United States Patent Application Publication US 2007/0048756 A1 - sequence listing, part 25

SEQ ID NO: 872494 - DNA, 33 bp, Homo sapien; identical to SEQ ID NO: 872492

SEQ ID NO: 872495 - DNA, 33 bp, Homo sapien
caggagggagcattcaaaaataggagcagctca

SEQ ID NO: 872496 - DNA, 33 bp, Homo sapien
caggagggagcattcagaaataggagcagctca

SEQ ID NO: 872497 - DNA, 33 bp, Homo sapien
gatcctaagcgatacaactacctgcctggttgc

SEQ ID NO: 872498 - DNA, 33 bp, Homo sapien
gatcctaagcgatacagctacctgcctggttgc

SEQ ID NO: 872499 - DNA, 33 bp, Homo sapien
atttaaacagaaagagaattcatagctagccta

SEQ ID NO: 872500 - DNA, 33 bp, Homo sapien
atttaaacagaaagaggattcatagctagccta

SEQ ID NO: 872501 - DNA, 33 bp, Homo sapien
ttcagagtcaaaccacaaactgaattccttccc

SEQ ID NO: 872502 - DNA, 33 bp, Homo sapien
ttcagagtcaaaccacgaactgaattccttccc

SEQ ID NO: 872503 - DNA, 33 bp, Homo sapien
taacatttggtgctagaataaggtagtcaaaga

SEQ ID NO: 872504 - DNA, 33 bp, Homo sapien
taacatttggtgctaggataaggtagtcaaaga

SEQ ID NO: 872505 - DNA, 33 bp, Homo sapien
agctggccataaacaaattaagaccctcattcc

SEQ ID NO: 872506 - DNA, 33 bp, Homo sapien
agctggccataaacaagttaagaccctcattcc

SEQ ID NO: 872507 - DNA, 33 bp, Homo sapien
tctctacgttgcattccctgattggttcagaca

SEQ ID NO: 872508 - DNA, 33 bp, Homo sapien
tctctacgttgcattctctgattggttcagaca

SEQ ID NO: 872509 - DNA, 33 bp, Homo sapien
taaagtgggggtcgacgccagttctgaaagaag

SEQ ID NO: 872510 - DNA, 33 bp, Homo sapien
taaagtgggggtcgactccagttctgaaagaag

SEQ ID NO: 872511 - DNA, 33 bp, Homo sapien
gaagggaagaggaaacaaactgatatttttgcc

SEQ ID NO: 872512 - DNA, 33 bp, Homo sapien
gaagggaagaggaaacgaactgatatttttgcc

SEQ ID NO: 872513 - DNA, 33 bp, Homo sapien
agtttgtccagttaatgatacccatatttgaac

SEQ ID NO: 872514 - DNA, 33 bp, Homo sapien
agtttgtccagttaattatacccatatttgaac

SEQ ID NO: 872515 - DNA, 33 bp, Homo sapien
tctcattggagacatacagcttaagcaggcgtc

SEQ ID NO: 872516 - DNA, 33 bp, Homo sapien
tctcattggagacatagagcttaagcaggcgtc

SEQ ID NO: 872517 - DNA, 33 bp, Homo sapien
aaagacgttagagctacggatgggtctttgaag

SEQ ID NO: 872518 - DNA, 33 bp, Homo sapien
aaagacgttagagctatggatgggtctttgaag

SEQ ID NO: 872519 - DNA, 33 bp, Homo sapien
cagctagggaagggaggaaggtgagatttagca

SEQ ID NO: 872520 - DNA, 33 bp, Homo sapien
cagctagggaagggagtaaggtgagatttagca

SEQ ID NO: 872521 - DNA, 33 bp, Homo sapien
gacaatcttgttcacaccattagcttgtatgag

SEQ ID NO: 872522 - DNA, 33 bp, Homo sapien
gacaatcttgttcacatcattagcttgtatgag

SEQ ID NO: 872523 - DNA, 33 bp, Homo sapien
taaatgccaataagataagtccaccaccaagtt

SEQ ID NO: 872524 - DNA, 33 bp, Homo sapien
taaatgccaataagatgagtccaccaccaagtt

SEQ ID NO: 872525 - DNA, 33 bp, Homo sapien
gctttccctttctaatgatctatgcagtataat

SEQ ID NO: 872526 - DNA, 33 bp, Homo sapien
gctttccctttctaattatctatgcagtataat

SEQ ID NO: 872527 - DNA, 33 bp, Homo sapien
taaggtatctatggaccgaaagagagaaatgca

SEQ ID NO: 872528 - DNA, 33 bp, Homo sapien
taaggtatctatggactgaaagagagaaatgca

SEQ ID NO: 872529 - DNA, 33 bp, Homo sapien
gtattttgctctgctccatattcaaacctgaat

SEQ ID NO: 872530 - DNA, 33 bp, Homo sapien
gtattttgctctgctctatattcaaacctgaat

SEQ ID NO: 872531 - DNA, 33 bp, Homo sapien
tttctgagccgtagtccacttctgtgtaaaagg

SEQ ID NO: 872532 - DNA, 33 bp, Homo sapien
tttctgagccgtagtctacttctgtgtaaaagg

SEQ ID NO: 872533 - DNA, 33 bp, Homo sapien
aattgggaggtgattaagccaaagggttctgct

SEQ ID NO: 872534 - DNA, 33 bp, Homo sapien
aattgggaggtgattaggccaaagggttctgct

SEQ ID NO: 872535 - DNA, 33 bp, Homo sapien
ataatgcatacttaccaacttcataaggttatt

SEQ ID NO: 872536 - DNA, 33 bp, Homo sapien
ataatgcatacttaccgacttcataaggttatt

SEQ ID NO: 872537 - DNA, 33 bp, Homo sapien
tctcaagtcctagaaagaaattcacctccaaga

SEQ ID NO: 872538 - DNA, 33 bp, Homo sapien
tctcaagtcctagaaataaattcacctccaaga

SEQ ID NO: 872539 - DNA, 33 bp, Homo sapien
acattgtagtcagcaaacacatatttcttaaca

SEQ ID NO: 872540 - DNA, 33 bp, Homo sapien
acattgtagtcagcaagcacatatttcttaaca

SEQ ID NO: 872541 - DNA, 33 bp, Homo sapien
aaagaaaaactaaaacacgaatgatgaagtaaa

SEQ ID NO: 872542 - DNA, 33 bp, Homo sapien
aaagaaaaactaaaacgcgaatgatgaagtaaa

SEQ ID NO: 872543 - DNA, 33 bp, Homo sapien
tcctctcaccctttcaacctcaggcctggcagc

SEQ ID NO: 872544 - DNA, 33 bp, Homo sapien
tcctctcaccctttcagcctcaggcctggcagc

SEQ ID NO: 872545 - DNA, 33 bp, Homo sapien
gtggttatgcaatctcgccaaggctgagaggag

SEQ ID NO: 872546 - DNA, 33 bp, Homo sapien
gtggttatgcaatctctccaaggctgagaggag

SEQ ID NO: 872547 - DNA, 33 bp, Homo sapien
ggttgtaagctctccacgcacgtactctatact

SEQ ID NO: 872548 - DNA, 33 bp, Homo sapien
ggttgtaagctctccatgcacgtactctatact

SEQ ID NO: 872549 - DNA, 33 bp, Homo sapien
cttagaaatggggagcccactgctaactctctg

SEQ ID NO: 872550 - DNA, 33 bp, Homo sapien
cttagaaatggggagctcactgctaactctctg

SEQ ID NO: 872551 - DNA, 33 bp, Homo sapien
gcatcctggctcagaaatatgctcttttccagg

SEQ ID NO: 872552 - DNA, 33 bp, Homo sapien
gcatcctggctcagaagtatgctcttttccagg

SEQ ID NO: 872553 - DNA, 33 bp, Homo sapien
agggttaacacatcaaacatttttcattctatc

SEQ ID NO: 872554 - DNA, 33 bp, Homo sapien
agggttaacacatcaagcatttttcattctatc

SEQ ID NO: 872555 - DNA, 33 bp, Homo sapien
aataatagctcaaacacaaagagatctagggat

SEQ ID NO: 872556 - DNA, 33 bp, Homo sapien
aataatagctcaaacagaaagagatctagggat

SEQ ID NO: 872557 - DNA, 33 bp, Homo sapien
tgagatcacagtatacactttctttagcacatt

SEQ ID NO: 872558 - DNA, 33 bp, Homo sapien
tgagatcacagtatacgctttctttagcacatt

SEQ ID NO: 872559 - DNA, 33 bp, Homo sapien
ttaattttttccactgaaatagacatcctggtg

SEQ ID NO: 872560 - DNA, 33 bp, Homo sapien
ttaattttttccactggaatagacatcctggtg

SEQ ID NO: 872561 - DNA, 33 bp, Homo sapien
gaacacttctcaaatcacagtgcaccataagag

SEQ ID NO: 872562 - DNA, 33 bp, Homo sapien
gaacacttctcaaatcgcagtgcaccataagag

SEQ ID NO: 872563 - DNA, 33 bp, Homo sapien
tatgtcatatgaaaaccaaaaatctgtaggaat

SEQ ID NO: 872564 - DNA, 33 bp, Homo sapien
tatgtcatatgaaaactaaaaatctgtaggaat

SEQ ID NO: 872565 - DNA, 33 bp, Homo sapien
atgtttttacactaaactgaatttatccaagct

SEQ ID NO: 872566 - DNA, 33 bp, Homo sapien
atgtttttacactaaagtgaatttatccaagct

SEQ ID NO: 872567 - DNA, 33 bp, Homo sapien
atttctaaagagtcctcaaagtggctgggtgcg

SEQ ID NO: 872568 - DNA, 33 bp, Homo sapien
atttctaaagagtcctgaaagtggctgggtgcg

SEQ ID NO: 872569 - DNA, 33 bp, Homo sapien
accctatttgaaataccgaagttgagttacttt

SEQ ID NO: 872570 - DNA, 33 bp, Homo sapien
accctatttgaaatactgaagttgagttacttt

SEQ ID NO: 872571 - DNA, 33 bp, Homo sapien
gaagcaagattgaggaaagagagaagttgaacg

SEQ ID NO: 872572 - DNA, 33 bp, Homo sapien
gaagcaagattgaggagagagagaagttgaacg

SEQ ID NO: 872573 - DNA, 33 bp, Homo sapien
aaacaccagtaaggcaatgagagaagcaagatt

SEQ ID NO: 872574 - DNA, 33 bp, Homo sapien
aaacaccagtaaggcagtgagagaagcaagatt

SEQ ID NO: 872575 - DNA, 33 bp, Homo sapien
agaatttttcaccacgaccccaactattgcacc

SEQ ID NO: 872576 - DNA, 33 bp, Homo sapien
agaatttttcaccacggccccaactattgcacc

SEQ ID NO: 872577 - DNA, 33 bp, Homo sapien
tcaggtgttatgctagaaatgggtgctaactct

SEQ ID NO: 872578 - DNA, 33 bp, Homo sapien
tcaggtgttatgctaggaatgggtgctaactct

SEQ ID NO: 872579 - DNA, 33 bp, Homo sapien
caggcaaatttcagtcactatcccagcaagatg

SEQ ID NO: 872580 - DNA, 33 bp, Homo sapien
caggcaaatttcagtcgctatcccagcaagatg

SEQ ID NO: 872581 - DNA, 33 bp, Homo sapien
caatgtttatgaagcactcaaagttctttcaat

SEQ ID NO: 872582 - DNA, 33 bp, Homo sapien
caatgtttatgaagcattcaaagttctttcaat

SEQ ID NO: 872583 - DNA, 33 bp, Homo sapien
tttctaaaaggctcaaccttaaacacaaaacag

SEQ ID NO: 872584 - DNA, 33 bp, Homo sapien
tttctaaaaggctcaatcttaaacacaaaacag

SEQ ID NO: 872585 - DNA, 33 bp, Homo sapien
gtaaaattgttgcatcaatactaatcactggtc

SEQ ID NO: 872586 - DNA, 33 bp, Homo sapien
gtaaaattgttgcatcgatactaatcactggtc

SEQ ID NO: 872587 - DNA, 33 bp, Homo sapien
aagtgaaggagtgtgaaaaataactcatatgag

SEQ ID NO: 872588 - DNA, 33 bp, Homo sapien
aagtgaaggagtgtgagaaataactcatatgag

SEQ ID NO: 872589 - DNA, 33 bp, Homo sapien
tatttgccctacgtccgctctccaaatacaatc

SEQ ID NO: 872590 - DNA, 33 bp, Homo sapien
tatttgccctacgtcctctctccaaatacaatc

SEQ ID NO: 872591 - DNA, 33 bp, Homo sapien
aaacaattattggctgaaataacctgatcgaga

SEQ ID NO: 872592 - DNA, 33 bp, Homo sapien
aaacaattattggctgcaataacctgatcgaga

SEQ ID NO: 872593 - DNA, 33 bp, Homo sapien
tgtgaacatcctaccaaaacatgcttggaaatg

SEQ ID NO: 872594 - DNA, 33 bp, Homo sapien
tgtgaacatcctaccagaacatgcttggaaatg

SEQ ID NO: 872595 - DNA, 33 bp, Homo sapien
taggtcaccagcaagaaattggaccagatcaaa

SEQ ID NO: 872596 - DNA, 33 bp, Homo sapien
taggtcaccagcaagatattggaccagatcaaa

SEQ ID NO: 872597 - DNA, 33 bp, Homo sapien
ttctcggtttctattcccttcatttctgtgtat

SEQ ID NO: 872598 - DNA, 33 bp, Homo sapien
ttctcggtttctattctcttcatttctgtgtat

SEQ ID NO: 872599 - DNA, 33 bp, Homo sapien
agttttggtttgaacacgcgactaccctgattc

SEQ ID NO: 872600 - DNA, 33 bp, Homo sapien
agttttggtttgaacatgcgactaccctgattc

SEQ ID NO: 872601 - DNA, 33 bp, Homo sapien
cgagcctttccctttcgccgttgcagtattgac

SEQ ID NO: 872602 - DNA, 33 bp, Homo sapien
cgagcctttccctttctccgttgcagtattgac

SEQ ID NO: 872603 - DNA, 33 bp, Homo sapien
tgcatgcatgaataaacgaacaaactctaaaac

SEQ ID NO: 872604 - DNA, 33 bp, Homo sapien
tgcatgcatgaataaatgaacaaactctaaaac

SEQ ID NO: 872605 - DNA, 33 bp, Homo sapien
tgcttaaaacaccacacctcatctaggagtaca

SEQ ID NO: 872606 - DNA, 33 bp, Homo sapien
tgcttaaaacaccacatctcatctaggagtaca

SEQ ID NO: 872607 - DNA, 33 bp, Homo sapien
aaggggagaaggtacaactccacttctgggcct

SEQ ID NO: 872608 - DNA, 33 bp, Homo sapien
aaggggagaaggtacagctccacttctgggcct

SEQ ID NO: 872609 - DNA, 33 bp, Homo sapien
atctgtggtaagggatcagttttagtttcatat

SEQ ID NO: 872610 - DNA, 33 bp, Homo sapien
atctgtggtaagggattagttttagtttcatat

SEQ ID NO: 872611 - DNA, 33 bp, Homo sapien
ggatcttaagtagcaaccccttaaactctgtca

SEQ ID NO: 872612 - DNA, 33 bp, Homo sapien
ggatcttaagtagcaatcccttaaactctgtca

SEQ ID NO: 872613 - DNA, 33 bp, Homo sapien
gcgtatacaggcaatcactttgcttcactggat

SEQ ID NO: 872614 - DNA, 33 bp, Homo sapien
gcgtatacaggcaatcgctttgcttcactggat

SEQ ID NO: 872615 - DNA, 33 bp, Homo sapien
tggaccactatgcaaaatgggtgcaagagctat

SEQ ID NO: 872616 - DNA, 33 bp, Homo sapien
tggaccactatgcaaactgggtgcaagagctat

SEQ ID NO: 872617 - DNA, 33 bp, Homo sapien
attctgggtaaccaccaattcatactgattcac

SEQ ID NO: 872618 - DNA, 33 bp, Homo sapien
attctgggtaaccaccgattcatactgattcac

SEQ ID NO: 872619 - DNA, 33 bp, Homo sapien
accctttctgcctctcaaccattatttctactg

SEQ ID NO: 872620 - DNA, 33 bp, Homo sapien
accctttctgcctctcgaccattatttctactg

SEQ ID NO: 872621 - DNA, 33 bp, Homo sapien
atttcatagatattgacggttgtgttgattcat

SEQ ID NO: 872622 - DNA, 33 bp, Homo sapien
atttcatagatattgatggttgtgttgattcat

SEQ ID NO: 872623 - DNA, 33 bp, Homo sapien
ctgtggatagggttcaccttacgtaggcttgag

SEQ ID NO: 872624 - DNA, 33 bp, Homo sapien
ctgtggatagggttcagcttacgtaggcttgag

SEQ ID NO: 872625 - DNA, 33 bp, Homo sapien
tccacagctgttaaaccagagaaactatttttt

SEQ ID NO: 872626 - DNA, 33 bp, Homo sapien
tccacagctgttaaactagagaaactatttttt

SEQ ID NO: 872627 - DNA, 33 bp, Homo sapien
cttcagacacagaacaatctggagaggtaagct

SEQ ID NO: 872628 - DNA, 33 bp, Homo sapien
cttcagacacagaacagtctggagaggtaagct

SEQ ID NO: 872629 - DNA, 33 bp, Homo sapien
gacaagaaaaaggataacaagcagatgggccag

SEQ ID NO: 872630 - DNA, 33 bp, Homo sapien
gacaagaaaaaggatagcaagcagatgggccag

SEQ ID NO: 872631 - DNA, 33 bp, Homo sapien
gacatttcagatgagagtatgtgacacgctggg

SEQ ID NO: 872632 - DNA, 33 bp, Homo sapien
gacatttcagatgagattatgtgacacgctggg

SEQ ID NO: 872633 - DNA, 33 bp, Homo sapien
tctgcatctaacaaacagtaagcactccagaat

SEQ ID NO: 872634 - DNA, 33 bp, Homo sapien
tctgcatctaacaaacggtaagcactccagaat

SEQ ID NO: 872635 - DNA, 33 bp, Homo sapien
atcaatggtcaatatcaacactttggtagacgc

SEQ ID NO: 872636 - DNA, 33 bp, Homo sapien
atcaatggtcaatatcgacactttggtagacgc

SEQ ID NO: 872637 - DNA, 33 bp, Homo sapien
acgatgagtgtctagaaaaaacagtcttaagtg

SEQ ID NO: 872638 - DNA, 33 bp, Homo sapien
acgatgagtgtctagagaaaacagtcttaagtg

SEQ ID NO: 872639 - DNA, 33 bp, Homo sapien
gaggctcttgctgagactaaaacagtggggggt

SEQ ID NO: 872640 - DNA, 33 bp, Homo sapien
gaggctcttgctgagattaaaacagtggggggt

SEQ ID NO: 872641 - DNA, 33 bp, Homo sapien
aagaagaaggattaacactactgtcacaggact

SEQ ID NO: 872642 - DNA, 33 bp, Homo sapien
aagaagaaggattaacgctactgtcacaggact

SEQ ID NO: 872643 - DNA, 33 bp, Homo sapien
gtgcgtttttgtacaccaacaatgaataatcag

SEQ ID NO: 872644 - DNA, 33 bp, Homo sapien
gtgcgtttttgtacactaacaatgaataatcag

SEQ ID NO: 872645 - DNA, 33 bp, Homo sapien
gatagtaaccttttaacagatgtgaagtgatat

SEQ ID NO: 872646 - DNA, 33 bp, Homo sapien
gatagtaaccttttaatagatgtgaagtgatat

SEQ ID NO: 872647 - DNA, 33 bp, Homo sapien
aatgccctgatgcttaaaatgaaaatagttctt

SEQ ID NO: 872648 - DNA, 33 bp, Homo sapien
aatgccctgatgcttacaatgaaaatagttctt

SEQ ID NO: 872649 - DNA, 33 bp, Homo sapien
acataatccagtccaacggaagaaaatacgtgt

SEQ ID NO: 872650 - DNA, 33 bp, Homo sapien
acataatccagtccaatggaagaaaatacgtgt

SEQ ID NO: 872651 - DNA, 33 bp, Homo sapien
ttcagaggggtaaagtaacctgtccaaagtcat

SEQ ID NO: 872652 - DNA, 33 bp, Homo sapien
ttcagaggggtaaagtgacctgtccaaagtcat

SEQ ID NO: 872653 - DNA, 33 bp, Homo sapien
aagggatcagcctaagaaggaaagtgcactgat

SEQ ID NO: 872654 - DNA, 33 bp, Homo sapien
aagggatcagcctaagcaggaaagtgcactgat

SEQ ID NO: 872655 - DNA, 33 bp, Homo sapien
aggacgtcattttcaggataatatctatgattt

SEQ ID NO: 872656 - DNA, 33 bp, Homo sapien
aggacgtcattttcagtataatatctatgattt

SEQ ID NO: 872657 - DNA, 33 bp, Homo sapien
ttgctggtttcataaacgtggaaactggaagac

SEQ ID NO: 872658 - DNA, 33 bp, Homo sapien
ttgctggtttcataaatgtggaaactggaagac

SEQ ID NO: 872659 - DNA, 33 bp, Homo sapien
ctaaagttgcttcaacaggactggccaaaaaga

SEQ ID NO: 872660 - DNA, 33 bp, Homo sapien
ctaaagttgcttcaacgggactggccaaaaaga

SEQ ID NO: 872661 - DNA, 33 bp, Homo sapien
tcagagggagaaatacaaacacacagagaagca

SEQ ID NO: 872662 - DNA, 33 bp, Homo sapien
tcagagggagaaatacgaacacacagagaagca

SEQ ID NO: 872663 - DNA, 33 bp, Homo sapien
tgtttactctccccaactgaaagaggaaggcca

SEQ ID NO: 872664 - DNA, 33 bp, Homo sapien
tgtttactctccccaagtgaaagaggaaggcca

SEQ ID NO: 872665 - DNA, 33 bp, Homo sapien
tggaagtttcaggacacggagctgcaaatagtg

SEQ ID NO: 872666 - DNA, 33 bp, Homo sapien
tggaagtttcaggacatggagctgcaaatagtg

SEQ ID NO: 872667 - DNA, 33 bp, Homo sapien
tgataccaaaaccagaaaaatacgctgcaaaaa

SEQ ID NO: 872668 - DNA, 33 bp, Homo sapien
tgataccaaaaccagacaaatacgctgcaaaaa

SEQ ID NO: 872669 - DNA, 33 bp, Homo sapien
agccatctggtcctagaagtttttgtgtgcatg

SEQ ID NO: 872670 - DNA, 33 bp, Homo sapien
agccatctggtcctaggagtttttgtgtgcatg

SEQ ID NO: 872671 - DNA, 33 bp, Homo sapien
atacatcaagaaatgaaaatcgtaaacatatat

SEQ ID NO: 872672 - DNA, 33 bp, Homo sapien
atacatcaagaaatgacaatcgtaaacatatat

SEQ ID NO: 872673 - DNA, 33 bp, Homo sapien
gaacacaattaggacaacagacgtttgacataa

SEQ ID NO: 872674 - DNA, 33 bp, Homo sapien
gaacacaattaggacagcagacgtttgacataa

SEQ ID NO: 872675 - DNA, 33 bp, Homo sapien
aaactcagtgttgtaaagaagatataagtctat

SEQ ID NO: 872676 - DNA, 33 bp, Homo sapien
aaactcagtgttgtaaggaagatataagtctat

SEQ ID NO: 872677 - DNA, 33 bp, Homo sapien
tcaagaaggctcaacaatgacagaataaactca

SEQ ID NO: 872678 - DNA, 33 bp, Homo sapien
tcaagaaggctcaacagtgacagaataaactca

SEQ ID NO: 872679 - DNA, 33 bp, Homo sapien
tcataaaaatttgaagcctgctttaccgtagca

SEQ ID NO: 872680 - DNA, 33 bp, Homo sapien
tcataaaaatttgaagtctgctttaccgtagca

SEQ ID NO: 872681 - DNA, 33 bp, Homo sapien
cattaagcaatattaaaccttggattcttctat

SEQ ID NO: 872682 - DNA, 33 bp, Homo sapien
cattaagcaatattaagccttggattcttctat

SEQ ID NO: 872683 - DNA, 33 bp, Homo sapien
acaatctctgttagacaatggacgccccttatc

SEQ ID NO: 872684 - DNA, 33 bp, Homo sapien
acaatctctgttagacgatggacgccccttatc

SEQ ID NO: 872685 - DNA, 33 bp, Homo sapien
gccaatattctcaagtgaattccagccacttat

SEQ ID NO: 872686 - DNA, 33 bp, Homo sapien
gccaatattctcaagttaattccagccacttat

SEQ ID NO: 872687 - DNA, 33 bp, Homo sapien
gaacaggtcttagcacaggggaaaattttaaat

SEQ ID NO: 872688 - DNA, 33 bp, Homo sapien
gaacaggtcttagcactggggaaaattttaaat

SEQ ID NO: 872689 - DNA, 33 bp, Homo sapien
tttggagacatagggcacacaagatttaaacaa

SEQ ID NO: 872690 - DNA, 33 bp, Homo sapien
tttggagacatagggctcacaagatttaaacaa

SEQ ID NO: 872691 - DNA, 33 bp, Homo sapien
aaatatcacataaaaacctcattcatttgaaaa

SEQ ID NO: 872692 - DNA, 33 bp, Homo sapien
aaatatcacataaaaatctcattcatttgaaaa

SEQ ID NO: 872693 - DNA, 33 bp, Homo sapien
aactttctgatttgaacaatatggtctctggca

SEQ ID NO: 872694 - DNA, 33 bp, Homo sapien
aactttctgatttgaataatatggtctctggca

SEQ ID NO: 872695 - DNA, 33 bp, Homo sapien
acataaagagctaaaccatgaggagtcctgccc

SEQ ID NO: 872696 - DNA, 33 bp, Homo sapien
acataaagagctaaactatgaggagtcctgccc

SEQ ID NO: 872697 - DNA, 33 bp, Homo sapien
tggtggtgctaatccccggctagagacatcaga

SEQ ID NO: 872698 - DNA, 33 bp, Homo sapien
tggtggtgctaatccctggctagagacatcaga

SEQ ID NO: 872699 - DNA, 33 bp, Homo sapien
cattgtagctaccacaaccttatgcttctacat

SEQ ID NO: 872700 - DNA, 33 bp, Homo sapien
cattgtagctaccacatccttatgcttctacat

SEQ ID NO: 872701 - DNA, 33 bp, Homo sapien
acttcgccaaataagcagactggaataatattc

SEQ ID NO: 872702 - DNA, 33 bp, Homo sapien
acttcgccaaataagcggactggaataatattc

SEQ ID NO: 872703 - DNA, 33 bp, Homo sapien
aataatattcagactacagactttcacgtaacc

SEQ ID NO: 872704 - DNA, 33 bp, Homo sapien
aataatattcagactatagactttcacgtaacc

SEQ ID NO: 872705 - DNA, 33 bp, Homo sapien
tggatgcaagaaaaccaggcccagataagagct

SEQ ID NO: 872706 - DNA, 33 bp, Homo sapien
tggatgcaagaaaaccgggcccagataagagct

SEQ ID NO: 872707 - DNA, 33 bp, Homo sapien
aagcccatcataaaaccgtggtctggtcaagct

SEQ ID NO: 872708 - DNA, 33 bp, Homo sapien
aagcccatcataaaactgtggtctggtcaagct

SEQ ID NO: 872709 - DNA, 33 bp, Homo sapien
tgatgttccacacggaagattaagatatataat

SEQ ID NO: 872710 - DNA, 33 bp, Homo sapien
tgatgttccacacggaggattaagatatataat

SEQ ID NO: 872711 - DNA, 33 bp, Homo sapien
atgctgttacagactacggacagtaaatacctc

SEQ ID NO: 872712 - DNA, 33 bp, Homo sapien
atgctgttacagactatggacagtaaatacctc

SEQ ID NO: 872713 - DNA, 33 bp, Homo sapien
acttgtattatgtccagtactgtgttaagaacc

SEQ ID NO: 872714 - DNA, 33 bp, Homo sapien
acttgtattatgtccattactgtgttaagaacc

SEQ ID NO: 872715 - DNA, 33 bp, Homo sapien
gctggagctacagatacaatactcgtactctaa

SEQ ID NO: 872716 - DNA, 33 bp, Homo sapien
gctggagctacagatataatactcgtactctaa

SEQ ID NO: 872717 - DNA, 33 bp, Homo sapien
atatcttagttaaaaacctatttgtgtagtagt

SEQ ID NO: 872718 - DNA, 33 bp, Homo sapien
atatcttagttaaaaatctatttgtgtagtagt

SEQ ID NO: 872719 - DNA, 33 bp, Homo sapien
tgacagttaactaaaaactgtcgtgcactattt

SEQ ID NO: 872720 - DNA, 33 bp, Homo sapien
tgacagttaactaaaagctgtcgtgcactattt

SEQ ID NO: 872721 - DNA, 33 bp, Homo sapien
tatcaagaaaaccaagccttcacatttatatgc

SEQ ID NO: 872722 - DNA, 33 bp, Homo sapien
tatcaagaaaaccaagtcttcacatttatatgc

SEQ ID NO: 872723 - DNA, 33 bp, Homo sapien
gcttctagaggagttacgtttctcataatataa

SEQ ID NO: 872724 - DNA, 33 bp, Homo sapien
gcttctagaggagttatgtttctcataatataa

SEQ ID NO: 872725 - DNA, 33 bp, Homo sapien
gtgtgaactggactagaagattttccatgaaac

SEQ ID NO: 872726 - DNA, 33 bp, Homo sapien
gtgtgaactggactagcagattttccatgaaac

SEQ ID NO: 872727 - DNA, 33 bp, Homo sapien
ttagtgaatcgtgcagcctcctagtgtttactg

SEQ ID NO: 872728 - DNA, 33 bp, Homo sapien
ttagtgaatcgtgcaggctcctagtgtttactg

SEQ ID NO: 872729 - DNA, 33 bp, Homo sapien
gaggtcagtggttttacggaatacaaaatgtga

SEQ ID NO: 872730 - DNA, 33 bp, Homo sapien
gaggtcagtggttttatggaatacaaaatgtga

SEQ ID NO: 872731 - DNA, 33 bp, Homo sapien
aataaataatgctaaaatgctaaaatactgctt

SEQ ID NO: 872732 - DNA, 33 bp, Homo sapien
aataaataatgctaaactgctaaaatactgctt

SEQ ID NO: 872733 - DNA, 33 bp, Homo sapien
aagaacaattaaaaccaagatacagtacattaa

SEQ ID NO: 872734 - DNA, 33 bp, Homo sapien
aagaacaattaaaacctagatacagtacattaa

SEQ ID NO: 872735 - DNA, 33 bp, Homo sapien
aattcataatccaacacagcaaattaagtcaaa

SEQ ID NO: 872736 - DNA, 33 bp, Homo sapien
aattcataatccaacagagcaaattaagtcaaa

SEQ ID NO: 872737 - DNA, 33 bp, Homo sapien
attcctagagtatgtacgtagtgacaaaaagat

SEQ ID NO: 872738 - DNA, 33 bp, Homo sapien
attcctagagtatgtatgtagtgacaaaaagat

SEQ ID NO: 872739 - DNA, 33 bp, Homo sapien
ggacagcagtctgcaaagtcaggtgtgttttag

SEQ ID NO: 872740 - DNA, 33 bp, Homo sapien
ggacagcagtctgcaaggtcaggtgtgttttag

SEQ ID NO: 872741 - DNA, 33 bp, Homo sapien
ctattagattaaaagcaccgaggctgaggataa

SEQ ID NO: 872742 - DNA, 33 bp, Homo sapien
ctattagattaaaagcgccgaggctgaggataa

SEQ ID NO: 872743 - DNA, 33 bp, Homo sapien
tgctgtctccatctaaaataatacagatcaccc

SEQ ID NO: 872744 - DNA, 33 bp, Homo sapien
tgctgtctccatctaagataatacagatcaccc

SEQ ID NO: 872745 - DNA, 33 bp, Homo sapien
attctctgtcttcctaagttctaaaaatgaatg

SEQ ID NO: 872746 - DNA, 33 bp, Homo sapien
attctctgtcttcctaggttctaaaaatgaatg

SEQ ID NO: 872747 - DNA, 33 bp, Homo sapien
gtattcagctagaaaacttagaaaacctgaata

SEQ ID NO: 872748 - DNA, 33 bp, Homo sapien
gtattcagctagaaaatttagaaaacctgaata

SEQ ID NO: 872749 - DNA, 33 bp, Homo sapien
gtcagctaggcataaaaagagagtggtaatagg

SEQ ID NO: 872750 - DNA, 33 bp, Homo sapien
gtcagctaggcataaagagagagtggtaatagg

SEQ ID NO: 872751 - DNA, 33 bp, Homo sapien
agcacactccttttccagacccttccagtttga

SEQ ID NO: 872752 - DNA, 33 bp, Homo sapien
agcacactccttttccggacccttccagtttga

SEQ ID NO: 872753 - DNA, 33 bp, Homo sapien
tagtctccagcatccactggagctctgggaaca

SEQ ID NO: 872754 - DNA, 33 bp, Homo sapien
tagtctccagcatccattggagctctgggaaca

SEQ ID NO: 872755 - DNA, 33 bp, Homo sapien
aacaatgttacaataaactaatacaatgacaca

SEQ ID NO: 872756 - DNA, 33 bp, Homo sapien
aacaatgttacaataagctaatacaatgacaca

SEQ ID NO: 872757 - DNA, 33 bp, Homo sapien
tatagctttgcttccacgacataggattttacc

SEQ ID NO: 872758 - DNA, 33 bp, Homo sapien
tatagctttgcttccatgacataggattttacc

SEQ ID NO: 872759 - DNA, 33 bp, Homo sapien
agagggacgatgaaaaacctaagatgatgagat

SEQ ID NO: 872760 - DNA, 33 bp, Homo sapien
agagggacgatgaaaagcctaagatgatgagat

SEQ ID NO: 872761 - DNA, 33 bp, Homo sapien
tagggtccaggagaaaaaatatggaaaccagta

SEQ ID NO: 872762 - DNA, 33 bp, Homo sapien
tagggtccaggagaaacaatatggaaaccagta

SEQ ID NO: 872763 - DNA, 33 bp, Homo sapien
tgtggcagaaagaggaaaaacagaagtaggagg

SEQ ID NO: 872764 - DNA, 33 bp, Homo sapien
tgtggcagaaagaggagaaacagaagtaggagg

SEQ ID NO: 872765 - DNA, 33 bp, Homo sapien
agtttacttaggagaacggccttcagctccacc

SEQ ID NO: 872766 - DNA, 33 bp, Homo sapien
agtttacttaggagaatggccttcagctccacc

SEQ ID NO: 872767 - DNA, 33 bp, Homo sapien
agtttgggctggtgaacattccaagaaaaaaat

SEQ ID NO: 872768 - DNA, 33 bp, Homo sapien
agtttgggctggtgaagattccaagaaaaaaat

SEQ ID NO: 872769 - DNA, 33 bp, Homo sapien
attggcttttttcttcaaggcgtaaaggagatg

SEQ ID NO: 872770 - DNA, 33 bp, Homo sapien
attggcttttttcttcgaggcgtaaaggagatg

SEQ ID NO: 872771 - DNA, 33 bp, Homo sapien
tcatatcattttcagaacaggtgacctctagtg

SEQ ID NO: 872772 - DNA, 33 bp, Homo sapien
tcatatcattttcagaccaggtgacctctagtg

SEQ ID NO: 872773 - DNA, 33 bp, Homo sapien
tgttctccttattcaactctttccatcatcttt

SEQ ID NO: 872774 - DNA, 33 bp, Homo sapien
tgttctccttattcaagtctttccatcatcttt

SEQ ID NO: 872775 - DNA, 33 bp, Homo sapien
atagagcttgtggcacagcagaccccagagctg

SEQ ID NO: 872776 - DNA, 33 bp, Homo sapien
atagagcttgtggcacggcagaccccagagctg

SEQ ID NO: 872777 - DNA, 33 bp, Homo sapien
tttaatttctattcacgcttcagggattaaaat

SEQ ID NO: 872778 - DNA, 33 bp, Homo sapien
tttaatttctattcactcttcagggattaaaat

SEQ ID NO: 872779 - DNA, 33 bp, Homo sapien
tgaataatgtgaattgcagaaaggatccattga

SEQ ID NO: 872780 - DNA, 33 bp, Homo sapien
tgaataatgtgaattgtagaaaggatccattga

SEQ ID NO: 872781 - DNA, 33 bp, Homo sapien
tccagaagctgtgaaggaccagaatgcctccac

SEQ ID NO: 872782 - DNA, 33 bp, Homo sapien
tccagaagctgtgaagtaccagaatgcctccac

SEQ ID NO: 872783 - DNA, 33 bp, Homo sapien
atgatagtcttttctacgacttgatgactctat

SEQ ID NO: 872784 - DNA, 33 bp, Homo sapien
atgatagtcttttctatgacttgatgactctat

SEQ ID NO: 872785 - DNA, 33 bp, Homo sapien
agatcaagctttagtcaaaaggaagcatctgaa

SEQ ID NO: 872786 - DNA, 33 bp, Homo sapien
agatcaagctttagtccaaaggaagcatctgaa

SEQ ID NO: 872787 - DNA, 33 bp, Homo sapien
gttctgggttctgatcacctggttgaggtctga

SEQ ID NO: 872788 - DNA, 33 bp, Homo sapien
gttctgggttctgatcgcctggttgaggtctga

SEQ ID NO: 872789 - DNA, 33 bp, Homo sapien
ggcttcatgtaattaacaaaatatatggcattt

SEQ ID NO: 872790 - DNA, 33 bp, Homo sapien
ggcttcatgtaattaagaaaatatatggcattt

SEQ ID NO: 872791 - DNA, 33 bp, Homo sapien
atgtggtatgcatgaaactttccttataccaaa

SEQ ID NO: 872792 - DNA, 33 bp, Homo sapien
atgtggtatgcatgaagctttccttataccaaa

SEQ ID NO: 872793 - DNA, 33 bp, Homo sapien
atggttagatgtaaatcacagatcaagtaaacc

SEQ ID NO: 872794 - DNA, 33 bp, Homo sapien
atggttagatgtaaatgacagatcaagtaaacc

SEQ ID NO: 872795 - DNA, 33 bp, Homo sapien
atgctgcagctatttccccccaatcaccactac

SEQ ID NO: 872796 - DNA, 33 bp, Homo sapien
atgctgcagctatttctccccaatcaccactac

SEQ ID NO: 872797 - DNA, 33 bp, Homo sapien
ttaagaatcaccattacgtaaaccactatattt

SEQ ID NO: 872798 - DNA, 33 bp, Homo sapien
ttaagaatcaccattatgtaaaccactatattt

SEQ ID NO: 872799 - DNA, 33 bp, Homo sapien
aaagctcaactcctcactcctgggatgtatgct

SEQ ID NO: 872800 - DNA, 33 bp, Homo sapien
aaagctcaactcctcagtcctgggatgtatgct

SEQ ID NO: 872801 - DNA, 33 bp, Homo sapien
aaatgtatgtgtgataaaagccatgcgatacgt

SEQ ID NO: 872802 - DNA, 33 bp, Homo sapien
aaatgtatgtgtgatataagccatgcgatacgt

SEQ ID NO: 872803 - DNA, 33 bp, Homo sapien
aacagagtgagcataaacggcaaaaatatttgc

SEQ ID NO: 872804 - DNA, 33 bp, Homo sapien
aacagagtgagcataagcggcaaaaatatttgc

SEQ ID NO: 872805 - DNA, 33 bp, Homo sapien
taaagaggttttattaactgcctaagtgactga

SEQ ID NO: 872806 - DNA, 33 bp, Homo sapien
taaagaggttttattacctgcctaagtgactga

SEQ ID NO: 872807 - DNA, 33 bp, Homo sapien
gtttagtctagtagtagtaatgggcaattgatg

SEQ ID NO: 872808 - DNA, 33 bp, Homo sapien
gtttagtctagtagtattaatgggcaattgatg

SEQ ID NO: 872809 - DNA, 33 bp, Homo sapien
tctcatatgaccattaccgagctagacaaatta

SEQ ID NO: 872810 - DNA, 33 bp, Homo sapien
tctcatatgaccattagcgagctagacaaatta

SEQ ID NO: 872811 - DNA, 33 bp, Homo sapien
acagctcttacctacaatcttttcaggtacttg

SEQ ID NO: 872812 - DNA, 33 bp, Homo sapien
acagctcttacctacagtcttttcaggtacttg

SEQ ID NO: 872813 - DNA, 33 bp, Homo sapien
cacggtttttggaaaagactgtcatttgaattg

SEQ ID NO: 872814 - DNA, 33 bp, Homo sapien
cacggtttttggaaaatactgtcatttgaattg

SEQ ID NO: 872815 - DNA, 33 bp, Homo sapien
ctattcttacacattaataactttctactattt

SEQ ID NO: 872816 - DNA, 33 bp, Homo sapien
ctattcttacacattagtaactttctactattt

SEQ ID NO: 872817 - DNA, 33 bp, Homo sapien
gaagagatgggcttaaaactttcttcacctagt

SEQ ID NO: 872818 - DNA, 33 bp, Homo sapien
gaagagatgggcttaatactttcttcacctagt

SEQ ID NO: 872819 - DNA, 33 bp, Homo sapien
gggttggtaagcctgcaaggtagccattagaat

SEQ ID NO: 872820 - DNA, 33 bp, Homo sapien
gggttggtaagcctgccaggtagccattagaat

SEQ ID NO: 872821 - DNA, 33 bp, Homo sapien
tctcagagctccaaacaaaagcttggaaaatac

SEQ ID NO: 872822 - DNA, 33 bp, Homo sapien
tctcagagctccaaaccaaagcttggaaaatac

SEQ ID NO: 872823 - DNA, 33 bp, Homo sapien
tgtgtcaggaaggaagaaaagtaactaaaatgg

SEQ ID NO: 872824 - DNA, 33 bp, Homo sapien
tgtgtcaggaaggaaggaaagtaactaaaatgg

SEQ ID NO: 872825 - DNA, 33 bp, Homo sapien
ttaatggtgactcttaacaagaaataggctagc

SEQ ID NO: 872826 - DNA, 33 bp, Homo sapien
ttaatggtgactcttaccaagaaataggctagc

SEQ ID NO: 872827 - DNA, 33 bp, Homo sapien
gttatcctccttgaccacatctgaaataaacat

SEQ ID NO: 872828 - DNA, 33 bp, Homo sapien
gttatcctccttgaccgcatctgaaataaacat

SEQ ID NO: 872829 - DNA, 33 bp, Homo sapien
gtggtactgaggctgcaagtgcacagatatcaa

SEQ ID NO: 872830 - DNA, 33 bp, Homo sapien
gtggtactgaggctgcgagtgcacagatatcaa

SEQ ID NO: 872831 - DNA, 33 bp, Homo sapien
agaaccctttgcaaatcattgaagtatccatgc

SEQ ID NO: 872832 - DNA, 33 bp, Homo sapien
agaaccctttgcaaatgattgaagtatccatgc

SEQ ID NO: 872833 - DNA, 33 bp, Homo sapien
gttgaattgtgtcaaaagcttattcttcatcta

SEQ ID NO: 872834 - DNA, 33 bp, Homo sapien
gttgaattgtgtcaaatgcttattcttcatcta

SEQ ID NO: 872835 - DNA, 33 bp, Homo sapien
gttgattgtcacaagactagatcttcatacatt

SEQ ID NO: 872836 - DNA, 33 bp, Homo sapien
gttgattgtcacaagattagatcttcatacatt

SEQ ID NO: 872837 - DNA, 33 bp, Homo sapien
ctaattctcttcactcacaactagaattgccat

SEQ ID NO: 872838 - DNA, 33 bp, Homo sapien
ctaattctcttcactctcaactagaattgccat

SEQ ID NO: 872839 - DNA, 33 bp, Homo sapien
tttaaagtttatgaacgaaggctcatgacaatt

SEQ ID NO: 872840 - DNA, 33 bp, Homo sapien
tttaaagtttatgaactaaggctcatgacaatt

SEQ ID NO: 872841 - DNA, 33 bp, Homo sapien
tagtttctgtgagagcaagttgttacaaaacca

SEQ ID NO: 872842 - DNA, 33 bp, Homo sapien
tagtttctgtgagagcgagttgttacaaaacca

SEQ ID NO: 872843 - DNA, 33 bp, Homo sapien
tcaacaaaaaaattcacaaaatgttagcagaat

SEQ ID NO: 872844 - DNA, 33 bp, Homo sapien
tcaacaaaaaaattcagaaaatgttagcagaat

SEQ ID NO: 872845 - DNA, 33 bp, Homo sapien
tctctcagcaatgttaagttctatcaatgcaaa

SEQ ID NO: 872846 - DNA, 33 bp, Homo sapien
tctctcagcaatgttacgttctatcaatgcaaa

SEQ ID NO: 872847 - DNA, 33 bp, Homo sapien
actatttgtggagaaacgttttgcttcttgatg

SEQ ID NO: 872848 - DNA, 33 bp, Homo sapien
actatttgtggagaaatgttttgcttcttgatg

SEQ ID NO: 872849 - DNA, 33 bp, Homo sapien
tattatcatgtgcttacattcttagtctataat

SEQ ID NO: 872850 - DNA, 33 bp, Homo sapien
tattatcatgtgcttatattcttagtctataat

SEQ ID NO: 872851 - DNA, 33 bp, Homo sapien
ctttgcagctaattcaaattaacctggaaaata

SEQ ID NO: 872852 - DNA, 33 bp, Homo sapien
ctttgcagctaattcagattaacctggaaaata

SEQ ID NO: 872853 - DNA, 33 bp, Homo sapien
ataatttaaatgaagccgattttcatatattct

SEQ ID NO: 872854 - DNA, 33 bp, Homo sapien
ataatttaaatgaagctgattttcatatattct

SEQ ID NO: 872855 - DNA, 33 bp, Homo sapien
agcaaagtaccacaaacgagtgacttaacagaa

SEQ ID NO: 872856 - DNA, 33 bp, Homo sapien
agcaaagtaccacaaatgagtgacttaacagaa

SEQ ID NO: 872857 - DNA, 33 bp, Homo sapien
ataaatttgagcagcaccttgaaaatatgttat

SEQ ID NO: 872858 - DNA, 33 bp, Homo sapien
ataaatttgagcagcagcttgaaaatatgttat

SEQ ID NO: 872859 - DNA, 33 bp, Homo sapien
gctcatggacatctagaaaatgatgacttagtt

SEQ ID NO: 872860 - DNA, 33 bp, Homo sapien
gctcatggacatctaggaaatgatgacttagtt

SEQ ID NO: 872861 - DNA, 33 bp, Homo sapien
atttttacaaagtgccaaaaagctacaggagag

SEQ ID NO: 872862 - DNA, 33 bp, Homo sapien
atttttacaaagtgccgaaaagctacaggagag

SEQ ID NO: 872863 - DNA, 33 bp, Homo sapien
gccaaatcatgactcgaatttgaatttaggata

SEQ ID NO: 872864 - DNA, 33 bp, Homo sapien
gccaaatcatgactcggatttgaatttaggata

SEQ ID NO: 872865 - DNA, 33 bp, Homo sapien
tgtctgcaagtttgagcagcaaggagagctagt

SEQ ID NO: 872866 - DNA, 33 bp, Homo sapien
tgtctgcaagtttgaggagcaaggagagctagt

SEQ ID NO: 872867 - DNA, 33 bp, Homo sapien
tgattggtgaaagaacagactctctaaaagtca

SEQ ID NO: 872868 - DNA, 33 bp, Homo sapien
tgattggtgaaagaacggactctctaaaagtca

SEQ ID NO: 872869 - DNA, 33 bp, Homo sapien
catgccccacttgtgacggaaatatgcttgtgg

SEQ ID NO: 872870 - DNA, 33 bp, Homo sapien
catgccccacttgtgatggaaatatgcttgtgg

SEQ ID NO: 872871 - DNA, 33 bp, Homo sapien
ggggaagagatatgtacatggacctctctgagt

SEQ ID NO: 872872 - DNA, 33 bp, Homo sapien
ggggaagagatatgtagatggacctctctgagt

SEQ ID NO: 872873 - DNA, 33 bp, Homo sapien
ttttaataaacagagaaattgaccactctcgtc

SEQ ID NO: 872874 - DNA, 33 bp, Homo sapien
ttttaataaacagagacattgaccactctcgtc

SEQ ID NO: 872875 - DNA, 33 bp, Homo sapien
gagattttagtccaccccatcaccccaagagtg

SEQ ID NO: 872876 - DNA, 33 bp, Homo sapien
gagattttagtccacctcatcaccccaagagtg

SEQ ID NO: 872877 - DNA, 33 bp, Homo sapien
ttccatatgaattttacgatagtacttctaatt

SEQ ID NO: 872878 - DNA, 33 bp, Homo sapien
ttccatatgaattttatgatagtacttctaatt

SEQ ID NO: 872879 - DNA, 33 bp, Homo sapien
gacatatatgtgttgaaaaagatagagcattgc

SEQ ID NO: 872880 - DNA, 33 bp, Homo sapien
gacatatatgtgttgagaaagatagagcattgc

SEQ ID NO: 872881 - DNA, 33 bp, Homo sapien
tgctactctggtttaagaatgtttttcaacaag

SEQ ID NO: 872882 - DNA, 33 bp, Homo sapien
tgctactctggtttaataatgtttttcaacaag

SEQ ID NO: 872883 - DNA, 33 bp, Homo sapien
ggcatagacttcatcaaggaagattaaaggact

SEQ ID NO: 872884 - DNA, 33 bp, Homo sapien
ggcatagacttcatcagggaagattaaaggact

SEQ ID NO: 872885 - DNA, 33 bp, Homo sapien
cctttattgtcttccacgagaattcaaatataa

SEQ ID NO: 872886 - DNA, 33 bp, Homo sapien
cctttattgtcttccatgagaattcaaatataa

SEQ ID NO: 872887 - DNA, 33 bp, Homo sapien
taagaaatcagattggaagaatatatgttagag

SEQ ID NO: 872888 - DNA, 33 bp, Homo sapien
taagaaatcagattggtagaatatatgttagag

SEQ ID NO: 872889 - DNA, 33 bp, Homo sapien
ctattgcatcaaagaaaacagatgtgtgttcta

SEQ ID NO: 872890 - DNA, 33 bp, Homo sapien
ctattgcatcaaagaagacagatgtgtgttcta

SEQ ID NO: 872891 - DNA, 33 bp, Homo sapien
tggttgcacccatttgcagttgatacagatagg

SEQ ID NO: 872892 - DNA, 33 bp, Homo sapien
tggttgcacccatttggagttgatacagatagg

SEQ ID NO: 872893 - DNA, 33 bp, Homo sapien
aaagcaaggtgtcactcagagtgaagaacacca

SEQ ID NO: 872894 - DNA, 33 bp, Homo sapien
aaagcaaggtgtcacttagagtgaagaacacca

SEQ ID NO: 872895 - DNA, 33 bp, Homo sapien
gatccatagacaaagcaaatcaagttcaggctc

SEQ ID NO: 872896 - DNA, 33 bp, Homo sapien
gatccatagacaaagccaatcaagttcaggctc

SEQ ID NO: 872897 - DNA, 33 bp, Homo sapien
gacccacacaccgggacaaaaccacaggaagat

SEQ ID NO: 872898 - DNA, 33 bp, Homo sapien
gacccacacaccgggagaaaaccacaggaagat

SEQ ID NO: 872899 - DNA, 33 bp, Homo sapien
tttcaagaataactagaatgttctgggaatgta

SEQ ID NO: 872900 - DNA, 33 bp, Homo sapien
tttcaagaataactaggatgttctgggaatgta

SEQ ID NO: 872901 - DNA, 33 bp, Homo sapien
atcctgaatgttgaccacagcttgtccatatga

SEQ ID NO: 872902 - DNA, 33 bp, Homo sapien
atcctgaatgttgaccgcagcttgtccatatga

SEQ ID NO: 872903 - DNA, 33 bp, Homo sapien
gaaggagaaaatagacgagaggcaagcagaggc

SEQ ID NO: 872904 - DNA, 33 bp, Homo sapien
gaaggagaaaatagactagaggcaagcagaggc

SEQ ID NO: 872905 - DNA, 33 bp, Homo sapien
ggtgaagttttaggacagcaagtagacagaagg

SEQ ID NO: 872906 - DNA, 33 bp, Homo sapien
ggtgaagttttaggaccgcaagtagacagaagg

SEQ ID NO: 872907 - DNA, 33 bp, Homo sapien
ggcctttgcttggggaagtgaaaatgaaggctc

SEQ ID NO: 872908 - DNA, 33 bp, Homo sapien
ggcctttgcttggggaggtgaaaatgaaggctc

SEQ ID NO: 872909 - DNA, 33 bp, Homo sapien
ctgtggcccttttttccaaacacaggaagacaa

SEQ ID NO: 872910 - DNA, 33 bp, Homo sapien
ctgtggcccttttttctaaacacaggaagacaa

SEQ ID NO: 872911 - DNA, 33 bp, Homo sapien
tagaaatgttaatgcaaccaagagagattaaag

SEQ ID NO: 872912 - DNA, 33 bp, Homo sapien
tagaaatgttaatgcatccaagagagattaaag

SEQ ID NO: 872913 - DNA, 33 bp, Homo sapien
tagaaaaacacagaaaaaaggaagtagacagtg

SEQ ID NO: 872914 - DNA, 33 bp, Homo sapien
tagaaaaacacagaaagaaggaagtagacagtg

SEQ ID NO: 872915 - DNA, 33 bp, Homo sapien
tagatatatgtaatcaactaagcagccaaacta

SEQ ID NO: 872916 - DNA, 33 bp, Homo sapien
tagatatatgtaatcatctaagcagccaaacta

SEQ ID NO: 872917 - DNA, 33 bp, Homo sapien
accaaccaggcaagtcaaagagctgtaacttag

SEQ ID NO: 872918 - DNA, 33 bp, Homo sapien
accaaccaggcaagtcgaagagctgtaacttag

SEQ ID NO: 872919 - DNA, 33 bp, Homo sapien
tttacccttccaaataaccaatcatacacagct

SEQ ID NO: 872920 - DNA, 33 bp, Homo sapien
tttacccttccaaatatccaatcatacacagct

SEQ ID NO: 872921 - DNA, 33 bp, Homo sapien
tgaaaaaacaaaacgaagatcagaaatattcca

SEQ ID NO: 872922 - DNA, 33 bp, Homo sapien
tgaaaaaacaaaacgaggatcagaaatattcca

SEQ ID NO: 872923 - DNA, 33 bp, Homo sapien
gtccgataaagctaaaccctttggccaggaaag

SEQ ID NO: 872924 - DNA, 33 bp, Homo sapien
gtccgataaagctaaatcctttggccaggaaag

SEQ ID NO: 872925 - DNA, 33 bp, Homo sapien
tcttgcctttagagcaaaaaggggataggatag

SEQ ID NO: 872926 - DNA, 33 bp, Homo sapien
tcttgcctttagagcagaaaggggataggatag

SEQ ID NO: 872927 - DNA, 33 bp, Homo sapien
aatatagaggtgttaaacgagtgaatattccac

SEQ ID NO: 872928 - DNA, 33 bp, Homo sapien
aatatagaggtgttaagcgagtgaatattccac

SEQ ID NO: 872929 - DNA, 33 bp, Homo sapien
ctatatgttctgggcaatactatagagttttat

SEQ ID NO: 872930 - DNA, 33 bp, Homo sapien
ctatatgttctgggcagtactatagagttttat

SEQ ID NO: 872931 - DNA, 33 bp, Homo sapien
ctcagcatagtaatcacgtcagagttcctggct

SEQ ID NO: 872932 - DNA, 33 bp, Homo sapien
ctcagcatagtaatcatgtcagagttcctggct

SEQ ID NO: 872933 - DNA, 33 bp, Homo sapien
cggctaggttaaagcccacttgccgagtcttcc

SEQ ID NO: 872934 - DNA, 33 bp, Homo sapien
cggctaggttaaagccgacttgccgagtcttcc

SEQ ID NO: 872935 - DNA, 33 bp, Homo sapien
catgctgatataaagacaactgagactgggtaa

SEQ ID NO: 872936 - DNA, 33 bp, Homo sapien
catgctgatataaagataactgagactgggtaa

SEQ ID NO: 872937 - DNA, 33 bp, Homo sapien
ggtagcaactaaaagccagaaaaggcaagggaa

SEQ ID NO: 872938 - DNA, 33 bp, Homo sapien
ggtagcaactaaaagcgagaaaaggcaagggaa

SEQ ID NO: 872939 - DNA, 33 bp, Homo sapien
tgcatgactggaatgacggagaacaaaaacata

SEQ ID NO: 872940 - DNA, 33 bp, Homo sapien
tgcatgactggaatgatggagaacaaaaacata

SEQ ID NO: 872941 - DNA, 33 bp, Homo sapien
gcagaagtaaagagtaacacatatggcctgacc

SEQ ID NO: 872942 - DNA, 33 bp, Homo sapien
gcagaagtaaagagtaccacatatggcctgacc

SEQ ID NO: 872943 - DNA, 33 bp, Homo sapien
agtacagtcaccttacaagacagtttggcagtt

SEQ ID NO: 872944 - DNA, 33 bp, Homo sapien
agtacagtcaccttaccagacagtttggcagtt

SEQ ID NO: 872945 - DNA, 33 bp, Homo sapien
aaatagatataccaccaaaaactaatacagcta

SEQ ID NO: 872946 - DNA, 33 bp, Homo sapien
aaatagatataccaccgaaaactaatacagcta

SEQ ID NO: 872947 - DNA, 33 bp, Homo sapien
aaggaaagcccatagaagatttagctgtaagaa

SEQ ID NO: 872948 - DNA, 33 bp, Homo sapien
aaggaaagcccatagatgatttagctgtaagaa

SEQ ID NO: 872949 - DNA, 33 bp, Homo sapien
tgagctggcccacttcaatctgtatcataatca

SEQ ID NO: 872950 - DNA, 33 bp, Homo sapien
tgagctggcccacttccatctgtatcataatca

SEQ ID NO: 872951 - DNA, 33 bp, Homo sapien
ctgatgaaggctcactctactttcaagatggta

SEQ ID NO: 872952 - DNA, 33 bp, Homo sapien
ctgatgaaggctcactgtactttcaagatggta

SEQ ID NO: 872953 - DNA, 33 bp, Homo sapien
ttctaggacatccaaccatgaatgacctttata

SEQ ID NO: 872954 - DNA, 33 bp, Homo sapien
ttctaggacatccaactatgaatgacctttata

SEQ ID NO: 872955 - DNA, 33 bp, Homo sapien
aaacatatctctacaaatagaccaaagacatga

SEQ ID NO: 872956 - DNA, 33 bp, Homo sapien
aaacatatctctacaagtagaccaaagacatga

SEQ ID NO: 872957 - DNA, 33 bp, Homo sapien
aaataaagatcctatacgtggaaggagctagag

SEQ ID NO: 872958 - DNA, 33 bp, Homo sapien
aaataaagatcctatatgtggaaggagctagag

SEQ ID NO: 872959 - DNA, 33 bp, Homo sapien
ctagccctaatagaataacctcatcaatcttgc

SEQ ID NO: 872960 - DNA, 33 bp, Homo sapien
ctagccctaatagaatgacctcatcaatcttgc

SEQ ID NO: 872961 - DNA, 33 bp, Homo sapien
gttttactatgacacaatagaggtattattaga

SEQ ID NO: 872962 - DNA, 33 bp, Homo sapien
gttttactatgacacagtagaggtattattaga

SEQ ID NO: 872963 - DNA, 33 bp, Homo sapien
ctactcttcttccaacacactgttcaatcactg

SEQ ID NO: 872964 - DNA, 33 bp, Homo sapien
ctactcttcttccaacgcactgttcaatcactg

SEQ ID NO: 872965 - DNA, 33 bp, Homo sapien
caatagagtgtatttacgattcaagaagcaagt

SEQ ID NO: 872966 - DNA, 33 bp, Homo sapien
caatagagtgtatttatgattcaagaagcaagt

SEQ ID NO: 872967 - DNA, 33 bp, Homo sapien
gattaagttgggaaagactgacatctcgatgat

SEQ ID NO: 872968 - DNA, 33 bp, Homo sapien
gattaagttgggaaagtctgacatctcgatgat

SEQ ID NO: 872969 - DNA, 33 bp, Homo sapien
ctaatgctttttctaacaccaaatttattacca

SEQ ID NO: 872970 - DNA, 33 bp, Homo sapien
ctaatgctttttctaagaccaaatttattacca

SEQ ID NO: 872971 - DNA, 33 bp, Homo sapien
gaggaaataaaatctaaaaaccatcttctgagt

SEQ ID NO: 872972 - DNA, 33 bp, Homo sapien
gaggaaataaaatctacaaaccatcttctgagt

SEQ ID NO: 872973 - DNA, 33 bp, Homo sapien
ttgctagcatcctaccaggctttcaaaagacaa

SEQ ID NO: 872974 - DNA, 33 bp, Homo sapien
ttgctagcatcctaccgggctttcaaaagacaa

SEQ ID NO: 872975 - DNA, 33 bp, Homo sapien
gtgaaagatgtgacaacgtagcaaagaaagcaa

SEQ ID NO: 872976 - DNA, 33 bp, Homo sapien
gtgaaagatgtgacaatgtagcaaagaaagcaa

SEQ ID NO: 872977 - DNA, 33 bp, Homo sapien
agagactgcttccagacacctaacctgtgaagc

SEQ ID NO: 872978 - DNA, 33 bp, Homo sapien
agagactgcttccagatacctaacctgtgaagc

SEQ ID NO: 872979 - DNA, 33 bp, Homo sapien
ttgttatatagtcaaaaaatccaggtctaataa

SEQ ID NO: 872980 - DNA, 33 bp, Homo sapien
ttgttatatagtcaaataatccaggtctaataa

SEQ ID NO: 872981 - DNA, 33 bp, Homo sapien
caaagttaccatgcaaaaagagttcttcagttc

SEQ ID NO: 872982 - DNA, 33 bp, Homo sapien
caaagttaccatgcaagaagagttcttcagttc

SEQ ID NO: 872983 - DNA, 33 bp, Homo sapien
caggtcaaaagtggaaacttattgccacataga

SEQ ID NO: 872984 - DNA, 33 bp, Homo sapien
caggtcaaaagtggaaccttattgccacataga

SEQ ID NO: 872985 - DNA, 33 bp, Homo sapien
actcccttggcattaccatctcccttcattaga

SEQ ID NO: 872986 - DNA, 33 bp, Homo sapien
actcccttggcattactatctcccttcattaga

SEQ ID NO: 872987 - DNA, 33 bp, Homo sapien
ttcttaaagcagacaacgccttgcaaactctta

SEQ ID NO: 872988 - DNA, 33 bp, Homo sapien
ttcttaaagcagacaatgccttgcaaactctta

SEQ ID NO: 872989 - DNA, 33 bp, Homo sapien; identical to SEQ ID NO: 872987

SEQ ID NO: 872990 - DNA, 33 bp, Homo sapien; identical to SEQ ID NO: 872988

SEQ ID NO: 872991 - DNA, 33 bp, Homo sapien
tttccacatctgttataaacctcagcctacatt

SEQ ID NO: 872992 - DNA, 33 bp, Homo sapien
tttccacatctgttatgaacctcagcctacatt

SEQ ID NO: 872993 - DNA, 33 bp, Homo sapien
tcatgctactcttacccggcctgaaagtttcca

SEQ ID NO: 872994 - DNA, 33 bp, Homo sapien
tcatgctactcttacctggcctgaaagtttcca

SEQ ID NO: 872995 - DNA, 33 bp, Homo sapien
atgacttaactaattacgtctgcagtaactcta

SEQ ID NO: 872996 - DNA, 33 bp, Homo sapien
atgacttaactaattatgtctgcagtaactcta

SEQ ID NO: 872997 - DNA, 33 bp, Homo sapien
tacacctctatgactcgctcctgctagttctga

SEQ ID NO: 872998 - DNA, 33 bp, Homo sapien
tacacctctatgactctctcctgctagttctga

SEQ ID NO: 872999 - DNA, 33 bp, Homo sapien
agtgacaaagggcaaggagaaatcctcaaagct

SEQ ID NO: 873000 - DNA, 33 bp, Homo sapien
agtgacaaagggcaagtagaaatcctcaaagct

SEQ ID NO: 873001 - DNA, 33 bp, Homo sapien
ataatacattagctaaagtgtgttagaaatatg

SEQ ID NO: 873002 - DNA, 33 bp, Homo sapien
ataatacattagctaaggtgtgttagaaatatg

SEQ ID NO: 873003 - DNA, 33 bp, Homo sapien
attggaagtataccaaaaatgtatatagcagat

SEQ ID NO: 873004 - DNA, 33 bp, Homo sapien
attggaagtataccaacaatgtatatagcagat

SEQ ID NO: 873005 - DNA, 33 bp, Homo sapien
agagggaggaacagggaatgtaactatgctgac

SEQ ID NO: 873006 - DNA, 33 bp, Homo sapien
agagggaggaacaggggatgtaactatgctgac

SEQ ID NO: 873007 - DNA, 33 bp, Homo sapien
aagaatgacattgctacaatctactcattttat

SEQ ID NO: 873008 - DNA, 33 bp, Homo sapien
aagaatgacattgctataatctactcattttat

SEQ ID NO: 873009 - DNA, 33 bp, Homo sapien
tcaaccgacatgtgcaccaaaaaacatacgcaa

SEQ ID NO: 873010 - DNA, 33 bp, Homo sapien
tcaaccgacatgtgcatcaaaaaacatacgcaa

SEQ ID NO: 873011 - DNA, 33 bp, Homo sapien
ctcttttgaggatacacgcctacaaaacaaaga

SEQ ID NO: 873012 - DNA, 33 bp, Homo sapien
ctcttttgaggatacatgcctacaaaacaaaga

SEQ ID NO: 873013 - DNA, 33 bp, Homo sapien
tgatattgcatctaaaacattttattcccagcc

SEQ ID NO: 873014 - DNA, 33 bp, Homo sapien
tgatattgcatctaaagcattttattcccagcc

SEQ ID NO: 873015 - DNA, 33 bp, Homo sapien
cttttgacctgcataactgcgagaaaataaatt

SEQ ID NO: 873016 - DNA, 33 bp, Homo sapien
cttttgacctgcataattgcgagaaaataaatt

SEQ ID NO: 873017 - DNA, 33 bp, Homo sapien
aaactgaacaaaggacaatacagatgtgtggaa

SEQ ID NO: 873018 - DNA, 33 bp, Homo sapien
aaactgaacaaaggacgatacagatgtgtggaa

SEQ ID NO: 873019 - DNA, 33 bp, Homo sapien
aattattcaagcttaagcaattattcaagttga

SEQ ID NO: 873020 - DNA, 33 bp, Homo sapien
aattattcaagcttaatcaattattcaagttga

SEQ ID NO: 873021 - DNA, 33 bp, Homo sapien
caaaagccaacatacagaatcaacatatttcca

SEQ ID NO: 873022 - DNA, 33 bp, Homo sapien
caaaagccaacatacataatcaacatatttcca

SEQ ID NO: 873023 - DNA, 33 bp, Homo sapien
ttgtttcttaagttctaacctatgtgcttcaca

SEQ ID NO: 873024 - DNA, 33 bp, Homo sapien
ttgtttcttaagttctgacctatgtgcttcaca

SEQ ID NO: 873025 - DNA, 33 bp, Homo sapien
gtagatttaaggcagacggagaggccaaggcaa

SEQ ID NO: 873026 - DNA, 33 bp, Homo sapien
gtagatttaaggcagagggagaggccaaggcaa

SEQ ID NO: 873027 - DNA, 33 bp, Homo sapien
gtgttcagcttatacacgaaaaccaatcctaga

SEQ ID NO: 873028 - DNA, 33 bp, Homo sapien
gtgttcagcttatacaggaaaaccaatcctaga

SEQ ID NO: 873029 - DNA, 33 bp, Homo sapien
cttgataagatctctgaagctgggctagcagac

SEQ ID NO: 873030 - DNA, 33 bp, Homo sapien
cttgataagatctctggagctgggctagcagac

SEQ ID NO: 873031 - DNA, 33 bp, Homo sapien
cttgcagatttttacccagtagagaagcaagta

SEQ ID NO: 873032 - DNA, 33 bp, Homo sapien
cttgcagatttttacctagtagagaagcaagta

SEQ ID NO: 873033 - DNA, 33 bp, Homo sapien
aagacatcatttaaaaaatagcatagtcaattt

SEQ ID NO: 873034 - DNA, 33 bp, Homo sapien
aagacatcatttaaaagatagcatagtcaattt

SEQ ID NO: 873035 - DNA, 33 bp, Homo sapien
ggttttatatggtttaggaagacacacgacatt

SEQ ID NO: 873036 - DNA, 33 bp, Homo sapien
ggttttatatggtttatgaagacacacgacatt

SEQ ID NO: 873037 - DNA, 33 bp, Homo sapien
taagtttgcaattttccaatttttcaatcagtg

SEQ ID NO: 873038 - DNA, 33 bp, Homo sapien
taagtttgcaattttctaatttttcaatcagtg

SEQ ID NO: 873039 - DNA, 33 bp, Homo sapien
tatcctttcctaataacagtcactccataaaat

SEQ ID NO: 873040 - DNA, 33 bp, Homo sapien
tatcctttcctaataatagtcactccataaaat

SEQ ID NO: 873041 - DNA, 33 bp, Homo sapien
tttatactaaaaatagactaacgagattttctt

SEQ ID NO: 873042 - DNA, 33 bp, Homo sapien
tttatactaaaaatagcctaacgagattttctt

SEQ ID NO: 873043 - DNA, 33 bp, Homo sapien
actaaaatcagcactaagccgtatattaaagca

SEQ ID NO: 873044 - DNA, 33 bp, Homo sapien
actaaaatcagcactaggccgtatattaaagca

SEQ ID NO: 873045 - DNA, 33 bp, Homo sapien
ttggcccttgaagaaacttcactgaacctggat

SEQ ID NO: 873046 - DNA, 33 bp, Homo sapien
ttggcccttgaagaaatttcactgaacctggat

SEQ ID NO: 873047 - DNA, 33 bp, Homo sapien
cttagttttggattgcccttctgcaaaatgagg

SEQ ID NO: 873048 - DNA, 33 bp, Homo sapien
cttagttttggattgcgcttctgcaaaatgagg

SEQ ID NO: 873049 - DNA, 33 bp, Homo sapien
aattaattacaaaaaccgattaagcatattaat

SEQ ID NO: 873050 - DNA, 33 bp, Homo sapien
aattaattacaaaaactgattaagcatattaat

SEQ ID NO: 873051 - DNA, 33 bp, Homo sapien
acacttttaaaatagccgaacaggaattattgt

SEQ ID NO: 873052 - DNA, 33 bp, Homo sapien
acacttttaaaatagctgaacaggaattattgt

SEQ ID NO: 873053 - DNA, 33 bp, Homo sapien
atctcctttcacttcaatagtacacaacaaaac

SEQ ID NO: 873054 - DNA, 33 bp, Homo sapien
atctcctttcacttcagtagtacacaacaaaac

SEQ ID NO: 873055 - DNA, 33 bp, Homo sapien
acaactctacacatcacgggtgaatatgggcaa

SEQ ID NO: 873056 - DNA, 33 bp, Homo sapien
acaactctacacatcatgggtgaatatgggcaa

SEQ ID NO: 873057 - DNA, 33 bp, Homo sapien
tttccagtttccaaaaattgtattatactcagg

SEQ ID NO: 873058 - DNA, 33 bp, Homo sapien
tttccagtttccaaaagttgtattatactcagg

SEQ ID NO: 873059 - DNA, 33 bp, Homo sapien
attagagaattaaatactaggttgtaattgact

SEQ ID NO: 873060 - DNA, 33 bp, Homo sapien
attagagaattaaatattaggttgtaattgact

SEQ ID NO: 873061 - DNA, 33 bp, Homo sapien
actataacaaaccacacgtgtgagaattaagta

SEQ ID NO: 873062 - DNA, 33 bp, Homo sapien
actataacaaaccacatgtgtgagaattaagta

SEQ ID NO: 873063 - DNA, 33 bp, Homo sapien
ggcatgacagaggcatcaatgggtgtagctagt

SEQ ID NO: 873064 - DNA, 33 bp, Homo sapien
ggcatgacagaggcatgaatgggtgtagctagt

SEQ ID NO: 873065 - DNA, 33 bp, Homo sapien
aggagggatgctacaactataggatgctactaa

SEQ ID NO: 873066 - DNA, 33 bp, Homo sapien
aggagggatgctacaattataggatgctactaa

SEQ ID NO: 873067 - DNA, 33 bp, Homo sapien
ttaatgctataatctacatgacagtattacttt

SEQ ID NO: 873068 - DNA, 33 bp, Homo sapien
ttaatgctataatctatatgacagtattacttt

SEQ ID NO: 873069 - DNA, 33 bp, Homo sapien
ttatcacgtttaggtggattatagcatttatct

SEQ ID NO: 873070 - DNA, 33 bp, Homo sapien
ttatcacgtttaggtgtattatagcatttatct

SEQ ID NO: 873071 - DNA, 33 bp, Homo sapien
acagaaaagaggtacccatccagaccccaagag

SEQ ID NO: 873072 - DNA, 33 bp, Homo sapien
acagaaaagaggtaccgatccagaccccaagag

SEQ ID NO: 873073 - DNA, 33 bp, Homo sapien
ctaattttatggcaaactaaactgagatttaaa

SEQ ID NO: 873074 - DNA, 33 bp, Homo sapien
ctaattttatggcaaattaaactgagatttaaa

SEQ ID NO: 873075 - DNA, 33 bp, Homo sapien
taacctgaatcacagaaggaagggaatactggg

SEQ ID NO: 873076 - DNA, 33 bp, Homo sapien
taacctgaatcacagagggaagggaatactggg

SEQ ID NO: 873077 - DNA, 33 bp, Homo sapien
tgaagccctgaacttaagtaaaataaatggctc

SEQ ID NO: 873078 - DNA, 33 bp, Homo sapien
tgaagccctgaacttatgtaaaataaatggctc

SEQ ID NO: 873079 - DNA, 33 bp, Homo sapien
agtcccgaatctgcaaattaaatatcacaaatt

SEQ ID NO: 873080 - DNA, 33 bp, Homo sapien
agtcccgaatctgcaagttaaatatcacaaatt

SEQ ID NO: 873081 - DNA, 33 bp, Homo sapien
acagtgctttcactccggccattcagcgggtcc

SEQ ID NO: 873082 - DNA, 33 bp, Homo sapien
acagtgctttcactcctgccattcagcgggtcc

SEQ ID NO: 873083 - DNA, 33 bp, Homo sapien
aggaagtaatcatgaccggaagtattggtggta

SEQ ID NO: 873084 - DNA, 33 bp, Homo sapien
aggaagtaatcatgactggaagtattggtggta

SEQ ID NO: 873085 - DNA, 33 bp, Homo sapien
agacttcaccagtaaaaatgttgattctcttca

SEQ ID NO: 873086 - DNA, 33 bp, Homo sapien
agacttcaccagtaaagatgttgattctcttca

SEQ ID NO: 873087 - DNA, 33 bp, Homo sapien
gttaccttgggatgtcacatagaatcaccacca

SEQ ID NO: 873088 - DNA, 33 bp, Homo sapien
gttaccttgggatgtcgcatagaatcaccacca

SEQ ID NO: 873089 - DNA, 33 bp, Homo sapien
tgatgcaacccttagcacatgttatttcagcat

SEQ ID NO: 873090 - DNA, 33 bp, Homo sapien
tgatgcaacccttagcgcatgttatttcagcat

SEQ ID NO: 873091 - DNA, 33 bp, Homo sapien
gatgagattgtgtccactaatcctgataaacac

SEQ ID NO: 873092 - DNA, 33 bp, Homo sapien
gatgagattgtgtccattaatcctgataaacac

SEQ ID NO: 873093 - DNA, 33 bp, Homo sapien
tgggtatatggatataaaggcatacaggtataa

SEQ ID NO: 873094 - DNA, 33 bp, Homo sapien
tgggtatatggatatagaggcatacaggtataa

SEQ ID NO: 873095 - DNA, 33 bp, Homo sapien
tgtgagtgagtctgtacacttgcttaaactggt

SEQ ID NO: 873096 - DNA, 33 bp, Homo sapien
tgtgagtgagtctgtatacttgcttaaactggt

SEQ ID NO: 873097 - DNA, 33 bp, Homo sapien
caacaaaatgataaaccggacttcatgaaaatt

SEQ ID NO: 873098 - DNA, 33 bp, Homo sapien
caacaaaatgataaactggacttcatgaaaatt

SEQ ID NO: 873099 - DNA, 33 bp, Homo sapien
gtgtctctcgctgatacatagtcaaacaaatga

SEQ ID NO: 873100 - DNA, 33 bp, Homo sapien
gtgtctctcgctgatatatagtcaaacaaatga

SEQ ID NO: 873101 - DNA, 33 bp, Homo sapien
atatttgttgggttttaaaaaatgactgatttt

SEQ ID NO: 873102 - DNA, 33 bp, Homo sapien
atatttgttgggtttttaaaaatgactgatttt

SEQ ID NO: 873103 - DNA, 33 bp, Homo sapien
cattcaaccccttacaatatcacatttaaaagg

SEQ ID NO: 873104 - DNA, 33 bp, Homo sapien
cattcaaccccttacagtatcacatttaaaagg

SEQ ID NO: 873105 - DNA, 33 bp, Homo sapien
ttaagtaggtaaataacgcccctccaggctttc

SEQ ID NO: 873106 - DNA, 33 bp, Homo sapien
ttaagtaggtaaataatgcccctccaggctttc

SEQ ID NO: 873107 - DNA, 33 bp, Homo sapien
gaatgtaccagattaaaggcaaaaccaagtgta

SEQ ID NO: 873108 - DNA, 33 bp, Homo sapien
gaatgtaccagattaatggcaaaaccaagtgta

SEQ ID NO: 873109 - DNA, 33 bp, Homo sapien
gtgtttataacaaatgcagtggcaatagagctg

SEQ ID NO: 873110 - DNA, 33 bp, Homo sapien
gtgtttataacaaatgtagtggcaatagagctg

SEQ ID NO: 873111 - DNA, 33 bp, Homo sapien
ctctccgtttctataaatgtgtttttcctaggt

SEQ ID NO: 873112 - DNA, 33 bp, Homo sapien
ctctccgtttctataactgtgtttttcctaggt

SEQ ID NO: 873113 - DNA, 33 bp, Homo sapien
aagtagtgctcccagacggatttcaattagggt

SEQ ID NO: 873114 - DNA, 33 bp, Homo sapien
aagtagtgctcccagatggatttcaattagggt

SEQ ID NO: 873115 - DNA, 33 bp, Homo sapien
ttctggaattagattacagtgattgatgcaact

SEQ ID NO: 873116 - DNA, 33 bp, Homo sapien
ttctggaattagattatagtgattgatgcaact

SEQ ID NO: 873117 - DNA, 33 bp, Homo sapien
actctgggcagtattacaggaaaagttccaaat

SEQ ID NO: 873118 - DNA, 33 bp, Homo sapien
actctgggcagtattataggaaaagttccaaat

SEQ ID NO: 873119 - DNA, 33 bp, Homo sapien
tggtgagagacttcaaagtgagaataaaagatt

SEQ ID NO: 873120 - DNA, 33 bp, Homo sapien
tggtgagagacttcaaggtgagaataaaagatt

SEQ ID NO: 873121 - DNA, 33 bp, Homo sapien
ttattttcctagcctcaaagtggtcaggatgag

SEQ ID NO: 873122 - DNA, 33 bp, Homo sapien
ttattttcctagcctcgaagtggtcaggatgag

SEQ ID NO: 873123 - DNA, 33 bp, Homo sapien
ctaataaatagccatgaatctgtgaagttattt

SEQ ID NO: 873124 - DNA, 33 bp, Homo sapien
ctaataaatagccatgcatctgtgaagttattt

SEQ ID NO: 873125 - DNA, 33 bp, Homo sapien
cttaagtattcagaagaacttgggtgttgtgat

SEQ ID NO: 873126 - DNA, 33 bp, Homo sapien
cttaagtattcagaaggacttgggtgttgtgat

SEQ ID NO: 873127 - DNA, 33 bp, Homo sapien
aatccataaaacatcaaaattgttcctttaata

SEQ ID NO: 873128 - DNA, 33 bp, Homo sapien
aatccataaaacatcacaattgttcctttaata

SEQ ID NO: 873129 - DNA, 33 bp, Homo sapien
ttttaaactgagcactcactatcacaatagcag

SEQ ID NO: 873130 - DNA, 33 bp, Homo sapien
ttttaaactgagcacttactatcacaatagcag

SEQ ID NO: 873131 - DNA, 33 bp, Homo sapien
gctgtatggtcacagaataattgattagaaggt

SEQ ID NO: 873132 - DNA, 33 bp, Homo sapien
gctgtatggtcacagagtaattgattagaaggt

SEQ ID NO: 873133 - DNA, 33 bp, Homo sapien
tcacaattatatggtgaagtctctgtaagaaag

SEQ ID NO: 873134 - DNA, 33 bp, Homo sapien
tcacaattatatggtgtagtctctgtaagaaag

SEQ ID NO: 873135 - DNA, 33 bp, Homo sapien
tacaaaaaatcaatcaaaatggagtatacagct

SEQ ID NO: 873136 - DNA, 33 bp, Homo sapien
tacaaaaaatcaatcacaatggagtatacagct

SEQ ID NO: 873137 - DNA, 33 bp, Homo sapien
acacatcataatcacccgaagtccattgtttac

SEQ ID NO: 873138 - DNA, 33 bp, Homo sapien
acacatcataatcaccggaagtccattgtttac

SEQ ID NO: 873139 - DNA, 33 bp, Homo sapien
atttttggtcaccctaaaatgaacactaatgat

SEQ ID NO: 873140 - DNA, 33 bp, Homo sapien
atttttggtcaccctagaatgaacactaatgat

SEQ ID NO: 873141 - DNA, 33 bp, Homo sapien
aggcaaaaataagtgaagaatggagaagaactt

SEQ ID NO: 873142 - DNA, 33 bp, Homo sapien
aggcaaaaataagtgacgaatggagaagaactt

SEQ ID NO: 873143 - DNA, 33 bp, Homo sapien
tagaatgcaggaaagaggttttacaattaatca

SEQ ID NO: 873144 - DNA, 33 bp, Homo sapien
tagaatgcaggaaagatgttttacaattaatca

SEQ ID NO: 873145 - DNA, 33 bp, Homo sapien
tttatgatctgtttgaacttgaaactatttagg

SEQ ID NO: 873146 - DNA, 33 bp, Homo sapien
tttatgatctgtttgagcttgaaactatttagg

SEQ ID NO: 873147 - DNA, 33 bp, Homo sapien
attaaaacttaaaacagctactcacagttaaga

SEQ ID NO: 873148 - DNA, 33 bp, Homo sapien
attaaaacttaaaacatctactcacagttaaga

SEQ ID NO: 873149 - DNA, 33 bp, Homo sapien
ccagaaatacagttccggcttatacaataagtg

SEQ ID NO: 873150 - DNA, 33 bp, Homo sapien
ccagaaatacagttcctgcttatacaataagtg

SEQ ID NO: 873151 - DNA, 33 bp, Homo sapien
tctaagaaaattcttacgtatgtttctttgtgt

SEQ ID NO: 873152 - DNA, 33 bp, Homo sapien
tctaagaaaattcttatgtatgtttctttgtgt

SEQ ID NO: 873153 - DNA, 33 bp, Homo sapien
cattgtgatggggggagtagtcacagtaattag

SEQ ID NO: 873154 - DNA, 33 bp, Homo sapien
cattgtgatggggggattagtcacagtaattag

SEQ ID NO: 873155 - DNA, 33 bp, Homo sapien
atgctctatttctggacggttgatattgggact

SEQ ID NO: 873156 - DNA, 33 bp, Homo sapien
atgctctatttctggatggttgatattgggact

SEQ ID NO: 873157 - DNA, 33 bp, Homo sapien
tagtcattatgaccgacgtgagatgttatctca

SEQ ID NO: 873158 - DNA, 33 bp, Homo sapien
tagtcattatgaccgatgtgagatgttatctca

SEQ ID NO: 873159 - DNA, 33 bp, Homo sapien
tcccacttataattgaagacaagcagtatttgg

SEQ ID NO: 873160 - DNA, 33 bp, Homo sapien
tcccacttataattgaggacaagcagtatttgg

SEQ ID NO: 873161 - DNA, 33 bp, Homo sapien
aaaccatcagaataagcaggtcatcaattaaaa

SEQ ID NO: 873162 - DNA, 33 bp, Homo sapien
aaaccatcagaataagtaggtcatcaattaaaa

SEQ ID NO: 873163 - DNA, 33 bp, Homo sapien
actaagaaatacagaacttaggaaacacaatat

SEQ ID NO: 873164 - DNA, 33 bp, Homo sapien
actaagaaatacagaagttaggaaacacaatat

SEQ ID NO: 873165 - DNA, 33 bp, Homo sapien
tcctatgaagttaatacgtttccttgattaaac

SEQ ID NO: 873166 - DNA, 33 bp, Homo sapien
tcctatgaagttaatatgtttccttgattaaac

SEQ ID NO: 873167 - DNA, 33 bp, Homo sapien
gcttctccaagagtgaacattccaagagacaca

SEQ ID NO: 873168 - DNA, 33 bp, Homo sapien
gcttctccaagagtgagcattccaagagacaca

SEQ ID NO: 873169 - DNA, 33 bp, Homo sapien
gatctgtaaatgaagaagtcaccttggatgtcc

SEQ ID NO: 873170 - DNA, 33 bp, Homo sapien
gatctgtaaatgaagatgtcaccttggatgtcc

SEQ ID NO: 873171 - DNA, 33 bp, Homo sapien
actcacatggctatcaagtttaggctgctgatt

SEQ ID NO: 873172 - DNA, 33 bp, Homo sapien
actcacatggctatcaggtttaggctgctgatt

SEQ ID NO: 873173 - DNA, 33 bp, Homo sapien
attagaattaggaggaaagtaaataccatatat

SEQ ID NO: 873174 - DNA, 33 bp, Homo sapien
attagaattaggaggagagtaaataccatatat

SEQ ID NO: 873175 - DNA, 33 bp, Homo sapien
agcgctagcagaatgcagaagaacattttgaga

SEQ ID NO: 873176 - DNA, 33 bp, Homo sapien
agcgctagcagaatgcggaagaacattttgaga

SEQ ID NO: 873177 - DNA, 33 bp, Homo sapien
taggtgatagtacttaagagctcctcataggcc

SEQ ID NO: 873178 - DNA, 33 bp, Homo sapien
taggtgatagtacttaggagctcctcataggcc

SEQ ID NO: 873179 - DNA, 33 bp, Homo sapien
cacaacaaaatccaaccatcaactatgtaaaat

SEQ ID NO: 873180 - DNA, 33 bp, Homo sapien
cacaacaaaatccaactatcaactatgtaaaat

SEQ ID NO: 873181 - DNA, 33 bp, Homo sapien
aaatagacacaataaaaaacaatgaaggggata

SEQ ID NO: 873182 - DNA, 33 bp, Homo sapien
aaatagacacaataaagaacaatgaaggggata

SEQ ID NO: 873183 - DNA, 33 bp, Homo sapien
tttctaagtttcaagaggttaggaagaactcta

SEQ ID NO: 873184 - DNA, 33 bp, Homo sapien
tttctaagtttcaagatgttaggaagaactcta

SEQ ID NO: 873185 - DNA, 33 bp, Homo sapien
agcctcactatactgaagaggatgaagagtgtg

SEQ ID NO: 873186 - DNA, 33 bp, Homo sapien
agcctcactatactgaggaggatgaagagtgtg

SEQ ID NO: 873187 - DNA, 33 bp, Homo sapien
ttcattagtttgacacaaatagaatatctgttg

SEQ ID NO: 873188 - DNA, 33 bp, Homo sapien
ttcattagtttgacacgaatagaatatctgttg

SEQ ID NO: 873189 - DNA, 33 bp, Homo sapien
agtcaagtgaaattacaaagtataaattatcac

SEQ ID NO: 873190 - DNA, 33 bp, Homo sapien
agtcaagtgaaattacgaagtataaattatcac

SEQ ID NO: 873191 - DNA, 33 bp, Homo sapien
gatagaatcagatagcagcaagtcatttccttt

SEQ ID NO: 873192 - DNA, 33 bp, Homo sapien
gatagaatcagatagcggcaagtcatttccttt

SEQ ID NO: 873193 - DNA, 33 bp, Homo sapien
atttatttagggcttcaatattttccaacaaca

SEQ ID NO: 873194 - DNA, 33 bp, Homo sapien
atttatttagggcttcgatattttccaacaaca

SEQ ID NO: 873195 - DNA, 33 bp, Homo sapien
aaatgtaagaagaatccataaagtaattgaaga

SEQ ID NO: 873196 - DNA, 33 bp, Homo sapien
aaatgtaagaagaatcgataaagtaattgaaga

SEQ ID NO: 873197 - DNA, 33 bp, Homo sapien
gaattcaccaccagtaggcttgaagaaaagtct

SEQ ID NO: 873198 - DNA, 33 bp, Homo sapien
gaattcaccaccagtatgcttgaagaaaagtct

SEQ ID NO: 873199 - DNA, 33 bp, Homo sapien
gaagttttgctgaagacggggatgccagatggg

SEQ ID NO: 873200 - DNA, 33 bp, Homo sapien
gaagttttgctgaagatggggatgccagatggg

SEQ ID NO: 873201 - DNA, 33 bp, Homo sapien
aaatatttattacgtcactatatggtacacatt

SEQ ID NO: 873202 - DNA, 33 bp, Homo sapien
aaatatttattacgtcgctatatggtacacatt

SEQ ID NO: 873203 - DNA, 33 bp, Homo sapien
agaacttaaaacaggacgagcatttgacctagg

SEQ ID NO: 873204 - DNA, 33 bp, Homo sapien
agaacttaaaacaggatgagcatttgacctagg

SEQ ID NO: 873205 - DNA, 33 bp, Homo sapien
tttactgtgggctctcaatagattctctatttg

SEQ ID NO: 873206 - DNA, 33 bp, Homo sapien
tttactgtgggctctcgatagattctctatttg

SEQ ID NO: 873207 - DNA, 33 bp, Homo sapien
caacccgttatggttcaaggccagggttcttgt

SEQ ID NO: 873208 - DNA, 33 bp, Homo sapien
caacccgttatggttcgaggccagggttcttgt

SEQ ID NO: 873209 - DNA, 33 bp, Homo sapien
cactgtaattggtaaagaagaagcagctactca

SEQ ID NO: 873210 - DNA, 33 bp, Homo sapien
cactgtaattggtaaataagaagcagctactca

SEQ ID NO: 873211 - DNA, 33 bp, Homo sapien
aggaaaatgttccaggcagaagaagtagttcat

SEQ ID NO: 873212 - DNA, 33 bp, Homo sapien
aggaaaatgttccaggtagaagaagtagttcat

SEQ ID NO: 873213 - DNA, 33 bp, Homo sapien
cacaggttacctgacaatggaggacaaaaagga

SEQ ID NO: 873214 - DNA, 33 bp, Homo sapien
cacaggttacctgacagtggaggacaaaaagga

SEQ ID NO: 873215 - DNA, 33 bp, Homo sapien
atttcagtgaggaaaaggttgacatgcatactc

SEQ ID NO: 873216 - DNA, 33 bp, Homo sapien
atttcagtgaggaaaatgttgacatgcatactc

SEQ ID NO: 873217 - DNA, 33 bp, Homo sapien
agtcaaacagataaaagttcaatagcaagttct

SEQ ID NO: 873218 - DNA, 33 bp, Homo sapien
agtcaaacagataaaatttcaatagcaagttct

SEQ ID NO: 873219 - DNA, 33 bp, Homo sapien
aaggatctaatttggcaaggtatgaagttatgc

SEQ ID NO: 873220 - DNA, 33 bp, Homo sapien
aaggatctaatttggcgaggtatgaagttatgc

SEQ ID NO: 873221 - DNA, 33 bp, Homo sapien
ccatcaacatcaaagacccacatcggctttaaa

SEQ ID NO: 873222 - DNA, 33 bp, Homo sapien
ccatcaacatcaaagatccacatcggctttaaa

SEQ ID NO: 873223 - DNA, 33 bp, Homo sapien
aatttttaaatgagcgcattatctttgtaggga

SEQ ID NO: 873224 - DNA, 33 bp, Homo sapien
aatttttaaatgagcgtattatctttgtaggga

SEQ ID NO: 873225 - DNA, 33 bp, Homo sapien
agtggaacctataatgcaggttaagaggagtga

SEQ ID NO: 873226 - DNA, 33 bp, Homo sapien
agtggaacctataatgtaggttaagaggagtga

SEQ ID NO: 873227 - DNA, 33 bp, Homo sapien
cttccacatttctttacgcaggcaactcctgag

SEQ ID NO: 873228 - DNA, 33 bp, Homo sapien
cttccacatttctttatgcaggcaactcctgag

SEQ ID NO: 873229 - DNA, 33 bp, Homo sapien
agaccaatttacttggaattaactggttggacc

SEQ ID NO: 873230 - DNA, 33 bp, Homo sapien
agaccaatttacttggcattaactggttggacc

SEQ ID NO: 873231 - DNA, 33 bp, Homo sapien
gactctgcttgctttacgtttgctaatgttaca

SEQ ID NO: 873232 - DNA, 33 bp, Homo sapien
gactctgcttgctttatgtttgctaatgttaca

SEQ ID NO: 873233 - DNA, 33 bp, Homo sapien
tgttaacaatttcttaagatttcccagaaatta

SEQ ID NO: 873234 - DNA, 33 bp, Homo sapien
tgttaacaatttcttaggatttcccagaaatta

SEQ ID NO: 873235 - DNA, 33 bp, Homo sapien
ccaagctaaagagcccactaatttagatacagt

SEQ ID NO: 873236 - DNA, 33 bp, Homo sapien
ccaagctaaagagcccgctaatttagatacagt

SEQ ID NO: 873237 - DNA, 33 bp, Homo sapien
atggaaatacaggagacgtagaatagccaacac

SEQ ID NO: 873238 - DNA, 33 bp, Homo sapien
atggaaatacaggagatgtagaatagccaacac

SEQ ID NO: 873239 - DNA, 33 bp, Homo sapien
aagactgtgacagataaatgggcaaaagcaata

SEQ ID NO: 873240 - DNA, 33 bp, Homo sapien
aagactgtgacagatatatgggcaaaagcaata

SEQ ID NO: 873241 - DNA, 33 bp, Homo sapien
caaatatagcagctacaatgttatcaaacagca

SEQ ID NO: 873242 - DNA, 33 bp, Homo sapien
caaatatagcagctacgatgttatcaaacagca

SEQ ID NO: 873243 - DNA, 33 bp, Homo sapien
catcccccatatacaactccaggtgactccctg

SEQ ID NO: 873244 - DNA, 33 bp, Homo sapien
catcccccatatacaattccaggtgactccctg

SEQ ID NO: 873245 - DNA, 33 bp, Homo sapien
tagcacatagcccatgcagcttttatgaatcag

SEQ ID NO: 873246 - DNA, 33 bp, Homo sapien
tagcacatagcccatggagcttttatgaatcag

SEQ ID NO: 873247 - DNA, 33 bp, Homo sapien
gtttgtttactcaatcaacagataagttttaca

SEQ ID NO: 873248 - DNA, 33 bp, Homo sapien
gtttgtttactcaatcgacagataagttttaca

SEQ ID NO: 873249 - DNA, 33 bp, Homo sapien
tgtatatttagttctaaacagctttgtcaggtg

SEQ ID NO: 873250 - DNA, 33 bp, Homo sapien
tgtatatttagttctagacagctttgtcaggtg

SEQ ID NO: 873251 - DNA, 33 bp, Homo sapien
ataactggttctctaactactagctactaccaa

SEQ ID NO: 873252 - DNA, 33 bp, Homo sapien
ataactggttctctaattactagctactaccaa

SEQ ID NO: 873253 - DNA, 33 bp, Homo sapien
atacgtataagtacaacgtatgacaactatagg

SEQ ID NO: 873254 - DNA, 33 bp, Homo sapien
atacgtataagtacaatgtatgacaactatagg

SEQ ID NO: 873255 - DNA, 33 bp, Homo sapien
caaccaacttacccaaacatacatacacatcag

SEQ ID NO: 873256 - DNA, 33 bp, Homo sapien
caaccaacttacccaatcatacatacacatcag

SEQ ID NO: 873257 - DNA, 33 bp, Homo sapien
tgatactctggcctacacatttctctcaaccct

SEQ ID NO: 873258 - DNA, 33 bp, Homo sapien
tgatactctggcctacgcatttctctcaaccct

SEQ ID NO: 873259 - DNA, 33 bp, Homo sapien
aatctttatttttacaccattagctttagcact

SEQ ID NO: 873260 - DNA, 33 bp, Homo sapien
aatctttatttttacagcattagctttagcact

SEQ ID NO: 873261 - DNA, 33 bp, Homo sapien
gggacttttttgtgagaatttagaacagtttag

SEQ ID NO: 873262 - DNA, 33 bp, Homo sapien
gggacttttttgtgaggatttagaacagtttag

SEQ ID NO: 873263 - DNA, 33 bp, Homo sapien
cttcctcttcttgtaacgacagcagacctatag

SEQ ID NO: 873264 - DNA, 33 bp, Homo sapien
cttcctcttcttgtaatgacagcagacctatag

SEQ ID NO: 873265 - DNA, 33 bp, Homo sapien
caaagagcattaccaaagataaacagagtcatt

SEQ ID NO: 873266 - DNA, 33 bp, Homo sapien
caaagagcattaccaaggataaacagagtcatt

SEQ ID NO: 873267 - DNA, 33 bp, Homo sapien
attgaaccatttctgacgaatgaactttgacct

SEQ ID NO: 873268 - DNA, 33 bp, Homo sapien
attgaaccatttctgatgaatgaactttgacct

SEQ ID NO: 873269 - DNA, 33 bp, Homo sapien
tgtaaggtgcaactcaaatgctgtcatcccagt

SEQ ID NO: 873270 - DNA, 33 bp, Homo sapien
tgtaaggtgcaactcagatgctgtcatcccagt

SEQ ID NO: 873271 - DNA, 33 bp, Homo sapien
gaagttaatgttatgaggttgagctgttctttc

SEQ ID NO: 873272 - DNA, 33 bp, Homo sapien
gaagttaatgttatgatgttgagctgttctttc

SEQ ID NO: 873273 - DNA, 33 bp, Homo sapien
cttcctccttgttcaaagtctccagaactgtag

SEQ ID NO: 873274 - DNA, 33 bp, Homo sapien
cttcctccttgttcaaggtctccagaactgtag

SEQ ID NO: 873275 - DNA, 33 bp, Homo sapien
aagcttgtccaattcacctcacgtctcaaaggc

SEQ ID NO: 873276 - DNA, 33 bp, Homo sapien
aagcttgtccaattcatctcacgtctcaaaggc

SEQ ID NO: 873277 - DNA, 33 bp, Homo sapien
taaaagattggacaaaatatgtgaagcaatgat

SEQ ID NO: 873278 - DNA, 33 bp, Homo sapien
taaaagattggacaaactatgtgaagcaatgat

SEQ ID NO: 873279 - DNA, 33 bp, Homo sapien
tttgctcacatgatcaatcaaaaataacccaaa

SEQ ID NO: 873280 - DNA, 33 bp, Homo sapien
tttgctcacatgatcagtcaaaaataacccaaa

SEQ ID NO: 873281 - DNA, 33 bp, Homo sapien
agggatagcaagacacaccattggaccttgtgc

SEQ ID NO: 873282 - DNA, 33 bp, Homo sapien
agggatagcaagacaccccattggaccttgtgc

SEQ ID NO: 873283 - DNA, 33 bp, Homo sapien
agaaaaatcctgattcacttagctttggcttta

SEQ ID NO: 873284 - DNA, 33 bp, Homo sapien
agaaaaatcctgattcgcttagctttggcttta

SEQ ID NO: 873285 - DNA, 33 bp, Homo sapien
atggtggtgggtaaaaattaatgctggagaaag

SEQ ID NO: 873286 - DNA, 33 bp, Homo sapien
atggtggtgggtaaaagttaatgctggagaaag

SEQ ID NO: 873287 - DNA, 33 bp, Homo sapien
gtcctctaggtccatccacgtgtcacaaatgac

SEQ ID NO: 873288 - DNA, 33 bp, Homo sapien
gtcctctaggtccatctacgtgtcacaaatgac

SEQ ID NO: 873289 - DNA, 33 bp, Homo sapien
acactgccctggtagacgcagacctggtgccag

SEQ ID NO: 873290 - DNA, 33 bp, Homo sapien
acactgccctggtagatgcagacctggtgccag

SEQ ID NO: 873291 - DNA, 33 bp, Homo sapien
tcactatttgttctcaatataaggttcacaata

SEQ ID NO: 873292 - DNA, 33 bp, Homo sapien
tcactatttgttctcagtataaggttcacaata

SEQ ID NO: 873293 - DNA, 33 bp, Homo sapien
aaagagagactgaaatcaatgttagcgatgctg

SEQ ID NO: 873294 - DNA, 33 bp, Homo sapien
aaagagagactgaaatgaatgttagcgatgctg

SEQ ID NO: 873295 - DNA, 33 bp, Homo sapien
ttatctaatttgtccagtccttttaactcttgg

SEQ ID NO: 873296 - DNA, 33 bp, Homo sapien
ttatctaatttgtccattccttttaactcttgg

SEQ ID NO: 873297 - DNA, 33 bp, Homo sapien
agggacacttcattgacatttggcatatttcac

SEQ ID NO: 873298 - DNA, 33 bp, Homo sapien
agggacacttcattgatatttggcatatttcac

SEQ ID NO: 873299 - DNA, 33 bp, Homo sapien
tgccagtttcaagaaaacttcatgtatcacaaa

SEQ ID NO: 873300 - DNA, 33 bp, Homo sapien
tgccagtttcaagaaaccttcatgtatcacaaa

SEQ ID NO: 873301 - DNA, 33 bp, Homo sapien
tttaactctgcattcaatcttttgggccatttt

SEQ ID NO: 873302 - DNA, 33 bp, Homo sapien
tttaactctgcattcagtcttttgggccatttt

SEQ ID NO: 873303 - DNA, 33 bp, Homo sapien
tttaataacccgtatacccagaggttccactat

SEQ ID NO: 873304 - DNA, 33 bp, Homo sapien
tttaataacccgtatatccagaggttccactat

SEQ ID NO: 873305 - DNA, 33 bp, Homo sapien
gtggtacagttgctcaatcatttctcactgcag

SEQ ID NO: 873306 - DNA, 33 bp, Homo sapien
gtggtacagttgctcagtcatttctcactgcag

SEQ ID NO: 873307 - DNA, 33 bp, Homo sapien
actcctgggaggtccacaatgatggaacatcaa

SEQ ID NO: 873308 - DNA, 33 bp, Homo sapien
actcctgggaggtccagaatgatggaacatcaa

SEQ ID NO: 873309 - DNA, 33 bp, Homo sapien
agacaagagcattacccagcttggctttcacgg

SEQ ID NO: 873310 - DNA, 33 bp, Homo sapien
agacaagagcattaccgagcttggctttcacgg

SEQ ID NO: 873311 - DNA, 33 bp, Homo sapien
tgcctgctgctaagctaaaacttctctagccag

SEQ ID NO: 873312 - DNA, 33 bp, Homo sapien
tgcctgctgctaagctgaaacttctctagccag

SEQ ID NO: 873313 - DNA, 33 bp, Homo sapien
tggccatgtggttgaacggttttccagagctct

SEQ ID NO: 873314 - DNA, 33 bp, Homo sapien
tggccatgtggttgaatggttttccagagctct

SEQ ID NO: 873315 - DNA, 33 bp, Homo sapien
atatacacgccaaaaaaacttaatttcaaagtt

SEQ ID NO: 873316 - DNA, 33 bp, Homo sapien
atatacacgccaaaaatacttaatttcaaagtt

SEQ ID NO: 873317 - DNA, 33 bp, Homo sapien
tagacatagacccttaagttatcaatttcctta

SEQ ID NO: 873318 - DNA, 33 bp, Homo sapien
tagacatagacccttacgttatcaatttcctta

SEQ ID NO: 873319 - DNA, 33 bp, Homo sapien
aattcttccaacatgagtagcagtaacgtatta

SEQ ID NO: 873320 - DNA, 33 bp, Homo sapien
aattcttccaacatgattagcagtaacgtatta

SEQ ID NO: 873321 - DNA, 33 bp, Homo sapien
taatttaaaacaatgacggcattttactccaga

SEQ ID NO: 873322 - DNA, 33 bp, Homo sapien
taatttaaaacaatgatggcattttactccaga

SEQ ID NO: 873323 - DNA, 33 bp, Homo sapien
gataaaggaaagtcagcagttctaccaatcatg

SEQ ID NO: 873324 - DNA, 33 bp, Homo sapien
gataaaggaaagtcagtagttctaccaatcatg

SEQ ID NO: 873325 - DNA, 33 bp, Homo sapien
tactttacttgcaagcaatggtacaaggcaata

SEQ ID NO: 873326 - DNA, 33 bp, Homo sapien
tactttacttgcaagccatggtacaaggcaata

SEQ ID NO: 873327 - DNA, 33 bp, Homo sapien
aagctagggtccatcaaagagtccatttcatca

SEQ ID NO: 873328 - DNA, 33 bp, Homo sapien
aagctagggtccatcagagagtccatttcatca

SEQ ID NO: 873329 - DNA, 33 bp, Homo sapien
ccatccccaaatcttacgtcggtccacatcatg

SEQ ID NO: 873330 - DNA, 33 bp, Homo sapien
ccatccccaaatcttaggtcggtccacatcatg

SEQ ID NO: 873331 - DNA, 33 bp, Homo sapien
tctcccgtctaaacccagccacgttctgtccct

SEQ ID NO: 873332 - DNA, 33 bp, Homo sapien
tctcccgtctaaacccggccacgttctgtccct

SEQ ID NO: 873333 - DNA, 33 bp, Homo sapien
acaaatttcaaatgaacgcttgatgccctttct

SEQ ID NO: 873334 - DNA, 33 bp, Homo sapien
acaaatttcaaatgaatgcttgatgccctttct

SEQ ID NO: 873335 - DNA, 33 bp, Homo sapien
ccttaagctatggtaacgtagcagagcttgtca

SEQ ID NO: 873336 - DNA, 33 bp, Homo sapien
ccttaagctatggtaatgtagcagagcttgtca

SEQ ID NO: 873337 - DNA, 33 bp, Homo sapien
aggtcagctcactttacggtccatactaccggg

SEQ ID NO: 873338 - DNA, 33 bp, Homo sapien
aggtcagctcactttatggtccatactaccggg

SEQ ID NO: 873339 - DNA, 33 bp, Homo sapien
ttgtatctataccccaagtttcatatcaatcaa

SEQ ID NO: 873340 - DNA, 33 bp, Homo sapien
ttgtatctataccccaggtttcatatcaatcaa

SEQ ID NO: 873341 - DNA, 33 bp, Homo sapien
aatgaataatacatgccgatttaaagtgaaatg

SEQ ID NO: 873342 - DNA, 33 bp, Homo sapien
aatgaataatacatgctgatttaaagtgaaatg

SEQ ID NO: 873343 - DNA, 33 bp, Homo sapien
aggttgtggttatgtacgtgttgtatactgagc

SEQ ID NO: 873344 - DNA, 33 bp, Homo sapien
aggttgtggttatgtaggtgttgtatactgagc

SEQ ID NO: 873345 - DNA, 33 bp, Homo sapien
ttttctggagagtgtcacaccttttaaggtcag

SEQ ID NO: 873346 - DNA, 33 bp, Homo sapien
ttttctggagagtgtcccaccttttaaggtcag

SEQ ID NO: 873347 - DNA, 33 bp, Homo sapien
aaaataattccaagggccaacctacacaaatga

SEQ ID NO: 873348 - DNA, 33 bp, Homo sapien
aaaataattccaagggtcaacctacacaaatga

SEQ ID NO: 873349 - DNA, 33 bp, Homo sapien
aattagtgcttctcaactggcaggcaaatgtgc

SEQ ID NO: 873350 - DNA, 33 bp, Homo sapien
aattagtgcttctcaagtggcaggcaaatgtgc

SEQ ID NO: 873351 - DNA, 33 bp, Homo sapien
taaaggtagcaacatacaggaatttttctgagg

SEQ ID NO: 873352 - DNA, 33 bp, Homo sapien
taaaggtagcaacatagaggaatttttctgagg

SEQ ID NO: 873353 - DNA, 33 bp, Homo sapien
ggccaaaaagtcttcacactggaagctgcttcc

SEQ ID NO: 873354 - DNA, 33 bp, Homo sapien
ggccaaaaagtcttcatactggaagctgcttcc

SEQ ID NO: 873355 - DNA, 33 bp, Homo sapien
aaataagaatcagaaaatctatcctcttggatt

SEQ ID NO: 873356 - DNA, 33 bp, Homo sapien
aaataagaatcagaaagtctatcctcttggatt

SEQ ID NO: 873357 - DNA, 33 bp, Homo sapien
actgactcaccttcatcaggttctgctcctgtg

SEQ ID NO: 873358 - DNA, 33 bp, Homo sapien
actgactcaccttcatgaggttctgctcctgtg

SEQ ID NO: 873359 - DNA, 33 bp, Homo sapien
gaaagttgacctattacgcaaaatgtccaagag

SEQ ID NO: 873360 - DNA, 33 bp, Homo sapien
gaaagttgacctattatgcaaaatgtccaagag

SEQ ID NO: 873361 - DNA, 33 bp, Homo sapien
tctctactattgaaacaaccatgccggaaatat

SEQ ID NO: 873362 - DNA, 33 bp, Homo sapien
tctctactattgaaacgaccatgccggaaatat

SEQ ID NO: 873363 - DNA, 33 bp, Homo sapien
ggccactatagtaaaacggtgaagccttatctg

SEQ ID NO: 873364 - DNA, 33 bp, Homo sapien
ggccactatagtaaaatggtgaagccttatctg

SEQ ID NO: 873365 - DNA, 33 bp, Homo sapien
tcaggaattgaaaatgaatagatccctctcaaa

SEQ ID NO: 873366 - DNA, 33 bp, Homo sapien
tcaggaattgaaaatgtatagatccctctcaaa

SEQ ID NO: 873367 - DNA, 33 bp, Homo sapien
tggctaatagcagttacggggggattcttggat

SEQ ID NO: 873368 - DNA, 33 bp, Homo sapien
tggctaatagcagttatggggggattcttggat

SEQ ID NO: 873369 - DNA, 33 bp, Homo sapien
gaagtccaaaggaagacgtgtgtttgatttaac

SEQ ID NO: 873370 - DNA, 33 bp, Homo sapien
gaagtccaaaggaagatgtgtgtttgatttaac

SEQ ID NO: 873371 - DNA, 33 bp, Homo sapien
cattaccataagtgaagtaatgcaaaagcagga

SEQ ID NO: 873372 - DNA, 33 bp, Homo sapien
cattaccataagtgaattaatgcaaaagcagga

SEQ ID NO: 873373 - DNA, 33 bp, Homo sapien
accaagctaccacttacgtgatgaaatcatagc

SEQ ID NO: 873374 - DNA, 33 bp, Homo sapien
accaagctaccacttatgtgatgaaatcatagc

SEQ ID NO: 873375 - DNA, 33 bp, Homo sapien
caaagattagttagccaaagtcattgcactcag

SEQ ID NO: 873376 - DNA, 33 bp, Homo sapien
caaagattagttagccgaagtcattgcactcag

SEQ ID NO: 873377 - DNA, 33 bp, Homo sapien
ttctggcagtattaccagactgtcctctctagg

SEQ ID NO: 873378 - DNA, 33 bp, Homo sapien
ttctggcagtattacccgactgtcctctctagg

SEQ ID NO: 873379 - DNA, 33 bp, Homo sapien
aataaacatacaattcaaaagttaagaaaacac

SEQ ID NO: 873380 - DNA, 33 bp, Homo sapien
aataaacatacaattcgaaagttaagaaaacac

SEQ ID NO: 873381 - DNA, 33 bp, Homo sapien
gaaattacttgagcaaaataaattaaatcaagt

SEQ ID NO: 873382 - DNA, 33 bp, Homo sapien
gaaattacttgagcaacataaattaaatcaagt

SEQ ID NO: 873383 - DNA, 33 bp, Homo sapien
tgattgttttcctgaactgacagtctgacatta

SEQ ID NO: 873384 - DNA, 33 bp, Homo sapien
tgattgttttcctgaattgacagtctgacatta

SEQ ID NO: 873385 - DNA, 33 bp, Homo sapien
tattccagttttctgactacttcactagatcac

SEQ ID NO: 873386 - DNA, 33 bp, Homo sapien
tattccagttttctgagtacttcactagatcac

SEQ ID NO: 873387 - DNA, 33 bp, Homo sapien
gtcaccttacgtcctccataagctccatgtgac

SEQ ID NO: 873388 - DNA, 33 bp, Homo sapien
gtcaccttacgtcctctataagctccatgtgac

SEQ ID NO: 873389 - DNA, 33 bp, Homo sapien
agttttctttcttggagcttaatcacagaaaaa

SEQ ID NO: 873390 - DNA, 33 bp, Homo sapien
agttttctttcttggatcttaatcacagaaaaa

SEQ ID NO: 873391 - DNA, 33 bp, Homo sapien
caagttcctatcagtactaataaatcctttcca

SEQ ID NO: 873392 - DNA, 33 bp, Homo sapien
caagttcctatcagtattaataaatcctttcca

SEQ ID NO: 873393 - DNA, 33 bp, Homo sapien
attctgctttttctcacggatttatgcaaatca

SEQ ID NO: 873394 - DNA, 33 bp, Homo sapien
attctgctttttctcatggatttatgcaaatca

SEQ ID NO: 873395 - DNA, 33 bp, Homo sapien
aaaaatacttttctcactatgttattgcaaggg

SEQ ID NO: 873396 - DNA, 33 bp, Homo sapien
aaaaatacttttctcattatgttattgcaaggg

SEQ ID NO: 873397 - DNA, 33 bp, Homo sapien
attcttcagtgcaatcacttcattatatgggaa

SEQ ID NO: 873398 - DNA, 33 bp, Homo sapien
attcttcagtgcaatcgcttcattatatgggaa

SEQ ID NO: 873399 - DNA, 33 bp, Homo sapien
gtgtaatgttactagaacttggtgtcttccctg

SEQ ID NO: 873400 - DNA, 33 bp, Homo sapien
gtgtaatgttactagatcttggtgtcttccctg

SEQ ID NO: 873401 - DNA, 33 bp, Homo sapien
ctttggccagtcaaaaagataagactgaactgt

SEQ ID NO: 873402 - DNA, 33 bp, Homo sapien
ctttggccagtcaaaacgataagactgaactgt

SEQ ID NO: 873403 - DNA, 33 bp, Homo sapien
tacatcagaatgttcacggtgtttatctctgag

SEQ ID NO: 873404 - DNA, 33 bp, Homo sapien
tacatcagaatgttcatggtgtttatctctgag

SEQ ID NO: 873405 - DNA, 33 bp, Homo sapien
aacatcctgggagttaacaacagcaactacagg

SEQ ID NO: 873406 - DNA, 33 bp, Homo sapien
aacatcctgggagttatcaacagcaactacagg

SEQ ID NO: 873407 - DNA, 33 bp, Homo sapien; identical to SEQ ID NO: 873405

SEQ ID NO: 873408 - DNA, 33 bp, Homo sapien; identical to SEQ ID NO: 873406

SEQ ID NO: 873409 - DNA, 33 bp, Homo sapien
ggccatcttctccacaatgatttttatcagcga

SEQ ID NO: 873410 - DNA, 33 bp, Homo sapien
ggccatcttctccacagtgatttttatcagcga

SEQ ID NO: 873411 - DNA, 33 bp, Homo sapien
ggatttctttcacatcaatctggaaattcatag

SEQ ID NO: 873412 - DNA, 33 bp, Homo sapien
ggatttctttcacatcgatctggaaattcatag

SEQ ID NO: 873413 - DNA, 33 bp, Homo sapien
gacaaatgaacagccaaagttgtttgcatcttc

SEQ ID NO: 873414 - DNA, 33 bp, Homo sapien
gacaaatgaacagccacagttgtttgcatcttc

SEQ ID NO: 873415 - DNA, 33 bp, Homo sapien
cagaaaataccttaaccaattagcccgtatttt

SEQ ID NO: 873416 - DNA, 33 bp, Homo sapien
cagaaaataccttaactaattagcccgtatttt

SEQ ID NO: 873417 - DNA, 33 bp, Homo sapien
ttgtgtttcttcctgaaattcagtagcctcagt

SEQ ID NO: 873418 - DNA, 33 bp, Homo sapien
ttgtgtttcttcctgatattcagtagcctcagt

SEQ ID NO: 873419 - DNA, 33 bp, Homo sapien
caatgcctgatccaaacattaagaattgtgttt

SEQ ID NO: 873420 - DNA, 33 bp, Homo sapien
caatgcctgatccaaatattaagaattgtgttt

SEQ ID NO: 873421 - DNA, 33 bp, Homo sapien
catcccagttctccaacatttgggcattctgta

SEQ ID NO: 873422 - DNA, 33 bp, Homo sapien
catcccagttctccaagatttgggcattctgta

SEQ ID NO: 873423 - DNA, 33 bp, Homo sapien
aaggttccaatcatagacacctacattttagaa

SEQ ID NO: 873424 - DNA, 33 bp, Homo sapien
aaggttccaatcataggcacctacattttagaa

SEQ ID NO: 873425 - DNA, 33 bp, Homo sapien
cgactgtacaaaaagggcctctgaactcatatt

SEQ ID NO: 873426 - DNA, 33 bp, Homo sapien
cgactgtacaaaaaggtcctctgaactcatatt

SEQ ID NO: 873427 - DNA, 33 bp, Homo sapien
ctggttttcttattcccagagcttgttcctaat

SEQ ID NO: 873428 - DNA, 33 bp, Homo sapien
ctggttttcttattcctagagcttgttcctaat

SEQ ID NO: 873429 - DNA, 33 bp, Homo sapien
cagggaagacatgatgaaaacttggactaggct

SEQ ID NO: 873430 - DNA, 33 bp, Homo sapien
cagggaagacatgatggaaacttggactaggct

SEQ ID NO: 873431 - DNA, 33 bp, Homo sapien
acgtggaagctgggagcccaatcaggcgccatt

SEQ ID NO: 873432 - DNA, 33 bp, Homo sapien
acgtggaagctgggagtccaatcaggcgccatt

SEQ ID NO: 873433 - DNA, 33 bp, Homo sapien
taaatcattaaaaaaccggaatccataagtcca

SEQ ID NO: 873434 - DNA, 33 bp, Homo sapien
taaatcattaaaaaactggaatccataagtcca

SEQ ID NO: 873435 - DNA, 33 bp, Homo sapien
aggctttcccagtttgcagcaagaattttaatg

SEQ ID NO: 873436 - DNA, 33 bp, Homo sapien
aggctttcccagtttgtagcaagaattttaatg

SEQ ID NO: 873437 - DNA, 33 bp, Homo sapien
atttacaagcctatgaaccaatgataactttaa

SEQ ID NO: 873438 - DNA, 33 bp, Homo sapien
atttacaagcctatgatccaatgataactttaa

SEQ ID NO: 873439 - DNA, 33 bp, Homo sapien
aggaattatcaacccaatctttttctttgtttt

SEQ ID NO: 873440 - DNA, 33 bp, Homo sapien
aggaattatcaacccagtctttttctttgtttt

SEQ ID NO: 873441 - DNA, 33 bp, Homo sapien
agggcagctgaagtggaagaatcacctgcgtct

SEQ ID NO: 873442 - DNA, 33 bp, Homo sapien
agggcagctgaagtgggagaatcacctgcgtct

SEQ ID NO: 873443 - DNA, 33 bp, Homo sapien
aactaaagcaattagtcacacagtatcgggagg

SEQ ID NO: 873444 - DNA, 33 bp, Homo sapien
aactaaagcaattagtgacacagtatcgggagg

SEQ ID NO: 873445 - DNA, 33 bp, Homo sapien
tgctgtgtcaatgaaggcctgtgagctggattt

SEQ ID NO: 873446 - DNA, 33 bp, Homo sapien
tgctgtgtcaatgaagtcctgtgagctggattt

SEQ ID NO: 873447 - DNA, 33 bp, Homo sapien
ttggaaagaataaggaaaggtcattaagaaagt

SEQ ID NO: 873448 - DNA, 33 bp, Homo sapien
ttggaaagaataaggacaggtcattaagaaagt

SEQ ID NO: 873449 - DNA, 33 bp, Homo sapien
gttgttcattggtatagctccagcaccaagaaa

SEQ ID NO: 873450 - DNA, 33 bp, Homo sapien
gttgttcattggtatatctccagcaccaagaaa

SEQ ID NO: 873451 - DNA, 33 bp, Homo sapien
taaaagtccagtttctcacttgcactgtccgca

SEQ ID NO: 873452 - DNA, 33 bp, Homo sapien
taaaagtccagtttcttacttgcactgtccgca

SEQ ID NO: 873453 - DNA, 33 bp, Homo sapien
gggcctgggcagcatacgttgcatctgaacaga

SEQ ID NO: 873454 - DNA, 33 bp, Homo sapien
gggcctgggcagcatatgttgcatctgaacaga

SEQ ID NO: 873455 - DNA, 33 bp, Homo sapien
agagtaggaacttgcaatgaagaattctattat

SEQ ID NO: 873456 - DNA, 33 bp, Homo sapien
agagtaggaacttgcagtgaagaattctattat

SEQ ID NO: 873457 - DNA, 33 bp, Homo sapien
tgaattagtccgtataatactactatatcttat

SEQ ID NO: 873458 - DNA, 33 bp, Homo sapien
tgaattagtccgtatactactactatatcttat

SEQ ID NO: 873459 - DNA, 33 bp, Homo sapien
aataaatgcagttaggaaaaattgttccattaa

SEQ ID NO: 873460 - DNA, 33 bp, Homo sapien
aataaatgcagttagggaaaattgttccattaa

SEQ ID NO: 873461 - DNA, 33 bp, Homo sapien
aagcattacaccagaaaagtaaaccttacactg

SEQ ID NO: 873462 - DNA, 33 bp, Homo sapien
aagcattacaccagaagagtaaaccttacactg

SEQ ID NO: 873463 - DNA, 33 bp, Homo sapien
ttttctgttatatttacgaaagctcttcttctc

SEQ ID NO: 873464 - DNA, 33 bp, Homo sapien
ttttctgttatatttatgaaagctcttcttctc

SEQ ID NO: 873465 - DNA, 33 bp, Homo sapien
tatattatctttgagccatggtcaaatttccag

SEQ ID NO: 873466 - DNA, 33 bp, Homo sapien
tatattatctttgagctatggtcaaatttccag

SEQ ID NO: 873467 - DNA, 33 bp, Homo sapien
acacattaagcaatccagctttttctaatgtca

SEQ ID NO: 873468 - DNA, 33 bp, Homo sapien
acacattaagcaatccggctttttctaatgtca

SEQ ID NO: 873469 - DNA, 33 bp, Homo sapien
tgacataaaatcactaagtttctggcaaaaaag

SEQ ID NO: 873470 - DNA, 33 bp, Homo sapien
tgacataaaatcactatgtttctggcaaaaaag

SEQ ID NO: 873471 - DNA, 33 bp, Homo sapien
aatacttagaaacttaagatgattagcttggaa

SEQ ID NO: 873472 - DNA, 33 bp, Homo sapien
aatacttagaaacttaggatgattagcttggaa

SEQ ID NO: 873473 - DNA, 33 bp, Homo sapien
tgttttcctcctcagaataatccatgcagtacc

SEQ ID NO: 873474 - DNA, 33 bp, Homo sapien
tgttttcctcctcagactaatccatgcagtacc

SEQ ID NO: 873475 - DNA, 33 bp, Homo sapien
ctcccaatattgcaaaggttttgtctcctggga

SEQ ID NO: 873476 - DNA, 33 bp, Homo sapien
ctcccaatattgcaaatgttttgtctcctggga

SEQ ID NO: 873477 - DNA, 33 bp, Homo sapien
tgaatatatacaagcaagggattaaagccgaac

SEQ ID NO: 873478 - DNA, 33 bp, Homo sapien
tgaatatatacaagcacgggattaaagccgaac

SEQ ID NO: 873479 - DNA, 33 bp, Homo sapien
acagattggacaactacggcttaaagcattaaa

SEQ ID NO: 873480 - DNA, 33 bp, Homo sapien
acagattggacaactatggcttaaagcattaaa

SEQ ID NO: 873481 - DNA, 33 bp, Homo sapien
aggaggcacttccatgaattcaaacaagagctg

SEQ ID NO: 873482 - DNA, 33 bp, Homo sapien
aggaggcacttccatggattcaaacaagagctg

SEQ ID NO: 873483 - DNA, 33 bp, Homo sapien
caggagaggtttacccacttgctcaacagaaat

SEQ ID NO: 873484 - DNA, 33 bp, Homo sapien
caggagaggtttacccgcttgctcaacagaaat

SEQ ID NO: 873485 - DNA, 33 bp, Homo sapien
aatgaactcctgatgaaaggaaaatatatgtat

SEQ ID NO: 873486 - DNA, 33 bp, Homo sapien
aatgaactcctgatgagaggaaaatatatgtat

SEQ ID NO: 873487 - DNA, 33 bp, Homo sapien
atgattatgttatttacaaacgtacagaaccaa

SEQ ID NO: 873488 - DNA, 33 bp, Homo sapien
atgattatgttatttagaaacgtacagaaccaa

SEQ ID NO: 873489 - DNA, 33 bp, Homo sapien
cgtctctgtatttatgccactttcttaaacaag

SEQ ID NO: 873490 - DNA, 33 bp, Homo sapien
cgtctctgtatttatgtcactttcttaaacaag

SEQ ID NO: 873491 - DNA, 33 bp, Homo sapien
cgggaccagtgaaaccaacattttgcctaaaac

SEQ ID NO: 873492 - DNA, 33 bp, Homo sapien
cgggaccagtgaaaccgacattttgcctaaaac

SEQ ID NO: 873493 - DNA, 33 bp, Homo sapien
ttctggatgagtgaacaagcatggcacctcagc

SEQ ID NO: 873494 - DNA, 33 bp, Homo sapien
ttctggatgagtgaacgagcatggcacctcagc

SEQ ID NO: 873495 - DNA, 33 bp, Homo sapien
tagaaagggcattaccagagaagaaaacctgca

SEQ ID NO: 873496 - DNA, 33 bp, Homo sapien
tagaaagggcattaccggagaagaaaacctgca

SEQ ID NO: 873497 - DNA, 33 bp, Homo sapien
tttaatccagactagtaaatctgagtataaaat

SEQ ID NO: 873498 - DNA, 33 bp, Homo sapien
tttaatccagactagtcaatctgagtataaaat

SEQ ID NO: 873499 - DNA, 33 bp, Homo sapien
gggtcacgtcttagacaccaacgaagttgagtt

SEQ ID NO: 873500 - DNA, 33 bp, Homo sapien
gggtcacgtcttagacgccaacgaagttgagtt

SEQ ID NO: 873501 - DNA, 33 bp, Homo sapien
gtgacagcagatcattaaaccaaactcagggcc

SEQ ID NO: 873502 - DNA, 33 bp, Homo sapien
gtgacagcagatcatttaaccaaactcagggcc

SEQ ID NO: 873503 - DNA, 33 bp, Homo sapien
tcatgagcaacagccaccttcacacagcgtcct

SEQ ID NO: 873504 - DNA, 33 bp, Homo sapien
tcatgagcaacagccatcttcacacagcgtcct

SEQ ID NO: 873505 - DNA, 33 bp, Homo sapien
aagtagctttgttcaccaaaacgctagatttat

SEQ ID NO: 873506 - DNA, 33 bp, Homo sapien
aagtagctttgttcactaaaacgctagatttat

SEQ ID NO: 873507 - DNA, 33 bp, Homo sapien
agcataaaagagtcaaacagatcttctgaatag

SEQ ID NO: 873508 - DNA, 33 bp, Homo sapien
agcataaaagagtcaatcagatcttctgaatag

SEQ ID NO: 873509 - DNA, 33 bp, Homo sapien
ttgctttgtactataccaccaggctgtttgccc

SEQ ID NO: 873510 - DNA, 33 bp, Homo sapien
ttgctttgtactatactaccaggctgtttgccc

SEQ ID NO: 873511 - DNA, 33 bp, Homo sapien
gagggacccacgaggacgtaactgaatcatggg

SEQ ID NO: 873512 - DNA, 33 bp, Homo sapien
gagggacccacgaggatgtaactgaatcatggg

SEQ ID NO: 873513 - DNA, 33 bp, Homo sapien
gtgtttgtctgtgaataaggaagaagtagtgcc

SEQ ID NO: 873514 - DNA, 33 bp, Homo sapien
gtgtttgtctgtgaatgaggaagaagtagtgcc

SEQ ID NO: 873515 - DNA, 33 bp, Homo sapien
agatgaggtcatactcaattataatgggcccta

SEQ ID NO: 873516 - DNA, 33 bp, Homo sapien
agatgaggtcatactcgattataatgggcccta

SEQ ID NO: 873517 - DNA, 33 bp, Homo sapien
tcctgaccctttttcaagaagatccttccaccc

SEQ ID NO: 873518 - DNA, 33 bp, Homo sapien
tcctgaccctttttcaggaagatccttccaccc

SEQ ID NO: 873519 - DNA, 33 bp, Homo sapien
gcacgtgcagaattatcagaaaccacagaggag

SEQ ID NO: 873520 - DNA, 33 bp, Homo sapien
gcacgtgcagaattattagaaaccacagaggag

SEQ ID NO: 873521 - DNA, 33 bp, Homo sapien
tgctggtcaatcagacaaataattaaagcaatg

SEQ ID NO: 873522 - DNA, 33 bp, Homo sapien
tgctggtcaatcagacgaataattaaagcaatg

SEQ ID NO: 873523 - DNA, 33 bp, Homo sapien
caaaaatacaggttgaatatctgttggccaaaa

SEQ ID NO: 873524 - DNA, 33 bp, Homo sapien
caaaaatacaggttgagtatctgttggccaaaa

SEQ ID NO: 873525 - DNA, 33 bp, Homo sapien
cttagtgaaaacacaactgaagatgtaaataat

SEQ ID NO: 873526 - DNA, 33 bp, Homo sapien
cttagtgaaaacacaattgaagatgtaaataat

SEQ ID NO: 873527 - DNA, 33 bp, Homo sapien
aggtgctcatggcatcagagagccagtagtgtt

SEQ ID NO: 873528 - DNA, 33 bp, Homo sapien
aggtgctcatggcatccgagagccagtagtgtt

SEQ ID NO: 873529 - DNA, 33 bp, Homo sapien
agccattgactttacactcatatcagctgagtt

SEQ ID NO: 873530 - DNA, 33 bp, Homo sapien
agccattgactttacattcatatcagctgagtt

SEQ ID NO: 873531 - DNA, 33 bp, Homo sapien
aggttgtataacttcacaggaaaagcttcataa

SEQ ID NO: 873532 - DNA, 33 bp, Homo sapien
aggttgtataacttcataggaaaagcttcataa

SEQ ID NO: 873533 - DNA, 33 bp, Homo sapien
cagacaacagaaaacccgaccacagcagtaaaa

SEQ ID NO: 873534 - DNA, 33 bp, Homo sapien
cagacaacagaaaacctgaccacagcagtaaaa

SEQ ID NO: 873535 - DNA, 33 bp, Homo sapien
caactgcagtccactacgagctgactctagcac

SEQ ID NO: 873536 - DNA, 33 bp, Homo sapien
caactgcagtccactatgagctgactctagcac

SEQ ID NO: 873537 - DNA, 33 bp, Homo sapien
cttacttttttcttacactacactaccagggct

SEQ ID NO: 873538 - DNA, 33 bp, Homo sapien
cttacttttttcttacgctacactaccagggct

SEQ ID NO: 873539 - DNA, 33 bp, Homo sapien
catgtacaaatttacactagtttgcataagcag

SEQ ID NO: 873540 - DNA, 33 bp, Homo sapien
catgtacaaatttacagtagtttgcataagcag

SEQ ID NO: 873541 - DNA, 33 bp, Homo sapien
aagaacaacataccccagagttgtacaacacaa

SEQ ID NO: 873542 - DNA, 33 bp, Homo sapien
aagaacaacataccccggagttgtacaacacaa

SEQ ID NO: 873543 - DNA, 33 bp, Homo sapien
acagcaacgtaagctgcatgattcctacagaat

SEQ ID NO: 873544 - DNA, 33 bp, Homo sapien
acagcaacgtaagctggatgattcctacagaat

SEQ ID NO: 873545 - DNA, 33 bp, Homo sapien
cttagttcatattcagacctcaaaacatacttg

SEQ ID NO: 873546 - DNA, 33 bp, Homo sapien
cttagttcatattcaggcctcaaaacatacttg

SEQ ID NO: 873547 - DNA, 33 bp, Homo sapien
gacgatgtccattagacgcaccgcctggtgaat

SEQ ID NO: 873548 - DNA, 33 bp, Homo sapien
gacgatgtccattagatgcaccgcctggtgaat

SEQ ID NO: 873549 - DNA, 33 bp, Homo sapien
taggacaaattcattaaacttctaccatttatt

SEQ ID NO: 873550 - DNA, 33 bp, Homo sapien
taggacaaattcattagacttctaccatttatt

SEQ ID NO: 873551 - DNA, 33 bp, Homo sapien
tgagaacgacacaataaaagtgttggcaagagt

SEQ ID NO: 873552 - DNA, 33 bp, Homo sapien
tgagaacgacacaatagaagtgttggcaagagt

SEQ ID NO: 873553 - DNA, 33 bp, Homo sapien
accagcaaatctctcaaattccattgtttagca

SEQ ID NO: 873554 - DNA, 33 bp, Homo sapien
accagcaaatctctcagattccattgtttagca

SEQ ID NO: 873555 - DNA, 33 bp, Homo sapien
tttctgccaggttctaaaatagacaacagagcc

SEQ ID NO: 873556 - DNA, 33 bp, Homo sapien
tttctgccaggttctataatagacaacagagcc

SEQ ID NO: 873557 - DNA, 33 bp, Homo sapien
tcctggcacagagtagaaaatgctatggccctg

SEQ ID NO: 873558 - DNA, 33 bp, Homo sapien
tcctggcacagagtaggaaatgctatggccctg

SEQ ID NO: 873559 - DNA, 33 bp, Homo sapien
ttaggaatgaatcctagaaactgattgtcctct

SEQ ID NO: 873560 - DNA, 33 bp, Homo sapien
ttaggaatgaatcctataaactgattgtcctct

SEQ ID NO: 873561 - DNA, 33 bp, Homo sapien
gagcagatcagagtgagacctgggatcctgcat

SEQ ID NO: 873562 - DNA, 33 bp, Homo sapien
gagcagatcagagtgatacctgggatcctgcat

SEQ ID NO: 873563 - DNA, 33 bp, Homo sapien
tatggacttcctagtacgttatccacagcagtg

SEQ ID NO: 873564 - DNA, 33 bp, Homo sapien
tatggacttcctagtatgttatccacagcagtg

SEQ ID NO: 873565 - DNA, 33 bp, Homo sapien
gttttgtaagatcatacacaccctcctaatccc

SEQ ID NO: 873566 - DNA, 33 bp, Homo sapien
gttttgtaagatcatatacaccctcctaatccc

SEQ ID NO: 873567 - DNA, 33 bp, Homo sapien
aacaaacaaacatcacggtactgaagggttttg

SEQ ID NO: 873568 - DNA, 33 bp, Homo sapien
aacaaacaaacatcactgtactgaagggttttg

SEQ ID NO: 873569 - DNA, 33 bp, Homo sapien
gctctgcacaagaaggacatttggaaatgacct

SEQ ID NO: 873570 - DNA, 33 bp, Homo sapien
gctctgcacaagaagggcatttggaaatgacct

SEQ ID NO: 873571 - DNA, 33 bp, Homo sapien
ctcattacttttccataaatcctataagcagaa

SEQ ID NO: 873572 - DNA, 33 bp, Homo sapien
ctcattacttttccatgaatcctataagcagaa

SEQ ID NO: 873573 - DNA, 33 bp, Homo sapien
ataaatatgtgttgggccaatctccatgaatgg

SEQ ID NO: 873574 - DNA, 33 bp, Homo sapien
ataaatatgtgttgggtcaatctccatgaatgg

SEQ ID NO: 873575 - DNA, 33 bp, Homo sapien
ctggctgcacgacttaaagtatatgtctttctt

SEQ ID NO: 873576 - DNA, 33 bp, Homo sapien
ctggctgcacgacttagagtatatgtctttctt

SEQ ID NO: 873577 - DNA, 33 bp, Homo sapien
ttacagtggatttaaaatacagaaagtaatagt

SEQ ID NO: 873578 - DNA, 33 bp, Homo sapien
ttacagtggatttaaagtacagaaagtaatagt

SEQ ID NO: 873579 - DNA, 33 bp, Homo sapien
aagaatcgccatcttggatcataagaatggttt

SEQ ID NO: 873580 - DNA, 33 bp, Homo sapien
aagaatcgccatcttgtatcataagaatggttt

SEQ ID NO: 873581 - DNA, 33 bp, Homo sapien
ttcctttgtgctgtgacgcccatttttaagaat

SEQ ID NO: 873582 - DNA, 33 bp, Homo sapien
ttcctttgtgctgtgatgcccatttttaagaat

SEQ ID NO: 873583 - DNA, 33 bp, Homo sapien
acacctacacaaaggaacagatgaaggttactt

SEQ ID NO: 873584 - DNA, 33 bp, Homo sapien
acacctacacaaaggagcagatgaaggttactt

SEQ ID NO: 873585 - DNA, 33 bp, Homo sapien
tagaagccaatctccacgtttgagggtaaatgg

SEQ ID NO: 873586 - DNA, 33 bp, Homo sapien
tagaagccaatctccatgtttgagggtaaatgg

SEQ ID NO: 873587 - DNA, 33 bp, Homo sapien
atttttaaaaaatttccaatctgtcatgaacca

SEQ ID NO: 873588 - DNA, 33 bp, Homo sapien
atttttaaaaaatttctaatctgtcatgaacca

SEQ ID NO: 873589 - DNA, 33 bp, Homo sapien
gccttgtggagtatgaaaaacaccgtctagcct

SEQ ID NO: 873590 - DNA, 33 bp, Homo sapien
gccttgtggagtatgataaacaccgtctagcct

SEQ ID NO: 873591 - DNA, 33 bp, Homo sapien
ttcagtgaggctctcacgtttttgtaaggaaaa

SEQ ID NO: 873592 - DNA, 33 bp, Homo sapien
ttcagtgaggctctcatgtttttgtaaggaaaa

SEQ ID NO: 873593 - DNA, 33 bp, Homo sapien
gagcctcactgaacaccgtctaaaaggctcttg

SEQ ID NO: 873594 - DNA, 33 bp, Homo sapien
gagcctcactgaacactgtctaaaaggctcttg

SEQ ID NO: 873595 - DNA, 33 bp, Homo sapien
ccaggagaccacaaacaagtacttttgagatag

SEQ ID NO: 873596 - DNA, 33 bp, Homo sapien
ccaggagaccacaaacgagtacttttgagatag

SEQ ID NO: 873597 - DNA, 33 bp, Homo sapien
ctgccccacaagttaccggacaccagacaaaag

SEQ ID NO: 873598 - DNA, 33 bp, Homo sapien
ctgccccacaagttactggacaccagacaaaag

SEQ ID NO: 873599 - DNA, 33 bp, Homo sapien
ggcgttcttgtagtaaagggaagtctaacaagc

SEQ ID NO: 873600 - DNA, 33 bp, Homo sapien
ggcgttcttgtagtaaggggaagtctaacaagc

SEQ ID NO: 873601 - DNA, 33 bp, Homo sapien
agtggctaccagatatcatagacttatgactat

SEQ ID NO: 873602 - DNA, 33 bp, Homo sapien
agtggctaccagatattatagacttatgactat

SEQ ID NO: 873603 - DNA, 33 bp, Homo sapien
cagggaacaatgccagacgtacagacaatacca

SEQ ID NO: 873604 - DNA, 33 bp, Homo sapien
cagggaacaatgccagtcgtacagacaatacca

SEQ ID NO: 873605 - DNA, 33 bp, Homo sapien
atttactgtcatgacacgtttttcttatgggct

SEQ ID NO: 873606 - DNA, 33 bp, Homo sapien
atttactgtcatgacatgtttttcttatgggct

SEQ ID NO: 873607 - DNA, 33 bp, Homo sapien
agcataaacacagagggatgaaataaatatttt

SEQ ID NO: 873608 - DNA, 33 bp, Homo sapien
agcataaacacagaggtatgaaataaatatttt

SEQ ID NO: 873609 - DNA, 33 bp, Homo sapien
agcattagtgagggcacgaagagaatcaacgtg

SEQ ID NO: 873610 - DNA, 33 bp, Homo sapien
agcattagtgagggcatgaagagaatcaacgtg

SEQ ID NO: 873611 - DNA, 33 bp, Homo sapien
tggtcttccatataaactccatcctagaaagta

SEQ ID NO: 873612 - DNA, 33 bp, Homo sapien
tggtcttccatataaagtccatcctagaaagta

SEQ ID NO: 873613 - DNA, 33 bp, Homo sapien
tggtgtcatcaccactaaacaggagcaacttgt

SEQ ID NO: 873614 - DNA, 33 bp, Homo sapien
tggtgtcatcaccactgaacaggagcaacttgt

SEQ ID NO: 873615 - DNA, 33 bp, Homo sapien
gagtgtggcattctgacaaaatcaggtgagtga

SEQ ID NO: 873616 - DNA, 33 bp, Homo sapien
gagtgtggcattctgagaaaatcaggtgagtga

SEQ ID NO: 873617 - DNA, 33 bp, Homo sapien
attcacgctgtgtgccgcatttggtccaagacc

SEQ ID NO: 873618 - DNA, 33 bp, Homo sapien
attcacgctgtgtgcctcatttggtccaagacc

SEQ ID NO: 873619 - DNA, 33 bp, Homo sapien
gtgttaatatgtcaaacaggacttggaattata

SEQ ID NO: 873620 - DNA, 33 bp, Homo sapien
gtgttaatatgtcaaagaggacttggaattata

SEQ ID NO: 873621 - DNA, 33 bp, Homo sapien
gaagaacactatccagacctttgggcttaaagg

SEQ ID NO: 873622 - DNA, 33 bp, Homo sapien
gaagaacactatccagtcctttgggcttaaagg

SEQ ID NO: 873623 - DNA, 33 bp, Homo sapien
gatttggggggattaaatacaattgaggggttt

SEQ ID NO: 873624 - DNA, 33 bp, Homo sapien
gatttggggggattaagtacaattgaggggttt

SEQ ID NO: 873625 - DNA, 33 bp, Homo sapien
ctgcgtcgggtgcataagtgtgaggtttgcagg

SEQ ID NO: 873626 - DNA, 33 bp, Homo sapien
ctgcgtcgggtgcatacgtgtgaggtttgcagg

SEQ ID NO: 873627 - DNA, 33 bp, Homo sapien
ctgatcactatcatcacgctttttttgtttcgg

SEQ ID NO: 873628 - DNA, 33 bp, Homo sapien
ctgatcactatcatcatgctttttttgtttcgg

SEQ ID NO: 873629 - DNA, 33 bp, Homo sapien
ggctaagagaggataaataatttgctcaaagac

SEQ ID NO: 873630 - DNA, 33 bp, Homo sapien
ggctaagagaggataagtaatttgctcaaagac

SEQ ID NO: 873631 - DNA, 33 bp, Homo sapien
agcccgtatgaagaacagaggataaaatgaaaa

SEQ ID NO: 873632 - DNA, 33 bp, Homo sapien
agcccgtatgaagaacggaggataaaatgaaaa

SEQ ID NO: 873633 - DNA, 33 bp, Homo sapien
aaatattacaataacaataagccagttgcttct

SEQ ID NO: 873634 - DNA, 33 bp, Homo sapien
aaatattacaataacagtaagccagttgcttct

SEQ ID NO: 873635 - DNA, 33 bp, Homo sapien
cacatgctaaacttaaaccaaagatatgtaaag

SEQ ID NO: 873636 - DNA, 33 bp, Homo sapien
cacatgctaaacttaagccaaagatatgtaaag

SEQ ID NO: 873637 - DNA, 33 bp, Homo sapien
aaccatccttccactacctatctccataagttc

SEQ ID NO: 873638 - DNA, 33 bp, Homo sapien
aaccatccttccactatctatctccataagttc

SEQ ID NO: 873639 - DNA, 33 bp, Homo sapien
ttaaaacagtaacagaagtgaacagaggagaaa

SEQ ID NO: 873640 - DNA, 33 bp, Homo sapien
ttaaaacagtaacagatgtgaacagaggagaaa

SEQ ID NO: 873641 - DNA, 33 bp, Homo sapien
caggcagaaagaagaacatgtgaaaacccacat

SEQ ID NO: 873642 - DNA, 33 bp, Homo sapien
caggcagaaagaagaatatgtgaaaacccacat

SEQ ID NO: 873643 - DNA, 33 bp, Homo sapien
tgatgggtacacagcaccttccttacattattt

SEQ ID NO: 873644 - DNA, 33 bp, Homo sapien
tgatgggtacacagcatcttccttacattattt

SEQ ID NO: 873645 - DNA, 33 bp, Homo sapien
caccctcattgataacacaggttctcaggtata

SEQ ID NO: 873646 - DNA, 33 bp, Homo sapien
caccctcattgataacgcaggttctcaggtata

SEQ ID NO: 873647 - DNA, 33 bp, Homo sapien
ctcatgccatatgctgacacaaccatgcatacc

SEQ ID NO: 873648 - DNA, 33 bp, Homo sapien
ctcatgccatatgctggcacaaccatgcatacc

SEQ ID NO: 873649 - DNA, 33 bp, Homo sapien
tgcatagactgttgccagcagtaattctcttgt

SEQ ID NO: 873650 - DNA, 33 bp, Homo sapien
tgcatagactgttgccggcagtaattctcttgt

SEQ ID NO: 873651 - DNA, 33 bp, Homo sapien
aacctatcgcaaagcgaaggcaggatacacttt

SEQ ID NO: 873652 - DNA, 33 bp, Homo sapien
aacctatcgcaaagcggaggcaggatacacttt

SEQ ID NO: 873653 - DNA, 33 bp, Homo sapien
tatgttgaacccgtaacccctagtgccttagaa

SEQ ID NO: 873654 - DNA, 33 bp, Homo sapien
tatgttgaacccgtaatccctagtgccttagaa

SEQ ID NO: 873655 - DNA, 33 bp, Homo sapien
taatgaaaattttgggaacagatgatcataatt

SEQ ID NO: 873656 - DNA, 33 bp, Homo sapien
taatgaaaattttggggacagatgatcataatt

SEQ ID NO: 873657 - DNA, 33 bp, Homo sapien
ttaaaattctttgaaccgtactcaaaattatga

SEQ ID NO: 873658 - DNA, 33 bp, Homo sapien
ttaaaattctttgaactgtactcaaaattatga

SEQ ID NO: 873659 - DNA, 33 bp, Homo sapien
agaagaggacaggacaatgcaagggtgggccct

SEQ ID NO: 873660 - DNA, 33 bp, Homo sapien
agaagaggacaggacagtgcaagggtgggccct

SEQ ID NO: 873661 - DNA, 33 bp, Homo sapien
ccacttagctggcagaacagttgatgctattgt

SEQ ID NO: 873662 - DNA, 33 bp, Homo sapien
ccacttagctggcagagcagttgatgctattgt

SEQ ID NO: 873663 - DNA, 33 bp, Homo sapien
tattctagagtatgtacaagcatggaaaataca

SEQ ID NO: 873664 - DNA, 33 bp, Homo sapien
tattctagagtatgtataagcatggaaaataca

SEQ ID NO: 873665 - DNA, 33 bp, Homo sapien
gcatagaaatgaaaacaagggctaagtaggaga

SEQ ID NO: 873666 - DNA, 33 bp, Homo sapien
gcatagaaatgaaaacgagggctaagtaggaga

SEQ ID NO: 873667 - DNA, 33 bp, Homo sapien
ttcattgtactagacaaacctcaaatgctcaat

SEQ ID NO: 873668 - DNA, 33 bp, Homo sapien
ttcattgtactagacacacctcaaatgctcaat

SEQ ID NO: 873669 - DNA, 33 bp, Homo sapien
aatggatcagcctgagactactgtggtaggaat

SEQ ID NO: 873670 - DNA, 33 bp, Homo sapien
aatggatcagcctgaggctactgtggtaggaat

SEQ ID NO: 873671 - DNA, 33 bp, Homo sapien
taatccattaacacaagaaacacgaccacaaga

SEQ ID NO: 873672 - DNA, 33 bp, Homo sapien
taatccattaacacaataaacacgaccacaaga

SEQ ID NO: 873673 - DNA, 33 bp, Homo sapien
ttactccgtgagtgtgaaagtaagatttgatct

SEQ ID NO: 873674 - DNA, 33 bp, Homo sapien
ttactccgtgagtgtggaagtaagatttgatct

SEQ ID NO: 873675 - DNA, 33 bp, Homo sapien
ttcccaggcatccagacgggttctaagaaaagt

SEQ ID NO: 873676 - DNA, 33 bp, Homo sapien
ttcccaggcatccagatgggttctaagaaaagt

SEQ ID NO: 873677 - DNA, 33 bp, Homo sapien
cttatatttcgacatacgcagtattttgagagt

SEQ ID NO: 873678 - DNA, 33 bp, Homo sapien
cttatatttcgacatatgcagtattttgagagt

SEQ ID NO: 873679 - DNA, 33 bp, Homo sapien
agttgctgaagaatgaagcaaggtacttgatac

SEQ ID NO: 873680 - DNA, 33 bp, Homo sapien
agttgctgaagaatgaggcaaggtacttgatac

SEQ ID NO: 873681 - DNA, 33 bp, Homo sapien
tacttgatactgatggaaataaatgatggttca

SEQ ID NO: 873682 - DNA, 33 bp, Homo sapien
tacttgatactgatgggaataaatgatggttca

SEQ ID NO: 873683 - DNA, 33 bp, Homo sapien
ttaggttgtacagaagccaagatgtcaggcggg

SEQ ID NO: 873684 - DNA, 33 bp, Homo sapien
ttaggttgtacagaagtcaagatgtcaggcggg

SEQ ID NO: 873685 - DNA, 33 bp, Homo sapien
acaccagtcatattcaatcaggggcctacccta

SEQ ID NO: 873686 - DNA, 33 bp, Homo sapien
acaccagtcatattcagtcaggggcctacccta

SEQ ID NO: 873687 - DNA, 33 bp, Homo sapien
ggttgaattgtgtccccccagcaaatttatatg

SEQ ID NO: 873688 - DNA, 33 bp, Homo sapien
ggttgaattgtgtccctccagcaaatttatatg

SEQ ID NO: 873689 - DNA, 33 bp, Homo sapien
tacgtttaaaaatgcccaataagagtgtttcca

SEQ ID NO: 873690 - DNA, 33 bp, Homo sapien
tacgtttaaaaatgcctaataagagtgtttcca

SEQ ID NO: 873691 - DNA, 33 bp, Homo sapien
acatcttacttggcaaagttggctgcttttgcg

SEQ ID NO: 873692 - DNA, 33 bp, Homo sapien
acatcttacttggcaaggttggctgcttttgcg

SEQ ID NO: 873693 - DNA, 33 bp, Homo sapien
acaaccgccctatttgaaaacagcttcaaaaga

SEQ ID NO: 873694 - DNA, 33 bp, Homo sapien
acaaccgccctatttgtaaacagcttcaaaaga

SEQ ID NO: 873695 - DNA, 33 bp, Homo sapien
gagttttaagagacagaagtagagtaaaatccc

SEQ ID NO: 873696 - DNA, 33 bp, Homo sapien
gagttttaagagacaggagtagagtaaaatccc

SEQ ID NO: 873697 - DNA, 33 bp, Homo sapien
tggtgttaaatgaggagaaaaggcttgtagtta

SEQ ID NO: 873698 - DNA, 33 bp, Homo sapien
tggtgttaaatgaggataaaaggcttgtagtta

SEQ ID NO: 873699 - DNA, 33 bp, Homo sapien
ttttacctactctagaccaggggcagctaacat

SEQ ID NO: 873700 - DNA, 33 bp, Homo sapien
ttttacctactctagatcaggggcagctaacat

SEQ ID NO: 873701 - DNA, 33 bp, Homo sapien
ttgacagtgacattaccaattatgtggacttac

SEQ ID NO: 873702 - DNA, 33 bp, Homo sapien
ttgacagtgacattactaattatgtggacttac

SEQ ID NO: 873703 - DNA, 33 bp, Homo sapien
gaaactgcacaggtggccatcaacaagaaaatg

SEQ ID NO: 873704 - DNA, 33 bp, Homo sapien
gaaactgcacaggtggtcatcaacaagaaaatg

SEQ ID NO: 873705 - DNA, 33 bp, Homo sapien
cttcatttggccattacaggaaaaaggagacgc

SEQ ID NO: 873706 - DNA, 33 bp, Homo sapien
cttcatttggccattagaggaaaaaggagacgc

SEQ ID NO: 873707 - DNA, 33 bp, Homo sapien
caaagttgttccataaactgaaggagtattcct

SEQ ID NO: 873708 - DNA, 33 bp, Homo sapien
caaagttgttccataagctgaaggagtattcct

SEQ ID NO: 873709 - DNA, 33 bp, Homo sapien
gttttatatcaaaaaaggagtcagtctgaaaag

SEQ ID NO: 873710 - DNA, 33 bp, Homo sapien
gttttatatcaaaaaatgagtcagtctgaaaag

SEQ ID NO: 873711 - DNA, 33 bp, Homo sapien
aattaaatctaaaaagcctggcagtgcctttac

SEQ ID NO: 873712 - DNA, 33 bp, Homo sapien
aattaaatctaaaaagtctggcagtgcctttac

SEQ ID NO: 873713 - DNA, 33 bp, Homo sapien
atgaaatgagactagcaatctatgggaaaaaaa

SEQ ID NO: 873714 - DNA, 33 bp, Homo sapien
atgaaatgagactagcgatctatgggaaaaaaa

SEQ ID NO: 873715 - DNA, 33 bp, Homo sapien
gccaattctcatctcactcttagccccaggtaa

SEQ ID NO: 873716 - DNA, 33 bp, Homo sapien
gccaattctcatctcagtcttagccccaggtaa

SEQ ID NO: 873717 - DNA, 33 bp, Homo sapien
attacttcagagaataaactttatggctgtaag

SEQ ID NO: 873718 - DNA, 33 bp, Homo sapien
attacttcagagaatatactttatggctgtaag

SEQ ID NO: 873719 - DNA, 33 bp, Homo sapien
ctcctctcaaaagtcaaaaactatcttgtgccc

SEQ ID NO: 873720 - DNA, 33 bp, Homo sapien
ctcctctcaaaagtcagaaactatcttgtgccc

SEQ ID NO: 873721 - DNA, 33 bp, Homo sapien
ctagactttcacaacacattaaacaatgatgac

SEQ ID NO: 873722 - DNA, 33 bp, Homo sapien
ctagactttcacaacatattaaacaatgatgac

SEQ ID NO: 873723 - DNA, 33 bp, Homo sapien
ccatgagagtaataacagaccatagcaaatgtg

SEQ ID NO: 873724 - DNA, 33 bp, Homo sapien
ccatgagagtaataacggaccatagcaaatgtg

SEQ ID NO: 873725 - DNA, 33 bp, Homo sapien
ttggtaaatttgggaaagagtgtgtaatgggca

SEQ ID NO: 873726 - DNA, 33 bp, Homo sapien
ttggtaaatttgggaatgagtgtgtaatgggca

SEQ ID NO: 873727 - DNA, 33 bp, Homo sapien
acagcccgactgagtagatgtacactaaaaagt

SEQ ID NO: 873728 - DNA, 33 bp, Homo sapien
acagcccgactgagtatatgtacactaaaaagt

SEQ ID NO: 873729 - DNA, 33 bp, Homo sapien
catacagtatttataaagtctggcagtgttcaa

SEQ ID NO: 873730 - DNA, 33 bp, Homo sapien
catacagtatttataacgtctggcagtgttcaa

SEQ ID NO: 873731 - DNA, 33 bp, Homo sapien
acaatggaaactaaaaagatgagggttgccaca

SEQ ID NO: 873732 - DNA, 33 bp, Homo sapien
acaatggaaactaaaaggatgagggttgccaca

SEQ ID NO: 873733 - DNA, 33 bp, Homo sapien
aagaaggaagagccaaaaggtacgacaaacacc

SEQ ID NO: 873734 - DNA, 33 bp, Homo sapien
aagaaggaagagccaacaggtacgacaaacacc

SEQ ID NO: 873735 - DNA, 33 bp, Homo sapien
gagaaatgggaagatcactagaaatgcaagtga

SEQ ID NO: 873736 - DNA, 33 bp, Homo sapien
gagaaatgggaagatcgctagaaatgcaagtga

SEQ ID NO: 873737 - DNA, 33 bp, Homo sapien
cccagacctagagcaaattacctgactcctctg

SEQ ID NO: 873738 - DNA, 33 bp, Homo sapien
cccagacctagagcaagttacctgactcctctg

SEQ ID NO: 873739 - DNA, 33 bp, Homo sapien
tacatgtatgagatcactgaatcattgaaaaga

SEQ ID NO: 873740 - DNA, 33 bp, Homo sapien
tacatgtatgagatcattgaatcattgaaaaga

SEQ ID NO: 873741 - DNA, 33 bp, Homo sapien
ttctgagatttttcaacattaggcacaatggta

SEQ ID NO: 873742 - DNA, 33 bp, Homo sapien
ttctgagatttttcaatattaggcacaatggta

SEQ ID NO: 873743 - DNA, 33 bp, Homo sapien
atatgccacctgctataataagcaatattgtgg

SEQ ID NO: 873744 - DNA, 33 bp, Homo sapien
atatgccacctgctatgataagcaatattgtgg

SEQ ID NO: 873745 - DNA, 33 bp, Homo sapien
gatggtgacggaggagaaccggatcaatactgg

SEQ ID NO: 873746 - DNA, 33 bp, Homo sapien
gatggtgacggaggagcaccggatcaatactgg

SEQ ID NO: 873747 - DNA, 33 bp, Homo sapien
tgcagttcaatttaaaatgtaatgcccgtagtc

SEQ ID NO: 873748 - DNA, 33 bp, Homo sapien
tgcagttcaatttaaagtgtaatgcccgtagtc

SEQ ID NO: 873749 - DNA, 33 bp, Homo sapien
tgcttttctgctgtaaatgtaggcactacagaa

SEQ ID NO: 873750 - DNA, 33 bp, Homo sapien
tgcttttctgctgtaattgtaggcactacagaa

SEQ ID NO: 873751 - DNA, 33 bp, Homo sapien
tgtgtcactcgaatatcaaggtcaccccaggaa

SEQ ID NO: 873752 - DNA, 33 bp, Homo sapien
tgtgtcactcgaatatgaaggtcaccccaggaa

SEQ ID NO: 873753 - DNA, 33 bp, Homo sapien
gagggggaggcatctgcaatattgagcgttgtt

SEQ ID NO: 873754 - DNA, 33 bp, Homo sapien
gagggggaggcatctggaatattgagcgttgtt

SEQ ID NO: 873755 - DNA, 33 bp, Homo sapien
agacattgggaaggaccgaagtagaaggcaaat

SEQ ID NO: 873756 - DNA, 33 bp, Homo sapien
agacattgggaaggacggaagtagaaggcaaat

SEQ ID NO: 873757 - DNA, 33 bp, Homo sapien
tggttcatgccatgaactccagtttgcagtgtt

SEQ ID NO: 873758 - DNA, 33 bp, Homo sapien
tggttcatgccatgaattccagtttgcagtgtt

SEQ ID NO: 873759 - DNA, 33 bp, Homo sapien
gctggagacccctttccctaattgtctgaagaa

SEQ ID NO: 873760 - DNA, 33 bp, Homo sapien
gctggagacccctttctctaattgtctgaagaa

SEQ ID NO: 873761 - DNA, 33 bp, Homo sapien
tgtcttgaaccaaacaagaacttttgggcttat

SEQ ID NO: 873762 - DNA, 33 bp, Homo sapien
tgtcttgaaccaaacacgaacttttgggcttat

SEQ ID NO: 873763 - DNA, 33 bp, Homo sapien
cccagtgctttatatacacgaatttcaatcctg

SEQ ID NO: 873764 - DNA, 33 bp, Homo sapien
cccagtgctttatatatacgaatttcaatcctg

SEQ ID NO: 873765 - DNA, 33 bp, Homo sapien
cctcaaataagcaggacgcctaatcattttagg

SEQ ID NO: 873766 - DNA, 33 bp, Homo sapien
cctcaaataagcaggatgcctaatcattttagg

SEQ ID NO: 873767 - DNA, 33 bp, Homo sapien
ctattgtctaaagtaacgcatagtgaattctct

SEQ ID NO: 873768 - DNA, 33 bp, Homo sapien
ctattgtctaaagtaatgcatagtgaattctct

SEQ ID NO: 873769 - DNA, 33 bp, Homo sapien
aagacaaagagtcctcagaagtaaaataatttt

SEQ ID NO: 873770 - DNA, 33 bp, Homo sapien
aagacaaagagtcctcggaagtaaaataatttt

SEQ ID NO: 873771 - DNA, 33 bp, Homo sapien
cagagtatttctccagaatgccccacagcctct

SEQ ID NO: 873772 - DNA, 33 bp, Homo sapien
cagagtatttctccagcatgccccacagcctct

SEQ ID NO: 873773 - DNA, 33 bp, Homo sapien
actggtttcggctccaatgagtatctgatcaaa

SEQ ID NO: 873774 - DNA, 33 bp, Homo sapien
actggtttcggctccagtgagtatctgatcaaa

SEQ ID NO: 873775 - DNA, 33 bp, Homo sapien
cttcccagaagccctgcaatttcttacctcccc

SEQ ID NO: 873776 - DNA, 33 bp, Homo sapien
cttcccagaagccctggaatttcttacctcccc

SEQ ID NO: 873777 - DNA, 33 bp, Homo sapien
atctaaactaatccacactttgaaggatctaga

SEQ ID NO: 873778 - DNA, 33 bp, Homo sapien
atctaaactaatccacgctttgaaggatctaga

SEQ ID NO: 873779 - DNA, 33 bp, Homo sapien
ttgaaaagttttacaactgtgaagcatttttaa

SEQ ID NO: 873780 - DNA, 33 bp, Homo sapien
ttgaaaagttttacaattgtgaagcatttttaa

SEQ ID NO: 873781 - DNA, 33 bp, Homo sapien
taaggaactcgattgaaggtgggagttctcggt

SEQ ID NO: 873782 - DNA, 33 bp, Homo sapien
taaggaactcgattgagggtgggagttctcggt

SEQ ID NO: 873783 - DNA, 33 bp, Homo sapien
gagaaagaaaatgcaaatggctaataatataaa

SEQ ID NO: 873784 - DNA, 33 bp, Homo sapien
gagaaagaaaatgcaagtggctaataatataaa

SEQ ID NO: 873785 - DNA, 33 bp, Homo sapien
attctgggtagagaaaagtaaggagtgtgtacc

SEQ ID NO: 873786 - DNA, 33 bp, Homo sapien
attctgggtagagaaaggtaaggagtgtgtacc

SEQ ID NO: 873787 - DNA, 33 bp, Homo sapien
tgaaacagcctggtctcacatcacattcagggg

SEQ ID NO: 873788 - DNA, 33 bp, Homo sapien
tgaaacagcctggtctgacatcacattcagggg

SEQ ID NO: 873789 - DNA, 33 bp, Homo sapien
gtgcctggtaaatgccactggctgatcggacgg

SEQ ID NO: 873790 - DNA, 33 bp, Homo sapien
gtgcctggtaaatgccgctggctgatcggacgg

SEQ ID NO: 873791 - DNA, 33 bp, Homo sapien
tgatcaatgttttataccaccattttattggtt

SEQ ID NO: 873792 - DNA, 33 bp, Homo sapien
tgatcaatgttttatatcaccattttattggtt

SEQ ID NO: 873793 - DNA, 33 bp, Homo sapien
ccttccctctttgctgaatttttgataacagca

SEQ ID NO: 873794 - DNA, 33 bp, Homo sapien
ccttccctctttgctggatttttgataacagca

SEQ ID NO: 873795 - DNA, 33 bp, Homo sapien
aagaggaggatgaagacgattataacaatggag

SEQ ID NO: 873796 - DNA, 33 bp, Homo sapien
aagaggaggatgaagatgattataacaatggag

SEQ ID NO: 873797 - DNA, 33 bp, Homo sapien
aaaggctgtaccgtcaatatgaggaaaagctag

SEQ ID NO: 873798 - DNA, 33 bp, Homo sapien
aaaggctgtaccgtcagtatgaggaaaagctag

SEQ ID NO: 873799 - DNA, 33 bp, Homo sapien
tcatattgtcattgtaaacggttctgggcaaca

SEQ ID NO: 873800 - DNA, 33 bp, Homo sapien
tcatattgtcattgtagacggttctgggcaaca

SEQ ID NO: 873801 - DNA, 33 bp, Homo sapien
agtgaactataatggaataattgtgtcgaaagc

SEQ ID NO: 873802 - DNA, 33 bp, Homo sapien
agtgaactataatggattaattgtgtcgaaagc

SEQ ID NO: 873803 - DNA, 33 bp, Homo sapien
catgggatggatgaaaaagtagtgagtctcaat

SEQ ID NO: 873804 - DNA, 33 bp, Homo sapien
catgggatggatgaaagagtagtgagtctcaat

SEQ ID NO: 873805 - DNA, 33 bp, Homo sapien
tatgttctatcctccaaccttaaccaatacacc

SEQ ID NO: 873806 - DNA, 33 bp, Homo sapien
tatgttctatcctccagccttaaccaatacacc

SEQ ID NO: 873807 - DNA, 33 bp, Homo sapien
ttaaaggattaatgttaaaatagcaccatcagc

SEQ ID NO: 873808 - DNA, 33 bp, Homo sapien
ttaaaggattaatgtttaaatagcaccatcagc

SEQ ID NO: 873809 - DNA, 33 bp, Homo sapien
aaatgggcctatctgactatttcaaccttttga

SEQ ID NO: 873810 - DNA, 33 bp, Homo sapien
aaatgggcctatctgattatttcaaccttttga

SEQ ID NO: 873811 - DNA, 33 bp, Homo sapien
atctactggaccaagcaatctaattacgtggac

SEQ ID NO: 873812 - DNA, 33 bp, Homo sapien
atctactggaccaagccatctaattacgtggac

SEQ ID NO: 873813 - DNA, 33 bp, Homo sapien
ttttactcactctaccactgtaattagagaagc

SEQ ID NO: 873814 - DNA, 33 bp, Homo sapien
ttttactcactctaccgctgtaattagagaagc

SEQ ID NO: 873815 - DNA, 33 bp, Homo sapien
tgtggagagtggcttgcaaagtagcaatttcta

SEQ ID NO: 873816 - DNA, 33 bp, Homo sapien
tgtggagagtggcttgtaaagtagcaatttcta

SEQ ID NO: 873817 - DNA, 33 bp, Homo sapien
agcctggcctttaccccaattattgcaatgctt

SEQ ID NO: 873818 - DNA, 33 bp, Homo sapien
agcctggcctttaccctaattattgcaatgctt

SEQ ID NO: 873819 - DNA, 33 bp, Homo sapien
gttcaaaaccttagcagcccaggttgtcatgcc

SEQ ID NO: 873820 - DNA, 33 bp, Homo sapien
gttcaaaaccttagcatcccaggttgtcatgcc

SEQ ID NO: 873821 - DNA, 33 bp, Homo sapien
cttattggatctctgccccattaggtaaccctt

SEQ ID NO: 873822 - DNA, 33 bp, Homo sapien
cttattggatctctgcgccattaggtaaccctt

SEQ ID NO: 873823 - DNA, 33 bp, Homo sapien
aacaatcaagcactgacacttatggaagttaag

SEQ ID NO: 873824 - DNA, 33 bp, Homo sapien
aacaatcaagcactgatacttatggaagttaag

SEQ ID NO: 873825 - DNA, 33 bp, Homo sapien
atgcacagattttatcaatccaaatgtaacaat

SEQ ID NO: 873826 - DNA, 33 bp, Homo sapien
atgcacagattttatctatccaaatgtaacaat

SEQ ID NO: 873827 - DNA, 33 bp, Homo sapien
ttaaaaatagatgatgcaagatgttatatgtaa

SEQ ID NO: 873828 - DNA, 33 bp, Homo sapien
ttaaaaatagatgatgtaagatgttatatgtaa

SEQ ID NO: 873829 - DNA, 33 bp, Homo sapien
acaccttctcaagtgacgctcatgaccatgtga

SEQ ID NO: 873830 - DNA, 33 bp, Homo sapien
acaccttctcaagtgatgctcatgaccatgtga

SEQ ID NO: 873831 - DNA, 33 bp, Homo sapien
ttgatttcagctagtgcattcatttgcctgctt

SEQ ID NO: 873832 - DNA, 33 bp, Homo sapien
ttgatttcagctagtgtattcatttgcctgctt

SEQ ID NO: 873833 - DNA, 33 bp, Homo sapien
ggaaagggactcggtaacttttgtatcattaac

SEQ ID NO: 873834 - DNA, 33 bp, Homo sapien
ggaaagggactcggtagcttttgtatcattaac

SEQ ID NO: 873835 - DNA, 33 bp, Homo sapien
ttcatttgttcaaacaataagcatttcacaaca

SEQ ID NO: 873836 - DNA, 33 bp, Homo sapien
ttcatttgttcaaacagtaagcatttcacaaca

SEQ ID NO: 873837 - DNA, 33 bp, Homo sapien
ctcagatattctgttacagaagcataaaacaga

SEQ ID NO: 873838 - DNA, 33 bp, Homo sapien
ctcagatattctgttagagaagcataaaacaga

SEQ ID NO: 873839 - DNA, 33 bp, Homo sapien
gagagaggtagtatacagagaaatgtccatgcc

SEQ ID NO: 873840 - DNA, 33 bp, Homo sapien
gagagaggtagtatacggagaaatgtccatgcc

SEQ ID NO: 873841 - DNA, 33 bp, Homo sapien
tacttgattaatacaacgcttagtaaatcaagg

SEQ ID NO: 873842 - DNA, 33 bp, Homo sapien
tacttgattaatacaatgcttagtaaatcaagg

SEQ ID NO: 873843 - DNA, 33 bp, Homo sapien
gtaggaaatagagccaagtccaactcttagctc

SEQ ID NO: 873844 - DNA, 33 bp, Homo sapien
gtaggaaatagagccacgtccaactcttagctc

SEQ ID NO: 873845 - DNA, 33 bp, Homo sapien
ttctggcactggaagcccatgtttttcctttgc

SEQ ID NO: 873846 - DNA, 33 bp, Homo sapien
ttctggcactggaagctcatgtttttcctttgc

SEQ ID NO: 873847 - DNA, 33 bp, Homo sapien
gggctacaatggtaagcaaaaacagatcagatc

SEQ ID NO: 873848 - DNA, 33 bp, Homo sapien
gggctacaatggtaagtaaaaacagatcagatc

SEQ ID NO: 873849 - DNA, 33 bp, Homo sapien
gaagggcttaactttgaacaacttaaatgttgt

SEQ ID NO: 873850 - DNA, 33 bp, Homo sapien
gaagggcttaactttggacaacttaaatgttgt

SEQ ID NO: 873851 - DNA, 33 bp, Homo sapien
accacatggggatctgcaaattctacctgtgcc

SEQ ID NO: 873852 - DNA, 33 bp, Homo sapien
accacatggggatctggaaattctacctgtgcc

SEQ ID NO: 873853 - DNA, 33 bp, Homo sapien
aacccaagaaacaacacggtggtgagattcctg

SEQ ID NO: 873854 - DNA, 33 bp, Homo sapien
aacccaagaaacaacatggtggtgagattcctg

SEQ ID NO: 873855 - DNA, 33 bp, Homo sapien
gtactaagataagaaccagagttttgttctaga

SEQ ID NO: 873856 - DNA, 33 bp, Homo sapien
gtactaagataagaactagagttttgttctaga

SEQ ID NO: 873857 - DNA, 33 bp, Homo sapien
ggagcagggctccagacgtaacgtacgaaaacg

SEQ ID NO: 873858 - DNA, 33 bp, Homo sapien
ggagcagggctccagaggtaacgtacgaaaacg

SEQ ID NO: 873859 - DNA, 33 bp, Homo sapien
taggccagacccacaacatcttgaggtataaaa

SEQ ID NO: 873860 - DNA, 33 bp, Homo sapien
taggccagacccacaatatcttgaggtataaaa

SEQ ID NO: 873861 - DNA, 33 bp, Homo sapien
tgtgcggcagaacacaataaggttcatatccat

SEQ ID NO: 873862 - DNA, 33 bp, Homo sapien
tgtgcggcagaacacagtaaggttcatatccat

SEQ ID NO: 873863 - DNA, 33 bp, Homo sapien
tgcttcttcagtgaaacccagactcctcagctc

SEQ ID NO: 873864 - DNA, 33 bp, Homo sapien
tgcttcttcagtgaaatccagactcctcagctc

SEQ ID NO: 873865 - DNA, 33 bp, Homo sapien
cagtgggtatttaataaagaagcaattcaaggc

SEQ ID NO: 873866 - DNA, 33 bp, Homo sapien
cagtgggtatttaatacagaagcaattcaaggc

SEQ ID NO: 873867 - DNA, 33 bp, Homo sapien
tcttagtggaataagacaagcaaaatcaaaatg

SEQ ID NO: 873868 - DNA, 33 bp, Homo sapien
tcttagtggaataagataagcaaaatcaaaatg

SEQ ID NO: 873869 - DNA, 33 bp, Homo sapien
ggcctttggctggttacgtaacttctccctgat

SEQ ID NO: 873870 - DNA, 33 bp, Homo sapien
ggcctttggctggttatgtaacttctccctgat

SEQ ID NO: 873871 - DNA, 33 bp, Homo sapien
agcaagtgtttactgaccatcttcatctattgt

SEQ ID NO: 873872 - DNA, 33 bp, Homo sapien
agcaagtgtttactgagcatcttcatctattgt

SEQ ID NO: 873873 - DNA, 33 bp, Homo sapien
cccaggaacatttcccaatttgaaactgtaacc

SEQ ID NO: 873874 - DNA, 33 bp, Homo sapien
cccaggaacatttcccgatttgaaactgtaacc

SEQ ID NO: 873875 - DNA, 33 bp, Homo sapien
ggcattttaatggttaaattatcagacaaaatt

SEQ ID NO: 873876 - DNA, 33 bp, Homo sapien
ggcattttaatggttacattatcagacaaaatt

SEQ ID NO: 873877 - DNA, 33 bp, Homo sapien
cctgccttggttgtcaatcttgatatctactgc

SEQ ID NO: 873878 - DNA, 33 bp, Homo sapien
cctgccttggttgtcagtcttgatatctactgc

SEQ ID NO: 873879 - DNA, 33 bp, Homo sapien
tgctcctcttctggtaaaattgtatagaatgaa

SEQ ID NO: 873880 - DNA, 33 bp, Homo sapien
tgctcctcttctggtagaattgtatagaatgaa

SEQ ID NO: 873881 - DNA, 33 bp, Homo sapien
ttcagagtttctcaccacaggagtgtactagat

SEQ ID NO: 873882 - DNA, 33 bp, Homo sapien
ttcagagtttctcaccgcaggagtgtactagat

SEQ ID NO: 873883 - DNA, 33 bp, Homo sapien
actacatacctactagaatggttaacataaaac

SEQ ID NO: 873884 - DNA, 33 bp, Homo sapien
actacatacctactaggatggttaacataaaac

SEQ ID NO: 873885 - DNA, 33 bp, Homo sapien
tttgttcaaatgctacccttgatgttcagccca

SEQ ID NO: 873886 - DNA, 33 bp, Homo sapien
tttgttcaaatgctactcttgatgttcagccca

SEQ ID NO: 873887 - DNA, 33 bp, Homo sapien
gcaatcaactaaaaacacagactgtggaaaatt

SEQ ID NO: 873888 - DNA, 33 bp, Homo sapien
gcaatcaactaaaaacccagactgtggaaaatt

SEQ ID NO: 873889 - DNA, 33 bp, Homo sapien
aagatgtacttttctacgtcattaccttctggg

SEQ ID NO: 873890 - DNA, 33 bp, Homo sapien
aagatgtacttttctatgtcattaccttctggg

SEQ ID NO: 873891 - DNA, 33 bp, Homo sapien
aaactcaggaatcaacagtgaaaatatcaccaa

SEQ ID NO: 873892 - DNA, 33 bp, Homo sapien
aaactcaggaatcaacggtgaaaatatcaccaa

SEQ ID NO: 873893 - DNA, 33 bp, Homo sapien
tgcctggcaacactaacggctgcagttgtttac

SEQ ID NO: 873894 - DNA, 33 bp, Homo sapien
tgcctggcaacactaatggctgcagttgtttac

SEQ ID NO: 873895 - DNA, 33 bp, Homo sapien
ccccaaaacaatcttacgatgaaagtactccta

SEQ ID NO: 873896 - DNA, 33 bp, Homo sapien
ccccaaaacaatcttatgatgaaagtactccta

SEQ ID NO: 873897 - DNA, 33 bp, Homo sapien
tagccatttcaagaggccaagggacaattctgt

SEQ ID NO: 873898 - DNA, 33 bp, Homo sapien
tagccatttcaagaggtcaagggacaattctgt

SEQ ID NO: 873899 - DNA, 33 bp, Homo sapien
cagtgcttgtctactcaatgatttgatttcgga

SEQ ID NO: 873900 - DNA, 33 bp, Homo sapien
cagtgcttgtctactccatgatttgatttcgga

SEQ ID NO: 873901 - DNA, 33 bp, Homo sapien
tggaacatcctctggccaagtcagctgatccgc

SEQ ID NO: 873902 - DNA, 33 bp, Homo sapien
tggaacatcctctggctaagtcagctgatccgc

SEQ ID NO: 873903 - DNA, 33 bp, Homo sapien
cagttaccattttgcacagctacatagacacgg

SEQ ID NO: 873904 - DNA, 33 bp, Homo sapien
cagttaccattttgcatagctacatagacacgg

SEQ ID NO: 873905 - DNA, 33 bp, Homo sapien
attactatctccttccagaatatattgcctgct

SEQ ID NO: 873906 - DNA, 33 bp, Homo sapien
attactatctccttcctgaatatattgcctgct

SEQ ID NO: 873907 - DNA, 33 bp, Homo sapien
cttaagaacttctcaacgaaatgaattatttag

SEQ ID NO: 873908 - DNA, 33 bp, Homo sapien
cttaagaacttctcaatgaaatgaattatttag

SEQ ID NO: 873909 - DNA, 33 bp, Homo sapien
aaatgccaatccaagacgcaatgagacaaaatc

SEQ ID NO: 873910 - DNA, 33 bp, Homo sapien
aaatgccaatccaagatgcaatgagacaaaatc

SEQ ID NO: 873911 - DNA, 33 bp, Homo sapien
gctatacaattttcccagcaccgtttattgagt

SEQ ID NO: 873912 - DNA, 33 bp, Homo sapien
gctatacaattttcccggcaccgtttattgagt

SEQ ID NO: 873913 - DNA, 33 bp, Homo sapien
atagcgtgaggaggtcaatgtactattcatatc

SEQ ID NO: 873914 - DNA, 33 bp, Homo sapien
atagcgtgaggaggtcgatgtactattcatatc

SEQ ID NO: 873915 - DNA, 33 bp, Homo sapien
ctcttctcgcattcctaaaagattctaatgttc

SEQ ID NO: 873916 - DNA, 33 bp, Homo sapien
ctcttctcgcattcctcaaagattctaatgttc

SEQ ID NO: 873917 - DNA, 33 bp, Homo sapien
caaacaaaaacaaaaaaggcctgctgtgtgcat

SEQ ID NO: 873918 - DNA, 33 bp, Homo sapien
caaacaaaaacaaaaacggcctgctgtgtgcat

SEQ ID NO: 873919 - DNA, 33 bp, Homo sapien
ggtgcatttcccttaaccaagtatcaaaagcag

SEQ ID NO: 873920 - DNA, 33 bp, Homo sapien
ggtgcatttcccttaatcaagtatcaaaagcag

SEQ ID NO: 873921 - DNA, 33 bp, Homo sapien
cactgcacaacaagacggtcacataaaaccaca

SEQ ID NO: 873922 - DNA, 33 bp, Homo sapien
cactgcacaacaagactgtcacataaaaccaca

SEQ ID NO: 873923 - DNA, 33 bp, Homo sapien
ttagctatggatgtaacgggaaagagacacatt

SEQ ID NO: 873924 - DNA, 33 bp, Homo sapien
ttagctatggatgtaatgggaaagagacacatt

SEQ ID NO: 873925 - DNA, 33 bp, Homo sapien
gactgagactcccttaagtcatctactctgcac

SEQ ID NO: 873926 - DNA, 33 bp, Homo sapien
gactgagactcccttaggtcatctactctgcac

SEQ ID NO: 873927 - DNA, 33 bp, Homo sapien
taagatggtctactgacaggcctatggtgataa

SEQ ID NO: 873928 - DNA, 33 bp, Homo sapien
taagatggtctactgataggcctatggtgataa

SEQ ID NO: 873929 - DNA, 33 bp, Homo sapien
gcaaataacctgctcaactccagtattttcctg

SEQ ID NO: 873930 - DNA, 33 bp, Homo sapien
gcaaataacctgctcacctccagtattttcctg

SEQ ID NO: 873931 - DNA, 33 bp, Homo sapien
gttaacgtttgaagccccaccatgtgaccttga

SEQ ID NO: 873932 - DNA, 33 bp, Homo sapien
gttaacgtttgaagcctcaccatgtgaccttga

SEQ ID NO: 873933 - DNA, 33 bp, Homo sapien
taataccttcaacaaccgcatgagtaggtagca

SEQ ID NO: 873934 - DNA, 33 bp, Homo sapien
taataccttcaacaactgcatgagtaggtagca

SEQ ID NO: 873935 - DNA, 33 bp, Homo sapien
cacaaagccccctctagctattttagttataag

SEQ ID NO: 873936 - DNA, 33 bp, Homo sapien
cacaaagccccctctatctattttagttataag

SEQ ID NO: 873937 - DNA, 33 bp, Homo sapien
tataaataatggattcacttcaatcatgtttct

SEQ ID NO: 873938 - DNA, 33 bp, Homo sapien
tataaataatggattcccttcaatcatgtttct

SEQ ID NO: 873939 - DNA, 33 bp, Homo sapien
tggttgagtgacataacctatttcacaactcta

SEQ ID NO: 873940 - DNA, 33 bp, Homo sapien
tggttgagtgacataatctatttcacaactcta

SEQ ID NO: 873941 - DNA, 33 bp, Homo sapien
aaaacacttatcaatcaatttacgtatctttca

SEQ ID NO: 873942 - DNA, 33 bp, Homo sapien
aaaacacttatcaatccatttacgtatctttca

SEQ ID NO: 873943 - DNA, 33 bp, Homo sapien
tgcaattattgttgtaacttttgcttttatatg

SEQ ID NO: 873944 - DNA, 33 bp, Homo sapien
tgcaattattgttgtaccttttgcttttatatg

SEQ ID NO: 873945 - DNA, 33 bp, Homo sapien
caggacaatgaggatgaaactgcaagaaagata

SEQ ID NO: 873946 - DNA, 33 bp, Homo sapien
caggacaatgaggatgtaactgcaagaaagata

SEQ ID NO: 873947 - DNA, 33 bp, Homo sapien
gaggtacaggctccaaaaagtccacattcaaac

SEQ ID NO: 873948 - DNA, 33 bp, Homo sapien
gaggtacaggctccaagaagtccacattcaaac

SEQ ID NO: 873949 - DNA, 33 bp, Homo sapien
gcggtcagcaggtagcaaggaaagtgatctcaa

SEQ ID NO: 873950 - DNA, 33 bp, Homo sapien
gcggtcagcaggtagcgaggaaagtgatctcaa

SEQ ID NO: 873951 - DNA, 33 bp, Homo sapien
taaaggatggtcaggaactcaaccaaaaccaaa

SEQ ID NO: 873952 - DNA, 33 bp, Homo sapien
taaaggatggtcaggagctcaaccaaaaccaaa

SEQ ID NO: 873953 - DNA, 33 bp, Homo sapien
gaactctgattcacaagggcgacaaagagaata

SEQ ID NO: 873954 - DNA, 33 bp, Homo sapien
gaactctgattcacaatggcgacaaagagaata

SEQ ID NO: 873955 - DNA, 33 bp, Homo sapien
tcacactttttctctaagtatttggagattcca

SEQ ID NO: 873956 - DNA, 33 bp, Homo sapien
tcacactttttctctaggtatttggagattcca

SEQ ID NO: 873957 - DNA, 33 bp, Homo sapien
cccatcctgaaaaaaacgacaactaggaatgga

SEQ ID NO: 873958 - DNA, 33 bp, Homo sapien
cccatcctgaaaaaaatgacaactaggaatgga

SEQ ID NO: 873959 - DNA, 33 bp, Homo sapien
agattccttcctcacaacttccagcttttggtg

SEQ ID NO: 873960 - DNA, 33 bp, Homo sapien
agattccttcctcacatcttccagcttttggtg

SEQ ID NO: 873961 - DNA, 33 bp, Homo sapien
aaatagctaccacccaccatagccactcactaa

SEQ ID NO: 873962 - DNA, 33 bp, Homo sapien
aaatagctaccacccatcatagccactcactaa

SEQ ID NO: 873963 - DNA, 33 bp, Homo sapien
taaaaatgctgaattgaaagacatgaaagtagg

SEQ ID NO: 873964 - DNA, 33 bp, Homo sapien
taaaaatgctgaattggaagacatgaaagtagg

SEQ ID NO: 873965 - DNA, 33 bp, Homo sapien
cctggagtgaaaaggaacaaaggctgtaatcat

SEQ ID NO: 873966 - DNA, 33 bp, Homo sapien
cctggagtgaaaaggagcaaaggctgtaatcat

SEQ ID NO: 873967 - DNA, 33 bp, Homo sapien
ggggaaaatctcttcacgatactggcattttat

SEQ ID NO: 873968 - DNA, 33 bp, Homo sapien
ggggaaaatctcttcatgatactggcattttat

SEQ ID NO: 873969 - DNA, 33 bp, Homo sapien
tgatgtcccagtagcacgtaacaatttgagaaa

SEQ ID NO: 873970 - DNA, 33 bp, Homo sapien
tgatgtcccagtagcatgtaacaatttgagaaa

SEQ ID NO: 873971 - DNA, 33 bp, Homo sapien
tctgaaattatattcacagtagatccaatcaac

SEQ ID NO: 873972 - DNA, 33 bp, Homo sapien
tctgaaattatattcagagtagatccaatcaac

SEQ ID NO: 873973 - DNA, 33 bp, Homo sapien
cagttgcaaaagaaggacattgaaatccacagg

SEQ ID NO: 873974 - DNA, 33 bp, Homo sapien
cagttgcaaaagaagggcattgaaatccacagg

SEQ ID NO: 873975 - DNA, 33 bp, Homo sapien
tggttactagttgtgcaatcttgtgcaaattac

SEQ ID NO: 873976 - DNA, 33 bp, Homo sapien
tggttactagttgtgcgatcttgtgcaaattac

SEQ ID NO: 873977 - DNA, 33 bp, Homo sapien
ccactgaatggaagagacaagtagggtgaggtg

SEQ ID NO: 873978 - DNA, 33 bp, Homo sapien
ccactgaatggaagagccaagtagggtgaggtg

SEQ ID NO: 873979 - DNA, 33 bp, Homo sapien
ctactaatgtttgaaacgtcaaaaatcccggtg

SEQ ID NO: 873980 - DNA, 33 bp, Homo sapien
ctactaatgtttgaaatgtcaaaaatcccggtg

SEQ ID NO: 873981 - DNA, 33 bp, Homo sapien
ccaggagagctgtgagaatttcctaaccgaaga

SEQ ID NO: 873982 - DNA, 33 bp, Homo sapien
ccaggagagctgtgagcatttcctaaccgaaga

SEQ ID NO: 873983 - DNA, 33 bp, Homo sapien
ctctatgtgtggattacgcctttgctagtcaaa

SEQ ID NO: 873984 - DNA, 33 bp, Homo sapien
ctctatgtgtggattatgcctttgctagtcaaa

SEQ ID NO: 873985 - DNA, 33 bp, Homo sapien
gacatttgaaaatcaccgaaaagcactatggtt

SEQ ID NO: 873986 - DNA, 33 bp, Homo sapien
gacatttgaaaatcactgaaaagcactatggtt

SEQ ID NO: 873987 - DNA, 33 bp, Homo sapien
tcccccaggaattaaaactagtcacctcaacat

SEQ ID NO: 873988 - DNA, 33 bp, Homo sapien
tcccccaggaattaaatctagtcacctcaacat

SEQ ID NO: 873989 - DNA, 33 bp, Homo sapien
tgggaatatagcaccacatacagtggcagatgc

SEQ ID NO: 873990 - DNA, 33 bp, Homo sapien
tgggaatatagcaccatatacagtggcagatgc

SEQ ID NO: 873991 - DNA, 33 bp, Homo sapien
taaacaataggccgccaaatgactagttggtca

SEQ ID NO: 873992 - DNA, 33 bp, Homo sapien
taaacaataggccgccgaatgactagttggtca

SEQ ID NO: 873993 - DNA, 33 bp, Homo sapien
cctcatcctaaaacccaaaaacaactaagaggg

SEQ ID NO: 873994 - DNA, 33 bp, Homo sapien
cctcatcctaaaacccgaaaacaactaagaggg

SEQ ID NO: 873995 - DNA, 33 bp, Homo sapien
atccatatttcccaacaccatttactgaagaga

SEQ ID NO: 873996 - DNA, 33 bp, Homo sapien
atccatatttcccaacgccatttactgaagaga

SEQ ID NO: 873997 - DNA, 33 bp, Homo sapien
ctcagataaagttccaaagggaatcagtccagg

SEQ ID NO: 873998 - DNA, 33 bp, Homo sapien
ctcagataaagttccagagggaatcagtccagg

SEQ ID NO: 873999 - DNA, 33 bp, Homo sapien
cttcagatttctgtatgagccacaactctcaac

SEQ ID NO: 874000 - DNA, 33 bp, Homo sapien
cttcagatttctgtattagccacaactctcaac

SEQ ID NO: 874001 - DNA, 33 bp, Homo sapien
gatgtctgtccttaagcccgatgctagcgctgt

SEQ ID NO: 874002 - DNA, 33 bp, Homo sapien
gatgtctgtccttaaggccgatgctagcgctgt

SEQ ID NO: 874003 - DNA, 33 bp, Homo sapien
gccatgactaattgggacacttactgttacctg

SEQ ID NO: 874004 - DNA, 33 bp, Homo sapien
gccatgactaattgggccacttactgttacctg

SEQ ID NO: 874005 - DNA, 33 bp, Homo sapien
ttagtcttgggctacacgaagggatacagggag

SEQ ID NO: 874006 - DNA, 33 bp, Homo sapien
ttagtcttgggctacatgaagggatacagggag

SEQ ID NO: 874007 - DNA, 33 bp, Homo sapien
tgtcaggaaggcagaacatcctcacagtcagaa

SEQ ID NO: 874008 - DNA, 33 bp, Homo sapien
tgtcaggaaggcagaatatcctcacagtcagaa

SEQ ID NO: 874009 - DNA, 33 bp, Homo sapien
cacattcgtgtttcaaaggagatgcatcatacc

SEQ ID NO: 874010 - DNA, 33 bp, Homo sapien
cacattcgtgtttcaagggagatgcatcatacc

SEQ ID NO: 874011 - DNA, 33 bp, Homo sapien
tgagttaatgaatgaccgtagtaagcactgagt

SEQ ID NO: 874012 - DNA, 33 bp, Homo sapien
tgagttaatgaatgactgtagtaagcactgagt

SEQ ID NO: 874013 - DNA, 33 bp, Homo sapien
taaagagcaacagaacaacatgatcactgagtg

SEQ ID NO: 874014 - DNA, 33 bp, Homo sapien
taaagagcaacagaaccacatgatcactgagtg

SEQ ID NO: 874015 - DNA, 33 bp, Homo sapien
aatgccacacttaatccccagcaatcttcccct

SEQ ID NO: 874016 - DNA, 33 bp, Homo sapien
aatgccacacttaatcgccagcaatcttcccct

SEQ ID NO: 874017 - DNA, 33 bp, Homo sapien
gaaatggagtagaaacaggaaggaaccatatag

SEQ ID NO: 874018 - DNA, 33 bp, Homo sapien
gaaatggagtagaaactggaaggaaccatatag

SEQ ID NO: 874019 - DNA, 33 bp, Homo sapien
cacacagtacttggcacataatcagtgctcatt

SEQ ID NO: 874020 - DNA, 33 bp, Homo sapien
cacacagtacttggcagataatcagtgctcatt

SEQ ID NO: 874021 - DNA, 33 bp, Homo sapien
tgcatgtgtggagaaaatattttaaaacttcaa

SEQ ID NO: 874022 - DNA, 33 bp, Homo sapien
tgcatgtgtggagaaactattttaaaacttcaa

SEQ ID NO: 874023 - DNA, 33 bp, Homo sapien
agcaccaagaacttcaggtattaatcactatga

SEQ ID NO: 874024 - DNA, 33 bp, Homo sapien
agcaccaagaacttcatgtattaatcactatga

SEQ ID NO: 874025 - DNA, 33 bp, Homo sapien
acatagaagttctgcacgatagagacaaactaa

SEQ ID NO: 874026 - DNA, 33 bp, Homo sapien
acatagaagttctgcatgatagagacaaactaa

SEQ ID NO: 874027 - DNA, 33 bp, Homo sapien
tttgaaaccaccaaaacgggtagcagcttctta

SEQ ID NO: 874028 - DNA, 33 bp, Homo sapien
tttgaaaccaccaaaatgggtagcagcttctta

SEQ ID NO: 874029 - DNA, 33 bp, Homo sapien
agtactcgaggctgagcacaaccaccagctaac

SEQ ID NO: 874030 - DNA, 33 bp, Homo sapien
agtactcgaggctgaggacaaccaccagctaac

SEQ ID NO: 874031 - DNA, 33 bp, Homo sapien
ttttatatcagttctcaagcacaatgactggtt

SEQ ID NO: 874032 - DNA, 33 bp, Homo sapien
ttttatatcagttctccagcacaatgactggtt

SEQ ID NO: 874033 - DNA, 33 bp, Homo sapien
atgaaactcattgctcaaaatattttcatcacc

SEQ ID NO: 874034 - DNA, 33 bp, Homo sapien
atgaaactcattgctctaaatattttcatcacc

SEQ ID NO: 874035 - DNA, 33 bp, Homo sapien
aactccagaaatgtcccaactaggaaaggtgct

SEQ ID NO: 874036 - DNA, 33 bp, Homo sapien
aactccagaaatgtcctaactaggaaaggtgct

SEQ ID NO: 874037 - DNA, 33 bp, Homo sapien
tattatcctggataccaatgcatactagatgag

SEQ ID NO: 874038 - DNA, 33 bp, Homo sapien
tattatcctggataccgatgcatactagatgag

SEQ ID NO: 874039 - DNA, 33 bp, Homo sapien
aacacgttattaagaaagggcaagatgtcctta

SEQ ID NO: 874040 - DNA, 33 bp, Homo sapien
aacacgttattaagaatgggcaagatgtcctta

SEQ ID NO: 874041 - DNA, 33 bp, Homo sapien
tttaagagaaaaacctaaagctaccaggagtgg

SEQ ID NO: 874042 - DNA, 33 bp, Homo sapien
tttaagagaaaaacctgaagctaccaggagtgg

SEQ ID NO: 874043 - DNA, 33 bp, Homo sapien
ttaagtagtttttgagacattgagtcatttcta

SEQ ID NO: 874044 - DNA, 33 bp, Homo sapien
ttaagtagtttttgagtcattgagtcatttcta

SEQ ID NO: 874045 - DNA, 33 bp, Homo sapien
atgctatggcagtgaacaaaatggctgaaaata

SEQ ID NO: 874046 - DNA, 33 bp, Homo sapien
atgctatggcagtgaataaaatggctgaaaata

SEQ ID NO: 874047 - DNA, 33 bp, Homo sapien
gagaggatggtgagaaaagggtctctgagagta

SEQ ID NO: 874048 - DNA, 33 bp, Homo sapien
gagaggatggtgagaagagggtctctgagagta

SEQ ID NO: 874049 - DNA, 33 bp, Homo sapien
gaaggcagtaggtctcccaaacacagggcacat

SEQ ID NO: 874050 - DNA, 33 bp, Homo sapien
gaaggcagtaggtctctcaaacacagggcacat

SEQ ID NO: 874051 - DNA, 33 bp, Homo sapien
tccttcaacttcaagaaaacagggagtgtttgg

SEQ ID NO: 874052 - DNA, 33 bp, Homo sapien
tccttcaacttcaagacaacagggagtgtttgg

SEQ ID NO: 874053 - DNA, 33 bp, Homo sapien
tctgtggtaatttgaactatactgaaaagcaat

SEQ ID NO: 874054 - DNA, 33 bp, Homo sapien
tctgtggtaatttgaagtatactgaaaagcaat

SEQ ID NO: 874055 - DNA, 33 bp, Homo sapien
cccaggcggaagaaccacagaaagagccatcct

SEQ ID NO: 874056 - DNA, 33 bp, Homo sapien
cccaggcggaagaaccgcagaaagagccatcct

SEQ ID NO: 874057 - DNA, 33 bp, Homo sapien
ccccattggtgtgtagccccgcgcagtcgccgg

SEQ ID NO: 874058 - DNA, 33 bp, Homo sapien
ccccattggtgtgtagtcccgcgcagtcgccgg

SEQ ID NO: 874059 - DNA, 33 bp, Homo sapien
atcacacactctactgccaataaatttcacttt

SEQ ID NO: 874060 - DNA, 33 bp, Homo sapien
atcacacactctactggcaataaatttcacttt

SEQ ID NO: 874061 - DNA, 33 bp, Homo sapien
acgctttttcaagatacgtaacgtgttgtaaat

SEQ ID NO: 874062 - DNA, 33 bp, Homo sapien
acgctttttcaagatatgtaacgtgttgtaaat

SEQ ID NO: 874063 - DNA, 33 bp, Homo sapien
agagacaagtaaggagacaattccagaaaaagc

SEQ ID NO: 874064 - DNA, 33 bp, Homo sapien
agagacaagtaaggaggcaattccagaaaaagc

SEQ ID NO: 874065 - DNA, 33 bp, Homo sapien
tagatgattgtttctcagaataacttggttgac

SEQ ID NO: 874066 - DNA, 33 bp, Homo sapien
tagatgattgtttctcggaataacttggttgac

SEQ ID NO: 874067 - DNA, 33 bp, Homo sapien
agacgagcatcaacaacggcatgagatttgaag

SEQ ID NO: 874068 - DNA, 33 bp, Homo sapien
agacgagcatcaacaatggcatgagatttgaag

SEQ ID NO: 874069 - DNA, 33 bp, Homo sapien
caacctacatactccaaactaattcctaatgct

SEQ ID NO: 874070 - DNA, 33 bp, Homo sapien
caacctacatactccagactaattcctaatgct

SEQ ID NO: 874071 - DNA, 33 bp, Homo sapien
aaaagacgttttttctaaataatgtcatgaaat

SEQ ID NO: 874072 - DNA, 33 bp, Homo sapien
aaaagacgttttttcttaataatgtcatgaaat

SEQ ID NO: 874073 - DNA, 33 bp, Homo sapien
gtctaatgaacacctagattcttcattgtctcc

SEQ ID NO: 874074 - DNA, 33 bp, Homo sapien
gtctaatgaacacctatattcttcattgtctcc

SEQ ID NO: 874075 - DNA, 33 bp, Homo sapien
tttcatatgtcaaatacaactttccatagtggg

SEQ ID NO: 874076 - DNA, 33 bp, Homo sapien
tttcatatgtcaaatagaactttccatagtggg

SEQ ID NO: 874077 - DNA, 33 bp, Homo sapien
actggccatttaggcacctatgaaggcccagat

SEQ ID NO: 874078 - DNA, 33 bp, Homo sapien
actggccatttaggcatctatgaaggcccagat

SEQ ID NO: 874079 - DNA, 33 bp, Homo sapien
accaactttacatgcaagctgtatgaactgttt

SEQ ID NO: 874080 - DNA, 33 bp, Homo sapien
accaactttacatgcaggctgtatgaactgttt

SEQ ID NO: 874081 - DNA, 33 bp, Homo sapien
gcttccttgtcctcaacagatttgcttgttggg

SEQ ID NO: 874082 - DNA, 33 bp, Homo sapien
gcttccttgtcctcaatagatttgcttgttggg

SEQ ID NO: 874083 - DNA, 33 bp, Homo sapien
ctcttcatgctctcacaagctgttctttttctc

SEQ ID NO: 874084 - DNA, 33 bp, Homo sapien
ctcttcatgctctcaccagctgttctttttctc

SEQ ID NO: 874085 - DNA, 33 bp, Homo sapien
ctgctgcctagcctggaattttatttctgtgat

SEQ ID NO: 874086 - DNA, 33 bp, Homo sapien
ctgctgcctagcctgggattttatttctgtgat

SEQ ID NO: 874087 - DNA, 33 bp, Homo sapien
gctggaggctgaataacctctgactccaaatta

SEQ ID NO: 874088 - DNA, 33 bp, Homo sapien
gctggaggctgaataagctctgactccaaatta

SEQ ID NO: 874089 - DNA, 33 bp, Homo sapien
tgtggtccatcaatgactaaaacatccttatgt

SEQ ID NO: 874090 - DNA, 33 bp, Homo sapien
tgtggtccatcaatgagtaaaacatccttatgt

SEQ ID NO: 874091 - DNA, 33 bp, Homo sapien
tttccctccaatcccccgcttccatgctactac

SEQ ID NO: 874092 - DNA, 33 bp, Homo sapien
tttccctccaatcccctgcttccatgctactac

SEQ ID NO: 874093 - DNA, 33 bp, Homo sapien
aagtatttaacagctacggtttgttaacattcc

SEQ ID NO: 874094 - DNA, 33 bp, Homo sapien
aagtatttaacagctatggtttgttaacattcc

SEQ ID NO: 874095 - DNA, 33 bp, Homo sapien
ctctgtcagacgaagaagaatttgagattcagg

SEQ ID NO: 874096 - DNA, 33 bp, Homo sapien
ctctgtcagacgaagaggaatttgagattcagg

SEQ ID NO: 874097 - DNA, 33 bp, Homo sapien
caaatattgctaattccaatcattttcccccac

SEQ ID NO: 874098 - DNA, 33 bp, Homo sapien
caaatattgctaattctaatcattttcccccac

SEQ ID NO: 874099 - DNA, 33 bp, Homo sapien
gccttctatgctaagaccttgaaatgctggagc

SEQ ID NO: 874100 - DNA, 33 bp, Homo sapien
gccttctatgctaagatcttgaaatgctggagc

SEQ ID NO: 874101 - DNA, 33 bp, Homo sapien
gctattataattttgaaaatgcataactgttga

SEQ ID NO: 874102 - DNA, 33 bp, Homo sapien
gctattataattttgacaatgcataactgttga

SEQ ID NO: 874103 - DNA, 33 bp, Homo sapien
gtgtggcctcatcacaacaaagagaaatgccgt

SEQ ID NO: 874104 - DNA, 33 bp, Homo sapien
gtgtggcctcatcacagcaaagagaaatgccgt

SEQ ID NO: 874105 - DNA, 33 bp, Homo sapien
gtgatcgttttacctaccatcttgaatttacag

SEQ ID NO: 874106 - DNA, 33 bp, Homo sapien
gtgatcgttttacctatcatcttgaatttacag

SEQ ID NO: 874107 - DNA, 33 bp, Homo sapien
tcttgccgggaactaactgttctggtagtaaaa

SEQ ID NO: 874108 - DNA, 33 bp, Homo sapien
tcttgccgggaactaagtgttctggtagtaaaa

SEQ ID NO: 874109 - DNA, 33 bp, Homo sapien
agatatatgcatcataacaagggcaaagcaatc

SEQ ID NO: 874110 - DNA, 33 bp, Homo sapien
agatatatgcatcataccaagggcaaagcaatc

SEQ ID NO: 874111 - DNA, 33 bp, Homo sapien
taatcacaaaagttctcacataatcgtgcaata

SEQ ID NO: 874112 - DNA, 33 bp, Homo sapien
taatcacaaaagttctgacataatcgtgcaata

SEQ ID NO: 874113 - DNA, 33 bp, Homo sapien
gcaggacgttatcgaaagccatgacgataccat

SEQ ID NO: 874114 - DNA, 33 bp, Homo sapien
gcaggacgttatcgaacgccatgacgataccat

SEQ ID NO: 874115 - DNA, 33 bp, Homo sapien
gttatttatgatagcaacaatgaaacaccaata

SEQ ID NO: 874116 - DNA, 33 bp, Homo sapien
gttatttatgatagcagcaatgaaacaccaata

SEQ ID NO: 874117 - DNA, 33 bp, Homo sapien
atgtcttatgacaaccagatccaaggccatggg

SEQ ID NO: 874118 - DNA, 33 bp, Homo sapien
atgtcttatgacaaccggatccaaggccatggg

SEQ ID NO: 874119 - DNA, 33 bp, Homo sapien
catctatggaacaagacgatgaaaatgaggcta

SEQ ID NO: 874120 - DNA, 33 bp, Homo sapien
catctatggaacaagatgatgaaaatgaggcta

SEQ ID NO: 874121 - DNA, 33 bp, Homo sapien
tagtgtgtgtgttacacgagtagatacttgtgt

SEQ ID NO: 874122 - DNA, 33 bp, Homo sapien
tagtgtgtgtgttacatgagtagatacttgtgt

SEQ ID NO: 874123 - DNA, 33 bp, Homo sapien
acagtttctgtactaaactaaccaagactttct

SEQ ID NO: 874124 - DNA, 33 bp, Homo sapien
acagtttctgtactaatctaaccaagactttct

SEQ ID NO: 874125 - DNA, 33 bp, Homo sapien
ttcttaagctctagaactatcctggtctttatc

SEQ ID NO: 874126 - DNA, 33 bp, Homo sapien
ttcttaagctctagaattatcctggtctttatc

SEQ ID NO: 874127 - DNA, 33 bp, Homo sapien
agacctggaatcaatcaaagggagtgtctgggt

SEQ ID NO: 874128 - DNA, 33 bp, Homo sapien
agacctggaatcaatcgaagggagtgtctgggt

SEQ ID NO: 874129 - DNA, 33 bp, Homo sapien
ccaaaaaatcagacaaatagcctttacccagtg

SEQ ID NO: 874130 - DNA, 33 bp, Homo sapien
ccaaaaaatcagacaactagcctttacccagtg

SEQ ID NO: 874131 - DNA, 33 bp, Homo sapien
aaacccaaacaaattgcagccagcaaagcacat

SEQ ID NO: 874132 - DNA, 33 bp, Homo sapien
aaacccaaacaaattggagccagcaaagcacat

SEQ ID NO: 874133 - DNA, 33 bp, Homo sapien
ttccttttctgaatttatagtaacgactcaaca

SEQ ID NO: 874134 - DNA, 33 bp, Homo sapien
ttccttttctgaatttttagtaacgactcaaca

SEQ ID NO: 874135 - DNA, 33 bp, Homo sapien
tgattaaataagcacaacaaaattcatatcaaa

SEQ ID NO: 874136 - DNA, 33 bp, Homo sapien
tgattaaataagcacatcaaaattcatatcaaa

SEQ ID NO: 874137 - DNA, 33 bp, Homo sapien
acattattgtgttccgaatgccaagtggaataa

SEQ ID NO: 874138 - DNA, 33 bp, Homo sapien
acattattgtgttccgcatgccaagtggaataa

SEQ ID NO: 874139 - DNA, 33 bp, Homo sapien
cttacacttcgatggaatagaaacttttattaa

SEQ ID NO: 874140 - DNA, 33 bp, Homo sapien
cttacacttcgatggagtagaaacttttattaa

SEQ ID NO: 874141 - DNA, 33 bp, Homo sapien
atgttataacgtgcaacgtctcctgccctggga

SEQ ID NO: 874142 - DNA, 33 bp, Homo sapien
atgttataacgtgcaatgtctcctgccctggga

SEQ ID NO: 874143 - DNA, 33 bp, Homo sapien
ggaaagctgtataagaaacagtggttattctgg

SEQ ID NO: 874144 - DNA, 33 bp, Homo sapien
ggaaagctgtataagacacagtggttattctgg

SEQ ID NO: 874145 - DNA, 33 bp, Homo sapien
atggtgtttttctgtacgtggcatatgtttcaa

SEQ ID NO: 874146 - DNA, 33 bp, Homo sapien
atggtgtttttctgtatgtggcatatgtttcaa

SEQ ID NO: 874147 - DNA, 33 bp, Homo sapien
acgtgagccttttaaacaacttgagtgaatagg

SEQ ID NO: 874148 - DNA, 33 bp, Homo sapien
acgtgagccttttaaataacttgagtgaatagg

SEQ ID NO: 874149 - DNA, 33 bp, Homo sapien
ttcttttgtaatgtagcagatcttttgtcaaat

SEQ ID NO: 874150 - DNA, 33 bp, Homo sapien
ttcttttgtaatgtaggagatcttttgtcaaat

SEQ ID NO: 874151 - DNA, 33 bp, Homo sapien
agtgtcatcgtttctaccttagcagaggatgtc

SEQ ID NO: 874152 - DNA, 33 bp, Homo sapien
agtgtcatcgtttctagcttagcagaggatgtc

SEQ ID NO: 874153 - DNA, 33 bp, Homo sapien
gagctttctagcagaacgtgtttcacctcaacg

SEQ ID NO: 874154 - DNA, 33 bp, Homo sapien
gagctttctagcagaatgtgtttcacctcaacg

SEQ ID NO: 874155 - DNA, 33 bp, Homo sapien
atgactcaatccagtcccgcttctacagtattt

SEQ ID NO: 874156 - DNA, 33 bp, Homo sapien
atgactcaatccagtctcgcttctacagtattt

SEQ ID NO: 874157 - DNA, 33 bp, Homo sapien
aataataataaaaatcccaaatcaagcctttga

SEQ ID NO: 874158 - DNA, 33 bp, Homo sapien
aataataataaaaatctcaaatcaagcctttga

SEQ ID NO: 874159 - DNA, 33 bp, Homo sapien
taactaattatcagtaaccattttgtgctgttt

SEQ ID NO: 874160 - DNA, 33 bp, Homo sapien
taactaattatcagtatccattttgtgctgttt

SEQ ID NO: 874161 - DNA, 33 bp, Homo sapien
gaaaaacaagcacttacatgctggtccctaagc

SEQ ID NO: 874162 - DNA, 33 bp, Homo sapien
gaaaaacaagcacttagatgctggtccctaagc

SEQ ID NO: 874163 - DNA, 33 bp, Homo sapien
caaagacaaggctttccaactaacccaatctga

SEQ ID NO: 874164 - DNA, 33 bp, Homo sapien
caaagacaaggctttctaactaacccaatctga

SEQ ID NO: 874165 - DNA, 33 bp, Homo sapien
agtctgttggatattaagcaaagttcagtgatt

SEQ ID NO: 874166 - DNA, 33 bp, Homo sapien
agtctgttggatattaggcaaagttcagtgatt

SEQ ID NO: 874167 - DNA, 33 bp, Homo sapien
ctagctggtacatgaaatatagattacaataca

SEQ ID NO: 874168 - DNA, 33 bp, Homo sapien
ctagctggtacatgaactatagattacaataca

SEQ ID NO: 874169 - DNA, 33 bp, Homo sapien
attttaaattagtgccaaacaaagaggtaatca

SEQ ID NO: 874170 - DNA, 33 bp, Homo sapien
attttaaattagtgcccaacaaagaggtaatca

SEQ ID NO: 874171 - DNA, 33 bp, Homo sapien
atacggtccacttgacaacaggccatgaagata

SEQ ID NO: 874172 - DNA, 33 bp, Homo sapien
atacggtccacttgacgacaggccatgaagata

SEQ ID NO: 874173 - DNA, 33 bp, Homo sapien
agatatacaactgggcaacaaacatatgaagaa

SEQ ID NO: 874174 - DNA, 33 bp, Homo sapien
agatatacaactgggcgacaaacatatgaagaa

SEQ ID NO: 874175 - DNA, 33 bp, Homo sapien
ctcacacttactcacactatttccttttatatc

SEQ ID NO: 874176 - DNA, 33 bp, Homo sapien
ctcacacttactcacagtatttccttttatatc

SEQ ID NO: 874177 - DNA, 33 bp, Homo sapien
aataaatatagccccaagtcattgaagcaaaat

SEQ ID NO: 874178 - DNA, 33 bp, Homo sapien
aataaatatagccccaggtcattgaagcaaaat

SEQ ID NO: 874179 - DNA, 33 bp, Homo sapien
ttttccttccttgatcaccttctaacaatggcc

SEQ ID NO: 874180 - DNA, 33 bp, Homo sapien
ttttccttccttgatccccttctaacaatggcc

SEQ ID NO: 874181 - DNA, 33 bp, Homo sapien
ccttctcttatgcctaacgtatttttatatatt

SEQ ID NO: 874182 - DNA, 33 bp, Homo sapien
ccttctcttatgcctagcgtatttttatatatt

SEQ ID NO: 874183 - DNA, 33 bp, Homo sapien
acacctcagagcatgcaacttctaaaacatgat

SEQ ID NO: 874184 - DNA, 33 bp, Homo sapien
acacctcagagcatgcgacttctaaaacatgat

SEQ ID NO: 874185 - DNA, 33 bp, Homo sapien
aggatttatgttaatgaagaaatgccaattaag

SEQ ID NO: 874186 - DNA, 33 bp, Homo sapien
aggatttatgttaatggagaaatgccaattaag

SEQ ID NO: 874187 - DNA, 33 bp, Homo sapien
tcactattcagcacagaacttgcaatccaagag

SEQ ID NO: 874188 - DNA, 33 bp, Homo sapien
tcactattcagcacaggacttgcaatccaagag

SEQ ID NO: 874189 - DNA, 33 bp, Homo sapien
taaactgcatataataaaaagcatgaaaggaaa

SEQ ID NO: 874190 - DNA, 33 bp, Homo sapien
taaactgcatataatagaaagcatgaaaggaaa

SEQ ID NO: 874191 - DNA, 33 bp, Homo sapien
gaattgttgagtagaaaaattgctcagctagtg

SEQ ID NO: 874192 - DNA, 33 bp, Homo sapien
gaattgttgagtagaagaattgctcagctagtg

SEQ ID NO: 874193 - DNA, 33 bp, Homo sapien
cagtaaataaacggtcaagctcagatgtgatct

SEQ ID NO: 874194 - DNA, 33 bp, Homo sapien
cagtaaataaacggtcgagctcagatgtgatct

SEQ ID NO: 874195 - DNA, 33 bp, Homo sapien
ttacaactattacaaacttcaattcctttcagt

SEQ ID NO: 874196 - DNA, 33 bp, Homo sapien
ttacaactattacaaatttcaattcctttcagt

SEQ ID NO: 874197 - DNA, 33 bp, Homo sapien
ttgttgctgttacacacactttgttagctttca

SEQ ID NO: 874198 - DNA, 33 bp, Homo sapien
ttgttgctgttacacatactttgttagctttca

SEQ ID NO: 874199 - DNA, 33 bp, Homo sapien
ctactagaaagacagactctccagtacattttg

SEQ ID NO: 874200 - DNA, 33 bp, Homo sapien
ctactagaaagacagattctccagtacattttg

SEQ ID NO: 874201 - DNA, 33 bp, Homo sapien
gtttcatggaaaaatacgagaccactctaatga

SEQ ID NO: 874202 - DNA, 33 bp, Homo sapien
gtttcatggaaaaatatgagaccactctaatga

SEQ ID NO: 874203 - DNA, 33 bp, Homo sapien
gtatacaggaattacacatcagcatcctggtat

SEQ ID NO: 874204 - DNA, 33 bp, Homo sapien
gtatacaggaattacatatcagcatcctggtat

SEQ ID NO: 874205 - DNA, 33 bp, Homo sapien
gcagtgcatttaataaaccatgtgacagctgtg

SEQ ID NO: 874206 - DNA, 33 bp, Homo sapien
gcagtgcatttaataagccatgtgacagctgtg

SEQ ID NO: 874207 - DNA, 33 bp, Homo sapien
gaaaaatgatatgttaaggttgaaaaatctgct

SEQ ID NO: 874208 - DNA, 33 bp, Homo sapien
gaaaaatgatatgttagggttgaaaaatctgct

SEQ ID NO: 874209 - DNA, 33 bp, Homo sapien
atatgacttcatacagcaagaaaagtctagtga

SEQ ID NO: 874210 - DNA, 33 bp, Homo sapien
atatgacttcatacaggaagaaaagtctagtga

SEQ ID NO: 874211 - DNA, 33 bp, Homo sapien
ctgatgttggtgaccactgcaataaaaaccaaa

SEQ ID NO: 874212 - DNA, 33 bp, Homo sapien
ctgatgttggtgaccagtgcaataaaaaccaaa

SEQ ID NO: 874213 - DNA, 33 bp, Homo sapien
aatctgcttattctggacatttcatataaacaa

SEQ ID NO: 874214 - DNA, 33 bp, Homo sapien
aatctgcttattctggtcatttcatataaacaa

SEQ ID NO: 874215 - DNA, 33 bp, Homo sapien
ttgaaattgtatcagaaagttggtgaattccta

SEQ ID NO: 874216 - DNA, 33 bp, Homo sapien
ttgaaattgtatcagacagttggtgaattccta

SEQ ID NO: 874217 - DNA, 33 bp, Homo sapien
aagactactgaattaaaaatcatctgacttcac

SEQ ID NO: 874218 - DNA, 33 bp, Homo sapien
aagactactgaattaagaatcatctgacttcac

SEQ ID NO: 874219 - DNA, 33 bp, Homo sapien
tctgcctctcctgacacctggaccatcatctcc

SEQ ID NO: 874220 - DNA, 33 bp, Homo sapien
tctgcctctcctgacagctggaccatcatctcc

SEQ ID NO: 874221 - DNA, 33 bp, Homo sapien
ggccaaacaatttaaggcatcatagattaggat

SEQ ID NO: 874222 - DNA, 33 bp, Homo sapien
ggccaaacaatttaagtcatcatagattaggat

SEQ ID NO: 874223 - DNA, 33 bp, Homo sapien
tgggcccagttaggaacaacggagaagttagaa

SEQ ID NO: 874224 - DNA, 33 bp, Homo sapien
tgggcccagttaggaagaacggagaagttagaa

SEQ ID NO: 874225 - DNA, 33 bp, Homo sapien
cttactttgctgagtactaattctgaccaaggg

SEQ ID NO: 874226 - DNA, 33 bp, Homo sapien
cttactttgctgagtagtaattctgaccaaggg

SEQ ID NO: 874227 - DNA, 33 bp, Homo sapien
caaaatagaataaagacgtatactgtgccttca

SEQ ID NO: 874228 - DNA, 33 bp, Homo sapien
caaaatagaataaagatgtatactgtgccttca

SEQ ID NO: 874229 - DNA, 33 bp, Homo sapien
accagaggttaaagaacgattataaccaatagt

SEQ ID NO: 874230 - DNA, 33 bp, Homo sapien
accagaggttaaagaaggattataaccaatagt

SEQ ID NO: 874231 - DNA, 33 bp, Homo sapien
gactcatcgtacattgcagcattccttataata

SEQ ID NO: 874232 - DNA, 33 bp, Homo sapien
gactcatcgtacattgtagcattccttataata

SEQ ID NO: 874233 - DNA, 33 bp, Homo sapien
gagatgctgctattaaactgaaactctgtctct

SEQ ID NO: 874234 - DNA, 33 bp, Homo sapien
gagatgctgctattaagctgaaactctgtctct

SEQ ID NO: 874235 - DNA, 33 bp, Homo sapien
ttgtcctccttggttcaaccctctggtctttat

SEQ ID NO: 874236 - DNA, 33 bp, Homo sapien
ttgtcctccttggttcgaccctctggtctttat

SEQ ID NO: 874237 - DNA, 33 bp, Homo sapien
cactcaaactacagaactggcccagatgttacc

SEQ ID NO: 874238 - DNA, 33 bp, Homo sapien
cactcaaactacagaattggcccagatgttacc

SEQ ID NO: 874239 - DNA, 33 bp, Homo sapien
ttagagctcccactagaattcctgctcaagatc

SEQ ID NO: 874240 - DNA, 33 bp, Homo sapien
ttagagctcccactaggattcctgctcaagatc

SEQ ID NO: 874241 - DNA, 33 bp, Homo sapien
ctataatagtttagaaattataggcttagcaag

SEQ ID NO: 874242 - DNA, 33 bp, Homo sapien
ctataatagtttagaatttataggcttagcaag

SEQ ID NO: 874243 - DNA, 33 bp, Homo sapien
ctaacacctagaacagaaaaacataagaactga

SEQ ID NO: 874244 - DNA, 33 bp, Homo sapien
ctaacacctagaacaggaaaacataagaactga

SEQ ID NO: 874245 - DNA, 33 bp, Homo sapien
ctttaaaaatgtcaaacgctgaggactccaatg

SEQ ID NO: 874246 - DNA, 33 bp, Homo sapien
ctttaaaaatgtcaaatgctgaggactccaatg

SEQ ID NO: 874247 - DNA, 33 bp, Homo sapien
catgcaaccacattcacgacttggacccttcaa

SEQ ID NO: 874248 - DNA, 33 bp, Homo sapien
catgcaaccacattcatgacttggacccttcaa

SEQ ID NO: 874249 - DNA, 33 bp, Homo sapien
gtcgtcctgtgcccagcaaaggatagttttcac

SEQ ID NO: 874250 - DNA, 33 bp, Homo sapien
gtcgtcctgtgcccaggaaaggatagttttcac

SEQ ID NO: 874251 - DNA, 33 bp, Homo sapien
gtgtctccccagaattaaagtgttggagccctg

SEQ ID NO: 874252 - DNA, 33 bp, Homo sapien
gtgtctccccagaattcaagtgttggagccctg

SEQ ID NO: 874253 - DNA, 33 bp, Homo sapien
ctgactcctaggacctcaggatgtgattgtatt

SEQ ID NO: 874254 - DNA, 33 bp, Homo sapien
ctgactcctaggacctgaggatgtgattgtatt

SEQ ID NO: 874255 - DNA, 33 bp, Homo sapien
tctggtttgccctggaaccttaggctagaggtc

SEQ ID NO: 874256 - DNA, 33 bp, Homo sapien
tctggtttgccctggagccttaggctagaggtc

SEQ ID NO: 874257 - DNA, 33 bp, Homo sapien
ctttattttctgctgaagattccttgtaatgaa

SEQ ID NO: 874258 - DNA, 33 bp, Homo sapien
ctttattttctgctgaggattccttgtaatgaa

SEQ ID NO: 874259 - DNA, 33 bp, Homo sapien
gagagggagaacagcccgagtcatgaaatcaac

SEQ ID NO: 874260 - DNA, 33 bp, Homo sapien
gagagggagaacagccggagtcatgaaatcaac

SEQ ID NO: 874261 - DNA, 33 bp, Homo sapien
ctctcttacttccccacgccaattctatgtaga

SEQ ID NO: 874262 - DNA, 33 bp, Homo sapien
ctctcttacttccccatgccaattctatgtaga

SEQ ID NO: 874263 - DNA, 33 bp, Homo sapien
tttcaaacatcatcataaagtgcagaaaaaggg

SEQ ID NO: 874264 - DNA, 33 bp, Homo sapien
tttcaaacatcatcatgaagtgcagaaaaaggg

SEQ ID NO: 874265 - DNA, 33 bp, Homo sapien
ccattgaacttataatcacagcagtagccctta

SEQ ID NO: 874266 - DNA, 33 bp, Homo sapien
ccattgaacttataattacagcagtagccctta

SEQ ID NO: 874267 - DNA, 33 bp, Homo sapien
gtcagagataaggagacaccacaatacatgaaa

SEQ ID NO: 874268 - DNA, 33 bp, Homo sapien
gtcagagataaggagataccacaatacatgaaa

SEQ ID NO: 874269 - DNA, 33 bp, Homo sapien
tgcaattagaggatcaagtcttactcagccaag

SEQ ID NO: 874270 - DNA, 33 bp, Homo sapien
tgcaattagaggatcaggtcttactcagccaag

SEQ ID NO: 874271 - DNA, 33 bp, Homo sapien
cacatataatgactgacgaagcagggaaatgaa

SEQ ID NO: 874272 - DNA, 33 bp, Homo sapien
cacatataatgactgatgaagcagggaaatgaa

SEQ ID NO: 874273 - DNA, 33 bp, Homo sapien
agagattctccttgtgaacataatgaaataagc

SEQ ID NO: 874274 - DNA, 33 bp, Homo sapien
agagattctccttgtggacataatgaaataagc

SEQ ID NO: 874275 - DNA, 33 bp, Homo sapien
aagttgtgcaagaaaccgtgtacagaatgagac

SEQ ID NO: 874276 - DNA, 33 bp, Homo sapien
aagttgtgcaagaaactgtgtacagaatgagac

SEQ ID NO: 874277 - DNA, 33 bp, Homo sapien
taagctacttttcacacccttgtttgtcatcca

SEQ ID NO: 874278 - DNA, 33 bp, Homo sapien
taagctacttttcacagccttgtttgtcatcca

SEQ ID NO: 874279 - DNA, 33 bp, Homo sapien
ttctaacaactaatgacgttaagctacttttca

SEQ ID NO: 874280 - DNA, 33 bp, Homo sapien
ttctaacaactaatgatgttaagctacttttca

SEQ ID NO: 874281 - DNA, 33 bp, Homo sapien
cctatgaaatgggaagaagaaactttaccaaaa

SEQ ID NO: 874282 - DNA, 33 bp, Homo sapien
cctatgaaatgggaaggagaaactttaccaaaa

SEQ ID NO: 874283 - DNA, 33 bp, Homo sapien
cgcctggccacagagacctttttgtagattgat

SEQ ID NO: 874284 - DNA, 33 bp, Homo sapien
cgcctggccacagagagctttttgtagattgat

SEQ ID NO: 874285 - DNA, 33 bp, Homo sapien
ttaccttgaatttcccaaataaatgaactccaa

SEQ ID NO: 874286 - DNA, 33 bp, Homo sapien
ttaccttgaatttcccgaataaatgaactccaa

SEQ ID NO: 874287 - DNA, 33 bp, Homo sapien
cacattaccttccaaaactacactttccctgga

SEQ ID NO: 874288 - DNA, 33 bp, Homo sapien
cacattaccttccaaagctacactttccctgga

SEQ ID NO: 874289 - DNA, 33 bp, Homo sapien
tacagggaaacagagacgtcaaataatttaaga

SEQ ID NO: 874290 - DNA, 33 bp, Homo sapien
tacagggaaacagagatgtcaaataatttaaga

SEQ ID NO: 874291 - DNA, 33 bp, Homo sapien
cttggtggacagcatacaaacattgacagattt

SEQ ID NO: 874292 - DNA, 33 bp, Homo sapien
cttggtggacagcatagaaacattgacagattt

SEQ ID NO: 874293 - DNA, 33 bp, Homo sapien
agaaagaaataaaatgaaatgtgaaactcaaaa

SEQ ID NO: 874294 - DNA, 33 bp, Homo sapien
agaaagaaataaaatggaatgtgaaactcaaaa

SEQ ID NO: 874295 - DNA, 33 bp, Homo sapien
atctgctcaatgtaacaagactgctgctttctt

SEQ ID NO: 874296 - DNA, 33 bp, Homo sapien
atctgctcaatgtaacgagactgctgctttctt

SEQ ID NO: 874297 - DNA, 33 bp, Homo sapien
cactaagtaaagaaagcagtaggagagttgtgc

SEQ ID NO: 874298 - DNA, 33 bp, Homo sapien
cactaagtaaagaaagtagtaggagagttgtgc

SEQ ID NO: 874299 - DNA, 33 bp, Homo sapien
gccagataaaagacagaatgccaagttaaattt

SEQ ID NO: 874300 - DNA, 33 bp, Homo sapien
gccagataaaagacaggatgccaagttaaattt

SEQ ID NO: 874301 - DNA, 33 bp, Homo sapien
agaggactctgtgaatcaagataattgcagtca

SEQ ID NO: 874302 - DNA, 33 bp, Homo sapien
agaggactctgtgaattaagataattgcagtca

SEQ ID NO: 874303 - DNA, 33 bp, Homo sapien
atttagaagtgactgcaaagtgtcatttcaacc

SEQ ID NO: 874304 - DNA, 33 bp, Homo sapien
atttagaagtgactgcgaagtgtcatttcaacc

SEQ ID NO: 874305 - DNA, 33 bp, Homo sapien
tgcttgctttttgacaaagttattagcaagatg

SEQ ID NO: 874306 - DNA, 33 bp, Homo sapien
tgcttgctttttgacatagttattagcaagatg

SEQ ID NO: 874307 - DNA, 33 bp, Homo sapien
tgaaatttgtcattaaagcttagagaaaacaaa

SEQ ID NO: 874308 - DNA, 33 bp, Homo sapien
tgaaatttgtcattaatgcttagagaaaacaaa

SEQ ID NO: 874309 - DNA, 33 bp, Homo sapien
agaggcttccaacagaaggatgagcagttagtg

SEQ ID NO: 874310 - DNA, 33 bp, Homo sapien
agaggcttccaacagagggatgagcagttagtg

SEQ ID NO: 874311 - DNA, 33 bp, Homo sapien
ctcctcagaactccaaaaggcttagcaaacaaa

SEQ ID NO: 874312 - DNA, 33 bp, Homo sapien
ctcctcagaactccaagaggcttagcaaacaaa

SEQ ID NO: 874313 - DNA, 33 bp, Homo sapien
agacaatcactttctcactgtatctccacatag

SEQ ID NO: 874314 - DNA, 33 bp, Homo sapien
agacaatcactttctcgctgtatctccacatag

SEQ ID NO: 874315 - DNA, 33 bp, Homo sapien
gtaacttgatccaagcacaggaaagagtcaaag

SEQ ID NO: 874316 - DNA, 33 bp, Homo sapien
gtaacttgatccaagctcaggaaagagtcaaag

SEQ ID NO: 874317 - DNA, 33 bp, Homo sapien
ggccctgcctcacttcagaactatttcttcact

SEQ ID NO: 874318 - DNA, 33 bp, Homo sapien
ggccctgcctcacttcggaactatttcttcact

SEQ ID NO: 874319 - DNA, 33 bp, Homo sapien
ttgtgtaaagctctaacctacagtggcacaact

SEQ ID NO: 874320 - DNA, 33 bp, Homo sapien
ttgtgtaaagctctaatctacagtggcacaact

SEQ ID NO: 874321 - DNA, 33 bp, Homo sapien
aaatccaaccagatccacagggaagggatgtgg

SEQ ID NO: 874322 - DNA, 33 bp, Homo sapien
aaatccaaccagatccgcagggaagggatgtgg

SEQ ID NO: 874323 - DNA, 33 bp, Homo sapien
gatttctgtaattgtaagaagaactctaaagca

SEQ ID NO: 874324 - DNA, 33 bp, Homo sapien
gatttctgtaattgtaggaagaactctaaagca

SEQ ID NO: 874325 - DNA, 33 bp, Homo sapien
aatggctggaatagcaagacgctggagtggaga

SEQ ID NO: 874326 - DNA, 33 bp, Homo sapien
aatggctggaatagcacgacgctggagtggaga

SEQ ID NO: 874327 - DNA, 33 bp, Homo sapien
ggaaggcttgaggtcaccttctaagcagcaggc

SEQ ID NO: 874328 - DNA, 33 bp, Homo sapien
ggaaggcttgaggtcatcttctaagcagcaggc

SEQ ID NO: 874329 - DNA, 33 bp, Homo sapien
gaaacaattcattaaaatgtgcaatgttacctc

SEQ ID NO: 874330 - DNA, 33 bp, Homo sapien
gaaacaattcattaaactgtgcaatgttacctc

SEQ ID NO: 874331 - DNA, 33 bp, Homo sapien
agctggcaatatggccacaatttaaaaactgac

SEQ ID NO: 874332 - DNA, 33 bp, Homo sapien
agctggcaatatggccgcaatttaaaaactgac

SEQ ID NO: 874333 - DNA, 33 bp, Homo sapien
attttgagttgcttgcaaaacttgaggtttacc

SEQ ID NO: 874334 - DNA, 33 bp, Homo sapien
attttgagttgcttgcgaaacttgaggtttacc

SEQ ID NO: 874335 - DNA, 33 bp, Homo sapien
attgttatttgtgtcacagttttataagggaaa

SEQ ID NO: 874336 - DNA, 33 bp, Homo sapien
attgttatttgtgtcatagttttataagggaaa

SEQ ID NO: 874337 - DNA, 33 bp, Homo sapien
tcctgaatgcctacaacgtgttaactgatgttc

SEQ ID NO: 874338 - DNA, 33 bp, Homo sapien
tcctgaatgcctacaatgtgttaactgatgttc

SEQ ID NO: 874339 - DNA, 33 bp, Homo sapien
gcatcctctattccagccaccgaaaactgctcc

SEQ ID NO: 874340 - DNA, 33 bp, Homo sapien
gcatcctctattccagtcaccgaaaactgctcc

SEQ ID NO: 874341 - DNA, 33 bp, Homo sapien
ctcatttcaaaggataaaaggaattggtagcaa

SEQ ID NO: 874342 - DNA, 33 bp, Homo sapien
ctcatttcaaaggatagaaggaattggtagcaa

SEQ ID NO: 874343 - DNA, 33 bp, Homo sapien
atgccacacatatgacacacacacaaagatacc

SEQ ID NO: 874344 - DNA, 33 bp, Homo sapien
atgccacacatatgactcacacacaaagatacc

SEQ ID NO: 874345 - DNA, 33 bp, Homo sapien
cacgggttgaaaaagcaatgtaggcttcaaaga

SEQ ID NO: 874346 - DNA, 33 bp, Homo sapien
cacgggttgaaaaagctatgtaggcttcaaaga

SEQ ID NO: 874347 - DNA, 33 bp, Homo sapien
caagataaataaagccaaagcagaatcaaagca

SEQ ID NO: 874348 - DNA, 33 bp, Homo sapien
caagataaataaagccgaagcagaatcaaagca

SEQ ID NO: 874349 - DNA, 33 bp, Homo sapien
tcttgcctaactctaaatcctacaactgtgtca

SEQ ID NO: 874350 - DNA, 33 bp, Homo sapien
tcttgcctaactctaagtcctacaactgtgtca

SEQ ID NO: 874351 - DNA, 33 bp, Homo sapien
gtaaacataaccccaacaccaaaagagagccac

SEQ ID NO: 874352 - DNA, 33 bp, Homo sapien
gtaaacataaccccaagaccaaaagagagccac

SEQ ID NO: 874353 - DNA, 33 bp, Homo sapien
aagtgcatttagatagcaatatgtcctggaaac

SEQ ID NO: 874354 - DNA, 33 bp, Homo sapien
aagtgcatttagatagtaatatgtcctggaaac

SEQ ID NO: 874355 - DNA, 33 bp, Homo sapien
tcaaagaatgaatgaacgctttgtggaaatgat

SEQ ID NO: 874356 - DNA, 33 bp, Homo sapien
tcaaagaatgaatgaatgctttgtggaaatgat

SEQ ID NO: 874357 - DNA, 33 bp, Homo sapien
tttggtggtggttaaacggaaactatgtgtgtt

SEQ ID NO: 874358 - DNA, 33 bp, Homo sapien
tttggtggtggttaaatggaaactatgtgtgtt

SEQ ID NO: 874359 - DNA, 33 bp, Homo sapien
gtgactagaccataaccgatatcattactaaat

SEQ ID NO: 874360 - DNA, 33 bp, Homo sapien
gtgactagaccataactgatatcattactaaat

SEQ ID NO: 874361 - DNA, 33 bp, Homo sapien
gatgatcaagcctaccgcatacctagactatgg

SEQ ID NO: 874362 - DNA, 33 bp, Homo sapien
gatgatcaagcctacctcatacctagactatgg

SEQ ID NO: 874363 - DNA, 33 bp, Homo sapien
cacaaaagtctagaaaaatatggagtgagaaat

SEQ ID NO: 874364 - DNA, 33 bp, Homo sapien
cacaaaagtctagaaagatatggagtgagaaat

SEQ ID NO: 874365 - DNA, 33 bp, Homo sapien
attccaccgatgactacattctgtggatgtgcc

SEQ ID NO: 874366 - DNA, 33 bp, Homo sapien
attccaccgatgactatattctgtggatgtgcc

SEQ ID NO: 874367 - DNA, 33 bp, Homo sapien
cctggtaaggaattgcaacattttattgaatta

SEQ ID NO: 874368 - DNA, 33 bp, Homo sapien
cctggtaaggaattgcgacattttattgaatta

SEQ ID NO: 874369 - DNA, 33 bp, Homo sapien
gtgggtggacctttgacataaacaccaaatagt

SEQ ID NO: 874370 - DNA, 33 bp, Homo sapien
gtgggtggacctttgatataaacaccaaatagt

SEQ ID NO: 874371 - DNA, 33 bp, Homo sapien
agcagctggggagcaaatctttcattcctgaaa

SEQ ID NO: 874372 - DNA, 33 bp, Homo sapien
agcagctggggagcaagtctttcattcctgaaa

SEQ ID NO: 874373 - DNA, 33 bp, Homo sapien
cttcaagctggaaagaaaggctattaattatta

SEQ ID NO: 874374 - DNA, 33 bp, Homo sapien
cttcaagctggaaagagaggctattaattatta

SEQ ID NO: 874375 - DNA, 33 bp, Homo sapien
tgtcataaaatgggaaatgataggatgtagaaa

SEQ ID NO: 874376 - DNA, 33 bp, Homo sapien
tgtcataaaatgggaagtgataggatgtagaaa

SEQ ID NO: 874377 - DNA, 33 bp, Homo sapien
gaaaaaggtatgtacccaaagatgttccatgac

SEQ ID NO: 874378 - DNA, 33 bp, Homo sapien
gaaaaaggtatgtacctaaagatgttccatgac

SEQ ID NO: 874379 - DNA, 33 bp, Homo sapien
tccaaagtcataaagagagtaaccggtcaagta

SEQ ID NO: 874380 - DNA, 33 bp, Homo sapien
tccaaagtcataaagatagtaaccggtcaagta

SEQ ID NO: 874381 - DNA, 33 bp, Homo sapien
cagcaaagtgctaaaaaccaaaggattatgtaa

SEQ ID NO: 874382 - DNA, 33 bp, Homo sapien
cagcaaagtgctaaaagccaaaggattatgtaa

SEQ ID NO: 874383 - DNA, 33 bp, Homo sapien
gaagtgtggaagtacaagttgaacaaagagtgc

SEQ ID NO: 874384 - DNA, 33 bp, Homo sapien
gaagtgtggaagtacaggttgaacaaagagtgc

SEQ ID NO: 874385 - DNA, 33 bp, Homo sapien
cagcaccatgttcacacattttctcactttcat

SEQ ID NO: 874386 - DNA, 33 bp, Homo sapien
cagcaccatgttcacatattttctcactttcat

SEQ ID NO: 874387 - DNA, 33 bp, Homo sapien
aaatgagcaggtggtacatttagggagaaggtg

SEQ ID NO: 874388 - DNA, 33 bp, Homo sapien
aaatgagcaggtggtagatttagggagaaggtg

SEQ ID NO: 874389 - DNA, 33 bp, Homo sapien
gctgcttgggccaggaataaactttccaaaatc

SEQ ID NO: 874390 - DNA, 33 bp, Homo sapien
gctgcttgggccaggagtaaactttccaaaatc

SEQ ID NO: 874391 - DNA, 33 bp, Homo sapien
caaatggaataagaaaagccctgaattatatct

SEQ ID NO: 874392 - DNA, 33 bp, Homo sapien
caaatggaataagaaaggccctgaattatatct

SEQ ID NO: 874393 - DNA, 33 bp, Homo sapien
caaaatacagataagagaactgagttgatacta

SEQ ID NO: 874394 - DNA, 33 bp, Homo sapien
caaaatacagataagataactgagttgatacta

SEQ ID NO: 874395 - DNA, 33 bp, Homo sapien
tgctgctggttcacgacgataaattccaaaata

SEQ ID NO: 874396 - DNA, 33 bp, Homo sapien
tgctgctggttcacgatgataaattccaaaata

SEQ ID NO: 874397 - DNA, 33 bp, Homo sapien
agacagggtgtatgtacgtaattcttacaggaa

SEQ ID NO: 874398 - DNA, 33 bp, Homo sapien
agacagggtgtatgtatgtaattcttacaggaa

SEQ ID NO: 874399 - DNA, 33 bp, Homo sapien
acagccatggctaaaaagatccgaggtatagct

SEQ ID NO: 874400 - DNA, 33 bp, Homo sapien
acagccatggctaaaaggatccgaggtatagct

SEQ ID NO: 874401 - DNA, 33 bp, Homo sapien
tatgcctggacatccaatcattttcatacatcc

SEQ ID NO: 874402 - DNA, 33 bp, Homo sapien
tatgcctggacatccagtcattttcatacatcc

SEQ ID NO: 874403 - DNA, 33 bp, Homo sapien
actctgaacccaacgccattttatcacagccat

SEQ ID NO: 874404 - DNA, 33 bp, Homo sapien
actctgaacccaacgctattttatcacagccat

SEQ ID NO: 874405 - DNA, 33 bp, Homo sapien
tcctatgggcatcaaactagacctccccatcta

SEQ ID NO: 874406 - DNA, 33 bp, Homo sapien
tcctatgggcatcaaattagacctccccatcta

SEQ ID NO: 874407 - DNA, 33 bp, Homo sapien
tatacttcctcataaaaattacatgtagagaaa

SEQ ID NO: 874408 - DNA, 33 bp, Homo sapien
tatacttcctcataaatattacatgtagagaaa

SEQ ID NO: 874409 - DNA, 33 bp, Homo sapien
tgtgattatcacaagaaaaagatctcagacaga

SEQ ID NO: 874410 - DNA, 33 bp, Homo sapien
tgtgattatcacaagacaaagatctcagacaga

SEQ ID NO: 874411 - DNA, 33 bp, Homo sapien
ctacatccaacactaacgatctgtcctctgact

SEQ ID NO: 874412 - DNA, 33 bp, Homo sapien
ctacatccaacactaatgatctgtcctctgact

SEQ ID NO: 874413 - DNA, 33 bp, Homo sapien
cactgaattaaactctcaagttggacactagtc

SEQ ID NO: 874414 - DNA, 33 bp, Homo sapien
cactgaattaaactctgaagttggacactagtc

SEQ ID NO: 874415 - DNA, 33 bp, Homo sapien
cagactctcccgtcctcactttcagctcctgca

SEQ ID NO: 874416 - DNA, 33 bp, Homo sapien
cagactctcccgtcctgactttcagctcctgca

SEQ ID NO: 874417 - DNA, 33 bp, Homo sapien
gtgcagaggatcattcccctgggataacacaac

SEQ ID NO: 874418 - DNA, 33 bp, Homo sapien
gtgcagaggatcattctcctgggataacacaac

SEQ ID NO: 874419 - DNA, 33 bp, Homo sapien
ttcaaaaaatgtgctcaccaaaagacaatatac

SEQ ID NO: 874420 - DNA, 33 bp, Homo sapien
ttcaaaaaatgtgctcgccaaaagacaatatac

SEQ ID NO: 874421 - DNA, 33 bp, Homo sapien
gcttccctcggacatcaaactgtagtcccagat

SEQ ID NO: 874422 - DNA, 33 bp, Homo sapien
gcttccctcggacatcgaactgtagtcccagat

SEQ ID NO: 874423 - DNA, 33 bp, Homo sapien
ctgatttcctcaaggaagtgactggagaatagt

SEQ ID NO: 874424 - DNA, 33 bp, Homo sapien
ctgatttcctcaaggaggtgactggagaatagt

SEQ ID NO: 874425 - DNA, 33 bp, Homo sapien
atacccactctcaacaccccagttggtctcttc

SEQ ID NO: 874426 - DNA, 33 bp, Homo sapien
atacccactctcaacatcccagttggtctcttc

SEQ ID NO: 874427 - DNA, 33 bp, Homo sapien
gcataatgctgagataagttttaaacattttta

SEQ ID NO: 874428 - DNA, 33 bp, Homo sapien
gcataatgctgagatatgttttaaacattttta

SEQ ID NO: 874429 - DNA, 33 bp, Homo sapien
tccataatatttcagcaatttttacctgaatac

SEQ ID NO: 874430 - DNA, 33 bp, Homo sapien
tccataatatttcagcgatttttacctgaatac

SEQ ID NO: 874431 - DNA, 33 bp, Homo sapien
gactatccatatcaaaaaacaacagcaattttc

SEQ ID NO: 874432 - DNA, 33 bp, Homo sapien
gactatccatatcaaacaacaacagcaattttc

SEQ ID NO: 874433 - DNA, 33 bp, Homo sapien
ggcttcaaccctatgacgttagccaagaaactg

SEQ ID NO: 874434 - DNA, 33 bp, Homo sapien
ggcttcaaccctatgatgttagccaagaaactg

SEQ ID NO: 874435 - DNA, 33 bp, Homo sapien
gcagtaaagataatgacgagtagagaaacctga

SEQ ID NO: 874436 - DNA, 33 bp, Homo sapien
gcagtaaagataatgatgagtagagaaacctga

SEQ ID NO: 874437 - DNA, 33 bp, Homo sapien
agaacatctctgattacattgtggagaataggt

SEQ ID NO: 874438 - DNA, 33 bp, Homo sapien
agaacatctctgattatattgtggagaataggt

SEQ ID NO: 874439 - DNA, 33 bp, Homo sapien
acaccctcatagaaacactctgaataatgttta

SEQ ID NO: 874440 - DNA, 33 bp, Homo sapien
acaccctcatagaaactctctgaataatgttta

SEQ ID NO: 874441 - DNA, 33 bp, Homo sapien
atgaatccattcatacactcttttatcttcata

SEQ ID NO: 874442 - DNA, 33 bp, Homo sapien
atgaatccattcatacgctcttttatcttcata

SEQ ID NO: 874443 - DNA, 33 bp, Homo sapien
aaaaaagaacatttcaaattaagggatggggca

SEQ ID NO: 874444 - DNA, 33 bp, Homo sapien
aaaaaagaacatttcagattaagggatggggca

SEQ ID NO: 874445 - DNA, 33 bp, Homo sapien
ctccgattttgtatcacatcatatacttcattc

SEQ ID NO: 874446 - DNA, 33 bp, Homo sapien
ctccgattttgtatcatatcatatacttcattc

SEQ ID NO: 874447 - DNA, 33 bp, Homo sapien
ttactctccagtgatcaagattagcaatgtgga

SEQ ID NO: 874448 - DNA, 33 bp, Homo sapien
ttactctccagtgatcgagattagcaatgtgga

SEQ ID NO: 874449 - DNA, 33 bp, Homo sapien
tgaagtggctaggataaaggtaggcatattcta

SEQ ID NO: 874450 - DNA, 33 bp, Homo sapien
tgaagtggctaggatataggtaggcatattcta

SEQ ID NO: 874451 - DNA, 33 bp, Homo sapien
ccatgatgccattgtaactgagaagggactacg

SEQ ID NO: 874452 - DNA, 33 bp, Homo sapien
ccatgatgccattgtagctgagaagggactacg

SEQ ID NO: 874453 - DNA, 33 bp, Homo sapien
gcaagtctggaaccaacctgaaattcaagaata

SEQ ID NO: 874454 - DNA, 33 bp, Homo sapien
gcaagtctggaaccaagctgaaattcaagaata

SEQ ID NO: 874455 - DNA, 33 bp, Homo sapien
attaaaggaagggggactaatcaagtcaagcaa

SEQ ID NO: 874456 - DNA, 33 bp, Homo sapien
attaaaggaagggggattaatcaagtcaagcaa

SEQ ID NO: 874457 - DNA, 33 bp, Homo sapien
caggtcatggcttcaacttgaaactttggtagg

SEQ ID NO: 874458 - DNA, 33 bp, Homo sapien
caggtcatggcttcaatttgaaactttggtagg

SEQ ID NO: 874459 - DNA, 33 bp, Homo sapien
gcaggtgtgatatgcaagatgcaccagaaaagg

SEQ ID NO: 874460 - DNA, 33 bp, Homo sapien
gcaggtgtgatatgcaggatgcaccagaaaagg

SEQ ID NO: 874461 - DNA, 33 bp, Homo sapien
catgctaacaagttccaccataaacaggcacta

SEQ ID NO: 874462 - DNA, 33 bp, Homo sapien
catgctaacaagttcctccataaacaggcacta

SEQ ID NO: 874463 - DNA, 33 bp, Homo sapien
ctctccctgaaaaaaacagtgggctgaatccag

SEQ ID NO: 874464 - DNA, 33 bp, Homo sapien
ctctccctgaaaaaaatagtgggctgaatccag

SEQ ID NO: 874465 - DNA, 33 bp, Homo sapien
tttgtgttagattagccctttgtctatgagttg

SEQ ID NO: 874466 - DNA, 33 bp, Homo sapien
tttgtgttagattagctctttgtctatgagttg

SEQ ID NO: 874467 - DNA, 33 bp, Homo sapien
atgcccctaaaactcactgaagtgttcttaatg

SEQ ID NO: 874468 - DNA, 33 bp, Homo sapien
atgcccctaaaactcattgaagtgttcttaatg

SEQ ID NO: 874469 - DNA, 33 bp, Homo sapien
ttttgtctgctattcaagctctctctggtattt

SEQ ID NO: 874470 - DNA, 33 bp, Homo sapien
ttttgtctgctattcatgctctctctggtattt

SEQ ID NO: 874471 - DNA, 33 bp, Homo sapien
aatttgaaataacctgcaggacatagaaaaact

SEQ ID NO: 874472 - DNA, 33 bp, Homo sapien
aatttgaaataacctgtaggacatagaaaaact

SEQ ID NO: 874473 - DNA, 33 bp, Homo sapien
aaaaacttcctaatgtcaagtgataaccagaga

SEQ ID NO: 874474 - DNA, 33 bp, Homo sapien
aaaaacttcctaatgtgaagtgataaccagaga

SEQ ID NO: 874475 - DNA, 33 bp, Homo sapien
agcttcaactctgagggagtcttacagggaaag

SEQ ID NO: 874476 - DNA, 33 bp, Homo sapien
agcttcaactctgaggtagtcttacagggaaag

SEQ ID NO: 874477 - DNA, 33 bp, Homo sapien
ggaaacagcagcataaagaggaacaagagaact

SEQ ID NO: 874478 - DNA, 33 bp, Homo sapien
ggaaacagcagcataaggaggaacaagagaact

SEQ ID NO: 874479 - DNA, 33 bp, Homo sapien
tggaggtagaggtgaaatcttggcctgcaacta

SEQ ID NO: 874480 - DNA, 33 bp, Homo sapien
tggaggtagaggtgaagtcttggcctgcaacta

SEQ ID NO: 874481 - DNA, 33 bp, Homo sapien
gaggaagcacatgaaacggacaaagccatgcca

SEQ ID NO: 874482 - DNA, 33 bp, Homo sapien
gaggaagcacatgaaatggacaaagccatgcca

SEQ ID NO: 874483 - DNA, 33 bp, Homo sapien
tttaaagtatgcaaataagattaataactaata

SEQ ID NO: 874484 - DNA, 33 bp, Homo sapien
tttaaagtatgcaaatgagattaataactaata

SEQ ID NO: 874485 - DNA, 33 bp, Homo sapien
atgcagtagtgtcacacccgggcggctcaccag

SEQ ID NO: 874486 - DNA, 33 bp, Homo sapien
atgcagtagtgtcacatccgggcggctcaccag

SEQ ID NO: 874487 - DNA, 33 bp, Homo sapien
aagatgaatgtggtcaaaaacactgggatcaga

SEQ ID NO: 874488 - DNA, 33 bp, Homo sapien
aagatgaatgtggtcagaaacactgggatcaga

SEQ ID NO: 874489 - DNA, 33 bp, Homo sapien
ttccaattctttgttgaaatttttcatattttc

SEQ ID NO: 874490 - DNA, 33 bp, Homo sapien
ttccaattctttgttggaatttttcatattttc

SEQ ID NO: 874491 - DNA, 33 bp, Homo sapien
cctatcttctcttgaaagacatttacattgttt

SEQ ID NO: 874492 - DNA, 33 bp, Homo sapien
cctatcttctcttgaaggacatttacattgttt

SEQ ID NO: 874493 - DNA, 33 bp, Homo sapien
aaaatatttgtataagccattcgttgataataa

SEQ ID NO: 874494 - DNA, 33 bp, Homo sapien
aaaatatttgtataagtcattcgttgataataa

SEQ ID NO: 874495 - DNA, 33 bp, Homo sapien
tggaaccaagtgccaaattatggtacaagcagg

SEQ ID NO: 874496 - DNA, 33 bp, Homo sapien
tggaaccaagtgccaagttatggtacaagcagg

SEQ ID NO: 874497 - DNA, 33 bp, Homo sapien
ctttcttgctaaccacaattaagctttctttcc

SEQ ID NO: 874498 - DNA, 33 bp, Homo sapien
ctttcttgctaaccaccattaagctttctttcc

SEQ ID NO: 874499 - DNA, 33 bp, Homo sapien
tttcaatacagcagctaacagacattccttcct

SEQ ID NO: 874500 - DNA, 33 bp, Homo sapien
tttcaatacagcagctgacagacattccttcct

SEQ ID NO: 874501 - DNA, 33 bp, Homo sapien
attaaaaggtgaagtacaggacacaaaggcact

SEQ ID NO: 874502 - DNA, 33 bp, Homo sapien
attaaaaggtgaagtagaggacacaaaggcact

SEQ ID NO: 874503 - DNA, 33 bp, Homo sapien
gaaactcccttactcaatctgaattttatctgg

SEQ ID NO: 874504 - DNA, 33 bp, Homo sapien
gaaactcccttactcagtctgaattttatctgg

SEQ ID NO: 874505 - DNA, 33 bp, Homo sapien
gaaaagagtgcaaaaagtattgtggaataacaa

SEQ ID NO: 874506 - DNA, 33 bp, Homo sapien
gaaaagagtgcaaaaattattgtggaataacaa

SEQ ID NO: 874507 - DNA, 33 bp, Homo sapien
acattttgattatcagaaaaaaaggaacaaaat

SEQ ID NO: 874508 - DNA, 33 bp, Homo sapien
acattttgattatcaggaaaaaaggaacaaaat

SEQ ID NO: 874509 - DNA, 33 bp, Homo sapien
agagatatgagataaaagaagctaatgagggag

SEQ ID NO: 874510 - DNA, 33 bp, Homo sapien
agagatatgagataaaggaagctaatgagggag

SEQ ID NO: 874511 - DNA, 33 bp, Homo sapien
ttttgcattttgtgccacagaatacagctctca

SEQ ID NO: 874512 - DNA, 33 bp, Homo sapien
ttttgcattttgtgccgcagaatacagctctca

SEQ ID NO: 874513 - DNA, 33 bp, Homo sapien
taagatgaaatttctaactgaagctccaatata

SEQ ID NO: 874514 - DNA, 33 bp, Homo sapien
taagatgaaatttctagctgaagctccaatata

SEQ ID NO: 874515 - DNA, 33 bp, Homo sapien
agtcaccagagactggaattggtggtgaaggat

SEQ ID NO: 874516 - DNA, 33 bp, Homo sapien
agtcaccagagactggtattggtggtgaaggat

SEQ ID NO: 874517 - DNA, 33 bp, Homo sapien
attctgcttaaaaatcagattcagtcaagcggg

SEQ ID NO: 874518 - DNA, 33 bp, Homo sapien
attctgcttaaaaatcggattcagtcaagcggg

SEQ ID NO: 874519 - DNA, 33 bp, Homo sapien
ttacagaccagggtcaagggtcaaagattttgc

SEQ ID NO: 874520 - DNA, 33 bp, Homo sapien
ttacagaccagggtcatgggtcaaagattttgc

SEQ ID NO: 874521 - DNA, 33 bp, Homo sapien
ttttgaattataaatacggtaactctggaaata

SEQ ID NO: 874522 - DNA, 33 bp, Homo sapien
ttttgaattataaatatggtaactctggaaata

SEQ ID NO: 874523 - DNA, 33 bp, Homo sapien
tcctgacccttaaaatcatgaatatgttctatg

SEQ ID NO: 874524 - DNA, 33 bp, Homo sapien
tcctgacccttaaaattatgaatatgttctatg

SEQ ID NO: 874525 - DNA, 33 bp, Homo sapien
agaggagcttttggcaagatcaaggtttccaga

SEQ ID NO: 874526 - DNA, 33 bp, Homo sapien
agaggagcttttggcaggatcaaggtttccaga

SEQ ID NO: 874527 - DNA, 33 bp, Homo sapien
tactgcagttcaactaacaatggatgtgtaggt

SEQ ID NO: 874528 - DNA, 33 bp, Homo sapien
tactgcagttcaactaccaatggatgtgtaggt

SEQ ID NO: 874529 - DNA, 33 bp, Homo sapien
aaggaatgtcctagagaaaatcatacacacatg

SEQ ID NO: 874530 - DNA, 33 bp, Homo sapien
aaggaatgtcctagagcaaatcatacacacatg

SEQ ID NO: 874531 - DNA, 33 bp, Homo sapien
cctacccacagatatacgaatgagtagaaataa

SEQ ID NO: 874532 - DNA, 33 bp, Homo sapien
cctacccacagatatatgaatgagtagaaataa

SEQ ID NO: 874533 - DNA, 33 bp, Homo sapien
aaggataatttagtgaaaccataaacaacatat

SEQ ID NO: 874534 - DNA, 33 bp, Homo sapien
aaggataatttagtgagaccataaacaacatat

SEQ ID NO: 874535 - DNA, 33 bp, Homo sapien
aatacctacagaagatcaaatgtcacatggagt

SEQ ID NO: 874536 - DNA, 33 bp, Homo sapien
aatacctacagaagattaaatgtcacatggagt

SEQ ID NO: 874537 - DNA, 33 bp, Homo sapien
aataaatcagacacacagagaaaaatactgcat

SEQ ID NO: 874538 - DNA, 33 bp, Homo sapien
aataaatcagacacacggagaaaaatactgcat

SEQ ID NO: 874539 - DNA, 33 bp, Homo sapien
gctccattggcagagaacggagaagaaaagaag

SEQ ID NO: 874540 - DNA, 33 bp, Homo sapien
gctccattggcagagaccggagaagaaaagaag

SEQ ID NO: 874541 - DNA, 33 bp, Homo sapien
gtcagtaaaccagtcccgatcttgctgtttatt

SEQ ID NO: 874542 - DNA, 33 bp, Homo sapien
gtcagtaaaccagtcctgatcttgctgtttatt

SEQ ID NO: 874543 - DNA, 33 bp, Homo sapien
gccaaaatctaaaagaagacagggatagataca

SEQ ID NO: 874544 - DNA, 33 bp, Homo sapien
gccaaaatctaaaagaggacagggatagataca

SEQ ID NO: 874545 - DNA, 33 bp, Homo sapien
catgggagggagtcaaaaagcttggctgggctc

SEQ ID NO: 874546 - DNA, 33 bp, Homo sapien
catgggagggagtcaagaagcttggctgggctc

SEQ ID NO: 874547 - DNA, 33 bp, Homo sapien
ctacaacttatcatgaagtctctagaactgaaa

SEQ ID NO: 874548 - DNA, 33 bp, Homo sapien
ctacaacttatcatgacgtctctagaactgaaa

SEQ ID NO: 874549 - DNA, 33 bp, Homo sapien
atcctcccttagtcaaatactgtccatccttta

SEQ ID NO: 874550 - DNA, 33 bp, Homo sapien
atcctcccttagtcaagtactgtccatccttta

SEQ ID NO: 874551 - DNA, 33 bp, Homo sapien
tcttcacaaagccttacctccatcactgtggga

SEQ ID NO: 874552 - DNA, 33 bp, Homo sapien
tcttcacaaagccttatctccatcactgtggga

SEQ ID NO: 874553 - DNA, 33 bp, Homo sapien
caggcaccagtgactacgacggaattttagcag

SEQ ID NO: 874554 - DNA, 33 bp, Homo sapien
caggcaccagtgactatgacggaattttagcag

SEQ ID NO: 874555 - DNA, 33 bp, Homo sapien
gggtttatattggatgccaacatttattctgca

SEQ ID NO: 874556 - DNA, 33 bp, Homo sapien
gggtttatattggatggcaacatttattctgca

SEQ ID NO: 874557 - DNA, 33 bp, Homo sapien
caaatgctaaagaaaaccatacccattttacag

SEQ ID NO: 874558 - DNA, 33 bp, Homo sapien
caaatgctaaagaaaatcatacccattttacag

SEQ ID NO: 874559 - DNA, 33 bp, Homo sapien
cttgttacaatacttacacattctgaaaacaaa

SEQ ID NO: 874560 - DNA, 33 bp, Homo sapien
cttgttacaatacttagacattctgaaaacaaa

SEQ ID NO: 874561 - DNA, 33 bp, Homo sapien
ccttcttctctttctgacaacatctataatatt

SEQ ID NO: 874562 - DNA, 33 bp, Homo sapien
ccttcttctctttctggcaacatctataatatt

SEQ ID NO: 874563 - DNA, 33 bp, Homo sapien
tttaggctctgcaagccaggtaaactcaattct

SEQ ID NO: 874564 - DNA, 33 bp, Homo sapien
tttaggctctgcaagcgaggtaaactcaattct

SEQ ID NO: 874565 - DNA, 33 bp, Homo sapien
gcttctgtgtttggcccctaaagcctcactgct

SEQ ID NO: 874566 - DNA, 33 bp, Homo sapien
gcttctgtgtttggcctctaaagcctcactgct

SEQ ID NO: 874567 - DNA, 33 bp, Homo sapien
ctcactacccattggagggatcaatactttttt

SEQ ID NO: 874568 - DNA, 33 bp, Homo sapien
ctcactacccattggatggatcaatactttttt

SEQ ID NO: 874569 - DNA, 33 bp, Homo sapien
caaatgctgctcctcaatcttccatatttttta

SEQ ID NO: 874570 - DNA, 33 bp, Homo sapien
caaatgctgctcctcagtcttccatatttttta

SEQ ID NO: 874571 - DNA, 33 bp, Homo sapien
gcagaaattaggagcacgatgaggacaataaga

SEQ ID NO: 874572 - DNA, 33 bp, Homo sapien
gcagaaattaggagcatgatgaggacaataaga

SEQ ID NO: 874573 - DNA, 33 bp, Homo sapien
agaaatttttgattaccaggagttaattctttc

SEQ ID NO: 874574 - DNA, 33 bp, Homo sapien
agaaatttttgattacgaggagttaattctttc

SEQ ID NO: 874575 - DNA, 33 bp, Homo sapien
aactaataaacaggagaaagtagcaaccttgct

SEQ ID NO: 874576 - DNA, 33 bp, Homo sapien
aactaataaacaggagtaagtagcaaccttgct

SEQ ID NO: 874577 - DNA, 33 bp, Homo sapien
taacaatagctaataagaaaatcgaacaatgat

SEQ ID NO: 874578 - DNA, 33 bp, Homo sapien
taacaatagctaataataaaatcgaacaatgat

SEQ ID NO: 874579 - DNA, 33 bp, Homo sapien
agtcagccgccaataaacttggaactgggtcca

SEQ ID NO: 874580 - DNA, 33 bp, Homo sapien
agtcagccgccaataatcttggaactgggtcca

SEQ ID NO: 874581 - DNA, 33 bp, Homo sapien
aaaaatatgccccccaaataatatattcatcat

SEQ ID NO: 874582 - DNA, 33 bp, Homo sapien
aaaaatatgccccccacataatatattcatcat

SEQ ID NO: 874583 - DNA, 33 bp, Homo sapien
ggaagaagcagttgtacagtaagacgagttcga

SEQ ID NO: 874584 - DNA, 33 bp, Homo sapien
ggaagaagcagttgtagagtaagacgagttcga

SEQ ID NO: 874585 - DNA, 33 bp, Homo sapien
ttagatgaggtttccacacaattaagcacagtc

SEQ ID NO: 874586 - DNA, 33 bp, Homo sapien
ttagatgaggtttccatacaattaagcacagtc

SEQ ID NO: 874587 - DNA, 33 bp, Homo sapien
gccagatcagaaagaaatctaagtaacatgctg

SEQ ID NO: 874588 - DNA, 33 bp, Homo sapien
gccagatcagaaagaagtctaagtaacatgctg

SEQ ID NO: 874589 - DNA, 33 bp, Homo sapien
cgataatgagaagagaaagaagatttaggtttg

SEQ ID NO: 874590 - DNA, 33 bp, Homo sapien
cgataatgagaagagagagaagatttaggtttg

SEQ ID NO: 874591 - DNA, 33 bp, Homo sapien
agtgctggaccatcaacaatggagagacatgat

SEQ ID NO: 874592 - DNA, 33 bp, Homo sapien
agtgctggaccatcaataatggagagacatgat

SEQ ID NO: 874593 - DNA, 33 bp, Homo sapien
ttgtaagacagaacaaagagaaaagaacaaatg

SEQ ID NO: 874594 - DNA, 33 bp, Homo sapien
ttgtaagacagaacaaggagaaaagaacaaatg

SEQ ID NO: 874595 - DNA, 33 bp, Homo sapien
acttttgtcaagcttccaacctgatgttcatag

SEQ ID NO: 874596 - DNA, 33 bp, Homo sapien
acttttgtcaagcttctaacctgatgttcatag

SEQ ID NO: 874597 - DNA, 33 bp, Homo sapien
ctacaattgcaggatacaaaagaatgaataaaa

SEQ ID NO: 874598 - DNA, 33 bp, Homo sapien
ctacaattgcaggatataaaagaatgaataaaa

SEQ ID NO: 874599 - DNA, 33 bp, Homo sapien
ttggatcttgaaactccatgtttgaatttatca

SEQ ID NO: 874600 - DNA, 33 bp, Homo sapien
ttggatcttgaaactctatgtttgaatttatca

SEQ ID NO: 874601 - DNA, 33 bp, Homo sapien
cttctgaaagggcataagtttcattgtaatttc

SEQ ID NO: 874602 - DNA, 33 bp, Homo sapien
cttctgaaagggcatacgtttcattgtaatttc

SEQ ID NO: 874603 - DNA, 33 bp, Homo sapien
ccttacttccactcacagcttgtacagcagtta

SEQ ID NO: 874604 - DNA, 33 bp, Homo sapien
ccttacttccactcacggcttgtacagcagtta

SEQ ID NO: 874605 - DNA, 33 bp, Homo sapien
catatagtgaatgaggcaagatgttgaaattgc

SEQ ID NO: 874606 - DNA, 33 bp, Homo sapien
catatagtgaatgaggtaagatgttgaaattgc

SEQ ID NO: 874607 - DNA, 33 bp, Homo sapien
ccaatctggcccttgcaaaaaccatatggatca

SEQ ID NO: 874608 - DNA, 33 bp, Homo sapien
ccaatctggcccttgcgaaaaccatatggatca

SEQ ID NO: 874609 - DNA, 33 bp, Homo sapien
aacatcgcctccagccacagtatttgatgcaat

SEQ ID NO: 874610 - DNA, 33 bp, Homo sapien
aacatcgcctccagccgcagtatttgatgcaat

SEQ ID NO: 874611 - DNA, 33 bp, Homo sapien
tgcttatcatcttttgaataatagcagtcctaa

SEQ ID NO: 874612 - DNA, 33 bp, Homo sapien
tgcttatcatcttttggataatagcagtcctaa

SEQ ID NO: 874613 - DNA, 33 bp, Homo sapien
tgttgcacaattacagaaatggctgaggaaaga

SEQ ID NO: 874614 - DNA, 33 bp, Homo sapien
tgttgcacaattacaggaatggctgaggaaaga

SEQ ID NO: 874615 - DNA, 33 bp, Homo sapien
atgtaatgctataccacctatctggatatctct

SEQ ID NO: 874616 - DNA, 33 bp, Homo sapien
atgtaatgctataccatctatctggatatctct

SEQ ID NO: 874617 - DNA, 33 bp, Homo sapien
acttctcaaagtacaaactattaggccaacata

SEQ ID NO: 874618 - DNA, 33 bp, Homo sapien
acttctcaaagtacaatctattaggccaacata

SEQ ID NO: 874619 - DNA, 33 bp, Homo sapien
tttcttatccagtcaaactttcaaaagaaaaac

SEQ ID NO: 874620 - DNA, 33 bp, Homo sapien
tttcttatccagtcaagctttcaaaagaaaaac

SEQ ID NO: 874621 - DNA, 33 bp, Homo sapien
cagataagttaggactaaagtctaagtcatgtt

SEQ ID NO: 874622 - DNA, 33 bp, Homo sapien
cagataagttaggactgaagtctaagtcatgtt

SEQ ID NO: 874623 - DNA, 33 bp, Homo sapien
ggtttgaatcacctaactcccagagtctagaat

SEQ ID NO: 874624 - DNA, 33 bp, Homo sapien
ggtttgaatcacctaattcccagagtctagaat

SEQ ID NO: 874625 - DNA, 33 bp, Homo sapien
gaagtgctcaagactaaatccacttatgatctt

SEQ ID NO: 874626 - DNA, 33 bp, Homo sapien
gaagtgctcaagactagatccacttatgatctt

SEQ ID NO: 874627 - DNA, 33 bp, Homo sapien
ttactcgtcaacttggaaagtctgtatctggct

SEQ ID NO: 874628 - DNA, 33 bp, Homo sapien
ttactcgtcaacttgggaagtctgtatctggct

SEQ ID NO: 874629 - DNA, 33 bp, Homo sapien
atggactatggagtctaaaagacagggtgcctc

SEQ ID NO: 874630 - DNA, 33 bp, Homo sapien
atggactatggagtctgaaagacagggtgcctc

SEQ ID NO: 874631 - DNA, 33 bp, Homo sapien
gggaccaagaaaggaaatatgagattttgagaa

SEQ ID NO: 874632 - DNA, 33 bp, Homo sapien
gggaccaagaaaggaactatgagattttgagaa

SEQ ID NO: 874633 - DNA, 33 bp, Homo sapien
gagaattcaatttaagacccaaagcactttctc

SEQ ID NO: 874634 - DNA, 33 bp, Homo sapien
gagaattcaatttaagtcccaaagcactttctc

SEQ ID NO: 874635 - DNA, 33 bp, Homo sapien
attagtgaaatgtaaacgaaaactacagtgaga

SEQ ID NO: 874636 - DNA, 33 bp, Homo sapien
attagtgaaatgtaaaggaaaactacagtgaga

SEQ ID NO: 874637 - DNA, 33 bp, Homo sapien
tgtcagaaagcaggaccgagactcggtaggata

SEQ ID NO: 874638 - DNA, 33 bp, Homo sapien
tgtcagaaagcaggactgagactcggtaggata

SEQ ID NO: 874639 - DNA, 33 bp, Homo sapien
ttgagtttcaattacaacccgcaattccagatg

SEQ ID NO: 874640 - DNA, 33 bp, Homo sapien
ttgagtttcaattacagcccgcaattccagatg

SEQ ID NO: 874641 - DNA, 33 bp, Homo sapien
gcaattgttagagtagccccagtcattaaactt

SEQ ID NO: 874642 - DNA, 33 bp, Homo sapien
gcaattgttagagtagtcccagtcattaaactt

SEQ ID NO: 874643 - DNA, 33 bp, Homo sapien
ttcccattataaccacaataaaattcaaatgct

SEQ ID NO: 874644 - DNA, 33 bp, Homo sapien
ttcccattataaccacgataaaattcaaatgct

SEQ ID NO: 874645 - DNA, 33 bp, Homo sapien
ctgtaactagatgtacaagtccattaagtcacg

SEQ ID NO: 874646 - DNA, 33 bp, Homo sapien
ctgtaactagatgtacgagtccattaagtcacg

SEQ ID NO: 874647 - DNA, 33 bp, Homo sapien
actattttgcctattaacagctaatactattcc

SEQ ID NO: 874648 - DNA, 33 bp, Homo sapien
actattttgcctattatcagctaatactattcc

SEQ ID NO: 874649 - DNA, 33 bp, Homo sapien
tggtacatatgggttaactctgatagattctaa

SEQ ID NO: 874650 - DNA, 33 bp, Homo sapien
tggtacatatgggttatctctgatagattctaa

SEQ ID NO: 874651 - DNA, 33 bp, Homo sapien
gtcaaaaaatgtataccgattgataccatttct

SEQ ID NO: 874652 - DNA, 33 bp, Homo sapien
gtcaaaaaatgtatactgattgataccatttct

SEQ ID NO: 874653 - DNA, 33 bp, Homo sapien
gcaactgaacatcataagtaacacttcttccaa

SEQ ID NO: 874654 - DNA, 33 bp, Homo sapien
gcaactgaacatcatacgtaacacttcttccaa

SEQ ID NO: 874655 - DNA, 33 bp, Homo sapien
ataaagaaaattacaacccggacatggtggctc

SEQ ID NO: 874656 - DNA, 33 bp, Homo sapien
ataaagaaaattacaagccggacatggtggctc

SEQ ID NO: 874657 - DNA, 33 bp, Homo sapien
ccatgtgctcagtagccctatgtgactagtggc

SEQ ID NO: 874658 - DNA, 33 bp, Homo sapien
ccatgtgctcagtagcgctatgtgactagtggc

SEQ ID NO: 874659 - DNA, 33 bp, Homo sapien
ttggtacaatatagagaatttgcatttactgta

SEQ ID NO: 874660 - DNA, 33 bp, Homo sapien
ttggtacaatatagaggatttgcatttactgta

SEQ ID NO: 874661 - DNA, 33 bp, Homo sapien
ttattgcagctaaaggaaaatggttattctctg

SEQ ID NO: 874662 - DNA, 33 bp, Homo sapien
ttattgcagctaaaggtaaatggttattctctg

SEQ ID NO: 874663 - DNA, 33 bp, Homo sapien
cattaacccaaaagtaaaactccatagtcttat

SEQ ID NO: 874664 - DNA, 33 bp, Homo sapien
cattaacccaaaagtacaactccatagtcttat

SEQ ID NO: 874665 - DNA, 33 bp, Homo sapien
tttaattactgccttgcatgattttggaattgc

SEQ ID NO: 874666 - DNA, 33 bp, Homo sapien
tttaattactgccttgtatgattttggaattgc

SEQ ID NO: 874667 - DNA, 33 bp, Homo sapien
ggaagctgagaggtttaaaaacaggctggcaat

SEQ ID NO: 874668 - DNA, 33 bp, Homo sapien
ggaagctgagaggtttgaaaacaggctggcaat

SEQ ID NO: 874669 - DNA, 33 bp, Homo sapien
gtgatttgctgagtcaaagttttaatagcactt

SEQ ID NO: 874670 - DNA, 33 bp, Homo sapien
gtgatttgctgagtcatagttttaatagcactt

SEQ ID NO: 874671 - DNA, 33 bp, Homo sapien
atcctttttatcaaccagagaatagataaacaa

SEQ ID NO: 874672 - DNA, 33 bp, Homo sapien
atcctttttatcaaccggagaatagataaacaa

SEQ ID NO: 874673 - DNA, 33 bp, Homo sapien
tccttcagtacagcaacgtgatatattaaagat

SEQ ID NO: 874674 - DNA, 33 bp, Homo sapien
tccttcagtacagcaatgtgatatattaaagat

SEQ ID NO: 874675 - DNA, 33 bp, Homo sapien
gatttctgtgcatatacaccccttaattatgat

SEQ ID NO: 874676 - DNA, 33 bp, Homo sapien
gatttctgtgcatatataccccttaattatgat

SEQ ID NO: 874677 - DNA, 33 bp, Homo sapien
tgtcaatggaaaaggagagaggagaatgaattt

SEQ ID NO: 874678 - DNA, 33 bp, Homo sapien
tgtcaatggaaaaggatagaggagaatgaattt

SEQ ID NO: 874679 - DNA, 33 bp, Homo sapien
atcagggatctgagtaaggtgctaacaggtatg

SEQ ID NO: 874680 - DNA, 33 bp, Homo sapien
atcagggatctgagtatggtgctaacaggtatg

SEQ ID NO: 874681 - DNA, 33 bp, Homo sapien
tatttgaaatgttttgaaaaagcatatgtttta

SEQ ID NO: 874682 - DNA, 33 bp, Homo sapien
tatttgaaatgttttggaaaagcatatgtttta

SEQ ID NO: 874683 - DNA, 33 bp, Homo sapien
ggagattagcctgcagaaaacttaataggaatg

SEQ ID NO: 874684 - DNA, 33 bp, Homo sapien
ggagattagcctgcaggaaacttaataggaatg

SEQ ID NO: 874685 - DNA, 33 bp, Homo sapien
ggagatagaatctgcagaaaggactgaaagtga

SEQ ID NO: 874686 - DNA, 33 bp, Homo sapien
ggagatagaatctgcataaaggactgaaagtga

SEQ ID NO: 874687 - DNA, 33 bp, Homo sapien
tacattacatgacctaaatggggcttctaatcc

SEQ ID NO: 874688 - DNA, 33 bp, Homo sapien
tacattacatgacctagatggggcttctaatcc

SEQ ID NO: 874689 - DNA, 33 bp, Homo sapien
atttttgttttgaataagtatccatcactccat

SEQ ID NO: 874690 - DNA, 33 bp, Homo sapien
atttttgttttgaatatgtatccatcactccat

SEQ ID NO: 874691 - DNA, 33 bp, Homo sapien
gtaccaccattgctaacgcacacacagacagat

SEQ ID NO: 874692 - DNA, 33 bp, Homo sapien
gtaccaccattgctaaggcacacacagacagat

SEQ ID NO: 874693 - DNA, 33 bp, Homo sapien
gagtgctgaacagaggaataatctgtggtcaat

SEQ ID NO: 874694 - DNA, 33 bp, Homo sapien
gagtgctgaacagaggtataatctgtggtcaat

SEQ ID NO: 874695 - DNA, 33 bp, Homo sapien
tctaaacaacaggcacactgtcctttaattttc

SEQ ID NO: 874696 - DNA, 33 bp, Homo sapien
tctaaacaacaggcacgctgtcctttaattttc

SEQ ID NO: 874697 - DNA, 33 bp, Homo sapien
gaaatgtctgaggcaccgaataaggaagtcttt

SEQ ID NO: 874698 - DNA, 33 bp, Homo sapien
gaaatgtctgaggcactgaataaggaagtcttt

SEQ ID NO: 874699 - DNA, 33 bp, Homo sapien
ctgcattaaaccactaacattcagggatttatt

SEQ ID NO: 874700 - DNA, 33 bp, Homo sapien
ctgcattaaaccactatcattcagggatttatt

SEQ ID NO: 874701 - DNA, 33 bp, Homo sapien
tagatacagacttggacgtttgttagtttcttc

SEQ ID NO: 874702 - DNA, 33 bp, Homo sapien
tagatacagacttggatgtttgttagtttcttc

SEQ ID NO: 874703 - DNA, 33 bp, Homo sapien
tgccctaaaccaagtgaatctcagtttagctat

SEQ ID NO: 874704 - DNA, 33 bp, Homo sapien
tgccctaaaccaagtgcatctcagtttagctat

SEQ ID NO: 874705 - DNA, 33 bp, Homo sapien
tagaaaacagagtaaaacatgacattaaattct

SEQ ID NO: 874706 - DNA, 33 bp, Homo sapien
tagaaaacagagtaaaccatgacattaaattct

SEQ ID NO: 874707 - DNA, 33 bp, Homo sapien
gaaggacaaggagtgaaagcgcacatcgttggg

SEQ ID NO: 874708 - DNA, 33 bp, Homo sapien
gaaggacaaggagtgagagcgcacatcgttggg

SEQ ID NO: 874709 - DNA, 33 bp, Homo sapien
ccctacttctatgctaaatgcccaacgatgtgc

SEQ ID NO: 874710 - DNA, 33 bp, Homo sapien
ccctacttctatgctagatgcccaacgatgtgc

SEQ ID NO: 874711 - DNA, 33 bp, Homo sapien
caaatgttgctacctaagttacacacctgagtt

SEQ ID NO: 874712 - DNA, 33 bp, Homo sapien
caaatgttgctacctaggttacacacctgagtt

SEQ ID NO: 874713 - DNA, 33 bp, Homo sapien
tgaaaccatctggagtaacacaatgcctgctca

SEQ ID NO: 874714 - DNA, 33 bp, Homo sapien
tgaaaccatctggagtgacacaatgcctgctca

SEQ ID NO: 874715 - DNA, 33 bp, Homo sapien
aaaccatccacctaccaatcaattgtagagcaa

SEQ ID NO: 874716 - DNA, 33 bp, Homo sapien
aaaccatccacctaccgatcaattgtagagcaa

SEQ ID NO: 874717 - DNA, 33 bp, Homo sapien
caaactatctgaacacgattgctcaactttcct

SEQ ID NO: 874718 - DNA, 33 bp, Homo sapien
caaactatctgaacactattgctcaactttcct

SEQ ID NO: 874719 - DNA, 33 bp, Homo sapien
ccttctcagcactgtacaatggaaataatagag

SEQ ID NO: 874720 - DNA, 33 bp, Homo sapien
ccttctcagcactgtataatggaaataatagag

SEQ ID NO: 874721 - DNA, 33 bp, Homo sapien
tagaattaatcatccaacaagaatgaattgtct

SEQ ID NO: 874722 - DNA, 33 bp, Homo sapien
tagaattaatcatccaccaagaatgaattgtct

SEQ ID NO: 874723 - DNA, 33 bp, Homo sapien
tctagactacaggttacggtgtttgtcactctg

SEQ ID NO: 874724 - DNA, 33 bp, Homo sapien
tctagactacaggttatggtgtttgtcactctg

SEQ ID NO: 874725 - DNA, 33 bp, Homo sapien
gagctgagacccaaaagaggagtcaggcttagt

SEQ ID NO: 874726 - DNA, 33 bp, Homo sapien
gagctgagacccaaaataggagtcaggcttagt

SEQ ID NO: 874727 - DNA, 33 bp, Homo sapien
cctctctccattaataactggcttgactacaaa

SEQ ID NO: 874728 - DNA, 33 bp, Homo sapien
cctctctccattaatatctggcttgactacaaa

SEQ ID NO: 874729 - DNA, 33 bp, Homo sapien
actattggaaatgatccatgagctatactgggc

SEQ ID NO: 874730 - DNA, 33 bp, Homo sapien
actattggaaatgatctatgagctatactgggc

SEQ ID NO: 874731 - DNA, 33 bp, Homo sapien
cttgcatctaacaagcccagccccaacaagtcc

SEQ ID NO: 874732 - DNA, 33 bp, Homo sapien
cttgcatctaacaagctcagccccaacaagtcc

SEQ ID NO: 874733 - DNA, 33 bp, Homo sapien
aaaccaggcttgacaacggtgccagggcactga

SEQ ID NO: 874734 - DNA, 33 bp, Homo sapien
aaaccaggcttgacaatggtgccagggcactga

SEQ ID NO: 874735 - DNA, 33 bp, Homo sapien
agtaaacttgaatacaagaagtgtcaaaaatgc

SEQ ID NO: 874736 - DNA, 33 bp, Homo sapien
agtaaacttgaatacatgaagtgtcaaaaatgc

SEQ ID NO: 874737 - DNA, 33 bp, Homo sapien
ccaggactgtgcgcaagacatttctgttattta

SEQ ID NO: 874738 - DNA, 33 bp, Homo sapien
ccaggactgtgcgcaatacatttctgttattta

SEQ ID NO: 874739 - DNA, 33 bp, Homo sapien
tttaccaagtctggaacgtttttaaggtgctaa

SEQ ID NO: 874740 - DNA, 33 bp, Homo sapien
tttaccaagtctggaatgtttttaaggtgctaa

SEQ ID NO: 874741 - DNA, 33 bp, Homo sapien
actcaagagccaaaaccgtaagcctggcacacc

SEQ ID NO: 874742 - DNA, 33 bp, Homo sapien
actcaagagccaaaactgtaagcctggcacacc

SEQ ID NO: 874743 - DNA, 33 bp, Homo sapien
cagtcatataatgctaagtttagacagaggctg

SEQ ID NO: 874744 - DNA, 33 bp, Homo sapien
cagtcatataatgctaggtttagacagaggctg

SEQ ID NO: 874745 - DNA, 33 bp, Homo sapien
aggagacatggagacactgctagcttccaagca

SEQ ID NO: 874746 - DNA, 33 bp, Homo sapien
aggagacatggagacattgctagcttccaagca

SEQ ID NO: 874747 - DNA, 33 bp, Homo sapien
tgcagaagtatttcagcagtctaagaatgtgta

SEQ ID NO: 874748 - DNA, 33 bp, Homo sapien
tgcagaagtatttcagtagtctaagaatgtgta

SEQ ID NO: 874749 - DNA, 33 bp, Homo sapien
tgcatcatcttttctgaatagtgggaaaaaaca

SEQ ID NO: 874750 - DNA, 33 bp, Homo sapien
tgcatcatcttttctggatagtgggaaaaaaca

SEQ ID NO: 874751 - DNA, 33 bp, Homo sapien
cagccattcatggtcaactggcagtcagagtaa

SEQ ID NO: 874752 - DNA, 33 bp, Homo sapien
cagccattcatggtcacctggcagtcagagtaa

SEQ ID NO: 874753 - DNA, 33 bp, Homo sapien
gccacacgaagcagaaaataggatgaagtgaac

SEQ ID NO: 874754 - DNA, 33 bp, Homo sapien
gccacacgaagcagaacataggatgaagtgaac

SEQ ID NO: 874755 - DNA, 33 bp, Homo sapien
gccaagggcccaagacacaagtacagccaaaga

SEQ ID NO: 874756 - DNA, 33 bp, Homo sapien
gccaagggcccaagacgcaagtacagccaaaga

SEQ ID NO: 874757 - DNA, 33 bp, Homo sapien
tccttttaaggagtaactgaaatgatgtctgta

SEQ ID NO: 874758 - DNA, 33 bp, Homo sapien
tccttttaaggagtaattgaaatgatgtctgta

SEQ ID NO: 874759 - DNA, 33 bp, Homo sapien
ataaatagctagaggtaaaaggaaatacagtca

SEQ ID NO: 874760 - DNA, 33 bp, Homo sapien
ataaatagctagaggtgaaaggaaatacagtca

SEQ ID NO: 874761 - DNA, 33 bp, Homo sapien
cactctcaaggtcctgaaagctgggtgaggact

SEQ ID NO: 874762 - DNA, 33 bp, Homo sapien
cactctcaaggtcctgcaagctgggtgaggact

SEQ ID NO: 874763 - DNA, 33 bp, Homo sapien
aatgctgattacctgaagctgggaaggggaaag

SEQ ID NO: 874764 - DNA, 33 bp, Homo sapien
aatgctgattacctgaggctgggaaggggaaag

SEQ ID NO: 874765 - DNA, 33 bp, Homo sapien
tctatcttcatagtcaaccctctagactcagac

SEQ ID NO: 874766 - DNA, 33 bp, Homo sapien
tctatcttcatagtcacccctctagactcagac

SEQ ID NO: 874767 - DNA, 33 bp, Homo sapien
ggctttgaggtacaaacatttttctcttgtcta

SEQ ID NO: 874768 - DNA, 33 bp, Homo sapien
ggctttgaggtacaaagatttttctcttgtcta

SEQ ID NO: 874769 - DNA, 33 bp, Homo sapien
atgaccttgagttccactattacatcatatcat

SEQ ID NO: 874770 - DNA, 33 bp, Homo sapien
atgaccttgagttccagtattacatcatatcat

SEQ ID NO: 874771 - DNA, 33 bp, Homo sapien
tacataattggacaaacgacattacagctaatt

SEQ ID NO: 874772 - DNA, 33 bp, Homo sapien
tacataattggacaaatgacattacagctaatt

SEQ ID NO: 874773 - DNA, 33 bp, Homo sapien
caacttgcctcagtgaacatgtgtttggatgcc

SEQ ID NO: 874774 - DNA, 33 bp, Homo sapien
caacttgcctcagtgagcatgtgtttggatgcc

SEQ ID NO: 874775 - DNA, 33 bp, Homo sapien
cttgcctattaattaccagagacacagtcatct

SEQ ID NO: 874776 - DNA, 33 bp, Homo sapien
cttgcctattaattacgagagacacagtcatct

SEQ ID NO: 874777 - DNA, 33 bp, Homo sapien
atgactttgcagtagcagagatgacccaattca

SEQ ID NO: 874778 - DNA, 33 bp, Homo sapien
atgactttgcagtagcggagatgacccaattca

SEQ ID NO: 874779 - DNA, 33 bp, Homo sapien
cttcccctaaagcttacacatgatgatgaaact

SEQ ID NO: 874780 - DNA, 33 bp, Homo sapien
cttcccctaaagcttatacatgatgatgaaact

SEQ ID NO: 874781 - DNA, 33 bp, Homo sapien
aattgtccacagtttgcaaaatagtcgactctg

SEQ ID NO: 874782 - DNA, 33 bp, Homo sapien
aattgtccacagtttgtaaaatagtcgactctg

SEQ ID NO: 874783 - DNA, 33 bp, Homo sapien
tcaatatcttagaacactatgatgccatatgaa

SEQ ID NO: 874784 - DNA, 33 bp, Homo sapien
tcaatatcttagaacagtatgatgccatatgaa

SEQ ID NO: 874785 - DNA, 33 bp, Homo sapien
gaatattagcaagaaaaaattttgagcttctct

SEQ ID NO: 874786 - DNA, 33 bp, Homo sapien
gaatattagcaagaaataattttgagcttctct

SEQ ID NO: 874787 - DNA, 33 bp, Homo sapien
atcacaggagaggtaccgagatttcgcctacat

SEQ ID NO: 874788 - DNA, 33 bp, Homo sapien
atcacaggagaggtactgagatttcgcctacat

SEQ ID NO: 874789 - DNA, 33 bp, Homo sapien
cactagtgcacagccaagctttctgttgaaagt

SEQ ID NO: 874790 - DNA, 33 bp, Homo sapien
cactagtgcacagccaggctttctgttgaaagt

SEQ ID NO: 874791 - DNA, 33 bp, Homo sapien
ttcaagatgcctactcaaaatcaaaagatcatt

SEQ ID NO: 874792 - DNA, 33 bp, Homo sapien
ttcaagatgcctactcgaaatcaaaagatcatt

SEQ ID NO: 874793 - DNA, 33 bp, Homo sapien
atgcaccccactgacagggttttaagaaatagc

SEQ ID NO: 874794 - DNA, 33 bp, Homo sapien
atgcaccccactgacatggttttaagaaatagc

SEQ ID NO: 874795 - DNA, 33 bp, Homo sapien
cagcagttactgagacaaaaacctctactcatt

SEQ ID NO: 874796 - DNA, 33 bp, Homo sapien
cagcagttactgagacgaaaacctctactcatt

SEQ ID NO: 874797 - DNA, 33 bp, Homo sapien
agggcctttgtgtgaactgtgatccactgtatg

SEQ ID NO: 874798 - DNA, 33 bp, Homo sapien
agggcctttgtgtgaattgtgatccactgtatg

SEQ ID NO: 874799 - DNA, 33 bp, Homo sapien
tcatctcccaaccagaccagtatcctccaataa

SEQ ID NO: 874800 - DNA, 33 bp, Homo sapien
tcatctcccaaccagagcagtatcctccaataa

SEQ ID NO: 874801 - DNA, 33 bp, Homo sapien
ctatttggtgctcttcaaccttcctgtgcctgg

SEQ ID NO: 874802 - DNA, 33 bp, Homo sapien
ctatttggtgctcttcgaccttcctgtgcctgg

SEQ ID NO: 874803 - DNA, 33 bp, Homo sapien
tttttcctctttctgcactttcattattcatga

SEQ ID NO: 874804 - DNA, 33 bp, Homo sapien
tttttcctctttctgcgctttcattattcatga

SEQ ID NO: 874805 - DNA, 33 bp, Homo sapien
tgttaggaatttcagacctaagtggcttccaaa

SEQ ID NO: 874806 - DNA, 33 bp, Homo sapien
tgttaggaatttcagagctaagtggcttccaaa

SEQ ID NO: 874807 - DNA, 33 bp, Homo sapien
aacgaaggaggaagtgccacaggctttcaaaca

SEQ ID NO: 874808 - DNA, 33 bp, Homo sapien
aacgaaggaggaagtgtcacaggctttcaaaca

SEQ ID NO: 874809 - DNA, 33 bp, Homo sapien
ggtccctgacaagggccaagcaaatgtcaaagt

SEQ ID NO: 874810 - DNA, 33 bp, Homo sapien
ggtccctgacaagggcgaagcaaatgtcaaagt

SEQ ID NO: 874811 - DNA, 33 bp, Homo sapien
agttccattatgaacaatctgcgaatgtcagta

SEQ ID NO: 874812 - DNA, 33 bp, Homo sapien
agttccattatgaacagtctgcgaatgtcagta

SEQ ID NO: 874813 - DNA, 33 bp, Homo sapien
tatggcacttgatgaacattgattgaagtatta

SEQ ID NO: 874814 - DNA, 33 bp, Homo sapien
tatggcacttgatgaatattgattgaagtatta

SEQ ID NO: 874815 - DNA, 33 bp, Homo sapien
cagaacagtaccaggaacacagtgggggctaat

SEQ ID NO: 874816 - DNA, 33 bp, Homo sapien
cagaacagtaccaggaccacagtgggggctaat

SEQ ID NO: 874817 - DNA, 33 bp, Homo sapien
aacttagaggacaccacggtgggtgacataaca

SEQ ID NO: 874818 - DNA, 33 bp, Homo sapien
aacttagaggacaccatggtgggtgacataaca

SEQ ID NO: 874819 - DNA, 33 bp, Homo sapien
ccaggagatggaacaacaggaaatgagaaatag

SEQ ID NO: 874820 - DNA, 33 bp, Homo sapien
ccaggagatggaacaataggaaatgagaaatag

SEQ ID NO: 874821 - DNA, 33 bp, Homo sapien
agagcaaatcacccaacaggcatacagagcaga

SEQ ID NO: 874822 - DNA, 33 bp, Homo sapien
agagcaaatcacccaataggcatacagagcaga

SEQ ID NO: 874823 - DNA, 33 bp, Homo sapien
aatccaaagctaatgcaaaatgagaccttgacc

SEQ ID NO: 874824 - DNA, 33 bp, Homo sapien
aatccaaagctaatgcgaaatgagaccttgacc

SEQ ID NO: 874825 - DNA, 33 bp, Homo sapien
acagttttcaacacccgagtcactcagtactca

SEQ ID NO: 874826 - DNA, 33 bp, Homo sapien
acagttttcaacaccctagtcactcagtactca

SEQ ID NO: 874827 - DNA, 33 bp, Homo sapien
gatccaacaactctcccatttactccatctact

SEQ ID NO: 874828 - DNA, 33 bp, Homo sapien
gatccaacaactctccgatttactccatctact

SEQ ID NO: 874829 - DNA, 33 bp, Homo sapien
gcctcttgcctgcacaagtggaactgtgagcat

SEQ ID NO: 874830 - DNA, 33 bp, Homo sapien
gcctcttgcctgcacaggtggaactgtgagcat

SEQ ID NO: 874831 - DNA, 33 bp, Homo sapien
attagatttttctgcaacattaaataattggat

SEQ ID NO: 874832 - DNA, 33 bp, Homo sapien
attagatttttctgcagcattaaataattggat

SEQ ID NO: 874833 - DNA, 33 bp, Homo sapien
ttcagagccttgaaaacggctatgcaatagaat

SEQ ID NO: 874834 - DNA, 33 bp, Homo sapien
ttcagagccttgaaaatggctatgcaatagaat

SEQ ID NO: 874835 - DNA, 33 bp, Homo sapien
gtgtatatcatagacaagataacagagacaaaa

SEQ ID NO: 874836 - DNA, 33 bp, Homo sapien
gtgtatatcatagacaggataacagagacaaaa

SEQ ID NO: 874837 - DNA, 33 bp, Homo sapien
ttcctttcactatatacgtaaagcaactgaagt

SEQ ID NO: 874838 - DNA, 33 bp, Homo sapien
ttcctttcactatatatgtaaagcaactgaagt

SEQ ID NO: 874839 - DNA, 33 bp, Homo sapien
tctaaatatcaaagcaatgaattcctacatcct

SEQ ID NO: 874840 - DNA, 33 bp, Homo sapien
tctaaatatcaaagcactgaattcctacatcct

SEQ ID NO: 874841 - DNA, 33 bp, Homo sapien
tataagaaattctttcaccacctctaaatatca

SEQ ID NO: 874842 - DNA, 33 bp, Homo sapien
tataagaaattctttcgccacctctaaatatca

SEQ ID NO: 874843 - DNA, 33 bp, Homo sapien
tggaatgcacctaaaaatcctctgtcgctgcca

SEQ ID NO: 874844 - DNA, 33 bp, Homo sapien
tggaatgcacctaaaactcctctgtcgctgcca

SEQ ID NO: 874845 - DNA, 33 bp, Homo sapien
taatgcagtttttatacgatatcaattgtgtag

SEQ ID NO: 874846 - DNA, 33 bp, Homo sapien
taatgcagtttttataggatatcaattgtgtag

SEQ ID NO: 874847 - DNA, 33 bp, Homo sapien
gaggaaaagcgaggagataaaatgccctggttc

SEQ ID NO: 874848 - DNA, 33 bp, Homo sapien
gaggaaaagcgaggaggtaaaatgccctggttc

SEQ ID NO: 874849 - DNA, 33 bp, Homo sapien
tgttgtacttcttaaaaatccacttcccatgcc

SEQ ID NO: 874850 - DNA, 33 bp, Homo sapien
tgttgtacttcttaaacatccacttcccatgcc

SEQ ID NO: 874851 - DNA, 33 bp, Homo sapien
caggttatcattttcaactcatcctttattagc

SEQ ID NO: 874852 - DNA, 33 bp, Homo sapien
caggttatcattttcacctcatcctttattagc

SEQ ID NO: 874853 - DNA, 33 bp, Homo sapien
tattttttgatagtgacaaacattacattagca

SEQ ID NO: 874854 - DNA, 33 bp, Homo sapien
tattttttgatagtgagaaacattacattagca

SEQ ID NO: 874855 - DNA, 33 bp, Homo sapien
gtgaaaataaaagtaacgatgccttccttctcc

SEQ ID NO: 874856 - DNA, 33 bp, Homo sapien
gtgaaaataaaagtaatgatgccttccttctcc

SEQ ID NO: 874857 - DNA, 33 bp, Homo sapien
cgctcacagttttaaacgccaaggagatttagt

SEQ ID NO: 874858 - DNA, 33 bp, Homo sapien
cgctcacagttttaaatgccaaggagatttagt

SEQ ID NO: 874859 - DNA, 33 bp, Homo sapien
ggtatctctttatagccatgcaagtatggccta

SEQ ID NO: 874860 - DNA, 33 bp, Homo sapien
ggtatctctttatagctatgcaagtatggccta

SEQ ID NO: 874861 - DNA, 33 bp, Homo sapien
agtcaaagaaaatttaggtattccatgtcctag

SEQ ID NO: 874862 - DNA, 33 bp, Homo sapien
agtcaaagaaaatttatgtattccatgtcctag

SEQ ID NO: 874863 - DNA, 33 bp, Homo sapien
gcttgacattgccaaccgccaatatttgtctag

SEQ ID NO: 874864 - DNA, 33 bp, Homo sapien
gcttgacattgccaactgccaatatttgtctag

SEQ ID NO: 874865 - DNA, 33 bp, Homo sapien
atgaaaacaaatggaaaatagggggaggagtaa

SEQ ID NO: 874866 - DNA, 33 bp, Homo sapien
atgaaaacaaatggaacatagggggaggagtaa

SEQ ID NO: 874867 - DNA, 33 bp, Homo sapien
actgatatttatacccaaaagaaccaatgatgc

SEQ ID NO: 874868 - DNA, 33 bp, Homo sapien
actgatatttataccccaaagaaccaatgatgc

SEQ ID NO: 874869 - DNA, 33 bp, Homo sapien
ccaagattactcctcacgggctcaatgtagctg

SEQ ID NO: 874870 - DNA, 33 bp, Homo sapien
ccaagattactcctcatgggctcaatgtagctg

SEQ ID NO: 874871 - DNA, 33 bp, Homo sapien
ttccctaagtttcaacaccttcagctgccaaag

SEQ ID NO: 874872 - DNA, 33 bp, Homo sapien
ttccctaagtttcaacgccttcagctgccaaag

SEQ ID NO: 874873 - DNA, 33 bp, Homo sapien
atacttgctgaaagaacgagtgaaaaaatgaat

SEQ ID NO: 874874 - DNA, 33 bp, Homo sapien
atacttgctgaaagaatgagtgaaaaaatgaat

SEQ ID NO: 874875 - DNA, 33 bp, Homo sapien
tcaggtaaaagttgcagacatggtgtttatgaa

SEQ ID NO: 874876 - DNA, 33 bp, Homo sapien
tcaggtaaaagttgcatacatggtgtttatgaa

SEQ ID NO: 874877 - DNA, 33 bp, Homo sapien
caggaaagtttgcaaaatgagaatcagacctag

SEQ ID NO: 874878 - DNA, 33 bp, Homo sapien
caggaaagtttgcaaagtgagaatcagacctag

SEQ ID NO: 874879 - DNA, 33 bp, Homo sapien
taaccacttaaattataaaacttcatagtacag

SEQ ID NO: 874880 - DNA, 33 bp, Homo sapien
taaccacttaaattatgaaacttcatagtacag

SEQ ID NO: 874881 - DNA, 33 bp, Homo sapien
gaggtcataaatagcacaggagagctgcacaaa

SEQ ID NO: 874882 - DNA, 33 bp, Homo sapien
gaggtcataaatagcataggagagctgcacaaa

SEQ ID NO: 874883 - DNA, 33 bp, Homo sapien
gaaaaattgagtggaaaagtaactgggtcagag

SEQ ID NO: 874884 - DNA, 33 bp, Homo sapien
gaaaaattgagtggaagagtaactgggtcagag

SEQ ID NO: 874885 - DNA, 33 bp, Homo sapien
gtgatctgtgatatgcccaatctttaaaattca

SEQ ID NO: 874886 - DNA, 33 bp, Homo sapien
gtgatctgtgatatgcgcaatctttaaaattca

SEQ ID NO: 874887 - DNA, 33 bp, Homo sapien
acatatgtggcattaaacacagaaaatcagtgt

SEQ ID NO: 874888 - DNA, 33 bp, Homo sapien
acatatgtggcattaagcacagaaaatcagtgt

SEQ ID NO: 874889 - DNA, 33 bp, Homo sapien
atccatctaaggctgcgcaaagtgtagtaaagc

SEQ ID NO: 874890 - DNA, 33 bp, Homo sapien
atccatctaaggctgctcaaagtgtagtaaagc

SEQ ID NO: 874891 - DNA, 33 bp, Homo sapien
ctagggatctggaacactgaatagactcagagt

SEQ ID NO: 874892 - DNA, 33 bp, Homo sapien
ctagggatctggaacagtgaatagactcagagt

SEQ ID NO: 874893 - DNA, 33 bp, Homo sapien
attttaacttaaacataagtgacggctagggct

SEQ ID NO: 874894 - DNA, 33 bp, Homo sapien
attttaacttaaacatcagtgacggctagggct

SEQ ID NO: 874895 - DNA, 33 bp, Homo sapien
aatctgtgtttaacgacaagtgtatgtgtgaat

SEQ ID NO: 874896 - DNA, 33 bp, Homo sapien
aatctgtgtttaacgagaagtgtatgtgtgaat

SEQ ID NO: 874897 - DNA, 33 bp, Homo sapien
agtttgtgttcagttcaagatcacaatatatgg

SEQ ID NO: 874898 - DNA, 33 bp, Homo sapien
agtttgtgttcagttcgagatcacaatatatgg

SEQ ID NO: 874899 - DNA, 33 bp, Homo sapien
aacacctatccaaagacgacacaggaatgacca

SEQ ID NO: 874900 - DNA, 33 bp, Homo sapien
aacacctatccaaagatgacacaggaatgacca

SEQ ID NO: 874901 - DNA, 33 bp, Homo sapien
gctgagtacctttgcacatacctgttggtcatt

SEQ ID NO: 874902 - DNA, 33 bp, Homo sapien
gctgagtacctttgcatatacctgttggtcatt

SEQ ID NO: 874903 - DNA, 33 bp, Homo sapien
gtgagaatgtaaattgcaatagccgttacagaa

SEQ ID NO: 874904 - DNA, 33 bp, Homo sapien
gtgagaatgtaaattggaatagccgttacagaa

SEQ ID NO: 874905 - DNA, 33 bp, Homo sapien
gttcgaagtataccacaggatggtttgatatat

SEQ ID NO: 874906 - DNA, 33 bp, Homo sapien
gttcgaagtataccacgggatggtttgatatat

SEQ ID NO: 874907 - DNA, 33 bp, Homo sapien
aaattaccagtgacttcaagagattctgtgttg

SEQ ID NO: 874908 - DNA, 33 bp, Homo sapien
aaattaccagtgacttgaagagattctgtgttg

SEQ ID NO: 874909 - DNA, 33 bp, Homo sapien
atatcagataaggtgaacattccaagaacaagg

SEQ ID NO: 874910 - DNA, 33 bp, Homo sapien
atatcagataaggtgagcattccaagaacaagg

SEQ ID NO: 874911 - DNA, 33 bp, Homo sapien
tgcaatccaagtctagcaccgaaaactaaagtc

SEQ ID NO: 874912 - DNA, 33 bp, Homo sapien
tgcaatccaagtctagtaccgaaaactaaagtc

SEQ ID NO: 874913 - DNA, 33 bp, Homo sapien
tcagaataaaggaatcactgctattctccatac

SEQ ID NO: 874914 - DNA, 33 bp, Homo sapien
tcagaataaaggaatctctgctattctccatac

SEQ ID NO: 874915 - DNA, 33 bp, Homo sapien
ctcaaccaagattaaactggccatctaaatagc

SEQ ID NO: 874916 - DNA, 33 bp, Homo sapien
ctcaaccaagattaaattggccatctaaatagc

SEQ ID NO: 874917 - DNA, 33 bp, Homo sapien
gaagagactgggtcacaggaatgctttaatgtg

SEQ ID NO: 874918 - DNA, 33 bp, Homo sapien
gaagagactgggtcacgggaatgctttaatgtg

SEQ ID NO: 874919 - DNA, 33 bp, Homo sapien
attatattttttctcactaaaattgatgtaaat

SEQ ID NO: 874920 - DNA, 33 bp, Homo sapien
attatattttttctcagtaaaattgatgtaaat

SEQ ID NO: 874921 - DNA, 33 bp, Homo sapien
ataacaaaaaaccaataagtctgtagaaaaatg

SEQ ID NO: 874922 - DNA, 33 bp, Homo sapien
ataacaaaaaaccaatcagtctgtagaaaaatg

SEQ ID NO: 874923 - DNA, 33 bp, Homo sapien
agacaggatacacatcaaatctgaatgcacttc

SEQ ID NO: 874924 - DNA, 33 bp, Homo sapien
agacaggatacacatcgaatctgaatgcacttc

SEQ ID NO: 874925 - DNA, 33 bp, Homo sapien
tgcagctaagactgagaaccatgaggagatgag

SEQ ID NO: 874926 - DNA, 33 bp, Homo sapien
tgcagctaagactgaggaccatgaggagatgag

SEQ ID NO: 874927 - DNA, 33 bp, Homo sapien
tgtaaacatcactaggacaataacttttacata

SEQ ID NO: 874928 - DNA, 33 bp, Homo sapien
tgtaaacatcactaggtcaataacttttacata

SEQ ID NO: 874929 - DNA, 33 bp, Homo sapien
agcatgaggcatagccaatatatgggacaaagg

SEQ ID NO: 874930 - DNA, 33 bp, Homo sapien
agcatgaggcatagccgatatatgggacaaagg

SEQ ID NO: 874931 - DNA, 33 bp, Homo sapien
aaaacttttatgtccaaagatcactgtaacagg

SEQ ID NO: 874932 - DNA, 33 bp, Homo sapien
aaaacttttatgtccagagatcactgtaacagg

SEQ ID NO: 874933 - DNA, 33 bp, Homo sapien
cttgttgtggaaacatgatctctccatctctga

SEQ ID NO: 874934 - DNA, 33 bp, Homo sapien
cttgttgtggaaacattatctctccatctctga

SEQ ID NO: 874935 - DNA, 33 bp, Homo sapien
gcgcttaaaagaacaccagtttttaatgctaat

SEQ ID NO: 874936 - DNA, 33 bp, Homo sapien
gcgcttaaaagaacactagtttttaatgctaat

SEQ ID NO: 874937 - DNA, 33 bp, Homo sapien
tgcttcctaaatccaaataaaatctaagaccat

SEQ ID NO: 874938 - DNA, 33 bp, Homo sapien
tgcttcctaaatccaactaaaatctaagaccat

SEQ ID NO: 874939 - DNA, 33 bp, Homo sapien
ggttcttaattgcttggaaatctctgcttcatt

SEQ ID NO: 874940 - DNA, 33 bp, Homo sapien
ggttcttaattgcttgtaaatctctgcttcatt

SEQ ID NO: 874941 - DNA, 33 bp, Homo sapien
taagccttttctgtgacagtcaagtaggttatt

SEQ ID NO: 874942 - DNA, 33 bp, Homo sapien
taagccttttctgtgagagtcaagtaggttatt

SEQ ID NO: 874943 - DNA, 33 bp, Homo sapien
gtttgatgaacagaaagacagaggactagtgga

SEQ ID NO: 874944 - DNA, 33 bp, Homo sapien
gtttgatgaacagaaatacagaggactagtgga

SEQ ID NO: 874945 - DNA, 33 bp, Homo sapien
ccctacaaacaagagaagagactttccagactc

SEQ ID NO: 874946 - DNA, 33 bp, Homo sapien
ccctacaaacaagagaggagactttccagactc

SEQ ID NO: 874947 - DNA, 33 bp, Homo sapien
agctgagatggctaagactaagtatatgcaaga

SEQ ID NO: 874948 - DNA, 33 bp, Homo sapien
agctgagatggctaaggctaagtatatgcaaga

SEQ ID NO: 874949 - DNA, 33 bp, Homo sapien
aaggtggcaagcgaaggcctcacagagaaaggg

SEQ ID NO: 874950 - DNA, 33 bp, Homo sapien
aaggtggcaagcgaagtcctcacagagaaaggg

SEQ ID NO: 874951 - DNA, 33 bp, Homo sapien
aagtccttcaagagcacggagttttgtccattc

SEQ ID NO: 874952 - DNA, 33 bp, Homo sapien
aagtccttcaagagcagggagttttgtccattc

SEQ ID NO: 874953 - DNA, 33 bp, Homo sapien
ttactcaatttcagaaactcagacattgttacc

SEQ ID NO: 874954 - DNA, 33 bp, Homo sapien
ttactcaatttcagaagctcagacattgttacc

SEQ ID NO: 874955 - DNA, 33 bp, Homo sapien
cacgtgaagaataagacggtgagagatgtgtat

SEQ ID NO: 874956 - DNA, 33 bp, Homo sapien
cacgtgaagaataagatggtgagagatgtgtat

SEQ ID NO: 874957 - DNA, 33 bp, Homo sapien
aagccttagtcatttaggtgcatttagagatat

SEQ ID NO: 874958 - DNA, 33 bp, Homo sapien
aagccttagtcatttatgtgcatttagagatat

SEQ ID NO: 874959 - DNA, 33 bp, Homo sapien
attctttggtctgggcactaaacttccatttat

SEQ ID NO: 874960 - DNA, 33 bp, Homo sapien
attctttggtctgggcgctaaacttccatttat

SEQ ID NO: 874961 - DNA, 33 bp, Homo sapien
tatgattctcgtactacctctttctctccctct

SEQ ID NO: 874962 - DNA, 33 bp, Homo sapien
tatgattctcgtactatctctttctctccctct

SEQ ID NO: 874963 - DNA, 33 bp, Homo sapien
catgtgtcgtcaagtacattcacaggagtatga

SEQ ID NO: 874964 - DNA, 33 bp, Homo sapien
catgtgtcgtcaagtatattcacaggagtatga

SEQ ID NO: 874965 - DNA, 33 bp, Homo sapien
atggatatattttggaacaagagaaaacgtcaa

SEQ ID NO: 874966 - DNA, 33 bp, Homo sapien
atggatatattttggatcaagagaaaacgtcaa

SEQ ID NO: 874967 - DNA, 33 bp, Homo sapien
ggcaatggcttcaaaacgcctacagcaggaagc

SEQ ID NO: 874968 - DNA, 33 bp, Homo sapien
ggcaatggcttcaaaatgcctacagcaggaagc

SEQ ID NO: 874969 - DNA, 33 bp, Homo sapien
tttgagatggacttccaactcttactggaaatt

SEQ ID NO: 874970 - DNA, 33 bp, Homo sapien
tttgagatggacttccgactcttactggaaatt

SEQ ID NO: 874971 - DNA, 33 bp, Homo sapien
gaatcaatgagccagacggtttccaataatcct

SEQ ID NO: 874972 - DNA, 33 bp, Homo sapien
gaatcaatgagccagatggtttccaataatcct

SEQ ID NO: 874973 - DNA, 33 bp, Homo sapien
aaagacaagagaaaagaaatcatcttactgtgt

SEQ ID NO: 874974 - DNA, 33 bp, Homo sapien
aaagacaagagaaaaggaatcatcttactgtgt

SEQ ID NO: 874975 - DNA, 33 bp, Homo sapien
tctattgctaagatcacgagtgacactttcttg

SEQ ID NO: 874976 - DNA, 33 bp, Homo sapien
tctattgctaagatcatgagtgacactttcttg

SEQ ID NO: 874977 - DNA, 33 bp, Homo sapien
gtcatcatattggcaaaagactgtctaactaga

SEQ ID NO: 874978 - DNA, 33 bp, Homo sapien
gtcatcatattggcaagagactgtctaactaga

SEQ ID NO: 874979 - DNA, 33 bp, Homo sapien
agtggcaagcggtacacggtacagaacccaatg

SEQ ID NO: 874980 - DNA, 33 bp, Homo sapien
agtggcaagcggtacatggtacagaacccaatg

SEQ ID NO: 874981 - DNA, 33 bp, Homo sapien
aatgagcctaaaggcaagaaacaaggaagggta

SEQ ID NO: 874982 - DNA, 33 bp, Homo sapien
aatgagcctaaaggcaggaaacaaggaagggta

SEQ ID NO: 874983 - DNA, 33 bp, Homo sapien
agacagtttgaaatccacagggttatgatagga

SEQ ID NO: 874984 - DNA, 33 bp, Homo sapien
agacagtttgaaatccgcagggttatgatagga

SEQ ID NO: 874985 - DNA, 33 bp, Homo sapien
cctctatttttactgacgtgaaatctgctatcc

SEQ ID NO: 874986 - DNA, 33 bp, Homo sapien
cctctatttttactgatgtgaaatctgctatcc

SEQ ID NO: 874987 - DNA, 33 bp, Homo sapien
gcagttgcctcatctaaaacattcacttgacat

SEQ ID NO: 874988 - DNA, 33 bp, Homo sapien
gcagttgcctcatctagaacattcacttgacat

SEQ ID NO: 874989 - DNA, 33 bp, Homo sapien
ggtcatttgcaattgacatggtccacagcatca

SEQ ID NO: 874990 - DNA, 33 bp, Homo sapien
ggtcatttgcaattgatatggtccacagcatca

SEQ ID NO: 874991 - DNA, 33 bp, Homo sapien
ttttggccaaatgcctaactcaacagatggact

SEQ ID NO: 874992 - DNA, 33 bp, Homo sapien
ttttggccaaatgcctgactcaacagatggact

SEQ ID NO: 874993 - DNA, 33 bp, Homo sapien
ttacagatttgaaacactaacgatatcagttat

SEQ ID NO: 874994 - DNA, 33 bp, Homo sapien
ttacagatttgaaacattaacgatatcagttat

SEQ ID NO: 874995 - DNA, 33 bp, Homo sapien
tgttcaccattataacacaggaaacttactcaa

SEQ ID NO: 874996 - DNA, 33 bp, Homo sapien
tgttcaccattataacgcaggaaacttactcaa

SEQ ID NO: 874997 - DNA, 33 bp, Homo sapien
aagtagtagatgttaacagtataagtaaaaata

SEQ ID NO: 874998 - DNA, 33 bp, Homo sapien
aagtagtagatgttaagagtataagtaaaaata

SEQ ID NO: 874999 - DNA, 33 bp, Homo sapien
ctgggaaagtcagaaacagaaagctcagtacaa

SEQ ID NO: 875000 - DNA, 33 bp, Homo sapien
ctgggaaagtcagaaatagaaagctcagtacaa

SEQ ID NO: 875001 - DNA, 33 bp, Homo sapien
agtttgaagctttctaccacgtcaaaccaatct

SEQ ID NO: 875002 - DNA, 33 bp, Homo sapien
agtttgaagctttctatcacgtcaaaccaatct

SEQ ID NO: 875003 - DNA, 33 bp, Homo sapien
tttcatagctgtattacgaacgggcttatccta

SEQ ID NO: 875004 - DNA, 33 bp, Homo sapien
tttcatagctgtattatgaacgggcttatccta

SEQ ID NO: 875005 - DNA, 33 bp, Homo sapien
ctgtggcccagagcaaatcagtggagacctctt

SEQ ID NO: 875006 - DNA, 33 bp, Homo sapien
ctgtggcccagagcaattcagtggagacctctt

SEQ ID NO: 875007 - DNA, 33 bp, Homo sapien
gaaggtttcactgttcaacttacaaaattcttt

SEQ ID NO: 875008 - DNA, 33 bp, Homo sapien
gaaggtttcactgttcgacttacaaaattcttt

SEQ ID NO: 875009 - DNA, 33 bp, Homo sapien
tatataatagtgttgacagcagtgtggttgtga

SEQ ID NO: 875010 - DNA, 33 bp, Homo sapien
tatataatagtgttgatagcagtgtggttgtga

SEQ ID NO: 875011 - DNA, 33 bp, Homo sapien
acactgtcttgtggtaagtgccttaagattgaa

SEQ ID NO: 875012 - DNA, 33 bp, Homo sapien
acactgtcttgtggtatgtgccttaagattgaa

SEQ ID NO: 875013 - DNA, 33 bp, Homo sapien
ttttcctgggcatgaaaaatttaggctaaaaaa

SEQ ID NO: 875014 - DNA, 33 bp, Homo sapien
ttttcctgggcatgaagaatttaggctaaaaaa

SEQ ID NO: 875015 - DNA, 33 bp, Homo sapien
tatctttaatttactccgaatcttgaagaaatt

SEQ ID NO: 875016 - DNA, 33 bp, Homo sapien
tatctttaatttactctgaatcttgaagaaatt

SEQ ID NO: 875017 - DNA, 33 bp, Homo sapien
gacatcagtcatactgcattaggatccatcctt

SEQ ID NO: 875018 - DNA, 33 bp, Homo sapien
gacatcagtcatactggattaggatccatcctt

SEQ ID NO: 875019 - DNA, 33 bp, Homo sapien
acccttctctttgtaacgtgtgtgtgttcttac

SEQ ID NO: 875020 - DNA, 33 bp, Homo sapien
acccttctctttgtaatgtgtgtgtgttcttac

SEQ ID NO: 875021 - DNA, 33 bp, Homo sapien
tttgcataacatttcaaaccttctgataaatat

SEQ ID NO: 875022 - DNA, 33 bp, Homo sapien
tttgcataacatttcagaccttctgataaatat

SEQ ID NO: 875023 - DNA, 33 bp, Homo sapien
tgctcacaaatgttgaagatgatgatagtatgt

SEQ ID NO: 875024 - DNA, 33 bp, Homo sapien
tgctcacaaatgttgaggatgatgatagtatgt

SEQ ID NO: 875025 - DNA, 33 bp, Homo sapien
cctcttaagtgagggacaagttgcacatagtcc

SEQ ID NO: 875026 - DNA, 33 bp, Homo sapien
cctcttaagtgagggagaagttgcacatagtcc

SEQ ID NO: 875027 - DNA, 33 bp, Homo sapien
gcaatccttgctatagaacagtagctggagagg

SEQ ID NO: 875028 - DNA, 33 bp, Homo sapien
gcaatccttgctataggacagtagctggagagg

SEQ ID NO: 875029 - DNA, 33 bp, Homo sapien
ttagtggtgggggtgacaattctggaaatataa

SEQ ID NO: 875030 - DNA, 33 bp, Homo sapien
ttagtggtgggggtgataattctggaaatataa

SEQ ID NO: 875031 - DNA, 33 bp, Homo sapien
atgctaaatggggcaaaatattaagaattgctg

SEQ ID NO: 875032 - DNA, 33 bp, Homo sapien
atgctaaatggggcaacatattaagaattgctg

SEQ ID NO: 875033 - DNA, 33 bp, Homo sapien
tcatttccttaaagaccgggtgcctactcatca

SEQ ID NO: 875034 - DNA, 33 bp, Homo sapien
tcatttccttaaagactgggtgcctactcatca

SEQ ID NO: 875035 - DNA, 33 bp, Homo sapien
acagccccagagcctacgatggcaggcactgtt

SEQ ID NO: 875036 - DNA, 33 bp, Homo sapien
acagccccagagcctatgatggcaggcactgtt

SEQ ID NO: 875037 - DNA, 33 bp, Homo sapien
cagccatctgtcactcaccatttttaccttcta

SEQ ID NO: 875038 - DNA, 33 bp, Homo sapien
cagccatctgtcactcgccatttttaccttcta

SEQ ID NO: 875039 - DNA, 33 bp, Homo sapien
tcaaataaatacacacgcaactcattctcattc

SEQ ID NO: 875040 - DNA, 33 bp, Homo sapien
tcaaataaatacacactcaactcattctcattc

SEQ ID NO: 875041 - DNA, 33 bp, Homo sapien
cagtttagtcctttcactcctttcaaagtttgc

SEQ ID NO: 875042 - DNA, 33 bp, Homo sapien
cagtttagtcctttcagtcctttcaaagtttgc

SEQ ID NO: 875043 - DNA, 33 bp, Homo sapien
attatacattggacatcaaatgatttatagctt

SEQ ID NO: 875044 - DNA, 33 bp, Homo sapien
attatacattggacattaaatgatttatagctt

SEQ ID NO: 875045 - DNA, 33 bp, Homo sapien
ttaatgcttctcactaaaaactcaattactagg

SEQ ID NO: 875046 - DNA, 33 bp, Homo sapien
ttaatgcttctcactataaactcaattactagg

SEQ ID NO: 875047 - DNA, 33 bp, Homo sapien
aagctctacctgtccaataagttaacattcatg

SEQ ID NO: 875048 - DNA, 33 bp, Homo sapien
aagctctacctgtccagtaagttaacattcatg

SEQ ID NO: 875049 - DNA, 33 bp, Homo sapien
accagatcggatgataaggtgagttcagaatgc

SEQ ID NO: 875050 - DNA, 33 bp, Homo sapien
accagatcggatgatacggtgagttcagaatgc

SEQ ID NO: 875051 - DNA, 33 bp, Homo sapien
aaagtggtaggaaatacgcaaaaatgttgcttc

SEQ ID NO: 875052 - DNA, 33 bp, Homo sapien
aaagtggtaggaaatatgcaaaaatgttgcttc

SEQ ID NO: 875053 - DNA, 33 bp, Homo sapien
tagaatgcaatgcaccactataataagctcaac

SEQ ID NO: 875054 - DNA, 33 bp, Homo sapien
tagaatgcaatgcaccgctataataagctcaac

SEQ ID NO: 875055 - DNA, 33 bp, Homo sapien
aaatttagcacaaaagcatagaatgcaatgcac

SEQ ID NO: 875056 - DNA, 33 bp, Homo sapien
aaatttagcacaaaagtatagaatgcaatgcac

SEQ ID NO: 875057 - DNA, 33 bp, Homo sapien
ctactactatacttgcaaataacctaatgttcc

SEQ ID NO: 875058 - DNA, 33 bp, Homo sapien
ctactactatacttgcgaataacctaatgttcc

SEQ ID NO: 875059 - DNA, 33 bp, Homo sapien
ttacataatcctctcaactatctatcctcatat

SEQ ID NO: 875060 - DNA, 33 bp, Homo sapien
ttacataatcctctcagctatctatcctcatat

SEQ ID NO: 875061 - DNA, 33 bp, Homo sapien
agcagatgtctgaagacgatacttttaatcatg

SEQ ID NO: 875062 - DNA, 33 bp, Homo sapien
agcagatgtctgaagatgatacttttaatcatg

SEQ ID NO: 875063 - DNA, 33 bp, Homo sapien
tgaaataataacacaacgaggacaacaacatct

SEQ ID NO: 875064 - DNA, 33 bp, Homo sapien
tgaaataataacacaatgaggacaacaacatct

SEQ ID NO: 875065 - DNA, 33 bp, Homo sapien
tgctatcgcatggaaaattacaagcatctgttg

SEQ ID NO: 875066 - DNA, 33 bp, Homo sapien
tgctatcgcatggaaagttacaagcatctgttg

SEQ ID NO: 875067 - DNA, 33 bp, Homo sapien
aggccaatgctgcttaccaatagtgtgacttta

SEQ ID NO: 875068 - DNA, 33 bp, Homo sapien
aggccaatgctgcttatcaatagtgtgacttta

SEQ ID NO: 875069 - DNA, 33 bp, Homo sapien
ttctgcacagctttaaacaaggacagttccaaa

SEQ ID NO: 875070 - DNA, 33 bp, Homo sapien
ttctgcacagctttaatcaaggacagttccaaa

SEQ ID NO: 875071 - DNA, 33 bp, Homo sapien
gattggtttgtgactaggcaaaaatggttaaaa

SEQ ID NO: 875072 - DNA, 33 bp, Homo sapien
gattggtttgtgactatgcaaaaatggttaaaa

SEQ ID NO: 875073 - DNA, 33 bp, Homo sapien
cccaatctgctttactcaatctgccaattcaaa

SEQ ID NO: 875074 - DNA, 33 bp, Homo sapien
cccaatctgctttactgaatctgccaattcaaa

SEQ ID NO: 875075 - DNA, 33 bp, Homo sapien
agtctatgctatctccacaacctgacaaatgag

SEQ ID NO: 875076 - DNA, 33 bp, Homo sapien
agtctatgctatctccgcaacctgacaaatgag

SEQ ID NO: 875077 - DNA, 33 bp, Homo sapien
tgtaaacccttcctcacaattctaatgccaaaa

SEQ ID NO: 875078 - DNA, 33 bp, Homo sapien
tgtaaacccttcctcataattctaatgccaaaa

SEQ ID NO: 875079 - DNA, 33 bp, Homo sapien
gccatggacacaggtaggttcttgctgataatg

SEQ ID NO: 875080 - DNA, 33 bp, Homo sapien
gccatggacacaggtatgttcttgctgataatg

SEQ ID NO: 875081 - DNA, 33 bp, Homo sapien
tgcttgaaatggtgaacatagaaagtcaaaact

SEQ ID NO: 875082 - DNA, 33 bp, Homo sapien
tgcttgaaatggtgaatatagaaagtcaaaact

SEQ ID NO: 875083 - DNA, 33 bp, Homo sapien
tatacctatataaaaaacctgcacgtgtacccc

SEQ ID NO: 875084 - DNA, 33 bp, Homo sapien
tatacctatataaaaatcctgcacgtgtacccc

SEQ ID NO: 875085 - DNA, 33 bp, Homo sapien
atgtagagatgatctacgtgacttgtggtttta

SEQ ID NO: 875086 - DNA, 33 bp, Homo sapien
atgtagagatgatctatgtgacttgtggtttta

SEQ ID NO: 875087 - DNA, 33 bp, Homo sapien
ggggagggtggataaccgaaaggatcagtgtcc

SEQ ID NO: 875088 - DNA, 33 bp, Homo sapien
ggggagggtggataacggaaaggatcagtgtcc

SEQ ID NO: 875089 - DNA, 33 bp, Homo sapien
gataaagtacctacttaaagcatactggcaacc

SEQ ID NO: 875090 - DNA, 33 bp, Homo sapien
gataaagtacctacttgaagcatactggcaacc

SEQ ID NO: 875091 - DNA, 33 bp, Homo sapien
aaaacttcataatacacgatcataacttttttt

SEQ ID NO: 875092 - DNA, 33 bp, Homo sapien
aaaacttcataatacaggatcataacttttttt

SEQ ID NO: 875093 - DNA, 33 bp, Homo sapien
ccaaaatcactcatcacctatcttctctatctt

SEQ ID NO: 875094 - DNA, 33 bp, Homo sapien
ccaaaatcactcatcatctatcttctctatctt

SEQ ID NO: 875095 - DNA, 33 bp, Homo sapien
tagtctattgtagttaaaacagaaaatggaccc

SEQ ID NO: 875096 - DNA, 33 bp, Homo sapien
tagtctattgtagttacaacagaaaatggaccc

SEQ ID NO: 875097 - DNA, 33 bp, Homo sapien
atacgtgatcttacaaatgtggaaaaatttcat

SEQ ID NO: 875098 - DNA, 33 bp, Homo sapien
atacgtgatcttacaattgtggaaaaatttcat

SEQ ID NO: 875099 - DNA, 33 bp, Homo sapien
gattaatcagacgttaacatggcagatcagcat

SEQ ID NO: 875100 - DNA, 33 bp, Homo sapien
gattaatcagacgttagcatggcagatcagcat

SEQ ID NO: 875101 - DNA, 33 bp, Homo sapien
ggcaaagaactacagaatcgtgctgttggactt

SEQ ID NO: 875102 - DNA, 33 bp, Homo sapien
ggcaaagaactacagactcgtgctgttggactt

SEQ ID NO: 875103 - DNA, 33 bp, Homo sapien
gtccctagtaatgtcacgaacgcagaaggaatt

SEQ ID NO: 875104 - DNA, 33 bp, Homo sapien
gtccctagtaatgtcatgaacgcagaaggaatt

SEQ ID NO: 875105 - DNA, 33 bp, Homo sapien
ggttgagggtatttgacgacactgattgagttg

SEQ ID NO: 875106 - DNA, 33 bp, Homo sapien
ggttgagggtatttgaggacactgattgagttg

SEQ ID NO: 875107 - DNA, 33 bp, Homo sapien
gccctcatcaagtccacgtcatctgactcgcct

SEQ ID NO: 875108 - DNA, 33 bp, Homo sapien
gccctcatcaagtccatgtcatctgactcgcct

SEQ ID NO: 875109 - DNA, 33 bp, Homo sapien
tcctgaggtgaagacaccctgaagatgaaagaa

SEQ ID NO: 875110 - DNA, 33 bp, Homo sapien
tcctgaggtgaagacatcctgaagatgaaagaa

SEQ ID NO: 875111 - DNA, 33 bp, Homo sapien
gtactttattccaccccggacagtgttctttca

SEQ ID NO: 875112 - DNA, 33 bp, Homo sapien
gtactttattccaccctggacagtgttctttca

SEQ ID NO: 875113 - DNA, 33 bp, Homo sapien
cactccctataccatacctatttttcaccaaca

SEQ ID NO: 875114 - DNA, 33 bp, Homo sapien
cactccctataccatatctatttttcaccaaca

SEQ ID NO: 875115 - DNA, 33 bp, Homo sapien
tattcttatttctccacgtattagtgttctatg

SEQ ID NO: 875116 - DNA, 33 bp, Homo sapien
tattcttatttctccatgtattagtgttctatg

SEQ ID NO: 875117 - DNA, 33 bp, Homo sapien
gccctaatggaaattacagtctggagaaagata

SEQ ID NO: 875118 - DNA, 33 bp, Homo sapien
gccctaatggaaattatagtctggagaaagata

SEQ ID NO: 875119 - DNA, 33 bp, Homo sapien
gcttttaaaatcgaaaattgtactcctcatcct

SEQ ID NO: 875120 - DNA, 33 bp, Homo sapien
gcttttaaaatcgaaatttgtactcctcatcct

SEQ ID NO: 875121 - DNA, 33 bp, Homo sapien; identical to SEQ ID NO: 875119

SEQ ID NO: 875122 - DNA, 33 bp, Homo sapien; identical to SEQ ID NO: 875120

SEQ ID NO: 875123 - DNA, 33 bp, Homo sapien
atgagtgaaaaataaaacttcattgttgaaagc

SEQ ID NO: 875124 - DNA, 33 bp, Homo sapien
atgagtgaaaaataaaccttcattgttgaaagc

SEQ ID NO: 875125 - DNA, 33 bp, Homo sapien
agttcccacaggagtacatgacaaagttagagg

SEQ ID NO: 875126 - DNA, 33 bp, Homo sapien
agttcccacaggagtatatgacaaagttagagg

SEQ ID NO: 875127 - DNA, 33 bp, Homo sapien
cttatttttaaatcagcaaatctaacaataact

SEQ ID NO: 875128 - DNA, 33 bp, Homo sapien
cttatttttaaatcaggaaatctaacaataact

SEQ ID NO: 875129 - DNA, 33 bp, Homo sapien
ataattattaccttgcagaccccctgaaagggc

SEQ ID NO: 875130 - DNA, 33 bp, Homo sapien
ataattattaccttgcggaccccctgaaagggc

SEQ ID NO: 875131 - DNA, 33 bp, Homo sapien
tattaggtttctaaggacaattttaacacaata

SEQ ID NO: 875132 - DNA, 33 bp, Homo sapien
tattaggtttctaagggcaattttaacacaata

SEQ ID NO: 875133 - DNA, 33 bp, Homo sapien
gaaataaatcagccacagatgcgacacctggaa

SEQ ID NO: 875134 - DNA, 33 bp, Homo sapien
gaaataaatcagccacggatgcgacacctggaa

SEQ ID NO: 875135 - DNA, 33 bp, Homo sapien
atttaggcatgaaggaaaagatttgcaggcagt

SEQ ID NO: 875136 - DNA, 33 bp, Homo sapien
atttaggcatgaaggagaagatttgcaggcagt

SEQ ID NO: 875137 - DNA, 33 bp, Homo sapien
ttcacaaaagtatagacgatgttagcttgcctc

SEQ ID NO: 875138 - DNA, 33 bp, Homo sapien
ttcacaaaagtatagatgatgttagcttgcctc

SEQ ID NO: 875139 - DNA, 33 bp, Homo sapien
gaggcaattattgtaacgtttctccaaaactat

SEQ ID NO: 875140 - DNA, 33 bp, Homo sapien
gaggcaattattgtaatgtttctccaaaactat

SEQ ID NO: 875141 - DNA, 33 bp, Homo sapien
aagagaaggcagtcaccgaggatgaaaggggag

SEQ ID NO: 875142 - DNA, 33 bp, Homo sapien
aagagaaggcagtcactgaggatgaaaggggag

SEQ ID NO: 875143 - DNA, 33 bp, Homo sapien
tgtatgtgcataggcccggaattagaaactctg

SEQ ID NO: 875144 - DNA, 33 bp, Homo sapien
tgtatgtgcataggcctggaattagaaactctg

SEQ ID NO: 875145 - DNA, 33 bp, Homo sapien
tactgagggcatacaacgagctaaacactatgc

SEQ ID NO: 875146 - DNA, 33 bp, Homo sapien
tactgagggcatacaatgagctaaacactatgc

SEQ ID NO: 875147 - DNA, 33 bp, Homo sapien
ttttattcatttagaaataggggattttcacta

SEQ ID NO: 875148 - DNA, 33 bp, Homo sapien
ttttattcatttagaattaggggattttcacta

SEQ ID NO: 875149 - DNA, 33 bp, Homo sapien
ggccagatcgaataaaaccgcttccctctacca

SEQ ID NO: 875150 - DNA, 33 bp, Homo sapien
ggccagatcgaataaagccgcttccctctacca

SEQ ID NO: 875151 - DNA, 33 bp, Homo sapien
ggagacagacaacatacaagtaaatatccaagt

SEQ ID NO: 875152 - DNA, 33 bp, Homo sapien
ggagacagacaacatataagtaaatatccaagt

SEQ ID NO: 875153 - DNA, 33 bp, Homo sapien
ttgcttcagtgccttcaatactgtaaactttct

SEQ ID NO: 875154 - DNA, 33 bp, Homo sapien
ttgcttcagtgccttcgatactgtaaactttct

SEQ ID NO: 875155 - DNA, 33 bp, Homo sapien
ggtctagttagccagcaaatattttagaaggat

SEQ ID NO: 875156 - DNA, 33 bp, Homo sapien
ggtctagttagccagcgaatattttagaaggat

SEQ ID NO: 875157 - DNA, 33 bp, Homo sapien
cctttgattgggcaagactaggacttctgtgac

SEQ ID NO: 875158 - DNA, 33 bp, Homo sapien
cctttgattgggcaaggctaggacttctgtgac

SEQ ID NO: 875159 - DNA, 33 bp, Homo sapien
gagtgatggtaaagaacgccaaattgctatggg

SEQ ID NO: 875160 - DNA, 33 bp, Homo sapien
gagtgatggtaaagaatgccaaattgctatggg

SEQ ID NO: 875161 - DNA, 33 bp, Homo sapien
aaatacaaagctcttagccctgtttgtctcttt

SEQ ID NO: 875162 - DNA, 33 bp, Homo sapien
aaatacaaagctcttatccctgtttgtctcttt

SEQ ID NO: 875163 - DNA, 33 bp, Homo sapien
gctccttggcactccaatgaaagatgagccaaa

SEQ ID NO: 875164 - DNA, 33 bp, Homo sapien
gctccttggcactccagtgaaagatgagccaaa

SEQ ID NO: 875165 - DNA, 33 bp, Homo sapien
caaaactggaggaatcacaacacctgacttcaa

SEQ ID NO: 875166 - DNA, 33 bp, Homo sapien
caaaactggaggaatcgcaacacctgacttcaa

SEQ ID NO: 875167 - DNA, 33 bp, Homo sapien
cacaaccaccataagacgtccttattttcttga

SEQ ID NO: 875168 - DNA, 33 bp, Homo sapien
cacaaccaccataagaggtccttattttcttga

SEQ ID NO: 875169 - DNA, 33 bp, Homo sapien
gtggaatcctaagagacagcaggaagcttcagc

SEQ ID NO: 875170 - DNA, 33 bp, Homo sapien
gtggaatcctaagagatagcaggaagcttcagc

SEQ ID NO: 875171 - DNA, 33 bp, Homo sapien
acccactctccacgccacttctgcagctctgag

SEQ ID NO: 875172 - DNA, 33 bp, Homo sapien
acccactctccacgccgcttctgcagctctgag

SEQ ID NO: 875173 - DNA, 33 bp, Homo sapien
attcaagtgattagcccgacacgtaagaccctc

SEQ ID NO: 875174 - DNA, 33 bp, Homo sapien
attcaagtgattagcctgacacgtaagaccctc

SEQ ID NO: 875175 - DNA, 33 bp, Homo sapien
aatgaaacgtgaaataaaacagtgacagtgaga

SEQ ID NO: 875176 - DNA, 33 bp, Homo sapien
aatgaaacgtgaaatagaacagtgacagtgaga

SEQ ID NO: 875177 - DNA, 33 bp, Homo sapien
cttggcctccccttcacggtccaaaaatgcctg

SEQ ID NO: 875178 - DNA, 33 bp, Homo sapien
cttggcctccccttcatggtccaaaaatgcctg

SEQ ID NO: 875179 - DNA, 33 bp, Homo sapien
cgtatttccataaatccacacaatccttctgta

SEQ ID NO: 875180 - DNA, 33 bp, Homo sapien
cgtatttccataaatctacacaatccttctgta

SEQ ID NO: 875181 - DNA, 33 bp, Homo sapien
ggatccaagtctaacactgacccattaaagagt

SEQ ID NO: 875182 - DNA, 33 bp, Homo sapien
ggatccaagtctaacattgacccattaaagagt

SEQ ID NO: 875183 - DNA, 33 bp, Homo sapien
tatacattattagaagacacgataaaatctggt

SEQ ID NO: 875184 - DNA, 33 bp, Homo sapien
tatacattattagaaggcacgataaaatctggt

SEQ ID NO: 875185 - DNA, 33 bp, Homo sapien
aattctgcgaaaataactgttacttccccagat

SEQ ID NO: 875186 - DNA, 33 bp, Homo sapien
aattctgcgaaaataattgttacttccccagat

SEQ ID NO: 875187 - DNA, 33 bp, Homo sapien
tactgcaagttgtcacagcagaatactggggaa

SEQ ID NO: 875188 - DNA, 33 bp, Homo sapien
tactgcaagttgtcacggcagaatactggggaa

SEQ ID NO: 875189 - DNA, 33 bp, Homo sapien
atttctctaagcccacacaatataattttaaag

SEQ ID NO: 875190 - DNA, 33 bp, Homo sapien
atttctctaagcccacgcaatataattttaaag

SEQ ID NO: 875191 - DNA, 33 bp, Homo sapien
atactttcaggaaggaatatggtagagtatgta

SEQ ID NO: 875192 - DNA, 33 bp, Homo sapien
atactttcaggaaggattatggtagagtatgta

SEQ ID NO: 875193 - DNA, 33 bp, Homo sapien
tgaaatgaaacattaaaaggaaccaacatattc

SEQ ID NO: 875194 - DNA, 33 bp, Homo sapien
tgaaatgaaacattaagaggaaccaacatattc

SEQ ID NO: 875195 - DNA, 33 bp, Homo sapien
ctaagatttggcttccccattcatttccatttt

SEQ ID NO: 875196 - DNA, 33 bp, Homo sapien
ctaagatttggcttcctcattcatttccatttt

SEQ ID NO: 875197 - DNA, 33 bp, Homo sapien
gctatcgatatttccaaggggatttcatttatt

SEQ ID NO: 875198 - DNA, 33 bp, Homo sapien
gctatcgatatttccagggggatttcatttatt

SEQ ID NO: 875199 - DNA, 33 bp, Homo sapien
tcctgtcatggaaaaacgttaatatgttacaca

SEQ ID NO: 875200 - DNA, 33 bp, Homo sapien
tcctgtcatggaaaaatgttaatatgttacaca

SEQ ID NO: 875201 - DNA, 33 bp, Homo sapien
aacaacagtattcaaaacagcagcaaaaagcaa

SEQ ID NO: 875202 - DNA, 33 bp, Homo sapien
aacaacagtattcaaagcagcagcaaaaagcaa

SEQ ID NO: 875203 - DNA, 33 bp, Homo sapien
acatacagagtttctaacaaattgttcccagaa

SEQ ID NO: 875204 - DNA, 33 bp, Homo sapien
acatacagagtttctaccaaattgttcccagaa

SEQ ID NO: 875205 - DNA, 33 bp, Homo sapien
gggtaaatgtgcaagacgagctaaaaaaaaaaa

SEQ ID NO: 875206 - DNA, 33 bp, Homo sapien
gggtaaatgtgcaagatgagctaaaaaaaaaaa

SEQ ID NO: 875207 - DNA, 33 bp, Homo sapien
tctacctctcaggacacgaaaaataacaagaga

SEQ ID NO: 875208 - DNA, 33 bp, Homo sapien
tctacctctcaggacatgaaaaataacaagaga

SEQ ID NO: 875209 - DNA, 33 bp, Homo sapien
taattgggtacttgagaaagattcataaggccg

SEQ ID NO: 875210 - DNA, 33 bp, Homo sapien
taattgggtacttgaggaagattcataaggccg

SEQ ID NO: 875211 - DNA, 33 bp, Homo sapien
agcagagtttgcaaaacgcagtcaacaaacagg

SEQ ID NO: 875212 - DNA, 33 bp, Homo sapien
agcagagtttgcaaaatgcagtcaacaaacagg

SEQ ID NO: 875213 - DNA, 33 bp, Homo sapien
ttccacaatttactgaagtagaaaaagaataga

SEQ ID NO: 875214 - DNA, 33 bp, Homo sapien
ttccacaatttactgatgtagaaaaagaataga

SEQ ID NO: 875215 - DNA, 33 bp, Homo sapien
tctgtgtttagtccctcaacacatcagtcaaag

SEQ ID NO: 875216 - DNA, 33 bp, Homo sapien
tctgtgtttagtccctgaacacatcagtcaaag

SEQ ID NO: 875217 - DNA, 33 bp, Homo sapien
tgcacttataagtaaacgtggctgccaaggaaa

SEQ ID NO: 875218 - DNA, 33 bp, Homo sapien
tgcacttataagtaaatgtggctgccaaggaaa

SEQ ID NO: 875219 - DNA, 33 bp, Homo sapien
ttttatatgtgcaaaaatgtaataacaacaaaa

SEQ ID NO: 875220 - DNA, 33 bp, Homo sapien
ttttatatgtgcaaaattgtaataacaacaaaa

SEQ ID NO: 875221 - DNA, 33 bp, Homo sapien
aacatgtagggagagagatattttccaaaatcc

SEQ ID NO: 875222 - DNA, 33 bp, Homo sapien
aacatgtagggagagatatattttccaaaatcc

SEQ ID NO: 875223 - DNA, 33 bp, Homo sapien
gttgacacttagagtcaagcgatggttttgctt

SEQ ID NO: 875224 - DNA, 33 bp, Homo sapien
gttgacacttagagtcgagcgatggttttgctt

SEQ ID NO: 875225 - DNA, 33 bp, Homo sapien
ccatcactgactgaaccctattttgtggttgca

SEQ ID NO: 875226 - DNA, 33 bp, Homo sapien
ccatcactgactgaactctattttgtggttgca

SEQ ID NO: 875227 - DNA, 33 bp, Homo sapien
tgaatttttcaatatacatactgtcacaatgga

SEQ ID NO: 875228 - DNA, 33 bp, Homo sapien
tgaatttttcaatatagatactgtcacaatgga

SEQ ID NO: 875229 - DNA, 33 bp, Homo sapien
cattccaattctgttgcagtctgacagtttact

SEQ ID NO: 875230 - DNA, 33 bp, Homo sapien
cattccaattctgttgtagtctgacagtttact

SEQ ID NO: 875231 - DNA, 33 bp, Homo sapien
taaaatggaaatcgagccagggcataccttctc

SEQ ID NO: 875232 - DNA, 33 bp, Homo sapien
taaaatggaaatcgagtcagggcataccttctc

SEQ ID NO: 875233 - DNA, 33 bp, Homo sapien
tcaaagttcgatgaataaagactctcatcttac

SEQ ID NO: 875234 - DNA, 33 bp, Homo sapien
tcaaagttcgatgaatgaagactctcatcttac

SEQ ID NO: 875235 - DNA, 33 bp, Homo sapien
atacatgagaaaggaaaggtaataataggatgc

SEQ ID NO: 875236 - DNA, 33 bp, Homo sapien
atacatgagaaaggaatggtaataataggatgc

SEQ ID NO: 875237 - DNA, 33 bp, Homo sapien
ttcatctaactttaccacaagggagtatatgag

SEQ ID NO: 875238 - DNA, 33 bp, Homo sapien
ttcatctaactttaccgcaagggagtatatgag

SEQ ID NO: 875239 - DNA, 33 bp, Homo sapien
cctgcttggtcaagcacggagtaccgaaaaaag

SEQ ID NO: 875240 - DNA, 33 bp, Homo sapien
cctgcttggtcaagcatggagtaccgaaaaaag

SEQ ID NO: 875241 - DNA, 33 bp, Homo sapien
aaaagcctgacgataccaatcattgccaagaat

SEQ ID NO: 875242 - DNA, 33 bp, Homo sapien
aaaagcctgacgatactaatcattgccaagaat

SEQ ID NO: 875243 - DNA, 33 bp, Homo sapien
ttctgcattccaccctaagattcccccaatctc

SEQ ID NO: 875244 - DNA, 33 bp, Homo sapien
ttctgcattccaccctgagattcccccaatctc

SEQ ID NO: 875245 - DNA, 33 bp, Homo sapien
aaaaagccttatgcagcatataaactcacataa

SEQ ID NO: 875246 - DNA, 33 bp, Homo sapien
aaaaagccttatgcaggatataaactcacataa

SEQ ID NO: 875247 - DNA, 33 bp, Homo sapien
tgtgtgtcctgctctacgttagatcctgaagac

SEQ ID NO: 875248 - DNA, 33 bp, Homo sapien
tgtgtgtcctgctctatgttagatcctgaagac

SEQ ID NO: 875249 - DNA, 33 bp, Homo sapien
aggtacatggctccaccagaaagatgttgtgac

SEQ ID NO: 875250 - DNA, 33 bp, Homo sapien
aggtacatggctccactagaaagatgttgtgac

SEQ ID NO: 875251 - DNA, 33 bp, Homo sapien
tcctttccagaacagaaatctgagctagagaca

SEQ ID NO: 875252 - DNA, 33 bp, Homo sapien
tcctttccagaacagagatctgagctagagaca

SEQ ID NO: 875253 - DNA, 33 bp, Homo sapien
gggcatgtgaatttgccgagcctcttccatata

SEQ ID NO: 875254 - DNA, 33 bp, Homo sapien
gggcatgtgaatttgctgagcctcttccatata

SEQ ID NO: 875255 - DNA, 33 bp, Homo sapien
gggaaatgggagaaatcatggagaaaggaaggt

SEQ ID NO: 875256 - DNA, 33 bp, Homo sapien
gggaaatgggagaaattatggagaaaggaaggt

SEQ ID NO: 875257 - DNA, 33 bp, Homo sapien
aatatggaaagacagacgcttcgctttattaaa

SEQ ID NO: 875258 - DNA, 33 bp, Homo sapien
aatatggaaagacagatgcttcgctttattaaa

SEQ ID NO: 875259 - DNA, 33 bp, Homo sapien
acagatttacctatataacaaagctgcacatac

SEQ ID NO: 875260 - DNA, 33 bp, Homo sapien
acagatttacctatatgacaaagctgcacatac

SEQ ID NO: 875261 - DNA, 33 bp, Homo sapien
gtcaggttgctggtcggagccttcagaggtttc

SEQ ID NO: 875262 - DNA, 33 bp, Homo sapien
gtcaggttgctggtcgtagccttcagaggtttc

SEQ ID NO: 875263 - DNA, 33 bp, Homo sapien
tttccagtaaaacggaagatgattgggcaagtt

SEQ ID NO: 875264 - DNA, 33 bp, Homo sapien
tttccagtaaaacggacgatgattgggcaagtt

SEQ ID NO: 875265 - DNA, 33 bp, Homo sapien
tttacagcacatatccccgaaatccctaacctt

SEQ ID NO: 875266 - DNA, 33 bp, Homo sapien
tttacagcacatatcctcgaaatccctaacctt

SEQ ID NO: 875267 - DNA, 33 bp, Homo sapien
ccaaccaagtagttcacgatttgtaagagttca

SEQ ID NO: 875268 - DNA, 33 bp, Homo sapien
ccaaccaagtagttcatgatttgtaagagttca

SEQ ID NO: 875269 - DNA, 33 bp, Homo sapien
taagctgtcccctctacagtgttgattcctaat

SEQ ID NO: 875270 - DNA, 33 bp, Homo sapien
taagctgtcccctctatagtgttgattcctaat

SEQ ID NO: 875271 - DNA, 33 bp, Homo sapien
cttagtgactccattgaacgtctttaaacaggt

SEQ ID NO: 875272 - DNA, 33 bp, Homo sapien
cttagtgactccattgcacgtctttaaacaggt

SEQ ID NO: 875273 - DNA, 33 bp, Homo sapien
caatacttagaattgcaaagctgctaaattact

SEQ ID NO: 875274 - DNA, 33 bp, Homo sapien
caatacttagaattgcgaagctgctaaattact

SEQ ID NO: 875275 - DNA, 33 bp, Homo sapien
ctattaaaaacataaaagtttcaagtgtgtatt

SEQ ID NO: 875276 - DNA, 33 bp, Homo sapien
ctattaaaaacataaaggtttcaagtgtgtatt

SEQ ID NO: 875277 - DNA, 33 bp, Homo sapien
tgcccatgtgttgcatcaggtaattcctattat

SEQ ID NO: 875278 - DNA, 33 bp, Homo sapien
tgcccatgtgttgcattaggtaattcctattat

SEQ ID NO: 875279 - DNA, 33 bp, Homo sapien
cttcgccagggttacacaacaataacaacaacc

SEQ ID NO: 875280 - DNA, 33 bp, Homo sapien
cttcgccagggttacataacaataacaacaacc

SEQ ID NO: 875281 - DNA, 33 bp, Homo sapien
agaacatcaaaacctacacctttgtctccagcc

SEQ ID NO: 875282 - DNA, 33 bp, Homo sapien
agaacatcaaaacctatacctttgtctccagcc

SEQ ID NO: 875283 - DNA, 33 bp, Homo sapien
gtgtagtgatagtgccaaattggatctggttcc

SEQ ID NO: 875284 - DNA, 33 bp, Homo sapien
gtgtagtgatagtgcctaattggatctggttcc

SEQ ID NO: 875285 - DNA, 33 bp, Homo sapien
ttgagtcttgccaatgaaagagaaggcaataaa

SEQ ID NO: 875286 - DNA, 33 bp, Homo sapien
ttgagtcttgccaatggaagagaaggcaataaa

SEQ ID NO: 875287 - DNA, 33 bp, Homo sapien
tcatatgcaggcaccacgttaggttaggttcac

SEQ ID NO: 875288 - DNA, 33 bp, Homo sapien
tcatatgcaggcaccatgttaggttaggttcac

SEQ ID NO: 875289 - DNA, 33 bp, Homo sapien
ggagaaatgggtaagacgtacgttacaccctcc

SEQ ID NO: 875290 - DNA, 33 bp, Homo sapien
ggagaaatgggtaagatgtacgttacaccctcc

SEQ ID NO: 875291 - DNA, 33 bp, Homo sapien
tattacacactccttcacacttagaaatctatt

SEQ ID NO: 875292 - DNA, 33 bp, Homo sapien
tattacacactccttcccacttagaaatctatt

SEQ ID NO: 875293 - DNA, 33 bp, Homo sapien
ggacacagggaaataacatcacttctctaaggc

SEQ ID NO: 875294 - DNA, 33 bp, Homo sapien
ggacacagggaaataatatcacttctctaaggc

SEQ ID NO: 875295 - DNA, 33 bp, Homo sapien
taattgggctgtttaaatcacattgacgaatgc

SEQ ID NO: 875296 - DNA, 33 bp, Homo sapien
taattgggctgtttaagtcacattgacgaatgc

SEQ ID NO: 875297 - DNA, 33 bp, Homo sapien
tgattcaggttcgtaacgtgcaatgtgatttag

SEQ ID NO: 875298 - DNA, 33 bp, Homo sapien
tgattcaggttcgtaatgtgcaatgtgatttag

SEQ ID NO: 875299 - DNA, 33 bp, Homo sapien
gtcaagctcaactgccaatacctggatgacaac

SEQ ID NO: 875300 - DNA, 33 bp, Homo sapien
gtcaagctcaactgccgatacctggatgacaac

SEQ ID NO: 875301 - DNA, 33 bp, Homo sapien
atgtgacacgtcatcaatcttggtattcaggtc

SEQ ID NO: 875302 - DNA, 33 bp, Homo sapien
atgtgacacgtcatcagtcttggtattcaggtc

SEQ ID NO: 875303 - DNA, 33 bp, Homo sapien
agataataccaccaacccacctttgtctctgcc

SEQ ID NO: 875304 - DNA, 33 bp, Homo sapien
agataataccaccaactcacctttgtctctgcc

SEQ ID NO: 875305 - DNA, 33 bp, Homo sapien
tcttggttggtccctaaataaagtgaggatgag

SEQ ID NO: 875306 - DNA, 33 bp, Homo sapien
tcttggttggtccctagataaagtgaggatgag

SEQ ID NO: 875307 - DNA, 33 bp, Homo sapien
acatactagtaacttgaagaaaaaagtctttaa

SEQ ID NO: 875308 - DNA, 33 bp, Homo sapien
acatactagtaacttggagaaaaaagtctttaa

SEQ ID NO: 875309 - DNA, 33 bp, Homo sapien
ttgtgtattgaaaataaacaacacagatacagt

SEQ ID NO: 875310 - DNA, 33 bp, Homo sapien
ttgtgtattgaaaatagacaacacagatacagt

SEQ ID NO: 875311 - DNA, 33 bp, Homo sapien
atgtatcatattcataaggatctctcctgttct

SEQ ID NO: 875312 - DNA, 33 bp, Homo sapien
atgtatcatattcatacggatctctcctgttct

SEQ ID NO: 875313 - DNA, 33 bp, Homo sapien
aaggggccaggagaataatgtgcactgagatga

SEQ ID NO: 875314 - DNA, 33 bp, Homo sapien
aaggggccaggagaattatgtgcactgagatga

SEQ ID NO: 875315 - DNA, 33 bp, Homo sapien
tcctcctcctgtgtcacggtggtttcatctgta

SEQ ID NO: 875316 - DNA, 33 bp, Homo sapien
tcctcctcctgtgtcatggtggtttcatctgta

SEQ ID NO: 875317 - DNA, 33 bp, Homo sapien
taacatacaatgaccaaactggatttccactcc

SEQ ID NO: 875318 - DNA, 33 bp, Homo sapien
taacatacaatgaccacactggatttccactcc

SEQ ID NO: 875319 - DNA, 33 bp, Homo sapien
gagcttaaaacacgaacgtgataaaataatgac

SEQ ID NO: 875320 - DNA, 33 bp, Homo sapien
gagcttaaaacacgaaggtgataaaataatgac

SEQ ID NO: 875321 - DNA, 33 bp, Homo sapien
ttaggataccagattgaaaaacagcaacttaat

SEQ ID NO: 875322 - DNA, 33 bp, Homo sapien
ttaggataccagattggaaaacagcaacttaat

SEQ ID NO: 875323 - DNA, 33 bp, Homo sapien
atggttttggagtataccaagtagcttactttc

SEQ ID NO: 875324 - DNA, 33 bp, Homo sapien
atggttttggagtatagcaagtagcttactttc

SEQ ID NO: 875325 - DNA, 33 bp, Homo sapien
gccaaggcagaatgagaagaaaagggtagggtt

SEQ ID NO: 875326 - DNA, 33 bp, Homo sapien
gccaaggcagaatgaggagaaaagggtagggtt

SEQ ID NO: 875327 - DNA, 33 bp, Homo sapien
ttgaggagctggtgaactattttccatggcagc

SEQ ID NO: 875328 - DNA, 33 bp, Homo sapien
ttgaggagctggtgaattattttccatggcagc

SEQ ID NO: 875329 - DNA, 33 bp, Homo sapien
tggtcagtccacacccagaataaatggtccagg

SEQ ID NO: 875330 - DNA, 33 bp, Homo sapien
tggtcagtccacacccggaataaatggtccagg

SEQ ID NO: 875331 - DNA, 33 bp, Homo sapien
taagggctaagcatgcaccgttgagatgttctt

SEQ ID NO: 875332 - DNA, 33 bp, Homo sapien
taagggctaagcatgcgccgttgagatgttctt

SEQ ID NO: 875333 - DNA, 33 bp, Homo sapien
ctaccccagtgtcaaaatggagtctcttaagat

SEQ ID NO: 875334 - DNA, 33 bp, Homo sapien
ctaccccagtgtcaaagtggagtctcttaagat

SEQ ID NO: 875335 - DNA, 33 bp, Homo sapien
gaattctaaaactggaaagactcttagttattc

SEQ ID NO: 875336 - DNA, 33 bp, Homo sapien
gaattctaaaactggagagactcttagttattc

SEQ ID NO: 875337 - DNA, 33 bp, Homo sapien
gctttgaagtcaaaagccctggcgtgaaccact

SEQ ID NO: 875338 - DNA, 33 bp, Homo sapien
gctttgaagtcaaaaggcctggcgtgaaccact

SEQ ID NO: 875339 - DNA, 33 bp, Homo sapien
caagtaagacaaaaccactgatccaagcaatct

SEQ ID NO: 875340 - DNA, 33 bp, Homo sapien
caagtaagacaaaaccgctgatccaagcaatct

SEQ ID NO: 875341 - DNA, 33 bp, Homo sapien
ccaggacataagagtaaaaattgctttctatct

SEQ ID NO: 875342 - DNA, 33 bp, Homo sapien
ccaggacataagagtacaaattgctttctatct

SEQ ID NO: 875343 - DNA, 33 bp, Homo sapien
cagaggcaaaacaacacaaataccctaagcaga

SEQ ID NO: 875344 - DNA, 33 bp, Homo sapien
cagaggcaaaacaacataaataccctaagcaga

SEQ ID NO: 875345 - DNA, 33 bp, Homo sapien
gaggaacaatcgacaccgaacaaataatataga

SEQ ID NO: 875346 - DNA, 33 bp, Homo sapien
gaggaacaatcgacactgaacaaataatataga

SEQ ID NO: 875347 - DNA, 33 bp, Homo sapien
ttggccaccctttatcagaacgtatttgttagg

SEQ ID NO: 875348 - DNA, 33 bp, Homo sapien
ttggccaccctttatcggaacgtatttgttagg

SEQ ID NO: 875349 - DNA, 33 bp, Homo sapien
agagaggttaaacgtacgccacaatttgagtga

SEQ ID NO: 875350 - DNA, 33 bp, Homo sapien
agagaggttaaacgtatgccacaatttgagtga

SEQ ID NO: 875351 - DNA, 33 bp, Homo sapien
tgtttgtacgtgaaacagagttttggtgaattt

SEQ ID NO: 875352 - DNA, 33 bp, Homo sapien
tgtttgtacgtgaaaccgagttttggtgaattt

SEQ ID NO: 875353 - DNA, 33 bp, Homo sapien
atatacatatttaatgaaaaagtgagtctaacc

SEQ ID NO: 875354 - DNA, 33 bp, Homo sapien
atatacatatttaatgtaaaagtgagtctaacc

SEQ ID NO: 875355 - DNA, 33 bp, Homo sapien
gctggtcaaactatgacacaaccattcaatggg

SEQ ID NO: 875356 - DNA, 33 bp, Homo sapien
gctggtcaaactatgatacaaccattcaatggg

SEQ ID NO: 875357 - DNA, 33 bp, Homo sapien
aagtaaagatgaagtacagaggcattcacagag

SEQ ID NO: 875358 - DNA, 33 bp, Homo sapien
aagtaaagatgaagtatagaggcattcacagag

SEQ ID NO: 875359 - DNA, 33 bp, Homo sapien
agggaaagagccagacaaaaaaatcttgtgaaa

SEQ ID NO: 875360 - DNA, 33 bp, Homo sapien
agggaaagagccagaccaaaaaatcttgtgaaa

SEQ ID NO: 875361 - DNA, 33 bp, Homo sapien
tctgtaatttgagaaactgcagtaactctcaga

SEQ ID NO: 875362 - DNA, 33 bp, Homo sapien
tctgtaatttgagaaagtgcagtaactctcaga

SEQ ID NO: 875363 - DNA, 33 bp, Homo sapien
aggtaccccagatgcacagttaaaaattagact

SEQ ID NO: 875364 - DNA, 33 bp, Homo sapien
aggtaccccagatgcagagttaaaaattagact

SEQ ID NO: 875365 - DNA, 33 bp, Homo sapien
ctttatcactgttccacctctctcaatggagaa

SEQ ID NO: 875366 - DNA, 33 bp, Homo sapien
ctttatcactgttccatctctctcaatggagaa

SEQ ID NO: 875367 - DNA, 33 bp, Homo sapien
agatctcagcaatatgccacttcctgctcggcc

SEQ ID NO: 875368 - DNA, 33 bp, Homo sapien
agatctcagcaatatgtcacttcctgctcggcc

SEQ ID NO: 875369 - DNA, 33 bp, Homo sapien
catgaacctcaggaaacgtacatgaatcaacat

SEQ ID NO: 875370 - DNA, 33 bp, Homo sapien
catgaacctcaggaaatgtacatgaatcaacat

SEQ ID NO: 875371 - DNA, 33 bp, Homo sapien
tccacccataagagcaactttttccaggaagtt

SEQ ID NO: 875372 - DNA, 33 bp, Homo sapien
tccacccataagagcatctttttccaggaagtt

SEQ ID NO: 875373 - DNA, 33 bp, Homo sapien
tcctatcacaatgctacagggtgcagatgcttt

SEQ ID NO: 875374 - DNA, 33 bp, Homo sapien
tcctatcacaatgctagagggtgcagatgcttt

SEQ ID NO: 875375 - DNA, 33 bp, Homo sapien
gaaaattgagctgcacaaagccagtgcctgagg

SEQ ID NO: 875376 - DNA, 33 bp, Homo sapien
gaaaattgagctgcaccaagccagtgcctgagg

SEQ ID NO: 875377 - DNA, 33 bp, Homo sapien
gctcaggatttgtctcacttggcagggaagcag

SEQ ID NO: 875378 - DNA, 33 bp, Homo sapien
gctcaggatttgtctcgcttggcagggaagcag

SEQ ID NO: 875379 - DNA, 33 bp, Homo sapien
taataaatgtaactgaccaactcagcagccaat

SEQ ID NO: 875380 - DNA, 33 bp, Homo sapien
taataaatgtaactgagcaactcagcagccaat

SEQ ID NO: 875381 - DNA, 33 bp, Homo sapien
aattttttagagctaaagtccagaaagatcatc

SEQ ID NO: 875382 - DNA, 33 bp, Homo sapien
aattttttagagctaaggtccagaaagatcatc

SEQ ID NO: 875383 - DNA, 33 bp, Homo sapien
aatttgtctgtaaataaagtgtgatttgactaa

SEQ ID NO: 875384 - DNA, 33 bp, Homo sapien
aatttgtctgtaaatagagtgtgatttgactaa

SEQ ID NO: 875385 - DNA, 33 bp, Homo sapien
catctacctcttctccactgttgacaccagaaa

SEQ ID NO: 875386 - DNA, 33 bp, Homo sapien
catctacctcttctccgctgttgacaccagaaa

SEQ ID NO: 875387 - DNA, 33 bp, Homo sapien
ctttggacttgactaacgtgggtttaaacccat

SEQ ID NO: 875388 - DNA, 33 bp, Homo sapien
ctttggacttgactaatgtgggtttaaacccat

SEQ ID NO: 875389 - DNA, 33 bp, Homo sapien
atatgtgttttgattccctcagcagttactgaa

SEQ ID NO: 875390 - DNA, 33 bp, Homo sapien
atatgtgttttgattctctcagcagttactgaa

SEQ ID NO: 875391 - DNA, 33 bp, Homo sapien
tgtgaagtatttctcaataattaagtaccattc

SEQ ID NO: 875392 - DNA, 33 bp, Homo sapien
tgtgaagtatttctcagtaattaagtaccattc

SEQ ID NO: 875393 - DNA, 33 bp, Homo sapien
cacgtgtcaaagtcacagcccactaaaagcctg

SEQ ID NO: 875394 - DNA, 33 bp, Homo sapien
cacgtgtcaaagtcacggcccactaaaagcctg

SEQ ID NO: 875395 - DNA, 33 bp, Homo sapien
ccaaatgatctgtaagacacaaaataaatcaga

SEQ ID NO: 875396 - DNA, 33 bp, Homo sapien
ccaaatgatctgtaaggcacaaaataaatcaga

SEQ ID NO: 875397 - DNA, 33 bp, Homo sapien
ataatcattcttttcacgtggcctcagaacata

SEQ ID NO: 875398 - DNA, 33 bp, Homo sapien
ataatcattcttttcatgtggcctcagaacata

SEQ ID NO: 875399 - DNA, 33 bp, Homo sapien
aatttaagacactaccaaactgttttcccgagt

SEQ ID NO: 875400 - DNA, 33 bp, Homo sapien
aatttaagacactaccgaactgttttcccgagt

SEQ ID NO: 875401 - DNA, 33 bp, Homo sapien
gcaagcctgtgaacagccacgggctagagaagg

SEQ ID NO: 875402 - DNA, 33 bp, Homo sapien
gcaagcctgtgaacagtcacgggctagagaagg

SEQ ID NO: 875403 - DNA, 33 bp, Homo sapien
cttcaggtgtaataaaagtgtattcattgtgta

SEQ ID NO: 875404 - DNA, 33 bp, Homo sapien
cttcaggtgtaataaatgtgtattcattgtgta

SEQ ID NO: 875405 - DNA, 33 bp, Homo sapien
gtcacctgactgataaaaaagaaatcactctgc

SEQ ID NO: 875406 - DNA, 33 bp, Homo sapien
gtcacctgactgataacaaagaaatcactctgc

SEQ ID NO: 875407 - DNA, 33 bp, Homo sapien
ttgggagatgaaaggacgttggaatgtctttga

SEQ ID NO: 875408 - DNA, 33 bp, Homo sapien
ttgggagatgaaaggatgttggaatgtctttga

SEQ ID NO: 875409 - DNA, 33 bp, Homo sapien
tcaagaggattacacacatcatcaacagtgcct

SEQ ID NO: 875410 - DNA, 33 bp, Homo sapien
tcaagaggattacacatatcatcaacagtgcct

SEQ ID NO: 875411 - DNA, 33 bp, Homo sapien
tttgaggctctcagacccggaatgagctactac

SEQ ID NO: 875412 - DNA, 33 bp, Homo sapien
tttgaggctctcagacgcggaatgagctactac

SEQ ID NO: 875413 - DNA, 33 bp, Homo sapien
taaaaatccagacttaagcgactcaagtttctc

SEQ ID NO: 875414 - DNA, 33 bp, Homo sapien
taaaaatccagacttaggcgactcaagtttctc

SEQ ID NO: 875415 - DNA, 33 bp, Homo sapien
ttaaatctgagtgagaataaggtatatgcggtg

SEQ ID NO: 875416 - DNA, 33 bp, Homo sapien
ttaaatctgagtgagagtaaggtatatgcggtg

SEQ ID NO: 875417 - DNA, 33 bp, Homo sapien
atcatcatctaaatcacatctgcacgctaatta

SEQ ID NO: 875418 - DNA, 33 bp, Homo sapien
atcatcatctaaatcatatctgcacgctaatta

SEQ ID NO: 875419 - DNA, 33 bp, Homo sapien
agcctgactcagggaactggcaatatgtgctca

SEQ ID NO: 875420 - DNA, 33 bp, Homo sapien
agcctgactcagggaattggcaatatgtgctca

SEQ ID NO: 875421 - DNA, 33 bp, Homo sapien
tggtaatttcagctcaagaattattatggccag

SEQ ID NO: 875422 - DNA, 33 bp, Homo sapien
tggtaatttcagctcaggaattattatggccag

SEQ ID NO: 875423 - DNA, 33 bp, Homo sapien
agaattaacaaagagacgtatgaaactgaagaa

SEQ ID NO: 875424 - DNA, 33 bp, Homo sapien
agaattaacaaagagatgtatgaaactgaagaa

SEQ ID NO: 875425 - DNA, 33 bp, Homo sapien
gttccagggtatttcacagcatgtcaaggacat

SEQ ID NO: 875426 - DNA, 33 bp, Homo sapien
gttccagggtatttcagagcatgtcaaggacat

SEQ ID NO: 875427 - DNA, 33 bp, Homo sapien
gacttctttccatagcactctgattatgctgtt

SEQ ID NO: 875428 - DNA, 33 bp, Homo sapien
gacttctttccatagcgctctgattatgctgtt

SEQ ID NO: 875429 - DNA, 33 bp, Homo sapien
ccagcatccatattgacaaaccttggcagaatg

SEQ ID NO: 875430 - DNA, 33 bp, Homo sapien
ccagcatccatattgataaaccttggcagaatg

SEQ ID NO: 875431 - DNA, 33 bp, Homo sapien
aatgttgtaaagtttacaaattgctttcactca

SEQ ID NO: 875432 - DNA, 33 bp, Homo sapien
aatgttgtaaagtttataaattgctttcactca

SEQ ID NO: 875433 - DNA, 33 bp, Homo sapien
tgtttttaccatagaagatccttaaaagttgac

SEQ ID NO: 875434 - DNA, 33 bp, Homo sapien
tgtttttaccatagaatatccttaaaagttgac

SEQ ID NO: 875435 - DNA, 33 bp, Homo sapien
acatctgtgaaggaacaaacatgcgacactctg

SEQ ID NO: 875436 - DNA, 33 bp, Homo sapien
acatctgtgaaggaacgaacatgcgacactctg

SEQ ID NO: 875437 - DNA, 33 bp, Homo sapien
cggttaatatggtcaactcagatggttaaatgt

SEQ ID NO: 875438 - DNA, 33 bp, Homo sapien
cggttaatatggtcaattcagatggttaaatgt

SEQ ID NO: 875439 - DNA, 33 bp, Homo sapien
ctaactttaagaaaccagagaaagaagaacaaa

SEQ ID NO: 875440 - DNA, 33 bp, Homo sapien
ctaactttaagaaaccggagaaagaagaacaaa

SEQ ID NO: 875441 - DNA, 33 bp, Homo sapien
tgctgagcggagttgacggataattaactagaa

SEQ ID NO: 875442 - DNA, 33 bp, Homo sapien
tgctgagcggagttgatggataattaactagaa

SEQ ID NO: 875443 - DNA, 33 bp, Homo sapien
gagtgtgggtttatcaaatcccgaaaaaggcta

SEQ ID NO: 875444 - DNA, 33 bp, Homo sapien
gagtgtgggtttatcacatcccgaaaaaggcta

SEQ ID NO: 875445 - DNA, 33 bp, Homo sapien
gaggaactgaagaaaaaacctaccgattcacta

SEQ ID NO: 875446 - DNA, 33 bp, Homo sapien
gaggaactgaagaaaagacctaccgattcacta

SEQ ID NO: 875447 - DNA, 33 bp, Homo sapien
agtgatgcagtatagacgggctatgtatttctc

SEQ ID NO: 875448 - DNA, 33 bp, Homo sapien
agtgatgcagtatagatgggctatgtatttctc

SEQ ID NO: 875449 - DNA, 33 bp, Homo sapien
tagtaggtaactatgcacaatgaagtgaacaaa

SEQ ID NO: 875450 - DNA, 33 bp, Homo sapien
tagtaggtaactatgctcaatgaagtgaacaaa

SEQ ID NO: 875451 - DNA, 33 bp, Homo sapien
aatgaaacaatgccaccgagttattcattgtgt

SEQ ID NO: 875452 - DNA, 33 bp, Homo sapien
aatgaaacaatgccacggagttattcattgtgt

SEQ ID NO: 875453 - DNA, 33 bp, Homo sapien
caataagtctttgaacgcttgccattcagggaa

SEQ ID NO: 875454 - DNA, 33 bp, Homo sapien
caataagtctttgaactcttgccattcagggaa

SEQ ID NO: 875455 - DNA, 33 bp, Homo sapien
tctctcaatgatttgcccccaaagactacttct

SEQ ID NO: 875456 - DNA, 33 bp, Homo sapien
tctctcaatgatttgctcccaaagactacttct

SEQ ID NO: 875457 - DNA, 33 bp, Homo sapien
ttctgaaacaggtatagagcgtaaaatgattcc

SEQ ID NO: 875458 - DNA, 33 bp, Homo sapien
ttctgaaacaggtatatagcgtaaaatgattcc

SEQ ID NO: 875459 - DNA, 33 bp, Homo sapien
tcaagatgcattttcacagttgagcacagacaa

SEQ ID NO: 875460 - DNA, 33 bp, Homo sapien
tcaagatgcattttcatagttgagcacagacaa

SEQ ID NO: 875461 - DNA, 33 bp, Homo sapien
ttaataccatgaccaaatatttctgactgacac

SEQ ID NO: 875462 - DNA, 33 bp, Homo sapien
ttaataccatgaccaagtatttctgactgacac

SEQ ID NO: 875463 - DNA, 33 bp, Homo sapien
tggaaggaaaattgtaagtattgtcaccactgt

SEQ ID NO: 875464 - DNA, 33 bp, Homo sapien
tggaaggaaaattgtacgtattgtcaccactgt

SEQ ID NO: 875465 - DNA, 33 bp, Homo sapien
aattaagtgatgatcaatagttcataaggaaaa

SEQ ID NO: 875466 - DNA, 33 bp, Homo sapien
aattaagtgatgatcagtagttcataaggaaaa

SEQ ID NO: 875467 - DNA, 33 bp, Homo sapien
aatgttgtcctcttaaagatatgaacatgtcca

SEQ ID NO: 875468 - DNA, 33 bp, Homo sapien
aatgttgtcctcttaaggatatgaacatgtcca

SEQ ID NO: 875469 - DNA, 33 bp, Homo sapien
gcacactcaccagcaacgtcctgagaataaata

SEQ ID NO: 875470 - DNA, 33 bp, Homo sapien
gcacactcaccagcaatgtcctgagaataaata

SEQ ID NO: 875471 - DNA, 33 bp, Homo sapien
gataacaaaaataatgcaagtacacaagggata

SEQ ID NO: 875472 - DNA, 33 bp, Homo sapien
gataacaaaaataatggaagtacacaagggata

SEQ ID NO: 875473 - DNA, 33 bp, Homo sapien
catctttcagctgaaggatttacgtgctcctaa

SEQ ID NO: 875474 - DNA, 33 bp, Homo sapien
catctttcagctgaagtatttacgtgctcctaa

SEQ ID NO: 875475 - DNA, 33 bp, Homo sapien
acgtgctcctaaatgcaaaatcatctaatactg

SEQ ID NO: 875476 - DNA, 33 bp, Homo sapien
acgtgctcctaaatgcgaaatcatctaatactg

SEQ ID NO: 875477 - DNA, 33 bp, Homo sapien
aaaggcagaattcataccatttccccaaatcac

SEQ ID NO: 875478 - DNA, 33 bp, Homo sapien
aaaggcagaattcatatcatttccccaaatcac

SEQ ID NO: 875479 - DNA, 33 bp, Homo sapien
ccccccagtcagaagccagatggtctttctact

SEQ ID NO: 875480 - DNA, 33 bp, Homo sapien
ccccccagtcagaagctagatggtctttctact

SEQ ID NO: 875481 - DNA, 33 bp, Homo sapien
tttctcttgttttacaacctcgtctttctgaaa

SEQ ID NO: 875482 - DNA, 33 bp, Homo sapien
tttctcttgttttacagcctcgtctttctgaaa

SEQ ID NO: 875483 - DNA, 33 bp, Homo sapien
agtaagtagtagtttcaacttggtctgaagaca

SEQ ID NO: 875484 - DNA, 33 bp, Homo sapien
agtaagtagtagtttccacttggtctgaagaca

SEQ ID NO: 875485 - DNA, 33 bp, Homo sapien
ctttccctttctctccaataaaatgccaattta

SEQ ID NO: 875486 - DNA, 33 bp, Homo sapien
ctttccctttctctcctataaaatgccaattta

SEQ ID NO: 875487 - DNA, 33 bp, Homo sapien
gtctcctccacagtgacaagaagagaggtggca

SEQ ID NO: 875488 - DNA, 33 bp, Homo sapien
gtctcctccacagtgagaagaagagaggtggca

SEQ ID NO: 875489 - DNA, 33 bp, Homo sapien
ccatgaaccttgagaacagagaatagttatttc

SEQ ID NO: 875490 - DNA, 33 bp, Homo sapien
ccatgaaccttgagaatagagaatagttatttc

SEQ ID NO: 875491 - DNA, 33 bp, Homo sapien
taatcaaacagaatctgagaaggttaaatgact

SEQ ID NO: 875492 - DNA, 33 bp, Homo sapien
taatcaaacagaatcttagaaggttaaatgact

SEQ ID NO: 875493 - DNA, 33 bp, Homo sapien
ggtgaagcctagaagaatcactgaattgctact

SEQ ID NO: 875494 - DNA, 33 bp, Homo sapien
ggtgaagcctagaagagtcactgaattgctact

SEQ ID NO: 875495 - DNA, 33 bp, Homo sapien
tatactgcagttaagaaaagaaggaagaaaaga

SEQ ID NO: 875496 - DNA, 33 bp, Homo sapien
tatactgcagttaagacaagaaggaagaaaaga

SEQ ID NO: 875497 - DNA, 33 bp, Homo sapien
tgctgactgaaaatcaaaatggagcataactat

SEQ ID NO: 875498 - DNA, 33 bp, Homo sapien
tgctgactgaaaatcagaatggagcataactat

SEQ ID NO: 875499 - DNA, 33 bp, Homo sapien
aggagtccatgattcacgtgggtacaacattgt

SEQ ID NO: 875500 - DNA, 33 bp, Homo sapien
aggagtccatgattcaggtgggtacaacattgt

SEQ ID NO: 875501 - DNA, 33 bp, Homo sapien
tattccgctattgatgcaccaagctaaggaatg

SEQ ID NO: 875502 - DNA, 33 bp, Homo sapien
tattccgctattgatgtaccaagctaaggaatg

SEQ ID NO: 875503 - DNA, 33 bp, Homo sapien
atttatatttgttttaaagccactgtgagcccc

SEQ ID NO: 875504 - DNA, 33 bp, Homo sapien
atttatatttgttttagagccactgtgagcccc

SEQ ID NO: 875505 - DNA, 33 bp, Homo sapien
agtttcttctctttgcacgatgttgattcaatt

SEQ ID NO: 875506 - DNA, 33 bp, Homo sapien
agtttcttctctttgcccgatgttgattcaatt

SEQ ID NO: 875507 - DNA, 33 bp, Homo sapien
gggctaagagataatacggaccgggtgaactgg

SEQ ID NO: 875508 - DNA, 33 bp, Homo sapien
gggctaagagataatatggaccgggtgaactgg

SEQ ID NO: 875509 - DNA, 33 bp, Homo sapien
taaacctgcaattgtacgccaaaagagaggacc

SEQ ID NO: 875510 - DNA, 33 bp, Homo sapien
taaacctgcaattgtatgccaaaagagaggacc

SEQ ID NO: 875511 - DNA, 33 bp, Homo sapien
aacatgaaaagtgttccacttcagaaaaaatat

SEQ ID NO: 875512 - DNA, 33 bp, Homo sapien
aacatgaaaagtgttctacttcagaaaaaatat

SEQ ID NO: 875513 - DNA, 33 bp, Homo sapien
ggacatttgtgtgagacgaccagtcaggtccgt

SEQ ID NO: 875514 - DNA, 33 bp, Homo sapien
ggacatttgtgtgagatgaccagtcaggtccgt

SEQ ID NO: 875515 - DNA, 33 bp, Homo sapien
ccacattttatcttgcaaaactatttggcctag

SEQ ID NO: 875516 - DNA, 33 bp, Homo sapien
ccacattttatcttgcgaaactatttggcctag

SEQ ID NO: 875517 - DNA, 33 bp, Homo sapien
agatagaacaaactggaaggcaaacagagcaag

SEQ ID NO: 875518 - DNA, 33 bp, Homo sapien
agatagaacaaactgggaggcaaacagagcaag

SEQ ID NO: 875519 - DNA, 33 bp, Homo sapien
aactctttgcatctacaattatttactgaatag

SEQ ID NO: 875520 - DNA, 33 bp, Homo sapien
aactctttgcatctactattatttactgaatag

SEQ ID NO: 875521 - DNA, 33 bp, Homo sapien
gacttaactccttcacacttcaaccttcttatc

SEQ ID NO: 875522 - DNA, 33 bp, Homo sapien
gacttaactccttcacgcttcaaccttcttatc

SEQ ID NO: 875523 - DNA, 33 bp, Homo sapien
gtaagataatgtaggactattcaggattaactg

SEQ ID NO: 875524 - DNA, 33 bp, Homo sapien
gtaagataatgtaggagtattcaggattaactg

SEQ ID NO: 875525 - DNA, 33 bp, Homo sapien
gattcaaagctgcctcaaactcacacaggaatg

SEQ ID NO: 875526 - DNA, 33 bp, Homo sapien
gattcaaagctgcctcgaactcacacaggaatg

SEQ ID NO: 875527 - DNA, 33 bp, Homo sapien
gtggtgttctggccaaatgcatcactctttcag

SEQ ID NO: 875528 - DNA, 33 bp, Homo sapien
gtggtgttctggccaagtgcatcactctttcag

SEQ ID NO: 875529 - DNA, 33 bp, Homo sapien
ctcagttctgatgacacggagaaatgagtttgg

SEQ ID NO: 875530 - DNA, 33 bp, Homo sapien
ctcagttctgatgacagggagaaatgagtttgg

SEQ ID NO: 875531 - DNA, 33 bp, Homo sapien
atgatctgtaataatcccaaagggctcatttca

SEQ ID NO: 875532 - DNA, 33 bp, Homo sapien
atgatctgtaataatctcaaagggctcatttca

SEQ ID NO: 875533 - DNA, 33 bp, Homo sapien
tacttctttctctttccactcgcttgttctctc

SEQ ID NO: 875534 - DNA, 33 bp, Homo sapien
tacttctttctctttctactcgcttgttctctc

SEQ ID NO: 875535 - DNA, 33 bp, Homo sapien
tacctctaggaactcactctgtgcaatgtgctc

SEQ ID NO: 875536 - DNA, 33 bp, Homo sapien
tacctctaggaactcattctgtgcaatgtgctc

SEQ ID NO: 875537 - DNA, 33 bp, Homo sapien
ataatgggtaacaatacggcattttaaagaact

SEQ ID NO: 875538 - DNA, 33 bp, Homo sapien
ataatgggtaacaatatggcattttaaagaact

SEQ ID NO: 875539 - DNA, 33 bp, Homo sapien
gccatttctgccttgaagaatataatggtgatc

SEQ ID NO: 875540 - DNA, 33 bp, Homo sapien
gccatttctgccttgaggaatataatggtgatc

SEQ ID NO: 875541 - DNA, 33 bp, Homo sapien
aaacccctctgtgtaaatgagaatggaaaactg

SEQ ID NO: 875542 - DNA, 33 bp, Homo sapien
aaacccctctgtgtaagtgagaatggaaaactg

SEQ ID NO: 875543 - DNA, 33 bp, Homo sapien
cagagcttgcaattaaacatgagagatccaact

SEQ ID NO: 875544 - DNA, 33 bp, Homo sapien
cagagcttgcaattaatcatgagagatccaact

SEQ ID NO: 875545 - DNA, 33 bp, Homo sapien
agagaacttgaatgataagtccaagtgaacaca

SEQ ID NO: 875546 - DNA, 33 bp, Homo sapien
agagaacttgaatgatgagtccaagtgaacaca

SEQ ID NO: 875547 - DNA, 33 bp, Homo sapien
gcattaactcagcccactcttgagcataaaaga

SEQ ID NO: 875548 - DNA, 33 bp, Homo sapien
gcattaactcagcccattcttgagcataaaaga

SEQ ID NO: 875549 - DNA, 33 bp, Homo sapien
gccaaaacaacactccaagccgcttcaatcctc

SEQ ID NO: 875550 - DNA, 33 bp, Homo sapien
gccaaaacaacactccgagccgcttcaatcctc

SEQ ID NO: 875551 - DNA, 33 bp, Homo sapien
taagagtctggccatacccctagttgtacaaca

SEQ ID NO: 875552 - DNA, 33 bp, Homo sapien
taagagtctggccatatccctagttgtacaaca

SEQ ID NO: 875553 - DNA, 33 bp, Homo sapien
aaaaacatggcattagaaaacaggaaaccaaag

SEQ ID NO: 875554 - DNA, 33 bp, Homo sapien
aaaaacatggcattaggaaacaggaaaccaaag

SEQ ID NO: 875555 - DNA, 33 bp, Homo sapien
tactttcctctttctcccaacagctcaaagctg

SEQ ID NO: 875556 - DNA, 33 bp, Homo sapien
tactttcctctttctctcaacagctcaaagctg

SEQ ID NO: 875557 - DNA, 33 bp, Homo sapien
atgtgacacaaagcaaataatctccactctcac

SEQ ID NO: 875558 - DNA, 33 bp, Homo sapien
atgtgacacaaagcaattaatctccactctcac

SEQ ID NO: 875559 - DNA, 33 bp, Homo sapien
gaaatgaaagtatggccatgatgtcatatgtaa

SEQ ID NO: 875560 - DNA, 33 bp, Homo sapien
gaaatgaaagtatggctatgatgtcatatgtaa

SEQ ID NO: 875561 - DNA, 33 bp, Homo sapien
tatacaggaaaaatccaatttagagaatgtcag

SEQ ID NO: 875562 - DNA, 33 bp, Homo sapien
tatacaggaaaaatccgatttagagaatgtcag

SEQ ID NO: 875563 - DNA, 33 bp, Homo sapien
tgatataacttggtcccatcaaataataggaga

SEQ ID NO: 875564 - DNA, 33 bp, Homo sapien
tgatataacttggtcctatcaaataataggaga

SEQ ID NO: 875565 - DNA, 33 bp, Homo sapien
actgtctctattttagaaccccactgcctgtga

SEQ ID NO: 875566 - DNA, 33 bp, Homo sapien
actgtctctattttaggaccccactgcctgtga

SEQ ID NO: 875567 - DNA, 33 bp, Homo sapien
gaaatactgtgaaaccaattgttgaggaaacag

SEQ ID NO: 875568 - DNA, 33 bp, Homo sapien
gaaatactgtgaaaccgattgttgaggaaacag

SEQ ID NO: 875569 - DNA, 33 bp, Homo sapien
tttatgagcttcccaggaggtggtggtgcagtc

SEQ ID NO: 875570 - DNA, 33 bp, Homo sapien
tttatgagcttcccagtaggtggtggtgcagtc

SEQ ID NO: 875571 - DNA, 33 bp, Homo sapien
ggaaacaccagggaagaaccttcagcaaaggca

SEQ ID NO: 875572 - DNA, 33 bp, Homo sapien
ggaaacaccagggaagcaccttcagcaaaggca

SEQ ID NO: 875573 - DNA, 33 bp, Homo sapien
cgacatttttaaaagcacattagagttgacata

SEQ ID NO: 875574 - DNA, 33 bp, Homo sapien
cgacatttttaaaagctcattagagttgacata

SEQ ID NO: 875575 - DNA, 33 bp, Homo sapien
gtgttgacttgatttacagattagtttatgtcc

SEQ ID NO: 875576 - DNA, 33 bp, Homo sapien
gtgttgacttgatttatagattagtttatgtcc

SEQ ID NO: 875577 - DNA, 33 bp, Homo sapien
aggtggatggagagccaagcaatatgaggaggg

SEQ ID NO: 875578 - DNA, 33 bp, Homo sapien
aggtggatggagagccgagcaatatgaggaggg

SEQ ID NO: 875579 - DNA, 33 bp, Homo sapien
aaagagtgagtgcatacggcctcagcctagagt

SEQ ID NO: 875580 - DNA, 33 bp, Homo sapien
aaagagtgagtgcatatggcctcagcctagagt

SEQ ID NO: 875581 - DNA, 33 bp, Homo sapien
ttaatgtatttgtgccacttcctttccttccta

SEQ ID NO: 875582 - DNA, 33 bp, Homo sapien
ttaatgtatttgtgccgcttcctttccttccta

SEQ ID NO: 875583 - DNA, 33 bp, Homo sapien
gtgtaaataaccaaataagccatcatttcaatt

SEQ ID NO: 875584 - DNA, 33 bp, Homo sapien
gtgtaaataaccaaatcagccatcatttcaatt

SEQ ID NO: 875585 - DNA, 33 bp, Homo sapien
tacctgaaacagaaaacgatctttggaaatgga

SEQ ID NO: 875586 - DNA, 33 bp, Homo sapien
tacctgaaacagaaaatgatctttggaaatgga

SEQ ID NO: 875587 - DNA, 33 bp, Homo sapien
aatggcaaaagtgccacgttgaaattactgtga

SEQ ID NO: 875588 - DNA, 33 bp, Homo sapien
aatggcaaaagtgccatgttgaaattactgtga

SEQ ID NO: 875589 - DNA, 33 bp, Homo sapien
cagtcaaggggactgaaagttcatggtgaaata

SEQ ID NO: 875590 - DNA, 33 bp, Homo sapien
cagtcaaggggactgacagttcatggtgaaata

SEQ ID NO: 875591 - DNA, 33 bp, Homo sapien
tgtttgatttccgtcagcatggacctaaaagac

SEQ ID NO: 875592 - DNA, 33 bp, Homo sapien
tgtttgatttccgtcatcatggacctaaaagac

SEQ ID NO: 875593 - DNA, 33 bp, Homo sapien
gcgccacagtgcattacatcgggggcccgtgat

SEQ ID NO: 875594 - DNA, 33 bp, Homo sapien
gcgccacagtgcattatatcgggggcccgtgat

SEQ ID NO: 875595 - DNA, 33 bp, Homo sapien
aataagaactcaataaacatcacctattattac

SEQ ID NO: 875596 - DNA, 33 bp, Homo sapien
aataagaactcaataagcatcacctattattac

SEQ ID NO: 875597 - DNA, 33 bp, Homo sapien
ccaaagaggaagtgaacatgtgtgaagagccag

SEQ ID NO: 875598 - DNA, 33 bp, Homo sapien
ccaaagaggaagtgaatatgtgtgaagagccag

SEQ ID NO: 875599 - DNA, 33 bp, Homo sapien
agagtctggtatcaggcagggcatcttaattcc

SEQ ID NO: 875600 - DNA, 33 bp, Homo sapien
agagtctggtatcaggtagggcatcttaattcc

SEQ ID NO: 875601 - DNA, 33 bp, Homo sapien
ggattagggaagtataaaagtggctcaagccac

SEQ ID NO: 875602 - DNA, 33 bp, Homo sapien
ggattagggaagtatacaagtggctcaagccac

SEQ ID NO: 875603 - DNA, 33 bp, Homo sapien
tttttcaggcacactacggtgggaagcataggc

SEQ ID NO: 875604 - DNA, 33 bp, Homo sapien
tttttcaggcacactagggtgggaagcataggc

SEQ ID NO: 875605 - DNA, 33 bp, Homo sapien
cagagtccaagctaaactgatcggtgcagggca

SEQ ID NO: 875606 - DNA, 33 bp, Homo sapien
cagagtccaagctaaattgatcggtgcagggca

SEQ ID NO: 875607 - DNA, 33 bp, Homo sapien
aggggagggaacagcacaatgtgagcacctatc

SEQ ID NO: 875608 - DNA, 33 bp, Homo sapien
aggggagggaacagcagaatgtgagcacctatc

SEQ ID NO: 875609 - DNA, 33 bp, Homo sapien
attctgtttcttcttacgcaggagagagaataa

SEQ ID NO: 875610 - DNA, 33 bp, Homo sapien
attctgtttcttcttatgcaggagagagaataa

SEQ ID NO: 875611 - DNA, 33 bp, Homo sapien
caagctctccaagtaactgtgatgtgcagatat

SEQ ID NO: 875612 - DNA, 33 bp, Homo sapien
caagctctccaagtaattgtgatgtgcagatat

SEQ ID NO: 875613 - DNA, 33 bp, Homo sapien
tcatcgccacccagatcagtgtcttgtcagctt

SEQ ID NO: 875614 - DNA, 33 bp, Homo sapien
tcatcgccacccagatgagtgtcttgtcagctt

SEQ ID NO: 875615 - DNA, 33 bp, Homo sapien
cgacctgtgcttacgacgcagagtagaagccaa

SEQ ID NO: 875616 - DNA, 33 bp, Homo sapien
cgacctgtgcttacgatgcagagtagaagccaa

SEQ ID NO: 875617 - DNA, 33 bp, Homo sapien
agctagttgcctcccacgtcaatatccagttca

SEQ ID NO: 875618 - DNA, 33 bp, Homo sapien
agctagttgcctcccatgtcaatatccagttca

SEQ ID NO: 875619 - DNA, 33 bp, Homo sapien
ggaaactctaggttgccatattttcttttccag

SEQ ID NO: 875620 - DNA, 33 bp, Homo sapien
ggaaactctaggttgcgatattttcttttccag

SEQ ID NO: 875621 - DNA, 33 bp, Homo sapien
atgtactgaacaacgcacaagtaaggtacatgg

SEQ ID NO: 875622 - DNA, 33 bp, Homo sapien
atgtactgaacaacgcccaagtaaggtacatgg

SEQ ID NO: 875623 - DNA, 33 bp, Homo sapien
tttctattgtaaactaagggagagtcggagcta

SEQ ID NO: 875624 - DNA, 33 bp, Homo sapien
tttctattgtaaactaggggagagtcggagcta

SEQ ID NO: 875625 - DNA, 33 bp, Homo sapien
tggtcatcaacagttcgctgcactcagccgtgg

SEQ ID NO: 875626 - DNA, 33 bp, Homo sapien
tggtcatcaacagttctctgcactcagccgtgg

SEQ ID NO: 875627 - DNA, 33 bp, Homo sapien
agggaggctttttcacccagagcagcctttaat

SEQ ID NO: 875628 - DNA, 33 bp, Homo sapien
agggaggctttttcacgcagagcagcctttaat

SEQ ID NO: 875629 - DNA, 33 bp, Homo sapien
tcattcagaggaagaagaattgaatatcctaat

SEQ ID NO: 875630 - DNA, 33 bp, Homo sapien
tcattcagaggaagaataattgaatatcctaat

SEQ ID NO: 875631 - DNA, 33 bp, Homo sapien
gacacacctaatgaaacattttgctccacactc

SEQ ID NO: 875632 - DNA, 33 bp, Homo sapien
gacacacctaatgaaagattttgctccacactc

SEQ ID NO: 875633 - DNA, 33 bp, Homo sapien
ctggttttgggctgtgcacacttttcagattat

SEQ ID NO: 875634 - DNA, 33 bp, Homo sapien
ctggttttgggctgtgtacacttttcagattat

SEQ ID NO: 875635 - DNA, 33 bp, Homo sapien
gaaagaaccagaaaggaataatgagacagactt

SEQ ID NO: 875636 - DNA, 33 bp, Homo sapien
gaaagaaccagaaagggataatgagacagactt

SEQ ID NO: 875637 - DNA, 33 bp, Homo sapien
aatcaacttccaactcacacctgaaggcagcta

SEQ ID NO: 875638 - DNA, 33 bp, Homo sapien
aatcaacttccaactcgcacctgaaggcagcta

SEQ ID NO: 875639 - DNA, 33 bp, Homo sapien
actacatacaggtccaaacttctcatatgccca

SEQ ID NO: 875640 - DNA, 33 bp, Homo sapien
actacatacaggtccatacttctcatatgccca

SEQ ID NO: 875641 - DNA, 33 bp, Homo sapien
gggtagggcacagaatcaaaatctctttcagaa

SEQ ID NO: 875642 - DNA, 33 bp, Homo sapien
gggtagggcacagaattaaaatctctttcagaa

SEQ ID NO: 875643 - DNA, 33 bp, Homo sapien
tgagtatgggatgatacgtcatttctcttacta

SEQ ID NO: 875644 - DNA, 33 bp, Homo sapien
tgagtatgggatgatatgtcatttctcttacta

SEQ ID NO: 875645 - DNA, 33 bp, Homo sapien
tacgtcctcacaaaggacccaacatcgagtatc

SEQ ID NO: 875646 - DNA, 33 bp, Homo sapien
tacgtcctcacaaagggcccaacatcgagtatc

SEQ ID NO: 875647 - DNA, 33 bp, Homo sapien
agcatccgagttctccagcattctagaaacgtg

SEQ ID NO: 875648 - DNA, 33 bp, Homo sapien
agcatccgagttctcctgcattctagaaacgtg

SEQ ID NO: 875649 - DNA, 33 bp, Homo sapien
agatctctgactaaacaagtgtgcaacacgggt

SEQ ID NO: 875650 - DNA, 33 bp, Homo sapien
agatctctgactaaacgagtgtgcaacacgggt

SEQ ID NO: 875651 - DNA, 33 bp, Homo sapien
tgagcctccaatcccaaaaaggactatggttct

SEQ ID NO: 875652 - DNA, 33 bp, Homo sapien
tgagcctccaatcccagaaaggactatggttct

SEQ ID NO: 875653 - DNA, 33 bp, Homo sapien
gtaattatgaccattcaattttcaagacactct

SEQ ID NO: 875654 - DNA, 33 bp, Homo sapien
gtaattatgaccattcgattttcaagacactct

SEQ ID NO: 875655 - DNA, 33 bp, Homo sapien
ggcatatagcagcaacagagaaaacaaatatcc

SEQ ID NO: 875656 - DNA, 33 bp, Homo sapien
ggcatatagcagcaacggagaaaacaaatatcc

SEQ ID NO: 875657 - DNA, 33 bp, Homo sapien
gtggcctctctgtacacccagtcaggaagtgta

SEQ ID NO: 875658 - DNA, 33 bp, Homo sapien
gtggcctctctgtacagccagtcaggaagtgta

SEQ ID NO: 875659 - DNA, 33 bp, Homo sapien
acaattctaagggttccaaaatgaattgtgtgg

SEQ ID NO: 875660 - DNA, 33 bp, Homo sapien
acaattctaagggttcgaaaatgaattgtgtgg

SEQ ID NO: 875661 - DNA, 33 bp, Homo sapien
gacgaactcaaaccaaaagaaaggataacttgt

SEQ ID NO: 875662 - DNA, 33 bp, Homo sapien
gacgaactcaaaccaagagaaaggataacttgt

SEQ ID NO: 875663 - DNA, 33 bp, Homo sapien
agtgttatgatagaaaccagtccatccattttt

SEQ ID NO: 875664 - DNA, 33 bp, Homo sapien
agtgttatgatagaaatcagtccatccattttt

SEQ ID NO: 875665 - DNA, 33 bp, Homo sapien
catgcaaatacacaagaatttcctctttgactg

SEQ ID NO: 875666 - DNA, 33 bp, Homo sapien
catgcaaatacacaagcatttcctctttgactg

SEQ ID NO: 875667 - DNA, 33 bp, Homo sapien
accttccaccagtaacaatgggatgatctgggc

SEQ ID NO: 875668 - DNA, 33 bp, Homo sapien
accttccaccagtaacgatgggatgatctgggc

SEQ ID NO: 875669 - DNA, 33 bp, Homo sapien
tgagatttcatttgtaaagccggatggctaagt

SEQ ID NO: 875670 - DNA, 33 bp, Homo sapien
tgagatttcatttgtagagccggatggctaagt

SEQ ID NO: 875671 - DNA, 33 bp, Homo sapien
caggtcttggacttgaagtaatcacatggaaag

SEQ ID NO: 875672 - DNA, 33 bp, Homo sapien
caggtcttggacttgatgtaatcacatggaaag

SEQ ID NO: 875673 - DNA, 33 bp, Homo sapien
ttcatctctgggctgaaaagaatctgattacta

SEQ ID NO: 875674 - DNA, 33 bp, Homo sapien
ttcatctctgggctgataagaatctgattacta

SEQ ID NO: 875675 - DNA, 33 bp, Homo sapien
ccaagagcattcaaaccaaagtcagacttttca

SEQ ID NO: 875676 - DNA, 33 bp, Homo sapien
ccaagagcattcaaacgaaagtcagacttttca

SEQ ID NO: 875677 - DNA, 33 bp, Homo sapien
acttaagccaagactaaaatgtctgtgcacaat

SEQ ID NO: 875678 - DNA, 33 bp, Homo sapien
acttaagccaagactacaatgtctgtgcacaat

SEQ ID NO: 875679 - DNA, 33 bp, Homo sapien
gttgtgataaaatgtacgtcagagctccacaga

SEQ ID NO: 875680 - DNA, 33 bp, Homo sapien
gttgtgataaaatgtatgtcagagctccacaga

SEQ ID NO: 875681 - DNA, 33 bp, Homo sapien
ggatcattttgaggaaaacatcttggcgatcca

SEQ ID NO: 875682 - DNA, 33 bp, Homo sapien
ggatcattttgaggaagacatcttggcgatcca

SEQ ID NO: 875683 - DNA, 33 bp, Homo sapien
attatccttcaatacacgagcaagtgaatatcc

SEQ ID NO: 875684 - DNA, 33 bp, Homo sapien
attatccttcaatacatgagcaagtgaatatcc

SEQ ID NO: 875685 - DNA, 33 bp, Homo sapien
tcgcaggtgagggctacgcttgctaccatttgg

SEQ ID NO: 875686 - DNA, 33 bp, Homo sapien
tcgcaggtgagggctatgcttgctaccatttgg

SEQ ID NO: 875687 - DNA, 33 bp, Homo sapien
cagaggaacagtggataagtcatggatgaaaag

SEQ ID NO: 875688 - DNA, 33 bp, Homo sapien
cagaggaacagtggatgagtcatggatgaaaag

SEQ ID NO: 875689 - DNA, 33 bp, Homo sapien
aatatatttatacatagaggatctcgattaaag

SEQ ID NO: 875690 - DNA, 33 bp, Homo sapien
aatatatttatacatataggatctcgattaaag

SEQ ID NO: 875691 - DNA, 33 bp, Homo sapien
taagagcacagcgaaaatgagcttcaaagaata

SEQ ID NO: 875692 - DNA, 33 bp, Homo sapien
taagagcacagcgaaactgagcttcaaagaata

SEQ ID NO: 875693 - DNA, 33 bp, Homo sapien
tgagccatttggataacgttaaaaactatttac

SEQ ID NO: 875694 - DNA, 33 bp, Homo sapien
tgagccatttggataatgttaaaaactatttac

SEQ ID NO: 875695 - DNA, 33 bp, Homo sapien
tgaaatcaattaattccaggtgagcaatctgat

SEQ ID NO: 875696 - DNA, 33 bp, Homo sapien
tgaaatcaattaattctaggtgagcaatctgat

SEQ ID NO: 875697 - DNA, 33 bp, Homo sapien
actttcactaaccagacccaggcagccttctgg

SEQ ID NO: 875698 - DNA, 33 bp, Homo sapien
actttcactaaccagatccaggcagccttctgg

SEQ ID NO: 875699 - DNA, 33 bp, Homo sapien
gttatccctgataagaagtaagctgttaatctt

SEQ ID NO: 875700 - DNA, 33 bp, Homo sapien
gttatccctgataagaggtaagctgttaatctt

SEQ ID NO: 875701 - DNA, 33 bp, Homo sapien
tgataaacatcgaggcaaaaatccacaataaaa

SEQ ID NO: 875702 - DNA, 33 bp, Homo sapien
tgataaacatcgaggcgaaaatccacaataaaa

SEQ ID NO: 875703 - DNA, 33 bp, Homo sapien
ataccaaatcctggcaaagtcacaacaaaaaaa

SEQ ID NO: 875704 - DNA, 33 bp, Homo sapien
ataccaaatcctggcagagtcacaacaaaaaaa

SEQ ID NO: 875705 - DNA, 33 bp, Homo sapien
ggcacacaacattgaaaacactggctggtgcca

SEQ ID NO: 875706 - DNA, 33 bp, Homo sapien
ggcacacaacattgaagacactggctggtgcca

SEQ ID NO: 875707 - DNA, 33 bp, Homo sapien
aatcaagagaagctacgaccaacccacagttgc

SEQ ID NO: 875708 - DNA, 33 bp, Homo sapien
aatcaagagaagctactaccaacccacagttgc

SEQ ID NO: 875709 - DNA, 33 bp, Homo sapien
tatgaaatgctcatctcagagagtggaggggcg

SEQ ID NO: 875710 - DNA, 33 bp, Homo sapien
tatgaaatgctcatctgagagagtggaggggcg

SEQ ID NO: 875711 - DNA, 33 bp, Homo sapien
ttctgatctacctttaaatggcagctacagaaa

SEQ ID NO: 875712 - DNA, 33 bp, Homo sapien
ttctgatctacctttacatggcagctacagaaa

SEQ ID NO: 875713 - DNA, 33 bp, Homo sapien
taaaggtagatcagaagagaggtagacggagac

SEQ ID NO: 875714 - DNA, 33 bp, Homo sapien
taaaggtagatcagaatagaggtagacggagac

SEQ ID NO: 875715 - DNA, 33 bp, Homo sapien
gtgcatgctttcccacacacccagtcgtacaca

SEQ ID NO: 875716 - DNA, 33 bp, Homo sapien
gtgcatgctttcccacgcacccagtcgtacaca

SEQ ID NO: 875717 - DNA, 33 bp, Homo sapien
tccccaccgttgaccacgaagcctctatggcgg

SEQ ID NO: 875718 - DNA, 33 bp, Homo sapien
tccccaccgttgaccatgaagcctctatggcgg

SEQ ID NO: 875719 - DNA, 33 bp, Homo sapien
cagttcaaccagaagacgattcctcatagtgtc

SEQ ID NO: 875720 - DNA, 33 bp, Homo sapien
cagttcaaccagaagatgattcctcatagtgtc

SEQ ID NO: 875721 - DNA, 33 bp, Homo sapien
ggttgggatcaactgcaatcaagagttcaagac

SEQ ID NO: 875722 - DNA, 33 bp, Homo sapien
ggttgggatcaactgcgatcaagagttcaagac

SEQ ID NO: 875723 - DNA, 33 bp, Homo sapien
aatcgagtcccagtgacgactgcctttaagttt

SEQ ID NO: 875724 - DNA, 33 bp, Homo sapien
aatcgagtcccagtgatgactgcctttaagttt

SEQ ID NO: 875725 - DNA, 33 bp, Homo sapien
gccttgtgtaagactacagaagctgtaaaggga

SEQ ID NO: 875726 - DNA, 33 bp, Homo sapien
gccttgtgtaagactatagaagctgtaaaggga

SEQ ID NO: 875727 - DNA, 33 bp, Homo sapien
caatcatgtgaacacaatctttgtcagcaatct

SEQ ID NO: 875728 - DNA, 33 bp, Homo sapien
caatcatgtgaacacagtctttgtcagcaatct

SEQ ID NO: 875729 - DNA, 33 bp, Homo sapien
agcatcactttgtcacggtcatccctggagaaa

SEQ ID NO: 875730 - DNA, 33 bp, Homo sapien
agcatcactttgtcactgtcatccctggagaaa

SEQ ID NO: 875731 - DNA, 33 bp, Homo sapien
gattttttcaggatgggatgattttctccaggg

SEQ ID NO: 875732 - DNA, 33 bp, Homo sapien
gattttttcaggatggtatgattttctccaggg

SEQ ID NO: 875733 - DNA, 33 bp, Homo sapien
attgcaaagagcgaaacaataaagcttccgcag

SEQ ID NO: 875734 - DNA, 33 bp, Homo sapien
attgcaaagagcgaaagaataaagcttccgcag

SEQ ID NO: 875735 - DNA, 33 bp, Homo sapien
gaactaggttagcagaataaaaggtctgaccta

SEQ ID NO: 875736 - DNA, 33 bp, Homo sapien
gaactaggttagcagagtaaaaggtctgaccta

SEQ ID NO: 875737 - DNA, 33 bp, Homo sapien
gaattcattaagatacagtaaggtcataagagt

SEQ ID NO: 875738 - DNA, 33 bp, Homo sapien
gaattcattaagatacggtaaggtcataagagt

SEQ ID NO: 875739 - DNA, 33 bp, Homo sapien
aacctgtggataatccaaaaagaaaccataagg

SEQ ID NO: 875740 - DNA, 33 bp, Homo sapien
aacctgtggataatccgaaaagaaaccataagg

SEQ ID NO: 875741 - DNA, 33 bp, Homo sapien
caagacaaaaagtgaacatgtcaacacagatgc

SEQ ID NO: 875742 - DNA, 33 bp, Homo sapien
caagacaaaaagtgaagatgtcaacacagatgc

SEQ ID NO: 875743 - DNA, 33 bp, Homo sapien
aggccttaagttgctaaagtggtctggacctat

SEQ ID NO: 875744 - DNA, 33 bp, Homo sapien
aggccttaagttgctacagtggtctggacctat

SEQ ID NO: 875745 - DNA, 33 bp, Homo sapien
cagtcagaagagctagacaaacactttcttaga

SEQ ID NO: 875746 - DNA, 33 bp, Homo sapien
cagtcagaagagctagtcaaacactttcttaga

SEQ ID NO: 875747 - DNA, 33 bp, Homo sapien
tccttgctttatcttacaggaaaggcaggggag

SEQ ID NO: 875748 - DNA, 33 bp, Homo sapien
tccttgctttatcttataggaaaggcaggggag

SEQ ID NO: 875749 - DNA, 33 bp, Homo sapien
ggggccactttcctatcagcttgagaattttca

SEQ ID NO: 875750 - DNA, 33 bp, Homo sapien
ggggccactttcctattagcttgagaattttca

SEQ ID NO: 875751 - DNA, 33 bp, Homo sapien
ggctatgatgtacagccaaaagtgtcctattat

SEQ ID NO: 875752 - DNA, 33 bp, Homo sapien
ggctatgatgtacagcgaaaagtgtcctattat

SEQ ID NO: 875753 - DNA, 33 bp, Homo sapien
aaggcttccctgtagacaatcaatggcactgtt

SEQ ID NO: 875754 - DNA, 33 bp, Homo sapien
aaggcttccctgtagataatcaatggcactgtt

SEQ ID NO: 875755 - DNA, 33 bp, Homo sapien
tgtatgtctctcactcagaaataatcatgccac

SEQ ID NO: 875756 - DNA, 33 bp, Homo sapien
tgtatgtctctcactctgaaataatcatgccac

SEQ ID NO: 875757 - DNA, 33 bp, Homo sapien
acatacattggggtaaatagaaatatatagcaa

SEQ ID NO: 875758 - DNA, 33 bp, Homo sapien
acatacattggggtaattagaaatatatagcaa

SEQ ID NO: 875759 - DNA, 33 bp, Homo sapien
acttcaatgaagaataagccttgtgagcaagac

SEQ ID NO: 875760 - DNA, 33 bp, Homo sapien
acttcaatgaagaatacgccttgtgagcaagac

SEQ ID NO: 875761 - DNA, 33 bp, Homo sapien
gacttaagatcccgtacgaggtgtgttgaacag

SEQ ID NO: 875762 - DNA, 33 bp, Homo sapien
gacttaagatcccgtatgaggtgtgttgaacag

SEQ ID NO: 875763 - DNA, 33 bp, Homo sapien
gaatacctgtaaacaacaaatatgtcagggttc

SEQ ID NO: 875764 - DNA, 33 bp, Homo sapien
gaatacctgtaaacaataaatatgtcagggttc

SEQ ID NO: 875765 - DNA, 33 bp, Homo sapien
ttgatagtatgcctaacagtcaaacggtaaaac

SEQ ID NO: 875766 - DNA, 33 bp, Homo sapien
ttgatagtatgcctaatagtcaaacggtaaaac

SEQ ID NO: 875767 - DNA, 33 bp, Homo sapien
tagccagagaaaataactggatgcacatagagt

SEQ ID NO: 875768 - DNA, 33 bp, Homo sapien
tagccagagaaaataattggatgcacatagagt

SEQ ID NO: 875769 - DNA, 33 bp, Homo sapien
ctacaaaattcaaggcaccacagacatttaaag

SEQ ID NO: 875770 - DNA, 33 bp, Homo sapien
ctacaaaattcaaggcgccacagacatttaaag

SEQ ID NO: 875771 - DNA, 33 bp, Homo sapien
ttcctggagtacagagacctagttccaaatttt

SEQ ID NO: 875772 - DNA, 33 bp, Homo sapien
ttcctggagtacagagccctagttccaaatttt

SEQ ID NO: 875773 - DNA, 33 bp, Homo sapien
ataagtagttctattacaaacagacatgcacgc

SEQ ID NO: 875774 - DNA, 33 bp, Homo sapien
ataagtagttctattataaacagacatgcacgc

SEQ ID NO: 875775 - DNA, 33 bp, Homo sapien
tgtggtgactcctcaaagacctagaggcagaaa

SEQ ID NO: 875776 - DNA, 33 bp, Homo sapien
tgtggtgactcctcaacgacctagaggcagaaa

SEQ ID NO: 875777 - DNA, 33 bp, Homo sapien
agtcagaaaagcactgaattgaaaaaggttcca

SEQ ID NO: 875778 - DNA, 33 bp, Homo sapien
agtcagaaaagcactggattgaaaaaggttcca

SEQ ID NO: 875779 - DNA, 33 bp, Homo sapien
tccatttgagtttcctaaagtaagtgtgcaagc

SEQ ID NO: 875780 - DNA, 33 bp, Homo sapien
tccatttgagtttcctgaagtaagtgtgcaagc

SEQ ID NO: 875781 - DNA, 33 bp, Homo sapien
cacactggccttctcacatattgttcttcttgt

SEQ ID NO: 875782 - DNA, 33 bp, Homo sapien
cacactggccttctcatatattgttcttcttgt

SEQ ID NO: 875783 - DNA, 33 bp, Homo sapien
atcatttcctctgagaaaacccaacccacctgc

SEQ ID NO: 875784 - DNA, 33 bp, Homo sapien
atcatttcctctgagataacccaacccacctgc

SEQ ID NO: 875785 - DNA, 33 bp, Homo sapien
aagtatgggtaggaaagattatctgcagcaact

SEQ ID NO: 875786 - DNA, 33 bp, Homo sapien
aagtatgggtaggaaatattatctgcagcaact

SEQ ID NO: 875787 - DNA, 33 bp, Homo sapien
acagattttgattcaacatctctgagcttcatt

SEQ ID NO: 875788 - DNA, 33 bp, Homo sapien
acagattttgattcaatatctctgagcttcatt

SEQ ID NO: 875789 - DNA, 33 bp, Homo sapien
gaaactctttcctagcactccatcatctccctg

SEQ ID NO: 875790 - DNA, 33 bp, Homo sapien
gaaactctttcctagcgctccatcatctccctg

SEQ ID NO: 875791 - DNA, 33 bp, Homo sapien
tattctctggccgcacaaagtgcataatcaagc

SEQ ID NO: 875792 - DNA, 33 bp, Homo sapien
tattctctggccgcacgaagtgcataatcaagc

SEQ ID NO: 875793 - DNA, 33 bp, Homo sapien
ctccaccctcataggcaaatgttttccttcctt

SEQ ID NO: 875794 - DNA, 33 bp, Homo sapien
ctccaccctcataggcgaatgttttccttcctt

SEQ ID NO: 875795 - DNA, 33 bp, Homo sapien
agtgacaaccgtttgaagatatcgacatactaa

SEQ ID NO: 875796 - DNA, 33 bp, Homo sapien
agtgacaaccgtttgaggatatcgacatactaa

SEQ ID NO: 875797 - DNA, 33 bp, Homo sapien
ttttctcaggaggacaaggggtcaagaatgatt

SEQ ID NO: 875798 - DNA, 33 bp, Homo sapien
ttttctcaggaggacagggggtcaagaatgatt

SEQ ID NO: 875799 - DNA, 33 bp, Homo sapien
ttttctaggtgaaagtaaatcatttctgaggaa

SEQ ID NO: 875800 - DNA, 33 bp, Homo sapien
ttttctaggtgaaagtcaatcatttctgaggaa

SEQ ID NO: 875801 - DNA, 33 bp, Homo sapien
taagttcaatttggagaagagttagggagtctt

SEQ ID NO: 875802 - DNA, 33 bp, Homo sapien
taagttcaatttggaggagagttagggagtctt

SEQ ID NO: 875803 - DNA, 33 bp, Homo sapien
gggagaccagttagaaactgctgaactgcatgt

SEQ ID NO: 875804 - DNA, 33 bp, Homo sapien
gggagaccagttagaagctgctgaactgcatgt

SEQ ID NO: 875805 - DNA, 33 bp, Homo sapien
tattttggagcctcgcgctgcagtcacactatc

SEQ ID NO: 875806 - DNA, 33 bp, Homo sapien
tattttggagcctcgctctgcagtcacactatc

SEQ ID NO: 875807 - DNA, 33 bp, Homo sapien
gtaagacagttacatacaacagatgtgtgcata

SEQ ID NO: 875808 - DNA, 33 bp, Homo sapien
gtaagacagttacatataacagatgtgtgcata

SEQ ID NO: 875809 - DNA, 33 bp, Homo sapien
tcagtggaagccataaggtcttagcttgtcgac

SEQ ID NO: 875810 - DNA, 33 bp, Homo sapien
tcagtggaagccataatgtcttagcttgtcgac

SEQ ID NO: 875811 - DNA, 33 bp, Homo sapien
gtagcctcgggacagactagccagctggattta

SEQ ID NO: 875812 - DNA, 33 bp, Homo sapien
gtagcctcgggacagattagccagctggattta

SEQ ID NO: 875813 - DNA, 33 bp, Homo sapien
ctcagttggcagccaccgtaaacatgcagtcaa

SEQ ID NO: 875814 - DNA, 33 bp, Homo sapien
ctcagttggcagccacggtaaacatgcagtcaa

SEQ ID NO: 875815 - DNA, 33 bp, Homo sapien
cagatgcaaggaatccaaggatgatgtctgggt

SEQ ID NO: 875816 - DNA, 33 bp, Homo sapien
cagatgcaaggaatccgaggatgatgtctgggt

SEQ ID NO: 875817 - DNA, 33 bp, Homo sapien
atctgcaaaataaggaagtcaactatgggctgt

SEQ ID NO: 875818 - DNA, 33 bp, Homo sapien
atctgcaaaataaggacgtcaactatgggctgt

SEQ ID NO: 875819 - DNA, 33 bp, Homo sapien
agtttacaatagaagccgctcaggaaggtgagg

SEQ ID NO: 875820 - DNA, 33 bp, Homo sapien
agtttacaatagaagctgctcaggaaggtgagg

SEQ ID NO: 875821 - DNA, 33 bp, Homo sapien
tttcttaaaagcaggcaagtagaatgtgcagag

SEQ ID NO: 875822 - DNA, 33 bp, Homo sapien
tttcttaaaagcaggcgagtagaatgtgcagag

SEQ ID NO: 875823 - DNA, 33 bp, Homo sapien
ttctgaactccactgacagcgtgcatgaatagg

SEQ ID NO: 875824 - DNA, 33 bp, Homo sapien
ttctgaactccactgagagcgtgcatgaatagg

SEQ ID NO: 875825 - DNA, 33 bp, Homo sapien
ggctctgtcaatgggaaccatcagctgttttcc

SEQ ID NO: 875826 - DNA, 33 bp, Homo sapien
ggctctgtcaatgggacccatcagctgttttcc

SEQ ID NO: 875827 - DNA, 33 bp, Homo sapien
aaagtagatgtgaaaaagttcactgcattgatt

SEQ ID NO: 875828 - DNA, 33 bp, Homo sapien
aaagtagatgtgaaaaggttcactgcattgatt

SEQ ID NO: 875829 - DNA, 33 bp, Homo sapien
accagataaaagagcaaaaagtgacgtgcaggg

SEQ ID NO: 875830 - DNA, 33 bp, Homo sapien
accagataaaagagcagaaagtgacgtgcaggg

SEQ ID NO: 875831 - DNA, 33 bp, Homo sapien
agtttcaggagaaaaccgtaatagtgagtagtt

SEQ ID NO: 875832 - DNA, 33 bp, Homo sapien
agtttcaggagaaaactgtaatagtgagtagtt

SEQ ID NO: 875833 - DNA, 33 bp, Homo sapien
ggtcctgaggcataaacgggattagtgctctta

SEQ ID NO: 875834 - DNA, 33 bp, Homo sapien
ggtcctgaggcataaatgggattagtgctctta

SEQ ID NO: 875835 - DNA, 33 bp, Homo sapien
agtcatccaggaaccacatttttgcgtgtatgt

SEQ ID NO: 875836 - DNA, 33 bp, Homo sapien
agtcatccaggaaccatatttttgcgtgtatgt

SEQ ID NO: 875837 - DNA, 33 bp, Homo sapien
gagactgggtattaacagggttcagtttcattt

SEQ ID NO: 875838 - DNA, 33 bp, Homo sapien
gagactgggtattaacggggttcagtttcattt

SEQ ID NO: 875839 - DNA, 33 bp, Homo sapien
ttgattattgattggaagtttcataatttatag

SEQ ID NO: 875840 - DNA, 33 bp, Homo sapien
ttgattattgattggaggtttcataatttatag

SEQ ID NO: 875841 - DNA, 33 bp, Homo sapien
ggctacacaatacttagggatgaccacagggtt

SEQ ID NO: 875842 - DNA, 33 bp, Homo sapien
ggctacacaatacttatggatgaccacagggtt

SEQ ID NO: 875843 - DNA, 33 bp, Homo sapien
gaataatgagaagcacacaggatgtcatttgag

SEQ ID NO: 875844 - DNA, 33 bp, Homo sapien
gaataatgagaagcacgcaggatgtcatttgag

SEQ ID NO: 875845 - DNA, 33 bp, Homo sapien
aagcaatacaaggacaaaaaaagtgtttctcta

SEQ ID NO: 875846 - DNA, 33 bp, Homo sapien
aagcaatacaaggacagaaaaagtgtttctcta

SEQ ID NO: 875847 - DNA, 33 bp, Homo sapien
tcctctaataaattacaaaaaaaggagctattc

SEQ ID NO: 875848 - DNA, 33 bp, Homo sapien
tcctctaataaattaccaaaaaaggagctattc

SEQ ID NO: 875849 - DNA, 33 bp, Homo sapien
gaggtgcctttttgtacgaatgaaatggaatag

SEQ ID NO: 875850 - DNA, 33 bp, Homo sapien
gaggtgcctttttgtatgaatgaaatggaatag

SEQ ID NO: 875851 - DNA, 33 bp, Homo sapien
ttatgtatagatcaaaactcggtgggaatggtg

SEQ ID NO: 875852 - DNA, 33 bp, Homo sapien
ttatgtatagatcaaatctcggtgggaatggtg

SEQ ID NO: 875853 - DNA, 33 bp, Homo sapien
cctggctaggacaaccaaatacgtgatggtatc

SEQ ID NO: 875854 - DNA, 33 bp, Homo sapien
cctggctaggacaaccgaatacgtgatggtatc

SEQ ID NO: 875855 - DNA, 33 bp, Homo sapien
tgtgagaaccactgaaataagtcaatgtaagta

SEQ ID NO: 875856 - DNA, 33 bp, Homo sapien
tgtgagaaccactgaactaagtcaatgtaagta

SEQ ID NO: 875857 - DNA, 33 bp, Homo sapien
tgataactgcaaataaataattcagatgaccac

SEQ ID NO: 875858 - DNA, 33 bp, Homo sapien
tgataactgcaaataagtaattcagatgaccac

SEQ ID NO: 875859 - DNA, 33 bp, Homo sapien
tttcattttcttctaacgaacagttactttaga

SEQ ID NO: 875860 - DNA, 33 bp, Homo sapien
tttcattttcttctaatgaacagttactttaga

SEQ ID NO: 875861 - DNA, 33 bp, Homo sapien
ggcttagaaaatcaaacggtttacagtcacgca

SEQ ID NO: 875862 - DNA, 33 bp, Homo sapien
ggcttagaaaatcaaatggtttacagtcacgca

SEQ ID NO: 875863 - DNA, 33 bp, Homo sapien
gttatctaatcatgtccaataatatgcatgtgg

SEQ ID NO: 875864 - DNA, 33 bp, Homo sapien
gttatctaatcatgtctaataatatgcatgtgg

SEQ ID NO: 875865 - DNA, 33 bp, Homo sapien
agagaaattttccttaaataaagctactccctt

SEQ ID NO: 875866 - DNA, 33 bp, Homo sapien
agagaaattttccttagataaagctactccctt

SEQ ID NO: 875867 - DNA, 33 bp, Homo sapien
gaagggtaaggcattacaccatagctaattgcc

SEQ ID NO: 875868 - DNA, 33 bp, Homo sapien
gaagggtaaggcattataccatagctaattgcc

SEQ ID NO: 875869 - DNA, 33 bp, Homo sapien
taccaatcaactgaaacattcaccgagggccaa

SEQ ID NO: 875870 - DNA, 33 bp, Homo sapien
taccaatcaactgaaatattcaccgagggccaa

SEQ ID NO: 875871 - DNA, 33 bp, Homo sapien
gaaggcaggaaacccgaaacagtcggtcgcagt

SEQ ID NO: 875872 - DNA, 33 bp, Homo sapien
gaaggcaggaaacccgtaacagtcggtcgcagt

SEQ ID NO: 875873 - DNA, 33 bp, Homo sapien
gccgctggagaaaagcaccgaatctcagggcca

SEQ ID NO: 875874 - DNA, 33 bp, Homo sapien
gccgctggagaaaagcgccgaatctcagggcca

SEQ ID NO: 875875 - DNA, 33 bp, Homo sapien
gtagttgatcaaataccgaaggtgagtggaaag

SEQ ID NO: 875876 - DNA, 33 bp, Homo sapien
gtagttgatcaaatactgaaggtgagtggaaag

SEQ ID NO: 875877 - DNA, 33 bp, Homo sapien
gcacagctaagccacacggaaaccagaagttgt

SEQ ID NO: 875878 - DNA, 33 bp, Homo sapien
gcacagctaagccacatggaaaccagaagttgt

SEQ ID NO: 875879 - DNA, 33 bp, Homo sapien
gccgcctagttagcaaaagaagacccaaacttg

SEQ ID NO: 875880 - DNA, 33 bp, Homo sapien
gccgcctagttagcaacagaagacccaaacttg

SEQ ID NO: 875881 - DNA, 33 bp, Homo sapien
agcagtcttactataaaagtcaaaccagtgtta

SEQ ID NO: 875882 - DNA, 33 bp, Homo sapien
agcagtcttactataagagtcaaaccagtgtta

SEQ ID NO: 875883 - DNA, 33 bp, Homo sapien
tgacacaggtggttgacaatgaagccactctgg

SEQ ID NO: 875884 - DNA, 33 bp, Homo sapien
tgacacaggtggttgagaatgaagccactctgg

SEQ ID NO: 875885 - DNA, 33 bp, Homo sapien
caattactcatgaaacaattgttgatcttatta

SEQ ID NO: 875886 - DNA, 33 bp, Homo sapien
caattactcatgaaacgattgttgatcttatta

SEQ ID NO: 875887 - DNA, 33 bp, Homo sapien
ctcagaacctaaagcgcaaggagattccacatt

SEQ ID NO: 875888 - DNA, 33 bp, Homo sapien
ctcagaacctaaagcgtaaggagattccacatt

SEQ ID NO: 875889 - DNA, 33 bp, Homo sapien
accatatacacaacctaaagggcttcttcaaga

SEQ ID NO: 875890 - DNA, 33 bp, Homo sapien
accatatacacaacctgaagggcttcttcaaga

SEQ ID NO: 875891 - DNA, 33 bp, Homo sapien
atctttatctatatgaacacttaagtacttttt

SEQ ID NO: 875892 - DNA, 33 bp, Homo sapien
atctttatctatatgatcacttaagtacttttt

SEQ ID NO: 875893 - DNA, 33 bp, Homo sapien
gtgtattcatattccaatactagattttgctgc

SEQ ID NO: 875894 - DNA, 33 bp, Homo sapien
gtgtattcatattccagtactagattttgctgc

SEQ ID NO: 875895 - DNA, 33 bp, Homo sapien
gtacagatggagaaacggaaataaaatcaatgc

SEQ ID NO: 875896 - DNA, 33 bp, Homo sapien
gtacagatggagaaactgaaataaaatcaatgc

SEQ ID NO: 875897 - DNA, 33 bp, Homo sapien
gaggagaaaatacagcggaataagactccaggt

SEQ ID NO: 875898 - DNA, 33 bp, Homo sapien
gaggagaaaatacagctgaataagactccaggt

SEQ ID NO: 875899 - DNA, 33 bp, Homo sapien
ctatatggaagagaagacctttatttcatccct

SEQ ID NO: 875900 - DNA, 33 bp, Homo sapien
ctatatggaagagaagccctttatttcatccct

SEQ ID NO: 875901 - DNA, 33 bp, Homo sapien
cagcaaagcaaaaagtaacttgaggaattactt

SEQ ID NO: 875902 - DNA, 33 bp, Homo sapien
cagcaaagcaaaaagttacttgaggaattactt

SEQ ID NO: 875903 - DNA, 33 bp, Homo sapien
tcagacacatagccataaactcagaagtagtgt

SEQ ID NO: 875904 - DNA, 33 bp, Homo sapien
tcagacacatagccatgaactcagaagtagtgt

SEQ ID NO: 875905 - DNA, 33 bp, Homo sapien
tttaatatctgtggcacctaccgtagtggcttt

SEQ ID NO: 875906 - DNA, 33 bp, Homo sapien
tttaatatctgtggcatctaccgtagtggcttt

SEQ ID NO: 875907 - DNA, 33 bp, Homo sapien
agtttgtatcaggtgccccattgttatccctgt

SEQ ID NO: 875908 - DNA, 33 bp, Homo sapien
agtttgtatcaggtgctccattgttatccctgt

SEQ ID NO: 875909 - DNA, 33 bp, Homo sapien
tgctgtaagatcagaacggaaaaagacgagccc

SEQ ID NO: 875910 - DNA, 33 bp, Homo sapien
tgctgtaagatcagaatggaaaaagacgagccc

SEQ ID NO: 875911 - DNA, 33 bp, Homo sapien
ctggtggcgccaccacaaagcacagtgggtacc

SEQ ID NO: 875912 - DNA, 33 bp, Homo sapien
ctggtggcgccaccacgaagcacagtgggtacc

SEQ ID NO: 875913 - DNA, 33 bp, Homo sapien
aatcagtcccagtggccatcacaaaagaccaca

SEQ ID NO: 875914 - DNA, 33 bp, Homo sapien
aatcagtcccagtggctatcacaaaagaccaca

SEQ ID NO: 875915 - DNA, 33 bp, Homo sapien
actccaaacagagacacggccaagaagtcaagt

SEQ ID NO: 875916 - DNA, 33 bp, Homo sapien
actccaaacagagacatggccaagaagtcaagt

SEQ ID NO: 875917 - DNA, 33 bp, Homo sapien
atagaaaaatcctgtaccttgattgtggtagta

SEQ ID NO: 875918 - DNA, 33 bp, Homo sapien
atagaaaaatcctgtatcttgattgtggtagta

SEQ ID NO: 875919 - DNA, 33 bp, Homo sapien
aagaactgtcctgtggccatatcaccatctgtg

SEQ ID NO: 875920 - DNA, 33 bp, Homo sapien
aagaactgtcctgtggtcatatcaccatctgtg

SEQ ID NO: 875921 - DNA, 33 bp, Homo sapien
tctttcatacttactacaagatcatgaagattt

SEQ ID NO: 875922 - DNA, 33 bp, Homo sapien
tctttcatacttactataagatcatgaagattt

SEQ ID NO: 875923 - DNA, 33 bp, Homo sapien
ttggttttcagtcactgaagtcctcagagacaa

SEQ ID NO: 875924 - DNA, 33 bp, Homo sapien
ttggttttcagtcacttaagtcctcagagacaa

SEQ ID NO: 875925 - DNA, 33 bp, Homo sapien
gccacctctgggaaaccaacactagtggcccaa

SEQ ID NO: 875926 - DNA, 33 bp, Homo sapien
gccacctctgggaaactaacactagtggcccaa

SEQ ID NO: 875927 - DNA, 33 bp, Homo sapien
agggaaaatcattcaacataagaatccccctct

SEQ ID NO: 875928 - DNA, 33 bp, Homo sapien
agggaaaatcattcaatataagaatccccctct

SEQ ID NO: 875929 - DNA, 33 bp, Homo sapien
cttaaaggaagaagaaacttcagattagagaag

SEQ ID NO: 875930 - DNA, 33 bp, Homo sapien
cttaaaggaagaagaagcttcagattagagaag

SEQ ID NO: 875931 - DNA, 33 bp, Homo sapien
cacagcgaaagaatagcatagcgactggaacgc

SEQ ID NO: 875932 - DNA, 33 bp, Homo sapien
cacagcgaaagaatagtatagcgactggaacgc

SEQ ID NO: 875933 - DNA, 33 bp, Homo sapien
agagtggagaagaatacgggctttgtagtaaca

SEQ ID NO: 875934 - DNA, 33 bp, Homo sapien
agagtggagaagaatatgggctttgtagtaaca

SEQ ID NO: 875935 - DNA, 33 bp, Homo sapien
ccccatgtctccaaacaccacacatctagtctt

SEQ ID NO: 875936 - DNA, 33 bp, Homo sapien
ccccatgtctccaaaccccacacatctagtctt

SEQ ID NO: 875937 - DNA, 33 bp, Homo sapien
gctatcaagacagatgaagtaaggtttgccaaa

SEQ ID NO: 875938 - DNA, 33 bp, Homo sapien
gctatcaagacagatggagtaaggtttgccaaa

SEQ ID NO: 875939 - DNA, 33 bp, Homo sapien
ataatcacacagttcaaccctgtttagaaagag

SEQ ID NO: 875940 - DNA, 33 bp, Homo sapien
ataatcacacagttcacccctgtttagaaagag

SEQ ID NO: 875941 - DNA, 33 bp, Homo sapien
attgggtgtgagtcgaaattttatggtctagaa

SEQ ID NO: 875942 - DNA, 33 bp, Homo sapien
attgggtgtgagtcgagattttatggtctagaa

SEQ ID NO: 875943 - DNA, 33 bp, Homo sapien
aggcagagattggcaaagtggatttaaaaaaat

SEQ ID NO: 875944 - DNA, 33 bp, Homo sapien
aggcagagattggcaacgtggatttaaaaaaat

SEQ ID NO: 875945 - DNA, 33 bp, Homo sapien
atgtctggggtagtacgctgatgaaaaatgtaa

SEQ ID NO: 875946 - DNA, 33 bp, Homo sapien
atgtctggggtagtactctgatgaaaaatgtaa

SEQ ID NO: 875947 - DNA, 33 bp, Homo sapien
agagcattgttgaaagaattaggagttaatatg

SEQ ID NO: 875948 - DNA, 33 bp, Homo sapien
agagcattgttgaaaggattaggagttaatatg

SEQ ID NO: 875949 - DNA, 33 bp, Homo sapien
cgtaagttcattggaaagaagagtgaagagaga

SEQ ID NO: 875950 - DNA, 33 bp, Homo sapien
cgtaagttcattggaaggaagagtgaagagaga

SEQ ID NO: 875951 - DNA, 33 bp, Homo sapien
acattgtgtgttgaaaggtatctaaggcaacca

SEQ ID NO: 875952 - DNA, 33 bp, Homo sapien
acattgtgtgttgaaatgtatctaaggcaacca

SEQ ID NO: 875953 - DNA, 33 bp, Homo sapien
caaactctgatttttaagaactccaatgataat

SEQ ID NO: 875954 - DNA, 33 bp, Homo sapien
caaactctgatttttaggaactccaatgataat

SEQ ID NO: 875955 - DNA, 33 bp, Homo sapien
ttctcggctgttgccaagacagtaaataacaaa

SEQ ID NO: 875956 - DNA, 33 bp, Homo sapien
ttctcggctgttgccaggacagtaaataacaaa

SEQ ID NO: 875957 - DNA, 33 bp, Homo sapien
tctgcaggaagaacaagttccattaggttaaac

SEQ ID NO: 875958 - DNA, 33 bp, Homo sapien
tctgcaggaagaacaatttccattaggttaaac

SEQ ID NO: 875959 - DNA, 33 bp, Homo sapien
caatgcatcataagacagaagtggtacatttgg

SEQ ID NO: 875960 - DNA, 33 bp, Homo sapien
caatgcatcataagacggaagtggtacatttgg

SEQ ID NO: 875961 - DNA, 33 bp, Homo sapien
gacaagggtcttactacgcaacaaaggaagtat

SEQ ID NO: 875962 - DNA, 33 bp, Homo sapien
gacaagggtcttactatgcaacaaaggaagtat

SEQ ID NO: 875963 - DNA, 33 bp, Homo sapien
ggaggttcaattgtgaactgtttgtagccaatg

SEQ ID NO: 875964 - DNA, 33 bp, Homo sapien
ggaggttcaattgtgagctgtttgtagccaatg

SEQ ID NO: 875965 - DNA, 33 bp, Homo sapien
atttttttttatcctccagaacaattgggaggt

SEQ ID NO: 875966 - DNA, 33 bp, Homo sapien
atttttttttatcctcgagaacaattgggaggt

SEQ ID NO: 875967 - DNA, 33 bp, Homo sapien
gtatcaacatttgcaccgcttactcatcaagga

SEQ ID NO: 875968 - DNA, 33 bp, Homo sapien
gtatcaacatttgcactgcttactcatcaagga

SEQ ID NO: 875969 - DNA, 33 bp, Homo sapien
tataatggcaacttagaaggagaatttatatac

SEQ ID NO: 875970 - DNA, 33 bp, Homo sapien
tataatggcaacttaggaggagaatttatatac

SEQ ID NO: 875971 - DNA, 33 bp, Homo sapien
aaaaatcaattctaaaagtctgaattgtgtaat

SEQ ID NO: 875972 - DNA, 33 bp, Homo sapien
aaaaatcaattctaaaggtctgaattgtgtaat

SEQ ID NO: 875973 - DNA, 33 bp, Homo sapien
cgtgcagccggggaaaccgaaacacttccatag

SEQ ID NO: 875974 - DNA, 33 bp, Homo sapien
cgtgcagccggggaaagcgaaacacttccatag

SEQ ID NO: 875975 - DNA, 33 bp, Homo sapien
acttttgctgtgaggcaagaaaaaagccgtact

SEQ ID NO: 875976 - DNA, 33 bp, Homo sapien
acttttgctgtgaggcgagaaaaaagccgtact

SEQ ID NO: 875977 - DNA, 33 bp, Homo sapien
gatccctagatgactacgagcagggacactaac

SEQ ID NO: 875978 - DNA, 33 bp, Homo sapien
gatccctagatgactatgagcagggacactaac

SEQ ID NO: 875979 - DNA, 33 bp, Homo sapien
atgaactaagctccacggtagccatttttgtgc

SEQ ID NO: 875980 - DNA, 33 bp, Homo sapien
atgaactaagctccactgtagccatttttgtgc

SEQ ID NO: 875981 - DNA, 33 bp, Homo sapien
acacttaaaatgagccaatttgggatccctgtc

SEQ ID NO: 875982 - DNA, 33 bp, Homo sapien
acacttaaaatgagccgatttgggatccctgtc

SEQ ID NO: 875983 - DNA, 33 bp, Homo sapien
aagagaatgataattacaggtgtcacagggctc

SEQ ID NO: 875984 - DNA, 33 bp, Homo sapien
aagagaatgataattataggtgtcacagggctc

SEQ ID NO: 875985 - DNA, 33 bp, Homo sapien
gtcgtcaggtcttggacagattatttaagttct

SEQ ID NO: 875986 - DNA, 33 bp, Homo sapien
gtcgtcaggtcttggatagattatttaagttct

SEQ ID NO: 875987 - DNA, 33 bp, Homo sapien
tccagaaatatccaggcatcctttagtccagtc

SEQ ID NO: 875988 - DNA, 33 bp, Homo sapien
tccagaaatatccaggtatcctttagtccagtc

SEQ ID NO: 875989 - DNA, 33 bp, Homo sapien
agagttgttaaacaaacgattgcttcctacata

SEQ ID NO: 875990 - DNA, 33 bp, Homo sapien
agagttgttaaacaaatgattgcttcctacata

SEQ ID NO: 875991 - DNA, 33 bp, Homo sapien
aagaagttcctgatatcaaggctttctggagcc

SEQ ID NO: 875992 - DNA, 33 bp, Homo sapien
aagaagttcctgatatgaaggctttctggagcc

SEQ ID NO: 875993 - DNA, 33 bp, Homo sapien
acatatgcagcattgccagataactccaactat

SEQ ID NO: 875994 - DNA, 33 bp, Homo sapien
acatatgcagcattgctagataactccaactat

SEQ ID NO: 875995 - DNA, 33 bp, Homo sapien
ctatgcacccccatgacgatacaatggagctac

SEQ ID NO: 875996 - DNA, 33 bp, Homo sapien
ctatgcacccccatgatgatacaatggagctac

SEQ ID NO: 875997 - DNA, 33 bp, Homo sapien
ttgtggagatgtaccccgatttggaaccccaga

SEQ ID NO: 875998 - DNA, 33 bp, Homo sapien
ttgtggagatgtaccctgatttggaaccccaga

SEQ ID NO: 875999 - DNA, 33 bp, Homo sapien
tctctgcgaagacagaatatccctcggctgtgt

SEQ ID NO: 876000 - DNA, 33 bp, Homo sapien
tctctgcgaagacagactatccctcggctgtgt

SEQ ID NO: 876001 - DNA, 33 bp, Homo sapien
acaccaatcaaaggtaagcaccaacaggtgcta

SEQ ID NO: 876002 - DNA, 33 bp, Homo sapien
acaccaatcaaaggtaggcaccaacaggtgcta

SEQ ID NO: 876003 - DNA, 33 bp, Homo sapien
agggaagttgttgaggaaagacaaagaaacgtg

SEQ ID NO: 876004 - DNA, 33 bp, Homo sapien
agggaagttgttgagggaagacaaagaaacgtg

SEQ ID NO: 876005 - DNA, 33 bp, Homo sapien
cttcattctttttcaccgagatagtccctctgt

SEQ ID NO: 876006 - DNA, 33 bp, Homo sapien
cttcattctttttcactgagatagtccctctgt

SEQ ID NO: 876007 - DNA, 33 bp, Homo sapien
ttatacagatatggaaacaatgcactctttatt

SEQ ID NO: 876008 - DNA, 33 bp, Homo sapien
ttatacagatatggaagcaatgcactctttatt

SEQ ID NO: 876009 - DNA, 33 bp, Homo sapien
tggcaagaaacagaagcctaactcaaactggct

SEQ ID NO: 876010 - DNA, 33 bp, Homo sapien
tggcaagaaacagaaggctaactcaaactggct

SEQ ID NO: 876011 - DNA, 33 bp, Homo sapien
aattttgtgtagcctacatttaacattttccat

SEQ ID NO: 876012 - DNA, 33 bp, Homo sapien
aattttgtgtagcctatatttaacattttccat

SEQ ID NO: 876013 - DNA, 33 bp, Homo sapien
tttctcaatcatccccaagaggaagtaccaaga

SEQ ID NO: 876014 - DNA, 33 bp, Homo sapien
tttctcaatcatccccgagaggaagtaccaaga

SEQ ID NO: 876015 - DNA, 33 bp, Homo sapien
aaggataaactgttgccacacacatcatggaca

SEQ ID NO: 876016 - DNA, 33 bp, Homo sapien
aaggataaactgttgctacacacatcatggaca

SEQ ID NO: 876017 - DNA, 33 bp, Homo sapien
tcctatttgacgtggtaaaagaagttacgctag

SEQ ID NO: 876018 - DNA, 33 bp, Homo sapien
tcctatttgacgtggtgaaagaagttacgctag

SEQ ID NO: 876019 - DNA, 33 bp, Homo sapien
cgcatggtgcttaacccctcttcacccttacta

SEQ ID NO: 876020 - DNA, 33 bp, Homo sapien
cgcatggtgcttaacctctcttcacccttacta

SEQ ID NO: 876021 - DNA, 33 bp, Homo sapien
gtttcttattagacttaaaaagagcctgttctg

SEQ ID NO: 876022 - DNA, 33 bp, Homo sapien
gtttcttattagactttaaaagagcctgttctg

SEQ ID NO: 876023 - DNA, 33 bp, Homo sapien
ttgtgccaaggccacaagagcattacatttatt

SEQ ID NO: 876024 - DNA, 33 bp, Homo sapien
ttgtgccaaggccacaggagcattacatttatt

SEQ ID NO: 876025 - DNA, 33 bp, Homo sapien
aaagtgcctgctttaactggatcagctctgttt

SEQ ID NO: 876026 - DNA, 33 bp, Homo sapien
aaagtgcctgctttaattggatcagctctgttt

SEQ ID NO: 876027 - DNA, 33 bp, Homo sapien
ataacttacagcagaacaggaaagagttgactg

SEQ ID NO: 876028 - DNA, 33 bp, Homo sapien
ataacttacagcagaataggaaagagttgactg

SEQ ID NO: 876029 - DNA, 33 bp, Homo sapien
aggctggtcttgagcaactaggttcaaggaatc

SEQ ID NO: 876030 - DNA, 33 bp, Homo sapien
aggctggtcttgagcagctaggttcaaggaatc

SEQ ID NO: 876031 - DNA, 33 bp, Homo sapien
aaaaccgcttaaaaaaacaaggctgaggatggg

SEQ ID NO: 876032 - DNA, 33 bp, Homo sapien
aaaaccgcttaaaaaagcaaggctgaggatggg

SEQ ID NO: 876033 - DNA, 33 bp, Homo sapien
taaccaggcaactatgacataatttgtgctcag

SEQ ID NO: 876034 - DNA, 33 bp, Homo sapien
taaccaggcaactatgtcataatttgtgctcag

SEQ ID NO: 876035 - DNA, 33 bp, Homo sapien
tcttaggatgattttaaaggaaatggaaaaata

SEQ ID NO: 876036 - DNA, 33 bp, Homo sapien
tcttaggatgattttataggaaatggaaaaata

SEQ ID NO: 876037 - DNA, 33 bp, Homo sapien
ttgtgtctcatctctacattctgtttgttttgt

SEQ ID NO: 876038 - DNA, 33 bp, Homo sapien
ttgtgtctcatctctatattctgtttgttttgt

SEQ ID NO: 876039 - DNA, 33 bp, Homo sapien
atgggggtaaataaaacgaagtgctagaaagat

SEQ ID NO: 876040 - DNA, 33 bp, Homo sapien
atgggggtaaataaaatgaagtgctagaaagat

SEQ ID NO: 876041 - DNA, 33 bp, Homo sapien
ttctattcttactctaactacatatcagaatac

SEQ ID NO: 876042 - DNA, 33 bp, Homo sapien
ttctattcttactctatctacatatcagaatac

SEQ ID NO: 876043 - DNA, 33 bp, Homo sapien
ctgaggttaagggaaacgcttgagtttggggag

SEQ ID NO: 876044 - DNA, 33 bp, Homo sapien
ctgaggttaagggaaatgcttgagtttggggag

SEQ ID NO: 876045 - DNA, 33 bp, Homo sapien
agctttgtcagatttccccaactgcaagttttt

SEQ ID NO: 876046 - DNA, 33 bp, Homo sapien
agctttgtcagatttcgccaactgcaagttttt

SEQ ID NO: 876047 - DNA, 33 bp, Homo sapien
cactttggatagcagaagctgggaccaattaga

SEQ ID NO: 876048 - DNA, 33 bp, Homo sapien
cactttggatagcagacgctgggaccaattaga

SEQ ID NO: 876049 - DNA, 33 bp, Homo sapien
tttttaataacctactcaacagcatagctttat

SEQ ID NO: 876050 - DNA, 33 bp, Homo sapien
tttttaataacctactgaacagcatagctttat

SEQ ID NO: 876051 - DNA, 33 bp, Homo sapien
aggctaccgaagaaagaactgagttaatgagga

SEQ ID NO: 876052 - DNA, 33 bp, Homo sapien
aggctaccgaagaaaggactgagttaatgagga

SEQ ID NO: 876053 - DNA, 33 bp, Homo sapien
ttaaagctccatgaatcatactggaattcgaaa

SEQ ID NO: 876054 - DNA, 33 bp, Homo sapien
ttaaagctccatgaatgatactggaattcgaaa

SEQ ID NO: 876055 - DNA, 33 bp, Homo sapien
atgggtctgtgaacacacgggattatataatat

SEQ ID NO: 876056 - DNA, 33 bp, Homo sapien
atgggtctgtgaacacgcgggattatataatat

SEQ ID NO: 876057 - DNA, 33 bp, Homo sapien
tcacgtgtccagaatacgtaaatttatcgagaa

SEQ ID NO: 876058 - DNA, 33 bp, Homo sapien
tcacgtgtccagaatatgtaaatttatcgagaa

SEQ ID NO: 876059 - DNA, 33 bp, Homo sapien
ccacgtcgcataatgactcatccaagttatatt

SEQ ID NO: 876060 - DNA, 33 bp, Homo sapien
ccacgtcgcataatgattcatccaagttatatt

SEQ ID NO: 876061 - DNA, 33 bp, Homo sapien
atctgttcactgcaaaccccagtcatttatctg

SEQ ID NO: 876062 - DNA, 33 bp, Homo sapien
atctgttcactgcaaagcccagtcatttatctg

SEQ ID NO: 876063 - DNA, 33 bp, Homo sapien
tcagaagaggaagaacagagtaaagaagggaat

SEQ ID NO: 876064 - DNA, 33 bp, Homo sapien
tcagaagaggaagaacggagtaaagaagggaat

SEQ ID NO: 876065 - DNA, 33 bp, Homo sapien
ttcccctgacgtgatgcagaaccaatacagctt

SEQ ID NO: 876066 - DNA, 33 bp, Homo sapien
ttcccctgacgtgatgtagaaccaatacagctt

SEQ ID NO: 876067 - DNA, 33 bp, Homo sapien
gcctcttcctgagttcaagttatcctcccacct

SEQ ID NO: 876068 - DNA, 33 bp, Homo sapien
gcctcttcctgagttcgagttatcctcccacct

SEQ ID NO: 876069 - DNA, 33 bp, Homo sapien
agatgaaacagccttcaagtggaagaaggtgtc

SEQ ID NO: 876070 - DNA, 33 bp, Homo sapien
agatgaaacagccttcgagtggaagaaggtgtc

SEQ ID NO: 876071 - DNA, 33 bp, Homo sapien
ttttaaatggcaaaataaccaatacaaatgcaa

SEQ ID NO: 876072 - DNA, 33 bp, Homo sapien
ttttaaatggcaaaatcaccaatacaaatgcaa

SEQ ID NO: 876073 - DNA, 33 bp, Homo sapien
gcagggtcttcagtgcacagagggcctcacagc

SEQ ID NO: 876074 - DNA, 33 bp, Homo sapien
gcagggtcttcagtgcgcagagggcctcacagc

SEQ ID NO: 876075 - DNA, 33 bp, Homo sapien
tggtaccctgtgatcaacgtcccgtaacatgcc

SEQ ID NO: 876076 - DNA, 33 bp, Homo sapien
tggtaccctgtgatcagcgtcccgtaacatgcc

SEQ ID NO: 876077 - DNA, 33 bp, Homo sapien
atttttaaagagcttcaaacattgcgatagtgt

SEQ ID NO: 876078 - DNA, 33 bp, Homo sapien
atttttaaagagcttccaacattgcgatagtgt

SEQ ID NO: 876079 - DNA, 33 bp, Homo sapien
ttgatgatccaatatgccagatattctttgcac

SEQ ID NO: 876080 - DNA, 33 bp, Homo sapien
ttgatgatccaatatgtcagatattctttgcac

SEQ ID NO: 876081 - DNA, 33 bp, Homo sapien
tagacgtaaagatgtaaacaacagaccgggcgc

SEQ ID NO: 876082 - DNA, 33 bp, Homo sapien
tagacgtaaagatgtagacaacagaccgggcgc

SEQ ID NO: 876083 - DNA, 33 bp, Homo sapien
cgaatcaactcaaagaactcaaacagagaacag

SEQ ID NO: 876084 - DNA, 33 bp, Homo sapien
cgaatcaactcaaagagctcaaacagagaacag

SEQ ID NO: 876085 - DNA, 33 bp, Homo sapien
atgttatacttttaaacacagcattgtttggca

SEQ ID NO: 876086 - DNA, 33 bp, Homo sapien
atgttatacttttaaatacagcattgtttggca

SEQ ID NO: 876087 - DNA, 33 bp, Homo sapien
gatgcgtgcttaagccagccacgagaatggctc

SEQ ID NO: 876088 - DNA, 33 bp, Homo sapien
gatgcgtgcttaagccggccacgagaatggctc

SEQ ID NO: 876089 - DNA, 33 bp, Homo sapien
ataaaagcaaggaaatcataaacacggagttct

SEQ ID NO: 876090 - DNA, 33 bp, Homo sapien
ataaaagcaaggaaattataaacacggagttct

SEQ ID NO: 876091 - DNA, 33 bp, Homo sapien
atcaacataagacagacaggagtagccatctac

SEQ ID NO: 876092 - DNA, 33 bp, Homo sapien
atcaacataagacagataggagtagccatctac

SEQ ID NO: 876093 - DNA, 33 bp, Homo sapien
agttgtgaaaggttcaagtgggtgctgaccctt

SEQ ID NO: 876094 - DNA, 33 bp, Homo sapien
agttgtgaaaggttcaggtgggtgctgaccctt

SEQ ID NO: 876095 - DNA, 33 bp, Homo sapien
gtttcgatgtataacccgcacagattgaacatg

SEQ ID NO: 876096 - DNA, 33 bp, Homo sapien
gtttcgatgtataacctgcacagattgaacatg

SEQ ID NO: 876097 - DNA, 33 bp, Homo sapien
gcagagccataggaaacggttcactcccagctg

SEQ ID NO: 876098 - DNA, 33 bp, Homo sapien
gcagagccataggaaatggttcactcccagctg

SEQ ID NO: 876099 - DNA, 33 bp, Homo sapien
ctgctctgtctcttgccctgacactcttcctcc

SEQ ID NO: 876100 - DNA, 33 bp, Homo sapien
ctgctctgtctcttgctctgacactcttcctcc

SEQ ID NO: 876101 - DNA, 33 bp, Homo sapien
agaacgtagaacaggcacaacgacaacaacgtt

SEQ ID NO: 876102 - DNA, 33 bp, Homo sapien
agaacgtagaacaggcgcaacgacaacaacgtt

SEQ ID NO: 876103 - DNA, 33 bp, Homo sapien
cccaaatgcagacgtacatcaagcaggcttccc

SEQ ID NO: 876104 - DNA, 33 bp, Homo sapien
cccaaatgcagacgtatatcaagcaggcttccc

SEQ ID NO: 876105 - DNA, 33 bp, Homo sapien
cttccccaaccctccacgattcatcttgtatcc

SEQ ID NO: 876106 - DNA, 33 bp, Homo sapien
cttccccaaccctccatgattcatcttgtatcc

SEQ ID NO: 876107 - DNA, 33 bp, Homo sapien
aagagcagtcatatttaaaaggatctttgttct

SEQ ID NO: 876108 - DNA, 33 bp, Homo sapien
aagagcagtcatattttaaaggatctttgttct

SEQ ID NO: 876109 - DNA, 33 bp, Homo sapien
tatttctgattgaaaccctctaagccttactgg

SEQ ID NO: 876110 - DNA, 33 bp, Homo sapien
tatttctgattgaaactctctaagccttactgg

SEQ ID NO: 876111 - DNA, 33 bp, Homo sapien
aattgaaaaatggccaaaggctctacgtaagca

SEQ ID NO: 876112 - DNA, 33 bp, Homo sapien
aattgaaaaatggccagaggctctacgtaagca

SEQ ID NO: 876113 - DNA, 33 bp, Homo sapien
tcagggttatgtgtcaactcattttaaactcct

SEQ ID NO: 876114 - DNA, 33 bp, Homo sapien
tcagggttatgtgtcatctcattttaaactcct

SEQ ID NO: 876115 - DNA, 33 bp, Homo sapien
gcttgaggacagaaccagagtatgtgcagcgtg

SEQ ID NO: 876116 - DNA, 33 bp, Homo sapien
gcttgaggacagaaccggagtatgtgcagcgtg

SEQ ID NO: 876117 - DNA, 33 bp, Homo sapien
tgaagtgtctttactaatagagtgtctctgaga

SEQ ID NO: 876118 - DNA, 33 bp, Homo sapien
tgaagtgtctttactactagagtgtctctgaga

SEQ ID NO: 876119 - DNA, 33 bp, Homo sapien
tccatctccatgtccaaattttctcttacaggg

SEQ ID NO: 876120 - DNA, 33 bp, Homo sapien
tccatctccatgtccagattttctcttacaggg

SEQ ID NO: 876121 - DNA, 33 bp, Homo sapien
aatcaatcaaactctactacaagcagctcacat

SEQ ID NO: 876122 - DNA, 33 bp, Homo sapien
aatcaatcaaactctattacaagcagctcacat

SEQ ID NO: 876123 - DNA, 33 bp, Homo sapien
gcagtacacaagggccacagtaagcgctcttcc

SEQ ID NO: 876124 - DNA, 33 bp, Homo sapien
gcagtacacaagggccgcagtaagcgctcttcc

SEQ ID NO: 876125 - DNA, 33 bp, Homo sapien
gcacttgtatgtaccactaatttactactttat

SEQ ID NO: 876126 - DNA, 33 bp, Homo sapien
gcacttgtatgtaccattaatttactactttat

SEQ ID NO: 876127 - DNA, 33 bp, Homo sapien
tgaggaaattttttaactgtcgaccactctaga

SEQ ID NO: 876128 - DNA, 33 bp, Homo sapien
tgaggaaattttttaattgtcgaccactctaga

SEQ ID NO: 876129 - DNA, 33 bp, Homo sapien
agctaccacactggacaatatagagaacatcac

SEQ ID NO: 876130 - DNA, 33 bp, Homo sapien
agctaccacactggacgatatagagaacatcac

SEQ ID NO: 876131 - DNA, 33 bp, Homo sapien
gagcatcacattaagaagtatataatattggac

SEQ ID NO: 876132 - DNA, 33 bp, Homo sapien
gagcatcacattaagacgtatataatattggac

SEQ ID NO: 876133 - DNA, 33 bp, Homo sapien
gaaggggaaagataacagtcgtctcagttttct

SEQ ID NO: 876134 - DNA, 33 bp, Homo sapien
gaaggggaaagataacggtcgtctcagttttct

SEQ ID NO: 876135 - DNA, 33 bp, Homo sapien
ttttcttttcttggacacttaattctgttctga

SEQ ID NO: 876136 - DNA, 33 bp, Homo sapien
ttttcttttcttggacgcttaattctgttctga

SEQ ID NO: 876137 - DNA, 33 bp, Homo sapien
atcacctgccatcttaaggtttaatatttacaa

SEQ ID NO: 876138 - DNA, 33 bp, Homo sapien
atcacctgccatcttatggtttaatatttacaa

SEQ ID NO: 876139 - DNA, 33 bp, Homo sapien
gtacttgacatctggagtattcttagctatcta

SEQ ID NO: 876140 - DNA, 33 bp, Homo sapien
gtacttgacatctggattattcttagctatcta

SEQ ID NO: 876141 - DNA, 33 bp, Homo sapien
cctactccagagacaccaatacatttatttgta

SEQ ID NO: 876142 - DNA, 33 bp, Homo sapien
cctactccagagacactaatacatttatttgta

SEQ ID NO: 876143 - DNA, 33 bp, Homo sapien
ttccagctgaccgtgacggacactgccgggcag

SEQ ID NO: 876144 - DNA, 33 bp, Homo sapien
ttccagctgaccgtgatggacactgccgggcag

SEQ ID NO: 876145 - DNA, 33 bp, Homo sapien
ccaccagcctggttccaagctaggattaaagag

SEQ ID NO: 876146 - DNA, 33 bp, Homo sapien
ccaccagcctggttccgagctaggattaaagag

SEQ ID NO: 876147 - DNA, 33 bp, Homo sapien
cctgacccagggatgcgctgtcctttcagcccc

SEQ ID NO: 876148 - DNA, 33 bp, Homo sapien
cctgacccagggatgctctgtcctttcagcccc

SEQ ID NO: 876149 - DNA, 33 bp, Homo sapien
acccaaagaatacaaactgttctactataaaga

SEQ ID NO: 876150 - DNA, 33 bp, Homo sapien
acccaaagaatacaaattgttctactataaaga

SEQ ID NO: 876151 - DNA, 33 bp, Homo sapien
tttagctataatatgcacagaagaggctgtgtg

SEQ ID NO: 876152 - DNA, 33 bp, Homo sapien
tttagctataatatgcgcagaagaggctgtgtg

SEQ ID NO: 876153 - DNA, 33 bp, Homo sapien
agtgttggctggtagcaattttgggtacaaggc

SEQ ID NO: 876154 - DNA, 33 bp, Homo sapien
agtgttggctggtagcgattttgggtacaaggc

SEQ ID NO: 876155 - DNA, 33 bp, Homo sapien
tattttttaggaaaatcatctatgctgaagaga

SEQ ID NO: 876156 - DNA, 33 bp, Homo sapien
tattttttaggaaaatgatctatgctgaagaga

SEQ ID NO: 876157 - DNA, 33 bp, Homo sapien
ttctgacaaaaaaaacaatgctcatcagaacct

SEQ ID NO: 876158 - DNA, 33 bp, Homo sapien
ttctgacaaaaaaaacgatgctcatcagaacct

SEQ ID NO: 876159 - DNA, 33 bp, Homo sapien
catgaatgactgtgcacgtagtaaagctttgtc

SEQ ID NO: 876160 - DNA, 33 bp, Homo sapien
catgaatgactgtgcatgtagtaaagctttgtc

SEQ ID NO: 876161 - DNA, 33 bp, Homo sapien
agatctcactctgggacgtgacccttatttcta

SEQ ID NO: 876162 - DNA, 33 bp, Homo sapien
agatctcactctgggatgtgacccttatttcta

SEQ ID NO: 876163 - DNA, 33 bp, Homo sapien
aaagtcttcttaaatgcaacaccagctgggctc

SEQ ID NO: 876164 - DNA, 33 bp, Homo sapien
aaagtcttcttaaatgtaacaccagctgggctc

SEQ ID NO: 876165 - DNA, 33 bp, Homo sapien
tctcagctttcaactcaagctcaacattcaaaa

SEQ ID NO: 876166 - DNA, 33 bp, Homo sapien
tctcagctttcaactcgagctcaacattcaaaa

SEQ ID NO: 876167 - DNA, 33 bp, Homo sapien
cattgtcctcttcagagtctcctcaggtacttg

SEQ ID NO: 876168 - DNA, 33 bp, Homo sapien
cattgtcctcttcagattctcctcaggtacttg

SEQ ID NO: 876169 - DNA, 33 bp, Homo sapien
cccacacgaaggcctcaaagttgtcagcaatgt

SEQ ID NO: 876170 - DNA, 33 bp, Homo sapien
cccacacgaaggcctcgaagttgtcagcaatgt

SEQ ID NO: 876171 - DNA, 33 bp, Homo sapien
accctggtttaaagcccgactttgccaaaccgc

SEQ ID NO: 876172 - DNA, 33 bp, Homo sapien
accctggtttaaagcctgactttgccaaaccgc

SEQ ID NO: 876173 - DNA, 33 bp, Homo sapien
ctgctggagtctattacaaaactcatctggaag

SEQ ID NO: 876174 - DNA, 33 bp, Homo sapien
ctgctggagtctattataaaactcatctggaag

SEQ ID NO: 876175 - DNA, 33 bp, Homo sapien
tctccatcctagagacagcagaaggacaaacat

SEQ ID NO: 876176 - DNA, 33 bp, Homo sapien
tctccatcctagagacggcagaaggacaaacat

SEQ ID NO: 876177 - DNA, 33 bp, Homo sapien
tggatccaattctggacgagttaccctgtccta

SEQ ID NO: 876178 - DNA, 33 bp, Homo sapien
tggatccaattctggatgagttaccctgtccta

SEQ ID NO: 876179 - DNA, 33 bp, Homo sapien
cccctcgcatttggaacccttgtatttctttct

SEQ ID NO: 876180 - DNA, 33 bp, Homo sapien
cccctcgcatttggaatccttgtatttctttct

SEQ ID NO: 876181 - DNA, 33 bp, Homo sapien
atggctgctgtgagtgaatgtagaatttctctg

SEQ ID NO: 876182 - DNA, 33 bp, Homo sapien
atggctgctgtgagtggatgtagaatttctctg

SEQ ID NO: 876183 - DNA, 33 bp, Homo sapien
gaaagcagtctccaaccactagaggacagtgga

SEQ ID NO: 876184 - DNA, 33 bp, Homo sapien
gaaagcagtctccaacgactagaggacagtgga

SEQ ID NO: 876185 - DNA, 33 bp, Homo sapien
cattcactgtagtgtacaatgcacctgcccaac

SEQ ID NO: 876186 - DNA, 33 bp, Homo sapien
cattcactgtagtgtagaatgcacctgcccaac

SEQ ID NO: 876187 - DNA, 33 bp, Homo sapien; identical to SEQ ID NO: 876185

SEQ ID NO: 876188 - DNA, 33 bp, Homo sapien; identical to SEQ ID NO: 876186

SEQ ID NO: 876189 - DNA, 33 bp, Homo sapien
gacataagaattgtggaacccaaatgaccaaat

SEQ ID NO: 876190 - DNA, 33 bp, Homo sapien
gacataagaattgtgggacccaaatgaccaaat

SEQ ID NO: 876191 - DNA, 33 bp, Homo sapien
tgagaggtcagaatcaccctaaacatttgaaac

SEQ ID NO: 876192 - DNA, 33 bp, Homo sapien
tgagaggtcagaatcatcctaaacatttgaaac

SEQ ID NO: 876193 - DNA, 33 bp, Homo sapien
tattgtgttccactgacctaagtgtctattttt

SEQ ID NO: 876194 - DNA, 33 bp, Homo sapien
tattgtgttccactgatctaagtgtctattttt

SEQ ID NO: 876195 - DNA, 33 bp, Homo sapien
ctacctggctgctgagaagagtcctttggagtg

SEQ ID NO: 876196 - DNA, 33 bp, Homo sapien
ctacctggctgctgaggagagtcctttggagtg

SEQ ID NO: 876197 - DNA, 33 bp, Homo sapien
gttcctggcagctgtgaagggcttagcttaggg

SEQ ID NO: 876198 - DNA, 33 bp, Homo sapien
gttcctggcagctgtggagggcttagcttaggg

SEQ ID NO: 876199 - DNA, 33 bp, Homo sapien
gcagacgctgactgaaaagactgtatacaagta

SEQ ID NO: 876200 - DNA, 33 bp, Homo sapien
gcagacgctgactgaagagactgtatacaagta

SEQ ID NO: 876201 - DNA, 33 bp, Homo sapien
tacccatcaaaatggcaatccttaaaatttcaa

SEQ ID NO: 876202 - DNA, 33 bp, Homo sapien
tacccatcaaaatggctatccttaaaatttcaa

SEQ ID NO: 876203 - DNA, 33 bp, Homo sapien
tcttgaaggagtttcaaatctttagagtgactc

SEQ ID NO: 876204 - DNA, 33 bp, Homo sapien
tcttgaaggagtttcagatctttagagtgactc

SEQ ID NO: 876205 - DNA, 33 bp, Homo sapien; identical to SEQ ID NO: 876203

SEQ ID NO: 876206 - DNA, 33 bp, Homo sapien; identical to SEQ ID NO: 876204

SEQ ID NO: 876207 - DNA, 33 bp, Homo sapien
cccccgatagccccaacggcggcgaggacatca

SEQ ID NO: 876208 - DNA, 33 bp, Homo sapien
cccccgatagccccaatggcggcgaggacatca

SEQ ID NO: 876209 - DNA, 33 bp, Homo sapien
gtataagtaatttgggcaatgctatataataaa

SEQ ID NO: 876210 - DNA, 33 bp, Homo sapien
gtataagtaatttggggaatgctatataataaa

SEQ ID NO: 876211 - DNA, 33 bp, Homo sapien
tacaaccatgtgaaaactaaaactaaaatgcca

SEQ ID NO: 876212 - DNA, 33 bp, Homo sapien
tacaaccatgtgaaaagtaaaactaaaatgcca

SEQ ID NO: 876213 - DNA, 33 bp, Homo sapien
aaatcaagacaagacacctggtccagtttgact

SEQ ID NO: 876214 - DNA, 33 bp, Homo sapien
aaatcaagacaagacatctggtccagtttgact

SEQ ID NO: 876215 - DNA, 33 bp, Homo sapien
cctggaggagcagggacgatgcttggtgggcag

SEQ ID NO: 876216 - DNA, 33 bp, Homo sapien
cctggaggagcagggatgatgcttggtgggcag

SEQ ID NO: 876217 - DNA, 33 bp, Homo sapien; identical to SEQ ID NO: 876215

SEQ ID NO: 876218 - DNA, 33 bp, Homo sapien; identical to SEQ ID NO: 876216

SEQ ID NO: 876219 - DNA, 33 bp, Homo sapien
catcacatgagctctaaaaagcagagaattttc

SEQ ID NO: 876220 - DNA, 33 bp, Homo sapien
catcacatgagctctacaaagcagagaattttc

SEQ ID NO: 876221 - DNA, 33 bp, Homo sapien
actggtatgagtcataagttaacggcggccacc

SEQ ID NO: 876222 - DNA, 33 bp, Homo sapien
actggtatgagtcataggttaacggcggccacc

SEQ ID NO: 876223 - DNA, 33 bp, Homo sapien
caggctcaccagctgacggagagaaaaatcatc

SEQ ID NO: 876224 - DNA, 33 bp, Homo sapien
caggctcaccagctgatggagagaaaaatcatc

SEQ ID NO: 876225 - DNA, 33 bp, Homo sapien
tgggcatagaagtggcccaaaggttattgtaat

SEQ ID NO: 876226 - DNA, 33 bp, Homo sapien
tgggcatagaagtggctcaaaggttattgtaat

SEQ ID NO: 876227 - DNA, 33 bp, Homo sapien
tgacttaacagaacagacaactgcattctgcag

SEQ ID NO: 876228 - DNA, 33 bp, Homo sapien
tgacttaacagaacaggcaactgcattctgcag

SEQ ID NO: 876229 - DNA, 33 bp, Homo sapien
actatcccatcacccaaacagtaaaagcggtac

SEQ ID NO: 876230 - DNA, 33 bp, Homo sapien
actatcccatcacccagacagtaaaagcggtac

SEQ ID NO: 876231 - DNA, 33 bp, Homo sapien
aacagtaaacatggcacctaacaagtgtttttt

SEQ ID NO: 876232 - DNA, 33 bp, Homo sapien
aacagtaaacatggcatctaacaagtgtttttt

SEQ ID NO: 876233 - DNA, 33 bp, Homo sapien
actcgctggttagcgcagaattacagtggcatg

SEQ ID NO: 876234 - DNA, 33 bp, Homo sapien
actcgctggttagcgctgaattacagtggcatg

SEQ ID NO: 876235 - DNA, 33 bp, Homo sapien
aacacatgggagaaaccgcgtgtcatcttgaga

SEQ ID NO: 876236 - DNA, 33 bp, Homo sapien
aacacatgggagaaactgcgtgtcatcttgaga

SEQ ID NO: 876237 - DNA, 33 bp, Homo sapien
accccgttggataaagaagagttaattatcatg

SEQ ID NO: 876238 - DNA, 33 bp, Homo sapien
accccgttggataaagcagagttaattatcatg

SEQ ID NO: 876239 - DNA, 33 bp, Homo sapien
tctctgactgttgcaacaacacagttaaatcct

SEQ ID NO: 876240 - DNA, 33 bp, Homo sapien
tctctgactgttgcaataacacagttaaatcct

SEQ ID NO: 876241 - DNA, 33 bp, Homo sapien
ggtaactgacagcagaacactgggagcgccctg

SEQ ID NO: 876242 - DNA, 33 bp, Homo sapien
ggtaactgacagcagagcactgggagcgccctg

SEQ ID NO: 876243 - DNA, 33 bp, Homo sapien
gaggttccagggactcagacccgcatcttgtca

SEQ ID NO: 876244 - DNA, 33 bp, Homo sapien
gaggttccagggactcggacccgcatcttgtca

SEQ ID NO: 876245 - DNA, 33 bp, Homo sapien
agctgttgtaaaaaaacactgcaaatttagtgg

SEQ ID NO: 876246 - DNA, 33 bp, Homo sapien
agctgttgtaaaaaaatactgcaaatttagtgg

SEQ ID NO: 876247 - DNA, 33 bp, Homo sapien
gaaaaaattcaggtgaagaaggcctaggattgc

SEQ ID NO: 876248 - DNA, 33 bp, Homo sapien
gaaaaaattcaggtgaggaaggcctaggattgc

SEQ ID NO: 876249 - DNA, 33 bp, Homo sapien
ggagccaatggtgagaacatggtgaacacagtg

SEQ ID NO: 876250 - DNA, 33 bp, Homo sapien
ggagccaatggtgagagcatggtgaacacagtg

SEQ ID NO: 876251 - DNA, 33 bp, Homo sapien
ctacacctctcctgaccggccaatcttaacagg

SEQ ID NO: 876252 - DNA, 33 bp, Homo sapien
ctacacctctcctgactggccaatcttaacagg

SEQ ID NO: 876253 - DNA, 33 bp, Homo sapien
cgcatcttcgccatcaccggagaggactatgat

SEQ ID NO: 876254 - DNA, 33 bp, Homo sapien
cgcatcttcgccatcatcggagaggactatgat

SEQ ID NO: 876255 - DNA, 33 bp, Homo sapien; identical to SEQ ID NO: 876253

SEQ ID NO: 876256 - DNA, 33 bp, Homo sapien; identical to SEQ ID NO: 876254

SEQ ID NO: 876257 - DNA, 33 bp, Homo sapien; identical to SEQ ID NO: 876253

SEQ ID NO: 876258 - DNA, 33 bp, Homo sapien; identical to SEQ ID NO: 876254

SEQ ID NO: 876259 - DNA, 33 bp, Homo sapien
ttctactcctgtgttaggttgcttatgataatg

SEQ ID NO: 876260 - DNA, 33 bp, Homo sapien
ttctactcctgtgttatgttgcttatgataatg

SEQ ID NO: 876261 - DNA, 33 bp, Homo sapien
ctggagaatcctagtacaagaaggtatggctaa

SEQ ID NO: 876262 - DNA, 33 bp, Homo sapien
ctggagaatcctagtataagaaggtatggctaa

SEQ ID NO: 876263 - DNA, 33 bp, Homo sapien
agtctagtgggtgtcacgtgatacctcatcctg

SEQ ID NO: 876264 - DNA, 33 bp, Homo sapien
agtctagtgggtgtcatgtgatacctcatcctg

SEQ ID NO: 876265 - DNA, 33 bp, Homo sapien
tccttaaactagaacaacagcatcgcctcctcc

SEQ ID NO: 876266 - DNA, 33 bp, Homo sapien
tccttaaactagaacagcagcatcgcctcctcc

SEQ ID NO: 876267 - DNA, 33 bp, Homo sapien
tgaccctcatgaacaaacccttcttatgaaatt

SEQ ID NO: 876268 - DNA, 33 bp, Homo sapien
tgaccctcatgaacaatcccttcttatgaaatt

SEQ ID NO: 876269 - DNA, 33 bp, Homo sapien
cagaggcactggagatcactagacaggtgagac

SEQ ID NO: 876270 - DNA, 33 bp, Homo sapien
cagaggcactggagattactagacaggtgagac

SEQ ID NO: 876271 - DNA, 33 bp, Homo sapien
taagtgcccagcaacactgaattgaatgaaaaa

SEQ ID NO: 876272 - DNA, 33 bp, Homo sapien
taagtgcccagcaacagtgaattgaatgaaaaa

SEQ ID NO: 876273 - DNA, 33 bp, Homo sapien
aagaaactagcaacacagtaaacagacagcgtg

SEQ ID NO: 876274 - DNA, 33 bp, Homo sapien
aagaaactagcaacacggtaaacagacagcgtg

SEQ ID NO: 876275 - DNA, 33 bp, Homo sapien
tgacaactcttgtccacgctccaaatctgagga

SEQ ID NO: 876276 - DNA, 33 bp, Homo sapien
tgacaactcttgtccatgctccaaatctgagga

SEQ ID NO: 876277 - DNA, 33 bp, Homo sapien
cttttgaacccagatcacttgtcatcaaatgaa

SEQ ID NO: 876278 - DNA, 33 bp, Homo sapien
cttttgaacccagatcgcttgtcatcaaatgaa

SEQ ID NO: 876279 - DNA, 33 bp, Homo sapien
catcctctagcttcaggctatgaatggctcatt

SEQ ID NO: 876280 - DNA, 33 bp, Homo sapien
catcctctagcttcagtctatgaatggctcatt

SEQ ID NO: 876281 - DNA, 33 bp, Homo sapien
agattgaagtggagctaaaaactggtcggcttc

SEQ ID NO: 876282 - DNA, 33 bp, Homo sapien
agattgaagtggagctgaaaactggtcggcttc

SEQ ID NO: 876283 - DNA, 33 bp, Homo sapien
ctctgtcttttcataccctcttactgagactgt

SEQ ID NO: 876284 - DNA, 33 bp, Homo sapien
ctctgtcttttcatacgctcttactgagactgt

SEQ ID NO: 876285 - DNA, 33 bp, Homo sapien
accccagacaattctacatcggccagaaatgca

SEQ ID NO: 876286 - DNA, 33 bp, Homo sapien
accccagacaattctatatcggccagaaatgca

SEQ ID NO: 876287 - DNA, 33 bp, Homo sapien
taatcactaaccaaaccgcttcagccctggaaa

SEQ ID NO: 876288 - DNA, 33 bp, Homo sapien
taatcactaaccaaactgcttcagccctggaaa

SEQ ID NO: 876289 - DNA, 33 bp, Homo sapien
agcaccagactacttaccagcagaagaaggtgg

SEQ ID NO: 876290 - DNA, 33 bp, Homo sapien
agcaccagactacttatcagcagaagaaggtgg

SEQ ID NO: 876291 - DNA, 33 bp, Homo sapien
ttaatggggttgggagaaacacagaacttgagg

SEQ ID NO: 876292 - DNA, 33 bp, Homo sapien
ttaatggggttgggaggaacacagaacttgagg

SEQ ID NO: 876293 - DNA, 33 bp, Homo sapien
gaggcctgggatgattcaaacccagattgtcct

SEQ ID NO: 876294 - DNA, 33 bp, Homo sapien
gaggcctgggatgatttaaacccagattgtcct

SEQ ID NO: 876295 - DNA, 33 bp, Homo sapien
gtcgtccaagggtcaactctatacagtaacaac

SEQ ID NO: 876296 - DNA, 33 bp, Homo sapien
gtcgtccaagggtcaattctatacagtaacaac

SEQ ID NO: 876297 - DNA, 33 bp, Homo sapien
atgaatacaatgaagaagacctttatgatgatc

SEQ ID NO: 876298 - DNA, 33 bp, Homo sapien
atgaatacaatgaagaggacctttatgatgatc

SEQ ID NO: 876299 - DNA, 33 bp, Homo sapien
aagaaaatgtaccttaagaactttcagtgaaac

SEQ ID NO: 876300 - DNA, 33 bp, Homo sapien
aagaaaatgtaccttaggaactttcagtgaaac

SEQ ID NO: 876301 - DNA, 33 bp, Homo sapien
gttttagcattcagaaaaaaatagccagtaagt

SEQ ID NO: 876302 - DNA, 33 bp, Homo sapien
gttttagcattcagaagaaaatagccagtaagt

SEQ ID NO: 876303 - DNA, 33 bp, Homo sapien
atctgtggaatccatacgaggtaacaaatgttt

SEQ ID NO: 876304 - DNA, 33 bp, Homo sapien
atctgtggaatccatatgaggtaacaaatgttt

SEQ ID NO: 876305 - DNA, 33 bp, Homo sapien
ggctccttgttgcacaaatagtttttgaaagat

SEQ ID NO: 876306 - DNA, 33 bp, Homo sapien
ggctccttgttgcacagatagtttttgaaagat

SEQ ID NO: 876307 - DNA, 33 bp, Homo sapien
tgctcactttgtgtgaaaaggttaaacgtggct

SEQ ID NO: 876308 - DNA, 33 bp, Homo sapien
tgctcactttgtgtgagaaggttaaacgtggct

SEQ ID NO: 876309 - DNA, 33 bp, Homo sapien
ctttaaagtatccaaactcaacactgtctcctt

SEQ ID NO: 876310 - DNA, 33 bp, Homo sapien
ctttaaagtatccaaagtcaacactgtctcctt

SEQ ID NO: 876311 - DNA, 33 bp, Homo sapien
ggtgggagcactcagaagtagttactggataca

SEQ ID NO: 876312 - DNA, 33 bp, Homo sapien
ggtgggagcactcagaggtagttactggataca

SEQ ID NO: 876313 - DNA, 33 bp, Homo sapien
ggagaaagctccatgacattggtttgagtaata

SEQ ID NO: 876314 - DNA, 33 bp, Homo sapien
ggagaaagctccatgatattggtttgagtaata

SEQ ID NO: 876315 - DNA, 33 bp, Homo sapien
tttctaacaaatgtacactatgtaactgacaca

SEQ ID NO: 876316 - DNA, 33 bp, Homo sapien
tttctaacaaatgtacgctatgtaactgacaca

SEQ ID NO: 876317 - DNA, 33 bp, Homo sapien
atcagcagatcatgcccgagttttgtggggcac

SEQ ID NO: 876318 - DNA, 33 bp, Homo sapien
atcagcagatcatgcctgagttttgtggggcac

SEQ ID NO: 876319 - DNA, 33 bp, Homo sapien
gtcccccatctgccatcaagctgagacaaagaa

SEQ ID NO: 876320 - DNA, 33 bp, Homo sapien
gtcccccatctgccatgaagctgagacaaagaa

SEQ ID NO: 876321 - DNA, 33 bp, Homo sapien
ggtgggtgacctggaaattaggaagagggacac

SEQ ID NO: 876322 - DNA, 33 bp, Homo sapien
ggtgggtgacctggaagttaggaagagggacac

SEQ ID NO: 876323 - DNA, 33 bp, Homo sapien
tgcaaatttccttaaacggcacaataattatgc

SEQ ID NO: 876324 - DNA, 33 bp, Homo sapien
tgcaaatttccttaaatggcacaataattatgc

SEQ ID NO: 876325 - DNA, 33 bp, Homo sapien
tttccacagacttttccaggtacagtatcacat

SEQ ID NO: 876326 - DNA, 33 bp, Homo sapien
tttccacagacttttcgaggtacagtatcacat

SEQ ID NO: 876327 - DNA, 33 bp, Homo sapien
tgtttctgtatctgaactaattggtgatattcc

SEQ ID NO: 876328 - DNA, 33 bp, Homo sapien
tgtttctgtatctgaattaattggtgatattcc

SEQ ID NO: 876329 - DNA, 33 bp, Homo sapien
gaataagagcatgactaaatctatactaagcaa

SEQ ID NO: 876330 - DNA, 33 bp, Homo sapien
gaataagagcatgactgaatctatactaagcaa

SEQ ID NO: 876331 - DNA, 33 bp, Homo sapien
cagcctgaagaaaatcacttaactttcaaatgt

SEQ ID NO: 876332 - DNA, 33 bp, Homo sapien
cagcctgaagaaaatcccttaactttcaaatgt

SEQ ID NO: 876333 - DNA, 33 bp, Homo sapien
tgctgccttataagccactcagtcaactcccca

SEQ ID NO: 876334 - DNA, 33 bp, Homo sapien
tgctgccttataagccgctcagtcaactcccca

SEQ ID NO: 876335 - DNA, 33 bp, Homo sapien
ctcactgtgttttcctaacgtgctttatcttgt

SEQ ID NO: 876336 - DNA, 33 bp, Homo sapien
ctcactgtgttttccttacgtgctttatcttgt

SEQ ID NO: 876337 - DNA, 33 bp, Homo sapien
tgccagccagcgctagaaatggaggcccgcaga

SEQ ID NO: 876338 - DNA, 33 bp, Homo sapien
tgccagccagcgctaggaatggaggcccgcaga

SEQ ID NO: 876339 - DNA, 33 bp, Homo sapien
tagatgtcatatcccaatctggcctgtttggga

SEQ ID NO: 876340 - DNA, 33 bp, Homo sapien
tagatgtcatatcccagtctggcctgtttggga

SEQ ID NO: 876341 - DNA, 33 bp, Homo sapien
acacaagatcacatcacctcactgttctaagta

SEQ ID NO: 876342 - DNA, 33 bp, Homo sapien
acacaagatcacatcagctcactgttctaagta

SEQ ID NO: 876343 - DNA, 33 bp, Homo sapien
cagcacattcttgtgcaaggtaaaacattaacc

SEQ ID NO: 876344 - DNA, 33 bp, Homo sapien
cagcacattcttgtgcgaggtaaaacattaacc

SEQ ID NO: 876345 - DNA, 33 bp, Homo sapien
gaaaggtcacagtaaaccctgctgaggtggcgc

SEQ ID NO: 876346 - DNA, 33 bp, Homo sapien
gaaaggtcacagtaaatcctgctgaggtggcgc

SEQ ID NO: 876347 - DNA, 33 bp, Homo sapien
agctgtgtaccgtgagacaaattattcaacctc

SEQ ID NO: 876348 - DNA, 33 bp, Homo sapien
agctgtgtaccgtgaggcaaattattcaacctc

SEQ ID NO: 876349 - DNA, 33 bp, Homo sapien
cagaattgcttgctaacagtccgagataactca

SEQ ID NO: 876350 - DNA, 33 bp, Homo sapien
cagaattgcttgctaatagtccgagataactca

SEQ ID NO: 876351 - DNA, 33 bp, Homo sapien
tcaacatgagattctacataaaccactgaaact

SEQ ID NO: 876352 - DNA, 33 bp, Homo sapien
tcaacatgagattctatataaaccactgaaact

SEQ ID NO: 876353 - DNA, 33 bp, Homo sapien
gtaacgcttactttccaacagttcacatatttc

SEQ ID NO: 876354 - DNA, 33 bp, Homo sapien
gtaacgcttactttccgacagttcacatatttc

SEQ ID NO: 876355 - DNA, 33 bp, Homo sapien
gtaacgacaaaacacaacatgtggccatgaaga

SEQ ID NO: 876356 - DNA, 33 bp, Homo sapien
gtaacgacaaaacacaccatgtggccatgaaga

SEQ ID NO: 876357 - DNA, 33 bp, Homo sapien
agggtaggcagaaacacagcatcttccaatcac

SEQ ID NO: 876358 - DNA, 33 bp, Homo sapien
agggtaggcagaaacatagcatcttccaatcac

SEQ ID NO: 876359 - DNA, 33 bp, Homo sapien
atgtctccacctgaacacttagtaagaagctca

SEQ ID NO: 876360 - DNA, 33 bp, Homo sapien
atgtctccacctgaacgcttagtaagaagctca

SEQ ID NO: 876361 - DNA, 33 bp, Homo sapien
tccacacagtgtctcacctttcagggcctctca

SEQ ID NO: 876362 - DNA, 33 bp, Homo sapien
tccacacagtgtctcatctttcagggcctctca

SEQ ID NO: 876363 - DNA, 33 bp, Homo sapien
ggcagatatgggccaaactttgattcatagaga

SEQ ID NO: 876364 - DNA, 33 bp, Homo sapien
ggcagatatgggccaagctttgattcatagaga

SEQ ID NO: 876365 - DNA, 33 bp, Homo sapien
ttttacgttttatagcagaacaagcaaatcatt

SEQ ID NO: 876366 - DNA, 33 bp, Homo sapien
ttttacgttttatagctgaacaagcaaatcatt

SEQ ID NO: 876367 - DNA, 33 bp, Homo sapien
tcatggtgccggggtccgaattactcgcctctc

SEQ ID NO: 876368 - DNA, 33 bp, Homo sapien
tcatggtgccggggtctgaattactcgcctctc

SEQ ID NO: 876369 - DNA, 33 bp, Homo sapien
accttagggtgaggacaaacctaagtctgcaga

SEQ ID NO: 876370 - DNA, 33 bp, Homo sapien
accttagggtgaggacgaacctaagtctgcaga

SEQ ID NO: 876371 - DNA, 33 bp, Homo sapien
attttaagaagttgacagacagctttaaaaatt

SEQ ID NO: 876372 - DNA, 33 bp, Homo sapien
attttaagaagttgacggacagctttaaaaatt

SEQ ID NO: 876373 - DNA, 33 bp, Homo sapien
gaaaaatgatgaatgacgtagatgaatgaacat

SEQ ID NO: 876374 - DNA, 33 bp, Homo sapien
gaaaaatgatgaatgatgtagatgaatgaacat

SEQ ID NO: 876375 - DNA, 33 bp, Homo sapien
ataaagtcagttttccaagctccctggaaatgt

SEQ ID NO: 876376 - DNA, 33 bp, Homo sapien
ataaagtcagttttccgagctccctggaaatgt

SEQ ID NO: 876377 - DNA, 33 bp, Homo sapien
tataggttaatttggccagagaagagatctcga

SEQ ID NO: 876378 - DNA, 33 bp, Homo sapien
tataggttaatttggcgagagaagagatctcga

SEQ ID NO: 876379 - DNA, 33 bp, Homo sapien
tgatgatttgttcaggacacacaaaaatggaca

SEQ ID NO: 876380 - DNA, 33 bp, Homo sapien
tgatgatttgttcagggcacacaaaaatggaca

SEQ ID NO: 876381 - DNA, 33 bp, Homo sapien
ttgaacactgaattacaattaagtctatacagc

SEQ ID NO: 876382 - DNA, 33 bp, Homo sapien
ttgaacactgaattacgattaagtctatacagc

SEQ ID NO: 876383 - DNA, 33 bp, Homo sapien
gagcagattatagctaacaaagaatggtgagac

SEQ ID NO: 876384 - DNA, 33 bp, Homo sapien
gagcagattatagctaccaaagaatggtgagac

SEQ ID NO: 876385 - DNA, 33 bp, Homo sapien
cgtgaacgtggatcccaagaagaatttcaagct

SEQ ID NO: 876386 - DNA, 33 bp, Homo sapien
cgtgaacgtggatcccgagaagaatttcaagct

SEQ ID NO: 876387 - DNA, 33 bp, Homo sapien
cccatctcaattgttaacccctatacacctcag

SEQ ID NO: 876388 - DNA, 33 bp, Homo sapien
cccatctcaattgttaccccctatacacctcag

SEQ ID NO: 876389 - DNA, 33 bp, Homo sapien
attaggtaagcccaacacaattttgtagcttaa

SEQ ID NO: 876390 - DNA, 33 bp, Homo sapien
attaggtaagcccaacgcaattttgtagcttaa

SEQ ID NO: 876391 - DNA, 33 bp, Homo sapien
gaggctagtacagagacggcccattacctcata

SEQ ID NO: 876392 - DNA, 33 bp, Homo sapien
gaggctagtacagagatggcccattacctcata

SEQ ID NO: 876393 - DNA, 33 bp, Homo sapien
cccacttaggtcgagacctttaatagctctgtc

SEQ ID NO: 876394 - DNA, 33 bp, Homo sapien
cccacttaggtcgagatctttaatagctctgtc

SEQ ID NO: 876395 - DNA, 33 bp, Homo sapien
tcggttgtcataaaaccgcacattttaaagttt

SEQ ID NO: 876396 - DNA, 33 bp, Homo sapien
tcggttgtcataaaactgcacattttaaagttt

SEQ ID NO: 876397 - DNA, 33 bp, Homo sapien
tcaagataaaacagtcacagcataaagaaaatc

SEQ ID NO: 876398 - DNA, 33 bp, Homo sapien
tcaagataaaacagtcgcagcataaagaaaatc

SEQ ID NO: 876399 - DNA, 33 bp, Homo sapien
gtcctcctggagttgacagtctactggttacta

SEQ ID NO: 876400 - DNA, 33 bp, Homo sapien
gtcctcctggagttgatagtctactggttacta

SEQ ID NO: 876401 - DNA, 33 bp, Homo sapien
gatcacattactggaaaaaaaaaagatgaagtc

SEQ ID NO: 876402 - DNA, 33 bp, Homo sapien
gatcacattactggaagaaaaaaagatgaagtc

SEQ ID NO: 876403 - DNA, 33 bp, Homo sapien
aagcctgagctctttaaagtgaaatatccatca

SEQ ID NO: 876404 - DNA, 33 bp, Homo sapien
aagcctgagctctttacagtgaaatatccatca

SEQ ID NO: 876405 - DNA, 33 bp, Homo sapien
attagctgagaggacacggggaagccactgctg

SEQ ID NO: 876406 - DNA, 33 bp, Homo sapien
attagctgagaggacatggggaagccactgctg

SEQ ID NO: 876407 - DNA, 33 bp, Homo sapien
atgtagtatatagagacagatgggtttgaatcc

SEQ ID NO: 876408 - DNA, 33 bp, Homo sapien
atgtagtatatagagagagatgggtttgaatcc

SEQ ID NO: 876409 - DNA, 33 bp, Homo sapien
agtcttggttgcacaaaacacataactgacagc

SEQ ID NO: 876410 - DNA, 33 bp, Homo sapien
agtcttggttgcacaacacacataactgacagc

SEQ ID NO: 876411 - DNA, 33 bp, Homo sapien
tcctctaagcaggagacctacttactttctgag

SEQ ID NO: 876412 - DNA, 33 bp, Homo sapien
tcctctaagcaggagatctacttactttctgag

SEQ ID NO: 876413 - DNA, 33 bp, Homo sapien
aataaccatctattgtaaacaactgctgttagc

SEQ ID NO: 876414 - DNA, 33 bp, Homo sapien
aataaccatctattgtgaacaactgctgttagc

SEQ ID NO: 876415 - DNA, 33 bp, Homo sapien
gaagtaaaagtcataaaaaggcctgtaatccca

SEQ ID NO: 876416 - DNA, 33 bp, Homo sapien
gaagtaaaagtcataagaaggcctgtaatccca

SEQ ID NO: 876417 - DNA, 33 bp, Homo sapien
aacttgctctctcaaacggaaactgggaccctc

SEQ ID NO: 876418 - DNA, 33 bp, Homo sapien
aacttgctctctcaaatggaaactgggaccctc

SEQ ID NO: 876419 - DNA, 33 bp, Homo sapien
agtttcaggagaacaacagccaccaaaacagag

SEQ ID NO: 876420 - DNA, 33 bp, Homo sapien
agtttcaggagaacaatagccaccaaaacagag

SEQ ID NO: 876421 - DNA, 33 bp, Homo sapien
tgcaaagattatgacaacgagataatctagcct

SEQ ID NO: 876422 - DNA, 33 bp, Homo sapien
tgcaaagattatgacagcgagataatctagcct

SEQ ID NO: 876423 - DNA, 33 bp, Homo sapien
tgtctcacacaagaaactattgcaatgggggtt

SEQ ID NO: 876424 - DNA, 33 bp, Homo sapien
tgtctcacacaagaaagtattgcaatgggggtt

SEQ ID NO: 876425 - DNA, 33 bp, Homo sapien
ttacagaggtacaatcactaactctgtcagact

SEQ ID NO: 876426 - DNA, 33 bp, Homo sapien
ttacagaggtacaatcgctaactctgtcagact

SEQ ID NO: 876427 - DNA, 33 bp, Homo sapien
taaagcaaagacaccaaccaaaggtgcacacaa

SEQ ID NO: 876428 - DNA, 33 bp, Homo sapien
taaagcaaagacaccacccaaaggtgcacacaa

SEQ ID NO: 876429 - DNA, 33 bp, Homo sapien
cataggaaaccaattaagaaagtgtaggtatat

SEQ ID NO: 876430 - DNA, 33 bp, Homo sapien
cataggaaaccaattaggaaagtgtaggtatat

SEQ ID NO: 876431 - DNA, 33 bp, Homo sapien
agaacttgataaaatgcaggttcccaggcctca

SEQ ID NO: 876432 - DNA, 33 bp, Homo sapien
agaacttgataaaatgtaggttcccaggcctca

SEQ ID NO: 876433 - DNA, 33 bp, Homo sapien
agcttttggatggccaatgaagctaagtgcaga

SEQ ID NO: 876434 - DNA, 33 bp, Homo sapien
agcttttggatggccagtgaagctaagtgcaga

SEQ ID NO: 876435 - DNA, 33 bp, Homo sapien
tctctggggattagcaagagccaactgttaaat

SEQ ID NO: 876436 - DNA, 33 bp, Homo sapien
tctctggggattagcaggagccaactgttaaat

SEQ ID NO: 876437 - DNA, 33 bp, Homo sapien
cctctgtcctcttgtacgtctccacgactgttc

SEQ ID NO: 876438 - DNA, 33 bp, Homo sapien
cctctgtcctcttgtatgtctccacgactgttc

SEQ ID NO: 876439 - DNA, 33 bp, Homo sapien
ctctggaagcgatgagcatgaccaggaggaatg

SEQ ID NO: 876440 - DNA, 33 bp, Homo sapien
ctctggaagcgatgagtatgaccaggaggaatg

SEQ ID NO: 876441 - DNA, 33 bp, Homo sapien
cttacagaaatggtaacatggcaagaaattcat

SEQ ID NO: 876442 - DNA, 33 bp, Homo sapien
cttacagaaatggtaatatggcaagaaattcat

SEQ ID NO: 876443 - DNA, 33 bp, Homo sapien
ttcagcaaaagtaggtaaagtctagatacagtg

SEQ ID NO: 876444 - DNA, 33 bp, Homo sapien
ttcagcaaaagtaggtgaagtctagatacagtg

SEQ ID NO: 876445 - DNA, 33 bp, Homo sapien
cattactcttacacaactaaacattcctaaaca

SEQ ID NO: 876446 - DNA, 33 bp, Homo sapien
cattactcttacacaagtaaacattcctaaaca

SEQ ID NO: 876447 - DNA, 33 bp, Homo sapien
atcaggcccttcacaccatgactctgcaattgc

SEQ ID NO: 876448 - DNA, 33 bp, Homo sapien
atcaggcccttcacacgatgactctgcaattgc

SEQ ID NO: 876449 - DNA, 33 bp, Homo sapien
atggcccacatctaataactgattgcagtggtc

SEQ ID NO: 876450 - DNA, 33 bp, Homo sapien
atggcccacatctaatgactgattgcagtggtc

SEQ ID NO: 876451 - DNA, 33 bp, Homo sapien
tattgtactacctaaactgtgtctttaggaaac

SEQ ID NO: 876452 - DNA, 33 bp, Homo sapien
tattgtactacctaaattgtgtctttaggaaac

SEQ ID NO: 876453 - DNA, 33 bp, Homo sapien
ctcccaggaactgccacgtagaaggagctcaga

SEQ ID NO: 876454 - DNA, 33 bp, Homo sapien
ctcccaggaactgccatgtagaaggagctcaga

SEQ ID NO: 876455 - DNA, 33 bp, Homo sapien
atgtcttgtagaggcagcttccagaacttcctg

SEQ ID NO: 876456 - DNA, 33 bp, Homo sapien
atgtcttgtagaggcatcttccagaacttcctg

SEQ ID NO: 876457 - DNA, 33 bp, Homo sapien
ttaaaatgtaaaaaccagggcatgttctttgta

SEQ ID NO: 876458 - DNA, 33 bp, Homo sapien
ttaaaatgtaaaaacccgggcatgttctttgta

SEQ ID NO: 876459 - DNA, 33 bp, Homo sapien
acaatcagaaatttaccatagtcccaagaattc

SEQ ID NO: 876460 - DNA, 33 bp, Homo sapien
acaatcagaaatttactatagtcccaagaattc

SEQ ID NO: 876461 - DNA, 33 bp, Homo sapien
cattcccaacctggcaactgtgaccctatcagt

SEQ ID NO: 876462 - DNA, 33 bp, Homo sapien
cattcccaacctggcacctgtgaccctatcagt

SEQ ID NO: 876463 - DNA, 33 bp, Homo sapien
gcttcagaagtaaataacctggctgcagatcag

SEQ ID NO: 876464 - DNA, 33 bp, Homo sapien
gcttcagaagtaaatagcctggctgcagatcag

SEQ ID NO: 876465 - DNA, 33 bp, Homo sapien
tgattctggatgtctaagtgaggcctgagagtc

SEQ ID NO: 876466 - DNA, 33 bp, Homo sapien
tgattctggatgtctaggtgaggcctgagagtc

SEQ ID NO: 876467 - DNA, 33 bp, Homo sapien
aactatgtaaccacaacgtaggttaagatacaa

SEQ ID NO: 876468 - DNA, 33 bp, Homo sapien
aactatgtaaccacaatgtaggttaagatacaa

SEQ ID NO: 876469 - DNA, 33 bp, Homo sapien
aatggtatagagcagtaaaaatgaatgacctag

SEQ ID NO: 876470 - DNA, 33 bp, Homo sapien
aatggtatagagcagtgaaaatgaatgacctag

SEQ ID NO: 876471 - DNA, 33 bp, Homo sapien
tgacttctctttgaccaagtaagtctactctta

SEQ ID NO: 876472 - DNA, 33 bp, Homo sapien
tgacttctctttgacccagtaagtctactctta

SEQ ID NO: 876473 - DNA, 33 bp, Homo sapien
gtgccggtagctgctaggtgaatatttgttgaa

SEQ ID NO: 876474 - DNA, 33 bp, Homo sapien
gtgccggtagctgctatgtgaatatttgttgaa

SEQ ID NO: 876475 - DNA, 33 bp, Homo sapien
gagactcaattcctgcactctgaggttcaaatc

SEQ ID NO: 876476 - DNA, 33 bp, Homo sapien
gagactcaattcctgcgctctgaggttcaaatc

SEQ ID NO: 876477 - DNA, 33 bp, Homo sapien
ttctgtacaaagccctcagatcatgtccacctt

SEQ ID NO: 876478 - DNA, 33 bp, Homo sapien
ttctgtacaaagccctgagatcatgtccacctt

SEQ ID NO: 876479 - DNA, 33 bp, Homo sapien
ggcttgcccttcttgcacagatcaagaatcccc

SEQ ID NO: 876480 - DNA, 33 bp, Homo sapien
ggcttgcccttcttgctcagatcaagaatcccc

SEQ ID NO: 876481 - DNA, 33 bp, Homo sapien
tgtttagacaacttaacgaaatgtgatcctctt

SEQ ID NO: 876482 - DNA, 33 bp, Homo sapien
tgtttagacaacttaatgaaatgtgatcctctt

SEQ ID NO: 876483 - DNA, 33 bp, Homo sapien
tcttgtatcttagaaagaatcagtcaacaatgg

SEQ ID NO: 876484 - DNA, 33 bp, Homo sapien
tcttgtatcttagaaataatcagtcaacaatgg

SEQ ID NO: 876485 - DNA, 33 bp, Homo sapien
agagctataagagtgccgaacaggcaattaccc

SEQ ID NO: 876486 - DNA, 33 bp, Homo sapien
agagctataagagtgctgaacaggcaattaccc

SEQ ID NO: 876487 - DNA, 33 bp, Homo sapien
actcagccaaaagtaactaaaggcataaataca

SEQ ID NO: 876488 - DNA, 33 bp, Homo sapien
actcagccaaaagtaagtaaaggcataaataca

SEQ ID NO: 876489 - DNA, 33 bp, Homo sapien
actacttggtggtgtgaagaagacaggggtatg

SEQ ID NO: 876490 - DNA, 33 bp, Homo sapien
actacttggtggtgtggagaagacaggggtatg

SEQ ID NO: 876491 - DNA, 33 bp, Homo sapien
agggagttaaatgcataaagaaatacagaaagc

SEQ ID NO: 876492 - DNA, 33 bp, Homo sapien
agggagttaaatgcatgaagaaatacagaaagc

SEQ ID NO: 876493 - DNA, 33 bp, Homo sapien
gattcagggaagaggacgagtccatgatgctgt

SEQ ID NO: 876494 - DNA, 33 bp, Homo sapien
gattcagggaagaggatgagtccatgatgctgt

SEQ ID NO: 876495 - DNA, 33 bp, Homo sapien
tccagtgccaagcatcaagcaggatgactaaaa

SEQ ID NO: 876496 - DNA, 33 bp, Homo sapien
tccagtgccaagcatcgagcaggatgactaaaa

SEQ ID NO: 876497 - DNA, 33 bp, Homo sapien
ggaaatggattccctcaattgtgccagataccc

SEQ ID NO: 876498 - DNA, 33 bp, Homo sapien
ggaaatggattccctcgattgtgccagataccc

SEQ ID NO: 876499 - DNA, 33 bp, Homo sapien
cgtttgcttaaaaccacgctaggagaaatctat

SEQ ID NO: 876500 - DNA, 33 bp, Homo sapien
cgtttgcttaaaaccatgctaggagaaatctat

SEQ ID NO: 876501 - DNA, 33 bp, Homo sapien
cctggtaacatccaacgccctgccttctcttag

SEQ ID NO: 876502 - DNA, 33 bp, Homo sapien
cctggtaacatccaactccctgccttctcttag

SEQ ID NO: 876503 - DNA, 33 bp, Homo sapien
cttttcttatacttaacgttcaggagactcaca

SEQ ID NO: 876504 - DNA, 33 bp, Homo sapien
cttttcttatacttaatgttcaggagactcaca

SEQ ID NO: 876505 - DNA, 33 bp, Homo sapien
ttccgcaccactgctcaactctgatacacacaa

SEQ ID NO: 876506 - DNA, 33 bp, Homo sapien
ttccgcaccactgctcgactctgatacacacaa

SEQ ID NO: 876507 - DNA, 33 bp, Homo sapien
ggcctgttagtgaacacattctgtctacacgtg

SEQ ID NO: 876508 - DNA, 33 bp, Homo sapien
ggcctgttagtgaacatattctgtctacacgtg

SEQ ID NO: 876509 - DNA, 33 bp, Homo sapien
ttgagaaggaatactgcaaaggcaagttaccta

SEQ ID NO: 876510 - DNA, 33 bp, Homo sapien
ttgagaaggaatactgtaaaggcaagttaccta

SEQ ID NO: 876511 - DNA, 33 bp, Homo sapien
attctttctggtcccccgatggaaatgtcctcc

SEQ ID NO: 876512 - DNA, 33 bp, Homo sapien
attctttctggtcccctgatggaaatgtcctcc

SEQ ID NO: 876513 - DNA, 33 bp, Homo sapien
ccatagtatttagcaccgaaccagatagatctg

SEQ ID NO: 876514 - DNA, 33 bp, Homo sapien
ccatagtatttagcactgaaccagatagatctg

SEQ ID NO: 876515 - DNA, 33 bp, Homo sapien
tgtccaggctaatcttcaactcctgtcttcaag

SEQ ID NO: 876516 - DNA, 33 bp, Homo sapien
tgtccaggctaatctttaactcctgtcttcaag

SEQ ID NO: 876517 - DNA, 33 bp, Homo sapien
gcatgctactcggtacacagtactcagaaatgt

SEQ ID NO: 876518 - DNA, 33 bp, Homo sapien
gcatgctactcggtacccagtactcagaaatgt

SEQ ID NO: 876519 - DNA, 33 bp, Homo sapien
gaccccagtgaactcactctggaccagttgctc

SEQ ID NO: 876520 - DNA, 33 bp, Homo sapien
gaccccagtgaactcattctggaccagttgctc

SEQ ID NO: 876521 - DNA, 33 bp, Homo sapien
cccagttagtcattaaaccagtttgccaagcga

SEQ ID NO: 876522 - DNA, 33 bp, Homo sapien
cccagttagtcattaacccagtttgccaagcga

SEQ ID NO: 876523 - DNA, 33 bp, Homo sapien
atatgtgataatgtgcaactattaaaaagaaag

SEQ ID NO: 876524 - DNA, 33 bp, Homo sapien
atatgtgataatgtgcgactattaaaaagaaag

SEQ ID NO: 876525 - DNA, 33 bp, Homo sapien
gaactcaggtgtgtaaaccgaaagtaaaatctt

SEQ ID NO: 876526 - DNA, 33 bp, Homo sapien
gaactcaggtgtgtaatccgaaagtaaaatctt

SEQ ID NO: 876527 - DNA, 33 bp, Homo sapien
tataattagtgtataacgacagctatttcaacc

SEQ ID NO: 876528 - DNA, 33 bp, Homo sapien
tataattagtgtataaggacagctatttcaacc

SEQ ID NO: 876529 - DNA, 33 bp, Homo sapien
atggccacacattatgaaagaatggcttatctt

SEQ ID NO: 876530 - DNA, 33 bp, Homo sapien
atggccacacattatggaagaatggcttatctt

SEQ ID NO: 876531 - DNA, 33 bp, Homo sapien
cagattgaccttcttaataaccaccaactcact

SEQ ID NO: 876532 - DNA, 33 bp, Homo sapien
cagattgaccttcttactaaccaccaactcact

SEQ ID NO: 876533 - DNA, 33 bp, Homo sapien
aggtgaaacaatgttacgtatcaggaaaaagga

SEQ ID NO: 876534 - DNA, 33 bp, Homo sapien
aggtgaaacaatgttatgtatcaggaaaaagga

SEQ ID NO: 876535 - DNA, 33 bp, Homo sapien
acagtcaaattctttcaagtctctgattaacct

SEQ ID NO: 876536 - DNA, 33 bp, Homo sapien
acagtcaaattctttcgagtctctgattaacct

SEQ ID NO: 876537 - DNA, 33 bp, Homo sapien
ctcattactgacagaactgtgacctttcagcag

SEQ ID NO: 876538 - DNA, 33 bp, Homo sapien
ctcattactgacagaattgtgacctttcagcag

SEQ ID NO: 876539 - DNA, 33 bp, Homo sapien
aagtacgtagccacagcagaatggggaaagtaa

SEQ ID NO: 876540 - DNA, 33 bp, Homo sapien
aagtacgtagccacaggagaatggggaaagtaa

SEQ ID NO: 876541 - DNA, 33 bp, Homo sapien
ccatgattgagttccccctcagtccaggtgatg

SEQ ID NO: 876542 - DNA, 33 bp, Homo sapien
ccatgattgagttcccgctcagtccaggtgatg

SEQ ID NO: 876543 - DNA, 33 bp, Homo sapien
gcataagtgtcccagcaagaagggccataagaa

SEQ ID NO: 876544 - DNA, 33 bp, Homo sapien
gcataagtgtcccagcgagaagggccataagaa

SEQ ID NO: 876545 - DNA, 33 bp, Homo sapien
agggtgaaataaaagcaaacaggcagactcaac

SEQ ID NO: 876546 - DNA, 33 bp, Homo sapien
agggtgaaataaaagcgaacaggcagactcaac

SEQ ID NO: 876547 - DNA, 33 bp, Homo sapien
ctacttgtcaaggagacgcaaggattgaagagg

SEQ ID NO: 876548 - DNA, 33 bp, Homo sapien
ctacttgtcaaggagatgcaaggattgaagagg

SEQ ID NO: 876549 - DNA, 33 bp, Homo sapien
cattggtggttttaagaactgctcctatctcag

SEQ ID NO: 876550 - DNA, 33 bp, Homo sapien
cattggtggttttaaggactgctcctatctcag

SEQ ID NO: 876551 - DNA, 33 bp, Homo sapien
aaagctcctgcgaagacggttcatgtggctggg

SEQ ID NO: 876552 - DNA, 33 bp, Homo sapien
aaagctcctgcgaagatggttcatgtggctggg

SEQ ID NO: 876553 - DNA, 33 bp, Homo sapien
cctcagggcctctgacgggctgcaaggttgtct

SEQ ID NO: 876554 - DNA, 33 bp, Homo sapien
cctcagggcctctgactggctgcaaggttgtct

SEQ ID NO: 876555 - DNA, 33 bp, Homo sapien
atttacaccacaaaaaatggcaaacactccaaa

SEQ ID NO: 876556 - DNA, 33 bp, Homo sapien
atttacaccacaaaaattggcaaacactccaaa

SEQ ID NO: 876557 - DNA, 33 bp, Homo sapien
ttgtatggcctgtgagaaaagattggtttttac

SEQ ID NO: 876558 - DNA, 33 bp, Homo sapien
ttgtatggcctgtgagcaaagattggtttttac

SEQ ID NO: 876559 - DNA, 33 bp, Homo sapien
tgactcatcatagacgaacttataatcaagatc

SEQ ID NO: 876560 - DNA, 33 bp, Homo sapien
tgactcatcatagacggacttataatcaagatc

SEQ ID NO: 876561 - DNA, 33 bp, Homo sapien
actttatcccaatccactccaacttctctcccc

SEQ ID NO: 876562 - DNA, 33 bp, Homo sapien
actttatcccaatccagtccaacttctctcccc

SEQ ID NO: 876563 - DNA, 33 bp, Homo sapien
aacaaccatatcctcccctttgatgcagctcta

SEQ ID NO: 876564 - DNA, 33 bp, Homo sapien
aacaaccatatcctcctctttgatgcagctcta

SEQ ID NO: 876565 - DNA, 33 bp, Homo sapien
agataattataactaccgtacaggatcatgatg

SEQ ID NO: 876566 - DNA, 33 bp, Homo sapien
agataattataactactgtacaggatcatgatg

SEQ ID NO: 876567 - DNA, 33 bp, Homo sapien
ttccagtagaaagttaccagagttggtctaatg

SEQ ID NO: 876568 - DNA, 33 bp, Homo sapien
ttccagtagaaagttatcagagttggtctaatg

SEQ ID NO: 876569 - DNA, 33 bp, Homo sapien
tcactccggagagcccagcagtaaacagagaca

SEQ ID NO: 876570 - DNA, 33 bp, Homo sapien
tcactccggagagcccggcagtaaacagagaca

SEQ ID NO: 876571 - DNA, 33 bp, Homo sapien
aacatcattaatagtacgggcagaatattaacc

SEQ ID NO: 876572 - DNA, 33 bp, Homo sapien
aacatcattaatagtaggggcagaatattaacc

SEQ ID NO: 876573 - DNA, 33 bp, Homo sapien
gtaaagggtaggattcaccagcagcagtttaga

SEQ ID NO: 876574 - DNA, 33 bp, Homo sapien
gtaaagggtaggattcgccagcagcagtttaga

SEQ ID NO: 876575 - DNA, 33 bp, Homo sapien
gttcctacaacaagcacgcggcatttggcattt

SEQ ID NO: 876576 - DNA, 33 bp, Homo sapien
gttcctacaacaagcatgcggcatttggcattt

SEQ ID NO: 876577 - DNA, 33 bp, Homo sapien
tgttcagtgaaaaaagaaaaaggtcagagtaca

SEQ ID NO: 876578 - DNA, 33 bp, Homo sapien
tgttcagtgaaaaaaggaaaaggtcagagtaca

SEQ ID NO: 876579 - DNA, 33 bp, Homo sapien
gtcaactcttattcacaaggtatctaacttcta

SEQ ID NO: 876580 - DNA, 33 bp, Homo sapien
gtcaactcttattcacgaggtatctaacttcta

SEQ ID NO: 876581 - DNA, 33 bp, Homo sapien
catgtcttctaggtgaccttgctactgtgtccc

SEQ ID NO: 876582 - DNA, 33 bp, Homo sapien
catgtcttctaggtgatcttgctactgtgtccc

SEQ ID NO: 876583 - DNA, 33 bp, Homo sapien
atcactatagtttcacagctaataggcgtatct

SEQ ID NO: 876584 - DNA, 33 bp, Homo sapien
atcactatagtttcactgctaataggcgtatct

SEQ ID NO: 876585 - DNA, 33 bp, Homo sapien
accttatgattatgtaacacttgaacatttgaa

SEQ ID NO: 876586 - DNA, 33 bp, Homo sapien
accttatgattatgtagcacttgaacatttgaa

SEQ ID NO: 876587 - DNA, 33 bp, Homo sapien
ttcagaagtctgcaaagaaatgaaactgtgaaa

SEQ ID NO: 876588 - DNA, 33 bp, Homo sapien
ttcagaagtctgcaaataaatgaaactgtgaaa

SEQ ID NO: 876589 - DNA, 33 bp, Homo sapien
caccctatccttaccccatcagctgaaaactct

SEQ ID NO: 876590 - DNA, 33 bp, Homo sapien
caccctatccttaccctatcagctgaaaactct

SEQ ID NO: 876591 - DNA, 33 bp, Homo sapien
actgaaatgtaatataaccaaaatgaaacacaa

SEQ ID NO: 876592 - DNA, 33 bp, Homo sapien
actgaaatgtaatatacccaaaatgaaacacaa

SEQ ID NO: 876593 - DNA, 33 bp, Homo sapien
gagttcggtattaggacggctgcacacccagac

SEQ ID NO: 876594 - DNA, 33 bp, Homo sapien
gagttcggtattaggatggctgcacacccagac

SEQ ID NO: 876595 - DNA, 33 bp, Homo sapien
gatttaataaaaatcccaatcaagtaaactctc

SEQ ID NO: 876596 - DNA, 33 bp, Homo sapien
gatttaataaaaatccgaatcaagtaaactctc

SEQ ID NO: 876597 - DNA, 33 bp, Homo sapien
ttgcatcactttattacgtctggaatgggagat

SEQ ID NO: 876598 - DNA, 33 bp, Homo sapien
ttgcatcactttattatgtctggaatgggagat

SEQ ID NO: 876599 - DNA, 33 bp, Homo sapien
ttgtctcgtttggataactggttaaatgacaaa

SEQ ID NO: 876600 - DNA, 33 bp, Homo sapien
ttgtctcgtttggatacctggttaaatgacaaa

SEQ ID NO: 876601 - DNA, 33 bp, Homo sapien
attacaaacaatttgtaaattctcaacctttaa

SEQ ID NO: 876602 - DNA, 33 bp, Homo sapien
attacaaacaatttgtgaattctcaacctttaa

SEQ ID NO: 876603 - DNA, 33 bp, Homo sapien
aatggtaaagtttccactgctgagtgctaccaa

SEQ ID NO: 876604 - DNA, 33 bp, Homo sapien
aatggtaaagtttccattgctgagtgctaccaa

SEQ ID NO: 876605 - DNA, 33 bp, Homo sapien
tgcctacaacatgacaagctctttggtagcact

SEQ ID NO: 876606 - DNA, 33 bp, Homo sapien
tgcctacaacatgacatgctctttggtagcact

SEQ ID NO: 876607 - DNA, 33 bp, Homo sapien
ctttaaaatcaggggaaccgtctcatttgacag

SEQ ID NO: 876608 - DNA, 33 bp, Homo sapien
ctttaaaatcaggggatccgtctcatttgacag

SEQ ID NO: 876609 - DNA, 33 bp, Homo sapien
tgacctgctgcgttcactccttacgaggaagca

SEQ ID NO: 876610 - DNA, 33 bp, Homo sapien
tgacctgctgcgttcattccttacgaggaagca

SEQ ID NO: 876611 - DNA, 33 bp, Homo sapien
attttctttattatgaagctaaaacctgggtct

SEQ ID NO: 876612 - DNA, 33 bp, Homo sapien
attttctttattatgaggctaaaacctgggtct

SEQ ID NO: 876613 - DNA, 33 bp, Homo sapien
atgtacagattgcccaccaagggttcttagatt

SEQ ID NO: 876614 - DNA, 33 bp, Homo sapien
atgtacagattgcccatcaagggttcttagatt

SEQ ID NO: 876615 - DNA, 33 bp, Homo sapien
acactgctgtgacacaagaatgttccatgcttc

SEQ ID NO: 876616 - DNA, 33 bp, Homo sapien
acactgctgtgacacaggaatgttccatgcttc

SEQ ID NO: 876617 - DNA, 33 bp, Homo sapien
ttgcaaataagtgaaaccacctaaactgcatct

SEQ ID NO: 876618 - DNA, 33 bp, Homo sapien
ttgcaaataagtgaaagcacctaaactgcatct

SEQ ID NO: 876619 - DNA, 33 bp, Homo sapien
cttgagttctttaaacaaaggtctccagaagca

SEQ ID NO: 876620 - DNA, 33 bp, Homo sapien
cttgagttctttaaacgaaggtctccagaagca

SEQ ID NO: 876621 - DNA, 33 bp, Homo sapien
atctttgtcaaatatacgccttctgaatctttc

SEQ ID NO: 876622 - DNA, 33 bp, Homo sapien
atctttgtcaaatatatgccttctgaatctttc

SEQ ID NO: 876623 - DNA, 33 bp, Homo sapien
aggcagtaactaaacaatgatggttatatatac

SEQ ID NO: 876624 - DNA, 33 bp, Homo sapien
aggcagtaactaaacagtgatggttatatatac

SEQ ID NO: 876625 - DNA, 33 bp, Homo sapien
gaccgtcataaaattgcactcagacatgacagg

SEQ ID NO: 876626 - DNA, 33 bp, Homo sapien
gaccgtcataaaattgtactcagacatgacagg

SEQ ID NO: 876627 - DNA, 33 bp, Homo sapien
cctgacaccactcttacgaagaatgtaaaataa

SEQ ID NO: 876628 - DNA, 33 bp, Homo sapien
cctgacaccactcttatgaagaatgtaaaataa

SEQ ID NO: 876629 - DNA, 33 bp, Homo sapien
ccattaaacaggaatcaagttgatagtttagaa

SEQ ID NO: 876630 - DNA, 33 bp, Homo sapien
ccattaaacaggaatccagttgatagtttagaa

SEQ ID NO: 876631 - DNA, 33 bp, Homo sapien
ggtgttgagaaagtcacggcagtccaaagtagg

SEQ ID NO: 876632 - DNA, 33 bp, Homo sapien
ggtgttgagaaagtcatggcagtccaaagtagg

SEQ ID NO: 876633 - DNA, 33 bp, Homo sapien
atttcttccaaagtgaagtgttacttgcacctt

SEQ ID NO: 876634 - DNA, 33 bp, Homo sapien
atttcttccaaagtgaggtgttacttgcacctt

SEQ ID NO: 876635 - DNA, 33 bp, Homo sapien
acttggtaccactgaactgcatgcttaactttt

SEQ ID NO: 876636 - DNA, 33 bp, Homo sapien
acttggtaccactgaattgcatgcttaactttt

SEQ ID NO: 876637 - DNA, 33 bp, Homo sapien
caaaggaaaatgctcacgtattgaaatggaaac

SEQ ID NO: 876638 - DNA, 33 bp, Homo sapien
caaaggaaaatgctcatgtattgaaatggaaac

SEQ ID NO: 876639 - DNA, 33 bp, Homo sapien
atcagtcccattcacacgcggtacccactgcct

SEQ ID NO: 876640 - DNA, 33 bp, Homo sapien
atcagtcccattcacatgcggtacccactgcct

SEQ ID NO: 876641 - DNA, 33 bp, Homo sapien
atgagtgagttaaagtcaatgagtacatgggga

SEQ ID NO: 876642 - DNA, 33 bp, Homo sapien
atgagtgagttaaagttaatgagtacatgggga

SEQ ID NO: 876643 - DNA, 33 bp, Homo sapien
gaaggcaaattcagcgcccttcagagcttacct

SEQ ID NO: 876644 - DNA, 33 bp, Homo sapien
gaaggcaaattcagcgtccttcagagcttacct

SEQ ID NO: 876645 - DNA, 33 bp, Homo sapien
aatgtggactcctcacaatctgttttctcaata

SEQ ID NO: 876646 - DNA, 33 bp, Homo sapien
aatgtggactcctcacgatctgttttctcaata

SEQ ID NO: 876647 - DNA, 33 bp, Homo sapien
aaaaagaagataaggacgccaatgtctaaacaa

SEQ ID NO: 876648 - DNA, 33 bp, Homo sapien
aaaaagaagataaggatgccaatgtctaaacaa

SEQ ID NO: 876649 - DNA, 33 bp, Homo sapien
gtggcataaccatgcaataggaatttcagttga

SEQ ID NO: 876650 - DNA, 33 bp, Homo sapien
gtggcataaccatgcagtaggaatttcagttga

SEQ ID NO: 876651 - DNA, 33 bp, Homo sapien
ggtgatgagcacagaccaaaacatcttaaggca

SEQ ID NO: 876652 - DNA, 33 bp, Homo sapien
ggtgatgagcacagacgaaaacatcttaaggca

SEQ ID NO: 876653 - DNA, 33 bp, Homo sapien
gatagtcttgctcctacggagtgcgcctcagat

SEQ ID NO: 876654 - DNA, 33 bp, Homo sapien
gatagtcttgctcctatggagtgcgcctcagat

SEQ ID NO: 876655 - DNA, 33 bp, Homo sapien
atcacttataaggttaacaatttggaggtagaa

SEQ ID NO: 876656 - DNA, 33 bp, Homo sapien
atcacttataaggttagcaatttggaggtagaa

SEQ ID NO: 876657 - DNA, 33 bp, Homo sapien
atgtggctttttgagaccgttctggccacatgg

SEQ ID NO: 876658 - DNA, 33 bp, Homo sapien
atgtggctttttgagagcgttctggccacatgg

SEQ ID NO: 876659 - DNA, 33 bp, Homo sapien
gtgacaacggttaatccgatcatttaattacta

SEQ ID NO: 876660 - DNA, 33 bp, Homo sapien
gtgacaacggttaatctgatcatttaattacta

SEQ ID NO: 876661 - DNA, 33 bp, Homo sapien
ctcactcccatctcacaggttcctctccctgcc

SEQ ID NO: 876662 - DNA, 33 bp, Homo sapien
ctcactcccatctcacgggttcctctccctgcc

SEQ ID NO: 876663 - DNA, 33 bp, Homo sapien
cttagcaaagcataaagtgggtaatgaataaag

SEQ ID NO: 876664 - DNA, 33 bp, Homo sapien
cttagcaaagcataaattgggtaatgaataaag

SEQ ID NO: 876665 - DNA, 33 bp, Homo sapien
cagctgtcaaaaataaagaagatctctacctgt

SEQ ID NO: 876666 - DNA, 33 bp, Homo sapien
cagctgtcaaaaataatgaagatctctacctgt

SEQ ID NO: 876667 - DNA, 33 bp, Homo sapien
aagaataaatctggaaaagttttggagatctca

SEQ ID NO: 876668 - DNA, 33 bp, Homo sapien
aagaataaatctggaagagttttggagatctca

SEQ ID NO: 876669 - DNA, 33 bp, Homo sapien
ttcttagattcttcaaataagtctggtgtacat

SEQ ID NO: 876670 - DNA, 33 bp, Homo sapien
ttcttagattcttcaagtaagtctggtgtacat

SEQ ID NO: 876671 - DNA, 33 bp, Homo sapien
tactcatagtgcatcacggcaaggagaaaaata

SEQ ID NO: 876672 - DNA, 33 bp, Homo sapien
tactcatagtgcatcatggcaaggagaaaaata

SEQ ID NO: 876673 - DNA, 33 bp, Homo sapien
ccgtgtgggccttgccactttgccaggagcttg

SEQ ID NO: 876674 - DNA, 33 bp, Homo sapien
ccgtgtgggccttgccgctttgccaggagcttg

SEQ ID NO: 876675 - DNA, 33 bp, Homo sapien
ggtccagttgctcccacatcttagagcctgtca

SEQ ID NO: 876676 - DNA, 33 bp, Homo sapien
ggtccagttgctcccatatcttagagcctgtca

SEQ ID NO: 876677 - DNA, 33 bp, Homo sapien
cagagaagagaaatcaaaaaaggattcaagtaa

SEQ ID NO: 876678 - DNA, 33 bp, Homo sapien
cagagaagagaaatcagaaaaggattcaagtaa

SEQ ID NO: 876679 - DNA, 33 bp, Homo sapien
ctttttctctttcaacagtcatttgaagagtta

SEQ ID NO: 876680 - DNA, 33 bp, Homo sapien
ctttttctctttcaactgtcatttgaagagtta

SEQ ID NO: 876681 - DNA, 33 bp, Homo sapien
aagagaaaaagaattacgtcacttactcaatat

SEQ ID NO: 876682 - DNA, 33 bp, Homo sapien
aagagaaaaagaattatgtcacttactcaatat

SEQ ID NO: 876683 - DNA, 33 bp, Homo sapien
tggtctatcatgggccactgagacatagttata

SEQ ID NO: 876684 - DNA, 33 bp, Homo sapien
tggtctatcatgggccgctgagacatagttata

SEQ ID NO: 876685 - DNA, 33 bp, Homo sapien
ctacatgggcacaggaaggtgtgattatcagac

SEQ ID NO: 876686 - DNA, 33 bp, Homo sapien
ctacatgggcacaggagggtgtgattatcagac

SEQ ID NO: 876687 - DNA, 33 bp, Homo sapien
aaaaaaaattaatagccaccatttgttgaggga

SEQ ID NO: 876688 - DNA, 33 bp, Homo sapien
aaaaaaaattaatagcgaccatttgttgaggga

SEQ ID NO: 876689 - DNA, 33 bp, Homo sapien
gttatcaaagtgggtccccagtgtttctggaac

SEQ ID NO: 876690 - DNA, 33 bp, Homo sapien
gttatcaaagtgggtctccagtgtttctggaac

SEQ ID NO: 876691 - DNA, 33 bp, Homo sapien
agagaggaaaattcacaaaagaagacacactca

SEQ ID NO: 876692 - DNA, 33 bp, Homo sapien
agagaggaaaattcacgaaagaagacacactca

SEQ ID NO: 876693 - DNA, 33 bp, Homo sapien
gaaggtgctgggggaaaaagtggcactttgttt

SEQ ID NO: 876694 - DNA, 33 bp, Homo sapien
gaaggtgctgggggaagaagtggcactttgttt

SEQ ID NO: 876695 - DNA, 33 bp, Homo sapien
atgaatcaggatcttacctcctggcataaaata

SEQ ID NO: 876696 - DNA, 33 bp, Homo sapien
atgaatcaggatcttatctcctggcataaaata

SEQ ID NO: 876697 - DNA, 33 bp, Homo sapien
gtaagatcatatggcactgaagcactataaaag

SEQ ID NO: 876698 - DNA, 33 bp, Homo sapien
gtaagatcatatggcattgaagcactataaaag

SEQ ID NO: 876699 - DNA, 33 bp, Homo sapien
actgaattcactaggaaacacaggacataccgt

SEQ ID NO: 876700 - DNA, 33 bp, Homo sapien
actgaattcactaggagacacaggacataccgt

SEQ ID NO: 876701 - DNA, 33 bp, Homo sapien
actgatgatttcaaaccggatccctatgcagag

SEQ ID NO: 876702 - DNA, 33 bp, Homo sapien
actgatgatttcaaactggatccctatgcagag

SEQ ID NO: 876703 - DNA, 33 bp, Homo sapien
gctttctgtttgttaaaaagagccattagggcc

SEQ ID NO: 876704 - DNA, 33 bp, Homo sapien
gctttctgtttgttaagaagagccattagggcc

SEQ ID NO: 876705 - DNA, 33 bp, Homo sapien
aaatacacagaccatccctgatttacaaccttt

SEQ ID NO: 876706 - DNA, 33 bp, Homo sapien
aaatacacagaccatctctgatttacaaccttt

SEQ ID NO: 876707 - DNA, 33 bp, Homo sapien
ctgacgcttagtaaccactctgtgaaatttttt

SEQ ID NO: 876708 - DNA, 33 bp, Homo sapien
ctgacgcttagtaaccgctctgtgaaatttttt

SEQ ID NO: 876709 - DNA, 33 bp, Homo sapien
ctccagccccagttaacgcctcagatgactgca

SEQ ID NO: 876710 - DNA, 33 bp, Homo sapien
ctccagccccagttaatgcctcagatgactgca

SEQ ID NO: 876711 - DNA, 33 bp, Homo sapien
acaaaacaagattatcaagtcgcacaataagcc

SEQ ID NO: 876712 - DNA, 33 bp, Homo sapien
acaaaacaagattatcgagtcgcacaataagcc

SEQ ID NO: 876713 - DNA, 33 bp, Homo sapien
attttaaaacatcattaaaaaactgccatttaa

SEQ ID NO: 876714 - DNA, 33 bp, Homo sapien
attttaaaacatcatttaaaaactgccatttaa

SEQ ID NO: 876715 - DNA, 33 bp, Homo sapien
agttgctgggtaagacaccatctaacatctact

SEQ ID NO: 876716 - DNA, 33 bp, Homo sapien
agttgctgggtaagacgccatctaacatctact

SEQ ID NO: 876717 - DNA, 33 bp, Homo sapien
gaaatgtgaatatgtaagtaagatcaaggatat

SEQ ID NO: 876718 - DNA, 33 bp, Homo sapien
gaaatgtgaatatgtaggtaagatcaaggatat

SEQ ID NO: 876719 - DNA, 33 bp, Homo sapien
tcaccctctttgcaccactatcacatcacctgt

SEQ ID NO: 876720 - DNA, 33 bp, Homo sapien
tcaccctctttgcaccgctatcacatcacctgt

SEQ ID NO: 876721 - DNA, 33 bp, Homo sapien
tcctgacaccgctgcaaggagaaacctaagact

SEQ ID NO: 876722 - DNA, 33 bp, Homo sapien
tcctgacaccgctgcatggagaaacctaagact

SEQ ID NO: 876723 - DNA, 33 bp, Homo sapien
ttagagatgcggctccaagaggttgtgactggc

SEQ ID NO: 876724 - DNA, 33 bp, Homo sapien
ttagagatgcggctccgagaggttgtgactggc

SEQ ID NO: 876725 - DNA, 33 bp, Homo sapien
agtttcaggctggatacatacgctactaccaaa

SEQ ID NO: 876726 - DNA, 33 bp, Homo sapien
agtttcaggctggatatatacgctactaccaaa

SEQ ID NO: 876727 - DNA, 33 bp, Homo sapien
aggtcaaagccttccacgtgacaacaaagaacc

SEQ ID NO: 876728 - DNA, 33 bp, Homo sapien
aggtcaaagccttccatgtgacaacaaagaacc

SEQ ID NO: 876729 - DNA, 33 bp, Homo sapien
tggattattcttctcacacttgtgccctcattt

SEQ ID NO: 876730 - DNA, 33 bp, Homo sapien
tggattattcttctcatacttgtgccctcattt

SEQ ID NO: 876731 - DNA, 33 bp, Homo sapien
ggtcttcaggacacccacagtggcttccctcac

SEQ ID NO: 876732 - DNA, 33 bp, Homo sapien
ggtcttcaggacacccgcagtggcttccctcac

SEQ ID NO: 876733 - DNA, 33 bp, Homo sapien
agagagacaaagaccaaagactgagcgttggct

SEQ ID NO: 876734 - DNA, 33 bp, Homo sapien
agagagacaaagaccagagactgagcgttggct

SEQ ID NO: 876735 - DNA, 33 bp, Homo sapien
gtttccaattttcaccactgcaaataatggcac

SEQ ID NO: 876736 - DNA, 33 bp, Homo sapien
gtttccaattttcaccgctgcaaataatggcac

SEQ ID NO: 876737 - DNA, 33 bp, Homo sapien
tagttgcctgtgtaataaaagcgagtattgaaa

SEQ ID NO: 876738 - DNA, 33 bp, Homo sapien
tagttgcctgtgtaatgaaagcgagtattgaaa

SEQ ID NO: 876739 - DNA, 33 bp, Homo sapien
ggtgagtgtttccaacccggaagcttcagggag

SEQ ID NO: 876740 - DNA, 33 bp, Homo sapien
ggtgagtgtttccaactcggaagcttcagggag

SEQ ID NO: 876741 - DNA, 33 bp, Homo sapien
gccttgaatgactgggaaggtttcagggaagca

SEQ ID NO: 876742 - DNA, 33 bp, Homo sapien
gccttgaatgactgggtaggtttcagggaagca

SEQ ID NO: 876743 - DNA, 33 bp, Homo sapien
ggaaagcataatctacaaactagtcaaactaga

SEQ ID NO: 876744 - DNA, 33 bp, Homo sapien
ggaaagcataatctaccaactagtcaaactaga

SEQ ID NO: 876745 - DNA, 33 bp, Homo sapien
cttagaactctggtaaactaacaattacttgaa

SEQ ID NO: 876746 - DNA, 33 bp, Homo sapien
cttagaactctggtaagctaacaattacttgaa

SEQ ID NO: 876747 - DNA, 33 bp, Homo sapien
gtacctgtgtttggaaatctaacaatgacattc

SEQ ID NO: 876748 - DNA, 33 bp, Homo sapien
gtacctgtgtttggaagtctaacaatgacattc

SEQ ID NO: 876749 - DNA, 33 bp, Homo sapien
atatgtttcatgtcaggatggatatcactccat

SEQ ID NO: 876750 - DNA, 33 bp, Homo sapien
atatgtttcatgtcagtatggatatcactccat

SEQ ID NO: 876751 - DNA, 33 bp, Homo sapien
atgacataagagagagaaagaactgttggtgca

SEQ ID NO: 876752 - DNA, 33 bp, Homo sapien
atgacataagagagaggaagaactgttggtgca

SEQ ID NO: 876753 - DNA, 33 bp, Homo sapien
gcagcagagttgcaataaattaggtagcttctt

SEQ ID NO: 876754 - DNA, 33 bp, Homo sapien
gcagcagagttgcaatcaattaggtagcttctt

SEQ ID NO: 876755 - DNA, 33 bp, Homo sapien
tgtcttggaactgctaagtcgattcattctgat

SEQ ID NO: 876756 - DNA, 33 bp, Homo sapien
tgtcttggaactgctatgtcgattcattctgat

SEQ ID NO: 876757 - DNA, 33 bp, Homo sapien
ggaatggctcagaaacaggggcgtttttaatga

SEQ ID NO: 876758 - DNA, 33 bp, Homo sapien
ggaatggctcagaaacgggggcgtttttaatga

SEQ ID NO: 876759 - DNA, 33 bp, Homo sapien
aggagagaagcagaaaaaagaacgggatcagga

SEQ ID NO: 876760 - DNA, 33 bp, Homo sapien
aggagagaagcagaaagaagaacgggatcagga

SEQ ID NO: 876761 - DNA, 33 bp, Homo sapien
ggagagagcaggaagcactgggaaatagcacgt

SEQ ID NO: 876762 - DNA, 33 bp, Homo sapien
ggagagagcaggaagcgctgggaaatagcacgt

SEQ ID NO: 876763 - DNA, 33 bp, Homo sapien
tgattaatttaaccaccaagttcattttcctct

SEQ ID NO: 876764 - DNA, 33 bp, Homo sapien
tgattaatttaaccacgaagttcattttcctct

SEQ ID NO: 876765 - DNA, 33 bp, Homo sapien
atttttgaaaaacacacaacacaatgctatatt

SEQ ID NO: 876766 - DNA, 33 bp, Homo sapien
atttttgaaaaacacataacacaatgctatatt

SEQ ID NO: 876767 - DNA, 33 bp, Homo sapien
tcatagtttctcttgccaagttacattaatggt

SEQ ID NO: 876768 - DNA, 33 bp, Homo sapien
tcatagtttctcttgctaagttacattaatggt

SEQ ID NO: 876769 - DNA, 33 bp, Homo sapien
ttctaaataatgtaaaccggtgtctgtaactaa

SEQ ID NO: 876770 - DNA, 33 bp, Homo sapien
ttctaaataatgtaaatcggtgtctgtaactaa

SEQ ID NO: 876771 - DNA, 33 bp, Homo sapien
tttggttgtagtaaaaactttgaaaataccaat

SEQ ID NO: 876772 - DNA, 33 bp, Homo sapien
tttggttgtagtaaaagctttgaaaataccaat

SEQ ID NO: 876773 - DNA, 33 bp, Homo sapien
aggtgtatgctggacaatacctcattctgaagc

SEQ ID NO: 876774 - DNA, 33 bp, Homo sapien
aggtgtatgctggacagtacctcattctgaagc

SEQ ID NO: 876775 - DNA, 33 bp, Homo sapien
atgttgtagagtgtcagaatttcccttcttttt

SEQ ID NO: 876776 - DNA, 33 bp, Homo sapien
atgttgtagagtgtcataatttcccttcttttt

SEQ ID NO: 876777 - DNA, 33 bp, Homo sapien
ttccttgaaaagagccacactttgtgaaatcat

SEQ ID NO: 876778 - DNA, 33 bp, Homo sapien
ttccttgaaaagagccgcactttgtgaaatcat

SEQ ID NO: 876779 - DNA, 33 bp, Homo sapien
cgatttgaggcaccacagcaatgcagaatgggg

SEQ ID NO: 876780 - DNA, 33 bp, Homo sapien
cgatttgaggcaccacggcaatgcagaatgggg

SEQ ID NO: 876781 - DNA, 33 bp, Homo sapien
cgtgcccggctgtgaacgcggtttttagccagg

SEQ ID NO: 876782 - DNA, 33 bp, Homo sapien
cgtgcccggctgtgaatgcggtttttagccagg

SEQ ID NO: 876783 - DNA, 33 bp, Homo sapien
gccctgaggtgtcttaaaaagaggagcatttat

SEQ ID NO: 876784 - DNA, 33 bp, Homo sapien
gccctgaggtgtcttataaagaggagcatttat

SEQ ID NO: 876785 - DNA, 33 bp, Homo sapien
caagtaggtgtcaagtaaaacttaatggtagac

SEQ ID NO: 876786 - DNA, 33 bp, Homo sapien
caagtaggtgtcaagtcaaacttaatggtagac

SEQ ID NO: 876787 - DNA, 33 bp, Homo sapien
tagaaaattctaagcccagttccagatcacttt

SEQ ID NO: 876788 - DNA, 33 bp, Homo sapien
tagaaaattctaagccgagttccagatcacttt

SEQ ID NO: 876789 - DNA, 33 bp, Homo sapien
actctaaaatacagccacaaatgaaataaatgt

SEQ ID NO: 876790 - DNA, 33 bp, Homo sapien
actctaaaatacagccgcaaatgaaataaatgt

SEQ ID NO: 876791 - DNA, 33 bp, Homo sapien
agcttacacaaaagttcaacctcaagcacatac

SEQ ID NO: 876792 - DNA, 33 bp, Homo sapien
agcttacacaaaagtttaacctcaagcacatac

SEQ ID NO: 876793 - DNA, 33 bp, Homo sapien
tgtggcgtggacatgaataagaccgagagtccc

SEQ ID NO: 876794 - DNA, 33 bp, Homo sapien
tgtggcgtggacatgattaagaccgagagtccc

SEQ ID NO: 876795 - DNA, 33 bp, Homo sapien
taacaaagatcaaagacgcagttatggctcaaa

SEQ ID NO: 876796 - DNA, 33 bp, Homo sapien
taacaaagatcaaagatgcagttatggctcaaa

SEQ ID NO: 876797 - DNA, 33 bp, Homo sapien
caccaaaagatgaaacaacattttatcaacact

SEQ ID NO: 876798 - DNA, 33 bp, Homo sapien
caccaaaagatgaaaccacattttatcaacact

SEQ ID NO: 876799 - DNA, 33 bp, Homo sapien
aagggccacaaggcttcaagaggacggagccta

SEQ ID NO: 876800 - DNA, 33 bp, Homo sapien
aagggccacaaggctttaagaggacggagccta

SEQ ID NO: 876801 - DNA, 33 bp, Homo sapien
gtgtcctaagataaaaccactatacaaagcaaa

SEQ ID NO: 876802 - DNA, 33 bp, Homo sapien
gtgtcctaagataaaagcactatacaaagcaaa

SEQ ID NO: 876803 - DNA, 33 bp, Homo sapien
actcctcaactcaaaaagtaagtaaacatcctg

SEQ ID NO: 876804 - DNA, 33 bp, Homo sapien
actcctcaactcaaaatgtaagtaaacatcctg

SEQ ID NO: 876805 - DNA, 33 bp, Homo sapien
ttgtagttaaacaaacaaaaccgtggctactct

SEQ ID NO: 876806 - DNA, 33 bp, Homo sapien
ttgtagttaaacaaacgaaaccgtggctactct

SEQ ID NO: 876807 - DNA, 33 bp, Homo sapien
tgctgagcatagaaacagtctctccacatgaac

SEQ ID NO: 876808 - DNA, 33 bp, Homo sapien
tgctgagcatagaaacggtctctccacatgaac

SEQ ID NO: 876809 - DNA, 33 bp, Homo sapien
cagcatgaaaaatggacgaatacaaagccacta

SEQ ID NO: 876810 - DNA, 33 bp, Homo sapien
cagcatgaaaaatggatgaatacaaagccacta

SEQ ID NO: 876811 - DNA, 33 bp, Homo sapien
tctgttaagaacaatccctcaaatcaacaggaa

SEQ ID NO: 876812 - DNA, 33 bp, Homo sapien
tctgttaagaacaatctctcaaatcaacaggaa

SEQ ID NO: 876813 - DNA, 33 bp, Homo sapien
aatgtaaaacatctacgctctcaacaaaaacca

SEQ ID NO: 876814 - DNA, 33 bp, Homo sapien
aatgtaaaacatctactctctcaacaaaaacca

SEQ ID NO: 876815 - DNA, 33 bp, Homo sapien
gcttggaataaaggaaagctgaaaacaatccac

SEQ ID NO: 876816 - DNA, 33 bp, Homo sapien
gcttggaataaaggaaggctgaaaacaatccac

SEQ ID NO: 876817 - DNA, 33 bp, Homo sapien
aggtaactatgcaaaccctaggactgtcataaa

SEQ ID NO: 876818 - DNA, 33 bp, Homo sapien
aggtaactatgcaaactctaggactgtcataaa

SEQ ID NO: 876819 - DNA, 33 bp, Homo sapien
tctgtctagtgggatgaaagcagaaaggacaag

SEQ ID NO: 876820 - DNA, 33 bp, Homo sapien
tctgtctagtgggatgcaagcagaaaggacaag

SEQ ID NO: 876821 - DNA, 33 bp, Homo sapien
gcaacctggctccctactaccgtggtttactat

SEQ ID NO: 876822 - DNA, 33 bp, Homo sapien
gcaacctggctccctattaccgtggtttactat

SEQ ID NO: 876823 - DNA, 33 bp, Homo sapien
tcaggaaaaagtagccaaaaccgacaattcaca

SEQ ID NO: 876824 - DNA, 33 bp, Homo sapien
tcaggaaaaagtagccgaaaccgacaattcaca

SEQ ID NO: 876825 - DNA, 33 bp, Homo sapien
agactcaactggctacaaaagagcttcccaacc

SEQ ID NO: 876826 - DNA, 33 bp, Homo sapien
agactcaactggctacgaaagagcttcccaacc

SEQ ID NO: 876827 - DNA, 33 bp, Homo sapien
gtaaagattattatgtaaagtgcattgaacagt

SEQ ID NO: 876828 - DNA, 33 bp, Homo sapien
gtaaagattattatgtgaagtgcattgaacagt

SEQ ID NO: 876829 - DNA, 33 bp, Homo sapien
aaggccaatttctctgcagtttatctcttaaga

SEQ ID NO: 876830 - DNA, 33 bp, Homo sapien
aaggccaatttctctggagtttatctcttaaga

SEQ ID NO: 876831 - DNA, 33 bp, Homo sapien
aaaaatcacttaaatgacatccagaatatcatt

SEQ ID NO: 876832 - DNA, 33 bp, Homo sapien
aaaaatcacttaaatggcatccagaatatcatt

SEQ ID NO: 876833 - DNA, 33 bp, Homo sapien
aaaagatctgcctacaacctttaattaatgacc

SEQ ID NO: 876834 - DNA, 33 bp, Homo sapien
aaaagatctgcctacagcctttaattaatgacc

SEQ ID NO: 876835 - DNA, 33 bp, Homo sapien
tctgctctgttttacacgaaataagctattgaa

SEQ ID NO: 876836 - DNA, 33 bp, Homo sapien
tctgctctgttttacatgaaataagctattgaa

SEQ ID NO: 876837 - DNA, 33 bp, Homo sapien
atattcgttaaagactcactgaggtttttgaat

SEQ ID NO: 876838 - DNA, 33 bp, Homo sapien
atattcgttaaagacttactgaggtttttgaat

SEQ ID NO: 876839 - DNA, 33 bp, Homo sapien
caatgtgaatgaaggacatgggattggatgagc

SEQ ID NO: 876840 - DNA, 33 bp, Homo sapien
caatgtgaatgaaggagatgggattggatgagc

SEQ ID NO: 876841 - DNA, 33 bp, Homo sapien
taaacgttagcgaactcacagtaagaaaagaga

SEQ ID NO: 876842 - DNA, 33 bp, Homo sapien
taaacgttagcgaactgacagtaagaaaagaga

SEQ ID NO: 876843 - DNA, 33 bp, Homo sapien
cattgaactcaagagcaatcgaatcaaaagctc

SEQ ID NO: 876844 - DNA, 33 bp, Homo sapien
cattgaactcaagagcgatcgaatcaaaagctc

SEQ ID NO: 876845 - DNA, 33 bp, Homo sapien
aacagcaggagggaccaagcaggcctgtgagat

SEQ ID NO: 876846 - DNA, 33 bp, Homo sapien
aacagcaggagggaccgagcaggcctgtgagat

SEQ ID NO: 876847 - DNA, 33 bp, Homo sapien
ccacttgtactgtctacattcaactgtccacag

SEQ ID NO: 876848 - DNA, 33 bp, Homo sapien
ccacttgtactgtctatattcaactgtccacag

SEQ ID NO: 876849 - DNA, 33 bp, Homo sapien
tctgcttcgattgctaagagtgcataatgctca

SEQ ID NO: 876850 - DNA, 33 bp, Homo sapien
tctgcttcgattgctacgagtgcataatgctca

SEQ ID NO: 876851 - DNA, 33 bp, Homo sapien
atcaaatgttgactaacgcatggggacccaggg

SEQ ID NO: 876852 - DNA, 33 bp, Homo sapien
atcaaatgttgactaatgcatggggacccaggg

SEQ ID NO: 876853 - DNA, 33 bp, Homo sapien
ggaggtcaacaaagagaatgaaatgcaagatgc

SEQ ID NO: 876854 - DNA, 33 bp, Homo sapien
ggaggtcaacaaagaggatgaaatgcaagatgc

SEQ ID NO: 876855 - DNA, 33 bp, Homo sapien
gtgtaaacaaggaatgccagcaaaagtgaggag

SEQ ID NO: 876856 - DNA, 33 bp, Homo sapien
gtgtaaacaaggaatgtcagcaaaagtgaggag

SEQ ID NO: 876857 - DNA, 33 bp, Homo sapien
atcttttcggtagaagcagatttgccccaaacc

SEQ ID NO: 876858 - DNA, 33 bp, Homo sapien
atcttttcggtagaagtagatttgccccaaacc

SEQ ID NO: 876859 - DNA, 33 bp, Homo sapien
caaacagacaatggcaatcttttccttagcttt

SEQ ID NO: 876860 - DNA, 33 bp, Homo sapien
caaacagacaatggcagtcttttccttagcttt

SEQ ID NO: 876861 - DNA, 33 bp, Homo sapien
aactctgggtacacaaaaggtgtgaacagaaat

SEQ ID NO: 876862 - DNA, 33 bp, Homo sapien
aactctgggtacacaagaggtgtgaacagaaat

SEQ ID NO: 876863 - DNA, 33 bp, Homo sapien
acatatggggggatgaaaggatgacgtttagtg

SEQ ID NO: 876864 - DNA, 33 bp, Homo sapien
acatatggggggatgagaggatgacgtttagtg

SEQ ID NO: 876865 - DNA, 33 bp, Homo sapien
aagcaaccagttcactaaattaattcaatctag

SEQ ID NO: 876866 - DNA, 33 bp, Homo sapien
aagcaaccagttcactcaattaattcaatctag

SEQ ID NO: 876867 - DNA, 33 bp, Homo sapien
tacaagatattcagaaaactgaagaccaaaagg

SEQ ID NO: 876868 - DNA, 33 bp, Homo sapien
tacaagatattcagaagactgaagaccaaaagg

SEQ ID NO: 876869 - DNA, 33 bp, Homo sapien
taggataaaagcaggaataaagatgagacctaa

SEQ ID NO: 876870 - DNA, 33 bp, Homo sapien
taggataaaagcaggagtaaagatgagacctaa

SEQ ID NO: 876871 - DNA, 33 bp, Homo sapien
catggcacgtagttgcactttttgggcaccagg

SEQ ID NO: 876872 - DNA, 33 bp, Homo sapien
catggcacgtagttgcgctttttgggcaccagg

SEQ ID NO: 876873 - DNA, 33 bp, Homo sapien
ataaaagcaaggatccaatactggagcatatag

SEQ ID NO: 876874 - DNA, 33 bp, Homo sapien
ataaaagcaaggatcccatactggagcatatag

SEQ ID NO: 876875 - DNA, 33 bp, Homo sapien
atcccttataggctacacacccaatctcccttg

SEQ ID NO: 876876 - DNA, 33 bp, Homo sapien
atcccttataggctacgcacccaatctcccttg

SEQ ID NO: 876877 - DNA, 33 bp, Homo sapien
taatttttagtagttacctgcaattccgagtgc

SEQ ID NO: 876878 - DNA, 33 bp, Homo sapien
taatttttagtagttatctgcaattccgagtgc

SEQ ID NO: 876879 - DNA, 33 bp, Homo sapien
taataacgtaaatgtacgatattgataactgtc

SEQ ID NO: 876880 - DNA, 33 bp, Homo sapien
taataacgtaaatgtatgatattgataactgtc

SEQ ID NO: 876881 - DNA, 33 bp, Homo sapien
gtcaccaggatttagcaaagttgccctcactgt

SEQ ID NO: 876882 - DNA, 33 bp, Homo sapien
gtcaccaggatttagcgaagttgccctcactgt

SEQ ID NO: 876883 - DNA, 33 bp, Homo sapien
ctcttaggattacttaggttaaaagagactgca

SEQ ID NO: 876884 - DNA, 33 bp, Homo sapien
ctcttaggattacttatgttaaaagagactgca

SEQ ID NO: 876885 - DNA, 33 bp, Homo sapien
aactctgcacatttgaagaagggagtcagatgg

SEQ ID NO: 876886 - DNA, 33 bp, Homo sapien
aactctgcacatttgaggaagggagtcagatgg

SEQ ID NO: 876887 - DNA, 33 bp, Homo sapien
cattcttctgcacttccaaaaggatgagtgagt

SEQ ID NO: 876888 - DNA, 33 bp, Homo sapien
cattcttctgcacttctaaaaggatgagtgagt

SEQ ID NO: 876889 - DNA, 33 bp, Homo sapien
gaataggagatcaaaacagcttgtggaaattgt

SEQ ID NO: 876890 - DNA, 33 bp, Homo sapien
gaataggagatcaaaatagcttgtggaaattgt

SEQ ID NO: 876891 - DNA, 33 bp, Homo sapien
ttagagcagagcttctcaaactttttggtgttg

SEQ ID NO: 876892 - DNA, 33 bp, Homo sapien
ttagagcagagcttctgaaactttttggtgttg

SEQ ID NO: 876893 - DNA, 33 bp, Homo sapien
aagttacactgtagaactgttcgccagtcttct

SEQ ID NO: 876894 - DNA, 33 bp, Homo sapien
aagttacactgtagaattgttcgccagtcttct

SEQ ID NO: 876895 - DNA, 33 bp, Homo sapien
tagcttcgaacctcaacccaagcatctgacaac

SEQ ID NO: 876896 - DNA, 33 bp, Homo sapien
tagcttcgaacctcaatccaagcatctgacaac

SEQ ID NO: 876897 - DNA, 33 bp, Homo sapien
cgcatccttttaaaaactgtgtgtaccattttc

SEQ ID NO: 876898 - DNA, 33 bp, Homo sapien
cgcatccttttaaaaattgtgtgtaccattttc

SEQ ID NO: 876899 - DNA, 33 bp, Homo sapien
ttttaaaaggatgcgacgagatatgtaaatgag

SEQ ID NO: 876900 - DNA, 33 bp, Homo sapien
ttttaaaaggatgcgatgagatatgtaaatgag

SEQ ID NO: 876901 - DNA, 33 bp, Homo sapien
tctggaagtacacagcaaagtgtctctacaggc

SEQ ID NO: 876902 - DNA, 33 bp, Homo sapien
tctggaagtacacagcgaagtgtctctacaggc

SEQ ID NO: 876903 - DNA, 33 bp, Homo sapien
caggaaagtcttagtcacgccctatctgcagag

SEQ ID NO: 876904 - DNA, 33 bp, Homo sapien
caggaaagtcttagtcgcgccctatctgcagag

SEQ ID NO: 876905 - DNA, 33 bp, Homo sapien
ctttctcttttttggagctgccatgaattcagg

SEQ ID NO: 876906 - DNA, 33 bp, Homo sapien
ctttctcttttttggatctgccatgaattcagg

SEQ ID NO: 876907 - DNA, 33 bp, Homo sapien
cagagtaaccacacaagaattgaaagcattcca

SEQ ID NO: 876908 - DNA, 33 bp, Homo sapien
cagagtaaccacacaataattgaaagcattcca

SEQ ID NO: 876909 - DNA, 33 bp, Homo sapien
atgatctcagaattcaaagtctagcagaggaaa

SEQ ID NO: 876910 - DNA, 33 bp, Homo sapien
atgatctcagaattcatagtctagcagaggaaa

SEQ ID NO: 876911 - DNA, 33 bp, Homo sapien
agtatagatttgatgggcatgtaaagagttttg

SEQ ID NO: 876912 - DNA, 33 bp, Homo sapien
agtatagatttgatggtcatgtaaagagttttg

SEQ ID NO: 876913 - DNA, 33 bp, Homo sapien
gttgccagagatggggaaattgtgttcagctca

SEQ ID NO: 876914 - DNA, 33 bp, Homo sapien
gttgccagagatgggggaattgtgttcagctca

SEQ ID NO: 876915 - DNA, 33 bp, Homo sapien
cactgctctcccttccaactcactttgtgccga

SEQ ID NO: 876916 - DNA, 33 bp, Homo sapien
cactgctctcccttccgactcactttgtgccga

SEQ ID NO: 876917 - DNA, 33 bp, Homo sapien
tgcacagattttcccaaactaagaaagatagct

SEQ ID NO: 876918 - DNA, 33 bp, Homo sapien
tgcacagattttcccacactaagaaagatagct

SEQ ID NO: 876919 - DNA, 33 bp, Homo sapien
agtaatagcagcaagaaggatgaggatgttgaa

SEQ ID NO: 876920 - DNA, 33 bp, Homo sapien
agtaatagcagcaagatggatgaggatgttgaa

SEQ ID NO: 876921 - DNA, 33 bp, Homo sapien
aaaatgttgctaaagaatacctttctgaatatt

SEQ ID NO: 876922 - DNA, 33 bp, Homo sapien
aaaatgttgctaaagagtacctttctgaatatt

SEQ ID NO: 876923 - DNA, 33 bp, Homo sapien
agccacctagctttacaatctggcaaatgcata

SEQ ID NO: 876924 - DNA, 33 bp, Homo sapien
agccacctagctttaccatctggcaaatgcata

SEQ ID NO: 876925 - DNA, 33 bp, Homo sapien
ttctctgcataaactaccaataaaatctaatga

SEQ ID NO: 876926 - DNA, 33 bp, Homo sapien
ttctctgcataaactagcaataaaatctaatga

SEQ ID NO: 876927 - DNA, 33 bp, Homo sapien
ctccttaaacattgtaggtatggccgggcatgg

SEQ ID NO: 876928 - DNA, 33 bp, Homo sapien
ctccttaaacattgtatgtatggccgggcatgg

SEQ ID NO: 876929 - DNA, 33 bp, Homo sapien
aagccctataaaggaaagagaaaagtggcagca

SEQ ID NO: 876930 - DNA, 33 bp, Homo sapien
aagccctataaaggaaggagaaaagtggcagca

SEQ ID NO: 876931 - DNA, 33 bp, Homo sapien
ttctatgggtcaggaaactcagcacgactttgc

SEQ ID NO: 876932 - DNA, 33 bp, Homo sapien
ttctatgggtcaggaatctcagcacgactttgc

SEQ ID NO: 876933 - DNA, 33 bp, Homo sapien
aacaagcatggtctgagaaagccaccacacaga

SEQ ID NO: 876934 - DNA, 33 bp, Homo sapien
aacaagcatggtctgataaagccaccacacaga

SEQ ID NO: 876935 - DNA, 33 bp, Homo sapien
agaatggcaccatcccagaaaaggaagacagac

SEQ ID NO: 876936 - DNA, 33 bp, Homo sapien
agaatggcaccatcccggaaaaggaagacagac

SEQ ID NO: 876937 - DNA, 33 bp, Homo sapien
tactgccaggttcccacgaattctaaatgagta

SEQ ID NO: 876938 - DNA, 33 bp, Homo sapien
tactgccaggttcccatgaattctaaatgagta

SEQ ID NO: 876939 - DNA, 33 bp, Homo sapien
agcatggaacggagcacggactctgacccatat

SEQ ID NO: 876940 - DNA, 33 bp, Homo sapien
agcatggaacggagcatggactctgacccatat

SEQ ID NO: 876941 - DNA, 33 bp, Homo sapien
gctctctgcaaaggagaattacctgtaagcttg

SEQ ID NO: 876942 - DNA, 33 bp, Homo sapien
gctctctgcaaaggaggattacctgtaagcttg

SEQ ID NO: 876943 - DNA, 33 bp, Homo sapien
gattctgtgagatcacccattaactttgacttt

SEQ ID NO: 876944 - DNA, 33 bp, Homo sapien
gattctgtgagatcactcattaactttgacttt

SEQ ID NO: 876945 - DNA, 33 bp, Homo sapien
acttcattttctgagaaagctgatccagaaatt

SEQ ID NO: 876946 - DNA, 33 bp, Homo sapien
acttcattttctgagagagctgatccagaaatt

SEQ ID NO: 876947 - DNA, 33 bp, Homo sapien
tccaccctattccaaacccccactaaaggtcag

SEQ ID NO: 876948 - DNA, 33 bp, Homo sapien
tccaccctattccaaatccccactaaaggtcag

SEQ ID NO: 876949 - DNA, 33 bp, Homo sapien
tggctggaagaggctgaaaatggtgatgaatct

SEQ ID NO: 876950 - DNA, 33 bp, Homo sapien
tggctggaagaggctgcaaatggtgatgaatct

SEQ ID NO: 876951 - DNA, 33 bp, Homo sapien
aaatatcagacttctgaaatcaatttccaagac

SEQ ID NO: 876952 - DNA, 33 bp, Homo sapien
aaatatcagacttctgtaatcaatttccaagac

SEQ ID NO: 876953 - DNA, 33 bp, Homo sapien
caacttctggtaaccaatcatctttctgtcttt

SEQ ID NO: 876954 - DNA, 33 bp, Homo sapien
caacttctggtaaccagtcatctttctgtcttt

SEQ ID NO: 876955 - DNA, 33 bp, Homo sapien
taattgccctgatttcaacacgtgctcttacgg

SEQ ID NO: 876956 - DNA, 33 bp, Homo sapien
taattgccctgatttcgacacgtgctcttacgg

SEQ ID NO: 876957 - DNA, 33 bp, Homo sapien
tttatgagttcagcagatatttgactctggatt

SEQ ID NO: 876958 - DNA, 33 bp, Homo sapien
tttatgagttcagcaggtatttgactctggatt

SEQ ID NO: 876959 - DNA, 33 bp, Homo sapien
tagctcctgagtgtgcaattcgactaaacttct

SEQ ID NO: 876960 - DNA, 33 bp, Homo sapien
tagctcctgagtgtgcgattcgactaaacttct

SEQ ID NO: 876961 - DNA, 33 bp, Homo sapien
tggaggtacagaaaggcatgctggaagagtgtt

SEQ ID NO: 876962 - DNA, 33 bp, Homo sapien
tggaggtacagaaagggatgctggaagagtgtt

SEQ ID NO: 876963 - DNA, 33 bp, Homo sapien
acatacagtcacatacacatctacctgaaataa

SEQ ID NO: 876964 - DNA, 33 bp, Homo sapien
acatacagtcacatacgcatctacctgaaataa

SEQ ID NO: 876965 - DNA, 33 bp, Homo sapien
gatcctgtgggtcgaccgggcagttctgttcat

SEQ ID NO: 876966 - DNA, 33 bp, Homo sapien
gatcctgtgggtcgactgggcagttctgttcat

SEQ ID NO: 876967 - DNA, 33 bp, Homo sapien
aggctagaatagataaaaaatcaatttggaatg

SEQ ID NO: 876968 - DNA, 33 bp, Homo sapien
aggctagaatagataagaaatcaatttggaatg

SEQ ID NO: 876969 - DNA, 33 bp, Homo sapien
ctgattttctcacatggacgggaaattgaatag

SEQ ID NO: 876970 - DNA, 33 bp, Homo sapien
ctgattttctcacatgtacgggaaattgaatag

SEQ ID NO: 876971 - DNA, 33 bp, Homo sapien
tatgtggatggcttaaacacaggagttcgagat

SEQ ID NO: 876972 - DNA, 33 bp, Homo sapien
tatgtggatggcttaagcacaggagttcgagat

SEQ ID NO: 876973 - DNA, 33 bp, Homo sapien
atgagccttccttgaactgcatcttcatttata

SEQ ID NO: 876974 - DNA, 33 bp, Homo sapien
atgagccttccttgaattgcatcttcatttata

SEQ ID NO: 876975 - DNA, 33 bp, Homo sapien
agatattttcacaatcaatatggccttgcttgt

SEQ ID NO: 876976 - DNA, 33 bp, Homo sapien
agatattttcacaatcgatatggccttgcttgt

SEQ ID NO: 876977 - DNA, 33 bp, Homo sapien
cttcctgaattgagaacgaggtaggaatgaaag

SEQ ID NO: 876978 - DNA, 33 bp, Homo sapien
cttcctgaattgagaatgaggtaggaatgaaag

SEQ ID NO: 876979 - DNA, 33 bp, Homo sapien
gaaacaccataaagatcagactgcagagcaagc

SEQ ID NO: 876980 - DNA, 33 bp, Homo sapien
gaaacaccataaagatgagactgcagagcaagc

SEQ ID NO: 876981 - DNA, 33 bp, Homo sapien
agtagctgcaactacaagtaccaagctgagcaa

SEQ ID NO: 876982 - DNA, 33 bp, Homo sapien
agtagctgcaactacaggtaccaagctgagcaa

SEQ ID NO: 876983 - DNA, 33 bp, Homo sapien
tcttttgagtgattacacagcatttgttcccta

SEQ ID NO: 876984 - DNA, 33 bp, Homo sapien
tcttttgagtgattacgcagcatttgttcccta

SEQ ID NO: 876985 - DNA, 33 bp, Homo sapien
aattgcaattgactgaacataaaatctcaacaa

SEQ ID NO: 876986 - DNA, 33 bp, Homo sapien
aattgcaattgactgagcataaaatctcaacaa

SEQ ID NO: 876987 - DNA, 33 bp, Homo sapien
tatgtagcagtacaaagcttttcccctactaaa

SEQ ID NO: 876988 - DNA, 33 bp, Homo sapien
tatgtagcagtacaaatcttttcccctactaaa

SEQ ID NO: 876989 - DNA, 33 bp, Homo sapien
tcctgactttgtccgtaaattgataagatctaa

SEQ ID NO: 876990 - DNA, 33 bp, Homo sapien
tcctgactttgtccgtgaattgataagatctaa

SEQ ID NO: 876991 - DNA, 33 bp, Homo sapien
ggtaaataaagtcaccacttccaggcttagcta

SEQ ID NO: 876992 - DNA, 33 bp, Homo sapien
ggtaaataaagtcaccgcttccaggcttagcta

SEQ ID NO: 876993 - DNA, 33 bp, Homo sapien
ctgaatcttttagactcaatctaccataatcaa

SEQ ID NO: 876994 - DNA, 33 bp, Homo sapien
ctgaatcttttagactgaatctaccataatcaa

SEQ ID NO: 876995 - DNA, 33 bp, Homo sapien
tacctaacaaggtcacacagtggattatactag

SEQ ID NO: 876996 - DNA, 33 bp, Homo sapien
tacctaacaaggtcactcagtggattatactag

SEQ ID NO: 876997 - DNA, 33 bp, Homo sapien
attttacttctactgaatagcagtcatgattta

SEQ ID NO: 876998 - DNA, 33 bp, Homo sapien
attttacttctactgagtagcagtcatgattta

SEQ ID NO: 876999 - DNA, 33 bp, Homo sapien
gtcttgacatcactagaaactagactgcttgtg

SEQ ID NO: 877000 - DNA, 33 bp, Homo sapien
gtcttgacatcactaggaactagactgcttgtg

SEQ ID NO: 877001 - DNA, 33 bp, Homo sapien
ttctctgtctagccaaactgctgttagaagaat

SEQ ID NO: 877002 - DNA, 33 bp, Homo sapien
ttctctgtctagccaagctgctgttagaagaat

SEQ ID NO: 877003 - DNA, 33 bp, Homo sapien
cctagagcaatgtggacatgggcagctgcttgt

SEQ ID NO: 877004 - DNA, 33 bp, Homo sapien
cctagagcaatgtggatatgggcagctgcttgt

SEQ ID NO: 877005 - DNA, 33 bp, Homo sapien
agagtcacaagagagacggttagaaatggtgcc

SEQ ID NO: 877006 - DNA, 33 bp, Homo sapien
agagtcacaagagagatggttagaaatggtgcc

SEQ ID NO: 877007 - DNA, 33 bp, Homo sapien
atgaattgtatagtgccgaagtctgggatttta

SEQ ID NO: 877008 - DNA, 33 bp, Homo sapien
atgaattgtatagtgctgaagtctgggatttta

SEQ ID NO: 877009 - DNA, 33 bp, Homo sapien
ccccagtcactgtaccgctttcctatctgtaaa

SEQ ID NO: 877010 - DNA, 33 bp, Homo sapien
ccccagtcactgtacctctttcctatctgtaaa

SEQ ID NO: 877011 - DNA, 33 bp, Homo sapien
acagcacaatttttaggagaatggactcaggag

SEQ ID NO: 877012 - DNA, 33 bp, Homo sapien
acagcacaatttttagtagaatggactcaggag

SEQ ID NO: 877013 - DNA, 33 bp, Homo sapien
catgaaaagcatttagcaaggtccctggcaagt

SEQ ID NO: 877014 - DNA, 33 bp, Homo sapien
catgaaaagcatttagtaaggtccctggcaagt

SEQ ID NO: 877015 - DNA, 33 bp, Homo sapien
gactacctgttctaataagagatgccaccattg

SEQ ID NO: 877016 - DNA, 33 bp, Homo sapien
gactacctgttctaatgagagatgccaccattg

SEQ ID NO: 877017 - DNA, 33 bp, Homo sapien
tgcacataaagcacaaataaccaaaggaaaaga

SEQ ID NO: 877018 - DNA, 33 bp, Homo sapien
tgcacataaagcacaagtaaccaaaggaaaaga

SEQ ID NO: 877019 - DNA, 33 bp, Homo sapien
atcccagttcgttatacaaaagagttgtgacat

SEQ ID NO: 877020 - DNA, 33 bp, Homo sapien
atcccagttcgttatataaaagagttgtgacat

SEQ ID NO: 877021 - DNA, 33 bp, Homo sapien
ccatgtccaattagcaataagtgccatgcacct

SEQ ID NO: 877022 - DNA, 33 bp, Homo sapien
ccatgtccaattagcagtaagtgccatgcacct

SEQ ID NO: 877023 - DNA, 33 bp, Homo sapien
ctgaggagtagaaaagcagggatttgaacacct

SEQ ID NO: 877024 - DNA, 33 bp, Homo sapien
ctgaggagtagaaaagtagggatttgaacacct

SEQ ID NO: 877025 - DNA, 33 bp, Homo sapien
aaaggttctttgaccaacaggaaaacacaaggc

SEQ ID NO: 877026 - DNA, 33 bp, Homo sapien
aaaggttctttgaccagcaggaaaacacaaggc

SEQ ID NO: 877027 - DNA, 33 bp, Homo sapien
ccaactcagattgtcactaccaaaggttctttg

SEQ ID NO: 877028 - DNA, 33 bp, Homo sapien
ccaactcagattgtcattaccaaaggttctttg

SEQ ID NO: 877029 - DNA, 33 bp, Homo sapien
aacttattctaattctcaatagccctgatctcg

SEQ ID NO: 877030 - DNA, 33 bp, Homo sapien
aacttattctaattcttaatagccctgatctcg

SEQ ID NO: 877031 - DNA, 33 bp, Homo sapien
atgaaataggtgttcaataagtatttgtagagt

SEQ ID NO: 877032 - DNA, 33 bp, Homo sapien
atgaaataggtgttcagtaagtatttgtagagt

SEQ ID NO: 877033 - DNA, 33 bp, Homo sapien
ccccatctttggttgccagtaccttttacaaac

SEQ ID NO: 877034 - DNA, 33 bp, Homo sapien
ccccatctttggttgctagtaccttttacaaac

SEQ ID NO: 877035 - DNA, 33 bp, Homo sapien
acaaccatttgttccccaactcccaaactccat

SEQ ID NO: 877036 - DNA, 33 bp, Homo sapien
acaaccatttgttcccgaactcccaaactccat

SEQ ID NO: 877037 - DNA, 33 bp, Homo sapien
ggcctgaggtcttttacgcagaggaagaaccag

SEQ ID NO: 877038 - DNA, 33 bp, Homo sapien
ggcctgaggtcttttatgcagaggaagaaccag

SEQ ID NO: 877039 - DNA, 33 bp, Homo sapien
gggtacatggtacagacgaagatcactatgaag

SEQ ID NO: 877040 - DNA, 33 bp, Homo sapien
gggtacatggtacagatgaagatcactatgaag

SEQ ID NO: 877041 - DNA, 33 bp, Homo sapien
actaatgactaagcccaatgttggttatatact

SEQ ID NO: 877042 - DNA, 33 bp, Homo sapien
actaatgactaagcccgatgttggttatatact

SEQ ID NO: 877043 - DNA, 33 bp, Homo sapien
gctatgtgaatcagaacgttcattagcttgttt

SEQ ID NO: 877044 - DNA, 33 bp, Homo sapien
gctatgtgaatcagaaggttcattagcttgttt

SEQ ID NO: 877045 - DNA, 33 bp, Homo sapien
tcccccagaaaatggcacaagtacagttagtta

SEQ ID NO: 877046 - DNA, 33 bp, Homo sapien
tcccccagaaaatggcgcaagtacagttagtta

SEQ ID NO: 877047 - DNA, 33 bp, Homo sapien
atggcagatttgggaacgtcatgtaatttgttg

SEQ ID NO: 877048 - DNA, 33 bp, Homo sapien
atggcagatttgggaatgtcatgtaatttgttg

SEQ ID NO: 877049 - DNA, 33 bp, Homo sapien
acataattttgaggacgagttgatgccttttga

SEQ ID NO: 877050 - DNA, 33 bp, Homo sapien
acataattttgaggactagttgatgccttttga

SEQ ID NO: 877051 - DNA, 33 bp, Homo sapien
tgcctggctatttggccgaaaaataacaacatg

SEQ ID NO: 877052 - DNA, 33 bp, Homo sapien
tgcctggctatttggctgaaaaataacaacatg

SEQ ID NO: 877053 - DNA, 33 bp, Homo sapien
caggacttcatgttcaataacttttcctttttc

SEQ ID NO: 877054 - DNA, 33 bp, Homo sapien
caggacttcatgttcattaacttttcctttttc

SEQ ID NO: 877055 - DNA, 33 bp, Homo sapien
gattaaatgttaagcaatacaacattgtacatg

SEQ ID NO: 877056 - DNA, 33 bp, Homo sapien
gattaaatgttaagcagtacaacattgtacatg

SEQ ID NO: 877057 - DNA, 33 bp, Homo sapien
cttctgttcccttgtaccgttgtggctggggag

SEQ ID NO: 877058 - DNA, 33 bp, Homo sapien
cttctgttcccttgtatcgttgtggctggggag

SEQ ID NO: 877059 - DNA, 33 bp, Homo sapien
gatgctaactgcaagcaaaaagtgtattcttct

SEQ ID NO: 877060 - DNA, 33 bp, Homo sapien
gatgctaactgcaagcgaaaagtgtattcttct

SEQ ID NO: 877061 - DNA, 33 bp, Homo sapien
tcaccaaatgcagatcactcagaatgtacgctc

SEQ ID NO: 877062 - DNA, 33 bp, Homo sapien
tcaccaaatgcagatcgctcagaatgtacgctc

SEQ ID NO: 877063 - DNA, 33 bp, Homo sapien
agactgtcccataaaagagtctcccttgcccca

SEQ ID NO: 877064 - DNA, 33 bp, Homo sapien
agactgtcccataaaatagtctcccttgcccca

SEQ ID NO: 877065 - DNA, 33 bp, Homo sapien
ttcatcataaaataacagtaacaacaacgaaca

SEQ ID NO: 877066 - DNA, 33 bp, Homo sapien
ttcatcataaaataacggtaacaacaacgaaca

SEQ ID NO: 877067 - DNA, 33 bp, Homo sapien
tgaagtgcaaacaaaacctctcatgggccgggc

SEQ ID NO: 877068 - DNA, 33 bp, Homo sapien
tgaagtgcaaacaaaatctctcatgggccgggc

SEQ ID NO: 877069 - DNA, 33 bp, Homo sapien
caattctggaagctggacatgcataatcaaagt

SEQ ID NO: 877070 - DNA, 33 bp, Homo sapien
caattctggaagctgggcatgcataatcaaagt

SEQ ID NO: 877071 - DNA, 33 bp, Homo sapien
tatgcatggatgattaagtctagcaattaaaga

SEQ ID NO: 877072 - DNA, 33 bp, Homo sapien
tatgcatggatgattaggtctagcaattaaaga

SEQ ID NO: 877073 - DNA, 33 bp, Homo sapien
ctttcaaacagaaaagactatcttgcctataaa

SEQ ID NO: 877074 - DNA, 33 bp, Homo sapien
ctttcaaacagaaaaggctatcttgcctataaa

SEQ ID NO: 877075 - DNA, 33 bp, Homo sapien
ttgaaagcgaaaaatactatttcaacatgtaaa

SEQ ID NO: 877076 - DNA, 33 bp, Homo sapien
ttgaaagcgaaaaatagtatttcaacatgtaaa

SEQ ID NO: 877077 - DNA, 33 bp, Homo sapien
tgtccagtcttaaatccaggtaagatacattta

SEQ ID NO: 877078 - DNA, 33 bp, Homo sapien
tgtccagtcttaaatctaggtaagatacattta

SEQ ID NO: 877079 - DNA, 33 bp, Homo sapien
aactgcaaatcagaaacaacagcctgtgtcact

SEQ ID NO: 877080 - DNA, 33 bp, Homo sapien
aactgcaaatcagaaataacagcctgtgtcact

SEQ ID NO: 877081 - DNA, 33 bp, Homo sapien
tggatgctgagccccccatactctattccgagt

SEQ ID NO: 877082 - DNA, 33 bp, Homo sapien
tggatgctgagcccccgatactctattccgagt

SEQ ID NO: 877083 - DNA, 33 bp, Homo sapien
ggtaagaatgcgaagcacagcttttaagagtca

SEQ ID NO: 877084 - DNA, 33 bp, Homo sapien
ggtaagaatgcgaagcgcagcttttaagagtca

SEQ ID NO: 877085 - DNA, 33 bp, Homo sapien
ggagagatgacagaagcctctgtttaaggacaa

SEQ ID NO: 877086 - DNA, 33 bp, Homo sapien
ggagagatgacagaagtctctgtttaaggacaa

SEQ ID NO: 877087 - DNA, 33 bp, Homo sapien
aataaatcctatttcaaatgtgactgttttagg

SEQ ID NO: 877088 - DNA, 33 bp, Homo sapien
aataaatcctatttcagatgtgactgttttagg

SEQ ID NO: 877089 - DNA, 33 bp, Homo sapien
gaacgctgaaaatacaatctttaagctgtgcaa

SEQ ID NO: 877090 - DNA, 33 bp, Homo sapien
gaacgctgaaaatacagtctttaagctgtgcaa

SEQ ID NO: 877091 - DNA, 33 bp, Homo sapien
cagaatgcctagaagacggcagaagctcttgat

SEQ ID NO: 877092 - DNA, 33 bp, Homo sapien
cagaatgcctagaagatggcagaagctcttgat

SEQ ID NO: 877093 - DNA, 33 bp, Homo sapien
tctcaggtcaatatcactatgatctgtacagga

SEQ ID NO: 877094 - DNA, 33 bp, Homo sapien
tctcaggtcaatatcagtatgatctgtacagga

SEQ ID NO: 877095 - DNA, 33 bp, Homo sapien
ttaaacagagtgaatgaataaagtgagattgtc

SEQ ID NO: 877096 - DNA, 33 bp, Homo sapien
ttaaacagagtgaatgtataaagtgagattgtc

SEQ ID NO: 877097 - DNA, 33 bp, Homo sapien
atagatctaaaacaacaagttggtccacaaaat

SEQ ID NO: 877098 - DNA, 33 bp, Homo sapien
atagatctaaaacaacgagttggtccacaaaat

SEQ ID NO: 877099 - DNA, 33 bp, Homo sapien
aaagttaaaagatagacatggcatactctttaa

SEQ ID NO: 877100 - DNA, 33 bp, Homo sapien
aaagttaaaagatagagatggcatactctttaa

SEQ ID NO: 877101 - DNA, 33 bp, Homo sapien
ggaatagagtcacccaacaacaaggaacaccag

SEQ ID NO: 877102 - DNA, 33 bp, Homo sapien
ggaatagagtcacccatcaacaaggaacaccag

SEQ ID NO: 877103 - DNA, 33 bp, Homo sapien
cagattactgcccatacgcggggtgaggagtga

SEQ ID NO: 877104 - DNA, 33 bp, Homo sapien
cagattactgcccatatgcggggtgaggagtga

SEQ ID NO: 877105 - DNA, 33 bp, Homo sapien
tttgtacctctacttcccaaaaaactgccttaa

SEQ ID NO: 877106 - DNA, 33 bp, Homo sapien
tttgtacctctacttctcaaaaaactgccttaa

SEQ ID NO: 877107 - DNA, 33 bp, Homo sapien
ataaaggaagagttgactaagtatgcataaatc

SEQ ID NO: 877108 - DNA, 33 bp, Homo sapien
ataaaggaagagttgagtaagtatgcataaatc

SEQ ID NO: 877109 - DNA, 33 bp, Homo sapien
agcttcttgtgagcaacattttatactacaaaa

SEQ ID NO: 877110 - DNA, 33 bp, Homo sapien
agcttcttgtgagcaatattttatactacaaaa

SEQ ID NO: 877111 - DNA, 33 bp, Homo sapien
agtttacatagtttaacagctaaagtaagtccc

SEQ ID NO: 877112 - DNA, 33 bp, Homo sapien
agtttacatagtttaagagctaaagtaagtccc

SEQ ID NO: 877113 - DNA, 33 bp, Homo sapien
tctatgaaaggaagccaaccaacagtggtgccc

SEQ ID NO: 877114 - DNA, 33 bp, Homo sapien
tctatgaaaggaagccgaccaacagtggtgccc

SEQ ID NO: 877115 - DNA, 33 bp, Homo sapien
aataaatgcatggagcaatttagcagcagttta

SEQ ID NO: 877116 - DNA, 33 bp, Homo sapien
aataaatgcatggagcgatttagcagcagttta

SEQ ID NO: 877117 - DNA, 33 bp, Homo sapien
aagctatgggtcaaggcaaatgggctaaaaata

SEQ ID NO: 877118 - DNA, 33 bp, Homo sapien
aagctatgggtcaaggtaaatgggctaaaaata

SEQ ID NO: 877119 - DNA, 33 bp, Homo sapien
aaaaacaaaaaactgaataggatctcaatctgg

SEQ ID NO: 877120 - DNA, 33 bp, Homo sapien
aaaaacaaaaaactgactaggatctcaatctgg

SEQ ID NO: 877121 - DNA, 33 bp, Homo sapien
caaatcttgatgccaccatttactaactttgtg

SEQ ID NO: 877122 - DNA, 33 bp, Homo sapien
caaatcttgatgccactatttactaactttgtg

SEQ ID NO: 877123 - DNA, 33 bp, Homo sapien
ttgcagattccttataaaggtagaaccatgcta

SEQ ID NO: 877124 - DNA, 33 bp, Homo sapien
ttgcagattccttatagaggtagaaccatgcta

SEQ ID NO: 877125 - DNA, 33 bp, Homo sapien
tttctaaaagtccaaccgattcatggccctgat

SEQ ID NO: 877126 - DNA, 33 bp, Homo sapien
tttctaaaagtccaactgattcatggccctgat

SEQ ID NO: 877127 - DNA, 33 bp, Homo sapien
cttgcaaaaacccggaatcatccataggacaca

SEQ ID NO: 877128 - DNA, 33 bp, Homo sapien
cttgcaaaaacccggactcatccataggacaca

SEQ ID NO: 877129 - DNA, 33 bp, Homo sapien
ctatactctctaataaatgtttggtttggcctt

SEQ ID NO: 877130 - DNA, 33 bp, Homo sapien
ctatactctctaataagtgtttggtttggcctt

SEQ ID NO: 877131 - DNA, 33 bp, Homo sapien
aggactccagagagaacagaatccaatcttctc

SEQ ID NO: 877132 - DNA, 33 bp, Homo sapien
aggactccagagagaatagaatccaatcttctc

SEQ ID NO: 877133 - DNA, 33 bp, Homo sapien
tgccaaatccaaatgacggacgttgcagaacac

SEQ ID NO: 877134 - DNA, 33 bp, Homo sapien
tgccaaatccaaatgatggacgttgcagaacac

SEQ ID NO: 877135 - DNA, 33 bp, Homo sapien
gcacagttccaagcatgatcagtagctcccctg

SEQ ID NO: 877136 - DNA, 33 bp, Homo sapien
gcacagttccaagcattatcagtagctcccctg

SEQ ID NO: 877137 - DNA, 33 bp, Homo sapien
aatcccactaaggcccaaaggaccaagtgctgt

SEQ ID NO: 877138 - DNA, 33 bp, Homo sapien
aatcccactaaggcccgaaggaccaagtgctgt

SEQ ID NO: 877139 - DNA, 33 bp, Homo sapien
aactgacttctcattacgtgagttgaataaaga

SEQ ID NO: 877140 - DNA, 33 bp, Homo sapien
aactgacttctcattatgtgagttgaataaaga

SEQ ID NO: 877141 - DNA, 33 bp, Homo sapien
agactcatttgcaaaaatacttcattttttatt

SEQ ID NO: 877142 - DNA, 33 bp, Homo sapien
agactcatttgcaaaattacttcattttttatt

SEQ ID NO: 877143 - DNA, 33 bp, Homo sapien
acaacaatcctgcacaagtactgttcagctcca

SEQ ID NO: 877144 - DNA, 33 bp, Homo sapien
acaacaatcctgcacaggtactgttcagctcca

SEQ ID NO: 877145 - DNA, 33 bp, Homo sapien
gcaacaataattgtgacaaaaatagctaatgtg

SEQ ID NO: 877146 - DNA, 33 bp, Homo sapien
gcaacaataattgtgataaaaatagctaatgtg

SEQ ID NO: 877147 - DNA, 33 bp, Homo sapien
tatttaaattacatcaaggagcatgacttgttt

SEQ ID NO: 877148 - DNA, 33 bp, Homo sapien
tatttaaattacatcagggagcatgacttgttt

SEQ ID NO: 877149 - DNA, 33 bp, Homo sapien
cttcattcattgcacaaaaaaatgatcatttag

SEQ ID NO: 877150 - DNA, 33 bp, Homo sapien
cttcattcattgcacagaaaaatgatcatttag

SEQ ID NO: 877151 - DNA, 33 bp, Homo sapien
tgacagaacccaacataaatgctcagagtgctg

SEQ ID NO: 877152 - DNA, 33 bp, Homo sapien
tgacagaacccaacatgaatgctcagagtgctg

SEQ ID NO: 877153 - DNA, 33 bp, Homo sapien
aggccttatgaccagaagctttagacacgagga

SEQ ID NO: 877154 - DNA, 33 bp, Homo sapien
aggccttatgaccagaggctttagacacgagga

SEQ ID NO: 877155 - DNA, 33 bp, Homo sapien
gagaaaactgaaggccagagagactaatttact

SEQ ID NO: 877156 - DNA, 33 bp, Homo sapien
gagaaaactgaaggccggagagactaatttact

SEQ ID NO: 877157 - DNA, 33 bp, Homo sapien
aaaggagttgcatgtacgttcttaaaaccaagt

SEQ ID NO: 877158 - DNA, 33 bp, Homo sapien
aaaggagttgcatgtatgttcttaaaaccaagt

SEQ ID NO: 877159 - DNA, 33 bp, Homo sapien
ctgcaatttaaaactcagagccctcagctggca

SEQ ID NO: 877160 - DNA, 33 bp, Homo sapien
ctgcaatttaaaactcggagccctcagctggca

SEQ ID NO: 877161 - DNA, 33 bp, Homo sapien
gggaacgttaatgttacgacaaatctcatggga

SEQ ID NO: 877162 - DNA, 33 bp, Homo sapien
gggaacgttaatgttatgacaaatctcatggga

SEQ ID NO: 877163 - DNA, 33 bp, Homo sapien
atttctaatgtggctacgaaacctttaagatta

SEQ ID NO: 877164 - DNA, 33 bp, Homo sapien
atttctaatgtggctatgaaacctttaagatta

SEQ ID NO: 877165 - DNA, 33 bp, Homo sapien
ttttggacattgtaaccaacaggaaagagtgaa

SEQ ID NO: 877166 - DNA, 33 bp, Homo sapien
ttttggacattgtaacgaacaggaaagagtgaa

SEQ ID NO: 877167 - DNA, 33 bp, Homo sapien
gtgctctatttgtcaactactaaaattcattcg

SEQ ID NO: 877168 - DNA, 33 bp, Homo sapien
gtgctctatttgtcaagtactaaaattcattcg

SEQ ID NO: 877169 - DNA, 33 bp, Homo sapien
caagttcctctttcaaacaaatgtgtaaattta

SEQ ID NO: 877170 - DNA, 33 bp, Homo sapien
caagttcctctttcaagcaaatgtgtaaattta

SEQ ID NO: 877171 - DNA, 33 bp, Homo sapien
acaactggaatacagaatcataataaagtccat

SEQ ID NO: 877172 - DNA, 33 bp, Homo sapien
acaactggaatacagagtcataataaagtccat

SEQ ID NO: 877173 - DNA, 33 bp, Homo sapien
tttcctccccaaatagcctactcaaagataaag

SEQ ID NO: 877174 - DNA, 33 bp, Homo sapien
tttcctccccaaatagtctactcaaagataaag

SEQ ID NO: 877175 - DNA, 33 bp, Homo sapien
aacaggaagaaccaatcaggagctggccaggcc

SEQ ID NO: 877176 - DNA, 33 bp, Homo sapien
aacaggaagaaccaatgaggagctggccaggcc

SEQ ID NO: 877177 - DNA, 33 bp, Homo sapien
agatagatgagttatacggcatgtggattatat

SEQ ID NO: 877178 - DNA, 33 bp, Homo sapien
agatagatgagttatatggcatgtggattatat

SEQ ID NO: 877179 - DNA, 33 bp, Homo sapien
tacgtttgtgagcccaatcatctgtttttctta

SEQ ID NO: 877180 - DNA, 33 bp, Homo sapien
tacgtttgtgagcccattcatctgtttttctta

SEQ ID NO: 877181 - DNA, 33 bp, Homo sapien
taccctctatgcgtaaatccatgtaaattcctc

SEQ ID NO: 877182 - DNA, 33 bp, Homo sapien
taccctctatgcgtaactccatgtaaattcctc

SEQ ID NO: 877183 - DNA, 33 bp, Homo sapien
aaacttgaatacccacagacatctcctgccaat

SEQ ID NO: 877184 - DNA, 33 bp, Homo sapien
aaacttgaatacccacggacatctcctgccaat

SEQ ID NO: 877185 - DNA, 33 bp, Homo sapien
gatttggttccagaccactgaaataaagtatat

SEQ ID NO: 877186 - DNA, 33 bp, Homo sapien
gatttggttccagaccgctgaaataaagtatat

SEQ ID NO: 877187 - DNA, 33 bp, Homo sapien
ccactggatcagtcaacggcctttcacgttgag

SEQ ID NO: 877188 - DNA, 33 bp, Homo sapien
ccactggatcagtcaatggcctttcacgttgag

SEQ ID NO: 877189 - DNA, 33 bp, Homo sapien
atggatcaataaaaaaagtggtttcttctgaga

SEQ ID NO: 877190 - DNA, 33 bp, Homo sapien
atggatcaataaaaaatgtggtttcttctgaga

SEQ ID NO: 877191 - DNA, 33 bp, Homo sapien
gtggaaacatcaagagaactagagttagagatg

SEQ ID NO: 877192 - DNA, 33 bp, Homo sapien
gtggaaacatcaagaggactagagttagagatg

SEQ ID NO: 877193 - DNA, 33 bp, Homo sapien
gatagcaaagtaaatacggtattcatcacctga

SEQ ID NO: 877194 - DNA, 33 bp, Homo sapien
gatagcaaagtaaatatggtattcatcacctga

SEQ ID NO: 877195 - DNA, 33 bp, Homo sapien
gatagaacaacaaggcaaatgtagtcagtaaga

SEQ ID NO: 877196 - DNA, 33 bp, Homo sapien
gatagaacaacaaggcgaatgtagtcagtaaga

SEQ ID NO: 877197 - DNA, 33 bp, Homo sapien
gcagataagctggtaccgaaaccataagaaaaa

SEQ ID NO: 877198 - DNA, 33 bp, Homo sapien
gcagataagctggtactgaaaccataagaaaaa

SEQ ID NO: 877199 - DNA, 33 bp, Homo sapien
ttgtatatggatttaaaaaaagtacataataac

SEQ ID NO: 877200 - DNA, 33 bp, Homo sapien
ttgtatatggatttaacaaaagtacataataac

SEQ ID NO: 877201 - DNA, 33 bp, Homo sapien
tccatccatgatgtaaaatatactaccttttaa

SEQ ID NO: 877202 - DNA, 33 bp, Homo sapien
tccatccatgatgtaagatatactaccttttaa

SEQ ID NO: 877203 - DNA, 33 bp, Homo sapien
tggattatgagctcaccgagaccaacacaattc

SEQ ID NO: 877204 - DNA, 33 bp, Homo sapien
tggattatgagctcacggagaccaacacaattc

SEQ ID NO: 877205 - DNA, 33 bp, Homo sapien
aggcaactcaggtgaaacttgtatggctgattt

SEQ ID NO: 877206 - DNA, 33 bp, Homo sapien
aggcaactcaggtgaaccttgtatggctgattt

SEQ ID NO: 877207 - DNA, 33 bp, Homo sapien
ccagcagaggcacacaagtgacggtgaaaatct

SEQ ID NO: 877208 - DNA, 33 bp, Homo sapien
ccagcagaggcacacaggtgacggtgaaaatct

SEQ ID NO: 877209 - DNA, 33 bp, Homo sapien
aatgagtgtgggcataacttcatattgttcatc

SEQ ID NO: 877210 - DNA, 33 bp, Homo sapien
aatgagtgtgggcataccttcatattgttcatc

SEQ ID NO: 877211 - DNA, 33 bp, Homo sapien
atcaaaaatgccactgaacatctataaaaaact

SEQ ID NO: 877212 - DNA, 33 bp, Homo sapien
atcaaaaatgccactggacatctataaaaaact

SEQ ID NO: 877213 - DNA, 33 bp, Homo sapien
actgaagtgttggtgactatcaacatatacagg

SEQ ID NO: 877214 - DNA, 33 bp, Homo sapien
actgaagtgttggtgattatcaacatatacagg

SEQ ID NO: 877215 - DNA, 33 bp, Homo sapien
tggttcctaaatatgaaaaaggtatacatatgt

SEQ ID NO: 877216 - DNA, 33 bp, Homo sapien
tggttcctaaatatgagaaaggtatacatatgt

SEQ ID NO: 877217 - DNA, 33 bp, Homo sapien
agcagtttagactgaaaagtagatttggctttt

SEQ ID NO: 877218 - DNA, 33 bp, Homo sapien
agcagtttagactgaatagtagatttggctttt

SEQ ID NO: 877219 - DNA, 33 bp, Homo sapien
atgataaggagtatcaacatgcttcagagtggg

SEQ ID NO: 877220 - DNA, 33 bp, Homo sapien
atgataaggagtatcagcatgcttcagagtggg

SEQ ID NO: 877221 - DNA, 33 bp, Homo sapien
acctgtggaaaaatgaacacgcactgaacccca

SEQ ID NO: 877222 - DNA, 33 bp, Homo sapien
acctgtggaaaaatgatcacgcactgaacccca

SEQ ID NO: 877223 - DNA, 33 bp, Homo sapien
ttattacagagatttcaaacgttaaaggtagat

SEQ ID NO: 877224 - DNA, 33 bp, Homo sapien
ttattacagagatttcgaacgttaaaggtagat

SEQ ID NO: 877225 - DNA, 33 bp, Homo sapien
gattataatctctctcccctttgtggacttccc

SEQ ID NO: 877226 - DNA, 33 bp, Homo sapien
gattataatctctctctcctttgtggacttccc

SEQ ID NO: 877227 - DNA, 33 bp, Homo sapien
ggcacagcagatagccaaatgtacacagaaaac

SEQ ID NO: 877228 - DNA, 33 bp, Homo sapien
ggcacagcagatagcccaatgtacacagaaaac

SEQ ID NO: 877229 - DNA, 33 bp, Homo sapien
aaggtagaggtaagaaagaaggtgggctccttt

SEQ ID NO: 877230 - DNA, 33 bp, Homo sapien
aaggtagaggtaagaacgaaggtgggctccttt

SEQ ID NO: 877231 - DNA, 33 bp, Homo sapien
caacaaaatttagcatcaactaggcaagcagtt

SEQ ID NO: 877232 - DNA, 33 bp, Homo sapien
caacaaaatttagcatgaactaggcaagcagtt

SEQ ID NO: 877233 - DNA, 33 bp, Homo sapien
tagatttgtataaaaaagagacaactatcagaa

SEQ ID NO: 877234 - DNA, 33 bp, Homo sapien
tagatttgtataaaaaggagacaactatcagaa

SEQ ID NO: 877235 - DNA, 33 bp, Homo sapien
tcctatgaatatataccggaacaaatgcaaaag

SEQ ID NO: 877236 - DNA, 33 bp, Homo sapien
tcctatgaatatatactggaacaaatgcaaaag

SEQ ID NO: 877237 - DNA, 33 bp, Homo sapien
aacataattgcttaaacgcagaatatttatagt

SEQ ID NO: 877238 - DNA, 33 bp, Homo sapien
aacataattgcttaaatgcagaatatttatagt

SEQ ID NO: 877239 - DNA, 33 bp, Homo sapien
agaatacattcgcatacgttatcttctgtaaga

SEQ ID NO: 877240 - DNA, 33 bp, Homo sapien
agaatacattcgcatatgttatcttctgtaaga

SEQ ID NO: 877241 - DNA, 33 bp, Homo sapien
aagtcatgatgcagtacgatcagattttgatga

SEQ ID NO: 877242 - DNA, 33 bp, Homo sapien
aagtcatgatgcagtaggatcagattttgatga

SEQ ID NO: 877243 - DNA, 33 bp, Homo sapien
tttgtctcatatagaagggttttcattaaactt

SEQ ID NO: 877244 - DNA, 33 bp, Homo sapien
tttgtctcatatagaatggttttcattaaactt

SEQ ID NO: 877245 - DNA, 33 bp, Homo sapien
tatgacatttatacatcaactgcagtgttattt

SEQ ID NO: 877246 - DNA, 33 bp, Homo sapien
tatgacatttatacatgaactgcagtgttattt

SEQ ID NO: 877247 - DNA, 33 bp, Homo sapien
atgtaagaaaggaataaacgtgtcactttcaag

SEQ ID NO: 877248 - DNA, 33 bp, Homo sapien
atgtaagaaaggaatagacgtgtcactttcaag

SEQ ID NO: 877249 - DNA, 33 bp, Homo sapien
tccccttctgaagggacgccttctttgacccct

SEQ ID NO: 877250 - DNA, 33 bp, Homo sapien
tccccttctgaagggatgccttctttgacccct

SEQ ID NO: 877251 - DNA, 33 bp, Homo sapien
cagatctgaaaatacacggaaaggtataagagc

SEQ ID NO: 877252 - DNA, 33 bp, Homo sapien
cagatctgaaaatacatggaaaggtataagagc

SEQ ID NO: 877253 - DNA, 33 bp, Homo sapien
atctctgccagcccaacatgtggccagaggatc

SEQ ID NO: 877254 - DNA, 33 bp, Homo sapien
atctctgccagcccaatatgtggccagaggatc

SEQ ID NO: 877255 - DNA, 33 bp, Homo sapien
caggaataatgtagagaatgaatgtcttctgat

SEQ ID NO: 877256 - DNA, 33 bp, Homo sapien
caggaataatgtagagtatgaatgtcttctgat

SEQ ID NO: 877257 - DNA, 33 bp, Homo sapien
ctcaagattgaacaaaagcttgtccaggcccag

SEQ ID NO: 877258 - DNA, 33 bp, Homo sapien
ctcaagattgaacaaaggcttgtccaggcccag

SEQ ID NO: 877259 - DNA, 33 bp, Homo sapien
ttatggttaatgaatcagagatggaactttcca

SEQ ID NO: 877260 - DNA, 33 bp, Homo sapien
ttatggttaatgaatcggagatggaactttcca

SEQ ID NO: 877261 - DNA, 33 bp, Homo sapien
ttgcttgaatgtttcacgtgagattgaaagaaa

SEQ ID NO: 877262 - DNA, 33 bp, Homo sapien
ttgcttgaatgtttcatgtgagattgaaagaaa

SEQ ID NO: 877263 - DNA, 33 bp, Homo sapien
tcactaacactctatacgctgcttccagtgctt

SEQ ID NO: 877264 - DNA, 33 bp, Homo sapien
tcactaacactctatatgctgcttccagtgctt

SEQ ID NO: 877265 - DNA, 33 bp, Homo sapien
tccttcttccagattacgtgactgtatggttcc

SEQ ID NO: 877266 - DNA, 33 bp, Homo sapien
tccttcttccagattatgtgactgtatggttcc

SEQ ID NO: 877267 - DNA, 33 bp, Homo sapien
gacctcctggagacaaccagcctggagacaatc

SEQ ID NO: 877268 - DNA, 33 bp, Homo sapien
gacctcctggagacaagcagcctggagacaatc

SEQ ID NO: 877269 - DNA, 33 bp, Homo sapien
cagaggagaaagttagccccaggaccagacgtc

SEQ ID NO: 877270 - DNA, 33 bp, Homo sapien
cagaggagaaagttagtcccaggaccagacgtc

SEQ ID NO: 877271 - DNA, 33 bp, Homo sapien
atggaacaggctgaccaatgatcatgccctgga

SEQ ID NO: 877272 - DNA, 33 bp, Homo sapien
atggaacaggctgaccgatgatcatgccctgga

SEQ ID NO: 877273 - DNA, 33 bp, Homo sapien
cggagaactgtcgaacgccatcctgataacttg

SEQ ID NO: 877274 - DNA, 33 bp, Homo sapien
cggagaactgtcgaactccatcctgataacttg

SEQ ID NO: 877275 - DNA, 33 bp, Homo sapien
attttcgcatttgtgaagaaaataatgagtctg

SEQ ID NO: 877276 - DNA, 33 bp, Homo sapien
attttcgcatttgtgatgaaaataatgagtctg

SEQ ID NO: 877277 - DNA, 33 bp, Homo sapien
aaggtcgacagaggacagacaaagactaggtca

SEQ ID NO: 877278 - DNA, 33 bp, Homo sapien
aaggtcgacagaggacggacaaagactaggtca

SEQ ID NO: 877279 - DNA, 33 bp, Homo sapien
atctccaccaaaaagaatctgctctagaggtat

SEQ ID NO: 877280 - DNA, 33 bp, Homo sapien
atctccaccaaaaagagtctgctctagaggtat

SEQ ID NO: 877281 - DNA, 33 bp, Homo sapien
ctgtagctacactttaataaactacactttggc

SEQ ID NO: 877282 - DNA, 33 bp, Homo sapien
ctgtagctacactttattaaactacactttggc

SEQ ID NO: 877283 - DNA, 33 bp, Homo sapien
ctttaatcaaaatctacgacaaaatatctatgc

SEQ ID NO: 877284 - DNA, 33 bp, Homo sapien
ctttaatcaaaatctatgacaaaatatctatgc

SEQ ID NO: 877285 - DNA, 33 bp, Homo sapien
ctccattttgcccacacaatcctcatttagagg

SEQ ID NO: 877286 - DNA, 33 bp, Homo sapien
ctccattttgcccacataatcctcatttagagg

SEQ ID NO: 877287 - DNA, 33 bp, Homo sapien
ctcccctgcactccagaatgtcagaattaattt

SEQ ID NO: 877288 - DNA, 33 bp, Homo sapien
ctcccctgcactccaggatgtcagaattaattt

SEQ ID NO: 877289 - DNA, 33 bp, Homo sapien
ctgaattaacagaataatagcatcattgcaacc

SEQ ID NO: 877290 - DNA, 33 bp, Homo sapien
ctgaattaacagaatactagcatcattgcaacc

SEQ ID NO: 877291 - DNA, 33 bp, Homo sapien
tgcttgacaagcttggccaaaacctaacttgag

SEQ ID NO: 877292 - DNA, 33 bp, Homo sapien
tgcttgacaagcttgggcaaaacctaacttgag

SEQ ID NO: 877293 - DNA, 33 bp, Homo sapien
cacaaaacagaactacaatcaccatttgaatgg

SEQ ID NO: 877294 - DNA, 33 bp, Homo sapien
cacaaaacagaactacgatcaccatttgaatgg

SEQ ID NO: 877295 - DNA, 33 bp, Homo sapien
atagtattgcttatcaatcttcctataatgata

SEQ ID NO: 877296 - DNA, 33 bp, Homo sapien
atagtattgcttatcactcttcctataatgata

SEQ ID NO: 877297 - DNA, 33 bp, Homo sapien
agataataagtaaacacgatttcaagtgaacag

SEQ ID NO: 877298 - DNA, 33 bp, Homo sapien
agataataagtaaacatgatttcaagtgaacag

SEQ ID NO: 877299 - DNA, 33 bp, Homo sapien
ccataaaaggtaggtaggccattttctcagtaa

SEQ ID NO: 877300 - DNA, 33 bp, Homo sapien
ccataaaaggtaggtatgccattttctcagtaa

SEQ ID NO: 877301 - DNA, 33 bp, Homo sapien
acaaagattatacatcacaggattagctctaat

SEQ ID NO: 877302 - DNA, 33 bp, Homo sapien
acaaagattatacatcgcaggattagctctaat

SEQ ID NO: 877303 - DNA, 33 bp, Homo sapien
cctctctttttgtagacgaaaacattaacatag

SEQ ID NO: 877304 - DNA, 33 bp, Homo sapien
cctctctttttgtagatgaaaacattaacatag

SEQ ID NO: 877305 - DNA, 33 bp, Homo sapien
aatgagaccttacgaaaaccacaaactcccaat

SEQ ID NO: 877306 - DNA, 33 bp, Homo sapien
aatgagaccttacgaacaccacaaactcccaat

SEQ ID NO: 877307 - DNA, 33 bp, Homo sapien
acttggaaaaatacaaagtagagagaccaggtg

SEQ ID NO: 877308 - DNA, 33 bp, Homo sapien
acttggaaaaatacaaggtagagagaccaggtg

SEQ ID NO: 877309 - DNA, 33 bp, Homo sapien
ctgaccacctgccataacctcttttccttagat

SEQ ID NO: 877310 - DNA, 33 bp, Homo sapien
ctgaccacctgccatatcctcttttccttagat

SEQ ID NO: 877311 - DNA, 33 bp, Homo sapien
tccccagaatagtagacagtcatagaataattc

SEQ ID NO: 877312 - DNA, 33 bp, Homo sapien
tccccagaatagtagagagtcatagaataattc

SEQ ID NO: 877313 - DNA, 33 bp, Homo sapien
tttaaaagtcccctgactaaaatggcttatttg

SEQ ID NO: 877314 - DNA, 33 bp, Homo sapien
tttaaaagtcccctgattaaaatggcttatttg

SEQ ID NO: 877315 - DNA, 33 bp, Homo sapien
tggcctaaattaatgacagaaaggatttgtgaa

SEQ ID NO: 877316 - DNA, 33 bp, Homo sapien
tggcctaaattaatgatagaaaggatttgtgaa

SEQ ID NO: 877317 - DNA, 33 bp, Homo sapien
aattaagttattcacaaacacatgggtgctcag

SEQ ID NO: 877318 - DNA, 33 bp, Homo sapien
aattaagttattcacagacacatgggtgctcag

SEQ ID NO: 877319 - DNA, 33 bp, Homo sapien
ataccagccactagaaatgtgtttggtcatggt

SEQ ID NO: 877320 - DNA, 33 bp, Homo sapien
ataccagccactagaactgtgtttggtcatggt

SEQ ID NO: 877321 - DNA, 33 bp, Homo sapien
tgtctggtataaataaatactgggctgagaggg

SEQ ID NO: 877322 - DNA, 33 bp, Homo sapien
tgtctggtataaataactactgggctgagaggg

SEQ ID NO: 877323 - DNA, 33 bp, Homo sapien
tttttctcatccaagaagatatgtggagtaagc

SEQ ID NO: 877324 - DNA, 33 bp, Homo sapien
tttttctcatccaagaggatatgtggagtaagc

SEQ ID NO: 877325 - DNA, 33 bp, Homo sapien
ccacagagaaaatgccagacaatgtaactgcta

SEQ ID NO: 877326 - DNA, 33 bp, Homo sapien
ccacagagaaaatgccggacaatgtaactgcta

SEQ ID NO: 877327 - DNA, 33 bp, Homo sapien
agaacctgttgccataccactgtgtagaaatag

SEQ ID NO: 877328 - DNA, 33 bp, Homo sapien
agaacctgttgccatatcactgtgtagaaatag

SEQ ID NO: 877329 - DNA, 33 bp, Homo sapien
agtacatcctgtagtacgacagtagagaggtta

SEQ ID NO: 877330 - DNA, 33 bp, Homo sapien
agtacatcctgtagtatgacagtagagaggtta

SEQ ID NO: 877331 - DNA, 33 bp, Homo sapien
aaatgaaagtttagaacgtgaatgagataagcc

SEQ ID NO: 877332 - DNA, 33 bp, Homo sapien
aaatgaaagtttagaaggtgaatgagataagcc

SEQ ID NO: 877333 - DNA, 33 bp, Homo sapien
gagagcattattaaaagggccaccatgatctcc

SEQ ID NO: 877334 - DNA, 33 bp, Homo sapien
gagagcattattaaaatggccaccatgatctcc

SEQ ID NO: 877335 - DNA, 33 bp, Homo sapien
tgttctagctttgaccactaagagctccttcag

SEQ ID NO: 877336 - DNA, 33 bp, Homo sapien
tgttctagctttgaccgctaagagctccttcag

SEQ ID NO: 877337 - DNA, 33 bp, Homo sapien
catctgtttcgattttaaaaatacacaggtgtc

SEQ ID NO: 877338 - DNA, 33 bp, Homo sapien
catctgtttcgatttttaaaatacacaggtgtc

SEQ ID NO: 877339 - DNA, 33 bp, Homo sapien
tgtttgacaaagtttaggagaggtcgcttacct

SEQ ID NO: 877340 - DNA, 33 bp, Homo sapien
tgtttgacaaagtttatgagaggtcgcttacct

SEQ ID NO: 877341 - DNA, 33 bp, Homo sapien
caaattgacagcatcactacacttgcactttgt

SEQ ID NO: 877342 - DNA, 33 bp, Homo sapien
caaattgacagcatcagtacacttgcactttgt

SEQ ID NO: 877343 - DNA, 33 bp, Homo sapien
tcaatttggatatgccaacaagatgctgtaaag

SEQ ID NO: 877344 - DNA, 33 bp, Homo sapien
tcaatttggatatgccgacaagatgctgtaaag

SEQ ID NO: 877345 - DNA, 33 bp, Homo sapien
tgtgggtgattattaccgggtagaattggttca

SEQ ID NO: 877346 - DNA, 33 bp, Homo sapien
tgtgggtgattattactgggtagaattggttca

SEQ ID NO: 877347 - DNA, 33 bp, Homo sapien
ataacctaaatcgtaaatggttcctaaaggcca

SEQ ID NO: 877348 - DNA, 33 bp, Homo sapien
ataacctaaatcgtaattggttcctaaaggcca

SEQ ID NO: 877349 - DNA, 33 bp, Homo sapien
ttcatccttgaggctcacattgcttgtatttca

SEQ ID NO: 877350 - DNA, 33 bp, Homo sapien
ttcatccttgaggctcgcattgcttgtatttca

SEQ ID NO: 877351 - DNA, 33 bp, Homo sapien
tttaactcatttctacagagggatactacggta

SEQ ID NO: 877352 - DNA, 33 bp, Homo sapien
tttaactcatttctacggagggatactacggta

SEQ ID NO: 877353 - DNA, 33 bp, Homo sapien
tgtccttatgaaaccacccatatttaactgaac

SEQ ID NO: 877354 - DNA, 33 bp, Homo sapien
tgtccttatgaaaccatccatatttaactgaac

SEQ ID NO: 877355 - DNA, 33 bp, Homo sapien
cgaccaaactttgaaaacactctctgagaacag

SEQ ID NO: 877356 - DNA, 33 bp, Homo sapien
cgaccaaactttgaaagcactctctgagaacag

SEQ ID NO: 877357 - DNA, 33 bp, Homo sapien
ttccttttgcctccaccagcttcaacactaaga

SEQ ID NO: 877358 - DNA, 33 bp, Homo sapien
ttccttttgcctccactagcttcaacactaaga

SEQ ID NO: 877359 - DNA, 33 bp, Homo sapien
aatcctgtagcaccacaaaatttagagctacac

SEQ ID NO: 877360 - DNA, 33 bp, Homo sapien
aatcctgtagcaccacgaaatttagagctacac

SEQ ID NO: 877361 - DNA, 33 bp, Homo sapien
tcattaaagatgtaggcattatgcaaaaatata

SEQ ID NO: 877362 - DNA, 33 bp, Homo sapien
tcattaaagatgtaggtattatgcaaaaatata

SEQ ID NO: 877363 - DNA, 33 bp, Homo sapien
ctttaagaatagtgagaagaactgaattggcaa

SEQ ID NO: 877364 - DNA, 33 bp, Homo sapien
ctttaagaatagtgaggagaactgaattggcaa

SEQ ID NO: 877365 - DNA, 33 bp, Homo sapien
caatttctcccataaggcataggaaatgagcac

SEQ ID NO: 877366 - DNA, 33 bp, Homo sapien
caatttctcccataagtcataggaaatgagcac

SEQ ID NO: 877367 - DNA, 33 bp, Homo sapien
gtttatttatgttgacaccacaatcttaaaatg

SEQ ID NO: 877368 - DNA, 33 bp, Homo sapien
gtttatttatgttgactccacaatcttaaaatg

SEQ ID NO: 877369 - DNA, 33 bp, Homo sapien
ccctttaagaaacatcaagggaaagtgatgagg

SEQ ID NO: 877370 - DNA, 33 bp, Homo sapien
ccctttaagaaacatcgagggaaagtgatgagg

SEQ ID NO: 877371 - DNA, 33 bp, Homo sapien
taggttaagccatatgaaatcgtaaaaataagt

SEQ ID NO: 877372 - DNA, 33 bp, Homo sapien
taggttaagccatatggaatcgtaaaaataagt

SEQ ID NO: 877373 - DNA, 33 bp, Homo sapien
attgaaaaaatggatccagctaaggtttgctaa

SEQ ID NO: 877374 - DNA, 33 bp, Homo sapien
attgaaaaaatggatctagctaaggtttgctaa

SEQ ID NO: 877375 - DNA, 33 bp, Homo sapien
gaaaacattcaaggaccctatagttgtgatctc

SEQ ID NO: 877376 - DNA, 33 bp, Homo sapien
gaaaacattcaaggactctatagttgtgatctc

SEQ ID NO: 877377 - DNA, 33 bp, Homo sapien
cagatggccactgggtcacagacaacaaactgt

SEQ ID NO: 877378 - DNA, 33 bp, Homo sapien
cagatggccactgggttacagacaacaaactgt

SEQ ID NO: 877379 - DNA, 33 bp, Homo sapien
tatggcaaagttttcaaaagagagtgtcctggt

SEQ ID NO: 877380 - DNA, 33 bp, Homo sapien
tatggcaaagttttcagaagagagtgtcctggt

SEQ ID NO: 877381 - DNA, 33 bp, Homo sapien
attcttagcaccataacaataatcaaagaagga

SEQ ID NO: 877382 - DNA, 33 bp, Homo sapien
attcttagcaccataataataatcaaagaagga

SEQ ID NO: 877383 - DNA, 33 bp, Homo sapien
cttcaagccaatctcaatctcatttccctgcct

SEQ ID NO: 877384 - DNA, 33 bp, Homo sapien
cttcaagccaatctcagtctcatttccctgcct

SEQ ID NO: 877385 - DNA, 33 bp, Homo sapien
ggagctgaaaaagcagcccatgaatacggaatc

SEQ ID NO: 877386 - DNA, 33 bp, Homo sapien
ggagctgaaaaagcaggccatgaatacggaatc

SEQ ID NO: 877387 - DNA, 33 bp, Homo sapien
gctctgatccaacataaacagggtcacacagcc

SEQ ID NO: 877388 - DNA, 33 bp, Homo sapien
gctctgatccaacatagacagggtcacacagcc

SEQ ID NO: 877389 - DNA, 33 bp, Homo sapien
tttctccatgaagcgcaatggatgaaataggtt

SEQ ID NO: 877390 - DNA, 33 bp, Homo sapien
tttctccatgaagcgcgatggatgaaataggtt

SEQ ID NO: 877391 - DNA, 33 bp, Homo sapien
agaaaatcaggatattggtggaactaggagttt

SEQ ID NO: 877392 - DNA, 33 bp, Homo sapien
agaaaatcaggatatttgtggaactaggagttt

SEQ ID NO: 877393 - DNA, 33 bp, Homo sapien
ataggtgaaccagtggcatttcccaactagaag

SEQ ID NO: 877394 - DNA, 33 bp, Homo sapien
ataggtgaaccagtggtatttcccaactagaag

SEQ ID NO: 877395 - DNA, 33 bp, Homo sapien
gaattaagagttattgccaaatgtactgctgct

SEQ ID NO: 877396 - DNA, 33 bp, Homo sapien
gaattaagagttattgtcaaatgtactgctgct

SEQ ID NO: 877397 - DNA, 33 bp, Homo sapien
aggctaaattagcagactagagaacccgtgcat

SEQ ID NO: 877398 - DNA, 33 bp, Homo sapien
aggctaaattagcagattagagaacccgtgcat

SEQ ID NO: 877399 - DNA, 33 bp, Homo sapien
atgaaggattggttaaataatagagtgcaatta

SEQ ID NO: 877400 - DNA, 33 bp, Homo sapien
atgaaggattggttaagtaatagagtgcaatta

SEQ ID NO: 877401 - DNA, 33 bp, Homo sapien
gagggaggtggaagaaaagagccatttgttgag

SEQ ID NO: 877402 - DNA, 33 bp, Homo sapien
gagggaggtggaagaagagagccatttgttgag

SEQ ID NO: 877403 - DNA, 33 bp, Homo sapien
acatcaagaccctgaccgataaaatgcccctta

SEQ ID NO: 877404 - DNA, 33 bp, Homo sapien
acatcaagaccctgactgataaaatgcccctta

SEQ ID NO: 877405 - DNA, 33 bp, Homo sapien
gtgagtatgacaaggcaagagggacagtgcttg

SEQ ID NO: 877406 - DNA, 33 bp, Homo sapien
gtgagtatgacaaggcgagagggacagtgcttg

SEQ ID NO: 877407 - DNA, 33 bp, Homo sapien
tttaacccaataacagccaggagtagcaggaac

SEQ ID NO: 877408 - DNA, 33 bp, Homo sapien
tttaacccaataacagtcaggagtagcaggaac

SEQ ID NO: 877409 - DNA, 33 bp, Homo sapien
ccctggtcttaaaagccattcttcctggattca

SEQ ID NO: 877410 - DNA, 33 bp, Homo sapien
ccctggtcttaaaagctattcttcctggattca

SEQ ID NO: 877411 - DNA, 33 bp, Homo sapien
tggcaaaggggaaagagatcatggatggttgta

SEQ ID NO: 877412 - DNA, 33 bp, Homo sapien
tggcaaaggggaaagatatcatggatggttgta

SEQ ID NO: 877413 - DNA, 33 bp, Homo sapien
aattttgaaacagcccagagttctcagactcag

SEQ ID NO: 877414 - DNA, 33 bp, Homo sapien
aattttgaaacagcccggagttctcagactcag

SEQ ID NO: 877415 - DNA, 33 bp, Homo sapien
tcttaaactcatgcagacatatggagtaaactt

SEQ ID NO: 877416 - DNA, 33 bp, Homo sapien
tcttaaactcatgcagccatatggagtaaactt

SEQ ID NO: 877417 - DNA, 33 bp, Homo sapien
atggtcacttccttgacggacctatcctgcctc

SEQ ID NO: 877418 - DNA, 33 bp, Homo sapien
atggtcacttccttgatggacctatcctgcctc

SEQ ID NO: 877419 - DNA, 33 bp, Homo sapien
gaagactcagccaaaaaactatcagaactgatt

SEQ ID NO: 877420 - DNA, 33 bp, Homo sapien
gaagactcagccaaaagactatcagaactgatt

SEQ ID NO: 877421 - DNA, 33 bp, Homo sapien
tcttcccaatattaaactgacccaaacagtttc

SEQ ID NO: 877422 - DNA, 33 bp, Homo sapien
tcttcccaatattaaattgacccaaacagtttc

SEQ ID NO: 877423 - DNA, 33 bp, Homo sapien
ttacatacacagacaacagccagtgctgtccac

SEQ ID NO: 877424 - DNA, 33 bp, Homo sapien
ttacatacacagacaagagccagtgctgtccac

SEQ ID NO: 877425 - DNA, 33 bp, Homo sapien
actttaagatgatatgaaaatgatacacattca

SEQ ID NO: 877426 - DNA, 33 bp, Homo sapien
actttaagatgatatggaaatgatacacattca

SEQ ID NO: 877427 - DNA, 33 bp, Homo sapien
tggtattttcaatgtacgatggatttatctaaa

SEQ ID NO: 877428 - DNA, 33 bp, Homo sapien
tggtattttcaatgtatgatggatttatctaaa

SEQ ID NO: 877429 - DNA, 33 bp, Homo sapien
agaagagacgcctacaaaatgagagaaaatatt

SEQ ID NO: 877430 - DNA, 33 bp, Homo sapien
agaagagacgcctacagaatgagagaaaatatt

SEQ ID NO: 877431 - DNA, 33 bp, Homo sapien
ccctcacagtctagacactgggatagttctacc

SEQ ID NO: 877432 - DNA, 33 bp, Homo sapien
ccctcacagtctagactctgggatagttctacc

SEQ ID NO: 877433 - DNA, 33 bp, Homo sapien
ctggctaaatgtcaagaaaaaacagcattaaca

SEQ ID NO: 877434 - DNA, 33 bp, Homo sapien
ctggctaaatgtcaaggaaaaacagcattaaca

SEQ ID NO: 877435 - DNA, 33 bp, Homo sapien
ctgtaagctgagacccaaaggataaaaagagat

SEQ ID NO: 877436 - DNA, 33 bp, Homo sapien
ctgtaagctgagacccgaaggataaaaagagat

SEQ ID NO: 877437 - DNA, 33 bp, Homo sapien
gcatcaagggcctgaaagaacttctaatgtatt

SEQ ID NO: 877438 - DNA, 33 bp, Homo sapien
gcatcaagggcctgaatgaacttctaatgtatt

SEQ ID NO: 877439 - DNA, 33 bp, Homo sapien
cttcagaaggcctgcacgttttaaaatttttgg

SEQ ID NO: 877440 - DNA, 33 bp, Homo sapien
cttcagaaggcctgcatgttttaaaatttttgg

SEQ ID NO: 877441 - DNA, 33 bp, Homo sapien
tgaaactggttttaacactaagtaggatatagg

SEQ ID NO: 877442 - DNA, 33 bp, Homo sapien
tgaaactggttttaacgctaagtaggatatagg

SEQ ID NO: 877443 - DNA, 33 bp, Homo sapien
agccctagaccatctccaaagtgcccagaggaa

SEQ ID NO: 877444 - DNA, 33 bp, Homo sapien
agccctagaccatctctaaagtgcccagaggaa

SEQ ID NO: 877445 - DNA, 33 bp, Homo sapien
ggaaagggcctagcaacggacaggttttaaaca

SEQ ID NO: 877446 - DNA, 33 bp, Homo sapien
ggaaagggcctagcaatggacaggttttaaaca

SEQ ID NO: 877447 - DNA, 33 bp, Homo sapien
tgctttgataactaaacaaaatggttctatctg

SEQ ID NO: 877448 - DNA, 33 bp, Homo sapien
tgctttgataactaaataaaatggttctatctg

SEQ ID NO: 877449 - DNA, 33 bp, Homo sapien
caagactcagtaaaacaatcaaaaagagatagt

SEQ ID NO: 877450 - DNA, 33 bp, Homo sapien
caagactcagtaaaacgatcaaaaagagatagt

SEQ ID NO: 877451 - DNA, 33 bp, Homo sapien
ctgatgcagatttcccgaaagcagtgggcgcta

SEQ ID NO: 877452 - DNA, 33 bp, Homo sapien
ctgatgcagatttccctaaagcagtgggcgcta

SEQ ID NO: 877453 - DNA, 33 bp, Homo sapien
tggggtaagacccgccccctgattcagttacct

SEQ ID NO: 877454 - DNA, 33 bp, Homo sapien
tggggtaagacccgccgcctgattcagttacct

SEQ ID NO: 877455 - DNA, 33 bp, Homo sapien
tttttcttgcttggtagaaatgcgtggttgagg

SEQ ID NO: 877456 - DNA, 33 bp, Homo sapien
tttttcttgcttggtataaatgcgtggttgagg

SEQ ID NO: 877457 - DNA, 33 bp, Homo sapien
cgagcaaccagacagaatcgcaggagagccagg

SEQ ID NO: 877458 - DNA, 33 bp, Homo sapien
cgagcaaccagacagagtcgcaggagagccagg

SEQ ID NO: 877459 - DNA, 33 bp, Homo sapien
ttaaattattgagctccctgttttttcctttct

SEQ ID NO: 877460 - DNA, 33 bp, Homo sapien
ttaaattattgagctctctgttttttcctttct

SEQ ID NO: 877461 - DNA, 33 bp, Homo sapien
ctgttgacatagcaaacaaaagcatcaagtgga

SEQ ID NO: 877462 - DNA, 33 bp, Homo sapien
ctgttgacatagcaaataaaagcatcaagtgga

SEQ ID NO: 877463 - DNA, 33 bp, Homo sapien
ctttatttgcatcatcgcattttaaattgtttc

SEQ ID NO: 877464 - DNA, 33 bp, Homo sapien
ctttatttgcatcatctcattttaaattgtttc

SEQ ID NO: 877465 - DNA, 33 bp, Homo sapien
ggcatttttgcttttacatggagcattcatgac

SEQ ID NO: 877466 - DNA, 33 bp, Homo sapien
ggcatttttgcttttagatggagcattcatgac

SEQ ID NO: 877467 - DNA, 33 bp, Homo sapien
aagatgagtatttaaccgagctgaaggataaat

SEQ ID NO: 877468 - DNA, 33 bp, Homo sapien
aagatgagtatttaactgagctgaaggataaat

SEQ ID NO: 877469 - DNA, 33 bp, Homo sapien
ctatagtgatacaagacaatttactaggggaaa

SEQ ID NO: 877470 - DNA, 33 bp, Homo sapien
ctatagtgatacaagagaatttactaggggaaa

SEQ ID NO: 877471 - DNA, 33 bp, Homo sapien
tctagacgtaagaataacttgacttcatgttag

SEQ ID NO: 877472 - DNA, 33 bp, Homo sapien
tctagacgtaagaataccttgacttcatgttag

SEQ ID NO: 877473 - DNA, 33 bp, Homo sapien
atgatttcctcatttacagtgctgcttaaatca

SEQ ID NO: 877474 - DNA, 33 bp, Homo sapien
atgatttcctcatttatagtgctgcttaaatca

SEQ ID NO: 877475 - DNA, 33 bp, Homo sapien
aaagttatgtgattcaaaacatcgacaatgaaa

SEQ ID NO: 877476 - DNA, 33 bp, Homo sapien
aaagttatgtgattcagaacatcgacaatgaaa

SEQ ID NO: 877477 - DNA, 33 bp, Homo sapien
aaaaagcttatacagacatttttgggcagaagg

SEQ ID NO: 877478 - DNA, 33 bp, Homo sapien
aaaaagcttatacagatatttttgggcagaagg

SEQ ID NO: 877479 - DNA, 33 bp, Homo sapien
taaccagccacgttcaggagaagtaacagagtt

SEQ ID NO: 877480 - DNA, 33 bp, Homo sapien
taaccagccacgttcatgagaagtaacagagtt

SEQ ID NO: 877481 - DNA, 33 bp, Homo sapien
gatattttgtgggaaaatggaataggagctttc

SEQ ID NO: 877482 - DNA, 33 bp, Homo sapien
gatattttgtgggaaattggaataggagctttc

SEQ ID NO: 877483 - DNA, 33 bp, Homo sapien
gttgtgagcagagagaatcctgaagagagctga

SEQ ID NO: 877484 - DNA, 33 bp, Homo sapien
gttgtgagcagagagagtcctgaagagagctga

SEQ ID NO: 877485 - DNA, 33 bp, Homo sapien
tgatcacaactttttaaatcaatatatccacgt

SEQ ID NO: 877486 - DNA, 33 bp, Homo sapien
tgatcacaactttttacatcaatatatccacgt

SEQ ID NO: 877487 - DNA, 33 bp, Homo sapien
cccagtatctgccacaagattcctactgcaggc

SEQ ID NO: 877488 - DNA, 33 bp, Homo sapien
cccagtatctgccacaggattcctactgcaggc

SEQ ID NO: 877489 - DNA, 33 bp, Homo sapien
cctgcaccgtctcataagtttttgttttccgtt

SEQ ID NO: 877490 - DNA, 33 bp, Homo sapien
cctgcaccgtctcatacgtttttgttttccgtt

SEQ ID NO: 877491 - DNA, 33 bp, Homo sapien
tttcttgttgctccttaaagaaattattttggg

SEQ ID NO: 877492 - DNA, 33 bp, Homo sapien
tttcttgttgctccttgaagaaattattttggg

SEQ ID NO: 877493 - DNA, 33 bp, Homo sapien
acacaacctttagtgacctttggagctctgaaa

SEQ ID NO: 877494 - DNA, 33 bp, Homo sapien
acacaacctttagtgatctttggagctctgaaa

SEQ ID NO: 877495 - DNA, 33 bp, Homo sapien
tatatgcatctgtccaacagcaagtgaagacag

SEQ ID NO: 877496 - DNA, 33 bp, Homo sapien
tatatgcatctgtccatcagcaagtgaagacag

SEQ ID NO: 877497 - DNA, 33 bp, Homo sapien
gcctgaccttacacgaaaaataaactctcaatt

SEQ ID NO: 877498 - DNA, 33 bp, Homo sapien
gcctgaccttacacgacaaataaactctcaatt

SEQ ID NO: 877499 - DNA, 33 bp, Homo sapien
cagaaaggctttgcaccgaaacatgaccactca

SEQ ID NO: 877500 - DNA, 33 bp, Homo sapien
cagaaaggctttgcactgaaacatgaccactca

SEQ ID NO: 877501 - DNA, 33 bp, Homo sapien
aggtcctgcactagtacgtttgaagcgataaga

SEQ ID NO: 877502 - DNA, 33 bp, Homo sapien
aggtcctgcactagtatgtttgaagcgataaga

SEQ ID NO: 877503 - DNA, 33 bp, Homo sapien
ttgtacatgacttactaagaaaaacatagcttc

SEQ ID NO: 877504 - DNA, 33 bp, Homo sapien
ttgtacatgacttacttagaaaaacatagcttc

SEQ ID NO: 877505 - DNA, 33 bp, Homo sapien
caagtcatagataaaaatagaacaaaaagagct

SEQ ID NO: 877506 - DNA, 33 bp, Homo sapien
caagtcatagataaaagtagaacaaaaagagct

SEQ ID NO: 877507 - DNA, 33 bp, Homo sapien
gcttataccttgatccagaacttaaattttctt

SEQ ID NO: 877508 - DNA, 33 bp, Homo sapien
gcttataccttgatccggaacttaaattttctt

SEQ ID NO: 877509 - DNA, 33 bp, Homo sapien
tgtaaatttcttcctactaatgttgcaataaca

SEQ ID NO: 877510 - DNA, 33 bp, Homo sapien
tgtaaatttcttcctattaatgttgcaataaca

SEQ ID NO: 877511 - DNA, 33 bp, Homo sapien
ctagacttgtggattaagaagggcatctgtatt

SEQ ID NO: 877512 - DNA, 33 bp, Homo sapien
ctagacttgtggattaggaagggcatctgtatt

SEQ ID NO: 877513 - DNA, 33 bp, Homo sapien
tgagaacaacactcaaaggagggaagcatgatg

SEQ ID NO: 877514 - DNA, 33 bp, Homo sapien
tgagaacaacactcaagggagggaagcatgatg

SEQ ID NO: 877515 - DNA, 33 bp, Homo sapien
tgtttgtagacagaaaagcatcacttcattaag

SEQ ID NO: 877516 - DNA, 33 bp, Homo sapien
tgtttgtagacagaaaggcatcacttcattaag

SEQ ID NO: 877517 - DNA, 33 bp, Homo sapien
aagagagagtgtgagaccaagtcaaaaatggag

SEQ ID NO: 877518 - DNA, 33 bp, Homo sapien
aagagagagtgtgagatcaagtcaaaaatggag

SEQ ID NO: 877519 - DNA, 33 bp, Homo sapien
cttgttgaagggcatacgcgtttgttttcctga

SEQ ID NO: 877520 - DNA, 33 bp, Homo sapien
cttgttgaagggcatatgcgtttgttttcctga

SEQ ID NO: 877521 - DNA, 33 bp, Homo sapien
ctgtcttgcgggcatccaagaccatgcttctgt

SEQ ID NO: 877522 - DNA, 33 bp, Homo sapien
ctgtcttgcgggcatcgaagaccatgcttctgt

SEQ ID NO: 877523 - DNA, 33 bp, Homo sapien
gcatttctaagagtaaatgattattgcatattc

SEQ ID NO: 877524 - DNA, 33 bp, Homo sapien
gcatttctaagagtaagtgattattgcatattc

SEQ ID NO: 877525 - DNA, 33 bp, Homo sapien
tctttttagagacttacacccatcatgcccatt

SEQ ID NO: 877526 - DNA, 33 bp, Homo sapien
tctttttagagacttatacccatcatgcccatt

SEQ ID NO: 877527 - DNA, 33 bp, Homo sapien
aagtgttaagctaggacaggaagatataaacaa

SEQ ID NO: 877528 - DNA, 33 bp, Homo sapien
aagtgttaagctaggataggaagatataaacaa

SEQ ID NO: 877529 - DNA, 33 bp, Homo sapien
atcctgagtgcaacctgaactacaaagccgaac

SEQ ID NO: 877530 - DNA, 33 bp, Homo sapien
atcctgagtgcaaccttaactacaaagccgaac

SEQ ID NO: 877531 - DNA, 33 bp, Homo sapien
tcacatccttctcacacgaaaaatacacttacc

SEQ ID NO: 877532 - DNA, 33 bp, Homo sapien
tcacatccttctcacaggaaaaatacacttacc

SEQ ID NO: 877533 - DNA, 33 bp, Homo sapien
atgctcagtagctgtacatgcttgctttgtttt

SEQ ID NO: 877534 - DNA, 33 bp, Homo sapien
atgctcagtagctgtatatgcttgctttgtttt

SEQ ID NO: 877535 - DNA, 33 bp, Homo sapien
gtcagggaagtaaccacgtctttgggattcagc

SEQ ID NO: 877536 - DNA, 33 bp, Homo sapien
gtcagggaagtaaccatgtctttgggattcagc

SEQ ID NO: 877537 - DNA, 33 bp, Homo sapien
tttagaaaggtgacaacacatttaatagactcc

SEQ ID NO: 877538 - DNA, 33 bp, Homo sapien
tttagaaaggtgacaatacatttaatagactcc

SEQ ID NO: 877539 - DNA, 33 bp, Homo sapien
ctggtgttttgctacccatgtgccactaagatg

SEQ ID NO: 877540 - DNA, 33 bp, Homo sapien
ctggtgttttgctacctatgtgccactaagatg

SEQ ID NO: 877541 - DNA, 33 bp, Homo sapien
gagccctaggattgtacaacttgaaactgaaag

SEQ ID NO: 877542 - DNA, 33 bp, Homo sapien
gagccctaggattgtagaacttgaaactgaaag

SEQ ID NO: 877543 - DNA, 33 bp, Homo sapien
aaaagagtaggcgctacggtcaaagttatcctt

SEQ ID NO: 877544 - DNA, 33 bp, Homo sapien
aaaagagtaggcgctatggtcaaagttatcctt

SEQ ID NO: 877545 - DNA, 33 bp, Homo sapien
ccaatagatgtatacaactcatttttcaaatca

SEQ ID NO: 877546 - DNA, 33 bp, Homo sapien
ccaatagatgtatacacctcatttttcaaatca

SEQ ID NO: 877547 - DNA, 33 bp, Homo sapien
caacaattatctggccaaaaatgtgctgaggtt

SEQ ID NO: 877548 - DNA, 33 bp, Homo sapien
caacaattatctggcccaaaatgtgctgaggtt

SEQ ID NO: 877549 - DNA, 33 bp, Homo sapien
ttaactgataatggtactaacttttaagaggga

SEQ ID NO: 877550 - DNA, 33 bp, Homo sapien
ttaactgataatggtattaacttttaagaggga

SEQ ID NO: 877551 - DNA, 33 bp, Homo sapien
ttaggcaaagggactaaatcgaaatctccagta

SEQ ID NO: 877552 - DNA, 33 bp, Homo sapien
ttaggcaaagggactatatcgaaatctccagta

SEQ ID NO: 877553 - DNA, 33 bp, Homo sapien
aatggaaagaagccccggcaattatatgcaaaa

SEQ ID NO: 877554 - DNA, 33 bp, Homo sapien
aatggaaagaagcccctgcaattatatgcaaaa

SEQ ID NO: 877555 - DNA, 33 bp, Homo sapien
ctcacaatgaagtaatcatcatgggttctttat

SEQ ID NO: 877556 - DNA, 33 bp, Homo sapien
ctcacaatgaagtaattatcatgggttctttat

SEQ ID NO: 877557 - DNA, 33 bp, Homo sapien
cttgcagttatcccacagagtatcaggtaagga

SEQ ID NO: 877558 - DNA, 33 bp, Homo sapien
cttgcagttatcccacggagtatcaggtaagga

SEQ ID NO: 877559 - DNA, 33 bp, Homo sapien
aatacacagtatttgaagagcaggcagagaaga

SEQ ID NO: 877560 - DNA, 33 bp, Homo sapien
aatacacagtatttgaggagcaggcagagaaga

SEQ ID NO: 877561 - DNA, 33 bp, Homo sapien
tcacccttatctccaaattctgggtgttgtcgc

SEQ ID NO: 877562 - DNA, 33 bp, Homo sapien
tcacccttatctccaagttctgggtgttgtcgc

SEQ ID NO: 877563 - DNA, 33 bp, Homo sapien
tttgatactaaagttacgaaatgcagaagtcaa

SEQ ID NO: 877564 - DNA, 33 bp, Homo sapien
tttgatactaaagttatgaaatgcagaagtcaa

SEQ ID NO: 877565 - DNA, 33 bp, Homo sapien
tacagatgtctttgctaacttggttttatggtt

SEQ ID NO: 877566 - DNA, 33 bp, Homo sapien
tacagatgtctttgcttacttggttttatggtt

SEQ ID NO: 877567 - DNA, 33 bp, Homo sapien
tctttgagaggagaaacaggaataggaatgcag

SEQ ID NO: 877568 - DNA, 33 bp, Homo sapien
tctttgagaggagaaataggaataggaatgcag

SEQ ID NO: 877569 - DNA, 33 bp, Homo sapien
aagtgaactaccacacaagtcagctagagataa

SEQ ID NO: 877570 - DNA, 33 bp, Homo sapien
aagtgaactaccacacgagtcagctagagataa

SEQ ID NO: 877571 - DNA, 33 bp, Homo sapien
gtgaggtcatgggagacactaagaagcagggta

SEQ ID NO: 877572 - DNA, 33 bp, Homo sapien
gtgaggtcatgggagatactaagaagcagggta

SEQ ID NO: 877573 - DNA, 33 bp, Homo sapien
cttactcaaaataagaagcaatggaaatgatga

SEQ ID NO: 877574 - DNA, 33 bp, Homo sapien
cttactcaaaataagaggcaatggaaatgatga

SEQ ID NO: 877575 - DNA, 33 bp, Homo sapien
tttctagtgcctgttacgtgctgggcaccattc

SEQ ID NO: 877576 - DNA, 33 bp, Homo sapien
tttctagtgcctgttatgtgctgggcaccattc

SEQ ID NO: 877577 - DNA, 33 bp, Homo sapien
ttgtgttacacctgatcaaattaagtattaacc

SEQ ID NO: 877578 - DNA, 33 bp, Homo sapien
ttgtgttacacctgattaaattaagtattaacc

SEQ ID NO: 877579 - DNA, 33 bp, Homo sapien
ttttgatatgacaaaacgttgtatcattgtggc

SEQ ID NO: 877580 - DNA, 33 bp, Homo sapien
ttttgatatgacaaaatgttgtatcattgtggc

SEQ ID NO: 877581 - DNA, 33 bp, Homo sapien
cttatttcatatttgccaatttttgttttataa

SEQ ID NO: 877582 - DNA, 33 bp, Homo sapien
cttatttcatatttgcgaatttttgttttataa

SEQ ID NO: 877583 - DNA, 33 bp, Homo sapien
aaaactgtcataaaaacgtagactatagcttca

SEQ ID NO: 877584 - DNA, 33 bp, Homo sapien
aaaactgtcataaaaatgtagactatagcttca

SEQ ID NO: 877585 - DNA, 33 bp, Homo sapien
caaagtgatttctcaaggtatattcctaccatt

SEQ ID NO: 877586 - DNA, 33 bp, Homo sapien
caaagtgatttctcaatgtatattcctaccatt

SEQ ID NO: 877587 - DNA, 33 bp, Homo sapien
acaagggaagaatgaccacaaaaaaatgattca

SEQ ID NO: 877588 - DNA, 33 bp, Homo sapien
acaagggaagaatgactacaaaaaaatgattca

SEQ ID NO: 877589 - DNA, 33 bp, Homo sapien
ctgtagcactaaaacactgaaccacactaactt

SEQ ID NO: 877590 - DNA, 33 bp, Homo sapien
ctgtagcactaaaacattgaaccacactaactt

SEQ ID NO: 877591 - DNA, 33 bp, Homo sapien
ataggtcacgtgcccccgagtctactatctctg

SEQ ID NO: 877592 - DNA, 33 bp, Homo sapien
ataggtcacgtgcccctgagtctactatctctg

SEQ ID NO: 877593 - DNA, 33 bp, Homo sapien
agctaacatcacaacaaccaagtcctatctgca

SEQ ID NO: 877594 - DNA, 33 bp, Homo sapien
agctaacatcacaacacccaagtcctatctgca

SEQ ID NO: 877595 - DNA, 33 bp, Homo sapien
tcatcgagatggaaagaaagacactgcctttgg

SEQ ID NO: 877596 - DNA, 33 bp, Homo sapien
tcatcgagatggaaagcaagacactgcctttgg

SEQ ID NO: 877597 - DNA, 33 bp, Homo sapien
ttcagaataaagaatacagccaaaaagaggaca

SEQ ID NO: 877598 - DNA, 33 bp, Homo sapien
ttcagaataaagaatatagccaaaaagaggaca

SEQ ID NO: 877599 - DNA, 33 bp, Homo sapien
gcataaatttgaattacagctcttcgagggact

SEQ ID NO: 877600 - DNA, 33 bp, Homo sapien
gcataaatttgaattatagctcttcgagggact

SEQ ID NO: 877601 - DNA, 33 bp, Homo sapien
gacatccaactgggcaaatgttgaaagttcttc

SEQ ID NO: 877602 - DNA, 33 bp, Homo sapien
gacatccaactgggcagatgttgaaagttcttc

SEQ ID NO: 877603 - DNA, 33 bp, Homo sapien
cttctggcttagaacaactcacaaagctgtaat

SEQ ID NO: 877604 - DNA, 33 bp, Homo sapien
cttctggcttagaacatctcacaaagctgtaat

SEQ ID NO: 877605 - DNA, 33 bp, Homo sapien
cttatttgcccaagtgcagatgcttttggtgac

SEQ ID NO: 877606 - DNA, 33 bp, Homo sapien
cttatttgcccaagtggagatgcttttggtgac

SEQ ID NO: 877607 - DNA, 33 bp, Homo sapien
accacatccatgtacactcaagtgcccagttgg

SEQ ID NO: 877608 - DNA, 33 bp, Homo sapien
accacatccatgtacattcaagtgcccagttgg

SEQ ID NO: 877609 - DNA, 33 bp, Homo sapien
cagtcttctattaaggaaaatgataagccttat

SEQ ID NO: 877610 - DNA, 33 bp, Homo sapien
cagtcttctattaagggaaatgataagccttat

SEQ ID NO: 877611 - DNA, 33 bp, Homo sapien
ttgatcaacagtgaaaccagttgccttacaaaa

SEQ ID NO: 877612 - DNA, 33 bp, Homo sapien
ttgatcaacagtgaaagcagttgccttacaaaa

SEQ ID NO: 877613 - DNA, 33 bp, Homo sapien
agttcttttaaacaaccagtccacattcaaaga

SEQ ID NO: 877614 - DNA, 33 bp, Homo sapien
agttcttttaaacaacgagtccacattcaaaga

SEQ ID NO: 877615 - DNA, 33 bp, Homo sapien
cctcggttttatggcacattacagtgtcttcat

SEQ ID NO: 877616 - DNA, 33 bp, Homo sapien
cctcggttttatggcatattacagtgtcttcat

SEQ ID NO: 877617 - DNA, 33 bp, Homo sapien
atccatcaatctcacactgaaagtcttggctac

SEQ ID NO: 877618 - DNA, 33 bp, Homo sapien
atccatcaatctcacattgaaagtcttggctac

SEQ ID NO: 877619 - DNA, 33 bp, Homo sapien
agacaaggcctgaggagcatcctggttttgtaa

SEQ ID NO: 877620 - DNA, 33 bp, Homo sapien
agacaaggcctgaggatcatcctggttttgtaa

SEQ ID NO: 877621 - DNA, 33 bp, Homo sapien
gaatacctgagactgaataatcgggtttattta

SEQ ID NO: 877622 - DNA, 33 bp, Homo sapien
gaatacctgagactgagtaatcgggtttattta

SEQ ID NO: 877623 - DNA, 33 bp, Homo sapien
aattcttggtaggaggaaaacattctctgatca

SEQ ID NO: 877624 - DNA, 33 bp, Homo sapien
aattcttggtaggagggaaacattctctgatca

SEQ ID NO: 877625 - DNA, 33 bp, Homo sapien
gtaatccagttccttcaaagtgtctgcagagtc

SEQ ID NO: 877626 - DNA, 33 bp, Homo sapien
gtaatccagttccttccaagtgtctgcagagtc

SEQ ID NO: 877627 - DNA, 33 bp, Homo sapien
ggccgcttggctctccgcttatgccctgtgtat

SEQ ID NO: 877628 - DNA, 33 bp, Homo sapien
ggccgcttggctctcctcttatgccctgtgtat

SEQ ID NO: 877629 - DNA, 33 bp, Homo sapien; identical to SEQ ID NO: 877627

SEQ ID NO: 877630 - DNA, 33 bp, Homo sapien; identical to SEQ ID NO: 877628

SEQ ID NO: 877631 - DNA, 33 bp, Homo sapien
agggcagtatgagtggcaatcaccaaggaggag

SEQ ID NO: 877632 - DNA, 33 bp, Homo sapien
agggcagtatgagtggtaatcaccaaggaggag

SEQ ID NO: 877633 - DNA, 33 bp, Homo sapien
tttgttgaacgtcgccactttattttaaccatg

SEQ ID NO: 877634 - DNA, 33 bp, Homo sapien
tttgttgaacgtcgccgctttattttaaccatg

SEQ ID NO: 877635 - DNA, 33 bp, Homo sapien
tgtgtgtgtcttacaaagttttatggactagat

SEQ ID NO: 877636 - DNA, 33 bp, Homo sapien
tgtgtgtgtcttacaacgttttatggactagat

SEQ ID NO: 877637 - DNA, 33 bp, Homo sapien
acgtttgagagagaccagagtggatgctggtag

SEQ ID NO: 877638 - DNA, 33 bp, Homo sapien
acgtttgagagagacccgagtggatgctggtag

SEQ ID NO: 877639 - DNA, 33 bp, Homo sapien
agttttaaatgggcccaacgtgaactggactaa

SEQ ID NO: 877640 - DNA, 33 bp, Homo sapien
agttttaaatgggccccacgtgaactggactaa

SEQ ID NO: 877641 - DNA, 33 bp, Homo sapien
cagctccccaaatgccaccatcttccatggagc

SEQ ID NO: 877642 - DNA, 33 bp, Homo sapien
cagctccccaaatgccgccatcttccatggagc

SEQ ID NO: 877643 - DNA, 33 bp, Homo sapien
gaatatcgaggatgagaaagaagaaggaaacag

SEQ ID NO: 877644 - DNA, 33 bp, Homo sapien
gaatatcgaggatgaggaagaagaaggaaacag

SEQ ID NO: 877645 - DNA, 33 bp, Homo sapien
tttagtagaagacacaatgacatctgcagatca

SEQ ID NO: 877646 - DNA, 33 bp, Homo sapien
tttagtagaagacacattgacatctgcagatca

SEQ ID NO: 877647 - DNA, 33 bp, Homo sapien
agcagttcagacatacacgctgaatctttgaat

SEQ ID NO: 877648 - DNA, 33 bp, Homo sapien
agcagttcagacatacccgctgaatctttgaat

SEQ ID NO: 877649 - DNA, 33 bp, Homo sapien
tccagagatgttgtctgaagcagaatgttcctg

SEQ ID NO: 877650 - DNA, 33 bp, Homo sapien
tccagagatgttgtcttaagcagaatgttcctg

SEQ ID NO: 877651 - DNA, 33 bp, Homo sapien
ggattacaagtcttacgcaagttcttgaaacta

SEQ ID NO: 877652 - DNA, 33 bp, Homo sapien
ggattacaagtcttactcaagttcttgaaacta

SEQ ID NO: 877653 - DNA, 33 bp, Homo sapien
gaatcaggctgagaaaaagttcgataggaataa

SEQ ID NO: 877654 - DNA, 33 bp, Homo sapien
gaatcaggctgagaaagagttcgataggaataa

SEQ ID NO: 877655 - DNA, 33 bp, Homo sapien
cagatctgttgacgaacgcttcatctctgtatg

SEQ ID NO: 877656 - DNA, 33 bp, Homo sapien
cagatctgttgacgaatgcttcatctctgtatg

SEQ ID NO: 877657 - DNA, 33 bp, Homo sapien
agtttaaaacccatacagtagcatgagaactcc

SEQ ID NO: 877658 - DNA, 33 bp, Homo sapien
agtttaaaacccatacggtagcatgagaactcc

SEQ ID NO: 877659 - DNA, 33 bp, Homo sapien
ctaggtttgctctaacaacaattgactacaact

SEQ ID NO: 877660 - DNA, 33 bp, Homo sapien
ctaggtttgctctaacgacaattgactacaact

SEQ ID NO: 877661 - DNA, 33 bp, Homo sapien
tgttaggacaaagtaagctgaacattcctcaac

SEQ ID NO: 877662 - DNA, 33 bp, Homo sapien
tgttaggacaaagtaatctgaacattcctcaac

SEQ ID NO: 877663 - DNA, 33 bp, Homo sapien
ctaattcttaagactgcaaatcaacccacacct

SEQ ID NO: 877664 - DNA, 33 bp, Homo sapien
ctaattcttaagactggaaatcaacccacacct

SEQ ID NO: 877665 - DNA, 33 bp, Homo sapien
taactattaataactgaaatctctgttgggttg

SEQ ID NO: 877666 - DNA, 33 bp, Homo sapien
taactattaataactggaatctctgttgggttg

SEQ ID NO: 877667 - DNA, 33 bp, Homo sapien
ggaagtctgaagtgaaggtgttggcagggccat

SEQ ID NO: 877668 - DNA, 33 bp, Homo sapien
ggaagtctgaagtgaatgtgttggcagggccat

SEQ ID NO: 877669 - DNA, 33 bp, Homo sapien
gatggagtgcaataacccaatcccttctcactg

SEQ ID NO: 877670 - DNA, 33 bp, Homo sapien
gatggagtgcaataacgcaatcccttctcactg

SEQ ID NO: 877671 - DNA, 33 bp, Homo sapien
tcagggaggttttaagccctgttgaggaccaag

SEQ ID NO: 877672 - DNA, 33 bp, Homo sapien
tcagggaggttttaaggcctgttgaggaccaag

SEQ ID NO: 877673 - DNA, 33 bp, Homo sapien
ctcatacaggatcttccaagttgtcccatttgg

SEQ ID NO: 877674 - DNA, 33 bp, Homo sapien
ctcatacaggatcttctaagttgtcccatttgg

SEQ ID NO: 877675 - DNA, 33 bp, Homo sapien
aaggaaggctgggagcacttgtaagttaatgat

SEQ ID NO: 877676 - DNA, 33 bp, Homo sapien
aaggaaggctgggagcgcttgtaagttaatgat

SEQ ID NO: 877677 - DNA, 33 bp, Homo sapien
tttgtgagttttctaaagctatcccattatatc

SEQ ID NO: 877678 - DNA, 33 bp, Homo sapien
tttgtgagttttctaaggctatcccattatatc

SEQ ID NO: 877679 - DNA, 33 bp, Homo sapien
acacaattccgtgcataacaaggtgtatatgga

SEQ ID NO: 877680 - DNA, 33 bp, Homo sapien
acacaattccgtgcatgacaaggtgtatatgga

SEQ ID NO: 877681 - DNA, 33 bp, Homo sapien
gggctgtatcgtattaaaatgctggggggacct

SEQ ID NO: 877682 - DNA, 33 bp, Homo sapien
gggctgtatcgtattacaatgctggggggacct

SEQ ID NO: 877683 - DNA, 33 bp, Homo sapien
taatcaccaaacgcaactgaatgtgaaaacata

SEQ ID NO: 877684 - DNA, 33 bp, Homo sapien
taatcaccaaacgcaagtgaatgtgaaaacata

SEQ ID NO: 877685 - DNA, 33 bp, Homo sapien
ttgcgtttggtgattacaacagagaattccttg

SEQ ID NO: 877686 - DNA, 33 bp, Homo sapien
ttgcgtttggtgattagaacagagaattccttg

SEQ ID NO: 877687 - DNA, 33 bp, Homo sapien
cctagaaatctttgcacattggtaccaggagac

SEQ ID NO: 877688 - DNA, 33 bp, Homo sapien
cctagaaatctttgcatattggtaccaggagac

SEQ ID NO: 877689 - DNA, 33 bp, Homo sapien
aggaggaagcaatgatcaaccatttcaaagtag

SEQ ID NO: 877690 - DNA, 33 bp, Homo sapien
aggaggaagcaatgattaaccatttcaaagtag

SEQ ID NO: 877691 - DNA, 33 bp, Homo sapien
gtctttggaattaatacctcagtcaaccaggag

SEQ ID NO: 877692 - DNA, 33 bp, Homo sapien
gtctttggaattaatagctcagtcaaccaggag

SEQ ID NO: 877693 - DNA, 33 bp, Homo sapien
attttaattgcacaaaaggcatccaataaacaa

SEQ ID NO: 877694 - DNA, 33 bp, Homo sapien
attttaattgcacaaagggcatccaataaacaa

SEQ ID NO: 877695 - DNA, 33 bp, Homo sapien
tatgtctccttagtgacagattgaaaaaattaa

SEQ ID NO: 877696 - DNA, 33 bp, Homo sapien
tatgtctccttagtgatagattgaaaaaattaa

SEQ ID NO: 877697 - DNA, 33 bp, Homo sapien
taaagggttatatgacagaaggcttactagaaa

SEQ ID NO: 877698 - DNA, 33 bp, Homo sapien
taaagggttatatgacggaaggcttactagaaa

SEQ ID NO: 877699 - DNA, 33 bp, Homo sapien
aaatcatttgaatactaagcagttttatgttgt

SEQ ID NO: 877700 - DNA, 33 bp, Homo sapien
aaatcatttgaatactgagcagttttatgttgt

SEQ ID NO: 877701 - DNA, 33 bp, Homo sapien
tcccacggggaggagaatacatttgggtttaaa

SEQ ID NO: 877702 - DNA, 33 bp, Homo sapien
tcccacggggaggagagtacatttgggtttaaa

SEQ ID NO: 877703 - DNA, 33 bp, Homo sapien
ttcctcatggtcttaagatgtcatttcatctgt

SEQ ID NO: 877704 - DNA, 33 bp, Homo sapien
ttcctcatggtcttaatatgtcatttcatctgt

SEQ ID NO: 877705 - DNA, 33 bp, Homo sapien
gatgctatagatctacacactaaatgttgaata

SEQ ID NO: 877706 - DNA, 33 bp, Homo sapien
gatgctatagatctacgcactaaatgttgaata

SEQ ID NO: 877707 - DNA, 33 bp, Homo sapien
ttgcctggatttttgacgcaaaaagagacagac

SEQ ID NO: 877708 - DNA, 33 bp, Homo sapien
ttgcctggatttttgatgcaaaaagagacagac

SEQ ID NO: 877709 - DNA, 33 bp, Homo sapien
atcaccacaaatcaaaaaaatgaccaagttgca

SEQ ID NO: 877710 - DNA, 33 bp, Homo sapien
atcaccacaaatcaaataaatgaccaagttgca

SEQ ID NO: 877711 - DNA, 33 bp, Homo sapien
aatcaacaggaagaaaatcagaagtaatgtcag

SEQ ID NO: 877712 - DNA, 33 bp, Homo sapien
aatcaacaggaagaaagtcagaagtaatgtcag

SEQ ID NO: 877713 - DNA, 33 bp, Homo sapien
ccgtgagttcttgggcacttttatttgtgtgat

SEQ ID NO: 877714 - DNA, 33 bp, Homo sapien
ccgtgagttcttgggctcttttatttgtgtgat

SEQ ID NO: 877715 - DNA, 33 bp, Homo sapien
gtattagagctgtaaacggcacacagtaaacac

SEQ ID NO: 877716 - DNA, 33 bp, Homo sapien
gtattagagctgtaaatggcacacagtaaacac

SEQ ID NO: 877717 - DNA, 33 bp, Homo sapien
aggaggaagaggcttccagagtattgtgtttgt

SEQ ID NO: 877718 - DNA, 33 bp, Homo sapien
aggaggaagaggcttctagagtattgtgtttgt

SEQ ID NO: 877719 - DNA, 33 bp, Homo sapien
atatgaacgtgggtaccaagagttttataggta

SEQ ID NO: 877720 - DNA, 33 bp, Homo sapien
atatgaacgtgggtactaagagttttataggta

SEQ ID NO: 877721 - DNA, 33 bp, Homo sapien
ataaaaccaggaaaagaccaattatgatgtttt

SEQ ID NO: 877722 - DNA, 33 bp, Homo sapien
ataaaaccaggaaaaggccaattatgatgtttt

SEQ ID NO: 877723 - DNA, 33 bp, Homo sapien
ctgtacacatatagagaaatcaagtcaattata

SEQ ID NO: 877724 - DNA, 33 bp, Homo sapien
ctgtacacatatagagcaatcaagtcaattata

SEQ ID NO: 877725 - DNA, 33 bp, Homo sapien
ttggtctttgtccttacgttgtttacagaatgc

SEQ ID NO: 877726 - DNA, 33 bp, Homo sapien
ttggtctttgtccttatgttgtttacagaatgc

SEQ ID NO: 877727 - DNA, 33 bp, Homo sapien
gctcctccaatcaacacctagaatctgtttccc

SEQ ID NO: 877728 - DNA, 33 bp, Homo sapien
gctcctccaatcaacagctagaatctgtttccc

SEQ ID NO: 877729 - DNA, 33 bp, Homo sapien
gtttttggcttctataaatattcacatacaggt

SEQ ID NO: 877730 - DNA, 33 bp, Homo sapien
gtttttggcttctatatatattcacatacaggt

SEQ ID NO: 877731 - DNA, 33 bp, Homo sapien
aacagaggacctctcagctgaatccctacaagc

SEQ ID NO: 877732 - DNA, 33 bp, Homo sapien
aacagaggacctctcatctgaatccctacaagc

SEQ ID NO: 877733 - DNA, 33 bp, Homo sapien
tagagacatggcatccagaaggctgcatatgga

SEQ ID NO: 877734 - DNA, 33 bp, Homo sapien
tagagacatggcatccggaaggctgcatatgga

SEQ ID NO: 877735 - DNA, 33 bp, Homo sapien
ctgtgtgggatgcaaaaacttacaaaatatggt

SEQ ID NO: 877736 - DNA, 33 bp, Homo sapien
ctgtgtgggatgcaaagacttacaaaatatggt

SEQ ID NO: 877737 - DNA, 33 bp, Homo sapien
gagaagcaggggtagaaacagctcttatggggg

SEQ ID NO: 877738 - DNA, 33 bp, Homo sapien
gagaagcaggggtagagacagctcttatggggg

SEQ ID NO: 877739 - DNA, 33 bp, Homo sapien
cagccaggccaataacaagagttcaatcccaac

SEQ ID NO: 877740 - DNA, 33 bp, Homo sapien
cagccaggccaataacgagagttcaatcccaac

SEQ ID NO: 877741 - DNA, 33 bp, Homo sapien
tgttcataataggtccacagtaagtaatatttg

SEQ ID NO: 877742 - DNA, 33 bp, Homo sapien
tgttcataataggtccgcagtaagtaatatttg

SEQ ID NO: 877743 - DNA, 33 bp, Homo sapien
tgactcctgcactaacaacctttcaaagagttt

SEQ ID NO: 877744 - DNA, 33 bp, Homo sapien
tgactcctgcactaacgacctttcaaagagttt

SEQ ID NO: 877745 - DNA, 33 bp, Homo sapien
acacattatgatacatgagtttggagaaaaacc

SEQ ID NO: 877746 - DNA, 33 bp, Homo sapien
acacattatgatacattagtttggagaaaaacc

SEQ ID NO: 877747 - DNA, 33 bp, Homo sapien
gttttataagatccacacatggttagttcaaca

SEQ ID NO: 877748 - DNA, 33 bp, Homo sapien
gttttataagatccacgcatggttagttcaaca

SEQ ID NO: 877749 - DNA, 33 bp, Homo sapien
ggtgactgtacacagccatcaggcccagattct

SEQ ID NO: 877750 - DNA, 33 bp, Homo sapien
ggtgactgtacacagctatcaggcccagattct

SEQ ID NO: 877751 - DNA, 33 bp, Homo sapien
ttccacttgccctgcaaccatctaaatggaccc

SEQ ID NO: 877752 - DNA, 33 bp, Homo sapien
ttccacttgccctgcagccatctaaatggaccc

SEQ ID NO: 877753 - DNA, 33 bp, Homo sapien
aatcaaaataatttacagacgaatcaggttgtg

SEQ ID NO: 877754 - DNA, 33 bp, Homo sapien
aatcaaaataatttacggacgaatcaggttgtg

SEQ ID NO: 877755 - DNA, 33 bp, Homo sapien
aataatgagatcaacgacaagctttagaagaga

SEQ ID NO: 877756 - DNA, 33 bp, Homo sapien
aataatgagatcaacggcaagctttagaagaga

SEQ ID NO: 877757 - DNA, 33 bp, Homo sapien
gatccagttataggccgcttatgtctgactcgg

SEQ ID NO: 877758 - DNA, 33 bp, Homo sapien
gatccagttataggcctcttatgtctgactcgg

SEQ ID NO: 877759 - DNA, 33 bp, Homo sapien
ttaactcatgattccccgataaatgctattttc

SEQ ID NO: 877760 - DNA, 33 bp, Homo sapien
ttaactcatgattccctgataaatgctattttc

SEQ ID NO: 877761 - DNA, 33 bp, Homo sapien
acctcagtcactaaacaaaagtttaattcttac

SEQ ID NO: 877762 - DNA, 33 bp, Homo sapien
acctcagtcactaaacgaaagtttaattcttac

SEQ ID NO: 877763 - DNA, 33 bp, Homo sapien
tttgtaatgaagggaacgcctatgttctctgcc

SEQ ID NO: 877764 - DNA, 33 bp, Homo sapien
tttgtaatgaagggaatgcctatgttctctgcc

SEQ ID NO: 877765 - DNA, 33 bp, Homo sapien
ctctgcttcactccacaggcctaggcttctcac

SEQ ID NO: 877766 - DNA, 33 bp, Homo sapien
ctctgcttcactccacgggcctaggcttctcac

SEQ ID NO: 877767 - DNA, 33 bp, Homo sapien
ccctgatctctcaaaagttggtcgagatctaaa

SEQ ID NO: 877768 - DNA, 33 bp, Homo sapien
ccctgatctctcaaaatttggtcgagatctaaa

SEQ ID NO: 877769 - DNA, 33 bp, Homo sapien
ttgagccataaagttaactgatgcgggtaccaa

SEQ ID NO: 877770 - DNA, 33 bp, Homo sapien
ttgagccataaagttagctgatgcgggtaccaa

SEQ ID NO: 877771 - DNA, 33 bp, Homo sapien
tgtgttgtttggcttaacccagtattttagaat

SEQ ID NO: 877772 - DNA, 33 bp, Homo sapien
tgtgttgtttggcttaccccagtattttagaat

SEQ ID NO: 877773 - DNA, 33 bp, Homo sapien
gttttctctcagaaaggaacacaatttcagaat

SEQ ID NO: 877774 - DNA, 33 bp, Homo sapien
gttttctctcagaaagtaacacaatttcagaat

SEQ ID NO: 877775 - DNA, 33 bp, Homo sapien
acagtaatcacagagaataagaacaattactca

SEQ ID NO: 877776 - DNA, 33 bp, Homo sapien
acagtaatcacagagagtaagaacaattactca

SEQ ID NO: 877777 - DNA, 33 bp, Homo sapien
gagtgtcatgttaaaactgatgtcactggatgt

SEQ ID NO: 877778 - DNA, 33 bp, Homo sapien
gagtgtcatgttaaaattgatgtcactggatgt

SEQ ID NO: 877779 - DNA, 33 bp, Homo sapien
ctatgtatctccagaacaatcaaagaatgtaca

SEQ ID NO: 877780 - DNA, 33 bp, Homo sapien
ctatgtatctccagaataatcaaagaatgtaca

SEQ ID NO: 877781 - DNA, 33 bp, Homo sapien
attacaaaatatgctgccaatgaatacacatat

SEQ ID NO: 877782 - DNA, 33 bp, Homo sapien
attacaaaatatgctgtcaatgaatacacatat

SEQ ID NO: 877783 - DNA, 33 bp, Homo sapien
gtgctaatatgttgcccaattatgtgccgtgca

SEQ ID NO: 877784 - DNA, 33 bp, Homo sapien
gtgctaatatgttgcctaattatgtgccgtgca

SEQ ID NO: 877785 - DNA, 33 bp, Homo sapien
tctaattcttatcttacgttgtatggattatgg

SEQ ID NO: 877786 - DNA, 33 bp, Homo sapien
tctaattcttatcttatgttgtatggattatgg

SEQ ID NO: 877787 - DNA, 33 bp, Homo sapien
gcttattgtcacagagaaaatatctctattgcc

SEQ ID NO: 877788 - DNA, 33 bp, Homo sapien
gcttattgtcacagaggaaatatctctattgcc

SEQ ID NO: 877789 - DNA, 33 bp, Homo sapien
taaacacattccgagcaaatatgaagatatcta

SEQ ID NO: 877790 - DNA, 33 bp, Homo sapien
taaacacattccgagcgaatatgaagatatcta

SEQ ID NO: 877791 - DNA, 33 bp, Homo sapien
aatgatgcatttgaaacagaggaggaaaacttg

SEQ ID NO: 877792 - DNA, 33 bp, Homo sapien
aatgatgcatttgaaagagaggaggaaaacttg

SEQ ID NO: 877793 - DNA, 33 bp, Homo sapien
aaggtataaacttagcaaagaatgatgcatttg

SEQ ID NO: 877794 - DNA, 33 bp, Homo sapien
aaggtataaacttagcgaagaatgatgcatttg

SEQ ID NO: 877795 - DNA, 33 bp, Homo sapien
tgaaatgctgcaagaaatagcaaaatatagcat

SEQ ID NO: 877796 - DNA, 33 bp, Homo sapien
tgaaatgctgcaagaattagcaaaatatagcat

SEQ ID NO: 877797 - DNA, 33 bp, Homo sapien
acccaatgctcttcaacttatgaatggataaac

SEQ ID NO: 877798 - DNA, 33 bp, Homo sapien
acccaatgctcttcaatttatgaatggataaac

SEQ ID NO: 877799 - DNA, 33 bp, Homo sapien
agacatttatgtagcaagtcactgaagataagg

SEQ ID NO: 877800 - DNA, 33 bp, Homo sapien
agacatttatgtagcaggtcactgaagataagg

SEQ ID NO: 877801 - DNA, 33 bp, Homo sapien
caccctgccatcttgacccttatcttcagtgac

SEQ ID NO: 877802 - DNA, 33 bp, Homo sapien
caccctgccatcttgatccttatcttcagtgac

SEQ ID NO: 877803 - DNA, 33 bp, Homo sapien
tgaagccagtatgagaagtgagggtcaaaagaa

SEQ ID NO: 877804 - DNA, 33 bp, Homo sapien
tgaagccagtatgagacgtgagggtcaaaagaa

SEQ ID NO: 877805 - DNA, 33 bp, Homo sapien
cagttctgcaggccaagaagtctaagaccaaag

SEQ ID NO: 877806 - DNA, 33 bp, Homo sapien
cagttctgcaggccaataagtctaagaccaaag

SEQ ID NO: 877807 - DNA, 33 bp, Homo sapien
ccttatatagcacaccacaaaattctgaattca

SEQ ID NO: 877808 - DNA, 33 bp, Homo sapien
ccttatatagcacacctcaaaattctgaattca

SEQ ID NO: 877809 - DNA, 33 bp, Homo sapien
tggattaagtgctgccagcgatgaacccttgag

SEQ ID NO: 877810 - DNA, 33 bp, Homo sapien
tggattaagtgctgccggcgatgaacccttgag

SEQ ID NO: 877811 - DNA, 33 bp, Homo sapien
tgttctctgtatcaacaggattgttcttttcat

SEQ ID NO: 877812 - DNA, 33 bp, Homo sapien
tgttctctgtatcaacgggattgttcttttcat

SEQ ID NO: 877813 - DNA, 33 bp, Homo sapien
gtttactttttgtgcaaatataccactcagttt

SEQ ID NO: 877814 - DNA, 33 bp, Homo sapien
gtttactttttgtgcagatataccactcagttt

SEQ ID NO: 877815 - DNA, 33 bp, Homo sapien
ttgtgccataattaccactggatagaagaaatg

SEQ ID NO: 877816 - DNA, 33 bp, Homo sapien
ttgtgccataattaccgctggatagaagaaatg

SEQ ID NO: 877817 - DNA, 33 bp, Homo sapien
agaatgtcttcagagaatactacctcactaatt

SEQ ID NO: 877818 - DNA, 33 bp, Homo sapien
agaatgtcttcagagagtactacctcactaatt

SEQ ID NO: 877819 - DNA, 33 bp, Homo sapien
gactcaggaatagcccaaaagagaggctggaag

SEQ ID NO: 877820 - DNA, 33 bp, Homo sapien
gactcaggaatagcccgaaagagaggctggaag

SEQ ID NO: 877821 - DNA, 33 bp, Homo sapien
tctggtatcacagaaagtggtgtctgttgggat

SEQ ID NO: 877822 - DNA, 33 bp, Homo sapien
tctggtatcacagaaattggtgtctgttgggat

SEQ ID NO: 877823 - DNA, 33 bp, Homo sapien
cacaaatttttattgacagatgaacaaataaac

SEQ ID NO: 877824 - DNA, 33 bp, Homo sapien
cacaaatttttattgagagatgaacaaataaac

SEQ ID NO: 877825 - DNA, 33 bp, Homo sapien
agatatttaaatagccaacaaattgaggatctt

SEQ ID NO: 877826 - DNA, 33 bp, Homo sapien
agatatttaaatagccgacaaattgaggatctt

SEQ ID NO: 877827 - DNA, 33 bp, Homo sapien
gcaataggcaccaagcaagtacgaggaagcagg

SEQ ID NO: 877828 - DNA, 33 bp, Homo sapien
gcaataggcaccaagccagtacgaggaagcagg

SEQ ID NO: 877829 - DNA, 33 bp, Homo sapien
ttttccccttggctacaatattccaaactattt

SEQ ID NO: 877830 - DNA, 33 bp, Homo sapien
ttttccccttggctaccatattccaaactattt

SEQ ID NO: 877831 - DNA, 33 bp, Homo sapien
agtgtttgtgtggacaccatttttcttgagtat

SEQ ID NO: 877832 - DNA, 33 bp, Homo sapien
agtgtttgtgtggacatcatttttcttgagtat

SEQ ID NO: 877833 - DNA, 33 bp, Homo sapien
tttggcactaagaaagaaagttctaatatatgt

SEQ ID NO: 877834 - DNA, 33 bp, Homo sapien
tttggcactaagaaaggaagttctaatatatgt

SEQ ID NO: 877835 - DNA, 33 bp, Homo sapien
taaggcactattcaaaaggaacaaaggagatga

SEQ ID NO: 877836 - DNA, 33 bp, Homo sapien
taaggcactattcaaagggaacaaaggagatga

SEQ ID NO: 877837 - DNA, 33 bp, Homo sapien
tattctctgcttccataagttcaattttgagtc

SEQ ID NO: 877838 - DNA, 33 bp, Homo sapien
tattctctgcttccatcagttcaattttgagtc

SEQ ID NO: 877839 - DNA, 33 bp, Homo sapien
aaatgcaaggtcaaacccacccaagagaaaaca

SEQ ID NO: 877840 - DNA, 33 bp, Homo sapien
aaatgcaaggtcaaactcacccaagagaaaaca

SEQ ID NO: 877841 - DNA, 33 bp, Homo sapien
aatgatggcaagaaaaagtctgtgcatattcag

SEQ ID NO: 877842 - DNA, 33 bp, Homo sapien
aatgatggcaagaaaacgtctgtgcatattcag

SEQ ID NO: 877843 - DNA, 33 bp, Homo sapien
ggaattctactcaccaatgaaaaggaataagac

SEQ ID NO: 877844 - DNA, 33 bp, Homo sapien
ggaattctactcaccagtgaaaaggaataagac

SEQ ID NO: 877845 - DNA, 33 bp, Homo sapien
aaccagtgaatggagaaacaaattgtagtactt

SEQ ID NO: 877846 - DNA, 33 bp, Homo sapien
aaccagtgaatggagagacaaattgtagtactt

SEQ ID NO: 877847 - DNA, 33 bp, Homo sapien
tccaagagatgaactgcagtatgagcttatgca

SEQ ID NO: 877848 - DNA, 33 bp, Homo sapien
tccaagagatgaactgtagtatgagcttatgca

SEQ ID NO: 877849 - DNA, 33 bp, Homo sapien
ccatgaaaagagaccaatcagaatctgtgagga

SEQ ID NO: 877850 - DNA, 33 bp, Homo sapien
ccatgaaaagagaccagtcagaatctgtgagga

SEQ ID NO: 877851 - DNA, 33 bp, Homo sapien
tattattcgcagccccactaagcaatagcagaa

SEQ ID NO: 877852 - DNA, 33 bp, Homo sapien
tattattcgcagccccgctaagcaatagcagaa

SEQ ID NO: 877853 - DNA, 33 bp, Homo sapien
agcattccccataaaacgcaactaacttgttcc

SEQ ID NO: 877854 - DNA, 33 bp, Homo sapien
agcattccccataaaatgcaactaacttgttcc

SEQ ID NO: 877855 - DNA, 33 bp, Homo sapien
ccgagaaatatcaacacggagaagtccattaaa

SEQ ID NO: 877856 - DNA, 33 bp, Homo sapien
ccgagaaatatcaacatggagaagtccattaaa

SEQ ID NO: 877857 - DNA, 33 bp, Homo sapien
catgaaaatgtctccaatgcctccttgttctca

SEQ ID NO: 877858 - DNA, 33 bp, Homo sapien
catgaaaatgtctccagtgcctccttgttctca

SEQ ID NO: 877859 - DNA, 33 bp, Homo sapien
ttactatgcattgaaacgaaactgagaaactta

SEQ ID NO: 877860 - DNA, 33 bp, Homo sapien
ttactatgcattgaaatgaaactgagaaactta

SEQ ID NO: 877861 - DNA, 33 bp, Homo sapien
tgaagtattgaattaaaagtgacttcttagaac

SEQ ID NO: 877862 - DNA, 33 bp, Homo sapien
tgaagtattgaattaacagtgacttcttagaac

SEQ ID NO: 877863 - DNA, 33 bp, Homo sapien
cactgctctgtgttcactaggactaaggagtaa

SEQ ID NO: 877864 - DNA, 33 bp, Homo sapien
cactgctctgtgttcagtaggactaaggagtaa

SEQ ID NO: 877865 - DNA, 33 bp, Homo sapien
ataacccaggtgattacgtaatgattatgttta

SEQ ID NO: 877866 - DNA, 33 bp, Homo sapien
ataacccaggtgattatgtaatgattatgttta

SEQ ID NO: 877867 - DNA, 33 bp, Homo sapien
tctgttagcattggacacctccaggggatggca

SEQ ID NO: 877868 - DNA, 33 bp, Homo sapien
tctgttagcattggacgcctccaggggatggca

SEQ ID NO: 877869 - DNA, 33 bp, Homo sapien
attagtattgcttctacaaactgttgaccctga

SEQ ID NO: 877870 - DNA, 33 bp, Homo sapien
attagtattgcttctataaactgttgaccctga

SEQ ID NO: 877871 - DNA, 33 bp, Homo sapien
tattagcacctcatcaacttttttatgtaagga

SEQ ID NO: 877872 - DNA, 33 bp, Homo sapien
tattagcacctcatcagcttttttatgtaagga

SEQ ID NO: 877873 - DNA, 33 bp, Homo sapien
ctcagatattatggtacagttcatggtagtagc

SEQ ID NO: 877874 - DNA, 33 bp, Homo sapien
ctcagatattatggtatagttcatggtagtagc

SEQ ID NO: 877875 - DNA, 33 bp, Homo sapien
tccacctgcatttaaagcagcacgtgtgttttt

SEQ ID NO: 877876 - DNA, 33 bp, Homo sapien
tccacctgcatttaaatcagcacgtgtgttttt

SEQ ID NO: 877877 - DNA, 33 bp, Homo sapien
gcacattgtttttgtacgtatcattatagttga

SEQ ID NO: 877878 - DNA, 33 bp, Homo sapien
gcacattgtttttgtatgtatcattatagttga

SEQ ID NO: 877879 - DNA, 33 bp, Homo sapien
ctctcaatattaatgaaccatatgcatcacaaa

SEQ ID NO: 877880 - DNA, 33 bp, Homo sapien
ctctcaatattaatgagccatatgcatcacaaa

SEQ ID NO: 877881 - DNA, 33 bp, Homo sapien
taagtgtaagcccatacacttacaaccatgtgt

SEQ ID NO: 877882 - DNA, 33 bp, Homo sapien
taagtgtaagcccatatacttacaaccatgtgt

SEQ ID NO: 877883 - DNA, 33 bp, Homo sapien
tcaccctcccacctcaaattggctctgatgtct

SEQ ID NO: 877884 - DNA, 33 bp, Homo sapien
tcaccctcccacctcagattggctctgatgtct

SEQ ID NO: 877885 - DNA, 33 bp, Homo sapien
tctcatttctaaacagaccaatttaagactaat

SEQ ID NO: 877886 - DNA, 33 bp, Homo sapien
tctcatttctaaacagtccaatttaagactaat

SEQ ID NO: 877887 - DNA, 33 bp, Homo sapien
aaaatctgaagtaggaggataataaagagatga

SEQ ID NO: 877888 - DNA, 33 bp, Homo sapien
aaaatctgaagtaggatgataataaagagatga

SEQ ID NO: 877889 - DNA, 33 bp, Homo sapien
ttcatcattttcagtcacttcctgaggacacct

SEQ ID NO: 877890 - DNA, 33 bp, Homo sapien
ttcatcattttcagtcgcttcctgaggacacct

SEQ ID NO: 877891 - DNA, 33 bp, Homo sapien
tcttgactgccacatccaatgatttcctctcgg

SEQ ID NO: 877892 - DNA, 33 bp, Homo sapien
tcttgactgccacatcgaatgatttcctctcgg

SEQ ID NO: 877893 - DNA, 33 bp, Homo sapien
acagttcataagcagcagaatcagtattaaaat

SEQ ID NO: 877894 - DNA, 33 bp, Homo sapien
acagttcataagcagcggaatcagtattaaaat

SEQ ID NO: 877895 - DNA, 33 bp, Homo sapien
ttatatgtggacaaatcaatctcattgaaatta

SEQ ID NO: 877896 - DNA, 33 bp, Homo sapien
ttatatgtggacaaattaatctcattgaaatta

SEQ ID NO: 877897 - DNA, 33 bp, Homo sapien
atcatatagtctctagaatcaatttgatgaaat

SEQ ID NO: 877898 - DNA, 33 bp, Homo sapien
atcatatagtctctaggatcaatttgatgaaat

SEQ ID NO: 877899 - DNA, 33 bp, Homo sapien
cttggagaatgaaagaaccttaggtggaagtca

SEQ ID NO: 877900 - DNA, 33 bp, Homo sapien
cttggagaatgaaagagccttaggtggaagtca

SEQ ID NO: 877901 - DNA, 33 bp, Homo sapien
aagcaagataagctaacaatttgagtgttcttt

SEQ ID NO: 877902 - DNA, 33 bp, Homo sapien
aagcaagataagctaataatttgagtgttcttt

SEQ ID NO: 877903 - DNA, 33 bp, Homo sapien
ctgtgaataggtttcaagaacaagtaattcagt

SEQ ID NO: 877904 - DNA, 33 bp, Homo sapien
ctgtgaataggtttcaggaacaagtaattcagt

SEQ ID NO: 877905 - DNA, 33 bp, Homo sapien
cttgagcccaagactagcccaggccaacacagg

SEQ ID NO: 877906 - DNA, 33 bp, Homo sapien
cttgagcccaagactatcccaggccaacacagg

SEQ ID NO: 877907 - DNA, 33 bp, Homo sapien
ataagaaggccttagaatatcaacaaacttgaa

SEQ ID NO: 877908 - DNA, 33 bp, Homo sapien
ataagaaggccttagattatcaacaaacttgaa

SEQ ID NO: 877909 - DNA, 33 bp, Homo sapien
gcgtgaagcattaaaacgataaaatacaaaagc

SEQ ID NO: 877910 - DNA, 33 bp, Homo sapien
gcgtgaagcattaaaaggataaaatacaaaagc

SEQ ID NO: 877911 - DNA, 33 bp, Homo sapien
ttcccttgtgaaaataagaaagcttagctccct

SEQ ID NO: 877912 - DNA, 33 bp, Homo sapien
ttcccttgtgaaaatatgaaagcttagctccct

SEQ ID NO: 877913 - DNA, 33 bp, Homo sapien
ttttttattgatttcacgtggcagtgattctca

SEQ ID NO: 877914 - DNA, 33 bp, Homo sapien
ttttttattgatttcatgtggcagtgattctca

SEQ ID NO: 877915 - DNA, 33 bp, Homo sapien
gcgaaacctttaagacacttcatcccttgctaa

SEQ ID NO: 877916 - DNA, 33 bp, Homo sapien
gcgaaacctttaagacgcttcatcccttgctaa

SEQ ID NO: 877917 - DNA, 33 bp, Homo sapien
tctcatttattctggacggactcatttctgttc

SEQ ID NO: 877918 - DNA, 33 bp, Homo sapien
tctcatttattctggatggactcatttctgttc

SEQ ID NO: 877919 - DNA, 33 bp, Homo sapien
tgagtattacctaaccaccaacttgatgatcat

SEQ ID NO: 877920 - DNA, 33 bp, Homo sapien
tgagtattacctaaccgccaacttgatgatcat

SEQ ID NO: 877921 - DNA, 33 bp, Homo sapien
cgtctgagtgatagccaggaaacactgggtggt

SEQ ID NO: 877922 - DNA, 33 bp, Homo sapien
cgtctgagtgatagccgggaaacactgggtggt

SEQ ID NO: 877923 - DNA, 33 bp, Homo sapien
tgggaggagaactccaataagaagaaatggcaa

SEQ ID NO: 877924 - DNA, 33 bp, Homo sapien
tgggaggagaactccagtaagaagaaatggcaa

SEQ ID NO: 877925 - DNA, 33 bp, Homo sapien
tttacaaatcttcaaaagagtagcaacataaga

SEQ ID NO: 877926 - DNA, 33 bp, Homo sapien
tttacaaatcttcaaaggagtagcaacataaga

SEQ ID NO: 877927 - DNA, 33 bp, Homo sapien
taaatcataattaagacagtacttgagaattag

SEQ ID NO: 877928 - DNA, 33 bp, Homo sapien
taaatcataattaagagagtacttgagaattag

SEQ ID NO: 877929 - DNA, 33 bp, Homo sapien
gtccagttattaacaacgtagaactttatatct

SEQ ID NO: 877930 - DNA, 33 bp, Homo sapien
gtccagttattaacaatgtagaactttatatct

SEQ ID NO: 877931 - DNA, 33 bp, Homo sapien
atgtgcctagtttataccagttccatgctgttt

SEQ ID NO: 877932 - DNA, 33 bp, Homo sapien
atgtgcctagtttatatcagttccatgctgttt

SEQ ID NO: 877933 - DNA, 33 bp, Homo sapien
cactcataggaaatccagaatgagtattcccca

SEQ ID NO: 877934 - DNA, 33 bp, Homo sapien
cactcataggaaatccggaatgagtattcccca

SEQ ID NO: 877935 - DNA, 33 bp, Homo sapien
atttcagagacccttaagaactcaaaaattgaa

SEQ ID NO: 877936 - DNA, 33 bp, Homo sapien
atttcagagacccttatgaactcaaaaattgaa

SEQ ID NO: 877937 - DNA, 33 bp, Homo sapien
caaggtttgtgatggaagctatgaaggaatatt

SEQ ID NO: 877938 - DNA, 33 bp, Homo sapien
caaggtttgtgatggacgctatgaaggaatatt

SEQ ID NO: 877939 - DNA, 33 bp, Homo sapien
ggatagtggaaagatacgcatttgatcttgaac

SEQ ID NO: 877940 - DNA, 33 bp, Homo sapien
ggatagtggaaagatatgcatttgatcttgaac

SEQ ID NO: 877941 - DNA, 33 bp, Homo sapien
attagtttgctaagaccgtcataacaaaatacc

SEQ ID NO: 877942 - DNA, 33 bp, Homo sapien
attagtttgctaagactgtcataacaaaatacc

SEQ ID NO: 877943 - DNA, 33 bp, Homo sapien
cagcagctctagcaaacgaataaaggtatgttt

SEQ ID NO: 877944 - DNA, 33 bp, Homo sapien
cagcagctctagcaaatgaataaaggtatgttt

SEQ ID NO: 877945 - DNA, 33 bp, Homo sapien
cctcaggacccaaatacctcccatcaagctcta

SEQ ID NO: 877946 - DNA, 33 bp, Homo sapien
cctcaggacccaaatatctcccatcaagctcta

SEQ ID NO: 877947 - DNA, 33 bp, Homo sapien
caatatatgcatctcaaacagttggctttgttt

SEQ ID NO: 877948 - DNA, 33 bp, Homo sapien
caatatatgcatctcagacagttggctttgttt

SEQ ID NO: 877949 - DNA, 33 bp, Homo sapien
atgcttattttggtaacgtttgagcttttttgg

SEQ ID NO: 877950 - DNA, 33 bp, Homo sapien
atgcttattttggtaatgtttgagcttttttgg

SEQ ID NO: 877951 - DNA, 33 bp, Homo sapien
agtaagtgaacaagctcagagacagacattact

SEQ ID NO: 877952 - DNA, 33 bp, Homo sapien
agtaagtgaacaagcttagagacagacattact

SEQ ID NO: 877953 - DNA, 33 bp, Homo sapien
aggatgaggctagaaacgcaagtaccacacaga

SEQ ID NO: 877954 - DNA, 33 bp, Homo sapien
aggatgaggctagaaatgcaagtaccacacaga

SEQ ID NO: 877955 - DNA, 33 bp, Homo sapien
agaaacagagatcacccaggcgccctggctcat

SEQ ID NO: 877956 - DNA, 33 bp, Homo sapien
agaaacagagatcaccgaggcgccctggctcat

SEQ ID NO: 877957 - DNA, 33 bp, Homo sapien
caaaacttggcacgcaataaataataatagatc

SEQ ID NO: 877958 - DNA, 33 bp, Homo sapien
caaaacttggcacgcagtaaataataatagatc

SEQ ID NO: 877959 - DNA, 33 bp, Homo sapien
taccatacataactgacgagcattttgctgatc

SEQ ID NO: 877960 - DNA, 33 bp, Homo sapien
taccatacataactgatgagcattttgctgatc

SEQ ID NO: 877961 - DNA, 33 bp, Homo sapien
ttttgacaattatgagccctgaggaagtgctca

SEQ ID NO: 877962 - DNA, 33 bp, Homo sapien
ttttgacaattatgagtcctgaggaagtgctca

SEQ ID NO: 877963 - DNA, 33 bp, Homo sapien
ctatagagcctatcatcagaaatacatttctaa

SEQ ID NO: 877964 - DNA, 33 bp, Homo sapien
ctatagagcctatcatgagaaatacatttctaa

SEQ ID NO: 877965 - DNA, 33 bp, Homo sapien
agtgataatcagacaacgtatgtaccattcaag

SEQ ID NO: 877966 - DNA, 33 bp, Homo sapien
agtgataatcagacaatgtatgtaccattcaag

SEQ ID NO: 877967 - DNA, 33 bp, Homo sapien
tgaggtcttggtcttaggaaatcattttctcca

SEQ ID NO: 877968 - DNA, 33 bp, Homo sapien
tgaggtcttggtcttatgaaatcattttctcca

SEQ ID NO: 877969 - DNA, 33 bp, Homo sapien
tagatagaacctctcacgttataaggcttttgt

SEQ ID NO: 877970 - DNA, 33 bp, Homo sapien
tagatagaacctctcatgttataaggcttttgt

SEQ ID NO: 877971 - DNA, 33 bp, Homo sapien
atccccaaactactcgaaaaggtggatttgagg

SEQ ID NO: 877972 - DNA, 33 bp, Homo sapien
atccccaaactactcggaaaggtggatttgagg

SEQ ID NO: 877973 - DNA, 33 bp, Homo sapien
ctcaacctttaaaggcaccacagtacctcaaga

SEQ ID NO: 877974 - DNA, 33 bp, Homo sapien
ctcaacctttaaaggcgccacagtacctcaaga

SEQ ID NO: 877975 - DNA, 33 bp, Homo sapien
aagattgtggaaataaatgaagtaaaagctact

SEQ ID NO: 877976 - DNA, 33 bp, Homo sapien
aagattgtggaaataactgaagtaaaagctact

SEQ ID NO: 877977 - DNA, 33 bp, Homo sapien
cttgctgttctgctggaaatgttacagcctttc

SEQ ID NO: 877978 - DNA, 33 bp, Homo sapien
cttgctgttctgctgggaatgttacagcctttc

SEQ ID NO: 877979 - DNA, 33 bp, Homo sapien
gaagtgtgctgtgaagaataaacaagcttcaat

SEQ ID NO: 877980 - DNA, 33 bp, Homo sapien
gaagtgtgctgtgaagtataaacaagcttcaat

SEQ ID NO: 877981 - DNA, 33 bp, Homo sapien
cattcaggagagaaacactcagggcaatttggg

SEQ ID NO: 877982 - DNA, 33 bp, Homo sapien
cattcaggagagaaacgctcagggcaatttggg

SEQ ID NO: 877983 - DNA, 33 bp, Homo sapien
attatctgaaagaactcagctgttgggagtctg

SEQ ID NO: 877984 - DNA, 33 bp, Homo sapien
attatctgaaagaacttagctgttgggagtctg

SEQ ID NO: 877985 - DNA, 33 bp, Homo sapien
aatgtatttgagactacgcactagattgctggt

SEQ ID NO: 877986 - DNA, 33 bp, Homo sapien
aatgtatttgagactaggcactagattgctggt

SEQ ID NO: 877987 - DNA, 33 bp, Homo sapien
cctgggaacctgttagaaatgcatattttcaga

SEQ ID NO: 877988 - DNA, 33 bp, Homo sapien
cctgggaacctgttaggaatgcatattttcaga

SEQ ID NO: 877989 - DNA, 33 bp, Homo sapien
tgagtgaagtcaacacaaagaaaagaggaagta

SEQ ID NO: 877990 - DNA, 33 bp, Homo sapien
tgagtgaagtcaacacgaagaaaagaggaagta

SEQ ID NO: 877991 - DNA, 33 bp, Homo sapien
ccttctcatgctaccagattttactattttttg

SEQ ID NO: 877992 - DNA, 33 bp, Homo sapien
ccttctcatgctaccatattttactattttttg

SEQ ID NO: 877993 - DNA, 33 bp, Homo sapien
ttataattatgagacactcatgcttggttgcca

SEQ ID NO: 877994 - DNA, 33 bp, Homo sapien
ttataattatgagacattcatgcttggttgcca

SEQ ID NO: 877995 - DNA, 33 bp, Homo sapien
gtatgtgaccaaaaacaatattatcaccatgaa

SEQ ID NO: 877996 - DNA, 33 bp, Homo sapien
gtatgtgaccaaaaacgatattatcaccatgaa

SEQ ID NO: 877997 - DNA, 33 bp, Homo sapien
catcttctcttaaacgaaaatctgcccatatca

SEQ ID NO: 877998 - DNA, 33 bp, Homo sapien
catcttctcttaaacgtaaatctgcccatatca

SEQ ID NO: 877999 - DNA, 33 bp, Homo sapien
cctttatcctgttgaacaaaattggttagggtt

SEQ ID NO: 878000 - DNA, 33 bp, Homo sapien
cctttatcctgttgaagaaaattggttagggtt

SEQ ID NO: 878001 - DNA, 33 bp, Homo sapien
tggctacactgtaccaccagaaattggatagtg

SEQ ID NO: 878002 - DNA, 33 bp, Homo sapien
tggctacactgtaccatcagaaattggatagtg

SEQ ID NO: 878003 - DNA, 33 bp, Homo sapien
atcagaatgttttttaaagggcttttcagcagt

SEQ ID NO: 878004 - DNA, 33 bp, Homo sapien
atcagaatgttttttacagggcttttcagcagt

SEQ ID NO: 878005 - DNA, 33 bp, Homo sapien
agtgaaaaagcaaacaacgggctttatcagaag

SEQ ID NO: 878006 - DNA, 33 bp, Homo sapien
agtgaaaaagcaaacatcgggctttatcagaag

SEQ ID NO: 878007 - DNA, 33 bp, Homo sapien
aaacagagtattaaccagaatggtacaaaagaa

SEQ ID NO: 878008 - DNA, 33 bp, Homo sapien
aaacagagtattaaccggaatggtacaaaagaa

SEQ ID NO: 878009 - DNA, 33 bp, Homo sapien
atttgctatttttcctaagcagtgggtcagttt

SEQ ID NO: 878010 - DNA, 33 bp, Homo sapien
atttgctatttttcctgagcagtgggtcagttt

SEQ ID NO: 878011 - DNA, 33 bp, Homo sapien
catctgagatttatgaacctcaagcaaaggcaa

SEQ ID NO: 878012 - DNA, 33 bp, Homo sapien
catctgagatttatgatcctcaagcaaaggcaa

SEQ ID NO: 878013 - DNA, 33 bp, Homo sapien
gccagtaatattctgccaactctaaaactggct

SEQ ID NO: 878014 - DNA, 33 bp, Homo sapien
gccagtaatattctgctaactctaaaactggct

SEQ ID NO: 878015 - DNA, 33 bp, Homo sapien
tagtcagttagggagacggatttaggactccca

SEQ ID NO: 878016 - DNA, 33 bp, Homo sapien
tagtcagttagggagatggatttaggactccca

SEQ ID NO: 878017 - DNA, 33 bp, Homo sapien
tccacaactccaggagacaccactgacaagcag

SEQ ID NO: 878018 - DNA, 33 bp, Homo sapien
tccacaactccaggaggcaccactgacaagcag

SEQ ID NO: 878019 - DNA, 33 bp, Homo sapien
gggcagaatttgccagaaccctgaatttacaca

SEQ ID NO: 878020 - DNA, 33 bp, Homo sapien
gggcagaatttgccaggaccctgaatttacaca

SEQ ID NO: 878021 - DNA, 33 bp, Homo sapien
cttgatggatggaagacgaagagccaatgtggg

SEQ ID NO: 878022 - DNA, 33 bp, Homo sapien
cttgatggatggaagatgaagagccaatgtggg

SEQ ID NO: 878023 - DNA, 33 bp, Homo sapien
aattaaatacatcaaaagatgaaccagatgaag

SEQ ID NO: 878024 - DNA, 33 bp, Homo sapien
aattaaatacatcaaaggatgaaccagatgaag

SEQ ID NO: 878025 - DNA, 33 bp, Homo sapien
gttttgagggaatacaatataccagggaaacta

SEQ ID NO: 878026 - DNA, 33 bp, Homo sapien
gttttgagggaatacagtataccagggaaacta

SEQ ID NO: 878027 - DNA, 33 bp, Homo sapien
tgtttatttgacaatacgtatccatggccacaa

SEQ ID NO: 878028 - DNA, 33 bp, Homo sapien
tgtttatttgacaatatgtatccatggccacaa

SEQ ID NO: 878029 - DNA, 33 bp, Homo sapien
tggatgtcaaatgtgaacatatattcaataaat

SEQ ID NO: 878030 - DNA, 33 bp, Homo sapien
tggatgtcaaatgtgatcatatattcaataaat

SEQ ID NO: 878031 - DNA, 33 bp, Homo sapien
tattgccttaatttgaagactgtgtgatcttag

SEQ ID NO: 878032 - DNA, 33 bp, Homo sapien
tattgccttaatttgaggactgtgtgatcttag

SEQ ID NO: 878033 - DNA, 33 bp, Homo sapien
ttaaacaagtggagaacgtgaaatttgtttctg

SEQ ID NO: 878034 - DNA, 33 bp, Homo sapien
ttaaacaagtggagaatgtgaaatttgtttctg

SEQ ID NO: 878035 - DNA, 33 bp, Homo sapien
aaaaagcctgtctctcacaatcaagttggctta

SEQ ID NO: 878036 - DNA, 33 bp, Homo sapien
aaaaagcctgtctctcgcaatcaagttggctta

SEQ ID NO: 878037 - DNA, 33 bp, Homo sapien
acacattcctttcccaacaccaatgtgagacaa

SEQ ID NO: 878038 - DNA, 33 bp, Homo sapien
acacattcctttcccagcaccaatgtgagacaa

SEQ ID NO: 878039 - DNA, 33 bp, Homo sapien
aatgaacaacttgttacgtggatatagtttatt

SEQ ID NO: 878040 - DNA, 33 bp, Homo sapien
aatgaacaacttgttatgtggatatagtttatt

SEQ ID NO: 878041 - DNA, 33 bp, Homo sapien
gcctgagctccactcaccagatgttgtgacagc

SEQ ID NO: 878042 - DNA, 33 bp, Homo sapien
gcctgagctccactcagcagatgttgtgacagc

SEQ ID NO: 878043 - DNA, 33 bp, Homo sapien
gtaaagtctacctgaacagtcatgtatggcccc

SEQ ID NO: 878044 - DNA, 33 bp, Homo sapien
gtaaagtctacctgaatagtcatgtatggcccc

SEQ ID NO: 878045 - DNA, 33 bp, Homo sapien
cattccagaaaagtaactgtgggcatgaaccac

SEQ ID NO: 878046 - DNA, 33 bp, Homo sapien
cattccagaaaagtaattgtgggcatgaaccac

SEQ ID NO: 878047 - DNA, 33 bp, Homo sapien
gagaaggaatctttaactgacatcatggccttc

SEQ ID NO: 878048 - DNA, 33 bp, Homo sapien
gagaaggaatctttaattgacatcatggccttc

SEQ ID NO: 878049 - DNA, 33 bp, Homo sapien
caaagtagcctacctagcaggctttttgaggaa

SEQ ID NO: 878050 - DNA, 33 bp, Homo sapien
caaagtagcctacctatcaggctttttgaggaa

SEQ ID NO: 878051 - DNA, 33 bp, Homo sapien
agtgagattgctaggtcaaaatgtagattctat

SEQ ID NO: 878052 - DNA, 33 bp, Homo sapien
agtgagattgctaggttaaaatgtagattctat

SEQ ID NO: 878053 - DNA, 33 bp, Homo sapien
catgtaccttgataacaaatgatttataatcct

SEQ ID NO: 878054 - DNA, 33 bp, Homo sapien
catgtaccttgataacgaatgatttataatcct

SEQ ID NO: 878055 - DNA, 33 bp, Homo sapien; identical to SEQ ID NO: 878053

SEQ ID NO: 878056 - DNA, 33 bp, Homo sapien; identical to SEQ ID NO: 878054

SEQ ID NO: 878057 - DNA, 33 bp, Homo sapien
gttcagcaattgacaaatgtactcacaaaatgt

SEQ ID NO: 878058 - DNA, 33 bp, Homo sapien
gttcagcaattgacaagtgtactcacaaaatgt

SEQ ID NO: 878059 - DNA, 33 bp, Homo sapien
cagcagtaacttcggcagacttaaatgttcctg

SEQ ID NO: 878060 - DNA, 33 bp, Homo sapien
cagcagtaacttcggctgacttaaatgttcctg

SEQ ID NO: 878061 - DNA, 33 bp, Homo sapien
tgtcaggcattcatctaaatctaaacctcagca

SEQ ID NO: 878062 - DNA, 33 bp, Homo sapien
tgtcaggcattcatctgaatctaaacctcagca

SEQ ID NO: 878063 - DNA, 33 bp, Homo sapien
acccaataagtgaaaagaattcatcacaggaat

SEQ ID NO: 878064 - DNA, 33 bp, Homo sapien
acccaataagtgaaaataattcatcacaggaat

SEQ ID NO: 878065 - DNA, 33 bp, Homo sapien
caatctcgacttcctcacttcctatcacttttc

SEQ ID NO: 878066 - DNA, 33 bp, Homo sapien
caatctcgacttcctctcttcctatcacttttc

SEQ ID NO: 878067 - DNA, 33 bp, Homo sapien
gtagcgcttggttttacatggacagtgagaaaa

SEQ ID NO: 878068 - DNA, 33 bp, Homo sapien
gtagcgcttggttttatatggacagtgagaaaa

SEQ ID NO: 878069 - DNA, 33 bp, Homo sapien
tatacatatctgtttacggtaacaatttatgga

SEQ ID NO: 878070 - DNA, 33 bp, Homo sapien
tatacatatctgtttatggtaacaatttatgga

SEQ ID NO: 878071 - DNA, 33 bp, Homo sapien
tatagaagtgaatttgaagaacttatgctgaaa

SEQ ID NO: 878072 - DNA, 33 bp, Homo sapien
tatagaagtgaatttggagaacttatgctgaaa

SEQ ID NO: 878073 - DNA, 33 bp, Homo sapien
tcctgctcaatcaaaaagtcaaataagaccatt

SEQ ID NO: 878074 - DNA, 33 bp, Homo sapien
tcctgctcaatcaaaacgtcaaataagaccatt

SEQ ID NO: 878075 - DNA, 33 bp, Homo sapien
ggccttaaataaactcaaaagactatctaggcc

SEQ ID NO: 878076 - DNA, 33 bp, Homo sapien
ggccttaaataaactcgaaagactatctaggcc

SEQ ID NO: 878077 - DNA, 33 bp, Homo sapien
ataaagttatggaagaaagagataagagatgct

SEQ ID NO: 878078 - DNA, 33 bp, Homo sapien
ataaagttatggaagagagagataagagatgct

SEQ ID NO: 878079 - DNA, 33 bp, Homo sapien
ttgtgaccgtctcaaaaacatgcctcgttttcc

SEQ ID NO: 878080 - DNA, 33 bp, Homo sapien
ttgtgaccgtctcaaacacatgcctcgttttcc

SEQ ID NO: 878081 - DNA, 33 bp, Homo sapien
gaggaatcatccacaaaactaaacaatcgtggt

SEQ ID NO: 878082 - DNA, 33 bp, Homo sapien
gaggaatcatccacaacactaaacaatcgtggt

SEQ ID NO: 878083 - DNA, 33 bp, Homo sapien
tggcagttcagagcacactcactctttctccct

SEQ ID NO: 878084 - DNA, 33 bp, Homo sapien
tggcagttcagagcacgctcactctttctccct

SEQ ID NO: 878085 - DNA, 33 bp, Homo sapien
cgctccacctttgccaatcacgcttttaggtta

SEQ ID NO: 878086 - DNA, 33 bp, Homo sapien
cgctccacctttgccagtcacgcttttaggtta

SEQ ID NO: 878087 - DNA, 33 bp, Homo sapien
gtgtgatgggtttaaacgagagagagatcattc

SEQ ID NO: 878088 - DNA, 33 bp, Homo sapien
gtgtgatgggtttaaatgagagagagatcattc

SEQ ID NO: 878089 - DNA, 33 bp, Homo sapien
gtctccttccaattaaatcatggaacatcagag

SEQ ID NO: 878090 - DNA, 33 bp, Homo sapien
gtctccttccaattaactcatggaacatcagag

SEQ ID NO: 878091 - DNA, 33 bp, Homo sapien
atgcctactctgaagaaagatgattggtcaaat

SEQ ID NO: 878092 - DNA, 33 bp, Homo sapien
atgcctactctgaagagagatgattggtcaaat

SEQ ID NO: 878093 - DNA, 33 bp, Homo sapien
aacgttgccagcagtacaacctgaacatcagag

SEQ ID NO: 878094 - DNA, 33 bp, Homo sapien
aacgttgccagcagtataacctgaacatcagag

SEQ ID NO: 878095 - DNA, 33 bp, Homo sapien
aaatatctcactctcactaaaatgggtagtaaa

SEQ ID NO: 878096 - DNA, 33 bp, Homo sapien
aaatatctcactctcagtaaaatgggtagtaaa

SEQ ID NO: 878097 - DNA, 33 bp, Homo sapien
gaattaaatactttcacagacactctccatcta

SEQ ID NO: 878098 - DNA, 33 bp, Homo sapien
gaattaaatactttcatagacactctccatcta

SEQ ID NO: 878099 - DNA, 33 bp, Homo sapien
ttacaagtattgaaaaagatacggtgagcaata

SEQ ID NO: 878100 - DNA, 33 bp, Homo sapien
ttacaagtattgaaaatgatacggtgagcaata

SEQ ID NO: 878101 - DNA, 33 bp, Homo sapien
gatacggtgagcaataagaatgagacaaagtaa

SEQ ID NO: 878102 - DNA, 33 bp, Homo sapien
gatacggtgagcaataggaatgagacaaagtaa

SEQ ID NO: 878103 - DNA, 33 bp, Homo sapien
cccacacctgagaagacgcatggtatgtagttg

SEQ ID NO: 878104 - DNA, 33 bp, Homo sapien
cccacacctgagaagatgcatggtatgtagttg

SEQ ID NO: 878105 - DNA, 33 bp, Homo sapien
aagtttaatctcaaagcacaagcaggatgattg

SEQ ID NO: 878106 - DNA, 33 bp, Homo sapien
aagtttaatctcaaagtacaagcaggatgattg

SEQ ID NO: 878107 - DNA, 33 bp, Homo sapien
tcctaacttcttgacccgctattttgattaaaa

SEQ ID NO: 878108 - DNA, 33 bp, Homo sapien
tcctaacttcttgacctgctattttgattaaaa

SEQ ID NO: 878109 - DNA, 33 bp, Homo sapien
acaagacatctgtggaaagttaatttgggaaag

SEQ ID NO: 878110 - DNA, 33 bp, Homo sapien
acaagacatctgtggagagttaatttgggaaag

SEQ ID NO: 878111 - DNA, 33 bp, Homo sapien
aaattaatttggagaggacattatgagaaatag

SEQ ID NO: 878112 - DNA, 33 bp, Homo sapien
aaattaatttggagagtacattatgagaaatag

SEQ ID NO: 878113 - DNA, 33 bp, Homo sapien
atatgttcagatgttacagaaagacaagatggt

SEQ ID NO: 878114 - DNA, 33 bp, Homo sapien
atatgttcagatgttatagaaagacaagatggt

SEQ ID NO: 878115 - DNA, 33 bp, Homo sapien
gctaatattattactccaagccatccggtgagg

SEQ ID NO: 878116 - DNA, 33 bp, Homo sapien
gctaatattattactctaagccatccggtgagg

SEQ ID NO: 878117 - DNA, 33 bp, Homo sapien
tctaaacagctctgcccagtggatacagttact

SEQ ID NO: 878118 - DNA, 33 bp, Homo sapien
tctaaacagctctgcctagtggatacagttact

SEQ ID NO: 878119 - DNA, 33 bp, Homo sapien
agaataagagttggacacttccttctctcctct

SEQ ID NO: 878120 - DNA, 33 bp, Homo sapien
agaataagagttggacccttccttctctcctct

SEQ ID NO: 878121 - DNA, 33 bp, Homo sapien
cctccaaggttgaggactccactacttttcttg

SEQ ID NO: 878122 - DNA, 33 bp, Homo sapien
cctccaaggttgaggattccactacttttcttg

SEQ ID NO: 878123 - DNA, 33 bp, Homo sapien
atgagtaggtaagagagcattcattcccttcaa

SEQ ID NO: 878124 - DNA, 33 bp, Homo sapien
atgagtaggtaagagatcattcattcccttcaa

SEQ ID NO: 878125 - DNA, 33 bp, Homo sapien
aagtttttcagcttctcaactggccacacacac

SEQ ID NO: 878126 - DNA, 33 bp, Homo sapien
aagtttttcagcttcttaactggccacacacac

SEQ ID NO: 878127 - DNA, 33 bp, Homo sapien
acctgtatttcgcctacagagacaaatacatat

SEQ ID NO: 878128 - DNA, 33 bp, Homo sapien
acctgtatttcgcctatagagacaaatacatat

SEQ ID NO: 878129 - DNA, 33 bp, Homo sapien
accatgggaagggatcagactttaatcgttagg

SEQ ID NO: 878130 - DNA, 33 bp, Homo sapien
accatgggaagggatcggactttaatcgttagg

SEQ ID NO: 878131 - DNA, 33 bp, Homo sapien
gcgttgttagaatgcgaactatagatttgactt

SEQ ID NO: 878132 - DNA, 33 bp, Homo sapien
gcgttgttagaatgcggactatagatttgactt

SEQ ID NO: 878133 - DNA, 33 bp, Homo sapien
tttcccccacatctggacaaacattaagctgta

SEQ ID NO: 878134 - DNA, 33 bp, Homo sapien
tttcccccacatctgggcaaacattaagctgta

SEQ ID NO: 878135 - DNA, 33 bp, Homo sapien
ttcctaatctgtgaaacgagatactagtattac

SEQ ID NO: 878136 - DNA, 33 bp, Homo sapien
ttcctaatctgtgaaatgagatactagtattac

SEQ ID NO: 878137 - DNA, 33 bp, Homo sapien
gggtcctttccagtaccaaccgccttaggctgg

SEQ ID NO: 878138 - DNA, 33 bp, Homo sapien
gggtcctttccagtactaaccgccttaggctgg

SEQ ID NO: 878139 - DNA, 33 bp, Homo sapien
aactcctttagtaccactgaaacttaaggcaaa

SEQ ID NO: 878140 - DNA, 33 bp, Homo sapien
aactcctttagtaccattgaaacttaaggcaaa

SEQ ID NO: 878141 - DNA, 33 bp, Homo sapien
tcacgaaaagccaaagaaaagcattcaaagcta

SEQ ID NO: 878142 - DNA, 33 bp, Homo sapien
tcacgaaaagccaaaggaaagcattcaaagcta

SEQ ID NO: 878143 - DNA, 33 bp, Homo sapien
tgtgaacaatttgttacgggtaggcagggccaa

SEQ ID NO: 878144 - DNA, 33 bp, Homo sapien
tgtgaacaatttgttaggggtaggcagggccaa

SEQ ID NO: 878145 - DNA, 33 bp, Homo sapien
agtagacattctttgcggaacatattcctatct

SEQ ID NO: 878146 - DNA, 33 bp, Homo sapien
agtagacattctttgctgaacatattcctatct

SEQ ID NO: 878147 - DNA, 33 bp, Homo sapien
cattgagtaggaaagcgcaaaggaagtagaggt

SEQ ID NO: 878148 - DNA, 33 bp, Homo sapien
cattgagtaggaaagctcaaaggaagtagaggt

SEQ ID NO: 878149 - DNA, 33 bp, Homo sapien
ctcatttcagtcgtaacgcatccattgagattg

SEQ ID NO: 878150 - DNA, 33 bp, Homo sapien
ctcatttcagtcgtaatgcatccattgagattg

SEQ ID NO: 878151 - DNA, 33 bp, Homo sapien
tacccaagagttagtgaaagagctagacatata

SEQ ID NO: 878152 - DNA, 33 bp, Homo sapien
tacccaagagttagtggaagagctagacatata

SEQ ID NO: 878153 - DNA, 33 bp, Homo sapien
cttccatttcctcaacaaagagatagcaaggcc

SEQ ID NO: 878154 - DNA, 33 bp, Homo sapien
cttccatttcctcaaccaagagatagcaaggcc

SEQ ID NO: 878155 - DNA, 33 bp, Homo sapien
gttacctagcactggaaaaccgatacactgaca

SEQ ID NO: 878156 - DNA, 33 bp, Homo sapien
gttacctagcactggataaccgatacactgaca

SEQ ID NO: 878157 - DNA, 33 bp, Homo sapien
tcagcttaagaaaaaacagagattacttatctg

SEQ ID NO: 878158 - DNA, 33 bp, Homo sapien
tcagcttaagaaaaaagagagattacttatctg

SEQ ID NO: 878159 - DNA, 33 bp, Homo sapien
attagtaaatttgacaactctacaacatagcaa

SEQ ID NO: 878160 - DNA, 33 bp, Homo sapien
attagtaaatttgacagctctacaacatagcaa

SEQ ID NO: 878161 - DNA, 33 bp, Homo sapien
gcttaatgactgcctaagtgttcaaactgccaa

SEQ ID NO: 878162 - DNA, 33 bp, Homo sapien
gcttaatgactgcctaggtgttcaaactgccaa

SEQ ID NO: 878163 - DNA, 33 bp, Homo sapien
tgagcatcttttcatacgcttttttgctattta

SEQ ID NO: 878164 - DNA, 33 bp, Homo sapien
tgagcatcttttcataggcttttttgctattta

SEQ ID NO: 878165 - DNA, 33 bp, Homo sapien
aaatggccaacaaacacgaagaaatgttcaatt

SEQ ID NO: 878166 - DNA, 33 bp, Homo sapien
aaatggccaacaaacatgaagaaatgttcaatt

SEQ ID NO: 878167 - DNA, 33 bp, Homo sapien
ttaagtgctgaggataaaaaggccaagatcagt

SEQ ID NO: 878168 - DNA, 33 bp, Homo sapien
ttaagtgctgaggatacaaaggccaagatcagt

SEQ ID NO: 878169 - DNA, 33 bp, Homo sapien
tcccctttatttaggcaaactatctagattaga

SEQ ID NO: 878170 - DNA, 33 bp, Homo sapien
tcccctttatttaggccaactatctagattaga

SEQ ID NO: 878171 - DNA, 33 bp, Homo sapien
taaaatgccttctctaccttgtctgctgttgga

SEQ ID NO: 878172 - DNA, 33 bp, Homo sapien
taaaatgccttctctatcttgtctgctgttgga

SEQ ID NO: 878173 - DNA, 33 bp, Homo sapien
ctaacattctggagaaaccaatagccaacatca

SEQ ID NO: 878174 - DNA, 33 bp, Homo sapien
ctaacattctggagaagccaatagccaacatca

SEQ ID NO: 878175 - DNA, 33 bp, Homo sapien
acatgtttaaaagtgcagagagtgatgctgaat

SEQ ID NO: 878176 - DNA, 33 bp, Homo sapien
acatgtttaaaagtgcggagagtgatgctgaat

SEQ ID NO: 878177 - DNA, 33 bp, Homo sapien
ctctggtcactaagcacatccaggtgaatgaaa

SEQ ID NO: 878178 - DNA, 33 bp, Homo sapien
ctctggtcactaagcatatccaggtgaatgaaa

SEQ ID NO: 878179 - DNA, 33 bp, Homo sapien
atagggctaaatcaaagagaatgccctctgata

SEQ ID NO: 878180 - DNA, 33 bp, Homo sapien
atagggctaaatcaaatagaatgccctctgata

SEQ ID NO: 878181 - DNA, 33 bp, Homo sapien
acatggtgaaacccacaagaaacacaaaaaatt

SEQ ID NO: 878182 - DNA, 33 bp, Homo sapien
acatggtgaaacccacgagaaacacaaaaaatt

SEQ ID NO: 878183 - DNA, 33 bp, Homo sapien
tatatggtgcccagagccctggagttagcaaat

SEQ ID NO: 878184 - DNA, 33 bp, Homo sapien
tatatggtgcccagagtcctggagttagcaaat

SEQ ID NO: 878185 - DNA, 33 bp, Homo sapien
ttcacagttggtgtccacacagagaagaggaat

SEQ ID NO: 878186 - DNA, 33 bp, Homo sapien
ttcacagttggtgtccgcacagagaagaggaat

SEQ ID NO: 878187 - DNA, 33 bp, Homo sapien
gttttaatgagggatacgttaaaggcatcaggt

SEQ ID NO: 878188 - DNA, 33 bp, Homo sapien
gttttaatgagggatatgttaaaggcatcaggt

SEQ ID NO: 878189 - DNA, 33 bp, Homo sapien
aaatcatctcctgggaactttttttgatatgcc

SEQ ID NO: 878190 - DNA, 33 bp, Homo sapien
aaatcatctcctgggacctttttttgatatgcc

SEQ ID NO: 878191 - DNA, 33 bp, Homo sapien
cagcatctacattcacaaattctcttctttgtc

SEQ ID NO: 878192 - DNA, 33 bp, Homo sapien
cagcatctacattcacgaattctcttctttgtc

SEQ ID NO: 878193 - DNA, 33 bp, Homo sapien
tggtttatatgagacaatgaaaacaatctttga

SEQ ID NO: 878194 - DNA, 33 bp, Homo sapien
tggtttatatgagacagtgaaaacaatctttga

SEQ ID NO: 878195 - DNA, 33 bp, Homo sapien
cgaagatggataccacagcactttccacctaga

SEQ ID NO: 878196 - DNA, 33 bp, Homo sapien
cgaagatggataccacggcactttccacctaga

SEQ ID NO: 878197 - DNA, 33 bp, Homo sapien
tccacagagatgcttaccatgtttctgagccta

SEQ ID NO: 878198 - DNA, 33 bp, Homo sapien
tccacagagatgcttatcatgtttctgagccta

SEQ ID NO: 878199 - DNA, 33 bp, Homo sapien
gctcactcatgtaatcacaatgctttaggatgc

SEQ ID NO: 878200 - DNA, 33 bp, Homo sapien
gctcactcatgtaatcgcaatgctttaggatgc

SEQ ID NO: 878201 - DNA, 33 bp, Homo sapien
taaagtatgtagattacagtcaagtaggtttaa

SEQ ID NO: 878202 - DNA, 33 bp, Homo sapien
taaagtatgtagattagagtcaagtaggtttaa

SEQ ID NO: 878203 - DNA, 33 bp, Homo sapien
tagctcccattctaggaaattgctaccacttac

SEQ ID NO: 878204 - DNA, 33 bp, Homo sapien
tagctcccattctaggtaattgctaccacttac

SEQ ID NO: 878205 - DNA, 33 bp, Homo sapien
aaaagtaagggccatcacttgctattcctatct

SEQ ID NO: 878206 - DNA, 33 bp, Homo sapien
aaaagtaagggccatcgcttgctattcctatct

SEQ ID NO: 878207 - DNA, 33 bp, Homo sapien
tttacaaccttgctgtgaagactgaaaacagtt

SEQ ID NO: 878208 - DNA, 33 bp, Homo sapien
tttacaaccttgctgttaagactgaaaacagtt

SEQ ID NO: 878209 - DNA, 33 bp, Homo sapien
tatcactgctagtcaccgaaggtccctctgaat

SEQ ID NO: 878210 - DNA, 33 bp, Homo sapien
tatcactgctagtcactgaaggtccctctgaat

SEQ ID NO: 878211 - DNA, 33 bp, Homo sapien
taatagagcagccaaaactagatcatagtgttt

SEQ ID NO: 878212 - DNA, 33 bp, Homo sapien
taatagagcagccaaagctagatcatagtgttt

SEQ ID NO: 878213 - DNA, 33 bp, Homo sapien
gctgctcatgcattaaatattcattttcacagc

SEQ ID NO: 878214 - DNA, 33 bp, Homo sapien
gctgctcatgcattaagtattcattttcacagc

SEQ ID NO: 878215 - DNA, 33 bp, Homo sapien
tctaactctggaagtcaccccacgtcacttaca

SEQ ID NO: 878216 - DNA, 33 bp, Homo sapien
tctaactctggaagtcgccccacgtcacttaca

SEQ ID NO: 878217 - DNA, 33 bp, Homo sapien
tgtatgattaagatgaatatctgtccccccact

SEQ ID NO: 878218 - DNA, 33 bp, Homo sapien
tgtatgattaagatgagtatctgtccccccact

SEQ ID NO: 878219 - DNA, 33 bp, Homo sapien
agcacatttttttagacgtatgctattgtacac

SEQ ID NO: 878220 - DNA, 33 bp, Homo sapien
agcacatttttttagatgtatgctattgtacac

SEQ ID NO: 878221 - DNA, 33 bp, Homo sapien
aataagcttgtaatgacgttattggtgtggaat

SEQ ID NO: 878222 - DNA, 33 bp, Homo sapien
aataagcttgtaatgatgttattggtgtggaat

SEQ ID NO: 878223 - DNA, 33 bp, Homo sapien
ctcttactacctactcacccctctccctacatg

SEQ ID NO: 878224 - DNA, 33 bp, Homo sapien
ctcttactacctactcgcccctctccctacatg

SEQ ID NO: 878225 - DNA, 33 bp, Homo sapien
ggaccacgaagcaccaatataagatcgcaaaaa

SEQ ID NO: 878226 - DNA, 33 bp, Homo sapien
ggaccacgaagcaccagtataagatcgcaaaaa

SEQ ID NO: 878227 - DNA, 33 bp, Homo sapien
gttataggatcatgaaaagtatttatcttctcc

SEQ ID NO: 878228 - DNA, 33 bp, Homo sapien
gttataggatcatgaagagtatttatcttctcc

SEQ ID NO: 878229 - DNA, 33 bp, Homo sapien
atctgtaatagttttacggactgatgagaatat

SEQ ID NO: 878230 - DNA, 33 bp, Homo sapien
atctgtaatagttttatggactgatgagaatat

SEQ ID NO: 878231 - DNA, 33 bp, Homo sapien
ctttaggagtgaataacgttaaattaaggttcc

SEQ ID NO: 878232 - DNA, 33 bp, Homo sapien
ctttaggagtgaataatgttaaattaaggttcc

SEQ ID NO: 878233 - DNA, 33 bp, Homo sapien
cacttcctcaatcctaacgttcttccttctcat

SEQ ID NO: 878234 - DNA, 33 bp, Homo sapien
cacttcctcaatcctatcgttcttccttctcat

SEQ ID NO: 878235 - DNA, 33 bp, Homo sapien
cttaacttcacaagccaaacagtatagagtaat

SEQ ID NO: 878236 - DNA, 33 bp, Homo sapien
cttaacttcacaagccgaacagtatagagtaat

SEQ ID NO: 878237 - DNA, 33 bp, Homo sapien
atttacccaaataaaaacaagtcatcctaccaa

SEQ ID NO: 878238 - DNA, 33 bp, Homo sapien
atttacccaaataaaatcaagtcatcctaccaa

SEQ ID NO: 878239 - DNA, 33 bp, Homo sapien
tttcaaaaacaggtacaatctgccgggcacggt

SEQ ID NO: 878240 - DNA, 33 bp, Homo sapien
tttcaaaaacaggtactatctgccgggcacggt

SEQ ID NO: 878241 - DNA, 33 bp, Homo sapien
ttcatatggactgtagaattgttttgtccctgt

SEQ ID NO: 878242 - DNA, 33 bp, Homo sapien
ttcatatggactgtaggattgttttgtccctgt

SEQ ID NO: 878243 - DNA, 33 bp, Homo sapien
gctctgcaggtggaagactgatcaaggtgtcag

SEQ ID NO: 878244 - DNA, 33 bp, Homo sapien
gctctgcaggtggaagtctgatcaaggtgtcag

SEQ ID NO: 878245 - DNA, 33 bp, Homo sapien
tgaggttaaattagcactgagtattcacatacc

SEQ ID NO: 878246 - DNA, 33 bp, Homo sapien
tgaggttaaattagcagtgagtattcacatacc

SEQ ID NO: 878247 - DNA, 33 bp, Homo sapien
ccagaaacaacattcaagatgacggcatcagtg

SEQ ID NO: 878248 - DNA, 33 bp, Homo sapien
ccagaaacaacattcaggatgacggcatcagtg

SEQ ID NO: 878249 - DNA, 33 bp, Homo sapien
ctatggatggccaagtcacaaccagaattgagt

SEQ ID NO: 878250 - DNA, 33 bp, Homo sapien
ctatggatggccaagttacaaccagaattgagt

SEQ ID NO: 878251 - DNA, 33 bp, Homo sapien
aggtgaagatttttcacgtcaatcaaaaagtca

SEQ ID NO: 878252 - DNA, 33 bp, Homo sapien
aggtgaagatttttcatgtcaatcaaaaagtca

SEQ ID NO: 878253 - DNA, 33 bp, Homo sapien
tgtgtcacatacacgaaaagaaagcaagccatg

SEQ ID NO: 878254 - DNA, 33 bp, Homo sapien
tgtgtcacatacacgagaagaaagcaagccatg

SEQ ID NO: 878255 - DNA, 33 bp, Homo sapien
cagttttcatggcatccgacatgaggagactac

SEQ ID NO: 878256 - DNA, 33 bp, Homo sapien
cagttttcatggcatctgacatgaggagactac

SEQ ID NO: 878257 - DNA, 33 bp, Homo sapien
aaattacaaacttgataaatgagttgagtgtgg

SEQ ID NO: 878258 - DNA, 33 bp, Homo sapien
aaattacaaacttgatgaatgagttgagtgtgg

SEQ ID NO: 878259 - DNA, 33 bp, Homo sapien
gcaggcgcaatgaagacgctcacaggtaccttt

SEQ ID NO: 878260 - DNA, 33 bp, Homo sapien
gcaggcgcaatgaagatgctcacaggtaccttt

SEQ ID NO: 878261 - DNA, 33 bp, Homo sapien
tatgaggaaaatattacgggaagagggaagcaa

SEQ ID NO: 878262 - DNA, 33 bp, Homo sapien
tatgaggaaaatattatgggaagagggaagcaa

SEQ ID NO: 878263 - DNA, 33 bp, Homo sapien
gatcatgacctcaaaaatccatgtgccttgaga

SEQ ID NO: 878264 - DNA, 33 bp, Homo sapien
gatcatgacctcaaaactccatgtgccttgaga

SEQ ID NO: 878265 - DNA, 33 bp, Homo sapien
ggagccctagaaggtaacaacaatcctcttaaa

SEQ ID NO: 878266 - DNA, 33 bp, Homo sapien
ggagccctagaaggtagcaacaatcctcttaaa

SEQ ID NO: 878267 - DNA, 33 bp, Homo sapien
gtcatctgtcttatcacgtggcgcttttttggg

SEQ ID NO: 878268 - DNA, 33 bp, Homo sapien
gtcatctgtcttatcatgtggcgcttttttggg

SEQ ID NO: 878269 - DNA, 33 bp, Homo sapien
aaggttagatccaggggcatataggatattatt

SEQ ID NO: 878270 - DNA, 33 bp, Homo sapien
aaggttagatccagggtcatataggatattatt

SEQ ID NO: 878271 - DNA, 33 bp, Homo sapien
ctgtacaacttctgaccactgtgaaatggaccc

SEQ ID NO: 878272 - DNA, 33 bp, Homo sapien
ctgtacaacttctgacgactgtgaaatggaccc

SEQ ID NO: 878273 - DNA, 33 bp, Homo sapien
aatgcaaaatgagagactctaaagacaaaaaca

SEQ ID NO: 878274 - DNA, 33 bp, Homo sapien
aatgcaaaatgagagattctaaagacaaaaaca

SEQ ID NO: 878275 - DNA, 33 bp, Homo sapien
cttgatgggaaaatcaaacattagaatgacagt

SEQ ID NO: 878276 - DNA, 33 bp, Homo sapien
cttgatgggaaaatcacacattagaatgacagt

SEQ ID NO: 878277 - DNA, 33 bp, Homo sapien
ctgtagcaagcctttaagtgtcttggcagatag

SEQ ID NO: 878278 - DNA, 33 bp, Homo sapien
ctgtagcaagcctttaggtgtcttggcagatag

SEQ ID NO: 878279 - DNA, 33 bp, Homo sapien
ttgaatactgtcttaacgatttctctgcatcac

SEQ ID NO: 878280 - DNA, 33 bp, Homo sapien
ttgaatactgtcttaatgatttctctgcatcac

SEQ ID NO: 878281 - DNA, 33 bp, Homo sapien
tatttaaacaacagaactctagataggttggaa

SEQ ID NO: 878282 - DNA, 33 bp, Homo sapien
tatttaaacaacagaattctagataggttggaa

SEQ ID NO: 878283 - DNA, 33 bp, Homo sapien
ccctcatctggctggcacttatcctcgaaaacc

SEQ ID NO: 878284 - DNA, 33 bp, Homo sapien
ccctcatctggctggcgcttatcctcgaaaacc

SEQ ID NO: 878285 - DNA, 33 bp, Homo sapien
ttaagactccagttggaatctctgttaagatgg

SEQ ID NO: 878286 - DNA, 33 bp, Homo sapien
ttaagactccagttggtatctctgttaagatgg

SEQ ID NO: 878287 - DNA, 33 bp, Homo sapien
atttccaagttaactacagagatctgatacatc

SEQ ID NO: 878288 - DNA, 33 bp, Homo sapien
atttccaagttaactatagagatctgatacatc

SEQ ID NO: 878289 - DNA, 33 bp, Homo sapien
tgcggctaaccctacacgttgtaaaagatcatt

SEQ ID NO: 878290 - DNA, 33 bp, Homo sapien
tgcggctaaccctacatgttgtaaaagatcatt

SEQ ID NO: 878291 - DNA, 33 bp, Homo sapien
cagtgatgactttgcactgatgtaatgtcatag

SEQ ID NO: 878292 - DNA, 33 bp, Homo sapien
cagtgatgactttgcagtgatgtaatgtcatag

SEQ ID NO: 878293 - DNA, 33 bp, Homo sapien
tgaattcttcacaccacggtaatgtagttatct

SEQ ID NO: 878294 - DNA, 33 bp, Homo sapien
tgaattcttcacaccatggtaatgtagttatct

SEQ ID NO: 878295 - DNA, 33 bp, Homo sapien
aaggtgaataagaaaaccaagctgcagaagtct

SEQ ID NO: 878296 - DNA, 33 bp, Homo sapien
aaggtgaataagaaaagcaagctgcagaagtct

SEQ ID NO: 878297 - DNA, 33 bp, Homo sapien
agagggcgtctttggaaaattccagcagttcag

SEQ ID NO: 878298 - DNA, 33 bp, Homo sapien
agagggcgtctttggagaattccagcagttcag

SEQ ID NO: 878299 - DNA, 33 bp, Homo sapien
tatccagttctgaaccaccttgcactgttctgt

SEQ ID NO: 878300 - DNA, 33 bp, Homo sapien
tatccagttctgaaccgccttgcactgttctgt

SEQ ID NO: 878301 - DNA, 33 bp, Homo sapien
ataggaattccaggaaaatgagacacgttaatg

SEQ ID NO: 878302 - DNA, 33 bp, Homo sapien
ataggaattccaggaagatgagacacgttaatg

SEQ ID NO: 878303 - DNA, 33 bp, Homo sapien
ggaaaagcaataaataagttatgtcttcattac

SEQ ID NO: 878304 - DNA, 33 bp, Homo sapien
ggaaaagcaataaataggttatgtcttcattac

SEQ ID NO: 878305 - DNA, 33 bp, Homo sapien
cggtgtgactgggacaactgcgtcaaggagtcc

SEQ ID NO: 878306 - DNA, 33 bp, Homo sapien
cggtgtgactgggacagctgcgtcaaggagtcc

SEQ ID NO: 878307 - DNA, 33 bp, Homo sapien
tcatgacaaagcctgacgtgcagggactttccc

SEQ ID NO: 878308 - DNA, 33 bp, Homo sapien
tcatgacaaagcctgatgtgcagggactttccc

SEQ ID NO: 878309 - DNA, 33 bp, Homo sapien
gtcacaggcactttgccacaatttgacactggc

SEQ ID NO: 878310 - DNA, 33 bp, Homo sapien
gtcacaggcactttgcgacaatttgacactggc

SEQ ID NO: 878311 - DNA, 33 bp, Homo sapien
ttaattgaccttttggaagtctagttgatagat

SEQ ID NO: 878312 - DNA, 33 bp, Homo sapien
ttaattgaccttttgggagtctagttgatagat

SEQ ID NO: 878313 - DNA, 33 bp, Homo sapien
aaaacctaatgcaaaaacattataaaaggttct

SEQ ID NO: 878314 - DNA, 33 bp, Homo sapien
aaaacctaatgcaaaatcattataaaaggttct

SEQ ID NO: 878315 - DNA, 33 bp, Homo sapien
tctatccaattatctaccagtcattctttatct

SEQ ID NO: 878316 - DNA, 33 bp, Homo sapien
tctatccaattatctatcagtcattctttatct

SEQ ID NO: 878317 - DNA, 33 bp, Homo sapien
ggaaacggtgatgaaaaggagggagcaaagaaa

SEQ ID NO: 878318 - DNA, 33 bp, Homo sapien
ggaaacggtgatgaaacggagggagcaaagaaa

SEQ ID NO: 878319 - DNA, 33 bp, Homo sapien
agacctccctgttccccgagataacaatattga

SEQ ID NO: 878320 - DNA, 33 bp, Homo sapien
agacctccctgttccctgagataacaatattga

SEQ ID NO: 878321 - DNA, 33 bp, Homo sapien
ccaagatcagccttcagaggaaaacactaaaag

SEQ ID NO: 878322 - DNA, 33 bp, Homo sapien
ccaagatcagccttcataggaaaacactaaaag

SEQ ID NO: 878323 - DNA, 33 bp, Homo sapien
tgtaaattctttttcacaatgactatcagaaca

SEQ ID NO: 878324 - DNA, 33 bp, Homo sapien
tgtaaattctttttcataatgactatcagaaca

SEQ ID NO: 878325 - DNA, 33 bp, Homo sapien
gaccccatagttaggaaagcgacctctagcgag

SEQ ID NO: 878326 - DNA, 33 bp, Homo sapien
gaccccatagttaggagagcgacctctagcgag

SEQ ID NO: 878327 - DNA, 33 bp, Homo sapien
accgtccagtctcaaacactgttcaccagaaat

SEQ ID NO: 878328 - DNA, 33 bp, Homo sapien
accgtccagtctcaaatactgttcaccagaaat

SEQ ID NO: 878329 - DNA, 33 bp, Homo sapien
aacttgctactgctctcaccttatgcccatttc

SEQ ID NO: 878330 - DNA, 33 bp, Homo sapien
aacttgctactgctctgaccttatgcccatttc

SEQ ID NO: 878331 - DNA, 33 bp, Homo sapien
ctacgtatgtatctaacggaaacgcatgctcac

SEQ ID NO: 878332 - DNA, 33 bp, Homo sapien
ctacgtatgtatctaatggaaacgcatgctcac

SEQ ID NO: 878333 - DNA, 33 bp, Homo sapien
cttcttgatagggtgaacaagtctgagtttgcg

SEQ ID NO: 878334 - DNA, 33 bp, Homo sapien
cttcttgatagggtgaccaagtctgagtttgcg

SEQ ID NO: 878335 - DNA, 33 bp, Homo sapien
agcttcttgttagaaacgtagaactttagccct

SEQ ID NO: 878336 - DNA, 33 bp, Homo sapien
agcttcttgttagaaatgtagaactttagccct

SEQ ID NO: 878337 - DNA, 33 bp, Homo sapien
agtagacaaatcagtgaatcagaatagaacaac

SEQ ID NO: 878338 - DNA, 33 bp, Homo sapien
agtagacaaatcagtggatcagaatagaacaac

SEQ ID NO: 878339 - DNA, 33 bp, Homo sapien
agactgttgagtctgcacgtccttgttcctgcg

SEQ ID NO: 878340 - DNA, 33 bp, Homo sapien
agactgttgagtctgcgcgtccttgttcctgcg

SEQ ID NO: 878341 - DNA, 33 bp, Homo sapien
cacgcaatgaagggtacgtcaaagcaacacagg

SEQ ID NO: 878342 - DNA, 33 bp, Homo sapien
cacgcaatgaagggtatgtcaaagcaacacagg

SEQ ID NO: 878343 - DNA, 33 bp, Homo sapien
tgcccttatgttcctcactccctttgagtgaat

SEQ ID NO: 878344 - DNA, 33 bp, Homo sapien
tgcccttatgttcctctctccctttgagtgaat

SEQ ID NO: 878345 - DNA, 33 bp, Homo sapien
cactaaaatgggactaagacaaacctcaagttc

SEQ ID NO: 878346 - DNA, 33 bp, Homo sapien
cactaaaatgggactacgacaaacctcaagttc

SEQ ID NO: 878347 - DNA, 33 bp, Homo sapien
gacagttaacagggaacccagttacagaaccac

SEQ ID NO: 878348 - DNA, 33 bp, Homo sapien
gacagttaacagggaatccagttacagaaccac

SEQ ID NO: 878349 - DNA, 33 bp, Homo sapien
acaggcaaccaaatacaagctagcaaaagcagt

SEQ ID NO: 878350 - DNA, 33 bp, Homo sapien
acaggcaaccaaatacgagctagcaaaagcagt

SEQ ID NO: 878351 - DNA, 33 bp, Homo sapien
ataaaattattccacaatgagcctatcaaatcc

SEQ ID NO: 878352 - DNA, 33 bp, Homo sapien
ataaaattattccacagtgagcctatcaaatcc

SEQ ID NO: 878353 - DNA, 33 bp, Homo sapien
taggcacatgaacataagcagaatacaaaccta

SEQ ID NO: 878354 - DNA, 33 bp, Homo sapien
taggcacatgaacataggcagaatacaaaccta

SEQ ID NO: 878355 - DNA, 33 bp, Homo sapien
gctcccactcatttcaagaagtagaactttgaa

SEQ ID NO: 878356 - DNA, 33 bp, Homo sapien
gctcccactcatttcaggaagtagaactttgaa

SEQ ID NO: 878357 - DNA, 33 bp, Homo sapien
tataatgtcaagcaaggacgtgacacaaaattc

SEQ ID NO: 878358 - DNA, 33 bp, Homo sapien
tataatgtcaagcaagtacgtgacacaaaattc

SEQ ID NO: 878359 - DNA, 33 bp, Homo sapien
cacattaaatgatagagataacggaatgccatt

SEQ ID NO: 878360 - DNA, 33 bp, Homo sapien
cacattaaatgatagatataacggaatgccatt

SEQ ID NO: 878361 - DNA, 33 bp, Homo sapien
ataaggagagttgtgacgtaaacaatcagagat

SEQ ID NO: 878362 - DNA, 33 bp, Homo sapien
ataaggagagttgtgaggtaaacaatcagagat

SEQ ID NO: 878363 - DNA, 33 bp, Homo sapien
gtattctttcttaacacattttaaacatatggt

SEQ ID NO: 878364 - DNA, 33 bp, Homo sapien
gtattctttcttaacagattttaaacatatggt

SEQ ID NO: 878365 - DNA, 33 bp, Homo sapien
cctgttatgcaacctaaccaccattaggaaaca

SEQ ID NO: 878366 - DNA, 33 bp, Homo sapien
cctgttatgcaacctatccaccattaggaaaca

SEQ ID NO: 878367 - DNA, 33 bp, Homo sapien
attactgagtgggagacggcagtttaaaatgga

SEQ ID NO: 878368 - DNA, 33 bp, Homo sapien
attactgagtgggagatggcagtttaaaatgga

SEQ ID NO: 878369 - DNA, 33 bp, Homo sapien
gaaaaatagtgaagtaataagtaccttatagga

SEQ ID NO: 878370 - DNA, 33 bp, Homo sapien
gaaaaatagtgaagtagtaagtaccttatagga

SEQ ID NO: 878371 - DNA, 33 bp, Homo sapien
caagtgaagaggcgaactcaaaagatgcctatg

SEQ ID NO: 878372 - DNA, 33 bp, Homo sapien
caagtgaagaggcgaattcaaaagatgcctatg

SEQ ID NO: 878373 - DNA, 33 bp, Homo sapien
ttcaaattagtacccagtgctcttagtcgcttg

SEQ ID NO: 878374 - DNA, 33 bp, Homo sapien
ttcaaattagtacccattgctcttagtcgcttg

SEQ ID NO: 878375 - DNA, 33 bp, Homo sapien
ttttggcagatggtctaaacaaagtagctaaag

SEQ ID NO: 878376 - DNA, 33 bp, Homo sapien
ttttggcagatggtctgaacaaagtagctaaag

SEQ ID NO: 878377 - DNA, 33 bp, Homo sapien
aagagcaacagcaggaaggaagcaattgattta

SEQ ID NO: 878378 - DNA, 33 bp, Homo sapien
aagagcaacagcaggagggaagcaattgattta

SEQ ID NO: 878379 - DNA, 33 bp, Homo sapien
atgaacaaagcctacaccccaactgatgaccaa

SEQ ID NO: 878380 - DNA, 33 bp, Homo sapien
atgaacaaagcctacagcccaactgatgaccaa

SEQ ID NO: 878381 - DNA, 33 bp, Homo sapien
agttagttaaaggagaaaatcaggactaagacc

SEQ ID NO: 878382 - DNA, 33 bp, Homo sapien
agttagttaaaggagagaatcaggactaagacc

SEQ ID NO: 878383 - DNA, 33 bp, Homo sapien
gtaataaatcagttgaagagggcaggtctgagg

SEQ ID NO: 878384 - DNA, 33 bp, Homo sapien
gtaataaatcagttgaggagggcaggtctgagg

SEQ ID NO: 878385 - DNA, 33 bp, Homo sapien
tggccctgatttgagggagggtgctctttaggg

SEQ ID NO: 878386 - DNA, 33 bp, Homo sapien
tggccctgatttgaggtagggtgctctttaggg

SEQ ID NO: 878387 - DNA, 33 bp, Homo sapien
ccctcacaaatgtcaacggcttccgtgaagagg

SEQ ID NO: 878388 - DNA, 33 bp, Homo sapien
ccctcacaaatgtcaagggcttccgtgaagagg

SEQ ID NO: 878389 - DNA, 33 bp, Homo sapien
acacagcagattcacgaacagttgtcttgggca

SEQ ID NO: 878390 - DNA, 33 bp, Homo sapien
acacagcagattcacggacagttgtcttgggca

SEQ ID NO: 878391 - DNA, 33 bp, Homo sapien
atacttacagaaaccaaggcttcaagtctgtaa

SEQ ID NO: 878392 - DNA, 33 bp, Homo sapien
atacttacagaaaccagggcttcaagtctgtaa

SEQ ID NO: 878393 - DNA, 33 bp, Homo sapien
cagtgcacactggtaactgcttataaagggtga

SEQ ID NO: 878394 - DNA, 33 bp, Homo sapien
cagtgcacactggtaattgcttataaagggtga

SEQ ID NO: 878395 - DNA, 33 bp, Homo sapien
cgttcaaggagatacccaatgataatggattaa

SEQ ID NO: 878396 - DNA, 33 bp, Homo sapien
cgttcaaggagatacctaatgataatggattaa

SEQ ID NO: 878397 - DNA, 33 bp, Homo sapien
acctgggaagcttcgagaatcctgaatcctgtg

SEQ ID NO: 878398 - DNA, 33 bp, Homo sapien
acctgggaagcttcgataatcctgaatcctgtg

SEQ ID NO: 878399 - DNA, 33 bp, Homo sapien
ctacagggaagaaaggaaagttttcgaaggcct

SEQ ID NO: 878400 - DNA, 33 bp, Homo sapien
ctacagggaagaaagggaagttttcgaaggcct

SEQ ID NO: 878401 - DNA, 33 bp, Homo sapien
accctggaaaaacagacgaacacaatagcctta

SEQ ID NO: 878402 - DNA, 33 bp, Homo sapien
accctggaaaaacagatgaacacaatagcctta

SEQ ID NO: 878403 - DNA, 33 bp, Homo sapien
cctccaataccaaagactcgagtttatgaataa

SEQ ID NO: 878404 - DNA, 33 bp, Homo sapien
cctccaataccaaagattcgagtttatgaataa

SEQ ID NO: 878405 - DNA, 33 bp, Homo sapien
acccctgaccagtgcaacaaagggataccatgc

SEQ ID NO: 878406 - DNA, 33 bp, Homo sapien
acccctgaccagtgcatcaaagggataccatgc

SEQ ID NO: 878407 - DNA, 33 bp, Homo sapien
ctgataagagccaggacggaatagacagaatag

SEQ ID NO: 878408 - DNA, 33 bp, Homo sapien
ctgataagagccaggatggaatagacagaatag

SEQ ID NO: 878409 - DNA, 33 bp, Homo sapien
aaaggtcccagaggtgaaaacagaagctatgca

SEQ ID NO: 878410 - DNA, 33 bp, Homo sapien
aaaggtcccagaggtggaaacagaagctatgca

SEQ ID NO: 878411 - DNA, 33 bp, Homo sapien
agtgcttctgtatcccaaacccagttcaactga

SEQ ID NO: 878412 - DNA, 33 bp, Homo sapien
agtgcttctgtatcccgaacccagttcaactga

SEQ ID NO: 878413 - DNA, 33 bp, Homo sapien
agggtattagtttctcactacaggcaggagccc

SEQ ID NO: 878414 - DNA, 33 bp, Homo sapien
agggtattagtttctcgctacaggcaggagccc

SEQ ID NO: 878415 - DNA, 33 bp, Homo sapien
atctcccacttgtttgcaccctgatatctagga

SEQ ID NO: 878416 - DNA, 33 bp, Homo sapien
atctcccacttgtttgtaccctgatatctagga

SEQ ID NO: 878417 - DNA, 33 bp, Homo sapien
gagataagagaaggcccgagagaatagagactt

SEQ ID NO: 878418 - DNA, 33 bp, Homo sapien
gagataagagaaggcctgagagaatagagactt

SEQ ID NO: 878419 - DNA, 33 bp, Homo sapien
acagcgccctcctggacgttactctgctgagac

SEQ ID NO: 878420 - DNA, 33 bp, Homo sapien
acagcgccctcctggatgttactctgctgagac

SEQ ID NO: 878421 - DNA, 33 bp, Homo sapien
aagatctgtttttctccccacacattcgtctag

SEQ ID NO: 878422 - DNA, 33 bp, Homo sapien
aagatctgtttttctctccacacattcgtctag

SEQ ID NO: 878423 - DNA, 33 bp, Homo sapien
gcttagaataaaaagcaagggctctagtggcag

SEQ ID NO: 878424 - DNA, 33 bp, Homo sapien
gcttagaataaaaagcgagggctctagtggcag

SEQ ID NO: 878425 - DNA, 33 bp, Homo sapien
tcttctagatcctgaaacagaactagaactacg

SEQ ID NO: 878426 - DNA, 33 bp, Homo sapien
tcttctagatcctgaatcagaactagaactacg

SEQ ID NO: 878427 - DNA, 33 bp, Homo sapien
ttttcttttttttgagcaaattcttctagatcc

SEQ ID NO: 878428 - DNA, 33 bp, Homo sapien
ttttcttttttttgaggaaattcttctagatcc

SEQ ID NO: 878429 - DNA, 33 bp, Homo sapien
tgtagaggagtaggaacgggggtccatgaagga

SEQ ID NO: 878430 - DNA, 33 bp, Homo sapien
tgtagaggagtaggaatgggggtccatgaagga

SEQ ID NO: 878431 - DNA, 33 bp, Homo sapien
ctgcctcttgggtttacaagatcctcccgcctc

SEQ ID NO: 878432 - DNA, 33 bp, Homo sapien
ctgcctcttgggtttataagatcctcccgcctc

SEQ ID NO: 878433 - DNA, 33 bp, Homo sapien
attatttgcaatagcccaaacaaggaacaaccc

SEQ ID NO: 878434 - DNA, 33 bp, Homo sapien
attatttgcaatagcctaaacaaggaacaaccc

SEQ ID NO: 878435 - DNA, 33 bp, Homo sapien
aaacataatggtgagacaatgaagctagagata

SEQ ID NO: 878436 - DNA, 33 bp, Homo sapien
aaacataatggtgagagaatgaagctagagata

SEQ ID NO: 878437 - DNA, 33 bp, Homo sapien
gaaggacagctggtaaaataaatccaagagaaa

SEQ ID NO: 878438 - DNA, 33 bp, Homo sapien
gaaggacagctggtaagataaatccaagagaaa

SEQ ID NO: 878439 - DNA, 33 bp, Homo sapien
atcacttggcccaatacaaatgagcctctcagc

SEQ ID NO: 878440 - DNA, 33 bp, Homo sapien
atcacttggcccaatataaatgagcctctcagc

SEQ ID NO: 878441 - DNA, 33 bp, Homo sapien
agaggcatagccaggacgagctttcagatttcc

SEQ ID NO: 878442 - DNA, 33 bp, Homo sapien
agaggcatagccaggatgagctttcagatttcc

SEQ ID NO: 878443 - DNA, 33 bp, Homo sapien
aaaggtatattccacaacagaatctagagctgt

SEQ ID NO: 878444 - DNA, 33 bp, Homo sapien
aaaggtatattccacaccagaatctagagctgt

SEQ ID NO: 878445 - DNA, 33 bp, Homo sapien
tgacttactgaggcacactaggaagactctgga

SEQ ID NO: 878446 - DNA, 33 bp, Homo sapien
tgacttactgaggcacgctaggaagactctgga

SEQ ID NO: 878447 - DNA, 33 bp, Homo sapien
tacaaattgcataaccacctgaaatatcctaag

SEQ ID NO: 878448 - DNA, 33 bp, Homo sapien
tacaaattgcataaccgcctgaaatatcctaag

SEQ ID NO: 878449 - DNA, 33 bp, Homo sapien
gagaattaatatgtcactaaacagagcaggaac

SEQ ID NO: 878450 - DNA, 33 bp, Homo sapien
gagaattaatatgtcagtaaacagagcaggaac

SEQ ID NO: 878451 - DNA, 33 bp, Homo sapien
actaaaataagtagagcaactttcaattcacca

SEQ ID NO: 878452 - DNA, 33 bp, Homo sapien
actaaaataagtagaggaactttcaattcacca

SEQ ID NO: 878453 - DNA, 33 bp, Homo sapien
ctctaggctgaatcccaacttctttatcccagg

SEQ ID NO: 878454 - DNA, 33 bp, Homo sapien
ctctaggctgaatcccgacttctttatcccagg

SEQ ID NO: 878455 - DNA, 33 bp, Homo sapien
ctcttgccatggatgcagagcacagtgagagcc

SEQ ID NO: 878456 - DNA, 33 bp, Homo sapien
ctcttgccatggatgcggagcacagtgagagcc

SEQ ID NO: 878457 - DNA, 33 bp, Homo sapien
gaatacaagtgtttatcaagacattacagtaaa

SEQ ID NO: 878458 - DNA, 33 bp, Homo sapien
gaatacaagtgtttattaagacattacagtaaa

SEQ ID NO: 878459 - DNA, 33 bp, Homo sapien
tattgaccaatatcacagcagatccttgaggtc

SEQ ID NO: 878460 - DNA, 33 bp, Homo sapien
tattgaccaatatcacggcagatccttgaggtc

SEQ ID NO: 878461 - DNA, 33 bp, Homo sapien
ttcaccaatgtcataaaaactcaaatattctgt

SEQ ID NO: 878462 - DNA, 33 bp, Homo sapien
ttcaccaatgtcataacaactcaaatattctgt

SEQ ID NO: 878463 - DNA, 33 bp, Homo sapien
gtctatgattgaattacggacactgggttactt

SEQ ID NO: 878464 - DNA, 33 bp, Homo sapien
gtctatgattgaattatggacactgggttactt

SEQ ID NO: 878465 - DNA, 33 bp, Homo sapien
cgttctgcaatgaacaatgatccagacaaatct

SEQ ID NO: 878466 - DNA, 33 bp, Homo sapien
cgttctgcaatgaacagtgatccagacaaatct

SEQ ID NO: 878467 - DNA, 33 bp, Homo sapien
gtgtctttctgggccacgtatattttctaagct

SEQ ID NO: 878468 - DNA, 33 bp, Homo sapien
gtgtctttctgggccatgtatattttctaagct

SEQ ID NO: 878469 - DNA, 33 bp, Homo sapien
ttctccgccagctaaaatggtcctgggccttct

SEQ ID NO: 878470 - DNA, 33 bp, Homo sapien
ttctccgccagctaaattggtcctgggccttct

SEQ ID NO: 878471 - DNA, 33 bp, Homo sapien
gtctccactgttgaaaaaatagccacttgctgg

SEQ ID NO: 878472 - DNA, 33 bp, Homo sapien
gtctccactgttgaaagaatagccacttgctgg

SEQ ID NO: 878473 - DNA, 33 bp, Homo sapien
aatgagcagcctctaacggactagaatatgaat

SEQ ID NO: 878474 - DNA, 33 bp, Homo sapien
aatgagcagcctctaatggactagaatatgaat

SEQ ID NO: 878475 - DNA, 33 bp, Homo sapien
agtaaagcgcttcatgcaaagtgtccatatatt

SEQ ID NO: 878476 - DNA, 33 bp, Homo sapien
agtaaagcgcttcatggaaagtgtccatatatt

SEQ ID NO: 878477 - DNA, 33 bp, Homo sapien
acaactttaacagcatcaagtttatgagagaga

SEQ ID NO: 878478 - DNA, 33 bp, Homo sapien
acaactttaacagcattaagtttatgagagaga

SEQ ID NO: 878479 - DNA, 33 bp, Homo sapien
cagcggcaggttagaacctaagctcatcttact

SEQ ID NO: 878480 - DNA, 33 bp, Homo sapien
cagcggcaggttagaatctaagctcatcttact

SEQ ID NO: 878481 - DNA, 33 bp, Homo sapien
gaaaagtgaaactaaaagtgcctgaattttcaa

SEQ ID NO: 878482 - DNA, 33 bp, Homo sapien
gaaaagtgaaactaaatgtgcctgaattttcaa

SEQ ID NO: 878483 - DNA, 33 bp, Homo sapien
atccagaaatacaccacagtatcctcgtatttt

SEQ ID NO: 878484 - DNA, 33 bp, Homo sapien
atccagaaatacaccatagtatcctcgtatttt

SEQ ID NO: 878485 - DNA, 33 bp, Homo sapien
tccagactgactagtgaacgtctgcaaatcact

SEQ ID NO: 878486 - DNA, 33 bp, Homo sapien
tccagactgactagtggacgtctgcaaatcact

SEQ ID NO: 878487 - DNA, 33 bp, Homo sapien
aaaatgtactgaaagcaacagatccaagacaaa

SEQ ID NO: 878488 - DNA, 33 bp, Homo sapien
aaaatgtactgaaagcgacagatccaagacaaa

SEQ ID NO: 878489 - DNA, 33 bp, Homo sapien
agctgaatcgtacgtaacaaggtaaatcttgtc

SEQ ID NO: 878490 - DNA, 33 bp, Homo sapien
agctgaatcgtacgtagcaaggtaaatcttgtc

SEQ ID NO: 878491 - DNA, 33 bp, Homo sapien
aaaggacgtattagcaagaagtcagcaattgtt

SEQ ID NO: 878492 - DNA, 33 bp, Homo sapien
aaaggacgtattagcatgaagtcagcaattgtt

SEQ ID NO: 878493 - DNA, 33 bp, Homo sapien
agatgcaggcttcacaatggcccttctcaacca

SEQ ID NO: 878494 - DNA, 33 bp, Homo sapien
agatgcaggcttcacagtggcccttctcaacca

SEQ ID NO: 878495 - DNA, 33 bp, Homo sapien
ctttcagataaaaatccacagaagttctctgaa

SEQ ID NO: 878496 - DNA, 33 bp, Homo sapien
ctttcagataaaaatctacagaagttctctgaa

SEQ ID NO: 878497 - DNA, 33 bp, Homo sapien
tagaactactgcttcacagagagccggctcact

SEQ ID NO: 878498 - DNA, 33 bp, Homo sapien
tagaactactgcttcatagagagccggctcact

SEQ ID NO: 878499 - DNA, 33 bp, Homo sapien
gatctcacttccttcacaggcaggaataaagtg

SEQ ID NO: 878500 - DNA, 33 bp, Homo sapien
gatctcacttccttcataggcaggaataaagtg

SEQ ID NO: 878501 - DNA, 33 bp, Homo sapien
tgtaaaagagaagcataaaaggtgagtattcag

SEQ ID NO: 878502 - DNA, 33 bp, Homo sapien
tgtaaaagagaagcatgaaaggtgagtattcag

SEQ ID NO: 878503 - DNA, 33 bp, Homo sapien
gtaggttaattaggacaggcacacagtgagcga

SEQ ID NO: 878504 - DNA, 33 bp, Homo sapien
gtaggttaattaggaccggcacacagtgagcga

SEQ ID NO: 878505 - DNA, 33 bp, Homo sapien
gcctcaagatgtgttccaaggattccttttatc

SEQ ID NO: 878506 - DNA, 33 bp, Homo sapien
gcctcaagatgtgttctaaggattccttttatc

SEQ ID NO: 878507 - DNA, 33 bp, Homo sapien
tgctctggccgtggcaccttgtacttggtggat

SEQ ID NO: 878508 - DNA, 33 bp, Homo sapien
tgctctggccgtggcatcttgtacttggtggat

SEQ ID NO: 878509 - DNA, 33 bp, Homo sapien
acagatgttcagactcactccagaaaaagcctc

SEQ ID NO: 878510 - DNA, 33 bp, Homo sapien
acagatgttcagactcgctccagaaaaagcctc

SEQ ID NO: 878511 - DNA, 33 bp, Homo sapien
tacctggatgagattaaggtgtcggaagaggta

SEQ ID NO: 878512 - DNA, 33 bp, Homo sapien
tacctggatgagattagggtgtcggaagaggta

SEQ ID NO: 878513 - DNA, 33 bp, Homo sapien
tttgttcacgctgtacactaaaaaccatagcca

SEQ ID NO: 878514 - DNA, 33 bp, Homo sapien
tttgttcacgctgtacgctaaaaaccatagcca

SEQ ID NO: 878515 - DNA, 33 bp, Homo sapien
ggcaggaaggcagtgggaagaaacttgctggtg

SEQ ID NO: 878516 - DNA, 33 bp, Homo sapien
ggcaggaaggcagtggtaagaaacttgctggtg

SEQ ID NO: 878517 - DNA, 33 bp, Homo sapien
aggagaagcctgtatcagaaataaacgtggcaa

SEQ ID NO: 878518 - DNA, 33 bp, Homo sapien
aggagaagcctgtatcggaaataaacgtggcaa

SEQ ID NO: 878519 - DNA, 33 bp, Homo sapien
tttaaagggtggtcaacagcattcagtgtaaaa

SEQ ID NO: 878520 - DNA, 33 bp, Homo sapien
tttaaagggtggtcaagagcattcagtgtaaaa

SEQ ID NO: 878521 - DNA, 33 bp, Homo sapien
cactcctgggcaagtcgcgattctaagtcttca

SEQ ID NO: 878522 - DNA, 33 bp, Homo sapien
cactcctgggcaagtctcgattctaagtcttca

SEQ ID NO: 878523 - DNA, 33 bp, Homo sapien
tactccattactagcacgtgcaccagctcaaga

SEQ ID NO: 878524 - DNA, 33 bp, Homo sapien
tactccattactagcatgtgcaccagctcaaga

SEQ ID NO: 878525 - DNA, 33 bp, Homo sapien
tggagctcagaggtgacggatgtactagatccc

SEQ ID NO: 878526 - DNA, 33 bp, Homo sapien
tggagctcagaggtgatggatgtactagatccc

SEQ ID NO: 878527 - DNA, 33 bp, Homo sapien
gtattttacagtagaacgtctgggagcaagagg

SEQ ID NO: 878528 - DNA, 33 bp, Homo sapien
gtattttacagtagaatgtctgggagcaagagg

SEQ ID NO: 878529 - DNA, 33 bp, Homo sapien
tcgttcttaatcgataaggcaccaagtaagcat

SEQ ID NO: 878530 - DNA, 33 bp, Homo sapien
tcgttcttaatcgatagggcaccaagtaagcat

SEQ ID NO: 878531 - DNA, 33 bp, Homo sapien
atgtgcctcatgtttcaatgtgaaagttgtatt

SEQ ID NO: 878532 - DNA, 33 bp, Homo sapien
atgtgcctcatgtttcgatgtgaaagttgtatt

SEQ ID NO: 878533 - DNA, 33 bp, Homo sapien
gaaggattcaaagttcaaagtgggatgatcacg

SEQ ID NO: 878534 - DNA, 33 bp, Homo sapien
gaaggattcaaagttcgaagtgggatgatcacg

SEQ ID NO: 878535 - DNA, 33 bp, Homo sapien
gctataggcaccacaaaatggaacgcaggagga

SEQ ID NO: 878536 - DNA, 33 bp, Homo sapien
gctataggcaccacaagatggaacgcaggagga

SEQ ID NO: 878537 - DNA, 33 bp, Homo sapien
ctccgttgttttacccaacagtgaagtggctct

SEQ ID NO: 878538 - DNA, 33 bp, Homo sapien
ctccgttgttttacccgacagtgaagtggctct

SEQ ID NO: 878539 - DNA, 33 bp, Homo sapien
aaaggtctatagctaacgaaagttgcttccagt

SEQ ID NO: 878540 - DNA, 33 bp, Homo sapien
aaaggtctatagctaatgaaagttgcttccagt

SEQ ID NO: 878541 - DNA, 33 bp, Homo sapien
gcatcaatctccttgccgagtcatctgaagctg

SEQ ID NO: 878542 - DNA, 33 bp, Homo sapien
gcatcaatctccttgctgagtcatctgaagctg

SEQ ID NO: 878543 - DNA, 33 bp, Homo sapien
tatctgaacattctgacctgaaaaaacaaggat

SEQ ID NO: 878544 - DNA, 33 bp, Homo sapien
tatctgaacattctgatctgaaaaaacaaggat

SEQ ID NO: 878545 - DNA, 33 bp, Homo sapien
tcaagggctttaaaaaagaatttgaggcaactt

SEQ ID NO: 878546 - DNA, 33 bp, Homo sapien
tcaagggctttaaaaacgaatttgaggcaactt

SEQ ID NO: 878547 - DNA, 33 bp, Homo sapien
gaaattcttatgatacactcaaattatctgaga

SEQ ID NO: 878548 - DNA, 33 bp, Homo sapien
gaaattcttatgataccctcaaattatctgaga

SEQ ID NO: 878549 - DNA, 33 bp, Homo sapien
gttgtgacacatagataagattgcttgaggctt

SEQ ID NO: 878550 - DNA, 33 bp, Homo sapien
gttgtgacacatagatgagattgcttgaggctt

SEQ ID NO: 878551 - DNA, 33 bp, Homo sapien
gaaatcaatcactaaaagagtacagaaatgata

SEQ ID NO: 878552 - DNA, 33 bp, Homo sapien
gaaatcaatcactaaaggagtacagaaatgata

SEQ ID NO: 878553 - DNA, 33 bp, Homo sapien
ctgcaagtgcggcccaactgaaggagtctggtc

SEQ ID NO: 878554 - DNA, 33 bp, Homo sapien
ctgcaagtgcggcccatctgaaggagtctggtc

SEQ ID NO: 878555 - DNA, 33 bp, Homo sapien
cttcaaattaagttaacgtcaaacagccaaatt

SEQ ID NO: 878556 - DNA, 33 bp, Homo sapien
cttcaaattaagttaatgtcaaacagccaaatt

SEQ ID NO: 878557 - DNA, 33 bp, Homo sapien
ttatgatggatttacacacattctcacctaatc

SEQ ID NO: 878558 - DNA, 33 bp, Homo sapien
ttatgatggatttacatacattctcacctaatc

SEQ ID NO: 878559 - DNA, 33 bp, Homo sapien
tactaagtcacggctgaagtacttaggttttga

SEQ ID NO: 878560 - DNA, 33 bp, Homo sapien
tactaagtcacggctggagtacttaggttttga

SEQ ID NO: 878561 - DNA, 33 bp, Homo sapien
ttttgggaatcgatgacggtatgggatacaggt

SEQ ID NO: 878562 - DNA, 33 bp, Homo sapien
ttttgggaatcgatgatggtatgggatacaggt

SEQ ID NO: 878563 - DNA, 33 bp, Homo sapien
atccgctttgtggggcaaaatcctattcatttt

SEQ ID NO: 878564 - DNA, 33 bp, Homo sapien
atccgctttgtggggcgaaatcctattcatttt

SEQ ID NO: 878565 - DNA, 33 bp, Homo sapien
cattctatatgtgtgaagcaatcttttacaaac

SEQ ID NO: 878566 - DNA, 33 bp, Homo sapien
cattctatatgtgtgatgcaatcttttacaaac

SEQ ID NO: 878567 - DNA, 33 bp, Homo sapien
atctcggcttattgcacgagacataatctgcca

SEQ ID NO: 878568 - DNA, 33 bp, Homo sapien
atctcggcttattgcatgagacataatctgcca

SEQ ID NO: 878569 - DNA, 33 bp, Homo sapien
gacacaatagccagtacaaaaaggaacctaaca

SEQ ID NO: 878570 - DNA, 33 bp, Homo sapien
gacacaatagccagtataaaaaggaacctaaca

SEQ ID NO: 878571 - DNA, 33 bp, Homo sapien
cagggaactgttgggagatttacctgtccaagc

SEQ ID NO: 878572 - DNA, 33 bp, Homo sapien
cagggaactgttgggatatttacctgtccaagc

SEQ ID NO: 878573 - DNA, 33 bp, Homo sapien
ttagcttgtgctacccaaaatggatattactat

SEQ ID NO: 878574 - DNA, 33 bp, Homo sapien
ttagcttgtgctacccgaaatggatattactat

SEQ ID NO: 878575 - DNA, 33 bp, Homo sapien
ttaaaggtagtaataagatctcactagctcttt

SEQ ID NO: 878576 - DNA, 33 bp, Homo sapien
ttaaaggtagtaataatatctcactagctcttt

SEQ ID NO: 878577 - DNA, 33 bp, Homo sapien
tatgtgttatactaaaagatatccaaattcata

SEQ ID NO: 878578 - DNA, 33 bp, Homo sapien
tatgtgttatactaaaggatatccaaattcata

SEQ ID NO: 878579 - DNA, 33 bp, Homo sapien
aagttgcaaaattatcactagtagtcataaatg

SEQ ID NO: 878580 - DNA, 33 bp, Homo sapien
aagttgcaaaattatctctagtagtcataaatg

SEQ ID NO: 878581 - DNA, 33 bp, Homo sapien
tagattaggggttggcaaactacagcctacagg

SEQ ID NO: 878582 - DNA, 33 bp, Homo sapien
tagattaggggttggcgaactacagcctacagg

SEQ ID NO: 878583 - DNA, 33 bp, Homo sapien
aaagtcagaacactcccaaatttgccttgtgca

SEQ ID NO: 878584 - DNA, 33 bp, Homo sapien
aaagtcagaacactccgaaatttgccttgtgca

SEQ ID NO: 878585 - DNA, 33 bp, Homo sapien
gagaacaaggtagtcagaaccaaagcagggctc

SEQ ID NO: 878586 - DNA, 33 bp, Homo sapien
gagaacaaggtagtcataaccaaagcagggctc

SEQ ID NO: 878587 - DNA, 33 bp, Homo sapien
agcagctctgggatagccactatatgcaaaaag

SEQ ID NO: 878588 - DNA, 33 bp, Homo sapien
agcagctctgggatagtcactatatgcaaaaag

SEQ ID NO: 878589 - DNA, 33 bp, Homo sapien
ctgggaagtgcctatagagcctagttcttctta

SEQ ID NO: 878590 - DNA, 33 bp, Homo sapien
ctgggaagtgcctatatagcctagttcttctta

SEQ ID NO: 878591 - DNA, 33 bp, Homo sapien
cagacactgtattgacaggtcacagagtttaat

SEQ ID NO: 878592 - DNA, 33 bp, Homo sapien
cagacactgtattgacgggtcacagagtttaat

SEQ ID NO: 878593 - DNA, 33 bp, Homo sapien
cacttacaggtttgagcagtagagtgacgtggg

SEQ ID NO: 878594 - DNA, 33 bp, Homo sapien
cacttacaggtttgagtagtagagtgacgtggg

SEQ ID NO: 878595 - DNA, 33 bp, Homo sapien
cctcttgattctttcccgacagaatgcaccaat

SEQ ID NO: 878596 - DNA, 33 bp, Homo sapien
cctcttgattctttcctgacagaatgcaccaat

SEQ ID NO: 878597 - DNA, 33 bp, Homo sapien
cctgcctaaacatgaaaagaatagacaagatgt

SEQ ID NO: 878598 - DNA, 33 bp, Homo sapien
cctgcctaaacatgaagagaatagacaagatgt

SEQ ID NO: 878599 - DNA, 33 bp, Homo sapien
ccctcagtctctaagcacaatgacctgcttttc

SEQ ID NO: 878600 - DNA, 33 bp, Homo sapien
ccctcagtctctaagcgcaatgacctgcttttc

SEQ ID NO: 878601 - DNA, 33 bp, Homo sapien
tgtattgtgcctaatccaaattactctttgaaa

SEQ ID NO: 878602 - DNA, 33 bp, Homo sapien
tgtattgtgcctaatctaaattactctttgaaa

SEQ ID NO: 878603 - DNA, 33 bp, Homo sapien
ttgtccaaagtcacccagcttgttcaccactga

SEQ ID NO: 878604 - DNA, 33 bp, Homo sapien
ttgtccaaagtcaccccgcttgttcaccactga

SEQ ID NO: 878605 - DNA, 33 bp, Homo sapien
ttataaaaatgtgagggactatttggacacgac

SEQ ID NO: 878606 - DNA, 33 bp, Homo sapien
ttataaaaatgtgaggtactatttggacacgac

SEQ ID NO: 878607 - DNA, 33 bp, Homo sapien
tttgttaaatatattacggcgtagaggaaagaa

SEQ ID NO: 878608 - DNA, 33 bp, Homo sapien
tttgttaaatatattatggcgtagaggaaagaa

SEQ ID NO: 878609 - DNA, 33 bp, Homo sapien
ttcctgatccacataacggagaaataagaatcc

SEQ ID NO: 878610 - DNA, 33 bp, Homo sapien
ttcctgatccacataatggagaaataagaatcc

SEQ ID NO: 878611 - DNA, 33 bp, Homo sapien
aatggcaatgaagcaacaaaatttatgtcttgt

SEQ ID NO: 878612 - DNA, 33 bp, Homo sapien
aatggcaatgaagcaataaaatttatgtcttgt

SEQ ID NO: 878613 - DNA, 33 bp, Homo sapien
tcatagaggaatgcagcctatttgaccttcaga

SEQ ID NO: 878614 - DNA, 33 bp, Homo sapien
tcatagaggaatgcaggctatttgaccttcaga

SEQ ID NO: 878615 - DNA, 33 bp, Homo sapien
atttgctaagcaaagaaaaataccagtgctacc

SEQ ID NO: 878616 - DNA, 33 bp, Homo sapien
atttgctaagcaaagagaaataccagtgctacc

SEQ ID NO: 878617 - DNA, 33 bp, Homo sapien
acctcagtacttaggacgtgaccttatttagaa

SEQ ID NO: 878618 - DNA, 33 bp, Homo sapien
acctcagtacttaggatgtgaccttatttagaa

SEQ ID NO: 878619 - DNA, 33 bp, Homo sapien
gtttgcctttgtcctcaaaataataaagaaaca

SEQ ID NO: 878620 - DNA, 33 bp, Homo sapien
gtttgcctttgtcctcgaaataataaagaaaca

SEQ ID NO: 878621 - DNA, 33 bp, Homo sapien
tcttcagcaaaattagccacactaaaagatgct

SEQ ID NO: 878622 - DNA, 33 bp, Homo sapien
tcttcagcaaaattagtcacactaaaagatgct

SEQ ID NO: 878623 - DNA, 33 bp, Homo sapien
tcaaaagcagcaataaagaaacttgtttccttc

SEQ ID NO: 878624 - DNA, 33 bp, Homo sapien
tcaaaagcagcaataatgaaacttgtttccttc

SEQ ID NO: 878625 - DNA, 33 bp, Homo sapien
tttccctagtaattacaaagtgtcagccttatg

SEQ ID NO: 878626 - DNA, 33 bp, Homo sapien
tttccctagtaattacgaagtgtcagccttatg

SEQ ID NO: 878627 - DNA, 33 bp, Homo sapien
cgaggtgaggtacaaaacgttatctgtcctaac

SEQ ID NO: 878628 - DNA, 33 bp, Homo sapien
cgaggtgaggtacaaagcgttatctgtcctaac

SEQ ID NO: 878629 - DNA, 33 bp, Homo sapien
gagtgtgtcttcaagacggtattgatacattta

SEQ ID NO: 878630 - DNA, 33 bp, Homo sapien
gagtgtgtcttcaagatggtattgatacattta

SEQ ID NO: 878631 - DNA, 33 bp, Homo sapien
actgaattgctaaggaaaatagcaggcgtcacc

SEQ ID NO: 878632 - DNA, 33 bp, Homo sapien
actgaattgctaaggacaatagcaggcgtcacc

SEQ ID NO: 878633 - DNA, 33 bp, Homo sapien
atgaaatggtattttacgaaattttagcaaagc

SEQ ID NO: 878634 - DNA, 33 bp, Homo sapien
atgaaatggtattttatgaaattttagcaaagc

SEQ ID NO: 878635 - DNA, 33 bp, Homo sapien
ttgcaaaattttctacgcatgccttacaactca

SEQ ID NO: 878636 - DNA, 33 bp, Homo sapien
ttgcaaaattttctactcatgccttacaactca

SEQ ID NO: 878637 - DNA, 33 bp, Homo sapien
tatagattgattttccgaccctttcattacccc

SEQ ID NO: 878638 - DNA, 33 bp, Homo sapien
tatagattgattttcctaccctttcattacccc

SEQ ID NO: 878639 - DNA, 33 bp, Homo sapien
cccagagcaaagtgcccctcatcccactcctcc

SEQ ID NO: 878640 - DNA, 33 bp, Homo sapien
cccagagcaaagtgccgctcatcccactcctcc

SEQ ID NO: 878641 - DNA, 33 bp, Homo sapien
tttatttgcaatagcaacaagtgaataaccctg

SEQ ID NO: 878642 - DNA, 33 bp, Homo sapien
tttatttgcaatagcagcaagtgaataaccctg

SEQ ID NO: 878643 - DNA, 33 bp, Homo sapien
tccagcgttgaagacaatcactgggagcatctt

SEQ ID NO: 878644 - DNA, 33 bp, Homo sapien
tccagcgttgaagacagtcactgggagcatctt

SEQ ID NO: 878645 - DNA, 33 bp, Homo sapien
attcatcattttttaacccaaattaagtggcac

SEQ ID NO: 878646 - DNA, 33 bp, Homo sapien
attcatcattttttaagccaaattaagtggcac

SEQ ID NO: 878647 - DNA, 33 bp, Homo sapien
gctgtgtggtagctcaatgaacagcaatgcccc

SEQ ID NO: 878648 - DNA, 33 bp, Homo sapien
gctgtgtggtagctcagtgaacagcaatgcccc

SEQ ID NO: 878649 - DNA, 33 bp, Homo sapien
actgaatataagggtacgtagcaaaatctatta

SEQ ID NO: 878650 - DNA, 33 bp, Homo sapien
actgaatataagggtatgtagcaaaatctatta

SEQ ID NO: 878651 - DNA, 33 bp, Homo sapien
aaccaacaagatgagacgagaaataaaacctca

SEQ ID NO: 878652 - DNA, 33 bp, Homo sapien
aaccaacaagatgagatgagaaataaaacctca

SEQ ID NO: 878653 - DNA, 33 bp, Homo sapien
gatttgtatgttaaaactcaccacaaagtgatg

SEQ ID NO: 878654 - DNA, 33 bp, Homo sapien
gatttgtatgttaaaattcaccacaaagtgatg

SEQ ID NO: 878655 - DNA, 33 bp, Homo sapien
gtcaccaaaattaggaactggtggttgaagtcg

SEQ ID NO: 878656 - DNA, 33 bp, Homo sapien
gtcaccaaaattaggagctggtggttgaagtcg

SEQ ID NO: 878657 - DNA, 33 bp, Homo sapien
tccacacttgcttccacgtgagcgtgccctacc

SEQ ID NO: 878658 - DNA, 33 bp, Homo sapien
tccacacttgcttccatgtgagcgtgccctacc

SEQ ID NO: 878659 - DNA, 33 bp, Homo sapien
tgtttctgatactgcacgttgtagtcatggaaa

SEQ ID NO: 878660 - DNA, 33 bp, Homo sapien
tgtttctgatactgcatgttgtagtcatggaaa

SEQ ID NO: 878661 - DNA, 33 bp, Homo sapien
ttagaaagttaactgaatcaaatgcctggttgc

SEQ ID NO: 878662 - DNA, 33 bp, Homo sapien
ttagaaagttaactgagtcaaatgcctggttgc

SEQ ID NO: 878663 - DNA, 33 bp, Homo sapien
aaaatcaggagtagaacgtgctacctgtttctg

SEQ ID NO: 878664 - DNA, 33 bp, Homo sapien
aaaatcaggagtagaatgtgctacctgtttctg

SEQ ID NO: 878665 - DNA, 33 bp, Homo sapien
tctttaaaatgtttacaaggttgattgaaacag

SEQ ID NO: 878666 - DNA, 33 bp, Homo sapien
tctttaaaatgtttacgaggttgattgaaacag

SEQ ID NO: 878667 - DNA, 33 bp, Homo sapien
tccatgccaaatgtaaatcacatagggcatttt

SEQ ID NO: 878668 - DNA, 33 bp, Homo sapien
tccatgccaaatgtaagtcacatagggcatttt

SEQ ID NO: 878669 - DNA, 33 bp, Homo sapien
agttgaaggattattcccagttgtctcctgcat

SEQ ID NO: 878670 - DNA, 33 bp, Homo sapien
agttgaaggattattctcagttgtctcctgcat

SEQ ID NO: 878671 - DNA, 33 bp, Homo sapien
atactagtgattaatacgccagaggagttaagg

SEQ ID NO: 878672 - DNA, 33 bp, Homo sapien
atactagtgattaatatgccagaggagttaagg

SEQ ID NO: 878673 - DNA, 33 bp, Homo sapien
gtactaacaatgacataaagaatgcatatggat

SEQ ID NO: 878674 - DNA, 33 bp, Homo sapien
gtactaacaatgacatgaagaatgcatatggat

SEQ ID NO: 878675 - DNA, 33 bp, Homo sapien
gtgttaagagcatgaaactgcaagtgaggagtt

SEQ ID NO: 878676 - DNA, 33 bp, Homo sapien
gtgttaagagcatgaacctgcaagtgaggagtt

SEQ ID NO: 878677 - DNA, 33 bp, Homo sapien
ctttttgggctagagcaatcaggaaaaggatgt

SEQ ID NO: 878678 - DNA, 33 bp, Homo sapien
ctttttgggctagagcgatcaggaaaaggatgt

SEQ ID NO: 878679 - DNA, 33 bp, Homo sapien
cacttccaccaaatcacggaacttgttcttgtc

SEQ ID NO: 878680 - DNA, 33 bp, Homo sapien
cacttccaccaaatcatggaacttgttcttgtc

SEQ ID NO: 878681 - DNA, 33 bp, Homo sapien
agtgttaggaacttagcactacaagaatgatcc

SEQ ID NO: 878682 - DNA, 33 bp, Homo sapien
agtgttaggaacttaggactacaagaatgatcc

SEQ ID NO: 878683 - DNA, 33 bp, Homo sapien
ctcttgctttgctttcactttcctgtttatctc

SEQ ID NO: 878684 - DNA, 33 bp, Homo sapien
ctcttgctttgctttcgctttcctgtttatctc

SEQ ID NO: 878685 - DNA, 33 bp, Homo sapien
tttgttattactgtcaactctgattatttgaag

SEQ ID NO: 878686 - DNA, 33 bp, Homo sapien
tttgttattactgtcatctctgattatttgaag

SEQ ID NO: 878687 - DNA, 33 bp, Homo sapien
gatgtatgaaatgaggcccataaataatggaaa

SEQ ID NO: 878688 - DNA, 33 bp, Homo sapien
gatgtatgaaatgaggtccataaataatggaaa

SEQ ID NO: 878689 - DNA, 33 bp, Homo sapien
tttgtgtcctcaaacacctatgagttgggtgaa

SEQ ID NO: 878690 - DNA, 33 bp, Homo sapien
tttgtgtcctcaaacatctatgagttgggtgaa

SEQ ID NO: 878691 - DNA, 33 bp, Homo sapien
agactcatgaaaagctgaaatgttcatgaatat

SEQ ID NO: 878692 - DNA, 33 bp, Homo sapien
agactcatgaaaagcttaaatgttcatgaatat

SEQ ID NO: 878693 - DNA, 33 bp, Homo sapien
acaaggttatcttaaggcacaaatctgctcttt

SEQ ID NO: 878694 - DNA, 33 bp, Homo sapien
acaaggttatcttaagtcacaaatctgctcttt

SEQ ID NO: 878695 - DNA, 33 bp, Homo sapien
agcatgggtgaaagccacattaacatccatggg

SEQ ID NO: 878696 - DNA, 33 bp, Homo sapien
agcatgggtgaaagccgcattaacatccatggg

SEQ ID NO: 878697 - DNA, 33 bp, Homo sapien
aaagagattctcttcaagtttttctaatgtcaa

SEQ ID NO: 878698 - DNA, 33 bp, Homo sapien
aaagagattctcttcatgtttttctaatgtcaa

SEQ ID NO: 878699 - DNA, 33 bp, Homo sapien
tagtttgacaatactacgtagcaaagatgtgga

SEQ ID NO: 878700 - DNA, 33 bp, Homo sapien
tagtttgacaatactatgtagcaaagatgtgga

SEQ ID NO: 878701 - DNA, 33 bp, Homo sapien
ctctccagcaatatctcagaattcctgtctcca

SEQ ID NO: 878702 - DNA, 33 bp, Homo sapien
ctctccagcaatatctgagaattcctgtctcca

SEQ ID NO: 878703 - DNA, 33 bp, Homo sapien
tggaacaatcaatcaactgaaagtcacagtaca

SEQ ID NO: 878704 - DNA, 33 bp, Homo sapien
tggaacaatcaatcaagtgaaagtcacagtaca

SEQ ID NO: 878705 - DNA, 33 bp, Homo sapien
ctcatgacgtaggagacatgagaggcccatgga

SEQ ID NO: 878706 - DNA, 33 bp, Homo sapien
ctcatgacgtaggagatatgagaggcccatgga

SEQ ID NO: 878707 - DNA, 33 bp, Homo sapien
tcaatcatgaaagaaacgtagctgaaaatttaa

SEQ ID NO: 878708 - DNA, 33 bp, Homo sapien
tcaatcatgaaagaaatgtagctgaaaatttaa

SEQ ID NO: 878709 - DNA, 33 bp, Homo sapien
caccttcagacattccaaccatgattaatcagt

SEQ ID NO: 878710 - DNA, 33 bp, Homo sapien
caccttcagacattccgaccatgattaatcagt

SEQ ID NO: 878711 - DNA, 33 bp, Homo sapien
aattagacaacatttaccatgcaattcgtgaaa

SEQ ID NO: 878712 - DNA, 33 bp, Homo sapien
aattagacaacatttatcatgcaattcgtgaaa

SEQ ID NO: 878713 - DNA, 33 bp, Homo sapien
cagctaaagtgctgaaagtcagagaagtcaaga

SEQ ID NO: 878714 - DNA, 33 bp, Homo sapien
cagctaaagtgctgaaggtcagagaagtcaaga

SEQ ID NO: 878715 - DNA, 33 bp, Homo sapien
atcaaaagatttacaaaatgctccgtctcaaaa

SEQ ID NO: 878716 - DNA, 33 bp, Homo sapien
atcaaaagatttacaatatgctccgtctcaaaa

SEQ ID NO: 878717 - DNA, 33 bp, Homo sapien
tcttgagatatgcaagccaaatatttcaaaaat

SEQ ID NO: 878718 - DNA, 33 bp, Homo sapien
tcttgagatatgcaagtcaaatatttcaaaaat

SEQ ID NO: 878719 - DNA, 33 bp, Homo sapien
ctttagggattcagaacaatggaagtctagaaa

SEQ ID NO: 878720 - DNA, 33 bp, Homo sapien
ctttagggattcagaataatggaagtctagaaa

SEQ ID NO: 878721 - DNA, 33 bp, Homo sapien
aatttttcaggatttcaaggacaaatctgaaaa

SEQ ID NO: 878722 - DNA, 33 bp, Homo sapien
aatttttcaggatttcgaggacaaatctgaaaa

SEQ ID NO: 878723 - DNA, 33 bp, Homo sapien
gtctaaagaaggtagccgccatattaactctct

SEQ ID NO: 878724 - DNA, 33 bp, Homo sapien
gtctaaagaaggtagctgccatattaactctct

SEQ ID NO: 878725 - DNA, 33 bp, Homo sapien
ccttctcccttccgggacaaagtacaaagcaga

SEQ ID NO: 878726 - DNA, 33 bp, Homo sapien
ccttctcccttccgggccaaagtacaaagcaga

SEQ ID NO: 878727 - DNA, 33 bp, Homo sapien
ggagaaacttctgtgacgaacattctaaggtga

SEQ ID NO: 878728 - DNA, 33 bp, Homo sapien
ggagaaacttctgtgaggaacattctaaggtga

SEQ ID NO: 878729 - DNA, 33 bp, Homo sapien
tgaaagaagatagggccaccattattttttcag

SEQ ID NO: 878730 - DNA, 33 bp, Homo sapien
tgaaagaagatagggctaccattattttttcag

SEQ ID NO: 878731 - DNA, 33 bp, Homo sapien
atttttcttctctcaaagataaccgtcctgcac

SEQ ID NO: 878732 - DNA, 33 bp, Homo sapien
atttttcttctctcaaggataaccgtcctgcac

SEQ ID NO: 878733 - DNA, 33 bp, Homo sapien
ttttgatgtagacccaatgaaaacacgatggcc

SEQ ID NO: 878734 - DNA, 33 bp, Homo sapien
ttttgatgtagacccagtgaaaacacgatggcc

SEQ ID NO: 878735 - DNA, 33 bp, Homo sapien
cttgaaaatgtaaatacgcttcattcagtatca

SEQ ID NO: 878736 - DNA, 33 bp, Homo sapien
cttgaaaatgtaaatatgcttcattcagtatca

SEQ ID NO: 878737 - DNA, 33 bp, Homo sapien
agagaccagttggttaaggaatgctcatagctc

SEQ ID NO: 878738 - DNA, 33 bp, Homo sapien
agagaccagttggttacggaatgctcatagctc

SEQ ID NO: 878739 - DNA, 33 bp, Homo sapien
agtataaagtgtgtaaggtctacgactgaggaa

SEQ ID NO: 878740 - DNA, 33 bp, Homo sapien
agtataaagtgtgtaatgtctacgactgaggaa

SEQ ID NO: 878741 - DNA, 33 bp, Homo sapien
attccaataatggaaaactccactgcagtttga

SEQ ID NO: 878742 - DNA, 33 bp, Homo sapien
attccaataatggaaagctccactgcagtttga

SEQ ID NO: 878743 - DNA, 33 bp, Homo sapien
acactgagtgataagcaccaaaagagataagta

SEQ ID NO: 878744 - DNA, 33 bp, Homo sapien
acactgagtgataagcgccaaaagagataagta

SEQ ID NO: 878745 - DNA, 33 bp, Homo sapien
tcttgaaatgtattaaaacttgctttacagtcc

SEQ ID NO: 878746 - DNA, 33 bp, Homo sapien
tcttgaaatgtattaagacttgctttacagtcc

SEQ ID NO: 878747 - DNA, 33 bp, Homo sapien
gtcggacacctaaatgaattccatatcttggct

SEQ ID NO: 878748 - DNA, 33 bp, Homo sapien
gtcggacacctaaatggattccatatcttggct

SEQ ID NO: 878749 - DNA, 33 bp, Homo sapien
agtttgaccttgtataagcagtctgaaattctt

SEQ ID NO: 878750 - DNA, 33 bp, Homo sapien
agtttgaccttgtataggcagtctgaaattctt

SEQ ID NO: 878751 - DNA, 33 bp, Homo sapien
tatataagttggataaagttatttggaattcat

SEQ ID NO: 878752 - DNA, 33 bp, Homo sapien
tatataagttggataaggttatttggaattcat

SEQ ID NO: 878753 - DNA, 33 bp, Homo sapien
catgaccaaaaccttccaacacaccataagtca

SEQ ID NO: 878754 - DNA, 33 bp, Homo sapien
catgaccaaaaccttcgaacacaccataagtca

SEQ ID NO: 878755 - DNA, 33 bp, Homo sapien
tcacatttcaccaataggttgattctttttctt

SEQ ID NO: 878756 - DNA, 33 bp, Homo sapien
tcacatttcaccaatatgttgattctttttctt

SEQ ID NO: 878757 - DNA, 33 bp, Homo sapien
atgctttatgctgttgaattttacttggagcct

SEQ ID NO: 878758 - DNA, 33 bp, Homo sapien
atgctttatgctgttgcattttacttggagcct

SEQ ID NO: 878759 - DNA, 33 bp, Homo sapien
gggagggtgataaccacgctgagctgggattgc

SEQ ID NO: 878760 - DNA, 33 bp, Homo sapien
gggagggtgataaccatgctgagctgggattgc

SEQ ID NO: 878761 - DNA, 33 bp, Homo sapien
gagagccccttttagacggttcctaggtgcttt

SEQ ID NO: 878762 - DNA, 33 bp, Homo sapien
gagagccccttttagatggttcctaggtgcttt

SEQ ID NO: 878763 - DNA, 33 bp, Homo sapien
tcagttaccacttgaaccagccaataaaagtta

SEQ ID NO: 878764 - DNA, 33 bp, Homo sapien
tcagttaccacttgaatcagccaataaaagtta

SEQ ID NO: 878765 - DNA, 33 bp, Homo sapien
aagtctacagtcagaacgtttccatggtgagac

SEQ ID NO: 878766 - DNA, 33 bp, Homo sapien
aagtctacagtcagaatgtttccatggtgagac

SEQ ID NO: 878767 - DNA, 33 bp, Homo sapien
ttattcctctcctaaacatatacattgcttcca

SEQ ID NO: 878768 - DNA, 33 bp, Homo sapien
ttattcctctcctaaagatatacattgcttcca

SEQ ID NO: 878769 - DNA, 33 bp, Homo sapien
cctttctgtgttaaaactgttagaataattaca

SEQ ID NO: 878770 - DNA, 33 bp, Homo sapien
cctttctgtgttaaaattgttagaataattaca

SEQ ID NO: 878771 - DNA, 33 bp, Homo sapien
aggcagagggggaagaacatcagggaaaacagc

SEQ ID NO: 878772 - DNA, 33 bp, Homo sapien
aggcagagggggaagagcatcagggaaaacagc

SEQ ID NO: 878773 - DNA, 33 bp, Homo sapien
ttaccctgttatagaaaaatcttcctggaattc

SEQ ID NO: 878774 - DNA, 33 bp, Homo sapien
ttaccctgttatagaacaatcttcctggaattc

SEQ ID NO: 878775 - DNA, 33 bp, Homo sapien
cttagaaatatgcacaaactttgacccagaaat

SEQ ID NO: 878776 - DNA, 33 bp, Homo sapien
cttagaaatatgcacatactttgacccagaaat

SEQ ID NO: 878777 - DNA, 33 bp, Homo sapien
tttaaggaaagaattaagaatatgcaaagattt

SEQ ID NO: 878778 - DNA, 33 bp, Homo sapien
tttaaggaaagaattaggaatatgcaaagattt

SEQ ID NO: 878779 - DNA, 33 bp, Homo sapien
gtaagccaattactcacgattcctgacactagg

SEQ ID NO: 878780 - DNA, 33 bp, Homo sapien
gtaagccaattactcatgattcctgacactagg

SEQ ID NO: 878781 - DNA, 33 bp, Homo sapien
ctaagagaataaggtacatttatacttggaaaa

SEQ ID NO: 878782 - DNA, 33 bp, Homo sapien
ctaagagaataaggtagatttatacttggaaaa

SEQ ID NO: 878783 - DNA, 33 bp, Homo sapien
acacgaatgtggatagacctaaaaaaccgagaa

SEQ ID NO: 878784 - DNA, 33 bp, Homo sapien
acacgaatgtggataggcctaaaaaaccgagaa

SEQ ID NO: 878785 - DNA, 33 bp, Homo sapien
ttgcacgcctaccccccagaagaaattatgaca

SEQ ID NO: 878786 - DNA, 33 bp, Homo sapien
ttgcacgcctaccccctagaagaaattatgaca

SEQ ID NO: 878787 - DNA, 33 bp, Homo sapien
ttttgcaaatactggccatgttttcattttcca

SEQ ID NO: 878788 - DNA, 33 bp, Homo sapien
ttttgcaaatactggctatgttttcattttcca

SEQ ID NO: 878789 - DNA, 33 bp, Homo sapien
aaagtttggaaagtgacgagaaggttgactttt

SEQ ID NO: 878790 - DNA, 33 bp, Homo sapien
aaagtttggaaagtgatgagaaggttgactttt

SEQ ID NO: 878791 - DNA, 33 bp, Homo sapien
ttggaatctggaagcaacacaatattaataaca

SEQ ID NO: 878792 - DNA, 33 bp, Homo sapien
ttggaatctggaagcagcacaatattaataaca

SEQ ID NO: 878793 - DNA, 33 bp, Homo sapien
gtcctgtttcctaccacgctttctcatttcact

SEQ ID NO: 878794 - DNA, 33 bp, Homo sapien
gtcctgtttcctaccatgctttctcatttcact

SEQ ID NO: 878795 - DNA, 33 bp, Homo sapien
aaaagtactggacccggaatcaggtgtccttcc

SEQ ID NO: 878796 - DNA, 33 bp, Homo sapien
aaaagtactggacccgtaatcaggtgtccttcc

SEQ ID NO: 878797 - DNA, 33 bp, Homo sapien
tagaagggattaaagagaggccaaaagttataa

SEQ ID NO: 878798 - DNA, 33 bp, Homo sapien
tagaagggattaaagataggccaaaagttataa

SEQ ID NO: 878799 - DNA, 33 bp, Homo sapien
gtttagtgcattctctgagaacattatagctca

SEQ ID NO: 878800 - DNA, 33 bp, Homo sapien
gtttagtgcattctcttagaacattatagctca

SEQ ID NO: 878801 - DNA, 33 bp, Homo sapien
taggagtcttagcttccaaatgcaggttgataa

SEQ ID NO: 878802 - DNA, 33 bp, Homo sapien
taggagtcttagcttctaaatgcaggttgataa

SEQ ID NO: 878803 - DNA, 33 bp, Homo sapien
gattagaaggatcaaaacatcaaataaaaggcc

SEQ ID NO: 878804 - DNA, 33 bp, Homo sapien
gattagaaggatcaaatcatcaaataaaaggcc

SEQ ID NO: 878805 - DNA, 33 bp, Homo sapien
cacctagagctgaggccgacaaaagtatcaacc

SEQ ID NO: 878806 - DNA, 33 bp, Homo sapien
cacctagagctgaggctgacaaaagtatcaacc

SEQ ID NO: 878807 - DNA, 33 bp, Homo sapien
ttcctagttgattctacaaggacttgaccaata

SEQ ID NO: 878808 - DNA, 33 bp, Homo sapien
ttcctagttgattctataaggacttgaccaata

SEQ ID NO: 878809 - DNA, 33 bp, Homo sapien
aagaaaagacctgttacaggaattgattcatac

SEQ ID NO: 878810 - DNA, 33 bp, Homo sapien
aagaaaagacctgttataggaattgattcatac

SEQ ID NO: 878811 - DNA, 33 bp, Homo sapien
tttcttaaatgttctgcatgaaaacgtaggtga

SEQ ID NO: 878812 - DNA, 33 bp, Homo sapien
tttcttaaatgttctgtatgaaaacgtaggtga

SEQ ID NO: 878813 - DNA, 33 bp, Homo sapien
cctaaatcaagtaggaaagaggaattgtcaaat

SEQ ID NO: 878814 - DNA, 33 bp, Homo sapien
cctaaatcaagtaggagagaggaattgtcaaat

SEQ ID NO: 878815 - DNA, 33 bp, Homo sapien
tatgttaacagatgagaatctttcttggtagaa

SEQ ID NO: 878816 - DNA, 33 bp, Homo sapien
tatgttaacagatgaggatctttcttggtagaa

SEQ ID NO: 878817 - DNA, 33 bp, Homo sapien
ttttaaatatggcctaccctgtattacataggc

SEQ ID NO: 878818 - DNA, 33 bp, Homo sapien
ttttaaatatggcctatcctgtattacataggc

SEQ ID NO: 878819 - DNA, 33 bp, Homo sapien
gatttacttttaaaatcagcagcgatcttaaaa

SEQ ID NO: 878820 - DNA, 33 bp, Homo sapien
gatttacttttaaaattagcagcgatcttaaaa

SEQ ID NO: 878821 - DNA, 33 bp, Homo sapien
gcaacatagcaattacccaaggaaagtggaggc

SEQ ID NO: 878822 - DNA, 33 bp, Homo sapien
gcaacatagcaattactcaaggaaagtggaggc

SEQ ID NO: 878823 - DNA, 33 bp, Homo sapien
ttgcccctgacctagcaattttacttgagagta

SEQ ID NO: 878824 - DNA, 33 bp, Homo sapien
ttgcccctgacctagcgattttacttgagagta

SEQ ID NO: 878825 - DNA, 33 bp, Homo sapien
taccagatttttactgaactttcactacatttg

SEQ ID NO: 878826 - DNA, 33 bp, Homo sapien
taccagatttttactgtactttcactacatttg

SEQ ID NO: 878827 - DNA, 33 bp, Homo sapien
cctgactttgtaaaagactaggtttcctttcag

SEQ ID NO: 878828 - DNA, 33 bp, Homo sapien
cctgactttgtaaaagcctaggtttcctttcag

SEQ ID NO: 878829 - DNA, 33 bp, Homo sapien
atgatgagtttatccactatggtctcttacaga

SEQ ID NO: 878830 - DNA, 33 bp, Homo sapien
atgatgagtttatccattatggtctcttacaga

SEQ ID NO: 878831 - DNA, 33 bp, Homo sapien
caacattactgacttcaaaattaatctacaagt

SEQ ID NO: 878832 - DNA, 33 bp, Homo sapien
caacattactgacttctaaattaatctacaagt

SEQ ID NO: 878833 - DNA, 33 bp, Homo sapien
gtttttagcatgccaccgaaataattttaattg

SEQ ID NO: 878834 - DNA, 33 bp, Homo sapien
gtttttagcatgccactgaaataattttaattg

SEQ ID NO: 878835 - DNA, 33 bp, Homo sapien
catatcaaactgatacaattggctgtgtaattc

SEQ ID NO: 878836 - DNA, 33 bp, Homo sapien
catatcaaactgataccattggctgtgtaattc

SEQ ID NO: 878837 - DNA, 33 bp, Homo sapien
tttcattttgtacaccaggaagctcagaatcaa

SEQ ID NO: 878838 - DNA, 33 bp, Homo sapien
tttcattttgtacaccgggaagctcagaatcaa

SEQ ID NO: 878839 - DNA, 33 bp, Homo sapien
aggcaaggccattatcggaaaagtttgtaaaaa

SEQ ID NO: 878840 - DNA, 33 bp, Homo sapien
aggcaaggccattatctgaaaagtttgtaaaaa

SEQ ID NO: 878841 - DNA, 33 bp, Homo sapien
attcacagattgtttaagctatcactagattgt

SEQ ID NO: 878842 - DNA, 33 bp, Homo sapien
attcacagattgtttaggctatcactagattgt

SEQ ID NO: 878843 - DNA, 33 bp, Homo sapien
aatagagccacctgggaatttattagcctgaaa

SEQ ID NO: 878844 - DNA, 33 bp, Homo sapien
aatagagccacctggggatttattagcctgaaa

SEQ ID NO: 878845 - DNA, 33 bp, Homo sapien
cttgttaattgaatgaatagttctggataatgg

SEQ ID NO: 878846 - DNA, 33 bp, Homo sapien
cttgttaattgaatgactagttctggataatgg

SEQ ID NO: 878847 - DNA, 33 bp, Homo sapien
atatattttgtaaggaatcaactattaagtgac

SEQ ID NO: 878848 - DNA, 33 bp, Homo sapien
atatattttgtaaggattcaactattaagtgac

SEQ ID NO: 878849 - DNA, 33 bp, Homo sapien
aatagtctaaataaagaacagcaatattgccaa

SEQ ID NO: 878850 - DNA, 33 bp, Homo sapien
aatagtctaaataaagtacagcaatattgccaa

SEQ ID NO: 878851 - DNA, 33 bp, Homo sapien
ggctatggttattggccgcagaaacatcatatt

SEQ ID NO: 878852 - DNA, 33 bp, Homo sapien
ggctatggttattggctgcagaaacatcatatt

SEQ ID NO: 878853 - DNA, 33 bp, Homo sapien
gagtggacccttagagactaagcaggctatggt

SEQ ID NO: 878854 - DNA, 33 bp, Homo sapien
gagtggacccttagaggctaagcaggctatggt

SEQ ID NO: 878855 - DNA, 33 bp, Homo sapien
catacataaagacacaaaatctcagaaaaacct

SEQ ID NO: 878856 - DNA, 33 bp, Homo sapien
catacataaagacacagaatctcagaaaaacct

SEQ ID NO: 878857 - DNA, 33 bp, Homo sapien
acttgaaccaacgttcccgatttatctaatagt

SEQ ID NO: 878858 - DNA, 33 bp, Homo sapien
acttgaaccaacgttctcgatttatctaatagt

SEQ ID NO: 878859 - DNA, 33 bp, Homo sapien
tataatcgctgtaaaaatatctcatttgtacta

SEQ ID NO: 878860 - DNA, 33 bp, Homo sapien
tataatcgctgtaaaattatctcatttgtacta

SEQ ID NO: 878861 - DNA, 33 bp, Homo sapien
acgtgctgctgagaaacggacacagatcttcac

SEQ ID NO: 878862 - DNA, 33 bp, Homo sapien
acgtgctgctgagaaatggacacagatcttcac

SEQ ID NO: 878863 - DNA, 33 bp, Homo sapien
gacatacctgcttgtactaaacagttggtacat

SEQ ID NO: 878864 - DNA, 33 bp, Homo sapien
gacatacctgcttgtattaaacagttggtacat

SEQ ID NO: 878865 - DNA, 33 bp, Homo sapien
gtattccatgtaggaaagagatagatagaaatg

SEQ ID NO: 878866 - DNA, 33 bp, Homo sapien
gtattccatgtaggaaggagatagatagaaatg

SEQ ID NO: 878867 - DNA, 33 bp, Homo sapien
ccgggagttactggaactcttgtaccatgcaat

SEQ ID NO: 878868 - DNA, 33 bp, Homo sapien
ccgggagttactggaattcttgtaccatgcaat

SEQ ID NO: 878869 - DNA, 33 bp, Homo sapien
atttgctgagttactaggcaaatttcacaatta

SEQ ID NO: 878870 - DNA, 33 bp, Homo sapien
atttgctgagttactatgcaaatttcacaatta

SEQ ID NO: 878871 - DNA, 33 bp, Homo sapien
acatgggttttccttaaagaagcagcaggtgga

SEQ ID NO: 878872 - DNA, 33 bp, Homo sapien
acatgggttttccttagagaagcagcaggtgga

SEQ ID NO: 878873 - DNA, 33 bp, Homo sapien
aaacaatatgtcaaaggagaggaaataggtatt

SEQ ID NO: 878874 - DNA, 33 bp, Homo sapien
aaacaatatgtcaaagtagaggaaataggtatt

SEQ ID NO: 878875 - DNA, 33 bp, Homo sapien
tggaagacagtctcggaattcaggaagctagct

SEQ ID NO: 878876 - DNA, 33 bp, Homo sapien
tggaagacagtctcggcattcaggaagctagct

SEQ ID NO: 878877 - DNA, 33 bp, Homo sapien
catagtgagatctgtacaaaaaaatttttttaa

SEQ ID NO: 878878 - DNA, 33 bp, Homo sapien
catagtgagatctgtagaaaaaaatttttttaa

SEQ ID NO: 878879 - DNA, 33 bp, Homo sapien
gacagatcttgctataaccacagagaaggaaat

SEQ ID NO: 878880 - DNA, 33 bp, Homo sapien
gacagatcttgctatagccacagagaaggaaat

SEQ ID NO: 878881 - DNA, 33 bp, Homo sapien
tgtctccttggctcaaaaacctgcaaagtctac

SEQ ID NO: 878882 - DNA, 33 bp, Homo sapien
tgtctccttggctcaacaacctgcaaagtctac

SEQ ID NO: 878883 - DNA, 33 bp, Homo sapien
aaaatccctaaacatacaggtcacctcctctct

SEQ ID NO: 878884 - DNA, 33 bp, Homo sapien
aaaatccctaaacatagaggtcacctcctctct

SEQ ID NO: 878885 - DNA, 33 bp, Homo sapien
gtacactaaccagaacaataccttttgattttt

SEQ ID NO: 878886 - DNA, 33 bp, Homo sapien
gtacactaaccagaacgataccttttgattttt

SEQ ID NO: 878887 - DNA, 33 bp, Homo sapien
ccaggcaagcatttccaaaccttgtttctgcaa

SEQ ID NO: 878888 - DNA, 33 bp, Homo sapien
ccaggcaagcatttccgaaccttgtttctgcaa

SEQ ID NO: 878889 - DNA, 33 bp, Homo sapien
agtcagctaaggggaccgcttggatagtctgac

SEQ ID NO: 878890 - DNA, 33 bp, Homo sapien
agtcagctaaggggactgcttggatagtctgac

SEQ ID NO: 878891 - DNA, 33 bp, Homo sapien
gggtagcctctctagacgttgcaaacaagccat

SEQ ID NO: 878892 - DNA, 33 bp, Homo sapien
gggtagcctctctagatgttgcaaacaagccat

SEQ ID NO: 878893 - DNA, 33 bp, Homo sapien
aagttactagtcggccaatgtagaatcaaatca

SEQ ID NO: 878894 - DNA, 33 bp, Homo sapien
aagttactagtcggccgatgtagaatcaaatca

SEQ ID NO: 878895 - DNA, 33 bp, Homo sapien
atgatgaactgactaacaaagcagtgttagaaa

SEQ ID NO: 878896 - DNA, 33 bp, Homo sapien
atgatgaactgactaataaagcagtgttagaaa

SEQ ID NO: 878897 - DNA, 33 bp, Homo sapien
actcttaaagttctctaactcattctgacatga

SEQ ID NO: 878898 - DNA, 33 bp, Homo sapien
actcttaaagttctcttactcattctgacatga

SEQ ID NO: 878899 - DNA, 33 bp, Homo sapien
aaatgaactacctaatgataggagaccaagcag

SEQ ID NO: 878900 - DNA, 33 bp, Homo sapien
aaatgaactacctaattataggagaccaagcag

SEQ ID NO: 878901 - DNA, 33 bp, Homo sapien
aggctttcatggtcaaccgcaatctctgtgact

SEQ ID NO: 878902 - DNA, 33 bp, Homo sapien
aggctttcatggtcaagcgcaatctctgtgact

SEQ ID NO: 878903 - DNA, 33 bp, Homo sapien
gagggaattatagggacatgaaattcggcttag

SEQ ID NO: 878904 - DNA, 33 bp, Homo sapien
gagggaattatagggatatgaaattcggcttag

SEQ ID NO: 878905 - DNA, 33 bp, Homo sapien
gcacaatggaaggagcaaggaaattggaatcag

SEQ ID NO: 878906 - DNA, 33 bp, Homo sapien
gcacaatggaaggagcgaggaaattggaatcag

SEQ ID NO: 878907 - DNA, 33 bp, Homo sapien
tggtagaatatcacacactcgccaacctcggtc

SEQ ID NO: 878908 - DNA, 33 bp, Homo sapien
tggtagaatatcacactctcgccaacctcggtc

SEQ ID NO: 878909 - DNA, 33 bp, Homo sapien
tgactcggggaactaactgtggaaacgtatagc

SEQ ID NO: 878910 - DNA, 33 bp, Homo sapien
tgactcggggaactaattgtggaaacgtatagc

SEQ ID NO: 878911 - DNA, 33 bp, Homo sapien
aaacagggtggagagcaattcagagaaacactg

SEQ ID NO: 878912 - DNA, 33 bp, Homo sapien
aaacagggtggagagcgattcagagaaacactg

SEQ ID NO: 878913 - DNA, 33 bp, Homo sapien
tttctcagatatcaaacggacatatttttcaac

SEQ ID NO: 878914 - DNA, 33 bp, Homo sapien
tttctcagatatcaaatggacatatttttcaac

SEQ ID NO: 878915 - DNA, 33 bp, Homo sapien
agatgatactatacaacgcaggtcttgaaatta

SEQ ID NO: 878916 - DNA, 33 bp, Homo sapien
agatgatactatacaaggcaggtcttgaaatta

SEQ ID NO: 878917 - DNA, 33 bp, Homo sapien
acatatgatcgctaaaactgtagcgttcatttt

SEQ ID NO: 878918 - DNA, 33 bp, Homo sapien
acatatgatcgctaaacctgtagcgttcatttt

SEQ ID NO: 878919 - DNA, 33 bp, Homo sapien
ttttcaactcacttacgagattaacattacaat

SEQ ID NO: 878920 - DNA, 33 bp, Homo sapien
ttttcaactcacttactagattaacattacaat

SEQ ID NO: 878921 - DNA, 33 bp, Homo sapien
ctaacagattgtcttacaagcaactcaaattca

SEQ ID NO: 878922 - DNA, 33 bp, Homo sapien
ctaacagattgtcttagaagcaactcaaattca

SEQ ID NO: 878923 - DNA, 33 bp, Homo sapien
cacaggtagagccaaactaagttgagagaagag

SEQ ID NO: 878924 - DNA, 33 bp, Homo sapien
cacaggtagagccaaagtaagttgagagaagag

SEQ ID NO: 878925 - DNA, 33 bp, Homo sapien
ttcaacctgtctgctcaagttgaaaacgtttca

SEQ ID NO: 878926 - DNA, 33 bp, Homo sapien
ttcaacctgtctgctccagttgaaaacgtttca

SEQ ID NO: 878927 - DNA, 33 bp, Homo sapien
atcttaataaagcaaacgtacgtgtgtgtgtgt

SEQ ID NO: 878928 - DNA, 33 bp, Homo sapien
atcttaataaagcaaatgtacgtgtgtgtgtgt

SEQ ID NO: 878929 - DNA, 33 bp, Homo sapien
taatgctcaaatttccaaatttcatacttaaaa

SEQ ID NO: 878930 - DNA, 33 bp, Homo sapien
taatgctcaaatttccgaatttcatacttaaaa

SEQ ID NO: 878931 - DNA, 33 bp, Homo sapien
ttaagttatataacctcaaacgccctgatccta

SEQ ID NO: 878932 - DNA, 33 bp, Homo sapien
ttaagttatataaccttaaacgccctgatccta

SEQ ID NO: 878933 - DNA, 33 bp, Homo sapien
acagctctcacgggggaaagtgtagcactattc

SEQ ID NO: 878934 - DNA, 33 bp, Homo sapien
acagctctcacggggggaagtgtagcactattc

SEQ ID NO: 878935 - DNA, 33 bp, Homo sapien
tgggtgttgaatatttgaaagtgcaacttctgc

SEQ ID NO: 878936 - DNA, 33 bp, Homo sapien
tgggtgttgaatattttaaagtgcaacttctgc

SEQ ID NO: 878937 - DNA, 33 bp, Homo sapien
aaaaaacctacagtcacaacacactaaatggca

SEQ ID NO: 878938 - DNA, 33 bp, Homo sapien
aaaaaacctacagtcataacacactaaatggca

SEQ ID NO: 878939 - DNA, 33 bp, Homo sapien
gctacacagactagggaaaagttcaaacaggta

SEQ ID NO: 878940 - DNA, 33 bp, Homo sapien
gctacacagactaggggaaagttcaaacaggta

SEQ ID NO: 878941 - DNA, 33 bp, Homo sapien
acatactaaaaacccaatgcagaatgggtgctg

SEQ ID NO: 878942 - DNA, 33 bp, Homo sapien
acatactaaaaacccagtgcagaatgggtgctg

SEQ ID NO: 878943 - DNA, 33 bp, Homo sapien
gacaactctgctatgaaccccacccagcatttc

SEQ ID NO: 878944 - DNA, 33 bp, Homo sapien
gacaactctgctatgatccccacccagcatttc

SEQ ID NO: 878945 - DNA, 33 bp, Homo sapien
gaaattgtaagctaaaatccgatcaggtggcac

SEQ ID NO: 878946 - DNA, 33 bp, Homo sapien
gaaattgtaagctaaagtccgatcaggtggcac

SEQ ID NO: 878947 - DNA, 33 bp, Homo sapien
ataggactctacacaccgctttactttgtctat

SEQ ID NO: 878948 - DNA, 33 bp, Homo sapien
ataggactctacacactgctttactttgtctat

SEQ ID NO: 878949 - DNA, 33 bp, Homo sapien
tctaacaggcaactagacatatctaccaagatg

SEQ ID NO: 878950 - DNA, 33 bp, Homo sapien
tctaacaggcaactagccatatctaccaagatg

SEQ ID NO: 878951 - DNA, 33 bp, Homo sapien
ttgcttgctcttaaccggaacacggctctatca

SEQ ID NO: 878952 - DNA, 33 bp, Homo sapien
ttgcttgctcttaacctgaacacggctctatca

SEQ ID NO: 878953 - DNA, 33 bp, Homo sapien
ggtatcgtgtcctgaaacctgttagtacattga

SEQ ID NO: 878954 - DNA, 33 bp, Homo sapien
ggtatcgtgtcctgaaccctgttagtacattga

SEQ ID NO: 878955 - DNA, 33 bp, Homo sapien
gaagagtggacagtcacgaagaaatgtgattgg

SEQ ID NO: 878956 - DNA, 33 bp, Homo sapien
gaagagtggacagtcatgaagaaatgtgattgg

SEQ ID NO: 878957 - DNA, 33 bp, Homo sapien
ttatttaagagtcttaacagatttaatccaaat

SEQ ID NO: 878958 - DNA, 33 bp, Homo sapien
ttatttaagagtcttatcagatttaatccaaat

SEQ ID NO: 878959 - DNA, 33 bp, Homo sapien
tattcttctgggtgtacactcagtgatgggatt

SEQ ID NO: 878960 - DNA, 33 bp, Homo sapien
tattcttctgggtgtatactcagtgatgggatt

SEQ ID NO: 878961 - DNA, 33 bp, Homo sapien
gaatgcatcaatgcaacttagctacctcactag

SEQ ID NO: 878962 - DNA, 33 bp, Homo sapien
gaatgcatcaatgcaagttagctacctcactag

SEQ ID NO: 878963 - DNA, 33 bp, Homo sapien
ataaatcttaatggaaaccaatgttctgctgaa

SEQ ID NO: 878964 - DNA, 33 bp, Homo sapien
ataaatcttaatggaagccaatgttctgctgaa

SEQ ID NO: 878965 - DNA, 33 bp, Homo sapien
gcctctgtttaagcaactattttaccatttggc

SEQ ID NO: 878966 - DNA, 33 bp, Homo sapien
gcctctgtttaagcaattattttaccatttggc

SEQ ID NO: 878967 - DNA, 33 bp, Homo sapien
atactgagaagaactagattggcggtatgcccc

SEQ ID NO: 878968 - DNA, 33 bp, Homo sapien
atactgagaagaactatattggcggtatgcccc

SEQ ID NO: 878969 - DNA, 33 bp, Homo sapien
cggttagtattgcacaatatatcttctttttca

SEQ ID NO: 878970 - DNA, 33 bp, Homo sapien
cggttagtattgcacagtatatcttctttttca

SEQ ID NO: 878971 - DNA, 33 bp, Homo sapien
acattacatttactcaccaaaatgcatcttttt

SEQ ID NO: 878972 - DNA, 33 bp, Homo sapien
acattacatttactcatcaaaatgcatcttttt

SEQ ID NO: 878973 - DNA, 33 bp, Homo sapien
ctgagaaagagtttgacggttcctggccagcct

SEQ ID NO: 878974 - DNA, 33 bp, Homo sapien
ctgagaaagagtttgatggttcctggccagcct

SEQ ID NO: 878975 - DNA, 33 bp, Homo sapien
agcaatgaacctgaccaatatgtccttgcctcc

SEQ ID NO: 878976 - DNA, 33 bp, Homo sapien
agcaatgaacctgacccatatgtccttgcctcc

SEQ ID NO: 878977 - DNA, 33 bp, Homo sapien
gtatcttactgcaatacagaattttactcttct

SEQ ID NO: 878978 - DNA, 33 bp, Homo sapien
gtatcttactgcaatagagaattttactcttct

SEQ ID NO: 878979 - DNA, 33 bp, Homo sapien
aactgaaggcaaaaaccacgtgattatttcaat

SEQ ID NO: 878980 - DNA, 33 bp, Homo sapien
aactgaaggcaaaaactacgtgattatttcaat

SEQ ID NO: 878981 - DNA, 33 bp, Homo sapien
ttttcttttcttctccacgactgaacagattta

SEQ ID NO: 878982 - DNA, 33 bp, Homo sapien
ttttcttttcttctccgcgactgaacagattta

SEQ ID NO: 878983 - DNA, 33 bp, Homo sapien
gcgcttggttgctagaagaaagggacttgatgg

SEQ ID NO: 878984 - DNA, 33 bp, Homo sapien
gcgcttggttgctagaggaaagggacttgatgg

SEQ ID NO: 878985 - DNA, 33 bp, Homo sapien; identical to SEQ ID NO: 878983

SEQ ID NO: 878986 - DNA, 33 bp, Homo sapien; identical to SEQ ID NO: 878984

SEQ ID NO: 878987 - DNA, 33 bp, Homo sapien
atcactcagagaattacggttttgcatccctcg

SEQ ID NO: 878988 - DNA, 33 bp, Homo sapien
atcactcagagaattatggttttgcatccctcg

SEQ ID NO: 878989 - DNA, 33 bp, Homo sapien
gtagaactcaatttgacactcaatttctatgat

SEQ ID NO: 878990 - DNA, 33 bp, Homo sapien
gtagaactcaatttgatactcaatttctatgat

SEQ ID NO: 878991 - DNA, 33 bp, Homo sapien
tcttggcttctaggaaatgtagaactcaatttg

SEQ ID NO: 878992 - DNA, 33 bp, Homo sapien
tcttggcttctaggaagtgtagaactcaatttg

SEQ ID NO: 878993 - DNA, 33 bp, Homo sapien
tttcttacaatgaccacgattttttttctacac

SEQ ID NO: 878994 - DNA, 33 bp, Homo sapien
tttcttacaatgaccatgattttttttctacac

SEQ ID NO: 878995 - DNA, 33 bp, Homo sapien
ttgctattgttacctacgagagttaattgtttc

SEQ ID NO: 878996 - DNA, 33 bp, Homo sapien
ttgctattgttacctatgagagttaattgtttc

SEQ ID NO: 878997 - DNA, 33 bp, Homo sapien
aatgcctttcaggcaccgggtgtgtaggtcttg

SEQ ID NO: 878998 - DNA, 33 bp, Homo sapien
aatgcctttcaggcactgggtgtgtaggtcttg

SEQ ID NO: 878999 - DNA, 33 bp, Homo sapien
aaagtttagcagagaaccacaatagctgtggaa

SEQ ID NO: 879000 - DNA, 33 bp, Homo sapien
aaagtttagcagagaagcacaatagctgtggaa

SEQ ID NO: 879001 - DNA, 33 bp, Homo sapien
gacgtcggtttctacccacggagccagctctgt

SEQ ID NO: 879002 - DNA, 33 bp, Homo sapien
gacgtcggtttctacctacggagccagctctgt

SEQ ID NO: 879003 - DNA, 33 bp, Homo sapien
catcttagtcttcagaacactggctacccatgt

SEQ ID NO: 879004 - DNA, 33 bp, Homo sapien
catcttagtcttcagagcactggctacccatgt

SEQ ID NO: 879005 - DNA, 33 bp, Homo sapien
agcatcaacataagtacggcaaaaactgagaac

SEQ ID NO: 879006 - DNA, 33 bp, Homo sapien
agcatcaacataagtatggcaaaaactgagaac

SEQ ID NO: 879007 - DNA, 33 bp, Homo sapien
ttaggatctattagcacagtctttgtggtccac

SEQ ID NO: 879008 - DNA, 33 bp, Homo sapien
ttaggatctattagcatagtctttgtggtccac

SEQ ID NO: 879009 - DNA, 33 bp, Homo sapien
cttctggtgtcagcataaaaaaaaagacagtta

SEQ ID NO: 879010 - DNA, 33 bp, Homo sapien
cttctggtgtcagcattaaaaaaaagacagtta

SEQ ID NO: 879011 - DNA, 33 bp, Homo sapien
attgtagaaatctgaactgacttccctcaaatc

SEQ ID NO: 879012 - DNA, 33 bp, Homo sapien
attgtagaaatctgaattgacttccctcaaatc

SEQ ID NO: 879013 - DNA, 33 bp, Homo sapien
aaccaacaaactttaaatgtaccaggcagtgat

SEQ ID NO: 879014 - DNA, 33 bp, Homo sapien
aaccaacaaactttaagtgtaccaggcagtgat

SEQ ID NO: 879015 - DNA, 33 bp, Homo sapien
gagaatagaaagaatcactactacatttgtgct

SEQ ID NO: 879016 - DNA, 33 bp, Homo sapien
gagaatagaaagaatcgctactacatttgtgct

SEQ ID NO: 879017 - DNA, 33 bp, Homo sapien
atggcaggaactggcactagtctatggtgaaca

SEQ ID NO: 879018 - DNA, 33 bp, Homo sapien
atggcaggaactggcagtagtctatggtgaaca

SEQ ID NO: 879019 - DNA, 33 bp, Homo sapien
cctttagttagtgcagcaattctactggtaata

SEQ ID NO: 879020 - DNA, 33 bp, Homo sapien
cctttagttagtgcaggaattctactggtaata

SEQ ID NO: 879021 - DNA, 33 bp, Homo sapien
attcaactggtttctacataatgctacctctcc

SEQ ID NO: 879022 - DNA, 33 bp, Homo sapien
attcaactggtttctatataatgctacctctcc

SEQ ID NO: 879023 - DNA, 33 bp, Homo sapien
agaactagagacactaaaagtcgagagccacct

SEQ ID NO: 879024 - DNA, 33 bp, Homo sapien
agaactagagacactagaagtcgagagccacct

SEQ ID NO: 879025 - DNA, 33 bp, Homo sapien
cttaccccagacaacaccaccacttcaatagaa

SEQ ID NO: 879026 - DNA, 33 bp, Homo sapien
cttaccccagacaacatcaccacttcaatagaa

SEQ ID NO: 879027 - DNA, 33 bp, Homo sapien
agctaggttgagataacgaactagttaaagcca

SEQ ID NO: 879028 - DNA, 33 bp, Homo sapien
agctaggttgagataatgaactagttaaagcca

SEQ ID NO: 879029 - DNA, 33 bp, Homo sapien
gtagttgtttactgacacatattctcacattaa

SEQ ID NO: 879030 - DNA, 33 bp, Homo sapien
gtagttgtttactgacgcatattctcacattaa

SEQ ID NO: 879031 - DNA, 33 bp, Homo sapien
agcaagactggatagaacatagggtaaaataat

SEQ ID NO: 879032 - DNA, 33 bp, Homo sapien
agcaagactggatagagcatagggtaaaataat

SEQ ID NO: 879033 - DNA, 33 bp, Homo sapien
agggtctctgcaggaactagaattgggatgaag

SEQ ID NO: 879034 - DNA, 33 bp, Homo sapien
agggtctctgcaggaattagaattgggatgaag

SEQ ID NO: 879035 - DNA, 33 bp, Homo sapien
ggcatggcagaaagaactatctgagaaggcttc

SEQ ID NO: 879036 - DNA, 33 bp, Homo sapien
ggcatggcagaaagaattatctgagaaggcttc

SEQ ID NO: 879037 - DNA, 33 bp, Homo sapien
atggggactgacattacgtattattgcaaaata

SEQ ID NO: 879038 - DNA, 33 bp, Homo sapien
atggggactgacattatgtattattgcaaaata

SEQ ID NO: 879039 - DNA, 33 bp, Homo sapien
gctttgatgaattggagaaaaaagcagtacaac

SEQ ID NO: 879040 - DNA, 33 bp, Homo sapien
gctttgatgaattggataaaaaagcagtacaac

SEQ ID NO: 879041 - DNA, 33 bp, Homo sapien
aactaattcatgctaaaatgtgaatgactaaat

SEQ ID NO: 879042 - DNA, 33 bp, Homo sapien
aactaattcatgctaagatgtgaatgactaaat

SEQ ID NO: 879043 - DNA, 33 bp, Homo sapien
gtatgagatgctatacacggaatagctcagaga

SEQ ID NO: 879044 - DNA, 33 bp, Homo sapien
gtatgagatgctatactcggaatagctcagaga

SEQ ID NO: 879045 - DNA, 33 bp, Homo sapien
tgtgtacaacagcaaaaagaaatctaagcaata

SEQ ID NO: 879046 - DNA, 33 bp, Homo sapien
tgtgtacaacagcaaagagaaatctaagcaata

SEQ ID NO: 879047 - DNA, 33 bp, Homo sapien
ctgaatcttcgctaaacaaccgagctaacccat

SEQ ID NO: 879048 - DNA, 33 bp, Homo sapien
ctgaatcttcgctaaagaaccgagctaacccat

SEQ ID NO: 879049 - DNA, 33 bp, Homo sapien
tttagttaagacagaaagcttcagaaaagccca

SEQ ID NO: 879050 - DNA, 33 bp, Homo sapien
tttagttaagacagaatgcttcagaaaagccca

SEQ ID NO: 879051 - DNA, 33 bp, Homo sapien
catgaaattcaactcactctcccaccttatgca

SEQ ID NO: 879052 - DNA, 33 bp, Homo sapien
catgaaattcaactcattctcccaccttatgca

SEQ ID NO: 879053 - DNA, 33 bp, Homo sapien
tactgcctgataactacaagcaacttaccttca

SEQ ID NO: 879054 - DNA, 33 bp, Homo sapien
tactgcctgataactagaagcaacttaccttca

SEQ ID NO: 879055 - DNA, 33 bp, Homo sapien
ttcaggaaatttgttacctgcttagcaattttt

SEQ ID NO: 879056 - DNA, 33 bp, Homo sapien
ttcaggaaatttgttagctgcttagcaattttt

SEQ ID NO: 879057 - DNA, 33 bp, Homo sapien
atatcccggtgccccaagaatttggaaaggaaa

SEQ ID NO: 879058 - DNA, 33 bp, Homo sapien
atatcccggtgccccacgaatttggaaaggaaa

SEQ ID NO: 879059 - DNA, 33 bp, Homo sapien
tgaaagaaagtagaaaacaatggcacttaaaac

SEQ ID NO: 879060 - DNA, 33 bp, Homo sapien
tgaaagaaagtagaaagcaatggcacttaaaac

SEQ ID NO: 879061 - DNA, 33 bp, Homo sapien
gcatggttagtatgaaaaaagctgccattatca

SEQ ID NO: 879062 - DNA, 33 bp, Homo sapien
gcatggttagtatgaagaaagctgccattatca

SEQ ID NO: 879063 - DNA, 33 bp, Homo sapien
actgataggtgcccctcaatcctaggatgttca

SEQ ID NO: 879064 - DNA, 33 bp, Homo sapien
actgataggtgccccttaatcctaggatgttca

SEQ ID NO: 879065 - DNA, 33 bp, Homo sapien
aattctgatttttctccgacggcatatattagt

SEQ ID NO: 879066 - DNA, 33 bp, Homo sapien
aattctgatttttctctgacggcatatattagt

SEQ ID NO: 879067 - DNA, 33 bp, Homo sapien
gttgggtttaggccggcatctgtgttggattgg

SEQ ID NO: 879068 - DNA, 33 bp, Homo sapien
gttgggtttaggccggtatctgtgttggattgg

SEQ ID NO: 879069 - DNA, 33 bp, Homo sapien
ccaattgaactttgcactaaacacacacacacc

SEQ ID NO: 879070 - DNA, 33 bp, Homo sapien
ccaattgaactttgcattaaacacacacacacc

SEQ ID NO: 879071 - DNA, 33 bp, Homo sapien
gcttccagggggattaacttcttaagtcttata

SEQ ID NO: 879072 - DNA, 33 bp, Homo sapien
gcttccagggggattagcttcttaagtcttata

SEQ ID NO: 879073 - DNA, 33 bp, Homo sapien
ctatgatcatggttaacgttccaaggcggggtc

SEQ ID NO: 879074 - DNA, 33 bp, Homo sapien
ctatgatcatggttaatgttccaaggcggggtc

SEQ ID NO: 879075 - DNA, 33 bp, Homo sapien
gggttgacaaatccaagtacagtgatttttcct

SEQ ID NO: 879076 - DNA, 33 bp, Homo sapien
gggttgacaaatccaattacagtgatttttcct

SEQ ID NO: 879077 - DNA, 33 bp, Homo sapien
tacacagaatattctaagatctctgtgaagtgt

SEQ ID NO: 879078 - DNA, 33 bp, Homo sapien
tacacagaatattctacgatctctgtgaagtgt

SEQ ID NO: 879079 - DNA, 33 bp, Homo sapien
gaataatgatcccctacgctttaaagtgtctag

SEQ ID NO: 879080 - DNA, 33 bp, Homo sapien
gaataatgatcccctatgctttaaagtgtctag

SEQ ID NO: 879081 - DNA, 33 bp, Homo sapien
ggcagaaagccaagtacggtattgatatggttt

SEQ ID NO: 879082 - DNA, 33 bp, Homo sapien
ggcagaaagccaagtatggtattgatatggttt

SEQ ID NO: 879083 - DNA, 33 bp, Homo sapien
agtccaatttatgtcaagctataatcatagcag

SEQ ID NO: 879084 - DNA, 33 bp, Homo sapien
agtccaatttatgtcatgctataatcatagcag

SEQ ID NO: 879085 - DNA, 33 bp, Homo sapien
cagctttggaacaagtaaccactggagtaggaa

SEQ ID NO: 879086 - DNA, 33 bp, Homo sapien
cagctttggaacaagtcaccactggagtaggaa

SEQ ID NO: 879087 - DNA, 33 bp, Homo sapien
aataaggtcatatctacagtttccaaatattag

SEQ ID NO: 879088 - DNA, 33 bp, Homo sapien
aataaggtcatatctatagtttccaaatattag

SEQ ID NO: 879089 - DNA, 33 bp, Homo sapien
ttccatagtgttccataataaaccttgcttggg

SEQ ID NO: 879090 - DNA, 33 bp, Homo sapien
ttccatagtgttccatgataaaccttgcttggg

SEQ ID NO: 879091 - DNA, 33 bp, Homo sapien
aaaaggcaacctaatgaaatgtgaggaacggtg

SEQ ID NO: 879092 - DNA, 33 bp, Homo sapien
aaaaggcaacctaatggaatgtgaggaacggtg

SEQ ID NO: 879093 - DNA, 33 bp, Homo sapien
cttttagagacttctcacattcgtatctcaggg

SEQ ID NO: 879094 - DNA, 33 bp, Homo sapien
cttttagagacttctcgcattcgtatctcaggg

SEQ ID NO: 879095 - DNA, 33 bp, Homo sapien
cttaaaatctggaaagcccacgatctactgttc

SEQ ID NO: 879096 - DNA, 33 bp, Homo sapien
cttaaaatctggaaaggccacgatctactgttc

SEQ ID NO: 879097 - DNA, 33 bp, Homo sapien
tgtagaagggctgatccacaaatctacacagga

SEQ ID NO: 879098 - DNA, 33 bp, Homo sapien
tgtagaagggctgatctacaaatctacacagga

SEQ ID NO: 879099 - DNA, 33 bp, Homo sapien
acttagtttcttataaagtttgtgtagacaaga

SEQ ID NO: 879100 - DNA, 33 bp, Homo sapien
acttagtttcttataatgtttgtgtagacaaga

SEQ ID NO: 879101 - DNA, 33 bp, Homo sapien
gcagtcaggactttagaacactcacttgtattt

SEQ ID NO: 879102 - DNA, 33 bp, Homo sapien
gcagtcaggactttaggacactcacttgtattt

SEQ ID NO: 879103 - DNA, 33 bp, Homo sapien
tgtttacatctcttaccccacctattctccaag

SEQ ID NO: 879104 - DNA, 33 bp, Homo sapien
tgtttacatctcttactccacctattctccaag

SEQ ID NO: 879105 - DNA, 33 bp, Homo sapien
aagcagtttccatgcacgtagagtccatcgtca

SEQ ID NO: 879106 - DNA, 33 bp, Homo sapien
aagcagtttccatgcatgtagagtccatcgtca

SEQ ID NO: 879107 - DNA, 33 bp, Homo sapien
gtttcaaagtttacgaaaacatcttggtatttt

SEQ ID NO: 879108 - DNA, 33 bp, Homo sapien
gtttcaaagtttacgagaacatcttggtatttt

SEQ ID NO: 879109 - DNA, 33 bp, Homo sapien
tagtgtgctgtaaatactagagagtcagtttat

SEQ ID NO: 879110 - DNA, 33 bp, Homo sapien
tagtgtgctgtaaatattagagagtcagtttat

SEQ ID NO: 879111 - DNA, 33 bp, Homo sapien
atattagcaatggttaagctaacagtggttaac

SEQ ID NO: 879112 - DNA, 33 bp, Homo sapien
atattagcaatggttaggctaacagtggttaac

SEQ ID NO: 879113 - DNA, 33 bp, Homo sapien
aaccgcttggcttgaagttaaaagatgctgctt

SEQ ID NO: 879114 - DNA, 33 bp, Homo sapien
aaccgcttggcttgaatttaaaagatgctgctt

SEQ ID NO: 879115 - DNA, 33 bp, Homo sapien
cacctggaatgggcacacttttgggttcatttt

SEQ ID NO: 879116 - DNA, 33 bp, Homo sapien
cacctggaatgggcacgcttttgggttcatttt

SEQ ID NO: 879117 - DNA, 33 bp, Homo sapien
catttgcttgataaacgaacaaatgtttgcatg

SEQ ID NO: 879118 - DNA, 33 bp, Homo sapien
catttgcttgataaactaacaaatgtttgcatg

SEQ ID NO: 879119 - DNA, 33 bp, Homo sapien
tacattgcaaccgaccacaactatgggatgcga

SEQ ID NO: 879120 - DNA, 33 bp, Homo sapien
tacattgcaaccgaccgcaactatgggatgcga

SEQ ID NO: 879121 - DNA, 33 bp, Homo sapien
taaaaaactaatacaccggccacgaagaagtag

SEQ ID NO: 879122 - DNA, 33 bp, Homo sapien
taaaaaactaatacactggccacgaagaagtag

SEQ ID NO: 879123 - DNA, 33 bp, Homo sapien
cagtcacaagcacctcaattctgccagccacca

SEQ ID NO: 879124 - DNA, 33 bp, Homo sapien
cagtcacaagcacctcgattctgccagccacca

SEQ ID NO: 879125 - DNA, 33 bp, Homo sapien
cccaatcctgaattagaaaaagtgagtttaggt

SEQ ID NO: 879126 - DNA, 33 bp, Homo sapien
cccaatcctgaattagtaaaagtgagtttaggt

SEQ ID NO: 879127 - DNA, 33 bp, Homo sapien
atttcaaagatacttacgttgggagaccaaacg

SEQ ID NO: 879128 - DNA, 33 bp, Homo sapien
atttcaaagatacttatgttgggagaccaaacg

SEQ ID NO: 879129 - DNA, 33 bp, Homo sapien
ttaattcacaaacacacattgccactaatacat

SEQ ID NO: 879130 - DNA, 33 bp, Homo sapien
ttaattcacaaacacatattgccactaatacat

SEQ ID NO: 879131 - DNA, 33 bp, Homo sapien
ataccttcaaccttatcaaagagatatccttat

SEQ ID NO: 879132 - DNA, 33 bp, Homo sapien
ataccttcaaccttatgaaagagatatccttat

SEQ ID NO: 879133 - DNA, 33 bp, Homo sapien
gggtatcaagaacaaaagtgcaagagtcttatt

SEQ ID NO: 879134 - DNA, 33 bp, Homo sapien
gggtatcaagaacaaaggtgcaagagtcttatt

SEQ ID NO: 879135 - DNA, 33 bp, Homo sapien
aaggccactgtctgtacccggaaaaatcccagg

SEQ ID NO: 879136 - DNA, 33 bp, Homo sapien
aaggccactgtctgtatccggaaaaatcccagg

SEQ ID NO: 879137 - DNA, 33 bp, Homo sapien
gagggtcacaccgtcaatatctcactagagtag

SEQ ID NO: 879138 - DNA, 33 bp, Homo sapien
gagggtcacaccgtcagtatctcactagagtag

SEQ ID NO: 879139 - DNA, 33 bp, Homo sapien
gaacctggacacctcacgactggaacccttaat

SEQ ID NO: 879140 - DNA, 33 bp, Homo sapien
gaacctggacacctcatgactggaacccttaat

SEQ ID NO: 879141 - DNA, 33 bp, Homo sapien
accttcctttgcataaagcaccaaactacatca

SEQ ID NO: 879142 - DNA, 33 bp, Homo sapien
accttcctttgcataaggcaccaaactacatca

SEQ ID NO: 879143 - DNA, 33 bp, Homo sapien
tcctctgtgtctgtaaactgaataatccaagta

SEQ ID NO: 879144 - DNA, 33 bp, Homo sapien
tcctctgtgtctgtaagctgaataatccaagta

SEQ ID NO: 879145 - DNA, 33 bp, Homo sapien
tgtcaatttaccacataataatccttccttcat

SEQ ID NO: 879146 - DNA, 33 bp, Homo sapien
tgtcaatttaccacatgataatccttccttcat

SEQ ID NO: 879147 - DNA, 33 bp, Homo sapien
tagtggctttaaacaccaggcatttattgtctc

SEQ ID NO: 879148 - DNA, 33 bp, Homo sapien
tagtggctttaaacacgaggcatttattgtctc

SEQ ID NO: 879149 - DNA, 33 bp, Homo sapien
aaatatttgttttcacagagaatccaacacttc

SEQ ID NO: 879150 - DNA, 33 bp, Homo sapien
aaatatttgttttcacggagaatccaacacttc

SEQ ID NO: 879151 - DNA, 33 bp, Homo sapien
cctcatttgacttggaataacgaggctcagtaa

SEQ ID NO: 879152 - DNA, 33 bp, Homo sapien
cctcatttgacttggagtaacgaggctcagtaa

SEQ ID NO: 879153 - DNA, 33 bp, Homo sapien
attatttctcccaaccaacttgacactagaagg

SEQ ID NO: 879154 - DNA, 33 bp, Homo sapien
attatttctcccaacctacttgacactagaagg

SEQ ID NO: 879155 - DNA, 33 bp, Homo sapien
gtatcctgaacagaacacgatgctgcttcttta

SEQ ID NO: 879156 - DNA, 33 bp, Homo sapien
gtatcctgaacagaacgcgatgctgcttcttta

SEQ ID NO: 879157 - DNA, 33 bp, Homo sapien
gcctgcccacaaagaactcacactgtcatagaa

SEQ ID NO: 879158 - DNA, 33 bp, Homo sapien
gcctgcccacaaagaattcacactgtcatagaa

SEQ ID NO: 879159 - DNA, 33 bp, Homo sapien
tgagaaagaacctcctcagagttgacagttttg

SEQ ID NO: 879160 - DNA, 33 bp, Homo sapien
tgagaaagaacctcctgagagttgacagttttg

SEQ ID NO: 879161 - DNA, 33 bp, Homo sapien
attctgcatcaagttgaatccatctatcttttt

SEQ ID NO: 879162 - DNA, 33 bp, Homo sapien
attctgcatcaagttggatccatctatcttttt

SEQ ID NO: 879163 - DNA, 33 bp, Homo sapien
aggtaaaggagcatcaggtctgcaacttattct

SEQ ID NO: 879164 - DNA, 33 bp, Homo sapien
aggtaaaggagcatcatgtctgcaacttattct

SEQ ID NO: 879165 - DNA, 33 bp, Homo sapien
ccacgtgtgtagatacgcaaatacttaccactg

SEQ ID NO: 879166 - DNA, 33 bp, Homo sapien
ccacgtgtgtagatactcaaatacttaccactg

SEQ ID NO: 879167 - DNA, 33 bp, Homo sapien
ccaaatgggctagaacacggacgatctgaactg

SEQ ID NO: 879168 - DNA, 33 bp, Homo sapien
ccaaatgggctagaacgcggacgatctgaactg

SEQ ID NO: 879169 - DNA, 33 bp, Homo sapien
gcaagccattctataaagtgtatctgcatgtct

SEQ ID NO: 879170 - DNA, 33 bp, Homo sapien
gcaagccattctataatgtgtatctgcatgtct

SEQ ID NO: 879171 - DNA, 33 bp, Homo sapien
gtatggtgagagtgataagtgatggtgctgact

SEQ ID NO: 879172 - DNA, 33 bp, Homo sapien
gtatggtgagagtgatgagtgatggtgctgact

SEQ ID NO: 879173 - DNA, 33 bp, Homo sapien
ttaccgtggcctgaacacttatacacacctttg

SEQ ID NO: 879174 - DNA, 33 bp, Homo sapien
ttaccgtggcctgaacgcttatacacacctttg

SEQ ID NO: 879175 - DNA, 33 bp, Homo sapien
aagcaattttcacaaacggtgttcacgaatctg

SEQ ID NO: 879176 - DNA, 33 bp, Homo sapien
aagcaattttcacaaatggtgttcacgaatctg

SEQ ID NO: 879177 - DNA, 33 bp, Homo sapien
aacagccagaaaaatacgtttttgtaatgtgac

SEQ ID NO: 879178 - DNA, 33 bp, Homo sapien
aacagccagaaaaatatgtttttgtaatgtgac

SEQ ID NO: 879179 - DNA, 33 bp, Homo sapien
ggggaaagaacaacacaaagtttccaggccttc

SEQ ID NO: 879180 - DNA, 33 bp, Homo sapien
ggggaaagaacaacacgaagtttccaggccttc

SEQ ID NO: 879181 - DNA, 33 bp, Homo sapien
atgaactgataataaacggcaagaatactaaat

SEQ ID NO: 879182 - DNA, 33 bp, Homo sapien
atgaactgataataaatggcaagaatactaaat

SEQ ID NO: 879183 - DNA, 33 bp, Homo sapien
tgctagccagaaggaacagctgtcacaaaaacc

SEQ ID NO: 879184 - DNA, 33 bp, Homo sapien
tgctagccagaaggaatagctgtcacaaaaacc

SEQ ID NO: 879185 - DNA, 33 bp, Homo sapien
cactaatcaaatgagaaggctagaagtagttgg

SEQ ID NO: 879186 - DNA, 33 bp, Homo sapien
cactaatcaaatgagagggctagaagtagttgg

SEQ ID NO: 879187 - DNA, 33 bp, Homo sapien
cttcccagactaattaagtgagaatctggggga

SEQ ID NO: 879188 - DNA, 33 bp, Homo sapien
cttcccagactaattaggtgagaatctggggga

SEQ ID NO: 879189 - DNA, 33 bp, Homo sapien
gttgggaagtgtaataccttctgatgagctact

SEQ ID NO: 879190 - DNA, 33 bp, Homo sapien
gttgggaagtgtaatatcttctgatgagctact

SEQ ID NO: 879191 - DNA, 33 bp, Homo sapien
ctggtagctagatataagcattcaaactttaca

SEQ ID NO: 879192 - DNA, 33 bp, Homo sapien
ctggtagctagatatatgcattcaaactttaca

SEQ ID NO: 879193 - DNA, 33 bp, Homo sapien
ttgtttaagccctgccacttgtggtcctttgtt

SEQ ID NO: 879194 - DNA, 33 bp, Homo sapien
ttgtttaagccctgccgcttgtggtcctttgtt

SEQ ID NO: 879195 - DNA, 33 bp, Homo sapien
gtcacccatctttcaaagtccagtaggaaaact

SEQ ID NO: 879196 - DNA, 33 bp, Homo sapien
gtcacccatctttcaaggtccagtaggaaaact

SEQ ID NO: 879197 - DNA, 33 bp, Homo sapien
tggtagaaacagcatcaaagacttaacagctaa

SEQ ID NO: 879198 - DNA, 33 bp, Homo sapien
tggtagaaacagcatcgaagacttaacagctaa

SEQ ID NO: 879199 - DNA, 33 bp, Homo sapien
tgagaagggactgataccacctactagtaaata

SEQ ID NO: 879200 - DNA, 33 bp, Homo sapien
tgagaagggactgatatcacctactagtaaata

SEQ ID NO: 879201 - DNA, 33 bp, Homo sapien
taactgtacatacataacaggccaaaatcatag

SEQ ID NO: 879202 - DNA, 33 bp, Homo sapien
taactgtacatacatagcaggccaaaatcatag

SEQ ID NO: 879203 - DNA, 33 bp, Homo sapien
ctagttcctaaaagcgcatatattgtggttccc

SEQ ID NO: 879204 - DNA, 33 bp, Homo sapien
ctagttcctaaaagcgtatatattgtggttccc

SEQ ID NO: 879205 - DNA, 33 bp, Homo sapien
catttttcagctccatcacgatctatgggacca

SEQ ID NO: 879206 - DNA, 33 bp, Homo sapien
catttttcagctccattacgatctatgggacca

SEQ ID NO: 879207 - DNA, 33 bp, Homo sapien
acagctttagtcaaatcatatacagtttaaaac

SEQ ID NO: 879208 - DNA, 33 bp, Homo sapien
acagctttagtcaaatgatatacagtttaaaac

SEQ ID NO: 879209 - DNA, 33 bp, Homo sapien
tcattcttgttagctaagggactattgtgtagg

SEQ ID NO: 879210 - DNA, 33 bp, Homo sapien
tcattcttgttagctacgggactattgtgtagg

SEQ ID NO: 879211 - DNA, 33 bp, Homo sapien
aggagagagaggttgccatcagtgaaccaagat

SEQ ID NO: 879212 - DNA, 33 bp, Homo sapien
aggagagagaggttgcgatcagtgaaccaagat

SEQ ID NO: 879213 - DNA, 33 bp, Homo sapien
aaaactagggcccaacccagaatctctaacttg

SEQ ID NO: 879214 - DNA, 33 bp, Homo sapien
aaaactagggcccaacgcagaatctctaacttg

SEQ ID NO: 879215 - DNA, 33 bp, Homo sapien
tcttggcagcctatcacgtggtgctcttgtgag

SEQ ID NO: 879216 - DNA, 33 bp, Homo sapien
tcttggcagcctatcatgtggtgctcttgtgag

SEQ ID NO: 879217 - DNA, 33 bp, Homo sapien
gtgtgtacaaatcttaagacatttctcccaaag

SEQ ID NO: 879218 - DNA, 33 bp, Homo sapien
gtgtgtacaaatcttacgacatttctcccaaag

SEQ ID NO: 879219 - DNA, 33 bp, Homo sapien
gcactaaagactcttcccttgtttcataacaag

SEQ ID NO: 879220 - DNA, 33 bp, Homo sapien
gcactaaagactcttctcttgtttcataacaag

SEQ ID NO: 879221 - DNA, 33 bp, Homo sapien
aagccactgtgggacacacttcagagctgctgt

SEQ ID NO: 879222 - DNA, 33 bp, Homo sapien
aagccactgtgggacagacttcagagctgctgt

SEQ ID NO: 879223 - DNA, 33 bp, Homo sapien
acagcggactacacacaggcatagagaagacat

SEQ ID NO: 879224 - DNA, 33 bp, Homo sapien
acagcggactacacacgggcatagagaagacat

SEQ ID NO: 879225 - DNA, 33 bp, Homo sapien
agggcccacctactcactgagaaaaaatggaac

SEQ ID NO: 879226 - DNA, 33 bp, Homo sapien
agggcccacctactcattgagaaaaaatggaac

SEQ ID NO: 879227 - DNA, 33 bp, Homo sapien
cccctgccctgtttgaacgagagaaatagaaca

SEQ ID NO: 879228 - DNA, 33 bp, Homo sapien
cccctgccctgtttgagcgagagaaatagaaca

SEQ ID NO: 879229 - DNA, 33 bp, Homo sapien
tggtgttcactttaaaaatttggtgaatccatt

SEQ ID NO: 879230 - DNA, 33 bp, Homo sapien
tggtgttcactttaaagatttggtgaatccatt

SEQ ID NO: 879231 - DNA, 33 bp, Homo sapien
tcatccttacttttcaaagctctcatgcaaact

SEQ ID NO: 879232 - DNA, 33 bp, Homo sapien
tcatccttacttttcagagctctcatgcaaact

SEQ ID NO: 879233 - DNA, 33 bp, Homo sapien
gatacgtcacttaatcactttaactttccattt

SEQ ID NO: 879234 - DNA, 33 bp, Homo sapien
gatacgtcacttaatcgctttaactttccattt

SEQ ID NO: 879235 - DNA, 33 bp, Homo sapien
tctgcagttggactcaagtttagaaatgtttgg

SEQ ID NO: 879236 - DNA, 33 bp, Homo sapien
tctgcagttggactcaggtttagaaatgtttgg

SEQ ID NO: 879237 - DNA, 33 bp, Homo sapien
gctctcttgaggactaactactacaactatcca

SEQ ID NO: 879238 - DNA, 33 bp, Homo sapien
gctctcttgaggactagctactacaactatcca

SEQ ID NO: 879239 - DNA, 33 bp, Homo sapien
atgactagtacaggaccgaacaactgtagacat

SEQ ID NO: 879240 - DNA, 33 bp, Homo sapien
atgactagtacaggactgaacaactgtagacat

SEQ ID NO: 879241 - DNA, 33 bp, Homo sapien
ctcctggcccgctgcgcattcggagtaaagcat

SEQ ID NO: 879242 - DNA, 33 bp, Homo sapien
ctcctggcccgctgcgtattcggagtaaagcat

SEQ ID NO: 879243 - DNA, 33 bp, Homo sapien
gcttgacgtgctggcaatctaagggtaggatgg

SEQ ID NO: 879244 - DNA, 33 bp, Homo sapien
gcttgacgtgctggcagtctaagggtaggatgg

SEQ ID NO: 879245 - DNA, 33 bp, Homo sapien
ctttgattctgtcacccgcaatttcaagagagt

SEQ ID NO: 879246 - DNA, 33 bp, Homo sapien
ctttgattctgtcacctgcaatttcaagagagt

SEQ ID NO: 879247 - DNA, 33 bp, Homo sapien
tctcggctctactaacaaccacagtgtacaagg

SEQ ID NO: 879248 - DNA, 33 bp, Homo sapien
tctcggctctactaacgaccacagtgtacaagg

SEQ ID NO: 879249 - DNA, 33 bp, Homo sapien
gacagctgagcctacacagatatcgaggcccaa

SEQ ID NO: 879250 - DNA, 33 bp, Homo sapien
gacagctgagcctacatagatatcgaggcccaa

SEQ ID NO: 879251 - DNA, 33 bp, Homo sapien
acatcttagtgtgagcaaatgaccagtcgttta

SEQ ID NO: 879252 - DNA, 33 bp, Homo sapien
acatcttagtgtgagcgaatgaccagtcgttta

SEQ ID NO: 879253 - DNA, 33 bp, Homo sapien
atgtgcatttgtcttaagcaaaacttacacaat

SEQ ID NO: 879254 - DNA, 33 bp, Homo sapien
atgtgcatttgtcttatgcaaaacttacacaat

SEQ ID NO: 879255 - DNA, 33 bp, Homo sapien
tcaccacacttgaatacgtctctgataagttta

SEQ ID NO: 879256 - DNA, 33 bp, Homo sapien
tcaccacacttgaatatgtctctgataagttta

SEQ ID NO: 879257 - DNA, 33 bp, Homo sapien
gtgtgtgatttctatacgtatttcaggaggttc

SEQ ID NO: 879258 - DNA, 33 bp, Homo sapien
gtgtgtgatttctatatgtatttcaggaggttc

SEQ ID NO: 879259 - DNA, 33 bp, Homo sapien
agtttgagaaatcttgaatgtaaaggtggacaa

SEQ ID NO: 879260 - DNA, 33 bp, Homo sapien
agtttgagaaatcttggatgtaaaggtggacaa

SEQ ID NO: 879261 - DNA, 33 bp, Homo sapien
gaatggtacactaacaacagcacggtgtccttg

SEQ ID NO: 879262 - DNA, 33 bp, Homo sapien
gaatggtacactaacagcagcacggtgtccttg

SEQ ID NO: 879263 - DNA, 33 bp, Homo sapien
gcaactgctgactagcactcagtaactgttggt

SEQ ID NO: 879264 - DNA, 33 bp, Homo sapien
gcaactgctgactagcgctcagtaactgttggt

SEQ ID NO: 879265 - DNA, 33 bp, Homo sapien
atgttactggaattgacgttttagaagtgttcc

SEQ ID NO: 879266 - DNA, 33 bp, Homo sapien
atgttactggaattgatgttttagaagtgttcc

SEQ ID NO: 879267 - DNA, 33 bp, Homo sapien
aagtaggcaagataaacgttaaggaagatagct

SEQ ID NO: 879268 - DNA, 33 bp, Homo sapien
aagtaggcaagataaaggttaaggaagatagct

SEQ ID NO: 879269 - DNA, 33 bp, Homo sapien
gaggttggcatgaaaacggtttgatctttctga

SEQ ID NO: 879270 - DNA, 33 bp, Homo sapien
gaggttggcatgaaaagggtttgatctttctga

SEQ ID NO: 879271 - DNA, 33 bp, Homo sapien
ttgccaaaacctgccaactcacaggttcagatg

SEQ ID NO: 879272 - DNA, 33 bp, Homo sapien
ttgccaaaacctgccagctcacaggttcagatg

SEQ ID NO: 879273 - DNA, 33 bp, Homo sapien
ccagtgatgaaaattaggttcaagaacttgatg

SEQ ID NO: 879274 - DNA, 33 bp, Homo sapien
ccagtgatgaaaattatgttcaagaacttgatg

SEQ ID NO: 879275 - DNA, 33 bp, Homo sapien
aggaactaattgacacgcctataaaatgggttg

SEQ ID NO: 879276 - DNA, 33 bp, Homo sapien
aggaactaattgacactcctataaaatgggttg

SEQ ID NO: 879277 - DNA, 33 bp, Homo sapien
aatggtatctcaatcacgaaccaagtagaaaga

SEQ ID NO: 879278 - DNA, 33 bp, Homo sapien
aatggtatctcaatcatgaaccaagtagaaaga

SEQ ID NO: 879279 - DNA, 33 bp, Homo sapien
cccagttacctttacaccagttaccactagatc

SEQ ID NO: 879280 - DNA, 33 bp, Homo sapien
cccagttacctttacagcagttaccactagatc

SEQ ID NO: 879281 - DNA, 33 bp, Homo sapien
cacaatttctgtaaacaagaagaatttcaaata

SEQ ID NO: 879282 - DNA, 33 bp, Homo sapien
cacaatttctgtaaactagaagaatttcaaata

SEQ ID NO: 879283 - DNA, 33 bp, Homo sapien
gcttcgtttctgtctcaccttttcagttaaacc

SEQ ID NO: 879284 - DNA, 33 bp, Homo sapien
gcttcgtttctgtctcgccttttcagttaaacc

SEQ ID NO: 879285 - DNA, 33 bp, Homo sapien
ctcagttacattggcaaatttgaaatcattgat

SEQ ID NO: 879286 - DNA, 33 bp, Homo sapien
ctcagttacattggcagatttgaaatcattgat

SEQ ID NO: 879287 - DNA, 33 bp, Homo sapien
tcaaggttatctcccacgcagaaaacagtaaca

SEQ ID NO: 879288 - DNA, 33 bp, Homo sapien
tcaaggttatctcccaggcagaaaacagtaaca

SEQ ID NO: 879289 - DNA, 33 bp, Homo sapien
tgaacagctcaagaaccggagaccaccagacca

SEQ ID NO: 879290 - DNA, 33 bp, Homo sapien
tgaacagctcaagaactggagaccaccagacca

SEQ ID NO: 879291 - DNA, 33 bp, Homo sapien
ttcacttcctagtagaagcaagaggatgtgctg

SEQ ID NO: 879292 - DNA, 33 bp, Homo sapien
ttcacttcctagtagaggcaagaggatgtgctg

SEQ ID NO: 879293 - DNA, 33 bp, Homo sapien
atgaaacactgctgggacaaaatttcacaactt

SEQ ID NO: 879294 - DNA, 33 bp, Homo sapien
atgaaacactgctggggcaaaatttcacaactt

SEQ ID NO: 879295 - DNA, 33 bp, Homo sapien
agtcagataaagcccaactgtgcatacaagtta

SEQ ID NO: 879296 - DNA, 33 bp, Homo sapien
agtcagataaagcccagctgtgcatacaagtta

SEQ ID NO: 879297 - DNA, 33 bp, Homo sapien
tgctctcttgtcaaacccttgcctaggtggctc

SEQ ID NO: 879298 - DNA, 33 bp, Homo sapien
tgctctcttgtcaaacgcttgcctaggtggctc

SEQ ID NO: 879299 - DNA, 33 bp, Homo sapien
aggaattcggccggaggagagatggactgagtt

SEQ ID NO: 879300 - DNA, 33 bp, Homo sapien
aggaattcggccggagtagagatggactgagtt

SEQ ID NO: 879301 - DNA, 33 bp, Homo sapien
acagtacgaggtagggaccaggcattcacatga

SEQ ID NO: 879302 - DNA, 33 bp, Homo sapien
acagtacgaggtaggggccaggcattcacatga

SEQ ID NO: 879303 - DNA, 33 bp, Homo sapien
tgtgaaaagtacacacacaagaactagagaacc

SEQ ID NO: 879304 - DNA, 33 bp, Homo sapien
tgtgaaaagtacacacgcaagaactagagaacc

SEQ ID NO: 879305 - DNA, 33 bp, Homo sapien
tgcatctctgtaatagcacttatttgccgaatt

SEQ ID NO: 879306 - DNA, 33 bp, Homo sapien
tgcatctctgtaataggacttatttgccgaatt

SEQ ID NO: 879307 - DNA, 33 bp, Homo sapien
attatgataagatgaaaacattttaaacaacag

SEQ ID NO: 879308 - DNA, 33 bp, Homo sapien
attatgataagatgaacacattttaaacaacag

SEQ ID NO: 879309 - DNA, 33 bp, Homo sapien
ggatgtaattaagacaaaggaaaattatcccag

SEQ ID NO: 879310 - DNA, 33 bp, Homo sapien
ggatgtaattaagacacaggaaaattatcccag

SEQ ID NO: 879311 - DNA, 33 bp, Homo sapien
gaacatgggagtgggccgataaggcagttatga

SEQ ID NO: 879312 - DNA, 33 bp, Homo sapien
gaacatgggagtgggctgataaggcagttatga

SEQ ID NO: 879313 - DNA, 33 bp, Homo sapien
gacttagtaccattcacgtgagatggagtgatg

SEQ ID NO: 879314 - DNA, 33 bp, Homo sapien
gacttagtaccattcatgtgagatggagtgatg

SEQ ID NO: 879315 - DNA, 33 bp, Homo sapien
attagcaatgtacaaactcaaggcactgatctt

SEQ ID NO: 879316 - DNA, 33 bp, Homo sapien
attagcaatgtacaaagtcaaggcactgatctt

SEQ ID NO: 879317 - DNA, 33 bp, Homo sapien
tctctcatcactttcaaagcaggaccctactta

SEQ ID NO: 879318 - DNA, 33 bp, Homo sapien
tctctcatcactttcatagcaggaccctactta

SEQ ID NO: 879319 - DNA, 33 bp, Homo sapien
attttctcagtagctacgacgtgcagggcattg

SEQ ID NO: 879320 - DNA, 33 bp, Homo sapien
attttctcagtagctatgacgtgcagggcattg

SEQ ID NO: 879321 - DNA, 33 bp, Homo sapien
gcaatacaaggagaaacggataagtcccggagt

SEQ ID NO: 879322 - DNA, 33 bp, Homo sapien
gcaatacaaggagaaatggataagtcccggagt

SEQ ID NO: 879323 - DNA, 33 bp, Homo sapien
gctatacatacatttaagaaagattagtaaaaa

SEQ ID NO: 879324 - DNA, 33 bp, Homo sapien
gctatacatacatttacgaaagattagtaaaaa

SEQ ID NO: 879325 - DNA, 33 bp, Homo sapien
acccagtgatcccaaaatctccatggcagagac

SEQ ID NO: 879326 - DNA, 33 bp, Homo sapien
acccagtgatcccaaagtctccatggcagagac

SEQ ID NO: 879327 - DNA, 33 bp, Homo sapien
agaaagcaaaagaatcgaatgttgtagctatgt

SEQ ID NO: 879328 - DNA, 33 bp, Homo sapien
agaaagcaaaagaatctaatgttgtagctatgt

SEQ ID NO: 879329 - DNA, 33 bp, Homo sapien
agtttttcatgacttaccacagggtgacattcc

SEQ ID NO: 879330 - DNA, 33 bp, Homo sapien
agtttttcatgacttatcacagggtgacattcc

SEQ ID NO: 879331 - DNA, 33 bp, Homo sapien
aaaagcaaaagtctaaagtcagattttcatagc

SEQ ID NO: 879332 - DNA, 33 bp, Homo sapien
aaaagcaaaagtctaatgtcagattttcatagc

SEQ ID NO: 879333 - DNA, 33 bp, Homo sapien
aatcatcgatagtagaagttaagttatttttgg

SEQ ID NO: 879334 - DNA, 33 bp, Homo sapien
aatcatcgatagtagaggttaagttatttttgg

SEQ ID NO: 879335 - DNA, 33 bp, Homo sapien
cttcagggtttcctgaaacgtcacaaagcaaac

SEQ ID NO: 879336 - DNA, 33 bp, Homo sapien
cttcagggtttcctgagacgtcacaaagcaaac

SEQ ID NO: 879337 - DNA, 33 bp, Homo sapien
ggctgagttacagcataaaagatacttgtcctg

SEQ ID NO: 879338 - DNA, 33 bp, Homo sapien
ggctgagttacagcatgaaagatacttgtcctg

SEQ ID NO: 879339 - DNA, 33 bp, Homo sapien
actgataagtatagaccgtagaaatgttttaga

SEQ ID NO: 879340 - DNA, 33 bp, Homo sapien
actgataagtatagactgtagaaatgttttaga

SEQ ID NO: 879341 - DNA, 33 bp, Homo sapien
gaatagagaaagggaacggaaattgacaggata

SEQ ID NO: 879342 - DNA, 33 bp, Homo sapien
gaatagagaaagggaatggaaattgacaggata

SEQ ID NO: 879343 - DNA, 33 bp, Homo sapien
tggtgttcgccgcccaacacactaagcacaata

SEQ ID NO: 879344 - DNA, 33 bp, Homo sapien
tggtgttcgccgcccagcacactaagcacaata

SEQ ID NO: 879345 - DNA, 33 bp, Homo sapien
acccttgccactgtcacagagtttatgaagagg

SEQ ID NO: 879346 - DNA, 33 bp, Homo sapien
acccttgccactgtcagagagtttatgaagagg

SEQ ID NO: 879347 - DNA, 33 bp, Homo sapien
acttcaatctctattacggagacctgtgttaaa

SEQ ID NO: 879348 - DNA, 33 bp, Homo sapien
acttcaatctctattatggagacctgtgttaaa

SEQ ID NO: 879349 - DNA, 33 bp, Homo sapien
tccctggagtcattcagtctgcattttgaaagg

SEQ ID NO: 879350 - DNA, 33 bp, Homo sapien
tccctggagtcattcattctgcattttgaaagg

SEQ ID NO: 879351 - DNA, 33 bp, Homo sapien
cagtgagtagcttgataaacatttgtcttaatg

SEQ ID NO: 879352 - DNA, 33 bp, Homo sapien
cagtgagtagcttgatgaacatttgtcttaatg

SEQ ID NO: 879353 - DNA, 33 bp, Homo sapien
cacaagataataactcacttttcaagctgtaaa

SEQ ID NO: 879354 - DNA, 33 bp, Homo sapien
cacaagataataactcgcttttcaagctgtaaa

SEQ ID NO: 879355 - DNA, 33 bp, Homo sapien
cttatggacaggataaatctcaaacttagaagc

SEQ ID NO: 879356 - DNA, 33 bp, Homo sapien
cttatggacaggataagtctcaaacttagaagc

SEQ ID NO: 879357 - DNA, 33 bp, Homo sapien
gattataactgtcaacaaagcagtaggtatttc

SEQ ID NO: 879358 - DNA, 33 bp, Homo sapien
gattataactgtcaacgaagcagtaggtatttc

SEQ ID NO: 879359 - DNA, 33 bp, Homo sapien
ggtatcccagctccagcaggcctttacgaagaa

SEQ ID NO: 879360 - DNA, 33 bp, Homo sapien
ggtatcccagctccagtaggcctttacgaagaa

SEQ ID NO: 879361 - DNA, 33 bp, Homo sapien
atgttctatctatttcaaaactgcctacctgaa

SEQ ID NO: 879362 - DNA, 33 bp, Homo sapien
atgttctatctatttccaaactgcctacctgaa

SEQ ID NO: 879363 - DNA, 33 bp, Homo sapien
gtccttgttcatagacactggctttggataaag

SEQ ID NO: 879364 - DNA, 33 bp, Homo sapien
gtccttgttcatagacgctggctttggataaag

SEQ ID NO: 879365 - DNA, 33 bp, Homo sapien
gacagcaggaaggagaaccttggcagagcctgc

SEQ ID NO: 879366 - DNA, 33 bp, Homo sapien
gacagcaggaaggagacccttggcagagcctgc

SEQ ID NO: 879367 - DNA, 33 bp, Homo sapien
tcagaactggactcccagagaggaaaaggagga

SEQ ID NO: 879368 - DNA, 33 bp, Homo sapien
tcagaactggactcccggagaggaaaaggagga

SEQ ID NO: 879369 - DNA, 33 bp, Homo sapien
tgacacacagctaagaaaatgagaacaggacat

SEQ ID NO: 879370 - DNA, 33 bp, Homo sapien
tgacacacagctaagacaatgagaacaggacat

SEQ ID NO: 879371 - DNA, 33 bp, Homo sapien
ttgacctgaatcagcacgtacttctgggcctga

SEQ ID NO: 879372 - DNA, 33 bp, Homo sapien
ttgacctgaatcagcatgtacttctgggcctga

SEQ ID NO: 879373 - DNA, 33 bp, Homo sapien
gaagtgtatctgagcacggaaaccggttgaaac

SEQ ID NO: 879374 - DNA, 33 bp, Homo sapien
gaagtgtatctgagcatggaaaccggttgaaac

SEQ ID NO: 879375 - DNA, 33 bp, Homo sapien
ctctcccacaaaaaacaaccgtgaaggccaggc

SEQ ID NO: 879376 - DNA, 33 bp, Homo sapien
ctctcccacaaaaaacgaccgtgaaggccaggc

SEQ ID NO: 879377 - DNA, 33 bp, Homo sapien
aagagctgaggtaacacaaagaaaggtagacaa

SEQ ID NO: 879378 - DNA, 33 bp, Homo sapien
aagagctgaggtaacataaagaaaggtagacaa

SEQ ID NO: 879379 - DNA, 33 bp, Homo sapien
tagtgtagtgtgtcaactcgcctgtagtctttg

SEQ ID NO: 879380 - DNA, 33 bp, Homo sapien
tagtgtagtgtgtcaagtcgcctgtagtctttg

SEQ ID NO: 879381 - DNA, 33 bp, Homo sapien
ttagatctttccatcaagccaggtgcaccaact

SEQ ID NO: 879382 - DNA, 33 bp, Homo sapien
ttagatctttccatcatgccaggtgcaccaact

SEQ ID NO: 879383 - DNA, 33 bp, Homo sapien
tgagtcaagtgcattaaattgattgtgtacttt

SEQ ID NO: 879384 - DNA, 33 bp, Homo sapien
tgagtcaagtgcattacattgattgtgtacttt

SEQ ID NO: 879385 - DNA, 33 bp, Homo sapien
accctgcctttctccaagggctaaagactgtat

SEQ ID NO: 879386 - DNA, 33 bp, Homo sapien
accctgcctttctccaggggctaaagactgtat

SEQ ID NO: 879387 - DNA, 33 bp, Homo sapien
cactttccatgttcaacgtattctatttttgta

SEQ ID NO: 879388 - DNA, 33 bp, Homo sapien
cactttccatgttcaatgtattctatttttgta

SEQ ID NO: 879389 - DNA, 33 bp, Homo sapien
tagtctgaagtttccaagacagtatatgactat

SEQ ID NO: 879390 - DNA, 33 bp, Homo sapien
tagtctgaagtttccaggacagtatatgactat

SEQ ID NO: 879391 - DNA, 33 bp, Homo sapien
gccatcactgtcttccggagcaatttattttcg

SEQ ID NO: 879392 - DNA, 33 bp, Homo sapien
gccatcactgtcttcctgagcaatttattttcg

SEQ ID NO: 879393 - DNA, 33 bp, Homo sapien
tctcacgcaggaagtcaaattttaaattaaatt

SEQ ID NO: 879394 - DNA, 33 bp, Homo sapien
tctcacgcaggaagtcgaattttaaattaaatt

SEQ ID NO: 879395 - DNA, 33 bp, Homo sapien
gtaagtatagaaatccaagaagagggcaagagc

SEQ ID NO: 879396 - DNA, 33 bp, Homo sapien
gtaagtatagaaatccgagaagagggcaagagc

SEQ ID NO: 879397 - DNA, 33 bp, Homo sapien
ttgcaaagcctacaaaaatctgagccatgagcg

SEQ ID NO: 879398 - DNA, 33 bp, Homo sapien
ttgcaaagcctacaaagatctgagccatgagcg

SEQ ID NO: 879399 - DNA, 33 bp, Homo sapien
cttgttatccagccctcagaataatagaaacag

SEQ ID NO: 879400 - DNA, 33 bp, Homo sapien
cttgttatccagccctgagaataatagaaacag

SEQ ID NO: 879401 - DNA, 33 bp, Homo sapien
gagtgacttgctagatcagttatatgctgatgt

SEQ ID NO: 879402 - DNA, 33 bp, Homo sapien
gagtgacttgctagattagttatatgctgatgt

SEQ ID NO: 879403 - DNA, 33 bp, Homo sapien
taaaaaaatgtaaaaacctgactgaaagatcag

SEQ ID NO: 879404 - DNA, 33 bp, Homo sapien
taaaaaaatgtaaaaatctgactgaaagatcag

SEQ ID NO: 879405 - DNA, 33 bp, Homo sapien
atgaagaggaaaaagacgtttgttagcaatcac

SEQ ID NO: 879406 - DNA, 33 bp, Homo sapien
atgaagaggaaaaagatgtttgttagcaatcac

SEQ ID NO: 879407 - DNA, 33 bp, Homo sapien
accaccctgctgcgacaaagccacagctggccc

SEQ ID NO: 879408 - DNA, 33 bp, Homo sapien
accaccctgctgcgacgaagccacagctggccc

SEQ ID NO: 879409 - DNA, 33 bp, Homo sapien
atgagcaattggataaactagaagatatgggtc

SEQ ID NO: 879410 - DNA, 33 bp, Homo sapien
atgagcaattggataacctagaagatatgggtc

SEQ ID NO: 879411 - DNA, 33 bp, Homo sapien
ttggaacccctctagaaatcgtaaaggtaccat

SEQ ID NO: 879412 - DNA, 33 bp, Homo sapien
ttggaacccctctagagatcgtaaaggtaccat

SEQ ID NO: 879413 - DNA, 33 bp, Homo sapien
catccaattcagactcaagaagacagcgaaatg

SEQ ID NO: 879414 - DNA, 33 bp, Homo sapien
catccaattcagactcgagaagacagcgaaatg

SEQ ID NO: 879415 - DNA, 33 bp, Homo sapien
ctttaatgcctgacaacagctggaagcaaggag

SEQ ID NO: 879416 - DNA, 33 bp, Homo sapien
ctttaatgcctgacaagagctggaagcaaggag

SEQ ID NO: 879417 - DNA, 33 bp, Homo sapien
agggactttaaagggaactcagaggtgatcaag

SEQ ID NO: 879418 - DNA, 33 bp, Homo sapien
agggactttaaagggacctcagaggtgatcaag

SEQ ID NO: 879419 - DNA, 33 bp, Homo sapien
aattcaggatatgaaacggatttggaattatgc

SEQ ID NO: 879420 - DNA, 33 bp, Homo sapien
aattcaggatatgaaatggatttggaattatgc

SEQ ID NO: 879421 - DNA, 33 bp, Homo sapien
atatacaaagtggtaacagtttgcaatgacgtt

SEQ ID NO: 879422 - DNA, 33 bp, Homo sapien
atatacaaagtggtaatagtttgcaatgacgtt

SEQ ID NO: 879423 - DNA, 33 bp, Homo sapien
ctgaatgatcctgttcaagggttttcaaaacct

SEQ ID NO: 879424 - DNA, 33 bp, Homo sapien
ctgaatgatcctgttcgagggttttcaaaacct

SEQ ID NO: 879425 - DNA, 33 bp, Homo sapien
caactgtgcttgcataaagtatcctaaacatcc

SEQ ID NO: 879426 - DNA, 33 bp, Homo sapien
caactgtgcttgcatacagtatcctaaacatcc

SEQ ID NO: 879427 - DNA, 33 bp, Homo sapien
atgaactggaacggtgaagaaggtcataaagag

SEQ ID NO: 879428 - DNA, 33 bp, Homo sapien
atgaactggaacggtggagaaggtcataaagag

SEQ ID NO: 879429 - DNA, 33 bp, Homo sapien
ttccggactctgaagacgaggctccttacccag

SEQ ID NO: 879430 - DNA, 33 bp, Homo sapien
ttccggactctgaagatgaggctccttacccag

SEQ ID NO: 879431 - DNA, 33 bp, Homo sapien
atgacgacctttgcacccatcgctttgcagttc

SEQ ID NO: 879432 - DNA, 33 bp, Homo sapien
atgacgacctttgcacgcatcgctttgcagttc

SEQ ID NO: 879433 - DNA, 33 bp, Homo sapien
acagtcttgccttgaacctgcagagttcatgag

SEQ ID NO: 879434 - DNA, 33 bp, Homo sapien
acagtcttgccttgaatctgcagagttcatgag

SEQ ID NO: 879435 - DNA, 33 bp, Homo sapien
ctagccagaagtcctgcagggaaaaaccagatt

SEQ ID NO: 879436 - DNA, 33 bp, Homo sapien
ctagccagaagtcctgtagggaaaaaccagatt

SEQ ID NO: 879437 - DNA, 33 bp, Homo sapien
aaggtagacagagagacgcgtgtgaaaaagagc

SEQ ID NO: 879438 - DNA, 33 bp, Homo sapien
aaggtagacagagagatgcgtgtgaaaaagagc

SEQ ID NO: 879439 - DNA, 33 bp, Homo sapien
tagactacaaacttgacgttcagtttcatcaaa

SEQ ID NO: 879440 - DNA, 33 bp, Homo sapien
tagactacaaacttgatgttcagtttcatcaaa

SEQ ID NO: 879441 - DNA, 33 bp, Homo sapien
atgtgctctgggtctaggagatggttaaaccgg

SEQ ID NO: 879442 - DNA, 33 bp, Homo sapien
atgtgctctgggtctatgagatggttaaaccgg

SEQ ID NO: 879443 - DNA, 33 bp, Homo sapien
ggattgcaaaagggagaaagggcagcaacctac

SEQ ID NO: 879444 - DNA, 33 bp, Homo sapien
ggattgcaaaagggagtaagggcagcaacctac

SEQ ID NO: 879445 - DNA, 33 bp, Homo sapien
cttcatccttcatccccgctgcctggaaaggga

SEQ ID NO: 879446 - DNA, 33 bp, Homo sapien
cttcatccttcatccctgctgcctggaaaggga

SEQ ID NO: 879447 - DNA, 33 bp, Homo sapien
ggatgggcctgacaaacgattaaagtgctacaa

SEQ ID NO: 879448 - DNA, 33 bp, Homo sapien
ggatgggcctgacaaatgattaaagtgctacaa

SEQ ID NO: 879449 - DNA, 33 bp, Homo sapien
aaaatagccacgtaaaggtttgaaaagtctgtg

SEQ ID NO: 879450 - DNA, 33 bp, Homo sapien
aaaatagccacgtaaatgtttgaaaagtctgtg

SEQ ID NO: 879451 - DNA, 33 bp, Homo sapien
aaggaaagctctgaaacgtctggatttacagag

SEQ ID NO: 879452 - DNA, 33 bp, Homo sapien
aaggaaagctctgaaatgtctggatttacagag

SEQ ID NO: 879453 - DNA, 33 bp, Homo sapien
ttcaacttctttcacagtgaattttttccatca

SEQ ID NO: 879454 - DNA, 33 bp, Homo sapien
ttcaacttctttcacattgaattttttccatca

SEQ ID NO: 879455 - DNA, 33 bp, Homo sapien
catagatgttctcagaaggttagatactttttt

SEQ ID NO: 879456 - DNA, 33 bp, Homo sapien
catagatgttctcagagggttagatactttttt

SEQ ID NO: 879457 - DNA, 33 bp, Homo sapien
agtagagaggtgttgaaatttttcgtgtaatta

SEQ ID NO: 879458 - DNA, 33 bp, Homo sapien
agtagagaggtgttgagatttttcgtgtaatta

SEQ ID NO: 879459 - DNA, 33 bp, Homo sapien
tctttcagggtaggtccgaatgacactctggcg

SEQ ID NO: 879460 - DNA, 33 bp, Homo sapien
tctttcagggtaggtctgaatgacactctggcg

SEQ ID NO: 879461 - DNA, 33 bp, Homo sapien
caagggtaacactagaggtaagtgctgttatta

SEQ ID NO: 879462 - DNA, 33 bp, Homo sapien
caagggtaacactagatgtaagtgctgttatta

SEQ ID NO: 879463 - DNA, 33 bp, Homo sapien
ttacatactctttcaaaatgcttgtgtataaaa

SEQ ID NO: 879464 - DNA, 33 bp, Homo sapien
ttacatactctttcaacatgcttgtgtataaaa

SEQ ID NO: 879465 - DNA, 33 bp, Homo sapien
gtaatatgataaatacaatactgtctgccttga

SEQ ID NO: 879466 - DNA, 33 bp, Homo sapien
gtaatatgataaatacgatactgtctgccttga

SEQ ID NO: 879467 - DNA, 33 bp, Homo sapien
tgcctactacctgtcaccagctcactttatact

SEQ ID NO: 879468 - DNA, 33 bp, Homo sapien
tgcctactacctgtcatcagctcactttatact

SEQ ID NO: 879469 - DNA, 33 bp, Homo sapien
aacaagatcgtattgcacaatgtcttcttggct

SEQ ID NO: 879470 - DNA, 33 bp, Homo sapien
aacaagatcgtattgcgcaatgtcttcttggct

SEQ ID NO: 879471 - DNA, 33 bp, Homo sapien
gataaatacacgtgtaagttgcgtcagtcacag

SEQ ID NO: 879472 - DNA, 33 bp, Homo sapien
gataaatacacgtgtaggttgcgtcagtcacag

SEQ ID NO: 879473 - DNA, 33 bp, Homo sapien
ccggcataagtcaatgcaatccttggcctactc

SEQ ID NO: 879474 - DNA, 33 bp, Homo sapien
ccggcataagtcaatggaatccttggcctactc

SEQ ID NO: 879475 - DNA, 33 bp, Homo sapien
gtattgaaagggctgaaagttttagtgtttgct

SEQ ID NO: 879476 - DNA, 33 bp, Homo sapien
gtattgaaagggctgacagttttagtgtttgct

SEQ ID NO: 879477 - DNA, 33 bp, Homo sapien
aatatcagggagaccacgagaggaagagtcagc

SEQ ID NO: 879478 - DNA, 33 bp, Homo sapien
aatatcagggagaccatgagaggaagagtcagc

SEQ ID NO: 879479 - DNA, 33 bp, Homo sapien
ctcaaggtggcccaacacatcacatatggcgag

SEQ ID NO: 879480 - DNA, 33 bp, Homo sapien
ctcaaggtggcccaacgcatcacatatggcgag

SEQ ID NO: 879481 - DNA, 33 bp, Homo sapien
gctgctggagatcgaacgaaatgtttggcaaga

SEQ ID NO: 879482 - DNA, 33 bp, Homo sapien
gctgctggagatcgaatgaaatgtttggcaaga

SEQ ID NO: 879483 - DNA, 33 bp, Homo sapien
atgccaagcacaagacaaaacagggttccagga

SEQ ID NO: 879484 - DNA, 33 bp, Homo sapien
atgccaagcacaagacgaaacagggttccagga

SEQ ID NO: 879485 - DNA, 33 bp, Homo sapien
agtatcaacgactgcgacccatgtggctttctc

SEQ ID NO: 879486 - DNA, 33 bp, Homo sapien
agtatcaacgactgcggcccatgtggctttctc

SEQ ID NO: 879487 - DNA, 33 bp, Homo sapien
tttgcattccacaagcacatatcggtaaggtct

SEQ ID NO: 879488 - DNA, 33 bp, Homo sapien
tttgcattccacaagcgcatatcggtaaggtct

SEQ ID NO: 879489 - DNA, 33 bp, Homo sapien
tctcccttcttgttccggagtccttcatctgca

SEQ ID NO: 879490 - DNA, 33 bp, Homo sapien
tctcccttcttgttcctgagtccttcatctgca

SEQ ID NO: 879491 - DNA, 33 bp, Homo sapien
accacaaactgtcacaaccaaaattatttccac

SEQ ID NO: 879492 - DNA, 33 bp, Homo sapien
accacaaactgtcacagccaaaattatttccac

SEQ ID NO: 879493 - DNA, 33 bp, Homo sapien
ttaccttttaacaaacaattcaaacacttctca

SEQ ID NO: 879494 - DNA, 33 bp, Homo sapien
ttaccttttaacaaacgattcaaacacttctca

SEQ ID NO: 879495 - DNA, 33 bp, Homo sapien
ttttattgggtgaaggcagagcaagacaaataa

SEQ ID NO: 879496 - DNA, 33 bp, Homo sapien
ttttattgggtgaaggtagagcaagacaaataa

SEQ ID NO: 879497 - DNA, 33 bp, Homo sapien
cccctttgtctttcaaaaccctgctcctcccca

SEQ ID NO: 879498 - DNA, 33 bp, Homo sapien
cccctttgtctttcaacaccctgctcctcccca

SEQ ID NO: 879499 - DNA, 33 bp, Homo sapien
ccctgtgtaaaatagcacaaatgatcagaccag

SEQ ID NO: 879500 - DNA, 33 bp, Homo sapien
ccctgtgtaaaatagcgcaaatgatcagaccag

SEQ ID NO: 879501 - DNA, 33 bp, Homo sapien
tttcaggtagactggacgtgggcagcagcccag

SEQ ID NO: 879502 - DNA, 33 bp, Homo sapien
tttcaggtagactggatgtgggcagcagcccag

SEQ ID NO: 879503 - DNA, 33 bp, Homo sapien
cagagcaaagcaatacaaacaagacaccaccac

SEQ ID NO: 879504 - DNA, 33 bp, Homo sapien
cagagcaaagcaatacgaacaagacaccaccac

SEQ ID NO: 879505 - DNA, 33 bp, Homo sapien
tgaagccacctacactcaggtatgcatggcaga

SEQ ID NO: 879506 - DNA, 33 bp, Homo sapien
tgaagccacctacactgaggtatgcatggcaga

SEQ ID NO: 879507 - DNA, 33 bp, Homo sapien
gcacatgatatgtgcacgaaatctcaggatcaa

SEQ ID NO: 879508 - DNA, 33 bp, Homo sapien
gcacatgatatgtgcatgaaatctcaggatcaa

SEQ ID NO: 879509 - DNA, 33 bp, Homo sapien
cggagtagtgcttatacgcgtatgactcccagg

SEQ ID NO: 879510 - DNA, 33 bp, Homo sapien
cggagtagtgcttatatgcgtatgactcccagg

SEQ ID NO: 879511 - DNA, 33 bp, Homo sapien
tgttccaagccttccacgtacataacttctgct

SEQ ID NO: 879512 - DNA, 33 bp, Homo sapien
tgttccaagccttccatgtacataacttctgct

SEQ ID NO: 879513 - DNA, 33 bp, Homo sapien
aaaattatctggatgaagttagcagtagattgg

SEQ ID NO: 879514 - DNA, 33 bp, Homo sapien
aaaattatctggatgaggttagcagtagattgg

SEQ ID NO: 879515 - DNA, 33 bp, Homo sapien
taccacatatctaaaaggtcctgtagtcaataa

SEQ ID NO: 879516 - DNA, 33 bp, Homo sapien
taccacatatctaaaatgtcctgtagtcaataa

SEQ ID NO: 879517 - DNA, 33 bp, Homo sapien
aagaactctccatgtaatctgaaaaatcaaatg

SEQ ID NO: 879518 - DNA, 33 bp, Homo sapien
aagaactctccatgtattctgaaaaatcaaatg

SEQ ID NO: 879519 - DNA, 33 bp, Homo sapien
gccagccaccctgtgccatcctaagtggtctct

SEQ ID NO: 879520 - DNA, 33 bp, Homo sapien
gccagccaccctgtgctatcctaagtggtctct

SEQ ID NO: 879521 - DNA, 33 bp, Homo sapien
actgcaattgcacttacgtgttatgctactaat

SEQ ID NO: 879522 - DNA, 33 bp, Homo sapien
actgcaattgcacttatgtgttatgctactaat

SEQ ID NO: 879523 - DNA, 33 bp, Homo sapien
caatctgggtatctaccatcagaaaaccctcat

SEQ ID NO: 879524 - DNA, 33 bp, Homo sapien
caatctgggtatctacgatcagaaaaccctcat

SEQ ID NO: 879525 - DNA, 33 bp, Homo sapien
acatatatgtattacaacttatagtacaaagag

SEQ ID NO: 879526 - DNA, 33 bp, Homo sapien
acatatatgtattacagcttatagtacaaagag

SEQ ID NO: 879527 - DNA, 33 bp, Homo sapien
ggcctgtgagtcaggaacaactctccacgtggg

SEQ ID NO: 879528 - DNA, 33 bp, Homo sapien
ggcctgtgagtcaggagcaactctccacgtggg

SEQ ID NO: 879529 - DNA, 33 bp, Homo sapien
actcttaccacacagaaagttgcaagggcttaa

SEQ ID NO: 879530 - DNA, 33 bp, Homo sapien
actcttaccacacagacagttgcaagggcttaa

SEQ ID NO: 879531 - DNA, 33 bp, Homo sapien
cagccctcagataacacgcttctctacgagcaa

SEQ ID NO: 879532 - DNA, 33 bp, Homo sapien
cagccctcagataacatgcttctctacgagcaa

SEQ ID NO: 879533 - DNA, 33 bp, Homo sapien
taggagcatttacacaccattgggcccaagcaa

SEQ ID NO: 879534 - DNA, 33 bp, Homo sapien
taggagcatttacacagcattgggcccaagcaa

SEQ ID NO: 879535 - DNA, 33 bp, Homo sapien
gaaacagggtagaaacagctcctctcctccccg

SEQ ID NO: 879536 - DNA, 33 bp, Homo sapien
gaaacagggtagaaacggctcctctcctccccg

SEQ ID NO: 879537 - DNA, 33 bp, Homo sapien
gaccaggtgtggagccaatgcccagacccgtga

SEQ ID NO: 879538 - DNA, 33 bp, Homo sapien
gaccaggtgtggagccgatgcccagacccgtga

SEQ ID NO: 879539 - DNA, 33 bp, Homo sapien
gaggctactcactccacgttaccttcttttcaa

SEQ ID NO: 879540 - DNA, 33 bp, Homo sapien
gaggctactcactccatgttaccttcttttcaa

SEQ ID NO: 879541 - DNA, 33 bp, Homo sapien
gttgaagactaaaggcaaaagggggattggcca

SEQ ID NO: 879542 - DNA, 33 bp, Homo sapien
gttgaagactaaaggcgaaagggggattggcca

SEQ ID NO: 879543 - DNA, 33 bp, Homo sapien
ggtaatgaaggttaaacgaggccaggccgggag

SEQ ID NO: 879544 - DNA, 33 bp, Homo sapien
ggtaatgaaggttaaatgaggccaggccgggag

SEQ ID NO: 879545 - DNA, 33 bp, Homo sapien
ggtcctggaggatgaaagtggctctaagttaac

SEQ ID NO: 879546 - DNA, 33 bp, Homo sapien
ggtcctggaggatgaatgtggctctaagttaac

SEQ ID NO: 879547 - DNA, 33 bp, Homo sapien
atgcttcaatcctggaagtactgcaacatacgt

SEQ ID NO: 879548 - DNA, 33 bp, Homo sapien
atgcttcaatcctggaggtactgcaacatacgt

SEQ ID NO: 879549 - DNA, 33 bp, Homo sapien
gacccaaatgtttaaaaaaccatcatgccggcc

SEQ ID NO: 879550 - DNA, 33 bp, Homo sapien
gacccaaatgtttaaacaaccatcatgccggcc

SEQ ID NO: 879551 - DNA, 33 bp, Homo sapien
agcgattttactttgaaaatgttcaagcttata

SEQ ID NO: 879552 - DNA, 33 bp, Homo sapien
agcgattttactttgacaatgttcaagcttata

SEQ ID NO: 879553 - DNA, 33 bp, Homo sapien
cagcaaaccattttagaaatttgtctcacgttg

SEQ ID NO: 879554 - DNA, 33 bp, Homo sapien
cagcaaaccattttaggaatttgtctcacgttg

SEQ ID NO: 879555 - DNA, 33 bp, Homo sapien
gctgagcaggggttcgcaaaggacagaggtact

SEQ ID NO: 879556 - DNA, 33 bp, Homo sapien
gctgagcaggggttcggaaaggacagaggtact

SEQ ID NO: 879557 - DNA, 33 bp, Homo sapien
gcagcccagcaagtgcagagatgacagacgggc

SEQ ID NO: 879558 - DNA, 33 bp, Homo sapien
gcagcccagcaagtgcggagatgacagacgggc

SEQ ID NO: 879559 - DNA, 33 bp, Homo sapien
tgaattacaccaaaccaatctagcttttatttt

SEQ ID NO: 879560 - DNA, 33 bp, Homo sapien
tgaattacaccaaaccgatctagcttttatttt

SEQ ID NO: 879561 - DNA, 33 bp, Homo sapien
aaaacactacatccctaagagtcgcaaatagaa

SEQ ID NO: 879562 - DNA, 33 bp, Homo sapien
aaaacactacatcccttagagtcgcaaatagaa

SEQ ID NO: 879563 - DNA, 33 bp, Homo sapien
acacttcacctctataacctgggagcatctgca

SEQ ID NO: 879564 - DNA, 33 bp, Homo sapien
acacttcacctctatagcctgggagcatctgca

SEQ ID NO: 879565 - DNA, 33 bp, Homo sapien
aaccctaagctgaaaacggggtgattttttctt

SEQ ID NO: 879566 - DNA, 33 bp, Homo sapien
aaccctaagctgaaaatggggtgattttttctt

SEQ ID NO: 879567 - DNA, 33 bp, Homo sapien
cctgttgcatcttaggaaaagaaaccaaatatt

SEQ ID NO: 879568 - DNA, 33 bp, Homo sapien
cctgttgcatcttagggaaagaaaccaaatatt

SEQ ID NO: 879569 - DNA, 33 bp, Homo sapien
tcccctgaagttcagaacccttcgactactaaa

SEQ ID NO: 879570 - DNA, 33 bp, Homo sapien
tcccctgaagttcagatcccttcgactactaaa

SEQ ID NO: 879571 - DNA, 33 bp, Homo sapien
atcacagtaacaatagcatggctctccatagta

SEQ ID NO: 879572 - DNA, 33 bp, Homo sapien
atcacagtaacaatagtatggctctccatagta

SEQ ID NO: 879573 - DNA, 33 bp, Homo sapien
gtcatgaggctgattccagatttgccagtcatc

SEQ ID NO: 879574 - DNA, 33 bp, Homo sapien
gtcatgaggctgattctagatttgccagtcatc

SEQ ID NO: 879575 - DNA, 33 bp, Homo sapien
gtctgtccctgcattaccgcgaaccttccatgt

SEQ ID NO: 879576 - DNA, 33 bp, Homo sapien
gtctgtccctgcattatcgcgaaccttccatgt

SEQ ID NO: 879577 - DNA, 33 bp, Homo sapien
cttaggagagtaaacacgaaacaatggaggctg

SEQ ID NO: 879578 - DNA, 33 bp, Homo sapien
cttaggagagtaaacatgaaacaatggaggctg

SEQ ID NO: 879579 - DNA, 33 bp, Homo sapien
taaatttgccaccagcactattataaaagggca

SEQ ID NO: 879580 - DNA, 33 bp, Homo sapien
taaatttgccaccagcgctattataaaagggca

SEQ ID NO: 879581 - DNA, 33 bp, Homo sapien
agagactgaagtaatgcagcttgaagaccagaa

SEQ ID NO: 879582 - DNA, 33 bp, Homo sapien
agagactgaagtaatgtagcttgaagaccagaa

SEQ ID NO: 879583 - DNA, 33 bp, Homo sapien
aggcgtaagagaaaaacaatcattacccccgtg

SEQ ID NO: 879584 - DNA, 33 bp, Homo sapien
aggcgtaagagaaaaataatcattacccccgtg

SEQ ID NO: 879585 - DNA, 33 bp, Homo sapien
aatttaacctaagtacaatttcaatgttggaac

SEQ ID NO: 879586 - DNA, 33 bp, Homo sapien
aatttaacctaagtaccatttcaatgttggaac

SEQ ID NO: 879587 - DNA, 33 bp, Homo sapien
actctgtctctttccaatccattctgtctgctc

SEQ ID NO: 879588 - DNA, 33 bp, Homo sapien
actctgtctctttccagtccattctgtctgctc

SEQ ID NO: 879589 - DNA, 33 bp, Homo sapien
tgatggctttaccaaccggagcagaataagaag

SEQ ID NO: 879590 - DNA, 33 bp, Homo sapien
tgatggctttaccaactggagcagaataagaag

SEQ ID NO: 879591 - DNA, 33 bp, Homo sapien
aacaaatggtgtcttaacaactggatgtttgca

SEQ ID NO: 879592 - DNA, 33 bp, Homo sapien
aacaaatggtgtcttagcaactggatgtttgca

SEQ ID NO: 879593 - DNA, 33 bp, Homo sapien
gcaggatccaaaatccaatcagatcaagccctg

SEQ ID NO: 879594 - DNA, 33 bp, Homo sapien
gcaggatccaaaatccgatcagatcaagccctg

SEQ ID NO: 879595 - DNA, 33 bp, Homo sapien
taacccactatttaacacctagggcaaggcaca

SEQ ID NO: 879596 - DNA, 33 bp, Homo sapien
taacccactatttaacgcctagggcaaggcaca

SEQ ID NO: 879597 - DNA, 33 bp, Homo sapien
gagaggagagataggaaaggaattttcagtggg

SEQ ID NO: 879598 - DNA, 33 bp, Homo sapien
gagaggagagataggagaggaattttcagtggg

SEQ ID NO: 879599 - DNA, 33 bp, Homo sapien
cgaatatgtgacaaagcaggtactgaatctaga

SEQ ID NO: 879600 - DNA, 33 bp, Homo sapien
cgaatatgtgacaaagtaggtactgaatctaga

SEQ ID NO: 879601 - DNA, 33 bp, Homo sapien
ggatggacttgaggaaaatagtctgtgaaagac

SEQ ID NO: 879602 - DNA, 33 bp, Homo sapien
ggatggacttgaggaagatagtctgtgaaagac

SEQ ID NO: 879603 - DNA, 33 bp, Homo sapien
tgtatgtatatgtacacaatttcaaacagggtt

SEQ ID NO: 879604 - DNA, 33 bp, Homo sapien
tgtatgtatatgtacagaatttcaaacagggtt

SEQ ID NO: 879605 - DNA, 33 bp, Homo sapien
ccttctccatctatataagcctgcaatgaaata

SEQ ID NO: 879606 - DNA, 33 bp, Homo sapien
ccttctccatctatatgagcctgcaatgaaata

SEQ ID NO: 879607 - DNA, 33 bp, Homo sapien
atttgtctttgtaaaccgagtaaaacttgaacc

SEQ ID NO: 879608 - DNA, 33 bp, Homo sapien
atttgtctttgtaaactgagtaaaacttgaacc

SEQ ID NO: 879609 - DNA, 33 bp, Homo sapien
cagtgtggccaggtcactcctcgctggcagcat

SEQ ID NO: 879610 - DNA, 33 bp, Homo sapien
cagtgtggccaggtcattcctcgctggcagcat

SEQ ID NO: 879611 - DNA, 33 bp, Homo sapien
ggccgattcttttttcaatccaagacatataaa

SEQ ID NO: 879612 - DNA, 33 bp, Homo sapien
ggccgattcttttttcgatccaagacatataaa

SEQ ID NO: 879613 - DNA, 33 bp, Homo sapien
agtttatcaccatatactaactgcaggttttat

SEQ ID NO: 879614 - DNA, 33 bp, Homo sapien
agtttatcaccatatattaactgcaggttttat

SEQ ID NO: 879615 - DNA, 33 bp, Homo sapien
ttgtcttgttttaagaagttgccacagccaccc

SEQ ID NO: 879616 - DNA, 33 bp, Homo sapien
ttgtcttgttttaagaggttgccacagccaccc

SEQ ID NO: 879617 - DNA, 33 bp, Homo sapien
ccttctaatggagctcagacgagagtgattgta

SEQ ID NO: 879618 - DNA, 33 bp, Homo sapien
ccttctaatggagctcggacgagagtgattgta

SEQ ID NO: 879619 - DNA, 33 bp, Homo sapien
cagaaaaactatgtaaaatacacttcaagacac

SEQ ID NO: 879620 - DNA, 33 bp, Homo sapien
cagaaaaactatgtaagatacacttcaagacac

SEQ ID NO: 879621 - DNA, 33 bp, Homo sapien
gttctggctcatagaaacgattaatcagattgg

SEQ ID NO: 879622 - DNA, 33 bp, Homo sapien
gttctggctcatagaagcgattaatcagattgg

SEQ ID NO: 879623 - DNA, 33 bp, Homo sapien
atttcttttgtagaaaaggtacagcaatgaaga

SEQ ID NO: 879624 - DNA, 33 bp, Homo sapien
atttcttttgtagaaagggtacagcaatgaaga

SEQ ID NO: 879625 - DNA, 33 bp, Homo sapien
aaaagagacactgagacgctcacctgaacctag

SEQ ID NO: 879626 - DNA, 33 bp, Homo sapien
aaaagagacactgagatgctcacctgaacctag

SEQ ID NO: 879627 - DNA, 33 bp, Homo sapien
ataaaatatagatagacagtattatgcacctac

SEQ ID NO: 879628 - DNA, 33 bp, Homo sapien
ataaaatatagatagatagtattatgcacctac

SEQ ID NO: 879629 - DNA, 33 bp, Homo sapien
ccactggatatcccgacgtgaaaaaaaaatgca

SEQ ID NO: 879630 - DNA, 33 bp, Homo sapien
ccactggatatcccgatgtgaaaaaaaaatgca

SEQ ID NO: 879631 - DNA, 33 bp, Homo sapien
ctccaggccatagctgaaacttctaccactaga

SEQ ID NO: 879632 - DNA, 33 bp, Homo sapien
ctccaggccatagctggaacttctaccactaga

SEQ ID NO: 879633 - DNA, 33 bp, Homo sapien
ataatgacaacctcaaagtgctactttcttcaa

SEQ ID NO: 879634 - DNA, 33 bp, Homo sapien
ataatgacaacctcaaggtgctactttcttcaa

SEQ ID NO: 879635 - DNA, 33 bp, Homo sapien
ttgatctcacttcacccgagttaaaccacagaa

SEQ ID NO: 879636 - DNA, 33 bp, Homo sapien
ttgatctcacttcacctgagttaaaccacagaa

SEQ ID NO: 879637 - DNA, 33 bp, Homo sapien
agactaagaataactaaaagcactctgaaaaca

SEQ ID NO: 879638 - DNA, 33 bp, Homo sapien
agactaagaataactacaagcactctgaaaaca

SEQ ID NO: 879639 - DNA, 33 bp, Homo sapien
atttcctagaactgtgcagctctgtcaccacac

SEQ ID NO: 879640 - DNA, 33 bp, Homo sapien
atttcctagaactgtggagctctgtcaccacac

SEQ ID NO: 879641 - DNA, 33 bp, Homo sapien
aatataaaactcagaaaaattagcttgctgtcg

SEQ ID NO: 879642 - DNA, 33 bp, Homo sapien
aatataaaactcagaacaattagcttgctgtcg

SEQ ID NO: 879643 - DNA, 33 bp, Homo sapien
aggcctggagcctaatcaatgcatgagtataga

SEQ ID NO: 879644 - DNA, 33 bp, Homo sapien
aggcctggagcctaattaatgcatgagtataga

SEQ ID NO: 879645 - DNA, 33 bp, Homo sapien
tcgaacaggttgggaaaattgagttacacacac

SEQ ID NO: 879646 - DNA, 33 bp, Homo sapien
tcgaacaggttgggaatattgagttacacacac

SEQ ID NO: 879647 - DNA, 33 bp, Homo sapien
ccaggtcctcctctaaaaacccactgtctgagc

SEQ ID NO: 879648 - DNA, 33 bp, Homo sapien
ccaggtcctcctctaacaacccactgtctgagc

SEQ ID NO: 879649 - DNA, 33 bp, Homo sapien
ttgtatttttgtacagccagtaaggttcctgct

SEQ ID NO: 879650 - DNA, 33 bp, Homo sapien
ttgtatttttgtacagtcagtaaggttcctgct

SEQ ID NO: 879651 - DNA, 33 bp, Homo sapien
attcactttggccagaaaaacatagctggggag

SEQ ID NO: 879652 - DNA, 33 bp, Homo sapien
attcactttggccagagaaacatagctggggag

SEQ ID NO: 879653 - DNA, 33 bp, Homo sapien
ggggaggaagtttagacagagaggctcgggaag

SEQ ID NO: 879654 - DNA, 33 bp, Homo sapien
ggggaggaagtttagatagagaggctcgggaag

SEQ ID NO: 879655 - DNA, 33 bp, Homo sapien
tccggtctgttaaaaaatgcctccttttctgag

SEQ ID NO: 879656 - DNA, 33 bp, Homo sapien
tccggtctgttaaaaagtgcctccttttctgag

SEQ ID NO: 879657 - DNA, 33 bp, Homo sapien
aacccctatcagagcccgagccgagtaagacag

SEQ ID NO: 879658 - DNA, 33 bp, Homo sapien
aacccctatcagagcctgagccgagtaagacag

SEQ ID NO: 879659 - DNA, 33 bp, Homo sapien
gcacaagaggcctaagaacttgcctgaggctcc

SEQ ID NO: 879660 - DNA, 33 bp, Homo sapien
gcacaagaggcctaagcacttgcctgaggctcc

SEQ ID NO: 879661 - DNA, 33 bp, Homo sapien
gtgaatccgctgctccaagtcaccttttcaacc

SEQ ID NO: 879662 - DNA, 33 bp, Homo sapien
gtgaatccgctgctccgagtcaccttttcaacc

SEQ ID NO: 879663 - DNA, 33 bp, Homo sapien
agcggctgctgctcagacccagcggaggaccgg

SEQ ID NO: 879664 - DNA, 33 bp, Homo sapien
agcggctgctgctcaggcccagcggaggaccgg

SEQ ID NO: 879665 - DNA, 33 bp, Homo sapien
tgattctaaggaggggaagagagaacgcctctg

SEQ ID NO: 879666 - DNA, 33 bp, Homo sapien
tgattctaaggagggggagagagaacgcctctg

SEQ ID NO: 879667 - DNA, 33 bp, Homo sapien
ggattcaggtctcctccctcccaagctgatgcg

SEQ ID NO: 879668 - DNA, 33 bp, Homo sapien
ggattcaggtctcctctctcccaagctgatgcg

SEQ ID NO: 879669 - DNA, 33 bp, Homo sapien
tattttcattaattcacaagcatcccataaaaa

SEQ ID NO: 879670 - DNA, 33 bp, Homo sapien
tattttcattaattcataagcatcccataaaaa

SEQ ID NO: 879671 - DNA, 33 bp, Homo sapien
ccctactccagtataacctcatctcagcgttac

SEQ ID NO: 879672 - DNA, 33 bp, Homo sapien
ccctactccagtataatctcatctcagcgttac

SEQ ID NO: 879673 - DNA, 33 bp, Homo sapien
agcattccatcctctgaaagaacacgagcgtcc

SEQ ID NO: 879674 - DNA, 33 bp, Homo sapien
agcattccatcctctggaagaacacgagcgtcc

SEQ ID NO: 879675 - DNA, 33 bp, Homo sapien
gctgctgggagaggaacgccttatgcggacttt

SEQ ID NO: 879676 - DNA, 33 bp, Homo sapien
gctgctgggagaggaatgccttatgcggacttt

SEQ ID NO: 879677 - DNA, 33 bp, Homo sapien
ttggttcagttgcaggaaacttcaaaagacaga

SEQ ID NO: 879678 - DNA, 33 bp, Homo sapien
ttggttcagttgcagggaacttcaaaagacaga

SEQ ID NO: 879679 - DNA, 33 bp, Homo sapien
tttttgaaccgtttgaaagtaggttgcatatat

SEQ ID NO: 879680 - DNA, 33 bp, Homo sapien
tttttgaaccgtttgagagtaggttgcatatat

SEQ ID NO: 879681 - DNA, 33 bp, Homo sapien
cctcactgtccactccatagaagaacaaggcat

SEQ ID NO: 879682 - DNA, 33 bp, Homo sapien
cctcactgtccactccgtagaagaacaaggcat

SEQ ID NO: 879683 - DNA, 33 bp, Homo sapien
cctccaaaaagacagaagaggctgcctggcaga

SEQ ID NO: 879684 - DNA, 33 bp, Homo sapien
cctccaaaaagacagatgaggctgcctggcaga

SEQ ID NO: 879685 - DNA, 33 bp, Homo sapien
accttccgactggtgacgaaaagattctactga

SEQ ID NO: 879686 - DNA, 33 bp, Homo sapien
accttccgactggtgatgaaaagattctactga

SEQ ID NO: 879687 - DNA, 33 bp, Homo sapien
tgcccattgtggtcaacagagaaggaagtggac

SEQ ID NO: 879688 - DNA, 33 bp, Homo sapien
tgcccattgtggtcaatagagaaggaagtggac

SEQ ID NO: 879689 - DNA, 33 bp, Homo sapien
ttctgcagcaccgaaacgttctctgtgccatct

SEQ ID NO: 879690 - DNA, 33 bp, Homo sapien
ttctgcagcaccgaaatgttctctgtgccatct

SEQ ID NO: 879691 - DNA, 33 bp, Homo sapien
taatctggacagaagactaaacaggtcccaacc

SEQ ID NO: 879692 - DNA, 33 bp, Homo sapien
taatctggacagaagattaaacaggtcccaacc

SEQ ID NO: 879693 - DNA, 33 bp, Homo sapien
tgcagctcttaccataacaattgctgccaacct

SEQ ID NO: 879694 - DNA, 33 bp, Homo sapien
tgcagctcttaccataccaattgctgccaacct

SEQ ID NO: 879695 - DNA, 33 bp, Homo sapien
agaaaatataaaagccacaaaatacgtaggttg

SEQ ID NO: 879696 - DNA, 33 bp, Homo sapien
agaaaatataaaagccgcaaaatacgtaggttg

SEQ ID NO: 879697 - DNA, 33 bp, Homo sapien
tatagtaattctgacacagggatggttattact

SEQ ID NO: 879698 - DNA, 33 bp, Homo sapien
tatagtaattctgacatagggatggttattact

SEQ ID NO: 879699 - DNA, 33 bp, Homo sapien
ctcttttgttcctaacgcagacctgtgctggcg

SEQ ID NO: 879700 - DNA, 33 bp, Homo sapien
ctcttttgttcctaactcagacctgtgctggcg

SEQ ID NO: 879701 - DNA, 33 bp, Homo sapien
ctctcagtgtcctggacgtggacggtatgaagg

SEQ ID NO: 879702 - DNA, 33 bp, Homo sapien
ctctcagtgtcctggatgtggacggtatgaagg

SEQ ID NO: 879703 - DNA, 33 bp, Homo sapien
catgcccacataaaaagagggattgatcagacc

SEQ ID NO: 879704 - DNA, 33 bp, Homo sapien
catgcccacataaaaatagggattgatcagacc

SEQ ID NO: 879705 - DNA, 33 bp, Homo sapien
catgctacctgggacccgaggcatctaaactta

SEQ ID NO: 879706 - DNA, 33 bp, Homo sapien
catgctacctgggaccggaggcatctaaactta

SEQ ID NO: 879707 - DNA, 33 bp, Homo sapien
ctgccaccagatcatgaacacaaaaccttaggt

SEQ ID NO: 879708 - DNA, 33 bp, Homo sapien
ctgccaccagatcatggacacaaaaccttaggt

SEQ ID NO: 879709 - DNA, 33 bp, Homo sapien
ttcttgtgtttgttacagaggtaaaaatcatat

SEQ ID NO: 879710 - DNA, 33 bp, Homo sapien
ttcttgtgtttgttacggaggtaaaaatcatat

SEQ ID NO: 879711 - DNA, 33 bp, Homo sapien
tcctcttccttcctaacattggcaacttgtgcc

SEQ ID NO: 879712 - DNA, 33 bp, Homo sapien
tcctcttccttcctaatattggcaacttgtgcc

SEQ ID NO: 879713 - DNA, 33 bp, Homo sapien
tagttaggctgcaaaaatattaagctttcataa

SEQ ID NO: 879714 - DNA, 33 bp, Homo sapien
tagttaggctgcaaaattattaagctttcataa

SEQ ID NO: 879715 - DNA, 33 bp, Homo sapien
gtccaccaaacttctacctttcattactctgag

SEQ ID NO: 879716 - DNA, 33 bp, Homo sapien
gtccaccaaacttctatctttcattactctgag

SEQ ID NO: 879717 - DNA, 33 bp, Homo sapien
tgcaggtatattttaacggacctattcacacac

SEQ ID NO: 879718 - DNA, 33 bp, Homo sapien
tgcaggtatattttaatggacctattcacacac

SEQ ID NO: 879719 - DNA, 33 bp, Homo sapien
atgggggtgcaggagagaatttagtgatgggag

SEQ ID NO: 879720 - DNA, 33 bp, Homo sapien
atgggggtgcaggagataatttagtgatgggag

SEQ ID NO: 879721 - DNA, 33 bp, Homo sapien
atgcaaccatatgatcactaatgagggcttcca

SEQ ID NO: 879722 - DNA, 33 bp, Homo sapien
atgcaaccatatgatcgctaatgagggcttcca

SEQ ID NO: 879723 - DNA, 33 bp, Homo sapien
aaatgcatcataaatacacaatcaaaatgtaac

SEQ ID NO: 879724 - DNA, 33 bp, Homo sapien
aaatgcatcataaatagacaatcaaaatgtaac

SEQ ID NO: 879725 - DNA, 33 bp, Homo sapien
tattaagcttgtcatactaaacttcttttttgt

SEQ ID NO: 879726 - DNA, 33 bp, Homo sapien
tattaagcttgtcatagtaaacttcttttttgt

SEQ ID NO: 879727 - DNA, 33 bp, Homo sapien
agaaatctaagtctaactgttgtttctttgtag

SEQ ID NO: 879728 - DNA, 33 bp, Homo sapien
agaaatctaagtctaattgttgtttctttgtag

SEQ ID NO: 879729 - DNA, 33 bp, Homo sapien
aatacatatgtatggaactattccactccatcg

SEQ ID NO: 879730 - DNA, 33 bp, Homo sapien
aatacatatgtatggacctattccactccatcg

SEQ ID NO: 879731 - DNA, 33 bp, Homo sapien
tttttgggggtcagccacagagttcttactact

SEQ ID NO: 879732 - DNA, 33 bp, Homo sapien
tttttgggggtcagccgcagagttcttactact

SEQ ID NO: 879733 - DNA, 33 bp, Homo sapien
aaaggggaaataaaccgaagacagtctactccc

SEQ ID NO: 879734 - DNA, 33 bp, Homo sapien
aaaggggaaataaacctaagacagtctactccc

SEQ ID NO: 879735 - DNA, 33 bp, Homo sapien
aagggctgaaaattgacccctggattcagaaag

SEQ ID NO: 879736 - DNA, 33 bp, Homo sapien
aagggctgaaaattgatccctggattcagaaag

SEQ ID NO: 879737 - DNA, 33 bp, Homo sapien
caagctgttctggaacgcctaagctcaagggat

SEQ ID NO: 879738 - DNA, 33 bp, Homo sapien
caagctgttctggaactcctaagctcaagggat

SEQ ID NO: 879739 - DNA, 33 bp, Homo sapien
agctgtgctggtagatcagcctactggaaaccg

SEQ ID NO: 879740 - DNA, 33 bp, Homo sapien
agctgtgctggtagattagcctactggaaaccg

SEQ ID NO: 879741 - DNA, 33 bp, Homo sapien
accaaaggatccaactcaagctagctactgtca

SEQ ID NO: 879742 - DNA, 33 bp, Homo sapien
accaaaggatccaactgaagctagctactgtca

SEQ ID NO: 879743 - DNA, 33 bp, Homo sapien
cacacacacaaaagcacggtaaacagtaaataa

SEQ ID NO: 879744 - DNA, 33 bp, Homo sapien
cacacacacaaaagcatggtaaacagtaaataa

SEQ ID NO: 879745 - DNA, 33 bp, Homo sapien
gcatgggggctggaacaatgtggaagaggggca

SEQ ID NO: 879746 - DNA, 33 bp, Homo sapien
gcatgggggctggaaccatgtggaagaggggca

SEQ ID NO: 879747 - DNA, 33 bp, Homo sapien
acaagttattcatcacggtattagttaggtatt

SEQ ID NO: 879748 - DNA, 33 bp, Homo sapien
acaagttattcatcactgtattagttaggtatt

SEQ ID NO: 879749 - DNA, 33 bp, Homo sapien
gcaatgtgctgtgaaaccagtatgcctagacat

SEQ ID NO: 879750 - DNA, 33 bp, Homo sapien
gcaatgtgctgtgaaatcagtatgcctagacat

SEQ ID NO: 879751 - DNA, 33 bp, Homo sapien
tgcatccatgtgttaactcaacttattgaattt

SEQ ID NO: 879752 - DNA, 33 bp, Homo sapien
tgcatccatgtgttaattcaacttattgaattt

SEQ ID NO: 879753 - DNA, 33 bp, Homo sapien
atgtgttcaatacatacggtgacattttttggt

SEQ ID NO: 879754 - DNA, 33 bp, Homo sapien
atgtgttcaatacatatggtgacattttttggt

SEQ ID NO: 879755 - DNA, 33 bp, Homo sapien
acaatttttatgtgaactcctaatttatccatc

SEQ ID NO: 879756 - DNA, 33 bp, Homo sapien
acaatttttatgtgaattcctaatttatccatc

SEQ ID NO: 879757 - DNA, 33 bp, Homo sapien
aatgcttaccgtgggccaaactctgtgccttgt

SEQ ID NO: 879758 - DNA, 33 bp, Homo sapien
aatgcttaccgtgggctaaactctgtgccttgt

SEQ ID NO: 879759 - DNA, 33 bp, Homo sapien
tgtacacaaaccaggccgaacaatgcctcaaaa

SEQ ID NO: 879760 - DNA, 33 bp, Homo sapien
tgtacacaaaccaggcggaacaatgcctcaaaa

SEQ ID NO: 879761 - DNA, 33 bp, Homo sapien
tttgaatcttatgacaagagaattaaaccagtt

SEQ ID NO: 879762 - DNA, 33 bp, Homo sapien
tttgaatcttatgacaggagaattaaaccagtt

SEQ ID NO: 879763 - DNA, 33 bp, Homo sapien
ttccacacatgaatacagaagccaagaaacaaa

SEQ ID NO: 879764 - DNA, 33 bp, Homo sapien
ttccacacatgaatacggaagccaagaaacaaa

SEQ ID NO: 879765 - DNA, 33 bp, Homo sapien
aagtagctaagcttgacatactgagctcaaaga

SEQ ID NO: 879766 - DNA, 33 bp, Homo sapien
aagtagctaagcttgatatactgagctcaaaga

SEQ ID NO: 879767 - DNA, 33 bp, Homo sapien
aagatgttttgctctcactctgctgtctcgttc

SEQ ID NO: 879768 - DNA, 33 bp, Homo sapien
aagatgttttgctctcgctctgctgtctcgttc

SEQ ID NO: 879769 - DNA, 33 bp, Homo sapien
cttttgaccaggtagcccacctgacatgaagcc

SEQ ID NO: 879770 - DNA, 33 bp, Homo sapien
cttttgaccaggtagcgcacctgacatgaagcc

SEQ ID NO: 879771 - DNA, 33 bp, Homo sapien
gccaccatgctcggcacattctgtcttctatat

SEQ ID NO: 879772 - DNA, 33 bp, Homo sapien
gccaccatgctcggcagattctgtcttctatat

SEQ ID NO: 879773 - DNA, 33 bp, Homo sapien
tacagcaacaactctaagaatggtggccttttc

SEQ ID NO: 879774 - DNA, 33 bp, Homo sapien
tacagcaacaactctaggaatggtggccttttc

SEQ ID NO: 879775 - DNA, 33 bp, Homo sapien
atattaatacatcctcaacattttatttacaat

SEQ ID NO: 879776 - DNA, 33 bp, Homo sapien
atattaatacatcctccacattttatttacaat

SEQ ID NO: 879777 - DNA, 33 bp, Homo sapien
tataaatgttgtttaacggccctgaactgtaca

SEQ ID NO: 879778 - DNA, 33 bp, Homo sapien
tataaatgttgtttaatggccctgaactgtaca

SEQ ID NO: 879779 - DNA, 33 bp, Homo sapien
tatttttaaagtccatcaaagcacctggttgaa

SEQ ID NO: 879780 - DNA, 33 bp, Homo sapien
tatttttaaagtccatgaaagcacctggttgaa

SEQ ID NO: 879781 - DNA, 33 bp, Homo sapien
aaccaaagggacatcacattagagaaaacatgc

SEQ ID NO: 879782 - DNA, 33 bp, Homo sapien
aaccaaagggacatcatattagagaaaacatgc

SEQ ID NO: 879783 - DNA, 33 bp, Homo sapien
ctcatttcccctttaacctagcattagttggta

SEQ ID NO: 879784 - DNA, 33 bp, Homo sapien
ctcatttcccctttaatctagcattagttggta

SEQ ID NO: 879785 - DNA, 33 bp, Homo sapien
tttcataacctcaaaactcagtggagtatgtga

SEQ ID NO: 879786 - DNA, 33 bp, Homo sapien
tttcataacctcaaaagtcagtggagtatgtga

SEQ ID NO: 879787 - DNA, 33 bp, Homo sapien
ctattaactaaatatcagaacagtggctaagag

SEQ ID NO: 879788 - DNA, 33 bp, Homo sapien
ctattaactaaatatccgaacagtggctaagag

SEQ ID NO: 879789 - DNA, 33 bp, Homo sapien
agcttggtgtcacttcaactcggttctgacacc

SEQ ID NO: 879790 - DNA, 33 bp, Homo sapien
agcttggtgtcacttcgactcggttctgacacc

SEQ ID NO: 879791 - DNA, 33 bp, Homo sapien
ccaacttcctctttagccactacatttaagcca

SEQ ID NO: 879792 - DNA, 33 bp, Homo sapien
ccaacttcctctttagtcactacatttaagcca

SEQ ID NO: 879793 - DNA, 33 bp, Homo sapien
tccttaaatgttcaagcctctcatataaaatgg

SEQ ID NO: 879794 - DNA, 33 bp, Homo sapien
tccttaaatgttcaagtctctcatataaaatgg

SEQ ID NO: 879795 - DNA, 33 bp, Homo sapien
ataccgttgtccctcaatatcgatgggggttgg

SEQ ID NO: 879796 - DNA, 33 bp, Homo sapien
ataccgttgtccctcagtatcgatgggggttgg

SEQ ID NO: 879797 - DNA, 33 bp, Homo sapien
cttatttctttctacaatgatcaaactctagcc

SEQ ID NO: 879798 - DNA, 33 bp, Homo sapien
cttatttctttctacactgatcaaactctagcc

SEQ ID NO: 879799 - DNA, 33 bp, Homo sapien
ttcaaacaccgtggcaaatgaagaagatgggca

SEQ ID NO: 879800 - DNA, 33 bp, Homo sapien
ttcaaacaccgtggcacatgaagaagatgggca

SEQ ID NO: 879801 - DNA, 33 bp, Homo sapien
tctgatcttaatgtcacgggaagacggtaatat

SEQ ID NO: 879802 - DNA, 33 bp, Homo sapien
tctgatcttaatgtcatgggaagacggtaatat

SEQ ID NO: 879803 - DNA, 33 bp, Homo sapien
gatagacgagatgcaccacggtagacgtgaggg

SEQ ID NO: 879804 - DNA, 33 bp, Homo sapien
gatagacgagatgcactacggtagacgtgaggg

SEQ ID NO: 879805 - DNA, 33 bp, Homo sapien
caagtgggaaattacaagtcctattatgttcac

SEQ ID NO: 879806 - DNA, 33 bp, Homo sapien
caagtgggaaattacacgtcctattatgttcac

SEQ ID NO: 879807 - DNA, 33 bp, Homo sapien
agtataatgttggttcaagatcaagaaggaatc

SEQ ID NO: 879808 - DNA, 33 bp, Homo sapien
agtataatgttggttcgagatcaagaaggaatc

SEQ ID NO: 879809 - DNA, 33 bp, Homo sapien
tctcataccactctaccgggacccatgtctgct

SEQ ID NO: 879810 - DNA, 33 bp, Homo sapien
tctcataccactctactgggacccatgtctgct

SEQ ID NO: 879811 - DNA, 33 bp, Homo sapien
ttacctctccactcccaatggtaaattttatct

SEQ ID NO: 879812 - DNA, 33 bp, Homo sapien
ttacctctccactcccgatggtaaattttatct

SEQ ID NO: 879813 - DNA, 33 bp, Homo sapien
tgctgacctccacagacattattagaaacaaac

SEQ ID NO: 879814 - DNA, 33 bp, Homo sapien
tgctgacctccacagatattattagaaacaaac

SEQ ID NO: 879815 - DNA, 33 bp, Homo sapien
tgaatgtactttaataccactgaactgtacact

SEQ ID NO: 879816 - DNA, 33 bp, Homo sapien
tgaatgtactttaatatcactgaactgtacact

SEQ ID NO: 879817 - DNA, 33 bp, Homo sapien
gaccaagagtagatagcagtaggattcatagaa

SEQ ID NO: 879818 - DNA, 33 bp, Homo sapien
gaccaagagtagatagtagtaggattcatagaa

SEQ ID NO: 879819 - DNA, 33 bp, Homo sapien
aagtgcaaagaagacaaatgaattttaatgtaa

SEQ ID NO: 879820 - DNA, 33 bp, Homo sapien
aagtgcaaagaagacagatgaattttaatgtaa

SEQ ID NO: 879821 - DNA, 33 bp, Homo sapien
ctctcctccataaatgacacctcgttcctgtgt

SEQ ID NO: 879822 - DNA, 33 bp, Homo sapien
ctctcctccataaatggcacctcgttcctgtgt

SEQ ID NO: 879823 - DNA, 33 bp, Homo sapien
accactttggaaaacaagcaatttctactaaac

SEQ ID NO: 879824 - DNA, 33 bp, Homo sapien
accactttggaaaacaggcaatttctactaaac

SEQ ID NO: 879825 - DNA, 33 bp, Homo sapien
agacttggtggcttaaaacgttacccattttta

SEQ ID NO: 879826 - DNA, 33 bp, Homo sapien
agacttggtggcttaacacgttacccattttta

SEQ ID NO: 879827 - DNA, 33 bp, Homo sapien
tactgggtatatacccaaaatcatgctactata

SEQ ID NO: 879828 - DNA, 33 bp, Homo sapien
tactgggtatataccccaaatcatgctactata

SEQ ID NO: 879829 - DNA, 33 bp, Homo sapien
cacgcgctaaacgtgcgaaatcctaagtatttc

SEQ ID NO: 879830 - DNA, 33 bp, Homo sapien
cacgcgctaaacgtgctaaatcctaagtatttc

SEQ ID NO: 879831 - DNA, 33 bp, Homo sapien
gacaacgtttaaggcaaaaccgagatttgtatg

SEQ ID NO: 879832 - DNA, 33 bp, Homo sapien
gacaacgtttaaggcagaaccgagatttgtatg

SEQ ID NO: 879833 - DNA, 33 bp, Homo sapien
ccatctattgtctctccattcacttgatgtttt

SEQ ID NO: 879834 - DNA, 33 bp, Homo sapien
ccatctattgtctctctattcacttgatgtttt

SEQ ID NO: 879835 - DNA, 33 bp, Homo sapien
tggtttctatgttgaggagctatagaaagattg

SEQ ID NO: 879836 - DNA, 33 bp, Homo sapien
tggtttctatgttgagtagctatagaaagattg

SEQ ID NO: 879837 - DNA, 33 bp, Homo sapien
aaagtccgcctatccaatagcccagcacacagt

SEQ ID NO: 879838 - DNA, 33 bp, Homo sapien
aaagtccgcctatccactagcccagcacacagt

SEQ ID NO: 879839 - DNA, 33 bp, Homo sapien
gttaaacgaaaacagcaaagtgcaaaaacagtc

SEQ ID NO: 879840 - DNA, 33 bp, Homo sapien
gttaaacgaaaacagcgaagtgcaaaaacagtc

SEQ ID NO: 879841 - DNA, 33 bp, Homo sapien
atgtctatgtatattgcagacagtaatattagt

SEQ ID NO: 879842 - DNA, 33 bp, Homo sapien
atgtctatgtatattggagacagtaatattagt

SEQ ID NO: 879843 - DNA, 33 bp, Homo sapien
actatccattgcttcactctgtatcagggagaa

SEQ ID NO: 879844 - DNA, 33 bp, Homo sapien
actatccattgcttcagtctgtatcagggagaa

SEQ ID NO: 879845 - DNA, 33 bp, Homo sapien
tgtacctacccttcaagaactacggccagagtc

SEQ ID NO: 879846 - DNA, 33 bp, Homo sapien
tgtacctacccttcaataactacggccagagtc

SEQ ID NO: 879847 - DNA, 33 bp, Homo sapien
tgtgggtgtgcatatcccgtcagctgatattat

SEQ ID NO: 879848 - DNA, 33 bp, Homo sapien
tgtgggtgtgcatatctcgtcagctgatattat

SEQ ID NO: 879849 - DNA, 33 bp, Homo sapien
cctatatgattttttagccttgctttacagcta

SEQ ID NO: 879850 - DNA, 33 bp, Homo sapien
cctatatgattttttatccttgctttacagcta

SEQ ID NO: 879851 - DNA, 33 bp, Homo sapien
tcatagacaaagaacacacagagcccaggcgcg

SEQ ID NO: 879852 - DNA, 33 bp, Homo sapien
tcatagacaaagaacatacagagcccaggcgcg

SEQ ID NO: 879853 - DNA, 33 bp, Homo sapien
accaagccaaatgcaacggaaggtaatgcaggg

SEQ ID NO: 879854 - DNA, 33 bp, Homo sapien
accaagccaaatgcaatggaaggtaatgcaggg

SEQ ID NO: 879855 - DNA, 33 bp, Homo sapien
gctctaacatttctataagccaaagactaatcc

SEQ ID NO: 879856 - DNA, 33 bp, Homo sapien
gctctaacatttctattagccaaagactaatcc

SEQ ID NO: 879857 - DNA, 33 bp, Homo sapien
agaagctgtaaacttgcagactgaaaatagaaa

SEQ ID NO: 879858 - DNA, 33 bp, Homo sapien
agaagctgtaaacttgtagactgaaaatagaaa

SEQ ID NO: 879859 - DNA, 33 bp, Homo sapien
tgcttgtttgttaatacgttcaaatgcactttt

SEQ ID NO: 879860 - DNA, 33 bp, Homo sapien
tgcttgtttgttaatatgttcaaatgcactttt

SEQ ID NO: 879861 - DNA, 33 bp, Homo sapien
cagcccagaatgactcccaacttatgagtggat

SEQ ID NO: 879862 - DNA, 33 bp, Homo sapien
cagcccagaatgactctcaacttatgagtggat

SEQ ID NO: 879863 - DNA, 33 bp, Homo sapien
aacatctcagcaacaaatacctgccaaataaac

SEQ ID NO: 879864 - DNA, 33 bp, Homo sapien
aacatctcagcaacaattacctgccaaataaac

SEQ ID NO: 879865 - DNA, 33 bp, Homo sapien
gcctttgaaaatctcaagtgaaaatgtcccagt

SEQ ID NO: 879866 - DNA, 33 bp, Homo sapien
gcctttgaaaatctcatgtgaaaatgtcccagt

SEQ ID NO: 879867 - DNA, 33 bp, Homo sapien
taattggaaaggccccagagtgtttcagtaatg

SEQ ID NO: 879868 - DNA, 33 bp, Homo sapien
taattggaaaggccccggagtgtttcagtaatg

SEQ ID NO: 879869 - DNA, 33 bp, Homo sapien
agttagagtgtggcagccgaatcagtcatcgtc

SEQ ID NO: 879870 - DNA, 33 bp, Homo sapien
agttagagtgtggcagtcgaatcagtcatcgtc

SEQ ID NO: 879871 - DNA, 33 bp, Homo sapien
tctggtgggcttctgaatacaatggaggagatg

SEQ ID NO: 879872 - DNA, 33 bp, Homo sapien
tctggtgggcttctgactacaatggaggagatg

SEQ ID NO: 879873 - DNA, 33 bp, Homo sapien
gtctgctgggaaaacacggttctgagacagaag

SEQ ID NO: 879874 - DNA, 33 bp, Homo sapien
gtctgctgggaaaacatggttctgagacagaag

SEQ ID NO: 879875 - DNA, 33 bp, Homo sapien
ccattgtatatagcaaagtcattagctgttctt

SEQ ID NO: 879876 - DNA, 33 bp, Homo sapien
ccattgtatatagcaaggtcattagctgttctt

SEQ ID NO: 879877 - DNA, 33 bp, Homo sapien
atttggtgtggagttcactttttcctaattcag

SEQ ID NO: 879878 - DNA, 33 bp, Homo sapien
atttggtgtggagttctctttttcctaattcag

SEQ ID NO: 879879 - DNA, 33 bp, Homo sapien
catagggcagaactgcagaaagcctacatttgg

SEQ ID NO: 879880 - DNA, 33 bp, Homo sapien
catagggcagaactgcggaaagcctacatttgg

SEQ ID NO: 879881 - DNA, 33 bp, Homo sapien
gggggttcctcctagccctctggtgccctagac

SEQ ID NO: 879882 - DNA, 33 bp, Homo sapien
gggggttcctcctagctctctggtgccctagac

SEQ ID NO: 879883 - DNA, 33 bp, Homo sapien
ggtctgaaagcagaaactgtactttggacagag

SEQ ID NO: 879884 - DNA, 33 bp, Homo sapien
ggtctgaaagcagaaattgtactttggacagag

SEQ ID NO: 879885 - DNA, 33 bp, Homo sapien
gctcatggtttacagaatatgtttaatagacat

SEQ ID NO: 879886 - DNA, 33 bp, Homo sapien
gctcatggtttacagagtatgtttaatagacat

SEQ ID NO: 879887 - DNA, 33 bp, Homo sapien
atggccattgtcctaccgactcctccagcccca

SEQ ID NO: 879888 - DNA, 33 bp, Homo sapien
atggccattgtcctactgactcctccagcccca

SEQ ID NO: 879889 - DNA, 33 bp, Homo sapien
tcctcagtggcctcaggcacatcagctggtcac

SEQ ID NO: 879890 - DNA, 33 bp, Homo sapien
tcctcagtggcctcagtcacatcagctggtcac

SEQ ID NO: 879891 - DNA, 33 bp, Homo sapien
agcaactccggatagacgtagacgttgctcaag

SEQ ID NO: 879892 - DNA, 33 bp, Homo sapien
agcaactccggatagatgtagacgttgctcaag

SEQ ID NO: 879893 - DNA, 33 bp, Homo sapien
taatgaggggtgaaccagctcaagtcagaaact

SEQ ID NO: 879894 - DNA, 33 bp, Homo sapien
taatgaggggtgaaccggctcaagtcagaaact

SEQ ID NO: 879895 - DNA, 33 bp, Homo sapien
atatttattgctaaacaaatgcactaaagtcag

SEQ ID NO: 879896 - DNA, 33 bp, Homo sapien
atatttattgctaaacgaatgcactaaagtcag

SEQ ID NO: 879897 - DNA, 33 bp, Homo sapien
aaaccatgagttaggcactagttttgctggtgt

SEQ ID NO: 879898 - DNA, 33 bp, Homo sapien
aaaccatgagttaggcgctagttttgctggtgt

SEQ ID NO: 879899 - DNA, 33 bp, Homo sapien
aataaagaaagctaaacatgaaaaatgctgtgc

SEQ ID NO: 879900 - DNA, 33 bp, Homo sapien
aataaagaaagctaaagatgaaaaatgctgtgc

SEQ ID NO: 879901 - DNA, 33 bp, Homo sapien
gatgatgaatatgttaactaaaatgatctgatc

SEQ ID NO: 879902 - DNA, 33 bp, Homo sapien
gatgatgaatatgttacctaaaatgatctgatc

SEQ ID NO: 879903 - DNA, 33 bp, Homo sapien
tgcctagctgtaaccacctcgttttggggaatg

SEQ ID NO: 879904 - DNA, 33 bp, Homo sapien
tgcctagctgtaaccatctcgttttggggaatg

SEQ ID NO: 879905 - DNA, 33 bp, Homo sapien
atgaatggatccaggaagtagacgttaccttgt

SEQ ID NO: 879906 - DNA, 33 bp, Homo sapien
atgaatggatccaggaggtagacgttaccttgt

SEQ ID NO: 879907 - DNA, 33 bp, Homo sapien
tcgttctctgtgccccaacagtgctatatgtag

SEQ ID NO: 879908 - DNA, 33 bp, Homo sapien
tcgttctctgtgccccgacagtgctatatgtag

SEQ ID NO: 879909 - DNA, 33 bp, Homo sapien
tcaccctcacaggcaacggggagttctagagca

SEQ ID NO: 879910 - DNA, 33 bp, Homo sapien
tcaccctcacaggcaatggggagttctagagca

SEQ ID NO: 879911 - DNA, 33 bp, Homo sapien
ccccagtatctttgcccaagacttgagtaataa

SEQ ID NO: 879912 - DNA, 33 bp, Homo sapien
ccccagtatctttgcctaagacttgagtaataa

SEQ ID NO: 879913 - DNA, 33 bp, Homo sapien
tgctagtactttatgaaatagcctgtgtccctg

SEQ ID NO: 879914 - DNA, 33 bp, Homo sapien
tgctagtactttatgagatagcctgtgtccctg

SEQ ID NO: 879915 - DNA, 33 bp, Homo sapien
actactgggcagataacgttcatacaaaggaca

SEQ ID NO: 879916 - DNA, 33 bp, Homo sapien
actactgggcagataaggttcatacaaaggaca

SEQ ID NO: 879917 - DNA, 33 bp, Homo sapien
aaaagaaattatgttacgattgccagtggctaa

SEQ ID NO: 879918 - DNA, 33 bp, Homo sapien
aaaagaaattatgttatgattgccagtggctaa

SEQ ID NO: 879919 - DNA, 33 bp, Homo sapien
atagtttatgtaagggacaacaacaggaagtaa

SEQ ID NO: 879920 - DNA, 33 bp, Homo sapien
atagtttatgtaaggggcaacaacaggaagtaa

SEQ ID NO: 879921 - DNA, 33 bp, Homo sapien
aaactactgttttgacggggtttgaggggaagg

SEQ ID NO: 879922 - DNA, 33 bp, Homo sapien
aaactactgttttgactgggtttgaggggaagg

SEQ ID NO: 879923 - DNA, 33 bp, Homo sapien
ttcttttaaagctgcccagtggattgaggctcc

SEQ ID NO: 879924 - DNA, 33 bp, Homo sapien
ttcttttaaagctgcctagtggattgaggctcc

SEQ ID NO: 879925 - DNA, 33 bp, Homo sapien
ttcactttaaaacagaagaagggcaaggtgcaa

SEQ ID NO: 879926 - DNA, 33 bp, Homo sapien
ttcactttaaaacagatgaagggcaaggtgcaa

SEQ ID NO: 879927 - DNA, 33 bp, Homo sapien
actgttttttacttcacggaatttcactacctc

SEQ ID NO: 879928 - DNA, 33 bp, Homo sapien
actgttttttacttcatggaatttcactacctc

SEQ ID NO: 879929 - DNA, 33 bp, Homo sapien
aggaactacctgataacgtgaggtagtgaaatt

SEQ ID NO: 879930 - DNA, 33 bp, Homo sapien
aggaactacctgataatgtgaggtagtgaaatt

SEQ ID NO: 879931 - DNA, 33 bp, Homo sapien
tagttataaggggactcacaatgaatcaaatac

SEQ ID NO: 879932 - DNA, 33 bp, Homo sapien
tagttataaggggactgacaatgaatcaaatac

SEQ ID NO: 879933 - DNA, 33 bp, Homo sapien
tcctctggcttctccccctcaatgctgaggctg

SEQ ID NO: 879934 - DNA, 33 bp, Homo sapien
tcctctggcttctcccgctcaatgctgaggctg

SEQ ID NO: 879935 - DNA, 33 bp, Homo sapien
ccactgctcagctggaaaggacaaactctaggc

SEQ ID NO: 879936 - DNA, 33 bp, Homo sapien
ccactgctcagctggagaggacaaactctaggc

SEQ ID NO: 879937 - DNA, 33 bp, Homo sapien
atgactgtgaggtggcaaaatcaggactagcgt

SEQ ID NO: 879938 - DNA, 33 bp, Homo sapien
atgactgtgaggtggcgaaatcaggactagcgt

SEQ ID NO: 879939 - DNA, 33 bp, Homo sapien
atagcattggaaaatacaggtgcccaaggctgc

SEQ ID NO: 879940 - DNA, 33 bp, Homo sapien
atagcattggaaaatataggtgcccaaggctgc

SEQ ID NO: 879941 - DNA, 33 bp, Homo sapien
aaataccctgtccatgacaagtttgaaacagag

SEQ ID NO: 879942 - DNA, 33 bp, Homo sapien
aaataccctgtccatggcaagtttgaaacagag

SEQ ID NO: 879943 - DNA, 33 bp, Homo sapien
taagtgttaaggtgaccgccatggagctagaat

SEQ ID NO: 879944 - DNA, 33 bp, Homo sapien
taagtgttaaggtgactgccatggagctagaat

SEQ ID NO: 879945 - DNA, 33 bp, Homo sapien
atgctccttgaaggccaaagcactgaaaccctc

SEQ ID NO: 879946 - DNA, 33 bp, Homo sapien
atgctccttgaaggccgaagcactgaaaccctc

SEQ ID NO: 879947 - DNA, 33 bp, Homo sapien
gggggagggagctaggaatttagaagcttagtt

SEQ ID NO: 879948 - DNA, 33 bp, Homo sapien
gggggagggagctaggcatttagaagcttagtt

SEQ ID NO: 879949 - DNA, 33 bp, Homo sapien
tcccaggacagaagggaaatggtgtcaggtctg

SEQ ID NO: 879950 - DNA, 33 bp, Homo sapien
tcccaggacagaaggggaatggtgtcaggtctg

SEQ ID NO: 879951 - DNA, 33 bp, Homo sapien
gagaaagaaaatataacactggtcaagcccctg

SEQ ID NO: 879952 - DNA, 33 bp, Homo sapien
gagaaagaaaatataagactggtcaagcccctg

SEQ ID NO: 879953 - DNA, 33 bp, Homo sapien
ggctctgggcagaggcagactggattcagtgag

SEQ ID NO: 879954 - DNA, 33 bp, Homo sapien
ggctctgggcagaggcggactggattcagtgag

SEQ ID NO: 879955 - DNA, 33 bp, Homo sapien
caggagtagttttaagcagaagaaagagaagtg

SEQ ID NO: 879956 - DNA, 33 bp, Homo sapien
caggagtagttttaaggagaagaaagagaagtg

SEQ ID NO: 879957 - DNA, 33 bp, Homo sapien
tgtgggtcccagggtcacaaataaatcctctgc

SEQ ID NO: 879958 - DNA, 33 bp, Homo sapien
tgtgggtcccagggtcgcaaataaatcctctgc

SEQ ID NO: 879959 - DNA, 33 bp, Homo sapien
gggtgacagtgactagacagagctaacagattg

SEQ ID NO: 879960 - DNA, 33 bp, Homo sapien
gggtgacagtgactaggcagagctaacagattg

SEQ ID NO: 879961 - DNA, 33 bp, Homo sapien
ccttattcatgtccacacttttctgccaatagt

SEQ ID NO: 879962 - DNA, 33 bp, Homo sapien
ccttattcatgtccacgcttttctgccaatagt

SEQ ID NO: 879963 - DNA, 33 bp, Homo sapien
cacgtccacagccagaaaaatcagcaaagatcc

SEQ ID NO: 879964 - DNA, 33 bp, Homo sapien
cacgtccacagccagagaaatcagcaaagatcc

SEQ ID NO: 879965 - DNA, 33 bp, Homo sapien
ttgagccaaaaaaccacagacttcagaaacctc

SEQ ID NO: 879966 - DNA, 33 bp, Homo sapien
ttgagccaaaaaaccagagacttcagaaacctc

SEQ ID NO: 879967 - DNA, 33 bp, Homo sapien
tggaagctgagaagtccaaaggtctgcagtcag

SEQ ID NO: 879968 - DNA, 33 bp, Homo sapien
tggaagctgagaagtcgaaaggtctgcagtcag

SEQ ID NO: 879969 - DNA, 33 bp, Homo sapien
tagccactgcgcccggccatgaggttttccttt

SEQ ID NO: 879970 - DNA, 33 bp, Homo sapien
tagccactgcgcccggtcatgaggttttccttt

SEQ ID NO: 879971 - DNA, 33 bp, Homo sapien
gtcagccctggtagcacacgcttgcagtcccag

SEQ ID NO: 879972 - DNA, 33 bp, Homo sapien
gtcagccctggtagcatacgcttgcagtcccag

SEQ ID NO: 879973 - DNA, 33 bp, Homo sapien
agcgggaagaaaccataaagatgcgctgaaggg

SEQ ID NO: 879974 - DNA, 33 bp, Homo sapien
agcgggaagaaaccatgaagatgcgctgaaggg

SEQ ID NO: 879975 - DNA, 33 bp, Homo sapien
tcccagagagtcagaacatgtggaaatggcttt

SEQ ID NO: 879976 - DNA, 33 bp, Homo sapien
tcccagagagtcagaatatgtggaaatggcttt

SEQ ID NO: 879977 - DNA, 33 bp, Homo sapien
atctgtgatttctgggccagttttgattcgttg

SEQ ID NO: 879978 - DNA, 33 bp, Homo sapien
atctgtgatttctggggcagttttgattcgttg

SEQ ID NO: 879979 - DNA, 33 bp, Homo sapien
ggcgaatggtactcacagtgacgatgaaggtga

SEQ ID NO: 879980 - DNA, 33 bp, Homo sapien
ggcgaatggtactcacggtgacgatgaaggtga

SEQ ID NO: 879981 - DNA, 33 bp, Homo sapien
gcctgttttccacatgcatttctgccctttgtg

SEQ ID NO: 879982 - DNA, 33 bp, Homo sapien
gcctgttttccacatggatttctgccctttgtg

SEQ ID NO: 879983 - DNA, 33 bp, Homo sapien
gcccctcagctgtaaactccagaagggtctatg

SEQ ID NO: 879984 - DNA, 33 bp, Homo sapien
gcccctcagctgtaaattccagaagggtctatg

SEQ ID NO: 879985 - DNA, 33 bp, Homo sapien
catgtccatttctttacctgagtattaaagaca

SEQ ID NO: 879986 - DNA, 33 bp, Homo sapien
catgtccatttctttagctgagtattaaagaca

SEQ ID NO: 879987 - DNA, 33 bp, Homo sapien
gcactgaaattgagtaagtctaacatttaagtc

SEQ ID NO: 879988 - DNA, 33 bp, Homo sapien
gcactgaaattgagtaggtctaacatttaagtc

SEQ ID NO: 879989 - DNA, 33 bp, Homo sapien
tttgaatacatgaattcaacctagacatttttt

SEQ ID NO: 879990 - DNA, 33 bp, Homo sapien
tttgaatacatgaatttaacctagacatttttt

SEQ ID NO: 879991 - DNA, 33 bp, Homo sapien
cacaggatgttattcccactccacaggcaccag

SEQ ID NO: 879992 - DNA, 33 bp, Homo sapien
cacaggatgttattcctactccacaggcaccag

SEQ ID NO: 879993 - DNA, 33 bp, Homo sapien
cacgcctgcactaaaactcctctgactccactg

SEQ ID NO: 879994 - DNA, 33 bp, Homo sapien
cacgcctgcactaaaattcctctgactccactg

SEQ ID NO: 879995 - DNA, 33 bp, Homo sapien
tgactttaggagagtacaatttccataacataa

SEQ ID NO: 879996 - DNA, 33 bp, Homo sapien
tgactttaggagagtataatttccataacataa

SEQ ID NO: 879997 - DNA, 33 bp, Homo sapien
aacagagaaaaaagtacctgagcagaaagaaca

SEQ ID NO: 879998 - DNA, 33 bp, Homo sapien
aacagagaaaaaagtatctgagcagaaagaaca

SEQ ID NO: 879999 - DNA, 33 bp, Homo sapien
caactaattaaagtcacataaagagactgtctc

SEQ ID NO: 880000 - DNA, 33 bp, Homo sapien
caactaattaaagtcatataaagagactgtctc

SEQ ID NO: 880001 - DNA, 33 bp, Homo sapien
gtgagaggttgaccaacgtgcctaatgtcacat

SEQ ID NO: 880002 - DNA, 33 bp, Homo sapien
gtgagaggttgaccaatgtgcctaatgtcacat

SEQ ID NO: 880003 - DNA, 33 bp, Homo sapien
cctggagtaactccaaaacacaggcctgaggat

SEQ ID NO: 880004 - DNA, 33 bp, Homo sapien
cctggagtaactccaagacacaggcctgaggat

SEQ ID NO: 880005 - DNA, 33 bp, Homo sapien
ctccaccagtgctctgcagctttctataatgca

SEQ ID NO: 880006 - DNA, 33 bp, Homo sapien
ctccaccagtgctctgtagctttctataatgca

SEQ ID NO: 880007 - DNA, 33 bp, Homo sapien
cagtcatctcaggaccgcagcaagtcgctttaa

SEQ ID NO: 880008 - DNA, 33 bp, Homo sapien
cagtcatctcaggacctcagcaagtcgctttaa

SEQ ID NO: 880009 - DNA, 33 bp, Homo sapien
taaaattcacggtccaaccacaaggacttttct

SEQ ID NO: 880010 - DNA, 33 bp, Homo sapien
taaaattcacggtccacccacaaggacttttct

SEQ ID NO: 880011 - DNA, 33 bp, Homo sapien
acagaacaagtcaggaaagtagaatcaaaagtc

SEQ ID NO: 880012 - DNA, 33 bp, Homo sapien
acagaacaagtcaggagagtagaatcaaaagtc

SEQ ID NO: 880013 - DNA, 33 bp, Homo sapien
aatgtttatgtccaccccgctcaccaattcata

SEQ ID NO: 880014 - DNA, 33 bp, Homo sapien
aatgtttatgtccacctcgctcaccaattcata

SEQ ID NO: 880015 - DNA, 33 bp, Homo sapien
aaaattccagcaggaaacctggtaaagaaaacg

SEQ ID NO: 880016 - DNA, 33 bp, Homo sapien
aaaattccagcaggaagcctggtaaagaaaacg

SEQ ID NO: 880017 - DNA, 33 bp, Homo sapien
ccctctttggaatgaacgaccgcttgcttggag

SEQ ID NO: 880018 - DNA, 33 bp, Homo sapien
ccctctttggaatgaatgaccgcttgcttggag

SEQ ID NO: 880019 - DNA, 33 bp, Homo sapien
attcagcatcttgaaactcaggccattcctacc

SEQ ID NO: 880020 - DNA, 33 bp, Homo sapien
attcagcatcttgaaagtcaggccattcctacc

SEQ ID NO: 880021 - DNA, 33 bp, Homo sapien
agtccccaggatgccaagaaactctcccacaag

SEQ ID NO: 880022 - DNA, 33 bp, Homo sapien
agtccccaggatgccaggaaactctcccacaag

SEQ ID NO: 880023 - DNA, 33 bp, Homo sapien
actgtaactaaggaacaaaaattacatgagaac

SEQ ID NO: 880024 - DNA, 33 bp, Homo sapien
actgtaactaaggaaccaaaattacatgagaac

SEQ ID NO: 880025 - DNA, 33 bp, Homo sapien
ttcttgaccaaagttgcaaaattaaagcccaag

SEQ ID NO: 880026 - DNA, 33 bp, Homo sapien
ttcttgaccaaagttggaaaattaaagcccaag

SEQ ID NO: 880027 - DNA, 33 bp, Homo sapien
ggagtgcatacggaaaaagacgtgagaaagcaa

SEQ ID NO: 880028 - DNA, 33 bp, Homo sapien
ggagtgcatacggaaagagacgtgagaaagcaa

SEQ ID NO: 880029 - DNA, 33 bp, Homo sapien
gaacaaatattgacaacttggtagcagcataag

SEQ ID NO: 880030 - DNA, 33 bp, Homo sapien
gaacaaatattgacaagttggtagcagcataag

SEQ ID NO: 880031 - DNA, 33 bp, Homo sapien
cacagtgcaaaccaaacgcagcttctttgcttt

SEQ ID NO: 880032 - DNA, 33 bp, Homo sapien
cacagtgcaaaccaaatgcagcttctttgcttt

SEQ ID NO: 880033 - DNA, 33 bp, Homo sapien
ccctgataataaaatgaaaagttgggatttaga

SEQ ID NO: 880034 - DNA, 33 bp, Homo sapien
ccctgataataaaatggaaagttgggatttaga

SEQ ID NO: 880035 - DNA, 33 bp, Homo sapien
ctgtctgctagtacaacaaatggagacttagta

SEQ ID NO: 880036 - DNA, 33 bp, Homo sapien
ctgtctgctagtacaataaatggagacttagta

SEQ ID NO: 880037 - DNA, 33 bp, Homo sapien
agtataaatacatgacactaggctgggcacggt

SEQ ID NO: 880038 - DNA, 33 bp, Homo sapien
agtataaatacatgacgctaggctgggcacggt

SEQ ID NO: 880039 - DNA, 33 bp, Homo sapien
tttgcctttgcgctcacgttcttctttaacctt

SEQ ID NO: 880040 - DNA, 33 bp, Homo sapien
tttgcctttgcgctcatgttcttctttaacctt

SEQ ID NO: 880041 - DNA, 33 bp, Homo sapien
acattttcctgagcccaatagacaagcagattt

SEQ ID NO: 880042 - DNA, 33 bp, Homo sapien
acattttcctgagcccgatagacaagcagattt

SEQ ID NO: 880043 - DNA, 33 bp, Homo sapien
aaatgttactgaattacgtgacaatttttgtta

SEQ ID NO: 880044 - DNA, 33 bp, Homo sapien
aaatgttactgaattatgtgacaatttttgtta

SEQ ID NO: 880045 - DNA, 33 bp, Homo sapien
accaacttcttctacactggaaataacatacat

SEQ ID NO: 880046 - DNA, 33 bp, Homo sapien
accaacttcttctacattggaaataacatacat

SEQ ID NO: 880047 - DNA, 33 bp, Homo sapien
aagtggtgtctaagaagtccagtttacttccct

SEQ ID NO: 880048 - DNA, 33 bp, Homo sapien
aagtggtgtctaagaattccagtttacttccct

SEQ ID NO: 880049 - DNA, 33 bp, Homo sapien
ttgtaggctcagaaaacatagggaactaaaggc

SEQ ID NO: 880050 - DNA, 33 bp, Homo sapien
ttgtaggctcagaaaagatagggaactaaaggc

SEQ ID NO: 880051 - DNA, 33 bp, Homo sapien
aatatgtgcaacctacgatgctcttctcagtga

SEQ ID NO: 880052 - DNA, 33 bp, Homo sapien
aatatgtgcaacctactatgctcttctcagtga

SEQ ID NO: 880053 - DNA, 33 bp, Homo sapien
acgagttaagcattccacatgcacgatctcatt

SEQ ID NO: 880054 - DNA, 33 bp, Homo sapien
acgagttaagcattccgcatgcacgatctcatt

SEQ ID NO: 880055 - DNA, 33 bp, Homo sapien
agcacagaaatcctaaacacaaaatatgctcag

SEQ ID NO: 880056 - DNA, 33 bp, Homo sapien
agcacagaaatcctaagcacaaaatatgctcag

SEQ ID NO: 880057 - DNA, 33 bp, Homo sapien
caaatctctgggatccagacatctaaatgctta

SEQ ID NO: 880058 - DNA, 33 bp, Homo sapien
caaatctctgggatccggacatctaaatgctta

SEQ ID NO: 880059 - DNA, 33 bp, Homo sapien
ctgtggtttggattacggcacgctcctgctccc

SEQ ID NO: 880060 - DNA, 33 bp, Homo sapien
ctgtggtttggattactgcacgctcctgctccc

SEQ ID NO: 880061 - DNA, 33 bp, Homo sapien
acatcgtttgtagagaacttcattacatacacc

SEQ ID NO: 880062 - DNA, 33 bp, Homo sapien
acatcgtttgtagagagcttcattacatacacc

SEQ ID NO: 880063 - DNA, 33 bp, Homo sapien
aattcctatgtcgaaaacctaacacccgatact

SEQ ID NO: 880064 - DNA, 33 bp, Homo sapien
aattcctatgtcgaaaccctaacacccgatact

SEQ ID NO: 880065 - DNA, 33 bp, Homo sapien
tccctagtggcctggaaacagcagaggcggggt

SEQ ID NO: 880066 - DNA, 33 bp, Homo sapien
tccctagtggcctggagacagcagaggcggggt

SEQ ID NO: 880067 - DNA, 33 bp, Homo sapien
aggccactagggacgacggtcggggaatagacc

SEQ ID NO: 880068 - DNA, 33 bp, Homo sapien
aggccactagggacgatggtcggggaatagacc

SEQ ID NO: 880069 - DNA, 33 bp, Homo sapien
aacaaacaaaaaaagaactctggcattccactg

SEQ ID NO: 880070 - DNA, 33 bp, Homo sapien
aacaaacaaaaaaagagctctggcattccactg

SEQ ID NO: 880071 - DNA, 33 bp, Homo sapien
agggtgacccactatcaaggctaaactgactta

SEQ ID NO: 880072 - DNA, 33 bp, Homo sapien
agggtgacccactatcgaggctaaactgactta

SEQ ID NO: 880073 - DNA, 33 bp, Homo sapien
gaaggaggctgctcaccggcaggaagagggaag

SEQ ID NO: 880074 - DNA, 33 bp, Homo sapien
gaaggaggctgctcactggcaggaagagggaag

SEQ ID NO: 880075 - DNA, 33 bp, Homo sapien
gaaagggtatgaccgcaaacattttttcaggat

SEQ ID NO: 880076 - DNA, 33 bp, Homo sapien
gaaagggtatgaccgccaacattttttcaggat

SEQ ID NO: 880077 - DNA, 33 bp, Homo sapien
agggctttcatgaggactaaataaattaatagg

SEQ ID NO: 880078 - DNA, 33 bp, Homo sapien
agggctttcatgaggagtaaataaattaatagg

SEQ ID NO: 880079 - DNA, 33 bp, Homo sapien
tgcaggccgaaccagacgaaacccaaatcgttg

SEQ ID NO: 880080 - DNA, 33 bp, Homo sapien
tgcaggccgaaccagatgaaacccaaatcgttg

SEQ ID NO: 880081 - DNA, 33 bp, Homo sapien
gcctgcacgttagtcacagggtcagcgtctcgt

SEQ ID NO: 880082 - DNA, 33 bp, Homo sapien
gcctgcacgttagtcagagggtcagcgtctcgt

SEQ ID NO: 880083 - DNA, 33 bp, Homo sapien
acactggtattcataacagatgtatgcacaagg

SEQ ID NO: 880084 - DNA, 33 bp, Homo sapien
acactggtattcataatagatgtatgcacaagg

SEQ ID NO: 880085 - DNA, 33 bp, Homo sapien
cgggcaccctactacacctcataattcacatgg

SEQ ID NO: 880086 - DNA, 33 bp, Homo sapien
cgggcaccctactacagctcataattcacatgg

SEQ ID NO: 880087 - DNA, 33 bp, Homo sapien
gctggggagaccttagaaaagaaacacaatcgt

SEQ ID NO: 880088 - DNA, 33 bp, Homo sapien
gctggggagaccttaggaaagaaacacaatcgt

SEQ ID NO: 880089 - DNA, 33 bp, Homo sapien
agaaagcaatagctgcagaggattggcaccctc

SEQ ID NO: 880090 - DNA, 33 bp, Homo sapien
agaaagcaatagctgcggaggattggcaccctc

SEQ ID NO: 880091 - DNA, 33 bp, Homo sapien
gctcaagaagatacaagctgtagccttgatggt

SEQ ID NO: 880092 - DNA, 33 bp, Homo sapien
gctcaagaagatacaatctgtagccttgatggt

SEQ ID NO: 880093 - DNA, 33 bp, Homo sapien
gcttctcctcaaaacaatgaaagaaagaccgca

SEQ ID NO: 880094 - DNA, 33 bp, Homo sapien
gcttctcctcaaaacagtgaaagaaagaccgca

SEQ ID NO: 880095 - DNA, 33 bp, Homo sapien
taaattctgtctccaactcatttttttccctct

SEQ ID NO: 880096 - DNA, 33 bp, Homo sapien
taaattctgtctccaagtcatttttttccctct

SEQ ID NO: 880097 - DNA, 33 bp, Homo sapien
caggctgctacatggccacttttaattgctaac

SEQ ID NO: 880098 - DNA, 33 bp, Homo sapien
caggctgctacatggctacttttaattgctaac

SEQ ID NO: 880099 - DNA, 33 bp, Homo sapien
gtcctagtcaagttgaacctaaattctcagttt

SEQ ID NO: 880100 - DNA, 33 bp, Homo sapien
gtcctagtcaagttgaccctaaattctcagttt

SEQ ID NO: 880101 - DNA, 33 bp, Homo sapien
agaacagtaagcttcacggcattttaacttgac

SEQ ID NO: 880102 - DNA, 33 bp, Homo sapien
agaacagtaagcttcatggcattttaacttgac

SEQ ID NO: 880103 - DNA, 33 bp, Homo sapien
ttatggaagagagagaactcttagggcaagatg

SEQ ID NO: 880104 - DNA, 33 bp, Homo sapien
ttatggaagagagagagctcttagggcaagatg

SEQ ID NO: 880105 - DNA, 33 bp, Homo sapien
ctgcttttagatggagactacctacaaagaaca

SEQ ID NO: 880106 - DNA, 33 bp, Homo sapien
ctgcttttagatggaggctacctacaaagaaca

SEQ ID NO: 880107 - DNA, 33 bp, Homo sapien
agaacaggattcatcacctttataaatattaca

SEQ ID NO: 880108 - DNA, 33 bp, Homo sapien
agaacaggattcatcagctttataaatattaca

SEQ ID NO: 880109 - DNA, 33 bp, Homo sapien
agaaattgagagtaaaagtttagaaatgtttag

SEQ ID NO: 880110 - DNA, 33 bp, Homo sapien
agaaattgagagtaaaggtttagaaatgtttag

SEQ ID NO: 880111 - DNA, 33 bp, Homo sapien
ttactagcaatcattcaatcactgaaattaata

SEQ ID NO: 880112 - DNA, 33 bp, Homo sapien
ttactagcaatcattcgatcactgaaattaata

SEQ ID NO: 880113 - DNA, 33 bp, Homo sapien
ggtgaccaggctttccacattttctaccatttt

SEQ ID NO: 880114 - DNA, 33 bp, Homo sapien
ggtgaccaggctttccgcattttctaccatttt

SEQ ID NO: 880115 - DNA, 33 bp, Homo sapien
attttattcatcattacatcctcagccccgagc

SEQ ID NO: 880116 - DNA, 33 bp, Homo sapien
attttattcatcattatatcctcagccccgagc

SEQ ID NO: 880117 - DNA, 33 bp, Homo sapien
tcatatttttgacagggaacatatatttcttta

SEQ ID NO: 880118 - DNA, 33 bp, Homo sapien
tcatatttttgacaggtaacatatatttcttta

SEQ ID NO: 880119 - DNA, 33 bp, Homo sapien
catggcaggttgaaaaatttccaagcttttata

SEQ ID NO: 880120 - DNA, 33 bp, Homo sapien
catggcaggttgaaaattttccaagcttttata

SEQ ID NO: 880121 - DNA, 33 bp, Homo sapien
atcaaaccacctcttcagaaatgcatatgagca

SEQ ID NO: 880122 - DNA, 33 bp, Homo sapien
atcaaaccacctcttcggaaatgcatatgagca

SEQ ID NO: 880123 - DNA, 33 bp, Homo sapien
ttcactccagagtaaaaattaaatgtaaatgag

SEQ ID NO: 880124 - DNA, 33 bp, Homo sapien
ttcactccagagtaaagattaaatgtaaatgag

SEQ ID NO: 880125 - DNA, 33 bp, Homo sapien
tccaattctagcaaaacgtttatacctctgatt

SEQ ID NO: 880126 - DNA, 33 bp, Homo sapien
tccaattctagcaaaatgtttatacctctgatt

SEQ ID NO: 880127 - DNA, 33 bp, Homo sapien
ttcctctgcaaaaagagaattactgaggaatca

SEQ ID NO: 880128 - DNA, 33 bp, Homo sapien
ttcctctgcaaaaagataattactgaggaatca

SEQ ID NO: 880129 - DNA, 33 bp, Homo sapien
attttttttcagcaagcagtcattctgccagaa

SEQ ID NO: 880130 - DNA, 33 bp, Homo sapien
attttttttcagcaaggagtcattctgccagaa

SEQ ID NO: 880131 - DNA, 33 bp, Homo sapien
gtctatcaatctgggaaactacttacttaaatg

SEQ ID NO: 880132 - DNA, 33 bp, Homo sapien
gtctatcaatctgggacactacttacttaaatg

SEQ ID NO: 880133 - DNA, 33 bp, Homo sapien
aggaaggtgcattttcacaagtaatattgtgaa

SEQ ID NO: 880134 - DNA, 33 bp, Homo sapien
aggaaggtgcattttctcaagtaatattgtgaa

SEQ ID NO: 880135 - DNA, 33 bp, Homo sapien
aaactttgccaagtacaggcaatttgattgttc

SEQ ID NO: 880136 - DNA, 33 bp, Homo sapien
aaactttgccaagtacgggcaatttgattgttc

SEQ ID NO: 880137 - DNA, 33 bp, Homo sapien
tcagacgtgtgtgtaaagccgtcttgggcgatc

SEQ ID NO: 880138 - DNA, 33 bp, Homo sapien
tcagacgtgtgtgtaaggccgtcttgggcgatc

SEQ ID NO: 880139 - DNA, 33 bp, Homo sapien
atgcttgtgtttcgccacagaacactgcagacc

SEQ ID NO: 880140 - DNA, 33 bp, Homo sapien
atgcttgtgtttcgccgcagaacactgcagacc

SEQ ID NO: 880141 - DNA, 33 bp, Homo sapien
ccaagcagatagataaaacaaactgagcctgaa

SEQ ID NO: 880142 - DNA, 33 bp, Homo sapien
ccaagcagatagataagacaaactgagcctgaa

SEQ ID NO: 880143 - DNA, 33 bp, Homo sapien
ataagaaggcaggtgacgttactgatgttttat

SEQ ID NO: 880144 - DNA, 33 bp, Homo sapien
ataagaaggcaggtgatgttactgatgttttat

SEQ ID NO: 880145 - DNA, 33 bp, Homo sapien
cccaaatgccactacacgtgactttggtctctt

SEQ ID NO: 880146 - DNA, 33 bp, Homo sapien
cccaaatgccactacatgtgactttggtctctt

SEQ ID NO: 880147 - DNA, 33 bp, Homo sapien
atgaaggccaggaaagacacattagggtcaaac

SEQ ID NO: 880148 - DNA, 33 bp, Homo sapien
atgaaggccaggaaaggcacattagggtcaaac

SEQ ID NO: 880149 - DNA, 33 bp, Homo sapien
cacaaaagagtcccaaagtggaaaaatcagccc

SEQ ID NO: 880150 - DNA, 33 bp, Homo sapien
cacaaaagagtcccaaggtggaaaaatcagccc

SEQ ID NO: 880151 - DNA, 33 bp, Homo sapien
caaaagggagttttgaacaaaaatatggagttg

SEQ ID NO: 880152 - DNA, 33 bp, Homo sapien
caaaagggagttttgagcaaaaatatggagttg

SEQ ID NO: 880153 - DNA, 33 bp, Homo sapien
gaagccatttaaaaacagagcagagagttctag

SEQ ID NO: 880154 - DNA, 33 bp, Homo sapien
gaagccatttaaaaacggagcagagagttctag

SEQ ID NO: 880155 - DNA, 33 bp, Homo sapien
aaattcaaagagaagcagaagccatttaaaaac

SEQ ID NO: 880156 - DNA, 33 bp, Homo sapien
aaattcaaagagaagcggaagccatttaaaaac

SEQ ID NO: 880157 - DNA, 33 bp, Homo sapien
aaaatgtttcttgatccctgttaaaaggcaagt

SEQ ID NO: 880158 - DNA, 33 bp, Homo sapien
aaaatgtttcttgatctctgttaaaaggcaagt

SEQ ID NO: 880159 - DNA, 33 bp, Homo sapien
aagcaagttagagaaaagttaagaagagcagcc

SEQ ID NO: 880160 - DNA, 33 bp, Homo sapien
aagcaagttagagaaaggttaagaagagcagcc

SEQ ID NO: 880161 - DNA, 33 bp, Homo sapien
caaattggagaaaatacctcttaaattcaaacc

SEQ ID NO: 880162 - DNA, 33 bp, Homo sapien
caaattggagaaaatagctcttaaattcaaacc

SEQ ID NO: 880163 - DNA, 33 bp, Homo sapien
taggcactttcctacaaacttacaaaggctaac

SEQ ID NO: 880164 - DNA, 33 bp, Homo sapien
taggcactttcctacagacttacaaaggctaac

SEQ ID NO: 880165 - DNA, 33 bp, Homo sapien
tttgttatttgtaacactctctttcatttttat

SEQ ID NO: 880166 - DNA, 33 bp, Homo sapien
tttgttatttgtaacagtctctttcatttttat

SEQ ID NO: 880167 - DNA, 33 bp, Homo sapien
tccttcctgatccaaaactttcactatatgtaa

SEQ ID NO: 880168 - DNA, 33 bp, Homo sapien
tccttcctgatccaaagctttcactatatgtaa

SEQ ID NO: 880169 - DNA, 33 bp, Homo sapien
ttggatatgaagaaggccccaactaaattgtat

SEQ ID NO: 880170 - DNA, 33 bp, Homo sapien
ttggatatgaagaaggtcccaactaaattgtat

SEQ ID NO: 880171 - DNA, 33 bp, Homo sapien
aatatagaaggttgtcacagtggtcccctgccc

SEQ ID NO: 880172 - DNA, 33 bp, Homo sapien
aatatagaaggttgtctcagtggtcccctgccc

SEQ ID NO: 880173 - DNA, 33 bp, Homo sapien
ggcctcaatgagttagaaagagcaaggggcagg

SEQ ID NO: 880174 - DNA, 33 bp, Homo sapien
ggcctcaatgagttagcaagagcaaggggcagg

SEQ ID NO: 880175 - DNA, 33 bp, Homo sapien
gggaaatgtaagataaatattgccattcagagg

SEQ ID NO: 880176 - DNA, 33 bp, Homo sapien
gggaaatgtaagataactattgccattcagagg

SEQ ID NO: 880177 - DNA, 33 bp, Homo sapien
tgagacgtgaaattcccagtttaagtccgtttt

SEQ ID NO: 880178 - DNA, 33 bp, Homo sapien
tgagacgtgaaattcctagtttaagtccgtttt

SEQ ID NO: 880179 - DNA, 33 bp, Homo sapien
caattattaaaatggcaaaagtccaaaacactg

SEQ ID NO: 880180 - DNA, 33 bp, Homo sapien
caattattaaaatggcgaaagtccaaaacactg

SEQ ID NO: 880181 - DNA, 33 bp, Homo sapien
ggagagcttgtaaaaaggtagactgctgggctg

SEQ ID NO: 880182 - DNA, 33 bp, Homo sapien
ggagagcttgtaaaaatgtagactgctgggctg

SEQ ID NO: 880183 - DNA, 33 bp, Homo sapien
cctaagacatgtctcaatagaggtcgtccacac

SEQ ID NO: 880184 - DNA, 33 bp, Homo sapien
cctaagacatgtctcagtagaggtcgtccacac

SEQ ID NO: 880185 - DNA, 33 bp, Homo sapien
gcagaatacagctgtacggtatttgacatatta

SEQ ID NO: 880186 - DNA, 33 bp, Homo sapien
gcagaatacagctgtatggtatttgacatatta

SEQ ID NO: 880187 - DNA, 33 bp, Homo sapien
actgaccttcctaaaacacatttccaacatgtc

SEQ ID NO: 880188 - DNA, 33 bp, Homo sapien
actgaccttcctaaaatacatttccaacatgtc

SEQ ID NO: 880189 - DNA, 33 bp, Homo sapien
tccacagggctttacacgatgctggctgaatgc

SEQ ID NO: 880190 - DNA, 33 bp, Homo sapien
tccacagggctttacatgatgctggctgaatgc

SEQ ID NO: 880191 - DNA, 33 bp, Homo sapien
ctgggcggtggcagaaaatccaattttaaatcc

SEQ ID NO: 880192 - DNA, 33 bp, Homo sapien
ctgggcggtggcagaatatccaattttaaatcc

SEQ ID NO: 880193 - DNA, 33 bp, Homo sapien
cacggatgcaggaagccctcgaatgcatatcag

SEQ ID NO: 880194 - DNA, 33 bp, Homo sapien
cacggatgcaggaagctctcgaatgcatatcag

SEQ ID NO: 880195 - DNA, 33 bp, Homo sapien
caaatgcatagtcccaagttctcaagaagtgga

SEQ ID NO: 880196 - DNA, 33 bp, Homo sapien
caaatgcatagtcccaggttctcaagaagtgga

SEQ ID NO: 880197 - DNA, 33 bp, Homo sapien
tcatattttatgaacacagaaggatacatgctg

SEQ ID NO: 880198 - DNA, 33 bp, Homo sapien
tcatattttatgaacatagaaggatacatgctg

SEQ ID NO: 880199 - DNA, 33 bp, Homo sapien
tttccttccatcttggaaaacatacttttaatt

SEQ ID NO: 880200 - DNA, 33 bp, Homo sapien
tttccttccatcttgggaaacatacttttaatt

SEQ ID NO: 880201 - DNA, 33 bp, Homo sapien
ttctactacagaggccagaatactaaacattca

SEQ ID NO: 880202 - DNA, 33 bp, Homo sapien
ttctactacagaggccggaatactaaacattca

SEQ ID NO: 880203 - DNA, 33 bp, Homo sapien
ccaactaatatataacagtctgacagattgcat

SEQ ID NO: 880204 - DNA, 33 bp, Homo sapien
ccaactaatatataaccgtctgacagattgcat

SEQ ID NO: 880205 - DNA, 33 bp, Homo sapien
caaaaacccaacttgagctcatttaaattccag

SEQ ID NO: 880206 - DNA, 33 bp, Homo sapien
caaaaacccaacttgatctcatttaaattccag

SEQ ID NO: 880207 - DNA, 33 bp, Homo sapien
atttgttttgttgtcacactgtaatgctgtgca

SEQ ID NO: 880208 - DNA, 33 bp, Homo sapien
atttgttttgttgtcatactgtaatgctgtgca

SEQ ID NO: 880209 - DNA, 33 bp, Homo sapien
ttccacatctccagggacatacgacttgcccaa

SEQ ID NO: 880210 - DNA, 33 bp, Homo sapien
ttccacatctccaggggcatacgacttgcccaa

SEQ ID NO: 880211 - DNA, 33 bp, Homo sapien
agagaaagtgtctggcaaagcatgattttgcat

SEQ ID NO: 880212 - DNA, 33 bp, Homo sapien
agagaaagtgtctggcgaagcatgattttgcat

SEQ ID NO: 880213 - DNA, 33 bp, Homo sapien
tagcatttcatccagacgttttgaatacttact

SEQ ID NO: 880214 - DNA, 33 bp, Homo sapien
tagcatttcatccagatgttttgaatacttact

SEQ ID NO: 880215 - DNA, 33 bp, Homo sapien
cttgcttttttcttacaaccttgggatattttg

SEQ ID NO: 880216 - DNA, 33 bp, Homo sapien
cttgcttttttcttacgaccttgggatattttg

SEQ ID NO: 880217 - DNA, 33 bp, Homo sapien
attctgctgaatgaaccagtggagatggtgatg

SEQ ID NO: 880218 - DNA, 33 bp, Homo sapien
attctgctgaatgaactagtggagatggtgatg

SEQ ID NO: 880219 - DNA, 33 bp, Homo sapien
gagaagttggaagaaaacttagttaagtgacag

SEQ ID NO: 880220 - DNA, 33 bp, Homo sapien
gagaagttggaagaaaccttagttaagtgacag

SEQ ID NO: 880221 - DNA, 33 bp, Homo sapien
ggctcagaaaggctaagggaacatctcaaaacc

SEQ ID NO: 880222 - DNA, 33 bp, Homo sapien
ggctcagaaaggctaatggaacatctcaaaacc

SEQ ID NO: 880223 - DNA, 33 bp, Homo sapien
actgcgctgaccaccaacttcacaaagatggtc

SEQ ID NO: 880224 - DNA, 33 bp, Homo sapien
actgcgctgaccaccagcttcacaaagatggtc

SEQ ID NO: 880225 - DNA, 33 bp, Homo sapien
tagggggattgcaagaaccagcctcagccctgt

SEQ ID NO: 880226 - DNA, 33 bp, Homo sapien
tagggggattgcaagagccagcctcagccctgt

SEQ ID NO: 880227 - DNA, 33 bp, Homo sapien
tgtatatatggaggaaaaatgcttgggaactaa

SEQ ID NO: 880228 - DNA, 33 bp, Homo sapien
tgtatatatggaggaagaatgcttgggaactaa

SEQ ID NO: 880229 - DNA, 33 bp, Homo sapien
cttgagagtagggccaatcttgtcatcttggct

SEQ ID NO: 880230 - DNA, 33 bp, Homo sapien
cttgagagtagggccagtcttgtcatcttggct

SEQ ID NO: 880231 - DNA, 33 bp, Homo sapien
tgctcacgttcaggcaacaaaaaacatccttcc

SEQ ID NO: 880232 - DNA, 33 bp, Homo sapien
tgctcacgttcaggcagcaaaaaacatccttcc

SEQ ID NO: 880233 - DNA, 33 bp, Homo sapien
aggtccattccaacaccgcgaggagaatccact

SEQ ID NO: 880234 - DNA, 33 bp, Homo sapien
aggtccattccaacactgcgaggagaatccact

SEQ ID NO: 880235 - DNA, 33 bp, Homo sapien
tgggaagcctgtctacccacttatcctgcatgg

SEQ ID NO: 880236 - DNA, 33 bp, Homo sapien
tgggaagcctgtctacgcacttatcctgcatgg

SEQ ID NO: 880237 - DNA, 33 bp, Homo sapien
aggcaccagtgttgaactgactgtcaaaggagg

SEQ ID NO: 880238 - DNA, 33 bp, Homo sapien
aggcaccagtgttgaattgactgtcaaaggagg

SEQ ID NO: 880239 - DNA, 33 bp, Homo sapien
cttcacagacaaggaaacgggcccacccagatc

SEQ ID NO: 880240 - DNA, 33 bp, Homo sapien
cttcacagacaaggaagcgggcccacccagatc

SEQ ID NO: 880241 - DNA, 33 bp, Homo sapien
aaaaatggccattcgacctcacagtccagggac

SEQ ID NO: 880242 - DNA, 33 bp, Homo sapien
aaaaatggccattcgatctcacagtccagggac

SEQ ID NO: 880243 - DNA, 33 bp, Homo sapien
acctaagtaagttaacagaagtgacactaagat

SEQ ID NO: 880244 - DNA, 33 bp, Homo sapien
acctaagtaagttaacggaagtgacactaagat

SEQ ID NO: 880245 - DNA, 33 bp, Homo sapien
agaataaaaatgaggcaatctggcctatttcta

SEQ ID NO: 880246 - DNA, 33 bp, Homo sapien
agaataaaaatgaggcgatctggcctatttcta

SEQ ID NO: 880247 - DNA, 33 bp, Homo sapien
cagatatgaactagaagtcagtttgccaatttc

SEQ ID NO: 880248 - DNA, 33 bp, Homo sapien
cagatatgaactagaattcagtttgccaatttc

SEQ ID NO: 880249 - DNA, 33 bp, Homo sapien
gccttaccggacattccagatgtaaatagcaca

SEQ ID NO: 880250 - DNA, 33 bp, Homo sapien
gccttaccggacattctagatgtaaatagcaca

SEQ ID NO: 880251 - DNA, 33 bp, Homo sapien
ctctgaacggtccctacggtttgcattgttatc

SEQ ID NO: 880252 - DNA, 33 bp, Homo sapien
ctctgaacggtccctagggtttgcattgttatc

SEQ ID NO: 880253 - DNA, 33 bp, Homo sapien
gaacaactaagaagaaactgagttgggcatcat

SEQ ID NO: 880254 - DNA, 33 bp, Homo sapien
gaacaactaagaagaacctgagttgggcatcat

SEQ ID NO: 880255 - DNA, 33 bp, Homo sapien
taacagagggttgaacaaagtccgctatgaact

SEQ ID NO: 880256 - DNA, 33 bp, Homo sapien
taacagagggttgaacgaagtccgctatgaact

SEQ ID NO: 880257 - DNA, 33 bp, Homo sapien
atttgtaactttttcacggaaagactaacttcc

SEQ ID NO: 880258 - DNA, 33 bp, Homo sapien
atttgtaactttttcatggaaagactaacttcc

SEQ ID NO: 880259 - DNA, 33 bp, Homo sapien
ttcctctccctctgtacgtgtttccatgttttt

SEQ ID NO: 880260 - DNA, 33 bp, Homo sapien
ttcctctccctctgtatgtgtttccatgttttt

SEQ ID NO: 880261 - DNA, 33 bp, Homo sapien
cgatatgaggatgatacgttactgtccccacat

SEQ ID NO: 880262 - DNA, 33 bp, Homo sapien
cgatatgaggatgatatgttactgtccccacat

SEQ ID NO: 880263 - DNA, 33 bp, Homo sapien
atccttgcatagtgggcactctcagcgttggca

SEQ ID NO: 880264 - DNA, 33 bp, Homo sapien
atccttgcatagtgggtactctcagcgttggca

SEQ ID NO: 880265 - DNA, 33 bp, Homo sapien
gtatcccctgaaataaagtatgtagaaaaatct

SEQ ID NO: 880266 - DNA, 33 bp, Homo sapien
gtatcccctgaaataatgtatgtagaaaaatct

SEQ ID NO: 880267 - DNA, 33 bp, Homo sapien
accaagtcacacacaaaatgtaacccactgagg

SEQ ID NO: 880268 - DNA, 33 bp, Homo sapien
accaagtcacacacaagatgtaacccactgagg

SEQ ID NO: 880269 - DNA, 33 bp, Homo sapien
tcacatatgaaggtcacgatgcctagtgccacg

SEQ ID NO: 880270 - DNA, 33 bp, Homo sapien
tcacatatgaaggtcatgatgcctagtgccacg

SEQ ID NO: 880271 - DNA, 33 bp, Homo sapien
ctcattttctacacagcccgaggaacatggagg

SEQ ID NO: 880272 - DNA, 33 bp, Homo sapien
ctcattttctacacaggccgaggaacatggagg

SEQ ID NO: 880273 - DNA, 33 bp, Homo sapien
actgcataaaagtacacgtaactgggaaaacat

SEQ ID NO: 880274 - DNA, 33 bp, Homo sapien
actgcataaaagtacatgtaactgggaaaacat

SEQ ID NO: 880275 - DNA, 33 bp, Homo sapien
tgaataagaatctctccaggaaacactttcaat

SEQ ID NO: 880276 - DNA, 33 bp, Homo sapien
tgaataagaatctctctaggaaacactttcaat

SEQ ID NO: 880277 - DNA, 33 bp, Homo sapien
taatatagaaagtcaacgtagtgtgtgacacag

SEQ ID NO: 880278 - DNA, 33 bp, Homo sapien
taatatagaaagtcaatgtagtgtgtgacacag

SEQ ID NO: 880279 - DNA, 33 bp, Homo sapien
taagaagtctttaaacagcaaggaaaataagct

SEQ ID NO: 880280 - DNA, 33 bp, Homo sapien
taagaagtctttaaacggcaaggaaaataagct

SEQ ID NO: 880281 - DNA, 33 bp, Homo sapien
cagctatttatttggcaaaagtaaacagggcca

SEQ ID NO: 880282 - DNA, 33 bp, Homo sapien
cagctatttatttggcgaaagtaaacagggcca

SEQ ID NO: 880283 - DNA, 33 bp, Homo sapien
tttttctggaaactcaataactgctctcacact

SEQ ID NO: 880284 - DNA, 33 bp, Homo sapien
tttttctggaaactcagtaactgctctcacact

SEQ ID NO: 880285 - DNA, 33 bp, Homo sapien
agggggttccgaagccaatgttcccaaacctga

SEQ ID NO: 880286 - DNA, 33 bp, Homo sapien
agggggttccgaagccgatgttcccaaacctga

SEQ ID NO: 880287 - DNA, 33 bp, Homo sapien
ggtgccaggaaggtcacagatggacactggcca

SEQ ID NO: 880288 - DNA, 33 bp, Homo sapien
ggtgccaggaaggtcatagatggacactggcca

SEQ ID NO: 880289 - DNA, 33 bp, Homo sapien
agtactagaactggccacaccattgaccactgc

SEQ ID NO: 880290 - DNA, 33 bp, Homo sapien
agtactagaactggccgcaccattgaccactgc

SEQ ID NO: 880291 - DNA, 33 bp, Homo sapien
attagggctcaacatacagacacaagtgactgc

SEQ ID NO: 880292 - DNA, 33 bp, Homo sapien
attagggctcaacatagagacacaagtgactgc

SEQ ID NO: 880293 - DNA, 33 bp, Homo sapien
tcggtgaattagaggactaacgtgtcaccaact

SEQ ID NO: 880294 - DNA, 33 bp, Homo sapien
tcggtgaattagaggagtaacgtgtcaccaact

SEQ ID NO: 880295 - DNA, 33 bp, Homo sapien
ttgttttgaaaattgcacctgaggtttttaagt

SEQ ID NO: 880296 - DNA, 33 bp, Homo sapien
ttgttttgaaaattgcgcctgaggtttttaagt

SEQ ID NO: 880297 - DNA, 33 bp, Homo sapien
aggagggacatcaccacagaccatacagatatt

SEQ ID NO: 880298 - DNA, 33 bp, Homo sapien
aggagggacatcaccagagaccatacagatatt

SEQ ID NO: 880299 - DNA, 33 bp, Homo sapien
gtttgctccccacctccaggcttctccatccta

SEQ ID NO: 880300 - DNA, 33 bp, Homo sapien
gtttgctccccacctcgaggcttctccatccta

SEQ ID NO: 880301 - DNA, 33 bp, Homo sapien
ttaacattccctgaagaaagatgtccacagtct

SEQ ID NO: 880302 - DNA, 33 bp, Homo sapien
ttaacattccctgaaggaagatgtccacagtct

SEQ ID NO: 880303 - DNA, 33 bp, Homo sapien
tgaatttaccaaatccgcaacataaatgcatag

SEQ ID NO: 880304 - DNA, 33 bp, Homo sapien
tgaatttaccaaatcctcaacataaatgcatag

SEQ ID NO: 880305 - DNA, 33 bp, Homo sapien
agacctggtacacaacacattgagaatctgggg

SEQ ID NO: 880306 - DNA, 33 bp, Homo sapien
agacctggtacacaacgcattgagaatctgggg

SEQ ID NO: 880307 - DNA, 33 bp, Homo sapien
gtcttaccggttattaccacaatgttaccacct

SEQ ID NO: 880308 - DNA, 33 bp, Homo sapien
gtcttaccggttattatcacaatgttaccacct

SEQ ID NO: 880309 - DNA, 33 bp, Homo sapien
aacaacttagcaaacaacatgcatttatgagag

SEQ ID NO: 880310 - DNA, 33 bp, Homo sapien
aacaacttagcaaacaccatgcatttatgagag

SEQ ID NO: 880311 - DNA, 33 bp, Homo sapien
gtgatggcttcttcggcagaaatgaatttagga

SEQ ID NO: 880312 - DNA, 33 bp, Homo sapien
gtgatggcttcttcgggagaaatgaatttagga

SEQ ID NO: 880313 - DNA, 33 bp, Homo sapien
agataattggcatacactggccttccagcttag

SEQ ID NO: 880314 - DNA, 33 bp, Homo sapien
agataattggcatacattggccttccagcttag

SEQ ID NO: 880315 - DNA, 33 bp, Homo sapien
tgcaatgaatggaaaacgctcaagaaagagttt

SEQ ID NO: 880316 - DNA, 33 bp, Homo sapien
tgcaatgaatggaaaatgctcaagaaagagttt

SEQ ID NO: 880317 - DNA, 33 bp, Homo sapien
gtttaagatcaagccaatgaaaccaattttcct

SEQ ID NO: 880318 - DNA, 33 bp, Homo sapien
gtttaagatcaagccagtgaaaccaattttcct

SEQ ID NO: 880319 - DNA, 33 bp, Homo sapien
gtttccctcattccacaaagatgctgcgtgtgc

SEQ ID NO: 880320 - DNA, 33 bp, Homo sapien
gtttccctcattccacgaagatgctgcgtgtgc

SEQ ID NO: 880321 - DNA, 33 bp, Homo sapien
ctgcaaatgtcataaacggtcagctgaggatga

SEQ ID NO: 880322 - DNA, 33 bp, Homo sapien
ctgcaaatgtcataaatggtcagctgaggatga

SEQ ID NO: 880323 - DNA, 33 bp, Homo sapien
tgttccaccagccagaaaaaaagttcataattc

SEQ ID NO: 880324 - DNA, 33 bp, Homo sapien
tgttccaccagccagacaaaaagttcataattc

SEQ ID NO: 880325 - DNA, 33 bp, Homo sapien
ttgtccacttttgtccaatgaaacacagtccac

SEQ ID NO: 880326 - DNA, 33 bp, Homo sapien
ttgtccacttttgtcccatgaaacacagtccac

SEQ ID NO: 880327 - DNA, 33 bp, Homo sapien
attattataaccccaaatcaattacttctttgc

SEQ ID NO: 880328 - DNA, 33 bp, Homo sapien
attattataaccccaattcaattacttctttgc

SEQ ID NO: 880329 - DNA, 33 bp, Homo sapien
ttaagagttattttgaagagagtgttctgctga

SEQ ID NO: 880330 - DNA, 33 bp, Homo sapien
ttaagagttattttgaggagagtgttctgctga

SEQ ID NO: 880331 - DNA, 33 bp, Homo sapien
cctttggtaagccatcgagctgctgtaggccca

SEQ ID NO: 880332 - DNA, 33 bp, Homo sapien
cctttggtaagccatctagctgctgtaggccca

SEQ ID NO: 880333 - DNA, 33 bp, Homo sapien
gtgtgctgttgctatacacaaatgagttttctg

SEQ ID NO: 880334 - DNA, 33 bp, Homo sapien
gtgtgctgttgctatatacaaatgagttttctg

SEQ ID NO: 880335 - DNA, 33 bp, Homo sapien
acatggcttgcctgaacgtctccctgaggctgt

SEQ ID NO: 880336 - DNA, 33 bp, Homo sapien
acatggcttgcctgaatgtctccctgaggctgt

SEQ ID NO: 880337 - DNA, 33 bp, Homo sapien
ttggtgagcttagcaaggtaggcatacatgatg

SEQ ID NO: 880338 - DNA, 33 bp, Homo sapien
ttggtgagcttagcaatgtaggcatacatgatg

SEQ ID NO: 880339 - DNA, 33 bp, Homo sapien
gagccactgtgggtccaagtagaatgtcagagt

SEQ ID NO: 880340 - DNA, 33 bp, Homo sapien
gagccactgtgggtcccagtagaatgtcagagt

SEQ ID NO: 880341 - DNA, 33 bp, Homo sapien
atgaactgtaacaccccgcagaaggccacaact

SEQ ID NO: 880342 - DNA, 33 bp, Homo sapien
atgaactgtaacaccctgcagaaggccacaact

SEQ ID NO: 880343 - DNA, 33 bp, Homo sapien
caaaaattcttctaagcctgtactttgtataac

SEQ ID NO: 880344 - DNA, 33 bp, Homo sapien
caaaaattcttctaagtctgtactttgtataac

SEQ ID NO: 880345 - DNA, 33 bp, Homo sapien
aacagctgtcttgaaacctcagacaagggctgg

SEQ ID NO: 880346 - DNA, 33 bp, Homo sapien
aacagctgtcttgaaatctcagacaagggctgg

SEQ ID NO: 880347 - DNA, 33 bp, Homo sapien
tttagtgagtagttacagatctcattttacaat

SEQ ID NO: 880348 - DNA, 33 bp, Homo sapien
tttagtgagtagttacggatctcattttacaat

SEQ ID NO: 880349 - DNA, 33 bp, Homo sapien
tgtgtttgaaagtgacaagtggactgggcgcag

SEQ ID NO: 880350 - DNA, 33 bp, Homo sapien
tgtgtttgaaagtgacgagtggactgggcgcag

SEQ ID NO: 880351 - DNA, 33 bp, Homo sapien
ttccagtccgcgtgcaagtgtgtctttctctcc

SEQ ID NO: 880352 - DNA, 33 bp, Homo sapien
ttccagtccgcgtgcaggtgtgtctttctctcc

SEQ ID NO: 880353 - DNA, 33 bp, Homo sapien
tacctggctctataacacctcttcccttgcatt

SEQ ID NO: 880354 - DNA, 33 bp, Homo sapien
tacctggctctataacgcctcttcccttgcatt

SEQ ID NO: 880355 - DNA, 33 bp, Homo sapien
gtgacaatactttgtaagtctggagcaaagttc

SEQ ID NO: 880356 - DNA, 33 bp, Homo sapien
gtgacaatactttgtaggtctggagcaaagttc

SEQ ID NO: 880357 - DNA, 33 bp, Homo sapien
gcccatctagccataaagtaggttgtgcacagc

SEQ ID NO: 880358 - DNA, 33 bp, Homo sapien
gcccatctagccataaggtaggttgtgcacagc

SEQ ID NO: 880359 - DNA, 33 bp, Homo sapien
aaacatagaattttcaccaggttaccaagtagt

SEQ ID NO: 880360 - DNA, 33 bp, Homo sapien
aaacatagaattttcagcaggttaccaagtagt

SEQ ID NO: 880361 - DNA, 33 bp, Homo sapien
gttctgggattgccacaatgcgcatcactacct

SEQ ID NO: 880362 - DNA, 33 bp, Homo sapien
gttctgggattgccacgatgcgcatcactacct

SEQ ID NO: 880363 - DNA, 33 bp, Homo sapien
tcagccacctttggaacatagaatccgccatcg

SEQ ID NO: 880364 - DNA, 33 bp, Homo sapien
tcagccacctttggaagatagaatccgccatcg

SEQ ID NO: 880365 - DNA, 33 bp, Homo sapien
acactctgcttggatcaaaagtcttagcatttt

SEQ ID NO: 880366 - DNA, 33 bp, Homo sapien
acactctgcttggatcgaaagtcttagcatttt

SEQ ID NO: 880367 - DNA, 33 bp, Homo sapien
atcagatatacggcaacgggtttccacttagaa

SEQ ID NO: 880368 - DNA, 33 bp, Homo sapien
atcagatatacggcaatgggtttccacttagaa

SEQ ID NO: 880369 - DNA, 33 bp, Homo sapien
ggatatattatttaggcaatggtgggagaaaac

SEQ ID NO: 880370 - DNA, 33 bp, Homo sapien
ggatatattatttaggtaatggtgggagaaaac

SEQ ID NO: 880371 - DNA, 33 bp, Homo sapien
gcagtcactggaatgaacatgcccacagctcag

SEQ ID NO: 880372 - DNA, 33 bp, Homo sapien
gcagtcactggaatgagcatgcccacagctcag

SEQ ID NO: 880373 - DNA, 33 bp, Homo sapien
tgctccagtcttgggaagcaggttcctcagcct

SEQ ID NO: 880374 - DNA, 33 bp, Homo sapien
tgctccagtcttgggaggcaggttcctcagcct

SEQ ID NO: 880375 - DNA, 33 bp, Homo sapien
ttcaactgaaaatagcaagactcagtaaaaaga

SEQ ID NO: 880376 - DNA, 33 bp, Homo sapien
ttcaactgaaaatagcgagactcagtaaaaaga

SEQ ID NO: 880377 - DNA, 33 bp, Homo sapien
ttgcagaaggtgcacaaaaacgtatgtaggcta

SEQ ID NO: 880378 - DNA, 33 bp, Homo sapien
ttgcagaaggtgcacacaaacgtatgtaggcta

SEQ ID NO: 880379 - DNA, 33 bp, Homo sapien
atggagtacttactgactaaatgaacgaatgac

SEQ ID NO: 880380 - DNA, 33 bp, Homo sapien
atggagtacttactgagtaaatgaacgaatgac

SEQ ID NO: 880381 - DNA, 33 bp, Homo sapien
ccagtttgactaacacagcctattattttaaca

SEQ ID NO: 880382 - DNA, 33 bp, Homo sapien
ccagtttgactaacaccgcctattattttaaca

SEQ ID NO: 880383 - DNA, 33 bp, Homo sapien
tcaatggcagatgccaaaaagccaaacacaagg

SEQ ID NO: 880384 - DNA, 33 bp, Homo sapien
tcaatggcagatgccacaaagccaaacacaagg

SEQ ID NO: 880385 - DNA, 33 bp, Homo sapien
aagtggtatccaggctaaaccccactgcctctg

SEQ ID NO: 880386 - DNA, 33 bp, Homo sapien
aagtggtatccaggctgaaccccactgcctctg

SEQ ID NO: 880387 - DNA, 33 bp, Homo sapien
ggggtactaattgcacaaggttctgggagttgc

SEQ ID NO: 880388 - DNA, 33 bp, Homo sapien
ggggtactaattgcaccaggttctgggagttgc

SEQ ID NO: 880389 - DNA, 33 bp, Homo sapien
attctctcctccaggacggccctggtgctctca

SEQ ID NO: 880390 - DNA, 33 bp, Homo sapien
attctctcctccaggatggccctggtgctctca

SEQ ID NO: 880391 - DNA, 33 bp, Homo sapien
ccacaggatactgtccggaaaatgcctttgaaa

SEQ ID NO: 880392 - DNA, 33 bp, Homo sapien
ccacaggatactgtcctgaaaatgcctttgaaa

SEQ ID NO: 880393 - DNA, 33 bp, Homo sapien
tatttacagcaaaatgacatgatatttaaaatg

SEQ ID NO: 880394 - DNA, 33 bp, Homo sapien
tatttacagcaaaatggcatgatatttaaaatg

SEQ ID NO: 880395 - DNA, 33 bp, Homo sapien
agagaagcacgccggacgtgggcagtggaggac

SEQ ID NO: 880396 - DNA, 33 bp, Homo sapien
agagaagcacgccggatgtgggcagtggaggac

SEQ ID NO: 880397 - DNA, 33 bp, Homo sapien
tacacaagccttgtagccctcttctgccaggta

SEQ ID NO: 880398 - DNA, 33 bp, Homo sapien
tacacaagccttgtagtcctcttctgccaggta

SEQ ID NO: 880399 - DNA, 33 bp, Homo sapien
tgaacagatccttctcaaaaaaagacatttatg

SEQ ID NO: 880400 - DNA, 33 bp, Homo sapien
tgaacagatccttctcgaaaaaagacatttatg

SEQ ID NO: 880401 - DNA, 33 bp, Homo sapien
cagtgacaagttgagaactcctcccctggctcc

SEQ ID NO: 880402 - DNA, 33 bp, Homo sapien
cagtgacaagttgagagctcctcccctggctcc

SEQ ID NO: 880403 - DNA, 33 bp, Homo sapien
gccctagtgcagctaactctgtgcatcagaatc

SEQ ID NO: 880404 - DNA, 33 bp, Homo sapien
gccctagtgcagctaattctgtgcatcagaatc

SEQ ID NO: 880405 - DNA, 33 bp, Homo sapien
agtcagaaaaaacaagacctacactgaattcac

SEQ ID NO: 880406 - DNA, 33 bp, Homo sapien
agtcagaaaaaacaaggcctacactgaattcac

SEQ ID NO: 880407 - DNA, 33 bp, Homo sapien
ttttttctgactccaacagttatgctctgctcc

SEQ ID NO: 880408 - DNA, 33 bp, Homo sapien
ttttttctgactccaatagttatgctctgctcc

SEQ ID NO: 880409 - DNA, 33 bp, Homo sapien
aaaccctgtgttccctaagagtgctttattccc

SEQ ID NO: 880410 - DNA, 33 bp, Homo sapien
aaaccctgtgttcccttagagtgctttattccc

SEQ ID NO: 880411 - DNA, 33 bp, Homo sapien
ttttccaataattttcaagagtctgccacagct

SEQ ID NO: 880412 - DNA, 33 bp, Homo sapien
ttttccaataattttcgagagtctgccacagct

SEQ ID NO: 880413 - DNA, 33 bp, Homo sapien
ttttcctttttacccaaattcacttgtgtaggg

SEQ ID NO: 880414 - DNA, 33 bp, Homo sapien
ttttcctttttacccacattcacttgtgtaggg

SEQ ID NO: 880415 - DNA, 33 bp, Homo sapien
ttcactttctgcagaacgttttcagccaatctt

SEQ ID NO: 880416 - DNA, 33 bp, Homo sapien
ttcactttctgcagaatgttttcagccaatctt

SEQ ID NO: 880417 - DNA, 33 bp, Homo sapien
tttttcttttttcttaagcactgacattttctt

SEQ ID NO: 880418 - DNA, 33 bp, Homo sapien
tttttcttttttcttaggcactgacattttctt

SEQ ID NO: 880419 - DNA, 33 bp, Homo sapien
ttgcagtgccagagaaaagaggtgtggtaactc

SEQ ID NO: 880420 - DNA, 33 bp, Homo sapien
ttgcagtgccagagaatagaggtgtggtaactc

SEQ ID NO: 880421 - DNA, 33 bp, Homo sapien
acttggctaacagagaactatgtgaaatttgga

SEQ ID NO: 880422 - DNA, 33 bp, Homo sapien
acttggctaacagagatctatgtgaaatttgga

SEQ ID NO: 880423 - DNA, 33 bp, Homo sapien
agccaaagctttgcacacccatttgtttctgtg

SEQ ID NO: 880424 - DNA, 33 bp, Homo sapien
agccaaagctttgcacgcccatttgtttctgtg

SEQ ID NO: 880425 - DNA, 33 bp, Homo sapien
tttcacttttggaacaccactccaacaagaaaa

SEQ ID NO: 880426 - DNA, 33 bp, Homo sapien
tttcacttttggaacatcactccaacaagaaaa

SEQ ID NO: 880427 - DNA, 33 bp, Homo sapien
agtgtgttcaggcgcacctattcacacaacgag

SEQ ID NO: 880428 - DNA, 33 bp, Homo sapien
agtgtgttcaggcgcagctattcacacaacgag

SEQ ID NO: 880429 - DNA, 33 bp, Homo sapien
tggtcattcgaccttcaccccataaatagtggt

SEQ ID NO: 880430 - DNA, 33 bp, Homo sapien
tggtcattcgaccttcgccccataaatagtggt

SEQ ID NO: 880431 - DNA, 33 bp, Homo sapien
ttggagagtttcaggacagttcagcttggccgt

SEQ ID NO: 880432 - DNA, 33 bp, Homo sapien
ttggagagtttcaggatagttcagcttggccgt

SEQ ID NO: 880433 - DNA, 33 bp, Homo sapien
tgaagcagaaggcacgaatctttttagaagttc

SEQ ID NO: 880434 - DNA, 33 bp, Homo sapien
tgaagcagaaggcacggatctttttagaagttc

SEQ ID NO: 880435 - DNA, 33 bp, Homo sapien
ggatggctggttaggaacctgacatcctggaga

SEQ ID NO: 880436 - DNA, 33 bp, Homo sapien
ggatggctggttaggaccctgacatcctggaga

SEQ ID NO: 880437 - DNA, 33 bp, Homo sapien
gagctgtgtactttccaatcaattttcctgtaa

SEQ ID NO: 880438 - DNA, 33 bp, Homo sapien
gagctgtgtactttccgatcaattttcctgtaa

SEQ ID NO: 880439 - DNA, 33 bp, Homo sapien
aattttcagtctgtaccatttcccaaatgccct

SEQ ID NO: 880440 - DNA, 33 bp, Homo sapien
aattttcagtctgtactatttcccaaatgccct

SEQ ID NO: 880441 - DNA, 33 bp, Homo sapien
atgtatactgcttattaaaaaatcatattttgg

SEQ ID NO: 880442 - DNA, 33 bp, Homo sapien
atgtatactgcttatttaaaaatcatattttgg

SEQ ID NO: 880443 - DNA, 33 bp, Homo sapien
ataggaaatctgatcaccctagtatctgaagta

SEQ ID NO: 880444 - DNA, 33 bp, Homo sapien
ataggaaatctgatcagcctagtatctgaagta

SEQ ID NO: 880445 - DNA, 33 bp, Homo sapien
ctatttattcttgtctcacactttccagcacaa

SEQ ID NO: 880446 - DNA, 33 bp, Homo sapien
ctatttattcttgtcttacactttccagcacaa

SEQ ID NO: 880447 - DNA, 33 bp, Homo sapien
tggccaaactcatgaaaagtgtggccattatca

SEQ ID NO: 880448 - DNA, 33 bp, Homo sapien
tggccaaactcatgaacagtgtggccattatca

SEQ ID NO: 880449 - DNA, 33 bp, Homo sapien
tgagtgcattttaccaagaatgatttagaagga

SEQ ID NO: 880450 - DNA, 33 bp, Homo sapien
tgagtgcattttaccaggaatgatttagaagga

SEQ ID NO: 880451 - DNA, 33 bp, Homo sapien
taacagttttcctctacgaatctgagaaggctg

SEQ ID NO: 880452 - DNA, 33 bp, Homo sapien
taacagttttcctctatgaatctgagaaggctg

SEQ ID NO: 880453 - DNA, 33 bp, Homo sapien
caccacaggggggttaaccttcagctaaattag

SEQ ID NO: 880454 - DNA, 33 bp, Homo sapien
caccacaggggggttagccttcagctaaattag

SEQ ID NO: 880455 - DNA, 33 bp, Homo sapien
atgggagatacttttacgatggaatgagaataa

SEQ ID NO: 880456 - DNA, 33 bp, Homo sapien
atgggagatacttttatgatggaatgagaataa

SEQ ID NO: 880457 - DNA, 33 bp, Homo sapien
cagctctctcctggagaatgatgagctctcttt

SEQ ID NO: 880458 - DNA, 33 bp, Homo sapien
cagctctctcctggaggatgatgagctctcttt

SEQ ID NO: 880459 - DNA, 33 bp, Homo sapien
acacattcaaagttaaatgatggcagacgtgcc

SEQ ID NO: 880460 - DNA, 33 bp, Homo sapien
acacattcaaagttaagtgatggcagacgtgcc

SEQ ID NO: 880461 - DNA, 33 bp, Homo sapien
gaaacacaagacaaagactaaagaggcaagaag

SEQ ID NO: 880462 - DNA, 33 bp, Homo sapien
gaaacacaagacaaagcctaaagaggcaagaag

SEQ ID NO: 880463 - DNA, 33 bp, Homo sapien
atcttcctgaaacaaccatgacaaacgttcagg

SEQ ID NO: 880464 - DNA, 33 bp, Homo sapien
atcttcctgaaacaactatgacaaacgttcagg

SEQ ID NO: 880465 - DNA, 33 bp, Homo sapien
actagttgggtcataaatatacatacatggtct

SEQ ID NO: 880466 - DNA, 33 bp, Homo sapien
actagttgggtcataattatacatacatggtct

SEQ ID NO: 880467 - DNA, 33 bp, Homo sapien
tccaatacaagtaagaacttcccatttctttga

SEQ ID NO: 880468 - DNA, 33 bp, Homo sapien
tccaatacaagtaagatcttcccatttctttga

SEQ ID NO: 880469 - DNA, 33 bp, Homo sapien
cggagcgatttgtatcaatattcccattttaaa

SEQ ID NO: 880470 - DNA, 33 bp, Homo sapien
cggagcgatttgtatcgatattcccattttaaa

SEQ ID NO: 880471 - DNA, 33 bp, Homo sapien
actttagaatgaagtaaaccaaaaaagcaacaa

SEQ ID NO: 880472 - DNA, 33 bp, Homo sapien
actttagaatgaagtagaccaaaaaagcaacaa

SEQ ID NO: 880473 - DNA, 33 bp, Homo sapien
aatttattgagaaaaaaataaaccagtgacttc

SEQ ID NO: 880474 - DNA, 33 bp, Homo sapien
aatttattgagaaaaagataaaccagtgacttc

SEQ ID NO: 880475 - DNA, 33 bp, Homo sapien
acagatgggaaatgagacattcttcaccaacca

SEQ ID NO: 880476 - DNA, 33 bp, Homo sapien
acagatgggaaatgagtcattcttcaccaacca

SEQ ID NO: 880477 - DNA, 33 bp, Homo sapien
ggaggacaggcatccaagccatgtgtgcactaa

SEQ ID NO: 880478 - DNA, 33 bp, Homo sapien
ggaggacaggcatccaggccatgtgtgcactaa

SEQ ID NO: 880479 - DNA, 33 bp, Homo sapien
tacacttcctgtctacacttcctccatctcatt

SEQ ID NO: 880480 - DNA, 33 bp, Homo sapien
tacacttcctgtctacgcttcctccatctcatt

SEQ ID NO: 880481 - DNA, 33 bp, Homo sapien
ggctctgttagcaccactagctcgcctttgaat

SEQ ID NO: 880482 - DNA, 33 bp, Homo sapien
ggctctgttagcaccagtagctcgcctttgaat

SEQ ID NO: 880483 - DNA, 33 bp, Homo sapien
tagtctttgttgaaagcaaacttgtatatttac

SEQ ID NO: 880484 - DNA, 33 bp, Homo sapien
tagtctttgttgaaaggaaacttgtatatttac

SEQ ID NO: 880485 - DNA, 33 bp, Homo sapien
taacgagagaggaaaacacaatagagaaaaaca

SEQ ID NO: 880486 - DNA, 33 bp, Homo sapien
taacgagagaggaaaatacaatagagaaaaaca

SEQ ID NO: 880487 - DNA, 33 bp, Homo sapien
ttggcctgattgcaagaccggctggactctacc

SEQ ID NO: 880488 - DNA, 33 bp, Homo sapien
ttggcctgattgcaaggccggctggactctacc

SEQ ID NO: 880489 - DNA, 33 bp, Homo sapien
ctttgtccatatactacaaaatctgaacacaca

SEQ ID NO: 880490 - DNA, 33 bp, Homo sapien
ctttgtccatatactataaaatctgaacacaca

SEQ ID NO: 880491 - DNA, 33 bp, Homo sapien
catgattacttctggccgatgagctgtgagcag

SEQ ID NO: 880492 - DNA, 33 bp, Homo sapien
catgattacttctggctgatgagctgtgagcag

SEQ ID NO: 880493 - DNA, 33 bp, Homo sapien
acctaactgcaaagaaagtcaacatatgtaagg

SEQ ID NO: 880494 - DNA, 33 bp, Homo sapien
acctaactgcaaagaaggtcaacatatgtaagg

SEQ ID NO: 880495 - DNA, 33 bp, Homo sapien
cagactgcgttgctgaaatcatcttggaaatca

SEQ ID NO: 880496 - DNA, 33 bp, Homo sapien
cagactgcgttgctgacatcatcttggaaatca

SEQ ID NO: 880497 - DNA, 33 bp, Homo sapien
aaggttctgctggtgcaatgaaacatacttctc

SEQ ID NO: 880498 - DNA, 33 bp, Homo sapien
aaggttctgctggtgccatgaaacatacttctc

SEQ ID NO: 880499 - DNA, 33 bp, Homo sapien
aacaagtgatttgcacgatcagtcaaggtgtgg

SEQ ID NO: 880500 - DNA, 33 bp, Homo sapien
aacaagtgatttgcactatcagtcaaggtgtgg

SEQ ID NO: 880501 - DNA, 33 bp, Homo sapien
gatgcgggaacttcagaaaaaaagacactcggc

SEQ ID NO: 880502 - DNA, 33 bp, Homo sapien
gatgcgggaacttcaggaaaaaagacactcggc

SEQ ID NO: 880503 - DNA, 33 bp, Homo sapien
aggaacagagaggcaggaaacaatggtctctaa

SEQ ID NO: 880504 - DNA, 33 bp, Homo sapien
aggaacagagaggcagtaaacaatggtctctaa

SEQ ID NO: 880505 - DNA, 33 bp, Homo sapien
gtattcagtgccgaaaaagaaatgagccatcaa

SEQ ID NO: 880506 - DNA, 33 bp, Homo sapien
gtattcagtgccgaaacagaaatgagccatcaa

SEQ ID NO: 880507 - DNA, 33 bp, Homo sapien
ttgttttcaccataaaaggtatttttctgactg

SEQ ID NO: 880508 - DNA, 33 bp, Homo sapien
ttgttttcaccataaatggtatttttctgactg

SEQ ID NO: 880509 - DNA, 33 bp, Homo sapien
ggttggctaaaaaaagaagaggtgcaaaaatgg

SEQ ID NO: 880510 - DNA, 33 bp, Homo sapien
ggttggctaaaaaaaggagaggtgcaaaaatgg

SEQ ID NO: 880511 - DNA, 33 bp, Homo sapien
acatgcttagcattacaatataaaagaaaaaag

SEQ ID NO: 880512 - DNA, 33 bp, Homo sapien
acatgcttagcattactatataaaagaaaaaag

SEQ ID NO: 880513 - DNA, 33 bp, Homo sapien
gctccagcaatcacacagcagctggagatggag

SEQ ID NO: 880514 - DNA, 33 bp, Homo sapien
gctccagcaatcacaccgcagctggagatggag

SEQ ID NO: 880515 - DNA, 33 bp, Homo sapien
atttccaggagctaaacgagaagatcttatgaa

SEQ ID NO: 880516 - DNA, 33 bp, Homo sapien
atttccaggagctaaatgagaagatcttatgaa

SEQ ID NO: 880517 - DNA, 33 bp, Homo sapien
cttctcattggaactcacttttcgcctcaccta

SEQ ID NO: 880518 - DNA, 33 bp, Homo sapien
cttctcattggaactcgcttttcgcctcaccta

SEQ ID NO: 880519 - DNA, 33 bp, Homo sapien
agagacaactttaagaagaagtcagagaatgca

SEQ ID NO: 880520 - DNA, 33 bp, Homo sapien
agagacaactttaagatgaagtcagagaatgca

SEQ ID NO: 880521 - DNA, 33 bp, Homo sapien
ggcacctctgagagtcaatgtgcaggacaaatg

SEQ ID NO: 880522 - DNA, 33 bp, Homo sapien
ggcacctctgagagtccatgtgcaggacaaatg

SEQ ID NO: 880523 - DNA, 33 bp, Homo sapien
aggctctcagctgaaaatcaaggccagctgaaa

SEQ ID NO: 880524 - DNA, 33 bp, Homo sapien
aggctctcagctgaaagtcaaggccagctgaaa

SEQ ID NO: 880525 - DNA, 33 bp, Homo sapien
gagtccttctattaacagagacttagtggtcct

SEQ ID NO: 880526 - DNA, 33 bp, Homo sapien
gagtccttctattaacggagacttagtggtcct

SEQ ID NO: 880527 - DNA, 33 bp, Homo sapien
ggcacaaatccaactgaagacccagactttatt

SEQ ID NO: 880528 - DNA, 33 bp, Homo sapien
ggcacaaatccaactggagacccagactttatt

SEQ ID NO: 880529 - DNA, 33 bp, Homo sapien
ttctctgaaatttcacaacaaattagcagagtg

SEQ ID NO: 880530 - DNA, 33 bp, Homo sapien
ttctctgaaatttcaccacaaattagcagagtg

SEQ ID NO: 880531 - DNA, 33 bp, Homo sapien
cggtgccctgttactcggacacaaatgtggcat

SEQ ID NO: 880532 - DNA, 33 bp, Homo sapien
cggtgccctgttactctgacacaaatgtggcat

SEQ ID NO: 880533 - DNA, 33 bp, Homo sapien
gatactctaacagcaaggagctcactcgaaacc

SEQ ID NO: 880534 - DNA, 33 bp, Homo sapien
gatactctaacagcaatgagctcactcgaaacc

SEQ ID NO: 880535 - DNA, 33 bp, Homo sapien
ggtctagccagattcccgctggtattgggggtt

SEQ ID NO: 880536 - DNA, 33 bp, Homo sapien
ggtctagccagattccggctggtattgggggtt

SEQ ID NO: 880537 - DNA, 33 bp, Homo sapien
ttggaatcaccgtgacactgggcatcgagacta

SEQ ID NO: 880538 - DNA, 33 bp, Homo sapien
ttggaatcaccgtgacgctgggcatcgagacta

SEQ ID NO: 880539 - DNA, 33 bp, Homo sapien
tgtaaaggatatttcaaagaatacagatgaaca

SEQ ID NO: 880540 - DNA, 33 bp, Homo sapien
tgtaaaggatatttcagagaatacagatgaaca

SEQ ID NO: 880541 - DNA, 33 bp, Homo sapien
attataggatttttaaagtttttgacatgcaag

SEQ ID NO: 880542 - DNA, 33 bp, Homo sapien
attataggatttttaatgtttttgacatgcaag

SEQ ID NO: 880543 - DNA, 33 bp, Homo sapien
gatcccagcaagataacgtcctgtcttctaaga

SEQ ID NO: 880544 - DNA, 33 bp, Homo sapien
gatcccagcaagataatgtcctgtcttctaaga

SEQ ID NO: 880545 - DNA, 33 bp, Homo sapien; identical to SEQ ID NO: 880543

SEQ ID NO: 880546 - DNA, 33 bp, Homo sapien; identical to SEQ ID NO: 880544

SEQ ID NO: 880547 - DNA, 33 bp, Homo sapien
atagaatttcaaaaacagtatttgctttgcttc

SEQ ID NO: 880548 - DNA, 33 bp, Homo sapien
atagaatttcaaaaactgtatttgctttgcttc

SEQ ID NO: 880549 - DNA, 33 bp, Homo sapien
acatttccccaaagcacattatacaacaagaac

SEQ ID NO: 880550 - DNA, 33 bp, Homo sapien
acatttccccaaagcatattatacaacaagaac

SEQ ID NO: 880551 - DNA, 33 bp, Homo sapien
cagcacagcctctagaggttttgctcgtttcat

SEQ ID NO: 880552 - DNA, 33 bp, Homo sapien
cagcacagcctctagatgttttgctcgtttcat

SEQ ID NO: 880553 - DNA, 33 bp, Homo sapien
aagttaactttcatcacgcgttgatatttcatt

SEQ ID NO: 880554 - DNA, 33 bp, Homo sapien
aagttaactttcatcatgcgttgatatttcatt

SEQ ID NO: 880555 - DNA, 33 bp, Homo sapien
gtcattttaatcatctcagaaaccatcaccata

SEQ ID NO: 880556 - DNA, 33 bp, Homo sapien
gtcattttaatcatctgagaaaccatcaccata

SEQ ID NO: 880557 - DNA, 33 bp, Homo sapien
aattcctcctagagacaatgttacctcttttat

SEQ ID NO: 880558 - DNA, 33 bp, Homo sapien
aattcctcctagagacgatgttacctcttttat

SEQ ID NO: 880559 - DNA, 33 bp, Homo sapien
tgcttcattgttaacaccttgcgtgactagcag

SEQ ID NO: 880560 - DNA, 33 bp, Homo sapien
tgcttcattgttaacatcttgcgtgactagcag

SEQ ID NO: 880561 - DNA, 33 bp, Homo sapien
caagatacatatctgaactatcaccataaagct

SEQ ID NO: 880562 - DNA, 33 bp, Homo sapien
caagatacatatctgagctatcaccataaagct

SEQ ID NO: 880563 - DNA, 33 bp, Homo sapien
gtttccttaaggcttacacaaattgtttcatgt

SEQ ID NO: 880564 - DNA, 33 bp, Homo sapien
gtttccttaaggcttatacaaattgtttcatgt

SEQ ID NO: 880565 - DNA, 33 bp, Homo sapien
taacaggcaaatgattaaactatcatacagcca

SEQ ID NO: 880566 - DNA, 33 bp, Homo sapien
taacaggcaaatgattgaactatcatacagcca

SEQ ID NO: 880567 - DNA, 33 bp, Homo sapien
cggcacttacaacctaagacacgtagtttacca

SEQ ID NO: 880568 - DNA, 33 bp, Homo sapien
cggcacttacaacctaggacacgtagtttacca

SEQ ID NO: 880569 - DNA, 33 bp, Homo sapien
taacttcctctttcaacttaccatgtaattcct

SEQ ID NO: 880570 - DNA, 33 bp, Homo sapien
taacttcctctttcaatttaccatgtaattcct

SEQ ID NO: 880571 - DNA, 33 bp, Homo sapien
agactttgcagagatacgcggatgggtcagata

SEQ ID NO: 880572 - DNA, 33 bp, Homo sapien
agactttgcagagatatgcggatgggtcagata

SEQ ID NO: 880573 - DNA, 33 bp, Homo sapien
tgtaatactcaactcaaggtacaagacaattgc

SEQ ID NO: 880574 - DNA, 33 bp, Homo sapien
tgtaatactcaactcacggtacaagacaattgc

SEQ ID NO: 880575 - DNA, 33 bp, Homo sapien
atagcacaaggatgtacgaagaagcttgaagga

SEQ ID NO: 880576 - DNA, 33 bp, Homo sapien
atagcacaaggatgtatgaagaagcttgaagga

SEQ ID NO: 880577 - DNA, 33 bp, Homo sapien
aggaaggaaaaaagaacacccgtgcagactgat

SEQ ID NO: 880578 - DNA, 33 bp, Homo sapien
aggaaggaaaaaagaatacccgtgcagactgat

SEQ ID NO: 880579 - DNA, 33 bp, Homo sapien
gtcgtaagtaataatacccgttcagccatttca

SEQ ID NO: 880580 - DNA, 33 bp, Homo sapien
gtcgtaagtaataatatccgttcagccatttca

SEQ ID NO: 880581 - DNA, 33 bp, Homo sapien
ttgagaaaacattcaccggtctgagtgtgccgg

SEQ ID NO: 880582 - DNA, 33 bp, Homo sapien
ttgagaaaacattcactggtctgagtgtgccgg

SEQ ID NO: 880583 - DNA, 33 bp, Homo sapien
tctaacgcaatgcctagcaagtgatacaggtat

SEQ ID NO: 880584 - DNA, 33 bp, Homo sapien
tctaacgcaatgcctatcaagtgatacaggtat

SEQ ID NO: 880585 - DNA, 33 bp, Homo sapien
cccctgctctctgaaacacgtgctgtgtcaaac

SEQ ID NO: 880586 - DNA, 33 bp, Homo sapien
cccctgctctctgaaatacgtgctgtgtcaaac

SEQ ID NO: 880587 - DNA, 33 bp, Homo sapien
cagtatcaatctaatactatagaacagtcagta

SEQ ID NO: 880588 - DNA, 33 bp, Homo sapien
cagtatcaatctaatattatagaacagtcagta

SEQ ID NO: 880589 - DNA, 33 bp, Homo sapien
accatagttccaaaaccctgttcaagtagaagc

SEQ ID NO: 880590 - DNA, 33 bp, Homo sapien
accatagttccaaaacgctgttcaagtagaagc

SEQ ID NO: 880591 - DNA, 33 bp, Homo sapien
gaggcgtggcaggagacgaagacagagtccaga

SEQ ID NO: 880592 - DNA, 33 bp, Homo sapien
gaggcgtggcaggagaggaagacagagtccaga

SEQ ID NO: 880593 - DNA, 33 bp, Homo sapien
cacaaggaatgggtttaaaaaaatcgcacacac

SEQ ID NO: 880594 - DNA, 33 bp, Homo sapien
cacaaggaatgggttttaaaaaatcgcacacac

SEQ ID NO: 880595 - DNA, 33 bp, Homo sapien
ctgggcacgtaggcaccagaaacacattagcag

SEQ ID NO: 880596 - DNA, 33 bp, Homo sapien
ctgggcacgtaggcactagaaacacattagcag

SEQ ID NO: 880597 - DNA, 33 bp, Homo sapien
aagcacttgaaagtacaaggggacagaggaggg

SEQ ID NO: 880598 - DNA, 33 bp, Homo sapien
aagcacttgaaagtaccaggggacagaggaggg

SEQ ID NO: 880599 - DNA, 33 bp, Homo sapien
caattactgcacacccaatgctgaataaagtcc

SEQ ID NO: 880600 - DNA, 33 bp, Homo sapien
caattactgcacacccgatgctgaataaagtcc

SEQ ID NO: 880601 - DNA, 33 bp, Homo sapien
acagaaaaggtctataaaggccaggaggggtgg

SEQ ID NO: 880602 - DNA, 33 bp, Homo sapien
acagaaaaggtctatagaggccaggaggggtgg

SEQ ID NO: 880603 - DNA, 33 bp, Homo sapien
ttcaaattgttgacaacagtagctctcttcact

SEQ ID NO: 880604 - DNA, 33 bp, Homo sapien
ttcaaattgttgacaatagtagctctcttcact

SEQ ID NO: 880605 - DNA, 33 bp, Homo sapien
tattagattccacatacaagaattttgtaattc

SEQ ID NO: 880606 - DNA, 33 bp, Homo sapien
tattagattccacatataagaattttgtaattc

SEQ ID NO: 880607 - DNA, 33 bp, Homo sapien
ccaaagtgtaactaggcaatcaaatgggaatct

SEQ ID NO: 880608 - DNA, 33 bp, Homo sapien
ccaaagtgtaactagggaatcaaatgggaatct

SEQ ID NO: 880609 - DNA, 33 bp, Homo sapien
tatcagtggtaataggaggtgcatctgagtcat

SEQ ID NO: 880610 - DNA, 33 bp, Homo sapien
tatcagtggtaataggcggtgcatctgagtcat

SEQ ID NO: 880611 - DNA, 33 bp, Homo sapien
aagctgagtagaaagaggatttattaaaaggat

SEQ ID NO: 880612 - DNA, 33 bp, Homo sapien
aagctgagtagaaagatgatttattaaaaggat

SEQ ID NO: 880613 - DNA, 33 bp, Homo sapien
ccagtgaggggttacccgaagagaacattgtca

SEQ ID NO: 880614 - DNA, 33 bp, Homo sapien
ccagtgaggggttacctgaagagaacattgtca

SEQ ID NO: 880615 - DNA, 33 bp, Homo sapien
cccatagtgggtaatacacacaggacatacctc

SEQ ID NO: 880616 - DNA, 33 bp, Homo sapien
cccatagtgggtaatatacacaggacatacctc

SEQ ID NO: 880617 - DNA, 33 bp, Homo sapien
taacaagaatgagcaaatccatttcctgagtgt

SEQ ID NO: 880618 - DNA, 33 bp, Homo sapien
taacaagaatgagcaagtccatttcctgagtgt

SEQ ID NO: 880619 - DNA, 33 bp, Homo sapien
tgagcctggttccctacgctcaggagcctcatg

SEQ ID NO: 880620 - DNA, 33 bp, Homo sapien
tgagcctggttccctatgctcaggagcctcatg

SEQ ID NO: 880621 - DNA, 33 bp, Homo sapien
aggaaacacctgtttcaccaacccaaaggctac

SEQ ID NO: 880622 - DNA, 33 bp, Homo sapien
aggaaacacctgtttcgccaacccaaaggctac

SEQ ID NO: 880623 - DNA, 33 bp, Homo sapien
tcttccggatcttcacaaccaagatggtgctgg

SEQ ID NO: 880624 - DNA, 33 bp, Homo sapien
tcttccggatcttcacgaccaagatggtgctgg

SEQ ID NO: 880625 - DNA, 33 bp, Homo sapien
tgtgaaaagtaactaacacaagaaggataagtt

SEQ ID NO: 880626 - DNA, 33 bp, Homo sapien
tgtgaaaagtaactaatacaagaaggataagtt

SEQ ID NO: 880627 - DNA, 33 bp, Homo sapien
ctctagattgacaaagcattcctgagacacatt

SEQ ID NO: 880628 - DNA, 33 bp, Homo sapien
ctctagattgacaaaggattcctgagacacatt

SEQ ID NO: 880629 - DNA, 33 bp, Homo sapien
attcctgagctagggaaaagaaatgcaatgagc

SEQ ID NO: 880630 - DNA, 33 bp, Homo sapien
attcctgagctagggataagaaatgcaatgagc

SEQ ID NO: 880631 - DNA, 33 bp, Homo sapien
ccaaaaatacactaaaactttctgagattgaaa

SEQ ID NO: 880632 - DNA, 33 bp, Homo sapien
ccaaaaatacactaaacctttctgagattgaaa

SEQ ID NO: 880633 - DNA, 33 bp, Homo sapien
tctgggcctttgtggacgatgggaagctctgca

SEQ ID NO: 880634 - DNA, 33 bp, Homo sapien
tctgggcctttgtggatgatgggaagctctgca

SEQ ID NO: 880635 - DNA, 33 bp, Homo sapien
agggcaccaaccaaataaattgatttctactca

SEQ ID NO: 880636 - DNA, 33 bp, Homo sapien
agggcaccaaccaaattaattgatttctactca

SEQ ID NO: 880637 - DNA, 33 bp, Homo sapien
aatgtaagagtaatgaactaagatatttggtag

SEQ ID NO: 880638 - DNA, 33 bp, Homo sapien
aatgtaagagtaatgagctaagatatttggtag

SEQ ID NO: 880639 - DNA, 33 bp, Homo sapien
tctctgtgaccttttcccaggtaagaatcaagt

SEQ ID NO: 880640 - DNA, 33 bp, Homo sapien
tctctgtgaccttttctcaggtaagaatcaagt

SEQ ID NO: 880641 - DNA, 33 bp, Homo sapien
tgcctatttgtacttacgggaagatcagatttt

SEQ ID NO: 880642 - DNA, 33 bp, Homo sapien
tgcctatttgtacttatgggaagatcagatttt

SEQ ID NO: 880643 - DNA, 33 bp, Homo sapien
ttgacgacagtggttaccttaggctcttgacat

SEQ ID NO: 880644 - DNA, 33 bp, Homo sapien
ttgacgacagtggttatcttaggctcttgacat

SEQ ID NO: 880645 - DNA, 33 bp, Homo sapien
agaccacatcacatcacgctgatcaacagatca

SEQ ID NO: 880646 - DNA, 33 bp, Homo sapien
agaccacatcacatcatgctgatcaacagatca

SEQ ID NO: 880647 - DNA, 33 bp, Homo sapien
tgctgtaaacgaacccactgcgctaccagtctt

SEQ ID NO: 880648 - DNA, 33 bp, Homo sapien
tgctgtaaacgaacccgctgcgctaccagtctt

SEQ ID NO: 880649 - DNA, 33 bp, Homo sapien
ctaggacctgactggacgctttcataagactgg

SEQ ID NO: 880650 - DNA, 33 bp, Homo sapien
ctaggacctgactggatgctttcataagactgg

SEQ ID NO: 880651 - DNA, 33 bp, Homo sapien
agcttgtttgttgctaacatttaacatcttact

SEQ ID NO: 880652 - DNA, 33 bp, Homo sapien
agcttgtttgttgctatcatttaacatcttact

SEQ ID NO: 880653 - DNA, 33 bp, Homo sapien
cagggtgcataccagagtacataatagtttttg

SEQ ID NO: 880654 - DNA, 33 bp, Homo sapien
cagggtgcataccagattacataatagtttttg

SEQ ID NO: 880655 - DNA, 33 bp, Homo sapien
ttttccttaggcaaacaatattacatatgtgaa

SEQ ID NO: 880656 - DNA, 33 bp, Homo sapien
ttttccttaggcaaacgatattacatatgtgaa

SEQ ID NO: 880657 - DNA, 33 bp, Homo sapien
agcaaatgccagcaaacgaaagccagaaaacgt

SEQ ID NO: 880658 - DNA, 33 bp, Homo sapien
agcaaatgccagcaaatgaaagccagaaaacgt

SEQ ID NO: 880659 - DNA, 33 bp, Homo sapien
ggctgaggagagggacagagagatttaacaatg

SEQ ID NO: 880660 - DNA, 33 bp, Homo sapien
ggctgaggagagggacggagagatttaacaatg

SEQ ID NO: 880661 - DNA, 33 bp, Homo sapien
gagtccaggtcaggtaacccttaaattcttttc

SEQ ID NO: 880662 - DNA, 33 bp, Homo sapien
gagtccaggtcaggtatcccttaaattcttttc

SEQ ID NO: 880663 - DNA, 33 bp, Homo sapien
tgggagcaagcatatcgcacagcaaaagcagga

SEQ ID NO: 880664 - DNA, 33 bp, Homo sapien
tgggagcaagcatatctcacagcaaaagcagga

SEQ ID NO: 880665 - DNA, 33 bp, Homo sapien
gttactactttgaagcaagaggatgtcaagtcc

SEQ ID NO: 880666 - DNA, 33 bp, Homo sapien
gttactactttgaagcgagaggatgtcaagtcc

SEQ ID NO: 880667 - DNA, 33 bp, Homo sapien
ttttgaggatcaaatacattaatatagtcatgt

SEQ ID NO: 880668 - DNA, 33 bp, Homo sapien
ttttgaggatcaaatagattaatatagtcatgt

SEQ ID NO: 880669 - DNA, 33 bp, Homo sapien
ttggaaatgcggttaccattttctttgtcagtg

SEQ ID NO: 880670 - DNA, 33 bp, Homo sapien
ttggaaatgcggttactattttctttgtcagtg

SEQ ID NO: 880671 - DNA, 33 bp, Homo sapien
tccacttcacagaaaaccaatgtcttcactagc

SEQ ID NO: 880672 - DNA, 33 bp, Homo sapien
tccacttcacagaaaatcaatgtcttcactagc

SEQ ID NO: 880673 - DNA, 33 bp, Homo sapien
tatgtcaggaagtctgcagattgaaaaatgtat

SEQ ID NO: 880674 - DNA, 33 bp, Homo sapien
tatgtcaggaagtctgtagattgaaaaatgtat

SEQ ID NO: 880675 - DNA, 33 bp, Homo sapien
caaaaagcaagtgaaccaagaagtaagcggcct

SEQ ID NO: 880676 - DNA, 33 bp, Homo sapien
caaaaagcaagtgaactaagaagtaagcggcct

SEQ ID NO: 880677 - DNA, 33 bp, Homo sapien
cgcaatagtgaggcataacctcaatccaccctt

SEQ ID NO: 880678 - DNA, 33 bp, Homo sapien
cgcaatagtgaggcatgacctcaatccaccctt

SEQ ID NO: 880679 - DNA, 33 bp, Homo sapien
agtgaattctaataacagtctggtcgcctttgg

SEQ ID NO: 880680 - DNA, 33 bp, Homo sapien
agtgaattctaataactgtctggtcgcctttgg

SEQ ID NO: 880681 - DNA, 33 bp, Homo sapien
gaatcactggcattggaatcataaggctttcgt

SEQ ID NO: 880682 - DNA, 33 bp, Homo sapien
gaatcactggcattggcatcataaggctttcgt

SEQ ID NO: 880683 - DNA, 33 bp, Homo sapien
ggcacacagatgataacgtgacacagctgggtg

SEQ ID NO: 880684 - DNA, 33 bp, Homo sapien
ggcacacagatgataatgtgacacagctgggtg

SEQ ID NO: 880685 - DNA, 33 bp, Homo sapien
atcttcacaccagagaacataattgacttcatt

SEQ ID NO: 880686 - DNA, 33 bp, Homo sapien
atcttcacaccagagagcataattgacttcatt

SEQ ID NO: 880687 - DNA, 33 bp, Homo sapien
ccaactgctgaaacagcatgaatgaccaacagc

SEQ ID NO: 880688 - DNA, 33 bp, Homo sapien
ccaactgctgaaacagtatgaatgaccaacagc

SEQ ID NO: 880689 - DNA, 33 bp, Homo sapien
ggctacagggagacacaaatgtgtaaatcattg

SEQ ID NO: 880690 - DNA, 33 bp, Homo sapien
ggctacagggagacacgaatgtgtaaatcattg

SEQ ID NO: 880691 - DNA, 33 bp, Homo sapien
acgcaaaggttatcacgaaaagtcttgcaaaaa

SEQ ID NO: 880692 - DNA, 33 bp, Homo sapien
acgcaaaggttatcactaaaagtcttgcaaaaa

SEQ ID NO: 880693 - DNA, 33 bp, Homo sapien
caatgttctgtgctacaggttcaaaggaagaaa

SEQ ID NO: 880694 - DNA, 33 bp, Homo sapien
caatgttctgtgctacgggttcaaaggaagaaa

SEQ ID NO: 880695 - DNA, 33 bp, Homo sapien
cttttctgcaaatttacctgaaagaaatcatcc

SEQ ID NO: 880696 - DNA, 33 bp, Homo sapien
cttttctgcaaatttatctgaaagaaatcatcc

SEQ ID NO: 880697 - DNA, 33 bp, Homo sapien
aaaaaaagggatggagaataggatgttgagtct

SEQ ID NO: 880698 - DNA, 33 bp, Homo sapien
aaaaaaagggatggaggataggatgttgagtct

SEQ ID NO: 880699 - DNA, 33 bp, Homo sapien
caccgagagagccaaacaagaagcccgcattca

SEQ ID NO: 880700 - DNA, 33 bp, Homo sapien
caccgagagagccaaagaagaagcccgcattca

SEQ ID NO: 880701 - DNA, 33 bp, Homo sapien
ttgcccatttcattcccggaaaaaggagaagag

SEQ ID NO: 880702 - DNA, 33 bp, Homo sapien
ttgcccatttcattcctggaaaaaggagaagag

SEQ ID NO: 880703 - DNA, 33 bp, Homo sapien
gccagcgcttcccaccacttgtactgttcaggt

SEQ ID NO: 880704 - DNA, 33 bp, Homo sapien
gccagcgcttcccaccgcttgtactgttcaggt

SEQ ID NO: 880705 - DNA, 33 bp, Homo sapien
acaggtggcaatcccactgcaatggctaccact

SEQ ID NO: 880706 - DNA, 33 bp, Homo sapien
acaggtggcaatcccagtgcaatggctaccact

SEQ ID NO: 880707 - DNA, 33 bp, Homo sapien
cctgtttcacaaggacaaggcaggggaagggca

SEQ ID NO: 880708 - DNA, 33 bp, Homo sapien
cctgtttcacaaggacgaggcaggggaagggca

SEQ ID NO: 880709 - DNA, 33 bp, Homo sapien
taaccaatgaacgccaatggcagatccctcatt

SEQ ID NO: 880710 - DNA, 33 bp, Homo sapien
taaccaatgaacgccagtggcagatccctcatt

SEQ ID NO: 880711 - DNA, 33 bp, Homo sapien
caagtggctgttaacaaactagaatgaaatatc

SEQ ID NO: 880712 - DNA, 33 bp, Homo sapien
caagtggctgttaacacactagaatgaaatatc

SEQ ID NO: 880713 - DNA, 33 bp, Homo sapien
ctgaaatgaagggctacgttcactccaccattg

SEQ ID NO: 880714 - DNA, 33 bp, Homo sapien
ctgaaatgaagggctatgttcactccaccattg

SEQ ID NO: 880715 - DNA, 33 bp, Homo sapien
aggacatttttaatacacatttgaaaaacatca

SEQ ID NO: 880716 - DNA, 33 bp, Homo sapien
aggacatttttaatacgcatttgaaaaacatca

SEQ ID NO: 880717 - DNA, 33 bp, Homo sapien
gacagagcttcctccccgaggtccacactggct

SEQ ID NO: 880718 - DNA, 33 bp, Homo sapien
gacagagcttcctccctgaggtccacactggct

SEQ ID NO: 880719 - DNA, 33 bp, Homo sapien
tctagggtagtggcaaaagacaaagatgcctaa

SEQ ID NO: 880720 - DNA, 33 bp, Homo sapien
tctagggtagtggcaacagacaaagatgcctaa

SEQ ID NO: 880721 - DNA, 33 bp, Homo sapien
attacaaaattaaccagcattctggggctacac

SEQ ID NO: 880722 - DNA, 33 bp, Homo sapien
attacaaaattaaccatcattctggggctacac

SEQ ID NO: 880723 - DNA, 33 bp, Homo sapien
tgaaatttcccaagcaaaagctgaaagaaatac

SEQ ID NO: 880724 - DNA, 33 bp, Homo sapien
tgaaatttcccaagcagaagctgaaagaaatac

SEQ ID NO: 880725 - DNA, 33 bp, Homo sapien
ttatataccttttccaatctcttcttctggaac

SEQ ID NO: 880726 - DNA, 33 bp, Homo sapien
ttatataccttttccagtctcttcttctggaac

SEQ ID NO: 880727 - DNA, 33 bp, Homo sapien
taaatggtggataacactgtggcttctcattct

SEQ ID NO: 880728 - DNA, 33 bp, Homo sapien
taaatggtggataacattgtggcttctcattct

SEQ ID NO: 880729 - DNA, 33 bp, Homo sapien
cacatccgacaggggaagttacatttcaacatg

SEQ ID NO: 880730 - DNA, 33 bp, Homo sapien
cacatccgacaggggaggttacatttcaacatg

SEQ ID NO: 880731 - DNA, 33 bp, Homo sapien
tctatcttagaaaaacacaatagtatacacaga

SEQ ID NO: 880732 - DNA, 33 bp, Homo sapien
tctatcttagaaaaacccaatagtatacacaga

SEQ ID NO: 880733 - DNA, 33 bp, Homo sapien
gacgatcaaatagaaacggctctagtctgcagc

SEQ ID NO: 880734 - DNA, 33 bp, Homo sapien
gacgatcaaatagaaatggctctagtctgcagc

SEQ ID NO: 880735 - DNA, 33 bp, Homo sapien
tttcctgtgcattctcaacttggctacctggta

SEQ ID NO: 880736 - DNA, 33 bp, Homo sapien
tttcctgtgcattctcgacttggctacctggta

SEQ ID NO: 880737 - DNA, 33 bp, Homo sapien
agaggcctttgaatccaagcggaggtcacacac

SEQ ID NO: 880738 - DNA, 33 bp, Homo sapien
agaggcctttgaatccgagcggaggtcacacac

SEQ ID NO: 880739 - DNA, 33 bp, Homo sapien
tacatggaagagactacgaaatgatgacagaat

SEQ ID NO: 880740 - DNA, 33 bp, Homo sapien
tacatggaagagactatgaaatgatgacagaat

SEQ ID NO: 880741 - DNA, 33 bp, Homo sapien; identical to SEQ ID NO: 880739

SEQ ID NO: 880742 - DNA, 33 bp, Homo sapien; identical to SEQ ID NO: 880740

SEQ ID NO: 880743 - DNA, 33 bp, Homo sapien
gatgggtacctcctcacgatgaaaagagggttc

SEQ ID NO: 880744 - DNA, 33 bp, Homo sapien
gatgggtacctcctcatgatgaaaagagggttc

SEQ ID NO: 880745 - DNA, 33 bp, Homo sapien
cccttcctgctgtctccattacacttccacaaa

SEQ ID NO: 880746 - DNA, 33 bp, Homo sapien
cccttcctgctgtctctattacacttccacaaa

SEQ ID NO: 880747 - DNA, 33 bp, Homo sapien
tggggggcggcatgcaagaaaagggacccagct

SEQ ID NO: 880748 - DNA, 33 bp, Homo sapien
tggggggcggcatgcaggaaaagggacccagct

SEQ ID NO: 880749 - DNA, 33 bp, Homo sapien
gggtgctccaaacagaagcccccataggatagt

SEQ ID NO: 880750 - DNA, 33 bp, Homo sapien
gggtgctccaaacagaggcccccataggatagt

SEQ ID NO: 880751 - DNA, 33 bp, Homo sapien
caatactgttattttcaccatgtcctggtttgc

SEQ ID NO: 880752 - DNA, 33 bp, Homo sapien
caatactgttattttcgccatgtcctggtttgc

SEQ ID NO: 880753 - DNA, 33 bp, Homo sapien
tcattattcttcccccaaaggctgtctccatgc

SEQ ID NO: 880754 - DNA, 33 bp, Homo sapien
tcattattcttcccccgaaggctgtctccatgc

SEQ ID NO: 880755 - DNA, 33 bp, Homo sapien
cttgcaaatgtgttaaagatgaataatgatggc

SEQ ID NO: 880756 - DNA, 33 bp, Homo sapien
cttgcaaatgtgttaaggatgaataatgatggc

SEQ ID NO: 880757 - DNA, 33 bp, Homo sapien
tatgtaagcacccccacaaaagaagtgacaatt

SEQ ID NO: 880758 - DNA, 33 bp, Homo sapien
tatgtaagcacccccataaaagaagtgacaatt

SEQ ID NO: 880759 - DNA, 33 bp, Homo sapien
ctccagtcatgcttctaaatatgtaagcacccc

SEQ ID NO: 880760 - DNA, 33 bp, Homo sapien
ctccagtcatgcttctgaatatgtaagcacccc

SEQ ID NO: 880761 - DNA, 33 bp, Homo sapien
cctttctatctctaccagattcactctctcttt

SEQ ID NO: 880762 - DNA, 33 bp, Homo sapien
cctttctatctctaccggattcactctctcttt

SEQ ID NO: 880763 - DNA, 33 bp, Homo sapien
gcaatttttctaagacaacaactctctctttta

SEQ ID NO: 880764 - DNA, 33 bp, Homo sapien
gcaatttttctaagacgacaactctctctttta

SEQ ID NO: 880765 - DNA, 33 bp, Homo sapien
ccagatccaccaggaaacggaggaaagtgttag

SEQ ID NO: 880766 - DNA, 33 bp, Homo sapien
ccagatccaccaggaaccggaggaaagtgttag

SEQ ID NO: 880767 - DNA, 33 bp, Homo sapien
ccaggagctgggagaggcaaggaagcgttctcc

SEQ ID NO: 880768 - DNA, 33 bp, Homo sapien
ccaggagctgggagagtcaaggaagcgttctcc

SEQ ID NO: 880769 - DNA, 33 bp, Homo sapien
ctactcctgaaaattacggtggttttgtaattc

SEQ ID NO: 880770 - DNA, 33 bp, Homo sapien
ctactcctgaaaattatggtggttttgtaattc

SEQ ID NO: 880771 - DNA, 33 bp, Homo sapien
attacacccgattatcaaatgaacaaaagctat

SEQ ID NO: 880772 - DNA, 33 bp, Homo sapien
attacacccgattatccaatgaacaaaagctat

SEQ ID NO: 880773 - DNA, 33 bp, Homo sapien
agtgtagaaacctgaaagatattttgttataaa

SEQ ID NO: 880774 - DNA, 33 bp, Homo sapien
agtgtagaaacctgaaggatattttgttataaa

SEQ ID NO: 880775 - DNA, 33 bp, Homo sapien
gtctggaggaagacgcgagaacattgcttccga

SEQ ID NO: 880776 - DNA, 33 bp, Homo sapien
gtctggaggaagacgctagaacattgcttccga

SEQ ID NO: 880777 - DNA, 33 bp, Homo sapien
agctgctgaggaaaacaagcggcaccatctgtg

SEQ ID NO: 880778 - DNA, 33 bp, Homo sapien
agctgctgaggaaaacgagcggcaccatctgtg

SEQ ID NO: 880779 - DNA, 33 bp, Homo sapien
atttcctggtaattcacagaaaggaaggtgaga

SEQ ID NO: 880780 - DNA, 33 bp, Homo sapien
atttcctggtaattcatagaaaggaaggtgaga

SEQ ID NO: 880781 - DNA, 33 bp, Homo sapien
gctacctgttttcaagcagacggctaatccggt

SEQ ID NO: 880782 - DNA, 33 bp, Homo sapien
gctacctgttttcaaggagacggctaatccggt

SEQ ID NO: 880783 - DNA, 33 bp, Homo sapien
ccccattgatttgtgaagccacttttataaaac

SEQ ID NO: 880784 - DNA, 33 bp, Homo sapien
ccccattgatttgtgatgccacttttataaaac

SEQ ID NO: 880785 - DNA, 33 bp, Homo sapien
atctttccaaatttgagagaaaaaatctcctgt

SEQ ID NO: 880786 - DNA, 33 bp, Homo sapien
atctttccaaatttgatagaaaaaatctcctgt

SEQ ID NO: 880787 - DNA, 33 bp, Homo sapien
ctcatagagacatctgcaccctcatgatcattg

SEQ ID NO: 880788 - DNA, 33 bp, Homo sapien
ctcatagagacatctgtaccctcatgatcattg

SEQ ID NO: 880789 - DNA, 33 bp, Homo sapien
ataagacgacattgcacctcgggtccaggtagt

SEQ ID NO: 880790 - DNA, 33 bp, Homo sapien
ataagacgacattgcatctcgggtccaggtagt

SEQ ID NO: 880791 - DNA, 33 bp, Homo sapien
atttatcttggttcctaacacacagagctggac

SEQ ID NO: 880792 - DNA, 33 bp, Homo sapien
atttatcttggttcctgacacacagagctggac

SEQ ID NO: 880793 - DNA, 33 bp, Homo sapien
tccatttatttgttgacggacaccggttgatcc

SEQ ID NO: 880794 - DNA, 33 bp, Homo sapien
tccatttatttgttgatggacaccggttgatcc

SEQ ID NO: 880795 - DNA, 33 bp, Homo sapien
attttgtgctgacagaaaatttacaggtagata

SEQ ID NO: 880796 - DNA, 33 bp, Homo sapien
attttgtgctgacagacaatttacaggtagata

SEQ ID NO: 880797 - DNA, 33 bp, Homo sapien
taataacagtgagaaaacacattaactacaggg

SEQ ID NO: 880798 - DNA, 33 bp, Homo sapien
taataacagtgagaaaccacattaactacaggg

SEQ ID NO: 880799 - DNA, 33 bp, Homo sapien
tgagttgtgccttctacatccctctaaggaaag

SEQ ID NO: 880800 - DNA, 33 bp, Homo sapien
tgagttgtgccttctagatccctctaaggaaag

SEQ ID NO: 880801 - DNA, 33 bp, Homo sapien
aagaaagcaggtgaaaaaatagagttttggagc

SEQ ID NO: 880802 - DNA, 33 bp, Homo sapien
aagaaagcaggtgaaacaatagagttttggagc

SEQ ID NO: 880803 - DNA, 33 bp, Homo sapien
tttcagaaatggacaaattgattctaaaatgaa

SEQ ID NO: 880804 - DNA, 33 bp, Homo sapien
tttcagaaatggacaagttgattctaaaatgaa

SEQ ID NO: 880805 - DNA, 33 bp, Homo sapien
ttccaatccatgaaatgacacatctttccattt

SEQ ID NO: 880806 - DNA, 33 bp, Homo sapien
ttccaatccatgaaattacacatctttccattt

SEQ ID NO: 880807 - DNA, 33 bp, Homo sapien
agaactcgagaagtgaactaacagcttccaata

SEQ ID NO: 880808 - DNA, 33 bp, Homo sapien
agaactcgagaagtgagctaacagcttccaata

SEQ ID NO: 880809 - DNA, 33 bp, Homo sapien
cgtttactgtggcaacggcatgtaccaatgcat

SEQ ID NO: 880810 - DNA, 33 bp, Homo sapien
cgtttactgtggcaactgcatgtaccaatgcat

SEQ ID NO: 880811 - DNA, 33 bp, Homo sapien
gtcggggacctgattacctgagagttagacccc

SEQ ID NO: 880812 - DNA, 33 bp, Homo sapien
gtcggggacctgattatctgagagttagacccc

SEQ ID NO: 880813 - DNA, 33 bp, Homo sapien
agaataccaaacatgtcaaggattgttggacac

SEQ ID NO: 880814 - DNA, 33 bp, Homo sapien
agaataccaaacatgttaaggattgttggacac

SEQ ID NO: 880815 - DNA, 33 bp, Homo sapien
tgatatatttagaagaagtcaacacagccttag

SEQ ID NO: 880816 - DNA, 33 bp, Homo sapien
tgatatatttagaagaggtcaacacagccttag

SEQ ID NO: 880817 - DNA, 33 bp, Homo sapien
agatctctttggactacattgtaacagagggtg

SEQ ID NO: 880818 - DNA, 33 bp, Homo sapien
agatctctttggactatattgtaacagagggtg

SEQ ID NO: 880819 - DNA, 33 bp, Homo sapien
tccagccccattctcacgataccactgataaaa

SEQ ID NO: 880820 - DNA, 33 bp, Homo sapien
tccagccccattctcatgataccactgataaaa

SEQ ID NO: 880821 - DNA, 33 bp, Homo sapien
tgccacttgggccatacagcctgacagatccta

SEQ ID NO: 880822 - DNA, 33 bp, Homo sapien
tgccacttgggccatatagcctgacagatccta

SEQ ID NO: 880823 - DNA, 33 bp, Homo sapien
acagatcctatgatacaggaggtgttagtggtg

SEQ ID NO: 880824 - DNA, 33 bp, Homo sapien
acagatcctatgatacgggaggtgttagtggtg

SEQ ID NO: 880825 - DNA, 33 bp, Homo sapien
caatatgaacttcttaacattgctcaaagctgt

SEQ ID NO: 880826 - DNA, 33 bp, Homo sapien
caatatgaacttcttagcattgctcaaagctgt

SEQ ID NO: 880827 - DNA, 33 bp, Homo sapien
cacagacgattctccaaatttctccttgtaact

SEQ ID NO: 880828 - DNA, 33 bp, Homo sapien
cacagacgattctccagatttctccttgtaact

SEQ ID NO: 880829 - DNA, 33 bp, Homo sapien
ctttcaccttaaaataaaagccctcactatact

SEQ ID NO: 880830 - DNA, 33 bp, Homo sapien
ctttcaccttaaaatacaagccctcactatact

SEQ ID NO: 880831 - DNA, 33 bp, Homo sapien
ctccagggactactgacagagttttctgaatgg

SEQ ID NO: 880832 - DNA, 33 bp, Homo sapien
ctccagggactactgagagagttttctgaatgg

SEQ ID NO: 880833 - DNA, 33 bp, Homo sapien
ggaatcagaaaagactaagccctggagttgggt

SEQ ID NO: 880834 - DNA, 33 bp, Homo sapien
ggaatcagaaaagactcagccctggagttgggt

SEQ ID NO: 880835 - DNA, 33 bp, Homo sapien
ccagctactaggcgtacggaggttaataagata

SEQ ID NO: 880836 - DNA, 33 bp, Homo sapien
ccagctactaggcgtatggaggttaataagata

SEQ ID NO: 880837 - DNA, 33 bp, Homo sapien
tgcagccaacatgcagacccttttatggcagat

SEQ ID NO: 880838 - DNA, 33 bp, Homo sapien
tgcagccaacatgcaggcccttttatggcagat

SEQ ID NO: 880839 - DNA, 33 bp, Homo sapien
gtgatctcaggataaaaccccctggcaagacag

SEQ ID NO: 880840 - DNA, 33 bp, Homo sapien
gtgatctcaggataaacccccctggcaagacag

SEQ ID NO: 880841 - DNA, 33 bp, Homo sapien
aatttaatgctctgacagatactttggaagcat

SEQ ID NO: 880842 - DNA, 33 bp, Homo sapien
aatttaatgctctgacggatactttggaagcat

SEQ ID NO: 880843 - DNA, 33 bp, Homo sapien
accttattgtaaccccaggatgctagtaaccct

SEQ ID NO: 880844 - DNA, 33 bp, Homo sapien
accttattgtaaccccgggatgctagtaaccct

SEQ ID NO: 880845 - DNA, 33 bp, Homo sapien
caggtctctcttctataaagccaggacaatgat

SEQ ID NO: 880846 - DNA, 33 bp, Homo sapien
caggtctctcttctatgaagccaggacaatgat

SEQ ID NO: 880847 - DNA, 33 bp, Homo sapien
ttatgtagccaaactgaattcaaatccgggggc

SEQ ID NO: 880848 - DNA, 33 bp, Homo sapien
ttatgtagccaaactggattcaaatccgggggc

SEQ ID NO: 880849 - DNA, 33 bp, Homo sapien
ccctgccaagcttcacactgttttgagaaagac

SEQ ID NO: 880850 - DNA, 33 bp, Homo sapien
ccctgccaagcttcacgctgttttgagaaagac

SEQ ID NO: 880851 - DNA, 33 bp, Homo sapien
ctgtcatcacattatcgctgcaattttccctgc

SEQ ID NO: 880852 - DNA, 33 bp, Homo sapien
ctgtcatcacattatctctgcaattttccctgc

SEQ ID NO: 880853 - DNA, 33 bp, Homo sapien
gaccacacagagagacaagctgggtgtttctta

SEQ ID NO: 880854 - DNA, 33 bp, Homo sapien
gaccacacagagagacgagctgggtgtttctta

SEQ ID NO: 880855 - DNA, 33 bp, Homo sapien
ggataatgttcccctccgagagtctccagggtg

SEQ ID NO: 880856 - DNA, 33 bp, Homo sapien
ggataatgttcccctctgagagtctccagggtg

SEQ ID NO: 880857 - DNA, 33 bp, Homo sapien
ttgccttaaatataaagagtcaaagccttggcc

SEQ ID NO: 880858 - DNA, 33 bp, Homo sapien
ttgccttaaatataaatagtcaaagccttggcc

SEQ ID NO: 880859 - DNA, 33 bp, Homo sapien
tatagttggagtctcaaaatgctgcctaggctg

SEQ ID NO: 880860 - DNA, 33 bp, Homo sapien
tatagttggagtctcacaatgctgcctaggctg

SEQ ID NO: 880861 - DNA, 33 bp, Homo sapien
ccttgtgtaccagacccaggggaggatgctctt

SEQ ID NO: 880862 - DNA, 33 bp, Homo sapien
ccttgtgtaccagacctaggggaggatgctctt

SEQ ID NO: 880863 - DNA, 33 bp, Homo sapien
agtactgtcctgacccagaaagcattatccaag

SEQ ID NO: 880864 - DNA, 33 bp, Homo sapien
agtactgtcctgacccggaaagcattatccaag

SEQ ID NO: 880865 - DNA, 33 bp, Homo sapien
aggtgagagcttttcaatactgctgcttacgct

SEQ ID NO: 880866 - DNA, 33 bp, Homo sapien
aggtgagagcttttcattactgctgcttacgct

SEQ ID NO: 880867 - DNA, 33 bp, Homo sapien
tctaggcagcatttgaaccaggccttgaataac

SEQ ID NO: 880868 - DNA, 33 bp, Homo sapien
tctaggcagcatttgagccaggccttgaataac

SEQ ID NO: 880869 - DNA, 33 bp, Homo sapien
tctgccttccagccgacgcaggagctgttagtg

SEQ ID NO: 880870 - DNA, 33 bp, Homo sapien
tctgccttccagccgatgcaggagctgttagtg

SEQ ID NO: 880871 - DNA, 33 bp, Homo sapien
ctgacaggtcaggacacagactttggtggcaac

SEQ ID NO: 880872 - DNA, 33 bp, Homo sapien
ctgacaggtcaggacatagactttggtggcaac

SEQ ID NO: 880873 - DNA, 33 bp, Homo sapien
ctgaaattgcagcctcactctgaccatctgggt

SEQ ID NO: 880874 - DNA, 33 bp, Homo sapien
ctgaaattgcagcctcgctctgaccatctgggt

SEQ ID NO: 880875 - DNA, 33 bp, Homo sapien
attaggttttgcttcacctgtgttttttttctc

SEQ ID NO: 880876 - DNA, 33 bp, Homo sapien
attaggttttgcttcatctgtgttttttttctc

SEQ ID NO: 880877 - DNA, 33 bp, Homo sapien
cagcaggattccattacaggttttgtgcaatga

SEQ ID NO: 880878 - DNA, 33 bp, Homo sapien
cagcaggattccattataggttttgtgcaatga

SEQ ID NO: 880879 - DNA, 33 bp, Homo sapien
gaagacttttgctcctaaagggcaaggggaagc

SEQ ID NO: 880880 - DNA, 33 bp, Homo sapien
gaagacttttgctcctgaagggcaaggggaagc

SEQ ID NO: 880881 - DNA, 33 bp, Homo sapien
gaatgttgttgacagcaaagcatgttatgtctc

SEQ ID NO: 880882 - DNA, 33 bp, Homo sapien
gaatgttgttgacagcgaagcatgttatgtctc

SEQ ID NO: 880883 - DNA, 33 bp, Homo sapien
aaaaattaggaaactgaagcatactaaatctag

SEQ ID NO: 880884 - DNA, 33 bp, Homo sapien
aaaaattaggaaactggagcatactaaatctag

SEQ ID NO: 880885 - DNA, 33 bp, Homo sapien
gtcaacaatcgggtacactgtgtctaatttaag

SEQ ID NO: 880886 - DNA, 33 bp, Homo sapien
gtcaacaatcgggtacgctgtgtctaatttaag

SEQ ID NO: 880887 - DNA, 33 bp, Homo sapien
ctgttggaactacttaactttaccatcgtagtg

SEQ ID NO: 880888 - DNA, 33 bp, Homo sapien
ctgttggaactacttacctttaccatcgtagtg

SEQ ID NO: 880889 - DNA, 33 bp, Homo sapien
agaccagtttcttggacggccagctagagatga

SEQ ID NO: 880890 - DNA, 33 bp, Homo sapien
agaccagtttcttggatggccagctagagatga

SEQ ID NO: 880891 - DNA, 33 bp, Homo sapien
actggaatccagacaaggagcctgagagatgat

SEQ ID NO: 880892 - DNA, 33 bp, Homo sapien
actggaatccagacaatgagcctgagagatgat

SEQ ID NO: 880893 - DNA, 33 bp, Homo sapien
agagcagacagtggcccagcacatcagcacaac

SEQ ID NO: 880894 - DNA, 33 bp, Homo sapien
agagcagacagtggcctagcacatcagcacaac

SEQ ID NO: 880895 - DNA, 33 bp, Homo sapien
atgtagtggctgctcacgctcaacaaacggttc

SEQ ID NO: 880896 - DNA, 33 bp, Homo sapien
atgtagtggctgctcatgctcaacaaacggttc

SEQ ID NO: 880897 - DNA, 33 bp, Homo sapien
caaggtccctcctagactatgattctgttcctt

SEQ ID NO: 880898 - DNA, 33 bp, Homo sapien
caaggtccctcctagagtatgattctgttcctt

SEQ ID NO: 880899 - DNA, 33 bp, Homo sapien
gaaaaatcaaatcaacagcagagtgaaatgcaa

SEQ ID NO: 880900 - DNA, 33 bp, Homo sapien
gaaaaatcaaatcaacggcagagtgaaatgcaa

SEQ ID NO: 880901 - DNA, 33 bp, Homo sapien
aaaactacccaaatgaatatgtctttgatgtta

SEQ ID NO: 880902 - DNA, 33 bp, Homo sapien
aaaactacccaaatgagtatgtctttgatgtta

SEQ ID NO: 880903 - DNA, 33 bp, Homo sapien
tttttttatttgtaagcagatggacatgagaaa

SEQ ID NO: 880904 - DNA, 33 bp, Homo sapien
tttttttatttgtaagtagatggacatgagaaa

SEQ ID NO: 880905 - DNA, 33 bp, Homo sapien
cattgtactccttgtcacaattctctcagtcct

SEQ ID NO: 880906 - DNA, 33 bp, Homo sapien
cattgtactccttgtcgcaattctctcagtcct

SEQ ID NO: 880907 - DNA, 33 bp, Homo sapien
aactcgatcccaagcaacaatggtctcagatat

SEQ ID NO: 880908 - DNA, 33 bp, Homo sapien
aactcgatcccaagcagcaatggtctcagatat

SEQ ID NO: 880909 - DNA, 33 bp, Homo sapien
tgacagcatgttacaacaggaattttggactgg

SEQ ID NO: 880910 - DNA, 33 bp, Homo sapien
tgacagcatgttacaataggaattttggactgg

SEQ ID NO: 880911 - DNA, 33 bp, Homo sapien
aagtgattccacaatacacacgtcaaaatctat

SEQ ID NO: 880912 - DNA, 33 bp, Homo sapien
aagtgattccacaatatacacgtcaaaatctat

SEQ ID NO: 880913 - DNA, 33 bp, Homo sapien
taacatagagttcctcaatgaaataatggcatc

SEQ ID NO: 880914 - DNA, 33 bp, Homo sapien
taacatagagttcctcgatgaaataatggcatc

SEQ ID NO: 880915 - DNA, 33 bp, Homo sapien
tcctgagagcttatccagaagctgtttcaggtg

SEQ ID NO: 880916 - DNA, 33 bp, Homo sapien
tcctgagagcttatccggaagctgtttcaggtg

SEQ ID NO: 880917 - DNA, 33 bp, Homo sapien
gactaactttaagtgacgtaagcaaaggtatca

SEQ ID NO: 880918 - DNA, 33 bp, Homo sapien
gactaactttaagtgatgtaagcaaaggtatca

SEQ ID NO: 880919 - DNA, 33 bp, Homo sapien
ctgtggggtgaaagccacagctatagagcttca

SEQ ID NO: 880920 - DNA, 33 bp, Homo sapien
ctgtggggtgaaagccgcagctatagagcttca

SEQ ID NO: 880921 - DNA, 33 bp, Homo sapien
ggtgctggatgtccctcaatattcttccgcctc

SEQ ID NO: 880922 - DNA, 33 bp, Homo sapien
ggtgctggatgtccctgaatattcttccgcctc

SEQ ID NO: 880923 - DNA, 33 bp, Homo sapien
ttaggaagtaaacagacatggagattaaaatgg

SEQ ID NO: 880924 - DNA, 33 bp, Homo sapien
ttaggaagtaaacagatatggagattaaaatgg

SEQ ID NO: 880925 - DNA, 33 bp, Homo sapien
gaactcatacagaatacacatggcttctttcct

SEQ ID NO: 880926 - DNA, 33 bp, Homo sapien
gaactcatacagaatatacatggcttctttcct

SEQ ID NO: 880927 - DNA, 33 bp, Homo sapien
tgtatttgattaaaacaataagaggagcaacag

SEQ ID NO: 880928 - DNA, 33 bp, Homo sapien
tgtatttgattaaaaccataagaggagcaacag

SEQ ID NO: 880929 - DNA, 33 bp, Homo sapien
gcagtacatagccaccaaattgtttatctcccc

SEQ ID NO: 880930 - DNA, 33 bp, Homo sapien
gcagtacatagccaccgaattgtttatctcccc

SEQ ID NO: 880931 - DNA, 33 bp, Homo sapien
gtgggagttgtgaggacagttgattccatcact

SEQ ID NO: 880932 - DNA, 33 bp, Homo sapien
gtgggagttgtgaggagagttgattccatcact

SEQ ID NO: 880933 - DNA, 33 bp, Homo sapien
attcaaagaggagaaaacaaactgagtaatttc

SEQ ID NO: 880934 - DNA, 33 bp, Homo sapien
attcaaagaggagaaatcaaactgagtaatttc

SEQ ID NO: 880935 - DNA, 33 bp, Homo sapien
ggtcctgtaacaatcacaaatcgtcctcaactt

SEQ ID NO: 880936 - DNA, 33 bp, Homo sapien
ggtcctgtaacaatcataaatcgtcctcaactt

SEQ ID NO: 880937 - DNA, 33 bp, Homo sapien; identical to SEQ ID NO: 880935

SEQ ID NO: 880938 - DNA, 33 bp, Homo sapien; identical to SEQ ID NO: 880936

SEQ ID NO: 880939 - DNA, 33 bp, Homo sapien
ttactacagttctaaaatgttaggaatttgttt

SEQ ID NO: 880940 - DNA, 33 bp, Homo sapien
ttactacagttctaaagtgttaggaatttgttt

SEQ ID NO: 880941 - DNA, 33 bp, Homo sapien
tgtagcggacctagaaaataccagagtcatccc

SEQ ID NO: 880942 - DNA, 33 bp, Homo sapien
tgtagcggacctagaatataccagagtcatccc

SEQ ID NO: 880943 - DNA, 33 bp, Homo sapien; identical to SEQ ID NO: 880941

SEQ ID NO: 880944 - DNA, 33 bp, Homo sapien; identical to SEQ ID NO: 880942

SEQ ID NO: 880945 - DNA, 33 bp, Homo sapien
gtaccagtggcctgaaaggatagaggttcccag

SEQ ID NO: 880946 - DNA, 33 bp, Homo sapien
gtaccagtggcctgaagggatagaggttcccag

SEQ ID NO: 880947 - DNA, 33 bp, Homo sapien
agtcagaatgacgaaccaccaaacacttagatt

SEQ ID NO: 880948 - DNA, 33 bp, Homo sapien
agtcagaatgacgaacgaccaaacacttagatt

SEQ ID NO: 880949 - DNA, 33 bp, Homo sapien
tgagacattttgctacaccatctgaatctgaca

SEQ ID NO: 880950 - DNA, 33 bp, Homo sapien
tgagacattttgctacgccatctgaatctgaca

SEQ ID NO: 880951 - DNA, 33 bp, Homo sapien
ccctgaagaaacagtgaaatataaaattaagcg

SEQ ID NO: 880952 - DNA, 33 bp, Homo sapien
ccctgaagaaacagtggaatataaaattaagcg

SEQ ID NO: 880953 - DNA, 33 bp, Homo sapien; identical to SEQ ID NO: 880951

SEQ ID NO: 880954 - DNA, 33 bp, Homo sapien; identical to SEQ ID NO: 880952

SEQ ID NO: 880955 - DNA, 33 bp, Homo sapien
ggtgagttgtgaagcccatcaccctggaaggtt

SEQ ID NO: 880956 - DNA, 33 bp, Homo sapien
ggtgagttgtgaagccgatcaccctggaaggtt

SEQ ID NO: 880957 - DNA, 33 bp, Homo sapien
ttgctctaggatttgcaatatccctttgaaccc

SEQ ID NO: 880958 - DNA, 33 bp, Homo sapien
ttgctctaggatttgccatatccctttgaaccc

SEQ ID NO: 880959 - DNA, 33 bp, Homo sapien
ctctcttcctggcaacccgtattccttcagacc

SEQ ID NO: 880960 - DNA, 33 bp, Homo sapien
ctctcttcctggcaacgcgtattccttcagacc

SEQ ID NO: 880961 - DNA, 33 bp, Homo sapien
agaacatgtgtttgtacgccgatgacaagtatc

SEQ ID NO: 880962 - DNA, 33 bp, Homo sapien
agaacatgtgtttgtatgccgatgacaagtatc

SEQ ID NO: 880963 - DNA, 33 bp, Homo sapien; identical to SEQ ID NO: 880961

SEQ ID NO: 880964 - DNA, 33 bp, Homo sapien; identical to SEQ ID NO: 880962

SEQ ID NO: 880965 - DNA, 33 bp, Homo sapien
cagaatgcatcagccaatgcctgttcaataatc

SEQ ID NO: 880966 - DNA, 33 bp, Homo sapien
cagaatgcatcagccagtgcctgttcaataatc

SEQ ID NO: 880967 - DNA, 33 bp, Homo sapien; identical to SEQ ID NO: 880965

SEQ ID NO: 880968 - DNA, 33 bp, Homo sapien; identical to SEQ ID NO: 880966

SEQ ID NO: 880969 - DNA, 33 bp, Homo sapien
gagctatagaatttacccaagcacaactcttcc

SEQ ID NO: 880970 - DNA, 33 bp, Homo sapien
gagctatagaatttactcaagcacaactcttcc

SEQ ID NO: 880971 - DNA, 33 bp, Homo sapien
aataagttcacagtgacctacatcctagtttcc

SEQ ID NO: 880972 - DNA, 33 bp, Homo sapien
aataagttcacagtgatctacatcctagtttcc

SEQ ID NO: 880973 - DNA, 33 bp, Homo sapien
agtggcagagtcagaacgcttttctagggctcc

SEQ ID NO: 880974 - DNA, 33 bp, Homo sapien
agtggcagagtcagaatgcttttctagggctcc

SEQ ID NO: 880975 - DNA, 33 bp, Homo sapien
cttgcccatgtgccttcaagacccattatgcag

SEQ ID NO: 880976 - DNA, 33 bp, Homo sapien
cttgcccatgtgccttgaagacccattatgcag

SEQ ID NO: 880977 - DNA, 33 bp, Homo sapien
gaaatcagtgaagtaaatgcccatattagtcac

SEQ ID NO: 880978 - DNA, 33 bp, Homo sapien
gaaatcagtgaagtaagtgcccatattagtcac

SEQ ID NO: 880979 - DNA, 33 bp, Homo sapien
taaacttgccgaggacccttaccacggcagagg

SEQ ID NO: 880980 - DNA, 33 bp, Homo sapien
taaacttgccgaggactcttaccacggcagagg

SEQ ID NO: 880981 - DNA, 33 bp, Homo sapien; identical to SEQ ID NO: 880979

SEQ ID NO: 880982 - DNA, 33 bp, Homo sapien; identical to SEQ ID NO: 880980

SEQ ID NO: 880983 - DNA, 33 bp, Homo sapien
gttgagtatcacagaacgttttaagtggatact

SEQ ID NO: 880984 - DNA, 33 bp, Homo sapien
gttgagtatcacagaatgttttaagtggatact

SEQ ID NO: 880985 - DNA, 33 bp, Homo sapien
tacacagtagaaaatccaggtataactctgact

SEQ ID NO: 880986 - DNA, 33 bp, Homo sapien
tacacagtagaaaatcgaggtataactctgact

SEQ ID NO: 880987 - DNA, 33 bp, Homo sapien
taattcaaaataaggcactttctacctgaaaga

SEQ ID NO: 880988 - DNA, 33 bp, Homo sapien
taattcaaaataaggcgctttctacctgaaaga

SEQ ID NO: 880989 - DNA, 33 bp, Homo sapien; identical to SEQ ID NO: 880987

SEQ ID NO: 880990 - DNA, 33 bp, Homo sapien; identical to SEQ ID NO: 880988

SEQ ID NO: 880991 - DNA, 33 bp, Homo sapien
tgaagtaagcatatcaagttagaactctcatca

SEQ ID NO: 880992 - DNA, 33 bp, Homo sapien
tgaagtaagcatatcaggttagaactctcatca

SEQ ID NO: 880993 - DNA, 33 bp, Homo sapien; identical to SEQ ID NO: 880991

SEQ ID NO: 880994 - DNA, 33 bp, Homo sapien; identical to SEQ ID NO: 880992

SEQ ID NO: 880995 - DNA, 33 bp, Homo sapien
tgggggaatggataaaagtgagtaacaagcact

SEQ ID NO: 880996 - DNA, 33 bp, Homo sapien
tgggggaatggataaaggtgagtaacaagcact

SEQ ID NO: 880997 - DNA, 33 bp, Homo sapien
ccatctggaaaattgacgtaagcaaattccagt

SEQ ID NO: 880998 - DNA, 33 bp, Homo sapien
ccatctggaaaattgatgtaagcaaattccagt

SEQ ID NO: 880999 - DNA, 33 bp, Homo sapien
aatctgaatggacaagaaagattttagtagcac

SEQ ID NO: 881000 - DNA, 33 bp, Homo sapien
aatctgaatggacaagcaagattttagtagcac

SEQ ID NO: 881001 - DNA, 33 bp, Homo sapien
tgcagcgggggatgtcacaaagttcccagcgct

SEQ ID NO: 881002 - DNA, 33 bp, Homo sapien
tgcagcgggggatgtcgcaaagttcccagcgct

SEQ ID NO: 881003 - DNA, 33 bp, Homo sapien
tgaaatcaatttagtaccatctatgcctgtgag

SEQ ID NO: 881004 - DNA, 33 bp, Homo sapien
tgaaatcaatttagtagcatctatgcctgtgag

SEQ ID NO: 881005 - DNA, 33 bp, Homo sapien
ggacttacttgcagggaaagttttctggtgtcc

SEQ ID NO: 881006 - DNA, 33 bp, Homo sapien
ggacttacttgcaggggaagttttctggtgtcc

SEQ ID NO: 881007 - DNA, 33 bp, Homo sapien
ctctatctgttctttcacacccaggttttaaat

SEQ ID NO: 881008 - DNA, 33 bp, Homo sapien
ctctatctgttctttcccacccaggttttaaat

SEQ ID NO: 881009 - DNA, 33 bp, Homo sapien
tactgtttttgtcataaattgcttcatgcttct

SEQ ID NO: 881010 - DNA, 33 bp, Homo sapien
tactgtttttgtcatagattgcttcatgcttct

SEQ ID NO: 881011 - DNA, 33 bp, Homo sapien
cttacagtaaaaatcaaagacatacgcatttgg

SEQ ID NO: 881012 - DNA, 33 bp, Homo sapien
cttacagtaaaaatcagagacatacgcatttgg

SEQ ID NO: 881013 - DNA, 33 bp, Homo sapien
ttttctgttcatctaacggcctctttcgctgtt

SEQ ID NO: 881014 - DNA, 33 bp, Homo sapien
ttttctgttcatctaatggcctctttcgctgtt

SEQ ID NO: 881015 - DNA, 33 bp, Homo sapien
tcttattttcatgatacgtcattttccacactt

SEQ ID NO: 881016 - DNA, 33 bp, Homo sapien
tcttattttcatgatatgtcattttccacactt

SEQ ID NO: 881017 - DNA, 33 bp, Homo sapien
cagggtggctttgatacgtcttgcagaaacaaa

SEQ ID NO: 881018 - DNA, 33 bp, Homo sapien
cagggtggctttgatatgtcttgcagaaacaaa

SEQ ID NO: 881019 - DNA, 33 bp, Homo sapien
ggctggacatctacacacttggacgctgggatg

SEQ ID NO: 881020 - DNA, 33 bp, Homo sapien
ggctggacatctacacgcttggacgctgggatg

SEQ ID NO: 881021 - DNA, 33 bp, Homo sapien
aggcatcagggggctaagctagaatataattgg

SEQ ID NO: 881022 - DNA, 33 bp, Homo sapien
aggcatcagggggctacgctagaatataattgg

SEQ ID NO: 881023 - DNA, 33 bp, Homo sapien
gctgggtgtcctacaacgtaactcagtgctgac

SEQ ID NO: 881024 - DNA, 33 bp, Homo sapien
gctgggtgtcctacaatgtaactcagtgctgac

SEQ ID NO: 881025 - DNA, 33 bp, Homo sapien
cacagtgtcatatgaaggggaggacaacactgc

SEQ ID NO: 881026 - DNA, 33 bp, Homo sapien
cacagtgtcatatgaatgggaggacaacactgc

SEQ ID NO: 881027 - DNA, 33 bp, Homo sapien
aggggcacaggaaggacggctttagagcattca

SEQ ID NO: 881028 - DNA, 33 bp, Homo sapien
aggggcacaggaaggatggctttagagcattca

SEQ ID NO: 881029 - DNA, 33 bp, Homo sapien
taactcaaagtccctcaatggagtcagttccag

SEQ ID NO: 881030 - DNA, 33 bp, Homo sapien
taactcaaagtccctcgatggagtcagttccag

SEQ ID NO: 881031 - DNA, 33 bp, Homo sapien
caaattatgtggtcgccgaccggaccgaatgtt

SEQ ID NO: 881032 - DNA, 33 bp, Homo sapien
caaattatgtggtcgctgaccggaccgaatgtt

SEQ ID NO: 881033 - DNA, 33 bp, Homo sapien
ttctctgctgtaagataactgttgcattgttaa

SEQ ID NO: 881034 - DNA, 33 bp, Homo sapien
ttctctgctgtaagatgactgttgcattgttaa

SEQ ID NO: 881035 - DNA, 33 bp, Homo sapien
tgctgtggtcctgagactattcgggacattttt

SEQ ID NO: 881036 - DNA, 33 bp, Homo sapien
tgctgtggtcctgagattattcgggacattttt

SEQ ID NO: 881037 - DNA, 33 bp, Homo sapien
ttgtgcatcactaagaccgtttttgactttaaa

SEQ ID NO: 881038 - DNA, 33 bp, Homo sapien
ttgtgcatcactaagatcgtttttgactttaaa

SEQ ID NO: 881039 - DNA, 33 bp, Homo sapien
aaaatgttggaagaacagattcgttgcctattt

SEQ ID NO: 881040 - DNA, 33 bp, Homo sapien
aaaatgttggaagaaccgattcgttgcctattt

SEQ ID NO: 881041 - DNA, 33 bp, Homo sapien
attacaaatctgcaacaagtgtatgaaaatgtg

SEQ ID NO: 881042 - DNA, 33 bp, Homo sapien
attacaaatctgcaacgagtgtatgaaaatgtg

SEQ ID NO: 881043 - DNA, 33 bp, Homo sapien
ctggacattgtttatacgaagaactgtttggac

SEQ ID NO: 881044 - DNA, 33 bp, Homo sapien
ctggacattgtttatatgaagaactgtttggac

SEQ ID NO: 881045 - DNA, 33 bp, Homo sapien
tagattaaattgcaagcatctggacattgttta

SEQ ID NO: 881046 - DNA, 33 bp, Homo sapien
tagattaaattgcaagtatctggacattgttta

SEQ ID NO: 881047 - DNA, 33 bp, Homo sapien
gcatatttgcatgtgtaaaagcttagtaatttg

SEQ ID NO: 881048 - DNA, 33 bp, Homo sapien
gcatatttgcatgtgtgaaagcttagtaatttg

SEQ ID NO: 881049 - DNA, 33 bp, Homo sapien
cctaatgaactaaaaaatgtcataaaataagaa

SEQ ID NO: 881050 - DNA, 33 bp, Homo sapien
cctaatgaactaaaaagtgtcataaaataagaa

SEQ ID NO: 881051 - DNA, 33 bp, Homo sapien
taaaatatgtaaaaagccagctttagtctaaac

SEQ ID NO: 881052 - DNA, 33 bp, Homo sapien
taaaatatgtaaaaagtcagctttagtctaaac

SEQ ID NO: 881053 - DNA, 33 bp, Homo sapien
agataggaatttgagcaagataaaaaatatcag

SEQ ID NO: 881054 - DNA, 33 bp, Homo sapien
agataggaatttgagcgagataaaaaatatcag

SEQ ID NO: 881055 - DNA, 33 bp, Homo sapien
ctgctattaatattacactgactgctttctctc

SEQ ID NO: 881056 - DNA, 33 bp, Homo sapien
ctgctattaatattactctgactgctttctctc

SEQ ID NO: 881057 - DNA, 33 bp, Homo sapien
agtcaccagtccaaccgcatatttatctgcctt

SEQ ID NO: 881058 - DNA, 33 bp, Homo sapien
agtcaccagtccaacctcatatttatctgcctt

SEQ ID NO: 881059 - DNA, 33 bp, Homo sapien
taatattaaagtgtaaatgagttaattcagtaa

SEQ ID NO: 881060 - DNA, 33 bp, Homo sapien
taatattaaagtgtaagtgagttaattcagtaa

SEQ ID NO: 881061 - DNA, 33 bp, Homo sapien
tatataatgtagctgcaaaataacattttcaga

SEQ ID NO: 881062 - DNA, 33 bp, Homo sapien
tatataatgtagctgctaaataacattttcaga

SEQ ID NO: 881063 - DNA, 33 bp, Homo sapien
taaccatgtactagtacgtcaagcattttgtca

SEQ ID NO: 881064 - DNA, 33 bp, Homo sapien
taaccatgtactagtatgtcaagcattttgtca

SEQ ID NO: 881065 - DNA, 33 bp, Homo sapien
ccgtaaaccaacttaacaggtagacaagattga

SEQ ID NO: 881066 - DNA, 33 bp, Homo sapien
ccgtaaaccaacttaataggtagacaagattga

SEQ ID NO: 881067 - DNA, 33 bp, Homo sapien
aaatatggcctgagaaaggctccgtacttcggt

SEQ ID NO: 881068 - DNA, 33 bp, Homo sapien
aaatatggcctgagaagggctccgtacttcggt

SEQ ID NO: 881069 - DNA, 33 bp, Homo sapien
ctctctcgctcttacaatatcttattctgctgc

SEQ ID NO: 881070 - DNA, 33 bp, Homo sapien
ctctctcgctcttacagtatcttattctgctgc

SEQ ID NO: 881071 - DNA, 33 bp, Homo sapien
ttgtaaagaagatgtcaaatgtggatgtagaga

SEQ ID NO: 881072 - DNA, 33 bp, Homo sapien
ttgtaaagaagatgtcgaatgtggatgtagaga

SEQ ID NO: 881073 - DNA, 33 bp, Homo sapien; identical to SEQ ID NO: 881071

SEQ ID NO: 881074 - DNA, 33 bp, Homo sapien; identical to SEQ ID NO: 881072

SEQ ID NO: 881075 - DNA, 33 bp, Homo sapien
caatggcattacaaaaagaaaagtgctatcaca

SEQ ID NO: 881076 - DNA, 33 bp, Homo sapien
caatggcattacaaaacgaaaagtgctatcaca

SEQ ID NO: 881077 - DNA, 33 bp, Homo sapien
agccctgttgtctgcaatcttattttctacctt

SEQ ID NO: 881078 - DNA, 33 bp, Homo sapien
agccctgttgtctgcattcttattttctacctt

SEQ ID NO: 881079 - DNA, 33 bp, Homo sapien
acatgccaataaaaaaaaacaatagattcatag

SEQ ID NO: 881080 - DNA, 33 bp, Homo sapien
acatgccaataaaaaacaacaatagattcatag

SEQ ID NO: 881081 - DNA, 33 bp, Homo sapien
ggacaagaaataagacaaagatcagaaggacat

SEQ ID NO: 881082 - DNA, 33 bp, Homo sapien
ggacaagaaataagaccaagatcagaaggacat

SEQ ID NO: 881083 - DNA, 33 bp, Homo sapien
aggctaagaagatggaacatttgctgggtatgc

SEQ ID NO: 881084 - DNA, 33 bp, Homo sapien
aggctaagaagatggagcatttgctgggtatgc

SEQ ID NO: 881085 - DNA, 33 bp, Homo sapien
tgtgaaaaggcggggcaagaataccgagaaatt

SEQ ID NO: 881086 - DNA, 33 bp, Homo sapien
tgtgaaaaggcggggcgagaataccgagaaatt

SEQ ID NO: 881087 - DNA, 33 bp, Homo sapien
ataatctgaggattagaacttttcacgcttcta

SEQ ID NO: 881088 - DNA, 33 bp, Homo sapien
ataatctgaggattagcacttttcacgcttcta

SEQ ID NO: 881089 - DNA, 33 bp, Homo sapien
actagatggccttaaaaataaagctagctagaa

SEQ ID NO: 881090 - DNA, 33 bp, Homo sapien
actagatggccttaaagataaagctagctagaa

SEQ ID NO: 881091 - DNA, 33 bp, Homo sapien
agttatctgggactgactatcttcttctctgct

SEQ ID NO: 881092 - DNA, 33 bp, Homo sapien
agttatctgggactgagtatcttcttctctgct

SEQ ID NO: 881093 - DNA, 33 bp, Homo sapien; identical to SEQ ID NO: 881091

SEQ ID NO: 881094 - DNA, 33 bp, Homo sapien; identical to SEQ ID NO: 881092

SEQ ID NO: 881095 - DNA, 33 bp, Homo sapien
ctgccttccttcagcccctttcatctctcacct

SEQ ID NO: 881096 - DNA, 33 bp, Homo sapien
ctgccttccttcagcctctttcatctctcacct

SEQ ID NO: 881097 - DNA, 33 bp, Homo sapien
aagcttccttccacagactgaccttgttttgtg

SEQ ID NO: 881098 - DNA, 33 bp, Homo sapien
aagcttccttccacaggctgaccttgttttgtg

SEQ ID NO: 881099 - DNA, 33 bp, Homo sapien
aagttagagtgcatacaaaaactacacttttac

SEQ ID NO: 881100 - DNA, 33 bp, Homo sapien
aagttagagtgcatacgaaaactacacttttac

SEQ ID NO: 881101 - DNA, 33 bp, Homo sapien
ttaggcttaagaaggaaggcagaaatagctctg

SEQ ID NO: 881102 - DNA, 33 bp, Homo sapien
ttaggcttaagaaggacggcagaaatagctctg

SEQ ID NO: 881103 - DNA, 33 bp, Homo sapien
ttgctcctttctcgtaagtaggtttgcctatct

SEQ ID NO: 881104 - DNA, 33 bp, Homo sapien
ttgctcctttctcgtaggtaggtttgcctatct

SEQ ID NO: 881105 - DNA, 33 bp, Homo sapien
ggattccactctgaagaaaatggagggctgttg

SEQ ID NO: 881106 - DNA, 33 bp, Homo sapien
ggattccactctgaaggaaatggagggctgttg

SEQ ID NO: 881107 - DNA, 33 bp, Homo sapien
cacagcttccacatacacagctgttaaaaacca

SEQ ID NO: 881108 - DNA, 33 bp, Homo sapien
cacagcttccacatacgcagctgttaaaaacca

SEQ ID NO: 881109 - DNA, 33 bp, Homo sapien
attagctcataatccacgctgggctggttagga

SEQ ID NO: 881110 - DNA, 33 bp, Homo sapien
attagctcataatccatgctgggctggttagga

SEQ ID NO: 881111 - DNA, 33 bp, Homo sapien
ctgaccattacattcacagcctcctgcttgtca

SEQ ID NO: 881112 - DNA, 33 bp, Homo sapien
ctgaccattacattcagagcctcctgcttgtca

SEQ ID NO: 881113 - DNA, 33 bp, Homo sapien
ctctcccggttgcccccgctcctctccaggctg

SEQ ID NO: 881114 - DNA, 33 bp, Homo sapien
ctctcccggttgcccctgctcctctccaggctg

SEQ ID NO: 881115 - DNA, 33 bp, Homo sapien
tagtcaaataataaagaccaggactcagcccac

SEQ ID NO: 881116 - DNA, 33 bp, Homo sapien
tagtcaaataataaagcccaggactcagcccac

SEQ ID NO: 881117 - DNA, 33 bp, Homo sapien
catgtgaacaagcatcacaatcagggctaagtg

SEQ ID NO: 881118 - DNA, 33 bp, Homo sapien
catgtgaacaagcatcgcaatcagggctaagtg

SEQ ID NO: 881119 - DNA, 33 bp, Homo sapien
ggtcctctccaatggacgtgaggtttttattgc

SEQ ID NO: 881120 - DNA, 33 bp, Homo sapien
ggtcctctccaatggatgtgaggtttttattgc

SEQ ID NO: 881121 - DNA, 33 bp, Homo sapien
aagtcacaaaggtaaactgttccaaattagttt

SEQ ID NO: 881122 - DNA, 33 bp, Homo sapien
aagtcacaaaggtaaattgttccaaattagttt

SEQ ID NO: 881123 - DNA, 33 bp, Homo sapien
caaagccaatgctcaaactacaaagttcctgtt

SEQ ID NO: 881124 - DNA, 33 bp, Homo sapien
caaagccaatgctcaagctacaaagttcctgtt

SEQ ID NO: 881125 - DNA, 33 bp, Homo sapien
aattacagagctgattcaaaacataaacaagta

SEQ ID NO: 881126 - DNA, 33 bp, Homo sapien
aattacagagctgattgaaaacataaacaagta

SEQ ID NO: 881127 - DNA, 33 bp, Homo sapien
gtggaagattgaaaaactctgtactagttaaac

SEQ ID NO: 881128 - DNA, 33 bp, Homo sapien
gtggaagattgaaaaattctgtactagttaaac

SEQ ID NO: 881129 - DNA, 33 bp, Homo sapien
ggtcttccatcatgctaacctaaagccgttaat

SEQ ID NO: 881130 - DNA, 33 bp, Homo sapien
ggtcttccatcatgctgacctaaagccgttaat

SEQ ID NO: 881131 - DNA, 33 bp, Homo sapien
catgaccggttgtaaactcaggatttcttccca

SEQ ID NO: 881132 - DNA, 33 bp, Homo sapien
catgaccggttgtaaagtcaggatttcttccca

SEQ ID NO: 881133 - DNA, 33 bp, Homo sapien
ttgctctttcatgccactaagtttcacagtggt

SEQ ID NO: 881134 - DNA, 33 bp, Homo sapien
ttgctctttcatgccattaagtttcacagtggt

SEQ ID NO: 881135 - DNA, 33 bp, Homo sapien
gaaactatggaaacacactatagggaacatggt

SEQ ID NO: 881136 - DNA, 33 bp, Homo sapien
gaaactatggaaacacgctatagggaacatggt

SEQ ID NO: 881137 - DNA, 33 bp, Homo sapien
atctaccaaattaaaaaacacataccattcaat

SEQ ID NO: 881138 - DNA, 33 bp, Homo sapien
atctaccaaattaaaacacacataccattcaat

SEQ ID NO: 881139 - DNA, 33 bp, Homo sapien
tacatagagagttgaccagcagaaactggtatc

SEQ ID NO: 881140 - DNA, 33 bp, Homo sapien
tacatagagagttgacgagcagaaactggtatc

SEQ ID NO: 881141 - DNA, 33 bp, Homo sapien
aatatctgaactgacaaggtaccacagattgta

SEQ ID NO: 881142 - DNA, 33 bp, Homo sapien
aatatctgaactgacacggtaccacagattgta

SEQ ID NO: 881143 - DNA, 33 bp, Homo sapien
ggtaccacagattgtacataatgcatattttgc

SEQ ID NO: 881144 - DNA, 33 bp, Homo sapien
ggtaccacagattgtatataatgcatattttgc

SEQ ID NO: 881145 - DNA, 33 bp, Homo sapien
cttttatagtcaaaacactattctccaaagtaa

SEQ ID NO: 881146 - DNA, 33 bp, Homo sapien
cttttatagtcaaaacgctattctccaaagtaa

SEQ ID NO: 881147 - DNA, 33 bp, Homo sapien
ttgctgatcatggttacaaaaatgaggaaaaat

SEQ ID NO: 881148 - DNA, 33 bp, Homo sapien
ttgctgatcatggttataaaaatgaggaaaaat

SEQ ID NO: 881149 - DNA, 33 bp, Homo sapien
gatctagcggctctaacgtaagatcagagttcc

SEQ ID NO: 881150 - DNA, 33 bp, Homo sapien
gatctagcggctctaatgtaagatcagagttcc

SEQ ID NO: 881151 - DNA, 33 bp, Homo sapien
acactatcagatactacggaaaacaagagaatt

SEQ ID NO: 881152 - DNA, 33 bp, Homo sapien
acactatcagatactatggaaaacaagagaatt

SEQ ID NO: 881153 - DNA, 33 bp, Homo sapien
cctttctaaaactaaccagctgtgaatgttggt

SEQ ID NO: 881154 - DNA, 33 bp, Homo sapien
cctttctaaaactaactagctgtgaatgttggt

SEQ ID NO: 881155 - DNA, 33 bp, Homo sapien
gggcctaaggcggacaagtatttagagcttggg

SEQ ID NO: 881156 - DNA, 33 bp, Homo sapien
gggcctaaggcggacacgtatttagagcttggg

SEQ ID NO: 881157 - DNA, 33 bp, Homo sapien
ttcttattgaaaaaaacatctacatgtaccccg

SEQ ID NO: 881158 - DNA, 33 bp, Homo sapien
ttcttattgaaaaaaatatctacatgtaccccg

SEQ ID NO: 881159 - DNA, 33 bp, Homo sapien
acccctttaagatttacgtcatcagccacacca

SEQ ID NO: 881160 - DNA, 33 bp, Homo sapien
acccctttaagatttatgtcatcagccacacca

SEQ ID NO: 881161 - DNA, 33 bp, Homo sapien
gcctcgtgttgaggacggtagacccatgaattg

SEQ ID NO: 881162 - DNA, 33 bp, Homo sapien
gcctcgtgttgaggactgtagacccatgaattg

SEQ ID NO: 881163 - DNA, 33 bp, Homo sapien
gcagcagtatgatgtcactgagcaatgaaatgg

SEQ ID NO: 881164 - DNA, 33 bp, Homo sapien
gcagcagtatgatgtccctgagcaatgaaatgg

SEQ ID NO: 881165 - DNA, 33 bp, Homo sapien
gtacagctcatctccaactttgcagcagtgtta

SEQ ID NO: 881166 - DNA, 33 bp, Homo sapien
gtacagctcatctccatctttgcagcagtgtta

SEQ ID NO: 881167 - DNA, 33 bp, Homo sapien
atacactggcctgctgcatccctcaccccaaca

SEQ ID NO: 881168 - DNA, 33 bp, Homo sapien
atacactggcctgctgtatccctcaccccaaca

SEQ ID NO: 881169 - DNA, 33 bp, Homo sapien
caaatagctaataagcaaaatggatgttcaaat

SEQ ID NO: 881170 - DNA, 33 bp, Homo sapien
caaatagctaataagccaaatggatgttcaaat

SEQ ID NO: 881171 - DNA, 33 bp, Homo sapien
gatactcaggtatgaagaagatactttaggcag

SEQ ID NO: 881172 - DNA, 33 bp, Homo sapien
gatactcaggtatgaataagatactttaggcag

SEQ ID NO: 881173 - DNA, 33 bp, Homo sapien
ctccactacctactaaccaaatatccaaacccc

SEQ ID NO: 881174 - DNA, 33 bp, Homo sapien
ctccactacctactaatcaaatatccaaacccc

SEQ ID NO: 881175 - DNA, 33 bp, Homo sapien
cgaatcactcagcatacaccagtctcgttggct

SEQ ID NO: 881176 - DNA, 33 bp, Homo sapien
cgaatcactcagcatataccagtctcgttggct

SEQ ID NO: 881177 - DNA, 33 bp, Homo sapien
tccccaatgtcgttaaatggaatcgctcagtgt

SEQ ID NO: 881178 - DNA, 33 bp, Homo sapien
tccccaatgtcgttaagtggaatcgctcagtgt

SEQ ID NO: 881179 - DNA, 33 bp, Homo sapien
aaaacaaggtatgggacgcctgataacactaca

SEQ ID NO: 881180 - DNA, 33 bp, Homo sapien
aaaacaaggtatgggatgcctgataacactaca

SEQ ID NO: 881181 - DNA, 33 bp, Homo sapien
agtgaggggagacagcaatattcaaatacgtac

SEQ ID NO: 881182 - DNA, 33 bp, Homo sapien
agtgaggggagacagcgatattcaaatacgtac

SEQ ID NO: 881183 - DNA, 33 bp, Homo sapien
cttcagtttgtcgatacgtttttagagagtgtc

SEQ ID NO: 881184 - DNA, 33 bp, Homo sapien
cttcagtttgtcgatatgtttttagagagtgtc

SEQ ID NO: 881185 - DNA, 33 bp, Homo sapien
gggtggatgtttggaccgaatgaatggtaactt

SEQ ID NO: 881186 - DNA, 33 bp, Homo sapien
gggtggatgtttggactgaatgaatggtaactt

SEQ ID NO: 881187 - DNA, 33 bp, Homo sapien
ctagtctttgagagaacgtgtggattgggtgga

SEQ ID NO: 881188 - DNA, 33 bp, Homo sapien
ctagtctttgagagaatgtgtggattgggtgga

SEQ ID NO: 881189 - DNA, 33 bp, Homo sapien
tctgttcctgaatgtcaccacaaagcagtctgt

SEQ ID NO: 881190 - DNA, 33 bp, Homo sapien
tctgttcctgaatgtcgccacaaagcagtctgt

SEQ ID NO: 881191 - DNA, 33 bp, Homo sapien
gtgacccactaagggacgatctttgaggaaaca

SEQ ID NO: 881192 - DNA, 33 bp, Homo sapien
gtgacccactaagggatgatctttgaggaaaca

SEQ ID NO: 881193 - DNA, 33 bp, Homo sapien
ctttataaaacttcgccgaacatgccctgttaa

SEQ ID NO: 881194 - DNA, 33 bp, Homo sapien
ctttataaaacttcgctgaacatgccctgttaa

SEQ ID NO: 881195 - DNA, 33 bp, Homo sapien
tgctgaaacgtgttgggcactcgatactcgagc

SEQ ID NO: 881196 - DNA, 33 bp, Homo sapien
tgctgaaacgtgttggtcactcgatactcgagc

SEQ ID NO: 881197 - DNA, 33 bp, Homo sapien
gcagtatggacacaggaagtcttcaggagcatc

SEQ ID NO: 881198 - DNA, 33 bp, Homo sapien
gcagtatggacacagggagtcttcaggagcatc

SEQ ID NO: 881199 - DNA, 33 bp, Homo sapien
ggtctggttgggaatacgtggaaccaagattca

SEQ ID NO: 881200 - DNA, 33 bp, Homo sapien
ggtctggttgggaatatgtggaaccaagattca

SEQ ID NO: 881201 - DNA, 33 bp, Homo sapien
caggttgtgcttgccccgccagtgtgggagcag

SEQ ID NO: 881202 - DNA, 33 bp, Homo sapien
caggttgtgcttgccctgccagtgtgggagcag

SEQ ID NO: 881203 - DNA, 33 bp, Homo sapien
ggttctgcagccaggaaggggccacagactaaa

SEQ ID NO: 881204 - DNA, 33 bp, Homo sapien
ggttctgcagccaggagggggccacagactaaa

SEQ ID NO: 881205 - DNA, 33 bp, Homo sapien
gttcttaagccttcaacgatcaaaatgcagagg

SEQ ID NO: 881206 - DNA, 33 bp, Homo sapien
gttcttaagccttcaatgatcaaaatgcagagg

SEQ ID NO: 881207 - DNA, 33 bp, Homo sapien
cctgagcaatccatcccgaccagaagctatcag

SEQ ID NO: 881208 - DNA, 33 bp, Homo sapien
cctgagcaatccatcctgaccagaagctatcag

SEQ ID NO: 881209 - DNA, 33 bp, Homo sapien
aggtgattttcccttaactaaacaacagaaagc

SEQ ID NO: 881210 - DNA, 33 bp, Homo sapien
aggtgattttcccttagctaaacaacagaaagc

SEQ ID NO: 881211 - DNA, 33 bp, Homo sapien
tgccgccttgcagttcgatcagacttctgtgct

SEQ ID NO: 881212 - DNA, 33 bp, Homo sapien
tgccgccttgcagttctatcagacttctgtgct

SEQ ID NO: 881213 - DNA, 33 bp, Homo sapien
cagaagaggaaacgccaaggcataccactggct

SEQ ID NO: 881214 - DNA, 33 bp, Homo sapien
cagaagaggaaacgccgaggcataccactggct

SEQ ID NO: 881215 - DNA, 33 bp, Homo sapien
taataacatcggcatactacttaaccttgctga

SEQ ID NO: 881216 - DNA, 33 bp, Homo sapien
taataacatcggcatattacttaaccttgctga

SEQ ID NO: 881217 - DNA, 33 bp, Homo sapien
actgaacaagacaaaacgtgcctgtgaatagaa

SEQ ID NO: 881218 - DNA, 33 bp, Homo sapien
actgaacaagacaaaatgtgcctgtgaatagaa

SEQ ID NO: 881219 - DNA, 33 bp, Homo sapien
taatttatccatttcaaaattagaaagtacata

SEQ ID NO: 881220 - DNA, 33 bp, Homo sapien
taatttatccatttcagaattagaaagtacata

SEQ ID NO: 881221 - DNA, 33 bp, Homo sapien
gtagtataaaagcaaacgttgcagaacttcatc

SEQ ID NO: 881222 - DNA, 33 bp, Homo sapien
gtagtataaaagcaaatgttgcagaacttcatc

SEQ ID NO: 881223 - DNA, 33 bp, Homo sapien
gaaataaaattacttacgtggactctagaggaa

SEQ ID NO: 881224 - DNA, 33 bp, Homo sapien
gaaataaaattacttatgtggactctagaggaa

SEQ ID NO: 881225 - DNA, 33 bp, Homo sapien
tcatgattctctggcacgactgatcctaaaatg

SEQ ID NO: 881226 - DNA, 33 bp, Homo sapien
tcatgattctctggcatgactgatcctaaaatg

SEQ ID NO: 881227 - DNA, 33 bp, Homo sapien
ttcttatctgcattggaaaaagtccctagccag

SEQ ID NO: 881228 - DNA, 33 bp, Homo sapien
ttcttatctgcattgggaaaagtccctagccag

SEQ ID NO: 881229 - DNA, 33 bp, Homo sapien
cagagatccctccaacaagctccacttccagtg

SEQ ID NO: 881230 - DNA, 33 bp, Homo sapien
cagagatccctccaacgagctccacttccagtg

SEQ ID NO: 881231 - DNA, 33 bp, Homo sapien
ttaactggatctctgaactctgggcaaaaccta

SEQ ID NO: 881232 - DNA, 33 bp, Homo sapien
ttaactggatctctgagctctgggcaaaaccta

SEQ ID NO: 881233 - DNA, 33 bp, Homo sapien
tagtcaagtttatctacgccggcaagcaaaact

SEQ ID NO: 881234 - DNA, 33 bp, Homo sapien
tagtcaagtttatctatgccggcaagcaaaact

SEQ ID NO: 881235 - DNA, 33 bp, Homo sapien
ctcatttaataacaccactatgtgaacaggcaa

SEQ ID NO: 881236 - DNA, 33 bp, Homo sapien
ctcatttaataacaccgctatgtgaacaggcaa

SEQ ID NO: 881237 - DNA, 33 bp, Homo sapien
gaaaggtttagcacaaggcttaatacataatca

SEQ ID NO: 881238 - DNA, 33 bp, Homo sapien
gaaaggtttagcacaatgcttaatacataatca

SEQ ID NO: 881239 - DNA, 33 bp, Homo sapien
cccaagatcagttaccaattgtggcaagcttag

SEQ ID NO: 881240 - DNA, 33 bp, Homo sapien
cccaagatcagttaccgattgtggcaagcttag

SEQ ID NO: 881241 - DNA, 33 bp, Homo sapien
gactctccatatgcccaaaaccatcctcagagc

SEQ ID NO: 881242 - DNA, 33 bp, Homo sapien
gactctccatatgcccgaaaccatcctcagagc

SEQ ID NO: 881243 - DNA, 33 bp, Homo sapien
cttcagtggcttattacatgaggcaagaatatg

SEQ ID NO: 881244 - DNA, 33 bp, Homo sapien
cttcagtggcttattatatgaggcaagaatatg

SEQ ID NO: 881245 - DNA, 33 bp, Homo sapien
agccaacactttttcaatatgtgcccttgagga

SEQ ID NO: 881246 - DNA, 33 bp, Homo sapien
agccaacactttttcagtatgtgcccttgagga

SEQ ID NO: 881247 - DNA, 33 bp, Homo sapien
ctcaaatagccatgaactcctttcacacagact

SEQ ID NO: 881248 - DNA, 33 bp, Homo sapien
ctcaaatagccatgaattcctttcacacagact

SEQ ID NO: 881249 - DNA, 33 bp, Homo sapien
aagacaaaacataagcagagtcagccttcagtc

SEQ ID NO: 881250 - DNA, 33 bp, Homo sapien
aagacaaaacataagcggagtcagccttcagtc

SEQ ID NO: 881251 - DNA, 33 bp, Homo sapien
gaggaaacttccattcacctggcgctatacgtg

SEQ ID NO: 881252 - DNA, 33 bp, Homo sapien
gaggaaacttccattcgcctggcgctatacgtg

SEQ ID NO: 881253 - DNA, 33 bp, Homo sapien
catggaggtatgatcgcatcgtttgtagcatag

SEQ ID NO: 881254 - DNA, 33 bp, Homo sapien
catggaggtatgatcgtatcgtttgtagcatag

SEQ ID NO: 881255 - DNA, 33 bp, Homo sapien
cagcctggaaattatacggacaacatgacaaag

SEQ ID NO: 881256 - DNA, 33 bp, Homo sapien
cagcctggaaattatatggacaacatgacaaag

SEQ ID NO: 881257 - DNA, 33 bp, Homo sapien
ttttaaaaaagaaaaactacctgcgtccaatta

SEQ ID NO: 881258 - DNA, 33 bp, Homo sapien
ttttaaaaaagaaaaattacctgcgtccaatta

SEQ ID NO: 881259 - DNA, 33 bp, Homo sapien
ccacctttgctatctaagacaccctctccttct

SEQ ID NO: 881260 - DNA, 33 bp, Homo sapien
ccacctttgctatctaggacaccctctccttct

SEQ ID NO: 881261 - DNA, 33 bp, Homo sapien
gagtagcaggtacacacgaccgtgccctggtaa

SEQ ID NO: 881262 - DNA, 33 bp, Homo sapien
gagtagcaggtacacatgaccgtgccctggtaa

SEQ ID NO: 881263 - DNA, 33 bp, Homo sapien
agccttctctaggccaatcatcagtgtcacagc

SEQ ID NO: 881264 - DNA, 33 bp, Homo sapien
agccttctctaggccagtcatcagtgtcacagc

SEQ ID NO: 881265 - DNA, 33 bp, Homo sapien
aagattctgggcattacggactttcctttctag

SEQ ID NO: 881266 - DNA, 33 bp, Homo sapien
aagattctgggcattatggactttcctttctag

SEQ ID NO: 881267 - DNA, 33 bp, Homo sapien
ccttgggcttttacaccgagtaacatggggacc

SEQ ID NO: 881268 - DNA, 33 bp, Homo sapien
ccttgggcttttacactgagtaacatggggacc

SEQ ID NO: 881269 - DNA, 33 bp, Homo sapien
tgagcagctggggggacgagactacctgtgaga

SEQ ID NO: 881270 - DNA, 33 bp, Homo sapien
tgagcagctggggggatgagactacctgtgaga

SEQ ID NO: 881271 - DNA, 33 bp, Homo sapien
gctgcagcaggggcccacaatactctgaattag

SEQ ID NO: 881272 - DNA, 33 bp, Homo sapien
gctgcagcaggggcccgcaatactctgaattag

SEQ ID NO: 881273 - DNA, 33 bp, Homo sapien
atgatgcagataaccaggatgaataaatgtcag

SEQ ID NO: 881274 - DNA, 33 bp, Homo sapien
atgatgcagataaccatgatgaataaatgtcag

SEQ ID NO: 881275 - DNA, 33 bp, Homo sapien
tcatgaaaaagttctgaaagggaatagctgtga

SEQ ID NO: 881276 - DNA, 33 bp, Homo sapien
tcatgaaaaagttctggaagggaatagctgtga

SEQ ID NO: 881277 - DNA, 33 bp, Homo sapien
cctgcttcatagatacagcaaaacttttatttg

SEQ ID NO: 881278 - DNA, 33 bp, Homo sapien
cctgcttcatagatacggcaaaacttttatttg

SEQ ID NO: 881279 - DNA, 33 bp, Homo sapien
caaaagatagtggttgcactttctcttctgcgt

SEQ ID NO: 881280 - DNA, 33 bp, Homo sapien
caaaagatagtggttgtactttctcttctgcgt

SEQ ID NO: 881281 - DNA, 33 bp, Homo sapien
gatagaaaggaagtaactaataatgctaggtgt

SEQ ID NO: 881282 - DNA, 33 bp, Homo sapien
gatagaaaggaagtaattaataatgctaggtgt

SEQ ID NO: 881283 - DNA, 33 bp, Homo sapien
tgacctaagccaaccaaaaactagagaatgtca

SEQ ID NO: 881284 - DNA, 33 bp, Homo sapien
tgacctaagccaaccacaaactagagaatgtca

SEQ ID NO: 881285 - DNA, 33 bp, Homo sapien
gaagattggtaaattcactcatagagaaggtgc

SEQ ID NO: 881286 - DNA, 33 bp, Homo sapien
gaagattggtaaattcgctcatagagaaggtgc

SEQ ID NO: 881287 - DNA, 33 bp, Homo sapien
gacacagtctggttgaagaggttctggcttctg

SEQ ID NO: 881288 - DNA, 33 bp, Homo sapien
gacacagtctggttgaggaggttctggcttctg

SEQ ID NO: 881289 - DNA, 33 bp, Homo sapien
ccaccacaagagaagacaatcctgaaaatgtat

SEQ ID NO: 881290 - DNA, 33 bp, Homo sapien
ccaccacaagagaagataatcctgaaaatgtat

SEQ ID NO: 881291 - DNA, 33 bp, Homo sapien
tacccagccctgaaacagtgtaagccacttcct

SEQ ID NO: 881292 - DNA, 33 bp, Homo sapien
tacccagccctgaaaccgtgtaagccacttcct

SEQ ID NO: 881293 - DNA, 33 bp, Homo sapien
tctttgaaaagtttaacgcaatttgaaacatga

SEQ ID NO: 881294 - DNA, 33 bp, Homo sapien
tctttgaaaagtttaatgcaatttgaaacatga

SEQ ID NO: 881295 - DNA, 33 bp, Homo sapien
aacagtacaattcggcaaaataggaaatctaaa

SEQ ID NO: 881296 - DNA, 33 bp, Homo sapien
aacagtacaattcggcgaaataggaaatctaaa

SEQ ID NO: 881297 - DNA, 33 bp, Homo sapien
gatctccgagcgattccatctacactgaactaa

SEQ ID NO: 881298 - DNA, 33 bp, Homo sapien
gatctccgagcgattctatctacactgaactaa

SEQ ID NO: 881299 - DNA, 33 bp, Homo sapien
cacggctgcattctagcaacttcgttgaaaagc

SEQ ID NO: 881300 - DNA, 33 bp, Homo sapien
cacggctgcattctagtaacttcgttgaaaagc

SEQ ID NO: 881301 - DNA, 33 bp, Homo sapien
accacaaagacaggaccgtaaaacatagaccgc

SEQ ID NO: 881302 - DNA, 33 bp, Homo sapien
accacaaagacaggactgtaaaacatagaccgc

SEQ ID NO: 881303 - DNA, 33 bp, Homo sapien
cctctgatcaatctacactgcttgactcggtgg

SEQ ID NO: 881304 - DNA, 33 bp, Homo sapien
cctctgatcaatctacgctgcttgactcggtgg

SEQ ID NO: 881305 - DNA, 33 bp, Homo sapien
ataaagtgataaggggacaaaaggtggatggct

SEQ ID NO: 881306 - DNA, 33 bp, Homo sapien
ataaagtgataaggggtcaaaaggtggatggct

SEQ ID NO: 881307 - DNA, 33 bp, Homo sapien
gcaagcataaaccaagaaattgtaataataata

SEQ ID NO: 881308 - DNA, 33 bp, Homo sapien
gcaagcataaaccaagtaattgtaataataata

SEQ ID NO: 881309 - DNA, 33 bp, Homo sapien
aagaccaaagcagtcccctaattctctaagttt

SEQ ID NO: 881310 - DNA, 33 bp, Homo sapien
aagaccaaagcagtccgctaattctctaagttt

SEQ ID NO: 881311 - DNA, 33 bp, Homo sapien
agaactcctggactccaaagaaccaagcggtct

SEQ ID NO: 881312 - DNA, 33 bp, Homo sapien
agaactcctggactcctaagaaccaagcggtct

SEQ ID NO: 881313 - DNA, 33 bp, Homo sapien
accttgaaaataacagcggttaaagggcaggtg

SEQ ID NO: 881314 - DNA, 33 bp, Homo sapien
accttgaaaataacagtggttaaagggcaggtg

SEQ ID NO: 881315 - DNA, 33 bp, Homo sapien
ggtccttgtggtcaacaaaagcgataggctgcg

SEQ ID NO: 881316 - DNA, 33 bp, Homo sapien
ggtccttgtggtcaacgaaagcgataggctgcg

SEQ ID NO: 881317 - DNA, 33 bp, Homo sapien
acagctcaggtacaacagttcatttgcacttta

SEQ ID NO: 881318 - DNA, 33 bp, Homo sapien
acagctcaggtacaaccgttcatttgcacttta

SEQ ID NO: 881319 - DNA, 33 bp, Homo sapien
agctactcctgaacaacgggcataaagcagctt

SEQ ID NO: 881320 - DNA, 33 bp, Homo sapien
agctactcctgaacaatgggcataaagcagctt

SEQ ID NO: 881321 - DNA, 33 bp, Homo sapien
aatcacctaccacacaacaatcatacggcatac

SEQ ID NO: 881322 - DNA, 33 bp, Homo sapien
aatcacctaccacacagcaatcatacggcatac

SEQ ID NO: 881323 - DNA, 33 bp, Homo sapien
gtaggtgattacttcgcacaatgatgacatttg

SEQ ID NO: 881324 - DNA, 33 bp, Homo sapien
gtaggtgattacttcgtacaatgatgacatttg

SEQ ID NO: 881325 - DNA, 33 bp, Homo sapien
cttttatgttcaaaaaggaggtgcattaagaac

SEQ ID NO: 881326 - DNA, 33 bp, Homo sapien
cttttatgttcaaaaatgaggtgcattaagaac

SEQ ID NO: 881327 - DNA, 33 bp, Homo sapien
ccgtattttcaaaacactgacttgccaaggttc

SEQ ID NO: 881328 - DNA, 33 bp, Homo sapien
ccgtattttcaaaacagtgacttgccaaggttc

SEQ ID NO: 881329 - DNA, 33 bp, Homo sapien
agatccactgggaacaccacgttcatcaatgca

SEQ ID NO: 881330 - DNA, 33 bp, Homo sapien
agatccactgggaacagcacgttcatcaatgca

SEQ ID NO: 881331 - DNA, 33 bp, Homo sapien
tctagaatcgtttaacagtgtagagggcaagaa

SEQ ID NO: 881332 - DNA, 33 bp, Homo sapien
tctagaatcgtttaacggtgtagagggcaagaa

SEQ ID NO: 881333 - DNA, 33 bp, Homo sapien
aaaatgtgggtagtccaaagggaggtgtgttgc

SEQ ID NO: 881334 - DNA, 33 bp, Homo sapien
aaaatgtgggtagtccgaagggaggtgtgttgc

SEQ ID NO: 881335 - DNA, 33 bp, Homo sapien
aagaagatctcattccaaggtactgggtgttag

SEQ ID NO: 881336 - DNA, 33 bp, Homo sapien
aagaagatctcattccgaggtactgggtgttag

SEQ ID NO: 881337 - DNA, 33 bp, Homo sapien
agaccagactaatacaccttaccttgactaatt

SEQ ID NO: 881338 - DNA, 33 bp, Homo sapien
agaccagactaatacatcttaccttgactaatt

SEQ ID NO: 881339 - DNA, 33 bp, Homo sapien
gccagcaggtttgtgacgggttttctgccttga

SEQ ID NO: 881340 - DNA, 33 bp, Homo sapien
gccagcaggtttgtgatgggttttctgccttga

SEQ ID NO: 881341 - DNA, 33 bp, Homo sapien
gaggtttctatcagctaaattatgaatagtata

SEQ ID NO: 881342 - DNA, 33 bp, Homo sapien
gaggtttctatcagctgaattatgaatagtata

SEQ ID NO: 881343 - DNA, 33 bp, Homo sapien
tctgaagcaacatcccaactctggaatccattc

SEQ ID NO: 881344 - DNA, 33 bp, Homo sapien
tctgaagcaacatcccgactctggaatccattc

SEQ ID NO: 881345 - DNA, 33 bp, Homo sapien
catcattagtcctagccgataacactgtgttct

SEQ ID NO: 881346 - DNA, 33 bp, Homo sapien
catcattagtcctagctgataacactgtgttct

SEQ ID NO: 881347 - DNA, 33 bp, Homo sapien
gctcaataatgctaacagtaaaagagtaatatt

SEQ ID NO: 881348 - DNA, 33 bp, Homo sapien
gctcaataatgctaacggtaaaagagtaatatt

SEQ ID NO: 881349 - DNA, 33 bp, Homo sapien
caaggtgacaaaaagcaagagagggttaaggat

SEQ ID NO: 881350 - DNA, 33 bp, Homo sapien
caaggtgacaaaaagcgagagagggttaaggat

SEQ ID NO: 881351 - DNA, 33 bp, Homo sapien
catcaggacaaacggccatcccccaactccagt

SEQ ID NO: 881352 - DNA, 33 bp, Homo sapien
catcaggacaaacggctatcccccaactccagt

SEQ ID NO: 881353 - DNA, 33 bp, Homo sapien
ataagacatgtatagaatcgcttttatgcatct

SEQ ID NO: 881354 - DNA, 33 bp, Homo sapien
ataagacatgtatagagtcgcttttatgcatct

SEQ ID NO: 881355 - DNA, 33 bp, Homo sapien
gatttctcgttggtaccatgcatataatagatg

SEQ ID NO: 881356 - DNA, 33 bp, Homo sapien
gatttctcgttggtactatgcatataatagatg

SEQ ID NO: 881357 - DNA, 33 bp, Homo sapien
ctgtgttttcagataacaggaagggggaaaaca

SEQ ID NO: 881358 - DNA, 33 bp, Homo sapien
ctgtgttttcagataagaggaagggggaaaaca

SEQ ID NO: 881359 - DNA, 33 bp, Homo sapien
aatatatgtacatggagaaaaactcacaagaaa

SEQ ID NO: 881360 - DNA, 33 bp, Homo sapien
aatatatgtacatggataaaaactcacaagaaa

SEQ ID NO: 881361 - DNA, 33 bp, Homo sapien
aaattgagtacactgccattttcagtgcttctt

SEQ ID NO: 881362 - DNA, 33 bp, Homo sapien
aaattgagtacactgcgattttcagtgcttctt

SEQ ID NO: 881363 - DNA, 33 bp, Homo sapien
aatcacataatgttgaactttgcagtcttataa

SEQ ID NO: 881364 - DNA, 33 bp, Homo sapien
aatcacataatgttgagctttgcagtcttataa

SEQ ID NO: 881365 - DNA, 33 bp, Homo sapien
ggtactgctaatacaacgcccaactccattact

SEQ ID NO: 881366 - DNA, 33 bp, Homo sapien
ggtactgctaatacaatgcccaactccattact

SEQ ID NO: 881367 - DNA, 33 bp, Homo sapien
gggtacttcccttctacctcaatcccatcacaa

SEQ ID NO: 881368 - DNA, 33 bp, Homo sapien
gggtacttcccttctatctcaatcccatcacaa

SEQ ID NO: 881369 - DNA, 33 bp, Homo sapien
cattagacacaaaatcacaaaataactcaattg

SEQ ID NO: 881370 - DNA, 33 bp, Homo sapien
cattagacacaaaatcgcaaaataactcaattg

SEQ ID NO: 881371 - DNA, 33 bp, Homo sapien
atgtagcaattactgaagctttgagattttatt

SEQ ID NO: 881372 - DNA, 33 bp, Homo sapien
atgtagcaattactgatgctttgagattttatt

SEQ ID NO: 881373 - DNA, 33 bp, Homo sapien
acagtagacagatcaacacgataaaatacatac

SEQ ID NO: 881374 - DNA, 33 bp, Homo sapien
acagtagacagatcaatacgataaaatacatac

SEQ ID NO: 881375 - DNA, 33 bp, Homo sapien
ttcacgtagcacttgaagtaatatcagcttctg

SEQ ID NO: 881376 - DNA, 33 bp, Homo sapien
ttcacgtagcacttgaggtaatatcagcttctg

SEQ ID NO: 881377 - DNA, 33 bp, Homo sapien
aaactctgagactgcacacaagtgaatggtatt

SEQ ID NO: 881378 - DNA, 33 bp, Homo sapien
aaactctgagactgcagacaagtgaatggtatt

SEQ ID NO: 881379 - DNA, 33 bp, Homo sapien
acttttctctgtcggaatacgagtacgatgttg

SEQ ID NO: 881380 - DNA, 33 bp, Homo sapien
acttttctctgtcggagtacgagtacgatgttg

SEQ ID NO: 881381 - DNA, 33 bp, Homo sapien
tccagaaaatatcttaaatgctcatgtgcatgg

SEQ ID NO: 881382 - DNA, 33 bp, Homo sapien
tccagaaaatatcttatatgctcatgtgcatgg

SEQ ID NO: 881383 - DNA, 33 bp, Homo sapien
ctgcctttcctattcaaacaataccactggata

SEQ ID NO: 881384 - DNA, 33 bp, Homo sapien
ctgcctttcctattcatacaataccactggata

SEQ ID NO: 881385 - DNA, 33 bp, Homo sapien
ggcctggagcaggaaacgtgtaagatgaacctg

SEQ ID NO: 881386 - DNA, 33 bp, Homo sapien
ggcctggagcaggaaatgtgtaagatgaacctg

SEQ ID NO: 881387 - DNA, 33 bp, Homo sapien
aagtcctctcagttctcactttgaaggacaggt

SEQ ID NO: 881388 - DNA, 33 bp, Homo sapien
aagtcctctcagttcttactttgaaggacaggt

SEQ ID NO: 881389 - DNA, 33 bp, Homo sapien
tccacactgacttaacggaaactgatccatctc

SEQ ID NO: 881390 - DNA, 33 bp, Homo sapien
tccacactgacttaactgaaactgatccatctc

SEQ ID NO: 881391 - DNA, 33 bp, Homo sapien
aaggtgagaacagcctaaagctacagtcttcaa

SEQ ID NO: 881392 - DNA, 33 bp, Homo sapien
aaggtgagaacagcctgaagctacagtcttcaa

SEQ ID NO: 881393 - DNA, 33 bp, Homo sapien
atcatcagtctcccaactcctctactgaatcat

SEQ ID NO: 881394 - DNA, 33 bp, Homo sapien
atcatcagtctcccaattcctctactgaatcat

SEQ ID NO: 881395 - DNA, 33 bp, Homo sapien
aaaaggctgccatgaaatacagataacaaacac

SEQ ID NO: 881396 - DNA, 33 bp, Homo sapien
aaaaggctgccatgaagtacagataacaaacac

SEQ ID NO: 881397 - DNA, 33 bp, Homo sapien
aacttaggaatgtctacgaccatcgatccctca

SEQ ID NO: 881398 - DNA, 33 bp, Homo sapien
aacttaggaatgtctatgaccatcgatccctca

SEQ ID NO: 881399 - DNA, 33 bp, Homo sapien
accacacagagtgaaaatgacgtttttgtgatt

SEQ ID NO: 881400 - DNA, 33 bp, Homo sapien
accacacagagtgaaagtgacgtttttgtgatt

SEQ ID NO: 881401 - DNA, 33 bp, Homo sapien
tatatgttcttacacacagttatgactatcaac

SEQ ID NO: 881402 - DNA, 33 bp, Homo sapien
tatatgttcttacacagagttatgactatcaac

SEQ ID NO: 881403 - DNA, 33 bp, Homo sapien
gccctggtataagcaactccagacagttaaatc

SEQ ID NO: 881404 - DNA, 33 bp, Homo sapien
gccctggtataagcaattccagacagttaaatc

SEQ ID NO: 881405 - DNA, 33 bp, Homo sapien
acacataggatattaaagatgttgcatcatact

SEQ ID NO: 881406 - DNA, 33 bp, Homo sapien
acacataggatattaaggatgttgcatcatact

SEQ ID NO: 881407 - DNA, 33 bp, Homo sapien
cttcagaatttgtctacaaacttaacaccacca

SEQ ID NO: 881408 - DNA, 33 bp, Homo sapien
cttcagaatttgtctagaaacttaacaccacca

SEQ ID NO: 881409 - DNA, 33 bp, Homo sapien
gggtcacacctgagacacccgtattttaattcc

SEQ ID NO: 881410 - DNA, 33 bp, Homo sapien
gggtcacacctgagacgcccgtattttaattcc

SEQ ID NO: 881411 - DNA, 33 bp, Homo sapien
caatattagcttgaaaccagcctcaccatatat

SEQ ID NO: 881412 - DNA, 33 bp, Homo sapien
caatattagcttgaaagcagcctcaccatatat

SEQ ID NO: 881413 - DNA, 33 bp, Homo sapien
tggaatccaaacaggaagaaaagcgtgaggccc

SEQ ID NO: 881414 - DNA, 33 bp, Homo sapien
tggaatccaaacaggaggaaaagcgtgaggccc

SEQ ID NO: 881415 - DNA, 33 bp, Homo sapien
atgttggatatgagaaacacctagctaaaaaga

SEQ ID NO: 881416 - DNA, 33 bp, Homo sapien
atgttggatatgagaagcacctagctaaaaaga

SEQ ID NO: 881417 - DNA, 33 bp, Homo sapien
cataaatgagaaaggacgtgaatcaaggaggaa

SEQ ID NO: 881418 - DNA, 33 bp, Homo sapien
cataaatgagaaaggatgtgaatcaaggaggaa

SEQ ID NO: 881419 - DNA, 33 bp, Homo sapien
gtatttctgttgggccacctgtttaatctcgac

SEQ ID NO: 881420 - DNA, 33 bp, Homo sapien
gtatttctgttgggcctcctgtttaatctcgac

SEQ ID NO: 881421 - DNA, 33 bp, Homo sapien
tagagttggctttccacacagtcttaaactttt

SEQ ID NO: 881422 - DNA, 33 bp, Homo sapien
tagagttggctttccatacagtcttaaactttt

SEQ ID NO: 881423 - DNA, 33 bp, Homo sapien
caggctaggaaatgcacgtcagttttgaaagac

SEQ ID NO: 881424 - DNA, 33 bp, Homo sapien
caggctaggaaatgcatgtcagttttgaaagac

SEQ ID NO: 881425 - DNA, 33 bp, Homo sapien
tcagttttgaaagacacgactcatcttgctgtt

SEQ ID NO: 881426 - DNA, 33 bp, Homo sapien
tcagttttgaaagacatgactcatcttgctgtt

SEQ ID NO: 881427 - DNA, 33 bp, Homo sapien
aggtaaactcatggaaatcagttggaattattg

SEQ ID NO: 881428 - DNA, 33 bp, Homo sapien
aggtaaactcatggaagtcagttggaattattg

SEQ ID NO: 881429 - DNA, 33 bp, Homo sapien
atgtggatgtttacagaataaatcaatctctct

SEQ ID NO: 881430 - DNA, 33 bp, Homo sapien
atgtggatgtttacaggataaatcaatctctct

SEQ ID NO: 881431 - DNA, 33 bp, Homo sapien
aatgtatcaatgtcagcagaaaatgcaagtcaa

SEQ ID NO: 881432 - DNA, 33 bp, Homo sapien
aatgtatcaatgtcaggagaaaatgcaagtcaa

SEQ ID NO: 881433 - DNA, 33 bp, Homo sapien
agcccttgtggggaaacggatatgatataatca

SEQ ID NO: 881434 - DNA, 33 bp, Homo sapien
agcccttgtggggaaatggatatgatataatca

SEQ ID NO: 881435 - DNA, 33 bp, Homo sapien
atatgattctaatggaaaagataatgtgatact

SEQ ID NO: 881436 - DNA, 33 bp, Homo sapien
atatgattctaatggagaagataatgtgatact

SEQ ID NO: 881437 - DNA, 33 bp, Homo sapien
taaccataaatccttcactatcccgtacacatc

SEQ ID NO: 881438 - DNA, 33 bp, Homo sapien
taaccataaatccttcgctatcccgtacacatc

SEQ ID NO: 881439 - DNA, 33 bp, Homo sapien
tttaaactgtgaacaaggtccacaataacgaca

SEQ ID NO: 881440 - DNA, 33 bp, Homo sapien
tttaaactgtgaacaatgtccacaataacgaca

SEQ ID NO: 881441 - DNA, 33 bp, Homo sapien
gtaatcattttttagccacttctggtttaaaac

SEQ ID NO: 881442 - DNA, 33 bp, Homo sapien
gtaatcattttttagctacttctggtttaaaac

SEQ ID NO: 881443 - DNA, 33 bp, Homo sapien
gatttcgctccttgacagaatggtttggagaac

SEQ ID NO: 881444 - DNA, 33 bp, Homo sapien
gatttcgctccttgaccgaatggtttggagaac

SEQ ID NO: 881445 - DNA, 33 bp, Homo sapien
ctcagttaggtatagaagatgtggtttatatag

SEQ ID NO: 881446 - DNA, 33 bp, Homo sapien
ctcagttaggtatagatgatgtggtttatatag

SEQ ID NO: 881447 - DNA, 33 bp, Homo sapien
tgctgaggatacagagcagtgctaagtgtgggg

SEQ ID NO: 881448 - DNA, 33 bp, Homo sapien
tgctgaggatacagaggagtgctaagtgtgggg

SEQ ID NO: 881449 - DNA, 33 bp, Homo sapien
aggggcttagaaagaccattcataacttgccaa

SEQ ID NO: 881450 - DNA, 33 bp, Homo sapien
aggggcttagaaagacgattcataacttgccaa

SEQ ID NO: 881451 - DNA, 33 bp, Homo sapien
tgaatacggtagttacaaaacttgaaaggacag

SEQ ID NO: 881452 - DNA, 33 bp, Homo sapien
tgaatacggtagttacgaaacttgaaaggacag

SEQ ID NO: 881453 - DNA, 33 bp, Homo sapien
accattttttccttgtaaatcttcagctgtgtg

SEQ ID NO: 881454 - DNA, 33 bp, Homo sapien
accattttttccttgtgaatcttcagctgtgtg

SEQ ID NO: 881455 - DNA, 33 bp, Homo sapien
aaaagaaaaaaccagacgtgaacagcggcagtg

SEQ ID NO: 881456 - DNA, 33 bp, Homo sapien
aaaagaaaaaaccagatgtgaacagcggcagtg

SEQ ID NO: 881457 - DNA, 33 bp, Homo sapien
gcgcagagcaaaggcaaggtctaaacctgagcc

SEQ ID NO: 881458 - DNA, 33 bp, Homo sapien
gcgcagagcaaaggcagggtctaaacctgagcc

SEQ ID NO: 881459 - DNA, 33 bp, Homo sapien
ctgttgtcatgataatgaataagtctcacaaga

SEQ ID NO: 881460 - DNA, 33 bp, Homo sapien
ctgttgtcatgataattaataagtctcacaaga

SEQ ID NO: 881461 - DNA, 33 bp, Homo sapien
ttgtcttttccaacagcctggatgtctacccac

SEQ ID NO: 881462 - DNA, 33 bp, Homo sapien
ttgtcttttccaacaggctggatgtctacccac

SEQ ID NO: 881463 - DNA, 33 bp, Homo sapien
gggatggaatccaggcaatgcagtcttctcagc

SEQ ID NO: 881464 - DNA, 33 bp, Homo sapien
gggatggaatccaggcgatgcagtcttctcagc

SEQ ID NO: 881465 - DNA, 33 bp, Homo sapien
aaagaagctccatgccacggatgtgtaccccag

SEQ ID NO: 881466 - DNA, 33 bp, Homo sapien
aaagaagctccatgccgcggatgtgtaccccag

SEQ ID NO: 881467 - DNA, 33 bp, Homo sapien
gcattaaaatgttgaacactccgactcatagcc

SEQ ID NO: 881468 - DNA, 33 bp, Homo sapien
gcattaaaatgttgaatactccgactcatagcc

SEQ ID NO: 881469 - DNA, 33 bp, Homo sapien
catcatctccaagttaccttgactcctctcttg

SEQ ID NO: 881470 - DNA, 33 bp, Homo sapien
catcatctccaagttatcttgactcctctcttg

SEQ ID NO: 881471 - DNA, 33 bp, Homo sapien
gttattgagcaccagccatatttatgcattgtg

SEQ ID NO: 881472 - DNA, 33 bp, Homo sapien
gttattgagcaccagctatatttatgcattgtg

SEQ ID NO: 881473 - DNA, 33 bp, Homo sapien
gatcaccgactaactacggtcacataaggtatc

SEQ ID NO: 881474 - DNA, 33 bp, Homo sapien
gatcaccgactaactatggtcacataaggtatc

SEQ ID NO: 881475 - DNA, 33 bp, Homo sapien
cacccccagaagtaaaatacagcatcacagttg

SEQ ID NO: 881476 - DNA, 33 bp, Homo sapien
cacccccagaagtaaattacagcatcacagttg

SEQ ID NO: 881477 - DNA, 33 bp, Homo sapien
ggcacagaaggattgaggtggacaaagagccac

SEQ ID NO: 881478 - DNA, 33 bp, Homo sapien
ggcacagaaggattgatgtggacaaagagccac

SEQ ID NO: 881479 - DNA, 33 bp, Homo sapien
ttcctattagaacatcaaatacttctacagaat

SEQ ID NO: 881480 - DNA, 33 bp, Homo sapien
ttcctattagaacatcgaatacttctacagaat

SEQ ID NO: 881481 - DNA, 33 bp, Homo sapien
aattcacggaaaagcaatgcagcttaaataaga

SEQ ID NO: 881482 - DNA, 33 bp, Homo sapien
aattcacggaaaagcagtgcagcttaaataaga

SEQ ID NO: 881483 - DNA, 33 bp, Homo sapien
ctttaagatcttcatcaacatttgcagagcaac

SEQ ID NO: 881484 - DNA, 33 bp, Homo sapien
ctttaagatcttcatcgacatttgcagagcaac

SEQ ID NO: 881485 - DNA, 33 bp, Homo sapien
tcatttagtagctgtgcacccattatgaaaagt

SEQ ID NO: 881486 - DNA, 33 bp, Homo sapien
tcatttagtagctgtgtacccattatgaaaagt

SEQ ID NO: 881487 - DNA, 33 bp, Homo sapien
tttgcattgaaatctgcaactgtcatcctcatg

SEQ ID NO: 881488 - DNA, 33 bp, Homo sapien
tttgcattgaaatctgtaactgtcatcctcatg

SEQ ID NO: 881489 - DNA, 33 bp, Homo sapien
taatagtgtctttcaaagagcagatcttttcac

SEQ ID NO: 881490 - DNA, 33 bp, Homo sapien
taatagtgtctttcaaggagcagatcttttcac

SEQ ID NO: 881491 - DNA, 33 bp, Homo sapien
aaataacactttgatgcagagcatttatgagcc

SEQ ID NO: 881492 - DNA, 33 bp, Homo sapien
aaataacactttgatgtagagcatttatgagcc

SEQ ID NO: 881493 - DNA, 33 bp, Homo sapien
tgctgggtttttataacgaaaatgtgcacatta

SEQ ID NO: 881494 - DNA, 33 bp, Homo sapien
tgctgggtttttataatgaaaatgtgcacatta

SEQ ID NO: 881495 - DNA, 33 bp, Homo sapien
gagggaaagacaagataagcctggtaaccataa

SEQ ID NO: 881496 - DNA, 33 bp, Homo sapien
gagggaaagacaagatgagcctggtaaccataa

SEQ ID NO: 881497 - DNA, 33 bp, Homo sapien
gaagactgagatgggcactaaacatcattcgcc

SEQ ID NO: 881498 - DNA, 33 bp, Homo sapien
gaagactgagatgggcgctaaacatcattcgcc

SEQ ID NO: 881499 - DNA, 33 bp, Homo sapien
atgggatggattacaaatcagaaattaaactct

SEQ ID NO: 881500 - DNA, 33 bp, Homo sapien
atgggatggattacaagtcagaaattaaactct

SEQ ID NO: 881501 - DNA, 33 bp, Homo sapien
atatcacaatgatgacacacctaacagaaataa

SEQ ID NO: 881502 - DNA, 33 bp, Homo sapien
atatcacaatgatgacgcacctaacagaaataa

SEQ ID NO: 881503 - DNA, 33 bp, Homo sapien
ctctactcttctatgagctctgaagcagaaacc

SEQ ID NO: 881504 - DNA, 33 bp, Homo sapien
ctctactcttctatgatctctgaagcagaaacc

SEQ ID NO: 881505 - DNA, 33 bp, Homo sapien
aaagcgaagtgattcaccgtgtggcttaatcta

SEQ ID NO: 881506 - DNA, 33 bp, Homo sapien
aaagcgaagtgattcatcgtgtggcttaatcta

SEQ ID NO: 881507 - DNA, 33 bp, Homo sapien
tgacaaaacgttaatgcaacaggcctgcccatg

SEQ ID NO: 881508 - DNA, 33 bp, Homo sapien
tgacaaaacgttaatggaacaggcctgcccatg

SEQ ID NO: 881509 - DNA, 33 bp, Homo sapien
ttacaggactatgaagacattacctataatata

SEQ ID NO: 881510 - DNA, 33 bp, Homo sapien
ttacaggactatgaagccattacctataatata

SEQ ID NO: 881511 - DNA, 33 bp, Homo sapien
agaggatgagatgaagaaaatgtattgacttca

SEQ ID NO: 881512 - DNA, 33 bp, Homo sapien
agaggatgagatgaaggaaatgtattgacttca

SEQ ID NO: 881513 - DNA, 33 bp, Homo sapien
tactgagcagagtaccagaatttaatggaattt

SEQ ID NO: 881514 - DNA, 33 bp, Homo sapien
tactgagcagagtaccggaatttaatggaattt

SEQ ID NO: 881515 - DNA, 33 bp, Homo sapien
ttagtgatgggcacaacgtacttattcaaaaat

SEQ ID NO: 881516 - DNA, 33 bp, Homo sapien
ttagtgatgggcacaatgtacttattcaaaaat

SEQ ID NO: 881517 - DNA, 33 bp, Homo sapien
tctctcccagcccttcaaaatgtttcccagctg

SEQ ID NO: 881518 - DNA, 33 bp, Homo sapien
tctctcccagcccttcgaaatgtttcccagctg

SEQ ID NO: 881519 - DNA, 33 bp, Homo sapien
tgcattaaaatctgtaccaggaatcacttctgc

SEQ ID NO: 881520 - DNA, 33 bp, Homo sapien
tgcattaaaatctgtagcaggaatcacttctgc

SEQ ID NO: 881521 - DNA, 33 bp, Homo sapien
tagttctcataacaaaagcaatgcaaacacaga

SEQ ID NO: 881522 - DNA, 33 bp, Homo sapien
tagttctcataacaaacgcaatgcaaacacaga

SEQ ID NO: 881523 - DNA, 33 bp, Homo sapien
aagcaggagactgagagaatttcatgttttcaa

SEQ ID NO: 881524 - DNA, 33 bp, Homo sapien
aagcaggagactgagataatttcatgttttcaa

SEQ ID NO: 881525 - DNA, 33 bp, Homo sapien
ttatactgtttggttccaaagcaggagactgag

SEQ ID NO: 881526 - DNA, 33 bp, Homo sapien
ttatactgtttggttctaaagcaggagactgag

SEQ ID NO: 881527 - DNA, 33 bp, Homo sapien
tatgcatgaagtctcagtaacacaagacatcgc

SEQ ID NO: 881528 - DNA, 33 bp, Homo sapien
tatgcatgaagtctcattaacacaagacatcgc

SEQ ID NO: 881529 - DNA, 33 bp, Homo sapien
tttgtatttaggagagcaatgttcgaaaaccaa

SEQ ID NO: 881530 - DNA, 33 bp, Homo sapien
tttgtatttaggagagtaatgttcgaaaaccaa

SEQ ID NO: 881531 - DNA, 33 bp, Homo sapien
ttatgcaaaaaatatgaaaagaattgacctcca

SEQ ID NO: 881532 - DNA, 33 bp, Homo sapien
ttatgcaaaaaatatggaaagaattgacctcca

SEQ ID NO: 881533 - DNA, 33 bp, Homo sapien
attactatacatacacagtcaacttggatatat

SEQ ID NO: 881534 - DNA, 33 bp, Homo sapien
attactatacatacacggtcaacttggatatat

SEQ ID NO: 881535 - DNA, 33 bp, Homo sapien
ggggcagtttattttacgaggatgaaatgaaag

SEQ ID NO: 881536 - DNA, 33 bp, Homo sapien
ggggcagtttattttatgaggatgaaatgaaag

SEQ ID NO: 881537 - DNA, 33 bp, Homo sapien
ctaggctacgcaaggaacttcccagctggaggg

SEQ ID NO: 881538 - DNA, 33 bp, Homo sapien
ctaggctacgcaaggaccttcccagctggaggg

SEQ ID NO: 881539 - DNA, 33 bp, Homo sapien
ttagtgaacaacatgtaaatgagagcagagaaa

SEQ ID NO: 881540 - DNA, 33 bp, Homo sapien
ttagtgaacaacatgtgaatgagagcagagaaa

SEQ ID NO: 881541 - DNA, 33 bp, Homo sapien
acaatatgtttggggcaatcgagtgcttgatgt

SEQ ID NO: 881542 - DNA, 33 bp, Homo sapien
acaatatgtttggggcgatcgagtgcttgatgt

SEQ ID NO: 881543 - DNA, 33 bp, Homo sapien
tcccctgttgaagataccagctatggtccccca

SEQ ID NO: 881544 - DNA, 33 bp, Homo sapien
tcccctgttgaagatatcagctatggtccccca

SEQ ID NO: 881545 - DNA, 33 bp, Homo sapien
ttgtctccataacatcaatcacttcctatagta

SEQ ID NO: 881546 - DNA, 33 bp, Homo sapien
ttgtctccataacatcgatcacttcctatagta

SEQ ID NO: 881547 - DNA, 33 bp, Homo sapien
cttcctgtcagttaaaacagaatccatccaagg

SEQ ID NO: 881548 - DNA, 33 bp, Homo sapien
cttcctgtcagttaaagcagaatccatccaagg

SEQ ID NO: 881549 - DNA, 33 bp, Homo sapien
ttcctgtcctccaaaacggtacccataggtaag

SEQ ID NO: 881550 - DNA, 33 bp, Homo sapien
ttcctgtcctccaaaatggtacccataggtaag

SEQ ID NO: 881551 - DNA, 33 bp, Homo sapien
atcattttaacaggaaatctgggaaatatatag

SEQ ID NO: 881552 - DNA, 33 bp, Homo sapien
atcattttaacaggaagtctgggaaatatatag

SEQ ID NO: 881553 - DNA, 33 bp, Homo sapien
tgatcacgaatgacaacgctactcctacagcgt

SEQ ID NO: 881554 - DNA, 33 bp, Homo sapien
tgatcacgaatgacaatgctactcctacagcgt

SEQ ID NO: 881555 - DNA, 33 bp, Homo sapien
ttaccacgaagattcaaaccaaaacatgtcagt

SEQ ID NO: 881556 - DNA, 33 bp, Homo sapien
ttaccacgaagattcataccaaaacatgtcagt

SEQ ID NO: 881557 - DNA, 33 bp, Homo sapien
ccttatctgagatgtgaaaagatgtgttaatta

SEQ ID NO: 881558 - DNA, 33 bp, Homo sapien
ccttatctgagatgtggaaagatgtgttaatta

SEQ ID NO: 881559 - DNA, 33 bp, Homo sapien
tttcaagatgatcaacagtgaacttggcgaggg

SEQ ID NO: 881560 - DNA, 33 bp, Homo sapien
tttcaagatgatcaacggtgaacttggcgaggg

SEQ ID NO: 881561 - DNA, 33 bp, Homo sapien
tcatacatagcactcccgagtagattaaagatg

SEQ ID NO: 881562 - DNA, 33 bp, Homo sapien
tcatacatagcactcctgagtagattaaagatg

SEQ ID NO: 881563 - DNA, 33 bp, Homo sapien
ctttacggtagcgaaaatagctgacgcacatat

SEQ ID NO: 881564 - DNA, 33 bp, Homo sapien
ctttacggtagcgaaagtagctgacgcacatat

SEQ ID NO: 881565 - DNA, 33 bp, Homo sapien
ccagtgtctcttaaaactgacataaaacataaa

SEQ ID NO: 881566 - DNA, 33 bp, Homo sapien
ccagtgtctcttaaaattgacataaaacataaa

SEQ ID NO: 881567 - DNA, 33 bp, Homo sapien
tttgaaaactgatcacaagtaagagattttagt

SEQ ID NO: 881568 - DNA, 33 bp, Homo sapien
tttgaaaactgatcacgagtaagagattttagt

SEQ ID NO: 881569 - DNA, 33 bp, Homo sapien
aagtctctgggtcacactagcctttaccatctt

SEQ ID NO: 881570 - DNA, 33 bp, Homo sapien
aagtctctgggtcacattagcctttaccatctt

SEQ ID NO: 881571 - DNA, 33 bp, Homo sapien
tgaagcacctccattcaacagaccctttctttg

SEQ ID NO: 881572 - DNA, 33 bp, Homo sapien
tgaagcacctccattcgacagaccctttctttg

SEQ ID NO: 881573 - DNA, 33 bp, Homo sapien
gatttcccttgttgaaacttatacacacttacc

SEQ ID NO: 881574 - DNA, 33 bp, Homo sapien
gatttcccttgttgaaccttatacacacttacc

SEQ ID NO: 881575 - DNA, 33 bp, Homo sapien
gcatgcaattgtagagactaggacacttggtga

SEQ ID NO: 881576 - DNA, 33 bp, Homo sapien
gcatgcaattgtagagtctaggacacttggtga

SEQ ID NO: 881577 - DNA, 33 bp, Homo sapien
gaggcaacggtgtccaatgagttgttttagaaa

SEQ ID NO: 881578 - DNA, 33 bp, Homo sapien
gaggcaacggtgtccattgagttgttttagaaa

SEQ ID NO: 881579 - DNA, 33 bp, Homo sapien
aggcttgagattacaacgtgaaaactgtttctt

SEQ ID NO: 881580 - DNA, 33 bp, Homo sapien
aggcttgagattacaaggtgaaaactgtttctt

SEQ ID NO: 881581 - DNA, 33 bp, Homo sapien
ctataatgcatttatcactaaagaacattcaat

SEQ ID NO: 881582 - DNA, 33 bp, Homo sapien
ctataatgcatttatctctaaagaacattcaat

SEQ ID NO: 881583 - DNA, 33 bp, Homo sapien
gtgtgctgacctctcaccttgttttattctaaa

SEQ ID NO: 881584 - DNA, 33 bp, Homo sapien
gtgtgctgacctctcatcttgttttattctaaa

SEQ ID NO: 881585 - DNA, 33 bp, Homo sapien
aagttagaataaaacccagttctcttgcttttg

SEQ ID NO: 881586 - DNA, 33 bp, Homo sapien
aagttagaataaaacctagttctcttgcttttg

SEQ ID NO: 881587 - DNA, 33 bp, Homo sapien
atgaggagggaaaaaaatatttggatgcacatg

SEQ ID NO: 881588 - DNA, 33 bp, Homo sapien
atgaggagggaaaaaattatttggatgcacatg

SEQ ID NO: 881589 - DNA, 33 bp, Homo sapien
agccataagccattgaataacttgactaaaatc

SEQ ID NO: 881590 - DNA, 33 bp, Homo sapien
agccataagccattgagtaacttgactaaaatc

SEQ ID NO: 881591 - DNA, 33 bp, Homo sapien
gtggatgtcctacagagctgaaacaaaaaagaa

SEQ ID NO: 881592 - DNA, 33 bp, Homo sapien
gtggatgtcctacagatctgaaacaaaaaagaa

SEQ ID NO: 881593 - DNA, 33 bp, Homo sapien
gggaattatgtgtaaactacaagcgtcggaaaa

SEQ ID NO: 881594 - DNA, 33 bp, Homo sapien
gggaattatgtgtaaagtacaagcgtcggaaaa

SEQ ID NO: 881595 - DNA, 33 bp, Homo sapien
tctattctagaattgacgtgattaccaaggctc

SEQ ID NO: 881596 - DNA, 33 bp, Homo sapien
tctattctagaattgaggtgattaccaaggctc

SEQ ID NO: 881597 - DNA, 33 bp, Homo sapien
cactatgttatcactacgttactgttgcaggaa

SEQ ID NO: 881598 - DNA, 33 bp, Homo sapien
cactatgttatcactatgttactgttgcaggaa

SEQ ID NO: 881599 - DNA, 33 bp, Homo sapien
ccccagctaagttctacgtgctataaatagtga

SEQ ID NO: 881600 - DNA, 33 bp, Homo sapien
ccccagctaagttctatgtgctataaatagtga

SEQ ID NO: 881601 - DNA, 33 bp, Homo sapien
caaattttccatagtaaagcaaaatcactataa

SEQ ID NO: 881602 - DNA, 33 bp, Homo sapien
caaattttccatagtagagcaaaatcactataa

SEQ ID NO: 881603 - DNA, 33 bp, Homo sapien
tggcgtcacccaaagccccatgtcttgtttcct

SEQ ID NO: 881604 - DNA, 33 bp, Homo sapien
tggcgtcacccaaagctccatgtcttgtttcct

SEQ ID NO: 881605 - DNA, 33 bp, Homo sapien
tggcccaaggaagagacgtagtgtactgagtgc

SEQ ID NO: 881606 - DNA, 33 bp, Homo sapien
tggcccaaggaagagatgtagtgtactgagtgc

SEQ ID NO: 881607 - DNA, 33 bp, Homo sapien
tgttaggaataaaatacgagctcatgtcctctg

SEQ ID NO: 881608 - DNA, 33 bp, Homo sapien
tgttaggaataaaatatgagctcatgtcctctg

SEQ ID NO: 881609 - DNA, 33 bp, Homo sapien
gcaaaatattcatcagaccttttgaccacaaat

SEQ ID NO: 881610 - DNA, 33 bp, Homo sapien
gcaaaatattcatcagcccttttgaccacaaat

SEQ ID NO: 881611 - DNA, 33 bp, Homo sapien
atccatgtggttaagcaactcatgacagtaatt

SEQ ID NO: 881612 - DNA, 33 bp, Homo sapien
atccatgtggttaagcgactcatgacagtaatt

SEQ ID NO: 881613 - DNA, 33 bp, Homo sapien
ctctaagaactcagacactacatagcaacaata

SEQ ID NO: 881614 - DNA, 33 bp, Homo sapien
ctctaagaactcagacgctacatagcaacaata

SEQ ID NO: 881615 - DNA, 33 bp, Homo sapien
tggagggactctctcccctagtttactcacagg

SEQ ID NO: 881616 - DNA, 33 bp, Homo sapien
tggagggactctctccgctagtttactcacagg

SEQ ID NO: 881617 - DNA, 33 bp, Homo sapien
aaaagtaagcgatctcaatgtctactaatagag

SEQ ID NO: 881618 - DNA, 33 bp, Homo sapien
aaaagtaagcgatctccatgtctactaatagag

SEQ ID NO: 881619 - DNA, 33 bp, Homo sapien
ctttcctacttataatcagtggtactgaggcag

SEQ ID NO: 881620 - DNA, 33 bp, Homo sapien
ctttcctacttataattagtggtactgaggcag

SEQ ID NO: 881621 - DNA, 33 bp, Homo sapien
ggacgatgacttcctccgagactgcttaaacca

SEQ ID NO: 881622 - DNA, 33 bp, Homo sapien
ggacgatgacttcctctgagactgcttaaacca

SEQ ID NO: 881623 - DNA, 33 bp, Homo sapien
atcttgcccaactttcaatgatgctgaggtcag

SEQ ID NO: 881624 - DNA, 33 bp, Homo sapien
atcttgcccaactttcgatgatgctgaggtcag

SEQ ID NO: 881625 - DNA, 33 bp, Homo sapien
tctcaggaaagcattccactgtatttatggaaa

SEQ ID NO: 881626 - DNA, 33 bp, Homo sapien
tctcaggaaagcattctactgtatttatggaaa

SEQ ID NO: 881627 - DNA, 33 bp, Homo sapien
taaaatgcacgaaataagatgactccatcacac

SEQ ID NO: 881628 - DNA, 33 bp, Homo sapien
taaaatgcacgaaataggatgactccatcacac

SEQ ID NO: 881629 - DNA, 33 bp, Homo sapien
attccttctctgagccagaacaaaagtgacttt

SEQ ID NO: 881630 - DNA, 33 bp, Homo sapien
attccttctctgagccggaacaaaagtgacttt

SEQ ID NO: 881631 - DNA, 33 bp, Homo sapien
acaggtaagccaaagggataccggaattctttc

SEQ ID NO: 881632 - DNA, 33 bp, Homo sapien
acaggtaagccaaaggtataccggaattctttc

SEQ ID NO: 881633 - DNA, 33 bp, Homo sapien
aatagaccttgatgacagagccttctgcctcag

SEQ ID NO: 881634 - DNA, 33 bp, Homo sapien
aatagaccttgatgacggagccttctgcctcag

SEQ ID NO: 881635 - DNA, 33 bp, Homo sapien
atgttatccccttatacgtttgacagcaacatt

SEQ ID NO: 881636 - DNA, 33 bp, Homo sapien
atgttatccccttatatgtttgacagcaacatt

SEQ ID NO: 881637 - DNA, 33 bp, Homo sapien
cattttgcctttcaaagccctagatgtctttcg

SEQ ID NO: 881638 - DNA, 33 bp, Homo sapien
cattttgcctttcaaatccctagatgtctttcg

SEQ ID NO: 881639 - DNA, 33 bp, Homo sapien
tgagctttagtacaaacagcttctaagtttgat

SEQ ID NO: 881640 - DNA, 33 bp, Homo sapien
tgagctttagtacaaatagcttctaagtttgat

SEQ ID NO: 881641 - DNA, 33 bp, Homo sapien
tagagcacgttgcgtcaaatgtgctagccacct

SEQ ID NO: 881642 - DNA, 33 bp, Homo sapien
tagagcacgttgcgtcgaatgtgctagccacct

SEQ ID NO: 881643 - DNA, 33 bp, Homo sapien
acccacaagttgtaaacgatgtccagttatgtg

SEQ ID NO: 881644 - DNA, 33 bp, Homo sapien
acccacaagttgtaaatgatgtccagttatgtg

SEQ ID NO: 881645 - DNA, 33 bp, Homo sapien
atcttaatggcaaagagtctagcttctcaccat

SEQ ID NO: 881646 - DNA, 33 bp, Homo sapien
atcttaatggcaaagattctagcttctcaccat

SEQ ID NO: 881647 - DNA, 33 bp, Homo sapien
agcaccattgtagcataatgagtctcccaccca

SEQ ID NO: 881648 - DNA, 33 bp, Homo sapien
agcaccattgtagcatgatgagtctcccaccca

SEQ ID NO: 881649 - DNA, 33 bp, Homo sapien
aaatttctatgagacaccttttactgtgtgtta

SEQ ID NO: 881650 - DNA, 33 bp, Homo sapien
aaatttctatgagacatcttttactgtgtgtta

SEQ ID NO: 881651 - DNA, 33 bp, Homo sapien
gatcataaacaggtgacgtgtggccaagcgcag

SEQ ID NO: 881652 - DNA, 33 bp, Homo sapien
gatcataaacaggtgaggtgtggccaagcgcag

SEQ ID NO: 881653 - DNA, 33 bp, Homo sapien
gccatgctcgtttcacactcctgacttcaagtg

SEQ ID NO: 881654 - DNA, 33 bp, Homo sapien
gccatgctcgtttcacgctcctgacttcaagtg

SEQ ID NO: 881655 - DNA, 33 bp, Homo sapien
gagacttgttttgaacagtgcctttcaatccat

SEQ ID NO: 881656 - DNA, 33 bp, Homo sapien
gagacttgttttgaacggtgcctttcaatccat

SEQ ID NO: 881657 - DNA, 33 bp, Homo sapien
gggagtccttggtccacgctttgttagcacaac

SEQ ID NO: 881658 - DNA, 33 bp, Homo sapien
gggagtccttggtccatgctttgttagcacaac

SEQ ID NO: 881659 - DNA, 33 bp, Homo sapien
aatacgcgaatacatacaagagttctctgtctt

SEQ ID NO: 881660 - DNA, 33 bp, Homo sapien
aatacgcgaatacatataagagttctctgtctt

SEQ ID NO: 881661 - DNA, 33 bp, Homo sapien
taagtaatatagcttcagaacatcttgactgaa

SEQ ID NO: 881662 - DNA, 33 bp, Homo sapien
taagtaatatagcttcggaacatcttgactgaa

SEQ ID NO: 881663 - DNA, 33 bp, Homo sapien
gaggagaggtaatgatcaggaacagtattcata

SEQ ID NO: 881664 - DNA, 33 bp, Homo sapien
gaggagaggtaatgatgaggaacagtattcata

SEQ ID NO: 881665 - DNA, 33 bp, Homo sapien
agaggaggaaatgcgccatagtttctttttaat

SEQ ID NO: 881666 - DNA, 33 bp, Homo sapien
agaggaggaaatgcgctatagtttctttttaat

SEQ ID NO: 881667 - DNA, 33 bp, Homo sapien
tttctctgaaaaaggaaccaagagcagtgaccg

SEQ ID NO: 881668 - DNA, 33 bp, Homo sapien
tttctctgaaaaaggagccaagagcagtgaccg

SEQ ID NO: 881669 - DNA, 33 bp, Homo sapien
gagaattcttgcccaacctttctgcctctttta

SEQ ID NO: 881670 - DNA, 33 bp, Homo sapien
gagaattcttgcccaatctttctgcctctttta

SEQ ID NO: 881671 - DNA, 33 bp, Homo sapien
ttgttacctccatatgcaagctctcggctgtta

SEQ ID NO: 881672 - DNA, 33 bp, Homo sapien
ttgttacctccatatgtaagctctcggctgtta

SEQ ID NO: 881673 - DNA, 33 bp, Homo sapien
caggctggtggccccaaatgaaacctttgcaac

SEQ ID NO: 881674 - DNA, 33 bp, Homo sapien
caggctggtggccccagatgaaacctttgcaac

SEQ ID NO: 881675 - DNA, 33 bp, Homo sapien
ttcctctaaaagagacaaagcttagtatgtagc

SEQ ID NO: 881676 - DNA, 33 bp, Homo sapien
ttcctctaaaagagacgaagcttagtatgtagc

SEQ ID NO: 881677 - DNA, 33 bp, Homo sapien
accctgaggaaaaaatcacaatgctgggatcca

SEQ ID NO: 881678 - DNA, 33 bp, Homo sapien
accctgaggaaaaaatgacaatgctgggatcca

SEQ ID NO: 881679 - DNA, 33 bp, Homo sapien
ctacccagttctaaacaaacatctcatttgtat

SEQ ID NO: 881680 - DNA, 33 bp, Homo sapien
ctacccagttctaaacgaacatctcatttgtat

SEQ ID NO: 881681 - DNA, 33 bp, Homo sapien
tggagtgatggcataaagaacaaaaagagtaaa

SEQ ID NO: 881682 - DNA, 33 bp, Homo sapien
tggagtgatggcataaggaacaaaaagagtaaa

SEQ ID NO: 881683 - DNA, 33 bp, Homo sapien
agacaccattcaatcacaatctgagtttgactt

SEQ ID NO: 881684 - DNA, 33 bp, Homo sapien
agacaccattcaatcataatctgagtttgactt

SEQ ID NO: 881685 - DNA, 33 bp, Homo sapien
ttttgaggattagaaaagtttagtaacgcagga

SEQ ID NO: 881686 - DNA, 33 bp, Homo sapien
ttttgaggattagaaaggtttagtaacgcagga

SEQ ID NO: 881687 - DNA, 33 bp, Homo sapien
tttaattgcacataaaatagattttcaggagag

SEQ ID NO: 881688 - DNA, 33 bp, Homo sapien
tttaattgcacataaagtagattttcaggagag

SEQ ID NO: 881689 - DNA, 33 bp, Homo sapien
aaattggcacatttccacacggtccccccaaat

SEQ ID NO: 881690 - DNA, 33 bp, Homo sapien
aaattggcacatttccgcacggtccccccaaat

SEQ ID NO: 881691 - DNA, 33 bp, Homo sapien
cgtgaagcaaatattacctaaacacgtctatat

SEQ ID NO: 881692 - DNA, 33 bp, Homo sapien
cgtgaagcaaatattatctaaacacgtctatat

SEQ ID NO: 881693 - DNA, 33 bp, Homo sapien
acttgtcagaactcctcaaattgtacccttcaa

SEQ ID NO: 881694 - DNA, 33 bp, Homo sapien
acttgtcagaactccttaaattgtacccttcaa

SEQ ID NO: 881695 - DNA, 33 bp, Homo sapien
aagtgggtaaggaaaaaaatgaactgagcaatt

SEQ ID NO: 881696 - DNA, 33 bp, Homo sapien
aagtgggtaaggaaaacaatgaactgagcaatt

SEQ ID NO: 881697 - DNA, 33 bp, Homo sapien
gagactccattacagcaaaactagcttctaagc

SEQ ID NO: 881698 - DNA, 33 bp, Homo sapien
gagactccattacagcgaaactagcttctaagc

SEQ ID NO: 881699 - DNA, 33 bp, Homo sapien
cagttcacttcatcaaatcaacaaggagagggt

SEQ ID NO: 881700 - DNA, 33 bp, Homo sapien
cagttcacttcatcaagtcaacaaggagagggt

SEQ ID NO: 881701 - DNA, 33 bp, Homo sapien
atatggtatacaggacacaagagaggcaaaaat

SEQ ID NO: 881702 - DNA, 33 bp, Homo sapien
atatggtatacaggacgcaagagaggcaaaaat

SEQ ID NO: 881703 - DNA, 33 bp, Homo sapien
aagtttattagatttccagtgaatgctcagata

SEQ ID NO: 881704 - DNA, 33 bp, Homo sapien
aagtttattagatttctagtgaatgctcagata

SEQ ID NO: 881705 - DNA, 33 bp, Homo sapien
agggaaaggtacaaataacatcggattatggtt

SEQ ID NO: 881706 - DNA, 33 bp, Homo sapien
agggaaaggtacaaatcacatcggattatggtt

SEQ ID NO: 881707 - DNA, 33 bp, Homo sapien
gttcagttgtatcccacggcttctaacatctga

SEQ ID NO: 881708 - DNA, 33 bp, Homo sapien
gttcagttgtatcccatggcttctaacatctga

SEQ ID NO: 881709 - DNA, 33 bp, Homo sapien
tccctatacatttccaccagagttcctgggtga

SEQ ID NO: 881710 - DNA, 33 bp, Homo sapien
tccctatacatttccatcagagttcctgggtga

SEQ ID NO: 881711 - DNA, 33 bp, Homo sapien
ctgtacaacattagagaaaaatgtggttgagca

SEQ ID NO: 881712 - DNA, 33 bp, Homo sapien
ctgtacaacattagaggaaaatgtggttgagca

SEQ ID NO: 881713 - DNA, 33 bp, Homo sapien
gctttccttttgggaactatggcagtgttctaa

SEQ ID NO: 881714 - DNA, 33 bp, Homo sapien
gctttccttttgggaattatggcagtgttctaa

SEQ ID NO: 881715 - DNA, 33 bp, Homo sapien
cacaactctatgaatacactactaaactgtaca

SEQ ID NO: 881716 - DNA, 33 bp, Homo sapien
cacaactctatgaatatactactaaactgtaca

SEQ ID NO: 881717 - DNA, 33 bp, Homo sapien
tatgtgaagcctaacacgacttctctagacata

SEQ ID NO: 881718 - DNA, 33 bp, Homo sapien
tatgtgaagcctaacatgacttctctagacata

SEQ ID NO: 881719 - DNA, 33 bp, Homo sapien
cactaacagttgaagcaataaattttgttttga

SEQ ID NO: 881720 - DNA, 33 bp, Homo sapien
cactaacagttgaagcgataaattttgttttga

SEQ ID NO: 881721 - DNA, 33 bp, Homo sapien
agacatcagtaacatcaaggacgtttctgcagt

SEQ ID NO: 881722 - DNA, 33 bp, Homo sapien
agacatcagtaacatcgaggacgtttctgcagt

SEQ ID NO: 881723 - DNA, 33 bp, Homo sapien
aaacatagcaggaactcaaatcgcagagtattt

SEQ ID NO: 881724 - DNA, 33 bp, Homo sapien
aaacatagcaggaactgaaatcgcagagtattt

SEQ ID NO: 881725 - DNA, 33 bp, Homo sapien
agtaatagccaatgacaaaacactgcatgtgca

SEQ ID NO: 881726 - DNA, 33 bp, Homo sapien
agtaatagccaatgacgaaacactgcatgtgca

SEQ ID NO: 881727 - DNA, 33 bp, Homo sapien
gcaaaaacattggtagcaacgtttatgtctaaa

SEQ ID NO: 881728 - DNA, 33 bp, Homo sapien
gcaaaaacattggtagtaacgtttatgtctaaa

SEQ ID NO: 881729 - DNA, 33 bp, Homo sapien
tgactttcagacataaatgaaagatcagtaatg

SEQ ID NO: 881730 - DNA, 33 bp, Homo sapien
tgactttcagacataagtgaaagatcagtaatg

SEQ ID NO: 881731 - DNA, 33 bp, Homo sapien
caggcaaattaattcacagcaactttcaaggat

SEQ ID NO: 881732 - DNA, 33 bp, Homo sapien
caggcaaattaattcatagcaactttcaaggat

SEQ ID NO: 881733 - DNA, 33 bp, Homo sapien
atttgccctgtgaaaactttctcacttgaagct

SEQ ID NO: 881734 - DNA, 33 bp, Homo sapien
atttgccctgtgaaaagtttctcacttgaagct

SEQ ID NO: 881735 - DNA, 33 bp, Homo sapien
aaaattcatttggccactattgcattactgtgt

SEQ ID NO: 881736 - DNA, 33 bp, Homo sapien
aaaattcatttggccattattgcattactgtgt

SEQ ID NO: 881737 - DNA, 33 bp, Homo sapien
acaattgagctatccaaaaaaatttatctataa

SEQ ID NO: 881738 - DNA, 33 bp, Homo sapien
acaattgagctatccagaaaaatttatctataa

SEQ ID NO: 881739 - DNA, 33 bp, Homo sapien
tgagtgggcctggtgaacttgaggtaggctatt

SEQ ID NO: 881740 - DNA, 33 bp, Homo sapien
tgagtgggcctggtgagcttgaggtaggctatt

SEQ ID NO: 881741 - DNA, 33 bp, Homo sapien
gcgggtgtcttcagcaccactggctttgaccac

SEQ ID NO: 881742 - DNA, 33 bp, Homo sapien
gcgggtgtcttcagcagcactggctttgaccac

SEQ ID NO: 881743 - DNA, 33 bp, Homo sapien
gccctgcacagcaaagcccattctagattacag

SEQ ID NO: 881744 - DNA, 33 bp, Homo sapien
gccctgcacagcaaagtccattctagattacag

SEQ ID NO: 881745 - DNA, 33 bp, Homo sapien
aaaagctgctccagctaaaagatggtctctaaa

SEQ ID NO: 881746 - DNA, 33 bp, Homo sapien
aaaagctgctccagctgaaagatggtctctaaa

SEQ ID NO: 881747 - DNA, 33 bp, Homo sapien
ctgcacataaaaggcaatctaaaggaaatgcaa

SEQ ID NO: 881748 - DNA, 33 bp, Homo sapien
ctgcacataaaaggcactctaaaggaaatgcaa

SEQ ID NO: 881749 - DNA, 33 bp, Homo sapien
aatgcaaaaccaacccaagacacattcagaaag

SEQ ID NO: 881750 - DNA, 33 bp, Homo sapien
aatgcaaaaccaacccgagacacattcagaaag

SEQ ID NO: 881751 - DNA, 33 bp, Homo sapien
ttttaagcagaacaatgatctagaaaaggatca

SEQ ID NO: 881752 - DNA, 33 bp, Homo sapien
ttttaagcagaacaattatctagaaaaggatca

SEQ ID NO: 881753 - DNA, 33 bp, Homo sapien
tgacagccctgttggacggaactttgctttata

SEQ ID NO: 881754 - DNA, 33 bp, Homo sapien
tgacagccctgttggatggaactttgctttata

SEQ ID NO: 881755 - DNA, 33 bp, Homo sapien
gctattctcatcgtcacgatcagtctatgagat

SEQ ID NO: 881756 - DNA, 33 bp, Homo sapien
gctattctcatcgtcatgatcagtctatgagat

SEQ ID NO: 881757 - DNA, 33 bp, Homo sapien
ccattctaaatgtaaacgcagattgaatcatga

SEQ ID NO: 881758 - DNA, 33 bp, Homo sapien
ccattctaaatgtaaatgcagattgaatcatga

SEQ ID NO: 881759 - DNA, 33 bp, Homo sapien
tctaataaagacaaaagtggcatcgttatgaaa

SEQ ID NO: 881760 - DNA, 33 bp, Homo sapien
tctaataaagacaaaattggcatcgttatgaaa

SEQ ID NO: 881761 - DNA, 33 bp, Homo sapien
ttccttctgtattaaacttacgattcaagcatt

SEQ ID NO: 881762 - DNA, 33 bp, Homo sapien
ttccttctgtattaaagttacgattcaagcatt

SEQ ID NO: 881763 - DNA, 33 bp, Homo sapien
tctgcagagactcaggaaggtacatctatgtgt

SEQ ID NO: 881764 - DNA, 33 bp, Homo sapien
tctgcagagactcagggaggtacatctatgtgt

SEQ ID NO: 881765 - DNA, 33 bp, Homo sapien
caaatagggcatagaacagcagggtttccacgc

SEQ ID NO: 881766 - DNA, 33 bp, Homo sapien
caaatagggcatagaatagcagggtttccacgc

SEQ ID NO: 881767 - DNA, 33 bp, Homo sapien
ggctttttatagagtgaaatacttgattgactt

SEQ ID NO: 881768 - DNA, 33 bp, Homo sapien
ggctttttatagagtggaatacttgattgactt

SEQ ID NO: 881769 - DNA, 33 bp, Homo sapien
agcacttcttcttctacgcacttcttagtgcac

SEQ ID NO: 881770 - DNA, 33 bp, Homo sapien
agcacttcttcttctatgcacttcttagtgcac

SEQ ID NO: 881771 - DNA, 33 bp, Homo sapien
ccctacagtattttgtaaagtccaccgtctgac

SEQ ID NO: 881772 - DNA, 33 bp, Homo sapien
ccctacagtattttgtgaagtccaccgtctgac

SEQ ID NO: 881773 - DNA, 33 bp, Homo sapien
tgtggaaacgaagatacggagatagagcttccg

SEQ ID NO: 881774 - DNA, 33 bp, Homo sapien
tgtggaaacgaagatatggagatagagcttccg

SEQ ID NO: 881775 - DNA, 33 bp, Homo sapien
aaactgctggctacagaaaatgactgctgttaa

SEQ ID NO: 881776 - DNA, 33 bp, Homo sapien
aaactgctggctacaggaaatgactgctgttaa

SEQ ID NO: 881777 - DNA, 33 bp, Homo sapien
aaaagcagaaaaataaaaatcagggctatgcgc

SEQ ID NO: 881778 - DNA, 33 bp, Homo sapien
aaaagcagaaaaataagaatcagggctatgcgc

SEQ ID NO: 881779 - DNA, 33 bp, Homo sapien
ttgaaatttgggggaaatccaaaaagatggaca

SEQ ID NO: 881780 - DNA, 33 bp, Homo sapien
ttgaaatttgggggaagtccaaaaagatggaca

SEQ ID NO: 881781 - DNA, 33 bp, Homo sapien
ataagaagccatcaaagtacattcaaggactta

SEQ ID NO: 881782 - DNA, 33 bp, Homo sapien
ataagaagccatcaaattacattcaaggactta

SEQ ID NO: 881783 - DNA, 33 bp, Homo sapien
tttaatggcatggaaacacaccacatgacaaaa

SEQ ID NO: 881784 - DNA, 33 bp, Homo sapien
tttaatggcatggaaagacaccacatgacaaaa

SEQ ID NO: 881785 - DNA, 33 bp, Homo sapien
atagtgtttcattttagagaactgccaaacatt

SEQ ID NO: 881786 - DNA, 33 bp, Homo sapien
atagtgtttcattttatagaactgccaaacatt

SEQ ID NO: 881787 - DNA, 33 bp, Homo sapien
ttacagatgcaacataactttacagaggccttt

SEQ ID NO: 881788 - DNA, 33 bp, Homo sapien
ttacagatgcaacatatctttacagaggccttt

SEQ ID NO: 881789 - DNA, 33 bp, Homo sapien
aataaagagttacaaagatcatctctaaaatga

SEQ ID NO: 881790 - DNA, 33 bp, Homo sapien
aataaagagttacaaatatcatctctaaaatga

SEQ ID NO: 881791 - DNA, 33 bp, Homo sapien
gacttcacaatggtaccgctgacctaagcttca

SEQ ID NO: 881792 - DNA, 33 bp, Homo sapien
gacttcacaatggtactgctgacctaagcttca

SEQ ID NO: 881793 - DNA, 33 bp, Homo sapien
agaggcagggcatccaaggaagaagctattatg

SEQ ID NO: 881794 - DNA, 33 bp, Homo sapien
agaggcagggcatccagggaagaagctattatg

SEQ ID NO: 881795 - DNA, 33 bp, Homo sapien
tcccatgttcagtataagacaacagtgtggcaa

SEQ ID NO: 881796 - DNA, 33 bp, Homo sapien
tcccatgttcagtataggacaacagtgtggcaa

SEQ ID NO: 881797 - DNA, 33 bp, Homo sapien
agtagttcctgtgaaaagcatacagattttact

SEQ ID NO: 881798 - DNA, 33 bp, Homo sapien
agtagttcctgtgaaacgcatacagattttact

SEQ ID NO: 881799 - DNA, 33 bp, Homo sapien
ttaggtgtttccttgccaaattaagccacttca

SEQ ID NO: 881800 - DNA, 33 bp, Homo sapien
ttaggtgtttccttgctaaattaagccacttca

SEQ ID NO: 881801 - DNA, 33 bp, Homo sapien
tgaccaactgcctcaaaagcagggttgccaggg

SEQ ID NO: 881802 - DNA, 33 bp, Homo sapien
tgaccaactgcctcaagagcagggttgccaggg

SEQ ID NO: 881803 - DNA, 33 bp, Homo sapien
ttgccagggtaggcaacttaggatacaaagcac

SEQ ID NO: 881804 - DNA, 33 bp, Homo sapien
ttgccagggtaggcaagttaggatacaaagcac

SEQ ID NO: 881805 - DNA, 33 bp, Homo sapien
taatgaggtatgctagaagaaattaagtttgta

SEQ ID NO: 881806 - DNA, 33 bp, Homo sapien
taatgaggtatgctagtagaaattaagtttgta

SEQ ID NO: 881807 - DNA, 33 bp, Homo sapien
aggacactatccttcaagcagactactttcagt

SEQ ID NO: 881808 - DNA, 33 bp, Homo sapien
aggacactatccttcaggcagactactttcagt

SEQ ID NO: 881809 - DNA, 33 bp, Homo sapien
aactacaaatgactaaaaaggtagattatatat

SEQ ID NO: 881810 - DNA, 33 bp, Homo sapien
aactacaaatgactaacaaggtagattatatat

SEQ ID NO: 881811 - DNA, 33 bp, Homo sapien
actttcaaatcttcataatcacgccaataagct

SEQ ID NO: 881812 - DNA, 33 bp, Homo sapien
actttcaaatcttcatgatcacgccaataagct

SEQ ID NO: 881813 - DNA, 33 bp, Homo sapien
gccaaatggagtgttacagaagaaaagctgttt

SEQ ID NO: 881814 - DNA, 33 bp, Homo sapien
gccaaatggagtgttagagaagaaaagctgttt

SEQ ID NO: 881815 - DNA, 33 bp, Homo sapien
agtgcagaggaaacgaagatagtcaatagcaca

SEQ ID NO: 881816 - DNA, 33 bp, Homo sapien
agtgcagaggaaacgaggatagtcaatagcaca

SEQ ID NO: 881817 - DNA, 33 bp, Homo sapien
gcattttggttcaggaacttaatattcttggtc

SEQ ID NO: 881818 - DNA, 33 bp, Homo sapien
gcattttggttcaggaccttaatattcttggtc

SEQ ID NO: 881819 - DNA, 33 bp, Homo sapien
ttttatagaagtacccaaacacatacagatacg

SEQ ID NO: 881820 - DNA, 33 bp, Homo sapien
ttttatagaagtacccgaacacatacagatacg

SEQ ID NO: 881821 - DNA, 33 bp, Homo sapien
ctacttggatgaaatgcacaaattctttgaaag

SEQ ID NO: 881822 - DNA, 33 bp, Homo sapien
ctacttggatgaaatggacaaattctttgaaag

SEQ ID NO: 881823 - DNA, 33 bp, Homo sapien
ctacacaacactgaagaagaacaaatatcattg

SEQ ID NO: 881824 - DNA, 33 bp, Homo sapien
ctacacaacactgaaggagaacaaatatcattg

SEQ ID NO: 881825 - DNA, 33 bp, Homo sapien
tagtggtgctcttctgcatgacgttataacggt

SEQ ID NO: 881826 - DNA, 33 bp, Homo sapien
tagtggtgctcttctgtatgacgttataacggt

SEQ ID NO: 881827 - DNA, 33 bp, Homo sapien
actgctgagcactgtgaaataaagccctttgcc

SEQ ID NO: 881828 - DNA, 33 bp, Homo sapien
actgctgagcactgtgtaataaagccctttgcc

SEQ ID NO: 881829 - DNA, 33 bp, Homo sapien
gacattgggtagtataataagagtcacacctga

SEQ ID NO: 881830 - DNA, 33 bp, Homo sapien
gacattgggtagtatagtaagagtcacacctga

SEQ ID NO: 881831 - DNA, 33 bp, Homo sapien
caatactttaacatcacgaaatcaagctaggtt

SEQ ID NO: 881832 - DNA, 33 bp, Homo sapien
caatactttaacatcatgaaatcaagctaggtt

SEQ ID NO: 881833 - DNA, 33 bp, Homo sapien
aagctttcgtctgctacagttagtcttgtattt

SEQ ID NO: 881834 - DNA, 33 bp, Homo sapien
aagctttcgtctgctatagttagtcttgtattt

SEQ ID NO: 881835 - DNA, 33 bp, Homo sapien
cagagttctgaatacacgggtgttggtatcatc

SEQ ID NO: 881836 - DNA, 33 bp, Homo sapien
cagagttctgaatacatgggtgttggtatcatc

SEQ ID NO: 881837 - DNA, 33 bp, Homo sapien
atcctaattttccccactcaattcgatttttga

SEQ ID NO: 881838 - DNA, 33 bp, Homo sapien
atcctaattttccccattcaattcgatttttga

SEQ ID NO: 881839 - DNA, 33 bp, Homo sapien
caatgagactgtctcaaattcatattatttatg

SEQ ID NO: 881840 - DNA, 33 bp, Homo sapien
caatgagactgtctcacattcatattatttatg

SEQ ID NO: 881841 - DNA, 33 bp, Homo sapien
gaggacaagcaatgaaacaaggtggcctctggc

SEQ ID NO: 881842 - DNA, 33 bp, Homo sapien
gaggacaagcaatgaatcaaggtggcctctggc

SEQ ID NO: 881843 - DNA, 33 bp, Homo sapien
ccgtgtgttttacaaggaccttgtctgtcacgt

SEQ ID NO: 881844 - DNA, 33 bp, Homo sapien
ccgtgtgttttacaagtaccttgtctgtcacgt

SEQ ID NO: 881845 - DNA, 33 bp, Homo sapien
aggaggaagtcattgcagattttcgagatgcac

SEQ ID NO: 881846 - DNA, 33 bp, Homo sapien
aggaggaagtcattgccgattttcgagatgcac

SEQ ID NO: 881847 - DNA, 33 bp, Homo sapien
aaaaaagtgttccatcggaggacagaactggat

SEQ ID NO: 881848 - DNA, 33 bp, Homo sapien
aaaaaagtgttccatctgaggacagaactggat

SEQ ID NO: 881849 - DNA, 33 bp, Homo sapien
aaggattatttctaaactgacagatgaagcagc

SEQ ID NO: 881850 - DNA, 33 bp, Homo sapien
aaggattatttctaaattgacagatgaagcagc

SEQ ID NO: 881851 - DNA, 33 bp, Homo sapien
ccattcaacatcttcaacaaatattataaagaa

SEQ ID NO: 881852 - DNA, 33 bp, Homo sapien
ccattcaacatcttcatcaaatattataaagaa

SEQ ID NO: 881853 - DNA, 33 bp, Homo sapien
tcagcaacttgtaaggaatatgaaaaggagaag

SEQ ID NO: 881854 - DNA, 33 bp, Homo sapien
tcagcaacttgtaaggcatatgaaaaggagaag

SEQ ID NO: 881855 - DNA, 33 bp, Homo sapien
aaagcgctctcaaatgcaacatagcagggaacc

SEQ ID NO: 881856 - DNA, 33 bp, Homo sapien
aaagcgctctcaaatggaacatagcagggaacc

SEQ ID NO: 881857 - DNA, 33 bp, Homo sapien
atcaggagggaggataataagtaatcatttcat

SEQ ID NO: 881858 - DNA, 33 bp, Homo sapien
atcaggagggaggatagtaagtaatcatttcat

SEQ ID NO: 881859 - DNA, 33 bp, Homo sapien
gttaccagagttccaaccgctgctgacttttct

SEQ ID NO: 881860 - DNA, 33 bp, Homo sapien
gttaccagagttccaagcgctgctgacttttct

SEQ ID NO: 881861 - DNA, 33 bp, Homo sapien
taatgacaaatcccaaattcaggataatagtta

SEQ ID NO: 881862 - DNA, 33 bp, Homo sapien
taatgacaaatcccaagttcaggataatagtta

SEQ ID NO: 881863 - DNA, 33 bp, Homo sapien
tccagagagagggagcaaaggacctagagtggg

SEQ ID NO: 881864 - DNA, 33 bp, Homo sapien
tccagagagagggagcgaaggacctagagtggg

SEQ ID NO: 881865 - DNA, 33 bp, Homo sapien
tttggttgcatgtaccagaatactgactacaga

SEQ ID NO: 881866 - DNA, 33 bp, Homo sapien
tttggttgcatgtaccggaatactgactacaga

SEQ ID NO: 881867 - DNA, 33 bp, Homo sapien
cattgttccaacatgacgggagttgatgccagc

SEQ ID NO: 881868 - DNA, 33 bp, Homo sapien
cattgttccaacatgatgggagttgatgccagc

SEQ ID NO: 881869 - DNA, 33 bp, Homo sapien
tccatttgaatcttaacgaagaaggattcgaat

SEQ ID NO: 881870 - DNA, 33 bp, Homo sapien
tccatttgaatcttaatgaagaaggattcgaat

SEQ ID NO: 881871 - DNA, 33 bp, Homo sapien
tccacagtgaccctctaaataaaaataggaggc

SEQ ID NO: 881872 - DNA, 33 bp, Homo sapien
tccacagtgaccctcttaataaaaataggaggc

SEQ ID NO: 881873 - DNA, 33 bp, Homo sapien
agtgtagtggaatagaactccattgggaacact

SEQ ID NO: 881874 - DNA, 33 bp, Homo sapien
agtgtagtggaatagagctccattgggaacact

SEQ ID NO: 881875 - DNA, 33 bp, Homo sapien
tcttcacaatagcactaaaagataattgggaga

SEQ ID NO: 881876 - DNA, 33 bp, Homo sapien
tcttcacaatagcactgaaagataattgggaga

SEQ ID NO: 881877 - DNA, 33 bp, Homo sapien
actgaagatgacggtaccttatatcacccagga

SEQ ID NO: 881878 - DNA, 33 bp, Homo sapien
actgaagatgacggtatcttatatcacccagga

SEQ ID NO: 881879 - DNA, 33 bp, Homo sapien
ggaagtctttggcccacagatcaaaattcacaa

SEQ ID NO: 881880 - DNA, 33 bp, Homo sapien
ggaagtctttggcccatagatcaaaattcacaa

SEQ ID NO: 881881 - DNA, 33 bp, Homo sapien
atttcactccataacacaggttgtaaggaaaaa

SEQ ID NO: 881882 - DNA, 33 bp, Homo sapien
atttcactccataacataggttgtaaggaaaaa

SEQ ID NO: 881883 - DNA, 33 bp, Homo sapien
caagatcatcatctcccatcgaaacctgttcaa

SEQ ID NO: 881884 - DNA, 33 bp, Homo sapien
caagatcatcatctcctatcgaaacctgttcaa

SEQ ID NO: 881885 - DNA, 33 bp, Homo sapien
agacacctgcttattacaatgctcttgctcttc

SEQ ID NO: 881886 - DNA, 33 bp, Homo sapien
agacacctgcttattagaatgctcttgctcttc

SEQ ID NO: 881887 - DNA, 33 bp, Homo sapien
gtagtcagctatatggaaaagtgaagctttcaa

SEQ ID NO: 881888 - DNA, 33 bp, Homo sapien
gtagtcagctatatggcaaagtgaagctttcaa

SEQ ID NO: 881889 - DNA, 33 bp, Homo sapien
accttatctcctgggacaattaggttatgtcca

SEQ ID NO: 881890 - DNA, 33 bp, Homo sapien
accttatctcctgggataattaggttatgtcca

SEQ ID NO: 881891 - DNA, 33 bp, Homo sapien
taatctgagttaactaacctttggagcaacctg

SEQ ID NO: 881892 - DNA, 33 bp, Homo sapien
taatctgagttaactaccctttggagcaacctg

SEQ ID NO: 881893 - DNA, 33 bp, Homo sapien
tctttaggattttctaacaagcctttagctcct

SEQ ID NO: 881894 - DNA, 33 bp, Homo sapien
tctttaggattttctagcaagcctttagctcct

SEQ ID NO: 881895 - DNA, 33 bp, Homo sapien
cataaaactggaaaaacgagcaaagaattacat

SEQ ID NO: 881896 - DNA, 33 bp, Homo sapien
cataaaactggaaaaatgagcaaagaattacat

SEQ ID NO: 881897 - DNA, 33 bp, Homo sapien
ttgctcagcataagaaccattttgaaaacacaa

SEQ ID NO: 881898 - DNA, 33 bp, Homo sapien
ttgctcagcataagaagcattttgaaaacacaa

SEQ ID NO: 881899 - DNA, 33 bp, Homo sapien
ggcagtggctggagcacgaaggtggactaaagg

SEQ ID NO: 881900 - DNA, 33 bp, Homo sapien
ggcagtggctggagcatgaaggtggactaaagg

SEQ ID NO: 881901 - DNA, 33 bp, Homo sapien
aatggaaaagggagaactgcgaagaggaaggac

SEQ ID NO: 881902 - DNA, 33 bp, Homo sapien
aatggaaaagggagaattgcgaagaggaaggac

SEQ ID NO: 881903 - DNA, 33 bp, Homo sapien
caaattctggctcctcgcaatgatcctgagtgt

SEQ ID NO: 881904 - DNA, 33 bp, Homo sapien
caaattctggctcctctcaatgatcctgagtgt

SEQ ID NO: 881905 - DNA, 33 bp, Homo sapien
gtgaaacaagacagtaacaataaagggtggaag

SEQ ID NO: 881906 - DNA, 33 bp, Homo sapien
gtgaaacaagacagtagcaataaagggtggaag

SEQ ID NO: 881907 - DNA, 33 bp, Homo sapien
gagagataaagaaacaaatttgaagaggtgtga

SEQ ID NO: 881908 - DNA, 33 bp, Homo sapien
gagagataaagaaacagatttgaagaggtgtga

SEQ ID NO: 881909 - DNA, 33 bp, Homo sapien
aatccaggagttcaaactatgatcacacctctg

SEQ ID NO: 881910 - DNA, 33 bp, Homo sapien
aatccaggagttcaaattatgatcacacctctg

SEQ ID NO: 881911 - DNA, 33 bp, Homo sapien
ttttattcgatgtcccaagttaatgcttattat

SEQ ID NO: 881912 - DNA, 33 bp, Homo sapien
ttttattcgatgtccccagttaatgcttattat

SEQ ID NO: 881913 - DNA, 33 bp, Homo sapien
taaagcagattaaagaatatttggcttttgttt

SEQ ID NO: 881914 - DNA, 33 bp, Homo sapien
taaagcagattaaagagtatttggcttttgttt

SEQ ID NO: 881915 - DNA, 33 bp, Homo sapien
atagctcctacacagaaaatcaaattttagggc

SEQ ID NO: 881916 - DNA, 33 bp, Homo sapien
atagctcctacacagagaatcaaattttagggc

SEQ ID NO: 881917 - DNA, 33 bp, Homo sapien
cctcaagtgatacaaacgaagataattctccgc

SEQ ID NO: 881918 - DNA, 33 bp, Homo sapien
cctcaagtgatacaaatgaagataattctccgc

SEQ ID NO: 881919 - DNA, 33 bp, Homo sapien
agtttcctcgtctgcacaatgaagaacacagtc

SEQ ID NO: 881920 - DNA, 33 bp, Homo sapien
agtttcctcgtctgcagaatgaagaacacagtc

SEQ ID NO: 881921 - DNA, 33 bp, Homo sapien
gcgatccctcatgcatgacttggacttcataag

SEQ ID NO: 881922 - DNA, 33 bp, Homo sapien
gcgatccctcatgcattacttggacttcataag

SEQ ID NO: 881923 - DNA, 33 bp, Homo sapien
taccatcttcatggaacagtcagatgttgtact

SEQ ID NO: 881924 - DNA, 33 bp, Homo sapien
taccatcttcatggaatagtcagatgttgtact

SEQ ID NO: 881925 - DNA, 33 bp, Homo sapien
ccttcgagccatcttccctgcttgtctgtaggg

SEQ ID NO: 881926 - DNA, 33 bp, Homo sapien
ccttcgagccatcttctctgcttgtctgtaggg

SEQ ID NO: 881927 - DNA, 33 bp, Homo sapien
tgaaatagatgactcccgcaatcttgtcctgtc

SEQ ID NO: 881928 - DNA, 33 bp, Homo sapien
tgaaatagatgactcctgcaatcttgtcctgtc

SEQ ID NO: 881929 - DNA, 33 bp, Homo sapien
gtgtgacagggtctgaataattacaagtattac

SEQ ID NO: 881930 - DNA, 33 bp, Homo sapien
gtgtgacagggtctgagtaattacaagtattac

SEQ ID NO: 881931 - DNA, 33 bp, Homo sapien
taattgcttttggctcaaatttaacttttataa

SEQ ID NO: 881932 - DNA, 33 bp, Homo sapien
taattgcttttggctcgaatttaacttttataa

SEQ ID NO: 881933 - DNA, 33 bp, Homo sapien
agatggctgctccttacgacaaaggttttattt

SEQ ID NO: 881934 - DNA, 33 bp, Homo sapien
agatggctgctccttatgacaaaggttttattt

SEQ ID NO: 881935 - DNA, 33 bp, Homo sapien
tactccactgctataaacatgttcttttacaat

SEQ ID NO: 881936 - DNA, 33 bp, Homo sapien
tactccactgctataagcatgttcttttacaat

SEQ ID NO: 881937 - DNA, 33 bp, Homo sapien
aacagaggcctcacaactcagtctgttgccctt

SEQ ID NO: 881938 - DNA, 33 bp, Homo sapien
aacagaggcctcacaattcagtctgttgccctt

SEQ ID NO: 881939 - DNA, 33 bp, Homo sapien
gggtagattccaaacacaaaatgagttccaagc

SEQ ID NO: 881940 - DNA, 33 bp, Homo sapien
gggtagattccaaacagaaaatgagttccaagc

SEQ ID NO: 881941 - DNA, 33 bp, Homo sapien
tccaatgggtgatcctaaaactgaaatgcaggc

SEQ ID NO: 881942 - DNA, 33 bp, Homo sapien
tccaatgggtgatccttaaactgaaatgcaggc

SEQ ID NO: 881943 - DNA, 33 bp, Homo sapien
tggggagcttgcatgaaaaaaggtggaagcttg

SEQ ID NO: 881944 - DNA, 33 bp, Homo sapien
tggggagcttgcatgagaaaaggtggaagcttg

SEQ ID NO: 881945 - DNA, 33 bp, Homo sapien
atgcttttgctagtaacccaagtgatattgagg

SEQ ID NO: 881946 - DNA, 33 bp, Homo sapien
atgcttttgctagtaatccaagtgatattgagg

SEQ ID NO: 881947 - DNA, 33 bp, Homo sapien
aaataagagaaaagtacggaaagatgctagcca

SEQ ID NO: 881948 - DNA, 33 bp, Homo sapien
aaataagagaaaagtatggaaagatgctagcca

SEQ ID NO: 881949 - DNA, 33 bp, Homo sapien
ggctcgacgtccctcaaattccaggccatgcac

SEQ ID NO: 881950 - DNA, 33 bp, Homo sapien
ggctcgacgtccctcagattccaggccatgcac

SEQ ID NO: 881951 - DNA, 33 bp, Homo sapien
tctgtttctaccagaaaacatcgctttctccaa

SEQ ID NO: 881952 - DNA, 33 bp, Homo sapien
tctgtttctaccagaagacatcgctttctccaa

SEQ ID NO: 881953 - DNA, 33 bp, Homo sapien
taaaattttcagagtaaacagaagagatgaaca

SEQ ID NO: 881954 - DNA, 33 bp, Homo sapien
taaaattttcagagtacacagaagagatgaaca

SEQ ID NO: 881955 - DNA, 33 bp, Homo sapien
ttagatgtaaagactgaaaattctaaataaaca

SEQ ID NO: 881956 - DNA, 33 bp, Homo sapien
ttagatgtaaagactgcaaattctaaataaaca

SEQ ID NO: 881957 - DNA, 33 bp, Homo sapien
ctgttcattgtaggcaaattgatctttttaaat

SEQ ID NO: 881958 - DNA, 33 bp, Homo sapien
ctgttcattgtaggcacattgatctttttaaat

SEQ ID NO: 881959 - DNA, 33 bp, Homo sapien
tcttttttggaagctcactagatggtctctcac

SEQ ID NO: 881960 - DNA, 33 bp, Homo sapien
tcttttttggaagctctctagatggtctctcac

SEQ ID NO: 881961 - DNA, 33 bp, Homo sapien
aattttctaagtcacaggttggtgggaaatttt

SEQ ID NO: 881962 - DNA, 33 bp, Homo sapien
aattttctaagtcacatgttggtgggaaatttt

SEQ ID NO: 881963 - DNA, 33 bp, Homo sapien
aggaattttcccaggacggcagctgataagtgg

SEQ ID NO: 881964 - DNA, 33 bp, Homo sapien
aggaattttcccaggatggcagctgataagtgg

SEQ ID NO: 881965 - DNA, 33 bp, Homo sapien
tctgtctgaaactgaaatcattttttaaaactg

SEQ ID NO: 881966 - DNA, 33 bp, Homo sapien
tctgtctgaaactgaagtcattttttaaaactg

SEQ ID NO: 881967 - DNA, 33 bp, Homo sapien
ggattatcagtctgcaataaaactctttttgga

SEQ ID NO: 881968 - DNA, 33 bp, Homo sapien
ggattatcagtctgcagtaaaactctttttgga

SEQ ID NO: 881969 - DNA, 33 bp, Homo sapien
ggggagtttcaaggcaataaagcccatctgtta

SEQ ID NO: 881970 - DNA, 33 bp, Homo sapien
ggggagtttcaaggcagtaaagcccatctgtta

SEQ ID NO: 881971 - DNA, 33 bp, Homo sapien
gctctcttactgcgaacgcatttcggacacaat

SEQ ID NO: 881972 - DNA, 33 bp, Homo sapien
gctctcttactgcgaatgcatttcggacacaat

SEQ ID NO: 881973 - DNA, 33 bp, Homo sapien
tgtggcagtaaatcaagccttattggtatacta

SEQ ID NO: 881974 - DNA, 33 bp, Homo sapien
tgtggcagtaaatcaatccttattggtatacta

SEQ ID NO: 881975 - DNA, 33 bp, Homo sapien
gaagaatcaaccagccaaatcagacacaagcta

SEQ ID NO: 881976 - DNA, 33 bp, Homo sapien
gaagaatcaaccagccgaatcagacacaagcta

SEQ ID NO: 881977 - DNA, 33 bp, Homo sapien
aagctttttggaagtgaaagtattatgctgtcc

SEQ ID NO: 881978 - DNA, 33 bp, Homo sapien
aagctttttggaagtgcaagtattatgctgtcc

SEQ ID NO: 881979 - DNA, 33 bp, Homo sapien
agcaaacacctttagcacctacttgtgcagacc

SEQ ID NO: 881980 - DNA, 33 bp, Homo sapien
agcaaacacctttagcgcctacttgtgcagacc

SEQ ID NO: 881981 - DNA, 33 bp, Homo sapien
taccaccttagtcatacagtaatagtgtataaa

SEQ ID NO: 881982 - DNA, 33 bp, Homo sapien
taccaccttagtcatatagtaatagtgtataaa

SEQ ID NO: 881983 - DNA, 33 bp, Homo sapien
ctcacttttgtgtaaccgtaataagaaacagaa

SEQ ID NO: 881984 - DNA, 33 bp, Homo sapien
ctcacttttgtgtaactgtaataagaaacagaa

SEQ ID NO: 881985 - DNA, 33 bp, Homo sapien
tttcctgttttcttgacgtacagaattttgctt

SEQ ID NO: 881986 - DNA, 33 bp, Homo sapien
tttcctgttttcttgatgtacagaattttgctt

SEQ ID NO: 881987 - DNA, 33 bp, Homo sapien
tcttgaagagaaggaactgtgcctcaagactgc

SEQ ID NO: 881988 - DNA, 33 bp, Homo sapien
tcttgaagagaaggaattgtgcctcaagactgc

SEQ ID NO: 881989 - DNA, 33 bp, Homo sapien
catgacaggggtgttcacatctgactacaatat

SEQ ID NO: 881990 - DNA, 33 bp, Homo sapien
catgacaggggtgttcgcatctgactacaatat

SEQ ID NO: 881991 - DNA, 33 bp, Homo sapien
tctggattggaatctcaattcaccacttagagc

SEQ ID NO: 881992 - DNA, 33 bp, Homo sapien
tctggattggaatctcgattcaccacttagagc

SEQ ID NO: 881993 - DNA, 33 bp, Homo sapien
cagatgtcaaattgtacagtcaaagaataaatg

SEQ ID NO: 881994 - DNA, 33 bp, Homo sapien
cagatgtcaaattgtatagtcaaagaataaatg

SEQ ID NO: 881995 - DNA, 33 bp, Homo sapien
gtagccaccacatccccaacccagacagtgctt

SEQ ID NO: 881996 - DNA, 33 bp, Homo sapien
gtagccaccacatccctaacccagacagtgctt

SEQ ID NO: 881997 - DNA, 33 bp, Homo sapien
ttctgaatatcagtaaagagtaacctcgcttta

SEQ ID NO: 881998 - DNA, 33 bp, Homo sapien
ttctgaatatcagtaacgagtaacctcgcttta

SEQ ID NO: 881999 - DNA, 33 bp, Homo sapien
acacctagaaccctgaagaacttcatcccaaaa

SEQ ID NO: 882000 - DNA, 33 bp, Homo sapien
acacctagaaccctgatgaacttcatcccaaaa

SEQ ID NO: 882001 - DNA, 33 bp, Homo sapien
gtctactgccaactgcgaagaaaaccaaaattc

SEQ ID NO: 882002 - DNA, 33 bp, Homo sapien
gtctactgccaactgctaagaaaaccaaaattc

SEQ ID NO: 882003 - DNA, 33 bp, Homo sapien
ggcaggaagaaatgaaaagcaaacagcttcact

SEQ ID NO: 882004 - DNA, 33 bp, Homo sapien
ggcaggaagaaatgaagagcaaacagcttcact

SEQ ID NO: 882005 - DNA, 33 bp, Homo sapien
taaatcgtgatcctgcccctttatatttaaaaa

SEQ ID NO: 882006 - DNA, 33 bp, Homo sapien
taaatcgtgatcctgcgcctttatatttaaaaa

SEQ ID NO: 882007 - DNA, 33 bp, Homo sapien
ttaagctaaaaatcacaagtacaacactaaaga

SEQ ID NO: 882008 - DNA, 33 bp, Homo sapien
ttaagctaaaaatcacgagtacaacactaaaga

SEQ ID NO: 882009 - DNA, 33 bp, Homo sapien
aaagtgtcttaagggagctctcgtgccaggagg

SEQ ID NO: 882010 - DNA, 33 bp, Homo sapien
aaagtgtcttaagggatctctcgtgccaggagg

SEQ ID NO: 882011 - DNA, 33 bp, Homo sapien
gaaccatgcgggaaaacacaacacacttctact

SEQ ID NO: 882012 - DNA, 33 bp, Homo sapien
gaaccatgcgggaaaatacaacacacttctact

SEQ ID NO: 882013 - DNA, 33 bp, Homo sapien
ccattcgggaaagcaaataaaggctatgtgtgt

SEQ ID NO: 882014 - DNA, 33 bp, Homo sapien
ccattcgggaaagcaactaaaggctatgtgtgt

SEQ ID NO: 882015 - DNA, 33 bp, Homo sapien
agtgatctggactttacatcaaaggctagtgag

SEQ ID NO: 882016 - DNA, 33 bp, Homo sapien
agtgatctggactttatatcaaaggctagtgag

SEQ ID NO: 882017 - DNA, 33 bp, Homo sapien
tgttggtcctgtttataagcccaagtctatgtc

SEQ ID NO: 882018 - DNA, 33 bp, Homo sapien
tgttggtcctgtttatgagcccaagtctatgtc

SEQ ID NO: 882019 - DNA, 33 bp, Homo sapien
tccttttcctctaagtaacatacagtctatgtc

SEQ ID NO: 882020 - DNA, 33 bp, Homo sapien
tccttttcctctaagtgacatacagtctatgtc

SEQ ID NO: 882021 - DNA, 33 bp, Homo sapien
cagtaagcatttagaagatcatactggaggaag

SEQ ID NO: 882022 - DNA, 33 bp, Homo sapien
cagtaagcatttagaatatcatactggaggaag

SEQ ID NO: 882023 - DNA, 33 bp, Homo sapien
caaaaatagaaaaatagaacgcttcatatcttt

SEQ ID NO: 882024 - DNA, 33 bp, Homo sapien
caaaaatagaaaaatataacgcttcatatcttt

SEQ ID NO: 882025 - DNA, 33 bp, Homo sapien
tctaagagaaaagagacgttatccatacaataa

SEQ ID NO: 882026 - DNA, 33 bp, Homo sapien
tctaagagaaaagagatgttatccatacaataa

SEQ ID NO: 882027 - DNA, 33 bp, Homo sapien
ggctcccattaggcaaccttcctctttggaaaa

SEQ ID NO: 882028 - DNA, 33 bp, Homo sapien
ggctcccattaggcaatcttcctctttggaaaa

SEQ ID NO: 882029 - DNA, 33 bp, Homo sapien
tcttgctctctaaaaaattatagtttggttgca

SEQ ID NO: 882030 - DNA, 33 bp, Homo sapien
tcttgctctctaaaaagttatagtttggttgca

SEQ ID NO: 882031 - DNA, 33 bp, Homo sapien
ttacctcacctatcaacgagacttcagttctgg

SEQ ID NO: 882032 - DNA, 33 bp, Homo sapien
ttacctcacctatcaatgagacttcagttctgg

SEQ ID NO: 882033 - DNA, 33 bp, Homo sapien
gggcaaaacttcactccctttccagaacgttct

SEQ ID NO: 882034 - DNA, 33 bp, Homo sapien
gggcaaaacttcactctctttccagaacgttct

SEQ ID NO: 882035 - DNA, 33 bp, Homo sapien
tacaggtaaacaccacagaagaaagagctgtca

SEQ ID NO: 882036 - DNA, 33 bp, Homo sapien
tacaggtaaacaccacggaagaaagagctgtca

SEQ ID NO: 882037 - DNA, 33 bp, Homo sapien
gcagctgagctttggacactgctaggcccaaaa

SEQ ID NO: 882038 - DNA, 33 bp, Homo sapien
gcagctgagctttggatactgctaggcccaaaa

SEQ ID NO: 882039 - DNA, 33 bp, Homo sapien
tataatatgtgacttacgtgtttaacatttaca

SEQ ID NO: 882040 - DNA, 33 bp, Homo sapien
tataatatgtgacttatgtgtttaacatttaca

SEQ ID NO: 882041 - DNA, 33 bp, Homo sapien
aggaaactacaagccaatattagcaatgaacat

SEQ ID NO: 882042 - DNA, 33 bp, Homo sapien
aggaaactacaagccagtattagcaatgaacat

SEQ ID NO: 882043 - DNA, 33 bp, Homo sapien
gtgctggatacaagacgcaaaggaaggactgag

SEQ ID NO: 882044 - DNA, 33 bp, Homo sapien
gtgctggatacaagactcaaaggaaggactgag

SEQ ID NO: 882045 - DNA, 33 bp, Homo sapien
ttaaaactccataaagaacatatatctagcccc

SEQ ID NO: 882046 - DNA, 33 bp, Homo sapien
ttaaaactccataaaggacatatatctagcccc

SEQ ID NO: 882047 - DNA, 33 bp, Homo sapien
taatgccctttaccagactctaagccccactgg

SEQ ID NO: 882048 - DNA, 33 bp, Homo sapien
taatgccctttaccaggctctaagccccactgg

SEQ ID NO: 882049 - DNA, 33 bp, Homo sapien
acaatcattcagaccactgggccttggctaaga

SEQ ID NO: 882050 - DNA, 33 bp, Homo sapien
acaatcattcagaccattgggccttggctaaga

SEQ ID NO: 882051 - DNA, 33 bp, Homo sapien
tttgggatgggagacgaaatgcatccaagtcaa

SEQ ID NO: 882052 - DNA, 33 bp, Homo sapien
tttgggatgggagacggaatgcatccaagtcaa

SEQ ID NO: 882053 - DNA, 33 bp, Homo sapien
gggatgatgacatcacacaaatggtcatgaata

SEQ ID NO: 882054 - DNA, 33 bp, Homo sapien
gggatgatgacatcacgcaaatggtcatgaata

SEQ ID NO: 882055 - DNA, 33 bp, Homo sapien
ataaagaatcagacaacgagtcaaaggagctaa

SEQ ID NO: 882056 - DNA, 33 bp, Homo sapien
ataaagaatcagacaatgagtcaaaggagctaa

SEQ ID NO: 882057 - DNA, 33 bp, Homo sapien
aactggagcccagatacagaaaatgacacaagg

SEQ ID NO: 882058 - DNA, 33 bp, Homo sapien
aactggagcccagatagagaaaatgacacaagg

SEQ ID NO: 882059 - DNA, 33 bp, Homo sapien
caacctgtgtaatccacgaagtcagtttttata

SEQ ID NO: 882060 - DNA, 33 bp, Homo sapien
caacctgtgtaatccaggaagtcagtttttata

SEQ ID NO: 882061 - DNA, 33 bp, Homo sapien
ttagcattttctgcacacttttaggaatgctaa

SEQ ID NO: 882062 - DNA, 33 bp, Homo sapien
ttagcattttctgcacgcttttaggaatgctaa

SEQ ID NO: 882063 - DNA, 33 bp, Homo sapien
aaaataaaatctgggcaaaattaccaattcact

SEQ ID NO: 882064 - DNA, 33 bp, Homo sapien
aaaataaaatctgggcgaaattaccaattcact

SEQ ID NO: 882065 - DNA, 33 bp, Homo sapien
aatacagaagcacttccataaaggctcttttgc

SEQ ID NO: 882066 - DNA, 33 bp, Homo sapien
aatacagaagcacttctataaaggctcttttgc

SEQ ID NO: 882067 - DNA, 33 bp, Homo sapien
ttctatgcagatgaagaagctgcaccctgttgg

SEQ ID NO: 882068 - DNA, 33 bp, Homo sapien
ttctatgcagatgaaggagctgcaccctgttgg

SEQ ID NO: 882069 - DNA, 33 bp, Homo sapien
ttctgattggagagcagctcttttccagtggta

SEQ ID NO: 882070 - DNA, 33 bp, Homo sapien
ttctgattggagagcatctcttttccagtggta

SEQ ID NO: 882071 - DNA, 33 bp, Homo sapien
tttgtaagacctcttgcaataactcaatagctg

SEQ ID NO: 882072 - DNA, 33 bp, Homo sapien
tttgtaagacctcttgtaataactcaatagctg

SEQ ID NO: 882073 - DNA, 33 bp, Homo sapien
cctccacagaactcgaatatgctgacaccctga

SEQ ID NO: 882074 - DNA, 33 bp, Homo sapien
cctccacagaactcgactatgctgacaccctga

SEQ ID NO: 882075 - DNA, 33 bp, Homo sapien
atggtactacctcaaacatactcaacataacgg

SEQ ID NO: 882076 - DNA, 33 bp, Homo sapien
atggtactacctcaaatatactcaacataacgg

SEQ ID NO: 882077 - DNA, 33 bp, Homo sapien
acattaaattctacttcaactgctacatttcta

SEQ ID NO: 882078 - DNA, 33 bp, Homo sapien
acattaaattctacttgaactgctacatttcta

SEQ ID NO: 882079 - DNA, 33 bp, Homo sapien
aaaggacaaaagctgaatagacagcaaggaagg

SEQ ID NO: 882080 - DNA, 33 bp, Homo sapien
aaaggacaaaagctgagtagacagcaaggaagg

SEQ ID NO: 882081 - DNA, 33 bp, Homo sapien
ctaaaattaaaatcacgacttctgcttttttat

SEQ ID NO: 882082 - DNA, 33 bp, Homo sapien
ctaaaattaaaatcactacttctgcttttttat

SEQ ID NO: 882083 - DNA, 33 bp, Homo sapien
ctcacaggtgttcatacacttaacaaagaaaat

SEQ ID NO: 882084 - DNA, 33 bp, Homo sapien
ctcacaggtgttcatatacttaacaaagaaaat

SEQ ID NO: 882085 - DNA, 33 bp, Homo sapien
gaagagcacatagagacgtaatttacagtttgt

SEQ ID NO: 882086 - DNA, 33 bp, Homo sapien
gaagagcacatagagatgtaatttacagtttgt

SEQ ID NO: 882087 - DNA, 33 bp, Homo sapien
cgctaccttcactaaacgttggcagttaatttt

SEQ ID NO: 882088 - DNA, 33 bp, Homo sapien
cgctaccttcactaaatgttggcagttaatttt

SEQ ID NO: 882089 - DNA, 33 bp, Homo sapien
gaacactactccacaacagaaattgatgatatg

SEQ ID NO: 882090 - DNA, 33 bp, Homo sapien
gaacactactccacaatagaaattgatgatatg

SEQ ID NO: 882091 - DNA, 33 bp, Homo sapien
gtttaaaaatctgtagaaccacccactttgctc

SEQ ID NO: 882092 - DNA, 33 bp, Homo sapien
gtttaaaaatctgtagcaccacccactttgctc

SEQ ID NO: 882093 - DNA, 33 bp, Homo sapien
tctttatgtattcatcaaaatcaatacatcaaa

SEQ ID NO: 882094 - DNA, 33 bp, Homo sapien
tctttatgtattcatcgaaatcaatacatcaaa

SEQ ID NO: 882095 - DNA, 33 bp, Homo sapien
ttgtttcttcaggataaaactttagatcactgt

SEQ ID NO: 882096 - DNA, 33 bp, Homo sapien
ttgtttcttcaggatagaactttagatcactgt

SEQ ID NO: 882097 - DNA, 33 bp, Homo sapien
ggggctctgtggtgaaaacagcaatgtgaccac

SEQ ID NO: 882098 - DNA, 33 bp, Homo sapien
ggggctctgtggtgaagacagcaatgtgaccac

SEQ ID NO: 882099 - DNA, 33 bp, Homo sapien
ttgacttaataaggtaacagaagttccatgttc

SEQ ID NO: 882100 - DNA, 33 bp, Homo sapien
ttgacttaataaggtagcagaagttccatgttc

SEQ ID NO: 882101 - DNA, 33 bp, Homo sapien
ccatctgtcagataaacgtagacagctcatttt

SEQ ID NO: 882102 - DNA, 33 bp, Homo sapien
ccatctgtcagataaatgtagacagctcatttt

SEQ ID NO: 882103 - DNA, 33 bp, Homo sapien
gggattgctgggatgagaaatttttatttcaaa

SEQ ID NO: 882104 - DNA, 33 bp, Homo sapien
gggattgctgggatgataaatttttatttcaaa

SEQ ID NO: 882105 - DNA, 33 bp, Homo sapien
ttgctccatatcatcaagtttccagaagtaact

SEQ ID NO: 882106 - DNA, 33 bp, Homo sapien
ttgctccatatcatcaggtttccagaagtaact

SEQ ID NO: 882107 - DNA, 33 bp, Homo sapien
ttatgatgtagatgagcaaactgagggaggaaa

SEQ ID NO: 882108 - DNA, 33 bp, Homo sapien
ttatgatgtagatgaggaaactgagggaggaaa

SEQ ID NO: 882109 - DNA, 33 bp, Homo sapien
aagtgaaatagccagacgttgggcatagaagac

SEQ ID NO: 882110 - DNA, 33 bp, Homo sapien
aagtgaaatagccagatgttgggcatagaagac

SEQ ID NO: 882111 - DNA, 33 bp, Homo sapien
ttttgaatgtgtgtcacctttaacttcaggtac

SEQ ID NO: 882112 - DNA, 33 bp, Homo sapien
ttttgaatgtgtgtcagctttaacttcaggtac

SEQ ID NO: 882113 - DNA, 33 bp, Homo sapien
taataagtgccattaaaagctcaaaattaattc

SEQ ID NO: 882114 - DNA, 33 bp, Homo sapien
taataagtgccattaagagctcaaaattaattc

SEQ ID NO: 882115 - DNA, 33 bp, Homo sapien
tattctgttactttggcatagtctagcttaacc

SEQ ID NO: 882116 - DNA, 33 bp, Homo sapien
tattctgttactttggtatagtctagcttaacc

SEQ ID NO: 882117 - DNA, 33 bp, Homo sapien
cgttgtgaatttgataaagaacagtataataat

SEQ ID NO: 882118 - DNA, 33 bp, Homo sapien
cgttgtgaatttgatatagaacagtataataat

SEQ ID NO: 882119 - DNA, 33 bp, Homo sapien
ctgtcagagtttcctacattacctcactgctct

SEQ ID NO: 882120 - DNA, 33 bp, Homo sapien
ctgtcagagtttcctatattacctcactgctct

SEQ ID NO: 882121 - DNA, 33 bp, Homo sapien
gaacatgagtttagagacatatagaccggccat

SEQ ID NO: 882122 - DNA, 33 bp, Homo sapien
gaacatgagtttagagtcatatagaccggccat

SEQ ID NO: 882123 - DNA, 33 bp, Homo sapien
ctcaactcctagagcccccagtccagcagcaga

SEQ ID NO: 882124 - DNA, 33 bp, Homo sapien
ctcaactcctagagcctccagtccagcagcaga

SEQ ID NO: 882125 - DNA, 33 bp, Homo sapien
taaggggtattcagctaactgcaaaggatgatt

SEQ ID NO: 882126 - DNA, 33 bp, Homo sapien
taaggggtattcagctgactgcaaaggatgatt

SEQ ID NO: 882127 - DNA, 33 bp, Homo sapien
ttgtgaggattcagtacgttatcataaatcatg

SEQ ID NO: 882128 - DNA, 33 bp, Homo sapien
ttgtgaggattcagtaggttatcataaatcatg

SEQ ID NO: 882129 - DNA, 33 bp, Homo sapien
gatccaacagtcttgaaggtcactagaccactg

SEQ ID NO: 882130 - DNA, 33 bp, Homo sapien
gatccaacagtcttgagggtcactagaccactg

SEQ ID NO: 882131 - DNA, 33 bp, Homo sapien
aaaaaaaaacgtggaacactcacaatgcaacat

SEQ ID NO: 882132 - DNA, 33 bp, Homo sapien
aaaaaaaaacgtggaatactcacaatgcaacat

SEQ ID NO: 882133 - DNA, 33 bp, Homo sapien
gaaccacagtataatacggcagcacgatcaata

SEQ ID NO: 882134 - DNA, 33 bp, Homo sapien
gaaccacagtataatatggcagcacgatcaata

SEQ ID NO: 882135 - DNA, 33 bp, Homo sapien
atcaatatattttcataagttcagtacatgaaa

SEQ ID NO: 882136 - DNA, 33 bp, Homo sapien
atcaatatattttcatgagttcagtacatgaaa

SEQ ID NO: 882137 - DNA, 33 bp, Homo sapien
acttatattttgtacacgtgcgtatattttgtg

SEQ ID NO: 882138 - DNA, 33 bp, Homo sapien
acttatattttgtacatgtgcgtatattttgtg

SEQ ID NO: 882139 - DNA, 33 bp, Homo sapien
tgcaaacctagtccaccgtaatgtcctttactg

SEQ ID NO: 882140 - DNA, 33 bp, Homo sapien
tgcaaacctagtccactgtaatgtcctttactg

SEQ ID NO: 882141 - DNA, 33 bp, Homo sapien
ctaccataaagtgcaacggctctatgaagtcag

SEQ ID NO: 882142 - DNA, 33 bp, Homo sapien
ctaccataaagtgcaagggctctatgaagtcag

SEQ ID NO: 882143 - DNA, 33 bp, Homo sapien
aggcttacagagtggacgggaactcataggcca

SEQ ID NO: 882144 - DNA, 33 bp, Homo sapien
aggcttacagagtggatgggaactcataggcca

SEQ ID NO: 882145 - DNA, 33 bp, Homo sapien
tgtttagtgacaagtacgttcgttaaaatatca

SEQ ID NO: 882146 - DNA, 33 bp, Homo sapien
tgtttagtgacaagtatgttcgttaaaatatca

SEQ ID NO: 882147 - DNA, 33 bp, Homo sapien
aaatgggcaagaaaaactacttaactcattggt

SEQ ID NO: 882148 - DNA, 33 bp, Homo sapien
aaatgggcaagaaaaattacttaactcattggt

SEQ ID NO: 882149 - DNA, 33 bp, Homo sapien
taactttcatccatcaactgattttatgaacac

SEQ ID NO: 882150 - DNA, 33 bp, Homo sapien
taactttcatccatcagctgattttatgaacac

SEQ ID NO: 882151 - DNA, 33 bp, Homo sapien
atccttggtgccagacaacctcggtgcccatcc

SEQ ID NO: 882152 - DNA, 33 bp, Homo sapien
atccttggtgccagacgacctcggtgcccatcc

SEQ ID NO: 882153 - DNA, 33 bp, Homo sapien
ttcacatgatcatgtacggaataaagaaataga

SEQ ID NO: 882154 - DNA, 33 bp, Homo sapien
ttcacatgatcatgtatggaataaagaaataga

SEQ ID NO: 882155 - DNA, 33 bp, Homo sapien
ctttgaactctgagaaaagagaatcctgaatat

SEQ ID NO: 882156 - DNA, 33 bp, Homo sapien
ctttgaactctgagaacagagaatcctgaatat

SEQ ID NO: 882157 - DNA, 33 bp, Homo sapien
gatctatttgctagaagcctctctaggttagct

SEQ ID NO: 882158 - DNA, 33 bp, Homo sapien
gatctatttgctagaatcctctctaggttagct

SEQ ID NO: 882159 - DNA, 33 bp, Homo sapien
actgaatcatttgcagaaacctctattagctag

SEQ ID NO: 882160 - DNA, 33 bp, Homo sapien
actgaatcatttgcaggaacctctattagctag

SEQ ID NO: 882161 - DNA, 33 bp, Homo sapien
tctagaaacgaggagaggtagaacacactaata

SEQ ID NO: 882162 - DNA, 33 bp, Homo sapien
tctagaaacgaggagatgtagaacacactaata

SEQ ID NO: 882163 - DNA, 33 bp, Homo sapien
tatttgaaaaggaaaactctcttcagttcaatg

SEQ ID NO: 882164 - DNA, 33 bp, Homo sapien
tatttgaaaaggaaaattctcttcagttcaatg

SEQ ID NO: 882165 - DNA, 33 bp, Homo sapien
ctattaaagtgtggaacaagacgaggatcctaa

SEQ ID NO: 882166 - DNA, 33 bp, Homo sapien
ctattaaagtgtggaataagacgaggatcctaa

SEQ ID NO: 882167 - DNA, 33 bp, Homo sapien
tagaactattctatcaactttcagtgtcagtgg

SEQ ID NO: 882168 - DNA, 33 bp, Homo sapien
tagaactattctatcatctttcagtgtcagtgg

SEQ ID NO: 882169 - DNA, 33 bp, Homo sapien
actagcacatcttcccactgaaaacttttatca

SEQ ID NO: 882170 - DNA, 33 bp, Homo sapien
actagcacatcttcccgctgaaaacttttatca

SEQ ID NO: 882171 - DNA, 33 bp, Homo sapien
ctcaacatgtatatagcccagtggatctcaaca

SEQ ID NO: 882172 - DNA, 33 bp, Homo sapien
ctcaacatgtatatagtccagtggatctcaaca

SEQ ID NO: 882173 - DNA, 33 bp, Homo sapien
gtggcattggctgagagggaaatggccaagaaa

SEQ ID NO: 882174 - DNA, 33 bp, Homo sapien
gtggcattggctgagatggaaatggccaagaaa

SEQ ID NO: 882175 - DNA, 33 bp, Homo sapien
atactgggtcgtgggaacttgcacagccagact

SEQ ID NO: 882176 - DNA, 33 bp, Homo sapien
atactgggtcgtgggaccttgcacagccagact

SEQ ID NO: 882177 - DNA, 33 bp, Homo sapien
tcaccttcaaaatccccaaaacgtggttgaata

SEQ ID NO: 882178 - DNA, 33 bp, Homo sapien
tcaccttcaaaatccctaaaacgtggttgaata

SEQ ID NO: 882179 - DNA, 33 bp, Homo sapien
cattaagaattggagaaagattggcagataaat

SEQ ID NO: 882180 - DNA, 33 bp, Homo sapien
cattaagaattggagagagattggcagataaat

SEQ ID NO: 882181 - DNA, 33 bp, Homo sapien
tcaagacttagctttgcaattgaacctgccatc

SEQ ID NO: 882182 - DNA, 33 bp, Homo sapien
tcaagacttagctttgtaattgaacctgccatc

SEQ ID NO: 882183 - DNA, 33 bp, Homo sapien
aggagacaattaagacacttgcttctcttctaa

SEQ ID NO: 882184 - DNA, 33 bp, Homo sapien
aggagacaattaagacccttgcttctcttctaa

SEQ ID NO: 882185 - DNA, 33 bp, Homo sapien
tatcgattctataaacgatgccattttcagaga

SEQ ID NO: 882186 - DNA, 33 bp, Homo sapien
tatcgattctataaactatgccattttcagaga

SEQ ID NO: 882187 - DNA, 33 bp, Homo sapien
aagagttgtcttgagcaccttcagtttaaaagg

SEQ ID NO: 882188 - DNA, 33 bp, Homo sapien
aagagttgtcttgagcgccttcagtttaaaagg

SEQ ID NO: 882189 - DNA, 33 bp, Homo sapien
gtttcctgcctgcctcacaattaccccacaaga

SEQ ID NO: 882190 - DNA, 33 bp, Homo sapien
gtttcctgcctgcctcgcaattaccccacaaga

SEQ ID NO: 882191 - DNA, 33 bp, Homo sapien
cttcattctgtgcttgaagactgtatttaccca

SEQ ID NO: 882192 - DNA, 33 bp, Homo sapien
cttcattctgtgcttggagactgtatttaccca

SEQ ID NO: 882193 - DNA, 33 bp, Homo sapien
tcctgatttttttgctcacatttattgatcatt

SEQ ID NO: 882194 - DNA, 33 bp, Homo sapien
tcctgatttttttgctgacatttattgatcatt

SEQ ID NO: 882195 - DNA, 33 bp, Homo sapien
aaacaactgctgaataataggcacttagtaggc

SEQ ID NO: 882196 - DNA, 33 bp, Homo sapien
aaacaactgctgaatagtaggcacttagtaggc

SEQ ID NO: 882197 - DNA, 33 bp, Homo sapien
agactgtaaagagaaactaagcatgtgttacca

SEQ ID NO: 882198 - DNA, 33 bp, Homo sapien
agactgtaaagagaaagtaagcatgtgttacca

SEQ ID NO: 882199 - DNA, 33 bp, Homo sapien
tgaaaatgtttggagacgattcttctggttgac

SEQ ID NO: 882200 - DNA, 33 bp, Homo sapien
tgaaaatgtttggagatgattcttctggttgac

SEQ ID NO: 882201 - DNA, 33 bp, Homo sapien
tctgtataaattcctcgcaggtagatgacagca

SEQ ID NO: 882202 - DNA, 33 bp, Homo sapien
tctgtataaattcctctcaggtagatgacagca

SEQ ID NO: 882203 - DNA, 33 bp, Homo sapien
gaccaggtttccaaaacgttgttcagattttgc

SEQ ID NO: 882204 - DNA, 33 bp, Homo sapien
gaccaggtttccaaaatgttgttcagattttgc

SEQ ID NO: 882205 - DNA, 33 bp, Homo sapien
tcctaactatttccaaatcaattcacttaggga

SEQ ID NO: 882206 - DNA, 33 bp, Homo sapien
tcctaactatttccaagtcaattcacttaggga

SEQ ID NO: 882207 - DNA, 33 bp, Homo sapien
gcagtctaaataccagccccagccatcacagca

SEQ ID NO: 882208 - DNA, 33 bp, Homo sapien
gcagtctaaataccagtcccagccatcacagca

SEQ ID NO: 882209 - DNA, 33 bp, Homo sapien
agcagggccacatccactgcttcccatgagttt

SEQ ID NO: 882210 - DNA, 33 bp, Homo sapien
agcagggccacatccagtgcttcccatgagttt

SEQ ID NO: 882211 - DNA, 33 bp, Homo sapien
caggaaagggttcttgaagttctccaacagttc

SEQ ID NO: 882212 - DNA, 33 bp, Homo sapien
caggaaagggttcttgcagttctccaacagttc

SEQ ID NO: 882213 - DNA, 33 bp, Homo sapien
gcacgaggagaacctacaactgtgggatcgcag

SEQ ID NO: 882214 - DNA, 33 bp, Homo sapien
gcacgaggagaacctataactgtgggatcgcag

SEQ ID NO: 882215 - DNA, 33 bp, Homo sapien
gtcacaggtaaagctgaatttcaatttatttaa

SEQ ID NO: 882216 - DNA, 33 bp, Homo sapien
gtcacaggtaaagctggatttcaatttatttaa

SEQ ID NO: 882217 - DNA, 33 bp, Homo sapien
agcatctaaagagctaccgtcctgtttctgtaa

SEQ ID NO: 882218 - DNA, 33 bp, Homo sapien
agcatctaaagagctatcgtcctgtttctgtaa

SEQ ID NO: 882219 - DNA, 33 bp, Homo sapien
gagatgtgttgcaaggaatctctggattataag

SEQ ID NO: 882220 - DNA, 33 bp, Homo sapien
gagatgtgttgcaagggatctctggattataag

SEQ ID NO: 882221 - DNA, 33 bp, Homo sapien
acttaagcttttgcacccactctggctgagctg

SEQ ID NO: 882222 - DNA, 33 bp, Homo sapien
acttaagcttttgcactcactctggctgagctg

SEQ ID NO: 882223 - DNA, 33 bp, Homo sapien
caggcctggcaagctcccttagcacctggatga

SEQ ID NO: 882224 - DNA, 33 bp, Homo sapien
caggcctggcaagctctcttagcacctggatga

SEQ ID NO: 882225 - DNA, 33 bp, Homo sapien
agccagaatacgctacacttggatctcatcatt

SEQ ID NO: 882226 - DNA, 33 bp, Homo sapien
agccagaatacgctactcttggatctcatcatt

SEQ ID NO: 882227 - DNA, 33 bp, Homo sapien
tcacagttcacagaaacggaaaaaaagaaatga

SEQ ID NO: 882228 - DNA, 33 bp, Homo sapien
tcacagttcacagaaatggaaaaaaagaaatga

SEQ ID NO: 882229 - DNA, 33 bp, Homo sapien
ggggaggtcaaaggtcacttctgaaggaacagt

SEQ ID NO: 882230 - DNA, 33 bp, Homo sapien
ggggaggtcaaaggtcgcttctgaaggaacagt

SEQ ID NO: 882231 - DNA, 33 bp, Homo sapien
ccatctgtaatgcactcagggcccagaaatcac

SEQ ID NO: 882232 - DNA, 33 bp, Homo sapien
ccatctgtaatgcactgagggcccagaaatcac

SEQ ID NO: 882233 - DNA, 33 bp, Homo sapien
ttttgtgttgggccagacatgaaaacagaagct

SEQ ID NO: 882234 - DNA, 33 bp, Homo sapien
ttttgtgttgggccagccatgaaaacagaagct

SEQ ID NO: 882235 - DNA, 33 bp, Homo sapien
aatttcatttcggatgcaggtctcctttgcaaa

SEQ ID NO: 882236 - DNA, 33 bp, Homo sapien
aatttcatttcggatgtaggtctcctttgcaaa

SEQ ID NO: 882237 - DNA, 33 bp, Homo sapien
gagagaaactctgtgacgttcaagtgctttaca

SEQ ID NO: 882238 - DNA, 33 bp, Homo sapien
gagagaaactctgtgatgttcaagtgctttaca

SEQ ID NO: 882239 - DNA, 33 bp, Homo sapien
taacagaatgatcaaaatttcccaaacctaagc

SEQ ID NO: 882240 - DNA, 33 bp, Homo sapien
taacagaatgatcaaattttcccaaacctaagc

SEQ ID NO: 882241 - DNA, 33 bp, Homo sapien
gacctggcaatgaggtaaagttaggctttggct

SEQ ID NO: 882242 - DNA, 33 bp, Homo sapien
gacctggcaatgaggtgaagttaggctttggct

SEQ ID NO: 882243 - DNA, 33 bp, Homo sapien
actactaccatgtgtaccaccactaataaaaat

SEQ ID NO: 882244 - DNA, 33 bp, Homo sapien
actactaccatgtgtatcaccactaataaaaat

SEQ ID NO: 882245 - DNA, 33 bp, Homo sapien
aatcaaagaacatccacgtcagtgacctctggt

SEQ ID NO: 882246 - DNA, 33 bp, Homo sapien
aatcaaagaacatccatgtcagtgacctctggt

SEQ ID NO: 882247 - DNA, 33 bp, Homo sapien
gggtgcccccatcaggcaggcttcagtttgagt

SEQ ID NO: 882248 - DNA, 33 bp, Homo sapien
gggtgcccccatcaggtaggcttcagtttgagt

SEQ ID NO: 882249 - DNA, 33 bp, Homo sapien
gtgacttttttgctccaaaagaaccaattttca

SEQ ID NO: 882250 - DNA, 33 bp, Homo sapien
gtgacttttttgctcccaaagaaccaattttca

SEQ ID NO: 882251 - DNA, 33 bp, Homo sapien
gggatttgacacagaacgagatgaccacacagg

SEQ ID NO: 882252 - DNA, 33 bp, Homo sapien
gggatttgacacagaatgagatgaccacacagg

SEQ ID NO: 882253 - DNA, 33 bp, Homo sapien
ctcgcactgtttgagcactttccatgtgcccgg

SEQ ID NO: 882254 - DNA, 33 bp, Homo sapien
ctcgcactgtttgagcgctttccatgtgcccgg

SEQ ID NO: 882255 - DNA, 33 bp, Homo sapien
gattgcatcttttacactagcagcatcaaaacc

SEQ ID NO: 882256 - DNA, 33 bp, Homo sapien
gattgcatcttttacattagcagcatcaaaacc

SEQ ID NO: 882257 - DNA, 33 bp, Homo sapien
ttaaatgtattttgtacgctttccaaacatggg

SEQ ID NO: 882258 - DNA, 33 bp, Homo sapien
ttaaatgtattttgtatgctttccaaacatggg

SEQ ID NO: 882259 - DNA, 33 bp, Homo sapien
gagggtaacagatcaaactacactgggttaatg

SEQ ID NO: 882260 - DNA, 33 bp, Homo sapien
gagggtaacagatcaagctacactgggttaatg

SEQ ID NO: 882261 - DNA, 33 bp, Homo sapien
tgtatctagttagtgacaatttgggaaaagatc

SEQ ID NO: 882262 - DNA, 33 bp, Homo sapien
tgtatctagttagtgataatttgggaaaagatc

SEQ ID NO: 882263 - DNA, 33 bp, Homo sapien
gcacttgaaaaaaatacctgtgaaaggagtgac

SEQ ID NO: 882264 - DNA, 33 bp, Homo sapien
gcacttgaaaaaaatatctgtgaaaggagtgac

SEQ ID NO: 882265 - DNA, 33 bp, Homo sapien
agttatgtattgtcaccgtaaaggtaacttttt

SEQ ID NO: 882266 - DNA, 33 bp, Homo sapien
agttatgtattgtcactgtaaaggtaacttttt

SEQ ID NO: 882267 - DNA, 33 bp, Homo sapien
ctgataacaatgcctaaatcaaagctcagtgtg

SEQ ID NO: 882268 - DNA, 33 bp, Homo sapien
ctgataacaatgcctacatcaaagctcagtgtg

SEQ ID NO: 882269 - DNA, 33 bp, Homo sapien
tgtcagtgatgctaacaaaacaaattcacgttt

SEQ ID NO: 882270 - DNA, 33 bp, Homo sapien
tgtcagtgatgctaacgaaacaaattcacgttt

SEQ ID NO: 882271 - DNA, 33 bp, Homo sapien
aaaaacatgactaaaaactgatactgaactctg

SEQ ID NO: 882272 - DNA, 33 bp, Homo sapien
aaaaacatgactaaaatctgatactgaactctg

SEQ ID NO: 882273 - DNA, 33 bp, Homo sapien
gtcattagaaaaactacgtgactttaggtcctc

SEQ ID NO: 882274 - DNA, 33 bp, Homo sapien
gtcattagaaaaactaggtgactttaggtcctc

SEQ ID NO: 882275 - DNA, 33 bp, Homo sapien
aatttatataaccccaatactagccaaaatact

SEQ ID NO: 882276 - DNA, 33 bp, Homo sapien
aatttatataaccccagtactagccaaaatact

SEQ ID NO: 882277 - DNA, 33 bp, Homo sapien
acaaatgcataattaaaagagtctgtcagcagg

SEQ ID NO: 882278 - DNA, 33 bp, Homo sapien
acaaatgcataattaagagagtctgtcagcagg

SEQ ID NO: 882279 - DNA, 33 bp, Homo sapien
cctcacctattcgaaactttaaagactagagga

SEQ ID NO: 882280 - DNA, 33 bp, Homo sapien
cctcacctattcgaaagtttaaagactagagga

SEQ ID NO: 882281 - DNA, 33 bp, Homo sapien
tgaaaaggaggccaacaataccacaaatttcaa

SEQ ID NO: 882282 - DNA, 33 bp, Homo sapien
tgaaaaggaggccaacgataccacaaatttcaa

SEQ ID NO: 882283 - DNA, 33 bp, Homo sapien
cccatggattcaaccaatgaggaaattccacag

SEQ ID NO: 882284 - DNA, 33 bp, Homo sapien
cccatggattcaaccagtgaggaaattccacag

SEQ ID NO: 882285 - DNA, 33 bp, Homo sapien
tccagtctatattaccacttaaataactgctta

SEQ ID NO: 882286 - DNA, 33 bp, Homo sapien
tccagtctatattacctcttaaataactgctta

SEQ ID NO: 882287 - DNA, 33 bp, Homo sapien
gggcttgaggtacaagaagactttctgggtttg

SEQ ID NO: 882288 - DNA, 33 bp, Homo sapien
gggcttgaggtacaaggagactttctgggtttg

SEQ ID NO: 882289 - DNA, 33 bp, Homo sapien
tttttggcatagcacccaaactactaaaacatg

SEQ ID NO: 882290 - DNA, 33 bp, Homo sapien
tttttggcatagcaccgaaactactaaaacatg

SEQ ID NO: 882291 - DNA, 33 bp, Homo sapien
gaagtagttactttacaaattgttgacattaat

SEQ ID NO: 882292 - DNA, 33 bp, Homo sapien
gaagtagttactttacgaattgttgacattaat

SEQ ID NO: 882293 - DNA, 33 bp, Homo sapien
ctcagaatgacctcagcaatgtcaaatgtaaaa

SEQ ID NO: 882294 - DNA, 33 bp, Homo sapien
ctcagaatgacctcagtaatgtcaaatgtaaaa

SEQ ID NO: 882295 - DNA, 33 bp, Homo sapien
accttatctaaaatgaataagaggtgatggacc

SEQ ID NO: 882296 - DNA, 33 bp, Homo sapien
accttatctaaaatgagtaagaggtgatggacc

SEQ ID NO: 882297 - DNA, 33 bp, Homo sapien
ttgattccacattgaaagcacgagtgcatataa

SEQ ID NO: 882298 - DNA, 33 bp, Homo sapien
ttgattccacattgaaggcacgagtgcatataa

SEQ ID NO: 882299 - DNA, 33 bp, Homo sapien
aatggtacagtttttacgtagttttcgaatgta

SEQ ID NO: 882300 - DNA, 33 bp, Homo sapien
aatggtacagtttttatgtagttttcgaatgta

SEQ ID NO: 882301 - DNA, 33 bp, Homo sapien
tgctatggatcctgcaactgtgggctactttaa

SEQ ID NO: 882302 - DNA, 33 bp, Homo sapien
tgctatggatcctgcacctgtgggctactttaa

SEQ ID NO: 882303 - DNA, 33 bp, Homo sapien
taagctaataaatacccagacggccgtgtgaat

SEQ ID NO: 882304 - DNA, 33 bp, Homo sapien
taagctaataaataccgagacggccgtgtgaat

SEQ ID NO: 882305 - DNA, 33 bp, Homo sapien
caagggaaaaccttgaccgattcacaaggacac

SEQ ID NO: 882306 - DNA, 33 bp, Homo sapien
caagggaaaaccttgagcgattcacaaggacac

SEQ ID NO: 882307 - DNA, 33 bp, Homo sapien
tgggaagatgaatagaacaaacaaacaatcctc

SEQ ID NO: 882308 - DNA, 33 bp, Homo sapien
tgggaagatgaatagaccaaacaaacaatcctc

SEQ ID NO: 882309 - DNA, 33 bp, Homo sapien
ccactccatgtgctgagaactacacccaaagct

SEQ ID NO: 882310 - DNA, 33 bp, Homo sapien
ccactccatgtgctgataactacacccaaagct

SEQ ID NO: 882311 - DNA, 33 bp, Homo sapien
gctagttggcatcatcaaggtcccgggctcaga

SEQ ID NO: 882312 - DNA, 33 bp, Homo sapien
gctagttggcatcatcgaggtcccgggctcaga

SEQ ID NO: 882313 - DNA, 33 bp, Homo sapien
ccttgttccaagtctaacctcataatttatcac

SEQ ID NO: 882314 - DNA, 33 bp, Homo sapien
ccttgttccaagtctagcctcataatttatcac

SEQ ID NO: 882315 - DNA, 33 bp, Homo sapien
gagcttgtgtattgtacctccgggtttccctag

SEQ ID NO: 882316 - DNA, 33 bp, Homo sapien
gagcttgtgtattgtatctccgggtttccctag

SEQ ID NO: 882317 - DNA, 33 bp, Homo sapien
gcaactgagctacgaaattcaggatctcttagc

SEQ ID NO: 882318 - DNA, 33 bp, Homo sapien
gcaactgagctacgaagttcaggatctcttagc

SEQ ID NO: 882319 - DNA, 33 bp, Homo sapien
gggcaccaagtaatagcagtgatagttaatggg

SEQ ID NO: 882320 - DNA, 33 bp, Homo sapien
gggcaccaagtaatagtagtgatagttaatggg

SEQ ID NO: 882321 - DNA, 33 bp, Homo sapien
tgttttttacagcatcgagtacacttcctgaca

SEQ ID NO: 882322 - DNA, 33 bp, Homo sapien
tgttttttacagcatctagtacacttcctgaca

SEQ ID NO: 882323 - DNA, 33 bp, Homo sapien
cttagtctaatgcatcaattacttggttattga

SEQ ID NO: 882324 - DNA, 33 bp, Homo sapien
cttagtctaatgcatcgattacttggttattga

SEQ ID NO: 882325 - DNA, 33 bp, Homo sapien
tgaaattccatttctcaagaacatagtacatag

SEQ ID NO: 882326 - DNA, 33 bp, Homo sapien
tgaaattccatttctcgagaacatagtacatag

SEQ ID NO: 882327 - DNA, 33 bp, Homo sapien
tggggtgaagagcacacgttcaaaagtcagaac

SEQ ID NO: 882328 - DNA, 33 bp, Homo sapien
tggggtgaagagcacaggttcaaaagtcagaac

SEQ ID NO: 882329 - DNA, 33 bp, Homo sapien
gaggtgctaccaaacacggaaataccccaggat

SEQ ID NO: 882330 - DNA, 33 bp, Homo sapien
gaggtgctaccaaacatggaaataccccaggat

SEQ ID NO: 882331 - DNA, 33 bp, Homo sapien
tggtccacccacaacaatgttctttatgttggg

SEQ ID NO: 882332 - DNA, 33 bp, Homo sapien
tggtccacccacaacagtgttctttatgttggg

SEQ ID NO: 882333 - DNA, 33 bp, Homo sapien
caccacaagggccaaagatagtacttaattcaa

SEQ ID NO: 882334 - DNA, 33 bp, Homo sapien
caccacaagggccaaatatagtacttaattcaa

SEQ ID NO: 882335 - DNA, 33 bp, Homo sapien
ttaaagttaatcccacacaacctctgcatattt

SEQ ID NO: 882336 - DNA, 33 bp, Homo sapien
ttaaagttaatcccacgcaacctctgcatattt

SEQ ID NO: 882337 - DNA, 33 bp, Homo sapien
gagtttgcaggctgtacgtaaggtctctgtggc

SEQ ID NO: 882338 - DNA, 33 bp, Homo sapien
gagtttgcaggctgtatgtaaggtctctgtggc

SEQ ID NO: 882339 - DNA, 33 bp, Homo sapien
aaaaaaattcttctgaataatttcatgcatcta

SEQ ID NO: 882340 - DNA, 33 bp, Homo sapien
aaaaaaattcttctgagtaatttcatgcatcta

SEQ ID NO: 882341 - DNA, 33 bp, Homo sapien
ttctgttgctgtgtaccatatcaccacacactt

SEQ ID NO: 882342 - DNA, 33 bp, Homo sapien
ttctgttgctgtgtacgatatcaccacacactt

SEQ ID NO: 882343 - DNA, 33 bp, Homo sapien
cgacaggaagggactacctgccatcgagagtgg

SEQ ID NO: 882344 - DNA, 33 bp, Homo sapien
cgacaggaagggactatctgccatcgagagtgg

SEQ ID NO: 882345 - DNA, 33 bp, Homo sapien
taattaacgtcaaacacgaaacaatcagtgtgt

SEQ ID NO: 882346 - DNA, 33 bp, Homo sapien
taattaacgtcaaacatgaaacaatcagtgtgt

SEQ ID NO: 882347 - DNA, 33 bp, Homo sapien
gtctgaggttcctgcaacgggtttatgtccttc

SEQ ID NO: 882348 - DNA, 33 bp, Homo sapien
gtctgaggttcctgcagcgggtttatgtccttc

SEQ ID NO: 882349 - DNA, 33 bp, Homo sapien
ttgctgttggcttgccaggagaaaccgacatca

SEQ ID NO: 882350 - DNA, 33 bp, Homo sapien
ttgctgttggcttgccgggagaaaccgacatca

SEQ ID NO: 882351 - DNA, 33 bp, Homo sapien
agctaacattctcaaacggcagtgatgggctgg

SEQ ID NO: 882352 - DNA, 33 bp, Homo sapien
agctaacattctcaaatggcagtgatgggctgg

SEQ ID NO: 882353 - DNA, 33 bp, Homo sapien
cctgatgttctctactcgccttcataaataaga

SEQ ID NO: 882354 - DNA, 33 bp, Homo sapien
cctgatgttctctacttgccttcataaataaga

SEQ ID NO: 882355 - DNA, 33 bp, Homo sapien
tcttacacagggttacaatagcttaatttgttc

SEQ ID NO: 882356 - DNA, 33 bp, Homo sapien
tcttacacagggttacgatagcttaatttgttc

SEQ ID NO: 882357 - DNA, 33 bp, Homo sapien
tagaaatgcaagaacccggaaaggaagggatag

SEQ ID NO: 882358 - DNA, 33 bp, Homo sapien
tagaaatgcaagaacctggaaaggaagggatag

SEQ ID NO: 882359 - DNA, 33 bp, Homo sapien
ctttctagacagaacactggagcagcctgctca

SEQ ID NO: 882360 - DNA, 33 bp, Homo sapien
ctttctagacagaacattggagcagcctgctca

SEQ ID NO: 882361 - DNA, 33 bp, Homo sapien
atgttcaacctgtgagcaagagagaccaatggt

SEQ ID NO: 882362 - DNA, 33 bp, Homo sapien
atgttcaacctgtgaggaagagagaccaatggt

SEQ ID NO: 882363 - DNA, 33 bp, Homo sapien
cgagagcacaagcaatcagcagatagcccagac

SEQ ID NO: 882364 - DNA, 33 bp, Homo sapien
cgagagcacaagcaatgagcagatagcccagac

SEQ ID NO: 882365 - DNA, 33 bp, Homo sapien
ataatagtacctacaacgaggattcgattagtc

SEQ ID NO: 882366 - DNA, 33 bp, Homo sapien
ataatagtacctacaatgaggattcgattagtc

SEQ ID NO: 882367 - DNA, 33 bp, Homo sapien
tggccacgctctgcaccaaacaaagccagtgtg

SEQ ID NO: 882368 - DNA, 33 bp, Homo sapien
tggccacgctctgcactaaacaaagccagtgtg

SEQ ID NO: 882369 - DNA, 33 bp, Homo sapien
gcagtgtccaagaataccttttggtcaattaca

SEQ ID NO: 882370 - DNA, 33 bp, Homo sapien
gcagtgtccaagaatatcttttggtcaattaca

SEQ ID NO: 882371 - DNA, 33 bp, Homo sapien
ctttctttctatgctcccagaaacagcctagct

SEQ ID NO: 882372 - DNA, 33 bp, Homo sapien
ctttctttctatgctcgcagaaacagcctagct

SEQ ID NO: 882373 - DNA, 33 bp, Homo sapien
tctcctaaagcacttacaatctgtaccgtgtaa

SEQ ID NO: 882374 - DNA, 33 bp, Homo sapien
tctcctaaagcacttataatctgtaccgtgtaa

SEQ ID NO: 882375 - DNA, 33 bp, Homo sapien
caccacgtgaataatcaagacgacaggttttct

SEQ ID NO: 882376 - DNA, 33 bp, Homo sapien
caccacgtgaataatctagacgacaggttttct

SEQ ID NO: 882377 - DNA, 33 bp, Homo sapien
gcgtttgcttcaaaaacactacaaaacgcagaa

SEQ ID NO: 882378 - DNA, 33 bp, Homo sapien
gcgtttgcttcaaaaatactacaaaacgcagaa

SEQ ID NO: 882379 - DNA, 33 bp, Homo sapien
ttctaagcatcagttccctgccagaaaatgagt

SEQ ID NO: 882380 - DNA, 33 bp, Homo sapien
ttctaagcatcagttctctgccagaaaatgagt

SEQ ID NO: 882381 - DNA, 33 bp, Homo sapien
gttgactttcagcaaacgctaactccacacata

SEQ ID NO: 882382 - DNA, 33 bp, Homo sapien
gttgactttcagcaaatgctaactccacacata

SEQ ID NO: 882383 - DNA, 33 bp, Homo sapien
caaaccttctgcactcaataaatgcagaaggtt

SEQ ID NO: 882384 - DNA, 33 bp, Homo sapien
caaaccttctgcactcgataaatgcagaaggtt

SEQ ID NO: 882385 - DNA, 33 bp, Homo sapien
gacgacactcctaaaacattctctgtaagacag

SEQ ID NO: 882386 - DNA, 33 bp, Homo sapien
gacgacactcctaaaatattctctgtaagacag

SEQ ID NO: 882387 - DNA, 33 bp, Homo sapien
agttacactactgcacagtgatttttatcagag

SEQ ID NO: 882388 - DNA, 33 bp, Homo sapien
agttacactactgcacggtgatttttatcagag

SEQ ID NO: 882389 - DNA, 33 bp, Homo sapien
attcagaatagggagcaaaaaaatgtgtgcgtg

SEQ ID NO: 882390 - DNA, 33 bp, Homo sapien
attcagaatagggagccaaaaaatgtgtgcgtg

SEQ ID NO: 882391 - DNA, 33 bp, Homo sapien
ccacattttctaccaacagttcagcttgcagca

SEQ ID NO: 882392 - DNA, 33 bp, Homo sapien
ccacattttctaccaatagttcagcttgcagca

SEQ ID NO: 882393 - DNA, 33 bp, Homo sapien
tacaaaacaggaaaccaacacagaccttcttta

SEQ ID NO: 882394 - DNA, 33 bp, Homo sapien
tacaaaacaggaaaccgacacagaccttcttta

SEQ ID NO: 882395 - DNA, 33 bp, Homo sapien
gcagaccttcagagcacggaggtacataggggt

SEQ ID NO: 882396 - DNA, 33 bp, Homo sapien
gcagaccttcagagcatggaggtacataggggt

SEQ ID NO: 882397 - DNA, 33 bp, Homo sapien
aagaaatgtaactttcaaggttggggctcatgt

SEQ ID NO: 882398 - DNA, 33 bp, Homo sapien
aagaaatgtaactttcgaggttggggctcatgt

SEQ ID NO: 882399 - DNA, 33 bp, Homo sapien
gctcctgagatgaactaaagaaaaatccaacga

SEQ ID NO: 882400 - DNA, 33 bp, Homo sapien
gctcctgagatgaactgaagaaaaatccaacga

SEQ ID NO: 882401 - DNA, 33 bp, Homo sapien
ggggtatgcaacatgaggaagacgaagctttcc

SEQ ID NO: 882402 - DNA, 33 bp, Homo sapien
ggggtatgcaacatgatgaagacgaagctttcc

SEQ ID NO: 882403 - DNA, 33 bp, Homo sapien
cagatgtctttaggcaactatttaatgaataaa

SEQ ID NO: 882404 - DNA, 33 bp, Homo sapien
cagatgtctttaggcagctatttaatgaataaa

SEQ ID NO: 882405 - DNA, 33 bp, Homo sapien
tcaccgttcactgggacgctcttcctgtgcctt

SEQ ID NO: 882406 - DNA, 33 bp, Homo sapien
tcaccgttcactgggatgctcttcctgtgcctt

SEQ ID NO: 882407 - DNA, 33 bp, Homo sapien
tttcacctctctccatcagagaacaaaattaag

SEQ ID NO: 882408 - DNA, 33 bp, Homo sapien
tttcacctctctccattagagaacaaaattaag

SEQ ID NO: 882409 - DNA, 33 bp, Homo sapien
agcatgggtgggtctaagtttgaacccaagtgg

SEQ ID NO: 882410 - DNA, 33 bp, Homo sapien
agcatgggtgggtctatgtttgaacccaagtgg

SEQ ID NO: 882411 - DNA, 33 bp, Homo sapien
aaaaccaaaggcaaagaacggcctcctgagacc

SEQ ID NO: 882412 - DNA, 33 bp, Homo sapien
aaaaccaaaggcaaagtacggcctcctgagacc

SEQ ID NO: 882413 - DNA, 33 bp, Homo sapien
accaatggatgaggaaaaggttaaagaatgaat

SEQ ID NO: 882414 - DNA, 33 bp, Homo sapien
accaatggatgaggaataggttaaagaatgaat

SEQ ID NO: 882415 - DNA, 33 bp, Homo sapien
ggaggtcagagaaaaccacacaatagggcagat

SEQ ID NO: 882416 - DNA, 33 bp, Homo sapien
ggaggtcagagaaaacgacacaatagggcagat

SEQ ID NO: 882417 - DNA, 33 bp, Homo sapien
ttctataaatacggtacaagctcaagcatatag

SEQ ID NO: 882418 - DNA, 33 bp, Homo sapien
ttctataaatacggtagaagctcaagcatatag

SEQ ID NO: 882419 - DNA, 33 bp, Homo sapien
cccttccccatttctccagccgctggcagccac

SEQ ID NO: 882420 - DNA, 33 bp, Homo sapien
cccttccccatttctctagccgctggcagccac

SEQ ID NO: 882421 - DNA, 33 bp, Homo sapien
aatgggtgaactaatacgcttgactgcctctgc

SEQ ID NO: 882422 - DNA, 33 bp, Homo sapien
aatgggtgaactaatatgcttgactgcctctgc

SEQ ID NO: 882423 - DNA, 33 bp, Homo sapien
aatgactcacagagtaccttgcattggttccta

SEQ ID NO: 882424 - DNA, 33 bp, Homo sapien
aatgactcacagagtatcttgcattggttccta

SEQ ID NO: 882425 - DNA, 33 bp, Homo sapien
atactgatatttgaagcccaagattttttctta

SEQ ID NO: 882426 - DNA, 33 bp, Homo sapien
atactgatatttgaagtccaagattttttctta

SEQ ID NO: 882427 - DNA, 33 bp, Homo sapien
atgggaaaaatgccacaagtcatgaagtagtct

SEQ ID NO: 882428 - DNA, 33 bp, Homo sapien
atgggaaaaatgccaccagtcatgaagtagtct

SEQ ID NO: 882429 - DNA, 33 bp, Homo sapien
aaaggagaattgctcaaccacatatagccaaga

SEQ ID NO: 882430 - DNA, 33 bp, Homo sapien
aaaggagaattgctcagccacatatagccaaga

SEQ ID NO: 882431 - DNA, 33 bp, Homo sapien
acaacgagggcaaccccatgtctcttctttagc

SEQ ID NO: 882432 - DNA, 33 bp, Homo sapien
acaacgagggcaacccgatgtctcttctttagc

SEQ ID NO: 882433 - DNA, 33 bp, Homo sapien
gtgaatggatcatggcagaaacctgaccacagt

SEQ ID NO: 882434 - DNA, 33 bp, Homo sapien
gtgaatggatcatggcggaaacctgaccacagt

SEQ ID NO: 882435 - DNA, 33 bp, Homo sapien
gagcagcagattcccaaacgtactggtattggt

SEQ ID NO: 882436 - DNA, 33 bp, Homo sapien
gagcagcagattcccagacgtactggtattggt

SEQ ID NO: 882437 - DNA, 33 bp, Homo sapien
cctgaaccatttctcactcatccttgccttcag

SEQ ID NO: 882438 - DNA, 33 bp, Homo sapien
cctgaaccatttctcattcatccttgccttcag

SEQ ID NO: 882439 - DNA, 33 bp, Homo sapien
gggaacaaaagattgcagacttgagtaatagta

SEQ ID NO: 882440 - DNA, 33 bp, Homo sapien
gggaacaaaagattgcggacttgagtaatagta

SEQ ID NO: 882441 - DNA, 33 bp, Homo sapien
cttatttcagaccaaccatgggacaaaatttag

SEQ ID NO: 882442 - DNA, 33 bp, Homo sapien
cttatttcagaccaactatgggacaaaatttag

SEQ ID NO: 882443 - DNA, 33 bp, Homo sapien
gactaaatctttggaaaggttcaaagacattat

SEQ ID NO: 882444 - DNA, 33 bp, Homo sapien
gactaaatctttggaagggttcaaagacattat

SEQ ID NO: 882445 - DNA, 33 bp, Homo sapien
agactaagtgagtttacggcttagtggcgtaaa

SEQ ID NO: 882446 - DNA, 33 bp, Homo sapien
agactaagtgagtttatggcttagtggcgtaaa

SEQ ID NO: 882447 - DNA, 33 bp, Homo sapien
caatatgacacatattaaaaagaagggattcta

SEQ ID NO: 882448 - DNA, 33 bp, Homo sapien
caatatgacacatattgaaaagaagggattcta

SEQ ID NO: 882449 - DNA, 33 bp, Homo sapien
cttgacattatttcgagtaacagtttgaagcta

SEQ ID NO: 882450 - DNA, 33 bp, Homo sapien
cttgacattatttcgattaacagtttgaagcta

SEQ ID NO: 882451 - DNA, 33 bp, Homo sapien
gcgcctggcttactgacattcctgaggccactc

SEQ ID NO: 882452 - DNA, 33 bp, Homo sapien
gcgcctggcttactgatattcctgaggccactc

SEQ ID NO: 882453 - DNA, 33 bp, Homo sapien
agctcaggccccttgaagagtaagagctctggc

SEQ ID NO: 882454 - DNA, 33 bp, Homo sapien
agctcaggccccttgatgagtaagagctctggc

SEQ ID NO: 882455 - DNA, 33 bp, Homo sapien
ccagactcataccgaacgcaaaaagctacccct

SEQ ID NO: 882456 - DNA, 33 bp, Homo sapien
ccagactcataccgaatgcaaaaagctacccct

SEQ ID NO: 882457 - DNA, 33 bp, Homo sapien
tatactgtgtgtttccaagcacttgtacacagt

SEQ ID NO: 882458 - DNA, 33 bp, Homo sapien
tatactgtgtgtttcccagcacttgtacacagt

SEQ ID NO: 882459 - DNA, 33 bp, Homo sapien
tgctatgaagaggtaaccactgtcaatttttag

SEQ ID NO: 882460 - DNA, 33 bp, Homo sapien
tgctatgaagaggtaatcactgtcaatttttag

SEQ ID NO: 882461 - DNA, 33 bp, Homo sapien
ggaaatttgggagaacaaccttggaaatactgt

SEQ ID NO: 882462 - DNA, 33 bp, Homo sapien
ggaaatttgggagaacgaccttggaaatactgt

SEQ ID NO: 882463 - DNA, 33 bp, Homo sapien
gacgctacaaaataggaagcaaaatgtccgtgt

SEQ ID NO: 882464 - DNA, 33 bp, Homo sapien
gacgctacaaaatagggagcaaaatgtccgtgt

SEQ ID NO: 882465 - DNA, 33 bp, Homo sapien
catattcccttgaaatgaagccctcgctgtgtt

SEQ ID NO: 882466 - DNA, 33 bp, Homo sapien
catattcccttgaaattaagccctcgctgtgtt

SEQ ID NO: 882467 - DNA, 33 bp, Homo sapien
atgtaactattaaaaacgtgttgcactctcatc

SEQ ID NO: 882468 - DNA, 33 bp, Homo sapien
atgtaactattaaaaatgtgttgcactctcatc

SEQ ID NO: 882469 - DNA, 33 bp, Homo sapien
tatttctcttttttaacagccaacacaatttaa

SEQ ID NO: 882470 - DNA, 33 bp, Homo sapien
tatttctcttttttaatagccaacacaatttaa

SEQ ID NO: 882471 - DNA, 33 bp, Homo sapien
ttgaagaaatgtgcacaatagaaaatctctgct

SEQ ID NO: 882472 - DNA, 33 bp, Homo sapien
ttgaagaaatgtgcaccatagaaaatctctgct

SEQ ID NO: 882473 - DNA, 33 bp, Homo sapien
tgattttcttgtgccacgtaacctagacagctt

SEQ ID NO: 882474 - DNA, 33 bp, Homo sapien
tgattttcttgtgccatgtaacctagacagctt

SEQ ID NO: 882475 - DNA, 33 bp, Homo sapien
aaagggaggactaaaactgtagaatttccatat

SEQ ID NO: 882476 - DNA, 33 bp, Homo sapien
aaagggaggactaaaagtgtagaatttccatat

SEQ ID NO: 882477 - DNA, 33 bp, Homo sapien
ctatttcacagagaagaaaactgactaatacag

SEQ ID NO: 882478 - DNA, 33 bp, Homo sapien
ctatttcacagagaaggaaactgactaatacag

SEQ ID NO: 882479 - DNA, 33 bp, Homo sapien
acctacgctgctgtgaatacccagacgaagtct

SEQ ID NO: 882480 - DNA, 33 bp, Homo sapien
acctacgctgctgtgagtacccagacgaagtct

SEQ ID NO: 882481 - DNA, 33 bp, Homo sapien
tttagagacttagagaccttcattgttaatgac

SEQ ID NO: 882482 - DNA, 33 bp, Homo sapien
tttagagacttagagagcttcattgttaatgac

SEQ ID NO: 882483 - DNA, 33 bp, Homo sapien
ctgtgcatggtgaacaatcattgcggaaaccca

SEQ ID NO: 882484 - DNA, 33 bp, Homo sapien
ctgtgcatggtgaacattcattgcggaaaccca

SEQ ID NO: 882485 - DNA, 33 bp, Homo sapien
agccagcgggtatcaaatgtcaagataaattgt

SEQ ID NO: 882486 - DNA, 33 bp, Homo sapien
agccagcgggtatcaagtgtcaagataaattgt

SEQ ID NO: 882487 - DNA, 33 bp, Homo sapien
tggaaagatacaagaaagagtgaaggatttgga

SEQ ID NO: 882488 - DNA, 33 bp, Homo sapien
tggaaagatacaagaaggagtgaaggatttgga

SEQ ID NO: 882489 - DNA, 33 bp, Homo sapien
actaatttgctgggtaaattggtcataactagt

SEQ ID NO: 882490 - DNA, 33 bp, Homo sapien
actaatttgctgggtatattggtcataactagt

SEQ ID NO: 882491 - DNA, 33 bp, Homo sapien
tgtaatggaaatcaatcatggtacaatgaagag

SEQ ID NO: 882492 - DNA, 33 bp, Homo sapien
tgtaatggaaatcaattatggtacaatgaagag

SEQ ID NO: 882493 - DNA, 33 bp, Homo sapien
tggttccagaccgagacgggaatcacagcgtgt

SEQ ID NO: 882494 - DNA, 33 bp, Homo sapien
tggttccagaccgagatgggaatcacagcgtgt

SEQ ID NO: 882495 - DNA, 33 bp, Homo sapien
agctgtacaccttaggaccatttatgcacatga

SEQ ID NO: 882496 - DNA, 33 bp, Homo sapien
agctgtacaccttagggccatttatgcacatga

SEQ ID NO: 882497 - DNA, 33 bp, Homo sapien
ttcaaaaggtggctgcaatttatagcaggacta

SEQ ID NO: 882498 - DNA, 33 bp, Homo sapien
ttcaaaaggtggctgcgatttatagcaggacta

SEQ ID NO: 882499 - DNA, 33 bp, Homo sapien
gctcctaccagacttaagggttttgttcatttt

SEQ ID NO: 882500 - DNA, 33 bp, Homo sapien
gctcctaccagacttaggggttttgttcatttt

SEQ ID NO: 882501 - DNA, 33 bp, Homo sapien
cttcccagtctaacccaccatggctcttagaca

SEQ ID NO: 882502 - DNA, 33 bp, Homo sapien
cttcccagtctaacccgccatggctcttagaca

SEQ ID NO: 882503 - DNA, 33 bp, Homo sapien
ccaaccatacaggttcacttcaatctcagtgca

SEQ ID NO: 882504 - DNA, 33 bp, Homo sapien
ccaaccatacaggttcgcttcaatctcagtgca

SEQ ID NO: 882505 - DNA, 33 bp, Homo sapien
gataatttcagcagaacgacccgtaagcacctc

SEQ ID NO: 882506 - DNA, 33 bp, Homo sapien
gataatttcagcagaatgacccgtaagcacctc

SEQ ID NO: 882507 - DNA, 33 bp, Homo sapien
ctcatggtcttagatccgacttctacttcattc

SEQ ID NO: 882508 - DNA, 33 bp, Homo sapien
ctcatggtcttagatctgacttctacttcattc

SEQ ID NO: 882509 - DNA, 33 bp, Homo sapien
gtctaggatatactgaaaacatcaagaagaaaa

SEQ ID NO: 882510 - DNA, 33 bp, Homo sapien
gtctaggatatactgagaacatcaagaagaaaa

SEQ ID NO: 882511 - DNA, 33 bp, Homo sapien
tagttattgtgctacaaaatcttattttactat

SEQ ID NO: 882512 - DNA, 33 bp, Homo sapien
tagttattgtgctacagaatcttattttactat

SEQ ID NO: 882513 - DNA, 33 bp, Homo sapien
tatctgagttaagataaggggtccaggagatct

SEQ ID NO: 882514 - DNA, 33 bp, Homo sapien
tatctgagttaagatacggggtccaggagatct

SEQ ID NO: 882515 - DNA, 33 bp, Homo sapien
cacttcttatcttgcactcgtgttagaatttct

SEQ ID NO: 882516 - DNA, 33 bp, Homo sapien
cacttcttatcttgcattcgtgttagaatttct

SEQ ID NO: 882517 - DNA, 33 bp, Homo sapien
acgcattcattcaaaaatactcgtcatgtcact

SEQ ID NO: 882518 - DNA, 33 bp, Homo sapien
acgcattcattcaaaactactcgtcatgtcact

SEQ ID NO: 882519 - DNA, 33 bp, Homo sapien
tgaaaacgtatctgtaaagaagattcaagctag

SEQ ID NO: 882520 - DNA, 33 bp, Homo sapien
tgaaaacgtatctgtacagaagattcaagctag

SEQ ID NO: 882521 - DNA, 33 bp, Homo sapien
gctgggcaaggagaaaactcccaggcatacaga

SEQ ID NO: 882522 - DNA, 33 bp, Homo sapien
gctgggcaaggagaaatctcccaggcatacaga

SEQ ID NO: 882523 - DNA, 33 bp, Homo sapien
gctttaggccctttcaagttcctgcagaggctg

SEQ ID NO: 882524 - DNA, 33 bp, Homo sapien
gctttaggccctttcaggttcctgcagaggctg

SEQ ID NO: 882525 - DNA, 33 bp, Homo sapien
ccctctcttactggccactgagaacagggtatg

SEQ ID NO: 882526 - DNA, 33 bp, Homo sapien
ccctctcttactggccgctgagaacagggtatg

SEQ ID NO: 882527 - DNA, 33 bp, Homo sapien
ttgacatgagaaggtaccatagtcggagttgct

SEQ ID NO: 882528 - DNA, 33 bp, Homo sapien
ttgacatgagaaggtagcatagtcggagttgct

SEQ ID NO: 882529 - DNA, 33 bp, Homo sapien
agatatctgtcttaaacgaatcctaatatgtaa

SEQ ID NO: 882530 - DNA, 33 bp, Homo sapien
agatatctgtcttaaatgaatcctaatatgtaa

SEQ ID NO: 882531 - DNA, 33 bp, Homo sapien
agcagttcagctatcaacaaaattccaaaatac

SEQ ID NO: 882532 - DNA, 33 bp, Homo sapien
agcagttcagctatcaccaaaattccaaaatac

SEQ ID NO: 882533 - DNA, 33 bp, Homo sapien
acccccttctcatctaaagagtggtaacagcaa

SEQ ID NO: 882534 - DNA, 33 bp, Homo sapien
acccccttctcatctagagagtggtaacagcaa

SEQ ID NO: 882535 - DNA, 33 bp, Homo sapien
agctgtgaacagcatcagcaacgagttggcact

SEQ ID NO: 882536 - DNA, 33 bp, Homo sapien
agctgtgaacagcatcggcaacgagttggcact

SEQ ID NO: 882537 - DNA, 33 bp, Homo sapien
gcagatacttcttaacaacaccagagcccttgg

SEQ ID NO: 882538 - DNA, 33 bp, Homo sapien
gcagatacttcttaacgacaccagagcccttgg

SEQ ID NO: 882539 - DNA, 33 bp, Homo sapien
ctgcccacactgagaacggagcgagagcaggcg

SEQ ID NO: 882540 - DNA, 33 bp, Homo sapien
ctgcccacactgagaatggagcgagagcaggcg

SEQ ID NO: 882541 - DNA, 33 bp, Homo sapien
caggcatccaactcagaccaaaaggagcaggca

SEQ ID NO: 882542 - DNA, 33 bp, Homo sapien
caggcatccaactcaggccaaaaggagcaggca

SEQ ID NO: 882543 - DNA, 33 bp, Homo sapien
aaaccttggaaaaatcagagcagtaatgatgat

SEQ ID NO: 882544 - DNA, 33 bp, Homo sapien
aaaccttggaaaaatcggagcagtaatgatgat

SEQ ID NO: 882545 - DNA, 33 bp, Homo sapien
ccagttgcggttcatacatggtccttctgaaga

SEQ ID NO: 882546 - DNA, 33 bp, Homo sapien
ccagttgcggttcatatatggtccttctgaaga

SEQ ID NO: 882547 - DNA, 33 bp, Homo sapien
tataggccagaccatccaggctctgaaacaaca

SEQ ID NO: 882548 - DNA, 33 bp, Homo sapien
tataggccagaccatcgaggctctgaaacaaca

SEQ ID NO: 882549 - DNA, 33 bp, Homo sapien
aaatttcctatcacaaccgagagaagcctttgg

SEQ ID NO: 882550 - DNA, 33 bp, Homo sapien
aaatttcctatcacaagcgagagaagcctttgg

SEQ ID NO: 882551 - DNA, 33 bp, Homo sapien
taatcgtgaagatccactcctctgtagcgcatg

SEQ ID NO: 882552 - DNA, 33 bp, Homo sapien
taatcgtgaagatccattcctctgtagcgcatg

SEQ ID NO: 882553 - DNA, 33 bp, Homo sapien
tctacgtgtaaaaggacggcgagtgtgacacag

SEQ ID NO: 882554 - DNA, 33 bp, Homo sapien
tctacgtgtaaaaggatggcgagtgtgacacag

SEQ ID NO: 882555 - DNA, 33 bp, Homo sapien
caggaagtgcaaatgcaaatctccctctgacta

SEQ ID NO: 882556 - DNA, 33 bp, Homo sapien
caggaagtgcaaatgccaatctccctctgacta

SEQ ID NO: 882557 - DNA, 33 bp, Homo sapien
ccctctcctgtggcataacagctccttgcttat

SEQ ID NO: 882558 - DNA, 33 bp, Homo sapien
ccctctcctgtggcatgacagctccttgcttat

SEQ ID NO: 882559 - DNA, 33 bp, Homo sapien
caattccataggataaatgccttcagagatata

SEQ ID NO: 882560 - DNA, 33 bp, Homo sapien
caattccataggataagtgccttcagagatata

SEQ ID NO: 882561 - DNA, 33 bp, Homo sapien
atgcacaattacaaaaagtcttgtcatagacca

SEQ ID NO: 882562 - DNA, 33 bp, Homo sapien
atgcacaattacaaaatgtcttgtcatagacca

SEQ ID NO: 882563 - DNA, 33 bp, Homo sapien
gttttagttactgtaaaaatgctgtgtagcaat

SEQ ID NO: 882564 - DNA, 33 bp, Homo sapien
gttttagttactgtaacaatgctgtgtagcaat

SEQ ID NO: 882565 - DNA, 33 bp, Homo sapien
atgtaattatcagtaaatggatccaaaagtcct

SEQ ID NO: 882566 - DNA, 33 bp, Homo sapien
atgtaattatcagtaagtggatccaaaagtcct

SEQ ID NO: 882567 - DNA, 33 bp, Homo sapien
agactttgtggttagaactagaatcttggtctg

SEQ ID NO: 882568 - DNA, 33 bp, Homo sapien
agactttgtggttagagctagaatcttggtctg

SEQ ID NO: 882569 - DNA, 33 bp, Homo sapien
tcattgtagagaaactgacagagagaccacatg

SEQ ID NO: 882570 - DNA, 33 bp, Homo sapien
tcattgtagagaaacttacagagagaccacatg

SEQ ID NO: 882571 - DNA, 33 bp, Homo sapien
gctagcaagtttatgtaaagtcattgacccgga

SEQ ID NO: 882572 - DNA, 33 bp, Homo sapien
gctagcaagtttatgtgaagtcattgacccgga

SEQ ID NO: 882573 - DNA, 33 bp, Homo sapien
ttagcaagactttctgcaaataagaatctcgga

SEQ ID NO: 882574 - DNA, 33 bp, Homo sapien
ttagcaagactttctgtaaataagaatctcgga

SEQ ID NO: 882575 - DNA, 33 bp, Homo sapien
actacagtcgaaaacacggaggcaaggagagga

SEQ ID NO: 882576 - DNA, 33 bp, Homo sapien
actacagtcgaaaacatggaggcaaggagagga

SEQ ID NO: 882577 - DNA, 33 bp, Homo sapien
gaccaggatatgaggaaggaaagaggtattgca

SEQ ID NO: 882578 - DNA, 33 bp, Homo sapien
gaccaggatatgaggagggaaagaggtattgca

SEQ ID NO: 882579 - DNA, 33 bp, Homo sapien
cacctgcgaatgaatacacagtaataaaagaat

SEQ ID NO: 882580 - DNA, 33 bp, Homo sapien
cacctgcgaatgaatatacagtaataaaagaat

SEQ ID NO: 882581 - DNA, 33 bp, Homo sapien
gccctaagaaggaatcaagtcattttcagcctt

SEQ ID NO: 882582 - DNA, 33 bp, Homo sapien
gccctaagaaggaatcgagtcattttcagcctt

SEQ ID NO: 882583 - DNA, 33 bp, Homo sapien
ctgatgagataccttcaagaattaaataaaaca

SEQ ID NO: 882584 - DNA, 33 bp, Homo sapien
ctgatgagataccttcgagaattaaataaaaca

SEQ ID NO: 882585 - DNA, 33 bp, Homo sapien
agtatcatctatttgccaggcccctacttggca

SEQ ID NO: 882586 - DNA, 33 bp, Homo sapien
agtatcatctatttgctaggcccctacttggca

SEQ ID NO: 882587 - DNA, 33 bp, Homo sapien
atgctacaaaaacttaaagatgataacataacc

SEQ ID NO: 882588 - DNA, 33 bp, Homo sapien
atgctacaaaaacttagagatgataacataacc

SEQ ID NO: 882589 - DNA, 33 bp, Homo sapien
tgttctaacaccacagaaaattccgttaaatgt

SEQ ID NO: 882590 - DNA, 33 bp, Homo sapien
tgttctaacaccacagcaaattccgttaaatgt

SEQ ID NO: 882591 - DNA, 33 bp, Homo sapien
caggatggaaagggcacgctttgcttgaacaac

SEQ ID NO: 882592 - DNA, 33 bp, Homo sapien
caggatggaaagggcatgctttgcttgaacaac

SEQ ID NO: 882593 - DNA, 33 bp, Homo sapien
cagttgttacagcttcacagaggaaatcttcat

SEQ ID NO: 882594 - DNA, 33 bp, Homo sapien
cagttgttacagcttcgcagaggaaatcttcat

SEQ ID NO: 882595 - DNA, 33 bp, Homo sapien
gtgttcttttccatcaaatgtaaacatatttaa

SEQ ID NO: 882596 - DNA, 33 bp, Homo sapien
gtgttcttttccatcagatgtaaacatatttaa

SEQ ID NO: 882597 - DNA, 33 bp, Homo sapien
atttcccctacggtaacggttggcttattgtgg

SEQ ID NO: 882598 - DNA, 33 bp, Homo sapien
atttcccctacggtaatggttggcttattgtgg

SEQ ID NO: 882599 - DNA, 33 bp, Homo sapien
tgcaaagtgctatcaacgtattatggttaacat

SEQ ID NO: 882600 - DNA, 33 bp, Homo sapien
tgcaaagtgctatcaatgtattatggttaacat

SEQ ID NO: 882601 - DNA, 33 bp, Homo sapien
ggttaacattttgtgaagaaaacttttttggat

SEQ ID NO: 882602 - DNA, 33 bp, Homo sapien
ggttaacattttgtgaggaaaacttttttggat

SEQ ID NO: 882603 - DNA, 33 bp, Homo sapien
aactagggagccccaaagaagtaggagagttag

SEQ ID NO: 882604 - DNA, 33 bp, Homo sapien
aactagggagccccaatgaagtaggagagttag

SEQ ID NO: 882605 - DNA, 33 bp, Homo sapien
gtctcggaaagtaagacgtcgaggagcctctaa

SEQ ID NO: 882606 - DNA, 33 bp, Homo sapien
gtctcggaaagtaagatgtcgaggagcctctaa

SEQ ID NO: 882607 - DNA, 33 bp, Homo sapien
tatcagtattatacataacccaacacacatgct

SEQ ID NO: 882608 - DNA, 33 bp, Homo sapien
tatcagtattatacatcacccaacacacatgct

SEQ ID NO: 882609 - DNA, 33 bp, Homo sapien
tcaaagttctaggtaagatttctggcacttata

SEQ ID NO: 882610 - DNA, 33 bp, Homo sapien
tcaaagttctaggtaatatttctggcacttata

SEQ ID NO: 882611 - DNA, 33 bp, Homo sapien
gaaagaacttgtttcaatactgtgtgttttcaa

SEQ ID NO: 882612 - DNA, 33 bp, Homo sapien
gaaagaacttgtttcagtactgtgtgttttcaa

SEQ ID NO: 882613 - DNA, 33 bp, Homo sapien
tgcattatgttccactaaatgcaatctatttta

SEQ ID NO: 882614 - DNA, 33 bp, Homo sapien
tgcattatgttccactgaatgcaatctatttta

SEQ ID NO: 882615 - DNA, 33 bp, Homo sapien
aatagaacccatgagagtcccttgttttagtca

SEQ ID NO: 882616 - DNA, 33 bp, Homo sapien
aatagaacccatgagattcccttgttttagtca

SEQ ID NO: 882617 - DNA, 33 bp, Homo sapien
gttagagacaaaaaagaccaagtaatggcaatt

SEQ ID NO: 882618 - DNA, 33 bp, Homo sapien
gttagagacaaaaaaggccaagtaatggcaatt

SEQ ID NO: 882619 - DNA, 33 bp, Homo sapien
gatgagctctggaaaacagaccgtcagtggcaa

SEQ ID NO: 882620 - DNA, 33 bp, Homo sapien
gatgagctctggaaaatagaccgtcagtggcaa

SEQ ID NO: 882621 - DNA, 33 bp, Homo sapien
ggcagcagaacaaagcaccatcctctctacagg

SEQ ID NO: 882622 - DNA, 33 bp, Homo sapien
ggcagcagaacaaagcgccatcctctctacagg

SEQ ID NO: 882623 - DNA, 33 bp, Homo sapien
tcacctgactgatgaaagtaaggagtattctga

SEQ ID NO: 882624 - DNA, 33 bp, Homo sapien
tcacctgactgatgaaggtaaggagtattctga

SEQ ID NO: 882625 - DNA, 33 bp, Homo sapien
cttggagaggagacaccggaagcatgagctcct

SEQ ID NO: 882626 - DNA, 33 bp, Homo sapien
cttggagaggagacactggaagcatgagctcct

SEQ ID NO: 882627 - DNA, 33 bp, Homo sapien
catgagctcctgagataacaaagactttacttt

SEQ ID NO: 882628 - DNA, 33 bp, Homo sapien
catgagctcctgagatgacaaagactttacttt

SEQ ID NO: 882629 - DNA, 33 bp, Homo sapien
acagggcacaattaacaagtctatattttttag

SEQ ID NO: 882630 - DNA, 33 bp, Homo sapien
acagggcacaattaaccagtctatattttttag

SEQ ID NO: 882631 - DNA, 33 bp, Homo sapien
tggctaggtattccaaatcattacttctctttg

SEQ ID NO: 882632 - DNA, 33 bp, Homo sapien
tggctaggtattccaagtcattacttctctttg

SEQ ID NO: 882633 - DNA, 33 bp, Homo sapien
tctttgttattatgaacggtgctactctaaaca

SEQ ID NO: 882634 - DNA, 33 bp, Homo sapien
tctttgttattatgaatggtgctactctaaaca

SEQ ID NO: 882635 - DNA, 33 bp, Homo sapien
agcaaataggcttcacagaagtagaaaaaacac

SEQ ID NO: 882636 - DNA, 33 bp, Homo sapien
agcaaataggcttcacggaagtagaaaaaacac

SEQ ID NO: 882637 - DNA, 33 bp, Homo sapien
aagataaagctagacactctggagatgcctaat

SEQ ID NO: 882638 - DNA, 33 bp, Homo sapien
aagataaagctagacattctggagatgcctaat

SEQ ID NO: 882639 - DNA, 33 bp, Homo sapien
agcatgcgtacttaataaagttttgggaatttc

SEQ ID NO: 882640 - DNA, 33 bp, Homo sapien
agcatgcgtacttaatcaagttttgggaatttc

SEQ ID NO: 882641 - DNA, 33 bp, Homo sapien
agaatcaaagtattccaaatagaaagctctaat

SEQ ID NO: 882642 - DNA, 33 bp, Homo sapien
agaatcaaagtattccgaatagaaagctctaat

SEQ ID NO: 882643 - DNA, 33 bp, Homo sapien
agtacaaatgaatacaccagttggagtacgtgt

SEQ ID NO: 882644 - DNA, 33 bp, Homo sapien
agtacaaatgaatacatcagttggagtacgtgt

SEQ ID NO: 882645 - DNA, 33 bp, Homo sapien
aactgcatatctgacacagaactactatctaga

SEQ ID NO: 882646 - DNA, 33 bp, Homo sapien
aactgcatatctgacatagaactactatctaga

SEQ ID NO: 882647 - DNA, 33 bp, Homo sapien
aactcattcttgaggtaaaggtaataatccctt

SEQ ID NO: 882648 - DNA, 33 bp, Homo sapien
aactcattcttgaggttaaggtaataatccctt

SEQ ID NO: 882649 - DNA, 33 bp, Homo sapien
tgttcttcataacagcaatcacaatgacaataa

SEQ ID NO: 882650 - DNA, 33 bp, Homo sapien
tgttcttcataacagcgatcacaatgacaataa

SEQ ID NO: 882651 - DNA, 33 bp, Homo sapien
ctgttccgagtcagataacatcctcaggcatca

SEQ ID NO: 882652 - DNA, 33 bp, Homo sapien
ctgttccgagtcagatcacatcctcaggcatca

SEQ ID NO: 882653 - DNA, 33 bp, Homo sapien
cagtggaacagaagacacacctcagggcttgaa

SEQ ID NO: 882654 - DNA, 33 bp, Homo sapien
cagtggaacagaagacgcacctcagggcttgaa

SEQ ID NO: 882655 - DNA, 33 bp, Homo sapien
ggaaggatctggagtacgtgaagtaagtatctc

SEQ ID NO: 882656 - DNA, 33 bp, Homo sapien
ggaaggatctggagtatgtgaagtaagtatctc

SEQ ID NO: 882657 - DNA, 33 bp, Homo sapien
aaaagaaaatggttcaaacggaatgaactgggg

SEQ ID NO: 882658 - DNA, 33 bp, Homo sapien
aaaagaaaatggttcacacggaatgaactgggg

SEQ ID NO: 882659 - DNA, 33 bp, Homo sapien
cagacaataaaaactcccacattctaaagaggg

SEQ ID NO: 882660 - DNA, 33 bp, Homo sapien
cagacaataaaaactctcacattctaaagaggg

SEQ ID NO: 882661 - DNA, 33 bp, Homo sapien
gaaaaaagagagaaaacgctcagctcacactca

SEQ ID NO: 882662 - DNA, 33 bp, Homo sapien
gaaaaaagagagaaaatgctcagctcacactca

SEQ ID NO: 882663 - DNA, 33 bp, Homo sapien
gactggtctctcacaacacactggagagcttgc

SEQ ID NO: 882664 - DNA, 33 bp, Homo sapien
gactggtctctcacaatacactggagagcttgc

SEQ ID NO: 882665 - DNA, 33 bp, Homo sapien
attactgatactatgaagttgcaaaaatagcag

SEQ ID NO: 882666 - DNA, 33 bp, Homo sapien
attactgatactatgaggttgcaaaaatagcag

SEQ ID NO: 882667 - DNA, 33 bp, Homo sapien
gcttgaatcaggatctcaataaagttcatatat

SEQ ID NO: 882668 - DNA, 33 bp, Homo sapien
gcttgaatcaggatcttaataaagttcatatat

SEQ ID NO: 882669 - DNA, 33 bp, Homo sapien
tgagaattgtagggatgaaaatttgcaaaacaa

SEQ ID NO: 882670 - DNA, 33 bp, Homo sapien
tgagaattgtagggattaaaatttgcaaaacaa

SEQ ID NO: 882671 - DNA, 33 bp, Homo sapien
cctggaactgccattacctgacattcaataaat

SEQ ID NO: 882672 - DNA, 33 bp, Homo sapien
cctggaactgccattagctgacattcaataaat

SEQ ID NO: 882673 - DNA, 33 bp, Homo sapien
gggttcagcctttaaactatccagagggcagct

SEQ ID NO: 882674 - DNA, 33 bp, Homo sapien
gggttcagcctttaaattatccagagggcagct

SEQ ID NO: 882675 - DNA, 33 bp, Homo sapien
gcatcagagagatagaacttaatttgcatttgt

SEQ ID NO: 882676 - DNA, 33 bp, Homo sapien
gcatcagagagatagatcttaatttgcatttgt

SEQ ID NO: 882677 - DNA, 33 bp, Homo sapien
gatttccttccacaaaggtaaaggcccgtggtc

SEQ ID NO: 882678 - DNA, 33 bp, Homo sapien
gatttccttccacaaatgtaaaggcccgtggtc

SEQ ID NO: 882679 - DNA, 33 bp, Homo sapien
tcttgggagccctggcaacatccattggatttt

SEQ ID NO: 882680 - DNA, 33 bp, Homo sapien
tcttgggagccctggcgacatccattggatttt

SEQ ID NO: 882681 - DNA, 33 bp, Homo sapien
cctttcagcatccacactacatggactttgtcc

SEQ ID NO: 882682 - DNA, 33 bp, Homo sapien
cctttcagcatccacattacatggactttgtcc

SEQ ID NO: 882683 - DNA, 33 bp, Homo sapien
atgactacagttaacaataacagttcaaaatag

SEQ ID NO: 882684 - DNA, 33 bp, Homo sapien
atgactacagttaacagtaacagttcaaaatag

SEQ ID NO: 882685 - DNA, 33 bp, Homo sapien
cagcatgattaaatcacagtattcatagttttc

SEQ ID NO: 882686 - DNA, 33 bp, Homo sapien
cagcatgattaaatcagagtattcatagttttc

SEQ ID NO: 882687 - DNA, 33 bp, Homo sapien
gcaggatctctaccacaccagctgagggagggt

SEQ ID NO: 882688 - DNA, 33 bp, Homo sapien
gcaggatctctaccacgccagctgagggagggt

SEQ ID NO: 882689 - DNA, 33 bp, Homo sapien
caccttgttagcttgaactattagatgtgatcc

SEQ ID NO: 882690 - DNA, 33 bp, Homo sapien
caccttgttagcttgagctattagatgtgatcc

SEQ ID NO: 882691 - DNA, 33 bp, Homo sapien
catcctgttgagatcaaacttgaatccagaagc

SEQ ID NO: 882692 - DNA, 33 bp, Homo sapien
catcctgttgagatcagacttgaatccagaagc

SEQ ID NO: 882693 - DNA, 33 bp, Homo sapien
ccaatccatcgtagaaacatcctgttgagatca

SEQ ID NO: 882694 - DNA, 33 bp, Homo sapien
ccaatccatcgtagaaccatcctgttgagatca

SEQ ID NO: 882695 - DNA, 33 bp, Homo sapien
ctttatgacggacaccaacatcaatgcttgctg

SEQ ID NO: 882696 - DNA, 33 bp, Homo sapien
ctttatgacggacaccgacatcaatgcttgctg

SEQ ID NO: 882697 - DNA, 33 bp, Homo sapien
tagtctttgtacttaccacttttctctgccaac

SEQ ID NO: 882698 - DNA, 33 bp, Homo sapien
tagtctttgtacttactacttttctctgccaac

SEQ ID NO: 882699 - DNA, 33 bp, Homo sapien
tgagaaagtaacagagaaaacagaagtcttctt

SEQ ID NO: 882700 - DNA, 33 bp, Homo sapien
tgagaaagtaacagaggaaacagaagtcttctt

SEQ ID NO: 882701 - DNA, 33 bp, Homo sapien
ttgggaaatactttgaaggctattttctgccaa

SEQ ID NO: 882702 - DNA, 33 bp, Homo sapien
ttgggaaatactttgagggctattttctgccaa

SEQ ID NO: 882703 - DNA, 33 bp, Homo sapien
aattctgttgcctgggcatctttataagtgtaa

SEQ ID NO: 882704 - DNA, 33 bp, Homo sapien
aattctgttgcctgggtatctttataagtgtaa

SEQ ID NO: 882705 - DNA, 33 bp, Homo sapien
aatttttcacaagtggcactgcatcatgggagt

SEQ ID NO: 882706 - DNA, 33 bp, Homo sapien
aatttttcacaagtggtactgcatcatgggagt

SEQ ID NO: 882707 - DNA, 33 bp, Homo sapien
tcggggtgaggaccaacgttttactagactgca

SEQ ID NO: 882708 - DNA, 33 bp, Homo sapien
tcggggtgaggaccaatgttttactagactgca

SEQ ID NO: 882709 - DNA, 33 bp, Homo sapien
attgcatttcactttaagtttagctttaactgg

SEQ ID NO: 882710 - DNA, 33 bp, Homo sapien
attgcatttcactttaggtttagctttaactgg

SEQ ID NO: 882711 - DNA, 33 bp, Homo sapien
gcagcagatacaggtaccatctttctgaagagt

SEQ ID NO: 882712 - DNA, 33 bp, Homo sapien
gcagcagatacaggtagcatctttctgaagagt

SEQ ID NO: 882713 - DNA, 33 bp, Homo sapien
gatatgtgattgttgaataattatacagtgacc

SEQ ID NO: 882714 - DNA, 33 bp, Homo sapien
gatatgtgattgttgagtaattatacagtgacc

SEQ ID NO: 882715 - DNA, 33 bp, Homo sapien
tactacagttaatttccatctaaggtctttcaa

SEQ ID NO: 882716 - DNA, 33 bp, Homo sapien
tactacagttaatttctatctaaggtctttcaa

SEQ ID NO: 882717 - DNA, 33 bp, Homo sapien
gcataagaacacatggaaccttcaggtaccttt

SEQ ID NO: 882718 - DNA, 33 bp, Homo sapien
gcataagaacacatgggaccttcaggtaccttt

SEQ ID NO: 882719 - DNA, 33 bp, Homo sapien
attgattgcctgtaataagggcttctgaaatat

SEQ ID NO: 882720 - DNA, 33 bp, Homo sapien
attgattgcctgtaatgagggcttctgaaatat

SEQ ID NO: 882721 - DNA, 33 bp, Homo sapien
attaatagaatgaatggaatactctgtagaatc

SEQ ID NO: 882722 - DNA, 33 bp, Homo sapien
attaatagaatgaatgtaatactctgtagaatc

SEQ ID NO: 882723 - DNA, 33 bp, Homo sapien
ctcaactatttgcattaaaaatgaatccaactg

SEQ ID NO: 882724 - DNA, 33 bp, Homo sapien
ctcaactatttgcattgaaaatgaatccaactg

SEQ ID NO: 882725 - DNA, 33 bp, Homo sapien
ataggcaaaaattcttcaaaatggggatgaaat

SEQ ID NO: 882726 - DNA, 33 bp, Homo sapien
ataggcaaaaattcttgaaaatggggatgaaat

SEQ ID NO: 882727 - DNA, 33 bp, Homo sapien
acaacgagatgaaaaaatgagagaataatccat

SEQ ID NO: 882728 - DNA, 33 bp, Homo sapien
acaacgagatgaaaaactgagagaataatccat

SEQ ID NO: 882729 - DNA, 33 bp, Homo sapien
aagaacgtattcagaacgcaccataaagaaaca

SEQ ID NO: 882730 - DNA, 33 bp, Homo sapien
aagaacgtattcagaatgcaccataaagaaaca

SEQ ID NO: 882731 - DNA, 33 bp, Homo sapien
gaaacacagtggcttaaaacaacatttagcatt

SEQ ID NO: 882732 - DNA, 33 bp, Homo sapien
gaaacacagtggcttacaacaacatttagcatt

SEQ ID NO: 882733 - DNA, 33 bp, Homo sapien
gtaacatgaagagaacaaccctaatgtgtaagc

SEQ ID NO: 882734 - DNA, 33 bp, Homo sapien
gtaacatgaagagaaccaccctaatgtgtaagc

SEQ ID NO: 882735 - DNA, 33 bp, Homo sapien
catagacatggtgaggaaattatttggtcactt

SEQ ID NO: 882736 - DNA, 33 bp, Homo sapien
catagacatggtgagggaattatttggtcactt

SEQ ID NO: 882737 - DNA, 33 bp, Homo sapien
ggacatctcaagtagcacggatgactgaaaccc

SEQ ID NO: 882738 - DNA, 33 bp, Homo sapien
ggacatctcaagtagcgcggatgactgaaaccc

SEQ ID NO: 882739 - DNA, 33 bp, Homo sapien
gaagagaatccagagaatagtgccccggaacct

SEQ ID NO: 882740 - DNA, 33 bp, Homo sapien
gaagagaatccagagagtagtgccccggaacct

SEQ ID NO: 882741 - DNA, 33 bp, Homo sapien
ctcttgtatctcattcggaacccaacatatcca

SEQ ID NO: 882742 - DNA, 33 bp, Homo sapien
ctcttgtatctcattctgaacccaacatatcca

SEQ ID NO: 882743 - DNA, 33 bp, Homo sapien
gtgttatatggcacacactgtctggagtcctat

SEQ ID NO: 882744 - DNA, 33 bp, Homo sapien
gtgttatatggcacacgctgtctggagtcctat

SEQ ID NO: 882745 - DNA, 33 bp, Homo sapien
caaggggctaaggcagaaagactaagcaatgtg

SEQ ID NO: 882746 - DNA, 33 bp, Homo sapien
caaggggctaaggcaggaagactaagcaatgtg

SEQ ID NO: 882747 - DNA, 33 bp, Homo sapien
ggtataatgaagcaaactcaatgccccctttcc

SEQ ID NO: 882748 - DNA, 33 bp, Homo sapien
ggtataatgaagcaaattcaatgccccctttcc

SEQ ID NO: 882749 - DNA, 33 bp, Homo sapien
taaaataattatcccaatatgccttcaaattgt

SEQ ID NO: 882750 - DNA, 33 bp, Homo sapien
taaaataattatcccagtatgccttcaaattgt

SEQ ID NO: 882751 - DNA, 33 bp, Homo sapien
attcatgacttgcccactactcctaagattacc

SEQ ID NO: 882752 - DNA, 33 bp, Homo sapien
attcatgacttgcccattactcctaagattacc

SEQ ID NO: 882753 - DNA, 33 bp, Homo sapien
gaacctcaggataagacgagggtatgaaacatg

SEQ ID NO: 882754 - DNA, 33 bp, Homo sapien
gaacctcaggataagatgagggtatgaaacatg

SEQ ID NO: 882755 - DNA, 33 bp, Homo sapien
tccagtgcctttccccaaggatgtaccccacac

SEQ ID NO: 882756 - DNA, 33 bp, Homo sapien
tccagtgcctttccccgaggatgtaccccacac

SEQ ID NO: 882757 - DNA, 33 bp, Homo sapien
cctgatcggataccatcacagcaaatatgaagt

SEQ ID NO: 882758 - DNA, 33 bp, Homo sapien
cctgatcggataccattacagcaaatatgaagt

SEQ ID NO: 882759 - DNA, 33 bp, Homo sapien
atgtatctaagacaaactctttttagctctgtt

SEQ ID NO: 882760 - DNA, 33 bp, Homo sapien
atgtatctaagacaaattctttttagctctgtt

SEQ ID NO: 882761 - DNA, 33 bp, Homo sapien
taatacattagagttcaagatacagtacaaact

SEQ ID NO: 882762 - DNA, 33 bp, Homo sapien
taatacattagagttcgagatacagtacaaact

SEQ ID NO: 882763 - DNA, 33 bp, Homo sapien
aaagtggtcgtagataatacacaggcaaatgag

SEQ ID NO: 882764 - DNA, 33 bp, Homo sapien
aaagtggtcgtagatagtacacaggcaaatgag

SEQ ID NO: 882765 - DNA, 33 bp, Homo sapien
ccacatggcttgcgaaatccaaaatatttacta

SEQ ID NO: 882766 - DNA, 33 bp, Homo sapien
ccacatggcttgcgaattccaaaatatttacta

SEQ ID NO: 882767 - DNA, 33 bp, Homo sapien
atcctttcgttcctggaaagttcctcctatatg

SEQ ID NO: 882768 - DNA, 33 bp, Homo sapien
atcctttcgttcctgggaagttcctcctatatg

SEQ ID NO: 882769 - DNA, 33 bp, Homo sapien
tgcaagctcaggaggacgtcatctatccaggaa

SEQ ID NO: 882770 - DNA, 33 bp, Homo sapien
tgcaagctcaggaggaggtcatctatccaggaa

SEQ ID NO: 882771 - DNA, 33 bp, Homo sapien
tgaacttccatgtatcagaaaacttagtgtcaa

SEQ ID NO: 882772 - DNA, 33 bp, Homo sapien
tgaacttccatgtatcggaaaacttagtgtcaa

SEQ ID NO: 882773 - DNA, 33 bp, Homo sapien
aaatacatataaggaaaacaagcaaagataaac

SEQ ID NO: 882774 - DNA, 33 bp, Homo sapien
aaatacatataaggaagacaagcaaagataaac

SEQ ID NO: 882775 - DNA, 33 bp, Homo sapien
ctccagatgactacaacatgcaccatttctgtg

SEQ ID NO: 882776 - DNA, 33 bp, Homo sapien
ctccagatgactacaatatgcaccatttctgtg

SEQ ID NO: 882777 - DNA, 33 bp, Homo sapien
caccttttattaactcaagaagccagaaacatg

SEQ ID NO: 882778 - DNA, 33 bp, Homo sapien
caccttttattaactcgagaagccagaaacatg

SEQ ID NO: 882779 - DNA, 33 bp, Homo sapien
tgtttcttcttgcaacagtaatgacagagaaca

SEQ ID NO: 882780 - DNA, 33 bp, Homo sapien
tgtttcttcttgcaacggtaatgacagagaaca

SEQ ID NO: 882781 - DNA, 33 bp, Homo sapien
taagcctactacaggcagaagaactcactggta

SEQ ID NO: 882782 - DNA, 33 bp, Homo sapien
taagcctactacaggccgaagaactcactggta

SEQ ID NO: 882783 - DNA, 33 bp, Homo sapien
aacactcaggttctaactcaggatctgtatcct

SEQ ID NO: 882784 - DNA, 33 bp, Homo sapien
aacactcaggttctaattcaggatctgtatcct

SEQ ID NO: 882785 - DNA, 33 bp, Homo sapien
ccacttcctcttccataacattgtgaaaacaca

SEQ ID NO: 882786 - DNA, 33 bp, Homo sapien
ccacttcctcttccatgacattgtgaaaacaca

SEQ ID NO: 882787 - DNA, 33 bp, Homo sapien
aagcttccatagcaccaagcgggttgctgctgc

SEQ ID NO: 882788 - DNA, 33 bp, Homo sapien
aagcttccatagcaccgagcgggttgctgctgc

SEQ ID NO: 882789 - DNA, 33 bp, Homo sapien; identical to SEQ ID NO: 882787

SEQ ID NO: 882790 - DNA, 33 bp, Homo sapien; identical to SEQ ID NO: 882788

SEQ ID NO: 882791 - DNA, 33 bp, Homo sapien
ccctagtatcttgcaacctgatcttatttggaa

SEQ ID NO: 882792 - DNA, 33 bp, Homo sapien
ccctagtatcttgcaatctgatcttatttggaa

SEQ ID NO: 882793 - DNA, 33 bp, Homo sapien
tgacactgttatggccactccaggaaactaaca

SEQ ID NO: 882794 - DNA, 33 bp, Homo sapien
tgacactgttatggccgctccaggaaactaaca

SEQ ID NO: 882795 - DNA, 33 bp, Homo sapien
tattgttgttccataaagtgtcttggctgaagt

SEQ ID NO: 882796 - DNA, 33 bp, Homo sapien
tattgttgttccataacgtgtcttggctgaagt

SEQ ID NO: 882797 - DNA, 33 bp, Homo sapien
tgaaaaaataaaacacacaagtcagaggagtag

SEQ ID NO: 882798 - DNA, 33 bp, Homo sapien
tgaaaaaataaaacacgcaagtcagaggagtag

SEQ ID NO: 882799 - DNA, 33 bp, Homo sapien
aaggaagataccactacacagacactagaaagg

SEQ ID NO: 882800 - DNA, 33 bp, Homo sapien
aaggaagataccactagacagacactagaaagg

SEQ ID NO: 882801 - DNA, 33 bp, Homo sapien
acgcctgcaatgccgacgctttggaaagtgagt

SEQ ID NO: 882802 - DNA, 33 bp, Homo sapien
acgcctgcaatgccgatgctttggaaagtgagt

SEQ ID NO: 882803 - DNA, 33 bp, Homo sapien
acctctgaagttcagaagcacaaggcctgacga

SEQ ID NO: 882804 - DNA, 33 bp, Homo sapien
acctctgaagttcagatgcacaaggcctgacga

SEQ ID NO: 882805 - DNA, 33 bp, Homo sapien
tctagtgtcagctgaactctcctttgtttcaga

SEQ ID NO: 882806 - DNA, 33 bp, Homo sapien
tctagtgtcagctgaagtctcctttgtttcaga

SEQ ID NO: 882807 - DNA, 33 bp, Homo sapien
tttcaaaatttactacagggtttgcaatttctt

SEQ ID NO: 882808 - DNA, 33 bp, Homo sapien
tttcaaaatttactacggggtttgcaatttctt

SEQ ID NO: 882809 - DNA, 33 bp, Homo sapien
caacagagctctcttacgtagtgccgatcttag

SEQ ID NO: 882810 - DNA, 33 bp, Homo sapien
caacagagctctcttatgtagtgccgatcttag

SEQ ID NO: 882811 - DNA, 33 bp, Homo sapien
gcaaccagcgccagaagaacagaaaatcaatga

SEQ ID NO: 882812 - DNA, 33 bp, Homo sapien
gcaaccagcgccagaataacagaaaatcaatga

SEQ ID NO: 882813 - DNA, 33 bp, Homo sapien
ggctctgcagacaacacagtagaaaagaaagaa

SEQ ID NO: 882814 - DNA, 33 bp, Homo sapien
ggctctgcagacaacagagtagaaaagaaagaa

SEQ ID NO: 882815 - DNA, 33 bp, Homo sapien
cttctgcagaagaaaacagttgttgatgatgct

SEQ ID NO: 882816 - DNA, 33 bp, Homo sapien
cttctgcagaagaaaatagttgttgatgatgct

SEQ ID NO: 882817 - DNA, 33 bp, Homo sapien
caccgaagttcacaaagcaacctgagatttagg

SEQ ID NO: 882818 - DNA, 33 bp, Homo sapien
caccgaagttcacaaatcaacctgagatttagg

SEQ ID NO: 882819 - DNA, 33 bp, Homo sapien
ctgtaattgctacaacaatgattatttttctgc

SEQ ID NO: 882820 - DNA, 33 bp, Homo sapien
ctgtaattgctacaaccatgattatttttctgc

SEQ ID NO: 882821 - DNA, 33 bp, Homo sapien
ttcttgctgcatcatcccataagggaaagtcaa

SEQ ID NO: 882822 - DNA, 33 bp, Homo sapien
ttcttgctgcatcatctcataagggaaagtcaa

SEQ ID NO: 882823 - DNA, 33 bp, Homo sapien
tggacttgccatcctcaagaaccataagaaatc

SEQ ID NO: 882824 - DNA, 33 bp, Homo sapien
tggacttgccatcctccagaaccataagaaatc

SEQ ID NO: 882825 - DNA, 33 bp, Homo sapien
tcatctctagttgtgacagtctattgagcatta

SEQ ID NO: 882826 - DNA, 33 bp, Homo sapien
tcatctctagttgtgagagtctattgagcatta

SEQ ID NO: 882827 - DNA, 33 bp, Homo sapien
ttcagacaaattgtgaagaattagaaaaaggaa

SEQ ID NO: 882828 - DNA, 33 bp, Homo sapien
ttcagacaaattgtgaggaattagaaaaaggaa

SEQ ID NO: 882829 - DNA, 33 bp, Homo sapien
acacggtggcttgtgcaactcagtatattgtaa

SEQ ID NO: 882830 - DNA, 33 bp, Homo sapien
acacggtggcttgtgctactcagtatattgtaa

SEQ ID NO: 882831 - DNA, 33 bp, Homo sapien
agccacacatgaaatacgctagacactaacgat

SEQ ID NO: 882832 - DNA, 33 bp, Homo sapien
agccacacatgaaatatgctagacactaacgat

SEQ ID NO: 882833 - DNA, 33 bp, Homo sapien
attaggttacaacatacgaatttccagggaaca

SEQ ID NO: 882834 - DNA, 33 bp, Homo sapien
attaggttacaacatatgaatttccagggaaca

SEQ ID NO: 882835 - DNA, 33 bp, Homo sapien
attgtacagctgagtaaattgagtcactgaaag

SEQ ID NO: 882836 - DNA, 33 bp, Homo sapien
attgtacagctgagtagattgagtcactgaaag

SEQ ID NO: 882837 - DNA, 33 bp, Homo sapien
caagagctagatataactacaagtcttataaac

SEQ ID NO: 882838 - DNA, 33 bp, Homo sapien
caagagctagatataattacaagtcttataaac

SEQ ID NO: 882839 - DNA, 33 bp, Homo sapien
gaccccaacatgctgggatgcacttgctgagta

SEQ ID NO: 882840 - DNA, 33 bp, Homo sapien
gaccccaacatgctggtatgcacttgctgagta

SEQ ID NO: 882841 - DNA, 33 bp, Homo sapien
ttatatgctctgtttacggtttaaatataaatt

SEQ ID NO: 882842 - DNA, 33 bp, Homo sapien
ttatatgctctgtttatggtttaaatataaatt

SEQ ID NO: 882843 - DNA, 33 bp, Homo sapien
atcacactttctaccacggccttcattttcacc

SEQ ID NO: 882844 - DNA, 33 bp, Homo sapien
atcacactttctaccatggccttcattttcacc

SEQ ID NO: 882845 - DNA, 33 bp, Homo sapien
ctccaaatctgaccaactggtgcaaaatcaaca

SEQ ID NO: 882846 - DNA, 33 bp, Homo sapien
ctccaaatctgaccaattggtgcaaaatcaaca

SEQ ID NO: 882847 - DNA, 33 bp, Homo sapien
aaagtagcgtggtggaaaaggccctggtgagga

SEQ ID NO: 882848 - DNA, 33 bp, Homo sapien
aaagtagcgtggtggagaaggccctggtgagga

SEQ ID NO: 882849 - DNA, 33 bp, Homo sapien
aaatcatggtgaatgacagtgttagaaatagac

SEQ ID NO: 882850 - DNA, 33 bp, Homo sapien
aaatcatggtgaatgagagtgttagaaatagac

SEQ ID NO: 882851 - DNA, 33 bp, Homo sapien
agactcttcaagggggcatccaaagtgttgttc

SEQ ID NO: 882852 - DNA, 33 bp, Homo sapien
agactcttcaagggggtatccaaagtgttgttc

SEQ ID NO: 882853 - DNA, 33 bp, Homo sapien
ttaattatacaatgcaagaaacatccacacaca

SEQ ID NO: 882854 - DNA, 33 bp, Homo sapien
ttaattatacaatgcaggaaacatccacacaca

SEQ ID NO: 882855 - DNA, 33 bp, Homo sapien
tttttggataagaccaactcacattttttgaaa

SEQ ID NO: 882856 - DNA, 33 bp, Homo sapien
tttttggataagaccatctcacattttttgaaa

SEQ ID NO: 882857 - DNA, 33 bp, Homo sapien
aatcacccaatttccaccaacgcactggctcat

SEQ ID NO: 882858 - DNA, 33 bp, Homo sapien
aatcacccaatttccatcaacgcactggctcat

SEQ ID NO: 882859 - DNA, 33 bp, Homo sapien
ctaatcttagtagtagaaacagtattattgagt

SEQ ID NO: 882860 - DNA, 33 bp, Homo sapien
ctaatcttagtagtaggaacagtattattgagt

SEQ ID NO: 882861 - DNA, 33 bp, Homo sapien
tattaagtaagatcaggaagacctgtgttaaaa

SEQ ID NO: 882862 - DNA, 33 bp, Homo sapien
tattaagtaagatcagtaagacctgtgttaaaa

SEQ ID NO: 882863 - DNA, 33 bp, Homo sapien
gtgaagaaggaccatgcatttgcttctccttct

SEQ ID NO: 882864 - DNA, 33 bp, Homo sapien
gtgaagaaggaccatgtatttgcttctccttct

SEQ ID NO: 882865 - DNA, 33 bp, Homo sapien
ttataaagaactgctccagactgagtaatttat

SEQ ID NO: 882866 - DNA, 33 bp, Homo sapien
ttataaagaactgctcgagactgagtaatttat

SEQ ID NO: 882867 - DNA, 33 bp, Homo sapien
tcatatttaatggcaactgcgatttctccagtg

SEQ ID NO: 882868 - DNA, 33 bp, Homo sapien
tcatatttaatggcaattgcgatttctccagtg

SEQ ID NO: 882869 - DNA, 33 bp, Homo sapien
agtattgaagttttaactgaggtttcagaacaa

SEQ ID NO: 882870 - DNA, 33 bp, Homo sapien
agtattgaagttttaattgaggtttcagaacaa

SEQ ID NO: 882871 - DNA, 33 bp, Homo sapien
tttagtttttaaagcaccaaacccatgcaatac

SEQ ID NO: 882872 - DNA, 33 bp, Homo sapien
tttagtttttaaagcatcaaacccatgcaatac

SEQ ID NO: 882873 - DNA, 33 bp, Homo sapien
ctccatttacaccctacggcatacacccagtaa

SEQ ID NO: 882874 - DNA, 33 bp, Homo sapien
ctccatttacaccctatggcatacacccagtaa

SEQ ID NO: 882875 - DNA, 33 bp, Homo sapien
agtgcttcagcagtcacaacaatttcttttcct

SEQ ID NO: 882876 - DNA, 33 bp, Homo sapien
agtgcttcagcagtcataacaatttcttttcct

SEQ ID NO: 882877 - DNA, 33 bp, Homo sapien
tctcaaagggatagagaaagaatttacagtgac

SEQ ID NO: 882878 - DNA, 33 bp, Homo sapien
tctcaaagggatagaggaagaatttacagtgac

SEQ ID NO: 882879 - DNA, 33 bp, Homo sapien
cctcaggaaacttccactcattgcagaaggtga

SEQ ID NO: 882880 - DNA, 33 bp, Homo sapien
cctcaggaaacttccattcattgcagaaggtga

SEQ ID NO: 882881 - DNA, 33 bp, Homo sapien
tgctaatgttcaacaacggaggcaggactaatc

SEQ ID NO: 882882 - DNA, 33 bp, Homo sapien
tgctaatgttcaacaatggaggcaggactaatc

SEQ ID NO: 882883 - DNA, 33 bp, Homo sapien
taaggaaatccaaagacaggaagcagatcagtg

SEQ ID NO: 882884 - DNA, 33 bp, Homo sapien
taaggaaatccaaagagaggaagcagatcagtg

SEQ ID NO: 882885 - DNA, 33 bp, Homo sapien
tcattgaacagaggaaagtaaaatgacaaccac

SEQ ID NO: 882886 - DNA, 33 bp, Homo sapien
tcattgaacagaggaaggtaaaatgacaaccac

SEQ ID NO: 882887 - DNA, 33 bp, Homo sapien
caaacactgttagaaacgagcatttttggaagc

SEQ ID NO: 882888 - DNA, 33 bp, Homo sapien
caaacactgttagaaatgagcatttttggaagc

SEQ ID NO: 882889 - DNA, 33 bp, Homo sapien
agataagattgggaaacagcatctgtaatttaa

SEQ ID NO: 882890 - DNA, 33 bp, Homo sapien
agataagattgggaaagagcatctgtaatttaa

SEQ ID NO: 882891 - DNA, 33 bp, Homo sapien
tctttctctatggaaaatgagacttgatttcta

SEQ ID NO: 882892 - DNA, 33 bp, Homo sapien
tctttctctatggaaactgagacttgatttcta

SEQ ID NO: 882893 - DNA, 33 bp, Homo sapien
ggaaatgagatggataagacctatcacccctgc

SEQ ID NO: 882894 - DNA, 33 bp, Homo sapien
ggaaatgagatggatacgacctatcacccctgc

SEQ ID NO: 882895 - DNA, 33 bp, Homo sapien
gggagagagcagttacaaacaccaatgtcagct

SEQ ID NO: 882896 - DNA, 33 bp, Homo sapien
gggagagagcagttaccaacaccaatgtcagct

SEQ ID NO: 882897 - DNA, 33 bp, Homo sapien
gtaataagctttaaaacgctgttagaatcatag

SEQ ID NO: 882898 - DNA, 33 bp, Homo sapien
gtaataagctttaaaatgctgttagaatcatag

SEQ ID NO: 882899 - DNA, 33 bp, Homo sapien
ggtttgatgaacaaataatttcgacacacaggg

SEQ ID NO: 882900 - DNA, 33 bp, Homo sapien
ggtttgatgaacaaatgatttcgacacacaggg

SEQ ID NO: 882901 - DNA, 33 bp, Homo sapien
agtgggtcctgaatacactcacttatgcatcta

SEQ ID NO: 882902 - DNA, 33 bp, Homo sapien
agtgggtcctgaatactctcacttatgcatcta

SEQ ID NO: 882903 - DNA, 33 bp, Homo sapien
tcaaatgttctgctttcctcttgacctgcataa

SEQ ID NO: 882904 - DNA, 33 bp, Homo sapien
tcaaatgttctgcttttctcttgacctgcataa

SEQ ID NO: 882905 - DNA, 33 bp, Homo sapien
gccactcttgattatacacaaatgcaattagga

SEQ ID NO: 882906 - DNA, 33 bp, Homo sapien
gccactcttgattatatacaaatgcaattagga

SEQ ID NO: 882907 - DNA, 33 bp, Homo sapien
agtagcttatgaatacagaaatttattgctcat

SEQ ID NO: 882908 - DNA, 33 bp, Homo sapien
agtagcttatgaatacggaaatttattgctcat

SEQ ID NO: 882909 - DNA, 33 bp, Homo sapien
taaaaggaaacaaataataacgatcagagcaga

SEQ ID NO: 882910 - DNA, 33 bp, Homo sapien
taaaaggaaacaaatagtaacgatcagagcaga

SEQ ID NO: 882911 - DNA, 33 bp, Homo sapien
cagtaaaaaaaacttacgactaggatatggaaa

SEQ ID NO: 882912 - DNA, 33 bp, Homo sapien
cagtaaaaaaaacttatgactaggatatggaaa

SEQ ID NO: 882913 - DNA, 33 bp, Homo sapien
tgagacttattttaaaggtgttgagatttgctt

SEQ ID NO: 882914 - DNA, 33 bp, Homo sapien
tgagacttattttaaatgtgttgagatttgctt

SEQ ID NO: 882915 - DNA, 33 bp, Homo sapien
tttattcattttataacactttgtagctttcac

SEQ ID NO: 882916 - DNA, 33 bp, Homo sapien
tttattcattttataagactttgtagctttcac

SEQ ID NO: 882917 - DNA, 33 bp, Homo sapien
tattatattgaacttgaatccggtaacattgtt

SEQ ID NO: 882918 - DNA, 33 bp, Homo sapien
tattatattgaacttgtatccggtaacattgtt

SEQ ID NO: 882919 - DNA, 33 bp, Homo sapien
tgaaaattattaaacactatcagctgcatcaca

SEQ ID NO: 882920 - DNA, 33 bp, Homo sapien
tgaaaattattaaacattatcagctgcatcaca

SEQ ID NO: 882921 - DNA, 33 bp, Homo sapien
cagaataggcaccaccaccagacaaacatggca

SEQ ID NO: 882922 - DNA, 33 bp, Homo sapien
cagaataggcaccaccgccagacaaacatggca

SEQ ID NO: 882923 - DNA, 33 bp, Homo sapien
aggcaaatacagagaacgacaactgaccagagc

SEQ ID NO: 882924 - DNA, 33 bp, Homo sapien
aggcaaatacagagaatgacaactgaccagagc

SEQ ID NO: 882925 - DNA, 33 bp, Homo sapien
ttaattctcaaactacactgtgagttaagcagt

SEQ ID NO: 882926 - DNA, 33 bp, Homo sapien
ttaattctcaaactacgctgtgagttaagcagt

SEQ ID NO: 882927 - DNA, 33 bp, Homo sapien
accactggctataaggaaggccatatttcctct

SEQ ID NO: 882928 - DNA, 33 bp, Homo sapien
accactggctataagggaggccatatttcctct

SEQ ID NO: 882929 - DNA, 33 bp, Homo sapien
agaaataaattaacaaagcagacctgaaaatat

SEQ ID NO: 882930 - DNA, 33 bp, Homo sapien
agaaataaattaacaaggcagacctgaaaatat

SEQ ID NO: 882931 - DNA, 33 bp, Homo sapien
ttgcactgactcagacggatttacttccagatg

SEQ ID NO: 882932 - DNA, 33 bp, Homo sapien
ttgcactgactcagactgatttacttccagatg

SEQ ID NO: 882933 - DNA, 33 bp, Homo sapien
atgataaaatcgcccaggctcttcaggggccac

SEQ ID NO: 882934 - DNA, 33 bp, Homo sapien
atgataaaatcgcccatgctcttcaggggccac

SEQ ID NO: 882935 - DNA, 33 bp, Homo sapien
tgaatatgcaaagaaagctaaagcaaaggtacc

SEQ ID NO: 882936 - DNA, 33 bp, Homo sapien
tgaatatgcaaagaaatctaaagcaaaggtacc

SEQ ID NO: 882937 - DNA, 33 bp, Homo sapien
ctaccatgtaaggagcaaagtgatgggctcaga

SEQ ID NO: 882938 - DNA, 33 bp, Homo sapien
ctaccatgtaaggagcgaagtgatgggctcaga

SEQ ID NO: 882939 - DNA, 33 bp, Homo sapien
attggctgttctaatactagtcatctgccatga

SEQ ID NO: 882940 - DNA, 33 bp, Homo sapien
attggctgttctaatattagtcatctgccatga

SEQ ID NO: 882941 - DNA, 33 bp, Homo sapien
acatttccctttttccacttatcaggctaacta

SEQ ID NO: 882942 - DNA, 33 bp, Homo sapien
acatttccctttttccgcttatcaggctaacta

SEQ ID NO: 882943 - DNA, 33 bp, Homo sapien
atatgtgaacatacaactgggaaatattgctcc

SEQ ID NO: 882944 - DNA, 33 bp, Homo sapien
atatgtgaacatacaattgggaaatattgctcc

SEQ ID NO: 882945 - DNA, 33 bp, Homo sapien
caagccacattttccaagctctttagttcattt

SEQ ID NO: 882946 - DNA, 33 bp, Homo sapien
caagccacattttccaggctctttagttcattt

SEQ ID NO: 882947 - DNA, 33 bp, Homo sapien
cctgcatgttcaaaaacgagggaatagtgccag

SEQ ID NO: 882948 - DNA, 33 bp, Homo sapien
cctgcatgttcaaaaatgagggaatagtgccag

SEQ ID NO: 882949 - DNA, 33 bp, Homo sapien
gcacattaatccttaaactaaatgctatcacat

SEQ ID NO: 882950 - DNA, 33 bp, Homo sapien
gcacattaatccttaacctaaatgctatcacat

SEQ ID NO: 882951 - DNA, 33 bp, Homo sapien
gccagaagttgtgcccactgagatttcccttca

SEQ ID NO: 882952 - DNA, 33 bp, Homo sapien
gccagaagttgtgcccgctgagatttcccttca

SEQ ID NO: 882953 - DNA, 33 bp, Homo sapien
tatgacccagcaaatccgatggtgcatccctca

SEQ ID NO: 882954 - DNA, 33 bp, Homo sapien
tatgacccagcaaatctgatggtgcatccctca

SEQ ID NO: 882955 - DNA, 33 bp, Homo sapien
ccacacaaaactgacaccctttcaggtcattca

SEQ ID NO: 882956 - DNA, 33 bp, Homo sapien
ccacacaaaactgacagcctttcaggtcattca

SEQ ID NO: 882957 - DNA, 33 bp, Homo sapien; identical to SEQ ID NO: 882955

SEQ ID NO: 882958 - DNA, 33 bp, Homo sapien; identical to SEQ ID NO: 882956

SEQ ID NO: 882959 - DNA, 33 bp, Homo sapien
agaaagttgcacaacacctagtgggcctatttg

SEQ ID NO: 882960 - DNA, 33 bp, Homo sapien
agaaagttgcacaacatctagtgggcctatttg

SEQ ID NO: 882961 - DNA, 33 bp, Homo sapien; identical to SEQ ID NO: 882959

SEQ ID NO: 882962 - DNA, 33 bp, Homo sapien; identical to SEQ ID NO: 882960

SEQ ID NO: 882963 - DNA, 33 bp, Homo sapien
taatgaagttgaagacactgagcttgtaaattc

SEQ ID NO: 882964 - DNA, 33 bp, Homo sapien
taatgaagttgaagacgctgagcttgtaaattc

SEQ ID NO: 882965 - DNA, 33 bp, Homo sapien
attaagattgcaaatgacaaatcaaactaattc

SEQ ID NO: 882966 - DNA, 33 bp, Homo sapien
attaagattgcaaatggcaaatcaaactaattc

SEQ ID NO: 882967 - DNA, 33 bp, Homo sapien
gcttgctaatcactgagcaaagagaggccaata

SEQ ID NO: 882968 - DNA, 33 bp, Homo sapien
gcttgctaatcactgatcaaagagaggccaata

SEQ ID NO: 882969 - DNA, 33 bp, Homo sapien
ctagcaaagactgataaatgttcttcatcaaaa

SEQ ID NO: 882970 - DNA, 33 bp, Homo sapien
ctagcaaagactgatatatgttcttcatcaaaa

SEQ ID NO: 882971 - DNA, 33 bp, Homo sapien
gccatgagtgtgtaaggatatacatttcctcag

SEQ ID NO: 882972 - DNA, 33 bp, Homo sapien
gccatgagtgtgtaagtatatacatttcctcag

SEQ ID NO: 882973 - DNA, 33 bp, Homo sapien
ccccgtgttattattccaattgtacaggacagg

SEQ ID NO: 882974 - DNA, 33 bp, Homo sapien
ccccgtgttattattctaattgtacaggacagg

SEQ ID NO: 882975 - DNA, 33 bp, Homo sapien
tgcattttttaagctaatagaactgactctccc

SEQ ID NO: 882976 - DNA, 33 bp, Homo sapien
tgcattttttaagctattagaactgactctccc

SEQ ID NO: 882977 - DNA, 33 bp, Homo sapien
ttttaaaagctgttcaaaaagaagaattcaaag

SEQ ID NO: 882978 - DNA, 33 bp, Homo sapien
ttttaaaagctgttcagaaagaagaattcaaag

SEQ ID NO: 882979 - DNA, 33 bp, Homo sapien
tagagcccagaatgaacgagataactaacaaag

SEQ ID NO: 882980 - DNA, 33 bp, Homo sapien
tagagcccagaatgaatgagataactaacaaag

SEQ ID NO: 882981 - DNA, 33 bp, Homo sapien
gcaagttcgcttagtaataaactccacagttct

SEQ ID NO: 882982 - DNA, 33 bp, Homo sapien
gcaagttcgcttagtagtaaactccacagttct

SEQ ID NO: 882983 - DNA, 33 bp, Homo sapien
tatatatgtggaatcacgtgtctttttgtgact

SEQ ID NO: 882984 - DNA, 33 bp, Homo sapien
tatatatgtggaatcatgtgtctttttgtgact

SEQ ID NO: 882985 - DNA, 33 bp, Homo sapien
tgtaaaaaactagaaaaagcatttctctcactc

SEQ ID NO: 882986 - DNA, 33 bp, Homo sapien
tgtaaaaaactagaaagagcatttctctcactc

SEQ ID NO: 882987 - DNA, 33 bp, Homo sapien
tgagatataagcaaaagagtggctgtagtgatg

SEQ ID NO: 882988 - DNA, 33 bp, Homo sapien
tgagatataagcaaaatagtggctgtagtgatg

SEQ ID NO: 882989 - DNA, 33 bp, Homo sapien
gatatagggacaaaaagaaatcaggcttgaaag

SEQ ID NO: 882990 - DNA, 33 bp, Homo sapien
gatatagggacaaaaataaatcaggcttgaaag

SEQ ID NO: 882991 - DNA, 33 bp, Homo sapien
tgatatatccaagaggaatggcagtgaaggtgt

SEQ ID NO: 882992 - DNA, 33 bp, Homo sapien
tgatatatccaagaggtatggcagtgaaggtgt

SEQ ID NO: 882993 - DNA, 33 bp, Homo sapien
gaaagtgggtacaaacacctgtaagtccacaga

SEQ ID NO: 882994 - DNA, 33 bp, Homo sapien
gaaagtgggtacaaacgcctgtaagtccacaga

SEQ ID NO: 882995 - DNA, 33 bp, Homo sapien
aatccttttgtttgtccctaagttctcaggaag

SEQ ID NO: 882996 - DNA, 33 bp, Homo sapien
aatccttttgtttgtctctaagttctcaggaag

SEQ ID NO: 882997 - DNA, 33 bp, Homo sapien
agcttgaggattggaagatatcacattgttcct

SEQ ID NO: 882998 - DNA, 33 bp, Homo sapien
agcttgaggattggaatatatcacattgttcct

SEQ ID NO: 882999 - DNA, 33 bp, Homo sapien
catagcacactggaaactgtttctgctatctgc

SEQ ID NO: 883000 - DNA, 33 bp, Homo sapien
catagcacactggaaattgtttctgctatctgc

SEQ ID NO: 883001 - DNA, 33 bp, Homo sapien
gagactccagctctgacgtatagtctatagaga

SEQ ID NO: 883002 - DNA, 33 bp, Homo sapien
gagactccagctctgatgtatagtctatagaga

SEQ ID NO: 883003 - DNA, 33 bp, Homo sapien
ctggtgctgttacaaaaagtatggaaggtactg

SEQ ID NO: 883004 - DNA, 33 bp, Homo sapien
ctggtgctgttacaaagagtatggaaggtactg

SEQ ID NO: 883005 - DNA, 33 bp, Homo sapien
agattaaagggagcaacgattttctgattgagc

SEQ ID NO: 883006 - DNA, 33 bp, Homo sapien
agattaaagggagcaatgattttctgattgagc

SEQ ID NO: 883007 - DNA, 33 bp, Homo sapien
aagaatggcttaaggaaaagcaactgaatggat

SEQ ID NO: 883008 - DNA, 33 bp, Homo sapien
aagaatggcttaaggagaagcaactgaatggat

SEQ ID NO: 883009 - DNA, 33 bp, Homo sapien
tattggaactaaaaagaagtgcagaattgttaa

SEQ ID NO: 883010 - DNA, 33 bp, Homo sapien
tattggaactaaaaaggagtgcagaattgttaa

SEQ ID NO: 883011 - DNA, 33 bp, Homo sapien
tggtttttctgttcaactcaggtagagtcttgg

SEQ ID NO: 883012 - DNA, 33 bp, Homo sapien
tggtttttctgttcaagtcaggtagagtcttgg

SEQ ID NO: 883013 - DNA, 33 bp, Homo sapien
actataataggctttgcaatcagcacaacatag

SEQ ID NO: 883014 - DNA, 33 bp, Homo sapien
actataataggctttgtaatcagcacaacatag

SEQ ID NO: 883015 - DNA, 33 bp, Homo sapien
gcactgtgtatgatcgaccaagggggacttaga

SEQ ID NO: 883016 - DNA, 33 bp, Homo sapien
gcactgtgtatgatcggccaagggggacttaga

SEQ ID NO: 883017 - DNA, 33 bp, Homo sapien
gggcagaagtgaagatcaagccaaagatgcaga

SEQ ID NO: 883018 - DNA, 33 bp, Homo sapien
gggcagaagtgaagattaagccaaagatgcaga

SEQ ID NO: 883019 - DNA, 33 bp, Homo sapien
aaagaagacagtcatgcaaattagaaggagaac

SEQ ID NO: 883020 - DNA, 33 bp, Homo sapien
aaagaagacagtcatgtaaattagaaggagaac

SEQ ID NO: 883021 - DNA, 33 bp, Homo sapien
tttcaggagctctggaagcaatcagaattgata

SEQ ID NO: 883022 - DNA, 33 bp, Homo sapien
tttcaggagctctggaggcaatcagaattgata

SEQ ID NO: 883023 - DNA, 33 bp, Homo sapien
gccctggacttcacaaaaaaaacaaagcatata

SEQ ID NO: 883024 - DNA, 33 bp, Homo sapien
gccctggacttcacaacaaaaacaaagcatata

SEQ ID NO: 883025 - DNA, 33 bp, Homo sapien
gactacttctgtagaactaggctccaggccagc

SEQ ID NO: 883026 - DNA, 33 bp, Homo sapien
gactacttctgtagaattaggctccaggccagc

SEQ ID NO: 883027 - DNA, 33 bp, Homo sapien
ggcctttcggtgacaaactaatgtctagagtca

SEQ ID NO: 883028 - DNA, 33 bp, Homo sapien
ggcctttcggtgacaacctaatgtctagagtca

SEQ ID NO: 883029 - DNA, 33 bp, Homo sapien
gagagaacagacactacccaactttaagtctta

SEQ ID NO: 883030 - DNA, 33 bp, Homo sapien
gagagaacagacactatccaactttaagtctta

SEQ ID NO: 883031 - DNA, 33 bp, Homo sapien
agaaacagacgaagcacggggactctgaaaggc

SEQ ID NO: 883032 - DNA, 33 bp, Homo sapien
agaaacagacgaagcatggggactctgaaaggc

SEQ ID NO: 883033 - DNA, 33 bp, Homo sapien
gtttcgcgccacaagaaaacatcacctttctgg

SEQ ID NO: 883034 - DNA, 33 bp, Homo sapien
gtttcgcgccacaagagaacatcacctttctgg

SEQ ID NO: 883035 - DNA, 33 bp, Homo sapien
aggcaggcttcaaagaatattacattgtgctaa

SEQ ID NO: 883036 - DNA, 33 bp, Homo sapien
aggcaggcttcaaagactattacattgtgctaa

SEQ ID NO: 883037 - DNA, 33 bp, Homo sapien
aatacttctttctccaatatctctccctgaaaa

SEQ ID NO: 883038 - DNA, 33 bp, Homo sapien
aatacttctttctccagtatctctccctgaaaa

SEQ ID NO: 883039 - DNA, 33 bp, Homo sapien
tgtcatctttttaatacagctgctgataaatgt

SEQ ID NO: 883040 - DNA, 33 bp, Homo sapien
tgtcatctttttaatatagctgctgataaatgt

SEQ ID NO: 883041 - DNA, 33 bp, Homo sapien
aaaatcaagtaggttacagtagaaattaaagcc

SEQ ID NO: 883042 - DNA, 33 bp, Homo sapien
aaaatcaagtaggttatagtagaaattaaagcc

SEQ ID NO: 883043 - DNA, 33 bp, Homo sapien
taaagccacaagtgaaacctttaagataaatac

SEQ ID NO: 883044 - DNA, 33 bp, Homo sapien
taaagccacaagtgaagcctttaagataaatac

SEQ ID NO: 883045 - DNA, 33 bp, Homo sapien
agtgaatccattgggtaaaaaagtttaatgttc

SEQ ID NO: 883046 - DNA, 33 bp, Homo sapien
agtgaatccattgggtgaaaaagtttaatgttc

SEQ ID NO: 883047 - DNA, 33 bp, Homo sapien
tgtctgcttaaatggaatcagataccaaagtcc

SEQ ID NO: 883048 - DNA, 33 bp, Homo sapien
tgtctgcttaaatggagtcagataccaaagtcc

SEQ ID NO: 883049 - DNA, 33 bp, Homo sapien
tgttttcacctctcagactatcttcagttatat

SEQ ID NO: 883050 - DNA, 33 bp, Homo sapien
tgttttcacctctcagtctatcttcagttatat

SEQ ID NO: 883051 - DNA, 33 bp, Homo sapien
aggagctgtaatttaaaagtgacaataaagtga

SEQ ID NO: 883052 - DNA, 33 bp, Homo sapien
aggagctgtaatttaacagtgacaataaagtga

SEQ ID NO: 883053 - DNA, 33 bp, Homo sapien
ttagtctcttcaacaaatggtgttggcaaaact

SEQ ID NO: 883054 - DNA, 33 bp, Homo sapien
ttagtctcttcaacaagtggtgttggcaaaact

SEQ ID NO: 883055 - DNA, 33 bp, Homo sapien
agataatgtcactaacaaagttctcatgcaaac

SEQ ID NO: 883056 - DNA, 33 bp, Homo sapien
agataatgtcactaacgaagttctcatgcaaac

SEQ ID NO: 883057 - DNA, 33 bp, Homo sapien
ggaacatattttatccaagatcaaactcagaca

SEQ ID NO: 883058 - DNA, 33 bp, Homo sapien
ggaacatattttatccgagatcaaactcagaca

SEQ ID NO: 883059 - DNA, 33 bp, Homo sapien
catacagtagcatataagacctaattcataaga

SEQ ID NO: 883060 - DNA, 33 bp, Homo sapien
catacagtagcatataggacctaattcataaga

SEQ ID NO: 883061 - DNA, 33 bp, Homo sapien
atataaacctgctttaactcactttctgtataa

SEQ ID NO: 883062 - DNA, 33 bp, Homo sapien
atataaacctgctttacctcactttctgtataa

SEQ ID NO: 883063 - DNA, 33 bp, Homo sapien
ctagtgtacatggaacaataaacaaaaattata

SEQ ID NO: 883064 - DNA, 33 bp, Homo sapien
ctagtgtacatggaactataaacaaaaattata

SEQ ID NO: 883065 - DNA, 33 bp, Homo sapien
tcagtcctccgtgacactgagatatgacatgaa

SEQ ID NO: 883066 - DNA, 33 bp, Homo sapien
tcagtcctccgtgacattgagatatgacatgaa

SEQ ID NO: 883067 - DNA, 33 bp, Homo sapien
ggttattaaaagctcacggtggcacagacagga

SEQ ID NO: 883068 - DNA, 33 bp, Homo sapien
ggttattaaaagctcatggtggcacagacagga

SEQ ID NO: 883069 - DNA, 33 bp, Homo sapien
tcttcattacctgatacggagtcatctccttcc

SEQ ID NO: 883070 - DNA, 33 bp, Homo sapien
tcttcattacctgatatggagtcatctccttcc

SEQ ID NO: 883071 - DNA, 33 bp, Homo sapien
ttcctggaaactgctacgacagtgttgattata

SEQ ID NO: 883072 - DNA, 33 bp, Homo sapien
ttcctggaaactgctatgacagtgttgattata

SEQ ID NO: 883073 - DNA, 33 bp, Homo sapien
ctctgtcatgtttcaacgtatcagtccatctgt

SEQ ID NO: 883074 - DNA, 33 bp, Homo sapien
ctctgtcatgtttcaatgtatcagtccatctgt

SEQ ID NO: 883075 - DNA, 33 bp, Homo sapien
tggtacatgtgtcatcaagaaatctctctctct

SEQ ID NO: 883076 - DNA, 33 bp, Homo sapien
tggtacatgtgtcatcgagaaatctctctctct

SEQ ID NO: 883077 - DNA, 33 bp, Homo sapien
atgactgctatggtcacggacaaagtcctgcag

SEQ ID NO: 883078 - DNA, 33 bp, Homo sapien
atgactgctatggtcatggacaaagtcctgcag

SEQ ID NO: 883079 - DNA, 33 bp, Homo sapien
atgcaaaatagctctgaaattagaaagacctcc

SEQ ID NO: 883080 - DNA, 33 bp, Homo sapien
atgcaaaatagctctgcaattagaaagacctcc

SEQ ID NO: 883081 - DNA, 33 bp, Homo sapien
cctgacagaatctcccaccgagaaccagcaagg

SEQ ID NO: 883082 - DNA, 33 bp, Homo sapien
cctgacagaatctcccgccgagaaccagcaagg

SEQ ID NO: 883083 - DNA, 33 bp, Homo sapien
gcttgacgggctcacacatacctggaagagtta

SEQ ID NO: 883084 - DNA, 33 bp, Homo sapien
gcttgacgggctcacatatacctggaagagtta

SEQ ID NO: 883085 - DNA, 33 bp, Homo sapien
gaatagttggcagcttaaaaccagttggtagct

SEQ ID NO: 883086 - DNA, 33 bp, Homo sapien
gaatagttggcagcttgaaaccagttggtagct

SEQ ID NO: 883087 - DNA, 33 bp, Homo sapien
ttaattggtcctttccactgatttctcctttgg

SEQ ID NO: 883088 - DNA, 33 bp, Homo sapien
ttaattggtcctttccgctgatttctcctttgg

SEQ ID NO: 883089 - DNA, 33 bp, Homo sapien
gatacgttttgggatacggaagtaagcaaaaag

SEQ ID NO: 883090 - DNA, 33 bp, Homo sapien
gatacgttttgggatatggaagtaagcaaaaag

SEQ ID NO: 883091 - DNA, 33 bp, Homo sapien
aaatgtatttgatagaatctaacctccattcag

SEQ ID NO: 883092 - DNA, 33 bp, Homo sapien
aaatgtatttgatagactctaacctccattcag

SEQ ID NO: 883093 - DNA, 33 bp, Homo sapien
atataggtcaagggaaagagtctttgtgatttt

SEQ ID NO: 883094 - DNA, 33 bp, Homo sapien
atataggtcaagggaaggagtctttgtgatttt

SEQ ID NO: 883095 - DNA, 33 bp, Homo sapien
tagaatacaatccacaatgattctctaatgctt

SEQ ID NO: 883096 - DNA, 33 bp, Homo sapien
tagaatacaatccacagtgattctctaatgctt

SEQ ID NO: 883097 - DNA, 33 bp, Homo sapien
atgaatggggtctttacgccagataaaacagca

SEQ ID NO: 883098 - DNA, 33 bp, Homo sapien
atgaatggggtctttatgccagataaaacagca

SEQ ID NO: 883099 - DNA, 33 bp, Homo sapien; identical to SEQ ID NO: 883097

SEQ ID NO: 883100 - DNA, 33 bp, Homo sapien; identical to SEQ ID NO: 883098

SEQ ID NO: 883101 - DNA, 33 bp, Homo sapien
ccacaagcctgtaacaaccttcccagtggacta

SEQ ID NO: 883102 - DNA, 33 bp, Homo sapien
ccacaagcctgtaacatccttcccagtggacta

SEQ ID NO: 883103 - DNA, 33 bp, Homo sapien
cttcatggaaataaagaaataaagaagcagaat

SEQ ID NO: 883104 - DNA, 33 bp, Homo sapien
cttcatggaaataaaggaataaagaagcagaat

SEQ ID NO: 883105 - DNA, 33 bp, Homo sapien
tttcctgggaatcaagacaattttgcattatgt

SEQ ID NO: 883106 - DNA, 33 bp, Homo sapien
tttcctgggaatcaaggcaattttgcattatgt

SEQ ID NO: 883107 - DNA, 33 bp, Homo sapien
tattttctgagcactacctatgaggatcagaag

SEQ ID NO: 883108 - DNA, 33 bp, Homo sapien
tattttctgagcactatctatgaggatcagaag

SEQ ID NO: 883109 - DNA, 33 bp, Homo sapien
cattatattataaaacaccagtctcctccatac

SEQ ID NO: 883110 - DNA, 33 bp, Homo sapien
cattatattataaaacgccagtctcctccatac

SEQ ID NO: 883111 - DNA, 33 bp, Homo sapien
tggttcaagctgcatccctgaaaaggaaaaaga

SEQ ID NO: 883112 - DNA, 33 bp, Homo sapien
tggttcaagctgcatcgctgaaaaggaaaaaga

SEQ ID NO: 883113 - DNA, 33 bp, Homo sapien
tcctcaattacagacactggcgcgctgctgctg

SEQ ID NO: 883114 - DNA, 33 bp, Homo sapien
tcctcaattacagacattggcgcgctgctgctg

SEQ ID NO: 883115 - DNA, 33 bp, Homo sapien
gtctgtaattgaggagaatctttcccagggaac

SEQ ID NO: 883116 - DNA, 33 bp, Homo sapien
gtctgtaattgaggaggatctttcccagggaac

SEQ ID NO: 883117 - DNA, 33 bp, Homo sapien
gttcacacacacagaacatgtaggaatctgact

SEQ ID NO: 883118 - DNA, 33 bp, Homo sapien
gttcacacacacagaatatgtaggaatctgact

SEQ ID NO: 883119 - DNA, 33 bp, Homo sapien
gaagcctcagaatgacagtaaagagtcataggt

SEQ ID NO: 883120 - DNA, 33 bp, Homo sapien
gaagcctcagaatgacggtaaagagtcataggt

SEQ ID NO: 883121 - DNA, 33 bp, Homo sapien
gctcccaccatagtccacctagccaaattctca

SEQ ID NO: 883122 - DNA, 33 bp, Homo sapien
gctcccaccatagtccgcctagccaaattctca

SEQ ID NO: 883123 - DNA, 33 bp, Homo sapien
ccaccatctttgtcctcaaccttagcagcagag

SEQ ID NO: 883124 - DNA, 33 bp, Homo sapien
ccaccatctttgtccttaaccttagcagcagag

SEQ ID NO: 883125 - DNA, 33 bp, Homo sapien
cctttcccactgtacaaaggcattacaagtgca

SEQ ID NO: 883126 - DNA, 33 bp, Homo sapien
cctttcccactgtacagaggcattacaagtgca

SEQ ID NO: 883127 - DNA, 33 bp, Homo sapien
atacccaaatcagtaaagtgtgaacatgaggag

SEQ ID NO: 883128 - DNA, 33 bp, Homo sapien
atacccaaatcagtaacgtgtgaacatgaggag

SEQ ID NO: 883129 - DNA, 33 bp, Homo sapien
atggacatctttaacacagttgttgaaaaggag

SEQ ID NO: 883130 - DNA, 33 bp, Homo sapien
atggacatctttaacatagttgttgaaaaggag

SEQ ID NO: 883131 - DNA, 33 bp, Homo sapien
acatcctaatcctctcacctggatcatgcccat

SEQ ID NO: 883132 - DNA, 33 bp, Homo sapien
acatcctaatcctctcgcctggatcatgcccat

SEQ ID NO: 883133 - DNA, 33 bp, Homo sapien
ctggggaggcagaatacaatgggagagggcgag

SEQ ID NO: 883134 - DNA, 33 bp, Homo sapien
ctggggaggcagaatataatgggagagggcgag

SEQ ID NO: 883135 - DNA, 33 bp, Homo sapien
tttttagacgttggtaataatgtttctggagga

SEQ ID NO: 883136 - DNA, 33 bp, Homo sapien
tttttagacgttggtagtaatgtttctggagga

SEQ ID NO: 883137 - DNA, 33 bp, Homo sapien
taaacaattatttcaaaatctaatggagcacag

SEQ ID NO: 883138 - DNA, 33 bp, Homo sapien
taaacaattatttcaatatctaatggagcacag

SEQ ID NO: 883139 - DNA, 33 bp, Homo sapien
ttacttgctcctccaaagtattaacctcacttc

SEQ ID NO: 883140 - DNA, 33 bp, Homo sapien
ttacttgctcctccaaggtattaacctcacttc

SEQ ID NO: 883141 - DNA, 33 bp, Homo sapien
cgacattacaaaacccactgccattcttttgaa

SEQ ID NO: 883142 - DNA, 33 bp, Homo sapien
cgacattacaaaacccgctgccattcttttgaa

SEQ ID NO: 883143 - DNA, 33 bp, Homo sapien
aatggttctttcgatacattcattgtttgagag

SEQ ID NO: 883144 - DNA, 33 bp, Homo sapien
aatggttctttcgatatattcattgtttgagag

SEQ ID NO: 883145 - DNA, 33 bp, Homo sapien
ttccatcaccacacaaattctatcaggcaacac

SEQ ID NO: 883146 - DNA, 33 bp, Homo sapien
ttccatcaccacacaagttctatcaggcaacac

SEQ ID NO: 883147 - DNA, 33 bp, Homo sapien
gaatgatcacgtgggaagaaacccaggtatcca

SEQ ID NO: 883148 - DNA, 33 bp, Homo sapien
gaatgatcacgtgggaggaaacccaggtatcca

SEQ ID NO: 883149 - DNA, 33 bp, Homo sapien
aaaaggggacaaccacaagcctttgtcaaccat

SEQ ID NO: 883150 - DNA, 33 bp, Homo sapien
aaaaggggacaaccacgagcctttgtcaaccat

SEQ ID NO: 883151 - DNA, 33 bp, Homo sapien
ccacattatttatcaaaatgccgaagagtttgt

SEQ ID NO: 883152 - DNA, 33 bp, Homo sapien
ccacattatttatcaagatgccgaagagtttgt

SEQ ID NO: 883153 - DNA, 33 bp, Homo sapien
ccttggaagcagcacaagttttgaaggcatgag

SEQ ID NO: 883154 - DNA, 33 bp, Homo sapien
ccttggaagcagcacaggttttgaaggcatgag

SEQ ID NO: 883155 - DNA, 33 bp, Homo sapien
ttaagtgcatttgatacatttaatggtgtccca

SEQ ID NO: 883156 - DNA, 33 bp, Homo sapien
ttaagtgcatttgatagatttaatggtgtccca

SEQ ID NO: 883157 - DNA, 33 bp, Homo sapien
tgttttcctagtactaacattaagtgcatttga

SEQ ID NO: 883158 - DNA, 33 bp, Homo sapien
tgttttcctagtactaccattaagtgcatttga

SEQ ID NO: 883159 - DNA, 33 bp, Homo sapien
aatatctccagtaaaaactgctgaaaaaaaatt

SEQ ID NO: 883160 - DNA, 33 bp, Homo sapien
aatatctccagtaaaacctgctgaaaaaaaatt

SEQ ID NO: 883161 - DNA, 33 bp, Homo sapien
tttggtcataagaatcactttttcaagtcatat

SEQ ID NO: 883162 - DNA, 33 bp, Homo sapien
tttggtcataagaatccctttttcaagtcatat

SEQ ID NO: 883163 - DNA, 33 bp, Homo sapien
atggctgatagtaatacgtgtgaaactcaatct

SEQ ID NO: 883164 - DNA, 33 bp, Homo sapien
atggctgatagtaatatgtgtgaaactcaatct

SEQ ID NO: 883165 - DNA, 33 bp, Homo sapien
cgttaatccaaaaaaacattcataactctgtta

SEQ ID NO: 883166 - DNA, 33 bp, Homo sapien
cgttaatccaaaaaaagattcataactctgtta

SEQ ID NO: 883167 - DNA, 33 bp, Homo sapien
ctccctaagggcaggacgtctgaccctttcttc

SEQ ID NO: 883168 - DNA, 33 bp, Homo sapien
ctccctaagggcaggatgtctgaccctttcttc

SEQ ID NO: 883169 - DNA, 33 bp, Homo sapien
tgagggctccagatgcacgattcatcgagggtg

SEQ ID NO: 883170 - DNA, 33 bp, Homo sapien
tgagggctccagatgcgcgattcatcgagggtg

SEQ ID NO: 883171 - DNA, 33 bp, Homo sapien
acaagccaggccagctaactatagcacagaatg

SEQ ID NO: 883172 - DNA, 33 bp, Homo sapien
acaagccaggccagctgactatagcacagaatg

SEQ ID NO: 883173 - DNA, 33 bp, Homo sapien
gactctgaaacagacaagagacagaattgagca

SEQ ID NO: 883174 - DNA, 33 bp, Homo sapien
gactctgaaacagacaggagacagaattgagca

SEQ ID NO: 883175 - DNA, 33 bp, Homo sapien
acgaggtaaacaaaccaacagtgcacatctcca

SEQ ID NO: 883176 - DNA, 33 bp, Homo sapien
acgaggtaaacaaaccgacagtgcacatctcca

SEQ ID NO: 883177 - DNA, 33 bp, Homo sapien
tgatccatgatgattcccccttggctttctctt

SEQ ID NO: 883178 - DNA, 33 bp, Homo sapien
tgatccatgatgattctcccttggctttctctt

SEQ ID NO: 883179 - DNA, 33 bp, Homo sapien
ataaagtgaatgccaaaaataccttatgatatt

SEQ ID NO: 883180 - DNA, 33 bp, Homo sapien
ataaagtgaatgccaataataccttatgatatt

SEQ ID NO: 883181 - DNA, 33 bp, Homo sapien
agaggtttgaattgcacgggcgcacttacgttc

SEQ ID NO: 883182 - DNA, 33 bp, Homo sapien
agaggtttgaattgcatgggcgcacttacgttc

SEQ ID NO: 883183 - DNA, 33 bp, Homo sapien
ctcaaatgaagggtgacgatgagaacatgacgc

SEQ ID NO: 883184 - DNA, 33 bp, Homo sapien
ctcaaatgaagggtgatgatgagaacatgacgc

SEQ ID NO: 883185 - DNA, 33 bp, Homo sapien
tttgggagaactgtccacttaacaatgttgagg

SEQ ID NO: 883186 - DNA, 33 bp, Homo sapien
tttgggagaactgtccgcttaacaatgttgagg

SEQ ID NO: 883187 - DNA, 33 bp, Homo sapien
ttccccttttcgatggcattatttgatgaaaaa

SEQ ID NO: 883188 - DNA, 33 bp, Homo sapien
ttccccttttcgatggtattatttgatgaaaaa

SEQ ID NO: 883189 - DNA, 33 bp, Homo sapien
cttcccttcttgatcaatctcctgaacatggga

SEQ ID NO: 883190 - DNA, 33 bp, Homo sapien
cttcccttcttgatcagtctcctgaacatggga

SEQ ID NO: 883191 - DNA, 33 bp, Homo sapien
cacagccttccagggacaggtgatatccacaga

SEQ ID NO: 883192 - DNA, 33 bp, Homo sapien
cacagccttccagggagaggtgatatccacaga

SEQ ID NO: 883193 - DNA, 33 bp, Homo sapien
caattgcactgatacaagcaatgtttatttgac

SEQ ID NO: 883194 - DNA, 33 bp, Homo sapien
caattgcactgatacaggcaatgtttatttgac

SEQ ID NO: 883195 - DNA, 33 bp, Homo sapien
tggcattgctatttgaataagagacatcaggaa

SEQ ID NO: 883196 - DNA, 33 bp, Homo sapien
tggcattgctatttgagtaagagacatcaggaa

SEQ ID NO: 883197 - DNA, 33 bp, Homo sapien
ctattgcatgaagaaaggtatgggtaaaatggg

SEQ ID NO: 883198 - DNA, 33 bp, Homo sapien
ctattgcatgaagaaatgtatgggtaaaatggg

SEQ ID NO: 883199 - DNA, 33 bp, Homo sapien
aaatggatcgttaaacaaactgagtctgtgttt

SEQ ID NO: 883200 - DNA, 33 bp, Homo sapien
aaatggatcgttaaaccaactgagtctgtgttt

SEQ ID NO: 883201 - DNA, 33 bp, Homo sapien
aaaatgtctatgacccaaatacgtaatatgaca

SEQ ID NO: 883202 - DNA, 33 bp, Homo sapien
aaaatgtctatgacccgaatacgtaatatgaca

SEQ ID NO: 883203 - DNA, 33 bp, Homo sapien
tgttctttccttggccagacgatatctgtcttc

SEQ ID NO: 883204 - DNA, 33 bp, Homo sapien
tgttctttccttggccggacgatatctgtcttc

SEQ ID NO: 883205 - DNA, 33 bp, Homo sapien
ataagaataataagaaagcagcacccttgggag

SEQ ID NO: 883206 - DNA, 33 bp, Homo sapien
ataagaataataagaatgcagcacccttgggag

SEQ ID NO: 883207 - DNA, 33 bp, Homo sapien
cacatttctgcaatacaccttttgactaattat

SEQ ID NO: 883208 - DNA, 33 bp, Homo sapien
cacatttctgcaatacgccttttgactaattat

SEQ ID NO: 883209 - DNA, 33 bp, Homo sapien
actgaaagccaattctcaccgtgttactggtct

SEQ ID NO: 883210 - DNA, 33 bp, Homo sapien
actgaaagccaattcttaccgtgttactggtct

SEQ ID NO: 883211 - DNA, 33 bp, Homo sapien
tgctgcatcaactcacagcttcatctcccaatg

SEQ ID NO: 883212 - DNA, 33 bp, Homo sapien
tgctgcatcaactcaccgcttcatctcccaatg

SEQ ID NO: 883213 - DNA, 33 bp, Homo sapien
gttggcaaatacctataaagaaattcacacggt

SEQ ID NO: 883214 - DNA, 33 bp, Homo sapien
gttggcaaatacctatgaagaaattcacacggt

SEQ ID NO: 883215 - DNA, 33 bp, Homo sapien
caactttatagttgtcatcagtagggaacctag

SEQ ID NO: 883216 - DNA, 33 bp, Homo sapien
caactttatagttgtcgtcagtagggaacctag

SEQ ID NO: 883217 - DNA, 33 bp, Homo sapien
cagaattccaaatcaacgctagataatatttag

SEQ ID NO: 883218 - DNA, 33 bp, Homo sapien
cagaattccaaatcaatgctagataatatttag

SEQ ID NO: 883219 - DNA, 33 bp, Homo sapien
agagccactagcttcaacactaaggccttggcc

SEQ ID NO: 883220 - DNA, 33 bp, Homo sapien
agagccactagcttcagcactaaggccttggcc

SEQ ID NO: 883221 - DNA, 33 bp, Homo sapien
cagagggaatgacaacacttgctgttagagaaa

SEQ ID NO: 883222 - DNA, 33 bp, Homo sapien
cagagggaatgacaacccttgctgttagagaaa

SEQ ID NO: 883223 - DNA, 33 bp, Homo sapien
aaaaagaacatccgaacatatgattgtaaaaga

SEQ ID NO: 883224 - DNA, 33 bp, Homo sapien
aaaaagaacatccgaatatatgattgtaaaaga

SEQ ID NO: 883225 - DNA, 33 bp, Homo sapien
tagtcttgacctatgacataattttgacttttt

SEQ ID NO: 883226 - DNA, 33 bp, Homo sapien
tagtcttgacctatgatataattttgacttttt

SEQ ID NO: 883227 - DNA, 33 bp, Homo sapien
cctctgcatttttgccagctggactagtgattt

SEQ ID NO: 883228 - DNA, 33 bp, Homo sapien
cctctgcatttttgccggctggactagtgattt

SEQ ID NO: 883229 - DNA, 33 bp, Homo sapien
taaattgctacactgacggaaaagtatccattt

SEQ ID NO: 883230 - DNA, 33 bp, Homo sapien
taaattgctacactgatggaaaagtatccattt

SEQ ID NO: 883231 - DNA, 33 bp, Homo sapien
gttcacacgtccacaccaaaacctctgcaagaa

SEQ ID NO: 883232 - DNA, 33 bp, Homo sapien
gttcacacgtccacactaaaacctctgcaagaa

SEQ ID NO: 883233 - DNA, 33 bp, Homo sapien
attgttgtcatagctaagaagtacttgcagacc

SEQ ID NO: 883234 - DNA, 33 bp, Homo sapien
attgttgtcatagctaggaagtacttgcagacc

SEQ ID NO: 883235 - DNA, 33 bp, Homo sapien
tggacagtgataaacaactctgatggatgagat

SEQ ID NO: 883236 - DNA, 33 bp, Homo sapien
tggacagtgataaacacctctgatggatgagat

SEQ ID NO: 883237 - DNA, 33 bp, Homo sapien
gtattgagtcacaacaaggtgctattattcatg

SEQ ID NO: 883238 - DNA, 33 bp, Homo sapien
gtattgagtcacaacagggtgctattattcatg

SEQ ID NO: 883239 - DNA, 33 bp, Homo sapien
aacatacagaatgactaaggtacacaaacatat

SEQ ID NO: 883240 - DNA, 33 bp, Homo sapien
aacatacagaatgactgaggtacacaaacatat

SEQ ID NO: 883241 - DNA, 33 bp, Homo sapien
aacagttcactggttacagtcaccagggtatat

SEQ ID NO: 883242 - DNA, 33 bp, Homo sapien
aacagttcactggttatagtcaccagggtatat

SEQ ID NO: 883243 - DNA, 33 bp, Homo sapien
catatgtaggatattcaatttgcagatactttt

SEQ ID NO: 883244 - DNA, 33 bp, Homo sapien
catatgtaggatattcgatttgcagatactttt

SEQ ID NO: 883245 - DNA, 33 bp, Homo sapien
tcatttcgcttggagacggaatttcaggaaggg

SEQ ID NO: 883246 - DNA, 33 bp, Homo sapien
tcatttcgcttggagatggaatttcaggaaggg

SEQ ID NO: 883247 - DNA, 33 bp, Homo sapien
taccaagtgccaaagcagaattttaatttcaag

SEQ ID NO: 883248 - DNA, 33 bp, Homo sapien
taccaagtgccaaagcggaattttaatttcaag

SEQ ID NO: 883249 - DNA, 33 bp, Homo sapien
tcaactccagtggtgacgaaaaggggccaatgt

SEQ ID NO: 883250 - DNA, 33 bp, Homo sapien
tcaactccagtggtgatgaaaaggggccaatgt

SEQ ID NO: 883251 - DNA, 33 bp, Homo sapien
ctaagatgacattacaggaaatagacagttgct

SEQ ID NO: 883252 - DNA, 33 bp, Homo sapien
ctaagatgacattacatgaaatagacagttgct

SEQ ID NO: 883253 - DNA, 33 bp, Homo sapien
tactgcttctttgccactcttgctgaatttgga

SEQ ID NO: 883254 - DNA, 33 bp, Homo sapien
tactgcttctttgccagtcttgctgaatttgga

SEQ ID NO: 883255 - DNA, 33 bp, Homo sapien
gcttacaaagcactttcaaacacacgacttcac

SEQ ID NO: 883256 - DNA, 33 bp, Homo sapien
gcttacaaagcactttgaaacacacgacttcac

SEQ ID NO: 883257 - DNA, 33 bp, Homo sapien
atgggggggggcgactaaaggttagcttttcaa

SEQ ID NO: 883258 - DNA, 33 bp, Homo sapien
atgggggggggcgactgaaggttagcttttcaa

SEQ ID NO: 883259 - DNA, 33 bp, Homo sapien
ttctttaaacacttcaatcttttcaagcaatgt

SEQ ID NO: 883260 - DNA, 33 bp, Homo sapien
ttctttaaacacttcagtcttttcaagcaatgt

SEQ ID NO: 883261 - DNA, 33 bp, Homo sapien
tctaatagatatatgacgttaggttgaaagttg

SEQ ID NO: 883262 - DNA, 33 bp, Homo sapien
tctaatagatatatgatgttaggttgaaagttg

SEQ ID NO: 883263 - DNA, 33 bp, Homo sapien
ttagaattaaccatcaaagacggtgaggttaat

SEQ ID NO: 883264 - DNA, 33 bp, Homo sapien
ttagaattaaccatcacagacggtgaggttaat

SEQ ID NO: 883265 - DNA, 33 bp, Homo sapien
tgttctagacactttacatacgaaatctctttt

SEQ ID NO: 883266 - DNA, 33 bp, Homo sapien
tgttctagacactttatatacgaaatctctttt

SEQ ID NO: 883267 - DNA, 33 bp, Homo sapien
acgtctctgattggcaacatctctctttcattt

SEQ ID NO: 883268 - DNA, 33 bp, Homo sapien
acgtctctgattggcagcatctctctttcattt

SEQ ID NO: 883269 - DNA, 33 bp, Homo sapien
gctatcttattgaaaccagcatacatttggagc

SEQ ID NO: 883270 - DNA, 33 bp, Homo sapien
gctatcttattgaaactagcatacatttggagc

SEQ ID NO: 883271 - DNA, 33 bp, Homo sapien
tcacatatgtgatcaaatcaactattataacat

SEQ ID NO: 883272 - DNA, 33 bp, Homo sapien
tcacatatgtgatcaagtcaactattataacat

SEQ ID NO: 883273 - DNA, 33 bp, Homo sapien
gtggggtgacagaaccaaaaataacaacaacaa

SEQ ID NO: 883274 - DNA, 33 bp, Homo sapien
gtggggtgacagaaccgaaaataacaacaacaa

SEQ ID NO: 883275 - DNA, 33 bp, Homo sapien
cctctgtcagcactacaaccaccactcattctg

SEQ ID NO: 883276 - DNA, 33 bp, Homo sapien
cctctgtcagcactacgaccaccactcattctg

SEQ ID NO: 883277 - DNA, 33 bp, Homo sapien
acaaaggtatgttatcacaatcattagcatgct

SEQ ID NO: 883278 - DNA, 33 bp, Homo sapien
acaaaggtatgttatcgcaatcattagcatgct

SEQ ID NO: 883279 - DNA, 33 bp, Homo sapien
atactgtcaagtaggacgtcatgggctgaatca

SEQ ID NO: 883280 - DNA, 33 bp, Homo sapien
atactgtcaagtaggatgtcatgggctgaatca

SEQ ID NO: 883281 - DNA, 33 bp, Homo sapien
ttttggattggtagtaccttaagtgactagcag

SEQ ID NO: 883282 - DNA, 33 bp, Homo sapien
ttttggattggtagtatcttaagtgactagcag

SEQ ID NO: 883283 - DNA, 33 bp, Homo sapien
aaaccataaaacacataagcaaaaaagtcacca

SEQ ID NO: 883284 - DNA, 33 bp, Homo sapien
aaaccataaaacacattagcaaaaaagtcacca

SEQ ID NO: 883285 - DNA, 33 bp, Homo sapien
agctacaattttgctaggtaccctgctgttcat

SEQ ID NO: 883286 - DNA, 33 bp, Homo sapien
agctacaattttgctatgtaccctgctgttcat

SEQ ID NO: 883287 - DNA, 33 bp, Homo sapien
acctggagcacagcccaccggaaaatgcaacat

SEQ ID NO: 883288 - DNA, 33 bp, Homo sapien
acctggagcacagcccgccggaaaatgcaacat

SEQ ID NO: 883289 - DNA, 33 bp, Homo sapien
aggacaaaagaacttgaaggaaatggctgtaaa

SEQ ID NO: 883290 - DNA, 33 bp, Homo sapien
aggacaaaagaacttggaggaaatggctgtaaa

SEQ ID NO: 883291 - DNA, 33 bp, Homo sapien
gagttaccaactccacaactctggagaagctca

SEQ ID NO: 883292 - DNA, 33 bp, Homo sapien
gagttaccaactccactactctggagaagctca

SEQ ID NO: 883293 - DNA, 33 bp, Homo sapien
ctggactgatgctgtaaaacttaagaactttga

SEQ ID NO: 883294 - DNA, 33 bp, Homo sapien
ctggactgatgctgtacaacttaagaactttga

SEQ ID NO: 883295 - DNA, 33 bp, Homo sapien
aagtttgcgttaaaaacttgatccccaacgcaa

SEQ ID NO: 883296 - DNA, 33 bp, Homo sapien
aagtttgcgttaaaaatttgatccccaacgcaa

SEQ ID NO: 883297 - DNA, 33 bp, Homo sapien
gaactgaacggcgcagactattgacatattttt

SEQ ID NO: 883298 - DNA, 33 bp, Homo sapien
gaactgaacggcgcaggctattgacatattttt

SEQ ID NO: 883299 - DNA, 33 bp, Homo sapien
tagaaattatagtaaaaacattttgctgtcata

SEQ ID NO: 883300 - DNA, 33 bp, Homo sapien
tagaaattatagtaaagacattttgctgtcata

SEQ ID NO: 883301 - DNA, 33 bp, Homo sapien
cactgactgtagatcaccttaacaggtacaata

SEQ ID NO: 883302 - DNA, 33 bp, Homo sapien
cactgactgtagatcatcttaacaggtacaata

SEQ ID NO: 883303 - DNA, 33 bp, Homo sapien
gatatttaatcatctgcaactattctcccatct

SEQ ID NO: 883304 - DNA, 33 bp, Homo sapien
gatatttaatcatctgtaactattctcccatct

SEQ ID NO: 883305 - DNA, 33 bp, Homo sapien
atcattgtagagttatcaattggtttgtctaat

SEQ ID NO: 883306 - DNA, 33 bp, Homo sapien
atcattgtagagttattaattggtttgtctaat

SEQ ID NO: 883307 - DNA, 33 bp, Homo sapien
ggcttttacaaccatacactgggagtgtcttct

SEQ ID NO: 883308 - DNA, 33 bp, Homo sapien
ggcttttacaaccatatactgggagtgtcttct

SEQ ID NO: 883309 - DNA, 33 bp, Homo sapien
atcacaactagtcagacgttgccaaagtttcat

SEQ ID NO: 883310 - DNA, 33 bp, Homo sapien
atcacaactagtcagatgttgccaaagtttcat

SEQ ID NO: 883311 - DNA, 33 bp, Homo sapien
taacaattgtcataggaaaaatatcttatcttc

SEQ ID NO: 883312 - DNA, 33 bp, Homo sapien
taacaattgtcatagggaaaatatcttatcttc

SEQ ID NO: 883313 - DNA, 33 bp, Homo sapien
taggatggtgttaacaagagccgcattgctgaa

SEQ ID NO: 883314 - DNA, 33 bp, Homo sapien
taggatggtgttaacaggagccgcattgctgaa

SEQ ID NO: 883315 - DNA, 33 bp, Homo sapien
gaaggtgagacatgctcaaggcaatactgctct

SEQ ID NO: 883316 - DNA, 33 bp, Homo sapien
gaaggtgagacatgctgaaggcaatactgctct

SEQ ID NO: 883317 - DNA, 33 bp, Homo sapien
aggatgaatactcaaacatacaaaacagcaaaa

SEQ ID NO: 883318 - DNA, 33 bp, Homo sapien
aggatgaatactcaaatatacaaaacagcaaaa

SEQ ID NO: 883319 - DNA, 33 bp, Homo sapien
caatgtgttatttatagctggtgccagtaaaaa

SEQ ID NO: 883320 - DNA, 33 bp, Homo sapien
caatgtgttatttatatctggtgccagtaaaaa

SEQ ID NO: 883321 - DNA, 33 bp, Homo sapien
tcactttgttcctgcaatcaaggctagctagag

SEQ ID NO: 883322 - DNA, 33 bp, Homo sapien
tcactttgttcctgcagtcaaggctagctagag

SEQ ID NO: 883323 - DNA, 33 bp, Homo sapien
gctgtcctggttttcaaatgacacgatcttgta

SEQ ID NO: 883324 - DNA, 33 bp, Homo sapien
gctgtcctggttttcagatgacacgatcttgta

SEQ ID NO: 883325 - DNA, 33 bp, Homo sapien
agactttagcaaacaaactatttgaactgatac

SEQ ID NO: 883326 - DNA, 33 bp, Homo sapien
agactttagcaaacaagctatttgaactgatac

SEQ ID NO: 883327 - DNA, 33 bp, Homo sapien
aacaacaaatgctggcaaagaaaggggaatgct

SEQ ID NO: 883328 - DNA, 33 bp, Homo sapien
aacaacaaatgctggcgaagaaaggggaatgct

SEQ ID NO: 883329 - DNA, 33 bp, Homo sapien
ctgatgcattctgctaagtggctctatgtctat

SEQ ID NO: 883330 - DNA, 33 bp, Homo sapien
ctgatgcattctgctatgtggctctatgtctat

SEQ ID NO: 883331 - DNA, 33 bp, Homo sapien
tgcttaagcacttgataaaaaaagatgcaaatt

SEQ ID NO: 883332 - DNA, 33 bp, Homo sapien
tgcttaagcacttgattaaaaaagatgcaaatt

SEQ ID NO: 883333 - DNA, 33 bp, Homo sapien
ttcctcacctcatccacggtcttcgctgctatc

SEQ ID NO: 883334 - DNA, 33 bp, Homo sapien
ttcctcacctcatccatggtcttcgctgctatc

SEQ ID NO: 883335 - DNA, 33 bp, Homo sapien
agcagtgcaattcaaacctctgttgttcaagtg

SEQ ID NO: 883336 - DNA, 33 bp, Homo sapien
agcagtgcaattcaaatctctgttgttcaagtg

SEQ ID NO: 883337 - DNA, 33 bp, Homo sapien
cgaactgcatagcctacaaataccgaaaatttt

SEQ ID NO: 883338 - DNA, 33 bp, Homo sapien
cgaactgcatagcctagaaataccgaaaatttt

SEQ ID NO: 883339 - DNA, 33 bp, Homo sapien
tgcttcattcaatccgaactgacttcaggtaaa

SEQ ID NO: 883340 - DNA, 33 bp, Homo sapien
tgcttcattcaatccggactgacttcaggtaaa

SEQ ID NO: 883341 - DNA, 33 bp, Homo sapien
ttcttctttggatggcggcactctcaagagttt

SEQ ID NO: 883342 - DNA, 33 bp, Homo sapien
ttcttctttggatggctgcactctcaagagttt

SEQ ID NO: 883343 - DNA, 33 bp, Homo sapien
ctaactttaccactcacaaaaatattcaggtgt

SEQ ID NO: 883344 - DNA, 33 bp, Homo sapien
ctaactttaccactcataaaaatattcaggtgt

SEQ ID NO: 883345 - DNA, 33 bp, Homo sapien
atgttgttagtgttcaaaaatagttactgaata

SEQ ID NO: 883346 - DNA, 33 bp, Homo sapien
atgttgttagtgttcacaaatagttactgaata

SEQ ID NO: 883347 - DNA, 33 bp, Homo sapien
gaatgtgagtttctgaagggcagagattttgtc

SEQ ID NO: 883348 - DNA, 33 bp, Homo sapien
gaatgtgagtttctgacgggcagagattttgtc

SEQ ID NO: 883349 - DNA, 33 bp, Homo sapien
aggaagggaagaaagaaaaatggatgtatgaga

SEQ ID NO: 883350 - DNA, 33 bp, Homo sapien
aggaagggaagaaagacaaatggatgtatgaga

SEQ ID NO: 883351 - DNA, 33 bp, Homo sapien
agattctatcccggaaccttttctagtcttcat

SEQ ID NO: 883352 - DNA, 33 bp, Homo sapien
agattctatcccggaagcttttctagtcttcat

SEQ ID NO: 883353 - DNA, 33 bp, Homo sapien
aatattatgaagtatgaaggtcattctgagtac

SEQ ID NO: 883354 - DNA, 33 bp, Homo sapien
aatattatgaagtatgtaggtcattctgagtac

SEQ ID NO: 883355 - DNA, 33 bp, Homo sapien
gatttggcatccttaacgtactcagaatgacct

SEQ ID NO: 883356 - DNA, 33 bp, Homo sapien
gatttggcatccttaatgtactcagaatgacct

SEQ ID NO: 883357 - DNA, 33 bp, Homo sapien
aaaatgtttgaaagaaagcatactggccaaatc

SEQ ID NO: 883358 - DNA, 33 bp, Homo sapien
aaaatgtttgaaagaacgcatactggccaaatc

SEQ ID NO: 883359 - DNA, 33 bp, Homo sapien
acggtgttgagaaatactatattcacaagatct

SEQ ID NO: 883360 - DNA, 33 bp, Homo sapien
acggtgttgagaaatattatattcacaagatct

SEQ ID NO: 883361 - DNA, 33 bp, Homo sapien
gattacaggtataaaccgctgcacctggttcat

SEQ ID NO: 883362 - DNA, 33 bp, Homo sapien
gattacaggtataaactgctgcacctggttcat

SEQ ID NO: 883363 - DNA, 33 bp, Homo sapien
aacctgtcagtttgccaattaggttttacaata

SEQ ID NO: 883364 - DNA, 33 bp, Homo sapien
aacctgtcagtttgccgattaggttttacaata

SEQ ID NO: 883365 - DNA, 33 bp, Homo sapien
gacatcacagtccgaccggggaatcctcgccac

SEQ ID NO: 883366 - DNA, 33 bp, Homo sapien
gacatcacagtccgacgggggaatcctcgccac

SEQ ID NO: 883367 - DNA, 33 bp, Homo sapien
gtaatagagcttgagaatagagaaagtttattt

SEQ ID NO: 883368 - DNA, 33 bp, Homo sapien
gtaatagagcttgagagtagagaaagtttattt

SEQ ID NO: 883369 - DNA, 33 bp, Homo sapien
acctcatacccaggagaaaaaccagaaatacca

SEQ ID NO: 883370 - DNA, 33 bp, Homo sapien
acctcatacccaggaggaaaaccagaaatacca

SEQ ID NO: 883371 - DNA, 33 bp, Homo sapien
gagatcaaacctgaacagtacattatcttcatt

SEQ ID NO: 883372 - DNA, 33 bp, Homo sapien
gagatcaaacctgaacggtacattatcttcatt

SEQ ID NO: 883373 - DNA, 33 bp, Homo sapien
aagggaagagagaaaacgatcaataagtaaatg

SEQ ID NO: 883374 - DNA, 33 bp, Homo sapien
aagggaagagagaaaatgatcaataagtaaatg

SEQ ID NO: 883375 - DNA, 33 bp, Homo sapien
aggctttatgctatagactactgcttccaggcc

SEQ ID NO: 883376 - DNA, 33 bp, Homo sapien
aggctttatgctatagcctactgcttccaggcc

SEQ ID NO: 883377 - DNA, 33 bp, Homo sapien
acacttgaatgttcaaatcaacctggaaaataa

SEQ ID NO: 883378 - DNA, 33 bp, Homo sapien
acacttgaatgttcaagtcaacctggaaaataa

SEQ ID NO: 883379 - DNA, 33 bp, Homo sapien
cttaacattctaacataaactaattccagttca

SEQ ID NO: 883380 - DNA, 33 bp, Homo sapien
cttaacattctaacattaactaattccagttca

SEQ ID NO: 883381 - DNA, 33 bp, Homo sapien
atcttgtacaaatgaactgcagcaaactcttca

SEQ ID NO: 883382 - DNA, 33 bp, Homo sapien
atcttgtacaaatgaattgcagcaaactcttca

SEQ ID NO: 883383 - DNA, 33 bp, Homo sapien
acaaatctgggaggacgcgccccgcctgtgccg

SEQ ID NO: 883384 - DNA, 33 bp, Homo sapien
acaaatctgggaggactcgccccgcctgtgccg

SEQ ID NO: 883385 - DNA, 33 bp, Homo sapien
tggaaagccacgcctgcagttaaagatgtctcc

SEQ ID NO: 883386 - DNA, 33 bp, Homo sapien
tggaaagccacgcctggagttaaagatgtctcc

SEQ ID NO: 883387 - DNA, 33 bp, Homo sapien
tatgctttgaccaagaactttcttttccccatc

SEQ ID NO: 883388 - DNA, 33 bp, Homo sapien
tatgctttgaccaagatctttcttttccccatc

SEQ ID NO: 883389 - DNA, 33 bp, Homo sapien
tatccaaccagccacccggatgtgtgactatta

SEQ ID NO: 883390 - DNA, 33 bp, Homo sapien
tatccaaccagccacctggatgtgtgactatta

SEQ ID NO: 883391 - DNA, 33 bp, Homo sapien
gacccgggtgataagaaaggagagaggattact

SEQ ID NO: 883392 - DNA, 33 bp, Homo sapien
gacccgggtgataagacaggagagaggattact

SEQ ID NO: 883393 - DNA, 33 bp, Homo sapien
tgcttgtcctgccctaaactttcctgatttgaa

SEQ ID NO: 883394 - DNA, 33 bp, Homo sapien
tgcttgtcctgccctatactttcctgatttgaa

SEQ ID NO: 883395 - DNA, 33 bp, Homo sapien
tgggaaggaagggatacacaaaatcgacatgga

SEQ ID NO: 883396 - DNA, 33 bp, Homo sapien
tgggaaggaagggatatacaaaatcgacatgga

SEQ ID NO: 883397 - DNA, 33 bp, Homo sapien
ctgcccatcacaccaacagttgcgaatcagaat

SEQ ID NO: 883398 - DNA, 33 bp, Homo sapien
ctgcccatcacaccaatagttgcgaatcagaat

SEQ ID NO: 883399 - DNA, 33 bp, Homo sapien
acaatatatagccaaactttataggcattgtat

SEQ ID NO: 883400 - DNA, 33 bp, Homo sapien
acaatatatagccaaagtttataggcattgtat

SEQ ID NO: 883401 - DNA, 33 bp, Homo sapien
ctagttaactatagaacatcgagtgtcttatta

SEQ ID NO: 883402 - DNA, 33 bp, Homo sapien
ctagttaactatagaatatcgagtgtcttatta

SEQ ID NO: 883403 - DNA, 33 bp, Homo sapien
ttctctcaaattcttacggcaaatgttttgatg

SEQ ID NO: 883404 - DNA, 33 bp, Homo sapien
ttctctcaaattcttatggcaaatgttttgatg

SEQ ID NO: 883405 - DNA, 33 bp, Homo sapien
acagtgagaatttagcacgcttgatcccagcct

SEQ ID NO: 883406 - DNA, 33 bp, Homo sapien
acagtgagaatttagcgcgcttgatcccagcct

SEQ ID NO: 883407 - DNA, 33 bp, Homo sapien
gtattgtctaatacaaacaggagaagcggaata

SEQ ID NO: 883408 - DNA, 33 bp, Homo sapien
gtattgtctaatacaaccaggagaagcggaata

SEQ ID NO: 883409 - DNA, 33 bp, Homo sapien
actcatcagtaaatataaactggcagaggaaag

SEQ ID NO: 883410 - DNA, 33 bp, Homo sapien
actcatcagtaaatatgaactggcagaggaaag

SEQ ID NO: 883411 - DNA, 33 bp, Homo sapien
agtcttcacctcttccaaagaagggatcctgca

SEQ ID NO: 883412 - DNA, 33 bp, Homo sapien
agtcttcacctcttccgaagaagggatcctgca

SEQ ID NO: 883413 - DNA, 33 bp, Homo sapien
cacaggtaagaacctacacatttgaatgttcag

SEQ ID NO: 883414 - DNA, 33 bp, Homo sapien
cacaggtaagaacctatacatttgaatgttcag

SEQ ID NO: 883415 - DNA, 33 bp, Homo sapien
agcgaggcttgagaaccgctttctagacctaca

SEQ ID NO: 883416 - DNA, 33 bp, Homo sapien
agcgaggcttgagaactgctttctagacctaca

SEQ ID NO: 883417 - DNA, 33 bp, Homo sapien
gcatactctttatgcacggtaattgggaaaatt

SEQ ID NO: 883418 - DNA, 33 bp, Homo sapien
gcatactctttatgcatggtaattgggaaaatt

SEQ ID NO: 883419 - DNA, 33 bp, Homo sapien
taccttttcaggtaacacaacatgagatcctac

SEQ ID NO: 883420 - DNA, 33 bp, Homo sapien
taccttttcaggtaacgcaacatgagatcctac

SEQ ID NO: 883421 - DNA, 33 bp, Homo sapien
agatagttaaaattcacgtcctaccttacttct

SEQ ID NO: 883422 - DNA, 33 bp, Homo sapien
agatagttaaaattcatgtcctaccttacttct

SEQ ID NO: 883423 - DNA, 33 bp, Homo sapien
aggtatgggaacaaacaagaaataagataaagg

SEQ ID NO: 883424 - DNA, 33 bp, Homo sapien
aggtatgggaacaaacgagaaataagataaagg

SEQ ID NO: 883425 - DNA, 33 bp, Homo sapien
tcaaagtctaagtgacaggacgaagcccacgag

SEQ ID NO: 883426 - DNA, 33 bp, Homo sapien
tcaaagtctaagtgacgggacgaagcccacgag

SEQ ID NO: 883427 - DNA, 33 bp, Homo sapien
actaaggcagaaacccagaatacagaaagccct

SEQ ID NO: 883428 - DNA, 33 bp, Homo sapien
actaaggcagaaacccggaatacagaaagccct

SEQ ID NO: 883429 - DNA, 33 bp, Homo sapien
gaagttggaattgcaaacagattctttttcttc

SEQ ID NO: 883430 - DNA, 33 bp, Homo sapien
gaagttggaattgcaagcagattctttttcttc

SEQ ID NO: 883431 - DNA, 33 bp, Homo sapien
tttcacacctagctgccaacatctaattgcatt

SEQ ID NO: 883432 - DNA, 33 bp, Homo sapien
tttcacacctagctgctaacatctaattgcatt

SEQ ID NO: 883433 - DNA, 33 bp, Homo sapien
cagagtcaccacataccaagcacctttcccact

SEQ ID NO: 883434 - DNA, 33 bp, Homo sapien
cagagtcaccacatacgaagcacctttcccact

SEQ ID NO: 883435 - DNA, 33 bp, Homo sapien
ctgcatcaaagtgagcaagctggcctcctgagg

SEQ ID NO: 883436 - DNA, 33 bp, Homo sapien
ctgcatcaaagtgagcgagctggcctcctgagg

SEQ ID NO: 883437 - DNA, 33 bp, Homo sapien
acagagagaggcctaacgatgaatacctcacgt

SEQ ID NO: 883438 - DNA, 33 bp, Homo sapien
acagagagaggcctaatgatgaatacctcacgt

SEQ ID NO: 883439 - DNA, 33 bp, Homo sapien
gacagagtgaaaaatccgaaagacagaatagtg

SEQ ID NO: 883440 - DNA, 33 bp, Homo sapien
gacagagtgaaaaatctgaaagacagaatagtg

SEQ ID NO: 883441 - DNA, 33 bp, Homo sapien
cagggctatttttcaccattgtaaatgacaccc

SEQ ID NO: 883442 - DNA, 33 bp, Homo sapien
cagggctatttttcactattgtaaatgacaccc

SEQ ID NO: 883443 - DNA, 33 bp, Homo sapien
acaatcagatttcaaaactccagttccatttct

SEQ ID NO: 883444 - DNA, 33 bp, Homo sapien
acaatcagatttcaaagctccagttccatttct

SEQ ID NO: 883445 - DNA, 33 bp, Homo sapien
agatctaggaacaagcaatagagcccatctatg

SEQ ID NO: 883446 - DNA, 33 bp, Homo sapien
agatctaggaacaagcgatagagcccatctatg

SEQ ID NO: 883447 - DNA, 33 bp, Homo sapien
ggatgctacacgtccactgagttaaaggcaaac

SEQ ID NO: 883448 - DNA, 33 bp, Homo sapien
ggatgctacacgtccagtgagttaaaggcaaac

SEQ ID NO: 883449 - DNA, 33 bp, Homo sapien
cacacaaaagcataacaataacaacaacaataa

SEQ ID NO: 883450 - DNA, 33 bp, Homo sapien
cacacaaaagcataacgataacaacaacaataa

SEQ ID NO: 883451 - DNA, 33 bp, Homo sapien
tatccacttgtcattaccaaaatttaacagcct

SEQ ID NO: 883452 - DNA, 33 bp, Homo sapien
tatccacttgtcattatcaaaatttaacagcct

SEQ ID NO: 883453 - DNA, 33 bp, Homo sapien
ccactatttgaaatgacgattatttcaagtcct

SEQ ID NO: 883454 - DNA, 33 bp, Homo sapien
ccactatttgaaatgatgattatttcaagtcct

SEQ ID NO: 883455 - DNA, 33 bp, Homo sapien
gctctagcggcaccaaatgggctctgcgttgta

SEQ ID NO: 883456 - DNA, 33 bp, Homo sapien
gctctagcggcaccaagtgggctctgcgttgta

SEQ ID NO: 883457 - DNA, 33 bp, Homo sapien
tcatttaatactgggacgtagacatgaacatgg

SEQ ID NO: 883458 - DNA, 33 bp, Homo sapien
tcatttaatactgggatgtagacatgaacatgg

SEQ ID NO: 883459 - DNA, 33 bp, Homo sapien
ggcagcctcatcacaactgagcgttctgtctac

SEQ ID NO: 883460 - DNA, 33 bp, Homo sapien
ggcagcctcatcacaattgagcgttctgtctac

SEQ ID NO: 883461 - DNA, 33 bp, Homo sapien
aactgatgaaggaggccgagaaatagaagaaca

SEQ ID NO: 883462 - DNA, 33 bp, Homo sapien
aactgatgaaggaggctgagaaatagaagaaca

SEQ ID NO: 883463 - DNA, 33 bp, Homo sapien
tgtatgcatttcaatacgtcctaattcacagag

SEQ ID NO: 883464 - DNA, 33 bp, Homo sapien
tgtatgcatttcaatatgtcctaattcacagag

SEQ ID NO: 883465 - DNA, 33 bp, Homo sapien
tattgctacataaaaaggtttcattggtttgcc

SEQ ID NO: 883466 - DNA, 33 bp, Homo sapien
tattgctacataaaaatgtttcattggtttgcc

SEQ ID NO: 883467 - DNA, 33 bp, Homo sapien
tttccattagagattgaactacagaatgtttta

SEQ ID NO: 883468 - DNA, 33 bp, Homo sapien
tttccattagagattggactacagaatgtttta

SEQ ID NO: 883469 - DNA, 33 bp, Homo sapien
agaagcagaaagagcacgttgtttggaatagaa

SEQ ID NO: 883470 - DNA, 33 bp, Homo sapien
agaagcagaaagagcatgttgtttggaatagaa

SEQ ID NO: 883471 - DNA, 33 bp, Homo sapien
gaatacaaataccaccacctttatccaggccac

SEQ ID NO: 883472 - DNA, 33 bp, Homo sapien
gaatacaaataccaccgcctttatccaggccac

SEQ ID NO: 883473 - DNA, 33 bp, Homo sapien
cctcccaatctctgcaactcaataagcagccca

SEQ ID NO: 883474 - DNA, 33 bp, Homo sapien
cctcccaatctctgcagctcaataagcagccca

SEQ ID NO: 883475 - DNA, 33 bp, Homo sapien
aatgtacttcatggtaaatttgtgttatgtata

SEQ ID NO: 883476 - DNA, 33 bp, Homo sapien
aatgtacttcatggtatatttgtgttatgtata

SEQ ID NO: 883477 - DNA, 33 bp, Homo sapien
tcagtggctccccttcacacaggaaaagctgct

SEQ ID NO: 883478 - DNA, 33 bp, Homo sapien
tcagtggctccccttcgcacaggaaaagctgct

SEQ ID NO: 883479 - DNA, 33 bp, Homo sapien
acacctcattgtgtaccgcaaatctatgcttcg

SEQ ID NO: 883480 - DNA, 33 bp, Homo sapien
acacctcattgtgtactgcaaatctatgcttcg

SEQ ID NO: 883481 - DNA, 33 bp, Homo sapien
tagctgaaaaaaaatcaagaaagcagtctcatt

SEQ ID NO: 883482 - DNA, 33 bp, Homo sapien
tagctgaaaaaaaatccagaaagcagtctcatt

SEQ ID NO: 883483 - DNA, 33 bp, Homo sapien
cacagcgagtccctgaagagaacaaggcaacgc

SEQ ID NO: 883484 - DNA, 33 bp, Homo sapien
cacagcgagtccctgatgagaacaaggcaacgc

SEQ ID NO: 883485 - DNA, 33 bp, Homo sapien
ttcttctcctgtgcaagataagaaggatgacat

SEQ ID NO: 883486 - DNA, 33 bp, Homo sapien
ttcttctcctgtgcaatataagaaggatgacat

SEQ ID NO: 883487 - DNA, 33 bp, Homo sapien
tttggggagaaaaagaatctaatggaaaatata

SEQ ID NO: 883488 - DNA, 33 bp, Homo sapien
tttggggagaaaaagagtctaatggaaaatata

SEQ ID NO: 883489 - DNA, 33 bp, Homo sapien
acttacttatctgtaaagtctctctatctttag

SEQ ID NO: 883490 - DNA, 33 bp, Homo sapien
acttacttatctgtaaggtctctctatctttag

SEQ ID NO: 883491 - DNA, 33 bp, Homo sapien
ggcaagagttttcatactacaatgattcaaaaa

SEQ ID NO: 883492 - DNA, 33 bp, Homo sapien
ggcaagagttttcatattacaatgattcaaaaa

SEQ ID NO: 883493 - DNA, 33 bp, Homo sapien
gggatttgctggctcacgtaatggttaagttca

SEQ ID NO: 883494 - DNA, 33 bp, Homo sapien
gggatttgctggctcatgtaatggttaagttca

SEQ ID NO: 883495 - DNA, 33 bp, Homo sapien
tcaaccatccttcctaactaatatccactgtcc

SEQ ID NO: 883496 - DNA, 33 bp, Homo sapien
tcaaccatccttcctacctaatatccactgtcc

SEQ ID NO: 883497 - DNA, 33 bp, Homo sapien
agggacaaaattcaaccctcaacaagaggacag

SEQ ID NO: 883498 - DNA, 33 bp, Homo sapien
agggacaaaattcaacgctcaacaagaggacag

SEQ ID NO: 883499 - DNA, 33 bp, Homo sapien
gcctcggcatcctcagcactttcattccgggct

SEQ ID NO: 883500 - DNA, 33 bp, Homo sapien
gcctcggcatcctcagtactttcattccgggct

SEQ ID NO: 883501 - DNA, 33 bp, Homo sapien
gaaaaagacaaaaccaacgagtgaaggcaggag

SEQ ID NO: 883502 - DNA, 33 bp, Homo sapien
gaaaaagacaaaaccatcgagtgaaggcaggag

SEQ ID NO: 883503 - DNA, 33 bp, Homo sapien
ctttcccacactttgactagagttgacatttaa

SEQ ID NO: 883504 - DNA, 33 bp, Homo sapien
ctttcccacactttgattagagttgacatttaa

SEQ ID NO: 883505 - DNA, 33 bp, Homo sapien
gatccatgcagtcctaggtatagattgcatata

SEQ ID NO: 883506 - DNA, 33 bp, Homo sapien
gatccatgcagtcctatgtatagattgcatata

SEQ ID NO: 883507 - DNA, 33 bp, Homo sapien
atcttatttttgcaataaacaatgaagagaggt

SEQ ID NO: 883508 - DNA, 33 bp, Homo sapien
atcttatttttgcaatgaacaatgaagagaggt

SEQ ID NO: 883509 - DNA, 33 bp, Homo sapien
tctatgtatgtatgaacgtggaaacacacatgg

SEQ ID NO: 883510 - DNA, 33 bp, Homo sapien
tctatgtatgtatgaatgtggaaacacacatgg

SEQ ID NO: 883511 - DNA, 33 bp, Homo sapien
ttttggaaaaacattacgctttagctgcattca

SEQ ID NO: 883512 - DNA, 33 bp, Homo sapien
ttttggaaaaacattatgctttagctgcattca

SEQ ID NO: 883513 - DNA, 33 bp, Homo sapien
ggggtgccgaaatggacactttacttctaagtc

SEQ ID NO: 883514 - DNA, 33 bp, Homo sapien
ggggtgccgaaatggatactttacttctaagtc

SEQ ID NO: 883515 - DNA, 33 bp, Homo sapien
gcctgtgtaaatgtcaacctgtatccccagcac

SEQ ID NO: 883516 - DNA, 33 bp, Homo sapien
gcctgtgtaaatgtcagcctgtatccccagcac

SEQ ID NO: 883517 - DNA, 33 bp, Homo sapien
ctgctcccatctcaccaagctttagcaaagcat

SEQ ID NO: 883518 - DNA, 33 bp, Homo sapien
ctgctcccatctcaccgagctttagcaaagcat

SEQ ID NO: 883519 - DNA, 33 bp, Homo sapien
ttgctgggatgagagaagaagaactaaaccatg

SEQ ID NO: 883520 - DNA, 33 bp, Homo sapien
ttgctgggatgagagacgaagaactaaaccatg

SEQ ID NO: 883521 - DNA, 33 bp, Homo sapien
ttttgtcctccaaacaaccttctgtgcagaagg

SEQ ID NO: 883522 - DNA, 33 bp, Homo sapien
ttttgtcctccaaacagccttctgtgcagaagg

SEQ ID NO: 883523 - DNA, 33 bp, Homo sapien
ccgaatgcccgccacacgtgaggctgtagactg

SEQ ID NO: 883524 - DNA, 33 bp, Homo sapien
ccgaatgcccgccacatgtgaggctgtagactg

SEQ ID NO: 883525 - DNA, 33 bp, Homo sapien
ccaaatctggtaggaacggatccttctaagaaa

SEQ ID NO: 883526 - DNA, 33 bp, Homo sapien
ccaaatctggtaggaatggatccttctaagaaa

SEQ ID NO: 883527 - DNA, 33 bp, Homo sapien
tactgatgaaggcagaacctgagtatcttttga

SEQ ID NO: 883528 - DNA, 33 bp, Homo sapien
tactgatgaaggcagaccctgagtatcttttga

SEQ ID NO: 883529 - DNA, 33 bp, Homo sapien
atcttgcttttagatacaaatgtaagtttgaga

SEQ ID NO: 883530 - DNA, 33 bp, Homo sapien
atcttgcttttagatagaaatgtaagtttgaga

SEQ ID NO: 883531 - DNA, 33 bp, Homo sapien
gttgtgccttttcctacgcaacctcctatgtat

SEQ ID NO: 883532 - DNA, 33 bp, Homo sapien
gttgtgccttttcctatgcaacctcctatgtat

SEQ ID NO: 883533 - DNA, 33 bp, Homo sapien
gaaaatgtgtgtgcaaaggcacagagataatca

SEQ ID NO: 883534 - DNA, 33 bp, Homo sapien
gaaaatgtgtgtgcaacggcacagagataatca

SEQ ID NO: 883535 - DNA, 33 bp, Homo sapien
atatattgcattttaccctccccagcaagccaa

SEQ ID NO: 883536 - DNA, 33 bp, Homo sapien
atatattgcattttactctccccagcaagccaa

SEQ ID NO: 883537 - DNA, 33 bp, Homo sapien
ttccaccctcaatgggaatataggctccatggc

SEQ ID NO: 883538 - DNA, 33 bp, Homo sapien
ttccaccctcaatggggatataggctccatggc

SEQ ID NO: 883539 - DNA, 33 bp, Homo sapien
accaccgcagaacttaggaagtgccacaaactg

SEQ ID NO: 883540 - DNA, 33 bp, Homo sapien
accaccgcagaacttatgaagtgccacaaactg

SEQ ID NO: 883541 - DNA, 33 bp, Homo sapien
aagaagaagacgtaaaacaatgttggagatgat

SEQ ID NO: 883542 - DNA, 33 bp, Homo sapien
aagaagaagacgtaaagcaatgttggagatgat

SEQ ID NO: 883543 - DNA, 33 bp, Homo sapien
agtggtaatgtcagaaacaccatctactataat

SEQ ID NO: 883544 - DNA, 33 bp, Homo sapien
agtggtaatgtcagaagcaccatctactataat

SEQ ID NO: 883545 - DNA, 33 bp, Homo sapien
aaaaaactcaacaaacgcaacgtagctccagcc

SEQ ID NO: 883546 - DNA, 33 bp, Homo sapien
aaaaaactcaacaaactcaacgtagctccagcc

SEQ ID NO: 883547 - DNA, 33 bp, Homo sapien
taagctacctgaaatcccttttggcataaaatc

SEQ ID NO: 883548 - DNA, 33 bp, Homo sapien
taagctacctgaaatctcttttggcataaaatc

SEQ ID NO: 883549 - DNA, 33 bp, Homo sapien
tgtaaatcagcaagtgaataattgaagaagttt

SEQ ID NO: 883550 - DNA, 33 bp, Homo sapien
tgtaaatcagcaagtggataattgaagaagttt

SEQ ID NO: 883551 - DNA, 33 bp, Homo sapien
agataggcgatctgagaaattctattagaaaca

SEQ ID NO: 883552 - DNA, 33 bp, Homo sapien
agataggcgatctgagcaattctattagaaaca

SEQ ID NO: 883553 - DNA, 33 bp, Homo sapien
caaataacttcaatggacatccaaggaaacatt

SEQ ID NO: 883554 - DNA, 33 bp, Homo sapien
caaataacttcaatggtcatccaaggaaacatt

SEQ ID NO: 883555 - DNA, 33 bp, Homo sapien
gggcacattctcttccgctttcacattttttcc

SEQ ID NO: 883556 - DNA, 33 bp, Homo sapien
gggcacattctcttcctctttcacattttttcc

SEQ ID NO: 883557 - DNA, 33 bp, Homo sapien
taatgtgagagatcaccatgacagagaaatggc

SEQ ID NO: 883558 - DNA, 33 bp, Homo sapien
taatgtgagagatcactatgacagagaaatggc

SEQ ID NO: 883559 - DNA, 33 bp, Homo sapien
tagcccttggccaccaaggaggtaaaggggacc

SEQ ID NO: 883560 - DNA, 33 bp, Homo sapien
tagcccttggccaccatggaggtaaaggggacc

SEQ ID NO: 883561 - DNA, 33 bp, Homo sapien
tgaggatcttcaaatacggggagtgaaattctt

SEQ ID NO: 883562 - DNA, 33 bp, Homo sapien
tgaggatcttcaaatatggggagtgaaattctt

SEQ ID NO: 883563 - DNA, 33 bp, Homo sapien
gattaggtgcaataaacataagacctgtattcc

SEQ ID NO: 883564 - DNA, 33 bp, Homo sapien
gattaggtgcaataaatataagacctgtattcc

SEQ ID NO: 883565 - DNA, 33 bp, Homo sapien
cacatgatcagttcacaactaggaagctaggct

SEQ ID NO: 883566 - DNA, 33 bp, Homo sapien
cacatgatcagttcaccactaggaagctaggct

SEQ ID NO: 883567 - DNA, 33 bp, Homo sapien
acctctgctttacaaaatgtattacaaagggga

SEQ ID NO: 883568 - DNA, 33 bp, Homo sapien
acctctgctttacaaagtgtattacaaagggga

SEQ ID NO: 883569 - DNA, 33 bp, Homo sapien
ctgcctactctacaaaccatctctatgtgccca

SEQ ID NO: 883570 - DNA, 33 bp, Homo sapien
ctgcctactctacaaatcatctctatgtgccca

SEQ ID NO: 883571 - DNA, 33 bp, Homo sapien
agcttctgcagtcatcgatgttcttaaagtaat

SEQ ID NO: 883572 - DNA, 33 bp, Homo sapien
agcttctgcagtcatctatgttcttaaagtaat

SEQ ID NO: 883573 - DNA, 33 bp, Homo sapien
ccggatggatccgagactctccgctgtccctgt

SEQ ID NO: 883574 - DNA, 33 bp, Homo sapien
ccggatggatccgagattctccgctgtccctgt

SEQ ID NO: 883575 - DNA, 33 bp, Homo sapien
gcgccatgataacactcaattctacacttaaac

SEQ ID NO: 883576 - DNA, 33 bp, Homo sapien
gcgccatgataacactgaattctacacttaaac

SEQ ID NO: 883577 - DNA, 33 bp, Homo sapien
ttttgaaaacttatgaaaaagctgaaggaattg

SEQ ID NO: 883578 - DNA, 33 bp, Homo sapien
ttttgaaaacttatgacaaagctgaaggaattg

SEQ ID NO: 883579 - DNA, 33 bp, Homo sapien
gttttctccataaagaaatctgtggcctttaca

SEQ ID NO: 883580 - DNA, 33 bp, Homo sapien
gttttctccataaagacatctgtggcctttaca

SEQ ID NO: 883581 - DNA, 33 bp, Homo sapien
ggacttcatgaaaggcagaagtagagggtgatg

SEQ ID NO: 883582 - DNA, 33 bp, Homo sapien
ggacttcatgaaaggcggaagtagagggtgatg

SEQ ID NO: 883583 - DNA, 33 bp, Homo sapien
aacctgaaagctgttcactaacccatgcttcct

SEQ ID NO: 883584 - DNA, 33 bp, Homo sapien
aacctgaaagctgttcgctaacccatgcttcct

SEQ ID NO: 883585 - DNA, 33 bp, Homo sapien
gtcaaaaacattaagaaatgctggtgaagacat

SEQ ID NO: 883586 - DNA, 33 bp, Homo sapien
gtcaaaaacattaagatatgctggtgaagacat

SEQ ID NO: 883587 - DNA, 33 bp, Homo sapien
aaaggaatctgaccaacagtttcccaaattgtt

SEQ ID NO: 883588 - DNA, 33 bp, Homo sapien
aaaggaatctgaccaagagtttcccaaattgtt

SEQ ID NO: 883589 - DNA, 33 bp, Homo sapien
ttcctttcattcaggaactaacttgtttatcaa

SEQ ID NO: 883590 - DNA, 33 bp, Homo sapien
ttcctttcattcaggagctaacttgtttatcaa

SEQ ID NO: 883591 - DNA, 33 bp, Homo sapien
tatatatcttgagtaccggctgcactctaactt

SEQ ID NO: 883592 - DNA, 33 bp, Homo sapien
tatatatcttgagtactggctgcactctaactt

SEQ ID NO: 883593 - DNA, 33 bp, Homo sapien
gtgtctgtacttgtgcaaagagagatttgggaa

SEQ ID NO: 883594 - DNA, 33 bp, Homo sapien
gtgtctgtacttgtgccaagagagatttgggaa

SEQ ID NO: 883595 - DNA, 33 bp, Homo sapien
caccttgtaactgtgacgagaacagagcagtgg

SEQ ID NO: 883596 - DNA, 33 bp, Homo sapien
caccttgtaactgtgatgagaacagagcagtgg

SEQ ID NO: 883597 - DNA, 33 bp, Homo sapien
aataacagtcaaggaaaaattatgaggcatttc

SEQ ID NO: 883598 - DNA, 33 bp, Homo sapien
aataacagtcaaggaagaattatgaggcatttc

SEQ ID NO: 883599 - DNA, 33 bp, Homo sapien
ctggtgtttcctccaacgtctacagtatgtttg

SEQ ID NO: 883600 - DNA, 33 bp, Homo sapien
ctggtgtttcctccaatgtctacagtatgtttg

SEQ ID NO: 883601 - DNA, 33 bp, Homo sapien
atgacttaaagttgaaagttatattgaaagtgg

SEQ ID NO: 883602 - DNA, 33 bp, Homo sapien
atgacttaaagttgaacgttatattgaaagtgg

SEQ ID NO: 883603 - DNA, 33 bp, Homo sapien
tcagccctacacgaaggaagtgctttttatgta

SEQ ID NO: 883604 - DNA, 33 bp, Homo sapien
tcagccctacacgaagtaagtgctttttatgta

SEQ ID NO: 883605 - DNA, 33 bp, Homo sapien
aaaaggcagctgagaaacgagtgaagaagggac

SEQ ID NO: 883606 - DNA, 33 bp, Homo sapien
aaaaggcagctgagaagcgagtgaagaagggac

SEQ ID NO: 883607 - DNA, 33 bp, Homo sapien
gccaaacgtgcacctcaagaaacatcagctcta

SEQ ID NO: 883608 - DNA, 33 bp, Homo sapien
gccaaacgtgcacctcgagaaacatcagctcta

SEQ ID NO: 883609 - DNA, 33 bp, Homo sapien
agaagccagacaataaaaagtacagtgtattat

SEQ ID NO: 883610 - DNA, 33 bp, Homo sapien
agaagccagacaataagaagtacagtgtattat

SEQ ID NO: 883611 - DNA, 33 bp, Homo sapien
tatttgggagaagccaaacagcttaattgttag

SEQ ID NO: 883612 - DNA, 33 bp, Homo sapien
tatttgggagaagccatacagcttaattgttag

SEQ ID NO: 883613 - DNA, 33 bp, Homo sapien
tcctaaaaatacacacaacgatacagatgtatt

SEQ ID NO: 883614 - DNA, 33 bp, Homo sapien
tcctaaaaatacacaccacgatacagatgtatt

SEQ ID NO: 883615 - DNA, 33 bp, Homo sapien
gtacttatccattatacagctaatgcaaaaatg

SEQ ID NO: 883616 - DNA, 33 bp, Homo sapien
gtacttatccattatagagctaatgcaaaaatg

SEQ ID NO: 883617 - DNA, 33 bp, Homo sapien
ggccactgtgtgtatggaagttttgcaagaaat

SEQ ID NO: 883618 - DNA, 33 bp, Homo sapien
ggccactgtgtgtatgtaagttttgcaagaaat

SEQ ID NO: 883619 - DNA, 33 bp, Homo sapien
ggagttgccctagagcaagcacacactgggcct

SEQ ID NO: 883620 - DNA, 33 bp, Homo sapien
ggagttgccctagagcgagcacacactgggcct

SEQ ID NO: 883621 - DNA, 33 bp, Homo sapien
ttgcgggtttgtatgacagagacaagaaagcac

SEQ ID NO: 883622 - DNA, 33 bp, Homo sapien
ttgcgggtttgtatgatagagacaagaaagcac

SEQ ID NO: 883623 - DNA, 33 bp, Homo sapien
cagagaaatcttatgcgcttgctgtaagggaaa

SEQ ID NO: 883624 - DNA, 33 bp, Homo sapien
cagagaaatcttatgctcttgctgtaagggaaa

SEQ ID NO: 883625 - DNA, 33 bp, Homo sapien
gggaaattgcctgatcaaatgtcatatagtcag

SEQ ID NO: 883626 - DNA, 33 bp, Homo sapien
gggaaattgcctgatcgaatgtcatatagtcag

SEQ ID NO: 883627 - DNA, 33 bp, Homo sapien
caggaaattattttgaaagcagggtcattaaat

SEQ ID NO: 883628 - DNA, 33 bp, Homo sapien
caggaaattattttgagagcagggtcattaaat

SEQ ID NO: 883629 - DNA, 33 bp, Homo sapien
agaacttgcaaaaatacgatagggaaactgtga

SEQ ID NO: 883630 - DNA, 33 bp, Homo sapien
agaacttgcaaaaatatgatagggaaactgtga

SEQ ID NO: 883631 - DNA, 33 bp, Homo sapien
ccatctgcagaggagacgcacaggcgcagatgc

SEQ ID NO: 883632 - DNA, 33 bp, Homo sapien
ccatctgcagaggagatgcacaggcgcagatgc

SEQ ID NO: 883633 - DNA, 33 bp, Homo sapien
agactggttctctgcaagtgggtgagactcagc

SEQ ID NO: 883634 - DNA, 33 bp, Homo sapien
agactggttctctgcacgtgggtgagactcagc

SEQ ID NO: 883635 - DNA, 33 bp, Homo sapien
atatctcaaaaggacacgcaaggcctctgtgct

SEQ ID NO: 883636 - DNA, 33 bp, Homo sapien
atatctcaaaaggacatgcaaggcctctgtgct

SEQ ID NO: 883637 - DNA, 33 bp, Homo sapien
gtacaaagcaatacaagaacaattttgagtaga

SEQ ID NO: 883638 - DNA, 33 bp, Homo sapien
gtacaaagcaatacaataacaattttgagtaga

SEQ ID NO: 883639 - DNA, 33 bp, Homo sapien
tgaagtgttatcttcacatagctgttggtgtgt

SEQ ID NO: 883640 - DNA, 33 bp, Homo sapien
tgaagtgttatcttcatatagctgttggtgtgt

SEQ ID NO: 883641 - DNA, 33 bp, Homo sapien
ataacaaataacaagacgctgctgcacatgaga

SEQ ID NO: 883642 - DNA, 33 bp, Homo sapien
ataacaaataacaagatgctgctgcacatgaga

SEQ ID NO: 883643 - DNA, 33 bp, Homo sapien
agcaagtcagccaaatcaacaccaaaatccagg

SEQ ID NO: 883644 - DNA, 33 bp, Homo sapien
agcaagtcagccaaatgaacaccaaaatccagg

SEQ ID NO: 883645 - DNA, 33 bp, Homo sapien
agttctacttcccaacactacctggacagtggg

SEQ ID NO: 883646 - DNA, 33 bp, Homo sapien
agttctacttcccaacgctacctggacagtggg

SEQ ID NO: 883647 - DNA, 33 bp, Homo sapien
tttcagatagtctcaaccaaaagttactgagga

SEQ ID NO: 883648 - DNA, 33 bp, Homo sapien
tttcagatagtctcaatcaaaagttactgagga

SEQ ID NO: 883649 - DNA, 33 bp, Homo sapien
ttttagtagctcaagaaaagatcttcaatttat

SEQ ID NO: 883650 - DNA, 33 bp, Homo sapien
ttttagtagctcaagagaagatcttcaatttat

SEQ ID NO: 883651 - DNA, 33 bp, Homo sapien
gccaaataagaatacaacttcagcaggaaagaa

SEQ ID NO: 883652 - DNA, 33 bp, Homo sapien
gccaaataagaatacagcttcagcaggaaagaa

SEQ ID NO: 883653 - DNA, 33 bp, Homo sapien
ttaaatggcttgtgaaatgttttttccacacca

SEQ ID NO: 883654 - DNA, 33 bp, Homo sapien
ttaaatggcttgtgaattgttttttccacacca

SEQ ID NO: 883655 - DNA, 33 bp, Homo sapien
aggccatggaataagacgacaagggacgtggag

SEQ ID NO: 883656 - DNA, 33 bp, Homo sapien
aggccatggaataagatgacaagggacgtggag

SEQ ID NO: 883657 - DNA, 33 bp, Homo sapien
gaggaaggaaaagaaaaggccgtggagactccc

SEQ ID NO: 883658 - DNA, 33 bp, Homo sapien
gaggaaggaaaagaaagggccgtggagactccc

SEQ ID NO: 883659 - DNA, 33 bp, Homo sapien
tatttccactagactaagttaaatatgtgagaa

SEQ ID NO: 883660 - DNA, 33 bp, Homo sapien
tatttccactagactaggttaaatatgtgagaa

SEQ ID NO: 883661 - DNA, 33 bp, Homo sapien
gaagtcaaccatgttcaaatgttatacgtgagc

SEQ ID NO: 883662 - DNA, 33 bp, Homo sapien
gaagtcaaccatgttcgaatgttatacgtgagc

SEQ ID NO: 883663 - DNA, 33 bp, Homo sapien
aggaaaatttggacaccggctagtttttgatga

SEQ ID NO: 883664 - DNA, 33 bp, Homo sapien
aggaaaatttggacactggctagtttttgatga

SEQ ID NO: 883665 - DNA, 33 bp, Homo sapien
aatgttactggaatataaaattagtgcaacctc

SEQ ID NO: 883666 - DNA, 33 bp, Homo sapien
aatgttactggaatatgaaattagtgcaacctc

SEQ ID NO: 883667 - DNA, 33 bp, Homo sapien
caaactcacattcaagaagtagatgtcatttgt

SEQ ID NO: 883668 - DNA, 33 bp, Homo sapien
caaactcacattcaaggagtagatgtcatttgt

SEQ ID NO: 883669 - DNA, 33 bp, Homo sapien
agagatagcaaacggcaaaaagtcctccttact

SEQ ID NO: 883670 - DNA, 33 bp, Homo sapien
agagatagcaaacggcgaaaagtcctccttact

SEQ ID NO: 883671 - DNA, 33 bp, Homo sapien
atgagtacacatttaacggcggcagaattctgc

SEQ ID NO: 883672 - DNA, 33 bp, Homo sapien
atgagtacacatttaatggcggcagaattctgc

SEQ ID NO: 883673 - DNA, 33 bp, Homo sapien
gtctgttacgatgaaacgctgtcatgatacaga

SEQ ID NO: 883674 - DNA, 33 bp, Homo sapien
gtctgttacgatgaaatgctgtcatgatacaga

SEQ ID NO: 883675 - DNA, 33 bp, Homo sapien
tccactaccccacaacccgggctgagcagagat

SEQ ID NO: 883676 - DNA, 33 bp, Homo sapien
tccactaccccacaactcgggctgagcagagat

SEQ ID NO: 883677 - DNA, 33 bp, Homo sapien
aatccacattattttacgttcgttcagctttcc

SEQ ID NO: 883678 - DNA, 33 bp, Homo sapien
aatccacattattttatgttcgttcagctttcc

SEQ ID NO: 883679 - DNA, 33 bp, Homo sapien
aagttgtatcagttaccaaatacatatgtgaaa

SEQ ID NO: 883680 - DNA, 33 bp, Homo sapien
aagttgtatcagttactaaatacatatgtgaaa

SEQ ID NO: 883681 - DNA, 33 bp, Homo sapien
attgagttgaatgaccaaaacttcactgctaaa

SEQ ID NO: 883682 - DNA, 33 bp, Homo sapien
attgagttgaatgaccgaaacttcactgctaaa

SEQ ID NO: 883683 - DNA, 33 bp, Homo sapien
gaagaatggccagataaaagaatcttcctacca

SEQ ID NO: 883684 - DNA, 33 bp, Homo sapien
gaagaatggccagatataagaatcttcctacca

SEQ ID NO: 883685 - DNA, 33 bp, Homo sapien
tctcttttgaatattcactcgatcataagacac

SEQ ID NO: 883686 - DNA, 33 bp, Homo sapien
tctcttttgaatattcgctcgatcataagacac

SEQ ID NO: 883687 - DNA, 33 bp, Homo sapien
caccaataacacacaaacagtttcatcttcata

SEQ ID NO: 883688 - DNA, 33 bp, Homo sapien
caccaataacacacaagcagtttcatcttcata

SEQ ID NO: 883689 - DNA, 33 bp, Homo sapien
cttctttcgaggaagtcaagttgagctgtcaaa

SEQ ID NO: 883690 - DNA, 33 bp, Homo sapien
cttctttcgaggaagttaagttgagctgtcaaa

SEQ ID NO: 883691 - DNA, 33 bp, Homo sapien
gagccacatttgtgccacttctttcgaggaagt

SEQ ID NO: 883692 - DNA, 33 bp, Homo sapien
gagccacatttgtgccgcttctttcgaggaagt

SEQ ID NO: 883693 - DNA, 33 bp, Homo sapien
gccctggtagcttggacgtgtgtaaccctaaac

SEQ ID NO: 883694 - DNA, 33 bp, Homo sapien
gccctggtagcttggatgtgtgtaaccctaaac

SEQ ID NO: 883695 - DNA, 33 bp, Homo sapien
ggaacttctgcctctaaagtcacgacagcattt

SEQ ID NO: 883696 - DNA, 33 bp, Homo sapien
ggaacttctgcctctacagtcacgacagcattt

SEQ ID NO: 883697 - DNA, 33 bp, Homo sapien
agcagacctttaattaacaaatgcccattgaga

SEQ ID NO: 883698 - DNA, 33 bp, Homo sapien
agcagacctttaattaccaaatgcccattgaga

SEQ ID NO: 883699 - DNA, 33 bp, Homo sapien
ttttgagttcatatggcaagtatattcatgtga

SEQ ID NO: 883700 - DNA, 33 bp, Homo sapien
ttttgagttcatatgggaagtatattcatgtga

SEQ ID NO: 883701 - DNA, 33 bp, Homo sapien
tgcaccatgaccctccactgacctttgacctga

SEQ ID NO: 883702 - DNA, 33 bp, Homo sapien
tgcaccatgaccctccgctgacctttgacctga

SEQ ID NO: 883703 - DNA, 33 bp, Homo sapien
aactgaaatgtctacaactgcatctggtgcctg

SEQ ID NO: 883704 - DNA, 33 bp, Homo sapien
aactgaaatgtctacagctgcatctggtgcctg

SEQ ID NO: 883705 - DNA, 33 bp, Homo sapien
tactttgaagcctgaacgaaagacgacagatcc

SEQ ID NO: 883706 - DNA, 33 bp, Homo sapien
tactttgaagcctgaatgaaagacgacagatcc

SEQ ID NO: 883707 - DNA, 33 bp, Homo sapien
gggaaaatgatggcatcaaagtgacagttcaat

SEQ ID NO: 883708 - DNA, 33 bp, Homo sapien
gggaaaatgatggcatgaaagtgacagttcaat

SEQ ID NO: 883709 - DNA, 33 bp, Homo sapien
tatttcctgccaccaacaatggctctgttgtcc

SEQ ID NO: 883710 - DNA, 33 bp, Homo sapien
tatttcctgccaccaataatggctctgttgtcc

SEQ ID NO: 883711 - DNA, 33 bp, Homo sapien
ttagcaatcacacgaacagttgctacctgtccc

SEQ ID NO: 883712 - DNA, 33 bp, Homo sapien
ttagcaatcacacgaatagttgctacctgtccc

SEQ ID NO: 883713 - DNA, 33 bp, Homo sapien
ataggtgccagtggaaaaaagacaaggcaaaat

SEQ ID NO: 883714 - DNA, 33 bp, Homo sapien
ataggtgccagtggaagaaagacaaggcaaaat

SEQ ID NO: 883715 - DNA, 33 bp, Homo sapien
aggtggaatcagttacccaagataaccgaaaat

SEQ ID NO: 883716 - DNA, 33 bp, Homo sapien
aggtggaatcagttacgcaagataaccgaaaat

SEQ ID NO: 883717 - DNA, 33 bp, Homo sapien
cgtgtctttgtgggaacgtgggaataacaatgt

SEQ ID NO: 883718 - DNA, 33 bp, Homo sapien
cgtgtctttgtgggaatgtgggaataacaatgt

SEQ ID NO: 883719 - DNA, 33 bp, Homo sapien
gaactgtaggtgaacacgtctagggcttagtcc

SEQ ID NO: 883720 - DNA, 33 bp, Homo sapien
gaactgtaggtgaacatgtctagggcttagtcc

SEQ ID NO: 883721 - DNA, 33 bp, Homo sapien
cacattctgcaaactgaaagtgggagctgtcaa

SEQ ID NO: 883722 - DNA, 33 bp, Homo sapien
cacattctgcaaactggaagtgggagctgtcaa

SEQ ID NO: 883723 - DNA, 33 bp, Homo sapien
gggagctgtcaagtcacaaacaaagctgccgat

SEQ ID NO: 883724 - DNA, 33 bp, Homo sapien
gggagctgtcaagtcataaacaaagctgccgat

SEQ ID NO: 883725 - DNA, 33 bp, Homo sapien
agacggttaattctctaaagcaaaagcacaaac

SEQ ID NO: 883726 - DNA, 33 bp, Homo sapien
agacggttaattctctgaagcaaaagcacaaac

SEQ ID NO: 883727 - DNA, 33 bp, Homo sapien
agccgttgttcctctccagctacttctgcagca

SEQ ID NO: 883728 - DNA, 33 bp, Homo sapien
agccgttgttcctctctagctacttctgcagca

SEQ ID NO: 883729 - DNA, 33 bp, Homo sapien
cttgtatctgggaggcactcataattatgctga

SEQ ID NO: 883730 - DNA, 33 bp, Homo sapien
cttgtatctgggaggctctcataattatgctga

SEQ ID NO: 883731 - DNA, 33 bp, Homo sapien
tatggcaagaaatacaagaccaggctcaggaaa

SEQ ID NO: 883732 - DNA, 33 bp, Homo sapien
tatggcaagaaatacacgaccaggctcaggaaa

SEQ ID NO: 883733 - DNA, 33 bp, Homo sapien
tgaattttaacacagaagcttattccagtttaa

SEQ ID NO: 883734 - DNA, 33 bp, Homo sapien
tgaattttaacacagaggcttattccagtttaa

SEQ ID NO: 883735 - DNA, 33 bp, Homo sapien
gtaatgtttataactgaatcctcagaattaaaa

SEQ ID NO: 883736 - DNA, 33 bp, Homo sapien
gtaatgtttataactgtatcctcagaattaaaa

SEQ ID NO: 883737 - DNA, 33 bp, Homo sapien
ttgaaaggatctcaaacttataatctactcttt

SEQ ID NO: 883738 - DNA, 33 bp, Homo sapien
ttgaaaggatctcaaatttataatctactcttt

SEQ ID NO: 883739 - DNA, 33 bp, Homo sapien
tgctacaccaaaaataccataggccaggcactg

SEQ ID NO: 883740 - DNA, 33 bp, Homo sapien
tgctacaccaaaaatatcataggccaggcactg

SEQ ID NO: 883741 - DNA, 33 bp, Homo sapien
tcatgaatgggatccacgccctaataagacgag

SEQ ID NO: 883742 - DNA, 33 bp, Homo sapien
tcatgaatgggatccatgccctaataagacgag

SEQ ID NO: 883743 - DNA, 33 bp, Homo sapien
cagagtgcaatgagaaaagatacttgtcttaca

SEQ ID NO: 883744 - DNA, 33 bp, Homo sapien
cagagtgcaatgagaacagatacttgtcttaca

SEQ ID NO: 883745 - DNA, 33 bp, Homo sapien
actgaaacagaagcaaaaacttttgtggctgta

SEQ ID NO: 883746 - DNA, 33 bp, Homo sapien
actgaaacagaagcaagaacttttgtggctgta

SEQ ID NO: 883747 - DNA, 33 bp, Homo sapien
gaggagtccacaatcaatcttactcttattcct

SEQ ID NO: 883748 - DNA, 33 bp, Homo sapien
gaggagtccacaatcagtcttactcttattcct

SEQ ID NO: 883749 - DNA, 33 bp, Homo sapien
aactaaatacccttcaaataactcacctacctc

SEQ ID NO: 883750 - DNA, 33 bp, Homo sapien
aactaaatacccttcagataactcacctacctc

SEQ ID NO: 883751 - DNA, 33 bp, Homo sapien
ggattgtatcaaaaggacaccattaaagggctc

SEQ ID NO: 883752 - DNA, 33 bp, Homo sapien
ggattgtatcaaaaggtcaccattaaagggctc

SEQ ID NO: 883753 - DNA, 33 bp, Homo sapien
tatttgcagtaacaaaatttggaatcaatctaa

SEQ ID NO: 883754 - DNA, 33 bp, Homo sapien
tatttgcagtaacaaagtttggaatcaatctaa

SEQ ID NO: 883755 - DNA, 33 bp, Homo sapien
gcagaacgctgacaaaagcaaatgctgattagg

SEQ ID NO: 883756 - DNA, 33 bp, Homo sapien
gcagaacgctgacaaaggcaaatgctgattagg

SEQ ID NO: 883757 - DNA, 33 bp, Homo sapien
ttgaatagatagcataagtagactgtacaaatt

SEQ ID NO: 883758 - DNA, 33 bp, Homo sapien
ttgaatagatagcatatgtagactgtacaaatt

SEQ ID NO: 883759 - DNA, 33 bp, Homo sapien
gagagaaaattgggcaacaggacagaaacaaaa

SEQ ID NO: 883760 - DNA, 33 bp, Homo sapien
gagagaaaattgggcagcaggacagaaacaaaa

SEQ ID NO: 883761 - DNA, 33 bp, Homo sapien
taagaagagagtcttaagcaatgtgtctgaaat

SEQ ID NO: 883762 - DNA, 33 bp, Homo sapien
taagaagagagtcttaggcaatgtgtctgaaat

SEQ ID NO: 883763 - DNA, 33 bp, Homo sapien
tcaagttcaaagcctccattctaggccacacat

SEQ ID NO: 883764 - DNA, 33 bp, Homo sapien
tcaagttcaaagcctctattctaggccacacat

SEQ ID NO: 883765 - DNA, 33 bp, Homo sapien
acttctaaacctgaaactgaacatgaccccaaa

SEQ ID NO: 883766 - DNA, 33 bp, Homo sapien
acttctaaacctgaaagtgaacatgaccccaaa

SEQ ID NO: 883767 - DNA, 33 bp, Homo sapien
agcaagctctggtggacggcgttcctcattctg

SEQ ID NO: 883768 - DNA, 33 bp, Homo sapien
agcaagctctggtggatggcgttcctcattctg

SEQ ID NO: 883769 - DNA, 33 bp, Homo sapien
tttcctcctgctggccaaaggcggcaacaggag

SEQ ID NO: 883770 - DNA, 33 bp, Homo sapien
tttcctcctgctggccgaaggcggcaacaggag

SEQ ID NO: 883771 - DNA, 33 bp, Homo sapien
ctgatcctttcggcaactcaagggaaatggcct

SEQ ID NO: 883772 - DNA, 33 bp, Homo sapien
ctgatcctttcggcaagtcaagggaaatggcct

SEQ ID NO: 883773 - DNA, 33 bp, Homo sapien
gcacagactgaaaacaaaggtctacatgaacgc

SEQ ID NO: 883774 - DNA, 33 bp, Homo sapien
gcacagactgaaaacagaggtctacatgaacgc

SEQ ID NO: 883775 - DNA, 33 bp, Homo sapien
cactgtggctctggccaatggtagaagaaagag

SEQ ID NO: 883776 - DNA, 33 bp, Homo sapien
cactgtggctctggccgatggtagaagaaagag

SEQ ID NO: 883777 - DNA, 33 bp, Homo sapien
gatcttgttgaggtcaaactctgtggaatttca

SEQ ID NO: 883778 - DNA, 33 bp, Homo sapien
gatcttgttgaggtcagactctgtggaatttca

SEQ ID NO: 883779 - DNA, 33 bp, Homo sapien
caaagaaacaagcctacggtttggtcagcccag

SEQ ID NO: 883780 - DNA, 33 bp, Homo sapien
caaagaaacaagcctatggtttggtcagcccag

SEQ ID NO: 883781 - DNA, 33 bp, Homo sapien
gtgtgcataaagccacagacaccgagtatgccg

SEQ ID NO: 883782 - DNA, 33 bp, Homo sapien
gtgtgcataaagccacggacaccgagtatgccg

SEQ ID NO: 883783 - DNA, 33 bp, Homo sapien; identical to SEQ ID NO: 883781

SEQ ID NO: 883784 - DNA, 33 bp, Homo sapien; identical to SEQ ID NO: 883782

SEQ ID NO: 883785 - DNA, 33 bp, Homo sapien
tggggcgaagagaggcaccgactgtgaactgag

SEQ ID NO: 883786 - DNA, 33 bp, Homo sapien
tggggcgaagagaggcgccgactgtgaactgag

SEQ ID NO: 883787 - DNA, 33 bp, Homo sapien
ctgtcatgacaacgtccactttacacacctgta

SEQ ID NO: 883788 - DNA, 33 bp, Homo sapien
ctgtcatgacaacgtctactttacacacctgta

SEQ ID NO: 883789 - DNA, 33 bp, Homo sapien
cagaagctaaggatacaggattcatgttcactg

SEQ ID NO: 883790 - DNA, 33 bp, Homo sapien
cagaagctaaggatacgggattcatgttcactg

SEQ ID NO: 883791 - DNA, 33 bp, Homo sapien
acagcaaggcatagtacgaaaggagtaattccc

SEQ ID NO: 883792 - DNA, 33 bp, Homo sapien
acagcaaggcatagtatgaaaggagtaattccc

SEQ ID NO: 883793 - DNA, 33 bp, Homo sapien
atgggcacctaaggtcactgtcattcgactctg

SEQ ID NO: 883794 - DNA, 33 bp, Homo sapien
atgggcacctaaggtcgctgtcattcgactctg

SEQ ID NO: 883795 - DNA, 33 bp, Homo sapien
gttaggtagaaataacagaacaaagcagagata

SEQ ID NO: 883796 - DNA, 33 bp, Homo sapien
gttaggtagaaataacggaacaaagcagagata

SEQ ID NO: 883797 - DNA, 33 bp, Homo sapien
cacgtttgaagtcattaaaaacacatcatctgg

SEQ ID NO: 883798 - DNA, 33 bp, Homo sapien
cacgtttgaagtcattgaaaacacatcatctgg

SEQ ID NO: 883799 - DNA, 33 bp, Homo sapien
acagcattgcaaactccattctaaggcaggcgt

SEQ ID NO: 883800 - DNA, 33 bp, Homo sapien
acagcattgcaaactcgattctaaggcaggcgt

SEQ ID NO: 883801 - DNA, 33 bp, Homo sapien
agtggttctgatgaacacttctaccatagatag

SEQ ID NO: 883802 - DNA, 33 bp, Homo sapien
agtggttctgatgaactcttctaccatagatag

SEQ ID NO: 883803 - DNA, 33 bp, Homo sapien
taagaataaatcttagaaaatcatctgtgcaca

SEQ ID NO: 883804 - DNA, 33 bp, Homo sapien
taagaataaatcttaggaaatcatctgtgcaca

SEQ ID NO: 883805 - DNA, 33 bp, Homo sapien
acaagtgtaattaaacaggaaaggccagaatgc

SEQ ID NO: 883806 - DNA, 33 bp, Homo sapien
acaagtgtaattaaacgggaaaggccagaatgc

SEQ ID NO: 883807 - DNA, 33 bp, Homo sapien
tgctgatggactggtaccttgcatacatttgtt

SEQ ID NO: 883808 - DNA, 33 bp, Homo sapien
tgctgatggactggtatcttgcatacatttgtt

SEQ ID NO: 883809 - DNA, 33 bp, Homo sapien
gcttctgggaaggtaactggacagacataacgc

SEQ ID NO: 883810 - DNA, 33 bp, Homo sapien
gcttctgggaaggtaattggacagacataacgc

SEQ ID NO: 883811 - DNA, 33 bp, Homo sapien
cgatcgagtacatggcacccgaggtggtgaacc

SEQ ID NO: 883812 - DNA, 33 bp, Homo sapien
cgatcgagtacatggcgcccgaggtggtgaacc

SEQ ID NO: 883813 - DNA, 33 bp, Homo sapien; identical to SEQ ID NO: 883811

SEQ ID NO: 883814 - DNA, 33 bp, Homo sapien; identical to SEQ ID NO: 883812

SEQ ID NO: 883815 - DNA, 33 bp, Homo sapien
ggatttggggattttgcaatatttacttatata

SEQ ID NO: 883816 - DNA, 33 bp, Homo sapien
ggatttggggattttggaatatttacttatata

SEQ ID NO: 883817 - DNA, 33 bp, Homo sapien
gaggctattatttctacgatattttgctaatct

SEQ ID NO: 883818 - DNA, 33 bp, Homo sapien
gaggctattatttctaggatattttgctaatct

SEQ ID NO: 883819 - DNA, 33 bp, Homo sapien
aatacaagtaagacgccgagggcttgatgaggt

SEQ ID NO: 883820 - DNA, 33 bp, Homo sapien
aatacaagtaagacgctgagggcttgatgaggt

SEQ ID NO: 883821 - DNA, 33 bp, Homo sapien
aggagccccacagaaacgtgcaccactgtccaa

SEQ ID NO: 883822 - DNA, 33 bp, Homo sapien
aggagccccacagaaatgtgcaccactgtccaa

SEQ ID NO: 883823 - DNA, 33 bp, Homo sapien
caaaagccagcaacgacaccagcttaaatattc

SEQ ID NO: 883824 - DNA, 33 bp, Homo sapien
caaaagccagcaacgataccagcttaaatattc

SEQ ID NO: 883825 - DNA, 33 bp, Homo sapien
tggcacagaagacaaacgctggggaggaaaagg

SEQ ID NO: 883826 - DNA, 33 bp, Homo sapien
tggcacagaagacaaatgctggggaggaaaagg

SEQ ID NO: 883827 - DNA, 33 bp, Homo sapien
gaagtgtttggtggcaacagatgctcaagacag

SEQ ID NO: 883828 - DNA, 33 bp, Homo sapien
gaagtgtttggtggcagcagatgctcaagacag

SEQ ID NO: 883829 - DNA, 33 bp, Homo sapien
ctgccttttggacataacgagttggcggttctg

SEQ ID NO: 883830 - DNA, 33 bp, Homo sapien
ctgccttttggacataccgagttggcggttctg

SEQ ID NO: 883831 - DNA, 33 bp, Homo sapien
cccaacatctcatccaaatcatatggtttcctc

SEQ ID NO: 883832 - DNA, 33 bp, Homo sapien
cccaacatctcatccagatcatatggtttcctc

SEQ ID NO: 883833 - DNA, 33 bp, Homo sapien
ggttttgctgtcagcacgtggagagcatccctg

SEQ ID NO: 883834 - DNA, 33 bp, Homo sapien
ggttttgctgtcagcaggtggagagcatccctg

SEQ ID NO: 883835 - DNA, 33 bp, Homo sapien
tttagctactcaagcacattgttccaaaatatt

SEQ ID NO: 883836 - DNA, 33 bp, Homo sapien
tttagctactcaagcatattgttccaaaatatt

SEQ ID NO: 883837 - DNA, 33 bp, Homo sapien
gagcgggaagctgcaccctgtttaagttgtcgc

SEQ ID NO: 883838 - DNA, 33 bp, Homo sapien
gagcgggaagctgcactctgtttaagttgtcgc

SEQ ID NO: 883839 - DNA, 33 bp, Homo sapien
aaagaaggaaccgttacgcttgaaggagaaaag

SEQ ID NO: 883840 - DNA, 33 bp, Homo sapien
aaagaaggaaccgttatgcttgaaggagaaaag

SEQ ID NO: 883841 - DNA, 33 bp, Homo sapien
ctattttgaagagataactgtaactgaagagac

SEQ ID NO: 883842 - DNA, 33 bp, Homo sapien
ctattttgaagagatagctgtaactgaagagac

SEQ ID NO: 883843 - DNA, 33 bp, Homo sapien
aaaactgtgcatggcacgtgactttcccgtgat

SEQ ID NO: 883844 - DNA, 33 bp, Homo sapien
aaaactgtgcatggcatgtgactttcccgtgat

SEQ ID NO: 883845 - DNA, 33 bp, Homo sapien
aaggagttgcatcagacggaagctaaaactgtg

SEQ ID NO: 883846 - DNA, 33 bp, Homo sapien
aaggagttgcatcagatggaagctaaaactgtg

SEQ ID NO: 883847 - DNA, 33 bp, Homo sapien
aagggacagagtgttacgagcattatcattcca

SEQ ID NO: 883848 - DNA, 33 bp, Homo sapien
aagggacagagtgttatgagcattatcattcca

SEQ ID NO: 883849 - DNA, 33 bp, Homo sapien
ggattatccagaacaccgatgtactattcattc

SEQ ID NO: 883850 - DNA, 33 bp, Homo sapien
ggattatccagaacactgatgtactattcattc

SEQ ID NO: 883851 - DNA, 33 bp, Homo sapien
ttctgtatcttccaacggcactcatatgaactt

SEQ ID NO: 883852 - DNA, 33 bp, Homo sapien
ttctgtatcttccaactgcactcatatgaactt

SEQ ID NO: 883853 - DNA, 33 bp, Homo sapien
tccctttccataaaccaggagatttcaccacaa

SEQ ID NO: 883854 - DNA, 33 bp, Homo sapien
tccctttccataaaccgggagatttcaccacaa

SEQ ID NO: 883855 - DNA, 33 bp, Homo sapien
cccgtcattgacctacgaaaggaagaaagaaat

SEQ ID NO: 883856 - DNA, 33 bp, Homo sapien
cccgtcattgacctactaaaggaagaaagaaat

SEQ ID NO: 883857 - DNA, 33 bp, Homo sapien
tacctacaggactagcacgcgcatgagtcatcc

SEQ ID NO: 883858 - DNA, 33 bp, Homo sapien
tacctacaggactagcgcgcgcatgagtcatcc

SEQ ID NO: 883859 - DNA, 33 bp, Homo sapien
tcatagtgtgggcgtcgcattaacacagctgca

SEQ ID NO: 883860 - DNA, 33 bp, Homo sapien
tcatagtgtgggcgtctcattaacacagctgca

SEQ ID NO: 883861 - DNA, 33 bp, Homo sapien
tcccagctcctcctcccaaagctctcaagttag

SEQ ID NO: 883862 - DNA, 33 bp, Homo sapien
tcccagctcctcctccgaaagctctcaagttag

SEQ ID NO: 883863 - DNA, 33 bp, Homo sapien
aaagtcagattctagacgaagccaagtttagag

SEQ ID NO: 883864 - DNA, 33 bp, Homo sapien
aaagtcagattctagatgaagccaagtttagag

SEQ ID NO: 883865 - DNA, 33 bp, Homo sapien
ttcgcgagccgttaccactctaaacgtcctagg

SEQ ID NO: 883866 - DNA, 33 bp, Homo sapien
ttcgcgagccgttaccgctctaaacgtcctagg

SEQ ID NO: 883867 - DNA, 33 bp, Homo sapien
tgcttgagttaatcctaaggactttgaaagaaa

SEQ ID NO: 883868 - DNA, 33 bp, Homo sapien
tgcttgagttaatcctgaggactttgaaagaaa

SEQ ID NO: 883869 - DNA, 33 bp, Homo sapien
ttttggaaactgctaaatgatgatctgcacgtt

SEQ ID NO: 883870 - DNA, 33 bp, Homo sapien
ttttggaaactgctaagtgatgatctgcacgtt

SEQ ID NO: 883871 - DNA, 33 bp, Homo sapien
gaggcgacaaactgaaatcgttgacacagcaca

SEQ ID NO: 883872 - DNA, 33 bp, Homo sapien
gaggcgacaaactgaagtcgttgacacagcaca

SEQ ID NO: 883873 - DNA, 33 bp, Homo sapien
gcccaccgcatgaaaaatgtctccagttttaca

SEQ ID NO: 883874 - DNA, 33 bp, Homo sapien
gcccaccgcatgaaaagtgtctccagttttaca

SEQ ID NO: 883875 - DNA, 33 bp, Homo sapien
aaggccagttgactcaaaggtggagattaacat

SEQ ID NO: 883876 - DNA, 33 bp, Homo sapien
aaggccagttgactcagaggtggagattaacat

SEQ ID NO: 883877 - DNA, 33 bp, Homo sapien
tgtttggctggtgcacacttgaaggatgaggca

SEQ ID NO: 883878 - DNA, 33 bp, Homo sapien
tgtttggctggtgcacgcttgaaggatgaggca

SEQ ID NO: 883879 - DNA, 33 bp, Homo sapien
ggagagtttaggaggcactgcttatcgttttta

SEQ ID NO: 883880 - DNA, 33 bp, Homo sapien
ggagagtttaggaggccctgcttatcgttttta

SEQ ID NO: 883881 - DNA, 33 bp, Homo sapien
ggaccatagcatcgcacggagcttgggagaggg

SEQ ID NO: 883882 - DNA, 33 bp, Homo sapien
ggaccatagcatcgcatggagcttgggagaggg

SEQ ID NO: 883883 - DNA, 33 bp, Homo sapien
gagatcacacagcccacgcaaagctgaaggtct

SEQ ID NO: 883884 - DNA, 33 bp, Homo sapien
gagatcacacagcccatgcaaagctgaaggtct

SEQ ID NO: 883885 - DNA, 33 bp, Homo sapien
tcatgaaattcttaaacattcctgtcaccccaa

SEQ ID NO: 883886 - DNA, 33 bp, Homo sapien
tcatgaaattcttaaagattcctgtcaccccaa

SEQ ID NO: 883887 - DNA, 33 bp, Homo sapien
tatattcagcataaaccaaaataaatacagcag

SEQ ID NO: 883888 - DNA, 33 bp, Homo sapien
tatattcagcataaactaaaataaatacagcag

SEQ ID NO: 883889 - DNA, 33 bp, Homo sapien
tctggttagagcttccagaacctcgtgttatga

SEQ ID NO: 883890 - DNA, 33 bp, Homo sapien
tctggttagagcttccggaacctcgtgttatga

SEQ ID NO: 883891 - DNA, 33 bp, Homo sapien
gagtgcttattaaagcaccaatggccaaaagag

SEQ ID NO: 883892 - DNA, 33 bp, Homo sapien
gagtgcttattaaagcgccaatggccaaaagag

SEQ ID NO: 883893 - DNA, 33 bp, Homo sapien
caatggccaaaagagacaagactcacaagactg

SEQ ID NO: 883894 - DNA, 33 bp, Homo sapien
caatggccaaaagagataagactcacaagactg

SEQ ID NO: 883895 - DNA, 33 bp, Homo sapien
cagtgtgtcaaacaggaaaaccaggtgaattta

SEQ ID NO: 883896 - DNA, 33 bp, Homo sapien
cagtgtgtcaaacagggaaaccaggtgaattta

SEQ ID NO: 883897 - DNA, 33 bp, Homo sapien
tgaaagttctgcttgacgcttaaatgtgcttat

SEQ ID NO: 883898 - DNA, 33 bp, Homo sapien
tgaaagttctgcttgatgcttaaatgtgcttat

SEQ ID NO: 883899 - DNA, 33 bp, Homo sapien
attaacatgtagagtacgatttaatgtgaaagg

SEQ ID NO: 883900 - DNA, 33 bp, Homo sapien
attaacatgtagagtatgatttaatgtgaaagg

SEQ ID NO: 883901 - DNA, 33 bp, Homo sapien
cgctgcccagaggcgcagcaaccaaaatagaaa

SEQ ID NO: 883902 - DNA, 33 bp, Homo sapien
cgctgcccagaggcgcggcaaccaaaatagaaa

SEQ ID NO: 883903 - DNA, 33 bp, Homo sapien
aaactcagcgtcaggaatcaaagactttaaatc

SEQ ID NO: 883904 - DNA, 33 bp, Homo sapien
aaactcagcgtcaggagtcaaagactttaaatc

SEQ ID NO: 883905 - DNA, 33 bp, Homo sapien
catggctcgggggcaacggtcccgcaacagcca

SEQ ID NO: 883906 - DNA, 33 bp, Homo sapien
catggctcgggggcaatggtcccgcaacagcca

SEQ ID NO: 883907 - DNA, 33 bp, Homo sapien
agcaaacgccaagtccagcctgcggcaccttcc

SEQ ID NO: 883908 - DNA, 33 bp, Homo sapien
agcaaacgccaagtccggcctgcggcaccttcc

SEQ ID NO: 883909 - DNA, 33 bp, Homo sapien
caacagagttgctttaacaagttacaggcaaga

SEQ ID NO: 883910 - DNA, 33 bp, Homo sapien
caacagagttgctttagcaagttacaggcaaga

SEQ ID NO: 883911 - DNA, 33 bp, Homo sapien
gcatttctaccataacaattccaaaacaaagtc

SEQ ID NO: 883912 - DNA, 33 bp, Homo sapien
gcatttctaccataaccattccaaaacaaagtc

SEQ ID NO: 883913 - DNA, 33 bp, Homo sapien
tccaatgtgtaattgccaaactaatagaggtca

SEQ ID NO: 883914 - DNA, 33 bp, Homo sapien
tccaatgtgtaattgcgaaactaatagaggtca

SEQ ID NO: 883915 - DNA, 33 bp, Homo sapien
aatgcttttattagaccgtaaaccctgtgaggg

SEQ ID NO: 883916 - DNA, 33 bp, Homo sapien
aatgcttttattagactgtaaaccctgtgaggg

SEQ ID NO: 883917 - DNA, 33 bp, Homo sapien
ggaagtgcagaatgagaattaacttgtgacaat

SEQ ID NO: 883918 - DNA, 33 bp, Homo sapien
ggaagtgcagaatgaggattaacttgtgacaat

SEQ ID NO: 883919 - DNA, 33 bp, Homo sapien
aagtattcacctttcaatatgaagaatggcaaa

SEQ ID NO: 883920 - DNA, 33 bp, Homo sapien
aagtattcacctttcagtatgaagaatggcaaa

SEQ ID NO: 883921 - DNA, 33 bp, Homo sapien
ctctgatttacaacctcaccactacaactctaa

SEQ ID NO: 883922 - DNA, 33 bp, Homo sapien
ctctgatttacaacctgaccactacaactctaa

SEQ ID NO: 883923 - DNA, 33 bp, Homo sapien
gtcaatatgttaccaaagcattatccctctcca

SEQ ID NO: 883924 - DNA, 33 bp, Homo sapien
gtcaatatgttaccaacgcattatccctctcca

SEQ ID NO: 883925 - DNA, 33 bp, Homo sapien
taaaattggtattttccactttatctcatactt

SEQ ID NO: 883926 - DNA, 33 bp, Homo sapien
taaaattggtattttctactttatctcatactt

SEQ ID NO: 883927 - DNA, 33 bp, Homo sapien
aacaacagaaaatcatgaggagagaaaaatgga

SEQ ID NO: 883928 - DNA, 33 bp, Homo sapien
aacaacagaaaatcattaggagagaaaaatgga

SEQ ID NO: 883929 - DNA, 33 bp, Homo sapien
tctggtgtttcatggacacttcactttatgcaa

SEQ ID NO: 883930 - DNA, 33 bp, Homo sapien
tctggtgtttcatggatacttcactttatgcaa

SEQ ID NO: 883931 - DNA, 33 bp, Homo sapien
tgggaccacagtttaccggagaagcatgtatga

SEQ ID NO: 883932 - DNA, 33 bp, Homo sapien
tgggaccacagtttacgggagaagcatgtatga

SEQ ID NO: 883933 - DNA, 33 bp, Homo sapien
acaccagcccagccaaattattccagtaagaaa

SEQ ID NO: 883934 - DNA, 33 bp, Homo sapien
acaccagcccagccaagttattccagtaagaaa

SEQ ID NO: 883935 - DNA, 33 bp, Homo sapien
gaatccagctttcccacgatttggttccccgtg

SEQ ID NO: 883936 - DNA, 33 bp, Homo sapien
gaatccagctttcccatgatttggttccccgtg

SEQ ID NO: 883937 - DNA, 33 bp, Homo sapien
atttatgatgtaagccaaacgtggatactgagc

SEQ ID NO: 883938 - DNA, 33 bp, Homo sapien
atttatgatgtaagccgaacgtggatactgagc

SEQ ID NO: 883939 - DNA, 33 bp, Homo sapien
ctcactgcttgcttggaaatacattggtacatt

SEQ ID NO: 883940 - DNA, 33 bp, Homo sapien
ctcactgcttgcttgggaatacattggtacatt

SEQ ID NO: 883941 - DNA, 33 bp, Homo sapien
ggaggagctaaaagagcctatccttacttgaga

SEQ ID NO: 883942 - DNA, 33 bp, Homo sapien
ggaggagctaaaagaggctatccttacttgaga

SEQ ID NO: 883943 - DNA, 33 bp, Homo sapien
ctgggaggaatggtaaatacattagatgatgaa

SEQ ID NO: 883944 - DNA, 33 bp, Homo sapien
ctgggaggaatggtaagtacattagatgatgaa

SEQ ID NO: 883945 - DNA, 33 bp, Homo sapien
atatcaactgtattcacagatttgtctatgtcg

SEQ ID NO: 883946 - DNA, 33 bp, Homo sapien
atatcaactgtattcatagatttgtctatgtcg

SEQ ID NO: 883947 - DNA, 33 bp, Homo sapien
atgcgaatggactcagaaagacttgaacccagg

SEQ ID NO: 883948 - DNA, 33 bp, Homo sapien
atgcgaatggactcaggaagacttgaacccagg

SEQ ID NO: 883949 - DNA, 33 bp, Homo sapien
cacattgtaaataaaccatagtgcaacccaaga

SEQ ID NO: 883950 - DNA, 33 bp, Homo sapien
cacattgtaaataaactatagtgcaacccaaga

SEQ ID NO: 883951 - DNA, 33 bp, Homo sapien
gaaagcggaagttgaccacaaatcaagtaggct

SEQ ID NO: 883952 - DNA, 33 bp, Homo sapien
gaaagcggaagttgacgacaaatcaagtaggct

SEQ ID NO: 883953 - DNA, 33 bp, Homo sapien
ttttctgaaggctgaaaatccaatttgaaactg

SEQ ID NO: 883954 - DNA, 33 bp, Homo sapien
ttttctgaaggctgaatatccaatttgaaactg

SEQ ID NO: 883955 - DNA, 33 bp, Homo sapien
ttccctgagccttgaaccgagcctctggtgatc

SEQ ID NO: 883956 - DNA, 33 bp, Homo sapien
ttccctgagccttgaatcgagcctctggtgatc

SEQ ID NO: 883957 - DNA, 33 bp, Homo sapien
aggcaaattaatggaacagaaaaatccaacaac

SEQ ID NO: 883958 - DNA, 33 bp, Homo sapien
aggcaaattaatggaagagaaaaatccaacaac

SEQ ID NO: 883959 - DNA, 33 bp, Homo sapien
tgttcactgtttttggaaacctctttgcaatgc

SEQ ID NO: 883960 - DNA, 33 bp, Homo sapien
tgttcactgtttttggtaacctctttgcaatgc

SEQ ID NO: 883961 - DNA, 33 bp, Homo sapien
tgagcattatttcctaaatcggcactgtgggga

SEQ ID NO: 883962 - DNA, 33 bp, Homo sapien
tgagcattatttcctacatcggcactgtgggga

SEQ ID NO: 883963 - DNA, 33 bp, Homo sapien
acatttttggggccacacaacctctgtcacgcc

SEQ ID NO: 883964 - DNA, 33 bp, Homo sapien
acatttttggggccacgcaacctctgtcacgcc

SEQ ID NO: 883965 - DNA, 33 bp, Homo sapien
ggccgatggatgtcaaacttgtttcacgctctg

SEQ ID NO: 883966 - DNA, 33 bp, Homo sapien
ggccgatggatgtcaatcttgtttcacgctctg

SEQ ID NO: 883967 - DNA, 33 bp, Homo sapien
ggcactggcttccataaatacatgctacaagat

SEQ ID NO: 883968 - DNA, 33 bp, Homo sapien
ggcactggcttccatacatacatgctacaagat

SEQ ID NO: 883969 - DNA, 33 bp, Homo sapien
tcacatacagaatgagaaaatatcacagatttt

SEQ ID NO: 883970 - DNA, 33 bp, Homo sapien
tcacatacagaatgaggaaatatcacagatttt

SEQ ID NO: 883971 - DNA, 33 bp, Homo sapien
ttccagaccactgggtaaccaactggggaattc

SEQ ID NO: 883972 - DNA, 33 bp, Homo sapien
ttccagaccactgggtgaccaactggggaattc

SEQ ID NO: 883973 - DNA, 33 bp, Homo sapien
ggggacagttaaatgactcaacctagtaagaca

SEQ ID NO: 883974 - DNA, 33 bp, Homo sapien
ggggacagttaaatgagtcaacctagtaagaca

SEQ ID NO: 883975 - DNA, 33 bp, Homo sapien
ttttggtgacagtttgcaagtttaatgctggct

SEQ ID NO: 883976 - DNA, 33 bp, Homo sapien
ttttggtgacagtttgtaagtttaatgctggct

SEQ ID NO: 883977 - DNA, 33 bp, Homo sapien
tattcactcagagaacaagagggggtgacaaca

SEQ ID NO: 883978 - DNA, 33 bp, Homo sapien
tattcactcagagaacgagagggggtgacaaca

SEQ ID NO: 883979 - DNA, 33 bp, Homo sapien
gaacatgtcttcatgacgattcaaggtcaggcc

SEQ ID NO: 883980 - DNA, 33 bp, Homo sapien
gaacatgtcttcatgatgattcaaggtcaggcc

SEQ ID NO: 883981 - DNA, 33 bp, Homo sapien
aatgcatctaggaggcccaatgcatctcttcat

SEQ ID NO: 883982 - DNA, 33 bp, Homo sapien
aatgcatctaggaggcgcaatgcatctcttcat

SEQ ID NO: 883983 - DNA, 33 bp, Homo sapien
gagtgaacaccctgaacagaatgcatctaggag

SEQ ID NO: 883984 - DNA, 33 bp, Homo sapien
gagtgaacaccctgaatagaatgcatctaggag

SEQ ID NO: 883985 - DNA, 33 bp, Homo sapien
tttcccgggctaactcagaatatgtcctctctg

SEQ ID NO: 883986 - DNA, 33 bp, Homo sapien
tttcccgggctaactcggaatatgtcctctctg

SEQ ID NO: 883987 - DNA, 33 bp, Homo sapien
cagtaaacaaaggaaactccgccagtgtcctgg

SEQ ID NO: 883988 - DNA, 33 bp, Homo sapien
cagtaaacaaaggaaattccgccagtgtcctgg

SEQ ID NO: 883989 - DNA, 33 bp, Homo sapien
tattgtctgtcacctcaaaggcgattgtcagtt

SEQ ID NO: 883990 - DNA, 33 bp, Homo sapien
tattgtctgtcacctcgaaggcgattgtcagtt

SEQ ID NO: 883991 - DNA, 33 bp, Homo sapien
catcttacaccttctacaccactttaagccagc

SEQ ID NO: 883992 - DNA, 33 bp, Homo sapien
catcttacaccttctataccactttaagccagc

SEQ ID NO: 883993 - DNA, 33 bp, Homo sapien
ctctaaccacgctttcacctctggaccgcattg

SEQ ID NO: 883994 - DNA, 33 bp, Homo sapien
ctctaaccacgctttcgcctctggaccgcattg

SEQ ID NO: 883995 - DNA, 33 bp, Homo sapien
ttttcttatggctttgaagtgaacacacatgcc

SEQ ID NO: 883996 - DNA, 33 bp, Homo sapien
ttttcttatggctttgcagtgaacacacatgcc

SEQ ID NO: 883997 - DNA, 33 bp, Homo sapien
ttgtttgcaaagaagacagtccaggaagtgaga

SEQ ID NO: 883998 - DNA, 33 bp, Homo sapien
ttgtttgcaaagaagagagtccaggaagtgaga

SEQ ID NO: 883999 - DNA, 33 bp, Homo sapien
cagaaatgacagagaacgatctcgctacaccca

SEQ ID NO: 884000 - DNA, 33 bp, Homo sapien
cagaaatgacagagaatgatctcgctacaccca

SEQ ID NO: 884001 - DNA, 33 bp, Homo sapien
attgatcgttttaacacgaatgatgaggtggcg

SEQ ID NO: 884002 - DNA, 33 bp, Homo sapien
attgatcgttttaacatgaatgatgaggtggcg

SEQ ID NO: 884003 - DNA, 33 bp, Homo sapien
tctctgataattaaaaatgccaggcctgtgcct

SEQ ID NO: 884004 - DNA, 33 bp, Homo sapien
tctctgataattaaaagtgccaggcctgtgcct

SEQ ID NO: 884005 - DNA, 33 bp, Homo sapien
tgccgtaacaaggcaccgagactgggcgactta

SEQ ID NO: 884006 - DNA, 33 bp, Homo sapien
tgccgtaacaaggcactgagactgggcgactta

SEQ ID NO: 884007 - DNA, 33 bp, Homo sapien
tctccctcagagccgactatgggcagagtgtcc

SEQ ID NO: 884008 - DNA, 33 bp, Homo sapien
tctccctcagagccgagtatgggcagagtgtcc

SEQ ID NO: 884009 - DNA, 33 bp, Homo sapien
gcctatctggggtcccagcaggttttgaagatg

SEQ ID NO: 884010 - DNA, 33 bp, Homo sapien
gcctatctggggtcccggcaggttttgaagatg

SEQ ID NO: 884011 - DNA, 33 bp, Homo sapien
actgaagcagcagcacaaggttagagccaccag

SEQ ID NO: 884012 - DNA, 33 bp, Homo sapien
actgaagcagcagcacgaggttagagccaccag

SEQ ID NO: 884013 - DNA, 33 bp, Homo sapien
gaaggaagcgtgactcaatcccgaggcccggat

SEQ ID NO: 884014 - DNA, 33 bp, Homo sapien
gaaggaagcgtgactcgatcccgaggcccggat

SEQ ID NO: 884015 - DNA, 33 bp, Homo sapien
atccaaagataaagaccgatgtatgtggatgtt

SEQ ID NO: 884016 - DNA, 33 bp, Homo sapien
atccaaagataaagactgatgtatgtggatgtt

SEQ ID NO: 884017 - DNA, 33 bp, Homo sapien
atttgagcttatagagaaaaaggagtcacaaaa

SEQ ID NO: 884018 - DNA, 33 bp, Homo sapien
atttgagcttatagaggaaaaggagtcacaaaa

SEQ ID NO: 884019 - DNA, 33 bp, Homo sapien
tcaattaaacttttcacgagtttagcatatcag

SEQ ID NO: 884020 - DNA, 33 bp, Homo sapien
tcaattaaacttttcatgagtttagcatatcag

SEQ ID NO: 884021 - DNA, 33 bp, Homo sapien
cttaaacactgttaaagactttccttctcaatt

SEQ ID NO: 884022 - DNA, 33 bp, Homo sapien
cttaaacactgttaaatactttccttctcaatt

SEQ ID NO: 884023 - DNA, 33 bp, Homo sapien
ttaaagtcatgtcagagaaatgcaaattagaac

SEQ ID NO: 884024 - DNA, 33 bp, Homo sapien
ttaaagtcatgtcagataaatgcaaattagaac

SEQ ID NO: 884025 - DNA, 33 bp, Homo sapien
aatctgaataaacatcaccaggatgccttccac

SEQ ID NO: 884026 - DNA, 33 bp, Homo sapien
aatctgaataaacatcgccaggatgccttccac

SEQ ID NO: 884027 - DNA, 33 bp, Homo sapien
ctgagaacgtgttcaacgcaggcccatggatgc

SEQ ID NO: 884028 - DNA, 33 bp, Homo sapien
ctgagaacgtgttcaatgcaggcccatggatgc

SEQ ID NO: 884029 - DNA, 33 bp, Homo sapien
agagatgcattaaagacgagatgtgccttgaac

SEQ ID NO: 884030 - DNA, 33 bp, Homo sapien
agagatgcattaaagatgagatgtgccttgaac

SEQ ID NO: 884031 - DNA, 33 bp, Homo sapien
tcttaaatagctgagaatcaccggtaatcaatg

SEQ ID NO: 884032 - DNA, 33 bp, Homo sapien
tcttaaatagctgagagtcaccggtaatcaatg

SEQ ID NO: 884033 - DNA, 33 bp, Homo sapien
ttcttaaggaccaagaatacgatgacatcacac

SEQ ID NO: 884034 - DNA, 33 bp, Homo sapien
ttcttaaggaccaagactacgatgacatcacac

SEQ ID NO: 884035 - DNA, 33 bp, Homo sapien
ataatctgatgtgcaaaggaaaaattccatgga

SEQ ID NO: 884036 - DNA, 33 bp, Homo sapien
ataatctgatgtgcaagggaaaaattccatgga

SEQ ID NO: 884037 - DNA, 33 bp, Homo sapien
gtatcaggaatgtaaacgttttctaacctattc

SEQ ID NO: 884038 - DNA, 33 bp, Homo sapien
gtatcaggaatgtaaatgttttctaacctattc

SEQ ID NO: 884039 - DNA, 33 bp, Homo sapien
cacttataatgacctcaattattttgttcaatt

SEQ ID NO: 884040 - DNA, 33 bp, Homo sapien
cacttataatgacctctattattttgttcaatt

SEQ ID NO: 884041 - DNA, 33 bp, Homo sapien
ggatattgaattaggtaaccatattttgtatca

SEQ ID NO: 884042 - DNA, 33 bp, Homo sapien
ggatattgaattaggttaccatattttgtatca

SEQ ID NO: 884043 - DNA, 33 bp, Homo sapien
cgggcaccagggggacaggctgctatctggaga

SEQ ID NO: 884044 - DNA, 33 bp, Homo sapien
cgggcaccagggggacgggctgctatctggaga

SEQ ID NO: 884045 - DNA, 33 bp, Homo sapien
tatctttctacttttccactttctcagaacaaa

SEQ ID NO: 884046 - DNA, 33 bp, Homo sapien
tatctttctacttttctactttctcagaacaaa

SEQ ID NO: 884047 - DNA, 33 bp, Homo sapien
ggtctgagaggactgacgcttggtgtgatgaga

SEQ ID NO: 884048 - DNA, 33 bp, Homo sapien
ggtctgagaggactgatgcttggtgtgatgaga

SEQ ID NO: 884049 - DNA, 33 bp, Homo sapien
attaaaaatactcccaagtcactttcaaggcca

SEQ ID NO: 884050 - DNA, 33 bp, Homo sapien
attaaaaatactcccaggtcactttcaaggcca

SEQ ID NO: 884051 - DNA, 33 bp, Homo sapien
tcttaatttccatttccatgtgcaagctttatt

SEQ ID NO: 884052 - DNA, 33 bp, Homo sapien
tcttaatttccatttctatgtgcaagctttatt

SEQ ID NO: 884053 - DNA, 33 bp, Homo sapien
ggtctcagtgtggcaacgcaggtcccgtgagtt

SEQ ID NO: 884054 - DNA, 33 bp, Homo sapien
ggtctcagtgtggcaatgcaggtcccgtgagtt

SEQ ID NO: 884055 - DNA, 33 bp, Homo sapien
agtaatctcttaaagaagtattgcctgacagaa

SEQ ID NO: 884056 - DNA, 33 bp, Homo sapien
agtaatctcttaaagacgtattgcctgacagaa

SEQ ID NO: 884057 - DNA, 33 bp, Homo sapien
atacacctttattcaccattgctgagggaacgg

SEQ ID NO: 884058 - DNA, 33 bp, Homo sapien
atacacctttattcactattgctgagggaacgg

SEQ ID NO: 884059 - DNA, 33 bp, Homo sapien
gtgaaagtactcacaagttggagtgatcacagc

SEQ ID NO: 884060 - DNA, 33 bp, Homo sapien
gtgaaagtactcacaatttggagtgatcacagc

SEQ ID NO: 884061 - DNA, 33 bp, Homo sapien
ataagtgtccaacatcaaagaattcaatcaaga

SEQ ID NO: 884062 - DNA, 33 bp, Homo sapien
ataagtgtccaacatcgaagaattcaatcaaga

SEQ ID NO: 884063 - DNA, 33 bp, Homo sapien
agaacaccagtgttgccgagatactctcacttt

SEQ ID NO: 884064 - DNA, 33 bp, Homo sapien
agaacaccagtgttgctgagatactctcacttt

SEQ ID NO: 884065 - DNA, 33 bp, Homo sapien
gggcctgatccaggcaacagaaaacagacttag

SEQ ID NO: 884066 - DNA, 33 bp, Homo sapien
gggcctgatccaggcagcagaaaacagacttag

SEQ ID NO: 884067 - DNA, 33 bp, Homo sapien
cgaggtggtcatcaaacggaagagaagaaagag

SEQ ID NO: 884068 - DNA, 33 bp, Homo sapien
cgaggtggtcatcaaatggaagagaagaaagag

SEQ ID NO: 884069 - DNA, 33 bp, Homo sapien
tagctggagcataggaaggaaggctgtccatcg

SEQ ID NO: 884070 - DNA, 33 bp, Homo sapien
tagctggagcataggacggaaggctgtccatcg

SEQ ID NO: 884071 - DNA, 33 bp, Homo sapien
ttaaataaatccctacaaattgcttaattgaca

SEQ ID NO: 884072 - DNA, 33 bp, Homo sapien
ttaaataaatccctacgaattgcttaattgaca

SEQ ID NO: 884073 - DNA, 33 bp, Homo sapien
aaagggatctaaggaaactctacgctgtgttct

SEQ ID NO: 884074 - DNA, 33 bp, Homo sapien
aaagggatctaaggaagctctacgctgtgttct

SEQ ID NO: 884075 - DNA, 33 bp, Homo sapien
cacccaactttctcctcactttgtgcattcacc

SEQ ID NO: 884076 - DNA, 33 bp, Homo sapien
cacccaactttctccttactttgtgcattcacc

SEQ ID NO: 884077 - DNA, 33 bp, Homo sapien
ctcacgcgatgctgtgcaaagctctagctgttt

SEQ ID NO: 884078 - DNA, 33 bp, Homo sapien
ctcacgcgatgctgtgtaaagctctagctgttt

SEQ ID NO: 884079 - DNA, 33 bp, Homo sapien
tttgaagtgcaaacatcagtgcagcaatgtgat

SEQ ID NO: 884080 - DNA, 33 bp, Homo sapien
tttgaagtgcaaacattagtgcagcaatgtgat

SEQ ID NO: 884081 - DNA, 33 bp, Homo sapien
catcaggactcagtaacgcaaggtgatatgctg

SEQ ID NO: 884082 - DNA, 33 bp, Homo sapien
catcaggactcagtaatgcaaggtgatatgctg

SEQ ID NO: 884083 - DNA, 33 bp, Homo sapien
acacatagacatgggcactctaaagaaaaatga

SEQ ID NO: 884084 - DNA, 33 bp, Homo sapien
acacatagacatgggcgctctaaagaaaaatga

SEQ ID NO: 884085 - DNA, 33 bp, Homo sapien
tgaaattaccaggatacaatcacagatatgaag

SEQ ID NO: 884086 - DNA, 33 bp, Homo sapien
tgaaattaccaggatagaatcacagatatgaag

SEQ ID NO: 884087 - DNA, 33 bp, Homo sapien
agtgaatgtgactcttcaaactgcagattccac

SEQ ID NO: 884088 - DNA, 33 bp, Homo sapien
agtgaatgtgactcttgaaactgcagattccac

SEQ ID NO: 884089 - DNA, 33 bp, Homo sapien
gaaacattttctcacccaacaaatgtagctaat

SEQ ID NO: 884090 - DNA, 33 bp, Homo sapien
gaaacattttctcacctaacaaatgtagctaat

SEQ ID NO: 884091 - DNA, 33 bp, Homo sapien
aaaatctgcactaccaagtatatacactaagaa

SEQ ID NO: 884092 - DNA, 33 bp, Homo sapien
aaaatctgcactaccaggtatatacactaagaa

SEQ ID NO: 884093 - DNA, 33 bp, Homo sapien
gccatagggaaaacgaggactccaaccagcatg

SEQ ID NO: 884094 - DNA, 33 bp, Homo sapien
gccatagggaaaacgatgactccaaccagcatg

SEQ ID NO: 884095 - DNA, 33 bp, Homo sapien
atctctaataaattcccgccctgtgagttttct

SEQ ID NO: 884096 - DNA, 33 bp, Homo sapien
atctctaataaattccggccctgtgagttttct

SEQ ID NO: 884097 - DNA, 33 bp, Homo sapien
tgcctggcgtatggcaaaagatcagctagtagg

SEQ ID NO: 884098 - DNA, 33 bp, Homo sapien
tgcctggcgtatggcagaagatcagctagtagg

SEQ ID NO: 884099 - DNA, 33 bp, Homo sapien
ggcagtgggacaaaacaggtccttcagatgggg

SEQ ID NO: 884100 - DNA, 33 bp, Homo sapien
ggcagtgggacaaaacgggtccttcagatgggg

SEQ ID NO: 884101 - DNA, 33 bp, Homo sapien
tttttctgatgacaaacgaaaatgaaattttgc

SEQ ID NO: 884102 - DNA, 33 bp, Homo sapien
tttttctgatgacaaatgaaaatgaaattttgc

SEQ ID NO: 884103 - DNA, 33 bp, Homo sapien
accagggtcagcttgacacaccgagcagggtac

SEQ ID NO: 884104 - DNA, 33 bp, Homo sapien
accagggtcagcttgatacaccgagcagggtac

SEQ ID NO: 884105 - DNA, 33 bp, Homo sapien
caacctcttcttggcagtagctccaggtttcct

SEQ ID NO: 884106 - DNA, 33 bp, Homo sapien
caacctcttcttggcattagctccaggtttcct

SEQ ID NO: 884107 - DNA, 33 bp, Homo sapien
atgccactgtggtccacggtatttttcactctg

SEQ ID NO: 884108 - DNA, 33 bp, Homo sapien
atgccactgtggtccatggtatttttcactctg

SEQ ID NO: 884109 - DNA, 33 bp, Homo sapien
cttgaagtaaaccagacgtcctcatcatttggc

SEQ ID NO: 884110 - DNA, 33 bp, Homo sapien
cttgaagtaaaccagatgtcctcatcatttggc

SEQ ID NO: 884111 - DNA, 33 bp, Homo sapien
ggtagacacaatgtataacaataggtgtacata

SEQ ID NO: 884112 - DNA, 33 bp, Homo sapien
ggtagacacaatgtattacaataggtgtacata

SEQ ID NO: 884113 - DNA, 33 bp, Homo sapien
aatgactgcagagacactgacgtaaagacagat

SEQ ID NO: 884114 - DNA, 33 bp, Homo sapien
aatgactgcagagacattgacgtaaagacagat

SEQ ID NO: 884115 - DNA, 33 bp, Homo sapien
accactccaggttaaaggatactaaagagaggt

SEQ ID NO: 884116 - DNA, 33 bp, Homo sapien
accactccaggttaaatgatactaaagagaggt

SEQ ID NO: 884117 - DNA, 33 bp, Homo sapien
gagggtttttatcaacaagctagtagggagcgg

SEQ ID NO: 884118 - DNA, 33 bp, Homo sapien
gagggtttttatcaacgagctagtagggagcgg

SEQ ID NO: 884119 - DNA, 33 bp, Homo sapien
aactaagatgggtagaagcaatacaggagatag

SEQ ID NO: 884120 - DNA, 33 bp, Homo sapien
aactaagatgggtagaggcaatacaggagatag

SEQ ID NO: 884121 - DNA, 33 bp, Homo sapien
gcaggctctggtggacaaagatagctgataatg

SEQ ID NO: 884122 - DNA, 33 bp, Homo sapien
gcaggctctggtggacgaagatagctgataatg

SEQ ID NO: 884123 - DNA, 33 bp, Homo sapien
ctgtatatattgaaaaaaatttgcatataagta

SEQ ID NO: 884124 - DNA, 33 bp, Homo sapien
ctgtatatattgaaaacaatttgcatataagta

SEQ ID NO: 884125 - DNA, 33 bp, Homo sapien
agtattcttgggatgccaatggtcatatccaca

SEQ ID NO: 884126 - DNA, 33 bp, Homo sapien
agtattcttgggatgcgaatggtcatatccaca

SEQ ID NO: 884127 - DNA, 33 bp, Homo sapien
tgcacagcactacaacagtcattaagttctctt

SEQ ID NO: 884128 - DNA, 33 bp, Homo sapien
tgcacagcactacaacggtcattaagttctctt

SEQ ID NO: 884129 - DNA, 33 bp, Homo sapien
tctctggacaagcacaaaagttatgggtcaaac

SEQ ID NO: 884130 - DNA, 33 bp, Homo sapien
tctctggacaagcacagaagttatgggtcaaac

SEQ ID NO: 884131 - DNA, 33 bp, Homo sapien; identical to SEQ ID NO: 884129

SEQ ID NO: 884132 - DNA, 33 bp, Homo sapien; identical to SEQ ID NO: 884130

SEQ ID NO: 884133 - DNA, 33 bp, Homo sapien
gtgaaaccatccttcaagagcgtcttgttcggt

SEQ ID NO: 884134 - DNA, 33 bp, Homo sapien
gtgaaaccatccttcaggagcgtcttgttcggt

SEQ ID NO: 884135 - DNA, 33 bp, Homo sapien
actgctctctttagtacgcaaggctgaattttg

SEQ ID NO: 884136 - DNA, 33 bp, Homo sapien
actgctctctttagtatgcaaggctgaattttg

SEQ ID NO: 884137 - DNA, 33 bp, Homo sapien
gtttatgttagaaatacgagtggttgaaggcag

SEQ ID NO: 884138 - DNA, 33 bp, Homo sapien
gtttatgttagaaatatgagtggttgaaggcag

SEQ ID NO: 884139 - DNA, 33 bp, Homo sapien
cacctctcagatttaacattgcttacagaagcc

SEQ ID NO: 884140 - DNA, 33 bp, Homo sapien
cacctctcagatttaatattgcttacagaagcc

SEQ ID NO: 884141 - DNA, 33 bp, Homo sapien
agtaagtgcccaaagacgtggacttcaatactc

SEQ ID NO: 884142 - DNA, 33 bp, Homo sapien
agtaagtgcccaaagatgtggacttcaatactc

SEQ ID NO: 884143 - DNA, 33 bp, Homo sapien
gggctgctgatttgcaaatttgtcctttatagc

SEQ ID NO: 884144 - DNA, 33 bp, Homo sapien
gggctgctgatttgcagatttgtcctttatagc

SEQ ID NO: 884145 - DNA, 33 bp, Homo sapien
aggtctctgttaagcacatcatgtacctgaatc

SEQ ID NO: 884146 - DNA, 33 bp, Homo sapien
aggtctctgttaagcatatcatgtacctgaatc

SEQ ID NO: 884147 - DNA, 33 bp, Homo sapien
atttacacaaaaactgaaaagtcagaaaagctt

SEQ ID NO: 884148 - DNA, 33 bp, Homo sapien
atttacacaaaaactggaaagtcagaaaagctt

SEQ ID NO: 884149 - DNA, 33 bp, Homo sapien
aattacagttcttatgcattcaattcaaatcca

SEQ ID NO: 884150 - DNA, 33 bp, Homo sapien
aattacagttcttatggattcaattcaaatcca

SEQ ID NO: 884151 - DNA, 33 bp, Homo sapien
atatacaggctccagaatatagaacatacagct

SEQ ID NO: 884152 - DNA, 33 bp, Homo sapien
atatacaggctccagagtatagaacatacagct

SEQ ID NO: 884153 - DNA, 33 bp, Homo sapien
tattaatagatatgtaagcataatgcaggctgg

SEQ ID NO: 884154 - DNA, 33 bp, Homo sapien
tattaatagatatgtaggcataatgcaggctgg

SEQ ID NO: 884155 - DNA, 33 bp, Homo sapien
ttaagtgagcagactgcatgacttgtgtaatgc

SEQ ID NO: 884156 - DNA, 33 bp, Homo sapien
ttaagtgagcagactgtatgacttgtgtaatgc

SEQ ID NO: 884157 - DNA, 33 bp, Homo sapien
cgagtggctggcctcacttaggattgcagtgag

SEQ ID NO: 884158 - DNA, 33 bp, Homo sapien
cgagtggctggcctcagttaggattgcagtgag

SEQ ID NO: 884159 - DNA, 33 bp, Homo sapien
aataggtcatttatccagctcatattttcaagt

SEQ ID NO: 884160 - DNA, 33 bp, Homo sapien
aataggtcatttatccggctcatattttcaagt

SEQ ID NO: 884161 - DNA, 33 bp, Homo sapien
caaattttaatcacaacttccagttcttctaca

SEQ ID NO: 884162 - DNA, 33 bp, Homo sapien
caaattttaatcacaatttccagttcttctaca

SEQ ID NO: 884163 - DNA, 33 bp, Homo sapien
agaaaaaaaaatctccaaattgtcagatgaaga

SEQ ID NO: 884164 - DNA, 33 bp, Homo sapien
agaaaaaaaaatctccgaattgtcagatgaaga

SEQ ID NO: 884165 - DNA, 33 bp, Homo sapien
catgtgtggtgcaggggatgaagtgtttgccca

SEQ ID NO: 884166 - DNA, 33 bp, Homo sapien
catgtgtggtgcagggtatgaagtgtttgccca

SEQ ID NO: 884167 - DNA, 33 bp, Homo sapien
caaaacaacactgcccaagaaacaaccctaaaa

SEQ ID NO: 884168 - DNA, 33 bp, Homo sapien
caaaacaacactgcccgagaaacaaccctaaaa

SEQ ID NO: 884169 - DNA, 33 bp, Homo sapien
aatctaaacgatctcactgacaatttttattga

SEQ ID NO: 884170 - DNA, 33 bp, Homo sapien
aatctaaacgatctcattgacaatttttattga

SEQ ID NO: 884171 - DNA, 33 bp, Homo sapien
gcacaacagccctgacaaattgcatagcgcacc

SEQ ID NO: 884172 - DNA, 33 bp, Homo sapien
gcacaacagccctgacgaattgcatagcgcacc

SEQ ID NO: 884173 - DNA, 33 bp, Homo sapien
ggaagtgctggagaacaaatgcctcacaaagga

SEQ ID NO: 884174 - DNA, 33 bp, Homo sapien
ggaagtgctggagaacgaatgcctcacaaagga

SEQ ID NO: 884175 - DNA, 33 bp, Homo sapien
tggacagctgtgtagaaaggggattggacaaaa

SEQ ID NO: 884176 - DNA, 33 bp, Homo sapien
tggacagctgtgtagagaggggattggacaaaa

SEQ ID NO: 884177 - DNA, 33 bp, Homo sapien
gattgattaacaggagaaaagataaatgtattt

SEQ ID NO: 884178 - DNA, 33 bp, Homo sapien
gattgattaacaggaggaaagataaatgtattt

SEQ ID NO: 884179 - DNA, 33 bp, Homo sapien
gccatgaagttgagaccggtgacctgatgggag

SEQ ID NO: 884180 - DNA, 33 bp, Homo sapien
gccatgaagttgagactggtgacctgatgggag

SEQ ID NO: 884181 - DNA, 33 bp, Homo sapien
acatcttctgccaacactgacatgaagatcagc

SEQ ID NO: 884182 - DNA, 33 bp, Homo sapien
acatcttctgccaacattgacatgaagatcagc

SEQ ID NO: 884183 - DNA, 33 bp, Homo sapien
caataaataagggaagaaattgtgggcttatct

SEQ ID NO: 884184 - DNA, 33 bp, Homo sapien
caataaataagggaagtaattgtgggcttatct

SEQ ID NO: 884185 - DNA, 33 bp, Homo sapien
cagagactggcagcacgggttattatctgggct

SEQ ID NO: 884186 - DNA, 33 bp, Homo sapien
cagagactggcagcactggttattatctgggct

SEQ ID NO: 884187 - DNA, 33 bp, Homo sapien
tacccattcctctgccaatgcacacgtcggttg

SEQ ID NO: 884188 - DNA, 33 bp, Homo sapien
tacccattcctctgccgatgcacacgtcggttg

SEQ ID NO: 884189 - DNA, 33 bp, Homo sapien
ccaggcacaagggatacggcagtgactaaaaca

SEQ ID NO: 884190 - DNA, 33 bp, Homo sapien
ccaggcacaagggatatggcagtgactaaaaca

SEQ ID NO: 884191 - DNA, 33 bp, Homo sapien
cgttgagtaacttcccaagaatgtatgagccag

SEQ ID NO: 884192 - DNA, 33 bp, Homo sapien
cgttgagtaacttcccgagaatgtatgagccag

SEQ ID NO: 884193 - DNA, 33 bp, Homo sapien
tgtgaccttcattttgcagatggaaagaaacca

SEQ ID NO: 884194 - DNA, 33 bp, Homo sapien
tgtgaccttcattttgtagatggaaagaaacca

SEQ ID NO: 884195 - DNA, 33 bp, Homo sapien
gcgattccatttgtataacaatctcggatgcac

SEQ ID NO: 884196 - DNA, 33 bp, Homo sapien
gcgattccatttgtatgacaatctcggatgcac

SEQ ID NO: 884197 - DNA, 33 bp, Homo sapien
atggcagtaacccctcagaaatatgaagtgatg

SEQ ID NO: 884198 - DNA, 33 bp, Homo sapien
atggcagtaacccctccgaaatatgaagtgatg

SEQ ID NO: 884199 - DNA, 33 bp, Homo sapien
actcagccaggaaggcaactcagatctgaccag

SEQ ID NO: 884200 - DNA, 33 bp, Homo sapien
actcagccaggaaggcgactcagatctgaccag

SEQ ID NO: 884201 - DNA, 33 bp, Homo sapien
agtgaagaaatgccaccgcgagcgtccagttca

SEQ ID NO: 884202 - DNA, 33 bp, Homo sapien
agtgaagaaatgccactgcgagcgtccagttca

SEQ ID NO: 884203 - DNA, 33 bp, Homo sapien
tggactgaagagtttacgcagaagaaaacatct

SEQ ID NO: 884204 - DNA, 33 bp, Homo sapien
tggactgaagagtttatgcagaagaaaacatct

SEQ ID NO: 884205 - DNA, 33 bp, Homo sapien
ggtcatttccaaccccactggcacagctggtgg

SEQ ID NO: 884206 - DNA, 33 bp, Homo sapien
ggtcatttccaaccccgctggcacagctggtgg

SEQ ID NO: 884207 - DNA, 33 bp, Homo sapien
gaggatacattcaggaactcagaacctggagga

SEQ ID NO: 884208 - DNA, 33 bp, Homo sapien
gaggatacattcaggagctcagaacctggagga

SEQ ID NO: 884209 - DNA, 33 bp, Homo sapien
gctaaagcagcaattagaggtgtctgtcagagg

SEQ ID NO: 884210 - DNA, 33 bp, Homo sapien
gctaaagcagcaattataggtgtctgtcagagg

SEQ ID NO: 884211 - DNA, 33 bp, Homo sapien
acctggtgggctctgaactagagtttgctgggc

SEQ ID NO: 884212 - DNA, 33 bp, Homo sapien
acctggtgggctctgagctagagtttgctgggc

SEQ ID NO: 884213 - DNA, 33 bp, Homo sapien
ccaccacattctttcccgaagtctcgcctggac

SEQ ID NO: 884214 - DNA, 33 bp, Homo sapien
ccaccacattctttcctgaagtctcgcctggac

SEQ ID NO: 884215 - DNA, 33 bp, Homo sapien
tagggggccatctgtaggccgttgaggagggcc

SEQ ID NO: 884216 - DNA, 33 bp, Homo sapien
tagggggccatctgtatgccgttgaggagggcc

SEQ ID NO: 884217 - DNA, 33 bp, Homo sapien
gcatcttctaagaaaactctctggctggtgctt

SEQ ID NO: 884218 - DNA, 33 bp, Homo sapien
gcatcttctaagaaaattctctggctggtgctt

SEQ ID NO: 884219 - DNA, 33 bp, Homo sapien
ggctgtactccaggcaggtcggagaaccagagc

SEQ ID NO: 884220 - DNA, 33 bp, Homo sapien
ggctgtactccaggcatgtcggagaaccagagc

SEQ ID NO: 884221 - DNA, 33 bp, Homo sapien
aggaggccgaataagacgggtgtggccccagac

SEQ ID NO: 884222 - DNA, 33 bp, Homo sapien
aggaggccgaataagatgggtgtggccccagac

SEQ ID NO: 884223 - DNA, 33 bp, Homo sapien
aggagtgagggtttcacctctgtctggggccac

SEQ ID NO: 884224 - DNA, 33 bp, Homo sapien
aggagtgagggtttcatctctgtctggggccac

SEQ ID NO: 884225 - DNA, 33 bp, Homo sapien
acacacgctatccacaccgcatctacacatggg

SEQ ID NO: 884226 - DNA, 33 bp, Homo sapien
acacacgctatccacatcgcatctacacatggg

SEQ ID NO: 884227 - DNA, 33 bp, Homo sapien
ctgccagccccgcaaactggagcaagtggctct

SEQ ID NO: 884228 - DNA, 33 bp, Homo sapien
ctgccagccccgcaaagtggagcaagtggctct

SEQ ID NO: 884229 - DNA, 33 bp, Homo sapien
aggtgacagcgaagtacgactgtgacttgacag

SEQ ID NO: 884230 - DNA, 33 bp, Homo sapien
aggtgacagcgaagtaggactgtgacttgacag

SEQ ID NO: 884231 - DNA, 33 bp, Homo sapien
ttttgcccaggttgagaacgcacccgtgacaca

SEQ ID NO: 884232 - DNA, 33 bp, Homo sapien
ttttgcccaggttgaggacgcacccgtgacaca

SEQ ID NO: 884233 - DNA, 33 bp, Homo sapien
atacccacggagttgacagcattctggagtctg

SEQ ID NO: 884234 - DNA, 33 bp, Homo sapien
atacccacggagttgagagcattctggagtctg

SEQ ID NO: 884235 - DNA, 33 bp, Homo sapien
gtgctgtcccccgcgacctctggccaggtttca

SEQ ID NO: 884236 - DNA, 33 bp, Homo sapien
gtgctgtcccccgcgagctctggccaggtttca

SEQ ID NO: 884237 - DNA, 33 bp, Homo sapien
aacccttgcagagagacaaatagtgacgattac

SEQ ID NO: 884238 - DNA, 33 bp, Homo sapien
aacccttgcagagagataaatagtgacgattac

SEQ ID NO: 884239 - DNA, 33 bp, Homo sapien
ggtacattcaggctaacggaaaaatcctacata

SEQ ID NO: 884240 - DNA, 33 bp, Homo sapien
ggtacattcaggctaatggaaaaatcctacata

SEQ ID NO: 884241 - DNA, 33 bp, Homo sapien
atgccagaatcctgtcaatctaagtctctacaa

SEQ ID NO: 884242 - DNA, 33 bp, Homo sapien
atgccagaatcctgtctatctaagtctctacaa

SEQ ID NO: 884243 - DNA, 33 bp, Homo sapien
accactttggcataagcatcattttgagctgaa

SEQ ID NO: 884244 - DNA, 33 bp, Homo sapien
accactttggcataaggatcattttgagctgaa

SEQ ID NO: 884245 - DNA, 33 bp, Homo sapien
agtttggctcttcgtcaacaggccccttgctag

SEQ ID NO: 884246 - DNA, 33 bp, Homo sapien
agtttggctcttcgtctacaggccccttgctag

SEQ ID NO: 884247 - DNA, 33 bp, Homo sapien
gagggaacagatcacaaatgtttcttatcagag

SEQ ID NO: 884248 - DNA, 33 bp, Homo sapien
gagggaacagatcacagatgtttcttatcagag

SEQ ID NO: 884249 - DNA, 33 bp, Homo sapien
tttgacctttggtaccaataaacatgagcagct

SEQ ID NO: 884250 - DNA, 33 bp, Homo sapien
tttgacctttggtaccgataaacatgagcagct

SEQ ID NO: 884251 - DNA, 33 bp, Homo sapien
ttgtctctaagggtacaacctatgagacttcat

SEQ ID NO: 884252 - DNA, 33 bp, Homo sapien
ttgtctctaagggtaccacctatgagacttcat

SEQ ID NO: 884253 - DNA, 33 bp, Homo sapien
ttcatcatatcgagtacctttccagtctgtctg

SEQ ID NO: 884254 - DNA, 33 bp, Homo sapien
ttcatcatatcgagtatctttccagtctgtctg

SEQ ID NO: 884255 - DNA, 33 bp, Homo sapien
gctttaaccctctaaccgggacagctgtctctg

SEQ ID NO: 884256 - DNA, 33 bp, Homo sapien
gctttaaccctctaactgggacagctgtctctg

SEQ ID NO: 884257 - DNA, 33 bp, Homo sapien
gtgggtaaaatgcagacccatagcctgtaacag

SEQ ID NO: 884258 - DNA, 33 bp, Homo sapien
gtgggtaaaatgcagatccatagcctgtaacag

SEQ ID NO: 884259 - DNA, 33 bp, Homo sapien
gtggacctgcctttccactgacagagaccctgc

SEQ ID NO: 884260 - DNA, 33 bp, Homo sapien
gtggacctgcctttccgctgacagagaccctgc

SEQ ID NO: 884261 - DNA, 33 bp, Homo sapien
gttccaactaaaaagacgacttccagagcatta

SEQ ID NO: 884262 - DNA, 33 bp, Homo sapien
gttccaactaaaaagatgacttccagagcatta

SEQ ID NO: 884263 - DNA, 33 bp, Homo sapien
tgggccaagtacacacacattttggtgaagagc

SEQ ID NO: 884264 - DNA, 33 bp, Homo sapien
tgggccaagtacacacgcattttggtgaagagc

SEQ ID NO: 884265 - DNA, 33 bp, Homo sapien
cagcccactttccagcaaccttctgggtcccca

SEQ ID NO: 884266 - DNA, 33 bp, Homo sapien
cagcccactttccagccaccttctgggtcccca

SEQ ID NO: 884267 - DNA, 33 bp, Homo sapien
agcttcttcataagtaaccatgttctcctcggc

SEQ ID NO: 884268 - DNA, 33 bp, Homo sapien
agcttcttcataagtagccatgttctcctcggc

SEQ ID NO: 884269 - DNA, 33 bp, Homo sapien
gcagctctctcaagaacgattcccgccacacac

SEQ ID NO: 884270 - DNA, 33 bp, Homo sapien
gcagctctctcaagaatgattcccgccacacac

SEQ ID NO: 884271 - DNA, 33 bp, Homo sapien
tttcccctggtgactacaaagcctccatcctac

SEQ ID NO: 884272 - DNA, 33 bp, Homo sapien
tttcccctggtgactataaagcctccatcctac

SEQ ID NO: 884273 - DNA, 33 bp, Homo sapien
gttgggtctctgacgtcaaagtccagaatctgt

SEQ ID NO: 884274 - DNA, 33 bp, Homo sapien
gttgggtctctgacgttaaagtccagaatctgt

SEQ ID NO: 884275 - DNA, 33 bp, Homo sapien
cccaccattcagtactaagccaccatttaaccc

SEQ ID NO: 884276 - DNA, 33 bp, Homo sapien
cccaccattcagtactgagccaccatttaaccc

SEQ ID NO: 884277 - DNA, 33 bp, Homo sapien
cagatgaggactctgaccttagaagttttcagc

SEQ ID NO: 884278 - DNA, 33 bp, Homo sapien
cagatgaggactctgatcttagaagttttcagc

SEQ ID NO: 884279 - DNA, 33 bp, Homo sapien
gggagcctgtgtttcaagtgcggcccgtgggag

SEQ ID NO: 884280 - DNA, 33 bp, Homo sapien
gggagcctgtgtttcaggtgcggcccgtgggag

SEQ ID NO: 884281 - DNA, 33 bp, Homo sapien
tgtcctgttccagaaccggggctcggcctcacc

SEQ ID NO: 884282 - DNA, 33 bp, Homo sapien
tgtcctgttccagaacgggggctcggcctcacc

SEQ ID NO: 884283 - DNA, 33 bp, Homo sapien
aggacgcaagtaagaacgcaagcccgtcaaggc

SEQ ID NO: 884284 - DNA, 33 bp, Homo sapien
aggacgcaagtaagaaggcaagcccgtcaaggc

SEQ ID NO: 884285 - DNA, 33 bp, Homo sapien
atgctcaaacattccaatgagactaaatcaagc

SEQ ID NO: 884286 - DNA, 33 bp, Homo sapien
atgctcaaacattccagtgagactaaatcaagc

SEQ ID NO: 884287 - DNA, 33 bp, Homo sapien
tatgaagtgagcacaaactgtttgaaaacggga

SEQ ID NO: 884288 - DNA, 33 bp, Homo sapien
tatgaagtgagcacaagctgtttgaaaacggga

SEQ ID NO: 884289 - DNA, 33 bp, Homo sapien; identical to SEQ ID NO: 884287

SEQ ID NO: 884290 - DNA, 33 bp, Homo sapien; identical to SEQ ID NO: 884288

SEQ ID NO: 884291 - DNA, 33 bp, Homo sapien
catgtttctttcttccccgatctcccacagata

SEQ ID NO: 884292 - DNA, 33 bp, Homo sapien
catgtttctttcttcctcgatctcccacagata

SEQ ID NO: 884293 - DNA, 33 bp, Homo sapien
ctttaaaataatggcacggaaatagtcccttcg

SEQ ID NO: 884294 - DNA, 33 bp, Homo sapien
ctttaaaataatggcatggaaatagtcccttcg

SEQ ID NO: 884295 - DNA, 33 bp, Homo sapien
gttgtcaagaccctccaatctgcacggtgacac

SEQ ID NO: 884296 - DNA, 33 bp, Homo sapien
gttgtcaagaccctccgatctgcacggtgacac

SEQ ID NO: 884297 - DNA, 33 bp, Homo sapien
gagcttatgaaagacgaatgttggtgggacaga

SEQ ID NO: 884298 - DNA, 33 bp, Homo sapien
gagcttatgaaagacggatgttggtgggacaga

SEQ ID NO: 884299 - DNA, 33 bp, Homo sapien
aaattcacattctcaacccaaaactattgaatc

SEQ ID NO: 884300 - DNA, 33 bp, Homo sapien
aaattcacattctcaagccaaaactattgaatc

SEQ ID NO: 884301 - DNA, 33 bp, Homo sapien
tctgcatcataagaacccccggacttgtatggc

SEQ ID NO: 884302 - DNA, 33 bp, Homo sapien
tctgcatcataagaactcccggacttgtatggc

SEQ ID NO: 884303 - DNA, 33 bp, Homo sapien
ccatgctgtttgtaacgatgtcagttggagttc

SEQ ID NO: 884304 - DNA, 33 bp, Homo sapien
ccatgctgtttgtaactatgtcagttggagttc

SEQ ID NO: 884305 - DNA, 33 bp, Homo sapien
gcagctttatctctgacgacgaagggacacaga

SEQ ID NO: 884306 - DNA, 33 bp, Homo sapien
gcagctttatctctgatgacgaagggacacaga

SEQ ID NO: 884307 - DNA, 33 bp, Homo sapien
aaggtctgtgcgttcaaattcttctctgtgtcc

SEQ ID NO: 884308 - DNA, 33 bp, Homo sapien
aaggtctgtgcgttcagattcttctctgtgtcc

SEQ ID NO: 884309 - DNA, 33 bp, Homo sapien
tccaggatggtgtttaagctgcgtgttgaagac

SEQ ID NO: 884310 - DNA, 33 bp, Homo sapien
tccaggatggtgtttacgctgcgtgttgaagac

SEQ ID NO: 884311 - DNA, 33 bp, Homo sapien
ctctgccatgttctcacaatgacaaactcaccc

SEQ ID NO: 884312 - DNA, 33 bp, Homo sapien
ctctgccatgttctcataatgacaaactcaccc

SEQ ID NO: 884313 - DNA, 33 bp, Homo sapien
acaggttttatttccacacattacaattttaaa

SEQ ID NO: 884314 - DNA, 33 bp, Homo sapien
acaggttttatttccagacattacaattttaaa

SEQ ID NO: 884315 - DNA, 33 bp, Homo sapien
cgtctcctcgcaaaacacattgggaagaaagct

SEQ ID NO: 884316 - DNA, 33 bp, Homo sapien
cgtctcctcgcaaaactcattgggaagaaagct

SEQ ID NO: 884317 - DNA, 33 bp, Homo sapien
ggcaaatctgagttccacctgtaccctgacatt

SEQ ID NO: 884318 - DNA, 33 bp, Homo sapien
ggcaaatctgagttccgcctgtaccctgacatt

SEQ ID NO: 884319 - DNA, 33 bp, Homo sapien
aaagcacgttcttcacaaccaaaattccctgta

SEQ ID NO: 884320 - DNA, 33 bp, Homo sapien
aaagcacgttcttcacgaccaaaattccctgta

SEQ ID NO: 884321 - DNA, 33 bp, Homo sapien
tgttaacagatgaacaaagtttccaatgaatta

SEQ ID NO: 884322 - DNA, 33 bp, Homo sapien
tgttaacagatgaacagagtttccaatgaatta

SEQ ID NO: 884323 - DNA, 33 bp, Homo sapien
aaggtaaaccagagaggaatctaattaagactt

SEQ ID NO: 884324 - DNA, 33 bp, Homo sapien
aaggtaaaccagagagtaatctaattaagactt

SEQ ID NO: 884325 - DNA, 33 bp, Homo sapien
tttgttgtcagccacaagtacttccgttaaggg

SEQ ID NO: 884326 - DNA, 33 bp, Homo sapien
tttgttgtcagccacaggtacttccgttaaggg

SEQ ID NO: 884327 - DNA, 33 bp, Homo sapien
gtgaaatacgagggaaacagtacaacctctgct

SEQ ID NO: 884328 - DNA, 33 bp, Homo sapien
gtgaaatacgagggaagcagtacaacctctgct

SEQ ID NO: 884329 - DNA, 33 bp, Homo sapien
atgtatagtatagcacgcatcatcattatcaag

SEQ ID NO: 884330 - DNA, 33 bp, Homo sapien
atgtatagtatagcactcatcatcattatcaag

SEQ ID NO: 884331 - DNA, 33 bp, Homo sapien
catttccttaaagaaccgaggtgcagatccggg

SEQ ID NO: 884332 - DNA, 33 bp, Homo sapien
catttccttaaagaacggaggtgcagatccggg

SEQ ID NO: 884333 - DNA, 33 bp, Homo sapien
cttgatgtgatactccgctcagcaaatcctacc

SEQ ID NO: 884334 - DNA, 33 bp, Homo sapien
cttgatgtgatactcctctcagcaaatcctacc

SEQ ID NO: 884335 - DNA, 33 bp, Homo sapien
tacttacatttccaaccaactttctagaattct

SEQ ID NO: 884336 - DNA, 33 bp, Homo sapien
tacttacatttccaactaactttctagaattct

SEQ ID NO: 884337 - DNA, 33 bp, Homo sapien
ggaaatgtaagtataacgacaggtttcagggga

SEQ ID NO: 884338 - DNA, 33 bp, Homo sapien
ggaaatgtaagtataatgacaggtttcagggga

SEQ ID NO: 884339 - DNA, 33 bp, Homo sapien
gccgcgcatttgagggaaaaagaagaatttggc

SEQ ID NO: 884340 - DNA, 33 bp, Homo sapien
gccgcgcatttgaggggaaaagaagaatttggc

SEQ ID NO: 884341 - DNA, 33 bp, Homo sapien
ggagtgcaaattccacaaaggaagggttttgat

SEQ ID NO: 884342 - DNA, 33 bp, Homo sapien
ggagtgcaaattccacgaaggaagggttttgat

SEQ ID NO: 884343 - DNA, 33 bp, Homo sapien
ggtgtgaacagtgacaataaagctggcggaggt

SEQ ID NO: 884344 - DNA, 33 bp, Homo sapien
ggtgtgaacagtgacagtaaagctggcggaggt

SEQ ID NO: 884345 - DNA, 33 bp, Homo sapien
gcctgttattctgaaacagagagtaagccattg

SEQ ID NO: 884346 - DNA, 33 bp, Homo sapien
gcctgttattctgaaagagagagtaagccattg

SEQ ID NO: 884347 - DNA, 33 bp, Homo sapien
cggtgatcatgctaaaaatagctaaccttttaa

SEQ ID NO: 884348 - DNA, 33 bp, Homo sapien
cggtgatcatgctaaacatagctaaccttttaa

SEQ ID NO: 884349 - DNA, 33 bp, Homo sapien
gctgccaccggcgcacgctgcatgccaggcaac

SEQ ID NO: 884350 - DNA, 33 bp, Homo sapien
gctgccaccggcgcactctgcatgccaggcaac

SEQ ID NO: 884351 - DNA, 33 bp, Homo sapien
gtacagacgagaaagccgagcagagaaagagtt

SEQ ID NO: 884352 - DNA, 33 bp, Homo sapien
gtacagacgagaaagctgagcagagaaagagtt

SEQ ID NO: 884353 - DNA, 33 bp, Homo sapien
acagcaggttaagtgcaaaagcttacttaacaa

SEQ ID NO: 884354 - DNA, 33 bp, Homo sapien
acagcaggttaagtgcgaaagcttacttaacaa

SEQ ID NO: 884355 - DNA, 33 bp, Homo sapien
tgtgaatcagatctaccgcctggagcatcctct

SEQ ID NO: 884356 - DNA, 33 bp, Homo sapien
tgtgaatcagatctactgcctggagcatcctct

SEQ ID NO: 884357 - DNA, 33 bp, Homo sapien
ccccattgtaatatccacctactgcagatgatg

SEQ ID NO: 884358 - DNA, 33 bp, Homo sapien
ccccattgtaatatccgcctactgcagatgatg

SEQ ID NO: 884359 - DNA, 33 bp, Homo sapien
acagcagggctaatacaccaacacctcagaaca

SEQ ID NO: 884360 - DNA, 33 bp, Homo sapien
acagcagggctaatacgccaacacctcagaaca

SEQ ID NO: 884361 - DNA, 33 bp, Homo sapien
aacacacggaaagttacggcatagcctcatatg

SEQ ID NO: 884362 - DNA, 33 bp, Homo sapien
aacacacggaaagttatggcatagcctcatatg

SEQ ID NO: 884363 - DNA, 33 bp, Homo sapien
cctaaacctgttaatcgaatgctacgatgacta

SEQ ID NO: 884364 - DNA, 33 bp, Homo sapien
cctaaacctgttaatctaatgctacgatgacta

SEQ ID NO: 884365 - DNA, 33 bp, Homo sapien
aaacggaagtatggggaaaatgcagctcagact

SEQ ID NO: 884366 - DNA, 33 bp, Homo sapien
aaacggaagtatgggggaaatgcagctcagact

SEQ ID NO: 884367 - DNA, 33 bp, Homo sapien
tgattttggtttcataaatctggaatcaatctg

SEQ ID NO: 884368 - DNA, 33 bp, Homo sapien
tgattttggtttcatagatctggaatcaatctg

SEQ ID NO: 884369 - DNA, 33 bp, Homo sapien
atttacaggccaagaacaagcaaacaaaaagta

SEQ ID NO: 884370 - DNA, 33 bp, Homo sapien
atttacaggccaagaagaagcaaacaaaaagta

SEQ ID NO: 884371 - DNA, 33 bp, Homo sapien
aatgacagtgcgaggcaacattagaaacactaa

SEQ ID NO: 884372 - DNA, 33 bp, Homo sapien
aatgacagtgcgaggcgacattagaaacactaa

SEQ ID NO: 884373 - DNA, 33 bp, Homo sapien
tcctattccaaccacgccctaaatgatgagttg

SEQ ID NO: 884374 - DNA, 33 bp, Homo sapien
tcctattccaaccacgtcctaaatgatgagttg

SEQ ID NO: 884375 - DNA, 33 bp, Homo sapien
ttactatgtgcaatgaaaaaatataaagcgtgt

SEQ ID NO: 884376 - DNA, 33 bp, Homo sapien
ttactatgtgcaatgagaaaatataaagcgtgt

SEQ ID NO: 884377 - DNA, 33 bp, Homo sapien
cactagaatcatagtgccaaacagctggatgat

SEQ ID NO: 884378 - DNA, 33 bp, Homo sapien
cactagaatcatagtgtcaaacagctggatgat

SEQ ID NO: 884379 - DNA, 33 bp, Homo sapien
aacctttccacattgaagatgcttgtgttttat

SEQ ID NO: 884380 - DNA, 33 bp, Homo sapien
aacctttccacattgatgatgcttgtgttttat

SEQ ID NO: 884381 - DNA, 33 bp, Homo sapien
gaacaaacctatgatcaccggccctttaaccag

SEQ ID NO: 884382 - DNA, 33 bp, Homo sapien
gaacaaacctatgatcgccggccctttaaccag

SEQ ID NO: 884383 - DNA, 33 bp, Homo sapien
agtgtgactgtgtatggatgaaagattcatcct

SEQ ID NO: 884384 - DNA, 33 bp, Homo sapien
agtgtgactgtgtatgtatgaaagattcatcct

SEQ ID NO: 884385 - DNA, 33 bp, Homo sapien
aaacctgcatatgtaccctgactctaaaaaaaa

SEQ ID NO: 884386 - DNA, 33 bp, Homo sapien
aaacctgcatatgtactctgactctaaaaaaaa

SEQ ID NO: 884387 - DNA, 33 bp, Homo sapien
ttgaattttcaaaaaccgacttatagattaaaa

SEQ ID NO: 884388 - DNA, 33 bp, Homo sapien
ttgaattttcaaaaactgacttatagattaaaa

SEQ ID NO: 884389 - DNA, 33 bp, Homo sapien
aacctgcactgggcgaagttgaaaaagaccttt

SEQ ID NO: 884390 - DNA, 33 bp, Homo sapien
aacctgcactgggcgaggttgaaaaagaccttt

SEQ ID NO: 884391 - DNA, 33 bp, Homo sapien
aaagtaccactatgagcaaacaagaataaagag

SEQ ID NO: 884392 - DNA, 33 bp, Homo sapien
aaagtaccactatgagtaaacaagaataaagag

SEQ ID NO: 884393 - DNA, 33 bp, Homo sapien
tagtaatgctatctataacaattaaattggtga

SEQ ID NO: 884394 - DNA, 33 bp, Homo sapien
tagtaatgctatctatcacaattaaattggtga

SEQ ID NO: 884395 - DNA, 33 bp, Homo sapien
ggcataatgtaataaaacatctcttctgtttta

SEQ ID NO: 884396 - DNA, 33 bp, Homo sapien
ggcataatgtaataaagcatctcttctgtttta

SEQ ID NO: 884397 - DNA, 33 bp, Homo sapien
ccaaatctgagaaagaccaagttcactgaaagt

SEQ ID NO: 884398 - DNA, 33 bp, Homo sapien
ccaaatctgagaaagatcaagttcactgaaagt

SEQ ID NO: 884399 - DNA, 33 bp, Homo sapien
tttattccaggattccaatactttcacactacc

SEQ ID NO: 884400 - DNA, 33 bp, Homo sapien
tttattccaggattccgatactttcacactacc

SEQ ID NO: 884401 - DNA, 33 bp, Homo sapien
ctggcaacagatttgacgctgcaagccccacac

SEQ ID NO: 884402 - DNA, 33 bp, Homo sapien
ctggcaacagatttgatgctgcaagccccacac

SEQ ID NO: 884403 - DNA, 33 bp, Homo sapien
ttgctttggccatataaggaataaggggcctct

SEQ ID NO: 884404 - DNA, 33 bp, Homo sapien
ttgctttggccatatagggaataaggggcctct

SEQ ID NO: 884405 - DNA, 33 bp, Homo sapien
ttcatttcaatcatcaacttttcttcagccctg

SEQ ID NO: 884406 - DNA, 33 bp, Homo sapien
ttcatttcaatcatcagcttttcttcagccctg

SEQ ID NO: 884407 - DNA, 33 bp, Homo sapien
catcagcatcaaaacacgttacagtgtcttctc

SEQ ID NO: 884408 - DNA, 33 bp, Homo sapien
catcagcatcaaaacatgttacagtgtcttctc

SEQ ID NO: 884409 - DNA, 33 bp, Homo sapien
atctttgaaggaaacacaatggcctcttcaaaa

SEQ ID NO: 884410 - DNA, 33 bp, Homo sapien
atctttgaaggaaacagaatggcctcttcaaaa

SEQ ID NO: 884411 - DNA, 33 bp, Homo sapien
cacctgatgacattccaaatataaacagcacct

SEQ ID NO: 884412 - DNA, 33 bp, Homo sapien
cacctgatgacattcccaatataaacagcacct

SEQ ID NO: 884413 - DNA, 33 bp, Homo sapien
tgcaatgatgaaaaaaaagttcaccacagcctc

SEQ ID NO: 884414 - DNA, 33 bp, Homo sapien
tgcaatgatgaaaaaacagttcaccacagcctc

SEQ ID NO: 884415 - DNA, 33 bp, Homo sapien
agtgcagggtagggcactatacagggggatttc

SEQ ID NO: 884416 - DNA, 33 bp, Homo sapien
agtgcagggtagggcagtatacagggggatttc

SEQ ID NO: 884417 - DNA, 33 bp, Homo sapien
tgctgccacaccaacacgctcagtaagacgcag

SEQ ID NO: 884418 - DNA, 33 bp, Homo sapien
tgctgccacaccaacaggctcagtaagacgcag

SEQ ID NO: 884419 - DNA, 33 bp, Homo sapien
agcagttgaaaaacccagaggagagcagcgagc

SEQ ID NO: 884420 - DNA, 33 bp, Homo sapien
agcagttgaaaaacccggaggagagcagcgagc

SEQ ID NO: 884421 - DNA, 33 bp, Homo sapien
tggtgattttagaacaataagtggctgaaatga

SEQ ID NO: 884422 - DNA, 33 bp, Homo sapien
tggtgattttagaacagtaagtggctgaaatga

SEQ ID NO: 884423 - DNA, 33 bp, Homo sapien
tttttcctctgctttccacctgactacagaaaa

SEQ ID NO: 884424 - DNA, 33 bp, Homo sapien
tttttcctctgctttctacctgactacagaaaa

SEQ ID NO: 884425 - DNA, 33 bp, Homo sapien
ataaactaggaatctacgtgaagtcggttgtga

SEQ ID NO: 884426 - DNA, 33 bp, Homo sapien
ataaactaggaatctatgtgaagtcggttgtga

SEQ ID NO: 884427 - DNA, 33 bp, Homo sapien
aggatatggttttcataagggatatcataagta

SEQ ID NO: 884428 - DNA, 33 bp, Homo sapien
aggatatggttttcatgagggatatcataagta

SEQ ID NO: 884429 - DNA, 33 bp, Homo sapien
gctacacttatgtacaccaaaacacacaaagaa

SEQ ID NO: 884430 - DNA, 33 bp, Homo sapien
gctacacttatgtacatcaaaacacacaaagaa

SEQ ID NO: 884431 - DNA, 33 bp, Homo sapien
agcaatgaaggcacgaatcacacaccttgtcat

SEQ ID NO: 884432 - DNA, 33 bp, Homo sapien
agcaatgaaggcacgagtcacacaccttgtcat

SEQ ID NO: 884433 - DNA, 33 bp, Homo sapien
agtgtccttcaagtgcaactcaccagaaaggtt

SEQ ID NO: 884434 - DNA, 33 bp, Homo sapien
agtgtccttcaagtgcgactcaccagaaaggtt

SEQ ID NO: 884435 - DNA, 33 bp, Homo sapien
atatttggcaattctccagggtgagcttgtagg

SEQ ID NO: 884436 - DNA, 33 bp, Homo sapien
atatttggcaattctctagggtgagcttgtagg

SEQ ID NO: 884437 - DNA, 33 bp, Homo sapien
ttaaacaatgtgaccacataattactacaacaa

SEQ ID NO: 884438 - DNA, 33 bp, Homo sapien
ttaaacaatgtgaccatataattactacaacaa

SEQ ID NO: 884439 - DNA, 33 bp, Homo sapien
atactcttaaatcacaagagcataactaaagta

SEQ ID NO: 884440 - DNA, 33 bp, Homo sapien
atactcttaaatcacaggagcataactaaagta

SEQ ID NO: 884441 - DNA, 33 bp, Homo sapien
cacaatacatatgaacacttttagagaactttg

SEQ ID NO: 884442 - DNA, 33 bp, Homo sapien
cacaatacatatgaacgcttttagagaactttg

SEQ ID NO: 884443 - DNA, 33 bp, Homo sapien
gtgctccagggaaaggaacaatcatgttatttt

SEQ ID NO: 884444 - DNA, 33 bp, Homo sapien
gtgctccagggaaagggacaatcatgttatttt

SEQ ID NO: 884445 - DNA, 33 bp, Homo sapien
atactccagtaagaacacttaaatatctccttc

SEQ ID NO: 884446 - DNA, 33 bp, Homo sapien
atactccagtaagaacgcttaaatatctccttc

SEQ ID NO: 884447 - DNA, 33 bp, Homo sapien
tggtggtgcttggcagaactgatagatttgata

SEQ ID NO: 884448 - DNA, 33 bp, Homo sapien
tggtggtgcttggcaggactgatagatttgata

SEQ ID NO: 884449 - DNA, 33 bp, Homo sapien
gggaggtctgttcttacggcgaggccaggggct

SEQ ID NO: 884450 - DNA, 33 bp, Homo sapien
gggaggtctgttcttatggcgaggccaggggct

SEQ ID NO: 884451 - DNA, 33 bp, Homo sapien
cgatgtgaaatgctgagataatcaaatagtgaa

SEQ ID NO: 884452 - DNA, 33 bp, Homo sapien
cgatgtgaaatgctgatataatcaaatagtgaa

SEQ ID NO: 884453 - DNA, 33 bp, Homo sapien
cccactctgtccactcactatggagtctccctg

SEQ ID NO: 884454 - DNA, 33 bp, Homo sapien
cccactctgtccactcgctatggagtctccctg

SEQ ID NO: 884455 - DNA, 33 bp, Homo sapien
ctggacaatgcaagtaagtcttcgtcaggaact

SEQ ID NO: 884456 - DNA, 33 bp, Homo sapien
ctggacaatgcaagtacgtcttcgtcaggaact

SEQ ID NO: 884457 - DNA, 33 bp, Homo sapien
gactacaacagataaacgggttcttacaggagt

SEQ ID NO: 884458 - DNA, 33 bp, Homo sapien
gactacaacagataaatgggttcttacaggagt

SEQ ID NO: 884459 - DNA, 33 bp, Homo sapien
cattccagccacaagaacctggaaaccacaagc

SEQ ID NO: 884460 - DNA, 33 bp, Homo sapien
cattccagccacaagagcctggaaaccacaagc

SEQ ID NO: 884461 - DNA, 33 bp, Homo sapien
cagaccgaacaagcacacaatcaggccaaggtg

SEQ ID NO: 884462 - DNA, 33 bp, Homo sapien
cagaccgaacaagcacgcaatcaggccaaggtg

SEQ ID NO: 884463 - DNA, 33 bp, Homo sapien
ttgctgtggttgttaccgatgagccaagtgttt

SEQ ID NO: 884464 - DNA, 33 bp, Homo sapien
ttgctgtggttgttactgatgagccaagtgttt

SEQ ID NO: 884465 - DNA, 33 bp, Homo sapien
ataatgtacacagttacacaccactctcatatg

SEQ ID NO: 884466 - DNA, 33 bp, Homo sapien
ataatgtacacagttatacaccactctcatatg

SEQ ID NO: 884467 - DNA, 33 bp, Homo sapien
tgttcatggctgcatacggcgtttagagtaact

SEQ ID NO: 884468 - DNA, 33 bp, Homo sapien
tgttcatggctgcatatggcgtttagagtaact

SEQ ID NO: 884469 - DNA, 33 bp, Homo sapien
cagcaagtaccaccgacggctgtgagctgaccg

SEQ ID NO: 884470 - DNA, 33 bp, Homo sapien
cagcaagtaccaccgatggctgtgagctgaccg

SEQ ID NO: 884471 - DNA, 33 bp, Homo sapien
aaaaggagaaaaagaacgctgcagaggagtgca

SEQ ID NO: 884472 - DNA, 33 bp, Homo sapien
aaaaggagaaaaagaatgctgcagaggagtgca

SEQ ID NO: 884473 - DNA, 33 bp, Homo sapien
ccacactagccatggaagtcatgataaactgag

SEQ ID NO: 884474 - DNA, 33 bp, Homo sapien
ccacactagccatggaggtcatgataaactgag

SEQ ID NO: 884475 - DNA, 33 bp, Homo sapien
caagcatcaccagcaacgccaggaaccaggaag

SEQ ID NO: 884476 - DNA, 33 bp, Homo sapien
caagcatcaccagcaatgccaggaaccaggaag

SEQ ID NO: 884477 - DNA, 33 bp, Homo sapien
ggagatcttttcagcccacttcttaattctttg

SEQ ID NO: 884478 - DNA, 33 bp, Homo sapien
ggagatcttttcagcctacttcttaattctttg

SEQ ID NO: 884479 - DNA, 33 bp, Homo sapien
gatgagattatttaaaatggaagctgatgttac

SEQ ID NO: 884480 - DNA, 33 bp, Homo sapien
gatgagattatttaaagtggaagctgatgttac

SEQ ID NO: 884481 - DNA, 33 bp, Homo sapien
acctcaaacgatgaaactactaaaataaaacct

SEQ ID NO: 884482 - DNA, 33 bp, Homo sapien
acctcaaacgatgaaattactaaaataaaacct

SEQ ID NO: 884483 - DNA, 33 bp, Homo sapien
ctggcataaaaatagacacatagaccatcagaa

SEQ ID NO: 884484 - DNA, 33 bp, Homo sapien
ctggcataaaaatagatacatagaccatcagaa

SEQ ID NO: 884485 - DNA, 33 bp, Homo sapien
ataggactgtggtaataagaatggtactggcat

SEQ ID NO: 884486 - DNA, 33 bp, Homo sapien
ataggactgtggtaatcagaatggtactggcat

SEQ ID NO: 884487 - DNA, 33 bp, Homo sapien
aaaccttcaggccaaacgtaaaatgtgtaagaa

SEQ ID NO: 884488 - DNA, 33 bp, Homo sapien
aaaccttcaggccaaatgtaaaatgtgtaagaa

SEQ ID NO: 884489 - DNA, 33 bp, Homo sapien
gttcccacaaggcgaagaggtggagctccggaa

SEQ ID NO: 884490 - DNA, 33 bp, Homo sapien
gttcccacaaggcgaataggtggagctccggaa

SEQ ID NO: 884491 - DNA, 33 bp, Homo sapien
gagggctggcattcaaagacttcttcgagtgtt

SEQ ID NO: 884492 - DNA, 33 bp, Homo sapien
gagggctggcattcaacgacttcttcgagtgtt

SEQ ID NO: 884493 - DNA, 33 bp, Homo sapien
gaaaactaagagcagaatatgttttgacagagg

SEQ ID NO: 884494 - DNA, 33 bp, Homo sapien
gaaaactaagagcagagtatgttttgacagagg

SEQ ID NO: 884495 - DNA, 33 bp, Homo sapien
catgactaatggttcccgagagcatggaagagt

SEQ ID NO: 884496 - DNA, 33 bp, Homo sapien
catgactaatggttcctgagagcatggaagagt

SEQ ID NO: 884497 - DNA, 33 bp, Homo sapien
aggattttagtcatgacacggtaaacataccaa

SEQ ID NO: 884498 - DNA, 33 bp, Homo sapien
aggattttagtcatgatacggtaaacataccaa

SEQ ID NO: 884499 - DNA, 33 bp, Homo sapien
aaaggaaatacttccacctttgttcacaaaagt

SEQ ID NO: 884500 - DNA, 33 bp, Homo sapien
aaaggaaatacttccatctttgttcacaaaagt

SEQ ID NO: 884501 - DNA, 33 bp, Homo sapien
tagagagaagaagttacgtttctgagaaaacct

SEQ ID NO: 884502 - DNA, 33 bp, Homo sapien
tagagagaagaagttatgtttctgagaaaacct

SEQ ID NO: 884503 - DNA, 33 bp, Homo sapien
gtgaaccactgtggaccgtcacccttgaggcaa

SEQ ID NO: 884504 - DNA, 33 bp, Homo sapien
gtgaaccactgtggactgtcacccttgaggcaa

SEQ ID NO: 884505 - DNA, 33 bp, Homo sapien
ctgaggagtaaatagaaaaattgcatgtgaacc

SEQ ID NO: 884506 - DNA, 33 bp, Homo sapien
ctgaggagtaaatagagaaattgcatgtgaacc

SEQ ID NO: 884507 - DNA, 33 bp, Homo sapien
ggcttacagagacggaagaggttgcctcaggcc

SEQ ID NO: 884508 - DNA, 33 bp, Homo sapien
ggcttacagagacggaggaggttgcctcaggcc

SEQ ID NO: 884509 - DNA, 33 bp, Homo sapien
agaatctcctgttagaaacgctcatagctcctg

SEQ ID NO: 884510 - DNA, 33 bp, Homo sapien
agaatctcctgttagacacgctcatagctcctg

SEQ ID NO: 884511 - DNA, 33 bp, Homo sapien
aaaatgggcaagacaaaaacagccccttcctca

SEQ ID NO: 884512 - DNA, 33 bp, Homo sapien
aaaatgggcaagacaacaacagccccttcctca

SEQ ID NO: 884513 - DNA, 33 bp, Homo sapien
agcatccaggcactgaaaggatgactaagtttc

SEQ ID NO: 884514 - DNA, 33 bp, Homo sapien
agcatccaggcactgacaggatgactaagtttc

SEQ ID NO: 884515 - DNA, 33 bp, Homo sapien
agaggctccagtcgaaagaggccacgtcctcag

SEQ ID NO: 884516 - DNA, 33 bp, Homo sapien
agaggctccagtcgaaggaggccacgtcctcag

SEQ ID NO: 884517 - DNA, 33 bp, Homo sapien
cagagggccctggcaaccgtgcagaattgaaag

SEQ ID NO: 884518 - DNA, 33 bp, Homo sapien
cagagggccctggcaagcgtgcagaattgaaag

SEQ ID NO: 884519 - DNA, 33 bp, Homo sapien
ggccactatagattccaccgtgacagtcaggat

SEQ ID NO: 884520 - DNA, 33 bp, Homo sapien
ggccactatagattccgccgtgacagtcaggat

SEQ ID NO: 884521 - DNA, 33 bp, Homo sapien
cgggaaggcttgagcaacaggaccctgcagagg

SEQ ID NO: 884522 - DNA, 33 bp, Homo sapien
cgggaaggcttgagcagcaggaccctgcagagg

SEQ ID NO: 884523 - DNA, 33 bp, Homo sapien
tcctgcttctggaaccggaaatgttcattttgg

SEQ ID NO: 884524 - DNA, 33 bp, Homo sapien
tcctgcttctggaacctgaaatgttcattttgg

SEQ ID NO: 884525 - DNA, 33 bp, Homo sapien
agtcacctgaactgtgaacctggtgggtcctct

SEQ ID NO: 884526 - DNA, 33 bp, Homo sapien
agtcacctgaactgtgtacctggtgggtcctct

SEQ ID NO: 884527 - DNA, 33 bp, Homo sapien
cactcttttgtgaagaataaatgaaacagcttc

SEQ ID NO: 884528 - DNA, 33 bp, Homo sapien
cactcttttgtgaagagtaaatgaaacagcttc

SEQ ID NO: 884529 - DNA, 33 bp, Homo sapien
gaaaacactagaatgcagacatcctgtttattg

SEQ ID NO: 884530 - DNA, 33 bp, Homo sapien
gaaaacactagaatgcggacatcctgtttattg

SEQ ID NO: 884531 - DNA, 33 bp, Homo sapien
aaatacatgggctcacagactatttgataatcc

SEQ ID NO: 884532 - DNA, 33 bp, Homo sapien
aaatacatgggctcacggactatttgataatcc

SEQ ID NO: 884533 - DNA, 33 bp, Homo sapien
gtgtgtaacccagctacagttttgcaccacaca

SEQ ID NO: 884534 - DNA, 33 bp, Homo sapien
gtgtgtaacccagctatagttttgcaccacaca

SEQ ID NO: 884535 - DNA, 33 bp, Homo sapien
tagttctcctcaccgacgtcagagtgaatgcag

SEQ ID NO: 884536 - DNA, 33 bp, Homo sapien
tagttctcctcaccgatgtcagagtgaatgcag

SEQ ID NO: 884537 - DNA, 33 bp, Homo sapien
tgtttccttcttcttccctggtcacagcaaacc

SEQ ID NO: 884538 - DNA, 33 bp, Homo sapien
tgtttccttcttcttctctggtcacagcaaacc

SEQ ID NO: 884539 - DNA, 33 bp, Homo sapien
gcttggtgagggtgaagcctcagtgagaaatac

SEQ ID NO: 884540 - DNA, 33 bp, Homo sapien
gcttggtgagggtgaatcctcagtgagaaatac

SEQ ID NO: 884541 - DNA, 33 bp, Homo sapien
aaaaaggctcctgtaaaatatgcacacaattgt

SEQ ID NO: 884542 - DNA, 33 bp, Homo sapien
aaaaaggctcctgtaacatatgcacacaattgt

SEQ ID NO: 884543 - DNA, 33 bp, Homo sapien
acgtctcctcaacaaacaaattggaaatcaaag

SEQ ID NO: 884544 - DNA, 33 bp, Homo sapien
acgtctcctcaacaaataaattggaaatcaaag

SEQ ID NO: 884545 - DNA, 33 bp, Homo sapien
caattctctctgtttacattatgtatgcatctt

SEQ ID NO: 884546 - DNA, 33 bp, Homo sapien
caattctctctgtttatattatgtatgcatctt

SEQ ID NO: 884547 - DNA, 33 bp, Homo sapien
ctttgatttacactggaaagagccaatggttct

SEQ ID NO: 884548 - DNA, 33 bp, Homo sapien
ctttgatttacactgggaagagccaatggttct

SEQ ID NO: 884549 - DNA, 33 bp, Homo sapien
ttttcagtgtttgaacccaagtaaatagccaca

SEQ ID NO: 884550 - DNA, 33 bp, Homo sapien
ttttcagtgtttgaactcaagtaaatagccaca

SEQ ID NO: 884551 - DNA, 33 bp, Homo sapien
tccttccaggaaattcactctcagaagcatgtt

SEQ ID NO: 884552 - DNA, 33 bp, Homo sapien
tccttccaggaaattcgctctcagaagcatgtt

SEQ ID NO: 884553 - DNA, 33 bp, Homo sapien
gcaggagggagcaccaacgtcggtgggatgcag

SEQ ID NO: 884554 - DNA, 33 bp, Homo sapien
gcaggagggagcaccagcgtcggtgggatgcag

SEQ ID NO: 884555 - DNA, 33 bp, Homo sapien
agaatggcatggctcacataatgttgaataatg

SEQ ID NO: 884556 - DNA, 33 bp, Homo sapien
agaatggcatggctcagataatgttgaataatg

SEQ ID NO: 884557 - DNA, 33 bp, Homo sapien
agccaaaacctgtccactcacgcgacgaggcct

SEQ ID NO: 884558 - DNA, 33 bp, Homo sapien
agccaaaacctgtccattcacgcgacgaggcct

SEQ ID NO: 884559 - DNA, 33 bp, Homo sapien
aagcagctccttttcacgccacggtttcttcct

SEQ ID NO: 884560 - DNA, 33 bp, Homo sapien
aagcagctccttttcatgccacggtttcttcct

SEQ ID NO: 884561 - DNA, 33 bp, Homo sapien
ggagaggctttagatacagtttttacacattac

SEQ ID NO: 884562 - DNA, 33 bp, Homo sapien
ggagaggctttagatagagtttttacacattac

SEQ ID NO: 884563 - DNA, 33 bp, Homo sapien
cttccctaatgtaagagaattccatccattcct

SEQ ID NO: 884564 - DNA, 33 bp, Homo sapien
cttccctaatgtaagataattccatccattcct

SEQ ID NO: 884565 - DNA, 33 bp, Homo sapien
catttattcactgtcaaatatcctttttattta

SEQ ID NO: 884566 - DNA, 33 bp, Homo sapien
catttattcactgtcagatatcctttttattta

SEQ ID NO: 884567 - DNA, 33 bp, Homo sapien
gggtttgtgttgggtacagaaagaagctattgt

SEQ ID NO: 884568 - DNA, 33 bp, Homo sapien
gggtttgtgttgggtatagaaagaagctattgt

SEQ ID NO: 884569 - DNA, 33 bp, Homo sapien
ttgccttttcctgaacaatggccagtgcagccc

SEQ ID NO: 884570 - DNA, 33 bp, Homo sapien
ttgccttttcctgaacgatggccagtgcagccc

SEQ ID NO: 884571 - DNA, 33 bp, Homo sapien
actgtgcggagcaggaaggaattcgcttggctg

SEQ ID NO: 884572 - DNA, 33 bp, Homo sapien
actgtgcggagcaggacggaattcgcttggctg

SEQ ID NO: 884573 - DNA, 33 bp, Homo sapien
taggcgtggtttcctaaacattcagcttccaac

SEQ ID NO: 884574 - DNA, 33 bp, Homo sapien
taggcgtggtttcctagacattcagcttccaac

SEQ ID NO: 884575 - DNA, 33 bp, Homo sapien
ttagtataaaaagtaaagcataggccgggcgtg

SEQ ID NO: 884576 - DNA, 33 bp, Homo sapien
ttagtataaaaagtaaggcataggccgggcgtg

SEQ ID NO: 884577 - DNA, 33 bp, Homo sapien
gtttacctgtgtaaaaatgtgcagggtaaggag

SEQ ID NO: 884578 - DNA, 33 bp, Homo sapien
gtttacctgtgtaaaagtgtgcagggtaaggag

SEQ ID NO: 884579 - DNA, 33 bp, Homo sapien
gtgtaacagaggtaacacaagtaaacatatctt

SEQ ID NO: 884580 - DNA, 33 bp, Homo sapien
gtgtaacagaggtaacgcaagtaaacatatctt

SEQ ID NO: 884581 - DNA, 33 bp, Homo sapien
tagtgactctccttgaagtataaaataaagcca

SEQ ID NO: 884582 - DNA, 33 bp, Homo sapien
tagtgactctccttgaggtataaaataaagcca

SEQ ID NO: 884583 - DNA, 33 bp, Homo sapien
tttgagggtgatactgcaaccgcttttgtctgt

SEQ ID NO: 884584 - DNA, 33 bp, Homo sapien
tttgagggtgatactgtaaccgcttttgtctgt

SEQ ID NO: 884585 - DNA, 33 bp, Homo sapien
accagtttagctagaaatatgatataaaagagg

SEQ ID NO: 884586 - DNA, 33 bp, Homo sapien
accagtttagctagaactatgatataaaagagg

SEQ ID NO: 884587 - DNA, 33 bp, Homo sapien
catttcagtgttataaccagaatctgcccaatg

SEQ ID NO: 884588 - DNA, 33 bp, Homo sapien
catttcagtgttataatcagaatctgcccaatg

SEQ ID NO: 884589 - DNA, 33 bp, Homo sapien
ttcaccacctcacatacgtactgtttttgtggt

SEQ ID NO: 884590 - DNA, 33 bp, Homo sapien
ttcaccacctcacatatgtactgtttttgtggt

SEQ ID NO: 884591 - DNA, 33 bp, Homo sapien
ccatgtgattcctgtacgcccatttcctcgtag

SEQ ID NO: 884592 - DNA, 33 bp, Homo sapien
ccatgtgattcctgtaggcccatttcctcgtag

SEQ ID NO: 884593 - DNA, 33 bp, Homo sapien
atgctaagaaatcgacagacttttcaggaaaaa

SEQ ID NO: 884594 - DNA, 33 bp, Homo sapien
atgctaagaaatcgaccgacttttcaggaaaaa

SEQ ID NO: 884595 - DNA, 33 bp, Homo sapien
cattttggttcttaaaataatgtgtttgtattc

SEQ ID NO: 884596 - DNA, 33 bp, Homo sapien
cattttggttcttaaagtaatgtgtttgtattc

SEQ ID NO: 884597 - DNA, 33 bp, Homo sapien
tctgttggtttctacagaaaagtgaagagtaag

SEQ ID NO: 884598 - DNA, 33 bp, Homo sapien
tctgttggtttctacataaaagtgaagagtaag

SEQ ID NO: 884599 - DNA, 33 bp, Homo sapien
ggtttggcatcagagcaaaggcagaactggcac

SEQ ID NO: 884600 - DNA, 33 bp, Homo sapien
ggtttggcatcagagcgaaggcagaactggcac

SEQ ID NO: 884601 - DNA, 33 bp, Homo sapien
cacactgaccaatccggatcctgaggcgcataa

SEQ ID NO: 884602 - DNA, 33 bp, Homo sapien
cacactgaccaatccgtatcctgaggcgcataa

SEQ ID NO: 884603 - DNA, 33 bp, Homo sapien
ttcacacaggtaatcacgtcaaaacgaggtcag

SEQ ID NO: 884604 - DNA, 33 bp, Homo sapien
ttcacacaggtaatcatgtcaaaacgaggtcag

SEQ ID NO: 884605 - DNA, 33 bp, Homo sapien
cagcaagcactggtcaccagtaacaacggcctc

SEQ ID NO: 884606 - DNA, 33 bp, Homo sapien
cagcaagcactggtcatcagtaacaacggcctc

SEQ ID NO: 884607 - DNA, 33 bp, Homo sapien
ccaaaatggatatagcaaaaagacaggctgaca

SEQ ID NO: 884608 - DNA, 33 bp, Homo sapien
ccaaaatggatatagcgaaaagacaggctgaca

SEQ ID NO: 884609 - DNA, 33 bp, Homo sapien
gccagaactccagaacacctacgtgggaacgtt

SEQ ID NO: 884610 - DNA, 33 bp, Homo sapien
gccagaactccagaacgcctacgtgggaacgtt

SEQ ID NO: 884611 - DNA, 33 bp, Homo sapien
gaagttgaaggaatgcaatcagtcaagttggga

SEQ ID NO: 884612 - DNA, 33 bp, Homo sapien
gaagttgaaggaatgcgatcagtcaagttggga

SEQ ID NO: 884613 - DNA, 33 bp, Homo sapien
aatggaaaatgaagtgcacatgatcatattctg

SEQ ID NO: 884614 - DNA, 33 bp, Homo sapien
aatggaaaatgaagtgtacatgatcatattctg

SEQ ID NO: 884615 - DNA, 33 bp, Homo sapien
aattcacaaactaataataagtgtgagaagggg

SEQ ID NO: 884616 - DNA, 33 bp, Homo sapien
aattcacaaactaatagtaagtgtgagaagggg

SEQ ID NO: 884617 - DNA, 33 bp, Homo sapien
caaaaaagccaaagaagagggacctcctcctgc

SEQ ID NO: 884618 - DNA, 33 bp, Homo sapien
caaaaaagccaaagaatagggacctcctcctgc

SEQ ID NO: 884619 - DNA, 33 bp, Homo sapien
attatccacaagtccaactcttgtcaacttggc

SEQ ID NO: 884620 - DNA, 33 bp, Homo sapien
attatccacaagtccacctcttgtcaacttggc

SEQ ID NO: 884621 - DNA, 33 bp, Homo sapien
gaggcatcacccacaagtcgacagcagcactgc

SEQ ID NO: 884622 - DNA, 33 bp, Homo sapien
gaggcatcacccacaattcgacagcagcactgc

SEQ ID NO: 884623 - DNA, 33 bp, Homo sapien
ggatgaagacgaaggcacatccccttaaagaag

SEQ ID NO: 884624 - DNA, 33 bp, Homo sapien
ggatgaagacgaaggcccatccccttaaagaag

SEQ ID NO: 884625 - DNA, 33 bp, Homo sapien
ttttttttgacactaaagatagcacaatgtaga

SEQ ID NO: 884626 - DNA, 33 bp, Homo sapien
ttttttttgacactaacgatagcacaatgtaga

SEQ ID NO: 884627 - DNA, 33 bp, Homo sapien
atccccaaagcggtaacgatgttatcgacctca

SEQ ID NO: 884628 - DNA, 33 bp, Homo sapien
atccccaaagcggtaatgatgttatcgacctca

SEQ ID NO: 884629 - DNA, 33 bp, Homo sapien
ttctataaaacagagacgatcgcacctgtcttg

SEQ ID NO: 884630 - DNA, 33 bp, Homo sapien
ttctataaaacagagatgatcgcacctgtcttg

SEQ ID NO: 884631 - DNA, 33 bp, Homo sapien
gagagatgagatctgcaagtgcattcatccaca

SEQ ID NO: 884632 - DNA, 33 bp, Homo sapien
gagagatgagatctgcgagtgcattcatccaca

SEQ ID NO: 884633 - DNA, 33 bp, Homo sapien
gtcgctgaggatttaactaagcagacaagtgag

SEQ ID NO: 884634 - DNA, 33 bp, Homo sapien
gtcgctgaggatttaattaagcagacaagtgag

SEQ ID NO: 884635 - DNA, 33 bp, Homo sapien
gttagaatgtagacaaaaaattggagccagaaa

SEQ ID NO: 884636 - DNA, 33 bp, Homo sapien
gttagaatgtagacaagaaattggagccagaaa

SEQ ID NO: 884637 - DNA, 33 bp, Homo sapien
tccttagctcctttcccctctataaaacagtgc

SEQ ID NO: 884638 - DNA, 33 bp, Homo sapien
tccttagctcctttcctctctataaaacagtgc

SEQ ID NO: 884639 - DNA, 33 bp, Homo sapien
aaaggctaacatggcccctggatattattacaa

SEQ ID NO: 884640 - DNA, 33 bp, Homo sapien
aaaggctaacatggcctctggatattattacaa

SEQ ID NO: 884641 - DNA, 33 bp, Homo sapien
tctttgcaattgtgaccggtgatgcaattaaca

SEQ ID NO: 884642 - DNA, 33 bp, Homo sapien
tctttgcaattgtgactggtgatgcaattaaca

SEQ ID NO: 884643 - DNA, 33 bp, Homo sapien
gtgatattttaagtcaaggatacgatgtgcatc

SEQ ID NO: 884644 - DNA, 33 bp, Homo sapien
gtgatattttaagtcacggatacgatgtgcatc

SEQ ID NO: 884645 - DNA, 33 bp, Homo sapien
atgatgcctgagcaacacgcctgggcctgcacc

SEQ ID NO: 884646 - DNA, 33 bp, Homo sapien
atgatgcctgagcaacgcgcctgggcctgcacc

SEQ ID NO: 884647 - DNA, 33 bp, Homo sapien
aggacccaggttctcaatcgaatcgtctgggtc

SEQ ID NO: 884648 - DNA, 33 bp, Homo sapien
aggacccaggttctcagtcgaatcgtctgggtc

SEQ ID NO: 884649 - DNA, 33 bp, Homo sapien
acagatgatgctgaacagacattaactttattt

SEQ ID NO: 884650 - DNA, 33 bp, Homo sapien
acagatgatgctgaacggacattaactttattt

SEQ ID NO: 884651 - DNA, 33 bp, Homo sapien
ggcagccctgaagttcacaatgcccgggaagcg

SEQ ID NO: 884652 - DNA, 33 bp, Homo sapien
ggcagccctgaagttcgcaatgcccgggaagcg

SEQ ID NO: 884653 - DNA, 33 bp, Homo sapien
caccgatgagcggtcaaggccgggccgagctgg

SEQ ID NO: 884654 - DNA, 33 bp, Homo sapien
caccgatgagcggtcagggccgggccgagctgg

SEQ ID NO: 884655 - DNA, 33 bp, Homo sapien
ccaggctctgtgaccaatcgaacaaatcctaaa

SEQ ID NO: 884656 - DNA, 33 bp, Homo sapien
ccaggctctgtgaccagtcgaacaaatcctaaa

SEQ ID NO: 884657 - DNA, 33 bp, Homo sapien
tcgggttattcaatcaccgccctgcattggcag

SEQ ID NO: 884658 - DNA, 33 bp, Homo sapien
tcgggttattcaatcatcgccctgcattggcag

SEQ ID NO: 884659 - DNA, 33 bp, Homo sapien
gcccctgacctttaccactgggccattttgtcg

SEQ ID NO: 884660 - DNA, 33 bp, Homo sapien
gcccctgacctttaccgctgggccattttgtcg

SEQ ID NO: 884661 - DNA, 33 bp, Homo sapien
agagcaaacaattgaacgagatgaatttgtttt

SEQ ID NO: 884662 - DNA, 33 bp, Homo sapien
agagcaaacaattgaatgagatgaatttgtttt

SEQ ID NO: 884663 - DNA, 33 bp, Homo sapien
ctagatactatgacaaacaaggtaaatctcttt

SEQ ID NO: 884664 - DNA, 33 bp, Homo sapien
ctagatactatgacaagcaaggtaaatctcttt

SEQ ID NO: 884665 - DNA, 33 bp, Homo sapien
aggattgctgaagctaactgccagatgatgcag

SEQ ID NO: 884666 - DNA, 33 bp, Homo sapien
aggattgctgaagctacctgccagatgatgcag

SEQ ID NO: 884667 - DNA, 33 bp, Homo sapien
ctgcatctgagaaaaaacaagtcagtctgtttc

SEQ ID NO: 884668 - DNA, 33 bp, Homo sapien
ctgcatctgagaaaaatcaagtcagtctgtttc

SEQ ID NO: 884669 - DNA, 33 bp, Homo sapien
ataactacagccaaggcatcaaatcacatctga

SEQ ID NO: 884670 - DNA, 33 bp, Homo sapien
ataactacagccaaggtatcaaatcacatctga

SEQ ID NO: 884671 - DNA, 33 bp, Homo sapien
gtttttacaagtgatcgcctatgaagtcttagc

SEQ ID NO: 884672 - DNA, 33 bp, Homo sapien
gtttttacaagtgatctcctatgaagtcttagc

SEQ ID NO: 884673 - DNA, 33 bp, Homo sapien
tagatcattcgtgtaacacaaataaacctccag

SEQ ID NO: 884674 - DNA, 33 bp, Homo sapien
tagatcattcgtgtaatacaaataaacctccag

SEQ ID NO: 884675 - DNA, 33 bp, Homo sapien
cagagttctgaaaacacaaactccacaaatttc

SEQ ID NO: 884676 - DNA, 33 bp, Homo sapien
cagagttctgaaaacataaactccacaaatttc

SEQ ID NO: 884677 - DNA, 33 bp, Homo sapien
agagattttgttgaaaagaaagacagccctaaa

SEQ ID NO: 884678 - DNA, 33 bp, Homo sapien
agagattttgttgaaacgaaagacagccctaaa

SEQ ID NO: 884679 - DNA, 33 bp, Homo sapien
ccatgttcccttcactcagactcgcccgttcag

SEQ ID NO: 884680 - DNA, 33 bp, Homo sapien
ccatgttcccttcactgagactcgcccgttcag

SEQ ID NO: 884681 - DNA, 33 bp, Homo sapien
gagacaggaggtagacagatagttctaggggtt

SEQ ID NO: 884682 - DNA, 33 bp, Homo sapien
gagacaggaggtagacggatagttctaggggtt

SEQ ID NO: 884683 - DNA, 33 bp, Homo sapien
agagcttcagtaagcaaccgactttgtggtcct

SEQ ID NO: 884684 - DNA, 33 bp, Homo sapien
agagcttcagtaagcagccgactttgtggtcct

SEQ ID NO: 884685 - DNA, 33 bp, Homo sapien
tggggaagagagtagacggccctttgcatatag

SEQ ID NO: 884686 - DNA, 33 bp, Homo sapien
tggggaagagagtagatggccctttgcatatag

SEQ ID NO: 884687 - DNA, 33 bp, Homo sapien
gttaataccgaggttaacatagaagcagactct

SEQ ID NO: 884688 - DNA, 33 bp, Homo sapien
gttaataccgaggttaccatagaagcagactct

SEQ ID NO: 884689 - DNA, 33 bp, Homo sapien
aaacagctcctatctacggctctttttaaatct

SEQ ID NO: 884690 - DNA, 33 bp, Homo sapien
aaacagctcctatctatggctctttttaaatct

SEQ ID NO: 884691 - DNA, 33 bp, Homo sapien
gatggatggcgccttgaagttactccgttttct

SEQ ID NO: 884692 - DNA, 33 bp, Homo sapien
gatggatggcgccttgcagttactccgttttct

SEQ ID NO: 884693 - DNA, 33 bp, Homo sapien
attagtctcttcacctcaaaaatgtcatcatag

SEQ ID NO: 884694 - DNA, 33 bp, Homo sapien
attagtctcttcacctgaaaaatgtcatcatag

SEQ ID NO: 884695 - DNA, 33 bp, Homo sapien
aacttctcaagttaaaattgaaacatccactag

SEQ ID NO: 884696 - DNA, 33 bp, Homo sapien
aacttctcaagttaaagttgaaacatccactag

SEQ ID NO: 884697 - DNA, 33 bp, Homo sapien
cacttgataagggtgactacagagaaagatgat

SEQ ID NO: 884698 - DNA, 33 bp, Homo sapien
cacttgataagggtgattacagagaaagatgat

SEQ ID NO: 884699 - DNA, 33 bp, Homo sapien
gcctggaacgtctgcaaatgtgtttagagctcg

SEQ ID NO: 884700 - DNA, 33 bp, Homo sapien
gcctggaacgtctgcagatgtgtttagagctcg

SEQ ID NO: 884701 - DNA, 33 bp, Homo sapien
aagtcagtaaagtcacaatggtggaggatgatc

SEQ ID NO: 884702 - DNA, 33 bp, Homo sapien
aagtcagtaaagtcacgatggtggaggatgatc

SEQ ID NO: 884703 - DNA, 33 bp, Homo sapien
ggagatccgtggggtcagaaccacttttataga

SEQ ID NO: 884704 - DNA, 33 bp, Homo sapien
ggagatccgtggggtcggaaccacttttataga

SEQ ID NO: 884705 - DNA, 33 bp, Homo sapien
gtacctggaaaatagcagaatctctccacatgg

SEQ ID NO: 884706 - DNA, 33 bp, Homo sapien
gtacctggaaaatagcggaatctctccacatgg

SEQ ID NO: 884707 - DNA, 33 bp, Homo sapien
tactttctctccaaagaaactggatccacgcat

SEQ ID NO: 884708 - DNA, 33 bp, Homo sapien
tactttctctccaaaggaactggatccacgcat

SEQ ID NO: 884709 - DNA, 33 bp, Homo sapien
tccgacacccccctggaagagtgtaaaccgcag

SEQ ID NO: 884710 - DNA, 33 bp, Homo sapien
tccgacacccccctggcagagtgtaaaccgcag

SEQ ID NO: 884711 - DNA, 33 bp, Homo sapien
atgcatggtgacatgaagataagagaggtcaca

SEQ ID NO: 884712 - DNA, 33 bp, Homo sapien
atgcatggtgacatgaggataagagaggtcaca

SEQ ID NO: 884713 - DNA, 33 bp, Homo sapien
gtcacaatgacgaaaacgtgagcgttccctgcc

SEQ ID NO: 884714 - DNA, 33 bp, Homo sapien
gtcacaatgacgaaaatgtgagcgttccctgcc

SEQ ID NO: 884715 - DNA, 33 bp, Homo sapien
gccactgctgaaccacaaacatcaggacaccca

SEQ ID NO: 884716 - DNA, 33 bp, Homo sapien
gccactgctgaaccaccaacatcaggacaccca

SEQ ID NO: 884717 - DNA, 33 bp, Homo sapien
gctatagtttctcccacgacctttcaagcaaaa

SEQ ID NO: 884718 - DNA, 33 bp, Homo sapien
gctatagtttctcccatgacctttcaagcaaaa

SEQ ID NO: 884719 - DNA, 33 bp, Homo sapien
catttcaccctcaccccagatagcaccctttga

SEQ ID NO: 884720 - DNA, 33 bp, Homo sapien
catttcaccctcaccctagatagcaccctttga

SEQ ID NO: 884721 - DNA, 33 bp, Homo sapien
tgcctctcctggtgcccggcaagtctccccttt

SEQ ID NO: 884722 - DNA, 33 bp, Homo sapien
tgcctctcctggtgcctggcaagtctccccttt

SEQ ID NO: 884723 - DNA, 33 bp, Homo sapien
gcatctacttttgcaggaaagcattttgtacct

SEQ ID NO: 884724 - DNA, 33 bp, Homo sapien
gcatctacttttgcagtaaagcattttgtacct

SEQ ID NO: 884725 - DNA, 33 bp, Homo sapien
agtagagattgagtcaacaaaccaaggtcaaca

SEQ ID NO: 884726 - DNA, 33 bp, Homo sapien
agtagagattgagtcagcaaaccaaggtcaaca

SEQ ID NO: 884727 - DNA, 33 bp, Homo sapien
ttggcctggacctgccaggagagtcattcttct

SEQ ID NO: 884728 - DNA, 33 bp, Homo sapien
ttggcctggacctgccgggagagtcattcttct

SEQ ID NO: 884729 - DNA, 33 bp, Homo sapien
tgtgggccaggtctccagacactctgtagtaga

SEQ ID NO: 884730 - DNA, 33 bp, Homo sapien
tgtgggccaggtctccggacactctgtagtaga

SEQ ID NO: 884731 - DNA, 33 bp, Homo sapien
ttccacattaggaaacaggagtatgtaatttgg

SEQ ID NO: 884732 - DNA, 33 bp, Homo sapien
ttccacattaggaaacgggagtatgtaatttgg

SEQ ID NO: 884733 - DNA, 33 bp, Homo sapien
gttggatacatgctgcgagttttgcattttcca

SEQ ID NO: 884734 - DNA, 33 bp, Homo sapien
gttggatacatgctgctagttttgcattttcca

SEQ ID NO: 884735 - DNA, 33 bp, Homo sapien
tctcagccctacgtccacaaacagcagtgcaga

SEQ ID NO: 884736 - DNA, 33 bp, Homo sapien
tctcagccctacgtcctcaaacagcagtgcaga

SEQ ID NO: 884737 - DNA, 33 bp, Homo sapien
atggctcgctgcacaccggctttgccacatgga

SEQ ID NO: 884738 - DNA, 33 bp, Homo sapien
atggctcgctgcacactggctttgccacatgga

SEQ ID NO: 884739 - DNA, 33 bp, Homo sapien
aagctgtcacaatacaatgcttggccacttgtc

SEQ ID NO: 884740 - DNA, 33 bp, Homo sapien
aagctgtcacaatacagtgcttggccacttgtc

SEQ ID NO: 884741 - DNA, 33 bp, Homo sapien
gaaaaaagaatgatacgaagtcctgagattgtt

SEQ ID NO: 884742 - DNA, 33 bp, Homo sapien
gaaaaaagaatgatactaagtcctgagattgtt

SEQ ID NO: 884743 - DNA, 33 bp, Homo sapien
cctggcttgaatctcaaatggaacgaggagcag

SEQ ID NO: 884744 - DNA, 33 bp, Homo sapien
cctggcttgaatctcagatggaacgaggagcag

SEQ ID NO: 884745 - DNA, 33 bp, Homo sapien
cggggggctccaatgacgattcaatgactgaga

SEQ ID NO: 884746 - DNA, 33 bp, Homo sapien
cggggggctccaatgatgattcaatgactgaga

SEQ ID NO: 884747 - DNA, 33 bp, Homo sapien
ccagggtccccgttccaaacttcgcctcacagc

SEQ ID NO: 884748 - DNA, 33 bp, Homo sapien
ccagggtccccgttccgaacttcgcctcacagc

SEQ ID NO: 884749 - DNA, 33 bp, Homo sapien
ttatctgaaaatcctccgaaaggttgagaaatt

SEQ ID NO: 884750 - DNA, 33 bp, Homo sapien
ttatctgaaaatcctctgaaaggttgagaaatt

SEQ ID NO: 884751 - DNA, 33 bp, Homo sapien
aaattagccttctacagaaatgcagagactggt

SEQ ID NO: 884752 - DNA, 33 bp, Homo sapien
aaattagccttctacataaatgcagagactggt

SEQ ID NO: 884753 - DNA, 33 bp, Homo sapien
cagcctgcaccacccaagaatggaagaagatta

SEQ ID NO: 884754 - DNA, 33 bp, Homo sapien
cagcctgcaccacccaggaatggaagaagatta

SEQ ID NO: 884755 - DNA, 33 bp, Homo sapien
tttcttcaattaaaccaaagtgaatgttgactc

SEQ ID NO: 884756 - DNA, 33 bp, Homo sapien
tttcttcaattaaaccgaagtgaatgttgactc

SEQ ID NO: 884757 - DNA, 33 bp, Homo sapien
aaacaagacaaactaaaagaaaatcccaagaaa

SEQ ID NO: 884758 - DNA, 33 bp, Homo sapien
aaacaagacaaactaacagaaaatcccaagaaa

SEQ ID NO: 884759 - DNA, 33 bp, Homo sapien
gcagcctcccaccatccgaacgactctctggga

SEQ ID NO: 884760 - DNA, 33 bp, Homo sapien
gcagcctcccaccatcggaacgactctctggga

SEQ ID NO: 884761 - DNA, 33 bp, Homo sapien
aggagaataatgtccacgtgtaggaggaaaacc

SEQ ID NO: 884762 - DNA, 33 bp, Homo sapien
aggagaataatgtccatgtgtaggaggaaaacc

SEQ ID NO: 884763 - DNA, 33 bp, Homo sapien
tagacacattttctaggcaaatagtatagttgg

SEQ ID NO: 884764 - DNA, 33 bp, Homo sapien
tagacacattttctagtcaaatagtatagttgg

SEQ ID NO: 884765 - DNA, 33 bp, Homo sapien
aatggacaccatttcaaaaatcttggattcaac

SEQ ID NO: 884766 - DNA, 33 bp, Homo sapien
aatggacaccatttcagaaatcttggattcaac

SEQ ID NO: 884767 - DNA, 33 bp, Homo sapien
attccaaaaaggagcccgctgtaattgattgga

SEQ ID NO: 884768 - DNA, 33 bp, Homo sapien
attccaaaaaggagcctgctgtaattgattgga

SEQ ID NO: 884769 - DNA, 33 bp, Homo sapien
tttgcccaagatcacaaactagtagagcatgcc

SEQ ID NO: 884770 - DNA, 33 bp, Homo sapien
tttgcccaagatcacagactagtagagcatgcc

SEQ ID NO: 884771 - DNA, 33 bp, Homo sapien
ttctttcttctttgggaaattatggatcctatg

SEQ ID NO: 884772 - DNA, 33 bp, Homo sapien
ttctttcttctttggggaattatggatcctatg

SEQ ID NO: 884773 - DNA, 33 bp, Homo sapien
tgttcaattgcttccaagagaaaaagcttgcag

SEQ ID NO: 884774 - DNA, 33 bp, Homo sapien
tgttcaattgcttccatgagaaaaagcttgcag

SEQ ID NO: 884775 - DNA, 33 bp, Homo sapien
ggctaaagacaccgaccccagtgctgcctctcc

SEQ ID NO: 884776 - DNA, 33 bp, Homo sapien
ggctaaagacaccgactccagtgctgcctctcc

SEQ ID NO: 884777 - DNA, 33 bp, Homo sapien
agggcatgattcctaacgtattggtatcacacc

SEQ ID NO: 884778 - DNA, 33 bp, Homo sapien
agggcatgattcctaatgtattggtatcacacc

SEQ ID NO: 884779 - DNA, 33 bp, Homo sapien
taagtcagtttttcccagcttgcttcatcattt

SEQ ID NO: 884780 - DNA, 33 bp, Homo sapien
taagtcagtttttcccggcttgcttcatcattt

SEQ ID NO: 884781 - DNA, 33 bp, Homo sapien
gaatctctgaaagccaaaaagtggctcaaaaag

SEQ ID NO: 884782 - DNA, 33 bp, Homo sapien
gaatctctgaaagccagaaagtggctcaaaaag

SEQ ID NO: 884783 - DNA, 33 bp, Homo sapien
aataatcttaactacacctcacaggcaagcagc

SEQ ID NO: 884784 - DNA, 33 bp, Homo sapien
aataatcttaactacatctcacaggcaagcagc

SEQ ID NO: 884785 - DNA, 33 bp, Homo sapien
gcgaaatggaagcccaaaaatgctgagggactg

SEQ ID NO: 884786 - DNA, 33 bp, Homo sapien
gcgaaatggaagcccagaaatgctgagggactg

SEQ ID NO: 884787 - DNA, 33 bp, Homo sapien
cctgacaactctgtgacaaactattaggaatgt

SEQ ID NO: 884788 - DNA, 33 bp, Homo sapien
cctgacaactctgtgataaactattaggaatgt

SEQ ID NO: 884789 - DNA, 33 bp, Homo sapien
acaggcatgaaaacccaggagtggtctgcacag

SEQ ID NO: 884790 - DNA, 33 bp, Homo sapien
acaggcatgaaaacccgggagtggtctgcacag

SEQ ID NO: 884791 - DNA, 33 bp, Homo sapien
tagcttctggggtagaagtgagatttagccacg

SEQ ID NO: 884792 - DNA, 33 bp, Homo sapien
tagcttctggggtagatgtgagatttagccacg

SEQ ID NO: 884793 - DNA, 33 bp, Homo sapien
tttccaataaacttccccgctgactttcctctc

SEQ ID NO: 884794 - DNA, 33 bp, Homo sapien
tttccaataaacttcctcgctgactttcctctc

SEQ ID NO: 884795 - DNA, 33 bp, Homo sapien
tgacagatggaaacacacccactcctgttggag

SEQ ID NO: 884796 - DNA, 33 bp, Homo sapien
tgacagatggaaacacccccactcctgttggag

SEQ ID NO: 884797 - DNA, 33 bp, Homo sapien
gggagcatccaatcacaagagcatctggacctg

SEQ ID NO: 884798 - DNA, 33 bp, Homo sapien
gggagcatccaatcacgagagcatctggacctg

SEQ ID NO: 884799 - DNA, 33 bp, Homo sapien
atggtattttatctcacgtccctcctagatggg

SEQ ID NO: 884800 - DNA, 33 bp, Homo sapien
atggtattttatctcatgtccctcctagatggg

SEQ ID NO: 884801 - DNA, 33 bp, Homo sapien
tctaatgaaataatgacgttagtgggttggggt

SEQ ID NO: 884802 - DNA, 33 bp, Homo sapien
tctaatgaaataatgatgttagtgggttggggt

SEQ ID NO: 884803 - DNA, 33 bp, Homo sapien
tggaaggtgaacgggaacccgcatatggcatgg

SEQ ID NO: 884804 - DNA, 33 bp, Homo sapien
tggaaggtgaacgggagcccgcatatggcatgg

SEQ ID NO: 884805 - DNA, 33 bp, Homo sapien
aacagtacttcgcttacgagttttaattgctat

SEQ ID NO: 884806 - DNA, 33 bp, Homo sapien
aacagtacttcgcttatgagttttaattgctat

SEQ ID NO: 884807 - DNA, 33 bp, Homo sapien
tgatggcgaaattccaaatgacttagaagtgtg

SEQ ID NO: 884808 - DNA, 33 bp, Homo sapien
tgatggcgaaattccagatgacttagaagtgtg

SEQ ID NO: 884809 - DNA, 33 bp, Homo sapien
gagaagttgagtaagacggagactgagaattga

SEQ ID NO: 884810 - DNA, 33 bp, Homo sapien
gagaagttgagtaagatggagactgagaattga

SEQ ID NO: 884811 - DNA, 33 bp, Homo sapien
caaagggactaagccaccatagtgccagatgga

SEQ ID NO: 884812 - DNA, 33 bp, Homo sapien
caaagggactaagccatcatagtgccagatgga

SEQ ID NO: 884813 - DNA, 33 bp, Homo sapien
tggagttataaaccaacaatcatggatgaaaac

SEQ ID NO: 884814 - DNA, 33 bp, Homo sapien
tggagttataaaccaagaatcatggatgaaaac

SEQ ID NO: 884815 - DNA, 33 bp, Homo sapien
gaaaacctgcagctacaattaggtattcttttt

SEQ ID NO: 884816 - DNA, 33 bp, Homo sapien
gaaaacctgcagctaccattaggtattcttttt

SEQ ID NO: 884817 - DNA, 33 bp, Homo sapien
ggagcaaggaaattgaactgtataggaggaata

SEQ ID NO: 884818 - DNA, 33 bp, Homo sapien
ggagcaaggaaattgagctgtataggaggaata

SEQ ID NO: 884819 - DNA, 33 bp, Homo sapien
ggtgatactgagatcaatacctaaagctgcagc

SEQ ID NO: 884820 - DNA, 33 bp, Homo sapien
ggtgatactgagatcagtacctaaagctgcagc

SEQ ID NO: 884821 - DNA, 33 bp, Homo sapien
ctatcgacagcttgaaactatgcaggtctttgg

SEQ ID NO: 884822 - DNA, 33 bp, Homo sapien
ctatcgacagcttgaacctatgcaggtctttgg

SEQ ID NO: 884823 - DNA, 33 bp, Homo sapien
gctcataaatgacgatgacaactcatccacaga

SEQ ID NO: 884824 - DNA, 33 bp, Homo sapien
gctcataaatgacgattacaactcatccacaga

SEQ ID NO: 884825 - DNA, 33 bp, Homo sapien
tcgaggcagtgaacgccattcctcctggatgcc

SEQ ID NO: 884826 - DNA, 33 bp, Homo sapien
tcgaggcagtgaacgcgattcctcctggatgcc

SEQ ID NO: 884827 - DNA, 33 bp, Homo sapien
tctgctctggtggtcaaacatggacaaaagggt

SEQ ID NO: 884828 - DNA, 33 bp, Homo sapien
tctgctctggtggtcatacatggacaaaagggt

SEQ ID NO: 884829 - DNA, 33 bp, Homo sapien
ctcagcatatgcacaccggctatgaggaataga

SEQ ID NO: 884830 - DNA, 33 bp, Homo sapien
ctcagcatatgcacactggctatgaggaataga

SEQ ID NO: 884831 - DNA, 33 bp, Homo sapien
cactgtgtgtagacataaacttgcacagtcttt

SEQ ID NO: 884832 - DNA, 33 bp, Homo sapien
cactgtgtgtagacatcaacttgcacagtcttt

SEQ ID NO: 884833 - DNA, 33 bp, Homo sapien
tggaactacaaaaaaaatcccacatagctaaag

SEQ ID NO: 884834 - DNA, 33 bp, Homo sapien
tggaactacaaaaaaagtcccacatagctaaag

SEQ ID NO: 884835 - DNA, 33 bp, Homo sapien
tagctcatgtaactaaacatcgttcactgccct

SEQ ID NO: 884836 - DNA, 33 bp, Homo sapien
tagctcatgtaactaagcatcgttcactgccct

SEQ ID NO: 884837 - DNA, 33 bp, Homo sapien
aattaggtaagtaagagctgccatttattaagg

SEQ ID NO: 884838 - DNA, 33 bp, Homo sapien
aattaggtaagtaagatctgccatttattaagg

SEQ ID NO: 884839 - DNA, 33 bp, Homo sapien
ctgaaaaattgactcaatccatcacaaatagct

SEQ ID NO: 884840 - DNA, 33 bp, Homo sapien
ctgaaaaattgactcagtccatcacaaatagct

SEQ ID NO: 884841 - DNA, 33 bp, Homo sapien
attctctagaacttcactagccaatttcatatt

SEQ ID NO: 884842 - DNA, 33 bp, Homo sapien
attctctagaacttcattagccaatttcatatt

SEQ ID NO: 884843 - DNA, 33 bp, Homo sapien
tccaagtattgtcagacgttgcacattttggca

SEQ ID NO: 884844 - DNA, 33 bp, Homo sapien
tccaagtattgtcagatgttgcacattttggca

SEQ ID NO: 884845 - DNA, 33 bp, Homo sapien
ttcttaacagtcccagaagctgggcacagatcc

SEQ ID NO: 884846 - DNA, 33 bp, Homo sapien
ttcttaacagtcccagcagctgggcacagatcc

SEQ ID NO: 884847 - DNA, 33 bp, Homo sapien
gccggccactcgatacgggacttagaggcccca

SEQ ID NO: 884848 - DNA, 33 bp, Homo sapien
gccggccactcgatactggacttagaggcccca

SEQ ID NO: 884849 - DNA, 33 bp, Homo sapien
tgcctgcttctagcaccagaaatccgaagcatt

SEQ ID NO: 884850 - DNA, 33 bp, Homo sapien
tgcctgcttctagcacgagaaatccgaagcatt

SEQ ID NO: 884851 - DNA, 33 bp, Homo sapien
ttttgaaaattaaaaacggcagttgaaatgtta

SEQ ID NO: 884852 - DNA, 33 bp, Homo sapien
ttttgaaaattaaaaatggcagttgaaatgtta

SEQ ID NO: 884853 - DNA, 33 bp, Homo sapien
atggtctcaaaggaccacatactctatggccca

SEQ ID NO: 884854 - DNA, 33 bp, Homo sapien
atggtctcaaaggaccgcatactctatggccca

SEQ ID NO: 884855 - DNA, 33 bp, Homo sapien
tcattcagacttgggaactagaactggcagaca

SEQ ID NO: 884856 - DNA, 33 bp, Homo sapien
tcattcagacttgggagctagaactggcagaca

SEQ ID NO: 884857 - DNA, 33 bp, Homo sapien
aaatgtatctgagaaaagtaagttgcaaatcta

SEQ ID NO: 884858 - DNA, 33 bp, Homo sapien
aaatgtatctgagaaatgtaagttgcaaatcta

SEQ ID NO: 884859 - DNA, 33 bp, Homo sapien
gctggagctaatggagcatgaaagctgatgagc

SEQ ID NO: 884860 - DNA, 33 bp, Homo sapien
gctggagctaatggaggatgaaagctgatgagc

SEQ ID NO: 884861 - DNA, 33 bp, Homo sapien
gaggaagtcgggaacacagcatctaaacctcca

SEQ ID NO: 884862 - DNA, 33 bp, Homo sapien
gaggaagtcgggaacatagcatctaaacctcca

SEQ ID NO: 884863 - DNA, 33 bp, Homo sapien
ctagttcaggcagttacagctttccagcaacgg

SEQ ID NO: 884864 - DNA, 33 bp, Homo sapien
ctagttcaggcagttagagctttccagcaacgg

SEQ ID NO: 884865 - DNA, 33 bp, Homo sapien
gtggcctatggcaatggatttcgtttgcttgtt

SEQ ID NO: 884866 - DNA, 33 bp, Homo sapien
gtggcctatggcaatgtatttcgtttgcttgtt

SEQ ID NO: 884867 - DNA, 33 bp, Homo sapien
gagatgaagaaaacacaaacacttctaagtaga

SEQ ID NO: 884868 - DNA, 33 bp, Homo sapien
gagatgaagaaaacacgaacacttctaagtaga

SEQ ID NO: 884869 - DNA, 33 bp, Homo sapien
gatgaaggaatgttccagaaatcagaaaagctg

SEQ ID NO: 884870 - DNA, 33 bp, Homo sapien
gatgaaggaatgttccggaaatcagaaaagctg

SEQ ID NO: 884871 - DNA, 33 bp, Homo sapien
ccctgagctgatcagcacagttttaattgttca

SEQ ID NO: 884872 - DNA, 33 bp, Homo sapien
ccctgagctgatcagcgcagttttaattgttca

SEQ ID NO: 884873 - DNA, 33 bp, Homo sapien
gtgtagaacgcagaacagtggcctaaagcaaat

SEQ ID NO: 884874 - DNA, 33 bp, Homo sapien
gtgtagaacgcagaacggtggcctaaagcaaat

SEQ ID NO: 884875 - DNA, 33 bp, Homo sapien
agttaagcaaagtttccaagttaggtgctgcag

SEQ ID NO: 884876 - DNA, 33 bp, Homo sapien
agttaagcaaagtttcgaagttaggtgctgcag

SEQ ID NO: 884877 - DNA, 33 bp, Homo sapien
agaggacgactcggcacgaagccggctttgaaa

SEQ ID NO: 884878 - DNA, 33 bp, Homo sapien
agaggacgactcggcaggaagccggctttgaaa

SEQ ID NO: 884879 - DNA, 33 bp, Homo sapien
tcagcacagcagtagacgttgtttgcagagacg

SEQ ID NO: 884880 - DNA, 33 bp, Homo sapien
tcagcacagcagtagatgttgtttgcagagacg

SEQ ID NO: 884881 - DNA, 33 bp, Homo sapien
ttgtcctgacatagacactgccattttaacaca

SEQ ID NO: 884882 - DNA, 33 bp, Homo sapien
ttgtcctgacatagacgctgccattttaacaca

SEQ ID NO: 884883 - DNA, 33 bp, Homo sapien
aggctcaggttttccacctggatctgggaatga

SEQ ID NO: 884884 - DNA, 33 bp, Homo sapien
aggctcaggttttccatctggatctgggaatga

SEQ ID NO: 884885 - DNA, 33 bp, Homo sapien
tcccacattctgctgcaaactctcctcctctgt

SEQ ID NO: 884886 - DNA, 33 bp, Homo sapien
tcccacattctgctgcgaactctcctcctctgt

SEQ ID NO: 884887 - DNA, 33 bp, Homo sapien
ctgagaaggtctccaacacacacaaggcaaccg

SEQ ID NO: 884888 - DNA, 33 bp, Homo sapien
ctgagaaggtctccaatacacacaaggcaaccg

SEQ ID NO: 884889 - DNA, 33 bp, Homo sapien
agttcgaggattcaccacgtttgtcctttgaag

SEQ ID NO: 884890 - DNA, 33 bp, Homo sapien
agttcgaggattcaccgcgtttgtcctttgaag

SEQ ID NO: 884891 - DNA, 33 bp, Homo sapien
atgatttaatgcaacaaggtaggacttcaggtg

SEQ ID NO: 884892 - DNA, 33 bp, Homo sapien
atgatttaatgcaacagggtaggacttcaggtg

SEQ ID NO: 884893 - DNA, 33 bp, Homo sapien
gaagcgagttatttcacagaggaactcaacttt

SEQ ID NO: 884894 - DNA, 33 bp, Homo sapien
gaagcgagttatttcatagaggaactcaacttt

SEQ ID NO: 884895 - DNA, 33 bp, Homo sapien
taaggcttaattgtcacgcatttgaatgttaag

SEQ ID NO: 884896 - DNA, 33 bp, Homo sapien
taaggcttaattgtcatgcatttgaatgttaag

SEQ ID NO: 884897 - DNA, 33 bp, Homo sapien
taagtcatgcagcctacgctaaaagagtaaact

SEQ ID NO: 884898 - DNA, 33 bp, Homo sapien
taagtcatgcagcctatgctaaaagagtaaact

SEQ ID NO: 884899 - DNA, 33 bp, Homo sapien
agtcaaaaatgtagaacattctaatactcgttg

SEQ ID NO: 884900 - DNA, 33 bp, Homo sapien
agtcaaaaatgtagaagattctaatactcgttg

SEQ ID NO: 884901 - DNA, 33 bp, Homo sapien
tggatggggggggaccaatgatctgggctcatt

SEQ ID NO: 884902 - DNA, 33 bp, Homo sapien
tggatggggggggaccgatgatctgggctcatt

SEQ ID NO: 884903 - DNA, 33 bp, Homo sapien
atccacagagcattcacacatcagatcttctta

SEQ ID NO: 884904 - DNA, 33 bp, Homo sapien
atccacagagcattcagacatcagatcttctta

SEQ ID NO: 884905 - DNA, 33 bp, Homo sapien
acttctgaccatcaaacaaaaagtatgacgcag

SEQ ID NO: 884906 - DNA, 33 bp, Homo sapien
acttctgaccatcaaagaaaaagtatgacgcag

SEQ ID NO: 884907 - DNA, 33 bp, Homo sapien
tgcttttcagaatcgacgaatttcttcatatcc

SEQ ID NO: 884908 - DNA, 33 bp, Homo sapien
tgcttttcagaatcgaggaatttcttcatatcc

SEQ ID NO: 884909 - DNA, 33 bp, Homo sapien
aatcaacacaacaaaaacaatcagttcaaaaca

SEQ ID NO: 884910 - DNA, 33 bp, Homo sapien
aatcaacacaacaaaagcaatcagttcaaaaca

SEQ ID NO: 884911 - DNA, 33 bp, Homo sapien
agactgaagcatcgtcaagaggaaaccttccaa

SEQ ID NO: 884912 - DNA, 33 bp, Homo sapien
agactgaagcatcgtcgagaggaaaccttccaa

SEQ ID NO: 884913 - DNA, 33 bp, Homo sapien
cggctggtttacccccacaaagagagagctcca

SEQ ID NO: 884914 - DNA, 33 bp, Homo sapien
cggctggtttacccccgcaaagagagagctcca

SEQ ID NO: 884915 - DNA, 33 bp, Homo sapien
ggggaaaacagacgaacgaggagttggtgataa

SEQ ID NO: 884916 - DNA, 33 bp, Homo sapien
ggggaaaacagacgaatgaggagttggtgataa

SEQ ID NO: 884917 - DNA, 33 bp, Homo sapien
tctccactatttacaaataaactcggggctcct

SEQ ID NO: 884918 - DNA, 33 bp, Homo sapien
tctccactatttacaactaaactcggggctcct

SEQ ID NO: 884919 - DNA, 33 bp, Homo sapien
tccacacatttttcataagaaaccaagactaag

SEQ ID NO: 884920 - DNA, 33 bp, Homo sapien
tccacacatttttcatgagaaaccaagactaag

SEQ ID NO: 884921 - DNA, 33 bp, Homo sapien
gtctgtagctgcttgcaaagctgtagccgctga

SEQ ID NO: 884922 - DNA, 33 bp, Homo sapien
gtctgtagctgcttgcgaagctgtagccgctga

SEQ ID NO: 884923 - DNA, 33 bp, Homo sapien
ttccacagtgtagataaaaatactctgtcctca

SEQ ID NO: 884924 - DNA, 33 bp, Homo sapien
ttccacagtgtagatacaaatactctgtcctca

SEQ ID NO: 884925 - DNA, 33 bp, Homo sapien
gagggtctggaaatgacgcctctgggtctcctt

SEQ ID NO: 884926 - DNA, 33 bp, Homo sapien
gagggtctggaaatgatgcctctgggtctcctt

SEQ ID NO: 884927 - DNA, 33 bp, Homo sapien
gttttgctaaaataaaacctgacattctgtgag

SEQ ID NO: 884928 - DNA, 33 bp, Homo sapien
gttttgctaaaataaaccctgacattctgtgag

SEQ ID NO: 884929 - DNA, 33 bp, Homo sapien
tgaacggtctccaagccgcagcttcctctcctc

SEQ ID NO: 884930 - DNA, 33 bp, Homo sapien
tgaacggtctccaagctgcagcttcctctcctc

SEQ ID NO: 884931 - DNA, 33 bp, Homo sapien
cacaaaacacttccacactgttacgcataggag

SEQ ID NO: 884932 - DNA, 33 bp, Homo sapien
cacaaaacacttccacgctgttacgcataggag

SEQ ID NO: 884933 - DNA, 33 bp, Homo sapien
ctgccacagaatgacactaaacagtaaaagaag

SEQ ID NO: 884934 - DNA, 33 bp, Homo sapien
ctgccacagaatgacattaaacagtaaaagaag

SEQ ID NO: 884935 - DNA, 33 bp, Homo sapien
tcatctcatggcccacaaagtcctgtcctagat

SEQ ID NO: 884936 - DNA, 33 bp, Homo sapien
tcatctcatggcccacgaagtcctgtcctagat

SEQ ID NO: 884937 - DNA, 33 bp, Homo sapien
aagacaacttatttcaaaagaaagagaaaattg

SEQ ID NO: 884938 - DNA, 33 bp, Homo sapien
aagacaacttatttcagaagaaagagaaaattg

SEQ ID NO: 884939 - DNA, 33 bp, Homo sapien
tgctgcctctcagcaacggtgtctataatgttc

SEQ ID NO: 884940 - DNA, 33 bp, Homo sapien
tgctgcctctcagcaatggtgtctataatgttc

SEQ ID NO: 884941 - DNA, 33 bp, Homo sapien
tggagggagaaagatacggagaccccagtctgt

SEQ ID NO: 884942 - DNA, 33 bp, Homo sapien
tggagggagaaagatatggagaccccagtctgt

SEQ ID NO: 884943 - DNA, 33 bp, Homo sapien
gtaattcctgagttgcacctctgcataaacaca

SEQ ID NO: 884944 - DNA, 33 bp, Homo sapien
gtaattcctgagttgcgcctctgcataaacaca

SEQ ID NO: 884945 - DNA, 33 bp, Homo sapien
tctgattcatttggctaaaacatgaattttcca

SEQ ID NO: 884946 - DNA, 33 bp, Homo sapien
tctgattcatttggctgaaacatgaattttcca

SEQ ID NO: 884947 - DNA, 33 bp, Homo sapien
tttcaaatatcaatgcacaacgtaagagcatat

SEQ ID NO: 884948 - DNA, 33 bp, Homo sapien
tttcaaatatcaatgcgcaacgtaagagcatat

SEQ ID NO: 884949 - DNA, 33 bp, Homo sapien
atgtaggcacatctgacgattccaaacctaaca

SEQ ID NO: 884950 - DNA, 33 bp, Homo sapien
atgtaggcacatctgaggattccaaacctaaca

SEQ ID NO: 884951 - DNA, 33 bp, Homo sapien
aagctctttataagaaatgattaatgaggagaa

SEQ ID NO: 884952 - DNA, 33 bp, Homo sapien
aagctctttataagaactgattaatgaggagaa

SEQ ID NO: 884953 - DNA, 33 bp, Homo sapien
catgcgctaagctgtgcacttcaactggatgaa

SEQ ID NO: 884954 - DNA, 33 bp, Homo sapien
catgcgctaagctgtgtacttcaactggatgaa

SEQ ID NO: 884955 - DNA, 33 bp, Homo sapien
gttttctgctctaggaaggtctgagcatttcca

SEQ ID NO: 884956 - DNA, 33 bp, Homo sapien
gttttctgctctaggacggtctgagcatttcca

SEQ ID NO: 884957 - DNA, 33 bp, Homo sapien
agcagaagaatgtggaaattaaatgacagcaac

SEQ ID NO: 884958 - DNA, 33 bp, Homo sapien
agcagaagaatgtggagattaaatgacagcaac

SEQ ID NO: 884959 - DNA, 33 bp, Homo sapien
aggttttattggtaacagccaacagctggaaat

SEQ ID NO: 884960 - DNA, 33 bp, Homo sapien
aggttttattggtaacggccaacagctggaaat

SEQ ID NO: 884961 - DNA, 33 bp, Homo sapien
ataaatactcatgagcaaaacctcttagaattg

SEQ ID NO: 884962 - DNA, 33 bp, Homo sapien
ataaatactcatgagcgaaacctcttagaattg

SEQ ID NO: 884963 - DNA, 33 bp, Homo sapien
tggcagatgcgtcccgaccattgtacaggctct

SEQ ID NO: 884964 - DNA, 33 bp, Homo sapien
tggcagatgcgtcccggccattgtacaggctct

SEQ ID NO: 884965 - DNA, 33 bp, Homo sapien
cttgcctatggtggagaactgttgcaacatctg

SEQ ID NO: 884966 - DNA, 33 bp, Homo sapien
cttgcctatggtggagcactgttgcaacatctg

SEQ ID NO: 884967 - DNA, 33 bp, Homo sapien
tactcagaaatgtcggcagctgaaaacagtaaa

SEQ ID NO: 884968 - DNA, 33 bp, Homo sapien
tactcagaaatgtcggtagctgaaaacagtaaa

SEQ ID NO: 884969 - DNA, 33 bp, Homo sapien
agcagagtcgacgctacccagattcactttggt

SEQ ID NO: 884970 - DNA, 33 bp, Homo sapien
agcagagtcgacgctagccagattcactttggt

SEQ ID NO: 884971 - DNA, 33 bp, Homo sapien
ttagttaagctaagcagtccaaatactcttgaa

SEQ ID NO: 884972 - DNA, 33 bp, Homo sapien
ttagttaagctaagcattccaaatactcttgaa

SEQ ID NO: 884973 - DNA, 33 bp, Homo sapien
gaaagaaagaggattacagccaatttagacgga

SEQ ID NO: 884974 - DNA, 33 bp, Homo sapien
gaaagaaagaggattatagccaatttagacgga

SEQ ID NO: 884975 - DNA, 33 bp, Homo sapien
gccattttcacaaaacagcagttaactctaaac

SEQ ID NO: 884976 - DNA, 33 bp, Homo sapien
gccattttcacaaaacggcagttaactctaaac

SEQ ID NO: 884977 - DNA, 33 bp, Homo sapien
aattccattctgtgtaaaggaggaaatcgactt

SEQ ID NO: 884978 - DNA, 33 bp, Homo sapien
aattccattctgtgtataggaggaaatcgactt

SEQ ID NO: 884979 - DNA, 33 bp, Homo sapien
gaatgagaaaataacaaccaattactcaataat

SEQ ID NO: 884980 - DNA, 33 bp, Homo sapien
gaatgagaaaataacatccaattactcaataat

SEQ ID NO: 884981 - DNA, 33 bp, Homo sapien
actggcaaacctggaacgtcaggagacaacata

SEQ ID NO: 884982 - DNA, 33 bp, Homo sapien
actggcaaacctggaatgtcaggagacaacata

SEQ ID NO: 884983 - DNA, 33 bp, Homo sapien
gtgtaataaaaggactaaactacagcacctcca

SEQ ID NO: 884984 - DNA, 33 bp, Homo sapien
gtgtaataaaaggactgaactacagcacctcca

SEQ ID NO: 884985 - DNA, 33 bp, Homo sapien
aataaacttgaaatgagacttggaggtgctgta

SEQ ID NO: 884986 - DNA, 33 bp, Homo sapien
aataaacttgaaatgatacttggaggtgctgta

SEQ ID NO: 884987 - DNA, 33 bp, Homo sapien
aatacttttgctaacacgctcatagattccttt

SEQ ID NO: 884988 - DNA, 33 bp, Homo sapien
aatacttttgctaacatgctcatagattccttt

SEQ ID NO: 884989 - DNA, 33 bp, Homo sapien
ctttctgtcgtaaaaccatcttctccctcaggc

SEQ ID NO: 884990 - DNA, 33 bp, Homo sapien
ctttctgtcgtaaaactatcttctccctcaggc

SEQ ID NO: 884991 - DNA, 33 bp, Homo sapien
catttcttagagaatccgaggtgacctatcttg

SEQ ID NO: 884992 - DNA, 33 bp, Homo sapien
catttcttagagaatctgaggtgacctatcttg

SEQ ID NO: 884993 - DNA, 33 bp, Homo sapien
actagaaggggtcagacgcaaaagaccatgtgt

SEQ ID NO: 884994 - DNA, 33 bp, Homo sapien
actagaaggggtcagatgcaaaagaccatgtgt

SEQ ID NO: 884995 - DNA, 33 bp, Homo sapien
agacacactgtggtcccgatgcgtttggttcaa

SEQ ID NO: 884996 - DNA, 33 bp, Homo sapien
agacacactgtggtcctgatgcgtttggttcaa

SEQ ID NO: 884997 - DNA, 33 bp, Homo sapien
ataaagtgttggttcacattgtttattcttgtg

SEQ ID NO: 884998 - DNA, 33 bp, Homo sapien
ataaagtgttggttcatattgtttattcttgtg

SEQ ID NO: 884999 - DNA, 33 bp, Homo sapien
ggttgaagtatcatcccgactcatttctgaaga

SEQ ID NO: 885000 - DNA, 33 bp, Homo sapien
ggttgaagtatcatcctgactcatttctgaaga

SEQ ID NO: 885001 - DNA, 33 bp, Homo sapien
agaaagggattgaagcaattgagtcgtgaccca

SEQ ID NO: 885002 - DNA, 33 bp, Homo sapien
agaaagggattgaagcgattgagtcgtgaccca

SEQ ID NO: 885003 - DNA, 33 bp, Homo sapien
gtctaaactcgaataacgcaacaaaatcaatat

SEQ ID NO: 885004 - DNA, 33 bp, Homo sapien
gtctaaactcgaataatgcaacaaaatcaatat

SEQ ID NO: 885005 - DNA, 33 bp, Homo sapien
tctgtgtgtaactaaacgtgggatacagcaaaa

SEQ ID NO: 885006 - DNA, 33 bp, Homo sapien
tctgtgtgtaactaaatgtgggatacagcaaaa

SEQ ID NO: 885007 - DNA, 33 bp, Homo sapien
tatgaaaatagcagcactgaagactcttcagtc

SEQ ID NO: 885008 - DNA, 33 bp, Homo sapien
tatgaaaatagcagcattgaagactcttcagtc

SEQ ID NO: 885009 - DNA, 33 bp, Homo sapien
tgtttgttttgttggaccgtgtcaaatacagct

SEQ ID NO: 885010 - DNA, 33 bp, Homo sapien
tgtttgttttgttggagcgtgtcaaatacagct

SEQ ID NO: 885011 - DNA, 33 bp, Homo sapien
gttgccaaatgcctcaccaccatgtaacggggc

SEQ ID NO: 885012 - DNA, 33 bp, Homo sapien
gttgccaaatgcctcagcaccatgtaacggggc

SEQ ID NO: 885013 - DNA, 33 bp, Homo sapien
attcccacaaaacatactacgttcaaactatga

SEQ ID NO: 885014 - DNA, 33 bp, Homo sapien
attcccacaaaacatagtacgttcaaactatga

SEQ ID NO: 885015 - DNA, 33 bp, Homo sapien
atcaggcaaagatacagacacaggaataattta

SEQ ID NO: 885016 - DNA, 33 bp, Homo sapien
atcaggcaaagatacatacacaggaataattta

SEQ ID NO: 885017 - DNA, 33 bp, Homo sapien
gtgtgtgcttggtcaactggactagattatttt

SEQ ID NO: 885018 - DNA, 33 bp, Homo sapien
gtgtgtgcttggtcaattggactagattatttt

SEQ ID NO: 885019 - DNA, 33 bp, Homo sapien
cagttcactagttttaaagatgggactcctccc

SEQ ID NO: 885020 - DNA, 33 bp, Homo sapien
cagttcactagttttagagatgggactcctccc

SEQ ID NO: 885021 - DNA, 33 bp, Homo sapien
actgggagtgaaatcaatcagcgccaatccagc

SEQ ID NO: 885022 - DNA, 33 bp, Homo sapien
actgggagtgaaatcagtcagcgccaatccagc

SEQ ID NO: 885023 - DNA, 33 bp, Homo sapien
tatttatttaccatcacatctcacgtaggcatc

SEQ ID NO: 885024 - DNA, 33 bp, Homo sapien
tatttatttaccatcagatctcacgtaggcatc

SEQ ID NO: 885025 - DNA, 33 bp, Homo sapien
actggatagccgtggaaattggctgtgcagtgg

SEQ ID NO: 885026 - DNA, 33 bp, Homo sapien
actggatagccgtggacattggctgtgcagtgg

SEQ ID NO: 885027 - DNA, 33 bp, Homo sapien
gaactatataacaccccgataacactcaccctg

SEQ ID NO: 885028 - DNA, 33 bp, Homo sapien
gaactatataacacccggataacactcaccctg

SEQ ID NO: 885029 - DNA, 33 bp, Homo sapien
atgcttaaaatctataaaattgtacctcaatac

SEQ ID NO: 885030 - DNA, 33 bp, Homo sapien
atgcttaaaatctatacaattgtacctcaatac

SEQ ID NO: 885031 - DNA, 33 bp, Homo sapien
accagtgaacttagaaacaattaaccaacttca

SEQ ID NO: 885032 - DNA, 33 bp, Homo sapien
accagtgaacttagaagcaattaaccaacttca

SEQ ID NO: 885033 - DNA, 33 bp, Homo sapien
acctggtatttagtcactactttggcaaatgct

SEQ ID NO: 885034 - DNA, 33 bp, Homo sapien
acctggtatttagtcattactttggcaaatgct

SEQ ID NO: 885035 - DNA, 33 bp, Homo sapien
aaaatagctgctttacaagtcttttttggacaa

SEQ ID NO: 885036 - DNA, 33 bp, Homo sapien
aaaatagctgctttaccagtcttttttggacaa

SEQ ID NO: 885037 - DNA, 33 bp, Homo sapien
taaatcactgtcagtacatgtttcagaatagtt

SEQ ID NO: 885038 - DNA, 33 bp, Homo sapien
taaatcactgtcagtatatgtttcagaatagtt

SEQ ID NO: 885039 - DNA, 33 bp, Homo sapien
tccactaagtgcccagcataaagatgaaagtgt

SEQ ID NO: 885040 - DNA, 33 bp, Homo sapien
tccactaagtgcccaggataaagatgaaagtgt

SEQ ID NO: 885041 - DNA, 33 bp, Homo sapien
aaaacacctttcgtcactcattttgttgctgaa

SEQ ID NO: 885042 - DNA, 33 bp, Homo sapien
aaaacacctttcgtcattcattttgttgctgaa

SEQ ID NO: 885043 - DNA, 33 bp, Homo sapien
tggactcagatgccgacgagcaacttgttagga

SEQ ID NO: 885044 - DNA, 33 bp, Homo sapien
tggactcagatgccgatgagcaacttgttagga

SEQ ID NO: 885045 - DNA, 33 bp, Homo sapien
ctctatggaactaagcccctctatggaactagg

SEQ ID NO: 885046 - DNA, 33 bp, Homo sapien
ctctatggaactaagctcctctatggaactagg

SEQ ID NO: 885047 - DNA, 33 bp, Homo sapien
gccactacttattagaccattgctctgttttcc

SEQ ID NO: 885048 - DNA, 33 bp, Homo sapien
gccactacttattagatcattgctctgttttcc

SEQ ID NO: 885049 - DNA, 33 bp, Homo sapien
gtgaatcatttataataagacctgagagccctt

SEQ ID NO: 885050 - DNA, 33 bp, Homo sapien
gtgaatcatttataatgagacctgagagccctt

SEQ ID NO: 885051 - DNA, 33 bp, Homo sapien
catcaatccaccacatgaaaccctgggtcacag

SEQ ID NO: 885052 - DNA, 33 bp, Homo sapien
catcaatccaccacattaaaccctgggtcacag

SEQ ID NO: 885053 - DNA, 33 bp, Homo sapien
ttcctctgaactaagcacttgaaggggacagga

SEQ ID NO: 885054 - DNA, 33 bp, Homo sapien
ttcctctgaactaagcgcttgaaggggacagga

SEQ ID NO: 885055 - DNA, 33 bp, Homo sapien
tgttctatggtgttccagcagggggaatgaatg

SEQ ID NO: 885056 - DNA, 33 bp, Homo sapien
tgttctatggtgttccggcagggggaatgaatg

SEQ ID NO: 885057 - DNA, 33 bp, Homo sapien
ggcggccacagggaaaagttcttctgcctatgg

SEQ ID NO: 885058 - DNA, 33 bp, Homo sapien
ggcggccacagggaaaggttcttctgcctatgg

SEQ ID NO: 885059 - DNA, 33 bp, Homo sapien
ttcacatggaatcgcaaaagacccagaatagac

SEQ ID NO: 885060 - DNA, 33 bp, Homo sapien
ttcacatggaatcgcagaagacccagaatagac

SEQ ID NO: 885061 - DNA, 33 bp, Homo sapien
actgtaggtgtgcggacgtgtttctgggttctc

SEQ ID NO: 885062 - DNA, 33 bp, Homo sapien
actgtaggtgtgcggatgtgtttctgggttctc

SEQ ID NO: 885063 - DNA, 33 bp, Homo sapien; identical to SEQ ID NO: 885061

SEQ ID NO: 885064 - DNA, 33 bp, Homo sapien; identical to SEQ ID NO: 885062

SEQ ID NO: 885065 - DNA, 33 bp, Homo sapien
gtgaaaagacagaaaactagagagtcacagaga

SEQ ID NO: 885066 - DNA, 33 bp, Homo sapien
gtgaaaagacagaaaagtagagagtcacagaga

SEQ ID NO: 885067 - DNA, 33 bp, Homo sapien
tcaatattttccattcaacaccttaagaatatg

SEQ ID NO: 885068 - DNA, 33 bp, Homo sapien
tcaatattttccattccacaccttaagaatatg

SEQ ID NO: 885069 - DNA, 33 bp, Homo sapien
ccatgttttcaaatgtcacagtagaagaggcag

SEQ ID NO: 885070 - DNA, 33 bp, Homo sapien
ccatgttttcaaatgttacagtagaagaggcag

SEQ ID NO: 885071 - DNA, 33 bp, Homo sapien
acattgtacgagccaacgcaggtaataaagcgt

SEQ ID NO: 885072 - DNA, 33 bp, Homo sapien
acattgtacgagccaaggcaggtaataaagcgt

SEQ ID NO: 885073 - DNA, 33 bp, Homo sapien
ttctcacaggagctcaaatcctcttgtgaactg

SEQ ID NO: 885074 - DNA, 33 bp, Homo sapien
ttctcacaggagctcacatcctcttgtgaactg

SEQ ID NO: 885075 - DNA, 33 bp, Homo sapien
cctcacaagctatggaacggtactagtcatgct

SEQ ID NO: 885076 - DNA, 33 bp, Homo sapien
cctcacaagctatggaccggtactagtcatgct

SEQ ID NO: 885077 - DNA, 33 bp, Homo sapien
tttttgtcaccaaagccgcttctcttggttgat

SEQ ID NO: 885078 - DNA, 33 bp, Homo sapien
tttttgtcaccaaagctgcttctcttggttgat

SEQ ID NO: 885079 - DNA, 33 bp, Homo sapien
agtggataaggagaagacgcatttcagttttac

SEQ ID NO: 885080 - DNA, 33 bp, Homo sapien
agtggataaggagaagtcgcatttcagttttac

SEQ ID NO: 885081 - DNA, 33 bp, Homo sapien
agtgtgtttcactgcaagtattaaggcagatcc

SEQ ID NO: 885082 - DNA, 33 bp, Homo sapien
agtgtgtttcactgcatgtattaaggcagatcc

SEQ ID NO: 885083 - DNA, 33 bp, Homo sapien
cgagcttcctaacccccgattctgctgaagggc

SEQ ID NO: 885084 - DNA, 33 bp, Homo sapien
cgagcttcctaacccctgattctgctgaagggc

SEQ ID NO: 885085 - DNA, 33 bp, Homo sapien
catcacctgcgtgaaaagtaaagacccccattc

SEQ ID NO: 885086 - DNA, 33 bp, Homo sapien
catcacctgcgtgaaaggtaaagacccccattc

SEQ ID NO: 885087 - DNA, 33 bp, Homo sapien
acaggtgttttatgacaactccaaagacaaaaa

SEQ ID NO: 885088 - DNA, 33 bp, Homo sapien
acaggtgttttatgacgactccaaagacaaaaa

SEQ ID NO: 885089 - DNA, 33 bp, Homo sapien
tttaaatgaatttgaccaataaaacagggacct

SEQ ID NO: 885090 - DNA, 33 bp, Homo sapien
tttaaatgaatttgacgaataaaacagggacct

SEQ ID NO: 885091 - DNA, 33 bp, Homo sapien
tgcaatctacctatctcacaaaggactaatgtc

SEQ ID NO: 885092 - DNA, 33 bp, Homo sapien
tgcaatctacctatctgacaaaggactaatgtc

SEQ ID NO: 885093 - DNA, 33 bp, Homo sapien
gctacaatgagaaaaaattttatcgtgctacaa

SEQ ID NO: 885094 - DNA, 33 bp, Homo sapien
gctacaatgagaaaaagttttatcgtgctacaa

SEQ ID NO: 885095 - DNA, 33 bp, Homo sapien
gtgatgtggactaaacagaaagacagaatgccg

SEQ ID NO: 885096 - DNA, 33 bp, Homo sapien
gtgatgtggactaaacggaaagacagaatgccg

SEQ ID NO: 885097 - DNA, 33 bp, Homo sapien
ctcctgagtgagcctaaggcccgttgctttggg

SEQ ID NO: 885098 - DNA, 33 bp, Homo sapien
ctcctgagtgagcctacggcccgttgctttggg

SEQ ID NO: 885099 - DNA, 33 bp, Homo sapien
gctttgcaattgcataaggtcagcacactcaca

SEQ ID NO: 885100 - DNA, 33 bp, Homo sapien
gctttgcaattgcatagggtcagcacactcaca

SEQ ID NO: 885101 - DNA, 33 bp, Homo sapien
aatgacatgcaaaaataaaatattcaggttatt

SEQ ID NO: 885102 - DNA, 33 bp, Homo sapien
aatgacatgcaaaaatcaaatattcaggttatt

SEQ ID NO: 885103 - DNA, 33 bp, Homo sapien
attctgttgggctaaccgtgtcaaaacttcata

SEQ ID NO: 885104 - DNA, 33 bp, Homo sapien
attctgttgggctaactgtgtcaaaacttcata

SEQ ID NO: 885105 - DNA, 33 bp, Homo sapien
tctatcagtctacggcaatgacgataacctgac

SEQ ID NO: 885106 - DNA, 33 bp, Homo sapien
tctatcagtctacggcgatgacgataacctgac

SEQ ID NO: 885107 - DNA, 33 bp, Homo sapien
ccacacaactgcccacacaccaccttccacaac

SEQ ID NO: 885108 - DNA, 33 bp, Homo sapien
ccacacaactgcccacgcaccaccttccacaac

SEQ ID NO: 885109 - DNA, 33 bp, Homo sapien
cagatggctctttgcaaccattccattcctttc

SEQ ID NO: 885110 - DNA, 33 bp, Homo sapien
cagatggctctttgcatccattccattcctttc

SEQ ID NO: 885111 - DNA, 33 bp, Homo sapien
ccactgtttgttaaaaatgagagtaaccttgtg

SEQ ID NO: 885112 - DNA, 33 bp, Homo sapien
ccactgtttgttaaaagtgagagtaaccttgtg

SEQ ID NO: 885113 - DNA, 33 bp, Homo sapien
aaacagctagttcatgaattggttcttggtaat

SEQ ID NO: 885114 - DNA, 33 bp, Homo sapien
aaacagctagttcatggattggttcttggtaat

SEQ ID NO: 885115 - DNA, 33 bp, Homo sapien
tgtgagcctctttgccaaatgcagaaactcgct

SEQ ID NO: 885116 - DNA, 33 bp, Homo sapien
tgtgagcctctttgcccaatgcagaaactcgct

SEQ ID NO: 885117 - DNA, 33 bp, Homo sapien
agctatgcatctctagaccttttactcaaatta

SEQ ID NO: 885118 - DNA, 33 bp, Homo sapien
agctatgcatctctaggccttttactcaaatta

SEQ ID NO: 885119 - DNA, 33 bp, Homo sapien
tgtgattctaaagacccgcagtttaagattcat

SEQ ID NO: 885120 - DNA, 33 bp, Homo sapien
tgtgattctaaagacctgcagtttaagattcat

SEQ ID NO: 885121 - DNA, 33 bp, Homo sapien
tcgagatcgtctccaacggccccgcggacacgc

SEQ ID NO: 885122 - DNA, 33 bp, Homo sapien
tcgagatcgtctccaatggccccgcggacacgc

SEQ ID NO: 885123 - DNA, 33 bp, Homo sapien
ccccattcacgggccacgttccaatcggcttac

SEQ ID NO: 885124 - DNA, 33 bp, Homo sapien
ccccattcacgggccatgttccaatcggcttac

SEQ ID NO: 885125 - DNA, 33 bp, Homo sapien
tgacttccatcgtctacgaagcccattccatgc

SEQ ID NO: 885126 - DNA, 33 bp, Homo sapien
tgacttccatcgtctatgaagcccattccatgc

SEQ ID NO: 885127 - DNA, 33 bp, Homo sapien
ctaaataccataaacccaggactctgctagtca

SEQ ID NO: 885128 - DNA, 33 bp, Homo sapien
ctaaataccataaaccgaggactctgctagtca

SEQ ID NO: 885129 - DNA, 33 bp, Homo sapien
cttattatagtaaacaaggtccagagccccacc

SEQ ID NO: 885130 - DNA, 33 bp, Homo sapien
cttattatagtaaacagggtccagagccccacc

SEQ ID NO: 885131 - DNA, 33 bp, Homo sapien
tgggaagtaagctggacgagagaatgtcagctg

SEQ ID NO: 885132 - DNA, 33 bp, Homo sapien
tgggaagtaagctggatgagagaatgtcagctg

SEQ ID NO: 885133 - DNA, 33 bp, Homo sapien
taaacttcttttcttagaaatcacccagtctca

SEQ ID NO: 885134 - DNA, 33 bp, Homo sapien
taaacttcttttcttataaatcacccagtctca

SEQ ID NO: 885135 - DNA, 33 bp, Homo sapien
ctgttattcagcctaccaagtccactagaatta

SEQ ID NO: 885136 - DNA, 33 bp, Homo sapien
ctgttattcagcctactaagtccactagaatta

SEQ ID NO: 885137 - DNA, 33 bp, Homo sapien
ggctgtactaatctgcactctcaccaacagagt

SEQ ID NO: 885138 - DNA, 33 bp, Homo sapien
ggctgtactaatctgctctctcaccaacagagt

SEQ ID NO: 885139 - DNA, 33 bp, Homo sapien
aatcagaatgggtttacgtaagtgattttctag

SEQ ID NO: 885140 - DNA, 33 bp, Homo sapien
aatcagaatgggtttatgtaagtgattttctag

SEQ ID NO: 885141 - DNA, 33 bp, Homo sapien
ttgacatgctttgaaacggcctgaaaactgtct

SEQ ID NO: 885142 - DNA, 33 bp, Homo sapien
ttgacatgctttgaaatggcctgaaaactgtct

SEQ ID NO: 885143 - DNA, 33 bp, Homo sapien
actgagcacagaactccgaagtgtaaggtgcat

SEQ ID NO: 885144 - DNA, 33 bp, Homo sapien
actgagcacagaactcggaagtgtaaggtgcat

SEQ ID NO: 885145 - DNA, 33 bp, Homo sapien
aggctatctgtgaataacttggacttttgtctt

SEQ ID NO: 885146 - DNA, 33 bp, Homo sapien
aggctatctgtgaatatcttggacttttgtctt

SEQ ID NO: 885147 - DNA, 33 bp, Homo sapien
actttgccttgtaggacgtagttgattcagtaa

SEQ ID NO: 885148 - DNA, 33 bp, Homo sapien
actttgccttgtaggatgtagttgattcagtaa

SEQ ID NO: 885149 - DNA, 33 bp, Homo sapien
tcgagaggatctgaccagcccaatacacagtgg

SEQ ID NO: 885150 - DNA, 33 bp, Homo sapien
tcgagaggatctgaccggcccaatacacagtgg

SEQ ID NO: 885151 - DNA, 33 bp, Homo sapien
cccagagctcattacaaccttggcttgagggac

SEQ ID NO: 885152 - DNA, 33 bp, Homo sapien
cccagagctcattacacccttggcttgagggac

SEQ ID NO: 885153 - DNA, 33 bp, Homo sapien
accaactggaatgaaacaagagggctgagtagc

SEQ ID NO: 885154 - DNA, 33 bp, Homo sapien
accaactggaatgaaataagagggctgagtagc

SEQ ID NO: 885155 - DNA, 33 bp, Homo sapien
agcatgagtgtaaatgcatcctttcaaaagaaa

SEQ ID NO: 885156 - DNA, 33 bp, Homo sapien
agcatgagtgtaaatggatcctttcaaaagaaa

SEQ ID NO: 885157 - DNA, 33 bp, Homo sapien
aaagctaaaggtgctcaaaagcacgaggagcca

SEQ ID NO: 885158 - DNA, 33 bp, Homo sapien
aaagctaaaggtgctcgaaagcacgaggagcca

SEQ ID NO: 885159 - DNA, 33 bp, Homo sapien
atgtgccagggacttgcactggggcactgcact

SEQ ID NO: 885160 - DNA, 33 bp, Homo sapien
atgtgccagggacttgtactggggcactgcact

SEQ ID NO: 885161 - DNA, 33 bp, Homo sapien
ataaaattctgagagccgcacatatgttattta

SEQ ID NO: 885162 - DNA, 33 bp, Homo sapien
ataaaattctgagagctgcacatatgttattta

SEQ ID NO: 885163 - DNA, 33 bp, Homo sapien
tctgcacaagattcaacgcccttgactatgaca

SEQ ID NO: 885164 - DNA, 33 bp, Homo sapien
tctgcacaagattcaatgcccttgactatgaca

SEQ ID NO: 885165 - DNA, 33 bp, Homo sapien
tattttcacacgcacaagaggcccagcaggccc

SEQ ID NO: 885166 - DNA, 33 bp, Homo sapien
tattttcacacgcacaggaggcccagcaggccc

SEQ ID NO: 885167 - DNA, 33 bp, Homo sapien
cgtctgcactgttttaacaaccaaaagtggcca

SEQ ID NO: 885168 - DNA, 33 bp, Homo sapien
cgtctgcactgttttagcaaccaaaagtggcca

SEQ ID NO: 885169 - DNA, 33 bp, Homo sapien
ttacaatagtctgagccgaataagatgtacaca

SEQ ID NO: 885170 - DNA, 33 bp, Homo sapien
ttacaatagtctgagctgaataagatgtacaca

SEQ ID NO: 885171 - DNA, 33 bp, Homo sapien
caaaggcatttctccacgtcgtcctacgtccaa

SEQ ID NO: 885172 - DNA, 33 bp, Homo sapien
caaaggcatttctccatgtcgtcctacgtccaa

SEQ ID NO: 885173 - DNA, 33 bp, Homo sapien
cctgcctctctgcctacagggctcctctcatta

SEQ ID NO: 885174 - DNA, 33 bp, Homo sapien
cctgcctctctgcctatagggctcctctcatta

SEQ ID NO: 885175 - DNA, 33 bp, Homo sapien
tgtgttatagcttgtaccatgtttggtggttcc

SEQ ID NO: 885176 - DNA, 33 bp, Homo sapien
tgtgttatagcttgtatcatgtttggtggttcc

SEQ ID NO: 885177 - DNA, 33 bp, Homo sapien
ctgagtccataaaaggccccggacccagccata

SEQ ID NO: 885178 - DNA, 33 bp, Homo sapien
ctgagtccataaaagggcccggacccagccata

SEQ ID NO: 885179 - DNA, 33 bp, Homo sapien
actccaaatgctcataaaaccggaacctcggac

SEQ ID NO: 885180 - DNA, 33 bp, Homo sapien
actccaaatgctcatataaccggaacctcggac

SEQ ID NO: 885181 - DNA, 33 bp, Homo sapien
tctgtaaatggaaaaaaggatttgtgaggctag

SEQ ID NO: 885182 - DNA, 33 bp, Homo sapien
tctgtaaatggaaaaacggatttgtgaggctag

SEQ ID NO: 885183 - DNA, 33 bp, Homo sapien
ccccctcatcataaggaaacatcaatactaacc

SEQ ID NO: 885184 - DNA, 33 bp, Homo sapien
ccccctcatcataagggaacatcaatactaacc

SEQ ID NO: 885185 - DNA, 33 bp, Homo sapien
aagggtatgtcctttacgagattgtttcaaggg

SEQ ID NO: 885186 - DNA, 33 bp, Homo sapien
aagggtatgtcctttatgagattgtttcaaggg

SEQ ID NO: 885187 - DNA, 33 bp, Homo sapien
ggatcaggaaacaaataaccctggcttcttact

SEQ ID NO: 885188 - DNA, 33 bp, Homo sapien
ggatcaggaaacaaatgaccctggcttcttact

SEQ ID NO: 885189 - DNA, 33 bp, Homo sapien
tgtaatgaagatgagcagagcaattgagacatt

SEQ ID NO: 885190 - DNA, 33 bp, Homo sapien
tgtaatgaagatgagcggagcaattgagacatt

SEQ ID NO: 885191 - DNA, 33 bp, Homo sapien
gggggaagaggagaccaaatgtatgggggactg

SEQ ID NO: 885192 - DNA, 33 bp, Homo sapien
gggggaagaggagaccgaatgtatgggggactg

SEQ ID NO: 885193 - DNA, 33 bp, Homo sapien
ctcaaaggtgagagccaacacatgcagcaccca

SEQ ID NO: 885194 - DNA, 33 bp, Homo sapien
ctcaaaggtgagagccgacacatgcagcaccca

SEQ ID NO: 885195 - DNA, 33 bp, Homo sapien
ctgcttgcatcactcacctttgcatctggctct

SEQ ID NO: 885196 - DNA, 33 bp, Homo sapien
ctgcttgcatcactcatctttgcatctggctct

SEQ ID NO: 885197 - DNA, 33 bp, Homo sapien
tgtgagccagcagagaacctgtgaaaatttgcc

SEQ ID NO: 885198 - DNA, 33 bp, Homo sapien
tgtgagccagcagagaccctgtgaaaatttgcc

SEQ ID NO: 885199 - DNA, 33 bp, Homo sapien
tttccttttttctgaaatgttcttctcagcttg

SEQ ID NO: 885200 - DNA, 33 bp, Homo sapien
tttccttttttctgaagtgttcttctcagcttg

SEQ ID NO: 885201 - DNA, 33 bp, Homo sapien
atttcctgagactcaacggtttctcattcacac

SEQ ID NO: 885202 - DNA, 33 bp, Homo sapien
atttcctgagactcaatggtttctcattcacac

SEQ ID NO: 885203 - DNA, 33 bp, Homo sapien
agcgaagggaggacaccaggcacaacagcgtag

SEQ ID NO: 885204 - DNA, 33 bp, Homo sapien
agcgaagggaggacacgaggcacaacagcgtag

SEQ ID NO: 885205 - DNA, 33 bp, Homo sapien
cgttggccagtccccacattctggtgacgcttt

SEQ ID NO: 885206 - DNA, 33 bp, Homo sapien
cgttggccagtccccatattctggtgacgcttt

SEQ ID NO: 885207 - DNA, 33 bp, Homo sapien
caatggcgtcaccgcacggcctttttgacccaa

SEQ ID NO: 885208 - DNA, 33 bp, Homo sapien
caatggcgtcaccgcatggcctttttgacccaa

SEQ ID NO: 885209 - DNA, 33 bp, Homo sapien
agtccatcctgcatcaggtcaaagcaggaggag

SEQ ID NO: 885210 - DNA, 33 bp, Homo sapien
agtccatcctgcatcatgtcaaagcaggaggag

SEQ ID NO: 885211 - DNA, 33 bp, Homo sapien
cttctagattccagacaatcagaaataaaattt

SEQ ID NO: 885212 - DNA, 33 bp, Homo sapien
cttctagattccagacgatcagaaataaaattt

SEQ ID NO: 885213 - DNA, 33 bp, Homo sapien
cacaccgtggcaaatacctggtaaaactgtcat

SEQ ID NO: 885214 - DNA, 33 bp, Homo sapien
cacaccgtggcaaatagctggtaaaactgtcat

SEQ ID NO: 885215 - DNA, 33 bp, Homo sapien
tgccctgacaagtggaccctcgtttgaaagtgt

SEQ ID NO: 885216 - DNA, 33 bp, Homo sapien
tgccctgacaagtggagcctcgtttgaaagtgt

SEQ ID NO: 885217 - DNA, 33 bp, Homo sapien
gccgccaccggcttccgacagctatttcgggct

SEQ ID NO: 885218 - DNA, 33 bp, Homo sapien
gccgccaccggcttcctacagctatttcgggct

SEQ ID NO: 885219 - DNA, 33 bp, Homo sapien
ggtcgtcattaggaataatgtaatcaatttctt

SEQ ID NO: 885220 - DNA, 33 bp, Homo sapien
ggtcgtcattaggaatgatgtaatcaatttctt

SEQ ID NO: 885221 - DNA, 33 bp, Homo sapien
tatcacgcaagcaccacaaggaatcttcacagc

SEQ ID NO: 885222 - DNA, 33 bp, Homo sapien
tatcacgcaagcaccagaaggaatcttcacagc

SEQ ID NO: 885223 - DNA, 33 bp, Homo sapien
gtcgacagactttgcacgggagcagtatgcctt

SEQ ID NO: 885224 - DNA, 33 bp, Homo sapien
gtcgacagactttgcatgggagcagtatgcctt

SEQ ID NO: 885225 - DNA, 33 bp, Homo sapien
tgcagaagtactggacaccatttccattttccc

SEQ ID NO: 885226 - DNA, 33 bp, Homo sapien
tgcagaagtactggacgccatttccattttccc

SEQ ID NO: 885227 - DNA, 33 bp, Homo sapien
aatctgtttagttaaagacacaaatgtcacttt

SEQ ID NO: 885228 - DNA, 33 bp, Homo sapien
aatctgtttagttaaatacacaaatgtcacttt

SEQ ID NO: 885229 - DNA, 33 bp, Homo sapien
atttgagaaatcatgaaattatagaattgaagt

SEQ ID NO: 885230 - DNA, 33 bp, Homo sapien
atttgagaaatcatgagattatagaattgaagt

SEQ ID NO: 885231 - DNA, 33 bp, Homo sapien
cagatgatacatagaaagatagcaacataatac

SEQ ID NO: 885232 - DNA, 33 bp, Homo sapien
cagatgatacatagaaggatagcaacataatac

SEQ ID NO: 885233 - DNA, 33 bp, Homo sapien
tcatatattaggaaacgctacaagaaatactaa

SEQ ID NO: 885234 - DNA, 33 bp, Homo sapien
tcatatattaggaaactctacaagaaatactaa

SEQ ID NO: 885235 - DNA, 33 bp, Homo sapien
atgtggaatacaggccgcttggaaaatgatggt

SEQ ID NO: 885236 - DNA, 33 bp, Homo sapien
atgtggaatacaggcctcttggaaaatgatggt

SEQ ID NO: 885237 - DNA, 33 bp, Homo sapien
ggctactgccttaaagccgcgtgactccctcgg

SEQ ID NO: 885238 - DNA, 33 bp, Homo sapien
ggctactgccttaaagtcgcgtgactccctcgg

SEQ ID NO: 885239 - DNA, 33 bp, Homo sapien
gtgttttttggctgaaatcttatggaagtggca

SEQ ID NO: 885240 - DNA, 33 bp, Homo sapien
gtgttttttggctgaattcttatggaagtggca

SEQ ID NO: 885241 - DNA, 33 bp, Homo sapien
attttcctttggagatgaatgtagatcatataa

SEQ ID NO: 885242 - DNA, 33 bp, Homo sapien
attttcctttggagattaatgtagatcatataa

SEQ ID NO: 885243 - DNA, 33 bp, Homo sapien
ccaactctaaaggagacggacactgcttaagaa

SEQ ID NO: 885244 - DNA, 33 bp, Homo sapien
ccaactctaaaggagatggacactgcttaagaa

SEQ ID NO: 885245 - DNA, 33 bp, Homo sapien
tataagacatggaaaactacctcaaaagataaa

SEQ ID NO: 885246 - DNA, 33 bp, Homo sapien
tataagacatggaaaattacctcaaaagataaa

SEQ ID NO: 885247 - DNA, 33 bp, Homo sapien
ctaagaaaaatagagacagaatccaaataaaca

SEQ ID NO: 885248 - DNA, 33 bp, Homo sapien
ctaagaaaaatagagagagaatccaaataaaca

SEQ ID NO: 885249 - DNA, 33 bp, Homo sapien
tgtaataggaatcctacgtgttgagtataacta

SEQ ID NO: 885250 - DNA, 33 bp, Homo sapien
tgtaataggaatcctatgtgttgagtataacta

SEQ ID NO: 885251 - DNA, 33 bp, Homo sapien
cctttaatgggtcatccattccctgtgctcaga

SEQ ID NO: 885252 - DNA, 33 bp, Homo sapien
cctttaatgggtcatctattccctgtgctcaga

SEQ ID NO: 885253 - DNA, 33 bp, Homo sapien
tcacggatggttgttaaattttgtcaaatcatt

SEQ ID NO: 885254 - DNA, 33 bp, Homo sapien
tcacggatggttgttacattttgtcaaatcatt

SEQ ID NO: 885255 - DNA, 33 bp, Homo sapien
actcaaattcagcaacaaggaaaaaataggtta

SEQ ID NO: 885256 - DNA, 33 bp, Homo sapien
actcaaattcagcaacgaggaaaaaataggtta

SEQ ID NO: 885257 - DNA, 33 bp, Homo sapien
accaagttctgtggtccacatactttatgaaag

SEQ ID NO: 885258 - DNA, 33 bp, Homo sapien
accaagttctgtggtctacatactttatgaaag

SEQ ID NO: 885259 - DNA, 33 bp, Homo sapien
atgtttgctatgaaaaaagcccttatctatgtt

SEQ ID NO: 885260 - DNA, 33 bp, Homo sapien
atgtttgctatgaaaagagcccttatctatgtt

SEQ ID NO: 885261 - DNA, 33 bp, Homo sapien
tgctctaaggtatagcaactgagataggcaaga

SEQ ID NO: 885262 - DNA, 33 bp, Homo sapien
tgctctaaggtatagcgactgagataggcaaga

SEQ ID NO: 885263 - DNA, 33 bp, Homo sapien
tttcatatactgagaacagccaactcagtattg

SEQ ID NO: 885264 - DNA, 33 bp, Homo sapien
tttcatatactgagaagagccaactcagtattg

SEQ ID NO: 885265 - DNA, 33 bp, Homo sapien
gccaaagatgtcaacaaatgcctcaccaaagag

SEQ ID NO: 885266 - DNA, 33 bp, Homo sapien
gccaaagatgtcaacagatgcctcaccaaagag

SEQ ID NO: 885267 - DNA, 33 bp, Homo sapien
caccaccaagagtgaacgctgataaactgtgga

SEQ ID NO: 885268 - DNA, 33 bp, Homo sapien
caccaccaagagtgaatgctgataaactgtgga

SEQ ID NO: 885269 - DNA, 33 bp, Homo sapien
agggaggcagttgatcaatttagagcaagcact

SEQ ID NO: 885270 - DNA, 33 bp, Homo sapien
agggaggcagttgatcgatttagagcaagcact

SEQ ID NO: 885271 - DNA, 33 bp, Homo sapien
ggataattacatcacaataaattaggttccagg

SEQ ID NO: 885272 - DNA, 33 bp, Homo sapien
ggataattacatcacagtaaattaggttccagg

SEQ ID NO: 885273 - DNA, 33 bp, Homo sapien
actattcttcccttgaataactaaaattccagt

SEQ ID NO: 885274 - DNA, 33 bp, Homo sapien
actattcttcccttgagtaactaaaattccagt

SEQ ID NO: 885275 - DNA, 33 bp, Homo sapien
tcatgtgtcatatggcaatagttttggtgtgtt

SEQ ID NO: 885276 - DNA, 33 bp, Homo sapien
tcatgtgtcatatggccatagttttggtgtgtt

SEQ ID NO: 885277 - DNA, 33 bp, Homo sapien
aatttctgttcattaaaggatgccatgatgaca

SEQ ID NO: 885278 - DNA, 33 bp, Homo sapien
aatttctgttcattaatggatgccatgatgaca

SEQ ID NO: 885279 - DNA, 33 bp, Homo sapien
aaaagggcaatgaagacagtctcttattttagt

SEQ ID NO: 885280 - DNA, 33 bp, Homo sapien
aaaagggcaatgaagatagtctcttattttagt

SEQ ID NO: 885281 - DNA, 33 bp, Homo sapien
tgttactcgttagaagaaaccagatcaattatg

SEQ ID NO: 885282 - DNA, 33 bp, Homo sapien
tgttactcgttagaaggaaccagatcaattatg

SEQ ID NO: 885283 - DNA, 33 bp, Homo sapien
caaatggtgtttatcacggacaaagccaaagtg

SEQ ID NO: 885284 - DNA, 33 bp, Homo sapien
caaatggtgtttatcatggacaaagccaaagtg

SEQ ID NO: 885285 - DNA, 33 bp, Homo sapien
ctctgtaactgcgccaacctggactcctcacac

SEQ ID NO: 885286 - DNA, 33 bp, Homo sapien
ctctgtaactgcgccagcctggactcctcacac

SEQ ID NO: 885287 - DNA, 33 bp, Homo sapien
cacagaagaggagtgacagcggcggtccactgt

SEQ ID NO: 885288 - DNA, 33 bp, Homo sapien
cacagaagaggagtgagagcggcggtccactgt

SEQ ID NO: 885289 - DNA, 33 bp, Homo sapien
atgtcttccatgaaaaataagcaagaatctgta

SEQ ID NO: 885290 - DNA, 33 bp, Homo sapien
atgtcttccatgaaaagtaagcaagaatctgta

SEQ ID NO: 885291 - DNA, 33 bp, Homo sapien
tgcaacttctctgtggaatgtggtaccgtgtct

SEQ ID NO: 885292 - DNA, 33 bp, Homo sapien
tgcaacttctctgtgggatgtggtaccgtgtct

SEQ ID NO: 885293 - DNA, 33 bp, Homo sapien
gctgcagtagcatcacagtcccacggttgtgtg

SEQ ID NO: 885294 - DNA, 33 bp, Homo sapien
gctgcagtagcatcacggtcccacggttgtgtg

SEQ ID NO: 885295 - DNA, 33 bp, Homo sapien
agcattaatagacttgaatgaatttaggaataa

SEQ ID NO: 885296 - DNA, 33 bp, Homo sapien
agcattaatagacttgcatgaatttaggaataa

SEQ ID NO: 885297 - DNA, 33 bp, Homo sapien
cccaacttttcggactcaaaccagcaattagca

SEQ ID NO: 885298 - DNA, 33 bp, Homo sapien
cccaacttttcggactgaaaccagcaattagca

SEQ ID NO: 885299 - DNA, 33 bp, Homo sapien
catctttgtatttacactatatgtttcctctag

SEQ ID NO: 885300 - DNA, 33 bp, Homo sapien
catctttgtatttacagtatatgtttcctctag

SEQ ID NO: 885301 - DNA, 33 bp, Homo sapien
tatgtctttgggcataaaatgttttttgtatct

SEQ ID NO: 885302 - DNA, 33 bp, Homo sapien
tatgtctttgggcatacaatgttttttgtatct

SEQ ID NO: 885303 - DNA, 33 bp, Homo sapien
ttgttatatgacagaacttcccgaataccagag

SEQ ID NO: 885304 - DNA, 33 bp, Homo sapien
ttgttatatgacagaatttcccgaataccagag

SEQ ID NO: 885305 - DNA, 33 bp, Homo sapien
ctgagatttcaagctggaaggcgctctccaact

SEQ ID NO: 885306 - DNA, 33 bp, Homo sapien
ctgagatttcaagctgtaaggcgctctccaact

SEQ ID NO: 885307 - DNA, 33 bp, Homo sapien
attgcaaagaccgtcgcaggcttggtgtcagtg

SEQ ID NO: 885308 - DNA, 33 bp, Homo sapien
attgcaaagaccgtcgtaggcttggtgtcagtg

SEQ ID NO: 885309 - DNA, 33 bp, Homo sapien
ataatattgaatattgaaaatgagtaagtgcat

SEQ ID NO: 885310 - DNA, 33 bp, Homo sapien
ataatattgaatattggaaatgagtaagtgcat

SEQ ID NO: 885311 - DNA, 33 bp, Homo sapien
agaagaaaacatgaaaataaccgttgcaaatca

SEQ ID NO: 885312 - DNA, 33 bp, Homo sapien
agaagaaaacatgaaagtaaccgttgcaaatca

SEQ ID NO: 885313 - DNA, 33 bp, Homo sapien
tatttcttacactggactcatttatcctgaaat

SEQ ID NO: 885314 - DNA, 33 bp, Homo sapien
tatttcttacactggattcatttatcctgaaat

SEQ ID NO: 885315 - DNA, 33 bp, Homo sapien
aaatcatcacttcataaactcaactgtagtccc

SEQ ID NO: 885316 - DNA, 33 bp, Homo sapien
aaatcatcacttcatacactcaactgtagtccc

SEQ ID NO: 885317 - DNA, 33 bp, Homo sapien
tttctccactttccttaaaaattcagctgaccc

SEQ ID NO: 885318 - DNA, 33 bp, Homo sapien
tttctccactttccttcaaaattcagctgaccc

SEQ ID NO: 885319 - DNA, 33 bp, Homo sapien
aacacctgtgagattacagggaatttgaggatg

SEQ ID NO: 885320 - DNA, 33 bp, Homo sapien
aacacctgtgagattagagggaatttgaggatg

SEQ ID NO: 885321 - DNA, 33 bp, Homo sapien
catggagcgtagacacagaatggcatattatcc

SEQ ID NO: 885322 - DNA, 33 bp, Homo sapien
catggagcgtagacacggaatggcatattatcc

SEQ ID NO: 885323 - DNA, 33 bp, Homo sapien
taagacacacttctgactaagggacaggtgccc

SEQ ID NO: 885324 - DNA, 33 bp, Homo sapien
taagacacacttctgagtaagggacaggtgccc

SEQ ID NO: 885325 - DNA, 33 bp, Homo sapien
atccagagaaaagctcaatacattaaaataaga

SEQ ID NO: 885326 - DNA, 33 bp, Homo sapien
atccagagaaaagctcgatacattaaaataaga

SEQ ID NO: 885327 - DNA, 33 bp, Homo sapien
aatgtatggcagtttacggtttattttatttgt

SEQ ID NO: 885328 - DNA, 33 bp, Homo sapien
aatgtatggcagtttatggtttattttatttgt

SEQ ID NO: 885329 - DNA, 33 bp, Homo sapien
aaaaaactgtgatatccagaagttgtatgacac

SEQ ID NO: 885330 - DNA, 33 bp, Homo sapien
aaaaaactgtgatatctagaagttgtatgacac

SEQ ID NO: 885331 - DNA, 33 bp, Homo sapien
agaagttgtatgacacagaaatcaggagatata

SEQ ID NO: 885332 - DNA, 33 bp, Homo sapien
agaagttgtatgacactgaaatcaggagatata

SEQ ID NO: 885333 - DNA, 33 bp, Homo sapien
ggaatagcgtgaaactaactagggtgcctatca

SEQ ID NO: 885334 - DNA, 33 bp, Homo sapien
ggaatagcgtgaaactgactagggtgcctatca

SEQ ID NO: 885335 - DNA, 33 bp, Homo sapien
gttctaggcctttgaggaaatgccacattgtct

SEQ ID NO: 885336 - DNA, 33 bp, Homo sapien
gttctaggcctttgagtaaatgccacattgtct

SEQ ID NO: 885337 - DNA, 33 bp, Homo sapien; identical to SEQ ID NO: 885335

SEQ ID NO: 885338 - DNA, 33 bp, Homo sapien; identical to SEQ ID NO: 885336

SEQ ID NO: 885339 - DNA, 33 bp, Homo sapien
aagcaacagggagatacggggtttgacaccatg

SEQ ID NO: 885340 - DNA, 33 bp, Homo sapien
aagcaacagggagatatggggtttgacaccatg

SEQ ID NO: 885341 - DNA, 33 bp, Homo sapien
taatggacttagcacacactaagagatttacat

SEQ ID NO: 885342 - DNA, 33 bp, Homo sapien
taatggacttagcacatactaagagatttacat

SEQ ID NO: 885343 - DNA, 33 bp, Homo sapien
tgatactactaatttcacagtaagatcttttaa

SEQ ID NO: 885344 - DNA, 33 bp, Homo sapien
tgatactactaatttcgcagtaagatcttttaa

SEQ ID NO: 885345 - DNA, 33 bp, Homo sapien
ccgtgagtgggcttccactatcaccgctgcact

SEQ ID NO: 885346 - DNA, 33 bp, Homo sapien
ccgtgagtgggcttccgctatcaccgctgcact

SEQ ID NO: 885347 - DNA, 33 bp, Homo sapien
attatccagatcctacgcattttaaaccttcct

SEQ ID NO: 885348 - DNA, 33 bp, Homo sapien
attatccagatcctactcattttaaaccttcct

SEQ ID NO: 885349 - DNA, 33 bp, Homo sapien
ataaatctcttaagaaacttagacctcttaata

SEQ ID NO: 885350 - DNA, 33 bp, Homo sapien
ataaatctcttaagaaccttagacctcttaata

SEQ ID NO: 885351 - DNA, 33 bp, Homo sapien
cacagtacatcacatacgctagtctgaaacgag

SEQ ID NO: 885352 - DNA, 33 bp, Homo sapien
cacagtacatcacatatgctagtctgaaacgag

SEQ ID NO: 885353 - DNA, 33 bp, Homo sapien
aataggaaatattgtcaaggcaatcaagaataa

SEQ ID NO: 885354 - DNA, 33 bp, Homo sapien
aataggaaatattgtcgaggcaatcaagaataa

SEQ ID NO: 885355 - DNA, 33 bp, Homo sapien
caccctgtactgaccacgtcgctgttcactagc

SEQ ID NO: 885356 - DNA, 33 bp, Homo sapien
caccctgtactgaccatgtcgctgttcactagc

SEQ ID NO: 885357 - DNA, 33 bp, Homo sapien
ccctggagatggcttcccagtgtattaacagac

SEQ ID NO: 885358 - DNA, 33 bp, Homo sapien
ccctggagatggcttctcagtgtattaacagac

SEQ ID NO: 885359 - DNA, 33 bp, Homo sapien
agctctcctcaggtgcactttttatctcctgta

SEQ ID NO: 885360 - DNA, 33 bp, Homo sapien
agctctcctcaggtgcgctttttatctcctgta

SEQ ID NO: 885361 - DNA, 33 bp, Homo sapien
tgtttacagttgagcccggatgatcatgttgtt

SEQ ID NO: 885362 - DNA, 33 bp, Homo sapien
tgtttacagttgagcctggatgatcatgttgtt

SEQ ID NO: 885363 - DNA, 33 bp, Homo sapien
ggggtcacttgtcccacaaagatatctactata

SEQ ID NO: 885364 - DNA, 33 bp, Homo sapien
ggggtcacttgtcccataaagatatctactata

SEQ ID NO: 885365 - DNA, 33 bp, Homo sapien
gctgccccagcagataagtccccacgctggcca

SEQ ID NO: 885366 - DNA, 33 bp, Homo sapien
gctgccccagcagatatgtccccacgctggcca

SEQ ID NO: 885367 - DNA, 33 bp, Homo sapien
tactccccacttccacaagatccactttttaag

SEQ ID NO: 885368 - DNA, 33 bp, Homo sapien
tactccccacttccaccagatccactttttaag

SEQ ID NO: 885369 - DNA, 33 bp, Homo sapien
tagttactagtttgacaacacacatataccaca

SEQ ID NO: 885370 - DNA, 33 bp, Homo sapien
tagttactagtttgaccacacacatataccaca

SEQ ID NO: 885371 - DNA, 33 bp, Homo sapien
tcagatctttgctgaaaggccaagacctgatgg

SEQ ID NO: 885372 - DNA, 33 bp, Homo sapien
tcagatctttgctgaagggccaagacctgatgg

SEQ ID NO: 885373 - DNA, 33 bp, Homo sapien
tacaggctggaaatcaactattcaacactatca

SEQ ID NO: 885374 - DNA, 33 bp, Homo sapien
tacaggctggaaatcagctattcaacactatca

SEQ ID NO: 885375 - DNA, 33 bp, Homo sapien
gttggtgtattctgtgcacctgaaggagaataa

SEQ ID NO: 885376 - DNA, 33 bp, Homo sapien
gttggtgtattctgtggacctgaaggagaataa

SEQ ID NO: 885377 - DNA, 33 bp, Homo sapien
ttatcagataactcgccagtccttgttctaagt

SEQ ID NO: 885378 - DNA, 33 bp, Homo sapien
ttatcagataactcgctagtccttgttctaagt

SEQ ID NO: 885379 - DNA, 33 bp, Homo sapien
tttgcttgaatattctcaaagtgaaaattgcac

SEQ ID NO: 885380 - DNA, 33 bp, Homo sapien
tttgcttgaatattctgaaagtgaaaattgcac

SEQ ID NO: 885381 - DNA, 33 bp, Homo sapien
tacctcttttcccttcaatttcataggtttgct

SEQ ID NO: 885382 - DNA, 33 bp, Homo sapien
tacctcttttcccttccatttcataggtttgct

SEQ ID NO: 885383 - DNA, 33 bp, Homo sapien
gctggaaactcagagacgcttgcctcagacagg

SEQ ID NO: 885384 - DNA, 33 bp, Homo sapien
gctggaaactcagagatgcttgcctcagacagg

SEQ ID NO: 885385 - DNA, 33 bp, Homo sapien
aaaaaacacatttaagcagtgacagcttggcaa

SEQ ID NO: 885386 - DNA, 33 bp, Homo sapien
aaaaaacacatttaaggagtgacagcttggcaa

SEQ ID NO: 885387 - DNA, 33 bp, Homo sapien
actgtaggtttccactaacttatcactggactt

SEQ ID NO: 885388 - DNA, 33 bp, Homo sapien
actgtaggtttccactgacttatcactggactt

SEQ ID NO: 885389 - DNA, 33 bp, Homo sapien
gcacctactggcctcacggggacttccctagga

SEQ ID NO: 885390 - DNA, 33 bp, Homo sapien
gcacctactggcctcatggggacttccctagga

SEQ ID NO: 885391 - DNA, 33 bp, Homo sapien
attccacgtccatgcactcagaaggcccacgca

SEQ ID NO: 885392 - DNA, 33 bp, Homo sapien
attccacgtccatgcattcagaaggcccacgca

SEQ ID NO: 885393 - DNA, 33 bp, Homo sapien
tttcactcctgagatacgagaacgtcctctgaa

SEQ ID NO: 885394 - DNA, 33 bp, Homo sapien
tttcactcctgagatatgagaacgtcctctgaa

SEQ ID NO: 885395 - DNA, 33 bp, Homo sapien
aagacaagaacagacagcgcctgaaatcttccc

SEQ ID NO: 885396 - DNA, 33 bp, Homo sapien
aagacaagaacagacatcgcctgaaatcttccc

SEQ ID NO: 885397 - DNA, 33 bp, Homo sapien
cttgttctttctctaaaagagtttggccttcca

SEQ ID NO: 885398 - DNA, 33 bp, Homo sapien
cttgttctttctctaagagagtttggccttcca

SEQ ID NO: 885399 - DNA, 33 bp, Homo sapien
tgcatattggatgtaacgtgagcaatttatgag

SEQ ID NO: 885400 - DNA, 33 bp, Homo sapien
tgcatattggatgtaatgtgagcaatttatgag

SEQ ID NO: 885401 - DNA, 33 bp, Homo sapien
gccaccacgtccaatccatcacctgctggttgt

SEQ ID NO: 885402 - DNA, 33 bp, Homo sapien
gccaccacgtccaatctatcacctgctggttgt

SEQ ID NO: 885403 - DNA, 33 bp, Homo sapien
aattgcaagtttcggaccatttgtcttcttgtt

SEQ ID NO: 885404 - DNA, 33 bp, Homo sapien
aattgcaagtttcggatcatttgtcttcttgtt

SEQ ID NO: 885405 - DNA, 33 bp, Homo sapien
ggcctgtcatcgcagaccgtgggcaagagctgc

SEQ ID NO: 885406 - DNA, 33 bp, Homo sapien
ggcctgtcatcgcagatcgtgggcaagagctgc

SEQ ID NO: 885407 - DNA, 33 bp, Homo sapien
ttttagacttcttcgcaaccagtcggcggtgga

SEQ ID NO: 885408 - DNA, 33 bp, Homo sapien
ttttagacttcttcgctaccagtcggcggtgga

SEQ ID NO: 885409 - DNA, 33 bp, Homo sapien
cttttccaaataagaacagacacacactgatag

SEQ ID NO: 885410 - DNA, 33 bp, Homo sapien
cttttccaaataagaagagacacacactgatag

SEQ ID NO: 885411 - DNA, 33 bp, Homo sapien
acaggtttgcccaacacagtttccagcttgact

SEQ ID NO: 885412 - DNA, 33 bp, Homo sapien
acaggtttgcccaacagagtttccagcttgact

SEQ ID NO: 885413 - DNA, 33 bp, Homo sapien
aatgagctaactgagaatagaggagaacatagg

SEQ ID NO: 885414 - DNA, 33 bp, Homo sapien
aatgagctaactgagagtagaggagaacatagg

SEQ ID NO: 885415 - DNA, 33 bp, Homo sapien
agtgccgtgttctggcaccggtcatggaattta

SEQ ID NO: 885416 - DNA, 33 bp, Homo sapien
agtgccgtgttctggcgccggtcatggaattta

SEQ ID NO: 885417 - DNA, 33 bp, Homo sapien
tgcctggggaaaccacacattcttgaatggttg

SEQ ID NO: 885418 - DNA, 33 bp, Homo sapien
tgcctggggaaaccacgcattcttgaatggttg

SEQ ID NO: 885419 - DNA, 33 bp, Homo sapien
attctgtatgtcttcaatatttcaaaatttgct

SEQ ID NO: 885420 - DNA, 33 bp, Homo sapien
attctgtatgtcttcattatttcaaaatttgct

SEQ ID NO: 885421 - DNA, 33 bp, Homo sapien
gaaaccacgtgcgaaccgccccacggcagggtg

SEQ ID NO: 885422 - DNA, 33 bp, Homo sapien
gaaaccacgtgcgaactgccccacggcagggtg

SEQ ID NO: 885423 - DNA, 33 bp, Homo sapien
acgaacacagcagaaaagatgaatgcggcaaac

SEQ ID NO: 885424 - DNA, 33 bp, Homo sapien
acgaacacagcagaaaggatgaatgcggcaaac

SEQ ID NO: 885425 - DNA, 33 bp, Homo sapien
tccactactgagtgtacgcccgaaagaaaggac

SEQ ID NO: 885426 - DNA, 33 bp, Homo sapien
tccactactgagtgtatgcccgaaagaaaggac

SEQ ID NO: 885427 - DNA, 33 bp, Homo sapien
tacagttactgaggtacgagaatatcttttttc

SEQ ID NO: 885428 - DNA, 33 bp, Homo sapien
tacagttactgaggtaggagaatatcttttttc

SEQ ID NO: 885429 - DNA, 33 bp, Homo sapien
aatgaaggctcaggccaggaaactcaggcgtgg

SEQ ID NO: 885430 - DNA, 33 bp, Homo sapien
aatgaaggctcaggccgggaaactcaggcgtgg

SEQ ID NO: 885431 - DNA, 33 bp, Homo sapien
tgccagcaaatgacgacgatgccaccgtgggct

SEQ ID NO: 885432 - DNA, 33 bp, Homo sapien
tgccagcaaatgacgatgatgccaccgtgggct

SEQ ID NO: 885433 - DNA, 33 bp, Homo sapien
tgctagacaagacagactattgtattttgtcct

SEQ ID NO: 885434 - DNA, 33 bp, Homo sapien
tgctagacaagacagattattgtattttgtcct

SEQ ID NO: 885435 - DNA, 33 bp, Homo sapien
tcttaactgtctaggcaaatattttaagaaatg

SEQ ID NO: 885436 - DNA, 33 bp, Homo sapien
tcttaactgtctaggctaatattttaagaaatg

SEQ ID NO: 885437 - DNA, 33 bp, Homo sapien
gtgaacttctcggccacgtgcaggaaggatggc

SEQ ID NO: 885438 - DNA, 33 bp, Homo sapien
gtgaacttctcggccatgtgcaggaaggatggc

SEQ ID NO: 885439 - DNA, 33 bp, Homo sapien
atggcttacatcaaagcacatttcacagtttaa

SEQ ID NO: 885440 - DNA, 33 bp, Homo sapien
atggcttacatcaaagtacatttcacagtttaa

SEQ ID NO: 885441 - DNA, 33 bp, Homo sapien
taggaaaggcaacatcaaatcttaaattaagtt

SEQ ID NO: 885442 - DNA, 33 bp, Homo sapien
taggaaaggcaacatcgaatcttaaattaagtt

SEQ ID NO: 885443 - DNA, 33 bp, Homo sapien
agaagagagggagaaacagtgtgcagacagccc

SEQ ID NO: 885444 - DNA, 33 bp, Homo sapien
agaagagagggagaaatagtgtgcagacagccc

SEQ ID NO: 885445 - DNA, 33 bp, Homo sapien
tggggtcctggataccagctggcgcacgggtcc

SEQ ID NO: 885446 - DNA, 33 bp, Homo sapien
tggggtcctggataccggctggcgcacgggtcc

SEQ ID NO: 885447 - DNA, 33 bp, Homo sapien
atgaatttgcacggacccgtttacggagaggga

SEQ ID NO: 885448 - DNA, 33 bp, Homo sapien
atgaatttgcacggactcgtttacggagaggga

SEQ ID NO: 885449 - DNA, 33 bp, Homo sapien
caatcatttaataagacgcctacataacacgtc

SEQ ID NO: 885450 - DNA, 33 bp, Homo sapien
caatcatttaataagatgcctacataacacgtc

SEQ ID NO: 885451 - DNA, 33 bp, Homo sapien
tgcagcagttctgcaaataaatctcaggatgtc

SEQ ID NO: 885452 - DNA, 33 bp, Homo sapien
tgcagcagttctgcaagtaaatctcaggatgtc

SEQ ID NO: 885453 - DNA, 33 bp, Homo sapien
cattccagccaggctcaaggtaaatcctgtgcc

SEQ ID NO: 885454 - DNA, 33 bp, Homo sapien
cattccagccaggctcgaggtaaatcctgtgcc

SEQ ID NO: 885455 - DNA, 33 bp, Homo sapien
cgagctctgtcttaaacctttgctcagctttac

SEQ ID NO: 885456 - DNA, 33 bp, Homo sapien
cgagctctgtcttaaatctttgctcagctttac

SEQ ID NO: 885457 - DNA, 33 bp, Homo sapien
cacatcaccctcttccagcttgcgatgactcaa

SEQ ID NO: 885458 - DNA, 33 bp, Homo sapien
cacatcaccctcttccggcttgcgatgactcaa

SEQ ID NO: 885459 - DNA, 33 bp, Homo sapien
cccagccctgtctcacaccgttcctcctcgggc

SEQ ID NO: 885460 - DNA, 33 bp, Homo sapien
cccagccctgtctcacgccgttcctcctcgggc

SEQ ID NO: 885461 - DNA, 33 bp, Homo sapien
aaggcaacactcccccaacagatgtactgggag

SEQ ID NO: 885462 - DNA, 33 bp, Homo sapien
aaggcaacactcccccgacagatgtactgggag

SEQ ID NO: 885463 - DNA, 33 bp, Homo sapien
ccatgacgtggaaaaacacagatgacgagggtg

SEQ ID NO: 885464 - DNA, 33 bp, Homo sapien
ccatgacgtggaaaaatacagatgacgagggtg

SEQ ID NO: 885465 - DNA, 33 bp, Homo sapien
gcagtgtcgcctatcacagccataaggtgccaa

SEQ ID NO: 885466 - DNA, 33 bp, Homo sapien
gcagtgtcgcctatcatagccataaggtgccaa

SEQ ID NO: 885467 - DNA, 33 bp, Homo sapien
ttccacgctcacctgagagagttcggaagcaga

SEQ ID NO: 885468 - DNA, 33 bp, Homo sapien
ttccacgctcacctgatagagttcggaagcaga

SEQ ID NO: 885469 - DNA, 33 bp, Homo sapien
gtgggagcaaagagaacggaaacatggacctgg

SEQ ID NO: 885470 - DNA, 33 bp, Homo sapien
gtgggagcaaagagaatggaaacatggacctgg

SEQ ID NO: 885471 - DNA, 33 bp, Homo sapien
ataaaaaatacaacaaattcagcagcccagagg

SEQ ID NO: 885472 - DNA, 33 bp, Homo sapien
ataaaaaatacaacaagttcagcagcccagagg

SEQ ID NO: 885473 - DNA, 33 bp, Homo sapien
tttaaaaatgcaaaaaccttatgttacttgaac

SEQ ID NO: 885474 - DNA, 33 bp, Homo sapien
tttaaaaatgcaaaaagcttatgttacttgaac

SEQ ID NO: 885475 - DNA, 33 bp, Homo sapien
tcatcgtgttactcccagagttctgattttcca

SEQ ID NO: 885476 - DNA, 33 bp, Homo sapien
tcatcgtgttactcccggagttctgattttcca

SEQ ID NO: 885477 - DNA, 33 bp, Homo sapien
tcattaatgatgcctaagtatttatatttcttt

SEQ ID NO: 885478 - DNA, 33 bp, Homo sapien
tcattaatgatgcctaggtatttatatttcttt

SEQ ID NO: 885479 - DNA, 33 bp, Homo sapien
cacctgtggagctgaacgactggctgtatcacc

SEQ ID NO: 885480 - DNA, 33 bp, Homo sapien
cacctgtggagctgaatgactggctgtatcacc

SEQ ID NO: 885481 - DNA, 33 bp, Homo sapien
gcattactacaaccacacttaaagcacggtgta

SEQ ID NO: 885482 - DNA, 33 bp, Homo sapien
gcattactacaaccacgcttaaagcacggtgta

SEQ ID NO: 885483 - DNA, 33 bp, Homo sapien
acccaccaggaaaagcacctgagtggcccaggt

SEQ ID NO: 885484 - DNA, 33 bp, Homo sapien
acccaccaggaaaagcgcctgagtggcccaggt

SEQ ID NO: 885485 - DNA, 33 bp, Homo sapien
caaggagcacctgccaaagaacgagccactgag

SEQ ID NO: 885486 - DNA, 33 bp, Homo sapien
caaggagcacctgccacagaacgagccactgag

SEQ ID NO: 885487 - DNA, 33 bp, Homo sapien
cacgaggtgaagaaagacggtgtgtggcccaca

SEQ ID NO: 885488 - DNA, 33 bp, Homo sapien
cacgaggtgaagaaaggcggtgtgtggcccaca

SEQ ID NO: 885489 - DNA, 33 bp, Homo sapien
ggcacctgcccaaatacgctgatgagaagcacg

SEQ ID NO: 885490 - DNA, 33 bp, Homo sapien
ggcacctgcccaaataggctgatgagaagcacg

SEQ ID NO: 885491 - DNA, 33 bp, Homo sapien
ctcggcggaagtgaaacctgaggcatctgccat

SEQ ID NO: 885492 - DNA, 33 bp, Homo sapien
ctcggcggaagtgaaatctgaggcatctgccat

SEQ ID NO: 885493 - DNA, 33 bp, Homo sapien
atgatggcttcccaccgagaaacaagcagtgcg

SEQ ID NO: 885494 - DNA, 33 bp, Homo sapien
atgatggcttcccacctagaaacaagcagtgcg

SEQ ID NO: 885495 - DNA, 33 bp, Homo sapien
ccgtcttcctccgcaccaatgtgcacgaaacaa

SEQ ID NO: 885496 - DNA, 33 bp, Homo sapien
ccgtcttcctccgcacgaatgtgcacgaaacaa

SEQ ID NO: 885497 - DNA, 33 bp, Homo sapien
gtgtagcatttatgacagaagtacttacagtgc

SEQ ID NO: 885498 - DNA, 33 bp, Homo sapien
gtgtagcatttatgacggaagtacttacagtgc

SEQ ID NO: 885499 - DNA, 33 bp, Homo sapien
ggcaccgatccggacaaatgagggccaggcagc

SEQ ID NO: 885500 - DNA, 33 bp, Homo sapien
ggcaccgatccggacagatgagggccaggcagc

SEQ ID NO: 885501 - DNA, 33 bp, Homo sapien
aattgggcctagcccgaagtgatcatgaggcca

SEQ ID NO: 885502 - DNA, 33 bp, Homo sapien
aattgggcctagcccggagtgatcatgaggcca

SEQ ID NO: 885503 - DNA, 33 bp, Homo sapien
cgtaccgctattaagaaggatatgttcaccgct

SEQ ID NO: 885504 - DNA, 33 bp, Homo sapien
cgtaccgctattaagagggatatgttcaccgct

SEQ ID NO: 885505 - DNA, 33 bp, Homo sapien
tggacgcctgagggcaaaccctggaccactctc

SEQ ID NO: 885506 - DNA, 33 bp, Homo sapien
tggacgcctgagggcagaccctggaccactctc

SEQ ID NO: 885507 - DNA, 33 bp, Homo sapien
tgacccagttgacccaaaacaagccaccacgtc

SEQ ID NO: 885508 - DNA, 33 bp, Homo sapien
tgacccagttgacccagaacaagccaccacgtc

SEQ ID NO: 885509 - DNA, 33 bp, Homo sapien
gaacacacgcaaatcacacagacgaaacagtga

SEQ ID NO: 885510 - DNA, 33 bp, Homo sapien
gaacacacgcaaatcatacagacgaaacagtga

SEQ ID NO: 885511 - DNA, 33 bp, Homo sapien
gaccccaaaggcaggcaagtggacctctcccga

SEQ ID NO: 885512 - DNA, 33 bp, Homo sapien
gaccccaaaggcaggcgagtggacctctcccga

SEQ ID NO: 885513 - DNA, 33 bp, Homo sapien
gaaaggacacacctgacggttctttggccttag

SEQ ID NO: 885514 - DNA, 33 bp, Homo sapien
gaaaggacacacctgatggttctttggccttag

SEQ ID NO: 885515 - DNA, 33 bp, Homo sapien
gcttggattgaatttccatcacttgtagccaaa

SEQ ID NO: 885516 - DNA, 33 bp, Homo sapien
gcttggattgaatttctatcacttgtagccaaa

SEQ ID NO: 885517 - DNA, 33 bp, Homo sapien
tgtgaaatacaccacagatgatgacgagcgctt

SEQ ID NO: 885518 - DNA, 33 bp, Homo sapien
tgtgaaatacaccacatatgatgacgagcgctt

SEQ ID NO: 885519 - DNA, 33 bp, Homo sapien
tcagcgtgctagaaatgaacaagaaaacgtgcc

SEQ ID NO: 885520 - DNA, 33 bp, Homo sapien
tcagcgtgctagaaattaacaagaaaacgtgcc

SEQ ID NO: 885521 - DNA, 33 bp, Homo sapien
gttaggcctcaataaccaggagagaactaagat

SEQ ID NO: 885522 - DNA, 33 bp, Homo sapien
gttaggcctcaataacgaggagagaactaagat

SEQ ID NO: 885523 - DNA, 33 bp, Homo sapien
cactaacaattatgcggagaagaaatttcaaac

SEQ ID NO: 885524 - DNA, 33 bp, Homo sapien
cactaacaattatgcgtagaagaaatttcaaac

SEQ ID NO: 885525 - DNA, 33 bp, Homo sapien
gaaggccaactgtgcacctggcagagacacacg

SEQ ID NO: 885526 - DNA, 33 bp, Homo sapien
gaaggccaactgtgcatctggcagagacacacg

SEQ ID NO: 885527 - DNA, 33 bp, Homo sapien
tcaggtgcgggacgtcactagctgcatctctca

SEQ ID NO: 885528 - DNA, 33 bp, Homo sapien
tcaggtgcgggacgtcgctagctgcatctctca

SEQ ID NO: 885529 - DNA, 33 bp, Homo sapien
ccacctcatccaaacacgggccaacgggaactt

SEQ ID NO: 885530 - DNA, 33 bp, Homo sapien
ccacctcatccaaacatgggccaacgggaactt

SEQ ID NO: 885531 - DNA, 33 bp, Homo sapien
ttggaatatcttacagaatctcgaatagtggcc

SEQ ID NO: 885532 - DNA, 33 bp, Homo sapien
ttggaatatcttacagcatctcgaatagtggcc

SEQ ID NO: 885533 - DNA, 33 bp, Homo sapien
ggtaattgcccacacaccacattctactgagcc

SEQ ID NO: 885534 - DNA, 33 bp, Homo sapien
ggtaattgcccacacatcacattctactgagcc

SEQ ID NO: 885535 - DNA, 33 bp, Homo sapien
aagcctacagcagcaccgtcatgtcctggcttc

SEQ ID NO: 885536 - DNA, 33 bp, Homo sapien
aagcctacagcagcacggtcatgtcctggcttc

SEQ ID NO: 885537 - DNA, 33 bp, Homo sapien
ctgagccttgtcgtcaaaaccacctgctgagtt

SEQ ID NO: 885538 - DNA, 33 bp, Homo sapien
ctgagccttgtcgtcacaaccacctgctgagtt

SEQ ID NO: 885539 - DNA, 33 bp, Homo sapien
ggggaaagaacggatgccacccggaagcatgcc

SEQ ID NO: 885540 - DNA, 33 bp, Homo sapien
ggggaaagaacggatgtcacccggaagcatgcc

SEQ ID NO: 885541 - DNA, 33 bp, Homo sapien
agccctcctcagtggcaaagtgatttagctcag

SEQ ID NO: 885542 - DNA, 33 bp, Homo sapien
agccctcctcagtggcgaagtgatttagctcag

SEQ ID NO: 885543 - DNA, 33 bp, Homo sapien
gcgactttgagtgggagcttccatctgtctggt

SEQ ID NO: 885544 - DNA, 33 bp, Homo sapien
gcgactttgagtgggatcttccatctgtctggt

SEQ ID NO: 885545 - DNA, 33 bp, Homo sapien
aagatttctcatctgcaatgtgcgtatgcaacc

SEQ ID NO: 885546 - DNA, 33 bp, Homo sapien
aagatttctcatctgcgatgtgcgtatgcaacc

SEQ ID NO: 885547 - DNA, 33 bp, Homo sapien
cattctgctgtgggtcacgtcacagacacggcg

SEQ ID NO: 885548 - DNA, 33 bp, Homo sapien
cattctgctgtgggtcgcgtcacagacacggcg

SEQ ID NO: 885549 - DNA, 33 bp, Homo sapien
aaagaggaaagaacacagaagtgagcgccccca

SEQ ID NO: 885550 - DNA, 33 bp, Homo sapien
aaagaggaaagaacacggaagtgagcgccccca

SEQ ID NO: 885551 - DNA, 33 bp, Homo sapien
ttattgaggcatatacagctatttcctttgggg

SEQ ID NO: 885552 - DNA, 33 bp, Homo sapien
ttattgaggcatatacggctatttcctttgggg

SEQ ID NO: 885553 - DNA, 33 bp, Homo sapien
cttttcccagcaacccagaactctggtgccctt

SEQ ID NO: 885554 - DNA, 33 bp, Homo sapien
cttttcccagcaaccccgaactctggtgccctt

SEQ ID NO: 885555 - DNA, 33 bp, Homo sapien
atcaaaatgtactcaactgtctaagtgtgtgca

SEQ ID NO: 885556 - DNA, 33 bp, Homo sapien
atcaaaatgtactcaattgtctaagtgtgtgca

SEQ ID NO: 885557 - DNA, 33 bp, Homo sapien
cattagcaaaggcacactggaataagcaaggta

SEQ ID NO: 885558 - DNA, 33 bp, Homo sapien
cattagcaaaggcacattggaataagcaaggta

SEQ ID NO: 885559 - DNA, 33 bp, Homo sapien
agttcccgtgtatacagattctgaacccaggca

SEQ ID NO: 885560 - DNA, 33 bp, Homo sapien
agttcccgtgtatacatattctgaacccaggca

SEQ ID NO: 885561 - DNA, 33 bp, Homo sapien
acaggaagttcccataggtacagatcctatatc

SEQ ID NO: 885562 - DNA, 33 bp, Homo sapien
acaggaagttcccatatgtacagatcctatatc

SEQ ID NO: 885563 - DNA, 33 bp, Homo sapien
actgtaaaaaagcaggcagatttgacccatgag

SEQ ID NO: 885564 - DNA, 33 bp, Homo sapien
actgtaaaaaagcaggtagatttgacccatgag

SEQ ID NO: 885565 - DNA, 33 bp, Homo sapien
agaatacatttacatcacaatacatcaaactct

SEQ ID NO: 885566 - DNA, 33 bp, Homo sapien
agaatacatttacatctcaatacatcaaactct

SEQ ID NO: 885567 - DNA, 33 bp, Homo sapien
catatatcttttagctcagatcatttgtgaaag

SEQ ID NO: 885568 - DNA, 33 bp, Homo sapien
catatatcttttagcttagatcatttgtgaaag

SEQ ID NO: 885569 - DNA, 33 bp, Homo sapien
tattctgggattgaaaagaggcaacaatggaca

SEQ ID NO: 885570 - DNA, 33 bp, Homo sapien
tattctgggattgaaaggaggcaacaatggaca

SEQ ID NO: 885571 - DNA, 33 bp, Homo sapien
tatggcaaaatacgtacaagaaactctgtcact

SEQ ID NO: 885572 - DNA, 33 bp, Homo sapien
tatggcaaaatacgtagaagaaactctgtcact

SEQ ID NO: 885573 - DNA, 33 bp, Homo sapien
tgactaaactttctcaaactttgtggaccatag

SEQ ID NO: 885574 - DNA, 33 bp, Homo sapien
tgactaaactttctcagactttgtggaccatag

SEQ ID NO: 885575 - DNA, 33 bp, Homo sapien
tgacacctgaaatcgccccaacagccctaggag

SEQ ID NO: 885576 - DNA, 33 bp, Homo sapien
tgacacctgaaatcgctccaacagccctaggag

SEQ ID NO: 885577 - DNA, 33 bp, Homo sapien
caaactactgcatcacaaaaagatcctgactaa

SEQ ID NO: 885578 - DNA, 33 bp, Homo sapien
caaactactgcatcacgaaaagatcctgactaa

SEQ ID NO: 885579 - DNA, 33 bp, Homo sapien
tagtgatttgaagagaataggttatgtggttct

SEQ ID NO: 885580 - DNA, 33 bp, Homo sapien
tagtgatttgaagagagtaggttatgtggttct

SEQ ID NO: 885581 - DNA, 33 bp, Homo sapien
ggaaacgaagatcgaacgcactaaatgcctacg

SEQ ID NO: 885582 - DNA, 33 bp, Homo sapien
ggaaacgaagatcgaatgcactaaatgcctacg

SEQ ID NO: 885583 - DNA, 33 bp, Homo sapien
cccagatcattttgtaaagtcctctgtagaaca

SEQ ID NO: 885584 - DNA, 33 bp, Homo sapien
cccagatcattttgtagagtcctctgtagaaca

SEQ ID NO: 885585 - DNA, 33 bp, Homo sapien
tcccaatgattagctacgaggcactagaaaaag

SEQ ID NO: 885586 - DNA, 33 bp, Homo sapien
tcccaatgattagctatgaggcactagaaaaag

SEQ ID NO: 885587 - DNA, 33 bp, Homo sapien
ggcttatgtctgaacacggaggacgaggattca

SEQ ID NO: 885588 - DNA, 33 bp, Homo sapien
ggcttatgtctgaacatggaggacgaggattca

SEQ ID NO: 885589 - DNA, 33 bp, Homo sapien
ctctttcttgttgccaaattcatattcaggact

SEQ ID NO: 885590 - DNA, 33 bp, Homo sapien
ctctttcttgttgccatattcatattcaggact

SEQ ID NO: 885591 - DNA, 33 bp, Homo sapien
gtaacccctggttgaagcttttgacaaagtgag

SEQ ID NO: 885592 - DNA, 33 bp, Homo sapien
gtaacccctggttgaatcttttgacaaagtgag

SEQ ID NO: 885593 - DNA, 33 bp, Homo sapien
actacaattatgaggactatgggcaaagtcagt

SEQ ID NO: 885594 - DNA, 33 bp, Homo sapien
actacaattatgaggagtatgggcaaagtcagt

SEQ ID NO: 885595 - DNA, 33 bp, Homo sapien
gtcctgacaccactccccgcagtaagttctctg

SEQ ID NO: 885596 - DNA, 33 bp, Homo sapien
gtcctgacaccactccgcgcagtaagttctctg

SEQ ID NO: 885597 - DNA, 33 bp, Homo sapien
tgaaatgggagcatggaaagtttggttgacttt

SEQ ID NO: 885598 - DNA, 33 bp, Homo sapien
tgaaatgggagcatggcaagtttggttgacttt

SEQ ID NO: 885599 - DNA, 33 bp, Homo sapien
tttgaaggtatcagtgaactgaaaaggtaataa

SEQ ID NO: 885600 - DNA, 33 bp, Homo sapien
tttgaaggtatcagtgtactgaaaaggtaataa

SEQ ID NO: 885601 - DNA, 33 bp, Homo sapien
tgcactggaagcatccacgaggtgggccacact

SEQ ID NO: 885602 - DNA, 33 bp, Homo sapien
tgcactggaagcatccgcgaggtgggccacact

SEQ ID NO: 885603 - DNA, 33 bp, Homo sapien
aaaccctaccccaggagaatctggtattggtgg

SEQ ID NO: 885604 - DNA, 33 bp, Homo sapien
aaaccctaccccaggataatctggtattggtgg

SEQ ID NO: 885605 - DNA, 33 bp, Homo sapien
aatttacttgctagaacgtacttgtaaagttta

SEQ ID NO: 885606 - DNA, 33 bp, Homo sapien
aatttacttgctagaaggtacttgtaaagttta

SEQ ID NO: 885607 - DNA, 33 bp, Homo sapien
tctgtcttgcaagaacagcttaatttctcccac

SEQ ID NO: 885608 - DNA, 33 bp, Homo sapien
tctgtcttgcaagaacggcttaatttctcccac

SEQ ID NO: 885609 - DNA, 33 bp, Homo sapien
gagaaggtactagtcaacctccaggtaagttca

SEQ ID NO: 885610 - DNA, 33 bp, Homo sapien
gagaaggtactagtcatcctccaggtaagttca

SEQ ID NO: 885611 - DNA, 33 bp, Homo sapien
aattaccttgaccaacaggccaaaggcacagag

SEQ ID NO: 885612 - DNA, 33 bp, Homo sapien
aattaccttgaccaacgggccaaaggcacagag

SEQ ID NO: 885613 - DNA, 33 bp, Homo sapien
gccagccagtgtgacaatgacttgcatgaaatc

SEQ ID NO: 885614 - DNA, 33 bp, Homo sapien
gccagccagtgtgacagtgacttgcatgaaatc

SEQ ID NO: 885615 - DNA, 33 bp, Homo sapien
caagagacagttctcaccttcaagttgctccca

SEQ ID NO: 885616 - DNA, 33 bp, Homo sapien
caagagacagttctcatcttcaagttgctccca

SEQ ID NO: 885617 - DNA, 33 bp, Homo sapien
cagttctgagcagcaaagagactattaaataat

SEQ ID NO: 885618 - DNA, 33 bp, Homo sapien
cagttctgagcagcaacgagactattaaataat

SEQ ID NO: 885619 - DNA, 33 bp, Homo sapien
tttgaggcatttactacggcttgttttagatta

SEQ ID NO: 885620 - DNA, 33 bp, Homo sapien
tttgaggcatttactatggcttgttttagatta

SEQ ID NO: 885621 - DNA, 33 bp, Homo sapien
tatagctctaaatgcccatcctcaaaagaagaa

SEQ ID NO: 885622 - DNA, 33 bp, Homo sapien
tatagctctaaatgcctatcctcaaaagaagaa

SEQ ID NO: 885623 - DNA, 33 bp, Homo sapien
aacctctggagctgaacgaacggtacagcacag

SEQ ID NO: 885624 - DNA, 33 bp, Homo sapien
aacctctggagctgaatgaacggtacagcacag

SEQ ID NO: 885625 - DNA, 33 bp, Homo sapien
ctctcgtcagaatggacgccagctgctggtgcg

SEQ ID NO: 885626 - DNA, 33 bp, Homo sapien
ctctcgtcagaatggatgccagctgctggtgcg

SEQ ID NO: 885627 - DNA, 33 bp, Homo sapien
gggcacagcgagccaactaactgaactgtgtgt

SEQ ID NO: 885628 - DNA, 33 bp, Homo sapien
gggcacagcgagccaagtaactgaactgtgtgt

SEQ ID NO: 885629 - DNA, 33 bp, Homo sapien
agggaactgtcagtgaaggaaggagggatgtga

SEQ ID NO: 885630 - DNA, 33 bp, Homo sapien
agggaactgtcagtgagggaaggagggatgtga

SEQ ID NO: 885631 - DNA, 33 bp, Homo sapien
agtgtagaattcggccacactcagcacatttac

SEQ ID NO: 885632 - DNA, 33 bp, Homo sapien
agtgtagaattcggccgcactcagcacatttac

SEQ ID NO: 885633 - DNA, 33 bp, Homo sapien
tttcctcagtggggacacaagcagcctctaaaa

SEQ ID NO: 885634 - DNA, 33 bp, Homo sapien
tttcctcagtggggacgcaagcagcctctaaaa

SEQ ID NO: 885635 - DNA, 33 bp, Homo sapien
tcacgcatcattattacggtgtatttacaaact

SEQ ID NO: 885636 - DNA, 33 bp, Homo sapien
tcacgcatcattattatggtgtatttacaaact

SEQ ID NO: 885637 - DNA, 33 bp, Homo sapien
tcatgttcgatttgtacgaagtgagttgtgaag

SEQ ID NO: 885638 - DNA, 33 bp, Homo sapien
tcatgttcgatttgtatgaagtgagttgtgaag

SEQ ID NO: 885639 - DNA, 33 bp, Homo sapien
tggattacggtggttaccatttcctaatcccta

SEQ ID NO: 885640 - DNA, 33 bp, Homo sapien
tggattacggtggttatcatttcctaatcccta

SEQ ID NO: 885641 - DNA, 33 bp, Homo sapien
agtgagcagaaaaaaacgtcataacacaacggc

SEQ ID NO: 885642 - DNA, 33 bp, Homo sapien
agtgagcagaaaaaaatgtcataacacaacggc

SEQ ID NO: 885643 - DNA, 33 bp, Homo sapien
aagagcagagtgctccaattctgtcaacataga

SEQ ID NO: 885644 - DNA, 33 bp, Homo sapien
aagagcagagtgctccgattctgtcaacataga

SEQ ID NO: 885645 - DNA, 33 bp, Homo sapien
aacacaaaagtttagacgtgtgaaacagtgaag

SEQ ID NO: 885646 - DNA, 33 bp, Homo sapien
aacacaaaagtttagatgtgtgaaacagtgaag

SEQ ID NO: 885647 - DNA, 33 bp, Homo sapien
tgcagatgataagttaaatgatggttactgaag

SEQ ID NO: 885648 - DNA, 33 bp, Homo sapien
tgcagatgataagttagatgatggttactgaag

SEQ ID NO: 885649 - DNA, 33 bp, Homo sapien
atatttcccatgcagcaatagctcctgctgtag

SEQ ID NO: 885650 - DNA, 33 bp, Homo sapien
atatttcccatgcagccatagctcctgctgtag

SEQ ID NO: 885651 - DNA, 33 bp, Homo sapien
gcaacactgttacatgaaaatcaaagaacaggg

SEQ ID NO: 885652 - DNA, 33 bp, Homo sapien
gcaacactgttacatggaaatcaaagaacaggg

SEQ ID NO: 885653 - DNA, 33 bp, Homo sapien
gaaactctcacaacatcaaatcattacaaaggc

SEQ ID NO: 885654 - DNA, 33 bp, Homo sapien
gaaactctcacaacattaaatcattacaaaggc

SEQ ID NO: 885655 - DNA, 33 bp, Homo sapien
taatgggataaaataccctagatgtcaacaaaa

SEQ ID NO: 885656 - DNA, 33 bp, Homo sapien
taatgggataaaatactctagatgtcaacaaaa

SEQ ID NO: 885657 - DNA, 33 bp, Homo sapien
atggcattccaggtaacataaacagcaagcaat

SEQ ID NO: 885658 - DNA, 33 bp, Homo sapien
atggcattccaggtaatataaacagcaagcaat

SEQ ID NO: 885659 - DNA, 33 bp, Homo sapien
ctgcataatttctaacacctcatccaatgaaac

SEQ ID NO: 885660 - DNA, 33 bp, Homo sapien
ctgcataatttctaacgcctcatccaatgaaac

SEQ ID NO: 885661 - DNA, 33 bp, Homo sapien
caatacatttacctgaaatttaaaagcgtagca

SEQ ID NO: 885662 - DNA, 33 bp, Homo sapien
caatacatttacctgagatttaaaagcgtagca

SEQ ID NO: 885663 - DNA, 33 bp, Homo sapien
tgacaagggattccaccattaatgttttcatgc

SEQ ID NO: 885664 - DNA, 33 bp, Homo sapien
tgacaagggattccactattaatgttttcatgc

SEQ ID NO: 885665 - DNA, 33 bp, Homo sapien
aatggacagtacaaaactgggaagagtttccaa

SEQ ID NO: 885666 - DNA, 33 bp, Homo sapien
aatggacagtacaaaagtgggaagagtttccaa

SEQ ID NO: 885667 - DNA, 33 bp, Homo sapien
aaggcatcaaaggccaagttagagacagggcag

SEQ ID NO: 885668 - DNA, 33 bp, Homo sapien
aaggcatcaaaggccaggttagagacagggcag

SEQ ID NO: 885669 - DNA, 33 bp, Homo sapien
ccacttttaatttcacacggattaaagacggtt

SEQ ID NO: 885670 - DNA, 33 bp, Homo sapien
ccacttttaatttcacgcggattaaagacggtt

SEQ ID NO: 885671 - DNA, 33 bp, Homo sapien
cctgctctgcaggaacagtctcagagctgtaac

SEQ ID NO: 885672 - DNA, 33 bp, Homo sapien
cctgctctgcaggaaccgtctcagagctgtaac

SEQ ID NO: 885673 - DNA, 33 bp, Homo sapien
tccctttatccccccaataaatagcatattctg

SEQ ID NO: 885674 - DNA, 33 bp, Homo sapien
tccctttatccccccagtaaatagcatattctg

SEQ ID NO: 885675 - DNA, 33 bp, Homo sapien
aatctctcctcactaaatcacaactttgataaa

SEQ ID NO: 885676 - DNA, 33 bp, Homo sapien
aatctctcctcactaagtcacaactttgataaa

SEQ ID NO: 885677 - DNA, 33 bp, Homo sapien
ttagagaaaaataaaaccagcaacctctttatt

SEQ ID NO: 885678 - DNA, 33 bp, Homo sapien
ttagagaaaaataaaagcagcaacctctttatt

SEQ ID NO: 885679 - DNA, 33 bp, Homo sapien
tgaggcagctccccacacacagagggctcccag

SEQ ID NO: 885680 - DNA, 33 bp, Homo sapien
tgaggcagctccccacgcacagagggctcccag

SEQ ID NO: 885681 - DNA, 33 bp, Homo sapien
acccgatggcctacaccggaaagtcatgtagga

SEQ ID NO: 885682 - DNA, 33 bp, Homo sapien
acccgatggcctacactggaaagtcatgtagga

SEQ ID NO: 885683 - DNA, 33 bp, Homo sapien
cactaaggaataaaccagcagctctccacgagg

SEQ ID NO: 885684 - DNA, 33 bp, Homo sapien
cactaaggaataaacccgcagctctccacgagg

SEQ ID NO: 885685 - DNA, 33 bp, Homo sapien
ggcctagtttggccacagcagggaacatgctgc

SEQ ID NO: 885686 - DNA, 33 bp, Homo sapien
ggcctagtttggccacggcagggaacatgctgc

SEQ ID NO: 885687 - DNA, 33 bp, Homo sapien
agtgttacccttcagcgctggggttctttgagc

SEQ ID NO: 885688 - DNA, 33 bp, Homo sapien
agtgttacccttcagctctggggttctttgagc

SEQ ID NO: 885689 - DNA, 33 bp, Homo sapien
tgcgaagagggacaccaacccttacaatctcac

SEQ ID NO: 885690 - DNA, 33 bp, Homo sapien
tgcgaagagggacaccgacccttacaatctcac

SEQ ID NO: 885691 - DNA, 33 bp, Homo sapien
ggttcccatatacttcacacagtttgcttatta

SEQ ID NO: 885692 - DNA, 33 bp, Homo sapien
ggttcccatatacttcgcacagtttgcttatta

SEQ ID NO: 885693 - DNA, 33 bp, Homo sapien
cagatattttcacacacaggtgtacatacacac

SEQ ID NO: 885694 - DNA, 33 bp, Homo sapien
cagatattttcacacataggtgtacatacacac

SEQ ID NO: 885695 - DNA, 33 bp, Homo sapien
taacaaggcgaaggaacctccaggtcacactga

SEQ ID NO: 885696 - DNA, 33 bp, Homo sapien
taacaaggcgaaggaatctccaggtcacactga

SEQ ID NO: 885697 - DNA, 33 bp, Homo sapien
aattaaatacagggacaccagcaagatggagaa

SEQ ID NO: 885698 - DNA, 33 bp, Homo sapien
aattaaatacagggactccagcaagatggagaa

SEQ ID NO: 885699 - DNA, 33 bp, Homo sapien
ccttctgggctttgcactcacagggggtgctgc

SEQ ID NO: 885700 - DNA, 33 bp, Homo sapien
ccttctgggctttgcattcacagggggtgctgc

SEQ ID NO: 885701 - DNA, 33 bp, Homo sapien
agaatgtcatgaacaacggctatataccaacaa

SEQ ID NO: 885702 - DNA, 33 bp, Homo sapien
agaatgtcatgaacaatggctatataccaacaa

SEQ ID NO: 885703 - DNA, 33 bp, Homo sapien
agaagcgcacacaccaatggaaaaattaaatgt

SEQ ID NO: 885704 - DNA, 33 bp, Homo sapien
agaagcgcacacaccagtggaaaaattaaatgt

SEQ ID NO: 885705 - DNA, 33 bp, Homo sapien
ggaagacactctgcaacgcttatacctttaatt

SEQ ID NO: 885706 - DNA, 33 bp, Homo sapien
ggaagacactctgcaatgcttatacctttaatt

SEQ ID NO: 885707 - DNA, 33 bp, Homo sapien
ctcaactaaggaccccaaaccactagtgtctgt

SEQ ID NO: 885708 - DNA, 33 bp, Homo sapien
ctcaactaaggaccccgaaccactagtgtctgt

SEQ ID NO: 885709 - DNA, 33 bp, Homo sapien
cagagatgctggatgcagaaaacagcctctgtc

SEQ ID NO: 885710 - DNA, 33 bp, Homo sapien
cagagatgctggatgccgaaaacagcctctgtc

SEQ ID NO: 885711 - DNA, 33 bp, Homo sapien
ttacatgtcctgcttaccctaataatgtgttat

SEQ ID NO: 885712 - DNA, 33 bp, Homo sapien
ttacatgtcctgcttatcctaataatgtgttat

SEQ ID NO: 885713 - DNA, 33 bp, Homo sapien
aggaccataagtggcacggtagtatattgatga

SEQ ID NO: 885714 - DNA, 33 bp, Homo sapien
aggaccataagtggcatggtagtatattgatga

SEQ ID NO: 885715 - DNA, 33 bp, Homo sapien
gacattcgcatcaccaagaaaggagacaccaca

SEQ ID NO: 885716 - DNA, 33 bp, Homo sapien
gacattcgcatcaccacgaaaggagacaccaca

SEQ ID NO: 885717 - DNA, 33 bp, Homo sapien
atgatatctgcataaaaaggcagttcttcttct

SEQ ID NO: 885718 - DNA, 33 bp, Homo sapien
atgatatctgcataaagaggcagttcttcttct

SEQ ID NO: 885719 - DNA, 33 bp, Homo sapien
cattgcacggtgtgttcaaaatgtccgcagcta

SEQ ID NO: 885720 - DNA, 33 bp, Homo sapien
cattgcacggtgtgtttaaaatgtccgcagcta

SEQ ID NO: 885721 - DNA, 33 bp, Homo sapien
gtgcgttttctagtctaaaatctaagtctccat

SEQ ID NO: 885722 - DNA, 33 bp, Homo sapien
gtgcgttttctagtctgaaatctaagtctccat

SEQ ID NO: 885723 - DNA, 33 bp, Homo sapien
tgatgatctcagtaaccgatcagagaatcaacg

SEQ ID NO: 885724 - DNA, 33 bp, Homo sapien
tgatgatctcagtaacggatcagagaatcaacg

SEQ ID NO: 885725 - DNA, 33 bp, Homo sapien
tatacagataccacaacttcagatattgatcag

SEQ ID NO: 885726 - DNA, 33 bp, Homo sapien
tatacagataccacaatttcagatattgatcag

SEQ ID NO: 885727 - DNA, 33 bp, Homo sapien
tgccttcctaaaaaccaagatggatgcaaatga

SEQ ID NO: 885728 - DNA, 33 bp, Homo sapien
tgccttcctaaaaaccgagatggatgcaaatga

SEQ ID NO: 885729 - DNA, 33 bp, Homo sapien
cagaaatatttacagcagagttcccgtgtgagc

SEQ ID NO: 885730 - DNA, 33 bp, Homo sapien
cagaaatatttacagcggagttcccgtgtgagc

SEQ ID NO: 885731 - DNA, 33 bp, Homo sapien
agaagctcattctccaagttgagagacgtgaat

SEQ ID NO: 885732 - DNA, 33 bp, Homo sapien
agaagctcattctccacgttgagagacgtgaat

SEQ ID NO: 885733 - DNA, 33 bp, Homo sapien
aggaagctcctagcaccgtagaagctcattctc

SEQ ID NO: 885734 - DNA, 33 bp, Homo sapien
aggaagctcctagcacggtagaagctcattctc

SEQ ID NO: 885735 - DNA, 33 bp, Homo sapien
tgcttgaggcctaataactttgcttggtctttt

SEQ ID NO: 885736 - DNA, 33 bp, Homo sapien
tgcttgaggcctaatatctttgcttggtctttt

SEQ ID NO: 885737 - DNA, 33 bp, Homo sapien
gcttagcttatgggtacgcagaagatctgcatc

SEQ ID NO: 885738 - DNA, 33 bp, Homo sapien
gcttagcttatgggtatgcagaagatctgcatc

SEQ ID NO: 885739 - DNA, 33 bp, Homo sapien
tctccttgtttatggaggctaaaatttgaattt

SEQ ID NO: 885740 - DNA, 33 bp, Homo sapien
tctccttgtttatggatgctaaaatttgaattt

SEQ ID NO: 885741 - DNA, 33 bp, Homo sapien
ctccgtgaggcttaaacgagagcagcctcagga

SEQ ID NO: 885742 - DNA, 33 bp, Homo sapien
ctccgtgaggcttaaatgagagcagcctcagga

SEQ ID NO: 885743 - DNA, 33 bp, Homo sapien
acacacatagacatacaaagacacaggtacaca

SEQ ID NO: 885744 - DNA, 33 bp, Homo sapien
acacacatagacatacgaagacacaggtacaca

SEQ ID NO: 885745 - DNA, 33 bp, Homo sapien
cacacgcacagtgcccaatcctgaggaggaacg

SEQ ID NO: 885746 - DNA, 33 bp, Homo sapien
cacacgcacagtgcccgatcctgaggaggaacg

SEQ ID NO: 885747 - DNA, 33 bp, Homo sapien
aaacccattcactagcaaaaactgactcaggct

SEQ ID NO: 885748 - DNA, 33 bp, Homo sapien
aaacccattcactagcgaaaactgactcaggct

SEQ ID NO: 885749 - DNA, 33 bp, Homo sapien
gtgtgcctttgtcatcaaaatacctgcagttcc

SEQ ID NO: 885750 - DNA, 33 bp, Homo sapien
gtgtgcctttgtcatcgaaatacctgcagttcc

SEQ ID NO: 885751 - DNA, 33 bp, Homo sapien
ggtgctcactttaatcccaagtcattcatctta

SEQ ID NO: 885752 - DNA, 33 bp, Homo sapien
ggtgctcactttaatctcaagtcattcatctta

SEQ ID NO: 885753 - DNA, 33 bp, Homo sapien
tgcagaaaacaaacaaaaatcacctgcaatcgt

SEQ ID NO: 885754 - DNA, 33 bp, Homo sapien
tgcagaaaacaaacaagaatcacctgcaatcgt

SEQ ID NO: 885755 - DNA, 33 bp, Homo sapien
tcactgttactagcccagcgtagtggcgtgcac

SEQ ID NO: 885756 - DNA, 33 bp, Homo sapien
tcactgttactagcccggcgtagtggcgtgcac

SEQ ID NO: 885757 - DNA, 33 bp, Homo sapien
acgcgtaagaaccacacaggccgggcctgccag

SEQ ID NO: 885758 - DNA, 33 bp, Homo sapien
acgcgtaagaaccacataggccgggcctgccag

SEQ ID NO: 885759 - DNA, 33 bp, Homo sapien
atttgttctgttcatcaagagggctcccaaaca

SEQ ID NO: 885760 - DNA, 33 bp, Homo sapien
atttgttctgttcatcgagagggctcccaaaca

SEQ ID NO: 885761 - DNA, 33 bp, Homo sapien
gaatcctaacaacttaccagatttctcctgttt

SEQ ID NO: 885762 - DNA, 33 bp, Homo sapien
gaatcctaacaacttatcagatttctcctgttt

SEQ ID NO: 885763 - DNA, 33 bp, Homo sapien
taaaacatacggtgaccggacatataaccttta

SEQ ID NO: 885764 - DNA, 33 bp, Homo sapien
taaaacatacggtgactggacatataaccttta

SEQ ID NO: 885765 - DNA, 33 bp, Homo sapien
agctcagctcttaaaacgcaagtctgccgacgc

SEQ ID NO: 885766 - DNA, 33 bp, Homo sapien
agctcagctcttaaaatgcaagtctgccgacgc

SEQ ID NO: 885767 - DNA, 33 bp, Homo sapien
agggaaaggtgaggccaacgacactgggcctac

SEQ ID NO: 885768 - DNA, 33 bp, Homo sapien
agggaaaggtgaggccgacgacactgggcctac

SEQ ID NO: 885769 - DNA, 33 bp, Homo sapien
cttgcctggagaacaaatgaacgctgcacgtga

SEQ ID NO: 885770 - DNA, 33 bp, Homo sapien
cttgcctggagaacaagtgaacgctgcacgtga

SEQ ID NO: 885771 - DNA, 33 bp, Homo sapien
aacggtgcctttgcagcagatcccattgttcat

SEQ ID NO: 885772 - DNA, 33 bp, Homo sapien
aacggtgcctttgcaggagatcccattgttcat

SEQ ID NO: 885773 - DNA, 33 bp, Homo sapien
agacacttttgtacaaataactgagctccataa

SEQ ID NO: 885774 - DNA, 33 bp, Homo sapien
agacacttttgtacaagtaactgagctccataa

SEQ ID NO: 885775 - DNA, 33 bp, Homo sapien
caaaaagtcctcgtagaagcaatgtgaatcaca

SEQ ID NO: 885776 - DNA, 33 bp, Homo sapien
caaaaagtcctcgtagcagcaatgtgaatcaca

SEQ ID NO: 885777 - DNA, 33 bp, Homo sapien
aaaaactgatttcagaagaccgagaacattttg

SEQ ID NO: 885778 - DNA, 33 bp, Homo sapien
aaaaactgatttcagaggaccgagaacattttg

SEQ ID NO: 885779 - DNA, 33 bp, Homo sapien
actaccactttatatgacaggtttgtgtgtctg

SEQ ID NO: 885780 - DNA, 33 bp, Homo sapien
actaccactttatatggcaggtttgtgtgtctg

SEQ ID NO: 885781 - DNA, 33 bp, Homo sapien
cctccttattctgccacagtagagtgtatggaa

SEQ ID NO: 885782 - DNA, 33 bp, Homo sapien
cctccttattctgccatagtagagtgtatggaa

SEQ ID NO: 885783 - DNA, 33 bp, Homo sapien
gataattgagagaagccaccgaaacgtgctgtt

SEQ ID NO: 885784 - DNA, 33 bp, Homo sapien
gataattgagagaagctaccgaaacgtgctgtt

SEQ ID NO: 885785 - DNA, 33 bp, Homo sapien
gcgtctgggacccacacgagacggtttgtgtcc

SEQ ID NO: 885786 - DNA, 33 bp, Homo sapien
gcgtctgggacccacatgagacggtttgtgtcc

SEQ ID NO: 885787 - DNA, 33 bp, Homo sapien
ctgatctcacagggtccaaggtccaggagtggg

SEQ ID NO: 885788 - DNA, 33 bp, Homo sapien
ctgatctcacagggtctaaggtccaggagtggg

SEQ ID NO: 885789 - DNA, 33 bp, Homo sapien
tccccgatcacagcacaggagagagtgaacagt

SEQ ID NO: 885790 - DNA, 33 bp, Homo sapien
tccccgatcacagcacgggagagagtgaacagt

SEQ ID NO: 885791 - DNA, 33 bp, Homo sapien
acaaagtgtcaatcaacgttttcttcaataatg

SEQ ID NO: 885792 - DNA, 33 bp, Homo sapien
acaaagtgtcaatcaatgttttcttcaataatg

SEQ ID NO: 885793 - DNA, 33 bp, Homo sapien
gtggtttagaaattcacatctcaatcagctaca

SEQ ID NO: 885794 - DNA, 33 bp, Homo sapien
gtggtttagaaattcagatctcaatcagctaca

SEQ ID NO: 885795 - DNA, 33 bp, Homo sapien
catgttttgaagaaaaatccaataattacttgt

SEQ ID NO: 885796 - DNA, 33 bp, Homo sapien
catgttttgaagaaaagtccaataattacttgt

SEQ ID NO: 885797 - DNA, 33 bp, Homo sapien
gatgacgacagtcccacgtgatcctcaacgtca

SEQ ID NO: 885798 - DNA, 33 bp, Homo sapien
gatgacgacagtcccatgtgatcctcaacgtca

SEQ ID NO: 885799 - DNA, 33 bp, Homo sapien
gtgcacttattagaacagtaagctctatcttat

SEQ ID NO: 885800 - DNA, 33 bp, Homo sapien
gtgcacttattagaacggtaagctctatcttat

SEQ ID NO: 885801 - DNA, 33 bp, Homo sapien
aggttaatttccaactcagctgcttcctgtcag

SEQ ID NO: 885802 - DNA, 33 bp, Homo sapien
aggttaatttccaacttagctgcttcctgtcag

SEQ ID NO: 885803 - DNA, 33 bp, Homo sapien
tgcccgccttgacctccatataaagtgctggga

SEQ ID NO: 885804 - DNA, 33 bp, Homo sapien
tgcccgccttgacctctatataaagtgctggga

SEQ ID NO: 885805 - DNA, 33 bp, Homo sapien
cacctccgtgttttccacatattgtctcccagt

SEQ ID NO: 885806 - DNA, 33 bp, Homo sapien
cacctccgtgttttccgcatattgtctcccagt

SEQ ID NO: 885807 - DNA, 33 bp, Homo sapien
agacgcttgtcatgataagctggccacattatt

SEQ ID NO: 885808 - DNA, 33 bp, Homo sapien
agacgcttgtcatgattagctggccacattatt

SEQ ID NO: 885809 - DNA, 33 bp, Homo sapien
agatgatgaactacccaaaatatctcgtgagaa

SEQ ID NO: 885810 - DNA, 33 bp, Homo sapien
agatgatgaactacccgaaatatctcgtgagaa

SEQ ID NO: 885811 - DNA, 33 bp, Homo sapien
acaccacacgtcaccactcacttcatggcaact

SEQ ID NO: 885812 - DNA, 33 bp, Homo sapien
acaccacacgtcaccagtcacttcatggcaact

SEQ ID NO: 885813 - DNA, 33 bp, Homo sapien
ggcccatcatccttacggccccaaatgtccaca

SEQ ID NO: 885814 - DNA, 33 bp, Homo sapien
ggcccatcatccttactgccccaaatgtccaca

SEQ ID NO: 885815 - DNA, 33 bp, Homo sapien
tggatgggcgaattgtcaacctgtcttcagcac

SEQ ID NO: 885816 - DNA, 33 bp, Homo sapien
tggatgggcgaattgtgaacctgtcttcagcac

SEQ ID NO: 885817 - DNA, 33 bp, Homo sapien
gtagtgggaggtggaaatcataacgcttagctg

SEQ ID NO: 885818 - DNA, 33 bp, Homo sapien
gtagtgggaggtggaagtcataacgcttagctg

SEQ ID NO: 885819 - DNA, 33 bp, Homo sapien
gtcccctgcctgcgtccatcgaggggcctggct

SEQ ID NO: 885820 - DNA, 33 bp, Homo sapien
gtcccctgcctgcgtctatcgaggggcctggct

SEQ ID NO: 885821 - DNA, 33 bp, Homo sapien
gggggatcgggaatcaagcggaaggtgcaggtt

SEQ ID NO: 885822 - DNA, 33 bp, Homo sapien
gggggatcgggaatcaggcggaaggtgcaggtt

SEQ ID NO: 885823 - DNA, 33 bp, Homo sapien
aagggtggaagtagaagtgactggaacagcctg

SEQ ID NO: 885824 - DNA, 33 bp, Homo sapien
aagggtggaagtagaattgactggaacagcctg

SEQ ID NO: 885825 - DNA, 33 bp, Homo sapien
ggaaggggctgtagacagaattggtgctcggat

SEQ ID NO: 885826 - DNA, 33 bp, Homo sapien
ggaaggggctgtagacggaattggtgctcggat

SEQ ID NO: 885827 - DNA, 33 bp, Homo sapien
ggattcacctttaaagaatttgagagcttgttt

SEQ ID NO: 885828 - DNA, 33 bp, Homo sapien
ggattcacctttaaaggatttgagagcttgttt

SEQ ID NO: 885829 - DNA, 33 bp, Homo sapien
ggacgctgtctaacgactcacgacactcctcgt

SEQ ID NO: 885830 - DNA, 33 bp, Homo sapien
ggacgctgtctaacgattcacgacactcctcgt

SEQ ID NO: 885831 - DNA, 33 bp, Homo sapien
tccatccagacagcacaagaaaggctctgtcat

SEQ ID NO: 885832 - DNA, 33 bp, Homo sapien
tccatccagacagcaccagaaaggctctgtcat

SEQ ID NO: 885833 - DNA, 33 bp, Homo sapien
gagcacccgagccctgaacggccacaccacgag

SEQ ID NO: 885834 - DNA, 33 bp, Homo sapien
gagcacccgagccctgcacggccacaccacgag

SEQ ID NO: 885835 - DNA, 33 bp, Homo sapien
gtatgtgtggtttgtaaatattttgtcccagtc

SEQ ID NO: 885836 - DNA, 33 bp, Homo sapien
gtatgtgtggtttgtacatattttgtcccagtc

SEQ ID NO: 885837 - DNA, 33 bp, Homo sapien
ctctccagggctttcactaacccacctgcccaa

SEQ ID NO: 885838 - DNA, 33 bp, Homo sapien
ctctccagggctttcagtaacccacctgcccaa

SEQ ID NO: 885839 - DNA, 33 bp, Homo sapien
ggctccaaacagaaaaataaaaacagaaggagg

SEQ ID NO: 885840 - DNA, 33 bp, Homo sapien
ggctccaaacagaaaagtaaaaacagaaggagg

SEQ ID NO: 885841 - DNA, 33 bp, Homo sapien
gtgactgttgggtgccacttgcccggagctgct

SEQ ID NO: 885842 - DNA, 33 bp, Homo sapien
gtgactgttgggtgccgcttgcccggagctgct

SEQ ID NO: 885843 - DNA, 33 bp, Homo sapien
atgtaagaaaggtctacgctttcagtttccaac

SEQ ID NO: 885844 - DNA, 33 bp, Homo sapien
atgtaagaaaggtctatgctttcagtttccaac

SEQ ID NO: 885845 - DNA, 33 bp, Homo sapien
gtgagcacagaacaaccgaaggaagcgcgggac

SEQ ID NO: 885846 - DNA, 33 bp, Homo sapien
gtgagcacagaacaactgaaggaagcgcgggac

SEQ ID NO: 885847 - DNA, 33 bp, Homo sapien
agccctctcaaatcccagcctggcaaggtcagt

SEQ ID NO: 885848 - DNA, 33 bp, Homo sapien
agccctctcaaatcccggcctggcaaggtcagt

SEQ ID NO: 885849 - DNA, 33 bp, Homo sapien
gttggaactctgctccaatttctgcattccgtg

SEQ ID NO: 885850 - DNA, 33 bp, Homo sapien
gttggaactctgctccgatttctgcattccgtg

SEQ ID NO: 885851 - DNA, 33 bp, Homo sapien
ccatcaaccgtaatctaagaagctgaaattaaa

SEQ ID NO: 885852 - DNA, 33 bp, Homo sapien
ccatcaaccgtaatcttagaagctgaaattaaa

SEQ ID NO: 885853 - DNA, 33 bp, Homo sapien
gtgttatgccatggataagaatagtagttggtt

SEQ ID NO: 885854 - DNA, 33 bp, Homo sapien
gtgttatgccatggatgagaatagtagttggtt

SEQ ID NO: 885855 - DNA, 33 bp, Homo sapien
ttgtggtcaacagaaaagaactcagcaaaatgt

SEQ ID NO: 885856 - DNA, 33 bp, Homo sapien
ttgtggtcaacagaaacgaactcagcaaaatgt

SEQ ID NO: 885857 - DNA, 33 bp, Homo sapien
ctccccatcaactagcaaagctgtggcaccaca

SEQ ID NO: 885858 - DNA, 33 bp, Homo sapien
ctccccatcaactagcgaagctgtggcaccaca

SEQ ID NO: 885859 - DNA, 33 bp, Homo sapien
ctccaaagaagatacacgaatgaccaacaggca

SEQ ID NO: 885860 - DNA, 33 bp, Homo sapien
ctccaaagaagatacatgaatgaccaacaggca

SEQ ID NO: 885861 - DNA, 33 bp, Homo sapien
aacttctgtgagtttaagttgcatgagtctcag

SEQ ID NO: 885862 - DNA, 33 bp, Homo sapien
aacttctgtgagtttaggttgcatgagtctcag

SEQ ID NO: 885863 - DNA, 33 bp, Homo sapien
ggcgtctgcaaagacacattccagtttggggaa

SEQ ID NO: 885864 - DNA, 33 bp, Homo sapien
ggcgtctgcaaagacatattccagtttggggaa

SEQ ID NO: 885865 - DNA, 33 bp, Homo sapien
gcctcaaacggaatccaacagttcaggcttcag

SEQ ID NO: 885866 - DNA, 33 bp, Homo sapien
gcctcaaacggaatccgacagttcaggcttcag

SEQ ID NO: 885867 - DNA, 33 bp, Homo sapien
acccttcagttcaccaacacaaccattgtctta

SEQ ID NO: 885868 - DNA, 33 bp, Homo sapien
acccttcagttcaccatcacaaccattgtctta

SEQ ID NO: 885869 - DNA, 33 bp, Homo sapien
tcaggtagaagtcaccaatggaggttaaggtgg

SEQ ID NO: 885870 - DNA, 33 bp, Homo sapien
tcaggtagaagtcaccgatggaggttaaggtgg

SEQ ID NO: 885871 - DNA, 33 bp, Homo sapien
taaatcatgactgcaacagaatacttcccagtg

SEQ ID NO: 885872 - DNA, 33 bp, Homo sapien
taaatcatgactgcaatagaatacttcccagtg

SEQ ID NO: 885873 - DNA, 33 bp, Homo sapien
gcgtttcctccctaagcattaacggcagcgtag

SEQ ID NO: 885874 - DNA, 33 bp, Homo sapien
gcgtttcctccctaagtattaacggcagcgtag

SEQ ID NO: 885875 - DNA, 33 bp, Homo sapien
gtggcctcaggagtcaacgcctcgctgtgcacc

SEQ ID NO: 885876 - DNA, 33 bp, Homo sapien
gtggcctcaggagtcaccgcctcgctgtgcacc

SEQ ID NO: 885877 - DNA, 33 bp, Homo sapien
ataacagtagaagtaaagtgcaacataaatcga

SEQ ID NO: 885878 - DNA, 33 bp, Homo sapien
ataacagtagaagtaaggtgcaacataaatcga

SEQ ID NO: 885879 - DNA, 33 bp, Homo sapien
aggtgaagttccgctcaaagaaagatgctctta

SEQ ID NO: 885880 - DNA, 33 bp, Homo sapien
aggtgaagttccgctcgaagaaagatgctctta

SEQ ID NO: 885881 - DNA, 33 bp, Homo sapien
aatcccaaattacctcaaatgtgaaacaagcca

SEQ ID NO: 885882 - DNA, 33 bp, Homo sapien
aatcccaaattacctcgaatgtgaaacaagcca

SEQ ID NO: 885883 - DNA, 33 bp, Homo sapien
tacacagatgatgatacatgttagagtggtggg

SEQ ID NO: 885884 - DNA, 33 bp, Homo sapien
tacacagatgatgatagatgttagagtggtggg

SEQ ID NO: 885885 - DNA, 33 bp, Homo sapien
gtgggaggatcatgagccctggaggtggaagtt

SEQ ID NO: 885886 - DNA, 33 bp, Homo sapien
gtgggaggatcatgagtcctggaggtggaagtt

SEQ ID NO: 885887 - DNA, 33 bp, Homo sapien
ctttctgagtataaaacgcccattgagaaggat

SEQ ID NO: 885888 - DNA, 33 bp, Homo sapien
ctttctgagtataaaatgcccattgagaaggat

SEQ ID NO: 885889 - DNA, 33 bp, Homo sapien
ccccgcaggcttcaccaagtcctgtctgctggg

SEQ ID NO: 885890 - DNA, 33 bp, Homo sapien
ccccgcaggcttcaccgagtcctgtctgctggg

SEQ ID NO: 885891 - DNA, 33 bp, Homo sapien
ctactaaacaactccccgattgttggacatttc

SEQ ID NO: 885892 - DNA, 33 bp, Homo sapien
ctactaaacaactccctgattgttggacatttc

SEQ ID NO: 885893 - DNA, 33 bp, Homo sapien
actgcctagtattccaccgagtgtgtatgtcgt

SEQ ID NO: 885894 - DNA, 33 bp, Homo sapien
actgcctagtattccatcgagtgtgtatgtcgt

SEQ ID NO: 885895 - DNA, 33 bp, Homo sapien
tctgtgaagtattacaccactttggtaatctga

SEQ ID NO: 885896 - DNA, 33 bp, Homo sapien
tctgtgaagtattacatcactttggtaatctga

SEQ ID NO: 885897 - DNA, 33 bp, Homo sapien
actcatggataaaaagcctgacataccccaagt

SEQ ID NO: 885898 - DNA, 33 bp, Homo sapien
actcatggataaaaagtctgacataccccaagt

SEQ ID NO: 885899 - DNA, 33 bp, Homo sapien
tctgggagacctggaaaagaataagagcgtctc

SEQ ID NO: 885900 - DNA, 33 bp, Homo sapien
tctgggagacctggaagagaataagagcgtctc

SEQ ID NO: 885901 - DNA, 33 bp, Homo sapien
agcattcaagcggaggccaatgtcacttccaaa

SEQ ID NO: 885902 - DNA, 33 bp, Homo sapien
agcattcaagcggaggtcaatgtcacttccaaa

SEQ ID NO: 885903 - DNA, 33 bp, Homo sapien
ctgctgtcacggtgtacggttccatgacgggat

SEQ ID NO: 885904 - DNA, 33 bp, Homo sapien
ctgctgtcacggtgtatggttccatgacgggat

SEQ ID NO: 885905 - DNA, 33 bp, Homo sapien
cactgacagacacaacagggtgaacgtgggagc

SEQ ID NO: 885906 - DNA, 33 bp, Homo sapien
cactgacagacacaacggggtgaacgtgggagc

SEQ ID NO: 885907 - DNA, 33 bp, Homo sapien
taaaactcagcccttacagaggatggacacata

SEQ ID NO: 885908 - DNA, 33 bp, Homo sapien
taaaactcagcccttatagaggatggacacata

SEQ ID NO: 885909 - DNA, 33 bp, Homo sapien
ctctgggacgcgtcaccgcaaacagcctcactc

SEQ ID NO: 885910 - DNA, 33 bp, Homo sapien
ctctgggacgcgtcacggcaaacagcctcactc

SEQ ID NO: 885911 - DNA, 33 bp, Homo sapien
tccattagactcttccaaagggcctggcgagac

SEQ ID NO: 885912 - DNA, 33 bp, Homo sapien
tccattagactcttccgaagggcctggcgagac

SEQ ID NO: 885913 - DNA, 33 bp, Homo sapien
ggcagcccagggtcagccgtccagaactgtgct

SEQ ID NO: 885914 - DNA, 33 bp, Homo sapien
ggcagcccagggtcagtcgtccagaactgtgct

SEQ ID NO: 885915 - DNA, 33 bp, Homo sapien
tatgtgtgttcgtgggcaatggctgagtcaaac

SEQ ID NO: 885916 - DNA, 33 bp, Homo sapien
tatgtgtgttcgtggggaatggctgagtcaaac

SEQ ID NO: 885917 - DNA, 33 bp, Homo sapien
gattcctgaaaccttacgtctcttggaagatag

SEQ ID NO: 885918 - DNA, 33 bp, Homo sapien
gattcctgaaaccttatgtctcttggaagatag

SEQ ID NO: 885919 - DNA, 33 bp, Homo sapien
ataacgttccagcgaactgctgctgtgtgttgg

SEQ ID NO: 885920 - DNA, 33 bp, Homo sapien
ataacgttccagcgaattgctgctgtgtgttgg

SEQ ID NO: 885921 - DNA, 33 bp, Homo sapien
agccaattgccaaaaaactgatactgtatgatt

SEQ ID NO: 885922 - DNA, 33 bp, Homo sapien
agccaattgccaaaaagctgatactgtatgatt

SEQ ID NO: 885923 - DNA, 33 bp, Homo sapien
actttattatcttacaactgattttttacatga

SEQ ID NO: 885924 - DNA, 33 bp, Homo sapien
actttattatcttacagctgattttttacatga

SEQ ID NO: 885925 - DNA, 33 bp, Homo sapien
agatctgtgcagtttacaaccagcttctgcttc

SEQ ID NO: 885926 - DNA, 33 bp, Homo sapien
agatctgtgcagtttataaccagcttctgcttc

SEQ ID NO: 885927 - DNA, 33 bp, Homo sapien
caatcaatcccagcgcacaagatgccacctccc

SEQ ID NO: 885928 - DNA, 33 bp, Homo sapien
caatcaatcccagcgcgcaagatgccacctccc

SEQ ID NO: 885929 - DNA, 33 bp, Homo sapien
ccaaaaccatcgctcacgatctgctgtccagga

SEQ ID NO: 885930 - DNA, 33 bp, Homo sapien
ccaaaaccatcgctcatgatctgctgtccagga

SEQ ID NO: 885931 - DNA, 33 bp, Homo sapien
ctttgtgaacttacacacagaataagcatgtgt

SEQ ID NO: 885932 - DNA, 33 bp, Homo sapien
ctttgtgaacttacactcagaataagcatgtgt

SEQ ID NO: 885933 - DNA, 33 bp, Homo sapien
gtttattaaaggctaagtagtgcaaacccacta

SEQ ID NO: 885934 - DNA, 33 bp, Homo sapien
gtttattaaaggctaattagtgcaaacccacta

SEQ ID NO: 885935 - DNA, 33 bp, Homo sapien
aacagaatacatacaccgacaccatttttatgt

SEQ ID NO: 885936 - DNA, 33 bp, Homo sapien
aacagaatacatacactgacaccatttttatgt

SEQ ID NO: 885937 - DNA, 33 bp, Homo sapien
aagacagtttccctgccgactaaggctcaggat

SEQ ID NO: 885938 - DNA, 33 bp, Homo sapien
aagacagtttccctgctgactaaggctcaggat

SEQ ID NO: 885939 - DNA, 33 bp, Homo sapien
aataaacacttctaagcaatccacaggtcaaag

SEQ ID NO: 885940 - DNA, 33 bp, Homo sapien
aataaacacttctaagtaatccacaggtcaaag

SEQ ID NO: 885941 - DNA, 33 bp, Homo sapien
ggacactcttcattgacgagagcaaagacagac

SEQ ID NO: 885942 - DNA, 33 bp, Homo sapien
ggacactcttcattgaggagagcaaagacagac

SEQ ID NO: 885943 - DNA, 33 bp, Homo sapien
atactatggaattttacaccgtggtgaaatgaa

SEQ ID NO: 885944 - DNA, 33 bp, Homo sapien
atactatggaattttataccgtggtgaaatgaa

SEQ ID NO: 885945 - DNA, 33 bp, Homo sapien
gcctcggatgtcacaaaacaagtcattctcctg

SEQ ID NO: 885946 - DNA, 33 bp, Homo sapien
gcctcggatgtcacaatacaagtcattctcctg

SEQ ID NO: 885947 - DNA, 33 bp, Homo sapien
gctgttaacggaattcactaatcaaacccaaca

SEQ ID NO: 885948 - DNA, 33 bp, Homo sapien
gctgttaacggaattcgctaatcaaacccaaca

SEQ ID NO: 885949 - DNA, 33 bp, Homo sapien
catttctgttgttcccagagcgaggggatgaga

SEQ ID NO: 885950 - DNA, 33 bp, Homo sapien
catttctgttgttcccggagcgaggggatgaga

SEQ ID NO: 885951 - DNA, 33 bp, Homo sapien
agataatctgctcacaaccatcaggtatctttc

SEQ ID NO: 885952 - DNA, 33 bp, Homo sapien
agataatctgctcacatccatcaggtatctttc

SEQ ID NO: 885953 - DNA, 33 bp, Homo sapien
tgcagtatctcgcaaaactttttattagatttc

SEQ ID NO: 885954 - DNA, 33 bp, Homo sapien
tgcagtatctcgcaaagctttttattagatttc

SEQ ID NO: 885955 - DNA, 33 bp, Homo sapien
acgtgaaggcccggataaatgatgcagacatgg

SEQ ID NO: 885956 - DNA, 33 bp, Homo sapien
acgtgaaggcccggatgaatgatgcagacatgg

SEQ ID NO: 885957 - DNA, 33 bp, Homo sapien
atccaggctgaaaatcacctccaggacgcagcc

SEQ ID NO: 885958 - DNA, 33 bp, Homo sapien
atccaggctgaaaatcgcctccaggacgcagcc

SEQ ID NO: 885959 - DNA, 33 bp, Homo sapien
attcccggaagtcttacatggctgaaatagatg

SEQ ID NO: 885960 - DNA, 33 bp, Homo sapien
attcccggaagtcttatatggctgaaatagatg

SEQ ID NO: 885961 - DNA, 33 bp, Homo sapien
ctaataatcaatctacaaggaccctaatctaaa

SEQ ID NO: 885962 - DNA, 33 bp, Homo sapien
ctaataatcaatctacgaggaccctaatctaaa

SEQ ID NO: 885963 - DNA, 33 bp, Homo sapien
tctgtttcctggtgaaatcgggtctgtgacaga

SEQ ID NO: 885964 - DNA, 33 bp, Homo sapien
tctgtttcctggtgaagtcgggtctgtgacaga

SEQ ID NO: 885965 - DNA, 33 bp, Homo sapien
agagcagagaacctgcacacgcccacacgcctg

SEQ ID NO: 885966 - DNA, 33 bp, Homo sapien
agagcagagaacctgcgcacgcccacacgcctg

SEQ ID NO: 885967 - DNA, 33 bp, Homo sapien
agatattctgacaaccggaaaatctggaaatcc

SEQ ID NO: 885968 - DNA, 33 bp, Homo sapien
agatattctgacaacctgaaaatctggaaatcc

SEQ ID NO: 885969 - DNA, 33 bp, Homo sapien
caagtctcataagtgccacctgtggagctgggg

SEQ ID NO: 885970 - DNA, 33 bp, Homo sapien
caagtctcataagtgctacctgtggagctgggg

SEQ ID NO: 885971 - DNA, 33 bp, Homo sapien
aagtgataactgttcacggtacacctttattaa

SEQ ID NO: 885972 - DNA, 33 bp, Homo sapien
aagtgataactgttcatggtacacctttattaa

SEQ ID NO: 885973 - DNA, 33 bp, Homo sapien
gagtgtagaaatggataactgtgatctgagaag

SEQ ID NO: 885974 - DNA, 33 bp, Homo sapien
gagtgtagaaatggatgactgtgatctgagaag

SEQ ID NO: 885975 - DNA, 33 bp, Homo sapien
agagtttctcagctcacgttccccaaaaggata

SEQ ID NO: 885976 - DNA, 33 bp, Homo sapien
agagtttctcagctcatgttccccaaaaggata

SEQ ID NO: 885977 - DNA, 33 bp, Homo sapien
tgttgcccagggtagcaaacaggggtgcgatca

SEQ ID NO: 885978 - DNA, 33 bp, Homo sapien
tgttgcccagggtagcgaacaggggtgcgatca

SEQ ID NO: 885979 - DNA, 33 bp, Homo sapien
cagggtcctcagaagcactgctcagctattcat

SEQ ID NO: 885980 - DNA, 33 bp, Homo sapien
cagggtcctcagaagcgctgctcagctattcat

SEQ ID NO: 885981 - DNA, 33 bp, Homo sapien
ccagcaagcaggagcaccgttgggggctggcac

SEQ ID NO: 885982 - DNA, 33 bp, Homo sapien
ccagcaagcaggagcatcgttgggggctggcac

SEQ ID NO: 885983 - DNA, 33 bp, Homo sapien
cctgtcagcaaaggaaaagcccagctggggcaa

SEQ ID NO: 885984 - DNA, 33 bp, Homo sapien
cctgtcagcaaaggaacagcccagctggggcaa

SEQ ID NO: 885985 - DNA, 33 bp, Homo sapien
ggagatctccaaagacagcctgcgggaaaggcc

SEQ ID NO: 885986 - DNA, 33 bp, Homo sapien
ggagatctccaaagaccgcctgcgggaaaggcc

SEQ ID NO: 885987 - DNA, 33 bp, Homo sapien
cttgttgtgttctagacgtttttgcatttgtat

SEQ ID NO: 885988 - DNA, 33 bp, Homo sapien
cttgttgtgttctagatgtttttgcatttgtat

SEQ ID NO: 885989 - DNA, 33 bp, Homo sapien
cgttttctttcaggtaaacgcctagtgtggagt

SEQ ID NO: 885990 - DNA, 33 bp, Homo sapien
cgttttctttcaggtagacgcctagtgtggagt

SEQ ID NO: 885991 - DNA, 33 bp, Homo sapien
cctttctgtagggagaactttcaaattcaggct

SEQ ID NO: 885992 - DNA, 33 bp, Homo sapien
cctttctgtagggagagctttcaaattcaggct

SEQ ID NO: 885993 - DNA, 33 bp, Homo sapien
gctaatgatacgacgagggcccaggaaatctct

SEQ ID NO: 885994 - DNA, 33 bp, Homo sapien
gctaatgatacgacgatggcccaggaaatctct

SEQ ID NO: 885995 - DNA, 33 bp, Homo sapien
gaattttttgtcatcaactaattatgaagtcca

SEQ ID NO: 885996 - DNA, 33 bp, Homo sapien
gaattttttgtcatcagctaattatgaagtcca

SEQ ID NO: 885997 - DNA, 33 bp, Homo sapien
gcgcgctaattaccacagagcttttgagtataa

SEQ ID NO: 885998 - DNA, 33 bp, Homo sapien
gcgcgctaattaccacggagcttttgagtataa

SEQ ID NO: 885999 - DNA, 33 bp, Homo sapien
ggcagcagtgaccccacgagtcctgaaaagatt

SEQ ID NO: 886000 - DNA, 33 bp, Homo sapien
ggcagcagtgaccccatgagtcctgaaaagatt

SEQ ID NO: 886001 - DNA, 33 bp, Homo sapien
ctgcactagaactaaaggaaacaagatggatac

SEQ ID NO: 886002 - DNA, 33 bp, Homo sapien
ctgcactagaactaaatgaaacaagatggatac

SEQ ID NO: 886003 - DNA, 33 bp, Homo sapien
gcttcctgtacagtccacagaatgacccagcct

SEQ ID NO: 886004 - DNA, 33 bp, Homo sapien
gcttcctgtacagtccgcagaatgacccagcct

SEQ ID NO: 886005 - DNA, 33 bp, Homo sapien
agaaaacgaccctgccactgactttcgaatgtg

SEQ ID NO: 886006 - DNA, 33 bp, Homo sapien
agaaaacgaccctgccgctgactttcgaatgtg

SEQ ID NO: 886007 - DNA, 33 bp, Homo sapien
tgtctgcagaccgtgccgatgattgcttccgtc

SEQ ID NO: 886008 - DNA, 33 bp, Homo sapien
tgtctgcagaccgtgctgatgattgcttccgtc

SEQ ID NO: 886009 - DNA, 33 bp, Homo sapien
gtctcgaaataaaaccacacactccaagcaccg

SEQ ID NO: 886010 - DNA, 33 bp, Homo sapien
gtctcgaaataaaaccgcacactccaagcaccg

SEQ ID NO: 886011 - DNA, 33 bp, Homo sapien
tattaaattggcccatcagtagtttaaaattga

SEQ ID NO: 886012 - DNA, 33 bp, Homo sapien
tattaaattggcccatgagtagtttaaaattga

SEQ ID NO: 886013 - DNA, 33 bp, Homo sapien
atgatgtggatttcaccgccaggaaggagaggt

SEQ ID NO: 886014 - DNA, 33 bp, Homo sapien
atgatgtggatttcactgccaggaaggagaggt

SEQ ID NO: 886015 - DNA, 33 bp, Homo sapien
cctgatggctgacactcaaatcttctgaacaac

SEQ ID NO: 886016 - DNA, 33 bp, Homo sapien
cctgatggctgacactgaaatcttctgaacaac

SEQ ID NO: 886017 - DNA, 33 bp, Homo sapien
aggagacgacactgtgcaatgctcgccaagaac

SEQ ID NO: 886018 - DNA, 33 bp, Homo sapien
aggagacgacactgtggaatgctcgccaagaac

SEQ ID NO: 886019 - DNA, 33 bp, Homo sapien
aggtcaccgagagcagaaggaagaccctcaggc

SEQ ID NO: 886020 - DNA, 33 bp, Homo sapien
aggtcaccgagagcaggaggaagaccctcaggc

SEQ ID NO: 886021 - DNA, 33 bp, Homo sapien
gaggaaaatctgatcacggagattaggagagag

SEQ ID NO: 886022 - DNA, 33 bp, Homo sapien
gaggaaaatctgatcatggagattaggagagag

SEQ ID NO: 886023 - DNA, 33 bp, Homo sapien
aagaggcaacggcatcagacgctaggaagacct

SEQ ID NO: 886024 - DNA, 33 bp, Homo sapien
aagaggcaacggcatcggacgctaggaagacct

SEQ ID NO: 886025 - DNA, 33 bp, Homo sapien
cggctgtccacccagcaaggagttattgagcca

SEQ ID NO: 886026 - DNA, 33 bp, Homo sapien
cggctgtccacccagcgaggagttattgagcca

SEQ ID NO: 886027 - DNA, 33 bp, Homo sapien
tgggtaacgcatcactaaagcacaggcacgccc

SEQ ID NO: 886028 - DNA, 33 bp, Homo sapien
tgggtaacgcatcactgaagcacaggcacgccc

SEQ ID NO: 886029 - DNA, 33 bp, Homo sapien
agcatccaagacagcacggcgctagcagctgaa

SEQ ID NO: 886030 - DNA, 33 bp, Homo sapien
agcatccaagacagcagggcgctagcagctgaa

SEQ ID NO: 886031 - DNA, 33 bp, Homo sapien
aagaagactgggactcagaccacactgacttct

SEQ ID NO: 886032 - DNA, 33 bp, Homo sapien
aagaagactgggactcggaccacactgacttct

SEQ ID NO: 886033 - DNA, 33 bp, Homo sapien
tccactgttctgtggccatgcacgtgggccccc

SEQ ID NO: 886034 - DNA, 33 bp, Homo sapien
tccactgttctgtggctatgcacgtgggccccc

SEQ ID NO: 886035 - DNA, 33 bp, Homo sapien
aacttcattttgctcacgtttcactgtagtgta

SEQ ID NO: 886036 - DNA, 33 bp, Homo sapien
aacttcattttgctcatgtttcactgtagtgta

SEQ ID NO: 886037 - DNA, 33 bp, Homo sapien
tgcccttctctttaacagcgaccgcggcttcag

SEQ ID NO: 886038 - DNA, 33 bp, Homo sapien
tgcccttctctttaacggcgaccgcggcttcag

SEQ ID NO: 886039 - DNA, 33 bp, Homo sapien
actgaggctcctaagcacagtggtagcacagcc

SEQ ID NO: 886040 - DNA, 33 bp, Homo sapien
actgaggctcctaagcgcagtggtagcacagcc

SEQ ID NO: 886041 - DNA, 33 bp, Homo sapien
agatctagtcagctgggattcctagctctgctc

SEQ ID NO: 886042 - DNA, 33 bp, Homo sapien
agatctagtcagctggtattcctagctctgctc

SEQ ID NO: 886043 - DNA, 33 bp, Homo sapien
cttgagccttctgacaaatagtaagaagcatgc

SEQ ID NO: 886044 - DNA, 33 bp, Homo sapien
cttgagccttctgacagatagtaagaagcatgc

SEQ ID NO: 886045 - DNA, 33 bp, Homo sapien
ggaggccttcatctgccgcacgtctgagtcact

SEQ ID NO: 886046 - DNA, 33 bp, Homo sapien
ggaggccttcatctgctgcacgtctgagtcact

SEQ ID NO: 886047 - DNA, 33 bp, Homo sapien
aggcctctgatgtctgcatgtgggtcagagctc

SEQ ID NO: 886048 - DNA, 33 bp, Homo sapien
aggcctctgatgtctgtatgtgggtcagagctc

SEQ ID NO: 886049 - DNA, 33 bp, Homo sapien
agccacacacgtcccacgacaactgttccagac

SEQ ID NO: 886050 - DNA, 33 bp, Homo sapien
agccacacacgtcccatgacaactgttccagac

SEQ ID NO: 886051 - DNA, 33 bp, Homo sapien
cgggagggtcgttaacagagtcccggtggccag

SEQ ID NO: 886052 - DNA, 33 bp, Homo sapien
cgggagggtcgttaacggagtcccggtggccag

SEQ ID NO: 886053 - DNA, 33 bp, Homo sapien
ataattagtctgggaccagagaactctaaagaa

SEQ ID NO: 886054 - DNA, 33 bp, Homo sapien
ataattagtctgggacgagagaactctaaagaa

SEQ ID NO: 886055 - DNA, 33 bp, Homo sapien
cccaaacagcactactaaaacctggcagggcca

SEQ ID NO: 886056 - DNA, 33 bp, Homo sapien
cccaaacagcactactgaaacctggcagggcca

SEQ ID NO: 886057 - DNA, 33 bp, Homo sapien
gaaaccctttgtaacagcagtctcaggtccgca

SEQ ID NO: 886058 - DNA, 33 bp, Homo sapien
gaaaccctttgtaacatcagtctcaggtccgca

SEQ ID NO: 886059 - DNA, 33 bp, Homo sapien
ggtctctggatgactcaagtgcaccataattca

SEQ ID NO: 886060 - DNA, 33 bp, Homo sapien
ggtctctggatgactcgagtgcaccataattca

SEQ ID NO: 886061 - DNA, 33 bp, Homo sapien
aaaaacccgcagtcaccactttggctaaaccaa

SEQ ID NO: 886062 - DNA, 33 bp, Homo sapien
aaaaacccgcagtcactactttggctaaaccaa

SEQ ID NO: 886063 - DNA, 33 bp, Homo sapien
gcagcaggaatcgacactctcctaggcaagcct

SEQ ID NO: 886064 - DNA, 33 bp, Homo sapien
gcagcaggaatcgacattctcctaggcaagcct

SEQ ID NO: 886065 - DNA, 33 bp, Homo sapien
cactgttccagagtgccgactgatgcaaaggaa

SEQ ID NO: 886066 - DNA, 33 bp, Homo sapien
cactgttccagagtgctgactgatgcaaaggaa

SEQ ID NO: 886067 - DNA, 33 bp, Homo sapien
tcaactgctgcagggaaatgagttacaagggtc

SEQ ID NO: 886068 - DNA, 33 bp, Homo sapien
tcaactgctgcagggacatgagttacaagggtc

SEQ ID NO: 886069 - DNA, 33 bp, Homo sapien
gccccaggtgagctcgaaaccctaaagcaaccc

SEQ ID NO: 886070 - DNA, 33 bp, Homo sapien
gccccaggtgagctcggaaccctaaagcaaccc

SEQ ID NO: 886071 - DNA, 33 bp, Homo sapien
atcgtgccagcagagcaaagggcactctcattc

SEQ ID NO: 886072 - DNA, 33 bp, Homo sapien
atcgtgccagcagagcgaagggcactctcattc

SEQ ID NO: 886073 - DNA, 33 bp, Homo sapien
taaaagtcctgtcttacgccgagcatggtggct

SEQ ID NO: 886074 - DNA, 33 bp, Homo sapien
taaaagtcctgtcttaggccgagcatggtggct

SEQ ID NO: 886075 - DNA, 33 bp, Homo sapien
gttttttgtttgcctccaatgcttgtctggaag

SEQ ID NO: 886076 - DNA, 33 bp, Homo sapien
gttttttgtttgcctctaatgcttgtctggaag

SEQ ID NO: 886077 - DNA, 33 bp, Homo sapien
ctgattccagagttgccgcaaaattcggaagac

SEQ ID NO: 886078 - DNA, 33 bp, Homo sapien
ctgattccagagttgctgcaaaattcggaagac

SEQ ID NO: 886079 - DNA, 33 bp, Homo sapien
tgttaacctgggatacagcagaatttgaaaaag

SEQ ID NO: 886080 - DNA, 33 bp, Homo sapien
tgttaacctgggatacggcagaatttgaaaaag

SEQ ID NO: 886081 - DNA, 33 bp, Homo sapien
tgagttggcagagtaccatatatattcatgaca

SEQ ID NO: 886082 - DNA, 33 bp, Homo sapien
tgagttggcagagtactatatatattcatgaca

SEQ ID NO: 886083 - DNA, 33 bp, Homo sapien
agtggcagagccagagaagcagacagctggccc

SEQ ID NO: 886084 - DNA, 33 bp, Homo sapien
agtggcagagccagaggagcagacagctggccc

SEQ ID NO: 886085 - DNA, 33 bp, Homo sapien
caatgctcaggattgacaggatgcgtttacgga

SEQ ID NO: 886086 - DNA, 33 bp, Homo sapien
caatgctcaggattgagaggatgcgtttacgga

SEQ ID NO: 886087 - DNA, 33 bp, Homo sapien
gtcagggacttagcaccgtgatcatgattgtca

SEQ ID NO: 886088 - DNA, 33 bp, Homo sapien
gtcagggacttagcactgtgatcatgattgtca

SEQ ID NO: 886089 - DNA, 33 bp, Homo sapien
tccctccacagccacacgttgcttttagcttgc

SEQ ID NO: 886090 - DNA, 33 bp, Homo sapien
tccctccacagccacatgttgcttttagcttgc

SEQ ID NO: 886091 - DNA, 33 bp, Homo sapien
agaactctcctaaaaccacatctgctgatggaa

SEQ ID NO: 886092 - DNA, 33 bp, Homo sapien
agaactctcctaaaacgacatctgctgatggaa

SEQ ID NO: 886093 - DNA, 33 bp, Homo sapien
catgagccaagtcataagcagaaccaggacggg

SEQ ID NO: 886094 - DNA, 33 bp, Homo sapien
catgagccaagtcataggcagaaccaggacggg

SEQ ID NO: 886095 - DNA, 33 bp, Homo sapien
gaggtcagggctcccaagaagggcacttggcac

SEQ ID NO: 886096 - DNA, 33 bp, Homo sapien
gaggtcagggctcccaggaagggcacttggcac

SEQ ID NO: 886097 - DNA, 33 bp, Homo sapien
tgggagccatgctgccaatttaccagacaaaaa

SEQ ID NO: 886098 - DNA, 33 bp, Homo sapien
tgggagccatgctgccgatttaccagacaaaaa

SEQ ID NO: 886099 - DNA, 33 bp, Homo sapien
tatatttcatcctcatgaccgtgtttctcattt

SEQ ID NO: 886100 - DNA, 33 bp, Homo sapien
tatatttcatcctcattaccgtgtttctcattt

SEQ ID NO: 886101 - DNA, 33 bp, Homo sapien
gtggctgctgaacagccgcaaaccatcttcacc

SEQ ID NO: 886102 - DNA, 33 bp, Homo sapien
gtggctgctgaacagctgcaaaccatcttcacc

SEQ ID NO: 886103 - DNA, 33 bp, Homo sapien
aacaactgttattaaacgtgtatgaaagttggg

SEQ ID NO: 886104 - DNA, 33 bp, Homo sapien
aacaactgttattaaatgtgtatgaaagttggg

SEQ ID NO: 886105 - DNA, 33 bp, Homo sapien
acggatgcttgtgtcaccaccttttcagatttc

SEQ ID NO: 886106 - DNA, 33 bp, Homo sapien
acggatgcttgtgtcagcaccttttcagatttc

SEQ ID NO: 886107 - DNA, 33 bp, Homo sapien
atcgccaggtcaacgcagacaaacagcacggag

SEQ ID NO: 886108 - DNA, 33 bp, Homo sapien
atcgccaggtcaacgcggacaaacagcacggag

SEQ ID NO: 886109 - DNA, 33 bp, Homo sapien
gcagcccagttggaagacccctgctctaagttg

SEQ ID NO: 886110 - DNA, 33 bp, Homo sapien
gcagcccagttggaagtcccctgctctaagttg

SEQ ID NO: 886111 - DNA, 33 bp, Homo sapien
agcccgacattgtcagcagctgtggatgccgct

SEQ ID NO: 886112 - DNA, 33 bp, Homo sapien
agcccgacattgtcagtagctgtggatgccgct

SEQ ID NO: 886113 - DNA, 33 bp, Homo sapien
aaatgctcactgttggacagcgactgggtcatc

SEQ ID NO: 886114 - DNA, 33 bp, Homo sapien
aaatgctcactgttgggcagcgactgggtcatc

SEQ ID NO: 886115 - DNA, 33 bp, Homo sapien
tattgttttgaaatacccctgtcgcatcttctt

SEQ ID NO: 886116 - DNA, 33 bp, Homo sapien
tattgttttgaaatactcctgtcgcatcttctt

SEQ ID NO: 886117 - DNA, 33 bp, Homo sapien
ctccaaaaatacagtaacaagtgtggacaatga

SEQ ID NO: 886118 - DNA, 33 bp, Homo sapien
ctccaaaaatacagtagcaagtgtggacaatga

SEQ ID NO: 886119 - DNA, 33 bp, Homo sapien
gggtagggtaaagacaacttcagacttgctccc

SEQ ID NO: 886120 - DNA, 33 bp, Homo sapien
gggtagggtaaagacaccttcagacttgctccc

SEQ ID NO: 886121 - DNA, 33 bp, Homo sapien
actctagaatccaaacaataactcacttgactc

SEQ ID NO: 886122 - DNA, 33 bp, Homo sapien
actctagaatccaaacgataactcacttgactc

SEQ ID NO: 886123 - DNA, 33 bp, Homo sapien
gctctaaacactgctacctatgtagacttgtgc

SEQ ID NO: 886124 - DNA, 33 bp, Homo sapien
gctctaaacactgctagctatgtagacttgtgc

SEQ ID NO: 886125 - DNA, 33 bp, Homo sapien
ctctctgtcttcatcaagctcaaatatttgtta

SEQ ID NO: 886126 - DNA, 33 bp, Homo sapien
ctctctgtcttcatcaggctcaaatatttgtta

SEQ ID NO: 886127 - DNA, 33 bp, Homo sapien
gagacggagtccaaagacgaagaccaatgtccc

SEQ ID NO: 886128 - DNA, 33 bp, Homo sapien
gagacggagtccaaaggcgaagaccaatgtccc

SEQ ID NO: 886129 - DNA, 33 bp, Homo sapien
ccatagctgtctgtgccagctgccttttctttc

SEQ ID NO: 886130 - DNA, 33 bp, Homo sapien
ccatagctgtctgtgctagctgccttttctttc

SEQ ID NO: 886131 - DNA, 33 bp, Homo sapien
acttttaggttaattacgtccatgcaagccaag

SEQ ID NO: 886132 - DNA, 33 bp, Homo sapien
acttttaggttaattatgtccatgcaagccaag

SEQ ID NO: 886133 - DNA, 33 bp, Homo sapien
ctctgaccaggaggagaaatgcacacaggcaaa

SEQ ID NO: 886134 - DNA, 33 bp, Homo sapien
ctctgaccaggaggaggaatgcacacaggcaaa

SEQ ID NO: 886135 - DNA, 33 bp, Homo sapien
gtgcaaggacatgatccaacagaaaaagttctg

SEQ ID NO: 886136 - DNA, 33 bp, Homo sapien
gtgcaaggacatgatcgaacagaaaaagttctg

SEQ ID NO: 886137 - DNA, 33 bp, Homo sapien
aaataaaatcatcggccaggcgtagtggctcac

SEQ ID NO: 886138 - DNA, 33 bp, Homo sapien
aaataaaatcatcggctaggcgtagtggctcac

SEQ ID NO: 886139 - DNA, 33 bp, Homo sapien
agcaattctgaaacaacgaacactgggattgaa

SEQ ID NO: 886140 - DNA, 33 bp, Homo sapien
agcaattctgaaacaatgaacactgggattgaa

SEQ ID NO: 886141 - DNA, 33 bp, Homo sapien
tcagtgcagggatgacacggattttcctgcagc

SEQ ID NO: 886142 - DNA, 33 bp, Homo sapien
tcagtgcagggatgacgcggattttcctgcagc

SEQ ID NO: 886143 - DNA, 33 bp, Homo sapien
ggggacctctgtgaaacaggaaaatgagtgcct

SEQ ID NO: 886144 - DNA, 33 bp, Homo sapien
ggggacctctgtgaaataggaaaatgagtgcct

SEQ ID NO: 886145 - DNA, 33 bp, Homo sapien
ttaaaggaaagtattacgccaagtgcatgcctg

SEQ ID NO: 886146 - DNA, 33 bp, Homo sapien
ttaaaggaaagtattaggccaagtgcatgcctg

SEQ ID NO: 886147 - DNA, 33 bp, Homo sapien
tgatgacaatgatgacagatatagatggtatat

SEQ ID NO: 886148 - DNA, 33 bp, Homo sapien
tgatgacaatgatgacggatatagatggtatat

SEQ ID NO: 886149 - DNA, 33 bp, Homo sapien
gtgtgaaaagaatggacagaaaacgcctggccc

SEQ ID NO: 886150 - DNA, 33 bp, Homo sapien
gtgtgaaaagaatggagagaaaacgcctggccc

SEQ ID NO: 886151 - DNA, 33 bp, Homo sapien
agctttgccctccggaactcacagcatcccagc

SEQ ID NO: 886152 - DNA, 33 bp, Homo sapien
agctttgccctccggatctcacagcatcccagc

SEQ ID NO: 886153 - DNA, 33 bp, Homo sapien
gctgctgtatttaaaaaacaagcgtctggatct

SEQ ID NO: 886154 - DNA, 33 bp, Homo sapien
gctgctgtatttaaaagacaagcgtctggatct

SEQ ID NO: 886155 - DNA, 33 bp, Homo sapien
cgtcagtttagcctcaagattcgactccgagcc

SEQ ID NO: 886156 - DNA, 33 bp, Homo sapien
cgtcagtttagcctcaggattcgactccgagcc

SEQ ID NO: 886157 - DNA, 33 bp, Homo sapien
gcagcgaccacgtggaaaagagtccccagtccc

SEQ ID NO: 886158 - DNA, 33 bp, Homo sapien
gcagcgaccacgtggagaagagtccccagtccc

SEQ ID NO: 886159 - DNA, 33 bp, Homo sapien
agggactcactgtgaacccagactcggtttctt

SEQ ID NO: 886160 - DNA, 33 bp, Homo sapien
agggactcactgtgaatccagactcggtttctt

SEQ ID NO: 886161 - DNA, 33 bp, Homo sapien
cctgatcgtggctcaactggctgaatttcaggc

SEQ ID NO: 886162 - DNA, 33 bp, Homo sapien
cctgatcgtggctcaattggctgaatttcaggc

SEQ ID NO: 886163 - DNA, 33 bp, Homo sapien
cagactttgagttccgaaggccttgtggtttca

SEQ ID NO: 886164 - DNA, 33 bp, Homo sapien
cagactttgagttccggaggccttgtggtttca

SEQ ID NO: 886165 - DNA, 33 bp, Homo sapien
ctgggtgagaccctgaaagcaaacgaaagttta

SEQ ID NO: 886166 - DNA, 33 bp, Homo sapien
ctgggtgagaccctgagagcaaacgaaagttta

SEQ ID NO: 886167 - DNA, 33 bp, Homo sapien
aataagctgaaatgaaattaagaaaattcaata

SEQ ID NO: 886168 - DNA, 33 bp, Homo sapien
aataagctgaaatgaagttaagaaaattcaata

SEQ ID NO: 886169 - DNA, 33 bp, Homo sapien
caactcaccactcccacgtagagaccacacggg

SEQ ID NO: 886170 - DNA, 33 bp, Homo sapien
caactcaccactcccatgtagagaccacacggg

SEQ ID NO: 886171 - DNA, 33 bp, Homo sapien
caaatatcaattaataaagtcctgattacaatg

SEQ ID NO: 886172 - DNA, 33 bp, Homo sapien
caaatatcaattaatacagtcctgattacaatg

SEQ ID NO: 886173 - DNA, 33 bp, Homo sapien
atatccctgcacccacaaggaaagctaccttct

SEQ ID NO: 886174 - DNA, 33 bp, Homo sapien
atatccctgcacccacgaggaaagctaccttct

SEQ ID NO: 886175 - DNA, 33 bp, Homo sapien
acatgacctagagaaacataaacaaatcgtttc

SEQ ID NO: 886176 - DNA, 33 bp, Homo sapien
acatgacctagagaaagataaacaaatcgtttc

SEQ ID NO: 886177 - DNA, 33 bp, Homo sapien
ccttatcacagtacccaatctcaggacgcaagg

SEQ ID NO: 886178 - DNA, 33 bp, Homo sapien
ccttatcacagtaccccatctcaggacgcaagg

SEQ ID NO: 886179 - DNA, 33 bp, Homo sapien
cacttgttacaaccacagtctgctgatgaactt

SEQ ID NO: 886180 - DNA, 33 bp, Homo sapien
cacttgttacaaccaccgtctgctgatgaactt

SEQ ID NO: 886181 - DNA, 33 bp, Homo sapien
caggggcaaacatttacggatactgaaagccag

SEQ ID NO: 886182 - DNA, 33 bp, Homo sapien
caggggcaaacatttatggatactgaaagccag

SEQ ID NO: 886183 - DNA, 33 bp, Homo sapien
acaggtcctggctaccagagaattttgccagcg

SEQ ID NO: 886184 - DNA, 33 bp, Homo sapien
acaggtcctggctacctgagaattttgccagcg

SEQ ID NO: 886185 - DNA, 33 bp, Homo sapien
agcgccggctattaacagtgaacgacccgccag

SEQ ID NO: 886186 - DNA, 33 bp, Homo sapien
agcgccggctattaacggtgaacgacccgccag

SEQ ID NO: 886187 - DNA, 33 bp, Homo sapien
gtttgtactctctaaaagcagaatcagctggcg

SEQ ID NO: 886188 - DNA, 33 bp, Homo sapien
gtttgtactctctaaaggcagaatcagctggcg

SEQ ID NO: 886189 - DNA, 33 bp, Homo sapien
ctctgaactaagcgtcaccttatgccaggaagg

SEQ ID NO: 886190 - DNA, 33 bp, Homo sapien
ctctgaactaagcgtcgccttatgccaggaagg

SEQ ID NO: 886191 - DNA, 33 bp, Homo sapien
agtacaccgtgaacaacacctgccaccaacgtc

SEQ ID NO: 886192 - DNA, 33 bp, Homo sapien
agtacaccgtgaacaatacctgccaccaacgtc

SEQ ID NO: 886193 - DNA, 33 bp, Homo sapien
atgaggtcacaggctgaatgctggagcagtgtc

SEQ ID NO: 886194 - DNA, 33 bp, Homo sapien
atgaggtcacaggctggatgctggagcagtgtc

SEQ ID NO: 886195 - DNA, 33 bp, Homo sapien
ggaggccacagacaacacagttctgaagagtcc

SEQ ID NO: 886196 - DNA, 33 bp, Homo sapien
ggaggccacagacaacgcagttctgaagagtcc

SEQ ID NO: 886197 - DNA, 33 bp, Homo sapien
cctccagggacaagtgacaaagccatcagcatg

SEQ ID NO: 886198 - DNA, 33 bp, Homo sapien
cctccagggacaagtggcaaagccatcagcatg

SEQ ID NO: 886199 - DNA, 33 bp, Homo sapien
ggctgcatcgggccaaacttctcatcagagtcc

SEQ ID NO: 886200 - DNA, 33 bp, Homo sapien
ggctgcatcgggccaagcttctcatcagagtcc

SEQ ID NO: 886201 - DNA, 33 bp, Homo sapien
ccagagaatgtgggtgacaaacgaggacgctgc

SEQ ID NO: 886202 - DNA, 33 bp, Homo sapien
ccagagaatgtgggtggcaaacgaggacgctgc

SEQ ID NO: 886203 - DNA, 33 bp, Homo sapien
acagtgggagaagacaccgtctacaagcaaaag

SEQ ID NO: 886204 - DNA, 33 bp, Homo sapien
acagtgggagaagacagcgtctacaagcaaaag

SEQ ID NO: 886205 - DNA, 33 bp, Homo sapien
ggggggtatctcagtcaaagattatgggctgga

SEQ ID NO: 886206 - DNA, 33 bp, Homo sapien
ggggggtatctcagtcgaagattatgggctgga

SEQ ID NO: 886207 - DNA, 33 bp, Homo sapien
tgtatgtgagggtttaagtctgtactctcttct

SEQ ID NO: 886208 - DNA, 33 bp, Homo sapien
tgtatgtgagggtttatgtctgtactctcttct

SEQ ID NO: 886209 - DNA, 33 bp, Homo sapien
ttctgttgccgtgttcaagagtttggctgtcag

SEQ ID NO: 886210 - DNA, 33 bp, Homo sapien
ttctgttgccgtgttcgagagtttggctgtcag

SEQ ID NO: 886211 - DNA, 33 bp, Homo sapien
ttggctgtcagtctaacgtctgttctttcaaag

SEQ ID NO: 886212 - DNA, 33 bp, Homo sapien
ttggctgtcagtctaatgtctgttctttcaaag

SEQ ID NO: 886213 - DNA, 33 bp, Homo sapien
agagctgtacccgtgtcaagggatggagggagc

SEQ ID NO: 886214 - DNA, 33 bp, Homo sapien
agagctgtacccgtgttaagggatggagggagc

SEQ ID NO: 886215 - DNA, 33 bp, Homo sapien
aagctaggaatgagaacgcttagctccctccat

SEQ ID NO: 886216 - DNA, 33 bp, Homo sapien
aagctaggaatgagaatgcttagctccctccat

SEQ ID NO: 886217 - DNA, 33 bp, Homo sapien
caccttccaatccctcaagaccctgaatagaac

SEQ ID NO: 886218 - DNA, 33 bp, Homo sapien
caccttccaatccctccagaccctgaatagaac

SEQ ID NO: 886219 - DNA, 33 bp, Homo sapien
atgtgcagggacgtaaaggagcttcaaagtgca

SEQ ID NO: 886220 - DNA, 33 bp, Homo sapien
atgtgcagggacgtaacggagcttcaaagtgca

SEQ ID NO: 886221 - DNA, 33 bp, Homo sapien
tcctcacatcttccacacatctgcggtgcgcgg

SEQ ID NO: 886222 - DNA, 33 bp, Homo sapien
tcctcacatcttccacgcatctgcggtgcgcgg

SEQ ID NO: 886223 - DNA, 33 bp, Homo sapien
atctgtgctcctcaaaaaaggtcagtacaaact

SEQ ID NO: 886224 - DNA, 33 bp, Homo sapien
atctgtgctcctcaaagaaggtcagtacaaact

SEQ ID NO: 886225 - DNA, 33 bp, Homo sapien
tccgaaatgattgcttaaaattcaggaggcttt

SEQ ID NO: 886226 - DNA, 33 bp, Homo sapien
tccgaaatgattgcttgaaattcaggaggcttt

SEQ ID NO: 886227 - DNA, 33 bp, Homo sapien
tagaggcaggggaataccttaaaacatactgta

SEQ ID NO: 886228 - DNA, 33 bp, Homo sapien
tagaggcaggggaatatcttaaaacatactgta

SEQ ID NO: 886229 - DNA, 33 bp, Homo sapien
attccaaatatgataaatatgaagaaactcata

SEQ ID NO: 886230 - DNA, 33 bp, Homo sapien
attccaaatatgataagtatgaagaaactcata

SEQ ID NO: 886231 - DNA, 33 bp, Homo sapien
ggacattccgtggatacgacagatgggaaaact

SEQ ID NO: 886232 - DNA, 33 bp, Homo sapien
ggacattccgtggatatgacagatgggaaaact

SEQ ID NO: 886233 - DNA, 33 bp, Homo sapien
cagagagcgagggagacggagagagaaggagct

SEQ ID NO: 886234 - DNA, 33 bp, Homo sapien
cagagagcgagggagatggagagagaaggagct

SEQ ID NO: 886235 - DNA, 33 bp, Homo sapien
atttcacgcagtcctcaaatgcagttagtgttt

SEQ ID NO: 886236 - DNA, 33 bp, Homo sapien
atttcacgcagtcctcgaatgcagttagtgttt

SEQ ID NO: 886237 - DNA, 33 bp, Homo sapien
cccaatttggtggcaccagacgtggcttaaaga

SEQ ID NO: 886238 - DNA, 33 bp, Homo sapien
cccaatttggtggcactagacgtggcttaaaga

SEQ ID NO: 886239 - DNA, 33 bp, Homo sapien
taattacagattcacaggaagttacacagatag

SEQ ID NO: 886240 - DNA, 33 bp, Homo sapien
taattacagattcacatgaagttacacagatag

SEQ ID NO: 886241 - DNA, 33 bp, Homo sapien
ggggatgcccagagtcaccatcttgaatggggc

SEQ ID NO: 886242 - DNA, 33 bp, Homo sapien
ggggatgcccagagtcgccatcttgaatggggc

SEQ ID NO: 886243 - DNA, 33 bp, Homo sapien
gtgctgtggtttgactgacacttaaataggatt

SEQ ID NO: 886244 - DNA, 33 bp, Homo sapien
gtgctgtggtttgacttacacttaaataggatt

SEQ ID NO: 886245 - DNA, 33 bp, Homo sapien
agaggcttaaacaagacaggctgaaggccgctt

SEQ ID NO: 886246 - DNA, 33 bp, Homo sapien
agaggcttaaacaagataggctgaaggccgctt

SEQ ID NO: 886247 - DNA, 33 bp, Homo sapien
tgaaattgtggccagtaaattacatgtagtaac

SEQ ID NO: 886248 - DNA, 33 bp, Homo sapien
tgaaattgtggccagtcaattacatgtagtaac

SEQ ID NO: 886249 - DNA, 33 bp, Homo sapien
cacattcaggtcaggagccacacaccaaagaca

SEQ ID NO: 886250 - DNA, 33 bp, Homo sapien
cacattcaggtcaggatccacacaccaaagaca

SEQ ID NO: 886251 - DNA, 33 bp, Homo sapien
atgtggcctcaggcacagcataactggtacggg

SEQ ID NO: 886252 - DNA, 33 bp, Homo sapien
atgtggcctcaggcacggcataactggtacggg

SEQ ID NO: 886253 - DNA, 33 bp, Homo sapien
taaactaaatcggtcacgcttgataactgtgtg

SEQ ID NO: 886254 - DNA, 33 bp, Homo sapien
taaactaaatcggtcaggcttgataactgtgtg

SEQ ID NO: 886255 - DNA, 33 bp, Homo sapien
tgaaaaagaaagtcccaagcgctgtaaagcaca

SEQ ID NO: 886256 - DNA, 33 bp, Homo sapien
tgaaaaagaaagtccccagcgctgtaaagcaca

SEQ ID NO: 886257 - DNA, 33 bp, Homo sapien
tttttgtgcaaatgcccgaaggagtccagtgtc

SEQ ID NO: 886258 - DNA, 33 bp, Homo sapien
tttttgtgcaaatgcctgaaggagtccagtgtc

SEQ ID NO: 886259 - DNA, 33 bp, Homo sapien
gatgctggaaagggacaacatggcagctccgaa

SEQ ID NO: 886260 - DNA, 33 bp, Homo sapien
gatgctggaaagggacgacatggcagctccgaa

SEQ ID NO: 886261 - DNA, 33 bp, Homo sapien
tcgcaatgtatagtcacgcatcgcgatgcatag

SEQ ID NO: 886262 - DNA, 33 bp, Homo sapien
tcgcaatgtatagtcatgcatcgcgatgcatag

SEQ ID NO: 886263 - DNA, 33 bp, Homo sapien
agcttagatttatctcacagtgcttccattccc

SEQ ID NO: 886264 - DNA, 33 bp, Homo sapien
agcttagatttatctcgcagtgcttccattccc

SEQ ID NO: 886265 - DNA, 33 bp, Homo sapien
gatatcatctgtagaactagaaaaataaaaaga

SEQ ID NO: 886266 - DNA, 33 bp, Homo sapien
gatatcatctgtagaattagaaaaataaaaaga

SEQ ID NO: 886267 - DNA, 33 bp, Homo sapien
cgtgggccaacatcaacgggggtgtggggaaca

SEQ ID NO: 886268 - DNA, 33 bp, Homo sapien
cgtgggccaacatcaatgggggtgtggggaaca

SEQ ID NO: 886269 - DNA, 33 bp, Homo sapien
atgcaccacacaacagaacctcaaaatacagga

SEQ ID NO: 886270 - DNA, 33 bp, Homo sapien
atgcaccacacaacaggacctcaaaatacagga

SEQ ID NO: 886271 - DNA, 33 bp, Homo sapien
tttatcatgtacttacaggatgttcaccaacaa

SEQ ID NO: 886272 - DNA, 33 bp, Homo sapien
tttatcatgtacttacgggatgttcaccaacaa

SEQ ID NO: 886273 - DNA, 33 bp, Homo sapien
aatagaatgtggcagaagcaatattctaccagt

SEQ ID NO: 886274 - DNA, 33 bp, Homo sapien
aatagaatgtggcagacgcaatattctaccagt

SEQ ID NO: 886275 - DNA, 33 bp, Homo sapien
tatttaagaatgaacaacagtgacattactaca

SEQ ID NO: 886276 - DNA, 33 bp, Homo sapien
tatttaagaatgaacaccagtgacattactaca

SEQ ID NO: 886277 - DNA, 33 bp, Homo sapien
ttgttttataacataaatctgtaagcctatgaa

SEQ ID NO: 886278 - DNA, 33 bp, Homo sapien
ttgttttataacataagtctgtaagcctatgaa

SEQ ID NO: 886279 - DNA, 33 bp, Homo sapien
aaaagaaaaagaaatacgttcaatccgagcagt

SEQ ID NO: 886280 - DNA, 33 bp, Homo sapien
aaaagaaaaagaaatatgttcaatccgagcagt

SEQ ID NO: 886281 - DNA, 33 bp, Homo sapien
aactcagccactctcacgagaacagcttggggg

SEQ ID NO: 886282 - DNA, 33 bp, Homo sapien
aactcagccactctcaggagaacagcttggggg

SEQ ID NO: 886283 - DNA, 33 bp, Homo sapien
ttcccgcaaagtcaatcatgtctggtctcaact

SEQ ID NO: 886284 - DNA, 33 bp, Homo sapien
ttcccgcaaagtcaatgatgtctggtctcaact

SEQ ID NO: 886285 - DNA, 33 bp, Homo sapien
cctagttagatgtgcacgggcaaacgctaccat

SEQ ID NO: 886286 - DNA, 33 bp, Homo sapien
cctagttagatgtgcatgggcaaacgctaccat

SEQ ID NO: 886287 - DNA, 33 bp, Homo sapien
gagtatttctaggtgcagagtgttagagtcact

SEQ ID NO: 886288 - DNA, 33 bp, Homo sapien
gagtatttctaggtgcggagtgttagagtcact

SEQ ID NO: 886289 - DNA, 33 bp, Homo sapien
cagcccagctgttaaacggccagcctagtagag

SEQ ID NO: 886290 - DNA, 33 bp, Homo sapien
cagcccagctgttaaatggccagcctagtagag

SEQ ID NO: 886291 - DNA, 33 bp, Homo sapien
caggtgtcccttttaactggattatgtcctctc

SEQ ID NO: 886292 - DNA, 33 bp, Homo sapien
caggtgtcccttttaagtggattatgtcctctc

SEQ ID NO: 886293 - DNA, 33 bp, Homo sapien
ccttgagaatagggaccggggctgataaatctc

SEQ ID NO: 886294 - DNA, 33 bp, Homo sapien
ccttgagaatagggactggggctgataaatctc

SEQ ID NO: 886295 - DNA, 33 bp, Homo sapien
gagctgatccattgggaaaaatactggattctt

SEQ ID NO: 886296 - DNA, 33 bp, Homo sapien
gagctgatccattggggaaaatactggattctt

SEQ ID NO: 886297 - DNA, 33 bp, Homo sapien
gggatttggcaaatataagcaaatgttttttga

SEQ ID NO: 886298 - DNA, 33 bp, Homo sapien
gggatttggcaaatatgagcaaatgttttttga

SEQ ID NO: 886299 - DNA, 33 bp, Homo sapien
tgcaggcccttgtgcaatacttggacttgcagg

SEQ ID NO: 886300 - DNA, 33 bp, Homo sapien
tgcaggcccttgtgcagtacttggacttgcagg

SEQ ID NO: 886301 - DNA, 33 bp, Homo sapien
ttattaataattcataccttgtctaagcggtaa

SEQ ID NO: 886302 - DNA, 33 bp, Homo sapien
ttattaataattcatatcttgtctaagcggtaa

SEQ ID NO: 886303 - DNA, 33 bp, Homo sapien
ctttggagccagacaacgtgacctaagcgttga

SEQ ID NO: 886304 - DNA, 33 bp, Homo sapien
ctttggagccagacaatgtgacctaagcgttga

SEQ ID NO: 886305 - DNA, 33 bp, Homo sapien
gcagggatttgaacaaagtctggctttgccggg

SEQ ID NO: 886306 - DNA, 33 bp, Homo sapien
gcagggatttgaacaaggtctggctttgccggg

SEQ ID NO: 886307 - DNA, 33 bp, Homo sapien
ggcaagcatcatcacaccagatttacagaggag

SEQ ID NO: 886308 - DNA, 33 bp, Homo sapien
ggcaagcatcatcacatcagatttacagaggag

SEQ ID NO: 886309 - DNA, 33 bp, Homo sapien
gcagcggccccgtcaccctgcactacaaggtca

SEQ ID NO: 886310 - DNA, 33 bp, Homo sapien
gcagcggccccgtcacgctgcactacaaggtca

SEQ ID NO: 886311 - DNA, 33 bp, Homo sapien
cctggctccgagaaggcccttaatggctaaggg

SEQ ID NO: 886312 - DNA, 33 bp, Homo sapien
cctggctccgagaaggtccttaatggctaaggg

SEQ ID NO: 886313 - DNA, 33 bp, Homo sapien
agaggcacggagcttacagttgagtttcttgga

SEQ ID NO: 886314 - DNA, 33 bp, Homo sapien
agaggcacggagcttagagttgagtttcttgga

SEQ ID NO: 886315 - DNA, 33 bp, Homo sapien
ggcgagaagactgattcaagaatgtttagaaag

SEQ ID NO: 886316 - DNA, 33 bp, Homo sapien
ggcgagaagactgattgaagaatgtttagaaag

SEQ ID NO: 886317 - DNA, 33 bp, Homo sapien
agatgacgtaaatcaaagtgccaggccctccgc

SEQ ID NO: 886318 - DNA, 33 bp, Homo sapien
agatgacgtaaatcaaggtgccaggccctccgc

SEQ ID NO: 886319 - DNA, 33 bp, Homo sapien
aaaaaatgtctcagacacaattcgaaatgtatt

SEQ ID NO: 886320 - DNA, 33 bp, Homo sapien
aaaaaatgtctcagacgcaattcgaaatgtatt

SEQ ID NO: 886321 - DNA, 33 bp, Homo sapien
tggatggctgagtgggacattagcggtggcctc

SEQ ID NO: 886322 - DNA, 33 bp, Homo sapien
tggatggctgagtggggcattagcggtggcctc

SEQ ID NO: 886323 - DNA, 33 bp, Homo sapien
caaggaagtccttgatcaaacatcagcggccga

SEQ ID NO: 886324 - DNA, 33 bp, Homo sapien
caaggaagtccttgattaaacatcagcggccga

SEQ ID NO: 886325 - DNA, 33 bp, Homo sapien
gccattggtttaaccactcccagctttcagtgt

SEQ ID NO: 886326 - DNA, 33 bp, Homo sapien
gccattggtttaaccattcccagctttcagtgt

SEQ ID NO: 886327 - DNA, 33 bp, Homo sapien
aaaacccactccataccggatagcgtggcccaa

SEQ ID NO: 886328 - DNA, 33 bp, Homo sapien
aaaacccactccatactggatagcgtggcccaa

SEQ ID NO: 886329 - DNA, 33 bp, Homo sapien
gagacttgggcattagaaagcaaaatcctgccc

SEQ ID NO: 886330 - DNA, 33 bp, Homo sapien
gagacttgggcattagcaagcaaaatcctgccc

SEQ ID NO: 886331 - DNA, 33 bp, Homo sapien
ccattctgccttacaacggactggatggtgcgg

SEQ ID NO: 886332 - DNA, 33 bp, Homo sapien
ccattctgccttacaatggactggatggtgcgg

SEQ ID NO: 886333 - DNA, 33 bp, Homo sapien
agactggaaaggaagacgtaacctgccattatt

SEQ ID NO: 886334 - DNA, 33 bp, Homo sapien
agactggaaaggaagaggtaacctgccattatt

SEQ ID NO: 886335 - DNA, 33 bp, Homo sapien
tatccatcctgctaaaagttaattcttctgcag

SEQ ID NO: 886336 - DNA, 33 bp, Homo sapien
tatccatcctgctaaaggttaattcttctgcag

SEQ ID NO: 886337 - DNA, 33 bp, Homo sapien
aacagactaatacaaccacctatttgatgttca

SEQ ID NO: 886338 - DNA, 33 bp, Homo sapien
aacagactaatacaacgacctatttgatgttca

SEQ ID NO: 886339 - DNA, 33 bp, Homo sapien
gatgggatgtgtgaaccaaagtggactttttta

SEQ ID NO: 886340 - DNA, 33 bp, Homo sapien
gatgggatgtgtgaacgaaagtggactttttta

SEQ ID NO: 886341 - DNA, 33 bp, Homo sapien
acttgggatggtagaacgagctctgtgctggaa

SEQ ID NO: 886342 - DNA, 33 bp, Homo sapien
acttgggatggtagaatgagctctgtgctggaa

SEQ ID NO: 886343 - DNA, 33 bp, Homo sapien
tggtgagggcacaggacggaacggcaggccctt

SEQ ID NO: 886344 - DNA, 33 bp, Homo sapien
tggtgagggcacaggatggaacggcaggccctt

SEQ ID NO: 886345 - DNA, 33 bp, Homo sapien
cctcctgatgtttctcccaggcactcatggctt

SEQ ID NO: 886346 - DNA, 33 bp, Homo sapien
cctcctgatgtttctcgcaggcactcatggctt

SEQ ID NO: 886347 - DNA, 33 bp, Homo sapien
tggcaccttatccccaaacctgttgtccccata

SEQ ID NO: 886348 - DNA, 33 bp, Homo sapien
tggcaccttatccccacacctgttgtccccata

SEQ ID NO: 886349 - DNA, 33 bp, Homo sapien
ttttgtgtagtggcaacgcaggaattatttatc

SEQ ID NO: 886350 - DNA, 33 bp, Homo sapien
ttttgtgtagtggcaaggcaggaattatttatc

SEQ ID NO: 886351 - DNA, 33 bp, Homo sapien
aaatcttgggacagtgaagcgatttgttcaagg

SEQ ID NO: 886352 - DNA, 33 bp, Homo sapien
aaatcttgggacagtggagcgatttgttcaagg

SEQ ID NO: 886353 - DNA, 33 bp, Homo sapien
cacacccatgggcaaacgtcagtgattgatcac

SEQ ID NO: 886354 - DNA, 33 bp, Homo sapien
cacacccatgggcaaatgtcagtgattgatcac

SEQ ID NO: 886355 - DNA, 33 bp, Homo sapien
tttccctatcaaaagacgcatgagaatgacatt

SEQ ID NO: 886356 - DNA, 33 bp, Homo sapien
tttccctatcaaaagatgcatgagaatgacatt

SEQ ID NO: 886357 - DNA, 33 bp, Homo sapien
cctcagcagcatctgaagcccattcttctctcc

SEQ ID NO: 886358 - DNA, 33 bp, Homo sapien
cctcagcagcatctgaggcccattcttctctcc

SEQ ID NO: 886359 - DNA, 33 bp, Homo sapien
ctgtccttgaacttgacgtggacggagtcacat

SEQ ID NO: 886360 - DNA, 33 bp, Homo sapien
ctgtccttgaacttgatgtggacggagtcacat

SEQ ID NO: 886361 - DNA, 33 bp, Homo sapien
ctgcagtgccggtatccccgcaaacaccagctg

SEQ ID NO: 886362 - DNA, 33 bp, Homo sapien
ctgcagtgccggtatctccgcaaacaccagctg

SEQ ID NO: 886363 - DNA, 33 bp, Homo sapien
gctccaacccaaaagacggaatgctgctggagg

SEQ ID NO: 886364 - DNA, 33 bp, Homo sapien
gctccaacccaaaagatggaatgctgctggagg

SEQ ID NO: 886365 - DNA, 33 bp, Homo sapien
caagttgctgcaaaaaatcatgggactttgcag

SEQ ID NO: 886366 - DNA, 33 bp, Homo sapien
caagttgctgcaaaaattcatgggactttgcag

SEQ ID NO: 886367 - DNA, 33 bp, Homo sapien
tgcaccggtccgcaccaagataagagccgaaac

SEQ ID NO: 886368 - DNA, 33 bp, Homo sapien
tgcaccggtccgcaccgagataagagccgaaac

SEQ ID NO: 886369 - DNA, 33 bp, Homo sapien
aacaaacaaacacctaaaaattggctgtgtaca

SEQ ID NO: 886370 - DNA, 33 bp, Homo sapien
aacaaacaaacacctagaaattggctgtgtaca

SEQ ID NO: 886371 - DNA, 33 bp, Homo sapien
cttcagttacaaatgcaaaaaagactgcattga

SEQ ID NO: 886372 - DNA, 33 bp, Homo sapien
cttcagttacaaatgcgaaaaagactgcattga

SEQ ID NO: 886373 - DNA, 33 bp, Homo sapien
ctgctaaagttctggcaaaccttctcaaaatac

SEQ ID NO: 886374 - DNA, 33 bp, Homo sapien
ctgctaaagttctggctaaccttctcaaaatac

SEQ ID NO: 886375 - DNA, 33 bp, Homo sapien
ttttagatggtactcactctttctggattgaca

SEQ ID NO: 886376 - DNA, 33 bp, Homo sapien
ttttagatggtactcagtctttctggattgaca

SEQ ID NO: 886377 - DNA, 33 bp, Homo sapien
agacggaaaatatttaaccctgctcgtccatca

SEQ ID NO: 886378 - DNA, 33 bp, Homo sapien
agacggaaaatatttagccctgctcgtccatca

SEQ ID NO: 886379 - DNA, 33 bp, Homo sapien
ctaagaaattattggcaaacccaaggtcacaaa

SEQ ID NO: 886380 - DNA, 33 bp, Homo sapien
ctaagaaattattggcgaacccaaggtcacaaa

SEQ ID NO: 886381 - DNA, 33 bp, Homo sapien
agattgagttcaatcacgtggccagttatctag

SEQ ID NO: 886382 - DNA, 33 bp, Homo sapien
agattgagttcaatcatgtggccagttatctag

SEQ ID NO: 886383 - DNA, 33 bp, Homo sapien
gtagccagaggagaaacaacccgacatttccag

SEQ ID NO: 886384 - DNA, 33 bp, Homo sapien
gtagccagaggagaaagaacccgacatttccag

SEQ ID NO: 886385 - DNA, 33 bp, Homo sapien
agctcctacagcaaatcacagctgctgagaaaa

SEQ ID NO: 886386 - DNA, 33 bp, Homo sapien
agctcctacagcaaatgacagctgctgagaaaa

SEQ ID NO: 886387 - DNA, 33 bp, Homo sapien
ttcggatgggactccaaagtttttccaagcgag

SEQ ID NO: 886388 - DNA, 33 bp, Homo sapien
ttcggatgggactccagagtttttccaagcgag

SEQ ID NO: 886389 - DNA, 33 bp, Homo sapien
tgtagggataaggccgaactgacaataacagag

SEQ ID NO: 886390 - DNA, 33 bp, Homo sapien
tgtagggataaggccggactgacaataacagag

SEQ ID NO: 886391 - DNA, 33 bp, Homo sapien
gaaaagaccctatatcaaaatgtagtcatattc

SEQ ID NO: 886392 - DNA, 33 bp, Homo sapien
gaaaagaccctatatcgaaatgtagtcatattc

SEQ ID NO: 886393 - DNA, 33 bp, Homo sapien
cttgctggtggaacacagcaactgaaaataaac

SEQ ID NO: 886394 - DNA, 33 bp, Homo sapien
cttgctggtggaacaccgcaactgaaaataaac

SEQ ID NO: 886395 - DNA, 33 bp, Homo sapien
ttctagggtgtcttctcactgtatccatttgat

SEQ ID NO: 886396 - DNA, 33 bp, Homo sapien
ttctagggtgtcttcttactgtatccatttgat

SEQ ID NO: 886397 - DNA, 33 bp, Homo sapien
actggtgggatcctgaagtcaccaagtgataga

SEQ ID NO: 886398 - DNA, 33 bp, Homo sapien
actggtgggatcctgaggtcaccaagtgataga

SEQ ID NO: 886399 - DNA, 33 bp, Homo sapien
aatttatcaggtttaagctggaagttgttttca

SEQ ID NO: 886400 - DNA, 33 bp, Homo sapien
aatttatcaggtttaatctggaagttgttttca

SEQ ID NO: 886401 - DNA, 33 bp, Homo sapien
cgcctcggcactctcacgccggattactgtgat

SEQ ID NO: 886402 - DNA, 33 bp, Homo sapien
cgcctcggcactctcaggccggattactgtgat

SEQ ID NO: 886403 - DNA, 33 bp, Homo sapien
ctcagtaacattcaaagggagcagctggtagga

SEQ ID NO: 886404 - DNA, 33 bp, Homo sapien
ctcagtaacattcaaatggagcagctggtagga

SEQ ID NO: 886405 - DNA, 33 bp, Homo sapien
tgtgaactgcgcacgcaagttctaggttgtgca

SEQ ID NO: 886406 - DNA, 33 bp, Homo sapien
tgtgaactgcgcacgcgagttctaggttgtgca

SEQ ID NO: 886407 - DNA, 33 bp, Homo sapien
agatggcttctgagaacacaagtgtagcataca

SEQ ID NO: 886408 - DNA, 33 bp, Homo sapien
agatggcttctgagaatacaagtgtagcataca

SEQ ID NO: 886409 - DNA, 33 bp, Homo sapien
agttaataaatccatcaaaagcccgtccccaaa

SEQ ID NO: 886410 - DNA, 33 bp, Homo sapien
agttaataaatccatcgaaagcccgtccccaaa

SEQ ID NO: 886411 - DNA, 33 bp, Homo sapien
caacctgttgtctcacaaagtgatctcctgcca

SEQ ID NO: 886412 - DNA, 33 bp, Homo sapien
caacctgttgtctcacgaagtgatctcctgcca

SEQ ID NO: 886413 - DNA, 33 bp, Homo sapien
actgctgttgagcccactccgttggatgagagg

SEQ ID NO: 886414 - DNA, 33 bp, Homo sapien
actgctgttgagcccattccgttggatgagagg

SEQ ID NO: 886415 - DNA, 33 bp, Homo sapien
tcccctttggtgtttacacaagagaaatgaaaa

SEQ ID NO: 886416 - DNA, 33 bp, Homo sapien
tcccctttggtgtttagacaagagaaatgaaaa

SEQ ID NO: 886417 - DNA, 33 bp, Homo sapien
ctgcataaacataccacgatggacccagatgca

SEQ ID NO: 886418 - DNA, 33 bp, Homo sapien
ctgcataaacataccatgatggacccagatgca

SEQ ID NO: 886419 - DNA, 33 bp, Homo sapien
tgcctcttaaattcaacagactcccactccttg

SEQ ID NO: 886420 - DNA, 33 bp, Homo sapien
tgcctcttaaattcaagagactcccactccttg

SEQ ID NO: 886421 - DNA, 33 bp, Homo sapien
tgggcaggtggaagacaatgggtcaaggataag

SEQ ID NO: 886422 - DNA, 33 bp, Homo sapien
tgggcaggtggaagacgatgggtcaaggataag

SEQ ID NO: 886423 - DNA, 33 bp, Homo sapien
gaagggatggacaaagaaagaccaccagtggat

SEQ ID NO: 886424 - DNA, 33 bp, Homo sapien
gaagggatggacaaaggaagaccaccagtggat

SEQ ID NO: 886425 - DNA, 33 bp, Homo sapien
catctagagtcaagtcagaacagattagagcaa

SEQ ID NO: 886426 - DNA, 33 bp, Homo sapien
catctagagtcaagtcggaacagattagagcaa

SEQ ID NO: 886427 - DNA, 33 bp, Homo sapien
atcaattcttccttcagtaatgcctcagaaaaa

SEQ ID NO: 886428 - DNA, 33 bp, Homo sapien
atcaattcttccttcattaatgcctcagaaaaa

SEQ ID NO: 886429 - DNA, 33 bp, Homo sapien
taagtccccgttggaaagaatcttcatgactgc

SEQ ID NO: 886430 - DNA, 33 bp, Homo sapien
taagtccccgttggaaggaatcttcatgactgc

SEQ ID NO: 886431 - DNA, 33 bp, Homo sapien
acacctgttcaaactaccggcaagacactaatc

SEQ ID NO: 886432 - DNA, 33 bp, Homo sapien
acacctgttcaaactatcggcaagacactaatc

SEQ ID NO: 886433 - DNA, 33 bp, Homo sapien
acctcagtttcctcaacagtcaaacaaggacaa

SEQ ID NO: 886434 - DNA, 33 bp, Homo sapien
acctcagtttcctcaatagtcaaacaaggacaa

SEQ ID NO: 886435 - DNA, 33 bp, Homo sapien
ttcaagactttctttaaacaattcacttcactc

SEQ ID NO: 886436 - DNA, 33 bp, Homo sapien
ttcaagactttctttagacaattcacttcactc

SEQ ID NO: 886437 - DNA, 33 bp, Homo sapien
gagaaatctgaaactgaagcatctatgttgttc

SEQ ID NO: 886438 - DNA, 33 bp, Homo sapien
gagaaatctgaaactggagcatctatgttgttc

SEQ ID NO: 886439 - DNA, 33 bp, Homo sapien
agctccttaaacaagtgaatttcctgccaacac

SEQ ID NO: 886440 - DNA, 33 bp, Homo sapien
agctccttaaacaagttaatttcctgccaacac

SEQ ID NO: 886441 - DNA, 33 bp, Homo sapien
gaatcagtggccataaagagctttgcgaagcag

SEQ ID NO: 886442 - DNA, 33 bp, Homo sapien
gaatcagtggccataaggagctttgcgaagcag

SEQ ID NO: 886443 - DNA, 33 bp, Homo sapien
gggagtcactttgacaggagtggttttgggggt

SEQ ID NO: 886444 - DNA, 33 bp, Homo sapien
gggagtcactttgacatgagtggttttgggggt

SEQ ID NO: 886445 - DNA, 33 bp, Homo sapien
aagtgctcagtaactgcgtgtgactaatggctc

SEQ ID NO: 886446 - DNA, 33 bp, Homo sapien
aagtgctcagtaactgtgtgtgactaatggctc

SEQ ID NO: 886447 - DNA, 33 bp, Homo sapien
ctttgactctgaaccaaattctgggacggcatc

SEQ ID NO: 886448 - DNA, 33 bp, Homo sapien
ctttgactctgaaccatattctgggacggcatc

SEQ ID NO: 886449 - DNA, 33 bp, Homo sapien
ctcacctgctcccccaactctttgaagaaatct

SEQ ID NO: 886450 - DNA, 33 bp, Homo sapien
ctcacctgctcccccagctctttgaagaaatct

SEQ ID NO: 886451 - DNA, 33 bp, Homo sapien
cagttctttgatttccactaactaccttgggag

SEQ ID NO: 886452 - DNA, 33 bp, Homo sapien
cagttctttgatttccgctaactaccttgggag

SEQ ID NO: 886453 - DNA, 33 bp, Homo sapien
tctcataacaaacataccaggttaatagctgtc

SEQ ID NO: 886454 - DNA, 33 bp, Homo sapien
tctcataacaaacatatcaggttaatagctgtc

SEQ ID NO: 886455 - DNA, 33 bp, Homo sapien
agacagtcttttgggacgctccactttcgttcc

SEQ ID NO: 886456 - DNA, 33 bp, Homo sapien
agacagtcttttgggatgctccactttcgttcc

SEQ ID NO: 886457 - DNA, 33 bp, Homo sapien
ttgtgggttacaagtaaataatatgccctttca

SEQ ID NO: 886458 - DNA, 33 bp, Homo sapien
ttgtgggttacaagtatataatatgccctttca

SEQ ID NO: 886459 - DNA, 33 bp, Homo sapien
ttggggtcgtttgttacgcagcagttttataga

SEQ ID NO: 886460 - DNA, 33 bp, Homo sapien
ttggggtcgtttgttatgcagcagttttataga

SEQ ID NO: 886461 - DNA, 33 bp, Homo sapien
tgacactctgatcccactgatggaagagaaaga

SEQ ID NO: 886462 - DNA, 33 bp, Homo sapien
tgacactctgatcccagtgatggaagagaaaga

SEQ ID NO: 886463 - DNA, 33 bp, Homo sapien
acttctgccgtagtcacgtaccctttccagatt

SEQ ID NO: 886464 - DNA, 33 bp, Homo sapien
acttctgccgtagtcatgtaccctttccagatt

SEQ ID NO: 886465 - DNA, 33 bp, Homo sapien
aggagaaggagaaatgcatgtgccgcgtcaaag

SEQ ID NO: 886466 - DNA, 33 bp, Homo sapien
aggagaaggagaaatggatgtgccgcgtcaaag

SEQ ID NO: 886467 - DNA, 33 bp, Homo sapien
agtcacaatgcaatcacgttatggaaaactata

SEQ ID NO: 886468 - DNA, 33 bp, Homo sapien
agtcacaatgcaatcatgttatggaaaactata

SEQ ID NO: 886469 - DNA, 33 bp, Homo sapien
tgatttggagcaatgggaatagcaaaacactag

SEQ ID NO: 886470 - DNA, 33 bp, Homo sapien
tgatttggagcaatggtaatagcaaaacactag

SEQ ID NO: 886471 - DNA, 33 bp, Homo sapien
taccagtgattgtctccataaagtgaaagtggg

SEQ ID NO: 886472 - DNA, 33 bp, Homo sapien
taccagtgattgtctctataaagtgaaagtggg

SEQ ID NO: 886473 - DNA, 33 bp, Homo sapien
ctacggaacgggaggaagtgttcatcagcacgg

SEQ ID NO: 886474 - DNA, 33 bp, Homo sapien
ctacggaacgggaggaggtgttcatcagcacgg

SEQ ID NO: 886475 - DNA, 33 bp, Homo sapien
ttctctgcagctggggaatacttttctgatttc

SEQ ID NO: 886476 - DNA, 33 bp, Homo sapien
ttctctgcagctgggggatacttttctgatttc

SEQ ID NO: 886477 - DNA, 33 bp, Homo sapien
cctttccattccttccaccgcatgaggacacaa

SEQ ID NO: 886478 - DNA, 33 bp, Homo sapien
cctttccattccttccgccgcatgaggacacaa

SEQ ID NO: 886479 - DNA, 33 bp, Homo sapien
cagaaatgacatataaatcgacttgcacaccaa

SEQ ID NO: 886480 - DNA, 33 bp, Homo sapien
cagaaatgacatataattcgacttgcacaccaa

SEQ ID NO: 886481 - DNA, 33 bp, Homo sapien
tcatcttgtagaaggaaaacctgaggctcacag

SEQ ID NO: 886482 - DNA, 33 bp, Homo sapien
tcatcttgtagaaggagaacctgaggctcacag

SEQ ID NO: 886483 - DNA, 33 bp, Homo sapien
gttatttttctgtttacggagccaatgctttaa

SEQ ID NO: 886484 - DNA, 33 bp, Homo sapien
gttatttttctgtttatggagccaatgctttaa

SEQ ID NO: 886485 - DNA, 33 bp, Homo sapien
atggctatgaccgagaaaatccctctagcaggc

SEQ ID NO: 886486 - DNA, 33 bp, Homo sapien
atggctatgaccgagacaatccctctagcaggc

SEQ ID NO: 886487 - DNA, 33 bp, Homo sapien
agcctactgcaactgcaagagtcaggctgactg

SEQ ID NO: 886488 - DNA, 33 bp, Homo sapien
agcctactgcaactgcgagagtcaggctgactg

SEQ ID NO: 886489 - DNA, 33 bp, Homo sapien
gctgttgcagaatagacggcattcctgttgctt

SEQ ID NO: 886490 - DNA, 33 bp, Homo sapien
gctgttgcagaatagatggcattcctgttgctt

SEQ ID NO: 886491 - DNA, 33 bp, Homo sapien
cagaaggtgaacagtcacccacccgatggtaga

SEQ ID NO: 886492 - DNA, 33 bp, Homo sapien
cagaaggtgaacagtcgcccacccgatggtaga

SEQ ID NO: 886493 - DNA, 33 bp, Homo sapien
tacactcttgcaaagccgagctggttatctgtt

SEQ ID NO: 886494 - DNA, 33 bp, Homo sapien
tacactcttgcaaagctgagctggttatctgtt

SEQ ID NO: 886495 - DNA, 33 bp, Homo sapien
atctgtgtccacaaaacgagcccagagttggga

SEQ ID NO: 886496 - DNA, 33 bp, Homo sapien
atctgtgtccacaaaatgagcccagagttggga

SEQ ID NO: 886497 - DNA, 33 bp, Homo sapien
ctaatggagatatacaataagacgaatgttgtt

SEQ ID NO: 886498 - DNA, 33 bp, Homo sapien
ctaatggagatatacagtaagacgaatgttgtt

SEQ ID NO: 886499 - DNA, 33 bp, Homo sapien
tgctgttttgccattacaagtgcagatccgtgg

SEQ ID NO: 886500 - DNA, 33 bp, Homo sapien
tgctgttttgccattataagtgcagatccgtgg

SEQ ID NO: 886501 - DNA, 33 bp, Homo sapien
tgaggtatgcctgtacaagcttgggaatcctta

SEQ ID NO: 886502 - DNA, 33 bp, Homo sapien
tgaggtatgcctgtacgagcttgggaatcctta

SEQ ID NO: 886503 - DNA, 33 bp, Homo sapien
ttcgcatcctgaaccaatgcatatcttgcctgt

SEQ ID NO: 886504 - DNA, 33 bp, Homo sapien
ttcgcatcctgaaccattgcatatcttgcctgt

SEQ ID NO: 886505 - DNA, 33 bp, Homo sapien
ttttggtttacagaaaaaattgatgaaccttac

SEQ ID NO: 886506 - DNA, 33 bp, Homo sapien
ttttggtttacagaaataattgatgaaccttac

SEQ ID NO: 886507 - DNA, 33 bp, Homo sapien
ctgggtgctgaactacagggcacaagaatagga

SEQ ID NO: 886508 - DNA, 33 bp, Homo sapien
ctgggtgctgaactacggggcacaagaatagga

SEQ ID NO: 886509 - DNA, 33 bp, Homo sapien
gccagattggaaagaaggaagtgcagatcaatc

SEQ ID NO: 886510 - DNA, 33 bp, Homo sapien
gccagattggaaagaatgaagtgcagatcaatc

SEQ ID NO: 886511 - DNA, 33 bp, Homo sapien
cttggcagcaaatggaaatcttggcatagctgg

SEQ ID NO: 886512 - DNA, 33 bp, Homo sapien
cttggcagcaaatggagatcttggcatagctgg

SEQ ID NO: 886513 - DNA, 33 bp, Homo sapien
atgcaccccttgcttaagagtagctcactgtgc

SEQ ID NO: 886514 - DNA, 33 bp, Homo sapien
atgcaccccttgcttatgagtagctcactgtgc

SEQ ID NO: 886515 - DNA, 33 bp, Homo sapien
actcaatacttacttacgggatgcaccaatgga

SEQ ID NO: 886516 - DNA, 33 bp, Homo sapien
actcaatacttacttatgggatgcaccaatgga

SEQ ID NO: 886517 - DNA, 33 bp, Homo sapien
atactttgtacccacaatgattcatggccactt

SEQ ID NO: 886518 - DNA, 33 bp, Homo sapien
atactttgtacccacagtgattcatggccactt

SEQ ID NO: 886519 - DNA, 33 bp, Homo sapien
cttgtacccctttaaactcattcagctgcatcc

SEQ ID NO: 886520 - DNA, 33 bp, Homo sapien
cttgtacccctttaaagtcattcagctgcatcc

SEQ ID NO: 886521 - DNA, 33 bp, Homo sapien
catttttctcttgcaaaaattggaatacatggg

SEQ ID NO: 886522 - DNA, 33 bp, Homo sapien
catttttctcttgcaagaattggaatacatggg

SEQ ID NO: 886523 - DNA, 33 bp, Homo sapien
actaggttcctttagccatgtgggcaccgtctc

SEQ ID NO: 886524 - DNA, 33 bp, Homo sapien
actaggttcctttagctatgtgggcaccgtctc

SEQ ID NO: 886525 - DNA, 33 bp, Homo sapien
cagggagtatcaagcacattgtactttccatga

SEQ ID NO: 886526 - DNA, 33 bp, Homo sapien
cagggagtatcaagcagattgtactttccatga

SEQ ID NO: 886527 - DNA, 33 bp, Homo sapien
atttgggcaaatcgctaactccaagttcctgta

SEQ ID NO: 886528 - DNA, 33 bp, Homo sapien
atttgggcaaatcgctgactccaagttcctgta

SEQ ID NO: 886529 - DNA, 33 bp, Homo sapien
gacttctgaggctaaagatgtataagcagtctt

SEQ ID NO: 886530 - DNA, 33 bp, Homo sapien
gacttctgaggctaaatatgtataagcagtctt

SEQ ID NO: 886531 - DNA, 33 bp, Homo sapien
ccctattccagacacccgctgacttcctggaaa

SEQ ID NO: 886532 - DNA, 33 bp, Homo sapien
ccctattccagacacctgctgacttcctggaaa

SEQ ID NO: 886533 - DNA, 33 bp, Homo sapien
aatggttttacgtgagaccacatggcttgattt

SEQ ID NO: 886534 - DNA, 33 bp, Homo sapien
aatggttttacgtgaggccacatggcttgattt

SEQ ID NO: 886535 - DNA, 33 bp, Homo sapien
atgggattaaccaacacgaggattaaaaataaa

SEQ ID NO: 886536 - DNA, 33 bp, Homo sapien
atgggattaaccaacatgaggattaaaaataaa

SEQ ID NO: 886537 - DNA, 33 bp, Homo sapien
cttggctcttctaaaacggttgtcttagctaaa

SEQ ID NO: 886538 - DNA, 33 bp, Homo sapien
cttggctcttctaaaatggttgtcttagctaaa

SEQ ID NO: 886539 - DNA, 33 bp, Homo sapien
gggtatcacagtataactaggagaatttcttta

SEQ ID NO: 886540 - DNA, 33 bp, Homo sapien
gggtatcacagtataattaggagaatttcttta

SEQ ID NO: 886541 - DNA, 33 bp, Homo sapien
ctgtaacaacaattgaagtgagagaaagtagca

SEQ ID NO: 886542 - DNA, 33 bp, Homo sapien
ctgtaacaacaattgaggtgagagaaagtagca

SEQ ID NO: 886543 - DNA, 33 bp, Homo sapien
tgagggctgattgatacgattgtaggtaaggtg

SEQ ID NO: 886544 - DNA, 33 bp, Homo sapien
tgagggctgattgatatgattgtaggtaaggtg

SEQ ID NO: 886545 - DNA, 33 bp, Homo sapien
ttactgttttataatacgatgcagtgagtatga

SEQ ID NO: 886546 - DNA, 33 bp, Homo sapien
ttactgttttataatatgatgcagtgagtatga

SEQ ID NO: 886547 - DNA, 33 bp, Homo sapien
ttatggagctctacaaatcactgcagcgtggaa

SEQ ID NO: 886548 - DNA, 33 bp, Homo sapien
ttatggagctctacaagtcactgcagcgtggaa

SEQ ID NO: 886549 - DNA, 33 bp, Homo sapien
tgtttgcccaaaaacaccaattctgtctagttt

SEQ ID NO: 886550 - DNA, 33 bp, Homo sapien
tgtttgcccaaaaacagcaattctgtctagttt

SEQ ID NO: 886551 - DNA, 33 bp, Homo sapien
atcccagctgaaatcccaatcacaaaaggaatc

SEQ ID NO: 886552 - DNA, 33 bp, Homo sapien
atcccagctgaaatcctaatcacaaaaggaatc

SEQ ID NO: 886553 - DNA, 33 bp, Homo sapien
ctcttccatttgcctaaatctaacccattctta

SEQ ID NO: 886554 - DNA, 33 bp, Homo sapien
ctcttccatttgcctatatctaacccattctta

SEQ ID NO: 886555 - DNA, 33 bp, Homo sapien
ctgacattctgctcaactagtttttcctgtgca

SEQ ID NO: 886556 - DNA, 33 bp, Homo sapien
ctgacattctgctcaagtagtttttcctgtgca

SEQ ID NO: 886557 - DNA, 33 bp, Homo sapien
tatgaagaggataaaccgtgaaggtgtacagac

SEQ ID NO: 886558 - DNA, 33 bp, Homo sapien
tatgaagaggataaactgtgaaggtgtacagac

SEQ ID NO: 886559 - DNA, 33 bp, Homo sapien
cttatgttgatatggaagcttaaaagaagaatt

SEQ ID NO: 886560 - DNA, 33 bp, Homo sapien
cttatgttgatatggaggcttaaaagaagaatt

SEQ ID NO: 886561 - DNA, 33 bp, Homo sapien
attttcagataacttacggattttatagtgaaa

SEQ ID NO: 886562 - DNA, 33 bp, Homo sapien
attttcagataacttatggattttatagtgaaa

SEQ ID NO: 886563 - DNA, 33 bp, Homo sapien
tggctggggctatccaagaatatagtgactagt

SEQ ID NO: 886564 - DNA, 33 bp, Homo sapien
tggctggggctatccaggaatatagtgactagt

SEQ ID NO: 886565 - DNA, 33 bp, Homo sapien
tgttattgaagtgttacatgaatttgtgtgtgt

SEQ ID NO: 886566 - DNA, 33 bp, Homo sapien
tgttattgaagtgttatatgaatttgtgtgtgt

SEQ ID NO: 886567 - DNA, 33 bp, Homo sapien
taacacctagaaattaacatgacttatataact

SEQ ID NO: 886568 - DNA, 33 bp, Homo sapien
taacacctagaaattatcatgacttatataact

SEQ ID NO: 886569 - DNA, 33 bp, Homo sapien
ctctggtttagctgtagccacatgaggttgcag

SEQ ID NO: 886570 - DNA, 33 bp, Homo sapien
ctctggtttagctgtatccacatgaggttgcag

SEQ ID NO: 886571 - DNA, 33 bp, Homo sapien
taattcatatacagcaataagtaactgatcaga

SEQ ID NO: 886572 - DNA, 33 bp, Homo sapien
taattcatatacagcagtaagtaactgatcaga

SEQ ID NO: 886573 - DNA, 33 bp, Homo sapien
gtctatctattatttcgctggtgagctcagggc

SEQ ID NO: 886574 - DNA, 33 bp, Homo sapien
gtctatctattatttctctggtgagctcagggc

SEQ ID NO: 886575 - DNA, 33 bp, Homo sapien
cattatttttgttgtgaaagaatattcagtaaa

SEQ ID NO: 886576 - DNA, 33 bp, Homo sapien
cattatttttgttgtgcaagaatattcagtaaa

SEQ ID NO: 886577 - DNA, 33 bp, Homo sapien
acgatctatagaataactaaccaaagctcaagt

SEQ ID NO: 886578 - DNA, 33 bp, Homo sapien
acgatctatagaataagtaaccaaagctcaagt

SEQ ID NO: 886579 - DNA, 33 bp, Homo sapien
gctgctaccagaatacgctattggtaaaacatg

SEQ ID NO: 886580 - DNA, 33 bp, Homo sapien
gctgctaccagaatactctattggtaaaacatg

SEQ ID NO: 886581 - DNA, 33 bp, Homo sapien
caaaaaggattggaaggatacccacaagtccat

SEQ ID NO: 886582 - DNA, 33 bp, Homo sapien
caaaaaggattggaagtatacccacaagtccat

SEQ ID NO: 886583 - DNA, 33 bp, Homo sapien
taagcaggataaaagaagtctttgctgcaaaag

SEQ ID NO: 886584 - DNA, 33 bp, Homo sapien
taagcaggataaaagaggtctttgctgcaaaag

SEQ ID NO: 886585 - DNA, 33 bp, Homo sapien
aatctagaaaggcaacaaatatatcatagcata

SEQ ID NO: 886586 - DNA, 33 bp, Homo sapien
aatctagaaaggcaaccaatatatcatagcata

SEQ ID NO: 886587 - DNA, 33 bp, Homo sapien
gaaagtcttaacaataaataccttcacaaggcc

SEQ ID NO: 886588 - DNA, 33 bp, Homo sapien
gaaagtcttaacaatatataccttcacaaggcc

SEQ ID NO: 886589 - DNA, 33 bp, Homo sapien
tgagaatctttatggaagaatttgcgacagctc

SEQ ID NO: 886590 - DNA, 33 bp, Homo sapien
tgagaatctttatggacgaatttgcgacagctc

SEQ ID NO: 886591 - DNA, 33 bp, Homo sapien
tcagaatgtgaaatacccttgtagtcttggaat

SEQ ID NO: 886592 - DNA, 33 bp, Homo sapien
tcagaatgtgaaatacgcttgtagtcttggaat

SEQ ID NO: 886593 - DNA, 33 bp, Homo sapien
ggtgagtgggagaatcaaacttttgtggtaatc

SEQ ID NO: 886594 - DNA, 33 bp, Homo sapien
ggtgagtgggagaatctaacttttgtggtaatc

SEQ ID NO: 886595 - DNA, 33 bp, Homo sapien
gatagaaacctcaacaccaatataaaagaattc

SEQ ID NO: 886596 - DNA, 33 bp, Homo sapien
gatagaaacctcaacatcaatataaaagaattc

SEQ ID NO: 886597 - DNA, 33 bp, Homo sapien
cacacttagaatccacgggtcaacttgaattat

SEQ ID NO: 886598 - DNA, 33 bp, Homo sapien
cacacttagaatccactggtcaacttgaattat

SEQ ID NO: 886599 - DNA, 33 bp, Homo sapien
aatttttctgaatcaactgagctggaatgacaa

SEQ ID NO: 886600 - DNA, 33 bp, Homo sapien
aatttttctgaatcaattgagctggaatgacaa

SEQ ID NO: 886601 - DNA, 33 bp, Homo sapien
gtagttatgcgcaaagcatcctaacaaaagtta

SEQ ID NO: 886602 - DNA, 33 bp, Homo sapien
gtagttatgcgcaaagtatcctaacaaaagtta

SEQ ID NO: 886603 - DNA, 33 bp, Homo sapien
cgtagctcgcgtgccaaccacttctcttggaga

SEQ ID NO: 886604 - DNA, 33 bp, Homo sapien
cgtagctcgcgtgccagccacttctcttggaga

SEQ ID NO: 886605 - DNA, 33 bp, Homo sapien
agctataacttaaaaaaaaagtccagcacaggg

SEQ ID NO: 886606 - DNA, 33 bp, Homo sapien
agctataacttaaaaagaaagtccagcacaggg

SEQ ID NO: 886607 - DNA, 33 bp, Homo sapien
ttgtgagtggaagatacgaaccaaaaagatgtt

SEQ ID NO: 886608 - DNA, 33 bp, Homo sapien
ttgtgagtggaagatatgaaccaaaaagatgtt

SEQ ID NO: 886609 - DNA, 33 bp, Homo sapien
gagggtttcaaggttacagacagcatacaccat

SEQ ID NO: 886610 - DNA, 33 bp, Homo sapien
gagggtttcaaggttagagacagcatacaccat

SEQ ID NO: 886611 - DNA, 33 bp, Homo sapien
aaaaagatatataagcaaagatatttaccgtct

SEQ ID NO: 886612 - DNA, 33 bp, Homo sapien
aaaaagatatataagctaagatatttaccgtct

SEQ ID NO: 886613 - DNA, 33 bp, Homo sapien
aattcaacatatagtcaaatcttctcaaatctg

SEQ ID NO: 886614 - DNA, 33 bp, Homo sapien
aattcaacatatagtccaatcttctcaaatctg

SEQ ID NO: 886615 - DNA, 33 bp, Homo sapien
aaaacagactgggagaaaaatgactgaacctca

SEQ ID NO: 886616 - DNA, 33 bp, Homo sapien
aaaacagactgggagagaaatgactgaacctca

SEQ ID NO: 886617 - DNA, 33 bp, Homo sapien
tacaggtatttcaaaacgatagagcggcaagcg

SEQ ID NO: 886618 - DNA, 33 bp, Homo sapien
tacaggtatttcaaaaggatagagcggcaagcg

SEQ ID NO: 886619 - DNA, 33 bp, Homo sapien
tatgatgacctctagaagataccattcattgtc

SEQ ID NO: 886620 - DNA, 33 bp, Homo sapien
tatgatgacctctagacgataccattcattgtc

SEQ ID NO: 886621 - DNA, 33 bp, Homo sapien
cactgtgtgcctcagaaatagtcaaggtactac

SEQ ID NO: 886622 - DNA, 33 bp, Homo sapien
cactgtgtgcctcagagatagtcaaggtactac

SEQ ID NO: 886623 - DNA, 33 bp, Homo sapien
agacatggatgggttacagagaaatgtaggaag

SEQ ID NO: 886624 - DNA, 33 bp, Homo sapien
agacatggatgggttatagagaaatgtaggaag

SEQ ID NO: 886625 - DNA, 33 bp, Homo sapien
gacatatcctaccagacattgtaaagctatagg

SEQ ID NO: 886626 - DNA, 33 bp, Homo sapien
gacatatcctaccagagattgtaaagctatagg

SEQ ID NO: 886627 - DNA, 33 bp, Homo sapien
aaggtatctgatcgataaatagactgtaaaact

SEQ ID NO: 886628 - DNA, 33 bp, Homo sapien
aaggtatctgatcgatgaatagactgtaaaact

SEQ ID NO: 886629 - DNA, 33 bp, Homo sapien
ttcacaacacaatggcaagctgagtggttttga

SEQ ID NO: 886630 - DNA, 33 bp, Homo sapien
ttcacaacacaatggcgagctgagtggttttga

SEQ ID NO: 886631 - DNA, 33 bp, Homo sapien
aagagcttggaccctgaagatgcgtagtgtggt

SEQ ID NO: 886632 - DNA, 33 bp, Homo sapien
aagagcttggaccctggagatgcgtagtgtggt

SEQ ID NO: 886633 - DNA, 33 bp, Homo sapien
cacaggatcagagctaaacaacagatatagaga

SEQ ID NO: 886634 - DNA, 33 bp, Homo sapien
cacaggatcagagctacacaacagatatagaga

SEQ ID NO: 886635 - DNA, 33 bp, Homo sapien
gttttgaaatttcacaatgatacagctaattgt

SEQ ID NO: 886636 - DNA, 33 bp, Homo sapien
gttttgaaatttcacagtgatacagctaattgt

SEQ ID NO: 886637 - DNA, 33 bp, Homo sapien
ggagttgtatcaccaccgggcattttatatatt

SEQ ID NO: 886638 - DNA, 33 bp, Homo sapien
ggagttgtatcaccactgggcattttatatatt

SEQ ID NO: 886639 - DNA, 33 bp, Homo sapien
cctactttattctgacaaagtatgtacaagcta

SEQ ID NO: 886640 - DNA, 33 bp, Homo sapien
cctactttattctgacgaagtatgtacaagcta

SEQ ID NO: 886641 - DNA, 33 bp, Homo sapien
actgtgtattatcatacggtttgtttagcccta

SEQ ID NO: 886642 - DNA, 33 bp, Homo sapien
actgtgtattatcatatggtttgtttagcccta

SEQ ID NO: 886643 - DNA, 33 bp, Homo sapien
aacgtctgaaaagaaacatctatcatctgttct

SEQ ID NO: 886644 - DNA, 33 bp, Homo sapien
aacgtctgaaaagaaatatctatcatctgttct

SEQ ID NO: 886645 - DNA, 33 bp, Homo sapien
ctctcagtctctcctacatccaagacaggcctg

SEQ ID NO: 886646 - DNA, 33 bp, Homo sapien
ctctcagtctctcctagatccaagacaggcctg

SEQ ID NO: 886647 - DNA, 33 bp, Homo sapien
tatacaagatatggaagtaacccatgtccaaca

SEQ ID NO: 886648 - DNA, 33 bp, Homo sapien
tatacaagatatggaattaacccatgtccaaca

SEQ ID NO: 886649 - DNA, 33 bp, Homo sapien
gctgcctgtcttttggaatagtgatttgtaagt

SEQ ID NO: 886650 - DNA, 33 bp, Homo sapien
gctgcctgtcttttggcatagtgatttgtaagt

SEQ ID NO: 886651 - DNA, 33 bp, Homo sapien
gacagaatttatccagcagctctaaaagaaagc

SEQ ID NO: 886652 - DNA, 33 bp, Homo sapien
gacagaatttatccaggagctctaaaagaaagc

SEQ ID NO: 886653 - DNA, 33 bp, Homo sapien
caattccaatctaaaaacaatgattattaaatg

SEQ ID NO: 886654 - DNA, 33 bp, Homo sapien
caattccaatctaaaaccaatgattattaaatg

SEQ ID NO: 886655 - DNA, 33 bp, Homo sapien
caccctaatcttattacgcaaatgagctgtcca

SEQ ID NO: 886656 - DNA, 33 bp, Homo sapien
caccctaatcttattatgcaaatgagctgtcca

SEQ ID NO: 886657 - DNA, 33 bp, Homo sapien
tattttgagtcacaaaaaaaacacatatgtgga

SEQ ID NO: 886658 - DNA, 33 bp, Homo sapien
tattttgagtcacaaataaaacacatatgtgga

SEQ ID NO: 886659 - DNA, 33 bp, Homo sapien
aggtggaattcctccaataagacatcaccccaa

SEQ ID NO: 886660 - DNA, 33 bp, Homo sapien
aggtggaattcctccagtaagacatcaccccaa

SEQ ID NO: 886661 - DNA, 33 bp, Homo sapien
tgctgaattaaaaaacggaacaattaagcatac

SEQ ID NO: 886662 - DNA, 33 bp, Homo sapien
tgctgaattaaaaaactgaacaattaagcatac

SEQ ID NO: 886663 - DNA, 33 bp, Homo sapien
tccctcactctactcaagactacttagattgtt

SEQ ID NO: 886664 - DNA, 33 bp, Homo sapien
tccctcactctactcaggactacttagattgtt

SEQ ID NO: 886665 - DNA, 33 bp, Homo sapien
caaaagcagaacttaacgtgattgcacttagtg

SEQ ID NO: 886666 - DNA, 33 bp, Homo sapien
caaaagcagaacttaatgtgattgcacttagtg

SEQ ID NO: 886667 - DNA, 33 bp, Homo sapien
gagaacagaagttgctaaattaggcccagaaat

SEQ ID NO: 886668 - DNA, 33 bp, Homo sapien
gagaacagaagttgctgaattaggcccagaaat

SEQ ID NO: 886669 - DNA, 33 bp, Homo sapien
accataaaataaacaacgtaccaactgcgtgtc

SEQ ID NO: 886670 - DNA, 33 bp, Homo sapien
accataaaataaacaatgtaccaactgcgtgtc

SEQ ID NO: 886671 - DNA, 33 bp, Homo sapien
agaaacaactggctcccacttctctgtgtcacc

SEQ ID NO: 886672 - DNA, 33 bp, Homo sapien
agaaacaactggctcctacttctctgtgtcacc

SEQ ID NO: 886673 - DNA, 33 bp, Homo sapien
ctatcttccatgaaaccagtcctgatgccaaaa

SEQ ID NO: 886674 - DNA, 33 bp, Homo sapien
ctatcttccatgaaacgagtcctgatgccaaaa

SEQ ID NO: 886675 - DNA, 33 bp, Homo sapien
attaacttatgtcacaatcgcagatggcagtgg

SEQ ID NO: 886676 - DNA, 33 bp, Homo sapien
attaacttatgtcacagtcgcagatggcagtgg

SEQ ID NO: 886677 - DNA, 33 bp, Homo sapien
tgcagtaaattacaccaactctcacaggcctcg

SEQ ID NO: 886678 - DNA, 33 bp, Homo sapien
tgcagtaaattacaccgactctcacaggcctcg

SEQ ID NO: 886679 - DNA, 33 bp, Homo sapien
tcaactgtttagcccacgcacttgtctgaagcc

SEQ ID NO: 886680 - DNA, 33 bp, Homo sapien
tcaactgtttagcccatgcacttgtctgaagcc

SEQ ID NO: 886681 - DNA, 33 bp, Homo sapien
cctaagtatttcatcacataagcaccccattta

SEQ ID NO: 886682 - DNA, 33 bp, Homo sapien
cctaagtatttcatcagataagcaccccattta

SEQ ID NO: 886683 - DNA, 33 bp, Homo sapien
acaaattcttcaacacacaacctatctgcagaa

SEQ ID NO: 886684 - DNA, 33 bp, Homo sapien
acaaattcttcaacacccaacctatctgcagaa

SEQ ID NO: 886685 - DNA, 33 bp, Homo sapien
ggttttgctttgcaaacggcaggcacgctgcac

SEQ ID NO: 886686 - DNA, 33 bp, Homo sapien
ggttttgctttgcaaatggcaggcacgctgcac

SEQ ID NO: 886687 - DNA, 33 bp, Homo sapien
gttctgttaggacttacccattgtttctggacc

SEQ ID NO: 886688 - DNA, 33 bp, Homo sapien
gttctgttaggacttagccattgtttctggacc

SEQ ID NO: 886689 - DNA, 33 bp, Homo sapien
cttaaaaatactgataacagagcctcactgctg

SEQ ID NO: 886690 - DNA, 33 bp, Homo sapien
cttaaaaatactgataccagagcctcactgctg

SEQ ID NO: 886691 - DNA, 33 bp, Homo sapien
ttttatgactttcacaacgtggccaaagccgaa

SEQ ID NO: 886692 - DNA, 33 bp, Homo sapien
ttttatgactttcacagcgtggccaaagccgaa

SEQ ID NO: 886693 - DNA, 33 bp, Homo sapien
gctgatgcatggtgaaactcatgtgcatcacat

SEQ ID NO: 886694 - DNA, 33 bp, Homo sapien
gctgatgcatggtgaagctcatgtgcatcacat

SEQ ID NO: 886695 - DNA, 33 bp, Homo sapien
ctatctgtaaggagaaagcatacgtagctcagt

SEQ ID NO: 886696 - DNA, 33 bp, Homo sapien
ctatctgtaaggagaacgcatacgtagctcagt

SEQ ID NO: 886697 - DNA, 33 bp, Homo sapien
ttcgtgtaggacactgcaaccatatgaagtggc

SEQ ID NO: 886698 - DNA, 33 bp, Homo sapien
ttcgtgtaggacactggaaccatatgaagtggc

SEQ ID NO: 886699 - DNA, 33 bp, Homo sapien
gtaagttgaagagcaactccctgaactccagtc

SEQ ID NO: 886700 - DNA, 33 bp, Homo sapien
gtaagttgaagagcaagtccctgaactccagtc

SEQ ID NO: 886701 - DNA, 33 bp, Homo sapien
gcaagttgtcttataagtctgaaaggttgcata

SEQ ID NO: 886702 - DNA, 33 bp, Homo sapien
gcaagttgtcttataattctgaaaggttgcata

SEQ ID NO: 886703 - DNA, 33 bp, Homo sapien
tagtatttgctctttacagggttagcattttca

SEQ ID NO: 886704 - DNA, 33 bp, Homo sapien
tagtatttgctctttatagggttagcattttca

SEQ ID NO: 886705 - DNA, 33 bp, Homo sapien
gacagtccccccaccactgaaagagaaaaatct

SEQ ID NO: 886706 - DNA, 33 bp, Homo sapien
gacagtccccccaccattgaaagagaaaaatct

SEQ ID NO: 886707 - DNA, 33 bp, Homo sapien
actgtctgaatgataacctaatactctctcttc

SEQ ID NO: 886708 - DNA, 33 bp, Homo sapien
actgtctgaatgataagctaatactctctcttc

SEQ ID NO: 886709 - DNA, 33 bp, Homo sapien
ataatgaattttcagcccttggttggtgatacc

SEQ ID NO: 886710 - DNA, 33 bp, Homo sapien
ataatgaattttcagctcttggttggtgatacc

SEQ ID NO: 886711 - DNA, 33 bp, Homo sapien
gagtggcccaaagtgacgtcggcagggactaga

SEQ ID NO: 886712 - DNA, 33 bp, Homo sapien
gagtggcccaaagtgaggtcggcagggactaga

SEQ ID NO: 886713 - DNA, 33 bp, Homo sapien
cactaaaacatgaagaaaaatcatcctgggtga

SEQ ID NO: 886714 - DNA, 33 bp, Homo sapien
cactaaaacatgaagagaaatcatcctgggtga

SEQ ID NO: 886715 - DNA, 33 bp, Homo sapien
aactcaacaaagctcacgtaaatggttatctag

SEQ ID NO: 886716 - DNA, 33 bp, Homo sapien
aactcaacaaagctcaggtaaatggttatctag

SEQ ID NO: 886717 - DNA, 33 bp, Homo sapien
cacatggtctaaacagcaatctctctcatctta

SEQ ID NO: 886718 - DNA, 33 bp, Homo sapien
cacatggtctaaacaggaatctctctcatctta

SEQ ID NO: 886719 - DNA, 33 bp, Homo sapien
caatgtttcttcatctcagagccgtaagaaaga

SEQ ID NO: 886720 - DNA, 33 bp, Homo sapien
caatgtttcttcatctgagagccgtaagaaaga

SEQ ID NO: 886721 - DNA, 33 bp, Homo sapien
agcctctgctgccttaaatcacattttgcaatt

SEQ ID NO: 886722 - DNA, 33 bp, Homo sapien
agcctctgctgccttatatcacattttgcaatt

SEQ ID NO: 886723 - DNA, 33 bp, Homo sapien
ttggtgctttctctcacgtggatcctgctgcca

SEQ ID NO: 886724 - DNA, 33 bp, Homo sapien
ttggtgctttctctcatgtggatcctgctgcca

SEQ ID NO: 886725 - DNA, 33 bp, Homo sapien
agacaaaagtgataaacttgattcatgcttgga

SEQ ID NO: 886726 - DNA, 33 bp, Homo sapien
agacaaaagtgataaagttgattcatgcttgga

SEQ ID NO: 886727 - DNA, 33 bp, Homo sapien
agagagaaaagcaacacaaggaacgctggatac

SEQ ID NO: 886728 - DNA, 33 bp, Homo sapien
agagagaaaagcaacagaaggaacgctggatac

SEQ ID NO: 886729 - DNA, 33 bp, Homo sapien
tcatcttgaggcccggaaactactaaaaggatt

SEQ ID NO: 886730 - DNA, 33 bp, Homo sapien
tcatcttgaggcccgggaactactaaaaggatt

SEQ ID NO: 886731 - DNA, 33 bp, Homo sapien
atatagtgtgttcaaaagtaattttattataac

SEQ ID NO: 886732 - DNA, 33 bp, Homo sapien
atatagtgtgttcaaatgtaattttattataac

SEQ ID NO: 886733 - DNA, 33 bp, Homo sapien
aacagatacagaaacagattaactacagacctt

SEQ ID NO: 886734 - DNA, 33 bp, Homo sapien
aacagatacagaaacatattaactacagacctt

SEQ ID NO: 886735 - DNA, 33 bp, Homo sapien
tattacatgagtttatgaacattcactgtgaga

SEQ ID NO: 886736 - DNA, 33 bp, Homo sapien
tattacatgagtttattaacattcactgtgaga

SEQ ID NO: 886737 - DNA, 33 bp, Homo sapien
tatttaacatacgataagcatctttggccctgg

SEQ ID NO: 886738 - DNA, 33 bp, Homo sapien
tatttaacatacgatatgcatctttggccctgg

SEQ ID NO: 886739 - DNA, 33 bp, Homo sapien
gtagtaatgatacagccacttcctaactccttt

SEQ ID NO: 886740 - DNA, 33 bp, Homo sapien
gtagtaatgatacagctacttcctaactccttt

SEQ ID NO: 886741 - DNA, 33 bp, Homo sapien
ccagtttctggtcttacgccctttggcaagtta

SEQ ID NO: 886742 - DNA, 33 bp, Homo sapien
ccagtttctggtcttatgccctttggcaagtta

SEQ ID NO: 886743 - DNA, 33 bp, Homo sapien
ggtttactgtcttataacggcaggatggtagct

SEQ ID NO: 886744 - DNA, 33 bp, Homo sapien
ggtttactgtcttatagcggcaggatggtagct

SEQ ID NO: 886745 - DNA, 33 bp, Homo sapien
aggaggtctagtttcacatccctggagtatctg

SEQ ID NO: 886746 - DNA, 33 bp, Homo sapien
aggaggtctagtttcagatccctggagtatctg

SEQ ID NO: 886747 - DNA, 33 bp, Homo sapien
tttgtatctttcttggaagtatttgtcatagtt

SEQ ID NO: 886748 - DNA, 33 bp, Homo sapien
tttgtatctttcttgggagtatttgtcatagtt

SEQ ID NO: 886749 - DNA, 33 bp, Homo sapien
aagacattccctggaaaacaatgccactgtctt

SEQ ID NO: 886750 - DNA, 33 bp, Homo sapien
aagacattccctggaagacaatgccactgtctt

SEQ ID NO: 886751 - DNA, 33 bp, Homo sapien
atggttcacaaacttacgataggaattaccagg

SEQ ID NO: 886752 - DNA, 33 bp, Homo sapien
atggttcacaaacttatgataggaattaccagg

SEQ ID NO: 886753 - DNA, 33 bp, Homo sapien
attgtgcagcgtgctaaggcgcgtacacacagt

SEQ ID NO: 886754 - DNA, 33 bp, Homo sapien
attgtgcagcgtgctacggcgcgtacacacagt

SEQ ID NO: 886755 - DNA, 33 bp, Homo sapien
caaagaataaaatcagaaacaattgccttgcaa

SEQ ID NO: 886756 - DNA, 33 bp, Homo sapien
caaagaataaaatcagtaacaattgccttgcaa

SEQ ID NO: 886757 - DNA, 33 bp, Homo sapien
tggtcaatttatcaggaagacaggcaattacag

SEQ ID NO: 886758 - DNA, 33 bp, Homo sapien
tggtcaatttatcagggagacaggcaattacag

SEQ ID NO: 886759 - DNA, 33 bp, Homo sapien
gttctgtaattacagacgtcttaactgacccat

SEQ ID NO: 886760 - DNA, 33 bp, Homo sapien
gttctgtaattacagaggtcttaactgacccat

SEQ ID NO: 886761 - DNA, 33 bp, Homo sapien
agggaggcaacaggtacattaatcacaaggata

SEQ ID NO: 886762 - DNA, 33 bp, Homo sapien
agggaggcaacaggtagattaatcacaaggata

SEQ ID NO: 886763 - DNA, 33 bp, Homo sapien
gacgtaaatagcagataaatttggagttagaag

SEQ ID NO: 886764 - DNA, 33 bp, Homo sapien
gacgtaaatagcagatgaatttggagttagaag

SEQ ID NO: 886765 - DNA, 33 bp, Homo sapien
gctcaatccacaagcaggtaaagaatgtaaatt

SEQ ID NO: 886766 - DNA, 33 bp, Homo sapien
gctcaatccacaagcatgtaaagaatgtaaatt

SEQ ID NO: 886767 - DNA, 33 bp, Homo sapien
tgagtaaacactttgacagccataaagtcttcc

SEQ ID NO: 886768 - DNA, 33 bp, Homo sapien
tgagtaaacactttgatagccataaagtcttcc

SEQ ID NO: 886769 - DNA, 33 bp, Homo sapien
ggtccaagagttaaaaaatctcaggcaagagga

SEQ ID NO: 886770 - DNA, 33 bp, Homo sapien
ggtccaagagttaaaagatctcaggcaagagga

SEQ ID NO: 886771 - DNA, 33 bp, Homo sapien
gcctcttaaaaaggtcccaagcatgacagatgc

SEQ ID NO: 886772 - DNA, 33 bp, Homo sapien
gcctcttaaaaaggtctcaagcatgacagatgc

SEQ ID NO: 886773 - DNA, 33 bp, Homo sapien
ggagctttgttccataactggccaaaagaccca

SEQ ID NO: 886774 - DNA, 33 bp, Homo sapien
ggagctttgttccatatctggccaaaagaccca

SEQ ID NO: 886775 - DNA, 33 bp, Homo sapien
gagctgttggaagcaaagtttaaagtataaatg

SEQ ID NO: 886776 - DNA, 33 bp, Homo sapien
gagctgttggaagcaaggtttaaagtataaatg

SEQ ID NO: 886777 - DNA, 33 bp, Homo sapien
tatttttcgttttcagaacattcagttggtatg

SEQ ID NO: 886778 - DNA, 33 bp, Homo sapien
tatttttcgttttcaggacattcagttggtatg

SEQ ID NO: 886779 - DNA, 33 bp, Homo sapien
gaaaagaaaatgggcaaagtacaacaagaagca

SEQ ID NO: 886780 - DNA, 33 bp, Homo sapien
gaaaagaaaatgggcagagtacaacaagaagca

SEQ ID NO: 886781 - DNA, 33 bp, Homo sapien
catgaacaatcaagaccctaacccagcctccca

SEQ ID NO: 886782 - DNA, 33 bp, Homo sapien
catgaacaatcaagactctaacccagcctccca

SEQ ID NO: 886783 - DNA, 33 bp, Homo sapien
ttctgagaagtgacaaacaactccaggtggtgg

SEQ ID NO: 886784 - DNA, 33 bp, Homo sapien
ttctgagaagtgacaagcaactccaggtggtgg

SEQ ID NO: 886785 - DNA, 33 bp, Homo sapien
cctttcagcattctgacatttttctgtgtagga

SEQ ID NO: 886786 - DNA, 33 bp, Homo sapien
cctttcagcattctgagatttttctgtgtagga

SEQ ID NO: 886787 - DNA, 33 bp, Homo sapien
gcacaggtgtaaataaagcaaggcctcaatccc

SEQ ID NO: 886788 - DNA, 33 bp, Homo sapien
gcacaggtgtaaataatgcaaggcctcaatccc

SEQ ID NO: 886789 - DNA, 33 bp, Homo sapien
ccatcactctctgtgacgatggacactgttctg

SEQ ID NO: 886790 - DNA, 33 bp, Homo sapien
ccatcactctctgtgatgatggacactgttctg

SEQ ID NO: 886791 - DNA, 33 bp, Homo sapien
gggtattctcttataaaaatgcaagaacagcct

SEQ ID NO: 886792 - DNA, 33 bp, Homo sapien
gggtattctcttataacaatgcaagaacagcct

SEQ ID NO: 886793 - DNA, 33 bp, Homo sapien
tccgcagaaagtgagacacagaaagcatttgac

SEQ ID NO: 886794 - DNA, 33 bp, Homo sapien
tccgcagaaagtgagatacagaaagcatttgac

SEQ ID NO: 886795 - DNA, 33 bp, Homo sapien
tcttcctgcacgctgaacttctgttaatgtact

SEQ ID NO: 886796 - DNA, 33 bp, Homo sapien
tcttcctgcacgctgaccttctgttaatgtact

SEQ ID NO: 886797 - DNA, 33 bp, Homo sapien
tggtacaattacaggccatttccttttgattct

SEQ ID NO: 886798 - DNA, 33 bp, Homo sapien
tggtacaattacaggctatttccttttgattct

SEQ ID NO: 886799 - DNA, 33 bp, Homo sapien
gaattgtatccatgaacctaaatcaggactaga

SEQ ID NO: 886800 - DNA, 33 bp, Homo sapien
gaattgtatccatgaagctaaatcaggactaga

SEQ ID NO: 886801 - DNA, 33 bp, Homo sapien
taactaccaggataataatgagtcaaagggggt

SEQ ID NO: 886802 - DNA, 33 bp, Homo sapien
taactaccaggataatgatgagtcaaagggggt

SEQ ID NO: 886803 - DNA, 33 bp, Homo sapien
gaaaataaagcgagtacagtgaatttgcaaacc

SEQ ID NO: 886804 - DNA, 33 bp, Homo sapien
gaaaataaagcgagtatagtgaatttgcaaacc

SEQ ID NO: 886805 - DNA, 33 bp, Homo sapien
gtccacttctctgacaatgagaattttcagacc

SEQ ID NO: 886806 - DNA, 33 bp, Homo sapien
gtccacttctctgacagtgagaattttcagacc

SEQ ID NO: 886807 - DNA, 33 bp, Homo sapien
atctaatctgtcttaaatcttaggttaagctat

SEQ ID NO: 886808 - DNA, 33 bp, Homo sapien
atctaatctgtcttaagtcttaggttaagctat

SEQ ID NO: 886809 - DNA, 33 bp, Homo sapien
ctgccatgttactacagattttgaatatcatct

SEQ ID NO: 886810 - DNA, 33 bp, Homo sapien
ctgccatgttactacatattttgaatatcatct

SEQ ID NO: 886811 - DNA, 33 bp, Homo sapien
ggagcaaatgaaaggacggtggttatggcagtt

SEQ ID NO: 886812 - DNA, 33 bp, Homo sapien
ggagcaaatgaaaggatggtggttatggcagtt

SEQ ID NO: 886813 - DNA, 33 bp, Homo sapien
cactgtatccagaagcagcatgattaatttgat

SEQ ID NO: 886814 - DNA, 33 bp, Homo sapien
cactgtatccagaagcggcatgattaatttgat

SEQ ID NO: 886815 - DNA, 33 bp, Homo sapien
ccagcaacgtagtaaagcccatctcacggcaca

SEQ ID NO: 886816 - DNA, 33 bp, Homo sapien
ccagcaacgtagtaaatcccatctcacggcaca

SEQ ID NO: 886817 - DNA, 33 bp, Homo sapien
agctttggttggtggaaacaaaagacaaacaag

SEQ ID NO: 886818 - DNA, 33 bp, Homo sapien
agctttggttggtggagacaaaagacaaacaag

SEQ ID NO: 886819 - DNA, 33 bp, Homo sapien
tctttaggacaggaggaaggtaaataagaatga

SEQ ID NO: 886820 - DNA, 33 bp, Homo sapien
tctttaggacaggagggaggtaaataagaatga

SEQ ID NO: 886821 - DNA, 33 bp, Homo sapien
ttacaaggcataatcaatataccataaccaagt

SEQ ID NO: 886822 - DNA, 33 bp, Homo sapien
ttacaaggcataatcagtataccataaccaagt

SEQ ID NO: 886823 - DNA, 33 bp, Homo sapien
cattaagtttgaagtcggaatctggggaaagat

SEQ ID NO: 886824 - DNA, 33 bp, Homo sapien
cattaagtttgaagtctgaatctggggaaagat

SEQ ID NO: 886825 - DNA, 33 bp, Homo sapien
cttgttcagtataacacctacatccttattgag

SEQ ID NO: 886826 - DNA, 33 bp, Homo sapien
cttgttcagtataacagctacatccttattgag

SEQ ID NO: 886827 - DNA, 33 bp, Homo sapien
tttacagaagagttgcaaagttagcacagaagg

SEQ ID NO: 886828 - DNA, 33 bp, Homo sapien
tttacagaagagttgcgaagttagcacagaagg

SEQ ID NO: 886829 - DNA, 33 bp, Homo sapien
gataatccccagatcacaaattaaactgtttag

SEQ ID NO: 886830 - DNA, 33 bp, Homo sapien
gataatccccagatcagaaattaaactgtttag

SEQ ID NO: 886831 - DNA, 33 bp, Homo sapien
aggcaagtgagagaacaaagaagctggaagtgt

SEQ ID NO: 886832 - DNA, 33 bp, Homo sapien
aggcaagtgagagaacgaagaagctggaagtgt

SEQ ID NO: 886833 - DNA, 33 bp, Homo sapien
caatttggagggaaacagcagactagtgcctga

SEQ ID NO: 886834 - DNA, 33 bp, Homo sapien
caatttggagggaaacggcagactagtgcctga

SEQ ID NO: 886835 - DNA, 33 bp, Homo sapien
ggagaaatactttgaacaaagttgccaggatgc

SEQ ID NO: 886836 - DNA, 33 bp, Homo sapien
ggagaaatactttgaagaaagttgccaggatgc

SEQ ID NO: 886837 - DNA, 33 bp, Homo sapien
tatttaagatttcaccaattccgataaatacag

SEQ ID NO: 886838 - DNA, 33 bp, Homo sapien
tatttaagatttcaccgattccgataaatacag

SEQ ID NO: 886839 - DNA, 33 bp, Homo sapien
ttgctgtgacagccgcacaaaggttaattatgc

SEQ ID NO: 886840 - DNA, 33 bp, Homo sapien
ttgctgtgacagccgcgcaaaggttaattatgc

SEQ ID NO: 886841 - DNA, 33 bp, Homo sapien
atggtcatgtagcatacgccgcctgccacagac

SEQ ID NO: 886842 - DNA, 33 bp, Homo sapien
atggtcatgtagcataggccgcctgccacagac

SEQ ID NO: 886843 - DNA, 33 bp, Homo sapien
gatggatgcgttctgcaacttcgggatggccag

SEQ ID NO: 886844 - DNA, 33 bp, Homo sapien
gatggatgcgttctgcgacttcgggatggccag

SEQ ID NO: 886845 - DNA, 33 bp, Homo sapien
tccataaactgcaccaataactcagtgtggcag

SEQ ID NO: 886846 - DNA, 33 bp, Homo sapien
tccataaactgcaccattaactcagtgtggcag

SEQ ID NO: 886847 - DNA, 33 bp, Homo sapien
tgggagaattcgcaacaaaacaacagcagaatg

SEQ ID NO: 886848 - DNA, 33 bp, Homo sapien
tgggagaattcgcaacgaaacaacagcagaatg

SEQ ID NO: 886849 - DNA, 33 bp, Homo sapien
ccaacttcctttaacaactttccagcttgccat

SEQ ID NO: 886850 - DNA, 33 bp, Homo sapien
ccaacttcctttaacagctttccagcttgccat

SEQ ID NO: 886851 - DNA, 33 bp, Homo sapien
aacccttacttttgtaggaccattcatagctta

SEQ ID NO: 886852 - DNA, 33 bp, Homo sapien
aacccttacttttgtatgaccattcatagctta

SEQ ID NO: 886853 - DNA, 33 bp, Homo sapien
acttcaagaagtattaaggacatgccttcaggg

SEQ ID NO: 886854 - DNA, 33 bp, Homo sapien
acttcaagaagtattagggacatgccttcaggg

SEQ ID NO: 886855 - DNA, 33 bp, Homo sapien
attcacccaccatgagcatttggccgcttcgag

SEQ ID NO: 886856 - DNA, 33 bp, Homo sapien
attcacccaccatgagtatttggccgcttcgag

SEQ ID NO: 886857 - DNA, 33 bp, Homo sapien
agaccagttgtttggcagaatgtccttcagtct

SEQ ID NO: 886858 - DNA, 33 bp, Homo sapien
agaccagttgtttggcggaatgtccttcagtct

SEQ ID NO: 886859 - DNA, 33 bp, Homo sapien
ccccatttagcttaataatcacactcaaaataa

SEQ ID NO: 886860 - DNA, 33 bp, Homo sapien
ccccatttagcttaatgatcacactcaaaataa

SEQ ID NO: 886861 - DNA, 33 bp, Homo sapien
ggaagatggatctcgcaattgagtgctgaagaa

SEQ ID NO: 886862 - DNA, 33 bp, Homo sapien
ggaagatggatctcgcgattgagtgctgaagaa

SEQ ID NO: 886863 - DNA, 33 bp, Homo sapien
ggcttgaagcaccagaaaagtgagtcgtccacc

SEQ ID NO: 886864 - DNA, 33 bp, Homo sapien
ggcttgaagcaccagacaagtgagtcgtccacc

SEQ ID NO: 886865 - DNA, 33 bp, Homo sapien
cattgggaactctaagaagactgaacaggaaga

SEQ ID NO: 886866 - DNA, 33 bp, Homo sapien
cattgggaactctaaggagactgaacaggaaga

SEQ ID NO: 886867 - DNA, 33 bp, Homo sapien
tgcctcccttcacttcacataactatttgcaaa

SEQ ID NO: 886868 - DNA, 33 bp, Homo sapien
tgcctcccttcacttctcataactatttgcaaa

SEQ ID NO: 886869 - DNA, 33 bp, Homo sapien
gccgagttacaaataaagccactgaaatacgct

SEQ ID NO: 886870 - DNA, 33 bp, Homo sapien
gccgagttacaaataacgccactgaaatacgct

SEQ ID NO: 886871 - DNA, 33 bp, Homo sapien
aataaaaaaatttgcaatctgccactttgcaaa

SEQ ID NO: 886872 - DNA, 33 bp, Homo sapien
aataaaaaaatttgcagtctgccactttgcaaa

SEQ ID NO: 886873 - DNA, 33 bp, Homo sapien
cccaccttaaaataggaagactctcttggattc

SEQ ID NO: 886874 - DNA, 33 bp, Homo sapien
cccaccttaaaatagggagactctcttggattc

SEQ ID NO: 886875 - DNA, 33 bp, Homo sapien
ttcaaaggctagaatgccaatattttaataggc

SEQ ID NO: 886876 - DNA, 33 bp, Homo sapien
ttcaaaggctagaatggcaatattttaataggc

SEQ ID NO: 886877 - DNA, 33 bp, Homo sapien
cctcctcttctcagggcagcgttgcctcttccc

SEQ ID NO: 886878 - DNA, 33 bp, Homo sapien
cctcctcttctcagggtagcgttgcctcttccc

SEQ ID NO: 886879 - DNA, 33 bp, Homo sapien
acggtgcccacaaccaaaagataccgtaatcag

SEQ ID NO: 886880 - DNA, 33 bp, Homo sapien
acggtgcccacaaccagaagataccgtaatcag

SEQ ID NO: 886881 - DNA, 33 bp, Homo sapien
aggaagagtccgttgacgcgccaggcttcactg

SEQ ID NO: 886882 - DNA, 33 bp, Homo sapien
aggaagagtccgttgatgcgccaggcttcactg

SEQ ID NO: 886883 - DNA, 33 bp, Homo sapien
acttgatttcaaatcacgcttctcttagcccaa

SEQ ID NO: 886884 - DNA, 33 bp, Homo sapien
acttgatttcaaatcatgcttctcttagcccaa

SEQ ID NO: 886885 - DNA, 33 bp, Homo sapien
tcagatacattctttacgataaaccatcttatt

SEQ ID NO: 886886 - DNA, 33 bp, Homo sapien
tcagatacattctttatgataaaccatcttatt

SEQ ID NO: 886887 - DNA, 33 bp, Homo sapien
gcatttattgacagcaagaggttacattgtcat

SEQ ID NO: 886888 - DNA, 33 bp, Homo sapien
gcatttattgacagcatgaggttacattgtcat

SEQ ID NO: 886889 - DNA, 33 bp, Homo sapien
acttactgttttcagacagctccacgatgtaat

SEQ ID NO: 886890 - DNA, 33 bp, Homo sapien
acttactgttttcagagagctccacgatgtaat

SEQ ID NO: 886891 - DNA, 33 bp, Homo sapien
tgacttgagagttcaccgtcgccgccactgctc

SEQ ID NO: 886892 - DNA, 33 bp, Homo sapien
tgacttgagagttcactgtcgccgccactgctc

SEQ ID NO: 886893 - DNA, 33 bp, Homo sapien
ttctttgtggaggtaacggattatctatcatga

SEQ ID NO: 886894 - DNA, 33 bp, Homo sapien
ttctttgtggaggtaatggattatctatcatga

SEQ ID NO: 886895 - DNA, 33 bp, Homo sapien
tgcttccctttgcgcacctgcgacgtaactcct

SEQ ID NO: 886896 - DNA, 33 bp, Homo sapien
tgcttccctttgcgcatctgcgacgtaactcct

SEQ ID NO: 886897 - DNA, 33 bp, Homo sapien
agcttctctgcaagcaatgctcttgatcactct

SEQ ID NO: 886898 - DNA, 33 bp, Homo sapien
agcttctctgcaagcagtgctcttgatcactct

SEQ ID NO: 886899 - DNA, 33 bp, Homo sapien
ctctgactcattgaagactctatttcccctcct

SEQ ID NO: 886900 - DNA, 33 bp, Homo sapien
ctctgactcattgaaggctctatttcccctcct

SEQ ID NO: 886901 - DNA, 33 bp, Homo sapien
aggagggagtggatgcacaatttgcagacttgc

SEQ ID NO: 886902 - DNA, 33 bp, Homo sapien
aggagggagtggatgcgcaatttgcagacttgc

SEQ ID NO: 886903 - DNA, 33 bp, Homo sapien
gtctaagaaggtcacaatcaataacggaagtgc

SEQ ID NO: 886904 - DNA, 33 bp, Homo sapien
gtctaagaaggtcacagtcaataacggaagtgc

SEQ ID NO: 886905 - DNA, 33 bp, Homo sapien
atttccattcttgttgcaagagtcaaaggagac

SEQ ID NO: 886906 - DNA, 33 bp, Homo sapien
atttccattcttgttgtaagagtcaaaggagac

SEQ ID NO: 886907 - DNA, 33 bp, Homo sapien
aactgcaggctcagaaagggcacaggtgcttct

SEQ ID NO: 886908 - DNA, 33 bp, Homo sapien
aactgcaggctcagaacgggcacaggtgcttct

SEQ ID NO: 886909 - DNA, 33 bp, Homo sapien
tctagatagaataaaaacaacaagcaggggaag

SEQ ID NO: 886910 - DNA, 33 bp, Homo sapien
tctagatagaataaaagcaacaagcaggggaag

SEQ ID NO: 886911 - DNA, 33 bp, Homo sapien
aactggacttgactatgataggaggaacacatg

SEQ ID NO: 886912 - DNA, 33 bp, Homo sapien
aactggacttgactattataggaggaacacatg

SEQ ID NO: 886913 - DNA, 33 bp, Homo sapien
ttgcactagccttcccactgtgtttcatctggc

SEQ ID NO: 886914 - DNA, 33 bp, Homo sapien
ttgcactagccttcccgctgtgtttcatctggc

SEQ ID NO: 886915 - DNA, 33 bp, Homo sapien
ttaaggcagagacatcaaacttagatttgttac

SEQ ID NO: 886916 - DNA, 33 bp, Homo sapien
ttaaggcagagacatcgaacttagatttgttac

SEQ ID NO: 886917 - DNA, 33 bp, Homo sapien
gtttactagccaatggcaatgttactcataaca

SEQ ID NO: 886918 - DNA, 33 bp, Homo sapien
gtttactagccaatggtaatgttactcataaca

SEQ ID NO: 886919 - DNA, 33 bp, Homo sapien
acacacataattcagacgtttacatagaacctt

SEQ ID NO: 886920 - DNA, 33 bp, Homo sapien
acacacataattcagatgtttacatagaacctt

SEQ ID NO: 886921 - DNA, 33 bp, Homo sapien
tagctatatgacagaactgaagtgaaatttatt

SEQ ID NO: 886922 - DNA, 33 bp, Homo sapien
tagctatatgacagaagtgaagtgaaatttatt

SEQ ID NO: 886923 - DNA, 33 bp, Homo sapien
gtccaaagaatgcagacaaatgcaccagataag

SEQ ID NO: 886924 - DNA, 33 bp, Homo sapien
gtccaaagaatgcagagaaatgcaccagataag

SEQ ID NO: 886925 - DNA, 33 bp, Homo sapien
aaaataaatgctttgaacactatttaaggtaca

SEQ ID NO: 886926 - DNA, 33 bp, Homo sapien
aaaataaatgctttgatcactatttaaggtaca

SEQ ID NO: 886927 - DNA, 33 bp, Homo sapien
tgacctgtcatccatgaatcttctaatggtatt

SEQ ID NO: 886928 - DNA, 33 bp, Homo sapien
tgacctgtcatccatgcatcttctaatggtatt

SEQ ID NO: 886929 - DNA, 33 bp, Homo sapien
cattataatttcctgaatagcaactttttttac

SEQ ID NO: 886930 - DNA, 33 bp, Homo sapien
cattataatttcctgagtagcaactttttttac

SEQ ID NO: 886931 - DNA, 33 bp, Homo sapien
aattcacagatgagaaacaacctgcaagtgaaa

SEQ ID NO: 886932 - DNA, 33 bp, Homo sapien
aattcacagatgagaagcaacctgcaagtgaaa

SEQ ID NO: 886933 - DNA, 33 bp, Homo sapien
aaaacaaaactatgcacgtggttcctgtaaact

SEQ ID NO: 886934 - DNA, 33 bp, Homo sapien
aaaacaaaactatgcatgtggttcctgtaaact

SEQ ID NO: 886935 - DNA, 33 bp, Homo sapien
acttatacgcatgaacacacaggtgaatctcaa

SEQ ID NO: 886936 - DNA, 33 bp, Homo sapien
acttatacgcatgaacgcacaggtgaatctcaa

SEQ ID NO: 886937 - DNA, 33 bp, Homo sapien
cttgccatcctgtaaaatgtgtgggttaaaaat

SEQ ID NO: 886938 - DNA, 33 bp, Homo sapien
cttgccatcctgtaaattgtgtgggttaaaaat

SEQ ID NO: 886939 - DNA, 33 bp, Homo sapien
aggccctgaacccaggacacgtaccttgtatcc

SEQ ID NO: 886940 - DNA, 33 bp, Homo sapien
aggccctgaacccaggccacgtaccttgtatcc

SEQ ID NO: 886941 - DNA, 33 bp, Homo sapien
ctgtatttctttaaaactgtaagcagtctccta

SEQ ID NO: 886942 - DNA, 33 bp, Homo sapien
ctgtatttctttaaaattgtaagcagtctccta

SEQ ID NO: 886943 - DNA, 33 bp, Homo sapien
cactgcaaatcatgcaagaaaaggaaatgaaag

SEQ ID NO: 886944 - DNA, 33 bp, Homo sapien
cactgcaaatcatgcaggaaaaggaaatgaaag

SEQ ID NO: 886945 - DNA, 33 bp, Homo sapien
acatggtaattctctagcaacagattccaatga

SEQ ID NO: 886946 - DNA, 33 bp, Homo sapien
acatggtaattctctatcaacagattccaatga

SEQ ID NO: 886947 - DNA, 33 bp, Homo sapien
aaaaaagaaccaaacagatatccaggaactaat

SEQ ID NO: 886948 - DNA, 33 bp, Homo sapien
aaaaaagaaccaaacatatatccaggaactaat

SEQ ID NO: 886949 - DNA, 33 bp, Homo sapien
cagggcttgggagtaacggcatccgggagaaca

SEQ ID NO: 886950 - DNA, 33 bp, Homo sapien
cagggcttgggagtaatggcatccgggagaaca

SEQ ID NO: 886951 - DNA, 33 bp, Homo sapien
agtggctgtcacttcaaaccaaactgctgacag

SEQ ID NO: 886952 - DNA, 33 bp, Homo sapien
agtggctgtcacttcacaccaaactgctgacag

SEQ ID NO: 886953 - DNA, 33 bp, Homo sapien
ctacttaataaacagaaccgtcaggcatttctg

SEQ ID NO: 886954 - DNA, 33 bp, Homo sapien
ctacttaataaacagagccgtcaggcatttctg

SEQ ID NO: 886955 - DNA, 33 bp, Homo sapien
gaaatgactgacagatcactcttacattttgca

SEQ ID NO: 886956 - DNA, 33 bp, Homo sapien
gaaatgactgacagattactcttacattttgca

SEQ ID NO: 886957 - DNA, 33 bp, Homo sapien
tgtccttatgaagctcaccctggtagggaggga

SEQ ID NO: 886958 - DNA, 33 bp, Homo sapien
tgtccttatgaagctcgccctggtagggaggga

SEQ ID NO: 886959 - DNA, 33 bp, Homo sapien
ggatgtgctgaaggcaccttagagccactgtgc

SEQ ID NO: 886960 - DNA, 33 bp, Homo sapien
ggatgtgctgaaggcagcttagagccactgtgc

SEQ ID NO: 886961 - DNA, 33 bp, Homo sapien
cactccctgtgccacacgttgggtgattccctg

SEQ ID NO: 886962 - DNA, 33 bp, Homo sapien
cactccctgtgccacatgttgggtgattccctg

SEQ ID NO: 886963 - DNA, 33 bp, Homo sapien
ctctatttctggtcacaacaccatcgtcctctg

SEQ ID NO: 886964 - DNA, 33 bp, Homo sapien
ctctatttctggtcacgacaccatcgtcctctg

SEQ ID NO: 886965 - DNA, 33 bp, Homo sapien
ctacacacagtcaccgaataagccagcaactcc

SEQ ID NO: 886966 - DNA, 33 bp, Homo sapien
ctacacacagtcaccgcataagccagcaactcc

SEQ ID NO: 886967 - DNA, 33 bp, Homo sapien
ttctaagctcctgaaggatgttaaaatgaatag

SEQ ID NO: 886968 - DNA, 33 bp, Homo sapien
ttctaagctcctgaagtatgttaaaatgaatag

SEQ ID NO: 886969 - DNA, 33 bp, Homo sapien
ctgtgagacttacagcaaatcagatgatctccg

SEQ ID NO: 886970 - DNA, 33 bp, Homo sapien
ctgtgagacttacagccaatcagatgatctccg

SEQ ID NO: 886971 - DNA, 33 bp, Homo sapien
ctgttggttcaggagaagaatgaggggtgaaag

SEQ ID NO: 886972 - DNA, 33 bp, Homo sapien
ctgttggttcaggagaggaatgaggggtgaaag

SEQ ID NO: 886973 - DNA, 33 bp, Homo sapien
tcaaaaatctctgttaccttcactgtctgaatc

SEQ ID NO: 886974 - DNA, 33 bp, Homo sapien
tcaaaaatctctgttatcttcactgtctgaatc

SEQ ID NO: 886975 - DNA, 33 bp, Homo sapien
cactgacagctctaaacgtggtattctgtgata

SEQ ID NO: 886976 - DNA, 33 bp, Homo sapien
cactgacagctctaaatgtggtattctgtgata

SEQ ID NO: 886977 - DNA, 33 bp, Homo sapien
ataactatgacacaaacgccaaaacagggcacc

SEQ ID NO: 886978 - DNA, 33 bp, Homo sapien
ataactatgacacaaatgccaaaacagggcacc

SEQ ID NO: 886979 - DNA, 33 bp, Homo sapien
tgctttgcagatgtcaaacccagtaagggaatc

SEQ ID NO: 886980 - DNA, 33 bp, Homo sapien
tgctttgcagatgtcagacccagtaagggaatc

SEQ ID NO: 886981 - DNA, 33 bp, Homo sapien
gtgcgtgacaggttacacaggattccgagggtc

SEQ ID NO: 886982 - DNA, 33 bp, Homo sapien
gtgcgtgacaggttacgcaggattccgagggtc

SEQ ID NO: 886983 - DNA, 33 bp, Homo sapien
gcctagcatttcctgaaccgagatgatcatggg

SEQ ID NO: 886984 - DNA, 33 bp, Homo sapien
gcctagcatttcctgagccgagatgatcatggg

SEQ ID NO: 886985 - DNA, 33 bp, Homo sapien
tcacatcactaaaaaaaagtttggaggcctgtg

SEQ ID NO: 886986 - DNA, 33 bp, Homo sapien
tcacatcactaaaaaagagtttggaggcctgtg

SEQ ID NO: 886987 - DNA, 33 bp, Homo sapien
cactccccaaagtggacgcacaaactcccgctc

SEQ ID NO: 886988 - DNA, 33 bp, Homo sapien
cactccccaaagtggatgcacaaactcccgctc

SEQ ID NO: 886989 - DNA, 33 bp, Homo sapien
ccttgactggtattacactaacgtgatgatgcg

SEQ ID NO: 886990 - DNA, 33 bp, Homo sapien
ccttgactggtattacgctaacgtgatgatgcg

SEQ ID NO: 886991 - DNA, 33 bp, Homo sapien
tcaggagctccagcaaatatgatccctgttggc

SEQ ID NO: 886992 - DNA, 33 bp, Homo sapien
tcaggagctccagcaagtatgatccctgttggc

SEQ ID NO: 886993 - DNA, 33 bp, Homo sapien
tccacaggcactgatacgggcgtggtgccttag

SEQ ID NO: 886994 - DNA, 33 bp, Homo sapien
tccacaggcactgatatgggcgtggtgccttag

SEQ ID NO: 886995 - DNA, 33 bp, Homo sapien
ggatgtgagcatttacaaagcacccattgcacc

SEQ ID NO: 886996 - DNA, 33 bp, Homo sapien
ggatgtgagcatttacgaagcacccattgcacc

SEQ ID NO: 886997 - DNA, 33 bp, Homo sapien
aagcacccattgcacccgacatggagctggaca

SEQ ID NO: 886998 - DNA, 33 bp, Homo sapien
aagcacccattgcacctgacatggagctggaca

SEQ ID NO: 886999 - DNA, 33 bp, Homo sapien
ctgacaccacgaggccaactcttcccatgaaag

SEQ ID NO: 887000 - DNA, 33 bp, Homo sapien
ctgacaccacgaggccgactcttcccatgaaag

SEQ ID NO: 887001 - DNA, 33 bp, Homo sapien
gaccaaactctgggccaatgagaagcacaaggc

SEQ ID NO: 887002 - DNA, 33 bp, Homo sapien
gaccaaactctgggccgatgagaagcacaaggc

SEQ ID NO: 887003 - DNA, 33 bp, Homo sapien
gaactggcagccaagaaataaggcaatcggaag

SEQ ID NO: 887004 - DNA, 33 bp, Homo sapien
gaactggcagccaagacataaggcaatcggaag

SEQ ID NO: 887005 - DNA, 33 bp, Homo sapien
tgttgctgtagctcaaagggcaagtgagatgct

SEQ ID NO: 887006 - DNA, 33 bp, Homo sapien
tgttgctgtagctcaacgggcaagtgagatgct

SEQ ID NO: 887007 - DNA, 33 bp, Homo sapien
gaagtcccggacacacaattagtctgtttggct

SEQ ID NO: 887008 - DNA, 33 bp, Homo sapien
gaagtcccggacacacgattagtctgtttggct

SEQ ID NO: 887009 - DNA, 33 bp, Homo sapien
agagcagtgatgtgccaactagagtgcaggggt

SEQ ID NO: 887010 - DNA, 33 bp, Homo sapien
agagcagtgatgtgccgactagagtgcaggggt

SEQ ID NO: 887011 - DNA, 33 bp, Homo sapien
ccattttgaatgtctccaacctcccaccggaga

SEQ ID NO: 887012 - DNA, 33 bp, Homo sapien
ccattttgaatgtctctaacctcccaccggaga

SEQ ID NO: 887013 - DNA, 33 bp, Homo sapien
acattcaaaatggaaacgcaaagtcccaagtgc

SEQ ID NO: 887014 - DNA, 33 bp, Homo sapien
acattcaaaatggaaatgcaaagtcccaagtgc

SEQ ID NO: 887015 - DNA, 33 bp, Homo sapien
actgtgtctgttgggcaaggcggattggccatt

SEQ ID NO: 887016 - DNA, 33 bp, Homo sapien
actgtgtctgttgggcgaggcggattggccatt

SEQ ID NO: 887017 - DNA, 33 bp, Homo sapien
cccagaatagacctgcagcagctcgaggaactg

SEQ ID NO: 887018 - DNA, 33 bp, Homo sapien
cccagaatagacctgcggcagctcgaggaactg

SEQ ID NO: 887019 - DNA, 33 bp, Homo sapien
aacaggtccccgctaacggctctcacccagcac

SEQ ID NO: 887020 - DNA, 33 bp, Homo sapien
aacaggtccccgctaatggctctcacccagcac

SEQ ID NO: 887021 - DNA, 33 bp, Homo sapien
tgctaggagtgggcaccggtcagtattatatgc

SEQ ID NO: 887022 - DNA, 33 bp, Homo sapien
tgctaggagtgggcactggtcagtattatatgc

SEQ ID NO: 887023 - DNA, 33 bp, Homo sapien
acctgtgagctcagcacgtaaagctatagggtt

SEQ ID NO: 887024 - DNA, 33 bp, Homo sapien
acctgtgagctcagcatgtaaagctatagggtt

SEQ ID NO: 887025 - DNA, 33 bp, Homo sapien
cactgtggcctttagccccgcaactttcaccaa

SEQ ID NO: 887026 - DNA, 33 bp, Homo sapien
cactgtggcctttagcgccgcaactttcaccaa

SEQ ID NO: 887027 - DNA, 33 bp, Homo sapien
cacctaaagccaccaactgattttattttattt

SEQ ID NO: 887028 - DNA, 33 bp, Homo sapien
cacctaaagccaccaagtgattttattttattt

SEQ ID NO: 887029 - DNA, 33 bp, Homo sapien
ctcactctctgctttcaaaccttcccagagaaa

SEQ ID NO: 887030 - DNA, 33 bp, Homo sapien
ctcactctctgctttccaaccttcccagagaaa

SEQ ID NO: 887031 - DNA, 33 bp, Homo sapien
aggcttcagagagtgagggaaaagtttcagagc

SEQ ID NO: 887032 - DNA, 33 bp, Homo sapien
aggcttcagagagtgatggaaaagtttcagagc

SEQ ID NO: 887033 - DNA, 33 bp, Homo sapien
cctccaccaaatgccacgtagaaccgttttgtt

SEQ ID NO: 887034 - DNA, 33 bp, Homo sapien
cctccaccaaatgccatgtagaaccgttttgtt

SEQ ID NO: 887035 - DNA, 33 bp, Homo sapien
gctttgtttaacgaggcaatgctcatactctag

SEQ ID NO: 887036 - DNA, 33 bp, Homo sapien
gctttgtttaacgaggtaatgctcatactctag

SEQ ID NO: 887037 - DNA, 33 bp, Homo sapien
tgttctgagaccagaacggcactctccctctga

SEQ ID NO: 887038 - DNA, 33 bp, Homo sapien
tgttctgagaccagaatggcactctccctctga

SEQ ID NO: 887039 - DNA, 33 bp, Homo sapien
cccgtacccacatacgccaaaagaagaacgtgg

SEQ ID NO: 887040 - DNA, 33 bp, Homo sapien
cccgtacccacatacgtcaaaagaagaacgtgg

SEQ ID NO: 887041 - DNA, 33 bp, Homo sapien
ggttcacagccgtgcacgagagaggtacagcag

SEQ ID NO: 887042 - DNA, 33 bp, Homo sapien
ggttcacagccgtgcatgagagaggtacagcag

SEQ ID NO: 887043 - DNA, 33 bp, Homo sapien
agagagaatgcaggaacggggatgggagtggtc

SEQ ID NO: 887044 - DNA, 33 bp, Homo sapien
agagagaatgcaggaatggggatgggagtggtc

SEQ ID NO: 887045 - DNA, 33 bp, Homo sapien
aacatcaccttgttgaccatgtagatggatctc

SEQ ID NO: 887046 - DNA, 33 bp, Homo sapien
aacatcaccttgttgagcatgtagatggatctc

SEQ ID NO: 887047 - DNA, 33 bp, Homo sapien
tcatggctgctttggaaaggaaaatatatttat

SEQ ID NO: 887048 - DNA, 33 bp, Homo sapien
tcatggctgctttggagaggaaaatatatttat

SEQ ID NO: 887049 - DNA, 33 bp, Homo sapien
tcagacatagagaggaagttagaggcacatgac

SEQ ID NO: 887050 - DNA, 33 bp, Homo sapien
tcagacatagagaggatgttagaggcacatgac

SEQ ID NO: 887051 - DNA, 33 bp, Homo sapien
tcgcatctgggacttcacacttctaacctctgc

SEQ ID NO: 887052 - DNA, 33 bp, Homo sapien
tcgcatctgggacttcgcacttctaacctctgc

SEQ ID NO: 887053 - DNA, 33 bp, Homo sapien
tgtccacgctgtgcaccggcaattcctaatgtg

SEQ ID NO: 887054 - DNA, 33 bp, Homo sapien
tgtccacgctgtgcactggcaattcctaatgtg

SEQ ID NO: 887055 - DNA, 33 bp, Homo sapien
tgctggcttccctgaaagactgatgagctcagt

SEQ ID NO: 887056 - DNA, 33 bp, Homo sapien
tgctggcttccctgaaggactgatgagctcagt

SEQ ID NO: 887057 - DNA, 33 bp, Homo sapien
caccagagacttcacacgtgtccggaggaaaag

SEQ ID NO: 887058 - DNA, 33 bp, Homo sapien
caccagagacttcacaggtgtccggaggaaaag

SEQ ID NO: 887059 - DNA, 33 bp, Homo sapien
tgtcaagggccttttccaccgcagctgcaactt

SEQ ID NO: 887060 - DNA, 33 bp, Homo sapien
tgtcaagggccttttctaccgcagctgcaactt

SEQ ID NO: 887061 - DNA, 33 bp, Homo sapien
acgcaactagttagcccggagaaaagaactgcc

SEQ ID NO: 887062 - DNA, 33 bp, Homo sapien
acgcaactagttagcctggagaaaagaactgcc

SEQ ID NO: 887063 - DNA, 33 bp, Homo sapien
atcccacagaaacggacgcattttcgggatgcc

SEQ ID NO: 887064 - DNA, 33 bp, Homo sapien
atcccacagaaacggatgcattttcgggatgcc

SEQ ID NO: 887065 - DNA, 33 bp, Homo sapien
caaaccttccttgatacgcccacttccatcggc

SEQ ID NO: 887066 - DNA, 33 bp, Homo sapien
caaaccttccttgatatgcccacttccatcggc

SEQ ID NO: 887067 - DNA, 33 bp, Homo sapien
gtgatgccaaaggaaacctctaaagggagagaa

SEQ ID NO: 887068 - DNA, 33 bp, Homo sapien
gtgatgccaaaggaaatctctaaagggagagaa

SEQ ID NO: 887069 - DNA, 33 bp, Homo sapien
gtaaaagcaccaaaaaagcctgataaatgaatg

SEQ ID NO: 887070 - DNA, 33 bp, Homo sapien
gtaaaagcaccaaaaaggcctgataaatgaatg

SEQ ID NO: 887071 - DNA, 33 bp, Homo sapien
gttcacagcagcctcaatcataatccaagtgtt

SEQ ID NO: 887072 - DNA, 33 bp, Homo sapien
gttcacagcagcctcagtcataatccaagtgtt

SEQ ID NO: 887073 - DNA, 33 bp, Homo sapien
tcaattgaaactgaacccttaaaaatgatttgt

SEQ ID NO: 887074 - DNA, 33 bp, Homo sapien
tcaattgaaactgaactcttaaaaatgatttgt

SEQ ID NO: 887075 - DNA, 33 bp, Homo sapien
catttcatactctgacagctttgaaaatttggt

SEQ ID NO: 887076 - DNA, 33 bp, Homo sapien
catttcatactctgacggctttgaaaatttggt

SEQ ID NO: 887077 - DNA, 33 bp, Homo sapien
aaatagttgagccatacctaaatcagcattttt

SEQ ID NO: 887078 - DNA, 33 bp, Homo sapien
aaatagttgagccatagctaaatcagcattttt

SEQ ID NO: 887079 - DNA, 33 bp, Homo sapien
tcaaggcagagagaaactgcaaccccaagctcc

SEQ ID NO: 887080 - DNA, 33 bp, Homo sapien
tcaaggcagagagaaagtgcaaccccaagctcc

SEQ ID NO: 887081 - DNA, 33 bp, Homo sapien
agttagcttcatgggactagtatctattaaaac

SEQ ID NO: 887082 - DNA, 33 bp, Homo sapien
agttagcttcatgggagtagtatctattaaaac

SEQ ID NO: 887083 - DNA, 33 bp, Homo sapien
aaatgcctgttagatacacttcatgcaggtgta

SEQ ID NO: 887084 - DNA, 33 bp, Homo sapien
aaatgcctgttagatatacttcatgcaggtgta

SEQ ID NO: 887085 - DNA, 33 bp, Homo sapien
ccccaaattcgcattcaacccagtctttaggac

SEQ ID NO: 887086 - DNA, 33 bp, Homo sapien
ccccaaattcgcattcgacccagtctttaggac

SEQ ID NO: 887087 - DNA, 33 bp, Homo sapien
tggacctgaaattctgaagtgtattgaatttca

SEQ ID NO: 887088 - DNA, 33 bp, Homo sapien
tggacctgaaattctggagtgtattgaatttca

SEQ ID NO: 887089 - DNA, 33 bp, Homo sapien
cctggtcctacctcccagcatttgctccagtta

SEQ ID NO: 887090 - DNA, 33 bp, Homo sapien
cctggtcctacctcccggcatttgctccagtta

SEQ ID NO: 887091 - DNA, 33 bp, Homo sapien
tggagttatagagacaatgatttggatgaagtt

SEQ ID NO: 887092 - DNA, 33 bp, Homo sapien
tggagttatagagacactgatttggatgaagtt

SEQ ID NO: 887093 - DNA, 33 bp, Homo sapien
gagtgtattaccctgacggcaatgctgtgcaag

SEQ ID NO: 887094 - DNA, 33 bp, Homo sapien
gagtgtattaccctgatggcaatgctgtgcaag

SEQ ID NO: 887095 - DNA, 33 bp, Homo sapien
gcttcgacggccataactctgactccggctggt

SEQ ID NO: 887096 - DNA, 33 bp, Homo sapien
gcttcgacggccataattctgactccggctggt

SEQ ID NO: 887097 - DNA, 33 bp, Homo sapien
ctgtcactggcctaaactggtacttgctgcagt

SEQ ID NO: 887098 - DNA, 33 bp, Homo sapien
ctgtcactggcctaaattggtacttgctgcagt

SEQ ID NO: 887099 - DNA, 33 bp, Homo sapien
gcagccatgctcattccgaaagccagtggaata

SEQ ID NO: 887100 - DNA, 33 bp, Homo sapien
gcagccatgctcattctgaaagccagtggaata

SEQ ID NO: 887101 - DNA, 33 bp, Homo sapien
gttgagcttcaaggtgaacccctcacttttggg

SEQ ID NO: 887102 - DNA, 33 bp, Homo sapien
gttgagcttcaaggtgtacccctcacttttggg

SEQ ID NO: 887103 - DNA, 33 bp, Homo sapien
ccaatgggttgtaagccgagggtaagtgcacag

SEQ ID NO: 887104 - DNA, 33 bp, Homo sapien
ccaatgggttgtaagctgagggtaagtgcacag

SEQ ID NO: 887105 - DNA, 33 bp, Homo sapien
tgaggccaggaatacaagaccagtcagggcaac

SEQ ID NO: 887106 - DNA, 33 bp, Homo sapien
tgaggccaggaatacaggaccagtcagggcaac

SEQ ID NO: 887107 - DNA, 33 bp, Homo sapien
gttggcaaggatgtgaagacgtcggaaccctca

SEQ ID NO: 887108 - DNA, 33 bp, Homo sapien
gttggcaaggatgtgaggacgtcggaaccctca

SEQ ID NO: 887109 - DNA, 33 bp, Homo sapien
tatgcttacaatttcaagagcctattgtcttct

SEQ ID NO: 887110 - DNA, 33 bp, Homo sapien
tatgcttacaatttcaggagcctattgtcttct

SEQ ID NO: 887111 - DNA, 33 bp, Homo sapien
ccagctatgaaggtgactatttgggaaaagggt

SEQ ID NO: 887112 - DNA, 33 bp, Homo sapien
ccagctatgaaggtgattatttgggaaaagggt

SEQ ID NO: 887113 - DNA, 33 bp, Homo sapien
gtttccgttgtctaaacagctcatagttgattc

SEQ ID NO: 887114 - DNA, 33 bp, Homo sapien
gtttccgttgtctaaagagctcatagttgattc

SEQ ID NO: 887115 - DNA, 33 bp, Homo sapien
catatgatttcaaagcaacactgacttaaagtg

SEQ ID NO: 887116 - DNA, 33 bp, Homo sapien
catatgatttcaaagcgacactgacttaaagtg

SEQ ID NO: 887117 - DNA, 33 bp, Homo sapien
gtttgaaatgcttgaaactcgaatttcaaatca

SEQ ID NO: 887118 - DNA, 33 bp, Homo sapien
gtttgaaatgcttgaatctcgaatttcaaatca

SEQ ID NO: 887119 - DNA, 33 bp, Homo sapien
agcagcattgatcatacgtcacttttgagattg

SEQ ID NO: 887120 - DNA, 33 bp, Homo sapien
agcagcattgatcataggtcacttttgagattg

SEQ ID NO: 887121 - DNA, 33 bp, Homo sapien
gaatgaatatggactacgtgtaacaaaaagaat

SEQ ID NO: 887122 - DNA, 33 bp, Homo sapien
gaatgaatatggactatgtgtaacaaaaagaat

SEQ ID NO: 887123 - DNA, 33 bp, Homo sapien
gtccagctagttagagccagtgggggaggtgga

SEQ ID NO: 887124 - DNA, 33 bp, Homo sapien
gtccagctagttagagtcagtgggggaggtgga

SEQ ID NO: 887125 - DNA, 33 bp, Homo sapien
agagttctgtatcctgcatcccacacaagcagg

SEQ ID NO: 887126 - DNA, 33 bp, Homo sapien
agagttctgtatcctgtatcccacacaagcagg

SEQ ID NO: 887127 - DNA, 33 bp, Homo sapien
tcaaaccatatcagaaagtaaagcataggctct

SEQ ID NO: 887128 - DNA, 33 bp, Homo sapien
tcaaaccatatcagaaggtaaagcataggctct

SEQ ID NO: 887129 - DNA, 33 bp, Homo sapien
cttttgggaaaacccacgctaacacctgactca

SEQ ID NO: 887130 - DNA, 33 bp, Homo sapien
cttttgggaaaacccaggctaacacctgactca

SEQ ID NO: 887131 - DNA, 33 bp, Homo sapien
aaatcctcaaagcaagacagaatgcaccacgta

SEQ ID NO: 887132 - DNA, 33 bp, Homo sapien
aaatcctcaaagcaaggcagaatgcaccacgta

SEQ ID NO: 887133 - DNA, 33 bp, Homo sapien
tcacttataggtggaaactaagcattcagtgcc

SEQ ID NO: 887134 - DNA, 33 bp, Homo sapien
tcacttataggtggaagctaagcattcagtgcc

SEQ ID NO: 887135 - DNA, 33 bp, Homo sapien
tcatagatctgaactcactctcctgcctatcaa

SEQ ID NO: 887136 - DNA, 33 bp, Homo sapien
tcatagatctgaactctctctcctgcctatcaa

SEQ ID NO: 887137 - DNA, 33 bp, Homo sapien
agggtcacaagcctaccaaggttcgagttgagg

SEQ ID NO: 887138 - DNA, 33 bp, Homo sapien
agggtcacaagcctacgaaggttcgagttgagg

SEQ ID NO: 887139 - DNA, 33 bp, Homo sapien
agcgtccgtctgcctcaccgttatctctggggc

SEQ ID NO: 887140 - DNA, 33 bp, Homo sapien
agcgtccgtctgcctcgccgttatctctggggc

SEQ ID NO: 887141 - DNA, 33 bp, Homo sapien
ggaacattacggtagaaatatctgcagcgcgtg

SEQ ID NO: 887142 - DNA, 33 bp, Homo sapien
ggaacattacggtagagatatctgcagcgcgtg

SEQ ID NO: 887143 - DNA, 33 bp, Homo sapien
gcactctgtactcccaatcatggcatgaattct

SEQ ID NO: 887144 - DNA, 33 bp, Homo sapien
gcactctgtactcccagtcatggcatgaattct

SEQ ID NO: 887145 - DNA, 33 bp, Homo sapien
aatgctgctactgctacgtttccagcctgacca

SEQ ID NO: 887146 - DNA, 33 bp, Homo sapien
aatgctgctactgctatgtttccagcctgacca

SEQ ID NO: 887147 - DNA, 33 bp, Homo sapien
caggctctagatgagaacttacggcttatctca

SEQ ID NO: 887148 - DNA, 33 bp, Homo sapien
caggctctagatgagagcttacggcttatctca

SEQ ID NO: 887149 - DNA, 33 bp, Homo sapien
gtggaggagagtcttaagtttaataaaatcagg

SEQ ID NO: 887150 - DNA, 33 bp, Homo sapien
gtggaggagagtcttaggtttaataaaatcagg

SEQ ID NO: 887151 - DNA, 33 bp, Homo sapien
gaaatagtaacctatacaagtatgtagccatga

SEQ ID NO: 887152 - DNA, 33 bp, Homo sapien
gaaatagtaacctatagaagtatgtagccatga

SEQ ID NO: 887153 - DNA, 33 bp, Homo sapien
ttacttggccatctggcacttttcaaaggtgaa

SEQ ID NO: 887154 - DNA, 33 bp, Homo sapien
ttacttggccatctgggacttttcaaaggtgaa

SEQ ID NO: 887155 - DNA, 33 bp, Homo sapien
tcccccaaagaataacagtaatgagaataaaaa

SEQ ID NO: 887156 - DNA, 33 bp, Homo sapien
tcccccaaagaataactgtaatgagaataaaaa

SEQ ID NO: 887157 - DNA, 33 bp, Homo sapien
tgcattcaaacatccaagaacataacttttatt

SEQ ID NO: 887158 - DNA, 33 bp, Homo sapien
tgcattcaaacatccaggaacataacttttatt

SEQ ID NO: 887159 - DNA, 33 bp, Homo sapien
aaaaagaaaagatcacagaaagggtcagaaaga

SEQ ID NO: 887160 - DNA, 33 bp, Homo sapien
aaaaagaaaagatcactgaaagggtcagaaaga

SEQ ID NO: 887161 - DNA, 33 bp, Homo sapien
tacaaacggagggctcaactttgtacgactttg

SEQ ID NO: 887162 - DNA, 33 bp, Homo sapien
tacaaacggagggctcgactttgtacgactttg

SEQ ID NO: 887163 - DNA, 33 bp, Homo sapien
caccatatagttataagtgagttacaaacggag

SEQ ID NO: 887164 - DNA, 33 bp, Homo sapien
caccatatagttataattgagttacaaacggag

SEQ ID NO: 887165 - DNA, 33 bp, Homo sapien
agtcggacattataccgagacgtcggattctat

SEQ ID NO: 887166 - DNA, 33 bp, Homo sapien
agtcggacattatacctagacgtcggattctat

SEQ ID NO: 887167 - DNA, 33 bp, Homo sapien
atgccctttggtctcaaatgttgggtcagctgt

SEQ ID NO: 887168 - DNA, 33 bp, Homo sapien
atgccctttggtctcagatgttgggtcagctgt

SEQ ID NO: 887169 - DNA, 33 bp, Homo sapien
ttttaattgagttgcaagtacatcaggcttttc

SEQ ID NO: 887170 - DNA, 33 bp, Homo sapien
ttttaattgagttgcacgtacatcaggcttttc

SEQ ID NO: 887171 - DNA, 33 bp, Homo sapien
gctttggccaaaaggacgtgagcacagatgaca

SEQ ID NO: 887172 - DNA, 33 bp, Homo sapien
gctttggccaaaaggatgtgagcacagatgaca

SEQ ID NO: 887173 - DNA, 33 bp, Homo sapien
cagcaaatctcattcaccacttctcctactgag

SEQ ID NO: 887174 - DNA, 33 bp, Homo sapien
cagcaaatctcattcagcacttctcctactgag

SEQ ID NO: 887175 - DNA, 33 bp, Homo sapien
ggagggctgtcttgtccgaaatcctacagttca

SEQ ID NO: 887176 - DNA, 33 bp, Homo sapien
ggagggctgtcttgtctgaaatcctacagttca

SEQ ID NO: 887177 - DNA, 33 bp, Homo sapien
ttcagaacgactttgacgaaaaagaaatttatt

SEQ ID NO: 887178 - DNA, 33 bp, Homo sapien
ttcagaacgactttgatgaaaaagaaatttatt

SEQ ID NO: 887179 - DNA, 33 bp, Homo sapien
ttctactcattcaatcggatccaaagctacacc

SEQ ID NO: 887180 - DNA, 33 bp, Homo sapien
ttctactcattcaatctgatccaaagctacacc

SEQ ID NO: 887181 - DNA, 33 bp, Homo sapien
cagcctgatgggcttacgcgtgcagggggacac

SEQ ID NO: 887182 - DNA, 33 bp, Homo sapien
cagcctgatgggcttatgcgtgcagggggacac

SEQ ID NO: 887183 - DNA, 33 bp, Homo sapien
tccagctatataaggacatttttaagcaatgga

SEQ ID NO: 887184 - DNA, 33 bp, Homo sapien
tccagctatataaggagatttttaagcaatgga

SEQ ID NO: 887185 - DNA, 33 bp, Homo sapien
ttcagtgttgctcagaaacaccctcaagagatc

SEQ ID NO: 887186 - DNA, 33 bp, Homo sapien
ttcagtgttgctcagacacaccctcaagagatc

SEQ ID NO: 887187 - DNA, 33 bp, Homo sapien
acgcagagtgacataaaccattcgccgagagac

SEQ ID NO: 887188 - DNA, 33 bp, Homo sapien
acgcagagtgacataagccattcgccgagagac

SEQ ID NO: 887189 - DNA, 33 bp, Homo sapien
agaggtggaagattcaccatgaggtcatgagca

SEQ ID NO: 887190 - DNA, 33 bp, Homo sapien
agaggtggaagattcatcatgaggtcatgagca

SEQ ID NO: 887191 - DNA, 33 bp, Homo sapien
aaacattcaggaactacagctaggtaaagagat

SEQ ID NO: 887192 - DNA, 33 bp, Homo sapien
aaacattcaggaactagagctaggtaaagagat

SEQ ID NO: 887193 - DNA, 33 bp, Homo sapien
tccagacatgatcaaacagtgccagcgaaacaa

SEQ ID NO: 887194 - DNA, 33 bp, Homo sapien
tccagacatgatcaaagagtgccagcgaaacaa

SEQ ID NO: 887195 - DNA, 33 bp, Homo sapien
tgtgtgtgcaaatgcaacaagacttggaatgct

SEQ ID NO: 887196 - DNA, 33 bp, Homo sapien
tgtgtgtgcaaatgcagcaagacttggaatgct

SEQ ID NO: 887197 - DNA, 33 bp, Homo sapien
tgagattttagagagaataccagcagtagcaac

SEQ ID NO: 887198 - DNA, 33 bp, Homo sapien
tgagattttagagagagtaccagcagtagcaac

SEQ ID NO: 887199 - DNA, 33 bp, Homo sapien
ggaaagaacaccatgaatcaagttagtggattc

SEQ ID NO: 887200 - DNA, 33 bp, Homo sapien
ggaaagaacaccatgagtcaagttagtggattc

SEQ ID NO: 887201 - DNA, 33 bp, Homo sapien
gtgcccatgtggctgacattagttattcaatct

SEQ ID NO: 887202 - DNA, 33 bp, Homo sapien
gtgcccatgtggctgagattagttattcaatct

SEQ ID NO: 887203 - DNA, 33 bp, Homo sapien
agtaatattcagagtacacagagctcttacaaa

SEQ ID NO: 887204 - DNA, 33 bp, Homo sapien
agtaatattcagagtatacagagctcttacaaa

SEQ ID NO: 887205 - DNA, 33 bp, Homo sapien
gaacctccacgttgaaaacacctggcttccaag

SEQ ID NO: 887206 - DNA, 33 bp, Homo sapien
gaacctccacgttgaatacacctggcttccaag

SEQ ID NO: 887207 - DNA, 33 bp, Homo sapien
cttatggatataaggggaattatgatctctgtc

SEQ ID NO: 887208 - DNA, 33 bp, Homo sapien
cttatggatataagggtaattatgatctctgtc

SEQ ID NO: 887209 - DNA, 33 bp, Homo sapien
gctgggggtgggctcactaagctggttctcaag

SEQ ID NO: 887210 - DNA, 33 bp, Homo sapien
gctgggggtgggctcattaagctggttctcaag

SEQ ID NO: 887211 - DNA, 33 bp, Homo sapien
aaacagggtccttgcaaatctaattagtaaggt

SEQ ID NO: 887212 - DNA, 33 bp, Homo sapien
aaacagggtccttgcagatctaattagtaaggt

SEQ ID NO: 887213 - DNA, 33 bp, Homo sapien
aaaactgaattgttaccgggcaaggtagccaca

SEQ ID NO: 887214 - DNA, 33 bp, Homo sapien
aaaactgaattgttactgggcaaggtagccaca

SEQ ID NO: 887215 - DNA, 33 bp, Homo sapien
aaattctaatccataacgttggaggagaggcct

SEQ ID NO: 887216 - DNA, 33 bp, Homo sapien
aaattctaatccataatgttggaggagaggcct

SEQ ID NO: 887217 - DNA, 33 bp, Homo sapien
atgtacttctcactcacggaacaggccaaggtg

SEQ ID NO: 887218 - DNA, 33 bp, Homo sapien
atgtacttctcactcatggaacaggccaaggtg

SEQ ID NO: 887219 - DNA, 33 bp, Homo sapien
ttttccagttagacaaagaaggaataggcattg

SEQ ID NO: 887220 - DNA, 33 bp, Homo sapien
ttttccagttagacaaggaaggaataggcattg

SEQ ID NO: 887221 - DNA, 33 bp, Homo sapien
ttccgtggcccaagaaaagctctatttaatctc

SEQ ID NO: 887222 - DNA, 33 bp, Homo sapien
ttccgtggcccaagaatagctctatttaatctc

SEQ ID NO: 887223 - DNA, 33 bp, Homo sapien
cagcacgcgcgtgacccaggagcccccgcaagg

SEQ ID NO: 887224 - DNA, 33 bp, Homo sapien
cagcacgcgcgtgaccgaggagcccccgcaagg

SEQ ID NO: 887225 - DNA, 33 bp, Homo sapien
gggggtatttctccataacagtgtgacaatgga

SEQ ID NO: 887226 - DNA, 33 bp, Homo sapien
gggggtatttctccattacagtgtgacaatgga

SEQ ID NO: 887227 - DNA, 33 bp, Homo sapien
attataaatgaataaaattagaagtgttcgggg

SEQ ID NO: 887228 - DNA, 33 bp, Homo sapien
attataaatgaataaagttagaagtgttcgggg

SEQ ID NO: 887229 - DNA, 33 bp, Homo sapien
ttctcacgagatccgacggctttatgaatggca

SEQ ID NO: 887230 - DNA, 33 bp, Homo sapien
ttctcacgagatccgatggctttatgaatggca

SEQ ID NO: 887231 - DNA, 33 bp, Homo sapien
tatgtgggtctctccaatcacacaaagagaagt

SEQ ID NO: 887232 - DNA, 33 bp, Homo sapien
tatgtgggtctctccagtcacacaaagagaagt

SEQ ID NO: 887233 - DNA, 33 bp, Homo sapien
ctttgaatgtcctgccaaatttttctgtaacag

SEQ ID NO: 887234 - DNA, 33 bp, Homo sapien
ctttgaatgtcctgccgaatttttctgtaacag

SEQ ID NO: 887235 - DNA, 33 bp, Homo sapien
ctcagaagctagctgcaaagtccgtgactcagg

SEQ ID NO: 887236 - DNA, 33 bp, Homo sapien
ctcagaagctagctgcgaagtccgtgactcagg

SEQ ID NO: 887237 - DNA, 33 bp, Homo sapien
agcttaaaccaacatccatctagcaccacatgg

SEQ ID NO: 887238 - DNA, 33 bp, Homo sapien
agcttaaaccaacatctatctagcaccacatgg

SEQ ID NO: 887239 - DNA, 33 bp, Homo sapien
acagcaaagtgtcatcaagtaagttatgaaaga

SEQ ID NO: 887240 - DNA, 33 bp, Homo sapien
acagcaaagtgtcatccagtaagttatgaaaga

SEQ ID NO: 887241 - DNA, 33 bp, Homo sapien
aacccaatcataaaaacaaaaagagctggctgg

SEQ ID NO: 887242 - DNA, 33 bp, Homo sapien
aacccaatcataaaaataaaaagagctggctgg

SEQ ID NO: 887243 - DNA, 33 bp, Homo sapien
agaagaaacgctatcacggagacccgggcagtt

SEQ ID NO: 887244 - DNA, 33 bp, Homo sapien
agaagaaacgctatcatggagacccgggcagtt

SEQ ID NO: 887245 - DNA, 33 bp, Homo sapien
aaaggtgctgatgaacccaggtaaacgcactga

SEQ ID NO: 887246 - DNA, 33 bp, Homo sapien
aaaggtgctgatgaacgcaggtaaacgcactga

SEQ ID NO: 887247 - DNA, 33 bp, Homo sapien
tgccagtagccacaccaaaagggtctaccaagg

SEQ ID NO: 887248 - DNA, 33 bp, Homo sapien
tgccagtagccacaccgaaagggtctaccaagg

SEQ ID NO: 887249 - DNA, 33 bp, Homo sapien
tgaaatgaaacctcaacgaatgggctcacacag

SEQ ID NO: 887250 - DNA, 33 bp, Homo sapien
tgaaatgaaacctcaatgaatgggctcacacag

SEQ ID NO: 887251 - DNA, 33 bp, Homo sapien
ctaagatgctctatgaaacccaagggctcttca

SEQ ID NO: 887252 - DNA, 33 bp, Homo sapien
ctaagatgctctatgatacccaagggctcttca

SEQ ID NO: 887253 - DNA, 33 bp, Homo sapien
agagtccttaacgttccatgtgggtgacactga

SEQ ID NO: 887254 - DNA, 33 bp, Homo sapien
agagtccttaacgttctatgtgggtgacactga

SEQ ID NO: 887255 - DNA, 33 bp, Homo sapien
ttcaacaaggaaggacacatctgcggagattca

SEQ ID NO: 887256 - DNA, 33 bp, Homo sapien
ttcaacaaggaaggacgcatctgcggagattca

SEQ ID NO: 887257 - DNA, 33 bp, Homo sapien
aagaaaagctaagtaccgtacgattccatttgc

SEQ ID NO: 887258 - DNA, 33 bp, Homo sapien
aagaaaagctaagtacggtacgattccatttgc

SEQ ID NO: 887259 - DNA, 33 bp, Homo sapien
aacaagcaaacctggactcagagctagaccaat

SEQ ID NO: 887260 - DNA, 33 bp, Homo sapien
aacaagcaaacctggattcagagctagaccaat

SEQ ID NO: 887261 - DNA, 33 bp, Homo sapien
atgcagcaccatctcccagcagctcaacatagg

SEQ ID NO: 887262 - DNA, 33 bp, Homo sapien
atgcagcaccatctccgagcagctcaacatagg

SEQ ID NO: 887263 - DNA, 33 bp, Homo sapien
aaagtttaaaaattaccaacatctggcacagca

SEQ ID NO: 887264 - DNA, 33 bp, Homo sapien
aaagtttaaaaattactaacatctggcacagca

SEQ ID NO: 887265 - DNA, 33 bp, Homo sapien
gctcgtgagtcacacaaactatggcacattctt

SEQ ID NO: 887266 - DNA, 33 bp, Homo sapien
gctcgtgagtcacacacactatggcacattctt

SEQ ID NO: 887267 - DNA, 33 bp, Homo sapien
ccgtggtgcagaagcaaggcctctataatggtg

SEQ ID NO: 887268 - DNA, 33 bp, Homo sapien
ccgtggtgcagaagcagggcctctataatggtg

SEQ ID NO: 887269 - DNA, 33 bp, Homo sapien
aaaacgcgcatccttacgtagaaagagtggtag

SEQ ID NO: 887270 - DNA, 33 bp, Homo sapien
aaaacgcgcatccttatgtagaaagagtggtag

SEQ ID NO: 887271 - DNA, 33 bp, Homo sapien
ccgccacagatggggacggatcttaacctgaaa

SEQ ID NO: 887272 - DNA, 33 bp, Homo sapien
ccgccacagatggggatggatcttaacctgaaa

SEQ ID NO: 887273 - DNA, 33 bp, Homo sapien
ctcactagagttcaaaaatgctttgggccaggc

SEQ ID NO: 887274 - DNA, 33 bp, Homo sapien
ctcactagagttcaaagatgctttgggccaggc

SEQ ID NO: 887275 - DNA, 33 bp, Homo sapien
aaattcactctcaagacgtgaaatgtaagccag

SEQ ID NO: 887276 - DNA, 33 bp, Homo sapien
aaattcactctcaagaggtgaaatgtaagccag

SEQ ID NO: 887277 - DNA, 33 bp, Homo sapien
atccttcctccacccaaaggtcgccacttctgg

SEQ ID NO: 887278 - DNA, 33 bp, Homo sapien
atccttcctccacccagaggtcgccacttctgg

SEQ ID NO: 887279 - DNA, 33 bp, Homo sapien
gcttgactcactcgtcacgctgcgggcgctgca

SEQ ID NO: 887280 - DNA, 33 bp, Homo sapien
gcttgactcactcgtcgcgctgcgggcgctgca

SEQ ID NO: 887281 - DNA, 33 bp, Homo sapien
ggatgcttgaaaggaacgacgtgcttgaatatt

SEQ ID NO: 887282 - DNA, 33 bp, Homo sapien
ggatgcttgaaaggaatgacgtgcttgaatatt

SEQ ID NO: 887283 - DNA, 33 bp, Homo sapien
aacaaactgctgccaaaacttagtagctgaggt

SEQ ID NO: 887284 - DNA, 33 bp, Homo sapien
aacaaactgctgccaagacttagtagctgaggt

SEQ ID NO: 887285 - DNA, 33 bp, Homo sapien
tcccaccagagacaaacgactggccggttccag

SEQ ID NO: 887286 - DNA, 33 bp, Homo sapien
tcccaccagagacaaatgactggccggttccag

SEQ ID NO: 887287 - DNA, 33 bp, Homo sapien
acagagcgagattccacgtcaaaaaaagaaaaa

SEQ ID NO: 887288 - DNA, 33 bp, Homo sapien
acagagcgagattccatgtcaaaaaaagaaaaa

SEQ ID NO: 887289 - DNA, 33 bp, Homo sapien
tctggatttttggagacgggaagaaatggccaa

SEQ ID NO: 887290 - DNA, 33 bp, Homo sapien
tctggatttttggagatgggaagaaatggccaa

SEQ ID NO: 887291 - DNA, 33 bp, Homo sapien
ccaactctactgagaaccaactacggtggaaca

SEQ ID NO: 887292 - DNA, 33 bp, Homo sapien
ccaactctactgagaatcaactacggtggaaca

SEQ ID NO: 887293 - DNA, 33 bp, Homo sapien
gaaccagagacaattcaccagcctggactttgg

SEQ ID NO: 887294 - DNA, 33 bp, Homo sapien
gaaccagagacaattcgccagcctggactttgg

SEQ ID NO: 887295 - DNA, 33 bp, Homo sapien
ctggggactcgagggacgatctggctgtcacca

SEQ ID NO: 887296 - DNA, 33 bp, Homo sapien
ctggggactcgagggatgatctggctgtcacca

SEQ ID NO: 887297 - DNA, 33 bp, Homo sapien
tccggcagctaaccaaagcaatgctgttttgtt

SEQ ID NO: 887298 - DNA, 33 bp, Homo sapien
tccggcagctaaccaaggcaatgctgttttgtt

SEQ ID NO: 887299 - DNA, 33 bp, Homo sapien
tgtgtgctggctccatcaaaagtgcagctcatg

SEQ ID NO: 887300 - DNA, 33 bp, Homo sapien
tgtgtgctggctccatgaaaagtgcagctcatg

SEQ ID NO: 887301 - DNA, 33 bp, Homo sapien
cctcgacggtgggaaacttctctcgaaagagcc

SEQ ID NO: 887302 - DNA, 33 bp, Homo sapien
cctcgacggtgggaaagttctctcgaaagagcc

SEQ ID NO: 887303 - DNA, 33 bp, Homo sapien
tatgacacctgctggcaaggtaatattattccc

SEQ ID NO: 887304 - DNA, 33 bp, Homo sapien
tatgacacctgctggctaggtaatattattccc

SEQ ID NO: 887305 - DNA, 33 bp, Homo sapien
tggaagtgtgtgcaccaccatttgacatttgtc

SEQ ID NO: 887306 - DNA, 33 bp, Homo sapien
tggaagtgtgtgcaccgccatttgacatttgtc

SEQ ID NO: 887307 - DNA, 33 bp, Homo sapien
agtcccgagcacacccaaccactgttccatggg

SEQ ID NO: 887308 - DNA, 33 bp, Homo sapien
agtcccgagcacacccgaccactgttccatggg

SEQ ID NO: 887309 - DNA, 33 bp, Homo sapien
tggcagctggaaacaccatcaatatcaacacat

SEQ ID NO: 887310 - DNA, 33 bp, Homo sapien
tggcagctggaaacactatcaatatcaacacat

SEQ ID NO: 887311 - DNA, 33 bp, Homo sapien
tcaggaggtgaaggtacggtgaactgaggtcac

SEQ ID NO: 887312 - DNA, 33 bp, Homo sapien
tcaggaggtgaaggtatggtgaactgaggtcac

SEQ ID NO: 887313 - DNA, 33 bp, Homo sapien
ttcccactggcactgaaggagaggtccagttgc

SEQ ID NO: 887314 - DNA, 33 bp, Homo sapien
ttcccactggcactgacggagaggtccagttgc

SEQ ID NO: 887315 - DNA, 33 bp, Homo sapien
tgcttagaaaacaggagaacaggctttagtcag

SEQ ID NO: 887316 - DNA, 33 bp, Homo sapien
tgcttagaaaacaggataacaggctttagtcag

SEQ ID NO: 887317 - DNA, 33 bp, Homo sapien
gcggaggttctgaacccagacctgcccagcgtc

SEQ ID NO: 887318 - DNA, 33 bp, Homo sapien
gcggaggttctgaacctagacctgcccagcgtc

SEQ ID NO: 887319 - DNA, 33 bp, Homo sapien
atgagtgaatacatccccttttaactgaagcca

SEQ ID NO: 887320 - DNA, 33 bp, Homo sapien
atgagtgaatacatcctcttttaactgaagcca

SEQ ID NO: 887321 - DNA, 33 bp, Homo sapien
caggcacccaaccttacatccgactaacttttg

SEQ ID NO: 887322 - DNA, 33 bp, Homo sapien
caggcacccaaccttagatccgactaacttttg

SEQ ID NO: 887323 - DNA, 33 bp, Homo sapien
gggcaacacagcaagacgtgtcaaaaaaatttt

SEQ ID NO: 887324 - DNA, 33 bp, Homo sapien
gggcaacacagcaagatgtgtcaaaaaaatttt

SEQ ID NO: 887325 - DNA, 33 bp, Homo sapien
aagttttgttttttcaccggatacaggtaatta

SEQ ID NO: 887326 - DNA, 33 bp, Homo sapien
aagttttgttttttcatcggatacaggtaatta

SEQ ID NO: 887327 - DNA, 33 bp, Homo sapien
ctctctgtaaacgtgaagaaatcaaagcattca

SEQ ID NO: 887328 - DNA, 33 bp, Homo sapien
ctctctgtaaacgtgaggaaatcaaagcattca

SEQ ID NO: 887329 - DNA, 33 bp, Homo sapien
ccagggtgaccaggtaaagcggcaagaagagga

SEQ ID NO: 887330 - DNA, 33 bp, Homo sapien
ccagggtgaccaggtagagcggcaagaagagga

SEQ ID NO: 887331 - DNA, 33 bp, Homo sapien
tacagcagcggggtgacgttgatatagatgagc

SEQ ID NO: 887332 - DNA, 33 bp, Homo sapien
tacagcagcggggtgatgttgatatagatgagc

SEQ ID NO: 887333 - DNA, 33 bp, Homo sapien
aatacaaaataagtcacgcatggtggcaagcgc

SEQ ID NO: 887334 - DNA, 33 bp, Homo sapien
aatacaaaataagtcatgcatggtggcaagcgc

SEQ ID NO: 887335 - DNA, 33 bp, Homo sapien
atttctggcttttccaacttcaaggattagaac

SEQ ID NO: 887336 - DNA, 33 bp, Homo sapien
atttctggcttttccagcttcaaggattagaac

SEQ ID NO: 887337 - DNA, 33 bp, Homo sapien
acgctggaatgagaacaatggcgtcctaacccc

SEQ ID NO: 887338 - DNA, 33 bp, Homo sapien
acgctggaatgagaaccatggcgtcctaacccc

SEQ ID NO: 887339 - DNA, 33 bp, Homo sapien
aagtataatttacataaggcaaaattcacctgt

SEQ ID NO: 887340 - DNA, 33 bp, Homo sapien
aagtataatttacatacggcaaaattcacctgt

SEQ ID NO: 887341 - DNA, 33 bp, Homo sapien
gtgttcctgtggtttcacttaacacaaagatgt

SEQ ID NO: 887342 - DNA, 33 bp, Homo sapien
gtgttcctgtggtttcgcttaacacaaagatgt

SEQ ID NO: 887343 - DNA, 33 bp, Homo sapien
gggcaacatagtaagaacttcatctctaaaaac

SEQ ID NO: 887344 - DNA, 33 bp, Homo sapien
gggcaacatagtaagaccttcatctctaaaaac

SEQ ID NO: 887345 - DNA, 33 bp, Homo sapien
cagatccatgaaaataggctggcttttaaccat

SEQ ID NO: 887346 - DNA, 33 bp, Homo sapien
cagatccatgaaaatatgctggcttttaaccat

SEQ ID NO: 887347 - DNA, 33 bp, Homo sapien
tctcttttgactgagaactttacactaagatga

SEQ ID NO: 887348 - DNA, 33 bp, Homo sapien
tctcttttgactgagagctttacactaagatga

SEQ ID NO: 887349 - DNA, 33 bp, Homo sapien
accgtgcgcggccctcactgttctttttgggac

SEQ ID NO: 887350 - DNA, 33 bp, Homo sapien
accgtgcgcggccctccctgttctttttgggac

SEQ ID NO: 887351 - DNA, 33 bp, Homo sapien
aacaagcaggaagcaccggggtacagaggaatc

SEQ ID NO: 887352 - DNA, 33 bp, Homo sapien
aacaagcaggaagcactggggtacagaggaatc

SEQ ID NO: 887353 - DNA, 33 bp, Homo sapien
tgtgtagctgaggtagaaagagtgcctgatccc

SEQ ID NO: 887354 - DNA, 33 bp, Homo sapien
tgtgtagctgaggtaggaagagtgcctgatccc

SEQ ID NO: 887355 - DNA, 33 bp, Homo sapien
tcaactgcgtaaggcaagaacgtctctactgtg

SEQ ID NO: 887356 - DNA, 33 bp, Homo sapien
tcaactgcgtaaggcaggaacgtctctactgtg

SEQ ID NO: 887357 - DNA, 33 bp, Homo sapien
cagttgaaactaggaactggtctgttaactgac

SEQ ID NO: 887358 - DNA, 33 bp, Homo sapien
cagttgaaactaggaagtggtctgttaactgac

SEQ ID NO: 887359 - DNA, 33 bp, Homo sapien
caaacttcaaaaaggacgatgagcgtgggggat

SEQ ID NO: 887360 - DNA, 33 bp, Homo sapien
caaacttcaaaaaggatgatgagcgtgggggat

SEQ ID NO: 887361 - DNA, 33 bp, Homo sapien
ggtcacagcaacctgccatcggtcattccctgg

SEQ ID NO: 887362 - DNA, 33 bp, Homo sapien
ggtcacagcaacctgctatcggtcattccctgg

SEQ ID NO: 887363 - DNA, 33 bp, Homo sapien
acaagcctgacttctcacttttgctgcctgtct

SEQ ID NO: 887364 - DNA, 33 bp, Homo sapien
acaagcctgacttctcgcttttgctgcctgtct

SEQ ID NO: 887365 - DNA, 33 bp, Homo sapien
gagagagagagaggaaaaacccagaggcaccat

SEQ ID NO: 887366 - DNA, 33 bp, Homo sapien
gagagagagagaggaacaacccagaggcaccat

SEQ ID NO: 887367 - DNA, 33 bp, Homo sapien
tagggaggaagctgcaagtcggagagtggagat

SEQ ID NO: 887368 - DNA, 33 bp, Homo sapien
tagggaggaagctgcaggtcggagagtggagat

SEQ ID NO: 887369 - DNA, 33 bp, Homo sapien
acccacattctgagccactgtataccctccacc

SEQ ID NO: 887370 - DNA, 33 bp, Homo sapien
acccacattctgagccgctgtataccctccacc

SEQ ID NO: 887371 - DNA, 33 bp, Homo sapien
tccaagatacagtccgaaattactagacaaggc

SEQ ID NO: 887372 - DNA, 33 bp, Homo sapien
tccaagatacagtccgcaattactagacaaggc

SEQ ID NO: 887373 - DNA, 33 bp, Homo sapien
aacagaaaagaaccaaatgaaccaattgtaagt

SEQ ID NO: 887374 - DNA, 33 bp, Homo sapien
aacagaaaagaaccaagtgaaccaattgtaagt

SEQ ID NO: 887375 - DNA, 33 bp, Homo sapien
caagcaaaataaacataaacaaatccgccacga

SEQ ID NO: 887376 - DNA, 33 bp, Homo sapien
caagcaaaataaacatcaacaaatccgccacga

SEQ ID NO: 887377 - DNA, 33 bp, Homo sapien
gcgtttttggcaatacactatttttaagatatg

SEQ ID NO: 887378 - DNA, 33 bp, Homo sapien
gcgtttttggcaatacgctatttttaagatatg

SEQ ID NO: 887379 - DNA, 33 bp, Homo sapien
ctcagaggaagacgaacaattcctgaaggacga

SEQ ID NO: 887380 - DNA, 33 bp, Homo sapien
ctcagaggaagacgaagaattcctgaaggacga

SEQ ID NO: 887381 - DNA, 33 bp, Homo sapien
taacaggccctgtccactacaatacaatacaaa

SEQ ID NO: 887382 - DNA, 33 bp, Homo sapien
taacaggccctgtccagtacaatacaatacaaa

SEQ ID NO: 887383 - DNA, 33 bp, Homo sapien
tgtaaacttgtgttctaaactccccctgccatc

SEQ ID NO: 887384 - DNA, 33 bp, Homo sapien
tgtaaacttgtgttctgaactccccctgccatc

SEQ ID NO: 887385 - DNA, 33 bp, Homo sapien
ttcttgctgtatgcaccacctgggccgactcct

SEQ ID NO: 887386 - DNA, 33 bp, Homo sapien
ttcttgctgtatgcactacctgggccgactcct

SEQ ID NO: 887387 - DNA, 33 bp, Homo sapien
tgtaaacagtgctcacaacacagggccttaaag

SEQ ID NO: 887388 - DNA, 33 bp, Homo sapien
tgtaaacagtgctcacgacacagggccttaaag

SEQ ID NO: 887389 - DNA, 33 bp, Homo sapien
tctcagaatgccataagaatcccaggcagggcc

SEQ ID NO: 887390 - DNA, 33 bp, Homo sapien
tctcagaatgccataataatcccaggcagggcc

SEQ ID NO: 887391 - DNA, 33 bp, Homo sapien
agccagttagagttcacgagttgtccacctcca

SEQ ID NO: 887392 - DNA, 33 bp, Homo sapien
agccagttagagttcatgagttgtccacctcca

SEQ ID NO: 887393 - DNA, 33 bp, Homo sapien
agtgccaaagttagcaactcaggagatgtggct

SEQ ID NO: 887394 - DNA, 33 bp, Homo sapien
agtgccaaagttagcagctcaggagatgtggct

SEQ ID NO: 887395 - DNA, 33 bp, Homo sapien
agccacccaggcgtgaagggtaaaagacatagc

SEQ ID NO: 887396 - DNA, 33 bp, Homo sapien
agccacccaggcgtgaggggtaaaagacatagc

SEQ ID NO: 887397 - DNA, 33 bp, Homo sapien
gattgtggccaaatgacgttgagagacgatgtt

SEQ ID NO: 887398 - DNA, 33 bp, Homo sapien
gattgtggccaaatgaggttgagagacgatgtt

SEQ ID NO: 887399 - DNA, 33 bp, Homo sapien
ggttagcgtgtcgcacagtcacagagcccgggt

SEQ ID NO: 887400 - DNA, 33 bp, Homo sapien
ggttagcgtgtcgcacggtcacagagcccgggt

SEQ ID NO: 887401 - DNA, 33 bp, Homo sapien
gcctcattgctcagggaagctctcgaagactgt

SEQ ID NO: 887402 - DNA, 33 bp, Homo sapien
gcctcattgctcagggcagctctcgaagactgt

SEQ ID NO: 887403 - DNA, 33 bp, Homo sapien
tttgttaagctattcaaattgtttttatttaaa

SEQ ID NO: 887404 - DNA, 33 bp, Homo sapien
tttgttaagctattcagattgtttttatttaaa

SEQ ID NO: 887405 - DNA, 33 bp, Homo sapien
ctcaaaaagctaaacacagggctaccacatgag

SEQ ID NO: 887406 - DNA, 33 bp, Homo sapien
ctcaaaaagctaaacatagggctaccacatgag

SEQ ID NO: 887407 - DNA, 33 bp, Homo sapien
cgaaatccttcaaaaccccattatagagctgta

SEQ ID NO: 887408 - DNA, 33 bp, Homo sapien
cgaaatccttcaaaactccattatagagctgta

SEQ ID NO: 887409 - DNA, 33 bp, Homo sapien
gggtcatttctaggccacattcacttcaaatgt

SEQ ID NO: 887410 - DNA, 33 bp, Homo sapien
gggtcatttctaggccgcattcacttcaaatgt

SEQ ID NO: 887411 - DNA, 33 bp, Homo sapien
gtagagtggtcactcaatgaatgggggttgaat

SEQ ID NO: 887412 - DNA, 33 bp, Homo sapien
gtagagtggtcactcagtgaatgggggttgaat

SEQ ID NO: 887413 - DNA, 33 bp, Homo sapien
aaaaaaaaaagccacactgaagagcgccccaga

SEQ ID NO: 887414 - DNA, 33 bp, Homo sapien
aaaaaaaaaagccacagtgaagagcgccccaga

SEQ ID NO: 887415 - DNA, 33 bp, Homo sapien
ccggtggggctctacaaaaataggcatagcatc

SEQ ID NO: 887416 - DNA, 33 bp, Homo sapien
ccggtggggctctacagaaataggcatagcatc

SEQ ID NO: 887417 - DNA, 33 bp, Homo sapien
gccaccaagcccggccacaatttgaatcttctg

SEQ ID NO: 887418 - DNA, 33 bp, Homo sapien
gccaccaagcccggccgcaatttgaatcttctg

SEQ ID NO: 887419 - DNA, 33 bp, Homo sapien
atttctttgagaaaacaactgaataaaacatag

SEQ ID NO: 887420 - DNA, 33 bp, Homo sapien
atttctttgagaaaacgactgaataaaacatag

SEQ ID NO: 887421 - DNA, 33 bp, Homo sapien
ttcaggtatgtatgatcaaggctccagctgcat

SEQ ID NO: 887422 - DNA, 33 bp, Homo sapien
ttcaggtatgtatgatgaaggctccagctgcat

SEQ ID NO: 887423 - DNA, 33 bp, Homo sapien
cacgccactcgatgtcaaagtagcagctggcat

SEQ ID NO: 887424 - DNA, 33 bp, Homo sapien
cacgccactcgatgtcgaagtagcagctggcat

SEQ ID NO: 887425 - DNA, 33 bp, Homo sapien
gcttcacaccagcctagatgactgcaagaaatt

SEQ ID NO: 887426 - DNA, 33 bp, Homo sapien
gcttcacaccagcctatatgactgcaagaaatt

SEQ ID NO: 887427 - DNA, 33 bp, Homo sapien
gggcagcctgctgctacgtccttgctggcgccc

SEQ ID NO: 887428 - DNA, 33 bp, Homo sapien
gggcagcctgctgctatgtccttgctggcgccc

SEQ ID NO: 887429 - DNA, 33 bp, Homo sapien
tcatatccaccacttgaacgcagctcagtgcat

SEQ ID NO: 887430 - DNA, 33 bp, Homo sapien
tcatatccaccacttgcacgcagctcagtgcat

SEQ ID NO: 887431 - DNA, 33 bp, Homo sapien
caggacactgtgcttaataactttaatacaact

SEQ ID NO: 887432 - DNA, 33 bp, Homo sapien
caggacactgtgcttagtaactttaatacaact

SEQ ID NO: 887433 - DNA, 33 bp, Homo sapien
cttcttggacttgggacaagtgacagatggggt

SEQ ID NO: 887434 - DNA, 33 bp, Homo sapien
cttcttggacttgggataagtgacagatggggt

SEQ ID NO: 887435 - DNA, 33 bp, Homo sapien
cctcatctgcagcgtgccaatcagttcatagtg

SEQ ID NO: 887436 - DNA, 33 bp, Homo sapien
cctcatctgcagcgtggcaatcagttcatagtg

SEQ ID NO: 887437 - DNA, 33 bp, Homo sapien
gttttgccatactctcaaatccagactgccagg

SEQ ID NO: 887438 - DNA, 33 bp, Homo sapien
gttttgccatactctcgaatccagactgccagg

SEQ ID NO: 887439 - DNA, 33 bp, Homo sapien
ccctccaaaaccatgacgggacaactccctcgc

SEQ ID NO: 887440 - DNA, 33 bp, Homo sapien
ccctccaaaaccatgatgggacaactccctcgc

SEQ ID NO: 887441 - DNA, 33 bp, Homo sapien
ttgcagtgagctgatactacactactgcactcc

SEQ ID NO: 887442 - DNA, 33 bp, Homo sapien
ttgcagtgagctgatattacactactgcactcc

SEQ ID NO: 887443 - DNA, 33 bp, Homo sapien
tccgtggtttcccccaatcggaaaggcacaagg

SEQ ID NO: 887444 - DNA, 33 bp, Homo sapien
tccgtggtttcccccagtcggaaaggcacaagg

SEQ ID NO: 887445 - DNA, 33 bp, Homo sapien
gacaactagaagacacagatggcctggaagccc

SEQ ID NO: 887446 - DNA, 33 bp, Homo sapien
gacaactagaagacacggatggcctggaagccc

SEQ ID NO: 887447 - DNA, 33 bp, Homo sapien
gcacataacagccgaagaaggcttggtccttgc

SEQ ID NO: 887448 - DNA, 33 bp, Homo sapien
gcacataacagccgaataaggcttggtccttgc

SEQ ID NO: 887449 - DNA, 33 bp, Homo sapien
ccatgagtaatcagaacctccatgcaaccaata

SEQ ID NO: 887450 - DNA, 33 bp, Homo sapien
ccatgagtaatcagaatctccatgcaaccaata

SEQ ID NO: 887451 - DNA, 33 bp, Homo sapien
ctatgtttcattgttgaaatgtttggtttgagc

SEQ ID NO: 887452 - DNA, 33 bp, Homo sapien
ctatgtttcattgttggaatgtttggtttgagc

SEQ ID NO: 887453 - DNA, 33 bp, Homo sapien
ctaaaattaacacctgaacaaattagaattaat

SEQ ID NO: 887454 - DNA, 33 bp, Homo sapien
ctaaaattaacacctggacaaattagaattaat

SEQ ID NO: 887455 - DNA, 33 bp, Homo sapien
ctcagattggaaagaactgactaagaacaggtc

SEQ ID NO: 887456 - DNA, 33 bp, Homo sapien
ctcagattggaaagaagtgactaagaacaggtc

SEQ ID NO: 887457 - DNA, 33 bp, Homo sapien
cagtcggctttaagaaacacaatagggaccctg

SEQ ID NO: 887458 - DNA, 33 bp, Homo sapien
cagtcggctttaagaagcacaatagggaccctg

SEQ ID NO: 887459 - DNA, 33 bp, Homo sapien
ggttccatttgcggtcactagttccttccatca

SEQ ID NO: 887460 - DNA, 33 bp, Homo sapien
ggttccatttgcggtcgctagttccttccatca

SEQ ID NO: 887461 - DNA, 33 bp, Homo sapien
gcagaaggcgagcgagaagaaaggcagagctgc

SEQ ID NO: 887462 - DNA, 33 bp, Homo sapien
gcagaaggcgagcgaggagaaaggcagagctgc

SEQ ID NO: 887463 - DNA, 33 bp, Homo sapien
acactgttcataaataaacacatccgtttacag

SEQ ID NO: 887464 - DNA, 33 bp, Homo sapien
acactgttcataaatagacacatccgtttacag

SEQ ID NO: 887465 - DNA, 33 bp, Homo sapien
cttctcctctaaacacaatcattaccagctgcc

SEQ ID NO: 887466 - DNA, 33 bp, Homo sapien
cttctcctctaaacacgatcattaccagctgcc

SEQ ID NO: 887467 - DNA, 33 bp, Homo sapien
taaaaaactatttccacagggccaagcagaaac

SEQ ID NO: 887468 - DNA, 33 bp, Homo sapien
taaaaaactatttccatagggccaagcagaaac

SEQ ID NO: 887469 - DNA, 33 bp, Homo sapien
tggcctgctgaacttgaaggtagccatgtagct

SEQ ID NO: 887470 - DNA, 33 bp, Homo sapien
tggcctgctgaacttggaggtagccatgtagct

SEQ ID NO: 887471 - DNA, 33 bp, Homo sapien
ctcgatagacccattcacactccttatgacaag

SEQ ID NO: 887472 - DNA, 33 bp, Homo sapien
ctcgatagacccattcgcactccttatgacaag

SEQ ID NO: 887473 - DNA, 33 bp, Homo sapien
tgaatagcgctgcttacagccatttgttggtga

SEQ ID NO: 887474 - DNA, 33 bp, Homo sapien
tgaatagcgctgcttatagccatttgttggtga

SEQ ID NO: 887475 - DNA, 33 bp, Homo sapien
agccatcttctttccacaccatatttacgaaca

SEQ ID NO: 887476 - DNA, 33 bp, Homo sapien
agccatcttctttccataccatatttacgaaca

SEQ ID NO: 887477 - DNA, 33 bp, Homo sapien; identical to SEQ ID NO: 887475

SEQ ID NO: 887478 - DNA, 33 bp, Homo sapien; identical to SEQ ID NO: 887476

SEQ ID NO: 887479 - DNA, 33 bp, Homo sapien
aggaaaataaccaagacaattaaaagctaaaat

SEQ ID NO: 887480 - DNA, 33 bp, Homo sapien
aggaaaataaccaagagaattaaaagctaaaat

SEQ ID NO: 887481 - DNA, 33 bp, Homo sapien
tgctttggccccatcaataacttctgtgtttct

SEQ ID NO: 887482 - DNA, 33 bp, Homo sapien
tgctttggccccatcactaacttctgtgtttct

SEQ ID NO: 887483 - DNA, 33 bp, Homo sapien
tctctgtttcctatccccagagttcagtagttc

SEQ ID NO: 887484 - DNA, 33 bp, Homo sapien
tctctgtttcctatccgcagagttcagtagttc

SEQ ID NO: 887485 - DNA, 33 bp, Homo sapien
tgtggtgaaactatacaggctattggacagtag

SEQ ID NO: 887486 - DNA, 33 bp, Homo sapien
tgtggtgaaactatacgggctattggacagtag

SEQ ID NO: 887487 - DNA, 33 bp, Homo sapien
gggtggcatgtacctacagttttagctacccag

SEQ ID NO: 887488 - DNA, 33 bp, Homo sapien
gggtggcatgtacctatagttttagctacccag

SEQ ID NO: 887489 - DNA, 33 bp, Homo sapien
attgacagaccttaagaaagcaagatgaaccca

SEQ ID NO: 887490 - DNA, 33 bp, Homo sapien
attgacagaccttaaggaagcaagatgaaccca

SEQ ID NO: 887491 - DNA, 33 bp, Homo sapien
gagagacccaaacttaagctgatatatgtcagt

SEQ ID NO: 887492 - DNA, 33 bp, Homo sapien
gagagacccaaacttacgctgatatatgtcagt

SEQ ID NO: 887493 - DNA, 33 bp, Homo sapien
acagttaataaaaataacacaatgtcacactta

SEQ ID NO: 887494 - DNA, 33 bp, Homo sapien
acagttaataaaaatagcacaatgtcacactta

SEQ ID NO: 887495 - DNA, 33 bp, Homo sapien
cccattggctagaaaagaaaatctgagctctgt

SEQ ID NO: 887496 - DNA, 33 bp, Homo sapien
cccattggctagaaaataaaatctgagctctgt

SEQ ID NO: 887497 - DNA, 33 bp, Homo sapien
aagcatgtcctttggtcacagaagattcagttc

SEQ ID NO: 887498 - DNA, 33 bp, Homo sapien
aagcatgtcctttggttacagaagattcagttc

SEQ ID NO: 887499 - DNA, 33 bp, Homo sapien
atttctgacaaatccgacagggctctgtaaatc

SEQ ID NO: 887500 - DNA, 33 bp, Homo sapien
atttctgacaaatccgccagggctctgtaaatc

SEQ ID NO: 887501 - DNA, 33 bp, Homo sapien
tgagtagtattcgaccacaaagatatgacacaa

SEQ ID NO: 887502 - DNA, 33 bp, Homo sapien
tgagtagtattcgaccgcaaagatatgacacaa

SEQ ID NO: 887503 - DNA, 33 bp, Homo sapien
cagtgatagaccattacctgtccattacaacag

SEQ ID NO: 887504 - DNA, 33 bp, Homo sapien
cagtgatagaccattatctgtccattacaacag

SEQ ID NO: 887505 - DNA, 33 bp, Homo sapien
ctcctaaagtgatggaaatacaggtgtgtgcca

SEQ ID NO: 887506 - DNA, 33 bp, Homo sapien
ctcctaaagtgatggagatacaggtgtgtgcca

SEQ ID NO: 887507 - DNA, 33 bp, Homo sapien
gtatacagaggtgaaacaggtgctctgcagagg

SEQ ID NO: 887508 - DNA, 33 bp, Homo sapien
gtatacagaggtgaaagaggtgctctgcagagg

SEQ ID NO: 887509 - DNA, 33 bp, Homo sapien
tcactttttataaacagctactgaccaggtgcg

SEQ ID NO: 887510 - DNA, 33 bp, Homo sapien
tcactttttataaacatctactgaccaggtgcg

SEQ ID NO: 887511 - DNA, 33 bp, Homo sapien
gcacaaagcgatgctacggaattgtgaagctag

SEQ ID NO: 887512 - DNA, 33 bp, Homo sapien
gcacaaagcgatgctatggaattgtgaagctag

SEQ ID NO: 887513 - DNA, 33 bp, Homo sapien
gatagcaggagctaaagtatcacatgattctaa

SEQ ID NO: 887514 - DNA, 33 bp, Homo sapien
gatagcaggagctaaattatcacatgattctaa

SEQ ID NO: 887515 - DNA, 33 bp, Homo sapien
cccgtggctggtacgcgctctccctctcccaca

SEQ ID NO: 887516 - DNA, 33 bp, Homo sapien
cccgtggctggtacgctctctccctctcccaca

SEQ ID NO: 887517 - DNA, 33 bp, Homo sapien
gtgttcagccctcgaccccaagcgcctggtaga

SEQ ID NO: 887518 - DNA, 33 bp, Homo sapien
gtgttcagccctcgactccaagcgcctggtaga

SEQ ID NO: 887519 - DNA, 33 bp, Homo sapien
ttggcaggtaacttcacgaggactccaagtggg

SEQ ID NO: 887520 - DNA, 33 bp, Homo sapien
ttggcaggtaacttcatgaggactccaagtggg

SEQ ID NO: 887521 - DNA, 33 bp, Homo sapien
cttcttgcagaaacacagacaaatgaaataata

SEQ ID NO: 887522 - DNA, 33 bp, Homo sapien
cttcttgcagaaacacggacaaatgaaataata

SEQ ID NO: 887523 - DNA, 33 bp, Homo sapien
ttctcacatggacctacggatctttatgatgtc

SEQ ID NO: 887524 - DNA, 33 bp, Homo sapien
ttctcacatggacctatggatctttatgatgtc

SEQ ID NO: 887525 - DNA, 33 bp, Homo sapien
gaaaatccagttggtacacagaatgaaagggag

SEQ ID NO: 887526 - DNA, 33 bp, Homo sapien
gaaaatccagttggtatacagaatgaaagggag

SEQ ID NO: 887527 - DNA, 33 bp, Homo sapien
ggaaggagagccaagacagttgctcagtacttg

SEQ ID NO: 887528 - DNA, 33 bp, Homo sapien
ggaaggagagccaagagagttgctcagtacttg

SEQ ID NO: 887529 - DNA, 33 bp, Homo sapien
caggagtcctcaactcacagggttagcccaaga

SEQ ID NO: 887530 - DNA, 33 bp, Homo sapien
caggagtcctcaactcgcagggttagcccaaga

SEQ ID NO: 887531 - DNA, 33 bp, Homo sapien
aacaacgtggatgataacgctttttaaatcaca

SEQ ID NO: 887532 - DNA, 33 bp, Homo sapien
aacaacgtggatgatagcgctttttaaatcaca

SEQ ID NO: 887533 - DNA, 33 bp, Homo sapien; identical to SEQ ID NO: 887531

SEQ ID NO: 887534 - DNA, 33 bp, Homo sapien; identical to SEQ ID NO: 887532

SEQ ID NO: 887535 - DNA, 33 bp, Homo sapien
agactggagcctttataaacgtgcagctgggcc

SEQ ID NO: 887536 - DNA, 33 bp, Homo sapien
agactggagcctttatgaacgtgcagctgggcc

SEQ ID NO: 887537 - DNA, 33 bp, Homo sapien
cagcctgggcaaaacaaccaagacaagaccctg

SEQ ID NO: 887538 - DNA, 33 bp, Homo sapien
cagcctgggcaaaacagccaagacaagaccctg

SEQ ID NO: 887539 - DNA, 33 bp, Homo sapien
tcaggagaaagcgcctaaaactgacgactcttt

SEQ ID NO: 887540 - DNA, 33 bp, Homo sapien
tcaggagaaagcgcctgaaactgacgactcttt

SEQ ID NO: 887541 - DNA, 33 bp, Homo sapien
acttcccaatgtgccacgcatcctggtaaaaca

SEQ ID NO: 887542 - DNA, 33 bp, Homo sapien
acttcccaatgtgccatgcatcctggtaaaaca

SEQ ID NO: 887543 - DNA, 33 bp, Homo sapien
ttttaagttgaagttaccacctattatgtgcct

SEQ ID NO: 887544 - DNA, 33 bp, Homo sapien
ttttaagttgaagttagcacctattatgtgcct

SEQ ID NO: 887545 - DNA, 33 bp, Homo sapien
cttatttaagatcaaacgtcagagaaatgtgaa

SEQ ID NO: 887546 - DNA, 33 bp, Homo sapien
cttatttaagatcaaatgtcagagaaatgtgaa

SEQ ID NO: 887547 - DNA, 33 bp, Homo sapien
ggactagaatgggtgcaaggtggaataggctag

SEQ ID NO: 887548 - DNA, 33 bp, Homo sapien
ggactagaatgggtgcgaggtggaataggctag

SEQ ID NO: 887549 - DNA, 33 bp, Homo sapien
gaataggctaggtgaaaaatggtggcctggcca

SEQ ID NO: 887550 - DNA, 33 bp, Homo sapien
gaataggctaggtgaagaatggtggcctggcca

SEQ ID NO: 887551 - DNA, 33 bp, Homo sapien
ggccaactttcagaaccgtgactgcccaagtac

SEQ ID NO: 887552 - DNA, 33 bp, Homo sapien
ggccaactttcagaactgtgactgcccaagtac

SEQ ID NO: 887553 - DNA, 33 bp, Homo sapien
ctttctttgcatatcacattctcccctaaatta

SEQ ID NO: 887554 - DNA, 33 bp, Homo sapien
ctttctttgcatatcagattctcccctaaatta

SEQ ID NO: 887555 - DNA, 33 bp, Homo sapien
ttgcatcctcaaataaatatcacattgtggtta

SEQ ID NO: 887556 - DNA, 33 bp, Homo sapien
ttgcatcctcaaataagtatcacattgtggtta

SEQ ID NO: 887557 - DNA, 33 bp, Homo sapien
gtttggattatgacagacccatccccctggacc

SEQ ID NO: 887558 - DNA, 33 bp, Homo sapien
gtttggattatgacaggcccatccccctggacc

SEQ ID NO: 887559 - DNA, 33 bp, Homo sapien
taaccctcttcagtgccagtggcccacgggtac

SEQ ID NO: 887560 - DNA, 33 bp, Homo sapien
taaccctcttcagtgctagtggcccacgggtac

SEQ ID NO: 887561 - DNA, 33 bp, Homo sapien
tgaggtcttgtgaaaacctggctccttttaaca

SEQ ID NO: 887562 - DNA, 33 bp, Homo sapien
tgaggtcttgtgaaaatctggctccttttaaca

SEQ ID NO: 887563 - DNA, 33 bp, Homo sapien
gtgcttgatacagtcaaggaactctgagaatgg

SEQ ID NO: 887564 - DNA, 33 bp, Homo sapien
gtgcttgatacagtcagggaactctgagaatgg

SEQ ID NO: 887565 - DNA, 33 bp, Homo sapien
ctctattgggaatttccagttgtacatgatcct

SEQ ID NO: 887566 - DNA, 33 bp, Homo sapien
ctctattgggaatttcgagttgtacatgatcct

SEQ ID NO: 887567 - DNA, 33 bp, Homo sapien
cttggtgacatttaacaaactgcataaaatctg

SEQ ID NO: 887568 - DNA, 33 bp, Homo sapien
cttggtgacatttaaccaactgcataaaatctg

SEQ ID NO: 887569 - DNA, 33 bp, Homo sapien
tcttccttttgatggcacattgagctttttagt

SEQ ID NO: 887570 - DNA, 33 bp, Homo sapien
tcttccttttgatggcgcattgagctttttagt

SEQ ID NO: 887571 - DNA, 33 bp, Homo sapien
ttcaaactttacagcacgttcgttctatttcaa

SEQ ID NO: 887572 - DNA, 33 bp, Homo sapien
ttcaaactttacagcatgttcgttctatttcaa

SEQ ID NO: 887573 - DNA, 33 bp, Homo sapien
gtgaaacagtgaaacacctcagtaaatagtgga

SEQ ID NO: 887574 - DNA, 33 bp, Homo sapien
gtgaaacagtgaaacagctcagtaaatagtgga

SEQ ID NO: 887575 - DNA, 33 bp, Homo sapien
cggaattctggtagcaagattcctgcaggtaga

SEQ ID NO: 887576 - DNA, 33 bp, Homo sapien
cggaattctggtagcatgattcctgcaggtaga

SEQ ID NO: 887577 - DNA, 33 bp, Homo sapien
gtatcaggcaactagagtcgataaagtttaagt

SEQ ID NO: 887578 - DNA, 33 bp, Homo sapien
gtatcaggcaactagattcgataaagtttaagt

SEQ ID NO: 887579 - DNA, 33 bp, Homo sapien
cccagaataggcagatgaatatttgttggctaa

SEQ ID NO: 887580 - DNA, 33 bp, Homo sapien
cccagaataggcagattaatatttgttggctaa

SEQ ID NO: 887581 - DNA, 33 bp, Homo sapien
tctagggtacacactcaagatgatctgaagctg

SEQ ID NO: 887582 - DNA, 33 bp, Homo sapien
tctagggtacacactcgagatgatctgaagctg

SEQ ID NO: 887583 - DNA, 33 bp, Homo sapien
tagaaaagaaatggaagtagatctgccttttgc

SEQ ID NO: 887584 - DNA, 33 bp, Homo sapien
tagaaaagaaatggaattagatctgccttttgc

SEQ ID NO: 887585 - DNA, 33 bp, Homo sapien
agtctgcataatcaagaaagtttttcacacata

SEQ ID NO: 887586 - DNA, 33 bp, Homo sapien
agtctgcataatcaaggaagtttttcacacata

SEQ ID NO: 887587 - DNA, 33 bp, Homo sapien
caacaggcaaagaaagacgttactgggctgact

SEQ ID NO: 887588 - DNA, 33 bp, Homo sapien
caacaggcaaagaaaggcgttactgggctgact

SEQ ID NO: 887589 - DNA, 33 bp, Homo sapien
ccacgtccatcatctccatgcttggaacacttc

SEQ ID NO: 887590 - DNA, 33 bp, Homo sapien
ccacgtccatcatctctatgcttggaacacttc

SEQ ID NO: 887591 - DNA, 33 bp, Homo sapien
tcttgagaggaccttacgcttataacttaacta

SEQ ID NO: 887592 - DNA, 33 bp, Homo sapien
tcttgagaggaccttatgcttataacttaacta

SEQ ID NO: 887593 - DNA, 33 bp, Homo sapien
ggaagcacacagaacaatgttcactttaccttt

SEQ ID NO: 887594 - DNA, 33 bp, Homo sapien
ggaagcacacagaacagtgttcactttaccttt

SEQ ID NO: 887595 - DNA, 33 bp, Homo sapien
atctaagtgtatttaacgccatcctgctgcatt

SEQ ID NO: 887596 - DNA, 33 bp, Homo sapien
atctaagtgtatttaaggccatcctgctgcatt

SEQ ID NO: 887597 - DNA, 33 bp, Homo sapien
ttccacctctccctaccccaagaatgctactgc

SEQ ID NO: 887598 - DNA, 33 bp, Homo sapien
ttccacctctccctactccaagaatgctactgc

SEQ ID NO: 887599 - DNA, 33 bp, Homo sapien
aaatacctttcagatgaaacagcatcttcagaa

SEQ ID NO: 887600 - DNA, 33 bp, Homo sapien
aaatacctttcagatgtaacagcatcttcagaa

SEQ ID NO: 887601 - DNA, 33 bp, Homo sapien
ggcactctgcatcagcaagctcccaggaaaccc

SEQ ID NO: 887602 - DNA, 33 bp, Homo sapien
ggcactctgcatcagcgagctcccaggaaaccc

SEQ ID NO: 887603 - DNA, 33 bp, Homo sapien
cacgacttcctgatgacgaacccgcgcctggca

SEQ ID NO: 887604 - DNA, 33 bp, Homo sapien
cacgacttcctgatgatgaacccgcgcctggca

SEQ ID NO: 887605 - DNA, 33 bp, Homo sapien
tcaatcacctagaaagcaaaggtcaggaaagag

SEQ ID NO: 887606 - DNA, 33 bp, Homo sapien
tcaatcacctagaaaggaaaggtcaggaaagag

SEQ ID NO: 887607 - DNA, 33 bp, Homo sapien
cagaaaacaggttagacaacacgagctctgctg

SEQ ID NO: 887608 - DNA, 33 bp, Homo sapien
cagaaaacaggttagataacacgagctctgctg

SEQ ID NO: 887609 - DNA, 33 bp, Homo sapien
gcagagctggttcacgacactcctgtggtcttc

SEQ ID NO: 887610 - DNA, 33 bp, Homo sapien
gcagagctggttcacgccactcctgtggtcttc

SEQ ID NO: 887611 - DNA, 33 bp, Homo sapien
ttccacatttatccagaaggctgattactaagg

SEQ ID NO: 887612 - DNA, 33 bp, Homo sapien
ttccacatttatccagcaggctgattactaagg

SEQ ID NO: 887613 - DNA, 33 bp, Homo sapien
aactacacaaagagacagagtgaaaagttatca

SEQ ID NO: 887614 - DNA, 33 bp, Homo sapien
aactacacaaagagacggagtgaaaagttatca

SEQ ID NO: 887615 - DNA, 33 bp, Homo sapien
cgctacacaatttttacaagtaaatacaggaga

SEQ ID NO: 887616 - DNA, 33 bp, Homo sapien
cgctacacaatttttagaagtaaatacaggaga

SEQ ID NO: 887617 - DNA, 33 bp, Homo sapien
tggatcgatgagagacagataaacggccatgtg

SEQ ID NO: 887618 - DNA, 33 bp, Homo sapien
tggatcgatgagagacggataaacggccatgtg

SEQ ID NO: 887619 - DNA, 33 bp, Homo sapien
agaggcaagttaaagacaatgatcatataagta

SEQ ID NO: 887620 - DNA, 33 bp, Homo sapien
agaggcaagttaaagagaatgatcatataagta

SEQ ID NO: 887621 - DNA, 33 bp, Homo sapien
caacagtctcatattacaagctgacaaacccgc

SEQ ID NO: 887622 - DNA, 33 bp, Homo sapien
caacagtctcatattataagctgacaaacccgc

SEQ ID NO: 887623 - DNA, 33 bp, Homo sapien
gaagagctcacataggaaagagagttgagagag

SEQ ID NO: 887624 - DNA, 33 bp, Homo sapien
gaagagctcacatagggaagagagttgagagag

SEQ ID NO: 887625 - DNA, 33 bp, Homo sapien
tgcaaaggtgtttgacagcttgagtgacaaaga

SEQ ID NO: 887626 - DNA, 33 bp, Homo sapien
tgcaaaggtgtttgacggcttgagtgacaaaga

SEQ ID NO: 887627 - DNA, 33 bp, Homo sapien
caagttcaaaggaggcaagaaatgagacctact

SEQ ID NO: 887628 - DNA, 33 bp, Homo sapien
caagttcaaaggaggctagaaatgagacctact

SEQ ID NO: 887629 - DNA, 33 bp, Homo sapien
ctgccaccgtacgcaccgattctgatcccctgc

SEQ ID NO: 887630 - DNA, 33 bp, Homo sapien
ctgccaccgtacgcactgattctgatcccctgc

SEQ ID NO: 887631 - DNA, 33 bp, Homo sapien
ggagccacttttcttacgcacttaaacttgaga

SEQ ID NO: 887632 - DNA, 33 bp, Homo sapien
ggagccacttttcttatgcacttaaacttgaga

SEQ ID NO: 887633 - DNA, 33 bp, Homo sapien
ccccagatcaccataaatgggcctacagaagat

SEQ ID NO: 887634 - DNA, 33 bp, Homo sapien
ccccagatcaccataagtgggcctacagaagat

SEQ ID NO: 887635 - DNA, 33 bp, Homo sapien
ttgttgtaaggtttgacacattacacacacttg

SEQ ID NO: 887636 - DNA, 33 bp, Homo sapien
ttgttgtaaggtttgatacattacacacacttg

SEQ ID NO: 887637 - DNA, 33 bp, Homo sapien
aagtcttgactgataccgctggagaatttctgg

SEQ ID NO: 887638 - DNA, 33 bp, Homo sapien
aagtcttgactgatactgctggagaatttctgg

SEQ ID NO: 887639 - DNA, 33 bp, Homo sapien
tttatcataacagtcaaaaccttcatagcagct

SEQ ID NO: 887640 - DNA, 33 bp, Homo sapien
tttatcataacagtcataaccttcatagcagct

SEQ ID NO: 887641 - DNA, 33 bp, Homo sapien
gcaaaaacaaaaagtacctctttcatacggtta

SEQ ID NO: 887642 - DNA, 33 bp, Homo sapien
gcaaaaacaaaaagtagctctttcatacggtta

SEQ ID NO: 887643 - DNA, 33 bp, Homo sapien
gtcgccattcttagttaaaattgcccttcaggt

SEQ ID NO: 887644 - DNA, 33 bp, Homo sapien
gtcgccattcttagttgaaattgcccttcaggt

SEQ ID NO: 887645 - DNA, 33 bp, Homo sapien
aaatacaggtgatctaaacaagggaagatgctg

SEQ ID NO: 887646 - DNA, 33 bp, Homo sapien
aaatacaggtgatctacacaagggaagatgctg

SEQ ID NO: 887647 - DNA, 33 bp, Homo sapien
cgcctggccagtgctaaaggttttaaagtggtg

SEQ ID NO: 887648 - DNA, 33 bp, Homo sapien
cgcctggccagtgctagaggttttaaagtggtg

SEQ ID NO: 887649 - DNA, 33 bp, Homo sapien
cctgtgaggaaggaaactgagagaccctggaga

SEQ ID NO: 887650 - DNA, 33 bp, Homo sapien
cctgtgaggaaggaaagtgagagaccctggaga

SEQ ID NO: 887651 - DNA, 33 bp, Homo sapien
tcctcttgagtgttacaaggacggggaagaaat

SEQ ID NO: 887652 - DNA, 33 bp, Homo sapien
tcctcttgagtgttacgaggacggggaagaaat

SEQ ID NO: 887653 - DNA, 33 bp, Homo sapien
ttggaatgttctggcaccattaaaaccctgagg

SEQ ID NO: 887654 - DNA, 33 bp, Homo sapien
ttggaatgttctggcagcattaaaaccctgagg

SEQ ID NO: 887655 - DNA, 33 bp, Homo sapien
ttgaattcagtacataagaaagtaagcaaagta

SEQ ID NO: 887656 - DNA, 33 bp, Homo sapien
ttgaattcagtacataggaaagtaagcaaagta

SEQ ID NO: 887657 - DNA, 33 bp, Homo sapien
agacggaaagaggccaccaagcgcacagcacgg

SEQ ID NO: 887658 - DNA, 33 bp, Homo sapien
agacggaaagaggccatcaagcgcacagcacgg

SEQ ID NO: 887659 - DNA, 33 bp, Homo sapien
gacccacaggatgggaaaagacactccaacaac

SEQ ID NO: 887660 - DNA, 33 bp, Homo sapien
gacccacaggatgggagaagacactccaacaac

SEQ ID NO: 887661 - DNA, 33 bp, Homo sapien
ataaagcgcgcgtcaccatagtgcttgtgtgta

SEQ ID NO: 887662 - DNA, 33 bp, Homo sapien
ataaagcgcgcgtcacgatagtgcttgtgtgta

SEQ ID NO: 887663 - DNA, 33 bp, Homo sapien
ttattcttaagagatacgactcatggcagagag

SEQ ID NO: 887664 - DNA, 33 bp, Homo sapien
ttattcttaagagatatgactcatggcagagag

SEQ ID NO: 887665 - DNA, 33 bp, Homo sapien
atagaaaagcgcaaaaacacatcctctgcagca

SEQ ID NO: 887666 - DNA, 33 bp, Homo sapien
atagaaaagcgcaaaatcacatcctctgcagca

SEQ ID NO: 887667 - DNA, 33 bp, Homo sapien
ccatctcaatcagtcaatcgatcaaattaagtt

SEQ ID NO: 887668 - DNA, 33 bp, Homo sapien
ccatctcaatcagtcagtcgatcaaattaagtt

SEQ ID NO: 887669 - DNA, 33 bp, Homo sapien
ggcatcttcgttatcaactggagttcaggtagt

SEQ ID NO: 887670 - DNA, 33 bp, Homo sapien
ggcatcttcgttatcacctggagttcaggtagt

SEQ ID NO: 887671 - DNA, 33 bp, Homo sapien
cagcttttcctatatcaattactgggcaaatat

SEQ ID NO: 887672 - DNA, 33 bp, Homo sapien
cagcttttcctatatccattactgggcaaatat

SEQ ID NO: 887673 - DNA, 33 bp, Homo sapien
aggccttgtatgccacaccttatgaagcactgt

SEQ ID NO: 887674 - DNA, 33 bp, Homo sapien
aggccttgtatgccacgccttatgaagcactgt

SEQ ID NO: 887675 - DNA, 33 bp, Homo sapien
tgtagtttctaagcacaatgtcctgaaagtctg

SEQ ID NO: 887676 - DNA, 33 bp, Homo sapien
tgtagtttctaagcacgatgtcctgaaagtctg

SEQ ID NO: 887677 - DNA, 33 bp, Homo sapien
atagttagaagttttcaaatgaagaaatgataa

SEQ ID NO: 887678 - DNA, 33 bp, Homo sapien
atagttagaagttttcgaatgaagaaatgataa

SEQ ID NO: 887679 - DNA, 33 bp, Homo sapien
acgtatctactaacaccaaatgcaaagaccctt

SEQ ID NO: 887680 - DNA, 33 bp, Homo sapien
acgtatctactaacacgaaatgcaaagaccctt

SEQ ID NO: 887681 - DNA, 33 bp, Homo sapien
attgggcagcttaaacaaaaaaatgtgttttcc

SEQ ID NO: 887682 - DNA, 33 bp, Homo sapien
attgggcagcttaaacgaaaaaatgtgttttcc

SEQ ID NO: 887683 - DNA, 33 bp, Homo sapien
tgcaattaatctactgcatgacctcttggccag

SEQ ID NO: 887684 - DNA, 33 bp, Homo sapien
tgcaattaatctactggatgacctcttggccag

SEQ ID NO: 887685 - DNA, 33 bp, Homo sapien
ctgatgcgtcctcaagccttcagtccctgagtt

SEQ ID NO: 887686 - DNA, 33 bp, Homo sapien
ctgatgcgtcctcaagtcttcagtccctgagtt

SEQ ID NO: 887687 - DNA, 33 bp, Homo sapien
ccgtcttgtctacccccactctgtgcatcatgg

SEQ ID NO: 887688 - DNA, 33 bp, Homo sapien
ccgtcttgtctacccctactctgtgcatcatgg

SEQ ID NO: 887689 - DNA, 33 bp, Homo sapien
gtctcctagagctgaactgaattctccctccct

SEQ ID NO: 887690 - DNA, 33 bp, Homo sapien
gtctcctagagctgaattgaattctccctccct

SEQ ID NO: 887691 - DNA, 33 bp, Homo sapien
actggcgttcaaagctaaagggactgtggctcc

SEQ ID NO: 887692 - DNA, 33 bp, Homo sapien
actggcgttcaaagctgaagggactgtggctcc

SEQ ID NO: 887693 - DNA, 33 bp, Homo sapien
ggaggcatttctgcaacagtcaaactccgacaa

SEQ ID NO: 887694 - DNA, 33 bp, Homo sapien
ggaggcatttctgcaatagtcaaactccgacaa

SEQ ID NO: 887695 - DNA, 33 bp, Homo sapien
aggcccccatgtggcaaaaggtaagcattattt

SEQ ID NO: 887696 - DNA, 33 bp, Homo sapien
aggcccccatgtggcacaaggtaagcattattt

SEQ ID NO: 887697 - DNA, 33 bp, Homo sapien
aggcatctggaatacacagtgttgggtggttgt

SEQ ID NO: 887698 - DNA, 33 bp, Homo sapien
aggcatctggaatacatagtgttgggtggttgt

SEQ ID NO: 887699 - DNA, 33 bp, Homo sapien
cctgggaccagcagaaaaagaggagctggcaaa

SEQ ID NO: 887700 - DNA, 33 bp, Homo sapien
cctgggaccagcagaagaagaggagctggcaaa

SEQ ID NO: 887701 - DNA, 33 bp, Homo sapien
agtagccaggactacaacttttgtattttttgt

SEQ ID NO: 887702 - DNA, 33 bp, Homo sapien
agtagccaggactacatcttttgtattttttgt

SEQ ID NO: 887703 - DNA, 33 bp, Homo sapien
agacttcattcatcaaaataaaatccagatgga

SEQ ID NO: 887704 - DNA, 33 bp, Homo sapien
agacttcattcatcaatataaaatccagatgga

SEQ ID NO: 887705 - DNA, 33 bp, Homo sapien
actaccttttctctgcccctagtacctgttcct

SEQ ID NO: 887706 - DNA, 33 bp, Homo sapien
actaccttttctctgctcctagtacctgttcct

SEQ ID NO: 887707 - DNA, 33 bp, Homo sapien
tgcccttgacagccaaacttcctttgccatatc

SEQ ID NO: 887708 - DNA, 33 bp, Homo sapien
tgcccttgacagccaaccttcctttgccatatc

SEQ ID NO: 887709 - DNA, 33 bp, Homo sapien
gaaatccgtgtgttgaagtctgctgcccagcag

SEQ ID NO: 887710 - DNA, 33 bp, Homo sapien
gaaatccgtgtgttgaggtctgctgcccagcag

SEQ ID NO: 887711 - DNA, 33 bp, Homo sapien
ggcctaacacagctgccctaattgatagagaag

SEQ ID NO: 887712 - DNA, 33 bp, Homo sapien
ggcctaacacagctgcgctaattgatagagaag

SEQ ID NO: 887713 - DNA, 33 bp, Homo sapien
ggtataaacctgagaccgggcccattacccagg

SEQ ID NO: 887714 - DNA, 33 bp, Homo sapien
ggtataaacctgagactgggcccattacccagg

SEQ ID NO: 887715 - DNA, 33 bp, Homo sapien
cggcatcaccaaagccaggcatttacccagaat

SEQ ID NO: 887716 - DNA, 33 bp, Homo sapien
cggcatcaccaaagccgggcatttacccagaat

SEQ ID NO: 887717 - DNA, 33 bp, Homo sapien
gggctccgactttccccctagggcagcactcca

SEQ ID NO: 887718 - DNA, 33 bp, Homo sapien
gggctccgactttccctctagggcagcactcca

SEQ ID NO: 887719 - DNA, 33 bp, Homo sapien
ttccattgtgtggatcaaccacattttctttac

SEQ ID NO: 887720 - DNA, 33 bp, Homo sapien
ttccattgtgtggatcgaccacattttctttac

SEQ ID NO: 887721 - DNA, 33 bp, Homo sapien
cccttaaactacgtcacggatgttaaggagaaa

SEQ ID NO: 887722 - DNA, 33 bp, Homo sapien
cccttaaactacgtcatggatgttaaggagaaa

SEQ ID NO: 887723 - DNA, 33 bp, Homo sapien
ttacaacagttcttaacctatggagagatattt

SEQ ID NO: 887724 - DNA, 33 bp, Homo sapien
ttacaacagttcttaagctatggagagatattt

SEQ ID NO: 887725 - DNA, 33 bp, Homo sapien
acttcttttaaaaaaacgtatcctgtcatcaca

SEQ ID NO: 887726 - DNA, 33 bp, Homo sapien
acttcttttaaaaaaatgtatcctgtcatcaca

SEQ ID NO: 887727 - DNA, 33 bp, Homo sapien
tttcaatcacaccaagaccaaaatcagcactct

SEQ ID NO: 887728 - DNA, 33 bp, Homo sapien
tttcaatcacaccaagtccaaaatcagcactct

SEQ ID NO: 887729 - DNA, 33 bp, Homo sapien
ggtcagagccacagtaaaaagtcagcaataaca

SEQ ID NO: 887730 - DNA, 33 bp, Homo sapien
ggtcagagccacagtagaaagtcagcaataaca

SEQ ID NO: 887731 - DNA, 33 bp, Homo sapien
gttgtccattttctgaactcgcgattgttttga

SEQ ID NO: 887732 - DNA, 33 bp, Homo sapien
gttgtccattttctgacctcgcgattgttttga

SEQ ID NO: 887733 - DNA, 33 bp, Homo sapien
aagtgtactcgcttcacaggcacatataataat

SEQ ID NO: 887734 - DNA, 33 bp, Homo sapien
aagtgtactcgcttcagaggcacatataataat

SEQ ID NO: 887735 - DNA, 33 bp, Homo sapien
ccaagtgaggcccaaagcatatttcaccatgct

SEQ ID NO: 887736 - DNA, 33 bp, Homo sapien
ccaagtgaggcccaaatcatatttcaccatgct

SEQ ID NO: 887737 - DNA, 33 bp, Homo sapien; identical to SEQ ID NO: 887735

SEQ ID NO: 887738 - DNA, 33 bp, Homo sapien; identical to SEQ ID NO: 887736

SEQ ID NO: 887739 - DNA, 33 bp, Homo sapien
cttagcttttgctccacgtggcactgtcctccc

SEQ ID NO: 887740 - DNA, 33 bp, Homo sapien
cttagcttttgctccatgtggcactgtcctccc

SEQ ID NO: 887741 - DNA, 33 bp, Homo sapien
ctaaacgggcgtaaacggtcttgatgtaggtaa

SEQ ID NO: 887742 - DNA, 33 bp, Homo sapien
ctaaacgggcgtaaactgtcttgatgtaggtaa

SEQ ID NO: 887743 - DNA, 33 bp, Homo sapien
ttctgtgaccttttgcgcacactttgtgccatt

SEQ ID NO: 887744 - DNA, 33 bp, Homo sapien
ttctgtgaccttttgctcacactttgtgccatt

SEQ ID NO: 887745 - DNA, 33 bp, Homo sapien; identical to SEQ ID NO: 887743

SEQ ID NO: 887746 - DNA, 33 bp, Homo sapien; identical to SEQ ID NO: 887744

SEQ ID NO: 887747 - DNA, 33 bp, Homo sapien
tatgtcttcaaatatcacagtggatgttcacac

SEQ ID NO: 887748 - DNA, 33 bp, Homo sapien
tatgtcttcaaatatctcagtggatgttcacac

SEQ ID NO: 887749 - DNA, 33 bp, Homo sapien; identical to SEQ ID NO: 887747

SEQ ID NO: 887750 - DNA, 33 bp, Homo sapien; identical to SEQ ID NO: 887748

SEQ ID NO: 887751 - DNA, 33 bp, Homo sapien
caatgccttttcaaataactcgtacttgatcat

SEQ ID NO: 887752 - DNA, 33 bp, Homo sapien
caatgccttttcaaatcactcgtacttgatcat

SEQ ID NO: 887753 - DNA, 33 bp, Homo sapien
cttgtttactgagtgaccttctggctcattttt

SEQ ID NO: 887754 - DNA, 33 bp, Homo sapien
cttgtttactgagtgatcttctggctcattttt

SEQ ID NO: 887755 - DNA, 33 bp, Homo sapien
tgtgttggtcttgtatcacaatctttagattac

SEQ ID NO: 887756 - DNA, 33 bp, Homo sapien
tgtgttggtcttgtattacaatctttagattac

SEQ ID NO: 887757 - DNA, 33 bp, Homo sapien
atgaaacttgacttacaaaagcaggagactggc

SEQ ID NO: 887758 - DNA, 33 bp, Homo sapien
atgaaacttgacttaccaaagcaggagactggc

SEQ ID NO: 887759 - DNA, 33 bp, Homo sapien
agccaccacacccggacctgtcaagtattcttt

SEQ ID NO: 887760 - DNA, 33 bp, Homo sapien
agccaccacacccggatctgtcaagtattcttt

SEQ ID NO: 887761 - DNA, 33 bp, Homo sapien
cttgatcattttaaccacctatccttgatcatt

SEQ ID NO: 887762 - DNA, 33 bp, Homo sapien
cttgatcattttaacctcctatccttgatcatt

SEQ ID NO: 887763 - DNA, 33 bp, Homo sapien; identical to SEQ ID NO: 887761

SEQ ID NO: 887764 - DNA, 33 bp, Homo sapien; identical to SEQ ID NO: 887762

SEQ ID NO: 887765 - DNA, 33 bp, Homo sapien
taagaatagagcacaacgaaccccgggaagaaa

SEQ ID NO: 887766 - DNA, 33 bp, Homo sapien
taagaatagagcacaatgaaccccgggaagaaa

SEQ ID NO: 887767 - DNA, 33 bp, Homo sapien
tcactgccatttattacctcctaactgcaatgc

SEQ ID NO: 887768 - DNA, 33 bp, Homo sapien
tcactgccatttattatctcctaactgcaatgc

SEQ ID NO: 887769 - DNA, 33 bp, Homo sapien
tacgtagaccaagtggaaaaagccaaggaagag

SEQ ID NO: 887770 - DNA, 33 bp, Homo sapien
tacgtagaccaagtgggaaaagccaaggaagag

SEQ ID NO: 887771 - DNA, 33 bp, Homo sapien
aaagggaagtattaaacctacatctatgagcca

SEQ ID NO: 887772 - DNA, 33 bp, Homo sapien
aaagggaagtattaaagctacatctatgagcca

SEQ ID NO: 887773 - DNA, 33 bp, Homo sapien
aactttggtaatgtatcagttacagagtggaaa

SEQ ID NO: 887774 - DNA, 33 bp, Homo sapien
aactttggtaatgtatgagttacagagtggaaa

SEQ ID NO: 887775 - DNA, 33 bp, Homo sapien
attaacatgacctagccgcaaggtccacagcca

SEQ ID NO: 887776 - DNA, 33 bp, Homo sapien
attaacatgacctagctgcaaggtccacagcca

SEQ ID NO: 887777 - DNA, 33 bp, Homo sapien
tttactgagcagttagcatagtacttgtgccag

SEQ ID NO: 887778 - DNA, 33 bp, Homo sapien
tttactgagcagttagtatagtacttgtgccag

SEQ ID NO: 887779 - DNA, 33 bp, Homo sapien
atgactcaataacttacgtaatagtaacggcat

SEQ ID NO: 887780 - DNA, 33 bp, Homo sapien
atgactcaataacttatgtaatagtaacggcat

SEQ ID NO: 887781 - DNA, 33 bp, Homo sapien
atatattttaaatctaggcactcctcactcaac

SEQ ID NO: 887782 - DNA, 33 bp, Homo sapien
atatattttaaatctatgcactcctcactcaac

SEQ ID NO: 887783 - DNA, 33 bp, Homo sapien
tttaaatgaacatggaagtagtagtttggagtt

SEQ ID NO: 887784 - DNA, 33 bp, Homo sapien
tttaaatgaacatggacgtagtagtttggagtt

SEQ ID NO: 887785 - DNA, 33 bp, Homo sapien
ggatgatgtaataataggtacaacacgtgttta

SEQ ID NO: 887786 - DNA, 33 bp, Homo sapien
ggatgatgtaataatatgtacaacacgtgttta

SEQ ID NO: 887787 - DNA, 33 bp, Homo sapien
ggttgtacagatcataccattacttaggtatta

SEQ ID NO: 887788 - DNA, 33 bp, Homo sapien
ggttgtacagatcatatcattacttaggtatta

SEQ ID NO: 887789 - DNA, 33 bp, Homo sapien
cataattgctactataaaccaaaaatagtaata

SEQ ID NO: 887790 - DNA, 33 bp, Homo sapien
cataattgctactatagaccaaaaatagtaata

SEQ ID NO: 887791 - DNA, 33 bp, Homo sapien
acctagagattaaacggatttagcataaaatat

SEQ ID NO: 887792 - DNA, 33 bp, Homo sapien
acctagagattaaacgtatttagcataaaatat

SEQ ID NO: 887793 - DNA, 33 bp, Homo sapien
cttttggttcaggaacaatagcagcaccataac

SEQ ID NO: 887794 - DNA, 33 bp, Homo sapien
cttttggttcaggaacgatagcagcaccataac

SEQ ID NO: 887795 - DNA, 33 bp, Homo sapien
cttcactcagtttggcagagataccacaaggca

SEQ ID NO: 887796 - DNA, 33 bp, Homo sapien
cttcactcagtttggcggagataccacaaggca

SEQ ID NO: 887797 - DNA, 33 bp, Homo sapien
aatgccagcaattggcgcattctccctgggatc

SEQ ID NO: 887798 - DNA, 33 bp, Homo sapien
aatgccagcaattggctcattctccctgggatc

SEQ ID NO: 887799 - DNA, 33 bp, Homo sapien
cctcagtgtttatcccaattttgcagagtacca

SEQ ID NO: 887800 - DNA, 33 bp, Homo sapien
cctcagtgtttatccctattttgcagagtacca

SEQ ID NO: 887801 - DNA, 33 bp, Homo sapien
acattcctgagctttagcttcctcatctgacaa

SEQ ID NO: 887802 - DNA, 33 bp, Homo sapien
acattcctgagctttatcttcctcatctgacaa

SEQ ID NO: 887803 - DNA, 33 bp, Homo sapien
gtaatatcatcgtctgacaacatggatattgag

SEQ ID NO: 887804 - DNA, 33 bp, Homo sapien
gtaatatcatcgtctgccaacatggatattgag

SEQ ID NO: 887805 - DNA, 33 bp, Homo sapien
tgtgacatgggtcgtaataaccaagaaaggaga

SEQ ID NO: 887806 - DNA, 33 bp, Homo sapien
tgtgacatgggtcgtagtaaccaagaaaggaga

SEQ ID NO: 887807 - DNA, 33 bp, Homo sapien
cgcatgggacgtacaccctttgtgatgctatta

SEQ ID NO: 887808 - DNA, 33 bp, Homo sapien
cgcatgggacgtacactctttgtgatgctatta

SEQ ID NO: 887809 - DNA, 33 bp, Homo sapien
ccttgtttagtatcaaattcatgccatgcaaaa

SEQ ID NO: 887810 - DNA, 33 bp, Homo sapien
ccttgtttagtatcaacttcatgccatgcaaaa

SEQ ID NO: 887811 - DNA, 33 bp, Homo sapien
atctgatgctgagtaacggttgagctatgactg

SEQ ID NO: 887812 - DNA, 33 bp, Homo sapien
atctgatgctgagtaatggttgagctatgactg

SEQ ID NO: 887813 - DNA, 33 bp, Homo sapien
agagatatatttaagaatcattgccaaggatga

SEQ ID NO: 887814 - DNA, 33 bp, Homo sapien
agagatatatttaagactcattgccaaggatga

SEQ ID NO: 887815 - DNA, 33 bp, Homo sapien
ttatgtcaagtgaaagaaaccaatcacaaaagg

SEQ ID NO: 887816 - DNA, 33 bp, Homo sapien
ttatgtcaagtgaaaggaaccaatcacaaaagg

SEQ ID NO: 887817 - DNA, 33 bp, Homo sapien
atatctgtgaagtccacagaatggtacctggca

SEQ ID NO: 887818 - DNA, 33 bp, Homo sapien
atatctgtgaagtccatagaatggtacctggca

SEQ ID NO: 887819 - DNA, 33 bp, Homo sapien
ttgcatcttaatggtcccaagctattatttttc

SEQ ID NO: 887820 - DNA, 33 bp, Homo sapien
ttgcatcttaatggtctcaagctattatttttc

SEQ ID NO: 887821 - DNA, 33 bp, Homo sapien
ttcatgaaccagaggggaacttctatcagtcat

SEQ ID NO: 887822 - DNA, 33 bp, Homo sapien
ttcatgaaccagagggtaacttctatcagtcat

SEQ ID NO: 887823 - DNA, 33 bp, Homo sapien
agagtcagagacaggcaaaaagaagcaggtagc

SEQ ID NO: 887824 - DNA, 33 bp, Homo sapien
agagtcagagacaggccaaaagaagcaggtagc

SEQ ID NO: 887825 - DNA, 33 bp, Homo sapien
gacatagccctgtccacagagaatgtcagcttt

SEQ ID NO: 887826 - DNA, 33 bp, Homo sapien
gacatagccctgtccagagagaatgtcagcttt

SEQ ID NO: 887827 - DNA, 33 bp, Homo sapien
gcacacaatggaatacggtaccaccacaagaat

SEQ ID NO: 887828 - DNA, 33 bp, Homo sapien
gcacacaatggaatactgtaccaccacaagaat

SEQ ID NO: 887829 - DNA, 33 bp, Homo sapien
attgcttttgtggcagaatttgttctgtgactt

SEQ ID NO: 887830 - DNA, 33 bp, Homo sapien
attgcttttgtggcagtatttgttctgtgactt

SEQ ID NO: 887831 - DNA, 33 bp, Homo sapien
attatgtcagttgtcactcttatgtctctctga

SEQ ID NO: 887832 - DNA, 33 bp, Homo sapien
attatgtcagttgtcattcttatgtctctctga

SEQ ID NO: 887833 - DNA, 33 bp, Homo sapien
ttggccaactaaagtccctcatttcagcctctg

SEQ ID NO: 887834 - DNA, 33 bp, Homo sapien
ttggccaactaaagtctctcatttcagcctctg

SEQ ID NO: 887835 - DNA, 33 bp, Homo sapien
caccaagtgatgaaaggcatgaaacctatcgac

SEQ ID NO: 887836 - DNA, 33 bp, Homo sapien
caccaagtgatgaaagtcatgaaacctatcgac

SEQ ID NO: 887837 - DNA, 33 bp, Homo sapien
gttggctccaaaggaagggatgagaagtcattg

SEQ ID NO: 887838 - DNA, 33 bp, Homo sapien
gttggctccaaaggaatggatgagaagtcattg

SEQ ID NO: 887839 - DNA, 33 bp, Homo sapien
ctatcgcaaaaggtaacataacttggactaggt

SEQ ID NO: 887840 - DNA, 33 bp, Homo sapien
ctatcgcaaaaggtaatataacttggactaggt

SEQ ID NO: 887841 - DNA, 33 bp, Homo sapien
cgagatggctaaacatcaattggggactgatat

SEQ ID NO: 887842 - DNA, 33 bp, Homo sapien
cgagatggctaaacatgaattggggactgatat

SEQ ID NO: 887843 - DNA, 33 bp, Homo sapien
acttgttttgtgttcgaccatctcctttctgtt

SEQ ID NO: 887844 - DNA, 33 bp, Homo sapien
acttgttttgtgttcggccatctcctttctgtt

SEQ ID NO: 887845 - DNA, 33 bp, Homo sapien
aatagccaataaaatacctttcctgaggaaaac

SEQ ID NO: 887846 - DNA, 33 bp, Homo sapien
aatagccaataaaatatctttcctgaggaaaac

SEQ ID NO: 887847 - DNA, 33 bp, Homo sapien
ttgtccacaaatactcaaaaagagaaggtctta

SEQ ID NO: 887848 - DNA, 33 bp, Homo sapien
ttgtccacaaatactcgaaaagagaaggtctta

SEQ ID NO: 887849 - DNA, 33 bp, Homo sapien
tggagtttgatgtggactcaaattctgattcta

SEQ ID NO: 887850 - DNA, 33 bp, Homo sapien
tggagtttgatgtggattcaaattctgattcta

SEQ ID NO: 887851 - DNA, 33 bp, Homo sapien
ctactgttcactagcacgtggcccgagtcagct

SEQ ID NO: 887852 - DNA, 33 bp, Homo sapien
ctactgttcactagcaggtggcccgagtcagct

SEQ ID NO: 887853 - DNA, 33 bp, Homo sapien
ccctcagatcaagaaccctgctcgttgtctcaa

SEQ ID NO: 887854 - DNA, 33 bp, Homo sapien
ccctcagatcaagaactctgctcgttgtctcaa

SEQ ID NO: 887855 - DNA, 33 bp, Homo sapien
tgaaatctaagacagaataataggcagtaactt

SEQ ID NO: 887856 - DNA, 33 bp, Homo sapien
tgaaatctaagacagagtaataggcagtaactt

SEQ ID NO: 887857 - DNA, 33 bp, Homo sapien
tcagatcaataggttagagaatttgacttactt

SEQ ID NO: 887858 - DNA, 33 bp, Homo sapien
tcagatcaataggttatagaatttgacttactt

SEQ ID NO: 887859 - DNA, 33 bp, Homo sapien
gaatatgcagctgaaccactggtcttcctccct

SEQ ID NO: 887860 - DNA, 33 bp, Homo sapien
gaatatgcagctgaactactggtcttcctccct

SEQ ID NO: 887861 - DNA, 33 bp, Homo sapien
aaagatcagaatctacagatctaaattctctca

SEQ ID NO: 887862 - DNA, 33 bp, Homo sapien
aaagatcagaatctaccgatctaaattctctca

SEQ ID NO: 887863 - DNA, 33 bp, Homo sapien
ttagagagatgcctagaagaatgtaacacaaaa

SEQ ID NO: 887864 - DNA, 33 bp, Homo sapien
ttagagagatgcctaggagaatgtaacacaaaa

SEQ ID NO: 887865 - DNA, 33 bp, Homo sapien
ttaataaaagattcaaaacagcaaaagatataa

SEQ ID NO: 887866 - DNA, 33 bp, Homo sapien
ttaataaaagattcaatacagcaaaagatataa

SEQ ID NO: 887867 - DNA, 33 bp, Homo sapien
agtttctaatggcctaaatttgcatatgaaagg

SEQ ID NO: 887868 - DNA, 33 bp, Homo sapien
agtttctaatggcctacatttgcatatgaaagg

SEQ ID NO: 887869 - DNA, 33 bp, Homo sapien
tataatttggagactaactgtaattactcttaa

SEQ ID NO: 887870 - DNA, 33 bp, Homo sapien
tataatttggagactacctgtaattactcttaa

SEQ ID NO: 887871 - DNA, 33 bp, Homo sapien
gggaccagaccaggaaactagctacaagactag

SEQ ID NO: 887872 - DNA, 33 bp, Homo sapien
gggaccagaccaggaagctagctacaagactag

SEQ ID NO: 887873 - DNA, 33 bp, Homo sapien
atgtgtgtatccatgccgatttccacatttcac

SEQ ID NO: 887874 - DNA, 33 bp, Homo sapien
atgtgtgtatccatgctgatttccacatttcac

SEQ ID NO: 887875 - DNA, 33 bp, Homo sapien
gaaaacatgaagccaacagaagtaaatgaaaga

SEQ ID NO: 887876 - DNA, 33 bp, Homo sapien
gaaaacatgaagccaagagaagtaaatgaaaga

SEQ ID NO: 887877 - DNA, 33 bp, Homo sapien
ataaagattacactaacggccaacctgaatgag

SEQ ID NO: 887878 - DNA, 33 bp, Homo sapien
ataaagattacactaatggccaacctgaatgag

SEQ ID NO: 887879 - DNA, 33 bp, Homo sapien
tgacttttgagcagaaacctgagtgttattaga

SEQ ID NO: 887880 - DNA, 33 bp, Homo sapien
tgacttttgagcagaaccctgagtgttattaga

SEQ ID NO: 887881 - DNA, 33 bp, Homo sapien
aaaagcatccaaagtaatactctcactaaaata

SEQ ID NO: 887882 - DNA, 33 bp, Homo sapien
aaaagcatccaaagtagtactctcactaaaata

SEQ ID NO: 887883 - DNA, 33 bp, Homo sapien
gtgatctctgatgacaaaacaaaggtagggtcg

SEQ ID NO: 887884 - DNA, 33 bp, Homo sapien
gtgatctctgatgacacaacaaaggtagggtcg

SEQ ID NO: 887885 - DNA, 33 bp, Homo sapien
aaaacaatgtactgcacaagaaataggcagata

SEQ ID NO: 887886 - DNA, 33 bp, Homo sapien
aaaacaatgtactgcagaagaaataggcagata

SEQ ID NO: 887887 - DNA, 33 bp, Homo sapien
gtgaaccaagttgcagacctcttcctgcaagca

SEQ ID NO: 887888 - DNA, 33 bp, Homo sapien
gtgaaccaagttgcaggcctcttcctgcaagca

SEQ ID NO: 887889 - DNA, 33 bp, Homo sapien
ctagtgcatcattgaacgaaaggaatttcacac

SEQ ID NO: 887890 - DNA, 33 bp, Homo sapien
ctagtgcatcattgaaggaaaggaatttcacac

SEQ ID NO: 887891 - DNA, 33 bp, Homo sapien
ggatggttgttaatgcaaataacccagtcctca

SEQ ID NO: 887892 - DNA, 33 bp, Homo sapien
ggatggttgttaatgccaataacccagtcctca

SEQ ID NO: 887893 - DNA, 33 bp, Homo sapien
ttattattttctgctacgtctaataccaatatt

SEQ ID NO: 887894 - DNA, 33 bp, Homo sapien
ttattattttctgctatgtctaataccaatatt

SEQ ID NO: 887895 - DNA, 33 bp, Homo sapien
agtttgagaaaaaaatcatgcaatttgccatac

SEQ ID NO: 887896 - DNA, 33 bp, Homo sapien
agtttgagaaaaaaatgatgcaatttgccatac

SEQ ID NO: 887897 - DNA, 33 bp, Homo sapien
aggccccaacattttcaagcaagactgactgcc

SEQ ID NO: 887898 - DNA, 33 bp, Homo sapien
aggccccaacattttcgagcaagactgactgcc

SEQ ID NO: 887899 - DNA, 33 bp, Homo sapien
ccagattcattttcataaaaggaagtaggtagt

SEQ ID NO: 887900 - DNA, 33 bp, Homo sapien
ccagattcattttcattaaaggaagtaggtagt

SEQ ID NO: 887901 - DNA, 33 bp, Homo sapien
gaagaggaaaattgaaccctatagataactagc

SEQ ID NO: 887902 - DNA, 33 bp, Homo sapien
gaagaggaaaattgaatcctatagataactagc

SEQ ID NO: 887903 - DNA, 33 bp, Homo sapien
gctatatctaaggtggaactaacatctgatcca

SEQ ID NO: 887904 - DNA, 33 bp, Homo sapien
gctatatctaaggtgggactaacatctgatcca

SEQ ID NO: 887905 - DNA, 33 bp, Homo sapien
ttgtgcttctgttgcacacaatgcataggagtg

SEQ ID NO: 887906 - DNA, 33 bp, Homo sapien
ttgtgcttctgttgcagacaatgcataggagtg

SEQ ID NO: 887907 - DNA, 33 bp, Homo sapien
ttttcttggggatccacagttaagcagagcaac

SEQ ID NO: 887908 - DNA, 33 bp, Homo sapien
ttttcttggggatccatagttaagcagagcaac

SEQ ID NO: 887909 - DNA, 33 bp, Homo sapien
ttctcctctttcttggcattcaagcttaaaata

SEQ ID NO: 887910 - DNA, 33 bp, Homo sapien
ttctcctctttcttggtattcaagcttaaaata

SEQ ID NO: 887911 - DNA, 33 bp, Homo sapien
acctatgtagtgtagcaattcaggatgaaatct

SEQ ID NO: 887912 - DNA, 33 bp, Homo sapien
acctatgtagtgtagcgattcaggatgaaatct

SEQ ID NO: 887913 - DNA, 33 bp, Homo sapien
ttagtgtctgatgccaatagtgatttagaattc

SEQ ID NO: 887914 - DNA, 33 bp, Homo sapien
ttagtgtctgatgccagtagtgatttagaattc

SEQ ID NO: 887915 - DNA, 33 bp, Homo sapien
aaaaaatgcactaagagggacagaacttcagca

SEQ ID NO: 887916 - DNA, 33 bp, Homo sapien
aaaaaatgcactaagatggacagaacttcagca

SEQ ID NO: 887917 - DNA, 33 bp, Homo sapien
ctctatttaaacaacactctgtgaaatctgtca

SEQ ID NO: 887918 - DNA, 33 bp, Homo sapien
ctctatttaaacaacagtctgtgaaatctgtca

SEQ ID NO: 887919 - DNA, 33 bp, Homo sapien
taatcaatccaagagaatatgatgatgaaatca

SEQ ID NO: 887920 - DNA, 33 bp, Homo sapien
taatcaatccaagagagtatgatgatgaaatca

SEQ ID NO: 887921 - DNA, 33 bp, Homo sapien
ctatgtttctagaatagcatctcattcaatgtt

SEQ ID NO: 887922 - DNA, 33 bp, Homo sapien
ctatgtttctagaatatcatctcattcaatgtt

SEQ ID NO: 887923 - DNA, 33 bp, Homo sapien
atttgtttattgtccaatcagcacacaaaaata

SEQ ID NO: 887924 - DNA, 33 bp, Homo sapien
atttgtttattgtccattcagcacacaaaaata

SEQ ID NO: 887925 - DNA, 33 bp, Homo sapien
acctcctgtcctagtccctcaaaactgctcaca

SEQ ID NO: 887926 - DNA, 33 bp, Homo sapien
acctcctgtcctagtctctcaaaactgctcaca

SEQ ID NO: 887927 - DNA, 33 bp, Homo sapien
tcaagatctttgggaactaggaagagaattctg

SEQ ID NO: 887928 - DNA, 33 bp, Homo sapien
tcaagatctttgggaattaggaagagaattctg

SEQ ID NO: 887929 - DNA, 33 bp, Homo sapien
caatcatgaggtaagagccatcccagcactccc

SEQ ID NO: 887930 - DNA, 33 bp, Homo sapien
caatcatgaggtaagatccatcccagcactccc

SEQ ID NO: 887931 - DNA, 33 bp, Homo sapien
cactggatcaggttgacagcaggatgggaataa

SEQ ID NO: 887932 - DNA, 33 bp, Homo sapien
cactggatcaggttgagagcaggatgggaataa

SEQ ID NO: 887933 - DNA, 33 bp, Homo sapien
tgggagaaagggcaaaagcaactttagattaga

SEQ ID NO: 887934 - DNA, 33 bp, Homo sapien
tgggagaaagggcaaaggcaactttagattaga

SEQ ID NO: 887935 - DNA, 33 bp, Homo sapien
aattttcatgtctgcccagaaattctagaatat

SEQ ID NO: 887936 - DNA, 33 bp, Homo sapien
aattttcatgtctgcctagaaattctagaatat

SEQ ID NO: 887937 - DNA, 33 bp, Homo sapien
ttaaacagtccaaaagcaaacgcagtattgcga

SEQ ID NO: 887938 - DNA, 33 bp, Homo sapien
ttaaacagtccaaaagtaaacgcagtattgcga

SEQ ID NO: 887939 - DNA, 33 bp, Homo sapien
tggatatgagaacttaaaggtcctccttccaga

SEQ ID NO: 887940 - DNA, 33 bp, Homo sapien
tggatatgagaacttagaggtcctccttccaga

SEQ ID NO: 887941 - DNA, 33 bp, Homo sapien
taaagaagtgaagagaccaagagtagtatgtta

SEQ ID NO: 887942 - DNA, 33 bp, Homo sapien
taaagaagtgaagagagcaagagtagtatgtta

SEQ ID NO: 887943 - DNA, 33 bp, Homo sapien
gaaaactcctgtttgaactttccagtgttcctg

SEQ ID NO: 887944 - DNA, 33 bp, Homo sapien
gaaaactcctgtttgacctttccagtgttcctg

SEQ ID NO: 887945 - DNA, 33 bp, Homo sapien
gatttgtctctggtaaaagaatgtatagttaga

SEQ ID NO: 887946 - DNA, 33 bp, Homo sapien
gatttgtctctggtaacagaatgtatagttaga

SEQ ID NO: 887947 - DNA, 33 bp, Homo sapien
aagaatagaaacagaggacatagcttcaaatct

SEQ ID NO: 887948 - DNA, 33 bp, Homo sapien
aagaatagaaacagagtacatagcttcaaatct

SEQ ID NO: 887949 - DNA, 33 bp, Homo sapien
ctccaattacagcaacagaaggcagtgttgtct

SEQ ID NO: 887950 - DNA, 33 bp, Homo sapien
ctccaattacagcaacggaaggcagtgttgtct

SEQ ID NO: 887951 - DNA, 33 bp, Homo sapien
acccacattccttggcgcatagttcctctattt

SEQ ID NO: 887952 - DNA, 33 bp, Homo sapien
acccacattccttggctcatagttcctctattt

SEQ ID NO: 887953 - DNA, 33 bp, Homo sapien
agtaaaaggcattaggcacctggagagcactgc

SEQ ID NO: 887954 - DNA, 33 bp, Homo sapien
agtaaaaggcattaggtacctggagagcactgc

SEQ ID NO: 887955 - DNA, 33 bp, Homo sapien
ataaacttgtaatcaacgttatcagtgtggaat

SEQ ID NO: 887956 - DNA, 33 bp, Homo sapien
ataaacttgtaatcaatgttatcagtgtggaat

SEQ ID NO: 887957 - DNA, 33 bp, Homo sapien
cctccttatgtccctcacagtagcaagatgtag

SEQ ID NO: 887958 - DNA, 33 bp, Homo sapien
cctccttatgtccctcgcagtagcaagatgtag

SEQ ID NO: 887959 - DNA, 33 bp, Homo sapien
taggaaatactaatcaaggcactccagagtacc

SEQ ID NO: 887960 - DNA, 33 bp, Homo sapien
taggaaatactaatcagggcactccagagtacc

SEQ ID NO: 887961 - DNA, 33 bp, Homo sapien
acctctactatgaagactccctagaccaaatgg

SEQ ID NO: 887962 - DNA, 33 bp, Homo sapien
acctctactatgaagattccctagaccaaatgg

SEQ ID NO: 887963 - DNA, 33 bp, Homo sapien
gcaaggataaataaccaagtgtcaggactcagg

SEQ ID NO: 887964 - DNA, 33 bp, Homo sapien
gcaaggataaataacccagtgtcaggactcagg

SEQ ID NO: 887965 - DNA, 33 bp, Homo sapien
tatctgttaacattaccccacagattccaagac

SEQ ID NO: 887966 - DNA, 33 bp, Homo sapien
tatctgttaacattactccacagattccaagac

SEQ ID NO: 887967 - DNA, 33 bp, Homo sapien
aaaggaatccctcctcagaaaatcagggtaatg

SEQ ID NO: 887968 - DNA, 33 bp, Homo sapien
aaaggaatccctcctcggaaaatcagggtaatg

SEQ ID NO: 887969 - DNA, 33 bp, Homo sapien
cccactatctgggtcaaagttcccctagagaga

SEQ ID NO: 887970 - DNA, 33 bp, Homo sapien
cccactatctgggtcagagttcccctagagaga

SEQ ID NO: 887971 - DNA, 33 bp, Homo sapien
ccaggtgtcagcaaaccctgtaaagggccatat

SEQ ID NO: 887972 - DNA, 33 bp, Homo sapien
ccaggtgtcagcaaactctgtaaagggccatat

SEQ ID NO: 887973 - DNA, 33 bp, Homo sapien
caggctatagaactcactagattctcgtatcct

SEQ ID NO: 887974 - DNA, 33 bp, Homo sapien
caggctatagaactcagtagattctcgtatcct

SEQ ID NO: 887975 - DNA, 33 bp, Homo sapien
gctgggtgagattgaacatatcagataaacaaa

SEQ ID NO: 887976 - DNA, 33 bp, Homo sapien
gctgggtgagattgaatatatcagataaacaaa

SEQ ID NO: 887977 - DNA, 33 bp, Homo sapien
taaatcaaatggtccaatgctgattgtaatgag

SEQ ID NO: 887978 - DNA, 33 bp, Homo sapien
taaatcaaatggtccagtgctgattgtaatgag

SEQ ID NO: 887979 - DNA, 33 bp, Homo sapien
catttgccaaacacttaaagctaaaagagatga

SEQ ID NO: 887980 - DNA, 33 bp, Homo sapien
catttgccaaacacttgaagctaaaagagatga

SEQ ID NO: 887981 - DNA, 33 bp, Homo sapien
tagatgactttgggcgcaatgtccaacctgact

SEQ ID NO: 887982 - DNA, 33 bp, Homo sapien
tagatgactttgggcgtaatgtccaacctgact

SEQ ID NO: 887983 - DNA, 33 bp, Homo sapien
ataaatgctatgatagaagatgtggtctcgggg

SEQ ID NO: 887984 - DNA, 33 bp, Homo sapien
ataaatgctatgataggagatgtggtctcgggg

SEQ ID NO: 887985 - DNA, 33 bp, Homo sapien
gctctctcagttccaaaaagtagcctcactctc

SEQ ID NO: 887986 - DNA, 33 bp, Homo sapien
gctctctcagttccaagaagtagcctcactctc

SEQ ID NO: 887987 - DNA, 33 bp, Homo sapien
cttcagttcttgtttacacaaatgcagtatttg

SEQ ID NO: 887988 - DNA, 33 bp, Homo sapien
cttcagttcttgtttatacaaatgcagtatttg

SEQ ID NO: 887989 - DNA, 33 bp, Homo sapien
cctatttataggtagaaaaagcaatgcacgagg

SEQ ID NO: 887990 - DNA, 33 bp, Homo sapien
cctatttataggtagacaaagcaatgcacgagg

SEQ ID NO: 887991 - DNA, 33 bp, Homo sapien
ggctattctttgggtcagaaacacacttacggt

SEQ ID NO: 887992 - DNA, 33 bp, Homo sapien
ggctattctttgggtcggaaacacacttacggt

SEQ ID NO: 887993 - DNA, 33 bp, Homo sapien
ctaaacatataactcccagcgataattcaccat

SEQ ID NO: 887994 - DNA, 33 bp, Homo sapien
ctaaacatataactcctagcgataattcaccat

SEQ ID NO: 887995 - DNA, 33 bp, Homo sapien
ataaaccttgcaagaacgaatcctgggcccaga

SEQ ID NO: 887996 - DNA, 33 bp, Homo sapien
ataaaccttgcaagaatgaatcctgggcccaga

SEQ ID NO: 887997 - DNA, 33 bp, Homo sapien
ctatcactgctgcagccgctaaagcatatgagt

SEQ ID NO: 887998 - DNA, 33 bp, Homo sapien
ctatcactgctgcagcggctaaagcatatgagt

SEQ ID NO: 887999 - DNA, 33 bp, Homo sapien
tttaaaatctaccatcaatacagctggctactc

SEQ ID NO: 888000 - DNA, 33 bp, Homo sapien
tttaaaatctaccatcgatacagctggctactc

SEQ ID NO: 888001 - DNA, 33 bp, Homo sapien
ttctatggctcagaagaagtggattcattttag

SEQ ID NO: 888002 - DNA, 33 bp, Homo sapien
ttctatggctcagaaggagtggattcattttag

SEQ ID NO: 888003 - DNA, 33 bp, Homo sapien
cttctttcttatttcaaacagcatcagtattac

SEQ ID NO: 888004 - DNA, 33 bp, Homo sapien
cttctttcttatttcagacagcatcagtattac

SEQ ID NO: 888005 - DNA, 33 bp, Homo sapien
gaaaaccctgagagcacgatgggctcgcccctc

SEQ ID NO: 888006 - DNA, 33 bp, Homo sapien
gaaaaccctgagagcatgatgggctcgcccctc

SEQ ID NO: 888007 - DNA, 33 bp, Homo sapien
tttccatgccccttcccattctcttgattctct

SEQ ID NO: 888008 - DNA, 33 bp, Homo sapien
tttccatgccccttcctattctcttgattctct

SEQ ID NO: 888009 - DNA, 33 bp, Homo sapien
ccgagagatgaacaacagttatttagaagacct

SEQ ID NO: 888010 - DNA, 33 bp, Homo sapien
ccgagagatgaacaactgttatttagaagacct

SEQ ID NO: 888011 - DNA, 33 bp, Homo sapien
gagaaaagatgttgtacgtgcttaatgccaact

SEQ ID NO: 888012 - DNA, 33 bp, Homo sapien
gagaaaagatgttgtatgtgcttaatgccaact

SEQ ID NO: 888013 - DNA, 33 bp, Homo sapien
ttccattcattcaacaagttgtagagctcctac

SEQ ID NO: 888014 - DNA, 33 bp, Homo sapien
ttccattcattcaacaggttgtagagctcctac

SEQ ID NO: 888015 - DNA, 33 bp, Homo sapien
gtgcactcttagaagccagtacgttgcctactt

SEQ ID NO: 888016 - DNA, 33 bp, Homo sapien
gtgcactcttagaagctagtacgttgcctactt

SEQ ID NO: 888017 - DNA, 33 bp, Homo sapien
tatgtggcaattcagactcaaatatttcgactt

SEQ ID NO: 888018 - DNA, 33 bp, Homo sapien
tatgtggcaattcagattcaaatatttcgactt

SEQ ID NO: 888019 - DNA, 33 bp, Homo sapien
ttggggcccaggattacgaaattttatgaagca

SEQ ID NO: 888020 - DNA, 33 bp, Homo sapien
ttggggcccaggattatgaaattttatgaagca

SEQ ID NO: 888021 - DNA, 33 bp, Homo sapien
ttagacatagcatagaaacagctcattctccac

SEQ ID NO: 888022 - DNA, 33 bp, Homo sapien
ttagacatagcatagatacagctcattctccac

SEQ ID NO: 888023 - DNA, 33 bp, Homo sapien
agcagagaacgcaactcaagctttcaaggcagg

SEQ ID NO: 888024 - DNA, 33 bp, Homo sapien
agcagagaacgcaacttaagctttcaaggcagg

SEQ ID NO: 888025 - DNA, 33 bp, Homo sapien
atgagatcctattctaccaactcaaacagtaat

SEQ ID NO: 888026 - DNA, 33 bp, Homo sapien
atgagatcctattctagcaactcaaacagtaat

SEQ ID NO: 888027 - DNA, 33 bp, Homo sapien
tctacctgctgtcttcccttgcactggcactga

SEQ ID NO: 888028 - DNA, 33 bp, Homo sapien
tctacctgctgtcttctcttgcactggcactga

SEQ ID NO: 888029 - DNA, 33 bp, Homo sapien
agtagaactaagtcaaaaggaatgatactctga

SEQ ID NO: 888030 - DNA, 33 bp, Homo sapien
agtagaactaagtcaataggaatgatactctga

SEQ ID NO: 888031 - DNA, 33 bp, Homo sapien
caagtcagtctggcaaatattttttcccttaaa

SEQ ID NO: 888032 - DNA, 33 bp, Homo sapien
caagtcagtctggcaactattttttcccttaaa

SEQ ID NO: 888033 - DNA, 33 bp, Homo sapien
acatgtaaaatgagaacgtcagtcaactggctg

SEQ ID NO: 888034 - DNA, 33 bp, Homo sapien
acatgtaaaatgagaatgtcagtcaactggctg

SEQ ID NO: 888035 - DNA, 33 bp, Homo sapien
gggctttgttgtactccgaacaagaggtattat

SEQ ID NO: 888036 - DNA, 33 bp, Homo sapien
gggctttgttgtactctgaacaagaggtattat

SEQ ID NO: 888037 - DNA, 33 bp, Homo sapien
cttgctgtacagtcaagtgtaagaaacttagca

SEQ ID NO: 888038 - DNA, 33 bp, Homo sapien
cttgctgtacagtcaattgtaagaaacttagca

SEQ ID NO: 888039 - DNA, 33 bp, Homo sapien
tgaatccacataacggcccagggagatcagctt

SEQ ID NO: 888040 - DNA, 33 bp, Homo sapien
tgaatccacataacggtccagggagatcagctt

SEQ ID NO: 888041 - DNA, 33 bp, Homo sapien
tgagtaccaaccttgaccacctagtagtgttca

SEQ ID NO: 888042 - DNA, 33 bp, Homo sapien
tgagtaccaaccttgatcacctagtagtgttca

SEQ ID NO: 888043 - DNA, 33 bp, Homo sapien
acccggggcatcttcacgtgtgtgctcatgctc

SEQ ID NO: 888044 - DNA, 33 bp, Homo sapien
acccggggcatcttcatgtgtgtgctcatgctc

SEQ ID NO: 888045 - DNA, 33 bp, Homo sapien
aggctggagggggagccgaatggtagctgtttg

SEQ ID NO: 888046 - DNA, 33 bp, Homo sapien
aggctggagggggagctgaatggtagctgtttg

SEQ ID NO: 888047 - DNA, 33 bp, Homo sapien
ctgccttttcttcacaataaggagaatgagctc

SEQ ID NO: 888048 - DNA, 33 bp, Homo sapien
ctgccttttcttcacagtaaggagaatgagctc

SEQ ID NO: 888049 - DNA, 33 bp, Homo sapien
ctagtcacaaaaacatcactaaacctctaaata

SEQ ID NO: 888050 - DNA, 33 bp, Homo sapien
ctagtcacaaaaacattactaaacctctaaata

SEQ ID NO: 888051 - DNA, 33 bp, Homo sapien
gttcagtaacttgtccactgtcatactaaaacc

SEQ ID NO: 888052 - DNA, 33 bp, Homo sapien
gttcagtaacttgtccgctgtcatactaaaacc

SEQ ID NO: 888053 - DNA, 33 bp, Homo sapien
aattttgcgagtttaaatcatcaaaatcttgga

SEQ ID NO: 888054 - DNA, 33 bp, Homo sapien
aattttgcgagtttaagtcatcaaaatcttgga

SEQ ID NO: 888055 - DNA, 33 bp, Homo sapien
cctgtgatcagcttaaggtttttgttttgtttt

SEQ ID NO: 888056 - DNA, 33 bp, Homo sapien
cctgtgatcagcttaatgtttttgttttgtttt

SEQ ID NO: 888057 - DNA, 33 bp, Homo sapien
acagtaaaccgtagcaaagaacttgacagactg

SEQ ID NO: 888058 - DNA, 33 bp, Homo sapien
acagtaaaccgtagcagagaacttgacagactg

SEQ ID NO: 888059 - DNA, 33 bp, Homo sapien
atgcaacaggtgctaaaggaaatccaaagttcc

SEQ ID NO: 888060 - DNA, 33 bp, Homo sapien
atgcaacaggtgctaagggaaatccaaagttcc

SEQ ID NO: 888061 - DNA, 33 bp, Homo sapien
caggatgggattctcacattcctaccagctcat

SEQ ID NO: 888062 - DNA, 33 bp, Homo sapien
caggatgggattctcagattcctaccagctcat

SEQ ID NO: 888063 - DNA, 33 bp, Homo sapien
tcctttccccctttcccctggcaaatgtggagg

SEQ ID NO: 888064 - DNA, 33 bp, Homo sapien
tcctttccccctttcctctggcaaatgtggagg

SEQ ID NO: 888065 - DNA, 33 bp, Homo sapien
ctgcttcttgctaacaatcatctcagtggcttg

SEQ ID NO: 888066 - DNA, 33 bp, Homo sapien
ctgcttcttgctaacagtcatctcagtggcttg

SEQ ID NO: 888067 - DNA, 33 bp, Homo sapien
agtgcttatgttaaaaccagagtgttgataaaa

SEQ ID NO: 888068 - DNA, 33 bp, Homo sapien
agtgcttatgttaaaagcagagtgttgataaaa

SEQ ID NO: 888069 - DNA, 33 bp, Homo sapien
aaagcatcaaaagcatcaaattataaactactg

SEQ ID NO: 888070 - DNA, 33 bp, Homo sapien
aaagcatcaaaagcatgaaattataaactactg

SEQ ID NO: 888071 - DNA, 33 bp, Homo sapien
tgcagttggatacaacagggaatctggtacctg

SEQ ID NO: 888072 - DNA, 33 bp, Homo sapien
tgcagttggatacaacggggaatctggtacctg

SEQ ID NO: 888073 - DNA, 33 bp, Homo sapien
aggtggtaacattttacggctggacagtctctg

SEQ ID NO: 888074 - DNA, 33 bp, Homo sapien
aggtggtaacattttatggctggacagtctctg

SEQ ID NO: 888075 - DNA, 33 bp, Homo sapien
attatcctgttttcgcaataaacctatgaggca

SEQ ID NO: 888076 - DNA, 33 bp, Homo sapien
attatcctgttttcgccataaacctatgaggca

SEQ ID NO: 888077 - DNA, 33 bp, Homo sapien
accttgtatcttgttactaaacacagtgaaaca

SEQ ID NO: 888078 - DNA, 33 bp, Homo sapien
accttgtatcttgttattaaacacagtgaaaca

SEQ ID NO: 888079 - DNA, 33 bp, Homo sapien
tcttcagagctgagacacattgattatacaaca

SEQ ID NO: 888080 - DNA, 33 bp, Homo sapien
tcttcagagctgagacgcattgattatacaaca

SEQ ID NO: 888081 - DNA, 33 bp, Homo sapien
ggaggtgacacatagaacaggaagataatgggg

SEQ ID NO: 888082 - DNA, 33 bp, Homo sapien
ggaggtgacacatagagcaggaagataatgggg

SEQ ID NO: 888083 - DNA, 33 bp, Homo sapien
aaaaggtgtagaaagacggaattacatataatt

SEQ ID NO: 888084 - DNA, 33 bp, Homo sapien
aaaaggtgtagaaagagggaattacatataatt

SEQ ID NO: 888085 - DNA, 33 bp, Homo sapien
ttacctgagggctaaccattcaggaacaactgt

SEQ ID NO: 888086 - DNA, 33 bp, Homo sapien
ttacctgagggctaactattcaggaacaactgt

SEQ ID NO: 888087 - DNA, 33 bp, Homo sapien
atacactattctgcaacgtgcaatttttttttt

SEQ ID NO: 888088 - DNA, 33 bp, Homo sapien
atacactattctgcaatgtgcaatttttttttt

SEQ ID NO: 888089 - DNA, 33 bp, Homo sapien
tattgatgatcctgtacaggcctaggctagtgt

SEQ ID NO: 888090 - DNA, 33 bp, Homo sapien
tattgatgatcctgtataggcctaggctagtgt

SEQ ID NO: 888091 - DNA, 33 bp, Homo sapien
ttcctgctacctttagcagtagcttcaagtcca

SEQ ID NO: 888092 - DNA, 33 bp, Homo sapien
ttcctgctacctttagtagtagcttcaagtcca

SEQ ID NO: 888093 - DNA, 33 bp, Homo sapien
cacgtctgagtaaactaagaaatctgaaggtag

SEQ ID NO: 888094 - DNA, 33 bp, Homo sapien
cacgtctgagtaaactgagaaatctgaaggtag

SEQ ID NO: 888095 - DNA, 33 bp, Homo sapien
gatattgaatgtagaactacagaaagacagaaa

SEQ ID NO: 888096 - DNA, 33 bp, Homo sapien
gatattgaatgtagaagtacagaaagacagaaa

SEQ ID NO: 888097 - DNA, 33 bp, Homo sapien
cataggaagcaaaaaaatgacgtggaaattaat

SEQ ID NO: 888098 - DNA, 33 bp, Homo sapien
cataggaagcaaaaaactgacgtggaaattaat

SEQ ID NO: 888099 - DNA, 33 bp, Homo sapien
acgtctgttttacccaagtgaggccatctgtat

SEQ ID NO: 888100 - DNA, 33 bp, Homo sapien
acgtctgttttacccaggtgaggccatctgtat

SEQ ID NO: 888101 - DNA, 33 bp, Homo sapien
ggtgcctatgccaccacggacctgggttttaag

SEQ ID NO: 888102 - DNA, 33 bp, Homo sapien
ggtgcctatgccaccagggacctgggttttaag

SEQ ID NO: 888103 - DNA, 33 bp, Homo sapien
atactaaccaattttgaatccatttataaattt

SEQ ID NO: 888104 - DNA, 33 bp, Homo sapien
atactaaccaattttgcatccatttataaattt

SEQ ID NO: 888105 - DNA, 33 bp, Homo sapien
tagtatccccggggcaataacgaatgcatttta

SEQ ID NO: 888106 - DNA, 33 bp, Homo sapien
tagtatccccggggcagtaacgaatgcatttta

SEQ ID NO: 888107 - DNA, 33 bp, Homo sapien
gctcaagactccagaccgcccagtaatgtccaa

SEQ ID NO: 888108 - DNA, 33 bp, Homo sapien
gctcaagactccagactgcccagtaatgtccaa

SEQ ID NO: 888109 - DNA, 33 bp, Homo sapien
catacccatcacttccaagagtttcctgctact

SEQ ID NO: 888110 - DNA, 33 bp, Homo sapien
catacccatcacttccgagagtttcctgctact

SEQ ID NO: 888111 - DNA, 33 bp, Homo sapien
gattttagtgctttagcatatgttcttttcagg

SEQ ID NO: 888112 - DNA, 33 bp, Homo sapien
gattttagtgctttagtatatgttcttttcagg

SEQ ID NO: 888113 - DNA, 33 bp, Homo sapien
acttaactccttccccaactacagtccacctca

SEQ ID NO: 888114 - DNA, 33 bp, Homo sapien
acttaactccttcccctactacagtccacctca

SEQ ID NO: 888115 - DNA, 33 bp, Homo sapien
gaagggtacttgcaagaacacataggattctga

SEQ ID NO: 888116 - DNA, 33 bp, Homo sapien
gaagggtacttgcaaggacacataggattctga

SEQ ID NO: 888117 - DNA, 33 bp, Homo sapien
agtaggggatgtttgacgtgttttcttttctcc

SEQ ID NO: 888118 - DNA, 33 bp, Homo sapien
agtaggggatgtttgatgtgttttcttttctcc

SEQ ID NO: 888119 - DNA, 33 bp, Homo sapien
cccctgtttttcatgcccagacttcatggaaat

SEQ ID NO: 888120 - DNA, 33 bp, Homo sapien
cccctgtttttcatgcgcagacttcatggaaat

SEQ ID NO: 888121 - DNA, 33 bp, Homo sapien
tctacttggaaacagcaagcttctcaaaagaag

SEQ ID NO: 888122 - DNA, 33 bp, Homo sapien
tctacttggaaacagcgagcttctcaaaagaag

SEQ ID NO: 888123 - DNA, 33 bp, Homo sapien
atcattgacctttgtccataggaggctctttta

SEQ ID NO: 888124 - DNA, 33 bp, Homo sapien
atcattgacctttgtctataggaggctctttta

SEQ ID NO: 888125 - DNA, 33 bp, Homo sapien
ctctattatttaggaccctgccacttttcaact

SEQ ID NO: 888126 - DNA, 33 bp, Homo sapien
ctctattatttaggacgctgccacttttcaact

SEQ ID NO: 888127 - DNA, 33 bp, Homo sapien
gatgagacaagatcaactgcttaaaatgaggac

SEQ ID NO: 888128 - DNA, 33 bp, Homo sapien
gatgagacaagatcaattgcttaaaatgaggac

SEQ ID NO: 888129 - DNA, 33 bp, Homo sapien
caagtatgaatgcaatcagaggtaagtttaaag

SEQ ID NO: 888130 - DNA, 33 bp, Homo sapien
caagtatgaatgcaattagaggtaagtttaaag

SEQ ID NO: 888131 - DNA, 33 bp, Homo sapien
agactttgttagctcacgacatctcagagcttt

SEQ ID NO: 888132 - DNA, 33 bp, Homo sapien
agactttgttagctcatgacatctcagagcttt

SEQ ID NO: 888133 - DNA, 33 bp, Homo sapien
tttaccctagtgtggacgtgaatcttctcttag

SEQ ID NO: 888134 - DNA, 33 bp, Homo sapien
tttaccctagtgtggatgtgaatcttctcttag

SEQ ID NO: 888135 - DNA, 33 bp, Homo sapien
ttatgacttctcagtagggaaagggcaatgcaa

SEQ ID NO: 888136 - DNA, 33 bp, Homo sapien
ttatgacttctcagtatggaaagggcaatgcaa

SEQ ID NO: 888137 - DNA, 33 bp, Homo sapien
aatgaaagactttaaacgtatgtgagttccaag

SEQ ID NO: 888138 - DNA, 33 bp, Homo sapien
aatgaaagactttaaatgtatgtgagttccaag

SEQ ID NO: 888139 - DNA, 33 bp, Homo sapien
cttaattcgctaaaaaggccaccttatttaaag

SEQ ID NO: 888140 - DNA, 33 bp, Homo sapien
cttaattcgctaaaaatgccaccttatttaaag

SEQ ID NO: 888141 - DNA, 33 bp, Homo sapien
atttttttccacaaacaagatcatactctgcat

SEQ ID NO: 888142 - DNA, 33 bp, Homo sapien
atttttttccacaaacgagatcatactctgcat

SEQ ID NO: 888143 - DNA, 33 bp, Homo sapien
gtaagttgctgcgaaaagatgtgcaatcatacg

SEQ ID NO: 888144 - DNA, 33 bp, Homo sapien
gtaagttgctgcgaaaggatgtgcaatcatacg

SEQ ID NO: 888145 - DNA, 33 bp, Homo sapien
gcagactcccatgagccatttaaacataaaagt

SEQ ID NO: 888146 - DNA, 33 bp, Homo sapien
gcagactcccatgagctatttaaacataaaagt

SEQ ID NO: 888147 - DNA, 33 bp, Homo sapien
accatatcttgtataagaatcccttgagatttc

SEQ ID NO: 888148 - DNA, 33 bp, Homo sapien
accatatcttgtataataatcccttgagatttc

SEQ ID NO: 888149 - DNA, 33 bp, Homo sapien
tactgaatgtaatttaacacttatggcaggaag

SEQ ID NO: 888150 - DNA, 33 bp, Homo sapien
tactgaatgtaatttagcacttatggcaggaag

SEQ ID NO: 888151 - DNA, 33 bp, Homo sapien
aagaagataccaaaaaagtttagaaatatcaca

SEQ ID NO: 888152 - DNA, 33 bp, Homo sapien
aagaagataccaaaaaggtttagaaatatcaca

SEQ ID NO: 888153 - DNA, 33 bp, Homo sapien
accgttaccactcacaacagtaacagttagggg

SEQ ID NO: 888154 - DNA, 33 bp, Homo sapien
accgttaccactcacagcagtaacagttagggg

SEQ ID NO: 888155 - DNA, 33 bp, Homo sapien
ctacatactcagaccacctacctctcttgctta

SEQ ID NO: 888156 - DNA, 33 bp, Homo sapien
ctacatactcagaccatctacctctcttgctta

SEQ ID NO: 888157 - DNA, 33 bp, Homo sapien
gagagcttgagaatgtaaaagtgttgtgaggta

SEQ ID NO: 888158 - DNA, 33 bp, Homo sapien
gagagcttgagaatgtgaaagtgttgtgaggta

SEQ ID NO: 888159 - DNA, 33 bp, Homo sapien
tttcctctgtgccacacgttaggctaagcattt

SEQ ID NO: 888160 - DNA, 33 bp, Homo sapien
tttcctctgtgccacatgttaggctaagcattt

SEQ ID NO: 888161 - DNA, 33 bp, Homo sapien
tacaaacgattgctaaaatataaagaaagtttc

SEQ ID NO: 888162 - DNA, 33 bp, Homo sapien
tacaaacgattgctaagatataaagaaagtttc

SEQ ID NO: 888163 - DNA, 33 bp, Homo sapien
aacccaagtctgttgaaaatgacaaattattcc

SEQ ID NO: 888164 - DNA, 33 bp, Homo sapien
aacccaagtctgttgacaatgacaaattattcc

SEQ ID NO: 888165 - DNA, 33 bp, Homo sapien
atctaggagagatgaaatgaaaggctgacacct

SEQ ID NO: 888166 - DNA, 33 bp, Homo sapien
atctaggagagatgaagtgaaaggctgacacct

SEQ ID NO: 888167 - DNA, 33 bp, Homo sapien
aaaaacatatttgtgaagcaaaagaaatcccct

SEQ ID NO: 888168 - DNA, 33 bp, Homo sapien
aaaaacatatttgtgaggcaaaagaaatcccct

SEQ ID NO: 888169 - DNA, 33 bp, Homo sapien
catttctagcactaaaagagtttagcacttggg

SEQ ID NO: 888170 - DNA, 33 bp, Homo sapien
catttctagcactaaaggagtttagcacttggg

SEQ ID NO: 888171 - DNA, 33 bp, Homo sapien
actagtaaggcaacggaattttgaatggatttt

SEQ ID NO: 888172 - DNA, 33 bp, Homo sapien
actagtaaggcaacgggattttgaatggatttt

SEQ ID NO: 888173 - DNA, 33 bp, Homo sapien
tacgtagaaagtttcaaatttcaagataatcct

SEQ ID NO: 888174 - DNA, 33 bp, Homo sapien
tacgtagaaagtttcacatttcaagataatcct

SEQ ID NO: 888175 - DNA, 33 bp, Homo sapien
attgtgaaaactggaaccgtattagctaataat

SEQ ID NO: 888176 - DNA, 33 bp, Homo sapien
attgtgaaaactggaatcgtattagctaataat

SEQ ID NO: 888177 - DNA, 33 bp, Homo sapien
gcagcttccatacctaactcaaaagaactcaag

SEQ ID NO: 888178 - DNA, 33 bp, Homo sapien
gcagcttccatacctagctcaaaagaactcaag

SEQ ID NO: 888179 - DNA, 33 bp, Homo sapien
gcaattcctaaatccaaactggcttatgactaa

SEQ ID NO: 888180 - DNA, 33 bp, Homo sapien
gcaattcctaaatccatactggcttatgactaa

SEQ ID NO: 888181 - DNA, 33 bp, Homo sapien
agaatcagagaggaaccacttgtaacttgcatg

SEQ ID NO: 888182 - DNA, 33 bp, Homo sapien
agaatcagagaggaacgacttgtaacttgcatg

SEQ ID NO: 888183 - DNA, 33 bp, Homo sapien
attttaaccaaccagcaactatcaaacatccaa

SEQ ID NO: 888184 - DNA, 33 bp, Homo sapien
attttaaccaaccagcgactatcaaacatccaa

SEQ ID NO: 888185 - DNA, 33 bp, Homo sapien
tttctagcagttcttaccactggcattaataag

SEQ ID NO: 888186 - DNA, 33 bp, Homo sapien
tttctagcagttcttagcactggcattaataag

SEQ ID NO: 888187 - DNA, 33 bp, Homo sapien
gagttattgctcttagaactggactagctgttc

SEQ ID NO: 888188 - DNA, 33 bp, Homo sapien
gagttattgctcttagcactggactagctgttc

SEQ ID NO: 888189 - DNA, 33 bp, Homo sapien
atcaatatagtatgaaagtgcttcaagcagaga

SEQ ID NO: 888190 - DNA, 33 bp, Homo sapien
atcaatatagtatgaacgtgcttcaagcagaga

SEQ ID NO: 888191 - DNA, 33 bp, Homo sapien
atgctgaacacaaaaacatgggttagaggctaa

SEQ ID NO: 888192 - DNA, 33 bp, Homo sapien
atgctgaacacaaaaatatgggttagaggctaa

SEQ ID NO: 888193 - DNA, 33 bp, Homo sapien
atctggccacaaagaaagaagttgtcctttgaa

SEQ ID NO: 888194 - DNA, 33 bp, Homo sapien
atctggccacaaagaacgaagttgtcctttgaa

SEQ ID NO: 888195 - DNA, 33 bp, Homo sapien
attacacagatagacacagtcaacattcaaagg

SEQ ID NO: 888196 - DNA, 33 bp, Homo sapien
attacacagatagacagagtcaacattcaaagg

SEQ ID NO: 888197 - DNA, 33 bp, Homo sapien
gtcttaatttccacaacgttgctgagtgtatct

SEQ ID NO: 888198 - DNA, 33 bp, Homo sapien
gtcttaatttccacaatgttgctgagtgtatct

SEQ ID NO: 888199 - DNA, 33 bp, Homo sapien
tattaaacaatgacgacatactataatatgtgt

SEQ ID NO: 888200 - DNA, 33 bp, Homo sapien
tattaaacaatgacgagatactataatatgtgt

SEQ ID NO: 888201 - DNA, 33 bp, Homo sapien
gatgccagtaagaataaggcctccaggctatgt

SEQ ID NO: 888202 - DNA, 33 bp, Homo sapien
gatgccagtaagaatacggcctccaggctatgt

SEQ ID NO: 888203 - DNA, 33 bp, Homo sapien
ttcaaaggagcttctaaaggtatctttcaacaa

SEQ ID NO: 888204 - DNA, 33 bp, Homo sapien
ttcaaaggagcttctacaggtatctttcaacaa

SEQ ID NO: 888205 - DNA, 33 bp, Homo sapien
actaacaagggatatcaagttcttcagacctgt

SEQ ID NO: 888206 - DNA, 33 bp, Homo sapien
actaacaagggatatcgagttcttcagacctgt

SEQ ID NO: 888207 - DNA, 33 bp, Homo sapien
gtttctatagcggcacagtctttatttttggac

SEQ ID NO: 888208 - DNA, 33 bp, Homo sapien
gtttctatagcggcacggtctttatttttggac

SEQ ID NO: 888209 - DNA, 33 bp, Homo sapien
aagcaatctctaacaaggtaatccaacttggcc

SEQ ID NO: 888210 - DNA, 33 bp, Homo sapien
aagcaatctctaacaatgtaatccaacttggcc

SEQ ID NO: 888211 - DNA, 33 bp, Homo sapien
ctgagcctcagaagatgagaatgaaataatagc

SEQ ID NO: 888212 - DNA, 33 bp, Homo sapien
ctgagcctcagaagattagaatgaaataatagc

SEQ ID NO: 888213 - DNA, 33 bp, Homo sapien
aagagtttaggaataacagtacaagaaattgga

SEQ ID NO: 888214 - DNA, 33 bp, Homo sapien
aagagtttaggaataagagtacaagaaattgga

SEQ ID NO: 888215 - DNA, 33 bp, Homo sapien
aactcttgcagcattcaaggaagaagaccttag

SEQ ID NO: 888216 - DNA, 33 bp, Homo sapien
aactcttgcagcattccaggaagaagaccttag

SEQ ID NO: 888217 - DNA, 33 bp, Homo sapien
tttctcattcaagttaccctgataaaactgcca

SEQ ID NO: 888218 - DNA, 33 bp, Homo sapien
tttctcattcaagttatcctgataaaactgcca

SEQ ID NO: 888219 - DNA, 33 bp, Homo sapien
gtccattccatcagcaaattgtgttccttttac

SEQ ID NO: 888220 - DNA, 33 bp, Homo sapien
gtccattccatcagcagattgtgttccttttac

SEQ ID NO: 888221 - DNA, 33 bp, Homo sapien
cccctatttcacttaacaatcagtgctctgact

SEQ ID NO: 888222 - DNA, 33 bp, Homo sapien
cccctatttcacttaagaatcagtgctctgact

SEQ ID NO: 888223 - DNA, 33 bp, Homo sapien
atcaatcgtgagcttcaaaactttgattataag

SEQ ID NO: 888224 - DNA, 33 bp, Homo sapien
atcaatcgtgagcttccaaactttgattataag

SEQ ID NO: 888225 - DNA, 33 bp, Homo sapien
agttcttaggtaccaaacactgttctaaatgct

SEQ ID NO: 888226 - DNA, 33 bp, Homo sapien
agttcttaggtaccaagcactgttctaaatgct

SEQ ID NO: 888227 - DNA, 33 bp, Homo sapien
tgttgcaaaaactaccagattggacataaaaca

SEQ ID NO: 888228 - DNA, 33 bp, Homo sapien
tgttgcaaaaactaccggattggacataaaaca

SEQ ID NO: 888229 - DNA, 33 bp, Homo sapien
gtggtgtagccatacaatagaatcatattcagc

SEQ ID NO: 888230 - DNA, 33 bp, Homo sapien
gtggtgtagccatacagtagaatcatattcagc

SEQ ID NO: 888231 - DNA, 33 bp, Homo sapien
gaggtactgatagatacccttaaatagtcactg

SEQ ID NO: 888232 - DNA, 33 bp, Homo sapien
gaggtactgatagatatccttaaatagtcactg

SEQ ID NO: 888233 - DNA, 33 bp, Homo sapien
ttggcacagaatggggcccaacatgaaattgct

SEQ ID NO: 888234 - DNA, 33 bp, Homo sapien
ttggcacagaatgggggccaacatgaaattgct

SEQ ID NO: 888235 - DNA, 33 bp, Homo sapien
acacagtggtttctgaagatccaaccacatatt

SEQ ID NO: 888236 - DNA, 33 bp, Homo sapien
acacagtggtttctgaggatccaaccacatatt

SEQ ID NO: 888237 - DNA, 33 bp, Homo sapien
ctataatagatgttggaagtaaaatgcccacct

SEQ ID NO: 888238 - DNA, 33 bp, Homo sapien
ctataatagatgttggcagtaaaatgcccacct

SEQ ID NO: 888239 - DNA, 33 bp, Homo sapien
gccttctctgtaaatcaacaaatttatcagatg

SEQ ID NO: 888240 - DNA, 33 bp, Homo sapien
gccttctctgtaaatcgacaaatttatcagatg

SEQ ID NO: 888241 - DNA, 33 bp, Homo sapien
actccttcaacccaggcaactctgaacttatca

SEQ ID NO: 888242 - DNA, 33 bp, Homo sapien
actccttcaacccagggaactctgaacttatca

SEQ ID NO: 888243 - DNA, 33 bp, Homo sapien
tttgattggatcattcccttgttttaaagctgg

SEQ ID NO: 888244 - DNA, 33 bp, Homo sapien
tttgattggatcattctcttgttttaaagctgg

SEQ ID NO: 888245 - DNA, 33 bp, Homo sapien
ccaaatttagctcaaaataagttagaaagctgg

SEQ ID NO: 888246 - DNA, 33 bp, Homo sapien
ccaaatttagctcaaagtaagttagaaagctgg

SEQ ID NO: 888247 - DNA, 33 bp, Homo sapien
ccaggtcactaaggacaccaacttatcagaaga

SEQ ID NO: 888248 - DNA, 33 bp, Homo sapien
ccaggtcactaaggacgccaacttatcagaaga

SEQ ID NO: 888249 - DNA, 33 bp, Homo sapien
agggtttctgaagctaaattgaaaagcgcagat

SEQ ID NO: 888250 - DNA, 33 bp, Homo sapien
agggtttctgaagctatattgaaaagcgcagat

SEQ ID NO: 888251 - DNA, 33 bp, Homo sapien
aaggtatagcaaatcccctctcccagtttgtgg

SEQ ID NO: 888252 - DNA, 33 bp, Homo sapien
aaggtatagcaaatccgctctcccagtttgtgg

SEQ ID NO: 888253 - DNA, 33 bp, Homo sapien
aagcaagtcaccgaacaatctatgcagtaaaat

SEQ ID NO: 888254 - DNA, 33 bp, Homo sapien
aagcaagtcaccgaacgatctatgcagtaaaat

SEQ ID NO: 888255 - DNA, 33 bp, Homo sapien
gaacctcaggtccccacgcgtacaaactacatc

SEQ ID NO: 888256 - DNA, 33 bp, Homo sapien
gaacctcaggtccccatgcgtacaaactacatc

SEQ ID NO: 888257 - DNA, 33 bp, Homo sapien
aatcacactgagcttacgcaagaaagtatggga

SEQ ID NO: 888258 - DNA, 33 bp, Homo sapien
aatcacactgagcttatgcaagaaagtatggga

SEQ ID NO: 888259 - DNA, 33 bp, Homo sapien
tggtcctagagggaaacatacaagggcttctga

SEQ ID NO: 888260 - DNA, 33 bp, Homo sapien
tggtcctagagggaaatatacaagggcttctga

SEQ ID NO: 888261 - DNA, 33 bp, Homo sapien
aagagctctggcatcaagaggaatacgaaaagg

SEQ ID NO: 888262 - DNA, 33 bp, Homo sapien
aagagctctggcatcatgaggaatacgaaaagg

SEQ ID NO: 888263 - DNA, 33 bp, Homo sapien
ccataaaatatggcccaatcgaagccagattac

SEQ ID NO: 888264 - DNA, 33 bp, Homo sapien
ccataaaatatggcccgatcgaagccagattac

SEQ ID NO: 888265 - DNA, 33 bp, Homo sapien
atcaagcaggcaactgaatatacaaatatgaat

SEQ ID NO: 888266 - DNA, 33 bp, Homo sapien
atcaagcaggcaactggatatacaaatatgaat

SEQ ID NO: 888267 - DNA, 33 bp, Homo sapien
catgttcaaacattaccgggaaaaatcaataat

SEQ ID NO: 888268 - DNA, 33 bp, Homo sapien
catgttcaaacattactgggaaaaatcaataat

SEQ ID NO: 888269 - DNA, 33 bp, Homo sapien
tatccaaatagagacagcttttaaacgacagtg

SEQ ID NO: 888270 - DNA, 33 bp, Homo sapien
tatccaaatagagacatcttttaaacgacagtg

SEQ ID NO: 888271 - DNA, 33 bp, Homo sapien
ctatagcaaagagaaacgactgagcttctagat

SEQ ID NO: 888272 - DNA, 33 bp, Homo sapien
ctatagcaaagagaaatgactgagcttctagat

SEQ ID NO: 888273 - DNA, 33 bp, Homo sapien
cttggtatgtgccttaataacattcacttggaa

SEQ ID NO: 888274 - DNA, 33 bp, Homo sapien
cttggtatgtgccttagtaacattcacttggaa

SEQ ID NO: 888275 - DNA, 33 bp, Homo sapien
aaaaaatgaggagacaagatttcaagagaaagt

SEQ ID NO: 888276 - DNA, 33 bp, Homo sapien
aaaaaatgaggagacacgatttcaagagaaagt

SEQ ID NO: 888277 - DNA, 33 bp, Homo sapien
cttctatataaggaacagtcttgaatattgact

SEQ ID NO: 888278 - DNA, 33 bp, Homo sapien
cttctatataaggaactgtcttgaatattgact

SEQ ID NO: 888279 - DNA, 33 bp, Homo sapien
gagtcacaatactcagaccattttaatgtttta

SEQ ID NO: 888280 - DNA, 33 bp, Homo sapien
gagtcacaatactcagcccattttaatgtttta

SEQ ID NO: 888281 - DNA, 33 bp, Homo sapien
ggcagattgattgaacggtgtataatgtctgta

SEQ ID NO: 888282 - DNA, 33 bp, Homo sapien
ggcagattgattgaactgtgtataatgtctgta

SEQ ID NO: 888283 - DNA, 33 bp, Homo sapien
atgtacagctatgtaaagatgtacaaattactt

SEQ ID NO: 888284 - DNA, 33 bp, Homo sapien
atgtacagctatgtaatgatgtacaaattactt

SEQ ID NO: 888285 - DNA, 33 bp, Homo sapien
ccatttattagtttaactgaagatacaagagat

SEQ ID NO: 888286 - DNA, 33 bp, Homo sapien
ccatttattagtttaattgaagatacaagagat

SEQ ID NO: 888287 - DNA, 33 bp, Homo sapien
tgcactcaaggtgtcacgttgaccatataccca

SEQ ID NO: 888288 - DNA, 33 bp, Homo sapien
tgcactcaaggtgtcatgttgaccatataccca

SEQ ID NO: 888289 - DNA, 33 bp, Homo sapien
agataaaacagtaacaataagagagctggaata

SEQ ID NO: 888290 - DNA, 33 bp, Homo sapien
agataaaacagtaacagtaagagagctggaata

SEQ ID NO: 888291 - DNA, 33 bp, Homo sapien
ttgttatgttcctgcaacagaaatcaggagaac

SEQ ID NO: 888292 - DNA, 33 bp, Homo sapien
ttgttatgttcctgcagcagaaatcaggagaac

SEQ ID NO: 888293 - DNA, 33 bp, Homo sapien
tagaacctgtcttcagcctaaaacatacatctt

SEQ ID NO: 888294 - DNA, 33 bp, Homo sapien
tagaacctgtcttcagtctaaaacatacatctt

SEQ ID NO: 888295 - DNA, 33 bp, Homo sapien
cctctaagtatagcataaaggaactgtagatca

SEQ ID NO: 888296 - DNA, 33 bp, Homo sapien
cctctaagtatagcatgaaggaactgtagatca

SEQ ID NO: 888297 - DNA, 33 bp, Homo sapien
ttaacggttgtaaaaaatggtaagtattcatta

SEQ ID NO: 888298 - DNA, 33 bp, Homo sapien
ttaacggttgtaaaaagtggtaagtattcatta

SEQ ID NO: 888299 - DNA, 33 bp, Homo sapien
gaaaatcttatgtggtcaaggctactatgttaa

SEQ ID NO: 888300 - DNA, 33 bp, Homo sapien
gaaaatcttatgtggtgaaggctactatgttaa

SEQ ID NO: 888301 - DNA, 33 bp, Homo sapien
ttttgtctcttattgacgcatgaacttttctca

SEQ ID NO: 888302 - DNA, 33 bp, Homo sapien
ttttgtctcttattgatgcatgaacttttctca

SEQ ID NO: 888303 - DNA, 33 bp, Homo sapien
actgttgctatcttccaaatagatgaaaataat

SEQ ID NO: 888304 - DNA, 33 bp, Homo sapien
actgttgctatcttcccaatagatgaaaataat

SEQ ID NO: 888305 - DNA, 33 bp, Homo sapien
tgcaaacctatccccaatgctaaaatactaagc

SEQ ID NO: 888306 - DNA, 33 bp, Homo sapien
tgcaaacctatccccactgctaaaatactaagc

SEQ ID NO: 888307 - DNA, 33 bp, Homo sapien
cccacagtgtaaggtcacatctagctctgaagt

SEQ ID NO: 888308 - DNA, 33 bp, Homo sapien
cccacagtgtaaggtcgcatctagctctgaagt

SEQ ID NO: 888309 - DNA, 33 bp, Homo sapien
ggatgttatttcaaaccactgtctggaagcaag

SEQ ID NO: 888310 - DNA, 33 bp, Homo sapien
ggatgttatttcaaactactgtctggaagcaag

SEQ ID NO: 888311 - DNA, 33 bp, Homo sapien
gtgttagtagtggttacgggccaagtgcagtag

SEQ ID NO: 888312 - DNA, 33 bp, Homo sapien
gtgttagtagtggttatgggccaagtgcagtag

SEQ ID NO: 888313 - DNA, 33 bp, Homo sapien
attttaagagatgtcactcattttcattaaaac

SEQ ID NO: 888314 - DNA, 33 bp, Homo sapien
attttaagagatgtcagtcattttcattaaaac

SEQ ID NO: 888315 - DNA, 33 bp, Homo sapien
gactatgaaaaataaaaatagctatcgtccatg

SEQ ID NO: 888316 - DNA, 33 bp, Homo sapien
gactatgaaaaataaagatagctatcgtccatg

SEQ ID NO: 888317 - DNA, 33 bp, Homo sapien
gaagacggtggagaaccagtgcgcgtactctgg

SEQ ID NO: 888318 - DNA, 33 bp, Homo sapien
gaagacggtggagaacgagtgcgcgtactctgg

SEQ ID NO: 888319 - DNA, 33 bp, Homo sapien
gctctagagttctcaaacatttagccacagtca

SEQ ID NO: 888320 - DNA, 33 bp, Homo sapien
gctctagagttctcaagcatttagccacagtca

SEQ ID NO: 888321 - DNA, 33 bp, Homo sapien
acaactgccagtattacaagacccttgtctact

SEQ ID NO: 888322 - DNA, 33 bp, Homo sapien
acaactgccagtattataagacccttgtctact

SEQ ID NO: 888323 - DNA, 33 bp, Homo sapien
ttgttatgtaagtaaaagtttgggaagcacttc

SEQ ID NO: 888324 - DNA, 33 bp, Homo sapien
ttgttatgtaagtaaacgtttgggaagcacttc

SEQ ID NO: 888325 - DNA, 33 bp, Homo sapien
agattcctttatagacaaaacagatatcttcta

SEQ ID NO: 888326 - DNA, 33 bp, Homo sapien
agattcctttatagacgaaacagatatcttcta

SEQ ID NO: 888327 - DNA, 33 bp, Homo sapien
acgtctactagtcccacagaaattaaaagttaa

SEQ ID NO: 888328 - DNA, 33 bp, Homo sapien
acgtctactagtcccatagaaattaaaagttaa

SEQ ID NO: 888329 - DNA, 33 bp, Homo sapien
ttagaccttattcaaacggtggaacaactgcaa

SEQ ID NO: 888330 - DNA, 33 bp, Homo sapien
ttagaccttattcaaatggtggaacaactgcaa

SEQ ID NO: 888331 - DNA, 33 bp, Homo sapien
gcaatggagtttcagcaaagtgggaaggaagta

SEQ ID NO: 888332 - DNA, 33 bp, Homo sapien
gcaatggagtttcagcgaagtgggaaggaagta

SEQ ID NO: 888333 - DNA, 33 bp, Homo sapien
ctctgatccggtgctcacttcaacgcccctcga

SEQ ID NO: 888334 - DNA, 33 bp, Homo sapien
ctctgatccggtgctcgcttcaacgcccctcga

SEQ ID NO: 888335 - DNA, 33 bp, Homo sapien
cataactacatagaccaaaaacgagagcacaga

SEQ ID NO: 888336 - DNA, 33 bp, Homo sapien
cataactacatagaccgaaaacgagagcacaga

SEQ ID NO: 888337 - DNA, 33 bp, Homo sapien
ttgtctcagttaaagtcaatgtcacataatttg

SEQ ID NO: 888338 - DNA, 33 bp, Homo sapien
ttgtctcagttaaagttaatgtcacataatttg

SEQ ID NO: 888339 - DNA, 33 bp, Homo sapien
gttttcagggtttagggatataaacttgaggac

SEQ ID NO: 888340 - DNA, 33 bp, Homo sapien
gttttcagggtttaggtatataaacttgaggac

SEQ ID NO: 888341 - DNA, 33 bp, Homo sapien
tttcaggtgtattttgaactcttggtacatcat

SEQ ID NO: 888342 - DNA, 33 bp, Homo sapien
tttcaggtgtattttggactcttggtacatcat

SEQ ID NO: 888343 - DNA, 33 bp, Homo sapien
tataaatttgtaagtgcacggtgagagcaagag

SEQ ID NO: 888344 - DNA, 33 bp, Homo sapien
tataaatttgtaagtgtacggtgagagcaagag

SEQ ID NO: 888345 - DNA, 33 bp, Homo sapien
gtgtaaagtaatgacaatgagagaaaacttgaa

SEQ ID NO: 888346 - DNA, 33 bp, Homo sapien
gtgtaaagtaatgacactgagagaaaacttgaa

SEQ ID NO: 888347 - DNA, 33 bp, Homo sapien
tctctctagtggttacagaggatgaatgcatat

SEQ ID NO: 888348 - DNA, 33 bp, Homo sapien
tctctctagtggttaccgaggatgaatgcatat

SEQ ID NO: 888349 - DNA, 33 bp, Homo sapien
aaatgagagtactgcacattatgattttatagc

SEQ ID NO: 888350 - DNA, 33 bp, Homo sapien
aaatgagagtactgcatattatgattttatagc

SEQ ID NO: 888351 - DNA, 33 bp, Homo sapien
aaagactgtaggaaaacaatggagcaaagctga

SEQ ID NO: 888352 - DNA, 33 bp, Homo sapien
aaagactgtaggaaaataatggagcaaagctga

SEQ ID NO: 888353 - DNA, 33 bp, Homo sapien
tatttctgttaccccacctatcttctcttattc

SEQ ID NO: 888354 - DNA, 33 bp, Homo sapien
tatttctgttaccccatctatcttctcttattc

SEQ ID NO: 888355 - DNA, 33 bp, Homo sapien
tgtttttctttgtaggccacctttgttctctca

SEQ ID NO: 888356 - DNA, 33 bp, Homo sapien
tgtttttctttgtaggtcacctttgttctctca

SEQ ID NO: 888357 - DNA, 33 bp, Homo sapien
gagtgcccaattctcccgaatcatcgttgagat

SEQ ID NO: 888358 - DNA, 33 bp, Homo sapien
gagtgcccaattctcctgaatcatcgttgagat

SEQ ID NO: 888359 - DNA, 33 bp, Homo sapien
ctcctgagcttttacaaaacccagtgcccattg

SEQ ID NO: 888360 - DNA, 33 bp, Homo sapien
ctcctgagcttttacagaacccagtgcccattg

SEQ ID NO: 888361 - DNA, 33 bp, Homo sapien
gggcttactaaggtcccatgttgggtttagtgc

SEQ ID NO: 888362 - DNA, 33 bp, Homo sapien
gggcttactaaggtcctatgttgggtttagtgc

SEQ ID NO: 888363 - DNA, 33 bp, Homo sapien
aatttttactgccctgaaattcctcaggaacat

SEQ ID NO: 888364 - DNA, 33 bp, Homo sapien
aatttttactgccctggaattcctcaggaacat

SEQ ID NO: 888365 - DNA, 33 bp, Homo sapien
tggccacatatggacaaagactgaaagtgaact

SEQ ID NO: 888366 - DNA, 33 bp, Homo sapien
tggccacatatggacagagactgaaagtgaact

SEQ ID NO: 888367 - DNA, 33 bp, Homo sapien
aatgttaatatcagtgaaaatgacttacagaag

SEQ ID NO: 888368 - DNA, 33 bp, Homo sapien
aatgttaatatcagtggaaatgacttacagaag

SEQ ID NO: 888369 - DNA, 33 bp, Homo sapien
tttaccaaactggcaaaagtctgacttaaaagt

SEQ ID NO: 888370 - DNA, 33 bp, Homo sapien
tttaccaaactggcaagagtctgacttaaaagt

SEQ ID NO: 888371 - DNA, 33 bp, Homo sapien
ctattctcttgatgccaaaaaaccccacaaatt

SEQ ID NO: 888372 - DNA, 33 bp, Homo sapien
ctattctcttgatgccgaaaaaccccacaaatt

SEQ ID NO: 888373 - DNA, 33 bp, Homo sapien
atactttctagagtgacaatgcttgtgttttag

SEQ ID NO: 888374 - DNA, 33 bp, Homo sapien
atactttctagagtgagaatgcttgtgttttag

SEQ ID NO: 888375 - DNA, 33 bp, Homo sapien
gtcagagtgctcctggaaaattccttgtgatta

SEQ ID NO: 888376 - DNA, 33 bp, Homo sapien
gtcagagtgctcctggcaaattccttgtgatta

SEQ ID NO: 888377 - DNA, 33 bp, Homo sapien
cctgccatttcacctcaaaaaacgactcccaga

SEQ ID NO: 888378 - DNA, 33 bp, Homo sapien
cctgccatttcacctcgaaaaacgactcccaga

SEQ ID NO: 888379 - DNA, 33 bp, Homo sapien
acagatccttgtgtgaaattaggttactattgg

SEQ ID NO: 888380 - DNA, 33 bp, Homo sapien
acagatccttgtgtgatattaggttactattgg

SEQ ID NO: 888381 - DNA, 33 bp, Homo sapien
tttgtaaactgtagagaactttaccaatattta

SEQ ID NO: 888382 - DNA, 33 bp, Homo sapien
tttgtaaactgtagagcactttaccaatattta

SEQ ID NO: 888383 - DNA, 33 bp, Homo sapien
atttgatgaactttctcacgatttaatccagaa

SEQ ID NO: 888384 - DNA, 33 bp, Homo sapien
atttgatgaactttcttacgatttaatccagaa

SEQ ID NO: 888385 - DNA, 33 bp, Homo sapien
gaacaaagcagaagaaaacctcatccctcaatt

SEQ ID NO: 888386 - DNA, 33 bp, Homo sapien
gaacaaagcagaagaagacctcatccctcaatt

SEQ ID NO: 888387 - DNA, 33 bp, Homo sapien
tattaggagtgggataactgctgaagatgaagc

SEQ ID NO: 888388 - DNA, 33 bp, Homo sapien
tattaggagtgggatagctgctgaagatgaagc

SEQ ID NO: 888389 - DNA, 33 bp, Homo sapien
aaacagaaaacagcttaaaaaatatgtgtacta

SEQ ID NO: 888390 - DNA, 33 bp, Homo sapien
aaacagaaaacagctttaaaaatatgtgtacta

SEQ ID NO: 888391 - DNA, 33 bp, Homo sapien
cttttgcaagggtcagcaacctatggcccacag

SEQ ID NO: 888392 - DNA, 33 bp, Homo sapien
cttttgcaagggtcagtaacctatggcccacag

SEQ ID NO: 888393 - DNA, 33 bp, Homo sapien
agttttctcatccactaaaggtgattgctgagc

SEQ ID NO: 888394 - DNA, 33 bp, Homo sapien
agttttctcatccactgaaggtgattgctgagc

SEQ ID NO: 888395 - DNA, 33 bp, Homo sapien
gttccttttaagataacagacagaaggcacata

SEQ ID NO: 888396 - DNA, 33 bp, Homo sapien
gttccttttaagataagagacagaaggcacata

SEQ ID NO: 888397 - DNA, 33 bp, Homo sapien
tagtttcctaagcatacgaaatgatgtatcaag

SEQ ID NO: 888398 - DNA, 33 bp, Homo sapien
tagtttcctaagcatatgaaatgatgtatcaag

SEQ ID NO: 888399 - DNA, 33 bp, Homo sapien
tagatcacagagatgacgaattccaataaatac

SEQ ID NO: 888400 - DNA, 33 bp, Homo sapien
tagatcacagagatgatgaattccaataaatac

SEQ ID NO: 888401 - DNA, 33 bp, Homo sapien
aaaggatttcattagcaagcaacgtggacaaat

SEQ ID NO: 888402 - DNA, 33 bp, Homo sapien
aaaggatttcattagccagcaacgtggacaaat

SEQ ID NO: 888403 - DNA, 33 bp, Homo sapien
tattgtcaaaagtaaacgatgctgaataaagta

SEQ ID NO: 888404 - DNA, 33 bp, Homo sapien
tattgtcaaaagtaaatgatgctgaataaagta

SEQ ID NO: 888405 - DNA, 33 bp, Homo sapien
acctcagcagcagttccacctctgagcaggaag

SEQ ID NO: 888406 - DNA, 33 bp, Homo sapien
acctcagcagcagttcgacctctgagcaggaag

SEQ ID NO: 888407 - DNA, 33 bp, Homo sapien
ttatatacaaatagccacaaaagtctggggcac

SEQ ID NO: 888408 - DNA, 33 bp, Homo sapien
ttatatacaaatagccgcaaaagtctggggcac

SEQ ID NO: 888409 - DNA, 33 bp, Homo sapien
acaaagtttagaaggacgaagtaatttacccaa

SEQ ID NO: 888410 - DNA, 33 bp, Homo sapien
acaaagtttagaaggatgaagtaatttacccaa

SEQ ID NO: 888411 - DNA, 33 bp, Homo sapien
aagggggttgagtatcacataagatcatagttg

SEQ ID NO: 888412 - DNA, 33 bp, Homo sapien
aagggggttgagtatcccataagatcatagttg

SEQ ID NO: 888413 - DNA, 33 bp, Homo sapien
atttgggggcttgttaaaataagtgtggattcc

SEQ ID NO: 888414 - DNA, 33 bp, Homo sapien
atttgggggcttgttataataagtgtggattcc

SEQ ID NO: 888415 - DNA, 33 bp, Homo sapien
ttcatatgaaagtccaaaatagagaaatctgta

SEQ ID NO: 888416 - DNA, 33 bp, Homo sapien
ttcatatgaaagtccagaatagagaaatctgta

SEQ ID NO: 888417 - DNA, 33 bp, Homo sapien
aattctctgatattaaaaaaggtcctcaggctg

SEQ ID NO: 888418 - DNA, 33 bp, Homo sapien
aattctctgatattaagaaaggtcctcaggctg

SEQ ID NO: 888419 - DNA, 33 bp, Homo sapien
ttacctaagcaagtcacatttgtcatggcagcg

SEQ ID NO: 888420 - DNA, 33 bp, Homo sapien
ttacctaagcaagtcatatttgtcatggcagcg

SEQ ID NO: 888421 - DNA, 33 bp, Homo sapien
gccactgacagctcccaagcttctccttttata

SEQ ID NO: 888422 - DNA, 33 bp, Homo sapien
gccactgacagctcccgagcttctccttttata

SEQ ID NO: 888423 - DNA, 33 bp, Homo sapien
tatgtataaaaaattacagttgtgggagacaag

SEQ ID NO: 888424 - DNA, 33 bp, Homo sapien
tatgtataaaaaattagagttgtgggagacaag

SEQ ID NO: 888425 - DNA, 33 bp, Homo sapien
gtcacagttgggagacactttcaactgagattt

SEQ ID NO: 888426 - DNA, 33 bp, Homo sapien
gtcacagttgggagacgctttcaactgagattt

SEQ ID NO: 888427 - DNA, 33 bp, Homo sapien
accagtttagccagcacgataaggaagtcttct

SEQ ID NO: 888428 - DNA, 33 bp, Homo sapien
accagtttagccagcatgataaggaagtcttct

SEQ ID NO: 888429 - DNA, 33 bp, Homo sapien
gttgttctatttttcacgtgagaggatggactc

SEQ ID NO: 888430 - DNA, 33 bp, Homo sapien
gttgttctatttttcatgtgagaggatggactc

SEQ ID NO: 888431 - DNA, 33 bp, Homo sapien
tgctgatctttgggtactaagaagaaatattca

SEQ ID NO: 888432 - DNA, 33 bp, Homo sapien
tgctgatctttgggtagtaagaagaaatattca

SEQ ID NO: 888433 - DNA, 33 bp, Homo sapien
tacctatcctttgcccaatgaactttaattcat

SEQ ID NO: 888434 - DNA, 33 bp, Homo sapien
tacctatcctttgcccgatgaactttaattcat

SEQ ID NO: 888435 - DNA, 33 bp, Homo sapien
tagtgatcggcatagaacctgataaaacttttg

SEQ ID NO: 888436 - DNA, 33 bp, Homo sapien
tagtgatcggcatagaccctgataaaacttttg

SEQ ID NO: 888437 - DNA, 33 bp, Homo sapien
ttcagttcataggtcaactgatcaagaagagcc

SEQ ID NO: 888438 - DNA, 33 bp, Homo sapien
ttcagttcataggtcacctgatcaagaagagcc

SEQ ID NO: 888439 - DNA, 33 bp, Homo sapien
aaataaattgtctaacaccatttgtcaaataag

SEQ ID NO: 888440 - DNA, 33 bp, Homo sapien
aaataaattgtctaacgccatttgtcaaataag

SEQ ID NO: 888441 - DNA, 33 bp, Homo sapien
tatgatgcatgtcaaccaagaaattggaagttg

SEQ ID NO: 888442 - DNA, 33 bp, Homo sapien
tatgatgcatgtcaactaagaaattggaagttg

SEQ ID NO: 888443 - DNA, 33 bp, Homo sapien
tctctaagggtggtaagacggcccagtggttaa

SEQ ID NO: 888444 - DNA, 33 bp, Homo sapien
tctctaagggtggtaatacggcccagtggttaa

SEQ ID NO: 888445 - DNA, 33 bp, Homo sapien
tggagagactaagtgaaatgctccaaatcccac

SEQ ID NO: 888446 - DNA, 33 bp, Homo sapien
tggagagactaagtgacatgctccaaatcccac

SEQ ID NO: 888447 - DNA, 33 bp, Homo sapien
cggtcaaaaccagtgacaaagagaaaactttga

SEQ ID NO: 888448 - DNA, 33 bp, Homo sapien
cggtcaaaaccagtgataaagagaaaactttga

SEQ ID NO: 888449 - DNA, 33 bp, Homo sapien
tggatgtctcagaagaacacagaaaaatgtggg

SEQ ID NO: 888450 - DNA, 33 bp, Homo sapien
tggatgtctcagaagagcacagaaaaatgtggg

SEQ ID NO: 888451 - DNA, 33 bp, Homo sapien
tagacccaaagagcaacgttttataaatgctgc

SEQ ID NO: 888452 - DNA, 33 bp, Homo sapien
tagacccaaagagcaatgttttataaatgctgc

SEQ ID NO: 888453 - DNA, 33 bp, Homo sapien
tccctgcgcttacatacaactcaagattcagga

SEQ ID NO: 888454 - DNA, 33 bp, Homo sapien
tccctgcgcttacatataactcaagattcagga

SEQ ID NO: 888455 - DNA, 33 bp, Homo sapien
gggtggataacttttaccttcttgtgctctgtc

SEQ ID NO: 888456 - DNA, 33 bp, Homo sapien
gggtggataacttttatcttcttgtgctctgtc

SEQ ID NO: 888457 - DNA, 33 bp, Homo sapien
aagtgatcatggctacccttgtctccctaattc

SEQ ID NO: 888458 - DNA, 33 bp, Homo sapien
aagtgatcatggctacgcttgtctccctaattc

SEQ ID NO: 888459 - DNA, 33 bp, Homo sapien
ttcaagagtttcacaccacttagcaaaatcaca

SEQ ID NO: 888460 - DNA, 33 bp, Homo sapien
ttcaagagtttcacacgacttagcaaaatcaca

SEQ ID NO: 888461 - DNA, 33 bp, Homo sapien
catcactttgctcatacagaacctagactgttt

SEQ ID NO: 888462 - DNA, 33 bp, Homo sapien
catcactttgctcatatagaacctagactgttt

SEQ ID NO: 888463 - DNA, 33 bp, Homo sapien
tcttgtatgttgaacagtaggtattacgaggtt

SEQ ID NO: 888464 - DNA, 33 bp, Homo sapien
tcttgtatgttgaacattaggtattacgaggtt

SEQ ID NO: 888465 - DNA, 33 bp, Homo sapien
ctgcacttatttctgaaaaaacatggtagctat

SEQ ID NO: 888466 - DNA, 33 bp, Homo sapien
ctgcacttatttctgataaaacatggtagctat

SEQ ID NO: 888467 - DNA, 33 bp, Homo sapien
tcgtatccttttctgaaatgttcaagcactgtc

SEQ ID NO: 888468 - DNA, 33 bp, Homo sapien
tcgtatccttttctgagatgttcaagcactgtc

SEQ ID NO: 888469 - DNA, 33 bp, Homo sapien
tcaacatttttgaataggatgaaaactttttaa

SEQ ID NO: 888470 - DNA, 33 bp, Homo sapien
tcaacatttttgaatatgatgaaaactttttaa

SEQ ID NO: 888471 - DNA, 33 bp, Homo sapien
ctgtatgagttgttatcaagacgtaatataata

SEQ ID NO: 888472 - DNA, 33 bp, Homo sapien
ctgtatgagttgttatgaagacgtaatataata

SEQ ID NO: 888473 - DNA, 33 bp, Homo sapien
aggcaagagtgagccaggtgaatcaactatgga

SEQ ID NO: 888474 - DNA, 33 bp, Homo sapien
aggcaagagtgagccatgtgaatcaactatgga

SEQ ID NO: 888475 - DNA, 33 bp, Homo sapien
acacatggaatgagggacaaagcaggactgcag

SEQ ID NO: 888476 - DNA, 33 bp, Homo sapien
acacatggaatgaggggcaaagcaggactgcag

SEQ ID NO: 888477 - DNA, 33 bp, Homo sapien
atcagagggaactgagaagtataacagggccta

SEQ ID NO: 888478 - DNA, 33 bp, Homo sapien
atcagagggaactgagtagtataacagggccta

SEQ ID NO: 888479 - DNA, 33 bp, Homo sapien
tattgtttttacagaccgaaggcttttggcaaa

SEQ ID NO: 888480 - DNA, 33 bp, Homo sapien
tattgtttttacagactgaaggcttttggcaaa

SEQ ID NO: 888481 - DNA, 33 bp, Homo sapien
gggtgaatgtttgcaaagtatgtttctgggccc

SEQ ID NO: 888482 - DNA, 33 bp, Homo sapien
gggtgaatgtttgcaacgtatgtttctgggccc

SEQ ID NO: 888483 - DNA, 33 bp, Homo sapien
gattatactgtgtgcaaattttaagataatctc

SEQ ID NO: 888484 - DNA, 33 bp, Homo sapien
gattatactgtgtgcagattttaagataatctc

SEQ ID NO: 888485 - DNA, 33 bp, Homo sapien
cagtaagctgtcagcacggcaggactcattaga

SEQ ID NO: 888486 - DNA, 33 bp, Homo sapien
cagtaagctgtcagcatggcaggactcattaga

SEQ ID NO: 888487 - DNA, 33 bp, Homo sapien
ctgaacacctaagacactgaaaattacccatta

SEQ ID NO: 888488 - DNA, 33 bp, Homo sapien
ctgaacacctaagacattgaaaattacccatta

SEQ ID NO: 888489 - DNA, 33 bp, Homo sapien
gagttagaataagtcaacttttccagcaatcag

SEQ ID NO: 888490 - DNA, 33 bp, Homo sapien
gagttagaataagtcagcttttccagcaatcag

SEQ ID NO: 888491 - DNA, 33 bp, Homo sapien
caatcacgggattccactgagcactgattgctg

SEQ ID NO: 888492 - DNA, 33 bp, Homo sapien
caatcacgggattccattgagcactgattgctg

SEQ ID NO: 888493 - DNA, 33 bp, Homo sapien
caataaccattcaaaacactgttggcttatttc

SEQ ID NO: 888494 - DNA, 33 bp, Homo sapien
caataaccattcaaaagactgttggcttatttc

SEQ ID NO: 888495 - DNA, 33 bp, Homo sapien
aaaatgtcttctttgaaaatgctgaccgttaga

SEQ ID NO: 888496 - DNA, 33 bp, Homo sapien
aaaatgtcttctttgagaatgctgaccgttaga

SEQ ID NO: 888497 - DNA, 33 bp, Homo sapien
atttcagccaacttaagagtcaatgtagatctc

SEQ ID NO: 888498 - DNA, 33 bp, Homo sapien
atttcagccaacttaatagtcaatgtagatctc

SEQ ID NO: 888499 - DNA, 33 bp, Homo sapien
cagtggtgaagtgtcaaacctttactggaagtt

SEQ ID NO: 888500 - DNA, 33 bp, Homo sapien
cagtggtgaagtgtcagacctttactggaagtt

SEQ ID NO: 888501 - DNA, 33 bp, Homo sapien
aaaatgaaacccaagaagttccaattagctgtt

SEQ ID NO: 888502 - DNA, 33 bp, Homo sapien
aaaatgaaacccaagacgttccaattagctgtt

SEQ ID NO: 888503 - DNA, 33 bp, Homo sapien
cattagctgcaatagactcccacttgtctaatg

SEQ ID NO: 888504 - DNA, 33 bp, Homo sapien
cattagctgcaatagattcccacttgtctaatg

SEQ ID NO: 888505 - DNA, 33 bp, Homo sapien
ttgcaagttctcatgcaaggtaatttccaacta

SEQ ID NO: 888506 - DNA, 33 bp, Homo sapien
ttgcaagttctcatgcgaggtaatttccaacta

SEQ ID NO: 888507 - DNA, 33 bp, Homo sapien
tagagaacagtccagagagagaaaaaggttgaa

SEQ ID NO: 888508 - DNA, 33 bp, Homo sapien
tagagaacagtccagatagagaaaaaggttgaa

SEQ ID NO: 888509 - DNA, 33 bp, Homo sapien
ctcagaatacttaataatatggtcaatcaatca

SEQ ID NO: 888510 - DNA, 33 bp, Homo sapien
ctcagaatacttaatactatggtcaatcaatca

SEQ ID NO: 888511 - DNA, 33 bp, Homo sapien
agaatggttagaagaactgtcactctagctcta

SEQ ID NO: 888512 - DNA, 33 bp, Homo sapien
agaatggttagaagaattgtcactctagctcta

SEQ ID NO: 888513 - DNA, 33 bp, Homo sapien
catgggacacatactacatcttacatattacat

SEQ ID NO: 888514 - DNA, 33 bp, Homo sapien
catgggacacatactatatcttacatattacat

SEQ ID NO: 888515 - DNA, 33 bp, Homo sapien
aactctagagattaaactgattaagtgattttc

SEQ ID NO: 888516 - DNA, 33 bp, Homo sapien
aactctagagattaaattgattaagtgattttc

SEQ ID NO: 888517 - DNA, 33 bp, Homo sapien
aatttaccctgcctcaaaaagatagtcgagagg

SEQ ID NO: 888518 - DNA, 33 bp, Homo sapien
aatttaccctgcctcacaaagatagtcgagagg

SEQ ID NO: 888519 - DNA, 33 bp, Homo sapien
ccaaataatgtgaggacaatggttagttcacct

SEQ ID NO: 888520 - DNA, 33 bp, Homo sapien
ccaaataatgtgaggataatggttagttcacct

SEQ ID NO: 888521 - DNA, 33 bp, Homo sapien
taaccaaactacaagcgacttaggctgaatcca

SEQ ID NO: 888522 - DNA, 33 bp, Homo sapien
taaccaaactacaagctacttaggctgaatcca

SEQ ID NO: 888523 - DNA, 33 bp, Homo sapien
gactcttttgtgaaggacacagtattatctaga

SEQ ID NO: 888524 - DNA, 33 bp, Homo sapien
gactcttttgtgaagggcacagtattatctaga

SEQ ID NO: 888525 - DNA, 33 bp, Homo sapien
gcaaattaaaagtgtacatttctgggaaccatt

SEQ ID NO: 888526 - DNA, 33 bp, Homo sapien
gcaaattaaaagtgtagatttctgggaaccatt

SEQ ID NO: 888527 - DNA, 33 bp, Homo sapien
caagtaagcaaccaaaagtaggtattcattcac

SEQ ID NO: 888528 - DNA, 33 bp, Homo sapien
caagtaagcaaccaaaggtaggtattcattcac

SEQ ID NO: 888529 - DNA, 33 bp, Homo sapien
tggtacaggaagatgaagctatacagtatcgac

SEQ ID NO: 888530 - DNA, 33 bp, Homo sapien
tggtacaggaagatgaggctatacagtatcgac

SEQ ID NO: 888531 - DNA, 33 bp, Homo sapien
gtatgctgctccaaagactaatattttatctcc

SEQ ID NO: 888532 - DNA, 33 bp, Homo sapien
gtatgctgctccaaaggctaatattttatctcc

SEQ ID NO: 888533 - DNA, 33 bp, Homo sapien
gatgattctattgcctgaaggtacgagagcacc

SEQ ID NO: 888534 - DNA, 33 bp, Homo sapien
gatgattctattgccttaaggtacgagagcacc

SEQ ID NO: 888535 - DNA, 33 bp, Homo sapien
agcctagtcacccgccactgttgctcactgctg

SEQ ID NO: 888536 - DNA, 33 bp, Homo sapien
agcctagtcacccgccgctgttgctcactgctg

SEQ ID NO: 888537 - DNA, 33 bp, Homo sapien
tttgaaattgagtttcacataagcttgatgtcc

SEQ ID NO: 888538 - DNA, 33 bp, Homo sapien
tttgaaattgagtttctcataagcttgatgtcc

SEQ ID NO: 888539 - DNA, 33 bp, Homo sapien
cttggcatgggtaggccattgttatttgtctcc

SEQ ID NO: 888540 - DNA, 33 bp, Homo sapien
cttggcatgggtaggctattgttatttgtctcc

SEQ ID NO: 888541 - DNA, 33 bp, Homo sapien
aatttaaacaagtgaactgcagaatatatatta

SEQ ID NO: 888542 - DNA, 33 bp, Homo sapien
aatttaaacaagtgaattgcagaatatatatta

SEQ ID NO: 888543 - DNA, 33 bp, Homo sapien
ttgtgtgactgtttgaccatgcccaagaaactt

SEQ ID NO: 888544 - DNA, 33 bp, Homo sapien
ttgtgtgactgtttgatcatgcccaagaaactt

SEQ ID NO: 888545 - DNA, 33 bp, Homo sapien
agagtctttaagtgcaaaacattcatcatatcc

SEQ ID NO: 888546 - DNA, 33 bp, Homo sapien
agagtctttaagtgcagaacattcatcatatcc

SEQ ID NO: 888547 - DNA, 33 bp, Homo sapien
atagcctgagaagaagacaatgagatgatgttg

SEQ ID NO: 888548 - DNA, 33 bp, Homo sapien
atagcctgagaagaaggcaatgagatgatgttg

SEQ ID NO: 888549 - DNA, 33 bp, Homo sapien
ctaaattttgaaacaaagcctcttaagaacaat

SEQ ID NO: 888550 - DNA, 33 bp, Homo sapien
ctaaattttgaaacaatgcctcttaagaacaat

SEQ ID NO: 888551 - DNA, 33 bp, Homo sapien
tctcaaggggaaaagaaccaagccttaagagga

SEQ ID NO: 888552 - DNA, 33 bp, Homo sapien
tctcaaggggaaaagagccaagccttaagagga

SEQ ID NO: 888553 - DNA, 33 bp, Homo sapien
taccttttggaaatcacagcatggattgttcct

SEQ ID NO: 888554 - DNA, 33 bp, Homo sapien
taccttttggaaatcatagcatggattgttcct

SEQ ID NO: 888555 - DNA, 33 bp, Homo sapien
ggttgatgtgaaaatagtaaggcaatacgtggt

SEQ ID NO: 888556 - DNA, 33 bp, Homo sapien
ggttgatgtgaaaatattaaggcaatacgtggt

SEQ ID NO: 888557 - DNA, 33 bp, Homo sapien
tcacaaaaaaacagaaatgttctaaagccatgt

SEQ ID NO: 888558 - DNA, 33 bp, Homo sapien
tcacaaaaaaacagaagtgttctaaagccatgt

SEQ ID NO: 888559 - DNA, 33 bp, Homo sapien
tattctgttaaggtcaagctagactaagtggtc

SEQ ID NO: 888560 - DNA, 33 bp, Homo sapien
tattctgttaaggtcacgctagactaagtggtc

SEQ ID NO: 888561 - DNA, 33 bp, Homo sapien
aatagtattagaaaaacgcctcaactgataaca

SEQ ID NO: 888562 - DNA, 33 bp, Homo sapien
aatagtattagaaaaatgcctcaactgataaca

SEQ ID NO: 888563 - DNA, 33 bp, Homo sapien
tcagaccatttggccagaagctaacttgtatga

SEQ ID NO: 888564 - DNA, 33 bp, Homo sapien
tcagaccatttggccataagctaacttgtatga

SEQ ID NO: 888565 - DNA, 33 bp, Homo sapien
cattgtaaatgcttaaatgttaaaacaacaaca

SEQ ID NO: 888566 - DNA, 33 bp, Homo sapien
cattgtaaatgcttaagtgttaaaacaacaaca

SEQ ID NO: 888567 - DNA, 33 bp, Homo sapien
attcaacaactctgccaggaaagttacacacaa

SEQ ID NO: 888568 - DNA, 33 bp, Homo sapien
attcaacaactctgccgggaaagttacacacaa

SEQ ID NO: 888569 - DNA, 33 bp, Homo sapien
tattatgattatagaacgaggtgctaaaacgta

SEQ ID NO: 888570 - DNA, 33 bp, Homo sapien
tattatgattatagaatgaggtgctaaaacgta

SEQ ID NO: 888571 - DNA, 33 bp, Homo sapien
gattatgtgaattttaagtgaagtaaggtcagt

SEQ ID NO: 888572 - DNA, 33 bp, Homo sapien
gattatgtgaattttaggtgaagtaaggtcagt

SEQ ID NO: 888573 - DNA, 33 bp, Homo sapien
gactgcttagactgaccacataggaattgcttt

SEQ ID NO: 888574 - DNA, 33 bp, Homo sapien
gactgcttagactgactacataggaattgcttt

SEQ ID NO: 888575 - DNA, 33 bp, Homo sapien
acaatgaagttccaaactgttctaaattttatg

SEQ ID NO: 888576 - DNA, 33 bp, Homo sapien
acaatgaagttccaaagtgttctaaattttatg

SEQ ID NO: 888577 - DNA, 33 bp, Homo sapien
taactaggaagggagacgaagaggtccagagac

SEQ ID NO: 888578 - DNA, 33 bp, Homo sapien
taactaggaagggagatgaagaggtccagagac

SEQ ID NO: 888579 - DNA, 33 bp, Homo sapien
tgctatcatacctcccacaagaattttgaaaaa

SEQ ID NO: 888580 - DNA, 33 bp, Homo sapien
tgctatcatacctcccgcaagaattttgaaaaa

SEQ ID NO: 888581 - DNA, 33 bp, Homo sapien
tggcattccagtgagccaaaattacacagaagc

SEQ ID NO: 888582 - DNA, 33 bp, Homo sapien
tggcattccagtgagctaaaattacacagaagc

SEQ ID NO: 888583 - DNA, 33 bp, Homo sapien
agatgatttttagtgacggtaacttcatctaat

SEQ ID NO: 888584 - DNA, 33 bp, Homo sapien
agatgatttttagtgatggtaacttcatctaat

SEQ ID NO: 888585 - DNA, 33 bp, Homo sapien
tcatgaaatctttcccgatccctatgtcctgaa

SEQ ID NO: 888586 - DNA, 33 bp, Homo sapien
tcatgaaatctttccctatccctatgtcctgaa

SEQ ID NO: 888587 - DNA, 33 bp, Homo sapien
aattcagtattctactaagaaattcggttgtca

SEQ ID NO: 888588 - DNA, 33 bp, Homo sapien
aattcagtattctactgagaaattcggttgtca

SEQ ID NO: 888589 - DNA, 33 bp, Homo sapien
gtatagtcctacaaatgacctgtttgggtttct

SEQ ID NO: 888590 - DNA, 33 bp, Homo sapien
gtatagtcctacaaattacctgtttgggtttct

SEQ ID NO: 888591 - DNA, 33 bp, Homo sapien
tagtatgattttaacaatggatcctatagttaa

SEQ ID NO: 888592 - DNA, 33 bp, Homo sapien
tagtatgattttaacagtggatcctatagttaa

SEQ ID NO: 888593 - DNA, 33 bp, Homo sapien
aaagaaaaaggaaaccaacaaagcatatttaga

SEQ ID NO: 888594 - DNA, 33 bp, Homo sapien
aaagaaaaaggaaaccgacaaagcatatttaga

SEQ ID NO: 888595 - DNA, 33 bp, Homo sapien
gactggaggagataagaccactatcattgtgac

SEQ ID NO: 888596 - DNA, 33 bp, Homo sapien
gactggaggagataaggccactatcattgtgac

SEQ ID NO: 888597 - DNA, 33 bp, Homo sapien
gctcagatagaatgaacctgccatggatgtcag

SEQ ID NO: 888598 - DNA, 33 bp, Homo sapien
gctcagatagaatgaagctgccatggatgtcag

SEQ ID NO: 888599 - DNA, 33 bp, Homo sapien
gttattctcttctctgcatagatatttccatac

SEQ ID NO: 888600 - DNA, 33 bp, Homo sapien
gttattctcttctctggatagatatttccatac

SEQ ID NO: 888601 - DNA, 33 bp, Homo sapien
tattttgcctttgctacgtttccttcttataca

SEQ ID NO: 888602 - DNA, 33 bp, Homo sapien
tattttgcctttgctatgtttccttcttataca

SEQ ID NO: 888603 - DNA, 33 bp, Homo sapien
ttctacaaatattacaaagaacctacttgtgtt

SEQ ID NO: 888604 - DNA, 33 bp, Homo sapien
ttctacaaatattacagagaacctacttgtgtt

SEQ ID NO: 888605 - DNA, 33 bp, Homo sapien
ttgtccttccttcaaaaaacagtgttgctttta

SEQ ID NO: 888606 - DNA, 33 bp, Homo sapien
ttgtccttccttcaaacaacagtgttgctttta

SEQ ID NO: 888607 - DNA, 33 bp, Homo sapien
aagtatattcacttcccgagagtatgactatta

SEQ ID NO: 888608 - DNA, 33 bp, Homo sapien
aagtatattcacttcctgagagtatgactatta

SEQ ID NO: 888609 - DNA, 33 bp, Homo sapien
tgagaaactcccacagaccccaagagatgttct

SEQ ID NO: 888610 - DNA, 33 bp, Homo sapien
tgagaaactcccacaggccccaagagatgttct

SEQ ID NO: 888611 - DNA, 33 bp, Homo sapien
ggagtttctcatttacagtccttttgcatctcc

SEQ ID NO: 888612 - DNA, 33 bp, Homo sapien
ggagtttctcatttacggtccttttgcatctcc

SEQ ID NO: 888613 - DNA, 33 bp, Homo sapien
tgatcaaatgtgtctgaattgggtgaaggcttg

SEQ ID NO: 888614 - DNA, 33 bp, Homo sapien
tgatcaaatgtgtctgtattgggtgaaggcttg

SEQ ID NO: 888615 - DNA, 33 bp, Homo sapien
tcactgcagtaaatgacgcacatatgggctgga

SEQ ID NO: 888616 - DNA, 33 bp, Homo sapien
tcactgcagtaaatgaggcacatatgggctgga

SEQ ID NO: 888617 - DNA, 33 bp, Homo sapien
tgtagaggtgacattaagaagttctagaaaggg

SEQ ID NO: 888618 - DNA, 33 bp, Homo sapien
tgtagaggtgacattaggaagttctagaaaggg

SEQ ID NO: 888619 - DNA, 33 bp, Homo sapien
gattttaaacaatgaaacttcaaaaataataac

SEQ ID NO: 888620 - DNA, 33 bp, Homo sapien
gattttaaacaatgaaccttcaaaaataataac

SEQ ID NO: 888621 - DNA, 33 bp, Homo sapien
ttgttcttaagcatcagaattggttttaagaac

SEQ ID NO: 888622 - DNA, 33 bp, Homo sapien
ttgttcttaagcatcataattggttttaagaac

SEQ ID NO: 888623 - DNA, 33 bp, Homo sapien
cctgacctctgaggaactgaatgccagggtaag

SEQ ID NO: 888624 - DNA, 33 bp, Homo sapien
cctgacctctgaggaattgaatgccagggtaag

SEQ ID NO: 888625 - DNA, 33 bp, Homo sapien
gtgaaacccaagtgaacggcagataatgtgaac

SEQ ID NO: 888626 - DNA, 33 bp, Homo sapien
gtgaaacccaagtgaatggcagataatgtgaac

SEQ ID NO: 888627 - DNA, 33 bp, Homo sapien
ttcctctgaaagctcaaggttgttctttgccaa

SEQ ID NO: 888628 - DNA, 33 bp, Homo sapien
ttcctctgaaagctcagggttgttctttgccaa

SEQ ID NO: 888629 - DNA, 33 bp, Homo sapien
aatcagtgttgaactcagtatgtttaatttcag

SEQ ID NO: 888630 - DNA, 33 bp, Homo sapien
aatcagtgttgaactcggtatgtttaatttcag

SEQ ID NO: 888631 - DNA, 33 bp, Homo sapien
tattttttcttttaaccccaggagcaccactca

SEQ ID NO: 888632 - DNA, 33 bp, Homo sapien
tattttttcttttaactccaggagcaccactca

SEQ ID NO: 888633 - DNA, 33 bp, Homo sapien
ctgggccagaatgcaccgtccttcaaggcacat

SEQ ID NO: 888634 - DNA, 33 bp, Homo sapien
ctgggccagaatgcactgtccttcaaggcacat

SEQ ID NO: 888635 - DNA, 33 bp, Homo sapien; identical to SEQ ID NO: 888633

SEQ ID NO: 888636 - DNA, 33 bp, Homo sapien; identical to SEQ ID NO: 888634

SEQ ID NO: 888637 - DNA, 33 bp, Homo sapien
tagaaatgcctagcacagtaaatggcccaccct

SEQ ID NO: 888638 - DNA, 33 bp, Homo sapien
tagaaatgcctagcacggtaaatggcccaccct

SEQ ID NO: 888639 - DNA, 33 bp, Homo sapien
ataaatggagctataacgtaattcagaattact

SEQ ID NO: 888640 - DNA, 33 bp, Homo sapien
ataaatggagctataatgtaattcagaattact

SEQ ID NO: 888641 - DNA, 33 bp, Homo sapien
aattgggtattctcacagagtcaaaacaaaaac

SEQ ID NO: 888642 - DNA, 33 bp, Homo sapien
aattgggtattctcacggagtcaaaacaaaaac

SEQ ID NO: 888643 - DNA, 33 bp, Homo sapien
gattctgttaacataacggagtacaagttgcct

SEQ ID NO: 888644 - DNA, 33 bp, Homo sapien
gattctgttaacataatggagtacaagttgcct

SEQ ID NO: 888645 - DNA, 33 bp, Homo sapien
ctttgctgcttcttgaacgtttttggatcttca

SEQ ID NO: 888646 - DNA, 33 bp, Homo sapien
ctttgctgcttcttgaccgtttttggatcttca

SEQ ID NO: 888647 - DNA, 33 bp, Homo sapien
aaaggaaagaaactgacagctctatgaaggttg

SEQ ID NO: 888648 - DNA, 33 bp, Homo sapien
aaaggaaagaaactgatagctctatgaaggttg

SEQ ID NO: 888649 - DNA, 33 bp, Homo sapien
atacattatttccctacaccaatgaccagaaga

SEQ ID NO: 888650 - DNA, 33 bp, Homo sapien
atacattatttccctataccaatgaccagaaga

SEQ ID NO: 888651 - DNA, 33 bp, Homo sapien
gctgcacctatacaaaacctatgactcaatatt

SEQ ID NO: 888652 - DNA, 33 bp, Homo sapien
gctgcacctatacaaaccctatgactcaatatt

SEQ ID NO: 888653 - DNA, 33 bp, Homo sapien
gtcttcctgatttgagaagaagggtgttgtcta

SEQ ID NO: 888654 - DNA, 33 bp, Homo sapien
gtcttcctgatttgaggagaagggtgttgtcta

SEQ ID NO: 888655 - DNA, 33 bp, Homo sapien
acttcttacactattcgaagatacttgcacctt

SEQ ID NO: 888656 - DNA, 33 bp, Homo sapien
acttcttacactattctaagatacttgcacctt

SEQ ID NO: 888657 - DNA, 33 bp, Homo sapien
aacagggtgctttaaacgcaaagacagaaagga

SEQ ID NO: 888658 - DNA, 33 bp, Homo sapien
aacagggtgctttaaatgcaaagacagaaagga

SEQ ID NO: 888659 - DNA, 33 bp, Homo sapien
gaggtgtagatgaagacggtggaatggtatcgc

SEQ ID NO: 888660 - DNA, 33 bp, Homo sapien
gaggtgtagatgaagagggtggaatggtatcgc

SEQ ID NO: 888661 - DNA, 33 bp, Homo sapien
aacaagtcaatgctgccagatttggtaaggtgc

SEQ ID NO: 888662 - DNA, 33 bp, Homo sapien
aacaagtcaatgctgcgagatttggtaaggtgc

SEQ ID NO: 888663 - DNA, 33 bp, Homo sapien
ccatatcactttagacagagaccaagactgtct

SEQ ID NO: 888664 - DNA, 33 bp, Homo sapien
ccatatcactttagaccgagaccaagactgtct

SEQ ID NO: 888665 - DNA, 33 bp, Homo sapien
tatcatctccgtgagaacaacttgaaaaataaa

SEQ ID NO: 888666 - DNA, 33 bp, Homo sapien
tatcatctccgtgagaccaacttgaaaaataaa

SEQ ID NO: 888667 - DNA, 33 bp, Homo sapien
ttatgtgttgcagttacagctgaaccctgtctt

SEQ ID NO: 888668 - DNA, 33 bp, Homo sapien
ttatgtgttgcagttatagctgaaccctgtctt

SEQ ID NO: 888669 - DNA, 33 bp, Homo sapien
cattctcaccgatgaaataagtctaaacccaat

SEQ ID NO: 888670 - DNA, 33 bp, Homo sapien
cattctcaccgatgaagtaagtctaaacccaat

SEQ ID NO: 888671 - DNA, 33 bp, Homo sapien
taactgcaaaggcttcaagagcagttatgtgca

SEQ ID NO: 888672 - DNA, 33 bp, Homo sapien
taactgcaaaggcttcgagagcagttatgtgca

SEQ ID NO: 888673 - DNA, 33 bp, Homo sapien
atgcttttgacattccagaagatccacatgttt

SEQ ID NO: 888674 - DNA, 33 bp, Homo sapien
atgcttttgacattccggaagatccacatgttt

SEQ ID NO: 888675 - DNA, 33 bp, Homo sapien
tcagttggctcttcccgaagtcattgattgtag

SEQ ID NO: 888676 - DNA, 33 bp, Homo sapien
tcagttggctcttccctaagtcattgattgtag

SEQ ID NO: 888677 - DNA, 33 bp, Homo sapien
atctgaactagctccacgtacttaattgctttc

SEQ ID NO: 888678 - DNA, 33 bp, Homo sapien
atctgaactagctccatgtacttaattgctttc

SEQ ID NO: 888679 - DNA, 33 bp, Homo sapien
gtttaaacatttcccaactgaattgattttgta

SEQ ID NO: 888680 - DNA, 33 bp, Homo sapien
gtttaaacatttcccagctgaattgattttgta

SEQ ID NO: 888681 - DNA, 33 bp, Homo sapien
caaatgccagacaaaacggttaggttctatata

SEQ ID NO: 888682 - DNA, 33 bp, Homo sapien
caaatgccagacaaaatggttaggttctatata

SEQ ID NO: 888683 - DNA, 33 bp, Homo sapien
caccatttttggcaacaattttctgacattata

SEQ ID NO: 888684 - DNA, 33 bp, Homo sapien
caccatttttggcaacgattttctgacattata

SEQ ID NO: 888685 - DNA, 33 bp, Homo sapien
gatgcactcacaatgaagaaacaaaggtggtct

SEQ ID NO: 888686 - DNA, 33 bp, Homo sapien
gatgcactcacaatgaggaaacaaaggtggtct

SEQ ID NO: 888687 - DNA, 33 bp, Homo sapien
attgacataatcaaaccgaaccatcctttcagt

SEQ ID NO: 888688 - DNA, 33 bp, Homo sapien
attgacataatcaaactgaaccatcctttcagt

SEQ ID NO: 888689 - DNA, 33 bp, Homo sapien
tctttaaaccagttaagaaacatctgctaagtc

SEQ ID NO: 888690 - DNA, 33 bp, Homo sapien
tctttaaaccagttaataaacatctgctaagtc

SEQ ID NO: 888691 - DNA, 33 bp, Homo sapien
cacttggatctagaatcaggcaaagagttctca

SEQ ID NO: 888692 - DNA, 33 bp, Homo sapien
cacttggatctagaattaggcaaagagttctca

SEQ ID NO: 888693 - DNA, 33 bp, Homo sapien
ggtttgttattacttgcaagctcacttgtttgc

SEQ ID NO: 888694 - DNA, 33 bp, Homo sapien
ggtttgttattacttggaagctcacttgtttgc

SEQ ID NO: 888695 - DNA, 33 bp, Homo sapien
cacacttttaatttcaaattagtgggagagcta

SEQ ID NO: 888696 - DNA, 33 bp, Homo sapien
cacacttttaatttcagattagtgggagagcta

SEQ ID NO: 888697 - DNA, 33 bp, Homo sapien
ctccaccaggaaatcccgaaagactgaaatctt

SEQ ID NO: 888698 - DNA, 33 bp, Homo sapien
ctccaccaggaaatcctgaaagactgaaatctt

SEQ ID NO: 888699 - DNA, 33 bp, Homo sapien
aatcaggcagccagcaccaatggactacaacac

SEQ ID NO: 888700 - DNA, 33 bp, Homo sapien
aatcaggcagccagcagcaatggactacaacac

SEQ ID NO: 888701 - DNA, 33 bp, Homo sapien
gctgcctgatttgtccagatgggcttctgcctg

SEQ ID NO: 888702 - DNA, 33 bp, Homo sapien
gctgcctgatttgtccggatgggcttctgcctg

SEQ ID NO: 888703 - DNA, 33 bp, Homo sapien
gagatgttgtcaaaagcctaatgctaaccctcc

SEQ ID NO: 888704 - DNA, 33 bp, Homo sapien
gagatgttgtcaaaaggctaatgctaaccctcc

SEQ ID NO: 888705 - DNA, 33 bp, Homo sapien
tcagaggtttttgaacggatatctttatgggag

SEQ ID NO: 888706 - DNA, 33 bp, Homo sapien
tcagaggtttttgaactgatatctttatgggag

SEQ ID NO: 888707 - DNA, 33 bp, Homo sapien
tactagtgcctgtacaaaaaactgttaggagaa

SEQ ID NO: 888708 - DNA, 33 bp, Homo sapien
tactagtgcctgtacataaaactgttaggagaa

SEQ ID NO: 888709 - DNA, 33 bp, Homo sapien
ctgaccagtcaaacaccaagagggataatgctt

SEQ ID NO: 888710 - DNA, 33 bp, Homo sapien
ctgaccagtcaaacacgaagagggataatgctt

SEQ ID NO: 888711 - DNA, 33 bp, Homo sapien
gagattacttggcgataaatataataactgaag

SEQ ID NO: 888712 - DNA, 33 bp, Homo sapien
gagattacttggcgattaatataataactgaag

SEQ ID NO: 888713 - DNA, 33 bp, Homo sapien
actgggaaaactggaaaacaaaagatagtgaaa

SEQ ID NO: 888714 - DNA, 33 bp, Homo sapien
actgggaaaactggaacacaaaagatagtgaaa

SEQ ID NO: 888715 - DNA, 33 bp, Homo sapien
cagtcctttaatgctacattttaaatcgcttta

SEQ ID NO: 888716 - DNA, 33 bp, Homo sapien
cagtcctttaatgctatattttaaatcgcttta

SEQ ID NO: 888717 - DNA, 33 bp, Homo sapien
tgctcctcaattctacacggtatcctctcctct

SEQ ID NO: 888718 - DNA, 33 bp, Homo sapien
tgctcctcaattctacgcggtatcctctcctct

SEQ ID NO: 888719 - DNA, 33 bp, Homo sapien
tctattactgtttcaagcaacagtagctgagca

SEQ ID NO: 888720 - DNA, 33 bp, Homo sapien
tctattactgtttcaatcaacagtagctgagca

SEQ ID NO: 888721 - DNA, 33 bp, Homo sapien
aaatactcgtcttacacagaataattgcggtgg

SEQ ID NO: 888722 - DNA, 33 bp, Homo sapien
aaatactcgtcttacatagaataattgcggtgg

SEQ ID NO: 888723 - DNA, 33 bp, Homo sapien
acatttctctaaataaaagcaaccacaatagtc

SEQ ID NO: 888724 - DNA, 33 bp, Homo sapien
acatttctctaaataagagcaaccacaatagtc

SEQ ID NO: 888725 - DNA, 33 bp, Homo sapien
aatgtgttcattgttacgattttttggttgaca

SEQ ID NO: 888726 - DNA, 33 bp, Homo sapien
aatgtgttcattgttatgattttttggttgaca

SEQ ID NO: 888727 - DNA, 33 bp, Homo sapien
tacccaattgttaccaatgattgtacttcagag

SEQ ID NO: 888728 - DNA, 33 bp, Homo sapien
tacccaattgttaccactgattgtacttcagag

SEQ ID NO: 888729 - DNA, 33 bp, Homo sapien
acacagcaagaaaaaacgaggcaaacatacttc

SEQ ID NO: 888730 - DNA, 33 bp, Homo sapien
acacagcaagaaaaaatgaggcaaacatacttc

SEQ ID NO: 888731 - DNA, 33 bp, Homo sapien
taagagtcagggagataaagtagagcagatact

SEQ ID NO: 888732 - DNA, 33 bp, Homo sapien
taagagtcagggagatgaagtagagcagatact

SEQ ID NO: 888733 - DNA, 33 bp, Homo sapien
gtgtctgaagaccaaactcatgatctgaatctc

SEQ ID NO: 888734 - DNA, 33 bp, Homo sapien
gtgtctgaagaccaaagtcatgatctgaatctc

SEQ ID NO: 888735 - DNA, 33 bp, Homo sapien
tttttatgatgtcaaaatcttgaagttcttact

SEQ ID NO: 888736 - DNA, 33 bp, Homo sapien
tttttatgatgtcaaattcttgaagttcttact

SEQ ID NO: 888737 - DNA, 33 bp, Homo sapien
caaactggatttgtaacctaggcttatcaattc

SEQ ID NO: 888738 - DNA, 33 bp, Homo sapien
caaactggatttgtaatctaggcttatcaattc

SEQ ID NO: 888739 - DNA, 33 bp, Homo sapien
cttggcaagaatggtcacatacaggccacaacc

SEQ ID NO: 888740 - DNA, 33 bp, Homo sapien
cttggcaagaatggtcgcatacaggccacaacc

SEQ ID NO: 888741 - DNA, 33 bp, Homo sapien
attgtgttaggttccacaggagaaataagcaga

SEQ ID NO: 888742 - DNA, 33 bp, Homo sapien
attgtgttaggttccataggagaaataagcaga

SEQ ID NO: 888743 - DNA, 33 bp, Homo sapien
tctttcactgtccaaacgtgtgacaagcagaca

SEQ ID NO: 888744 - DNA, 33 bp, Homo sapien
tctttcactgtccaaatgtgtgacaagcagaca

SEQ ID NO: 888745 - DNA, 33 bp, Homo sapien
tagcacctgagcagaaatgatttccctccacaa

SEQ ID NO: 888746 - DNA, 33 bp, Homo sapien
tagcacctgagcagaactgatttccctccacaa

SEQ ID NO: 888747 - DNA, 33 bp, Homo sapien
attctgttcaccaataatagatgcaattttgtt

SEQ ID NO: 888748 - DNA, 33 bp, Homo sapien
attctgttcaccaatattagatgcaattttgtt

SEQ ID NO: 888749 - DNA, 33 bp, Homo sapien
gtgtctgataattagacgaagtggtgtgagcag

SEQ ID NO: 888750 - DNA, 33 bp, Homo sapien
gtgtctgataattagatgaagtggtgtgagcag

SEQ ID NO: 888751 - DNA, 33 bp, Homo sapien
tgcaacaactcaaagaagaaaagcaaaaaggat

SEQ ID NO: 888752 - DNA, 33 bp, Homo sapien
tgcaacaactcaaagaggaaaagcaaaaaggat

SEQ ID NO: 888753 - DNA, 33 bp, Homo sapien
ctagtttcactaaacccaggcacttaaatcacc

SEQ ID NO: 888754 - DNA, 33 bp, Homo sapien
ctagtttcactaaaccgaggcacttaaatcacc

SEQ ID NO: 888755 - DNA, 33 bp, Homo sapien
tagatgagcaggggtacagcactgattcaggga

SEQ ID NO: 888756 - DNA, 33 bp, Homo sapien
tagatgagcaggggtatagcactgattcaggga

SEQ ID NO: 888757 - DNA, 33 bp, Homo sapien
ggtggtagtcagtggcaaataaagctacctaac

SEQ ID NO: 888758 - DNA, 33 bp, Homo sapien
ggtggtagtcagtggcgaataaagctacctaac

SEQ ID NO: 888759 - DNA, 33 bp, Homo sapien
atgccttcatatgacaatagttcaattccccac

SEQ ID NO: 888760 - DNA, 33 bp, Homo sapien
atgccttcatatgacagtagttcaattccccac

SEQ ID NO: 888761 - DNA, 33 bp, Homo sapien
gagtttattttgaatagggaaagtctttttgct

SEQ ID NO: 888762 - DNA, 33 bp, Homo sapien
gagtttattttgaatatggaaagtctttttgct

SEQ ID NO: 888763 - DNA, 33 bp, Homo sapien
ctttccatgaacccaagaccatccaccactatc

SEQ ID NO: 888764 - DNA, 33 bp, Homo sapien
ctttccatgaacccaataccatccaccactatc

SEQ ID NO: 888765 - DNA, 33 bp, Homo sapien
catgcacctctattaccgccattttacaaaata

SEQ ID NO: 888766 - DNA, 33 bp, Homo sapien
catgcacctctattactgccattttacaaaata

SEQ ID NO: 888767 - DNA, 33 bp, Homo sapien
ttaattgtattcaccaactagtaatatggggag

SEQ ID NO: 888768 - DNA, 33 bp, Homo sapien
ttaattgtattcaccagctagtaatatggggag

SEQ ID NO: 888769 - DNA, 33 bp, Homo sapien
tgaattagccaaagagcaagatatttttcttta

SEQ ID NO: 888770 - DNA, 33 bp, Homo sapien
tgaattagccaaagaggaagatatttttcttta

SEQ ID NO: 888771 - DNA, 33 bp, Homo sapien
ttaagagtcacagttaaaataaatatataatta

SEQ ID NO: 888772 - DNA, 33 bp, Homo sapien
ttaagagtcacagttataataaatatataatta

SEQ ID NO: 888773 - DNA, 33 bp, Homo sapien
tctgtattgctaatgaaataactagtggctagg

SEQ ID NO: 888774 - DNA, 33 bp, Homo sapien
tctgtattgctaatgagataactagtggctagg

SEQ ID NO: 888775 - DNA, 33 bp, Homo sapien
ttgagatacattaaacaatgctgctcagaatgt

SEQ ID NO: 888776 - DNA, 33 bp, Homo sapien
ttgagatacattaaacgatgctgctcagaatgt

SEQ ID NO: 888777 - DNA, 33 bp, Homo sapien
cttctgcatcaatgaacagtccttcagaggacc

SEQ ID NO: 888778 - DNA, 33 bp, Homo sapien
cttctgcatcaatgaatagtccttcagaggacc

SEQ ID NO: 888779 - DNA, 33 bp, Homo sapien
tattgaggaagctaccgagtctccaaaaccatt

SEQ ID NO: 888780 - DNA, 33 bp, Homo sapien
tattgaggaagctacctagtctccaaaaccatt

SEQ ID NO: 888781 - DNA, 33 bp, Homo sapien
ttattctgagaaatgggcaattacattaatcta

SEQ ID NO: 888782 - DNA, 33 bp, Homo sapien
ttattctgagaaatggtcaattacattaatcta

SEQ ID NO: 888783 - DNA, 33 bp, Homo sapien
tttatgatggctaaaaatgttgagtatctttta

SEQ ID NO: 888784 - DNA, 33 bp, Homo sapien
tttatgatggctaaaagtgttgagtatctttta

SEQ ID NO: 888785 - DNA, 33 bp, Homo sapien
ttcaatcctgactcaaaagcttgcctacaccct

SEQ ID NO: 888786 - DNA, 33 bp, Homo sapien
ttcaatcctgactcaagagcttgcctacaccct

SEQ ID NO: 888787 - DNA, 33 bp, Homo sapien
aaatggtgtttatctcccggtcagctgcagatc

SEQ ID NO: 888788 - DNA, 33 bp, Homo sapien
aaatggtgtttatctctcggtcagctgcagatc

SEQ ID NO: 888789 - DNA, 33 bp, Homo sapien
aggagtggtgctttcacgcataattagaaaggc

SEQ ID NO: 888790 - DNA, 33 bp, Homo sapien
aggagtggtgctttcatgcataattagaaaggc

SEQ ID NO: 888791 - DNA, 33 bp, Homo sapien
ccaatgagaaacagtcaaggtgatatgtgtggc

SEQ ID NO: 888792 - DNA, 33 bp, Homo sapien
ccaatgagaaacagtcgaggtgatatgtgtggc

SEQ ID NO: 888793 - DNA, 33 bp, Homo sapien
ccaatctgtgccctaagctttttccgattcctt

SEQ ID NO: 888794 - DNA, 33 bp, Homo sapien
ccaatctgtgccctaatctttttccgattcctt

SEQ ID NO: 888795 - DNA, 33 bp, Homo sapien
gggttctatggttgaaaggtaaaaatcaaagcc

SEQ ID NO: 888796 - DNA, 33 bp, Homo sapien
gggttctatggttgaagggtaaaaatcaaagcc

SEQ ID NO: 888797 - DNA, 33 bp, Homo sapien
tgattcattgtggttacactcaatcatactcta

SEQ ID NO: 888798 - DNA, 33 bp, Homo sapien
tgattcattgtggttatactcaatcatactcta

SEQ ID NO: 888799 - DNA, 33 bp, Homo sapien
aaatctttcttggtcaaatactcactacaaggt

SEQ ID NO: 888800 - DNA, 33 bp, Homo sapien
aaatctttcttggtcagatactcactacaaggt

SEQ ID NO: 888801 - DNA, 33 bp, Homo sapien
gctaattatactcgaaactgcttgaacaatttc

SEQ ID NO: 888802 - DNA, 33 bp, Homo sapien
gctaattatactcgaacctgcttgaacaatttc

SEQ ID NO: 888803 - DNA, 33 bp, Homo sapien
atgttgcaggtgacatcacatttgagtaaataa

SEQ ID NO: 888804 - DNA, 33 bp, Homo sapien
atgttgcaggtgacatgacatttgagtaaataa

SEQ ID NO: 888805 - DNA, 33 bp, Homo sapien
attgccccattttccccctgaaatcaatttgta

SEQ ID NO: 888806 - DNA, 33 bp, Homo sapien
attgccccattttcccgctgaaatcaatttgta

SEQ ID NO: 888807 - DNA, 33 bp, Homo sapien
aacagaatcaagacaacgggatagaaaaaagca

SEQ ID NO: 888808 - DNA, 33 bp, Homo sapien
aacagaatcaagacaatgggatagaaaaaagca

SEQ ID NO: 888809 - DNA, 33 bp, Homo sapien
aactggctatgcacaaatacaaaattaaattat

SEQ ID NO: 888810 - DNA, 33 bp, Homo sapien
aactggctatgcacaagtacaaaattaaattat

SEQ ID NO: 888811 - DNA, 33 bp, Homo sapien
acaaagacaccaataacgcacaatgggaaaatt

SEQ ID NO: 888812 - DNA, 33 bp, Homo sapien
acaaagacaccaataatgcacaatgggaaaatt

SEQ ID NO: 888813 - DNA, 33 bp, Homo sapien
ttattgaccctagttaacctgctgtgcagcaga

SEQ ID NO: 888814 - DNA, 33 bp, Homo sapien
ttattgaccctagttaccctgctgtgcagcaga

SEQ ID NO: 888815 - DNA, 33 bp, Homo sapien
ccaccctggtaaagaaccttacaattggaaagg

SEQ ID NO: 888816 - DNA, 33 bp, Homo sapien
ccaccctggtaaagaatcttacaattggaaagg

SEQ ID NO: 888817 - DNA, 33 bp, Homo sapien
tcttgttctatccttacgctacttttgttgttg

SEQ ID NO: 888818 - DNA, 33 bp, Homo sapien
tcttgttctatccttatgctacttttgttgttg

SEQ ID NO: 888819 - DNA, 33 bp, Homo sapien
aactattggcagtgtagattgcagttgggaaaa

SEQ ID NO: 888820 - DNA, 33 bp, Homo sapien
aactattggcagtgtatattgcagttgggaaaa

SEQ ID NO: 888821 - DNA, 33 bp, Homo sapien
aaaaataggcattattaaaggagaaaagacatt

SEQ ID NO: 888822 - DNA, 33 bp, Homo sapien
aaaaataggcattatttaaggagaaaagacatt

SEQ ID NO: 888823 - DNA, 33 bp, Homo sapien
gcatatagatctgtgaagaaaaagggaaataag

SEQ ID NO: 888824 - DNA, 33 bp, Homo sapien
gcatatagatctgtgaggaaaaagggaaataag

SEQ ID NO: 888825 - DNA, 33 bp, Homo sapien
gaggtgtctgtttagagctttcacctattttta

SEQ ID NO: 888826 - DNA, 33 bp, Homo sapien
gaggtgtctgtttagatctttcacctattttta

SEQ ID NO: 888827 - DNA, 33 bp, Homo sapien
ggtgaggtaggagaaaagtaggtgtgattataa

SEQ ID NO: 888828 - DNA, 33 bp, Homo sapien
ggtgaggtaggagaaaggtaggtgtgattataa

SEQ ID NO: 888829 - DNA, 33 bp, Homo sapien
ccatatggttactaacacttggtataatcagtc

SEQ ID NO: 888830 - DNA, 33 bp, Homo sapien
ccatatggttactaacgcttggtataatcagtc

SEQ ID NO: 888831 - DNA, 33 bp, Homo sapien
ggaggtagttaggtcacgaaggtagattcctca

SEQ ID NO: 888832 - DNA, 33 bp, Homo sapien
ggaggtagttaggtcatgaaggtagattcctca

SEQ ID NO: 888833 - DNA, 33 bp, Homo sapien
caaggcctggccctctaaaaacaccaggtggca

SEQ ID NO: 888834 - DNA, 33 bp, Homo sapien
caaggcctggccctcttaaaacaccaggtggca

SEQ ID NO: 888835 - DNA, 33 bp, Homo sapien
atcccattttccattacgcgattattaagcatt

SEQ ID NO: 888836 - DNA, 33 bp, Homo sapien
atcccattttccattatgcgattattaagcatt

SEQ ID NO: 888837 - DNA, 33 bp, Homo sapien
taccagatgtagtgagaattcaatctatcatga

SEQ ID NO: 888838 - DNA, 33 bp, Homo sapien
taccagatgtagtgagcattcaatctatcatga

SEQ ID NO: 888839 - DNA, 33 bp, Homo sapien
caaagtcagggtcatcaatagctctgtcttcca

SEQ ID NO: 888840 - DNA, 33 bp, Homo sapien
caaagtcagggtcatcgatagctctgtcttcca

SEQ ID NO: 888841 - DNA, 33 bp, Homo sapien
agatggtttctcaggcctaatgatttactgtca

SEQ ID NO: 888842 - DNA, 33 bp, Homo sapien
agatggtttctcaggcttaatgatttactgtca

SEQ ID NO: 888843 - DNA, 33 bp, Homo sapien
aacattagagacaaaaagatggctaaagtaata

SEQ ID NO: 888844 - DNA, 33 bp, Homo sapien
aacattagagacaaaaggatggctaaagtaata

SEQ ID NO: 888845 - DNA, 33 bp, Homo sapien
gggactaaatagaggaaagagttgaaaacatcc

SEQ ID NO: 888846 - DNA, 33 bp, Homo sapien
gggactaaatagaggagagagttgaaaacatcc

SEQ ID NO: 888847 - DNA, 33 bp, Homo sapien
cacggttcttagaaatcaatcaattctggctgg

SEQ ID NO: 888848 - DNA, 33 bp, Homo sapien
cacggttcttagaaatgaatcaattctggctgg

SEQ ID NO: 888849 - DNA, 33 bp, Homo sapien
ttccttccgttcatcaatcaccactgtcattta

SEQ ID NO: 888850 - DNA, 33 bp, Homo sapien
ttccttccgttcatcagtcaccactgtcattta

SEQ ID NO: 888851 - DNA, 33 bp, Homo sapien
ggcaacgtaattgcaacatgacagcaggcaaaa

SEQ ID NO: 888852 - DNA, 33 bp, Homo sapien
ggcaacgtaattgcaagatgacagcaggcaaaa

SEQ ID NO: 888853 - DNA, 33 bp, Homo sapien
ctttaacttctaacaacgggagactcaattgtg

SEQ ID NO: 888854 - DNA, 33 bp, Homo sapien
ctttaacttctaacaatgggagactcaattgtg

SEQ ID NO: 888855 - DNA, 33 bp, Homo sapien
caaataaactaaataaggcactagcaaccaatc

SEQ ID NO: 888856 - DNA, 33 bp, Homo sapien
caaataaactaaataatgcactagcaaccaatc

SEQ ID NO: 888857 - DNA, 33 bp, Homo sapien
attgctttaggaggcacctgaaggccagtgaca

SEQ ID NO: 888858 - DNA, 33 bp, Homo sapien
attgctttaggaggcatctgaaggccagtgaca

SEQ ID NO: 888859 - DNA, 33 bp, Homo sapien
tctatggccacgatccgaccttaggtgcaaggc

SEQ ID NO: 888860 - DNA, 33 bp, Homo sapien
tctatggccacgatcctaccttaggtgcaaggc

SEQ ID NO: 888861 - DNA, 33 bp, Homo sapien
ctcagctcattaccaaatgtgatggctatggga

SEQ ID NO: 888862 - DNA, 33 bp, Homo sapien
ctcagctcattaccaactgtgatggctatggga

SEQ ID NO: 888863 - DNA, 33 bp, Homo sapien
cttgaaggaaaggaaacagtcctggcaacattt

SEQ ID NO: 888864 - DNA, 33 bp, Homo sapien
cttgaaggaaaggaaatagtcctggcaacattt

SEQ ID NO: 888865 - DNA, 33 bp, Homo sapien
taaaccagctctagccagaggggaattgcagat

SEQ ID NO: 888866 - DNA, 33 bp, Homo sapien
taaaccagctctagccggaggggaattgcagat

SEQ ID NO: 888867 - DNA, 33 bp, Homo sapien
gtgaacgaaataatgtcaaactgaaaatgttct

SEQ ID NO: 888868 - DNA, 33 bp, Homo sapien
gtgaacgaaataatgtgaaactgaaaatgttct

SEQ ID NO: 888869 - DNA, 33 bp, Homo sapien
tctggctaaacgtacaacactgaatcatctaat

SEQ ID NO: 888870 - DNA, 33 bp, Homo sapien
tctggctaaacgtacagcactgaatcatctaat

SEQ ID NO: 888871 - DNA, 33 bp, Homo sapien
atggtaaatattgagccaaacctttggtgtatg

SEQ ID NO: 888872 - DNA, 33 bp, Homo sapien
atggtaaatattgagctaaacctttggtgtatg

SEQ ID NO: 888873 - DNA, 33 bp, Homo sapien
atatttaccattatctcaatttctacatcttct

SEQ ID NO: 888874 - DNA, 33 bp, Homo sapien
atatttaccattatcttaatttctacatcttct

SEQ ID NO: 888875 - DNA, 33 bp, Homo sapien
tttgatgtgactggtacagacctccaactaaga

SEQ ID NO: 888876 - DNA, 33 bp, Homo sapien
tttgatgtgactggtatagacctccaactaaga

SEQ ID NO: 888877 - DNA, 33 bp, Homo sapien
tactaaacaagaatgacgtgctagttgcaggta

SEQ ID NO: 888878 - DNA, 33 bp, Homo sapien
tactaaacaagaatgaggtgctagttgcaggta

SEQ ID NO: 888879 - DNA, 33 bp, Homo sapien
catgcaggaaatggaaatgataccaaagttgca

SEQ ID NO: 888880 - DNA, 33 bp, Homo sapien
catgcaggaaatggaagtgataccaaagttgca

SEQ ID NO: 888881 - DNA, 33 bp, Homo sapien
ccttgtcagagaaccacggtagttacgaggcca

SEQ ID NO: 888882 - DNA, 33 bp, Homo sapien
ccttgtcagagaaccatggtagttacgaggcca

SEQ ID NO: 888883 - DNA, 33 bp, Homo sapien
tatttgcatgatctgacagtgaaatttttcgcc

SEQ ID NO: 888884 - DNA, 33 bp, Homo sapien
tatttgcatgatctgagagtgaaatttttcgcc

SEQ ID NO: 888885 - DNA, 33 bp, Homo sapien
gttttgatgagaaggaagactaaaacataatca

SEQ ID NO: 888886 - DNA, 33 bp, Homo sapien
gttttgatgagaaggatgactaaaacataatca

SEQ ID NO: 888887 - DNA, 33 bp, Homo sapien
cacatcgcatctctcaaaacaatgcatttctga

SEQ ID NO: 888888 - DNA, 33 bp, Homo sapien
cacatcgcatctctcacaacaatgcatttctga

SEQ ID NO: 888889 - DNA, 33 bp, Homo sapien
tgagaagtcaaccttacgcctacttctctaggc

SEQ ID NO: 888890 - DNA, 33 bp, Homo sapien
tgagaagtcaaccttatgcctacttctctaggc

SEQ ID NO: 888891 - DNA, 33 bp, Homo sapien
accacagtaagatgacgatagttaacaataata

SEQ ID NO: 888892 - DNA, 33 bp, Homo sapien
accacagtaagatgactatagttaacaataata

SEQ ID NO: 888893 - DNA, 33 bp, Homo sapien
ttaatttcaacaaagagtatagtcaccttgaag

SEQ ID NO: 888894 - DNA, 33 bp, Homo sapien
ttaatttcaacaaagattatagtcaccttgaag

SEQ ID NO: 888895 - DNA, 33 bp, Homo sapien
caactagaacacacaccgatattagtctaggtt

SEQ ID NO: 888896 - DNA, 33 bp, Homo sapien
caactagaacacacacggatattagtctaggtt

SEQ ID NO: 888897 - DNA, 33 bp, Homo sapien
cagggagaaaaactaaagtgagaagaaagttga

SEQ ID NO: 888898 - DNA, 33 bp, Homo sapien
cagggagaaaaactaaggtgagaagaaagttga

SEQ ID NO: 888899 - DNA, 33 bp, Homo sapien
ttcttgattgcgcacaaaaatagagtgatgttt

SEQ ID NO: 888900 - DNA, 33 bp, Homo sapien
ttcttgattgcgcacagaaatagagtgatgttt

SEQ ID NO: 888901 - DNA, 33 bp, Homo sapien
aaagatatagaagacccgagaattggctctaat

SEQ ID NO: 888902 - DNA, 33 bp, Homo sapien
aaagatatagaagacctgagaattggctctaat

SEQ ID NO: 888903 - DNA, 33 bp, Homo sapien
caaggggattgaggataaatgcaagaacgtgcc

SEQ ID NO: 888904 - DNA, 33 bp, Homo sapien
caaggggattgaggatgaatgcaagaacgtgcc

SEQ ID NO: 888905 - DNA, 33 bp, Homo sapien
ccattaagtctttctcacctgatgttagtgtta

SEQ ID NO: 888906 - DNA, 33 bp, Homo sapien
ccattaagtctttctctcctgatgttagtgtta

SEQ ID NO: 888907 - DNA, 33 bp, Homo sapien
atacttatacttcttacatactggctactcctg

SEQ ID NO: 888908 - DNA, 33 bp, Homo sapien
atacttatacttcttagatactggctactcctg

SEQ ID NO: 888909 - DNA, 33 bp, Homo sapien
acacacacatacacgcaaatgaagagaggccat

SEQ ID NO: 888910 - DNA, 33 bp, Homo sapien
acacacacatacacgcgaatgaagagaggccat

SEQ ID NO: 888911 - DNA, 33 bp, Homo sapien
cttaggggtgataataactgcagaagacagaat

SEQ ID NO: 888912 - DNA, 33 bp, Homo sapien
cttaggggtgataatagctgcagaagacagaat

SEQ ID NO: 888913 - DNA, 33 bp, Homo sapien
cagttttcaaaatgtcaaaatagcctaaatgtc

SEQ ID NO: 888914 - DNA, 33 bp, Homo sapien
cagttttcaaaatgtcgaaatagcctaaatgtc

SEQ ID NO: 888915 - DNA, 33 bp, Homo sapien
aagcatgataattgaacatgaggtttgggcagg

SEQ ID NO: 888916 - DNA, 33 bp, Homo sapien
aagcatgataattgaagatgaggtttgggcagg

SEQ ID NO: 888917 - DNA, 33 bp, Homo sapien
ctggcatctacacaaccaagagaaaatgctgca

SEQ ID NO: 888918 - DNA, 33 bp, Homo sapien
ctggcatctacacaactaagagaaaatgctgca

SEQ ID NO: 888919 - DNA, 33 bp, Homo sapien
accacctgtagtggtacctattcaggacgctgg

SEQ ID NO: 888920 - DNA, 33 bp, Homo sapien
accacctgtagtggtagctattcaggacgctgg

SEQ ID NO: 888921 - DNA, 33 bp, Homo sapien
atttaagtttacattaccattattgacttaacc

SEQ ID NO: 888922 - DNA, 33 bp, Homo sapien
atttaagtttacattatcattattgacttaacc

SEQ ID NO: 888923 - DNA, 33 bp, Homo sapien
attatttcgctattgacagattaaaaaaatagt

SEQ ID NO: 888924 - DNA, 33 bp, Homo sapien
attatttcgctattgagagattaaaaaaatagt

SEQ ID NO: 888925 - DNA, 33 bp, Homo sapien
cattttcttgtcacaacatctctgcacgctagt

SEQ ID NO: 888926 - DNA, 33 bp, Homo sapien
cattttcttgtcacaatatctctgcacgctagt

SEQ ID NO: 888927 - DNA, 33 bp, Homo sapien
gttctctttctaaaagacggtgccaatcaagat

SEQ ID NO: 888928 - DNA, 33 bp, Homo sapien
gttctctttctaaaaggcggtgccaatcaagat

SEQ ID NO: 888929 - DNA, 33 bp, Homo sapien
atatatgatcactccccaataaactgggttttt

SEQ ID NO: 888930 - DNA, 33 bp, Homo sapien
atatatgatcactcccgaataaactgggttttt

SEQ ID NO: 888931 - DNA, 33 bp, Homo sapien
gtaggcctgaaacaaaaaataagttgcttatct

SEQ ID NO: 888932 - DNA, 33 bp, Homo sapien
gtaggcctgaaacaaagaataagttgcttatct

SEQ ID NO: 888933 - DNA, 33 bp, Homo sapien
agatgtgagggtatctcaagtattcctaccagc

SEQ ID NO: 888934 - DNA, 33 bp, Homo sapien
agatgtgagggtatctgaagtattcctaccagc

SEQ ID NO: 888935 - DNA, 33 bp, Homo sapien
ggtcactgagaaaaataactatggcttgaacta

SEQ ID NO: 888936 - DNA, 33 bp, Homo sapien
ggtcactgagaaaaatgactatggcttgaacta

SEQ ID NO: 888937 - DNA, 33 bp, Homo sapien
catgaagaacagttcaataattttaacttaggc

SEQ ID NO: 888938 - DNA, 33 bp, Homo sapien
catgaagaacagttcagtaattttaacttaggc

SEQ ID NO: 888939 - DNA, 33 bp, Homo sapien
atggaaaaaagaacaaaagcactgaggatgttg

SEQ ID NO: 888940 - DNA, 33 bp, Homo sapien
atggaaaaaagaacaagagcactgaggatgttg

SEQ ID NO: 888941 - DNA, 33 bp, Homo sapien
gtatgtgaaggaagaaaccacttatacatttgt

SEQ ID NO: 888942 - DNA, 33 bp, Homo sapien
gtatgtgaaggaagaagccacttatacatttgt

SEQ ID NO: 888943 - DNA, 33 bp, Homo sapien
aactaggtctgaaagccgagaacagtcttcaca

SEQ ID NO: 888944 - DNA, 33 bp, Homo sapien
aactaggtctgaaagctgagaacagtcttcaca

SEQ ID NO: 888945 - DNA, 33 bp, Homo sapien
tgaagaaattgccttacatgatagtacatgaac

SEQ ID NO: 888946 - DNA, 33 bp, Homo sapien
tgaagaaattgccttagatgatagtacatgaac

SEQ ID NO: 888947 - DNA, 33 bp, Homo sapien
gcatggggtagctaagcataaaagatatagcca

SEQ ID NO: 888948 - DNA, 33 bp, Homo sapien
gcatggggtagctaaggataaaagatatagcca

SEQ ID NO: 888949 - DNA, 33 bp, Homo sapien
tagagagttatcccaaaaaggcagatgaattag

SEQ ID NO: 888950 - DNA, 33 bp, Homo sapien
tagagagttatcccaacaaggcagatgaattag

SEQ ID NO: 888951 - DNA, 33 bp, Homo sapien
tgaaatcttgattaggccacacaaagcatgata

SEQ ID NO: 888952 - DNA, 33 bp, Homo sapien
tgaaatcttgattaggtcacacaaagcatgata

SEQ ID NO: 888953 - DNA, 33 bp, Homo sapien
tacgaaaaaagaagctcacatctaacaaataac

SEQ ID NO: 888954 - DNA, 33 bp, Homo sapien
tacgaaaaaagaagctgacatctaacaaataac

SEQ ID NO: 888955 - DNA, 33 bp, Homo sapien
cctataaaatgctacaacttgaacgtgttaagt

SEQ ID NO: 888956 - DNA, 33 bp, Homo sapien
cctataaaatgctacagcttgaacgtgttaagt

SEQ ID NO: 888957 - DNA, 33 bp, Homo sapien
gcttaaacctcaagccaagtgggcactaacata

SEQ ID NO: 888958 - DNA, 33 bp, Homo sapien
gcttaaacctcaagccgagtgggcactaacata

SEQ ID NO: 888959 - DNA, 33 bp, Homo sapien
aagactttctgaaagccgaaaatagtttctagt

SEQ ID NO: 888960 - DNA, 33 bp, Homo sapien
aagactttctgaaagctgaaaatagtttctagt

SEQ ID NO: 888961 - DNA, 33 bp, Homo sapien
tgacaacagtcacttacgaaaaacccacagata

SEQ ID NO: 888962 - DNA, 33 bp, Homo sapien
tgacaacagtcacttatgaaaaacccacagata

SEQ ID NO: 888963 - DNA, 33 bp, Homo sapien
tgtgaaagcattaaacagcaccagtaaaataaa

SEQ ID NO: 888964 - DNA, 33 bp, Homo sapien
tgtgaaagcattaaacggcaccagtaaaataaa

SEQ ID NO: 888965 - DNA, 33 bp, Homo sapien
tgggtgtatatctaacaatggaattgcagggtc

SEQ ID NO: 888966 - DNA, 33 bp, Homo sapien
tgggtgtatatctaactatggaattgcagggtc

SEQ ID NO: 888967 - DNA, 33 bp, Homo sapien
taatttcagtggtttcaaaattgttgagacttt

SEQ ID NO: 888968 - DNA, 33 bp, Homo sapien
taatttcagtggtttcgaaattgttgagacttt

SEQ ID NO: 888969 - DNA, 33 bp, Homo sapien
tttaaaattgggaagtcacaaagccttttgtat

SEQ ID NO: 888970 - DNA, 33 bp, Homo sapien
tttaaaattgggaagtgacaaagccttttgtat

SEQ ID NO: 888971 - DNA, 33 bp, Homo sapien
aatagtatcttcataacgtttcttattccagaa

SEQ ID NO: 888972 - DNA, 33 bp, Homo sapien
aatagtatcttcataatgtttcttattccagaa

SEQ ID NO: 888973 - DNA, 33 bp, Homo sapien
gggttagtaggagtgcagataactgggattgta

SEQ ID NO: 888974 - DNA, 33 bp, Homo sapien
gggttagtaggagtgcggataactgggattgta

SEQ ID NO: 888975 - DNA, 33 bp, Homo sapien
ttccgcaaaaagagaacgtacaagagccttgtg

SEQ ID NO: 888976 - DNA, 33 bp, Homo sapien
ttccgcaaaaagagaaggtacaagagccttgtg

SEQ ID NO: 888977 - DNA, 33 bp, Homo sapien
tataccttcctagaccagcttatgtgaaaaagc

SEQ ID NO: 888978 - DNA, 33 bp, Homo sapien
tataccttcctagacccgcttatgtgaaaaagc

SEQ ID NO: 888979 - DNA, 33 bp, Homo sapien
atgtgaaaaagcatacaaacccatcatttcact

SEQ ID NO: 888980 - DNA, 33 bp, Homo sapien
atgtgaaaaagcatacgaacccatcatttcact

SEQ ID NO: 888981 - DNA, 33 bp, Homo sapien
tactccttggttgaaacagttacctcaattctg

SEQ ID NO: 888982 - DNA, 33 bp, Homo sapien
tactccttggttgaaatagttacctcaattctg

SEQ ID NO: 888983 - DNA, 33 bp, Homo sapien
gtgaaatgtttatgtccaatatccatccagtct

SEQ ID NO: 888984 - DNA, 33 bp, Homo sapien
gtgaaatgtttatgtctaatatccatccagtct

SEQ ID NO: 888985 - DNA, 33 bp, Homo sapien
atgattgacagaaacaacgtattgaggtatgat

SEQ ID NO: 888986 - DNA, 33 bp, Homo sapien
atgattgacagaaacaccgtattgaggtatgat

SEQ ID NO: 888987 - DNA, 33 bp, Homo sapien
attcctaagctccagcaataactatggaaaata

SEQ ID NO: 888988 - DNA, 33 bp, Homo sapien
attcctaagctccagcgataactatggaaaata

SEQ ID NO: 888989 - DNA, 33 bp, Homo sapien
caaaatataaagtgaagggtaacctatcagtct

SEQ ID NO: 888990 - DNA, 33 bp, Homo sapien
caaaatataaagtgaatggtaacctatcagtct

SEQ ID NO: 888991 - DNA, 33 bp, Homo sapien
atttatacatgaaggacaatcagtctaccataa

SEQ ID NO: 888992 - DNA, 33 bp, Homo sapien
atttatacatgaaggagaatcagtctaccataa

SEQ ID NO: 888993 - DNA, 33 bp, Homo sapien
caaaagcagtgctccacgaagattgccacctct

SEQ ID NO: 888994 - DNA, 33 bp, Homo sapien
caaaagcagtgctccatgaagattgccacctct

SEQ ID NO: 888995 - DNA, 33 bp, Homo sapien
ttcctccctcattcccagaagaacagaatacta

SEQ ID NO: 888996 - DNA, 33 bp, Homo sapien
ttcctccctcattcccggaagaacagaatacta

SEQ ID NO: 888997 - DNA, 33 bp, Homo sapien
aaaagacaatacctcacgaacttggagtagaaa

SEQ ID NO: 888998 - DNA, 33 bp, Homo sapien
aaaagacaatacctcatgaacttggagtagaaa

SEQ ID NO: 888999 - DNA, 33 bp, Homo sapien
gtaacaagattaaatcactagtacaaagtcagc

SEQ ID NO: 889000 - DNA, 33 bp, Homo sapien
gtaacaagattaaatcgctagtacaaagtcagc

SEQ ID NO: 889001 - DNA, 33 bp, Homo sapien
tggtgtattacttgtacgccagagattacaaag

SEQ ID NO: 889002 - DNA, 33 bp, Homo sapien
tggtgtattacttgtatgccagagattacaaag

SEQ ID NO: 889003 - DNA, 33 bp, Homo sapien
agatatacacatatggacattctgtttatgcaa

SEQ ID NO: 889004 - DNA, 33 bp, Homo sapien
agatatacacatatggtcattctgtttatgcaa

SEQ ID NO: 889005 - DNA, 33 bp, Homo sapien
aaggcacttttagttacaagtgatgctcaggag

SEQ ID NO: 889006 - DNA, 33 bp, Homo sapien
aaggcacttttagttataagtgatgctcaggag

SEQ ID NO: 889007 - DNA, 33 bp, Homo sapien
ttttagggtggttggccatagagcaaatgtaaa

SEQ ID NO: 889008 - DNA, 33 bp, Homo sapien
ttttagggtggttggctatagagcaaatgtaaa

SEQ ID NO: 889009 - DNA, 33 bp, Homo sapien
ttaaccaatcacctaacgttggatatttattaa

SEQ ID NO: 889010 - DNA, 33 bp, Homo sapien
ttaaccaatcacctaatgttggatatttattaa

SEQ ID NO: 889011 - DNA, 33 bp, Homo sapien
gtgctaaaaccaggaaagtatcaggcaaactag

SEQ ID NO: 889012 - DNA, 33 bp, Homo sapien
gtgctaaaaccaggaacgtatcaggcaaactag

SEQ ID NO: 889013 - DNA, 33 bp, Homo sapien
cttctgtctcaggacaatccgtctcagggtaaa

SEQ ID NO: 889014 - DNA, 33 bp, Homo sapien
cttctgtctcaggacactccgtctcagggtaaa

SEQ ID NO: 889015 - DNA, 33 bp, Homo sapien
acagaagccagaaagactcgagagggtcaagag

SEQ ID NO: 889016 - DNA, 33 bp, Homo sapien
acagaagccagaaagattcgagagggtcaagag

SEQ ID NO: 889017 - DNA, 33 bp, Homo sapien
gaattgaggcttttccaactattgaatgtcctt

SEQ ID NO: 889018 - DNA, 33 bp, Homo sapien
gaattgaggcttttccgactattgaatgtcctt

SEQ ID NO: 889019 - DNA, 33 bp, Homo sapien
aggatcattttatgccagattgtgtggtcaatt

SEQ ID NO: 889020 - DNA, 33 bp, Homo sapien
aggatcattttatgcccgattgtgtggtcaatt

SEQ ID NO: 889021 - DNA, 33 bp, Homo sapien
atgagttgctaggtggcatagtaattctggtta

SEQ ID NO: 889022 - DNA, 33 bp, Homo sapien
atgagttgctaggtgggatagtaattctggtta

SEQ ID NO: 889023 - DNA, 33 bp, Homo sapien
agaagagaaaatcgaaaatggtatgttctcact

SEQ ID NO: 889024 - DNA, 33 bp, Homo sapien
agaagagaaaatcgaatatggtatgttctcact

SEQ ID NO: 889025 - DNA, 33 bp, Homo sapien
attaattgttttagcagaaggattcagtttttt

SEQ ID NO: 889026 - DNA, 33 bp, Homo sapien
attaattgttttagcataaggattcagtttttt

SEQ ID NO: 889027 - DNA, 33 bp, Homo sapien
tgtgtgtgtgtgtacaacgtgtggaaaattata

SEQ ID NO: 889028 - DNA, 33 bp, Homo sapien
tgtgtgtgtgtgtacatcgtgtggaaaattata

SEQ ID NO: 889029 - DNA, 33 bp, Homo sapien
gcagtgattgtggaaacgtacatagtagtctta

SEQ ID NO: 889030 - DNA, 33 bp, Homo sapien
gcagtgattgtggaaatgtacatagtagtctta

SEQ ID NO: 889031 - DNA, 33 bp, Homo sapien
gtcctaagttctagggaagatgctgagatttat

SEQ ID NO: 889032 - DNA, 33 bp, Homo sapien
gtcctaagttctagggcagatgctgagatttat

SEQ ID NO: 889033 - DNA, 33 bp, Homo sapien
taattgaagagttaacaatgactttctcagaaa

SEQ ID NO: 889034 - DNA, 33 bp, Homo sapien
taattgaagagttaacgatgactttctcagaaa

SEQ ID NO: 889035 - DNA, 33 bp, Homo sapien
aggagaggacactcagaaaatgaataagtttga

SEQ ID NO: 889036 - DNA, 33 bp, Homo sapien
aggagaggacactcaggaaatgaataagtttga

SEQ ID NO: 889037 - DNA, 33 bp, Homo sapien
ggtatattgagtgaaactaaggtgtgaggtaca

SEQ ID NO: 889038 - DNA, 33 bp, Homo sapien
ggtatattgagtgaaattaaggtgtgaggtaca

SEQ ID NO: 889039 - DNA, 33 bp, Homo sapien
ggatacaaaattgtcagacaaaaattactggca

SEQ ID NO: 889040 - DNA, 33 bp, Homo sapien
ggatacaaaattgtcatacaaaaattactggca

SEQ ID NO: 889041 - DNA, 33 bp, Homo sapien
gacacacccaggcttacaagtgaaaacaggatg

SEQ ID NO: 889042 - DNA, 33 bp, Homo sapien
gacacacccaggcttagaagtgaaaacaggatg

SEQ ID NO: 889043 - DNA, 33 bp, Homo sapien
gtggtttcctgaacataaggtgttttttcactc

SEQ ID NO: 889044 - DNA, 33 bp, Homo sapien
gtggtttcctgaacatgaggtgttttttcactc

SEQ ID NO: 889045 - DNA, 33 bp, Homo sapien
taattatctaatccctaactctctccatagata

SEQ ID NO: 889046 - DNA, 33 bp, Homo sapien
taattatctaatccctgactctctccatagata

SEQ ID NO: 889047 - DNA, 33 bp, Homo sapien
tccctgaaagacaaacaagcctaccacagcatg

SEQ ID NO: 889048 - DNA, 33 bp, Homo sapien
tccctgaaagacaaactagcctaccacagcatg

SEQ ID NO: 889049 - DNA, 33 bp, Homo sapien
tgctaccatctttcccagcttgaagaatggctt

SEQ ID NO: 889050 - DNA, 33 bp, Homo sapien
tgctaccatctttcccggcttgaagaatggctt

SEQ ID NO: 889051 - DNA, 33 bp, Homo sapien
cttcagaagataatacaaattgcaacgtgtaat

SEQ ID NO: 889052 - DNA, 33 bp, Homo sapien
cttcagaagataatacgaattgcaacgtgtaat

SEQ ID NO: 889053 - DNA, 33 bp, Homo sapien
aaacagttatctttagaatttacattatctgtt

SEQ ID NO: 889054 - DNA, 33 bp, Homo sapien
aaacagttatctttagcatttacattatctgtt

SEQ ID NO: 889055 - DNA, 33 bp, Homo sapien
atgtgtcacgctaccacgtagaaatttacaaat

SEQ ID NO: 889056 - DNA, 33 bp, Homo sapien
atgtgtcacgctaccatgtagaaatttacaaat

SEQ ID NO: 889057 - DNA, 33 bp, Homo sapien
ctttaaccttcatttcaattcctccaggtctca

SEQ ID NO: 889058 - DNA, 33 bp, Homo sapien
ctttaaccttcatttcgattcctccaggtctca

SEQ ID NO: 889059 - DNA, 33 bp, Homo sapien
ggaggccatgccagaacgaaatatcaagcagaa

SEQ ID NO: 889060 - DNA, 33 bp, Homo sapien
ggaggccatgccagaatgaaatatcaagcagaa

SEQ ID NO: 889061 - DNA, 33 bp, Homo sapien
aataagcccatcttgtgaattataggtgtattc

SEQ ID NO: 889062 - DNA, 33 bp, Homo sapien
aataagcccatcttgttaattataggtgtattc

SEQ ID NO: 889063 - DNA, 33 bp, Homo sapien
ggagtttggaagagaaaagtagggtaaagagga

SEQ ID NO: 889064 - DNA, 33 bp, Homo sapien
ggagtttggaagagaagagtagggtaaagagga

SEQ ID NO: 889065 - DNA, 33 bp, Homo sapien
ggtgctataataaacaatatgtatgctttatca

SEQ ID NO: 889066 - DNA, 33 bp, Homo sapien
ggtgctataataaacagtatgtatgctttatca

SEQ ID NO: 889067 - DNA, 33 bp, Homo sapien
tgtggatcctcagaaaatgcacagaaagaaggc

SEQ ID NO: 889068 - DNA, 33 bp, Homo sapien
tgtggatcctcagaaattgcacagaaagaaggc

SEQ ID NO: 889069 - DNA, 33 bp, Homo sapien
tccactctggagtaaaggtacactgaagctgtc

SEQ ID NO: 889070 - DNA, 33 bp, Homo sapien
tccactctggagtaaatgtacactgaagctgtc

SEQ ID NO: 889071 - DNA, 33 bp, Homo sapien
gatacatagcagaatgcagacatgctttgtgat

SEQ ID NO: 889072 - DNA, 33 bp, Homo sapien
gatacatagcagaatggagacatgctttgtgat

SEQ ID NO: 889073 - DNA, 33 bp, Homo sapien
aggcgattggaataaacaggatgccgacgcctc

SEQ ID NO: 889074 - DNA, 33 bp, Homo sapien
aggcgattggaataaataggatgccgacgcctc

SEQ ID NO: 889075 - DNA, 33 bp, Homo sapien
caaattcagtttgtaacctcaaaacactagcaa

SEQ ID NO: 889076 - DNA, 33 bp, Homo sapien
caaattcagtttgtaagctcaaaacactagcaa

SEQ ID NO: 889077 - DNA, 33 bp, Homo sapien
ctttttcaaaatgggaaatgtgaagttaactag

SEQ ID NO: 889078 - DNA, 33 bp, Homo sapien
ctttttcaaaatgggagatgtgaagttaactag

SEQ ID NO: 889079 - DNA, 33 bp, Homo sapien
ctgatgtccctggaaacgcctattaatcttgca

SEQ ID NO: 889080 - DNA, 33 bp, Homo sapien
ctgatgtccctggaaatgcctattaatcttgca

SEQ ID NO: 889081 - DNA, 33 bp, Homo sapien
gttcactcgagagagacactgaattctatagaa

SEQ ID NO: 889082 - DNA, 33 bp, Homo sapien
gttcactcgagagagagactgaattctatagaa

SEQ ID NO: 889083 - DNA, 33 bp, Homo sapien
ttagtataatgatcccaaaagtctgagcaagca

SEQ ID NO: 889084 - DNA, 33 bp, Homo sapien
ttagtataatgatcccgaaagtctgagcaagca

SEQ ID NO: 889085 - DNA, 33 bp, Homo sapien
agctcaaattgagacaaactattctggcaggag

SEQ ID NO: 889086 - DNA, 33 bp, Homo sapien
agctcaaattgagacagactattctggcaggag

SEQ ID NO: 889087 - DNA, 33 bp, Homo sapien
tcctatgccactttcagatacaattttactggc

SEQ ID NO: 889088 - DNA, 33 bp, Homo sapien
tcctatgccactttcatatacaattttactggc

SEQ ID NO: 889089 - DNA, 33 bp, Homo sapien
ccctcagctcaaaagacacagcttttttactct

SEQ ID NO: 889090 - DNA, 33 bp, Homo sapien
ccctcagctcaaaagagacagcttttttactct

SEQ ID NO: 889091 - DNA, 33 bp, Homo sapien
ttaagaatattgacaactgaaacttactattta

SEQ ID NO: 889092 - DNA, 33 bp, Homo sapien
ttaagaatattgacaattgaaacttactattta

SEQ ID NO: 889093 - DNA, 33 bp, Homo sapien
ctaaagcacagtctgcaagaataaactttgtaa

SEQ ID NO: 889094 - DNA, 33 bp, Homo sapien
ctaaagcacagtctgcgagaataaactttgtaa

SEQ ID NO: 889095 - DNA, 33 bp, Homo sapien
tatccaaactcaaatcaactcatgcctagatat

SEQ ID NO: 889096 - DNA, 33 bp, Homo sapien
tatccaaactcaaatccactcatgcctagatat

SEQ ID NO: 889097 - DNA, 33 bp, Homo sapien
ctagatgcaacagtatgacaacaatagccacgc

SEQ ID NO: 889098 - DNA, 33 bp, Homo sapien
ctagatgcaacagtattacaacaatagccacgc

SEQ ID NO: 889099 - DNA, 33 bp, Homo sapien
gatataggtattgataagaatgaatttgagaaa

SEQ ID NO: 889100 - DNA, 33 bp, Homo sapien
gatataggtattgataggaatgaatttgagaaa

SEQ ID NO: 889101 - DNA, 33 bp, Homo sapien
gtcaaagaaccttaccactttgtagcttgcaca

SEQ ID NO: 889102 - DNA, 33 bp, Homo sapien
gtcaaagaaccttaccgctttgtagcttgcaca

SEQ ID NO: 889103 - DNA, 33 bp, Homo sapien
tgctttttgtcacataacattttagcttttaag

SEQ ID NO: 889104 - DNA, 33 bp, Homo sapien
tgctttttgtcacatagcattttagcttttaag

SEQ ID NO: 889105 - DNA, 33 bp, Homo sapien
aaacagatgatcaaaactgattgagcttactta

SEQ ID NO: 889106 - DNA, 33 bp, Homo sapien
aaacagatgatcaaaagtgattgagcttactta

SEQ ID NO: 889107 - DNA, 33 bp, Homo sapien
ctgacatagaagaccagcaggcgaccaaggggg

SEQ ID NO: 889108 - DNA, 33 bp, Homo sapien
ctgacatagaagaccatcaggcgaccaaggggg

SEQ ID NO: 889109 - DNA, 33 bp, Homo sapien
atgaatatttccaaaagaactgattctgtttgt

SEQ ID NO: 889110 - DNA, 33 bp, Homo sapien
atgaatatttccaaaataactgattctgtttgt

SEQ ID NO: 889111 - DNA, 33 bp, Homo sapien
ttgggactaacataacactagaatggaagcttc

SEQ ID NO: 889112 - DNA, 33 bp, Homo sapien
ttgggactaacataactctagaatggaagcttc

SEQ ID NO: 889113 - DNA, 33 bp, Homo sapien
aatgcactttcccatcaagaaatataaaagtgc

SEQ ID NO: 889114 - DNA, 33 bp, Homo sapien
aatgcactttcccatcgagaaatataaaagtgc

SEQ ID NO: 889115 - DNA, 33 bp, Homo sapien
gtgtatataggtaccacgatactatgctgaatt

SEQ ID NO: 889116 - DNA, 33 bp, Homo sapien
gtgtatataggtaccaggatactatgctgaatt

SEQ ID NO: 889117 - DNA, 33 bp, Homo sapien
tcttgattgagtatcacggcttctgataaaatc

SEQ ID NO: 889118 - DNA, 33 bp, Homo sapien
tcttgattgagtatcatggcttctgataaaatc

SEQ ID NO: 889119 - DNA, 33 bp, Homo sapien
ccatgttgagaacacacggagacagagatgtat

SEQ ID NO: 889120 - DNA, 33 bp, Homo sapien
ccatgttgagaacacagggagacagagatgtat

SEQ ID NO: 889121 - DNA, 33 bp, Homo sapien
gagctgcctaatttcacggcacaagagaaaaat

SEQ ID NO: 889122 - DNA, 33 bp, Homo sapien
gagctgcctaatttcagggcacaagagaaaaat

SEQ ID NO: 889123 - DNA, 33 bp, Homo sapien
gctctacctgcaacaccggggaggtcacatttc

SEQ ID NO: 889124 - DNA, 33 bp, Homo sapien
gctctacctgcaacactggggaggtcacatttc

SEQ ID NO: 889125 - DNA, 33 bp, Homo sapien
ataattgtgactaagtcaaaatgttccccgtga

SEQ ID NO: 889126 - DNA, 33 bp, Homo sapien
ataattgtgactaagttaaaatgttccccgtga

SEQ ID NO: 889127 - DNA, 33 bp, Homo sapien
gatttgttttcagtggccacatatcaagcccat

SEQ ID NO: 889128 - DNA, 33 bp, Homo sapien
gatttgttttcagtgggcacatatcaagcccat

SEQ ID NO: 889129 - DNA, 33 bp, Homo sapien
cagcatctataaccaactaacctggagcctcat

SEQ ID NO: 889130 - DNA, 33 bp, Homo sapien
cagcatctataaccaattaacctggagcctcat

SEQ ID NO: 889131 - DNA, 33 bp, Homo sapien
aaaaaatcttgtttagccaatcagaataataca

SEQ ID NO: 889132 - DNA, 33 bp, Homo sapien
aaaaaatcttgtttagtcaatcagaataataca

SEQ ID NO: 889133 - DNA, 33 bp, Homo sapien
ctaaaaatgatgtttaacctctacacaaataaa

SEQ ID NO: 889134 - DNA, 33 bp, Homo sapien
ctaaaaatgatgtttatcctctacacaaataaa

SEQ ID NO: 889135 - DNA, 33 bp, Homo sapien
aattgaatggaacaaccgaacaagaacatgaac

SEQ ID NO: 889136 - DNA, 33 bp, Homo sapien
aattgaatggaacaactgaacaagaacatgaac

SEQ ID NO: 889137 - DNA, 33 bp, Homo sapien
aagatagttatagagaatccactccctcacctt

SEQ ID NO: 889138 - DNA, 33 bp, Homo sapien
aagatagttatagagattccactccctcacctt

SEQ ID NO: 889139 - DNA, 33 bp, Homo sapien
agggagcaggtaaagacatgagtggagtgtgtt

SEQ ID NO: 889140 - DNA, 33 bp, Homo sapien
agggagcaggtaaagatatgagtggagtgtgtt

SEQ ID NO: 889141 - DNA, 33 bp, Homo sapien
tatttggcaacaaatacggagaataacagcaca

SEQ ID NO: 889142 - DNA, 33 bp, Homo sapien
tatttggcaacaaatatggagaataacagcaca

SEQ ID NO: 889143 - DNA, 33 bp, Homo sapien
agtttagcaggtgccactacaaaaagaaaacct

SEQ ID NO: 889144 - DNA, 33 bp, Homo sapien
agtttagcaggtgccattacaaaaagaaaacct

SEQ ID NO: 889145 - DNA, 33 bp, Homo sapien
ttttataataccagagcctacttacaaagttaa

SEQ ID NO: 889146 - DNA, 33 bp, Homo sapien
ttttataataccagagtctacttacaaagttaa

SEQ ID NO: 889147 - DNA, 33 bp, Homo sapien
tcacttagccaaagatgaacttatatacttatt

SEQ ID NO: 889148 - DNA, 33 bp, Homo sapien
tcacttagccaaagattaacttatatacttatt

SEQ ID NO: 889149 - DNA, 33 bp, Homo sapien
aacttcatggagagaccgggctttcatccctgt

SEQ ID NO: 889150 - DNA, 33 bp, Homo sapien
aacttcatggagagactgggctttcatccctgt

SEQ ID NO: 889151 - DNA, 33 bp, Homo sapien
cagccttctgtgacaccacactggccaatgggt

SEQ ID NO: 889152 - DNA, 33 bp, Homo sapien
cagccttctgtgacacgacactggccaatgggt

SEQ ID NO: 889153 - DNA, 33 bp, Homo sapien
aagaacggggcagcctaacaaaatgaaggcttt

SEQ ID NO: 889154 - DNA, 33 bp, Homo sapien
aagaacggggcagcctcacaaaatgaaggcttt

SEQ ID NO: 889155 - DNA, 33 bp, Homo sapien
acttattgagatggaaactactcttggaaaaca

SEQ ID NO: 889156 - DNA, 33 bp, Homo sapien
acttattgagatggaacctactcttggaaaaca

SEQ ID NO: 889157 - DNA, 33 bp, Homo sapien
tagttgtgttgagtccactgatgaacccatgat

SEQ ID NO: 889158 - DNA, 33 bp, Homo sapien
tagttgtgttgagtccgctgatgaacccatgat

SEQ ID NO: 889159 - DNA, 33 bp, Homo sapien
ttaagtaatagactcaaactctaaagttgaata

SEQ ID NO: 889160 - DNA, 33 bp, Homo sapien
ttaagtaatagactcatactctaaagttgaata

SEQ ID NO: 889161 - DNA, 33 bp, Homo sapien
gataggtaatagaaatcagagagtaaaattggc

SEQ ID NO: 889162 - DNA, 33 bp, Homo sapien
gataggtaatagaaatgagagagtaaaattggc

SEQ ID NO: 889163 - DNA, 33 bp, Homo sapien
gaaaactaatttaaaaagccaattcatgttata

SEQ ID NO: 889164 - DNA, 33 bp, Homo sapien
gaaaactaatttaaaaggccaattcatgttata

SEQ ID NO: 889165 - DNA, 33 bp, Homo sapien
caagattgatgtggaaaaactcagcatggtttt

SEQ ID NO: 889166 - DNA, 33 bp, Homo sapien
caagattgatgtggaagaactcagcatggtttt

SEQ ID NO: 889167 - DNA, 33 bp, Homo sapien
tttatctaacaaacagaaaatgtagagtccaga

SEQ ID NO: 889168 - DNA, 33 bp, Homo sapien
tttatctaacaaacaggaaatgtagagtccaga

SEQ ID NO: 889169 - DNA, 33 bp, Homo sapien
tcttattataacttcacagtaactttgccagat

SEQ ID NO: 889170 - DNA, 33 bp, Homo sapien
tcttattataacttcatagtaactttgccagat

SEQ ID NO: 889171 - DNA, 33 bp, Homo sapien
acatactatatagctagcactggtctagttgtc

SEQ ID NO: 889172 - DNA, 33 bp, Homo sapien
acatactatatagctatcactggtctagttgtc

SEQ ID NO: 889173 - DNA, 33 bp, Homo sapien
cattacaagatttccaaaaagaatcaaaagtga

SEQ ID NO: 889174 - DNA, 33 bp, Homo sapien
cattacaagatttccagaaagaatcaaaagtga

SEQ ID NO: 889175 - DNA, 33 bp, Homo sapien
gcttgagtaaaggatacaggagtgtaaaggggt

SEQ ID NO: 889176 - DNA, 33 bp, Homo sapien
gcttgagtaaaggatataggagtgtaaaggggt

SEQ ID NO: 889177 - DNA, 33 bp, Homo sapien
gttcctaatttaataacaagagtttcccatttc

SEQ ID NO: 889178 - DNA, 33 bp, Homo sapien
gttcctaatttaataagaagagtttcccatttc

SEQ ID NO: 889179 - DNA, 33 bp, Homo sapien
atgtttaatcaggccaaatttttattatagcac

SEQ ID NO: 889180 - DNA, 33 bp, Homo sapien
atgtttaatcaggccacatttttattatagcac

SEQ ID NO: 889181 - DNA, 33 bp, Homo sapien
gataggcttatgtttacccatgccttttaaaga

SEQ ID NO: 889182 - DNA, 33 bp, Homo sapien
gataggcttatgtttagccatgccttttaaaga

SEQ ID NO: 889183 - DNA, 33 bp, Homo sapien
tcaccccattccaacactcttagaagtcttaat

SEQ ID NO: 889184 - DNA, 33 bp, Homo sapien
tcaccccattccaacattcttagaagtcttaat

SEQ ID NO: 889185 - DNA, 33 bp, Homo sapien
aaggtagtaagggacggaatcagtggggatggt

SEQ ID NO: 889186 - DNA, 33 bp, Homo sapien
aaggtagtaagggacgtaatcagtggggatggt

SEQ ID NO: 889187 - DNA, 33 bp, Homo sapien
tatgcacattcaactacaggaaccagctatgac

SEQ ID NO: 889188 - DNA, 33 bp, Homo sapien
tatgcacattcaactataggaaccagctatgac

SEQ ID NO: 889189 - DNA, 33 bp, Homo sapien
tatgagcagagtaacaatgcattaaaaccacaa

SEQ ID NO: 889190 - DNA, 33 bp, Homo sapien
tatgagcagagtaacagtgcattaaaaccacaa

SEQ ID NO: 889191 - DNA, 33 bp, Homo sapien
gtctactttgaggtaccatcttattctccctgg

SEQ ID NO: 889192 - DNA, 33 bp, Homo sapien
gtctactttgaggtactatcttattctccctgg

SEQ ID NO: 889193 - DNA, 33 bp, Homo sapien
agggtcctagaactgaaaagtattgacgaatgt

SEQ ID NO: 889194 - DNA, 33 bp, Homo sapien
agggtcctagaactgagaagtattgacgaatgt

SEQ ID NO: 889195 - DNA, 33 bp, Homo sapien
atgatttgtatttggaccatcttcaagttgcat

SEQ ID NO: 889196 - DNA, 33 bp, Homo sapien
atgatttgtatttggagcatcttcaagttgcat

SEQ ID NO: 889197 - DNA, 33 bp, Homo sapien
aataatacattaattcactaatctagctgatga

SEQ ID NO: 889198 - DNA, 33 bp, Homo sapien
aataatacattaattcgctaatctagctgatga

SEQ ID NO: 889199 - DNA, 33 bp, Homo sapien
aacttctcaacctgcacaaatgtgaactaaata

SEQ ID NO: 889200 - DNA, 33 bp, Homo sapien
aacttctcaacctgcagaaatgtgaactaaata

SEQ ID NO: 889201 - DNA, 33 bp, Homo sapien
tgcaaacaatggttccccaggacaaatctctcc

SEQ ID NO: 889202 - DNA, 33 bp, Homo sapien
tgcaaacaatggttccgcaggacaaatctctcc

SEQ ID NO: 889203 - DNA, 33 bp, Homo sapien
ggagtgaaatctggaactaagtaagcataaaga

SEQ ID NO: 889204 - DNA, 33 bp, Homo sapien
ggagtgaaatctggaagtaagtaagcataaaga

SEQ ID NO: 889205 - DNA, 33 bp, Homo sapien
acattgagacgatgcccgattttggcaactgcc

SEQ ID NO: 889206 - DNA, 33 bp, Homo sapien
acattgagacgatgcctgattttggcaactgcc

SEQ ID NO: 889207 - DNA, 33 bp, Homo sapien
tggtagctttgactagaaaatagatgacctgcc

SEQ ID NO: 889208 - DNA, 33 bp, Homo sapien
tggtagctttgactaggaaatagatgacctgcc

SEQ ID NO: 889209 - DNA, 33 bp, Homo sapien
cataacctagaaaagcacttgaaaagcattcca

SEQ ID NO: 889210 - DNA, 33 bp, Homo sapien
cataacctagaaaagcccttgaaaagcattcca

SEQ ID NO: 889211 - DNA, 33 bp, Homo sapien
tggcaaattagtcaaacaacttggttactttaa

SEQ ID NO: 889212 - DNA, 33 bp, Homo sapien
tggcaaattagtcaaagaacttggttactttaa

SEQ ID NO: 889213 - DNA, 33 bp, Homo sapien
ctaccattggacacacaaatctcattagtaggt

SEQ ID NO: 889214 - DNA, 33 bp, Homo sapien
ctaccattggacacaccaatctcattagtaggt

SEQ ID NO: 889215 - DNA, 33 bp, Homo sapien
tttgctgtgaagtaaactccgtaatcaggtaat

SEQ ID NO: 889216 - DNA, 33 bp, Homo sapien
tttgctgtgaagtaaattccgtaatcaggtaat

SEQ ID NO: 889217 - DNA, 33 bp, Homo sapien
aggtgccagtaatgaacagagattggatttttg

SEQ ID NO: 889218 - DNA, 33 bp, Homo sapien
aggtgccagtaatgaagagagattggatttttg

SEQ ID NO: 889219 - DNA, 33 bp, Homo sapien
ctggcatcatgatacaaaaaacattgagcagtc

SEQ ID NO: 889220 - DNA, 33 bp, Homo sapien
ctggcatcatgatacataaaacattgagcagtc

SEQ ID NO: 889221 - DNA, 33 bp, Homo sapien
agagaattataaaacaatcggctaattttaatc

SEQ ID NO: 889222 - DNA, 33 bp, Homo sapien
agagaattataaaacagtcggctaattttaatc

SEQ ID NO: 889223 - DNA, 33 bp, Homo sapien
gagctaaaatgatataagcaataggacttactg

SEQ ID NO: 889224 - DNA, 33 bp, Homo sapien
gagctaaaatgatatacgcaataggacttactg

SEQ ID NO: 889225 - DNA, 33 bp, Homo sapien
taattcctcagttccaatcaagaccaatgaaat

SEQ ID NO: 889226 - DNA, 33 bp, Homo sapien
taattcctcagttccactcaagaccaatgaaat

SEQ ID NO: 889227 - DNA, 33 bp, Homo sapien
aagtactgaacacaaccaacatttgacaagatc

SEQ ID NO: 889228 - DNA, 33 bp, Homo sapien
aagtactgaacacaacgaacatttgacaagatc

SEQ ID NO: 889229 - DNA, 33 bp, Homo sapien
aaaagttagaagagaacgaggtgaaggtaatat

SEQ ID NO: 889230 - DNA, 33 bp, Homo sapien
aaaagttagaagagaaggaggtgaaggtaatat

SEQ ID NO: 889231 - DNA, 33 bp, Homo sapien
taaccactcacaaatacaggtccagcttctttc

SEQ ID NO: 889232 - DNA, 33 bp, Homo sapien
taaccactcacaaatagaggtccagcttctttc

SEQ ID NO: 889233 - DNA, 33 bp, Homo sapien
gttatttaaatttcagaaaggcttgctctaaat

SEQ ID NO: 889234 - DNA, 33 bp, Homo sapien
gttatttaaatttcaggaaggcttgctctaaat

SEQ ID NO: 889235 - DNA, 33 bp, Homo sapien
taaaggaatcaaacaagttaatcatacttccta

SEQ ID NO: 889236 - DNA, 33 bp, Homo sapien
taaaggaatcaaacaatttaatcatacttccta

SEQ ID NO: 889237 - DNA, 33 bp, Homo sapien
ttaatcatacttcctaagagtcatgcactttta

SEQ ID NO: 889238 - DNA, 33 bp, Homo sapien
ttaatcatacttcctacgagtcatgcactttta

SEQ ID NO: 889239 - DNA, 33 bp, Homo sapien
tgtttatgtagctgaccatccttcaaagtgcga

SEQ ID NO: 889240 - DNA, 33 bp, Homo sapien
tgtttatgtagctgacgatccttcaaagtgcga

SEQ ID NO: 889241 - DNA, 33 bp, Homo sapien
caaattcaaaaggtcaagaggtaactgttctca

SEQ ID NO: 889242 - DNA, 33 bp, Homo sapien
caaattcaaaaggtcaggaggtaactgttctca

SEQ ID NO: 889243 - DNA, 33 bp, Homo sapien
taactgttctcaaaaacattcaaccagagattt

SEQ ID NO: 889244 - DNA, 33 bp, Homo sapien
taactgttctcaaaaatattcaaccagagattt

SEQ ID NO: 889245 - DNA, 33 bp, Homo sapien
gttgcaagatgaaatgaagtggtgcagtcataa

SEQ ID NO: 889246 - DNA, 33 bp, Homo sapien
gttgcaagatgaaatggagtggtgcagtcataa

SEQ ID NO: 889247 - DNA, 33 bp, Homo sapien
aagcagttactctttgaaggctaaatgatgtta

SEQ ID NO: 889248 - DNA, 33 bp, Homo sapien
aagcagttactctttggaggctaaatgatgtta

SEQ ID NO: 889249 - DNA, 33 bp, Homo sapien
catgcctaatgccagacagtcttcgtttactac

SEQ ID NO: 889250 - DNA, 33 bp, Homo sapien
catgcctaatgccagagagtcttcgtttactac

SEQ ID NO: 889251 - DNA, 33 bp, Homo sapien
ttggaactcagaagaaagatctggtttgcagac

SEQ ID NO: 889252 - DNA, 33 bp, Homo sapien
ttggaactcagaagaaggatctggtttgcagac

SEQ ID NO: 889253 - DNA, 33 bp, Homo sapien
gatttgagagaaaagcagatcaacttgacttat

SEQ ID NO: 889254 - DNA, 33 bp, Homo sapien
gatttgagagaaaagcggatcaacttgacttat

SEQ ID NO: 889255 - DNA, 33 bp, Homo sapien
tgttgagttgggtcgagagattacattagtgtc

SEQ ID NO: 889256 - DNA, 33 bp, Homo sapien
tgttgagttgggtcgatagattacattagtgtc

SEQ ID NO: 889257 - DNA, 33 bp, Homo sapien
tgatagacaagcctcaagtgctacacattcatt

SEQ ID NO: 889258 - DNA, 33 bp, Homo sapien
tgatagacaagcctcaggtgctacacattcatt

SEQ ID NO: 889259 - DNA, 33 bp, Homo sapien
tcactgcagccacaataaaatttgaaacaggag

SEQ ID NO: 889260 - DNA, 33 bp, Homo sapien
tcactgcagccacaatgaaatttgaaacaggag

SEQ ID NO: 889261 - DNA, 33 bp, Homo sapien
accaaggccaattcaaaaagagggctcgagggt

SEQ ID NO: 889262 - DNA, 33 bp, Homo sapien
accaaggccaattcaacaagagggctcgagggt

SEQ ID NO: 889263 - DNA, 33 bp, Homo sapien
ctcttttctccatagaacttaccataattccat

SEQ ID NO: 889264 - DNA, 33 bp, Homo sapien
ctcttttctccatagaccttaccataattccat

SEQ ID NO: 889265 - DNA, 33 bp, Homo sapien
tatcttggcctcttggcagcaaagtgatgggat

SEQ ID NO: 889266 - DNA, 33 bp, Homo sapien
tatcttggcctcttgggagcaaagtgatgggat

SEQ ID NO: 889267 - DNA, 33 bp, Homo sapien
tctctccagtttccaagttgaaaatccctgata

SEQ ID NO: 889268 - DNA, 33 bp, Homo sapien
tctctccagtttccaatttgaaaatccctgata

SEQ ID NO: 889269 - DNA, 33 bp, Homo sapien
gaaatcaaagtcttgaacgaaagaatgatatca

SEQ ID NO: 889270 - DNA, 33 bp, Homo sapien
gaaatcaaagtcttgagcgaaagaatgatatca

SEQ ID NO: 889271 - DNA, 33 bp, Homo sapien
tttctaataaactcaacctgaatcgttttcacc

SEQ ID NO: 889272 - DNA, 33 bp, Homo sapien
tttctaataaactcaagctgaatcgttttcacc

SEQ ID NO: 889273 - DNA, 33 bp, Homo sapien
agaaatcacgagcaaaagcaactagttattaaa

SEQ ID NO: 889274 - DNA, 33 bp, Homo sapien
agaaatcacgagcaaaggcaactagttattaaa

SEQ ID NO: 889275 - DNA, 33 bp, Homo sapien
atgtgtcagcttatcaataaattttgacttttt

SEQ ID NO: 889276 - DNA, 33 bp, Homo sapien
atgtgtcagcttatcagtaaattttgacttttt

SEQ ID NO: 889277 - DNA, 33 bp, Homo sapien
aatcattggatatttaagctaagaaggactatt

SEQ ID NO: 889278 - DNA, 33 bp, Homo sapien
aatcattggatatttatgctaagaaggactatt

SEQ ID NO: 889279 - DNA, 33 bp, Homo sapien
acttgaatgctgttacacaagtttggaaagact

SEQ ID NO: 889280 - DNA, 33 bp, Homo sapien
acttgaatgctgttacccaagtttggaaagact

SEQ ID NO: 889281 - DNA, 33 bp, Homo sapien
ctttcactcaatgtcaacaaccctcatatgttt

SEQ ID NO: 889282 - DNA, 33 bp, Homo sapien
ctttcactcaatgtcagcaaccctcatatgttt

SEQ ID NO: 889283 - DNA, 33 bp, Homo sapien
gaacacttccctgaaaaataaatgcttaaatgt

SEQ ID NO: 889284 - DNA, 33 bp, Homo sapien
gaacacttccctgaaagataaatgcttaaatgt

SEQ ID NO: 889285 - DNA, 33 bp, Homo sapien
tatgtttggaaacacaatgaatggaaaaaaggg

SEQ ID NO: 889286 - DNA, 33 bp, Homo sapien
tatgtttggaaacacagtgaatggaaaaaaggg

SEQ ID NO: 889287 - DNA, 33 bp, Homo sapien
aaaaaatgcaagaaaacttgtatacttgggaaa

SEQ ID NO: 889288 - DNA, 33 bp, Homo sapien
aaaaaatgcaagaaaatttgtatacttgggaaa

SEQ ID NO: 889289 - DNA, 33 bp, Homo sapien
ttccccatggtaaaaaataaaaatacagacaaa

SEQ ID NO: 889290 - DNA, 33 bp, Homo sapien
ttccccatggtaaaaattaaaaatacagacaaa

SEQ ID NO: 889291 - DNA, 33 bp, Homo sapien
agcctgaggagaatcaacaaggatacttacagc

SEQ ID NO: 889292 - DNA, 33 bp, Homo sapien
agcctgaggagaatcagcaaggatacttacagc

SEQ ID NO: 889293 - DNA, 33 bp, Homo sapien
gaaacttaacacatgacagagctggattgaatt

SEQ ID NO: 889294 - DNA, 33 bp, Homo sapien
gaaacttaacacatgagagagctggattgaatt

SEQ ID NO: 889295 - DNA, 33 bp, Homo sapien
gtgattgatggtagaactgttgctgtagggcat

SEQ ID NO: 889296 - DNA, 33 bp, Homo sapien
gtgattgatggtagaattgttgctgtagggcat

SEQ ID NO: 889297 - DNA, 33 bp, Homo sapien
ttaatagcagcaatcaaattgccactactcata

SEQ ID NO: 889298 - DNA, 33 bp, Homo sapien
ttaatagcagcaatcacattgccactactcata

SEQ ID NO: 889299 - DNA, 33 bp, Homo sapien
tttccacaaagtataacatctagcacaaagtag

SEQ ID NO: 889300 - DNA, 33 bp, Homo sapien
tttccacaaagtataatatctagcacaaagtag

SEQ ID NO: 889301 - DNA, 33 bp, Homo sapien
taatgtatctgattaacgtgccacttttatttg

SEQ ID NO: 889302 - DNA, 33 bp, Homo sapien
taatgtatctgattaatgtgccacttttatttg

SEQ ID NO: 889303 - DNA, 33 bp, Homo sapien
tgaaactataagttccagaaaggcagtattaga

SEQ ID NO: 889304 - DNA, 33 bp, Homo sapien
tgaaactataagttcccgaaaggcagtattaga

SEQ ID NO: 889305 - DNA, 33 bp, Homo sapien
gcagtttgcagcaacaaccttaacattacaaaa

SEQ ID NO: 889306 - DNA, 33 bp, Homo sapien
gcagtttgcagcaacacccttaacattacaaaa

SEQ ID NO: 889307 - DNA, 33 bp, Homo sapien
aagtctgaggacaagaaggctcagaaatgaaag

SEQ ID NO: 889308 - DNA, 33 bp, Homo sapien
aagtctgaggacaagacggctcagaaatgaaag

SEQ ID NO: 889309 - DNA, 33 bp, Homo sapien
tacagcctgctaaagaagaatagtggacatgat

SEQ ID NO: 889310 - DNA, 33 bp, Homo sapien
tacagcctgctaaagaggaatagtggacatgat

SEQ ID NO: 889311 - DNA, 33 bp, Homo sapien
cccctgtttattgcccaatactcaatatcataa

SEQ ID NO: 889312 - DNA, 33 bp, Homo sapien
cccctgtttattgcccgatactcaatatcataa

SEQ ID NO: 889313 - DNA, 33 bp, Homo sapien
ttctcccaagcaaacacagttggaattgcccat

SEQ ID NO: 889314 - DNA, 33 bp, Homo sapien
ttctcccaagcaaacatagttggaattgcccat

SEQ ID NO: 889315 - DNA, 33 bp, Homo sapien
caagtgagctctactaggtctcctgtatctgat

SEQ ID NO: 889316 - DNA, 33 bp, Homo sapien
caagtgagctctactatgtctcctgtatctgat

SEQ ID NO: 889317 - DNA, 33 bp, Homo sapien
ctatgtatttattcaacgcaaatgaaaacattg

SEQ ID NO: 889318 - DNA, 33 bp, Homo sapien
ctatgtatttattcaaggcaaatgaaaacattg

SEQ ID NO: 889319 - DNA, 33 bp, Homo sapien
gcaacctagtcacaaaatctcatgtgccgtctt

SEQ ID NO: 889320 - DNA, 33 bp, Homo sapien
gcaacctagtcacaaactctcatgtgccgtctt

SEQ ID NO: 889321 - DNA, 33 bp, Homo sapien
taggttgctaagtgtccctgaggtggttgttgt

SEQ ID NO: 889322 - DNA, 33 bp, Homo sapien
taggttgctaagtgtctctgaggtggttgttgt

SEQ ID NO: 889323 - DNA, 33 bp, Homo sapien
aggcacagaagtgaacactttgaggcctttgga

SEQ ID NO: 889324 - DNA, 33 bp, Homo sapien
aggcacagaagtgaacgctttgaggcctttgga

SEQ ID NO: 889325 - DNA, 33 bp, Homo sapien
gaatatataggccatgacaatggtagctgaaat

SEQ ID NO: 889326 - DNA, 33 bp, Homo sapien
gaatatataggccatggcaatggtagctgaaat

SEQ ID NO: 889327 - DNA, 33 bp, Homo sapien
tggtcagattctcttccccactaaaattcatgc

SEQ ID NO: 889328 - DNA, 33 bp, Homo sapien
tggtcagattctcttcgccactaaaattcatgc

SEQ ID NO: 889329 - DNA, 33 bp, Homo sapien
aattttacttcgggaggcaagatactatgtaga

SEQ ID NO: 889330 - DNA, 33 bp, Homo sapien
aattttacttcgggagtcaagatactatgtaga

SEQ ID NO: 889331 - DNA, 33 bp, Homo sapien
gaaccagtgaggaataactgacaagcagagctt

SEQ ID NO: 889332 - DNA, 33 bp, Homo sapien
gaaccagtgaggaatacctgacaagcagagctt

SEQ ID NO: 889333 - DNA, 33 bp, Homo sapien
tatgagtgggaacaaacgcttgtattcagtgtg

SEQ ID NO: 889334 - DNA, 33 bp, Homo sapien
tatgagtgggaacaaaggcttgtattcagtgtg

SEQ ID NO: 889335 - DNA, 33 bp, Homo sapien
tttccgtgatgacatacgcactaagggataaaa

SEQ ID NO: 889336 - DNA, 33 bp, Homo sapien
tttccgtgatgacataggcactaagggataaaa

SEQ ID NO: 889337 - DNA, 33 bp, Homo sapien
ttggaattgcagatgacgggttatagagtttaa

SEQ ID NO: 889338 - DNA, 33 bp, Homo sapien
ttggaattgcagatgatgggttatagagtttaa

SEQ ID NO: 889339 - DNA, 33 bp, Homo sapien
tccaaacagtgagaacaactacagggaaaagtt

SEQ ID NO: 889340 - DNA, 33 bp, Homo sapien
tccaaacagtgagaacgactacagggaaaagtt

SEQ ID NO: 889341 - DNA, 33 bp, Homo sapien
cataatgttaaaaaaaattgctgggatctaaac

SEQ ID NO: 889342 - DNA, 33 bp, Homo sapien
cataatgttaaaaaaatttgctgggatctaaac

SEQ ID NO: 889343 - DNA, 33 bp, Homo sapien
ccttgctgtcaccatacgaagaaggacttgttt

SEQ ID NO: 889344 - DNA, 33 bp, Homo sapien
ccttgctgtcaccataggaagaaggacttgttt

SEQ ID NO: 889345 - DNA, 33 bp, Homo sapien
tgaagacttagcaaagcaagggtatcataatgg

SEQ ID NO: 889346 - DNA, 33 bp, Homo sapien
tgaagacttagcaaagtaagggtatcataatgg

SEQ ID NO: 889347 - DNA, 33 bp, Homo sapien
agatatcgatcctgtaccttttctaaggtatgc

SEQ ID NO: 889348 - DNA, 33 bp, Homo sapien
agatatcgatcctgtatcttttctaaggtatgc

SEQ ID NO: 889349 - DNA, 33 bp, Homo sapien
aaccaaccctggagaaaaccaacatttaaaggg

SEQ ID NO: 889350 - DNA, 33 bp, Homo sapien
aaccaaccctggagaagaccaacatttaaaggg

SEQ ID NO: 889351 - DNA, 33 bp, Homo sapien
agacagtggcaataatcatgaagagaagatgat

SEQ ID NO: 889352 - DNA, 33 bp, Homo sapien
agacagtggcaataatgatgaagagaagatgat

SEQ ID NO: 889353 - DNA, 33 bp, Homo sapien
tcatactagtgcgagacgaaaaacaaaacacaa

SEQ ID NO: 889354 - DNA, 33 bp, Homo sapien
tcatactagtgcgagatgaaaaacaaaacacaa

SEQ ID NO: 889355 - DNA, 33 bp, Homo sapien
gaagatagaggtgctactacaatcactcataat

SEQ ID NO: 889356 - DNA, 33 bp, Homo sapien
gaagatagaggtgctattacaatcactcataat

SEQ ID NO: 889357 - DNA, 33 bp, Homo sapien
tggagaggatctcaacacctttgagggtataga

SEQ ID NO: 889358 - DNA, 33 bp, Homo sapien
tggagaggatctcaactcctttgagggtataga

SEQ ID NO: 889359 - DNA, 33 bp, Homo sapien
ttctgatgcagcccccacaatggaggctctcat

SEQ ID NO: 889360 - DNA, 33 bp, Homo sapien
ttctgatgcagcccccgcaatggaggctctcat

SEQ ID NO: 889361 - DNA, 33 bp, Homo sapien
aaacatcaccagtttccaagtagcaatgtaaaa

SEQ ID NO: 889362 - DNA, 33 bp, Homo sapien
aaacatcaccagtttctaagtagcaatgtaaaa

SEQ ID NO: 889363 - DNA, 33 bp, Homo sapien
gggagtagaaggtgaaatagatggaagatttaa

SEQ ID NO: 889364 - DNA, 33 bp, Homo sapien
gggagtagaaggtgaagtagatggaagatttaa

SEQ ID NO: 889365 - DNA, 33 bp, Homo sapien
acttgggttctgagacatactggtttcaggaga

SEQ ID NO: 889366 - DNA, 33 bp, Homo sapien
acttgggttctgagacgtactggtttcaggaga

SEQ ID NO: 889367 - DNA, 33 bp, Homo sapien
ccagtaatgagatgcagatgaaccaggaaggaa

SEQ ID NO: 889368 - DNA, 33 bp, Homo sapien
ccagtaatgagatgcatatgaaccaggaaggaa

SEQ ID NO: 889369 - DNA, 33 bp, Homo sapien
accagttttccacccaagtagcataaacaatct

SEQ ID NO: 889370 - DNA, 33 bp, Homo sapien
accagttttccacccaggtagcataaacaatct

SEQ ID NO: 889371 - DNA, 33 bp, Homo sapien
atcacaaaatgtgaaaaaaatcgaatcagtttt

SEQ ID NO: 889372 - DNA, 33 bp, Homo sapien
atcacaaaatgtgaaagaaatcgaatcagtttt

SEQ ID NO: 889373 - DNA, 33 bp, Homo sapien
agtgtagacaaaataaataaatctgtcagtgtc

SEQ ID NO: 889374 - DNA, 33 bp, Homo sapien
agtgtagacaaaataactaaatctgtcagtgtc

SEQ ID NO: 889375 - DNA, 33 bp, Homo sapien
agtgcataaacaaatcactatttctgaatttta

SEQ ID NO: 889376 - DNA, 33 bp, Homo sapien
agtgcataaacaaatcgctatttctgaatttta

SEQ ID NO: 889377 - DNA, 33 bp, Homo sapien
aaatgccaaaatacatcatggttgttcagggac

SEQ ID NO: 889378 - DNA, 33 bp, Homo sapien
aaatgccaaaatacattatggttgttcagggac

SEQ ID NO: 889379 - DNA, 33 bp, Homo sapien
gcaagctgttttacctcaagtggttcatatccc

SEQ ID NO: 889380 - DNA, 33 bp, Homo sapien
gcaagctgttttacctgaagtggttcatatccc

SEQ ID NO: 889381 - DNA, 33 bp, Homo sapien
ttgctcccctgtgttacggcaggttattaatta

SEQ ID NO: 889382 - DNA, 33 bp, Homo sapien
ttgctcccctgtgttatggcaggttattaatta

SEQ ID NO: 889383 - DNA, 33 bp, Homo sapien
agtaactgcataaaaacatttgctggaagatca

SEQ ID NO: 889384 - DNA, 33 bp, Homo sapien
agtaactgcataaaaagatttgctggaagatca

SEQ ID NO: 889385 - DNA, 33 bp, Homo sapien
tggaggattatgacagccaccatcttttttctt

SEQ ID NO: 889386 - DNA, 33 bp, Homo sapien
tggaggattatgacaggcaccatcttttttctt

SEQ ID NO: 889387 - DNA, 33 bp, Homo sapien
aaattattgtagagacaaatgaatatcaaagaa

SEQ ID NO: 889388 - DNA, 33 bp, Homo sapien
aaattattgtagagaccaatgaatatcaaagaa

SEQ ID NO: 889389 - DNA, 33 bp, Homo sapien
agccttaaaaaaggaaatccatttatgacaaca

SEQ ID NO: 889390 - DNA, 33 bp, Homo sapien
agccttaaaaaaggaagtccatttatgacaaca

SEQ ID NO: 889391 - DNA, 33 bp, Homo sapien
ctggaagagagagtacacttagcatgttcacaa

SEQ ID NO: 889392 - DNA, 33 bp, Homo sapien
ctggaagagagagtacgcttagcatgttcacaa

SEQ ID NO: 889393 - DNA, 33 bp, Homo sapien
acaagtcacaaattcacgatattgtcctggttg

SEQ ID NO: 889394 - DNA, 33 bp, Homo sapien
acaagtcacaaattcatgatattgtcctggttg

SEQ ID NO: 889395 - DNA, 33 bp, Homo sapien
ggaggaactttgcaacccaatcatcaccaagct

SEQ ID NO: 889396 - DNA, 33 bp, Homo sapien
ggaggaactttgcaacgcaatcatcaccaagct

SEQ ID NO: 889397 - DNA, 33 bp, Homo sapien
ctattttttctgttctcacttttctgtagcttg

SEQ ID NO: 889398 - DNA, 33 bp, Homo sapien
ctattttttctgttctgacttttctgtagcttg

SEQ ID NO: 889399 - DNA, 33 bp, Homo sapien
tggcacatatgagaaaatatgcttaacaggagt

SEQ ID NO: 889400 - DNA, 33 bp, Homo sapien
tggcacatatgagaaagtatgcttaacaggagt

SEQ ID NO: 889401 - DNA, 33 bp, Homo sapien
accacaatgttcagcaataacaaaaagttacta

SEQ ID NO: 889402 - DNA, 33 bp, Homo sapien
accacaatgttcagcagtaacaaaaagttacta

SEQ ID NO: 889403 - DNA, 33 bp, Homo sapien
attatggaaaattataaggaagctccacaaaaa

SEQ ID NO: 889404 - DNA, 33 bp, Homo sapien
attatggaaaattatacggaagctccacaaaaa

SEQ ID NO: 889405 - DNA, 33 bp, Homo sapien
aaattttttgttatcaaagactacggagtgagg

SEQ ID NO: 889406 - DNA, 33 bp, Homo sapien
aaattttttgttatcagagactacggagtgagg

SEQ ID NO: 889407 - DNA, 33 bp, Homo sapien
gagcaaagtgttaagccatcagcaagtatcata

SEQ ID NO: 889408 - DNA, 33 bp, Homo sapien
gagcaaagtgttaagcgatcagcaagtatcata

SEQ ID NO: 889409 - DNA, 33 bp, Homo sapien
gttcatgaagacattcacgacattaattccata

SEQ ID NO: 889410 - DNA, 33 bp, Homo sapien
gttcatgaagacattcgcgacattaattccata

SEQ ID NO: 889411 - DNA, 33 bp, Homo sapien
ctcaatcctgaattgccatttggaaacttgtca

SEQ ID NO: 889412 - DNA, 33 bp, Homo sapien
ctcaatcctgaattgctatttggaaacttgtca

SEQ ID NO: 889413 - DNA, 33 bp, Homo sapien
cttaatattctagtgaagaaaatcacccatgtc

SEQ ID NO: 889414 - DNA, 33 bp, Homo sapien
cttaatattctagtgaggaaaatcacccatgtc

SEQ ID NO: 889415 - DNA, 33 bp, Homo sapien
ccaaccatgaaccaaaaggaaagagtacagctt

SEQ ID NO: 889416 - DNA, 33 bp, Homo sapien
ccaaccatgaaccaaatggaaagagtacagctt

SEQ ID NO: 889417 - DNA, 33 bp, Homo sapien
tagactgagacaacaacacagtaagtacctgca

SEQ ID NO: 889418 - DNA, 33 bp, Homo sapien
tagactgagacaacaatacagtaagtacctgca

SEQ ID NO: 889419 - DNA, 33 bp, Homo sapien
ccttatccgtcaaccaatgggaatatctctctt

SEQ ID NO: 889420 - DNA, 33 bp, Homo sapien
ccttatccgtcaaccagtgggaatatctctctt

SEQ ID NO: 889421 - DNA, 33 bp, Homo sapien
ctgaatcaattgtctcaacttattttgtctagt

SEQ ID NO: 889422 - DNA, 33 bp, Homo sapien
ctgaatcaattgtctctacttattttgtctagt

SEQ ID NO: 889423 - DNA, 33 bp, Homo sapien
agtactgctgtgctctaaactcatagacattct

SEQ ID NO: 889424 - DNA, 33 bp, Homo sapien
agtactgctgtgctctgaactcatagacattct

SEQ ID NO: 889425 - DNA, 33 bp, Homo sapien
gtgttctgtttttaagaatgaagcaccctagga

SEQ ID NO: 889426 - DNA, 33 bp, Homo sapien
gtgttctgtttttaagcatgaagcaccctagga

SEQ ID NO: 889427 - DNA, 33 bp, Homo sapien
ccttcagagcaagacaaaaaaatacaagtgtga

SEQ ID NO: 889428 - DNA, 33 bp, Homo sapien
ccttcagagcaagacagaaaaatacaagtgtga

SEQ ID NO: 889429 - DNA, 33 bp, Homo sapien
aggattctgccttgaacgtttgatgtaagtcct

SEQ ID NO: 889430 - DNA, 33 bp, Homo sapien
aggattctgccttgaatgtttgatgtaagtcct

SEQ ID NO: 889431 - DNA, 33 bp, Homo sapien
taaacacaatatcttcccaaatgaaggaaagaa

SEQ ID NO: 889432 - DNA, 33 bp, Homo sapien
taaacacaatatcttctcaaatgaaggaaagaa

SEQ ID NO: 889433 - DNA, 33 bp, Homo sapien
acactgcataatcccacgggtattgatttccat

SEQ ID NO: 889434 - DNA, 33 bp, Homo sapien
acactgcataatcccaggggtattgatttccat

SEQ ID NO: 889435 - DNA, 33 bp, Homo sapien
taggaagccttctagcacacattagcaaatatt

SEQ ID NO: 889436 - DNA, 33 bp, Homo sapien
taggaagccttctagcgcacattagcaaatatt

SEQ ID NO: 889437 - DNA, 33 bp, Homo sapien
tagaacaaataataagcctaatttggatggtaa

SEQ ID NO: 889438 - DNA, 33 bp, Homo sapien
tagaacaaataataaggctaatttggatggtaa

SEQ ID NO: 889439 - DNA, 33 bp, Homo sapien
aaacaaaatagcattacaagcattgtcattaag

SEQ ID NO: 889440 - DNA, 33 bp, Homo sapien
aaacaaaatagcattataagcattgtcattaag

SEQ ID NO: 889441 - DNA, 33 bp, Homo sapien
tgctactagaaaaagtaaaagcatggataagat

SEQ ID NO: 889442 - DNA, 33 bp, Homo sapien
tgctactagaaaaagtcaaagcatggataagat

SEQ ID NO: 889443 - DNA, 33 bp, Homo sapien
taaaactccccaatcaaaagctacagattgata

SEQ ID NO: 889444 - DNA, 33 bp, Homo sapien
taaaactccccaatcagaagctacagattgata

SEQ ID NO: 889445 - DNA, 33 bp, Homo sapien
ggacttcacattgaacgcaatgctgccctgtcg

SEQ ID NO: 889446 - DNA, 33 bp, Homo sapien
ggacttcacattgaactcaatgctgccctgtcg

SEQ ID NO: 889447 - DNA, 33 bp, Homo sapien
tcctcagcaaagcttcccttctcacaaaaagca

SEQ ID NO: 889448 - DNA, 33 bp, Homo sapien
tcctcagcaaagcttctcttctcacaaaaagca

SEQ ID NO: 889449 - DNA, 33 bp, Homo sapien
ctgaactatctctaagcctatgtgtatctgtgt

SEQ ID NO: 889450 - DNA, 33 bp, Homo sapien
ctgaactatctctaagtctatgtgtatctgtgt

SEQ ID NO: 889451 - DNA, 33 bp, Homo sapien
agtgttggatcataaccataatagtgcattttg

SEQ ID NO: 889452 - DNA, 33 bp, Homo sapien
agtgttggatcataactataatagtgcattttg

SEQ ID NO: 889453 - DNA, 33 bp, Homo sapien
tgtttatagaatgatactagtcttggtcttaat

SEQ ID NO: 889454 - DNA, 33 bp, Homo sapien
tgtttatagaatgatagtagtcttggtcttaat

SEQ ID NO: 889455 - DNA, 33 bp, Homo sapien
tgatggttccaaaaaacgcacaattgaaatgtc

SEQ ID NO: 889456 - DNA, 33 bp, Homo sapien
tgatggttccaaaaaatgcacaattgaaatgtc

SEQ ID NO: 889457 - DNA, 33 bp, Homo sapien
gaacggaagtcttctccccaaaccaagaattaa

SEQ ID NO: 889458 - DNA, 33 bp, Homo sapien
gaacggaagtcttctctccaaaccaagaattaa

SEQ ID NO: 889459 - DNA, 33 bp, Homo sapien
actcaaactatatcagaactggtaggatactag

SEQ ID NO: 889460 - DNA, 33 bp, Homo sapien
actcaaactatatcaggactggtaggatactag

SEQ ID NO: 889461 - DNA, 33 bp, Homo sapien
agagaccttttgtgacactaaggaggcaagcct

SEQ ID NO: 889462 - DNA, 33 bp, Homo sapien
agagaccttttgtgaccctaaggaggcaagcct

SEQ ID NO: 889463 - DNA, 33 bp, Homo sapien
atatcttactcaaaggaactgtctggaggcagc

SEQ ID NO: 889464 - DNA, 33 bp, Homo sapien
atatcttactcaaaggtactgtctggaggcagc

SEQ ID NO: 889465 - DNA, 33 bp, Homo sapien
tcaaaactcagatgtccgaaagaagtccatttc

SEQ ID NO: 889466 - DNA, 33 bp, Homo sapien
tcaaaactcagatgtctgaaagaagtccatttc

SEQ ID NO: 889467 - DNA, 33 bp, Homo sapien
tcaagatgctttccaactgatggtgattgatgg

SEQ ID NO: 889468 - DNA, 33 bp, Homo sapien
tcaagatgctttccaattgatggtgattgatgg

SEQ ID NO: 889469 - DNA, 33 bp, Homo sapien
actctgatgaattttgaaaagtgtggattgtct

SEQ ID NO: 889470 - DNA, 33 bp, Homo sapien
actctgatgaattttgcaaagtgtggattgtct

SEQ ID NO: 889471 - DNA, 33 bp, Homo sapien
gagaacttgcacctcaatgactctacaggcaga

SEQ ID NO: 889472 - DNA, 33 bp, Homo sapien
gagaacttgcacctcagtgactctacaggcaga

SEQ ID NO: 889473 - DNA, 33 bp, Homo sapien
attttgcaatctaggaatacggtagtagccagt

SEQ ID NO: 889474 - DNA, 33 bp, Homo sapien
attttgcaatctaggagtacggtagtagccagt

SEQ ID NO: 889475 - DNA, 33 bp, Homo sapien
cccttttagaagctgaccagtcctagagacaag

SEQ ID NO: 889476 - DNA, 33 bp, Homo sapien
cccttttagaagctgagcagtcctagagacaag

SEQ ID NO: 889477 - DNA, 33 bp, Homo sapien
tttctccaggacaatcaccaagaaagtaagctt

SEQ ID NO: 889478 - DNA, 33 bp, Homo sapien
tttctccaggacaatcgccaagaaagtaagctt

SEQ ID NO: 889479 - DNA, 33 bp, Homo sapien
cagcactgatgttacaagaagttatccattgct

SEQ ID NO: 889480 - DNA, 33 bp, Homo sapien
cagcactgatgttacatgaagttatccattgct

SEQ ID NO: 889481 - DNA, 33 bp, Homo sapien
gctggaatgattgacagaaagtgaagaaaacaa

SEQ ID NO: 889482 - DNA, 33 bp, Homo sapien
gctggaatgattgacataaagtgaagaaaacaa

SEQ ID NO: 889483 - DNA, 33 bp, Homo sapien
gaagtgtgtcaaattacagaacttgcataatcg

SEQ ID NO: 889484 - DNA, 33 bp, Homo sapien
gaagtgtgtcaaattatagaacttgcataatcg

SEQ ID NO: 889485 - DNA, 33 bp, Homo sapien
agaccttagattttgtaaatgtcaagtcttttc

SEQ ID NO: 889486 - DNA, 33 bp, Homo sapien
agaccttagattttgtgaatgtcaagtcttttc

SEQ ID NO: 889487 - DNA, 33 bp, Homo sapien
ttcagtcacacaaaggaaagttgattaaggagg

SEQ ID NO: 889488 - DNA, 33 bp, Homo sapien
ttcagtcacacaaagggaagttgattaaggagg

SEQ ID NO: 889489 - DNA, 33 bp, Homo sapien
ttaaaaatttgtttgaaaactcatgcaataaaa

SEQ ID NO: 889490 - DNA, 33 bp, Homo sapien
ttaaaaatttgtttgagaactcatgcaataaaa

SEQ ID NO: 889491 - DNA, 33 bp, Homo sapien
aggatagaaaggtcaactcagattccatgcggg

SEQ ID NO: 889492 - DNA, 33 bp, Homo sapien
aggatagaaaggtcaagtcagattccatgcggg

SEQ ID NO: 889493 - DNA, 33 bp, Homo sapien
agttcagatagataaactgggttgactaccaat

SEQ ID NO: 889494 - DNA, 33 bp, Homo sapien
agttcagatagataaagtgggttgactaccaat

SEQ ID NO: 889495 - DNA, 33 bp, Homo sapien
gataggtatatcagccagcattcagttaaggaa

SEQ ID NO: 889496 - DNA, 33 bp, Homo sapien
gataggtatatcagccggcattcagttaaggaa

SEQ ID NO: 889497 - DNA, 33 bp, Homo sapien
ttatcttcaacttcaaacatgtggataaagaaa

SEQ ID NO: 889498 - DNA, 33 bp, Homo sapien
ttatcttcaacttcaagcatgtggataaagaaa

SEQ ID NO: 889499 - DNA, 33 bp, Homo sapien
ttttagtataaaatggcaaactgaaaatagcaa

SEQ ID NO: 889500 - DNA, 33 bp, Homo sapien
ttttagtataaaatgggaaactgaaaatagcaa

SEQ ID NO: 889501 - DNA, 33 bp, Homo sapien
atgtagaagtaggtacaaagcaagaagggtcac

SEQ ID NO: 889502 - DNA, 33 bp, Homo sapien
atgtagaagtaggtacgaagcaagaagggtcac

SEQ ID NO: 889503 - DNA, 33 bp, Homo sapien
gaataactgtgtccaaatagagtttcatattaa

SEQ ID NO: 889504 - DNA, 33 bp, Homo sapien
gaataactgtgtccaagtagagtttcatattaa

SEQ ID NO: 889505 - DNA, 33 bp, Homo sapien
ttctgctctctgtaagcaactagttccaacttt

SEQ ID NO: 889506 - DNA, 33 bp, Homo sapien
ttctgctctctgtaagtaactagttccaacttt

SEQ ID NO: 889507 - DNA, 33 bp, Homo sapien
ctgggaattgagcaaggctaaatgtttacttaa

SEQ ID NO: 889508 - DNA, 33 bp, Homo sapien
ctgggaattgagcaagtctaaatgtttacttaa

SEQ ID NO: 889509 - DNA, 33 bp, Homo sapien
tgtgtcttagccttagcattgtgtcatttgaac

SEQ ID NO: 889510 - DNA, 33 bp, Homo sapien
tgtgtcttagccttagtattgtgtcatttgaac

SEQ ID NO: 889511 - DNA, 33 bp, Homo sapien
tctgtcttatcctataaagtggttacatttgta

SEQ ID NO: 889512 - DNA, 33 bp, Homo sapien
tctgtcttatcctatacagtggttacatttgta

SEQ ID NO: 889513 - DNA, 33 bp, Homo sapien
aattttcaccaaactgcaactatcttgctagta

SEQ ID NO: 889514 - DNA, 33 bp, Homo sapien
aattttcaccaaactggaactatcttgctagta

SEQ ID NO: 889515 - DNA, 33 bp, Homo sapien
atttaccattgtgaaaagttcagctggattcag

SEQ ID NO: 889516 - DNA, 33 bp, Homo sapien
atttaccattgtgaaaggttcagctggattcag

SEQ ID NO: 889517 - DNA, 33 bp, Homo sapien
cactaacacagattcaagagtaaagaacctgga

SEQ ID NO: 889518 - DNA, 33 bp, Homo sapien
cactaacacagattcatgagtaaagaacctgga

SEQ ID NO: 889519 - DNA, 33 bp, Homo sapien
tgtgataacaaacatcacaggtaattttgattt

SEQ ID NO: 889520 - DNA, 33 bp, Homo sapien
tgtgataacaaacatcgcaggtaattttgattt

SEQ ID NO: 889521 - DNA, 33 bp, Homo sapien
tttgtaaatgcaaggacgtttataagtcaggca

SEQ ID NO: 889522 - DNA, 33 bp, Homo sapien
tttgtaaatgcaaggatgtttataagtcaggca

SEQ ID NO: 889523 - DNA, 33 bp, Homo sapien
agcttaaatgaatttcaaagtcatcacgctgtg

SEQ ID NO: 889524 - DNA, 33 bp, Homo sapien
agcttaaatgaatttcgaagtcatcacgctgtg

SEQ ID NO: 889525 - DNA, 33 bp, Homo sapien
cttcaactaagattcaaaaataagagtcaagaa

SEQ ID NO: 889526 - DNA, 33 bp, Homo sapien
cttcaactaagattcagaaataagagtcaagaa

SEQ ID NO: 889527 - DNA, 33 bp, Homo sapien
tcactttaattagaaccgcctggaaaatcagga

SEQ ID NO: 889528 - DNA, 33 bp, Homo sapien
tcactttaattagaactgcctggaaaatcagga

SEQ ID NO: 889529 - DNA, 33 bp, Homo sapien
ctgtgtggcttaaaaccggatattctgagcaca

SEQ ID NO: 889530 - DNA, 33 bp, Homo sapien
ctgtgtggcttaaaactggatattctgagcaca

SEQ ID NO: 889531 - DNA, 33 bp, Homo sapien
aaaattgggggatttacaggcaagtatgacaac

SEQ ID NO: 889532 - DNA, 33 bp, Homo sapien
aaaattgggggatttataggcaagtatgacaac

SEQ ID NO: 889533 - DNA, 33 bp, Homo sapien
cctcctctgtccaggccattagagcttgaatat

SEQ ID NO: 889534 - DNA, 33 bp, Homo sapien
cctcctctgtccaggctattagagcttgaatat

SEQ ID NO: 889535 - DNA, 33 bp, Homo sapien
tgtcaattcagaccacacttagggaatcagact

SEQ ID NO: 889536 - DNA, 33 bp, Homo sapien
tgtcaattcagaccacgcttagggaatcagact

SEQ ID NO: 889537 - DNA, 33 bp, Homo sapien
atcacaatcaacaagacgttttcaggatgtgtt

SEQ ID NO: 889538 - DNA, 33 bp, Homo sapien
atcacaatcaacaagatgttttcaggatgtgtt

SEQ ID NO: 889539 - DNA, 33 bp, Homo sapien
ataaaagcgaaagtcaatgaaaagagagccaac

SEQ ID NO: 889540 - DNA, 33 bp, Homo sapien
ataaaagcgaaagtcagtgaaaagagagccaac

SEQ ID NO: 889541 - DNA, 33 bp, Homo sapien
tatgcataaatggctcaaaagtataggaaaaga

SEQ ID NO: 889542 - DNA, 33 bp, Homo sapien
tatgcataaatggctcgaaagtataggaaaaga

SEQ ID NO: 889543 - DNA, 33 bp, Homo sapien
aggctggattctttgacaattttttcatgtagt

SEQ ID NO: 889544 - DNA, 33 bp, Homo sapien
aggctggattctttgataattttttcatgtagt

SEQ ID NO: 889545 - DNA, 33 bp, Homo sapien
tcagaagtcctagagacgaagaaaggtcattga

SEQ ID NO: 889546 - DNA, 33 bp, Homo sapien
tcagaagtcctagagatgaagaaaggtcattga

SEQ ID NO: 889547 - DNA, 33 bp, Homo sapien
tcccatcacataggtaataagtctagcatccat

SEQ ID NO: 889548 - DNA, 33 bp, Homo sapien
tcccatcacataggtattaagtctagcatccat

SEQ ID NO: 889549 - DNA, 33 bp, Homo sapien; identical to SEQ ID NO: 889547

SEQ ID NO: 889550 - DNA, 33 bp, Homo sapien; identical to SEQ ID NO: 889548

SEQ ID NO: 889551 - DNA, 33 bp, Homo sapien
caagggacaaggtatgacaatgacagttattat

SEQ ID NO: 889552 - DNA, 33 bp, Homo sapien
caagggacaaggtatgccaatgacagttattat

SEQ ID NO: 889553 - DNA, 33 bp, Homo sapien
tcatattgtgtattaacgtaagaggaaaaagaa

SEQ ID NO: 889554 - DNA, 33 bp, Homo sapien
tcatattgtgtattaatgtaagaggaaaaagaa

SEQ ID NO: 889555 - DNA, 33 bp, Homo sapien
gtagagacaaaggaaggaatgacggtaggctgt

SEQ ID NO: 889556 - DNA, 33 bp, Homo sapien
gtagagacaaaggaagtaatgacggtaggctgt

SEQ ID NO: 889557 - DNA, 33 bp, Homo sapien
cactcatgcctgagtacaagactgagagagtaa

SEQ ID NO: 889558 - DNA, 33 bp, Homo sapien
cactcatgcctgagtataagactgagagagtaa

SEQ ID NO: 889559 - DNA, 33 bp, Homo sapien
acctgtatgggccacaatagttctttttggaga

SEQ ID NO: 889560 - DNA, 33 bp, Homo sapien
acctgtatgggccacagtagttctttttggaga

SEQ ID NO: 889561 - DNA, 33 bp, Homo sapien
tactttcttccttgctaacggtactccaatgat

SEQ ID NO: 889562 - DNA, 33 bp, Homo sapien
tactttcttccttgctcacggtactccaatgat

SEQ ID NO: 889563 - DNA, 33 bp, Homo sapien
aaataaagaaaaaaaaacgatgatgaatcctgt

SEQ ID NO: 889564 - DNA, 33 bp, Homo sapien
aaataaagaaaaaaaaccgatgatgaatcctgt

SEQ ID NO: 889565 - DNA, 33 bp, Homo sapien
attccagctctgtccaataaaaatatatgggag

SEQ ID NO: 889566 - DNA, 33 bp, Homo sapien
attccagctctgtccactaaaaatatatgggag

SEQ ID NO: 889567 - DNA, 33 bp, Homo sapien
aaaccttgcaacgtgcagattataacaagagct

SEQ ID NO: 889568 - DNA, 33 bp, Homo sapien
aaaccttgcaacgtgcggattataacaagagct

SEQ ID NO: 889569 - DNA, 33 bp, Homo sapien
gtaccttggatttatcagacttcaggggcaaaa

SEQ ID NO: 889570 - DNA, 33 bp, Homo sapien
gtaccttggatttatcggacttcaggggcaaaa

SEQ ID NO: 889571 - DNA, 33 bp, Homo sapien
caacaggatgtaagaaaaatttggaattcttgg

SEQ ID NO: 889572 - DNA, 33 bp, Homo sapien
caacaggatgtaagaacaatttggaattcttgg

SEQ ID NO: 889573 - DNA, 33 bp, Homo sapien
aacagaggtaggaatgaagcaattttgcccacc

SEQ ID NO: 889574 - DNA, 33 bp, Homo sapien
aacagaggtaggaatggagcaattttgcccacc

SEQ ID NO: 889575 - DNA, 33 bp, Homo sapien
tactgaaggatttagaagccaaattataatcag

SEQ ID NO: 889576 - DNA, 33 bp, Homo sapien
tactgaaggatttagaggccaaattataatcag

SEQ ID NO: 889577 - DNA, 33 bp, Homo sapien
cagattaaagattgcacagacttttagctctac

SEQ ID NO: 889578 - DNA, 33 bp, Homo sapien
cagattaaagattgcatagacttttagctctac

SEQ ID NO: 889579 - DNA, 33 bp, Homo sapien
ccaaaattcatagacacagttttcctaaaatac

SEQ ID NO: 889580 - DNA, 33 bp, Homo sapien
ccaaaattcatagacagagttttcctaaaatac

SEQ ID NO: 889581 - DNA, 33 bp, Homo sapien
aatagaacataggtaacctaaaaagcctataaa

SEQ ID NO: 889582 - DNA, 33 bp, Homo sapien
aatagaacataggtaatctaaaaagcctataaa

SEQ ID NO: 889583 - DNA, 33 bp, Homo sapien
gcctaaacttctctcacgagcttgagtgatgtt

SEQ ID NO: 889584 - DNA, 33 bp, Homo sapien
gcctaaacttctctcatgagcttgagtgatgtt

SEQ ID NO: 889585 - DNA, 33 bp, Homo sapien
ctgaatgctcaaacccaagagagaacatgaaca

SEQ ID NO: 889586 - DNA, 33 bp, Homo sapien
ctgaatgctcaaaccctagagagaacatgaaca

SEQ ID NO: 889587 - DNA, 33 bp, Homo sapien
attccattacactagaagttgagactggtcact

SEQ ID NO: 889588 - DNA, 33 bp, Homo sapien
attccattacactagatgttgagactggtcact

SEQ ID NO: 889589 - DNA, 33 bp, Homo sapien
cacacccactagtaaacgtagagccatacctct

SEQ ID NO: 889590 - DNA, 33 bp, Homo sapien
cacacccactagtaaatgtagagccatacctct

SEQ ID NO: 889591 - DNA, 33 bp, Homo sapien
atgtatctcagctgaaaagcaatttgcatggca

SEQ ID NO: 889592 - DNA, 33 bp, Homo sapien
atgtatctcagctgaagagcaatttgcatggca

SEQ ID NO: 889593 - DNA, 33 bp, Homo sapien
gcatatgactctaggcaagcacaaagtgctgct

SEQ ID NO: 889594 - DNA, 33 bp, Homo sapien
gcatatgactctaggccagcacaaagtgctgct

SEQ ID NO: 889595 - DNA, 33 bp, Homo sapien
ccttctcaggcatatacaccatgggctccaatg

SEQ ID NO: 889596 - DNA, 33 bp, Homo sapien
ccttctcaggcatatataccatgggctccaatg

SEQ ID NO: 889597 - DNA, 33 bp, Homo sapien
ttctctgccaggtgaacagggcttcttatttgg

SEQ ID NO: 889598 - DNA, 33 bp, Homo sapien
ttctctgccaggtgaatagggcttcttatttgg

SEQ ID NO: 889599 - DNA, 33 bp, Homo sapien
taatctgactttgaataagtggaccaagatgtg

SEQ ID NO: 889600 - DNA, 33 bp, Homo sapien
taatctgactttgaatcagtggaccaagatgtg

SEQ ID NO: 889601 - DNA, 33 bp, Homo sapien
tgatttcatagggtcactcagtatctgttaaat

SEQ ID NO: 889602 - DNA, 33 bp, Homo sapien
tgatttcatagggtcagtcagtatctgttaaat

SEQ ID NO: 889603 - DNA, 33 bp, Homo sapien
agcattatcaaactaccgtaagacagatccatg

SEQ ID NO: 889604 - DNA, 33 bp, Homo sapien
agcattatcaaactactgtaagacagatccatg

SEQ ID NO: 889605 - DNA, 33 bp, Homo sapien
tatagaagaatttatgcattattggctttctag

SEQ ID NO: 889606 - DNA, 33 bp, Homo sapien
tatagaagaatttatgtattattggctttctag

SEQ ID NO: 889607 - DNA, 33 bp, Homo sapien
cttcatcaaagtacaactccttaaaatcaagag

SEQ ID NO: 889608 - DNA, 33 bp, Homo sapien
cttcatcaaagtacaattccttaaaatcaagag

SEQ ID NO: 889609 - DNA, 33 bp, Homo sapien
tcgtacttttgcccaccatcctgagttgtagct

SEQ ID NO: 889610 - DNA, 33 bp, Homo sapien
tcgtacttttgcccactatcctgagttgtagct

SEQ ID NO: 889611 - DNA, 33 bp, Homo sapien
atatttcaaaacccagaatattgcatgaatcaa

SEQ ID NO: 889612 - DNA, 33 bp, Homo sapien
atatttcaaaacccaggatattgcatgaatcaa

SEQ ID NO: 889613 - DNA, 33 bp, Homo sapien
tgaagacataaaaacccggatacaaatcttggc

SEQ ID NO: 889614 - DNA, 33 bp, Homo sapien
tgaagacataaaaacctggatacaaatcttggc

SEQ ID NO: 889615 - DNA, 33 bp, Homo sapien
gatctgctatatcctacacaaagaaagcacaga

SEQ ID NO: 889616 - DNA, 33 bp, Homo sapien
gatctgctatatcctatacaaagaaagcacaga

SEQ ID NO: 889617 - DNA, 33 bp, Homo sapien
gctacattaattggtaaacaagatggtaagaaa

SEQ ID NO: 889618 - DNA, 33 bp, Homo sapien
gctacattaattggtacacaagatggtaagaaa

SEQ ID NO: 889619 - DNA, 33 bp, Homo sapien
agcttttaaggtttaacgtatgcctggctgggt

SEQ ID NO: 889620 - DNA, 33 bp, Homo sapien
agcttttaaggtttaatgtatgcctggctgggt

SEQ ID NO: 889621 - DNA, 33 bp, Homo sapien
ctaaagtgattagcataactaaaaaagagacaa

SEQ ID NO: 889622 - DNA, 33 bp, Homo sapien
ctaaagtgattagcatgactaaaaaagagacaa

SEQ ID NO: 889623 - DNA, 33 bp, Homo sapien
cacggaagggatgccaacatttagcctttaaca

SEQ ID NO: 889624 - DNA, 33 bp, Homo sapien
cacggaagggatgccaccatttagcctttaaca

SEQ ID NO: 889625 - DNA, 33 bp, Homo sapien
taaagtgagatgttaacaagtatgcacgtgtaa

SEQ ID NO: 889626 - DNA, 33 bp, Homo sapien
taaagtgagatgttaataagtatgcacgtgtaa

SEQ ID NO: 889627 - DNA, 33 bp, Homo sapien
ttccatatcctttgccactttatctttggagat

SEQ ID NO: 889628 - DNA, 33 bp, Homo sapien
ttccatatcctttgccgctttatctttggagat

SEQ ID NO: 889629 - DNA, 33 bp, Homo sapien
atgatgttaaggggtccaatggagatttattga

SEQ ID NO: 889630 - DNA, 33 bp, Homo sapien
atgatgttaaggggtctaatggagatttattga

SEQ ID NO: 889631 - DNA, 33 bp, Homo sapien
caactactcgtacaatcaaattatctttcagct

SEQ ID NO: 889632 - DNA, 33 bp, Homo sapien
caactactcgtacaattaaattatctttcagct

SEQ ID NO: 889633 - DNA, 33 bp, Homo sapien
ttgcttaacttttctgcaactcttgattcccca

SEQ ID NO: 889634 - DNA, 33 bp, Homo sapien
ttgcttaacttttctggaactcttgattcccca

SEQ ID NO: 889635 - DNA, 33 bp, Homo sapien
ttaatatattccacaccacttctgaattttata

SEQ ID NO: 889636 - DNA, 33 bp, Homo sapien
ttaatatattccacacgacttctgaattttata

SEQ ID NO: 889637 - DNA, 33 bp, Homo sapien
aatggcattttgccaacgagaaacgtgttaaca

SEQ ID NO: 889638 - DNA, 33 bp, Homo sapien
aatggcattttgccaaggagaaacgtgttaaca

SEQ ID NO: 889639 - DNA, 33 bp, Homo sapien
ccagtttaatgtcaaagcttctattctcagcag

SEQ ID NO: 889640 - DNA, 33 bp, Homo sapien
ccagtttaatgtcaaatcttctattctcagcag

SEQ ID NO: 889641 - DNA, 33 bp, Homo sapien
catcctactctcaaaactcccactgtaccttac

SEQ ID NO: 889642 - DNA, 33 bp, Homo sapien
catcctactctcaaaattcccactgtaccttac

SEQ ID NO: 889643 - DNA, 33 bp, Homo sapien
tgtttgtggttgaggaaaatccaaatgtataat

SEQ ID NO: 889644 - DNA, 33 bp, Homo sapien
tgtttgtggttgaggataatccaaatgtataat

SEQ ID NO: 889645 - DNA, 33 bp, Homo sapien
ttgtgtacaaagtgaaatacacatgattaagaa

SEQ ID NO: 889646 - DNA, 33 bp, Homo sapien
ttgtgtacaaagtgaactacacatgattaagaa

SEQ ID NO: 889647 - DNA, 33 bp, Homo sapien
agaacatacctggaacactaacaactcaacagc

SEQ ID NO: 889648 - DNA, 33 bp, Homo sapien
agaacatacctggaactctaacaactcaacagc

SEQ ID NO: 889649 - DNA, 33 bp, Homo sapien
atcttgcagtactgatcaaaagcaattttcaaa

SEQ ID NO: 889650 - DNA, 33 bp, Homo sapien
atcttgcagtactgattaaaagcaattttcaaa

SEQ ID NO: 889651 - DNA, 33 bp, Homo sapien
acagtggaataatgaacgaataaaaggtatgcc

SEQ ID NO: 889652 - DNA, 33 bp, Homo sapien
acagtggaataatgaatgaataaaaggtatgcc

SEQ ID NO: 889653 - DNA, 33 bp, Homo sapien
tgtaatatttatagcaacagtgtaaatgttaga

SEQ ID NO: 889654 - DNA, 33 bp, Homo sapien
tgtaatatttatagcaccagtgtaaatgttaga

SEQ ID NO: 889655 - DNA, 33 bp, Homo sapien
attggatgacagtacagtctgcctaatgcactt

SEQ ID NO: 889656 - DNA, 33 bp, Homo sapien
attggatgacagtacattctgcctaatgcactt

SEQ ID NO: 889657 - DNA, 33 bp, Homo sapien
caagacctttccttcacaactgcacctttccta

SEQ ID NO: 889658 - DNA, 33 bp, Homo sapien
caagacctttccttcagaactgcacctttccta

SEQ ID NO: 889659 - DNA, 33 bp, Homo sapien
agatctgagcagaaagaccagggatctatgatt

SEQ ID NO: 889660 - DNA, 33 bp, Homo sapien
agatctgagcagaaaggccagggatctatgatt

SEQ ID NO: 889661 - DNA, 33 bp, Homo sapien
taactatcgatgaggacactttcgtttatgtcc

SEQ ID NO: 889662 - DNA, 33 bp, Homo sapien
taactatcgatgaggagactttcgtttatgtcc

SEQ ID NO: 889663 - DNA, 33 bp, Homo sapien
tcctcatcgatagttaaggtaaaatgaactgtg

SEQ ID NO: 889664 - DNA, 33 bp, Homo sapien
tcctcatcgatagttagggtaaaatgaactgtg

SEQ ID NO: 889665 - DNA, 33 bp, Homo sapien
ttaaactttatctgcaaaggatatttagtgtga

SEQ ID NO: 889666 - DNA, 33 bp, Homo sapien
ttaaactttatctgcataggatatttagtgtga

SEQ ID NO: 889667 - DNA, 33 bp, Homo sapien
aaacaagaaagcttgacgagagccctccgcaca

SEQ ID NO: 889668 - DNA, 33 bp, Homo sapien
aaacaagaaagcttgatgagagccctccgcaca

SEQ ID NO: 889669 - DNA, 33 bp, Homo sapien
ggagacagctgaaagaagtggtcgtgtctttct

SEQ ID NO: 889670 - DNA, 33 bp, Homo sapien
ggagacagctgaaagaggtggtcgtgtctttct

SEQ ID NO: 889671 - DNA, 33 bp, Homo sapien
actacacaattcctaaccttttccaggatggat

SEQ ID NO: 889672 - DNA, 33 bp, Homo sapien
actacacaattcctaatcttttccaggatggat

SEQ ID NO: 889673 - DNA, 33 bp, Homo sapien
agtctttaggcatttgcaatatagtctatttat

SEQ ID NO: 889674 - DNA, 33 bp, Homo sapien
agtctttaggcatttgtaatatagtctatttat

SEQ ID NO: 889675 - DNA, 33 bp, Homo sapien
tcttacgtggaaagaaacgagattcacagtatc

SEQ ID NO: 889676 - DNA, 33 bp, Homo sapien
tcttacgtggaaagaagcgagattcacagtatc

SEQ ID NO: 889677 - DNA, 33 bp, Homo sapien
cacagaatccgcaaataataaggatcacctgta

SEQ ID NO: 889678 - DNA, 33 bp, Homo sapien
cacagaatccgcaaatgataaggatcacctgta

SEQ ID NO: 889679 - DNA, 33 bp, Homo sapien
caataaaatctcgagaacctccctgtacaatta

SEQ ID NO: 889680 - DNA, 33 bp, Homo sapien
caataaaatctcgagaccctccctgtacaatta

SEQ ID NO: 889681 - DNA, 33 bp, Homo sapien
tagaacagcctggcaacgcttcctctaatacag

SEQ ID NO: 889682 - DNA, 33 bp, Homo sapien
tagaacagcctggcaatgcttcctctaatacag

SEQ ID NO: 889683 - DNA, 33 bp, Homo sapien
tcccacttctttgtcccattgatgccgaacttg

SEQ ID NO: 889684 - DNA, 33 bp, Homo sapien
tcccacttctttgtcctattgatgccgaacttg

SEQ ID NO: 889685 - DNA, 33 bp, Homo sapien
agcattctatcagacaactattgaggtatataa

SEQ ID NO: 889686 - DNA, 33 bp, Homo sapien
agcattctatcagacagctattgaggtatataa

SEQ ID NO: 889687 - DNA, 33 bp, Homo sapien
tagttaatagataaagccatggagaatataaaa

SEQ ID NO: 889688 - DNA, 33 bp, Homo sapien
tagttaatagataaaggcatggagaatataaaa

SEQ ID NO: 889689 - DNA, 33 bp, Homo sapien
agacaagaagtacggcacagatcttcattgctc

SEQ ID NO: 889690 - DNA, 33 bp, Homo sapien
agacaagaagtacggcgcagatcttcattgctc

SEQ ID NO: 889691 - DNA, 33 bp, Homo sapien
aaacttgattctacctaagatttgatagattaa

SEQ ID NO: 889692 - DNA, 33 bp, Homo sapien
aaacttgattctacctgagatttgatagattaa

SEQ ID NO: 889693 - DNA, 33 bp, Homo sapien
tgaacacacaggcctcactaagttcctccaagt

SEQ ID NO: 889694 - DNA, 33 bp, Homo sapien
tgaacacacaggcctcgctaagttcctccaagt

SEQ ID NO: 889695 - DNA, 33 bp, Homo sapien
acattaaactcttggacgtcaaaaataaacacc

SEQ ID NO: 889696 - DNA, 33 bp, Homo sapien
acattaaactcttggatgtcaaaaataaacacc

SEQ ID NO: 889697 - DNA, 33 bp, Homo sapien
ctatcttttgttgtacacagtttgcatcacaaa

SEQ ID NO: 889698 - DNA, 33 bp, Homo sapien
ctatcttttgttgtacgcagtttgcatcacaaa

SEQ ID NO: 889699 - DNA, 33 bp, Homo sapien
aaaagacagatttacaacatgggagaaaagtac

SEQ ID NO: 889700 - DNA, 33 bp, Homo sapien
aaaagacagatttacagcatgggagaaaagtac

SEQ ID NO: 889701 - DNA, 33 bp, Homo sapien
taagaaagacaactgacattttggagatggaca

SEQ ID NO: 889702 - DNA, 33 bp, Homo sapien
taagaaagacaactgagattttggagatggaca

SEQ ID NO: 889703 - DNA, 33 bp, Homo sapien
ctcacagactgagaaaccttgatttggttacat

SEQ ID NO: 889704 - DNA, 33 bp, Homo sapien
ctcacagactgagaaatcttgatttggttacat

SEQ ID NO: 889705 - DNA, 33 bp, Homo sapien
gggatacccaaaccaaagaggaagacagtgaaa

SEQ ID NO: 889706 - DNA, 33 bp, Homo sapien
gggatacccaaaccaacgaggaagacagtgaaa

SEQ ID NO: 889707 - DNA, 33 bp, Homo sapien
atacacaaggcaacaactaatgagcacttccta

SEQ ID NO: 889708 - DNA, 33 bp, Homo sapien
atacacaaggcaacaattaatgagcacttccta

SEQ ID NO: 889709 - DNA, 33 bp, Homo sapien
tggaagaggagaaagagctaacaaaggtgacag

SEQ ID NO: 889710 - DNA, 33 bp, Homo sapien
tggaagaggagaaagatctaacaaaggtgacag

SEQ ID NO: 889711 - DNA, 33 bp, Homo sapien
taccgaatatcgtttaaagcatcacattctaca

SEQ ID NO: 889712 - DNA, 33 bp, Homo sapien
taccgaatatcgtttagagcatcacattctaca

SEQ ID NO: 889713 - DNA, 33 bp, Homo sapien
ttcttacactatacaacatacattctgaatcaa

SEQ ID NO: 889714 - DNA, 33 bp, Homo sapien
ttcttacactatacaagatacattctgaatcaa

SEQ ID NO: 889715 - DNA, 33 bp, Homo sapien
gagaaattcttcagatcaaataacagaatcatg

SEQ ID NO: 889716 - DNA, 33 bp, Homo sapien
gagaaattcttcagatgaaataacagaatcatg

SEQ ID NO: 889717 - DNA, 33 bp, Homo sapien
tccttcacgtgattgacaaatttggcttccact

SEQ ID NO: 889718 - DNA, 33 bp, Homo sapien
tccttcacgtgattgataaatttggcttccact

SEQ ID NO: 889719 - DNA, 33 bp, Homo sapien
acctatttgacttgtacgacagaaaattccccc

SEQ ID NO: 889720 - DNA, 33 bp, Homo sapien
acctatttgacttgtatgacagaaaattccccc

SEQ ID NO: 889721 - DNA, 33 bp, Homo sapien
atccatctccttacaagttaaaatcggtagctt

SEQ ID NO: 889722 - DNA, 33 bp, Homo sapien
atccatctccttacaatttaaaatcggtagctt

SEQ ID NO: 889723 - DNA, 33 bp, Homo sapien
gcagtgatactagataacagggaaacattagca

SEQ ID NO: 889724 - DNA, 33 bp, Homo sapien
gcagtgatactagatagcagggaaacattagca

SEQ ID NO: 889725 - DNA, 33 bp, Homo sapien
tatttcaagtattgcaaaatttgatctctacca

SEQ ID NO: 889726 - DNA, 33 bp, Homo sapien
tatttcaagtattgcagaatttgatctctacca

SEQ ID NO: 889727 - DNA, 33 bp, Homo sapien
ttacatagggaaacagaagtctcgtggaagata

SEQ ID NO: 889728 - DNA, 33 bp, Homo sapien
ttacatagggaaacaggagtctcgtggaagata

SEQ ID NO: 889729 - DNA, 33 bp, Homo sapien
cattagcatacggacaaaagaagtgcctggaga

SEQ ID NO: 889730 - DNA, 33 bp, Homo sapien
cattagcatacggacagaagaagtgcctggaga

SEQ ID NO: 889731 - DNA, 33 bp, Homo sapien
cactgtgaatgaagtacagtaaaaccttgggca

SEQ ID NO: 889732 - DNA, 33 bp, Homo sapien
cactgtgaatgaagtagagtaaaaccttgggca

SEQ ID NO: 889733 - DNA, 33 bp, Homo sapien
acatgcgattgaaagccctgactttaaaataat

SEQ ID NO: 889734 - DNA, 33 bp, Homo sapien
acatgcgattgaaagctctgactttaaaataat

SEQ ID NO: 889735 - DNA, 33 bp, Homo sapien
ctctttccctgttgtcaatccatgattattgaa

SEQ ID NO: 889736 - DNA, 33 bp, Homo sapien
ctctttccctgttgtccatccatgattattgaa

SEQ ID NO: 889737 - DNA, 33 bp, Homo sapien
gtcaaaagcatatcaacacactttaagaaaaag

SEQ ID NO: 889738 - DNA, 33 bp, Homo sapien
gtcaaaagcatatcaagacactttaagaaaaag

SEQ ID NO: 889739 - DNA, 33 bp, Homo sapien
aaaagttcactattgacataaccttacaccaac

SEQ ID NO: 889740 - DNA, 33 bp, Homo sapien
aaaagttcactattgatataaccttacaccaac

SEQ ID NO: 889741 - DNA, 33 bp, Homo sapien
ttacaaacatatcccaagttaaatggcaaatta

SEQ ID NO: 889742 - DNA, 33 bp, Homo sapien
ttacaaacatatcccaggttaaatggcaaatta

SEQ ID NO: 889743 - DNA, 33 bp, Homo sapien
tttcttgggcatgggaaccttggacttttgctt

SEQ ID NO: 889744 - DNA, 33 bp, Homo sapien
tttcttgggcatgggagccttggacttttgctt

SEQ ID NO: 889745 - DNA, 33 bp, Homo sapien
gtctttgtaactatgaagagttttgtgacattt

SEQ ID NO: 889746 - DNA, 33 bp, Homo sapien
gtctttgtaactatgatgagttttgtgacattt

SEQ ID NO: 889747 - DNA, 33 bp, Homo sapien
gaacctttacctctaccgagtgtcacaatgtct

SEQ ID NO: 889748 - DNA, 33 bp, Homo sapien
gaacctttacctctactgagtgtcacaatgtct

SEQ ID NO: 889749 - DNA, 33 bp, Homo sapien
attattacatattcagcaagcaactaagataca

SEQ ID NO: 889750 - DNA, 33 bp, Homo sapien
attattacatattcaggaagcaactaagataca

SEQ ID NO: 889751 - DNA, 33 bp, Homo sapien
tatatcattgctcataaatttgtatgcttattt

SEQ ID NO: 889752 - DNA, 33 bp, Homo sapien
tatatcattgctcatagatttgtatgcttattt

SEQ ID NO: 889753 - DNA, 33 bp, Homo sapien
tttaattctactgctactagagggataaccctt

SEQ ID NO: 889754 - DNA, 33 bp, Homo sapien
tttaattctactgctattagagggataaccctt

SEQ ID NO: 889755 - DNA, 33 bp, Homo sapien
ctgagggtatggagagaagctcactgaatatca

SEQ ID NO: 889756 - DNA, 33 bp, Homo sapien
ctgagggtatggagagtagctcactgaatatca

SEQ ID NO: 889757 - DNA, 33 bp, Homo sapien
aagtggcagctgaacactgaatacacatttaca

SEQ ID NO: 889758 - DNA, 33 bp, Homo sapien
aagtggcagctgaacattgaatacacatttaca

SEQ ID NO: 889759 - DNA, 33 bp, Homo sapien
agctactaaccaagacaccagatacagaacact

SEQ ID NO: 889760 - DNA, 33 bp, Homo sapien
agctactaaccaagactccagatacagaacact

SEQ ID NO: 889761 - DNA, 33 bp, Homo sapien
tgctttgtccttcataaaaacaagtgctgtggt

SEQ ID NO: 889762 - DNA, 33 bp, Homo sapien
tgctttgtccttcatagaaacaagtgctgtggt

SEQ ID NO: 889763 - DNA, 33 bp, Homo sapien
tagccttaatgtgaccgcaattgtgtctcttta

SEQ ID NO: 889764 - DNA, 33 bp, Homo sapien
tagccttaatgtgacctcaattgtgtctcttta

SEQ ID NO: 889765 - DNA, 33 bp, Homo sapien
tagcagaattgaaatagaagccttcaaatttat

SEQ ID NO: 889766 - DNA, 33 bp, Homo sapien
tagcagaattgaaatataagccttcaaatttat

SEQ ID NO: 889767 - DNA, 33 bp, Homo sapien
tctgactgaagtaaaacctggaagtgtagcctt

SEQ ID NO: 889768 - DNA, 33 bp, Homo sapien
tctgactgaagtaaaagctggaagtgtagcctt

SEQ ID NO: 889769 - DNA, 33 bp, Homo sapien
tcccagcagtttgagaccacatcactgattctt

SEQ ID NO: 889770 - DNA, 33 bp, Homo sapien
tcccagcagtttgagatcacatcactgattctt

SEQ ID NO: 889771 - DNA, 33 bp, Homo sapien
atactcatatgcttgactaaggtgctctggatt

SEQ ID NO: 889772 - DNA, 33 bp, Homo sapien
atactcatatgcttgattaaggtgctctggatt

SEQ ID NO: 889773 - DNA, 33 bp, Homo sapien
gatgccgaagtgaacacagttgagcttccatcg

SEQ ID NO: 889774 - DNA, 33 bp, Homo sapien
gatgccgaagtgaacatagttgagcttccatcg

SEQ ID NO: 889775 - DNA, 33 bp, Homo sapien
actgaagtgtgtgatacataatgtcagcctaag

SEQ ID NO: 889776 - DNA, 33 bp, Homo sapien
actgaagtgtgtgatatataatgtcagcctaag

SEQ ID NO: 889777 - DNA, 33 bp, Homo sapien
accatctccaaaagagccatatctagcacctcc

SEQ ID NO: 889778 - DNA, 33 bp, Homo sapien
accatctccaaaagaggcatatctagcacctcc

SEQ ID NO: 889779 - DNA, 33 bp, Homo sapien
catattgtgtactcaaccattgacttagaaagg

SEQ ID NO: 889780 - DNA, 33 bp, Homo sapien
catattgtgtactcaatcattgacttagaaagg

SEQ ID NO: 889781 - DNA, 33 bp, Homo sapien
agcaactatgcctaccaaaaacgtaaatctact

SEQ ID NO: 889782 - DNA, 33 bp, Homo sapien
agcaactatgcctaccgaaaacgtaaatctact

SEQ ID NO: 889783 - DNA, 33 bp, Homo sapien
agctttcatgagcaaacctcccaagaccctgtg

SEQ ID NO: 889784 - DNA, 33 bp, Homo sapien
agctttcatgagcaaatctcccaagaccctgtg

SEQ ID NO: 889785 - DNA, 33 bp, Homo sapien
aaccacaagctgataaaggacaaataaacacta

SEQ ID NO: 889786 - DNA, 33 bp, Homo sapien
aaccacaagctgataagggacaaataaacacta

SEQ ID NO: 889787 - DNA, 33 bp, Homo sapien
tcaagtttctttggctaaacttcagctgccttt

SEQ ID NO: 889788 - DNA, 33 bp, Homo sapien
tcaagtttctttggctgaacttcagctgccttt

SEQ ID NO: 889789 - DNA, 33 bp, Homo sapien
aaactctcaacagagaacctcaatcgtggaaca

SEQ ID NO: 889790 - DNA, 33 bp, Homo sapien
aaactctcaacagagatcctcaatcgtggaaca

SEQ ID NO: 889791 - DNA, 33 bp, Homo sapien
tagactagtgttgaaagagaaacctttagttct

SEQ ID NO: 889792 - DNA, 33 bp, Homo sapien
tagactagtgttgaaatagaaacctttagttct

SEQ ID NO: 889793 - DNA, 33 bp, Homo sapien
agaacaagaagatttacactagccatgcaagga

SEQ ID NO: 889794 - DNA, 33 bp, Homo sapien
agaacaagaagatttatactagccatgcaagga

SEQ ID NO: 889795 - DNA, 33 bp, Homo sapien
cctgacttgaagagaacgctttaaacaaggttt

SEQ ID NO: 889796 - DNA, 33 bp, Homo sapien
cctgacttgaagagaaggctttaaacaaggttt

SEQ ID NO: 889797 - DNA, 33 bp, Homo sapien
ggtgaaagcaagtgaagtcaggactttttagat

SEQ ID NO: 889798 - DNA, 33 bp, Homo sapien
ggtgaaagcaagtgaattcaggactttttagat

SEQ ID NO: 889799 - DNA, 33 bp, Homo sapien
agtggggttgactacacggtgggttacaagacc

SEQ ID NO: 889800 - DNA, 33 bp, Homo sapien
agtggggttgactacatggtgggttacaagacc

SEQ ID NO: 889801 - DNA, 33 bp, Homo sapien
cgtaagtaggagttgaagtattgctcctcacaa

SEQ ID NO: 889802 - DNA, 33 bp, Homo sapien
cgtaagtaggagttgaggtattgctcctcacaa

SEQ ID NO: 889803 - DNA, 33 bp, Homo sapien
tcatatgacctggctagaataaataagtgataa

SEQ ID NO: 889804 - DNA, 33 bp, Homo sapien
tcatatgacctggctataataaataagtgataa

SEQ ID NO: 889805 - DNA, 33 bp, Homo sapien
cttcttaggcatgacacaagaagtttttccatt

SEQ ID NO: 889806 - DNA, 33 bp, Homo sapien
cttcttaggcatgacataagaagtttttccatt

SEQ ID NO: 889807 - DNA, 33 bp, Homo sapien
aaagcaagccacataacagaataaaatgttacc

SEQ ID NO: 889808 - DNA, 33 bp, Homo sapien
aaagcaagccacataagagaataaaatgttacc

SEQ ID NO: 889809 - DNA, 33 bp, Homo sapien
atagatctggaatagactagaagtggtttgtaa

SEQ ID NO: 889810 - DNA, 33 bp, Homo sapien
atagatctggaatagagtagaagtggtttgtaa

SEQ ID NO: 889811 - DNA, 33 bp, Homo sapien
gattaagtgaaagcctcaaattcaaacagagga

SEQ ID NO: 889812 - DNA, 33 bp, Homo sapien
gattaagtgaaagcctgaaattcaaacagagga

SEQ ID NO: 889813 - DNA, 33 bp, Homo sapien
tctttgttgctaaacactgatcacatgtggttt

SEQ ID NO: 889814 - DNA, 33 bp, Homo sapien
tctttgttgctaaacattgatcacatgtggttt

SEQ ID NO: 889815 - DNA, 33 bp, Homo sapien
agtgcactgcagaaacaaacaagacctttatat

SEQ ID NO: 889816 - DNA, 33 bp, Homo sapien
agtgcactgcagaaacgaacaagacctttatat

SEQ ID NO: 889817 - DNA, 33 bp, Homo sapien
aaatacgagtatccaccatgataaggaacaatt

SEQ ID NO: 889818 - DNA, 33 bp, Homo sapien
aaatacgagtatccactatgataaggaacaatt

SEQ ID NO: 889819 - DNA, 33 bp, Homo sapien
tctttcagccaaatcacctttctagatggatgg

SEQ ID NO: 889820 - DNA, 33 bp, Homo sapien
tctttcagccaaatcagctttctagatggatgg

SEQ ID NO: 889821 - DNA, 33 bp, Homo sapien
aggcaatgccattgaacgtcctgttacatataa

SEQ ID NO: 889822 - DNA, 33 bp, Homo sapien
aggcaatgccattgaatgtcctgttacatataa

SEQ ID NO: 889823 - DNA, 33 bp, Homo sapien
tgttgctgcttgtttgcataacattgtatgagt

SEQ ID NO: 889824 - DNA, 33 bp, Homo sapien
tgttgctgcttgtttggataacattgtatgagt

SEQ ID NO: 889825 - DNA, 33 bp, Homo sapien
acttcttatgccattacacaaaatttcctggaa

SEQ ID NO: 889826 - DNA, 33 bp, Homo sapien
acttcttatgccattatacaaaatttcctggaa

SEQ ID NO: 889827 - DNA, 33 bp, Homo sapien
ttaaaagttcggatcccgcactattgctatata

SEQ ID NO: 889828 - DNA, 33 bp, Homo sapien
ttaaaagttcggatcctgcactattgctatata

SEQ ID NO: 889829 - DNA, 33 bp, Homo sapien
aaacatcccaactccactgagcctgtggaagga

SEQ ID NO: 889830 - DNA, 33 bp, Homo sapien
aaacatcccaactccattgagcctgtggaagga

SEQ ID NO: 889831 - DNA, 33 bp, Homo sapien
ttgggagaatttagtgaatgtttagaccaggtg

SEQ ID NO: 889832 - DNA, 33 bp, Homo sapien
ttgggagaatttagtggatgtttagaccaggtg

SEQ ID NO: 889833 - DNA, 33 bp, Homo sapien
ccggtcacagttggcaatagaattgtactttct

SEQ ID NO: 889834 - DNA, 33 bp, Homo sapien
ccggtcacagttggcagtagaattgtactttct

SEQ ID NO: 889835 - DNA, 33 bp, Homo sapien
ttgaaaggtgattaaccgtgggacaggaacaga

SEQ ID NO: 889836 - DNA, 33 bp, Homo sapien
ttgaaaggtgattaactgtgggacaggaacaga

SEQ ID NO: 889837 - DNA, 33 bp, Homo sapien
ctacaatagcaggaaaagttagaagcaccttaa

SEQ ID NO: 889838 - DNA, 33 bp, Homo sapien
ctacaatagcaggaaacgttagaagcaccttaa

SEQ ID NO: 889839 - DNA, 33 bp, Homo sapien
gtatagcaatggagataacaatgggtaatggag

SEQ ID NO: 889840 - DNA, 33 bp, Homo sapien
gtatagcaatggagatgacaatgggtaatggag

SEQ ID NO: 889841 - DNA, 33 bp, Homo sapien
tcgtgaagattgtatgaaggctttaaactctat

SEQ ID NO: 889842 - DNA, 33 bp, Homo sapien
tcgtgaagattgtatgcaggctttaaactctat

SEQ ID NO: 889843 - DNA, 33 bp, Homo sapien
ttctgtcattgcctcacgttttctctacattct

SEQ ID NO: 889844 - DNA, 33 bp, Homo sapien
ttctgtcattgcctcatgttttctctacattct

SEQ ID NO: 889845 - DNA, 33 bp, Homo sapien
tcagttcatggaaaaacgaaagctttctgtgga

SEQ ID NO: 889846 - DNA, 33 bp, Homo sapien
tcagttcatggaaaaatgaaagctttctgtgga

SEQ ID NO: 889847 - DNA, 33 bp, Homo sapien
cagtgtttgcaaaatggcagaggagtgaaaaag

SEQ ID NO: 889848 - DNA, 33 bp, Homo sapien
cagtgtttgcaaaatgtcagaggagtgaaaaag

SEQ ID NO: 889849 - DNA, 33 bp, Homo sapien
taatgttcacagaggaagaaaaccgagtcctaa

SEQ ID NO: 889850 - DNA, 33 bp, Homo sapien
taatgttcacagaggaggaaaaccgagtcctaa

SEQ ID NO: 889851 - DNA, 33 bp, Homo sapien
caccctctaatgattccctgtggttctcctgat

SEQ ID NO: 889852 - DNA, 33 bp, Homo sapien
caccctctaatgattctctgtggttctcctgat

SEQ ID NO: 889853 - DNA, 33 bp, Homo sapien
caatatttggagagaactgaagctaagtgcttg

SEQ ID NO: 889854 - DNA, 33 bp, Homo sapien
caatatttggagagaattgaagctaagtgcttg

SEQ ID NO: 889855 - DNA, 33 bp, Homo sapien
atccatttgcctgatacatttgcatgaaccatt

SEQ ID NO: 889856 - DNA, 33 bp, Homo sapien
atccatttgcctgatatatttgcatgaaccatt

SEQ ID NO: 889857 - DNA, 33 bp, Homo sapien
tgtaatatctttgttgcaggcataaggcaacta

SEQ ID NO: 889858 - DNA, 33 bp, Homo sapien
tgtaatatctttgttgtaggcataaggcaacta

SEQ ID NO: 889859 - DNA, 33 bp, Homo sapien
atttcttcatattctcaccaagagttgtctttt

SEQ ID NO: 889860 - DNA, 33 bp, Homo sapien
atttcttcatattctcgccaagagttgtctttt

SEQ ID NO: 889861 - DNA, 33 bp, Homo sapien
gacatattaagaatctcaacattggaagataat

SEQ ID NO: 889862 - DNA, 33 bp, Homo sapien
gacatattaagaatctgaacattggaagataat

SEQ ID NO: 889863 - DNA, 33 bp, Homo sapien
atggtaacttaaagaaaccagacacaacaggtc

SEQ ID NO: 889864 - DNA, 33 bp, Homo sapien
atggtaacttaaagaagccagacacaacaggtc

SEQ ID NO: 889865 - DNA, 33 bp, Homo sapien
aattttgtgtttatcacgatggctttgacacat

SEQ ID NO: 889866 - DNA, 33 bp, Homo sapien
aattttgtgtttatcatgatggctttgacacat

SEQ ID NO: 889867 - DNA, 33 bp, Homo sapien
atttgcattcttcccaactagaatcaggtgcct

SEQ ID NO: 889868 - DNA, 33 bp, Homo sapien
atttgcattcttcccatctagaatcaggtgcct

SEQ ID NO: 889869 - DNA, 33 bp, Homo sapien
gtcttccttctctcaacttattagaaccctttg

SEQ ID NO: 889870 - DNA, 33 bp, Homo sapien
gtcttccttctctcaatttattagaaccctttg

SEQ ID NO: 889871 - DNA, 33 bp, Homo sapien
aatgattacattttgaagagcaatatttgtgca

SEQ ID NO: 889872 - DNA, 33 bp, Homo sapien
aatgattacattttgaggagcaatatttgtgca

SEQ ID NO: 889873 - DNA, 33 bp, Homo sapien
catttcatatttctgaacatattcacacagaca

SEQ ID NO: 889874 - DNA, 33 bp, Homo sapien
catttcatatttctgaccatattcacacagaca

SEQ ID NO: 889875 - DNA, 33 bp, Homo sapien
ctactaggcttagactcacagatgtatccaaaa

SEQ ID NO: 889876 - DNA, 33 bp, Homo sapien
ctactaggcttagactgacagatgtatccaaaa

SEQ ID NO: 889877 - DNA, 33 bp, Homo sapien
tctaagcctagtagccacttattcaaagcagga

SEQ ID NO: 889878 - DNA, 33 bp, Homo sapien
tctaagcctagtagccgcttattcaaagcagga

SEQ ID NO: 889879 - DNA, 33 bp, Homo sapien
cagcaagcctcaataagttaggggatttctttt

SEQ ID NO: 889880 - DNA, 33 bp, Homo sapien
cagcaagcctcaataatttaggggatttctttt

SEQ ID NO: 889881 - DNA, 33 bp, Homo sapien
atagaagagaatgaaacaatgttgaggaggcaa

SEQ ID NO: 889882 - DNA, 33 bp, Homo sapien
atagaagagaatgaaagaatgttgaggaggcaa

SEQ ID NO: 889883 - DNA, 33 bp, Homo sapien
ttctaaaaacagaaaactacgattctagtgaca

SEQ ID NO: 889884 - DNA, 33 bp, Homo sapien
ttctaaaaacagaaaagtacgattctagtgaca

SEQ ID NO: 889885 - DNA, 33 bp, Homo sapien
agaacaaggtatcttccactaattcccttcaaa

SEQ ID NO: 889886 - DNA, 33 bp, Homo sapien
agaacaaggtatcttctactaattcccttcaaa

SEQ ID NO: 889887 - DNA, 33 bp, Homo sapien
ttctgcttttttgctacgataagcataatctgc

SEQ ID NO: 889888 - DNA, 33 bp, Homo sapien
ttctgcttttttgctatgataagcataatctgc

SEQ ID NO: 889889 - DNA, 33 bp, Homo sapien
tccctgagtcacacttaaaaaccacaagactcc

SEQ ID NO: 889890 - DNA, 33 bp, Homo sapien
tccctgagtcacacttgaaaaccacaagactcc

SEQ ID NO: 889891 - DNA, 33 bp, Homo sapien
tactctttggaaggaaggtaaaaatcttatatc

SEQ ID NO: 889892 - DNA, 33 bp, Homo sapien
tactctttggaaggaatgtaaaaatcttatatc

SEQ ID NO: 889893 - DNA, 33 bp, Homo sapien
tttaaattagatactccgaaagtttccataagt

SEQ ID NO: 889894 - DNA, 33 bp, Homo sapien
tttaaattagatactctgaaagtttccataagt

SEQ ID NO: 889895 - DNA, 33 bp, Homo sapien
ttttaaatcttggtgccactatattgtttttga

SEQ ID NO: 889896 - DNA, 33 bp, Homo sapien
ttttaaatcttggtgctactatattgtttttga

SEQ ID NO: 889897 - DNA, 33 bp, Homo sapien
taactttttaatattgaagtaggcttgcatcct

SEQ ID NO: 889898 - DNA, 33 bp, Homo sapien
taactttttaatattggagtaggcttgcatcct

SEQ ID NO: 889899 - DNA, 33 bp, Homo sapien
aaaaaatcaaaataaaatgcaacctaccacaac

SEQ ID NO: 889900 - DNA, 33 bp, Homo sapien
aaaaaatcaaaataaattgcaacctaccacaac

SEQ ID NO: 889901 - DNA, 33 bp, Homo sapien
ttgacaacttagactaaatgggaagaataaaaa

SEQ ID NO: 889902 - DNA, 33 bp, Homo sapien
ttgacaacttagactacatgggaagaataaaaa

SEQ ID NO: 889903 - DNA, 33 bp, Homo sapien
tgtaatgtaatatctacagcaaacactaaaaga

SEQ ID NO: 889904 - DNA, 33 bp, Homo sapien
tgtaatgtaatatctagagcaaacactaaaaga

SEQ ID NO: 889905 - DNA, 33 bp, Homo sapien
ggaaatttgttatggaagcagtagaaaactaat

SEQ ID NO: 889906 - DNA, 33 bp, Homo sapien
ggaaatttgttatggaggcagtagaaaactaat

SEQ ID NO: 889907 - DNA, 33 bp, Homo sapien
aagaaagagaataaaaaaagatggaagaattga

SEQ ID NO: 889908 - DNA, 33 bp, Homo sapien
aagaaagagaataaaagaagatggaagaattga

SEQ ID NO: 889909 - DNA, 33 bp, Homo sapien
acatattctgtgactacgatggagtgagacaaa

SEQ ID NO: 889910 - DNA, 33 bp, Homo sapien
acatattctgtgactatgatggagtgagacaaa

SEQ ID NO: 889911 - DNA, 33 bp, Homo sapien
attagaggtacatacaaactgaagactatggag

SEQ ID NO: 889912 - DNA, 33 bp, Homo sapien
attagaggtacatacacactgaagactatggag

SEQ ID NO: 889913 - DNA, 33 bp, Homo sapien
ttttcattgatagaccactaggtttgatatgtg

SEQ ID NO: 889914 - DNA, 33 bp, Homo sapien
ttttcattgatagacccctaggtttgatatgtg

SEQ ID NO: 889915 - DNA, 33 bp, Homo sapien
ttggtctaagcaagcaatatctggctcttggtt

SEQ ID NO: 889916 - DNA, 33 bp, Homo sapien
ttggtctaagcaagcactatctggctcttggtt

SEQ ID NO: 889917 - DNA, 33 bp, Homo sapien
gttctattctcagaaactccgattcactacatt

SEQ ID NO: 889918 - DNA, 33 bp, Homo sapien
gttctattctcagaaattccgattcactacatt

SEQ ID NO: 889919 - DNA, 33 bp, Homo sapien
tcatcaagaatggagacagaaataaccccaaaa

SEQ ID NO: 889920 - DNA, 33 bp, Homo sapien
tcatcaagaatggagagagaaataaccccaaaa

SEQ ID NO: 889921 - DNA, 33 bp, Homo sapien
tgagcagttgtgaacacagactatggagataga

SEQ ID NO: 889922 - DNA, 33 bp, Homo sapien
tgagcagttgtgaacatagactatggagataga

SEQ ID NO: 889923 - DNA, 33 bp, Homo sapien
atgtgaataaagataacgaacgagggttgaaat

SEQ ID NO: 889924 - DNA, 33 bp, Homo sapien
atgtgaataaagataatgaacgagggttgaaat

SEQ ID NO: 889925 - DNA, 33 bp, Homo sapien
ttttctcttcatactcccatatgttcactcccc

SEQ ID NO: 889926 - DNA, 33 bp, Homo sapien
ttttctcttcatactcgcatatgttcactcccc

SEQ ID NO: 889927 - DNA, 33 bp, Homo sapien
cagtatattgtagagaacctcgattatgtcatc

SEQ ID NO: 889928 - DNA, 33 bp, Homo sapien
cagtatattgtagagagcctcgattatgtcatc

SEQ ID NO: 889929 - DNA, 33 bp, Homo sapien
atgattagagacgtcacgtagaaagatcaatgc

SEQ ID NO: 889930 - DNA, 33 bp, Homo sapien
atgattagagacgtcatgtagaaagatcaatgc

SEQ ID NO: 889931 - DNA, 33 bp, Homo sapien
tagatatataaatctcagaatccaaacaaaacc

SEQ ID NO: 889932 - DNA, 33 bp, Homo sapien
tagatatataaatctcggaatccaaacaaaacc

SEQ ID NO: 889933 - DNA, 33 bp, Homo sapien
acagcctttatataacacctagtcaagattcac

SEQ ID NO: 889934 - DNA, 33 bp, Homo sapien
acagcctttatataacgcctagtcaagattcac

SEQ ID NO: 889935 - DNA, 33 bp, Homo sapien
aacctgcttgtcaaaaaaaatcttatttggata

SEQ ID NO: 889936 - DNA, 33 bp, Homo sapien
aacctgcttgtcaaaagaaatcttatttggata

SEQ ID NO: 889937 - DNA, 33 bp, Homo sapien
aaaagtgtcctgacaaactaaatctccatgaaa

SEQ ID NO: 889938 - DNA, 33 bp, Homo sapien
aaaagtgtcctgacaacctaaatctccatgaaa

SEQ ID NO: 889939 - DNA, 33 bp, Homo sapien
taagttctcctttgggcaagcagcacatttgca

SEQ ID NO: 889940 - DNA, 33 bp, Homo sapien
taagttctcctttgggtaagcagcacatttgca

SEQ ID NO: 889941 - DNA, 33 bp, Homo sapien
aatgtgaccctttgccccagatagcttcagaag

SEQ ID NO: 889942 - DNA, 33 bp, Homo sapien
aatgtgaccctttgcctcagatagcttcagaag

SEQ ID NO: 889943 - DNA, 33 bp, Homo sapien
cttctctcagataaaaagaataagttggcaatg

SEQ ID NO: 889944 - DNA, 33 bp, Homo sapien
cttctctcagataaaaggaataagttggcaatg

SEQ ID NO: 889945 - DNA, 33 bp, Homo sapien
ttaaatttatctacaaaagtaactgcaatgcca

SEQ ID NO: 889946 - DNA, 33 bp, Homo sapien
ttaaatttatctacaacagtaactgcaatgcca

SEQ ID NO: 889947 - DNA, 33 bp, Homo sapien
tatcattcatgtgtaggattttgttaactagac

SEQ ID NO: 889948 - DNA, 33 bp, Homo sapien
tatcattcatgtgtagtattttgttaactagac

SEQ ID NO: 889949 - DNA, 33 bp, Homo sapien
gaaacttgctctcacaatgtctcaagcaagaga

SEQ ID NO: 889950 - DNA, 33 bp, Homo sapien
gaaacttgctctcacattgtctcaagcaagaga

SEQ ID NO: 889951 - DNA, 33 bp, Homo sapien
cccctctttgtattgacacgattgcattttatt

SEQ ID NO: 889952 - DNA, 33 bp, Homo sapien
cccctctttgtattgatacgattgcattttatt

SEQ ID NO: 889953 - DNA, 33 bp, Homo sapien
gatgacactttcaataccatttctacagtaaat

SEQ ID NO: 889954 - DNA, 33 bp, Homo sapien
gatgacactttcaatatcatttctacagtaaat

SEQ ID NO: 889955 - DNA, 33 bp, Homo sapien
tatgatttggattgaactgaaaaaaatatagta

SEQ ID NO: 889956 - DNA, 33 bp, Homo sapien
tatgatttggattgaagtgaaaaaaatatagta

SEQ ID NO: 889957 - DNA, 33 bp, Homo sapien
acaatgtgcaagaaaaatattcttaggtatagc

SEQ ID NO: 889958 - DNA, 33 bp, Homo sapien
acaatgtgcaagaaaattattcttaggtatagc

SEQ ID NO: 889959 - DNA, 33 bp, Homo sapien
cagggcctaaatgtggacacaatagaaacaaca

SEQ ID NO: 889960 - DNA, 33 bp, Homo sapien
cagggcctaaatgtgggcacaatagaaacaaca

SEQ ID NO: 889961 - DNA, 33 bp, Homo sapien
ctaggttgtgcccctacgtaatccagaagttat

SEQ ID NO: 889962 - DNA, 33 bp, Homo sapien
ctaggttgtgcccctatgtaatccagaagttat

SEQ ID NO: 889963 - DNA, 33 bp, Homo sapien
attagttttattcacacggggattatgcataag

SEQ ID NO: 889964 - DNA, 33 bp, Homo sapien
attagttttattcacatggggattatgcataag

SEQ ID NO: 889965 - DNA, 33 bp, Homo sapien
aaatttgaaacctgctaaagtaggtcaatggat

SEQ ID NO: 889966 - DNA, 33 bp, Homo sapien
aaatttgaaacctgctgaagtaggtcaatggat

SEQ ID NO: 889967 - DNA, 33 bp, Homo sapien
tcataaaggaatgatacgggtatgccaactatg

SEQ ID NO: 889968 - DNA, 33 bp, Homo sapien
tcataaaggaatgatatgggtatgccaactatg

SEQ ID NO: 889969 - DNA, 33 bp, Homo sapien
aagacctaaacatccaccgatagaacatcagtt

SEQ ID NO: 889970 - DNA, 33 bp, Homo sapien
aagacctaaacatccagcgatagaacatcagtt

SEQ ID NO: 889971 - DNA, 33 bp, Homo sapien
aagtcaaagaagctacaaactctcctcttattt

SEQ ID NO: 889972 - DNA, 33 bp, Homo sapien
aagtcaaagaagctaccaactctcctcttattt

SEQ ID NO: 889973 - DNA, 33 bp, Homo sapien
agttgtcactgatacacgaagactttaaaatac

SEQ ID NO: 889974 - DNA, 33 bp, Homo sapien
agttgtcactgatacatgaagactttaaaatac

SEQ ID NO: 889975 - DNA, 33 bp, Homo sapien
gaatggaacataaaataaagtgaagttaatgtg

SEQ ID NO: 889976 - DNA, 33 bp, Homo sapien
gaatggaacataaaatgaagtgaagttaatgtg

SEQ ID NO: 889977 - DNA, 33 bp, Homo sapien
ataccattttctctcaaatagatctcttcccta

SEQ ID NO: 889978 - DNA, 33 bp, Homo sapien
ataccattttctctcagatagatctcttcccta

SEQ ID NO: 889979 - DNA, 33 bp, Homo sapien
gttgtccctgcttacaacaaaataaaatctaca

SEQ ID NO: 889980 - DNA, 33 bp, Homo sapien
gttgtccctgcttacagcaaaataaaatctaca

SEQ ID NO: 889981 - DNA, 33 bp, Homo sapien
gaagataaggaaaaacaaaaatgtgacagagat

SEQ ID NO: 889982 - DNA, 33 bp, Homo sapien
gaagataaggaaaaacgaaaatgtgacagagat

SEQ ID NO: 889983 - DNA, 33 bp, Homo sapien
aagactcatagcctaaccttggaaataccactt

SEQ ID NO: 889984 - DNA, 33 bp, Homo sapien
aagactcatagcctaatcttggaaataccactt

SEQ ID NO: 889985 - DNA, 33 bp, Homo sapien
aatcaggagaaattgtcaaacgtgtctgttttc

SEQ ID NO: 889986 - DNA, 33 bp, Homo sapien
aatcaggagaaattgtgaaacgtgtctgttttc

SEQ ID NO: 889987 - DNA, 33 bp, Homo sapien
gacaaagaccacaaagaatttctgccaagccag

SEQ ID NO: 889988 - DNA, 33 bp, Homo sapien
gacaaagaccacaaagcatttctgccaagccag

SEQ ID NO: 889989 - DNA, 33 bp, Homo sapien
agtccaaaatgaaatcactgataaactggagtc

SEQ ID NO: 889990 - DNA, 33 bp, Homo sapien
agtccaaaatgaaatcgctgataaactggagtc

SEQ ID NO: 889991 - DNA, 33 bp, Homo sapien
catattcaagatgaagcccaaactatttagctt

SEQ ID NO: 889992 - DNA, 33 bp, Homo sapien
catattcaagatgaaggccaaactatttagctt

SEQ ID NO: 889993 - DNA, 33 bp, Homo sapien
taattccagcttcataaggcaaaaaaaattgtt

SEQ ID NO: 889994 - DNA, 33 bp, Homo sapien
taattccagcttcatatggcaaaaaaaattgtt

SEQ ID NO: 889995 - DNA, 33 bp, Homo sapien
gtcattatctcaagaaccttgtgaatttttaat

SEQ ID NO: 889996 - DNA, 33 bp, Homo sapien
gtcattatctcaagaatcttgtgaatttttaat

SEQ ID NO: 889997 - DNA, 33 bp, Homo sapien
gtgcatcaaggataaagtaaacacactttacaa

SEQ ID NO: 889998 - DNA, 33 bp, Homo sapien
gtgcatcaaggataaattaaacacactttacaa

SEQ ID NO: 889999 - DNA, 33 bp, Homo sapien
ttaggattaaggaaagaagtggacctcaatctt

SEQ ID NO: 890000 - DNA, 33 bp, Homo sapien
ttaggattaaggaaaggagtggacctcaatctt

SEQ ID NO: 890001 - DNA, 33 bp, Homo sapien
ccaattaaattccatgcagaaaaatcatattgt

SEQ ID NO: 890002 - DNA, 33 bp, Homo sapien
ccaattaaattccatgtagaaaaatcatattgt

SEQ ID NO: 890003 - DNA, 33 bp, Homo sapien
gaatcttcattccctcacaaatgaaacttcatt

SEQ ID NO: 890004 - DNA, 33 bp, Homo sapien
gaatcttcattccctcgcaaatgaaacttcatt

SEQ ID NO: 890005 - DNA, 33 bp, Homo sapien
ccctgctctaaacttccatgtctttaactaaca

SEQ ID NO: 890006 - DNA, 33 bp, Homo sapien
ccctgctctaaacttctatgtctttaactaaca

SEQ ID NO: 890007 - DNA, 33 bp, Homo sapien
ttgtgctcagtagaggaattctatatcaggacc

SEQ ID NO: 890008 - DNA, 33 bp, Homo sapien
ttgtgctcagtagaggcattctatatcaggacc

SEQ ID NO: 890009 - DNA, 33 bp, Homo sapien
ggaatgtgttcttaaaaagcactaagccatgct

SEQ ID NO: 890010 - DNA, 33 bp, Homo sapien
ggaatgtgttcttaaacagcactaagccatgct

SEQ ID NO: 890011 - DNA, 33 bp, Homo sapien
tcacacagccattctcgaccagaaaactgtcaa

SEQ ID NO: 890012 - DNA, 33 bp, Homo sapien
tcacacagccattctctaccagaaaactgtcaa

SEQ ID NO: 890013 - DNA, 33 bp, Homo sapien
attttattttggtcaacgaatttattgcttaga

SEQ ID NO: 890014 - DNA, 33 bp, Homo sapien
attttattttggtcaatgaatttattgcttaga

SEQ ID NO: 890015 - DNA, 33 bp, Homo sapien
tataagtgttattccacgcatagaagtgtttaa

SEQ ID NO: 890016 - DNA, 33 bp, Homo sapien
tataagtgttattccatgcatagaagtgtttaa

SEQ ID NO: 890017 - DNA, 33 bp, Homo sapien
agttgtaggagagttacgtgtccaagttgaatc

SEQ ID NO: 890018 - DNA, 33 bp, Homo sapien
agttgtaggagagttatgtgtccaagttgaatc

SEQ ID NO: 890019 - DNA, 33 bp, Homo sapien
caaacccaaattgaggaaaactctatgaaatat

SEQ ID NO: 890020 - DNA, 33 bp, Homo sapien
caaacccaaattgagggaaactctatgaaatat

SEQ ID NO: 890021 - DNA, 33 bp, Homo sapien
ccccctccaggaggtacagtttaacgcaccctc

SEQ ID NO: 890022 - DNA, 33 bp, Homo sapien
ccccctccaggaggtagagtttaacgcaccctc

SEQ ID NO: 890023 - DNA, 33 bp, Homo sapien
tcaatttaaactcactcaacggagaggaatttt

SEQ ID NO: 890024 - DNA, 33 bp, Homo sapien
tcaatttaaactcacttaacggagaggaatttt

SEQ ID NO: 890025 - DNA, 33 bp, Homo sapien
gttgcttagactagttcaaataaatatgaatag

SEQ ID NO: 890026 - DNA, 33 bp, Homo sapien
gttgcttagactagttgaaataaatatgaatag

SEQ ID NO: 890027 - DNA, 33 bp, Homo sapien
atagtcctgccaagtagggtcttcttatttaaa

SEQ ID NO: 890028 - DNA, 33 bp, Homo sapien
atagtcctgccaagtatggtcttcttatttaaa

SEQ ID NO: 890029 - DNA, 33 bp, Homo sapien
gttagctcttgaaacacggagaacttattaggt

SEQ ID NO: 890030 - DNA, 33 bp, Homo sapien
gttagctcttgaaacatggagaacttattaggt

SEQ ID NO: 890031 - DNA, 33 bp, Homo sapien
aagtgatctccaactccagtccatgtgattgtg

SEQ ID NO: 890032 - DNA, 33 bp, Homo sapien
aagtgatctccaactctagtccatgtgattgtg

SEQ ID NO: 890033 - DNA, 33 bp, Homo sapien
cacagaaacccaaagacgtgcattgttgagggc

SEQ ID NO: 890034 - DNA, 33 bp, Homo sapien
cacagaaacccaaagatgtgcattgttgagggc

SEQ ID NO: 890035 - DNA, 33 bp, Homo sapien
cctactatacgaaaaccatcactaaccccttct

SEQ ID NO: 890036 - DNA, 33 bp, Homo sapien
cctactatacgaaaactatcactaaccccttct

SEQ ID NO: 890037 - DNA, 33 bp, Homo sapien
aatttgaataaaagcaatctgatccagagcctg

SEQ ID NO: 890038 - DNA, 33 bp, Homo sapien
aatttgaataaaagcagtctgatccagagcctg

SEQ ID NO: 890039 - DNA, 33 bp, Homo sapien
tgtaatgagggaatacaaaaccaagtgaagtga

SEQ ID NO: 890040 - DNA, 33 bp, Homo sapien
tgtaatgagggaatactaaaccaagtgaagtga

SEQ ID NO: 890041 - DNA, 33 bp, Homo sapien
gaccccttagcaataccgctttctgcttcacgc

SEQ ID NO: 890042 - DNA, 33 bp, Homo sapien
gaccccttagcaatactgctttctgcttcacgc

SEQ ID NO: 890043 - DNA, 33 bp, Homo sapien
aaagttagaggacttacaggtgagttgtttttt

SEQ ID NO: 890044 - DNA, 33 bp, Homo sapien
aaagttagaggacttagaggtgagttgtttttt

SEQ ID NO: 890045 - DNA, 33 bp, Homo sapien
ccattaagacagaagacagcatgattattagca

SEQ ID NO: 890046 - DNA, 33 bp, Homo sapien
ccattaagacagaagagagcatgattattagca

SEQ ID NO: 890047 - DNA, 33 bp, Homo sapien
atgagtagcttgaaagcaaagccaaacaacaac

SEQ ID NO: 890048 - DNA, 33 bp, Homo sapien
atgagtagcttgaaagtaaagccaaacaacaac

SEQ ID NO: 890049 - DNA, 33 bp, Homo sapien
taggaaatcattcaaaatccatctcctttccaa

SEQ ID NO: 890050 - DNA, 33 bp, Homo sapien
taggaaatcattcaaactccatctcctttccaa

SEQ ID NO: 890051 - DNA, 33 bp, Homo sapien
atgattaaagtgaggacatggaagtaactaatt

SEQ ID NO: 890052 - DNA, 33 bp, Homo sapien
atgattaaagtgaggatatggaagtaactaatt

SEQ ID NO: 890053 - DNA, 33 bp, Homo sapien
taaaaggtgctagtcacaaaagatcacgcaagt

SEQ ID NO: 890054 - DNA, 33 bp, Homo sapien
taaaaggtgctagtcagaaaagatcacgcaagt

SEQ ID NO: 890055 - DNA, 33 bp, Homo sapien
aaataaaaagcgataacttagtggaaagtaatg

SEQ ID NO: 890056 - DNA, 33 bp, Homo sapien
aaataaaaagcgataagttagtggaaagtaatg

SEQ ID NO: 890057 - DNA, 33 bp, Homo sapien
ctctctttcaagctgggagacaacattttcatt

SEQ ID NO: 890058 - DNA, 33 bp, Homo sapien
ctctctttcaagctggtagacaacattttcatt

SEQ ID NO: 890059 - DNA, 33 bp, Homo sapien
ttaaacatctttttaccgactacacacacacac

SEQ ID NO: 890060 - DNA, 33 bp, Homo sapien
ttaaacatctttttactgactacacacacacac

SEQ ID NO: 890061 - DNA, 33 bp, Homo sapien
gaaagaaggaaaccaaatgttggctattttgaa

SEQ ID NO: 890062 - DNA, 33 bp, Homo sapien
gaaagaaggaaaccaattgttggctattttgaa

SEQ ID NO: 890063 - DNA, 33 bp, Homo sapien
aatagctttatttccccatcatacaaatggtat

SEQ ID NO: 890064 - DNA, 33 bp, Homo sapien
aatagctttatttccctatcatacaaatggtat

SEQ ID NO: 890065 - DNA, 33 bp, Homo sapien
actggagcagaagaaggaatcacatttagaaaa

SEQ ID NO: 890066 - DNA, 33 bp, Homo sapien
actggagcagaagaagtaatcacatttagaaaa

SEQ ID NO: 890067 - DNA, 33 bp, Homo sapien
tttcctacagaggggaagaagagtagtagtaat

SEQ ID NO: 890068 - DNA, 33 bp, Homo sapien
tttcctacagaggggaggaagagtagtagtaat

SEQ ID NO: 890069 - DNA, 33 bp, Homo sapien
tgggcaaatgcattccaaagcataaccaggaaa

SEQ ID NO: 890070 - DNA, 33 bp, Homo sapien
tgggcaaatgcattccgaagcataaccaggaaa

SEQ ID NO: 890071 - DNA, 33 bp, Homo sapien
ctaactcatcattaaagaccaatacaaataaaa

SEQ ID NO: 890072 - DNA, 33 bp, Homo sapien
ctaactcatcattaaataccaatacaaataaaa

SEQ ID NO: 890073 - DNA, 33 bp, Homo sapien
gttaaggctgtaagcaatgagataatcatggga

SEQ ID NO: 890074 - DNA, 33 bp, Homo sapien
gttaaggctgtaagcagtgagataatcatggga

SEQ ID NO: 890075 - DNA, 33 bp, Homo sapien
agtttccaaccatttaccttttcatcataaaag

SEQ ID NO: 890076 - DNA, 33 bp, Homo sapien
agtttccaaccatttagcttttcatcataaaag

SEQ ID NO: 890077 - DNA, 33 bp, Homo sapien
cataacaggtgaaaacaataaaaacagacttaa

SEQ ID NO: 890078 - DNA, 33 bp, Homo sapien
cataacaggtgaaaaccataaaaacagacttaa

SEQ ID NO: 890079 - DNA, 33 bp, Homo sapien
actcatagctttgcttaaaatctctttatggac

SEQ ID NO: 890080 - DNA, 33 bp, Homo sapien
actcatagctttgcttgaaatctctttatggac

SEQ ID NO: 890081 - DNA, 33 bp, Homo sapien
acttaatgtagtgagaatataatctgtcaaaat

SEQ ID NO: 890082 - DNA, 33 bp, Homo sapien
acttaatgtagtgagagtataatctgtcaaaat

SEQ ID NO: 890083 - DNA, 33 bp, Homo sapien
cctgctaaataagctaaacctgaacaccatctg

SEQ ID NO: 890084 - DNA, 33 bp, Homo sapien
cctgctaaataagctatacctgaacaccatctg

SEQ ID NO: 890085 - DNA, 33 bp, Homo sapien
ttatttagcaggtttaccttgagcagggcattt

SEQ ID NO: 890086 - DNA, 33 bp, Homo sapien
ttatttagcaggtttatcttgagcagggcattt

SEQ ID NO: 890087 - DNA, 33 bp, Homo sapien
cttgagtaacaaaacagtctgatagctatcatt

SEQ ID NO: 890088 - DNA, 33 bp, Homo sapien
cttgagtaacaaaacattctgatagctatcatt

SEQ ID NO: 890089 - DNA, 33 bp, Homo sapien
ggtagaatttccaatacgcctcaaatctgattc

SEQ ID NO: 890090 - DNA, 33 bp, Homo sapien
ggtagaatttccaatatgcctcaaatctgattc

SEQ ID NO: 890091 - DNA, 33 bp, Homo sapien
ttcagctgcatcactacgtctaattaaagataa

SEQ ID NO: 890092 - DNA, 33 bp, Homo sapien
ttcagctgcatcactatgtctaattaaagataa

SEQ ID NO: 890093 - DNA, 33 bp, Homo sapien
tttgcaaatgttttaacgaagttacttgttttt

SEQ ID NO: 890094 - DNA, 33 bp, Homo sapien
tttgcaaatgttttaatgaagttacttgttttt

SEQ ID NO: 890095 - DNA, 33 bp, Homo sapien
aaattgacatattctacatgactcaaatagaag

SEQ ID NO: 890096 - DNA, 33 bp, Homo sapien
aaattgacatattctagatgactcaaatagaag

SEQ ID NO: 890097 - DNA, 33 bp, Homo sapien
ttgaaactttgaaagaatatgcaggagtctaca

SEQ ID NO: 890098 - DNA, 33 bp, Homo sapien
ttgaaactttgaaagagtatgcaggagtctaca

SEQ ID NO: 890099 - DNA, 33 bp, Homo sapien
ccacagacagaatgcaaagtaagaaaagggttg

SEQ ID NO: 890100 - DNA, 33 bp, Homo sapien
ccacagacagaatgcagagtaagaaaagggttg

SEQ ID NO: 890101 - DNA, 33 bp, Homo sapien
tttggcacatactggccaattcaaaaatctgta

SEQ ID NO: 890102 - DNA, 33 bp, Homo sapien
tttggcacatactggctaattcaaaaatctgta

SEQ ID NO: 890103 - DNA, 33 bp, Homo sapien
cttagcttttgctgtgaaacttcagaaaatcag

SEQ ID NO: 890104 - DNA, 33 bp, Homo sapien
cttagcttttgctgtggaacttcagaaaatcag

SEQ ID NO: 890105 - DNA, 33 bp, Homo sapien
gttggtccttggtagacaatattccacggagat

SEQ ID NO: 890106 - DNA, 33 bp, Homo sapien
gttggtccttggtagataatattccacggagat

SEQ ID NO: 890107 - DNA, 33 bp, Homo sapien
tgctgttttggcataaatgttgcatttacacac

SEQ ID NO: 890108 - DNA, 33 bp, Homo sapien
tgctgttttggcataagtgttgcatttacacac

SEQ ID NO: 890109 - DNA, 33 bp, Homo sapien
cctagcttccttccatcactgaggcttatttcc

SEQ ID NO: 890110 - DNA, 33 bp, Homo sapien
cctagcttccttccattactgaggcttatttcc

SEQ ID NO: 890111 - DNA, 33 bp, Homo sapien
attaattttgctagataaagacgagtggctgag

SEQ ID NO: 890112 - DNA, 33 bp, Homo sapien
attaattttgctagatgaagacgagtggctgag

SEQ ID NO: 890113 - DNA, 33 bp, Homo sapien
ttatatctgtttctagacctttcttcttttcct

SEQ ID NO: 890114 - DNA, 33 bp, Homo sapien
ttatatctgtttctaggcctttcttcttttcct

SEQ ID NO: 890115 - DNA, 33 bp, Homo sapien
cactttctgagaaaacaccttggactacataaa

SEQ ID NO: 890116 - DNA, 33 bp, Homo sapien
cactttctgagaaaacgccttggactacataaa

SEQ ID NO: 890117 - DNA, 33 bp, Homo sapien
aaggacagttggtaaacagaagaaagaaattat

SEQ ID NO: 890118 - DNA, 33 bp, Homo sapien
aaggacagttggtaaatagaagaaagaaattat

SEQ ID NO: 890119 - DNA, 33 bp, Homo sapien
gtcctttcagtttgaaataatgactatcatggt

SEQ ID NO: 890120 - DNA, 33 bp, Homo sapien
gtcctttcagtttgaagtaatgactatcatggt

SEQ ID NO: 890121 - DNA, 33 bp, Homo sapien
caacacacatggtctggaaagtagggattaggt

SEQ ID NO: 890122 - DNA, 33 bp, Homo sapien
caacacacatggtctgtaaagtagggattaggt

SEQ ID NO: 890123 - DNA, 33 bp, Homo sapien
gaatcctttacctttacgcagtggccttctttg

SEQ ID NO: 890124 - DNA, 33 bp, Homo sapien
gaatcctttacctttatgcagtggccttctttg

SEQ ID NO: 890125 - DNA, 33 bp, Homo sapien
attctaatttcagacaatagactttaagctaac

SEQ ID NO: 890126 - DNA, 33 bp, Homo sapien
attctaatttcagacagtagactttaagctaac

SEQ ID NO: 890127 - DNA, 33 bp, Homo sapien
taaaaaacagctgatacgttcaaaaggattctt

SEQ ID NO: 890128 - DNA, 33 bp, Homo sapien
taaaaaacagctgatatgttcaaaaggattctt

SEQ ID NO: 890129 - DNA, 33 bp, Homo sapien
ttgaaaacctctgacccattcctagaaatctag

SEQ ID NO: 890130 - DNA, 33 bp, Homo sapien
ttgaaaacctctgacctattcctagaaatctag

SEQ ID NO: 890131 - DNA, 33 bp, Homo sapien
aggttttattagtccactctcacaccatgaaga

SEQ ID NO: 890132 - DNA, 33 bp, Homo sapien
aggttttattagtccattctcacaccatgaaga

SEQ ID NO: 890133 - DNA, 33 bp, Homo sapien
tggttttcccctgatcaatttcagttgtcttca

SEQ ID NO: 890134 - DNA, 33 bp, Homo sapien
tggttttcccctgatcgatttcagttgtcttca

SEQ ID NO: 890135 - DNA, 33 bp, Homo sapien
gtagttcagtcttaacaatttggcttttttggt

SEQ ID NO: 890136 - DNA, 33 bp, Homo sapien
gtagttcagtcttaacgatttggcttttttggt

SEQ ID NO: 890137 - DNA, 33 bp, Homo sapien
gaatgaacaaagcttacaggatctatggaacaa

SEQ ID NO: 890138 - DNA, 33 bp, Homo sapien
gaatgaacaaagcttataggatctatggaacaa

SEQ ID NO: 890139 - DNA, 33 bp, Homo sapien
aatatttaatcttacaatacgtgaacaaggatg

SEQ ID NO: 890140 - DNA, 33 bp, Homo sapien
aatatttaatcttacattacgtgaacaaggatg

SEQ ID NO: 890141 - DNA, 33 bp, Homo sapien
gaggcaattaaagttaaatgaggtcaaaagagt

SEQ ID NO: 890142 - DNA, 33 bp, Homo sapien
gaggcaattaaagttacatgaggtcaaaagagt

SEQ ID NO: 890143 - DNA, 33 bp, Homo sapien
ggatgaagagacagaaaatcagtggtccaatga

SEQ ID NO: 890144 - DNA, 33 bp, Homo sapien
ggatgaagagacagaagatcagtggtccaatga

SEQ ID NO: 890145 - DNA, 33 bp, Homo sapien
gggttaaggtgagagaaagaatctagaattaat

SEQ ID NO: 890146 - DNA, 33 bp, Homo sapien
gggttaaggtgagagagagaatctagaattaat

SEQ ID NO: 890147 - DNA, 33 bp, Homo sapien
atcatagcttgcataaataaaaaagataagcca

SEQ ID NO: 890148 - DNA, 33 bp, Homo sapien
atcatagcttgcataagtaaaaaagataagcca

SEQ ID NO: 890149 - DNA, 33 bp, Homo sapien
gatccaataagtagtcaaaaataagtcctcaga

SEQ ID NO: 890150 - DNA, 33 bp, Homo sapien
gatccaataagtagtcgaaaataagtcctcaga

SEQ ID NO: 890151 - DNA, 33 bp, Homo sapien
aaaagcaagcaataatcaggctggcataacttt

SEQ ID NO: 890152 - DNA, 33 bp, Homo sapien
aaaagcaagcaataattaggctggcataacttt

SEQ ID NO: 890153 - DNA, 33 bp, Homo sapien
ctgaatattttaagaaatgacacagaagaggac

SEQ ID NO: 890154 - DNA, 33 bp, Homo sapien
ctgaatattttaagaagtgacacagaagaggac

SEQ ID NO: 890155 - DNA, 33 bp, Homo sapien
tctttaatatagaagcactcacagctttttggt

SEQ ID NO: 890156 - DNA, 33 bp, Homo sapien
tctttaatatagaagccctcacagctttttggt

SEQ ID NO: 890157 - DNA, 33 bp, Homo sapien
tggggaataggaatgtaacacctgtatgtgtag

SEQ ID NO: 890158 - DNA, 33 bp, Homo sapien
tggggaataggaatgtcacacctgtatgtgtag

SEQ ID NO: 890159 - DNA, 33 bp, Homo sapien
catgtaaattttctccaaagttaccactcacat

SEQ ID NO: 890160 - DNA, 33 bp, Homo sapien
catgtaaattttctccgaagttaccactcacat

SEQ ID NO: 890161 - DNA, 33 bp, Homo sapien
tgtgcacaaatgatgacgtggtaaagagcttgg

SEQ ID NO: 890162 - DNA, 33 bp, Homo sapien
tgtgcacaaatgatgatgtggtaaagagcttgg

SEQ ID NO: 890163 - DNA, 33 bp, Homo sapien
aggtttgtagttgttacggcagtgctaagaaac

SEQ ID NO: 890164 - DNA, 33 bp, Homo sapien
aggtttgtagttgttatggcagtgctaagaaac

SEQ ID NO: 890165 - DNA, 33 bp, Homo sapien
ctgtcaaacagggataaagacaggttcaggaaa

SEQ ID NO: 890166 - DNA, 33 bp, Homo sapien
ctgtcaaacagggatagagacaggttcaggaaa

SEQ ID NO: 890167 - DNA, 33 bp, Homo sapien
acaaagacatccaactaagattattgaatatgt

SEQ ID NO: 890168 - DNA, 33 bp, Homo sapien
acaaagacatccaactgagattattgaatatgt

SEQ ID NO: 890169 - DNA, 33 bp, Homo sapien
atgagaacagactaacacaaggttaataagttg

SEQ ID NO: 890170 - DNA, 33 bp, Homo sapien
atgagaacagactaacgcaaggttaataagttg

SEQ ID NO: 890171 - DNA, 33 bp, Homo sapien
caggagagagtaagatgatacattcaaagtact

SEQ ID NO: 890172 - DNA, 33 bp, Homo sapien
caggagagagtaagattatacattcaaagtact

SEQ ID NO: 890173 - DNA, 33 bp, Homo sapien
tgcagataaagggagaatactgtattacctttt

SEQ ID NO: 890174 - DNA, 33 bp, Homo sapien
tgcagataaagggagactactgtattacctttt

SEQ ID NO: 890175 - DNA, 33 bp, Homo sapien
gaacacaacgtccagacagaaagtgaataaata

SEQ ID NO: 890176 - DNA, 33 bp, Homo sapien
gaacacaacgtccagagagaaagtgaataaata

SEQ ID NO: 890177 - DNA, 33 bp, Homo sapien
cttttttaaactctggaattctgaactggttaa

SEQ ID NO: 890178 - DNA, 33 bp, Homo sapien
cttttttaaactctgggattctgaactggttaa

SEQ ID NO: 890179 - DNA, 33 bp, Homo sapien
gatccctttggatgagaaatgttaaaactccaa

SEQ ID NO: 890180 - DNA, 33 bp, Homo sapien
gatccctttggatgaggaatgttaaaactccaa

SEQ ID NO: 890181 - DNA, 33 bp, Homo sapien
tgtgaggagagacgaaaaaaatcagaaacaaaa

SEQ ID NO: 890182 - DNA, 33 bp, Homo sapien
tgtgaggagagacgaagaaaatcagaaacaaaa

SEQ ID NO: 890183 - DNA, 33 bp, Homo sapien
catatctcaaaatagaacatcacaaaatggtta

SEQ ID NO: 890184 - DNA, 33 bp, Homo sapien
catatctcaaaatagatcatcacaaaatggtta

SEQ ID NO: 890185 - DNA, 33 bp, Homo sapien
tattatgttaaactgaagccaaaggtaagttgt

SEQ ID NO: 890186 - DNA, 33 bp, Homo sapien
tattatgttaaactgacgccaaaggtaagttgt

SEQ ID NO: 890187 - DNA, 33 bp, Homo sapien
tgcttccagcctttgccctgaggagataagaac

SEQ ID NO: 890188 - DNA, 33 bp, Homo sapien
tgcttccagcctttgctctgaggagataagaac

SEQ ID NO: 890189 - DNA, 33 bp, Homo sapien
atttccatgtaagaaccaaaacctttctccaaa

SEQ ID NO: 890190 - DNA, 33 bp, Homo sapien
atttccatgtaagaacgaaaacctttctccaaa

SEQ ID NO: 890191 - DNA, 33 bp, Homo sapien
gaataacaatagcaaacacgaaatgcttactaa

SEQ ID NO: 890192 - DNA, 33 bp, Homo sapien
gaataacaatagcaaatacgaaatgcttactaa

SEQ ID NO: 890193 - DNA, 33 bp, Homo sapien
agtggaacagaaccacacatacagtcaaatcaa

SEQ ID NO: 890194 - DNA, 33 bp, Homo sapien
agtggaacagaaccacgcatacagtcaaatcaa

SEQ ID NO: 890195 - DNA, 33 bp, Homo sapien
ataataaagattttggaactgaatagacatgga

SEQ ID NO: 890196 - DNA, 33 bp, Homo sapien
ataataaagattttggtactgaatagacatgga

SEQ ID NO: 890197 - DNA, 33 bp, Homo sapien
ggctgagagccaagtaggagcttaaacaaacag

SEQ ID NO: 890198 - DNA, 33 bp, Homo sapien
ggctgagagccaagtatgagcttaaacaaacag

SEQ ID NO: 890199 - DNA, 33 bp, Homo sapien
gagctgcagttattgacggttatgaagactggt

SEQ ID NO: 890200 - DNA, 33 bp, Homo sapien
gagctgcagttattgatggttatgaagactggt

SEQ ID NO: 890201 - DNA, 33 bp, Homo sapien
ttggtgattaccattcacagtgccctgaattca

SEQ ID NO: 890202 - DNA, 33 bp, Homo sapien
ttggtgattaccattctcagtgccctgaattca

SEQ ID NO: 890203 - DNA, 33 bp, Homo sapien
catggcttgacatggcactggtacccagagaaa

SEQ ID NO: 890204 - DNA, 33 bp, Homo sapien
catggcttgacatggcgctggtacccagagaaa

SEQ ID NO: 890205 - DNA, 33 bp, Homo sapien
taatgatcatgaaaccactttaaatttaaacta

SEQ ID NO: 890206 - DNA, 33 bp, Homo sapien
taatgatcatgaaaccgctttaaatttaaacta

SEQ ID NO: 890207 - DNA, 33 bp, Homo sapien
gccctctaaattttgcactcaacatggacgtca

SEQ ID NO: 890208 - DNA, 33 bp, Homo sapien
gccctctaaattttgctctcaacatggacgtca

SEQ ID NO: 890209 - DNA, 33 bp, Homo sapien
aacccacagcctcagaccttatagctgaccctg

SEQ ID NO: 890210 - DNA, 33 bp, Homo sapien
aacccacagcctcagatcttatagctgaccctg

SEQ ID NO: 890211 - DNA, 33 bp, Homo sapien
ataaaagcgagttgcaatagtgtaaatgaaagc

SEQ ID NO: 890212 - DNA, 33 bp, Homo sapien
ataaaagcgagttgcagtagtgtaaatgaaagc

SEQ ID NO: 890213 - DNA, 33 bp, Homo sapien
ttttaagtccatcaacagaagagcctctctatg

SEQ ID NO: 890214 - DNA, 33 bp, Homo sapien
ttttaagtccatcaacggaagagcctctctatg

SEQ ID NO: 890215 - DNA, 33 bp, Homo sapien
aagcagctggttgggaaagaagacagatgaacg

SEQ ID NO: 890216 - DNA, 33 bp, Homo sapien
aagcagctggttgggagagaagacagatgaacg

SEQ ID NO: 890217 - DNA, 33 bp, Homo sapien
gggagagaagaaaggcaaaaatcttggcttctc

SEQ ID NO: 890218 - DNA, 33 bp, Homo sapien
gggagagaagaaaggcgaaaatcttggcttctc

SEQ ID NO: 890219 - DNA, 33 bp, Homo sapien
gaaatagccgtgagaaacatatggggtatcacc

SEQ ID NO: 890220 - DNA, 33 bp, Homo sapien
gaaatagccgtgagaatcatatggggtatcacc

SEQ ID NO: 890221 - DNA, 33 bp, Homo sapien
aagtatttaatatccaactagacaatagcctga

SEQ ID NO: 890222 - DNA, 33 bp, Homo sapien
aagtatttaatatccatctagacaatagcctga

SEQ ID NO: 890223 - DNA, 33 bp, Homo sapien
cagataagcacaagaacggagaacaacccaatg

SEQ ID NO: 890224 - DNA, 33 bp, Homo sapien
cagataagcacaagaatggagaacaacccaatg

SEQ ID NO: 890225 - DNA, 33 bp, Homo sapien
aataagtattttcccacgttgaagtcacaaaga

SEQ ID NO: 890226 - DNA, 33 bp, Homo sapien
aataagtattttcccatgttgaagtcacaaaga

SEQ ID NO: 890227 - DNA, 33 bp, Homo sapien
ggacattagaaccaatcaaaggaactgtatatc

SEQ ID NO: 890228 - DNA, 33 bp, Homo sapien
ggacattagaaccaatgaaaggaactgtatatc

SEQ ID NO: 890229 - DNA, 33 bp, Homo sapien
tggaaagagttaaggcaagtcaggacattagaa

SEQ ID NO: 890230 - DNA, 33 bp, Homo sapien
tggaaagagttaaggcgagtcaggacattagaa

SEQ ID NO: 890231 - DNA, 33 bp, Homo sapien
ttatagcattttgcatcactagtctgcagagga

SEQ ID NO: 890232 - DNA, 33 bp, Homo sapien
ttatagcattttgcattactagtctgcagagga

SEQ ID NO: 890233 - DNA, 33 bp, Homo sapien
gatatatatgtaataactacaatggagaagtaa

SEQ ID NO: 890234 - DNA, 33 bp, Homo sapien
gatatatatgtaataagtacaatggagaagtaa

SEQ ID NO: 890235 - DNA, 33 bp, Homo sapien
ttatattttcatcactaaaggagcacttagata

SEQ ID NO: 890236 - DNA, 33 bp, Homo sapien
ttatattttcatcactgaaggagcacttagata

SEQ ID NO: 890237 - DNA, 33 bp, Homo sapien
gtaggtgcttggtccaatacagagttcttggtg

SEQ ID NO: 890238 - DNA, 33 bp, Homo sapien
gtaggtgcttggtccagtacagagttcttggtg

SEQ ID NO: 890239 - DNA, 33 bp, Homo sapien
gactcattcatcattgaaaaacaaatatgtagt

SEQ ID NO: 890240 - DNA, 33 bp, Homo sapien
gactcattcatcattggaaaacaaatatgtagt

SEQ ID NO: 890241 - DNA, 33 bp, Homo sapien
gattacatctcagtgaaaaaagtcattgtgccc

SEQ ID NO: 890242 - DNA, 33 bp, Homo sapien
gattacatctcagtgagaaaagtcattgtgccc

SEQ ID NO: 890243 - DNA, 33 bp, Homo sapien
tgccccagcaagcaaccaacacatacttagcac

SEQ ID NO: 890244 - DNA, 33 bp, Homo sapien
tgccccagcaagcaacgaacacatacttagcac

SEQ ID NO: 890245 - DNA, 33 bp, Homo sapien
accaacagaaagatcacgaggaaatagtttaca

SEQ ID NO: 890246 - DNA, 33 bp, Homo sapien
accaacagaaagatcatgaggaaatagtttaca

SEQ ID NO: 890247 - DNA, 33 bp, Homo sapien
tttatcttctgcttgacggtctgtacattaaat

SEQ ID NO: 890248 - DNA, 33 bp, Homo sapien
tttatcttctgcttgatggtctgtacattaaat

SEQ ID NO: 890249 - DNA, 33 bp, Homo sapien
tcagaaagaaaagtcaataatcaagccaggttc

SEQ ID NO: 890250 - DNA, 33 bp, Homo sapien
tcagaaagaaaagtcagtaatcaagccaggttc

SEQ ID NO: 890251 - DNA, 33 bp, Homo sapien
tgaatttgagaagagaacaatgtatgaggagtg

SEQ ID NO: 890252 - DNA, 33 bp, Homo sapien
tgaatttgagaagagagcaatgtatgaggagtg

SEQ ID NO: 890253 - DNA, 33 bp, Homo sapien
ctcaataactggtaaaagctggtactgaatttt

SEQ ID NO: 890254 - DNA, 33 bp, Homo sapien
ctcaataactggtaaatgctggtactgaatttt

SEQ ID NO: 890255 - DNA, 33 bp, Homo sapien
ctatctaccaaaaacaaattgactatatttctc

SEQ ID NO: 890256 - DNA, 33 bp, Homo sapien
ctatctaccaaaaacatattgactatatttctc

SEQ ID NO: 890257 - DNA, 33 bp, Homo sapien
tgaatttactcactaacgattcatagcaatttg

SEQ ID NO: 890258 - DNA, 33 bp, Homo sapien
tgaatttactcactaatgattcatagcaatttg

SEQ ID NO: 890259 - DNA, 33 bp, Homo sapien
catattaggattatcactagccctttgcagaga

SEQ ID NO: 890260 - DNA, 33 bp, Homo sapien
catattaggattatcattagccctttgcagaga

SEQ ID NO: 890261 - DNA, 33 bp, Homo sapien
gggagaggttggtcaaaaagtatgaactttcag

SEQ ID NO: 890262 - DNA, 33 bp, Homo sapien
gggagaggttggtcaagaagtatgaactttcag

SEQ ID NO: 890263 - DNA, 33 bp, Homo sapien
agtcaggtggtcattacagatttttgagtatat

SEQ ID NO: 890264 - DNA, 33 bp, Homo sapien
agtcaggtggtcattatagatttttgagtatat

SEQ ID NO: 890265 - DNA, 33 bp, Homo sapien
agtcattacaaggaggccattttcaggcatttc

SEQ ID NO: 890266 - DNA, 33 bp, Homo sapien
agtcattacaaggaggtcattttcaggcatttc

SEQ ID NO: 890267 - DNA, 33 bp, Homo sapien
atagatcttgttttgaaaaaatgcctcaggaaa

SEQ ID NO: 890268 - DNA, 33 bp, Homo sapien
atagatcttgttttgagaaaatgcctcaggaaa

SEQ ID NO: 890269 - DNA, 33 bp, Homo sapien
gtcatcagttagtagactcaagcagcagagagt

SEQ ID NO: 890270 - DNA, 33 bp, Homo sapien
gtcatcagttagtagattcaagcagcagagagt

SEQ ID NO: 890271 - DNA, 33 bp, Homo sapien
aacagactttggcaccagctaggtaaacctatc

SEQ ID NO: 890272 - DNA, 33 bp, Homo sapien
aacagactttggcaccggctaggtaaacctatc

SEQ ID NO: 890273 - DNA, 33 bp, Homo sapien
actgtaaacactttgccaggattctgtaatcct

SEQ ID NO: 890274 - DNA, 33 bp, Homo sapien
actgtaaacactttgcgaggattctgtaatcct

SEQ ID NO: 890275 - DNA, 33 bp, Homo sapien
gatcaagccaggtataaaggagaaaatacagct

SEQ ID NO: 890276 - DNA, 33 bp, Homo sapien
gatcaagccaggtatacaggagaaaatacagct

SEQ ID NO: 890277 - DNA, 33 bp, Homo sapien
gaaacgatattgtgaaaatactgcaatgaatga

SEQ ID NO: 890278 - DNA, 33 bp, Homo sapien
gaaacgatattgtgaagatactgcaatgaatga

SEQ ID NO: 890279 - DNA, 33 bp, Homo sapien
tttgatatgtcttttaccggttcctaaaaatag

SEQ ID NO: 890280 - DNA, 33 bp, Homo sapien
tttgatatgtcttttagcggttcctaaaaatag

SEQ ID NO: 890281 - DNA, 33 bp, Homo sapien
agaagttatttttgtggaggcactagtactaat

SEQ ID NO: 890282 - DNA, 33 bp, Homo sapien
agaagttatttttgtgtaggcactagtactaat

SEQ ID NO: 890283 - DNA, 33 bp, Homo sapien
ctacagatgccaaataagactaaaagttttcat

SEQ ID NO: 890284 - DNA, 33 bp, Homo sapien
ctacagatgccaaataggactaaaagttttcat

SEQ ID NO: 890285 - DNA, 33 bp, Homo sapien
cttccacatttcctaacgtctctgaggatttag

SEQ ID NO: 890286 - DNA, 33 bp, Homo sapien
cttccacatttcctaaggtctctgaggatttag

SEQ ID NO: 890287 - DNA, 33 bp, Homo sapien
actgctctggcagtcaaaaaagtaaatgttcta

SEQ ID NO: 890288 - DNA, 33 bp, Homo sapien
actgctctggcagtcagaaaagtaaatgttcta

SEQ ID NO: 890289 - DNA, 33 bp, Homo sapien
atgctaaatgttaccaaattttcacatctgaaa

SEQ ID NO: 890290 - DNA, 33 bp, Homo sapien
atgctaaatgttaccatattttcacatctgaaa

SEQ ID NO: 890291 - DNA, 33 bp, Homo sapien
cagaaatggtagagaacgtcaatacagaaaaga

SEQ ID NO: 890292 - DNA, 33 bp, Homo sapien
cagaaatggtagagaaggtcaatacagaaaaga

SEQ ID NO: 890293 - DNA, 33 bp, Homo sapien
tcttaattctcataagcatttgtattctcaacc

SEQ ID NO: 890294 - DNA, 33 bp, Homo sapien
tcttaattctcataaggatttgtattctcaacc

SEQ ID NO: 890295 - DNA, 33 bp, Homo sapien
gattgaaatttagaagaatcttggaagtctttg

SEQ ID NO: 890296 - DNA, 33 bp, Homo sapien
gattgaaatttagaaggatcttggaagtctttg

SEQ ID NO: 890297 - DNA, 33 bp, Homo sapien
cagatgtgagctaaaaatcgtgacctaatgaca

SEQ ID NO: 890298 - DNA, 33 bp, Homo sapien
cagatgtgagctaaaagtcgtgacctaatgaca

SEQ ID NO: 890299 - DNA, 33 bp, Homo sapien
caaatcctttctggaaagtttcaatttactttg

SEQ ID NO: 890300 - DNA, 33 bp, Homo sapien
caaatcctttctggaaggtttcaatttactttg

SEQ ID NO: 890301 - DNA, 33 bp, Homo sapien
acatctgtttacaacacggttcactgaatattt

SEQ ID NO: 890302 - DNA, 33 bp, Homo sapien
acatctgtttacaacatggttcactgaatattt

SEQ ID NO: 890303 - DNA, 33 bp, Homo sapien
ccttcacaacttgtgcaagagacctagctttca

SEQ ID NO: 890304 - DNA, 33 bp, Homo sapien
ccttcacaacttgtgcgagagacctagctttca

SEQ ID NO: 890305 - DNA, 33 bp, Homo sapien
taagtaacttccactcacttgaatgtaatacaa

SEQ ID NO: 890306 - DNA, 33 bp, Homo sapien
taagtaacttccactcgcttgaatgtaatacaa

SEQ ID NO: 890307 - DNA, 33 bp, Homo sapien
catgggtacctgggacactggatggctgttcca

SEQ ID NO: 890308 - DNA, 33 bp, Homo sapien
catgggtacctgggactctggatggctgttcca

SEQ ID NO: 890309 - DNA, 33 bp, Homo sapien
gttgatggaattcatacaagttcagtcttccag

SEQ ID NO: 890310 - DNA, 33 bp, Homo sapien
gttgatggaattcatataagttcagtcttccag

SEQ ID NO: 890311 - DNA, 33 bp, Homo sapien
ttgaacctgctagaaaatgcaagataaggtaaa

SEQ ID NO: 890312 - DNA, 33 bp, Homo sapien
ttgaacctgctagaaagtgcaagataaggtaaa

SEQ ID NO: 890313 - DNA, 33 bp, Homo sapien
tcccctgagagcagaaaagatgacagaacaacc

SEQ ID NO: 890314 - DNA, 33 bp, Homo sapien
tcccctgagagcagaagagatgacagaacaacc

SEQ ID NO: 890315 - DNA, 33 bp, Homo sapien
ttgcccttggcacgtacggtatccaggccagta

SEQ ID NO: 890316 - DNA, 33 bp, Homo sapien
ttgcccttggcacgtatggtatccaggccagta

SEQ ID NO: 890317 - DNA, 33 bp, Homo sapien
cactgatgagtttgccaaaacatgatgaaaatc

SEQ ID NO: 890318 - DNA, 33 bp, Homo sapien
cactgatgagtttgccgaaacatgatgaaaatc

SEQ ID NO: 890319 - DNA, 33 bp, Homo sapien
ttgttaaacctagcacaagaactagttggtgtt

SEQ ID NO: 890320 - DNA, 33 bp, Homo sapien
ttgttaaacctagcacgagaactagttggtgtt

SEQ ID NO: 890321 - DNA, 33 bp, Homo sapien
tagaatccactgaacactgggtgcgaaaagagc

SEQ ID NO: 890322 - DNA, 33 bp, Homo sapien
tagaatccactgaacagtgggtgcgaaaagagc

SEQ ID NO: 890323 - DNA, 33 bp, Homo sapien
cagcctgcagctggaacggtcataccaccacca

SEQ ID NO: 890324 - DNA, 33 bp, Homo sapien
cagcctgcagctggaatggtcataccaccacca

SEQ ID NO: 890325 - DNA, 33 bp, Homo sapien
caggatatgagaggggaagaagaggaggcctgt

SEQ ID NO: 890326 - DNA, 33 bp, Homo sapien
caggatatgagagggggagaagaggaggcctgt

SEQ ID NO: 890327 - DNA, 33 bp, Homo sapien
ctggatcaaggaaaaactaactgagagttcaac

SEQ ID NO: 890328 - DNA, 33 bp, Homo sapien
ctggatcaaggaaaaattaactgagagttcaac

SEQ ID NO: 890329 - DNA, 33 bp, Homo sapien
gtggttgacaagtcaccgataagagtgaaagtc

SEQ ID NO: 890330 - DNA, 33 bp, Homo sapien
gtggttgacaagtcactgataagagtgaaagtc

SEQ ID NO: 890331 - DNA, 33 bp, Homo sapien
aagacaagttttggagcaggaatgaaagtttac

SEQ ID NO: 890332 - DNA, 33 bp, Homo sapien
aagacaagttttggagtaggaatgaaagtttac

SEQ ID NO: 890333 - DNA, 33 bp, Homo sapien
cttagcagaacacttgcattttaatagttagca

SEQ ID NO: 890334 - DNA, 33 bp, Homo sapien
cttagcagaacacttggattttaatagttagca

SEQ ID NO: 890335 - DNA, 33 bp, Homo sapien
aggaaagattagtgaagtgacatgaagattgga

SEQ ID NO: 890336 - DNA, 33 bp, Homo sapien
aggaaagattagtgaattgacatgaagattgga

SEQ ID NO: 890337 - DNA, 33 bp, Homo sapien
gtttcctgtatctgtgaattcataccataccta

SEQ ID NO: 890338 - DNA, 33 bp, Homo sapien
gtttcctgtatctgtggattcataccataccta

SEQ ID NO: 890339 - DNA, 33 bp, Homo sapien
tggaaaatagctacaacaaaaggtggtaacaat

SEQ ID NO: 890340 - DNA, 33 bp, Homo sapien
tggaaaatagctacaataaaaggtggtaacaat

SEQ ID NO: 890341 - DNA, 33 bp, Homo sapien
catatagaggtactacagatttttatgttaatt

SEQ ID NO: 890342 - DNA, 33 bp, Homo sapien
catatagaggtactactgatttttatgttaatt

SEQ ID NO: 890343 - DNA, 33 bp, Homo sapien
ttttggtatatgaatcaagagagatgatcacaa

SEQ ID NO: 890344 - DNA, 33 bp, Homo sapien
ttttggtatatgaatcgagagagatgatcacaa

SEQ ID NO: 890345 - DNA, 33 bp, Homo sapien
atttactcctactcccactactatcaaaaagtt

SEQ ID NO: 890346 - DNA, 33 bp, Homo sapien
atttactcctactcccgctactatcaaaaagtt

SEQ ID NO: 890347 - DNA, 33 bp, Homo sapien
ggatcagaatatatgaagtggccagaatatata

SEQ ID NO: 890348 - DNA, 33 bp, Homo sapien
ggatcagaatatatgaggtggccagaatatata

SEQ ID NO: 890349 - DNA, 33 bp, Homo sapien
ctctgcaaattagactaaataactcacttaaat

SEQ ID NO: 890350 - DNA, 33 bp, Homo sapien
ctctgcaaattagactgaataactcacttaaat

SEQ ID NO: 890351 - DNA, 33 bp, Homo sapien
ctgatagatcaagagaaagaaaggcattccagg

SEQ ID NO: 890352 - DNA, 33 bp, Homo sapien
ctgatagatcaagagagagaaaggcattccagg

SEQ ID NO: 890353 - DNA, 33 bp, Homo sapien
aatttgtttcctcatacgcacttacgattatga

SEQ ID NO: 890354 - DNA, 33 bp, Homo sapien
aatttgtttcctcatatgcacttacgattatga

SEQ ID NO: 890355 - DNA, 33 bp, Homo sapien
agttcaagcctacaaacatagacaagagctaaa

SEQ ID NO: 890356 - DNA, 33 bp, Homo sapien
agttcaagcctacaaatatagacaagagctaaa

SEQ ID NO: 890357 - DNA, 33 bp, Homo sapien
tattctgccatgactaatacaatgtctattctc

SEQ ID NO: 890358 - DNA, 33 bp, Homo sapien
tattctgccatgactattacaatgtctattctc

SEQ ID NO: 890359 - DNA, 33 bp, Homo sapien
atttcaataaaaagatcagtatggtaatcaaat

SEQ ID NO: 890360 - DNA, 33 bp, Homo sapien
atttcaataaaaagatgagtatggtaatcaaat

SEQ ID NO: 890361 - DNA, 33 bp, Homo sapien
aacaacccaatgttctaaatacagttaactggc

SEQ ID NO: 890362 - DNA, 33 bp, Homo sapien
aacaacccaatgttctgaatacagttaactggc

SEQ ID NO: 890363 - DNA, 33 bp, Homo sapien
taactggtcgaagtatcataagtagaaataatg

SEQ ID NO: 890364 - DNA, 33 bp, Homo sapien
taactggtcgaagtatgataagtagaaataatg

SEQ ID NO: 890365 - DNA, 33 bp, Homo sapien
gtgccatgagtcaaaacggacacttctataagg

SEQ ID NO: 890366 - DNA, 33 bp, Homo sapien
gtgccatgagtcaaaatggacacttctataagg

SEQ ID NO: 890367 - DNA, 33 bp, Homo sapien
ttctgattgataaatacgttctaaaattgactg

SEQ ID NO: 890368 - DNA, 33 bp, Homo sapien
ttctgattgataaatatgttctaaaattgactg

SEQ ID NO: 890369 - DNA, 33 bp, Homo sapien
gcctcctcttactctacgacccttggttctgtt

SEQ ID NO: 890370 - DNA, 33 bp, Homo sapien
gcctcctcttactctatgacccttggttctgtt

SEQ ID NO: 890371 - DNA, 33 bp, Homo sapien
cagaagtggaaaggaccgcatttagacactagc

SEQ ID NO: 890372 - DNA, 33 bp, Homo sapien
cagaagtggaaaggactgcatttagacactagc

SEQ ID NO: 890373 - DNA, 33 bp, Homo sapien
tcataatgaccaaaaaatagaaagaactcaata

SEQ ID NO: 890374 - DNA, 33 bp, Homo sapien
tcataatgaccaaaaagtagaaagaactcaata

SEQ ID NO: 890375 - DNA, 33 bp, Homo sapien
agagagaaaacacatcagatgtcctgttctacc

SEQ ID NO: 890376 - DNA, 33 bp, Homo sapien
agagagaaaacacatcggatgtcctgttctacc

SEQ ID NO: 890377 - DNA, 33 bp, Homo sapien
caacactggaaatccacgaaatgtgaagacatt

SEQ ID NO: 890378 - DNA, 33 bp, Homo sapien
caacactggaaatccatgaaatgtgaagacatt

SEQ ID NO: 890379 - DNA, 33 bp, Homo sapien
aactgctggattgtaccgagacaagttggcaac

SEQ ID NO: 890380 - DNA, 33 bp, Homo sapien
aactgctggattgtactgagacaagttggcaac

SEQ ID NO: 890381 - DNA, 33 bp, Homo sapien
tcaggccaaagaaacaccactataagacaactg

SEQ ID NO: 890382 - DNA, 33 bp, Homo sapien
tcaggccaaagaaacagcactataagacaactg

SEQ ID NO: 890383 - DNA, 33 bp, Homo sapien
atcagacatctcaaataagaaatcgctgtatta

SEQ ID NO: 890384 - DNA, 33 bp, Homo sapien
atcagacatctcaaatcagaaatcgctgtatta

SEQ ID NO: 890385 - DNA, 33 bp, Homo sapien
gtgattactacatgcaagaatggggatagtggt

SEQ ID NO: 890386 - DNA, 33 bp, Homo sapien
gtgattactacatgcaggaatggggatagtggt

SEQ ID NO: 890387 - DNA, 33 bp, Homo sapien
ttattggagactattaagaacatctatacacta

SEQ ID NO: 890388 - DNA, 33 bp, Homo sapien
ttattggagactattatgaacatctatacacta

SEQ ID NO: 890389 - DNA, 33 bp, Homo sapien
gttcagttcatagcagacagttccaagacagat

SEQ ID NO: 890390 - DNA, 33 bp, Homo sapien
gttcagttcatagcaggcagttccaagacagat

SEQ ID NO: 890391 - DNA, 33 bp, Homo sapien
agtgacctggctgaaactaatccctcaatcagc

SEQ ID NO: 890392 - DNA, 33 bp, Homo sapien
agtgacctggctgaaagtaatccctcaatcagc

SEQ ID NO: 890393 - DNA, 33 bp, Homo sapien
atttctggctgcactaaatgaatttgctcggtt

SEQ ID NO: 890394 - DNA, 33 bp, Homo sapien
atttctggctgcactatatgaatttgctcggtt

SEQ ID NO: 890395 - DNA, 33 bp, Homo sapien
agctttggagttaatgaattattgaactcaatg

SEQ ID NO: 890396 - DNA, 33 bp, Homo sapien
agctttggagttaatgcattattgaactcaatg

SEQ ID NO: 890397 - DNA, 33 bp, Homo sapien
agagagaggtttgtccagagaaaaatatattac

SEQ ID NO: 890398 - DNA, 33 bp, Homo sapien
agagagaggtttgtccggagaaaaatatattac

SEQ ID NO: 890399 - DNA, 33 bp, Homo sapien
agtagctttgacaataacaatttggcaaactgt

SEQ ID NO: 890400 - DNA, 33 bp, Homo sapien
agtagctttgacaatagcaatttggcaaactgt

SEQ ID NO: 890401 - DNA, 33 bp, Homo sapien
gaagaaaaaaggagtccactaaaggtgaagttc

SEQ ID NO: 890402 - DNA, 33 bp, Homo sapien
gaagaaaaaaggagtcgactaaaggtgaagttc

SEQ ID NO: 890403 - DNA, 33 bp, Homo sapien
agagaacacgagggaaacattttaaaatagcaa

SEQ ID NO: 890404 - DNA, 33 bp, Homo sapien
agagaacacgagggaatcattttaaaatagcaa

SEQ ID NO: 890405 - DNA, 33 bp, Homo sapien
atttcagggtggtagaactgctagtattttcgc

SEQ ID NO: 890406 - DNA, 33 bp, Homo sapien
atttcagggtggtagatctgctagtattttcgc

SEQ ID NO: 890407 - DNA, 33 bp, Homo sapien
gcagtatgattccccaaaaacaatgaggaagta

SEQ ID NO: 890408 - DNA, 33 bp, Homo sapien
gcagtatgattccccagaaacaatgaggaagta

SEQ ID NO: 890409 - DNA, 33 bp, Homo sapien
aaaatctgtcatcaaagtgagtattatcttgga

SEQ ID NO: 890410 - DNA, 33 bp, Homo sapien
aaaatctgtcatcaaattgagtattatcttgga

SEQ ID NO: 890411 - DNA, 33 bp, Homo sapien; identical to SEQ ID NO: 890409

SEQ ID NO: 890412 - DNA, 33 bp, Homo sapien; identical to SEQ ID NO: 890410

SEQ ID NO: 890413 - DNA, 33 bp, Homo sapien
atgagtatggactatacgtatgaaggctcctct

SEQ ID NO: 890414 - DNA, 33 bp, Homo sapien
atgagtatggactatatgtatgaaggctcctct

SEQ ID NO: 890415 - DNA, 33 bp, Homo sapien
aaatatcagtggatacaaaaaattaatatgcct

SEQ ID NO: 890416 - DNA, 33 bp, Homo sapien
aaatatcagtggatacgaaaaattaatatgcct

SEQ ID NO: 890417 - DNA, 33 bp, Homo sapien
actgacagttgaaaaacgatcaatatatgcagt

SEQ ID NO: 890418 - DNA, 33 bp, Homo sapien
actgacagttgaaaaatgatcaatatatgcagt

SEQ ID NO: 890419 - DNA, 33 bp, Homo sapien
caaaaccacttgataacaatgatattactagca

SEQ ID NO: 890420 - DNA, 33 bp, Homo sapien
caaaaccacttgataagaatgatattactagca

SEQ ID NO: 890421 - DNA, 33 bp, Homo sapien
agtctacagaaaagcaagagtgtatttggaaat

SEQ ID NO: 890422 - DNA, 33 bp, Homo sapien
agtctacagaaaagcaggagtgtatttggaaat

SEQ ID NO: 890423 - DNA, 33 bp, Homo sapien
caatcaccatattttgaattaaggttagcacca

SEQ ID NO: 890424 - DNA, 33 bp, Homo sapien
caatcaccatattttggattaaggttagcacca

SEQ ID NO: 890425 - DNA, 33 bp, Homo sapien
accaaatctagacatccctatgcacattaagag

SEQ ID NO: 890426 - DNA, 33 bp, Homo sapien
accaaatctagacatcgctatgcacattaagag

SEQ ID NO: 890427 - DNA, 33 bp, Homo sapien
tgttgaggaggttgctcacagccaaatcccagt

SEQ ID NO: 890428 - DNA, 33 bp, Homo sapien
tgttgaggaggttgctgacagccaaatcccagt

SEQ ID NO: 890429 - DNA, 33 bp, Homo sapien
aggcagccacaagtaactaaaactgaaaactaa

SEQ ID NO: 890430 - DNA, 33 bp, Homo sapien
aggcagccacaagtaattaaaactgaaaactaa

SEQ ID NO: 890431 - DNA, 33 bp, Homo sapien
taaaatagatggtatacgtggtggaatagatag

SEQ ID NO: 890432 - DNA, 33 bp, Homo sapien
taaaatagatggtataggtggtggaatagatag

SEQ ID NO: 890433 - DNA, 33 bp, Homo sapien
tctcacatgagtgtcactcactaaacttctcgt

SEQ ID NO: 890434 - DNA, 33 bp, Homo sapien
tctcacatgagtgtcattcactaaacttctcgt

SEQ ID NO: 890435 - DNA, 33 bp, Homo sapien
catactgtgtctataaataagttgaaggcaacc

SEQ ID NO: 890436 - DNA, 33 bp, Homo sapien
catactgtgtctataagtaagttgaaggcaacc

SEQ ID NO: 890437 - DNA, 33 bp, Homo sapien
acgtctaaagtacaaacacaagagtggaatttg

SEQ ID NO: 890438 - DNA, 33 bp, Homo sapien
acgtctaaagtacaaatacaagagtggaatttg

SEQ ID NO: 890439 - DNA, 33 bp, Homo sapien
actgaaaactgtaagcacatactttgtattccc

SEQ ID NO: 890440 - DNA, 33 bp, Homo sapien
actgaaaactgtaagcccatactttgtattccc

SEQ ID NO: 890441 - DNA, 33 bp, Homo sapien
aggtacttcagccaaaatggaatgcatatcagc

SEQ ID NO: 890442 - DNA, 33 bp, Homo sapien
aggtacttcagccaaactggaatgcatatcagc

SEQ ID NO: 890443 - DNA, 33 bp, Homo sapien
caattgagtgatgctaaaatgacatggagtatt

SEQ ID NO: 890444 - DNA, 33 bp, Homo sapien
caattgagtgatgctacaatgacatggagtatt

SEQ ID NO: 890445 - DNA, 33 bp, Homo sapien
atgaaaccaattactaccacttactgatctttg

SEQ ID NO: 890446 - DNA, 33 bp, Homo sapien
atgaaaccaattactatcacttactgatctttg

SEQ ID NO: 890447 - DNA, 33 bp, Homo sapien
atctctgcattcctgacgaccaaagtttctgtc

SEQ ID NO: 890448 - DNA, 33 bp, Homo sapien
atctctgcattcctgatgaccaaagtttctgtc

SEQ ID NO: 890449 - DNA, 33 bp, Homo sapien
tgagatccagaaataacaggattagcgagagaa

SEQ ID NO: 890450 - DNA, 33 bp, Homo sapien
tgagatccagaaataagaggattagcgagagaa

SEQ ID NO: 890451 - DNA, 33 bp, Homo sapien
gtttagtccaagatcaacgatatcacgcgtccc

SEQ ID NO: 890452 - DNA, 33 bp, Homo sapien
gtttagtccaagatcagcgatatcacgcgtccc

SEQ ID NO: 890453 - DNA, 33 bp, Homo sapien
tcagctttgcacctagcagtttaaatgcatcca

SEQ ID NO: 890454 - DNA, 33 bp, Homo sapien
tcagctttgcacctagtagtttaaatgcatcca

SEQ ID NO: 890455 - DNA, 33 bp, Homo sapien
agtcagaattgtagtgaagctctaaggtttcag

SEQ ID NO: 890456 - DNA, 33 bp, Homo sapien
agtcagaattgtagtggagctctaaggtttcag

SEQ ID NO: 890457 - DNA, 33 bp, Homo sapien
ttccccttagctgggacagtttcaacaagggtg

SEQ ID NO: 890458 - DNA, 33 bp, Homo sapien
ttccccttagctgggatagtttcaacaagggtg

SEQ ID NO: 890459 - DNA, 33 bp, Homo sapien
tttcaggtgatagttacaaccagcctctcgaaa

SEQ ID NO: 890460 - DNA, 33 bp, Homo sapien
tttcaggtgatagttagaaccagcctctcgaaa

SEQ ID NO: 890461 - DNA, 33 bp, Homo sapien
ttcagcacagattaaacaccctccaacttggag

SEQ ID NO: 890462 - DNA, 33 bp, Homo sapien
ttcagcacagattaaagaccctccaacttggag

SEQ ID NO: 890463 - DNA, 33 bp, Homo sapien
tatggcaaaacctgtaagagatacaatttgtga

SEQ ID NO: 890464 - DNA, 33 bp, Homo sapien
tatggcaaaacctgtaggagatacaatttgtga

SEQ ID NO: 890465 - DNA, 33 bp, Homo sapien
taatatattctacaaaagagcgttgaaaaccgc

SEQ ID NO: 890466 - DNA, 33 bp, Homo sapien
taatatattctacaaaggagcgttgaaaaccgc

SEQ ID NO: 890467 - DNA, 33 bp, Homo sapien
atcgcactatttttaaagacacttacaacaaat

SEQ ID NO: 890468 - DNA, 33 bp, Homo sapien
atcgcactatttttaaggacacttacaacaaat

SEQ ID NO: 890469 - DNA, 33 bp, Homo sapien
atgatatttcagagcccagtgtaaaatcactcc

SEQ ID NO: 890470 - DNA, 33 bp, Homo sapien
atgatatttcagagcctagtgtaaaatcactcc

SEQ ID NO: 890471 - DNA, 33 bp, Homo sapien
tcaagttacttactggcaggtagccactagaga

SEQ ID NO: 890472 - DNA, 33 bp, Homo sapien
tcaagttacttactggtaggtagccactagaga

SEQ ID NO: 890473 - DNA, 33 bp, Homo sapien
aaattatcattccgaaaaaatggagacatgatg

SEQ ID NO: 890474 - DNA, 33 bp, Homo sapien
aaattatcattccgaagaaatggagacatgatg

SEQ ID NO: 890475 - DNA, 33 bp, Homo sapien
aatcattctaacgccaacttctaggtaaacagt

SEQ ID NO: 890476 - DNA, 33 bp, Homo sapien
aatcattctaacgccaccttctaggtaaacagt

SEQ ID NO: 890477 - DNA, 33 bp, Homo sapien
aatatctctgctctgacgttttgattttgttaa

SEQ ID NO: 890478 - DNA, 33 bp, Homo sapien
aatatctctgctctgatgttttgattttgttaa

SEQ ID NO: 890479 - DNA, 33 bp, Homo sapien
tagttaaagctggaaagaattaggactcatttg

SEQ ID NO: 890480 - DNA, 33 bp, Homo sapien
tagttaaagctggaaataattaggactcatttg

SEQ ID NO: 890481 - DNA, 33 bp, Homo sapien
ttctcttcttggtttacaacttctcttggtagc

SEQ ID NO: 890482 - DNA, 33 bp, Homo sapien
ttctcttcttggtttagaacttctcttggtagc

SEQ ID NO: 890483 - DNA, 33 bp, Homo sapien; identical to SEQ ID NO: 890481

SEQ ID NO: 890484 - DNA, 33 bp, Homo sapien; identical to SEQ ID NO: 890482

SEQ ID NO: 890485 - DNA, 33 bp, Homo sapien
tttaggttcttcaagtcaaagtgcttctgacaa

SEQ ID NO: 890486 - DNA, 33 bp, Homo sapien
tttaggttcttcaagtgaaagtgcttctgacaa

SEQ ID NO: 890487 - DNA, 33 bp, Homo sapien
tataatagatctgtaacgcatgaggaaactatg

SEQ ID NO: 890488 - DNA, 33 bp, Homo sapien
tataatagatctgtaatgcatgaggaaactatg

SEQ ID NO: 890489 - DNA, 33 bp, Homo sapien
cagatactgaggcttacattaatgggaagaata

SEQ ID NO: 890490 - DNA, 33 bp, Homo sapien
cagatactgaggcttagattaatgggaagaata

SEQ ID NO: 890491 - DNA, 33 bp, Homo sapien
cccatgaatttaaaaacgatctctatgctgatg

SEQ ID NO: 890492 - DNA, 33 bp, Homo sapien
cccatgaatttaaaaatgatctctatgctgatg

SEQ ID NO: 890493 - DNA, 33 bp, Homo sapien
atcctagccttgtccaactaattaaaccactat

SEQ ID NO: 890494 - DNA, 33 bp, Homo sapien
atcctagccttgtccatctaattaaaccactat

SEQ ID NO: 890495 - DNA, 33 bp, Homo sapien
tgaagctgatatggaaacaaacactgagagtta

SEQ ID NO: 890496 - DNA, 33 bp, Homo sapien
tgaagctgatatggaagcaaacactgagagtta

SEQ ID NO: 890497 - DNA, 33 bp, Homo sapien
tgtttcagttaggaggaataaatgtttgatatg

SEQ ID NO: 890498 - DNA, 33 bp, Homo sapien
tgtttcagttaggaggtataaatgtttgatatg

SEQ ID NO: 890499 - DNA, 33 bp, Homo sapien
tccactcctttgtcacactcctcattcctcgtc

SEQ ID NO: 890500 - DNA, 33 bp, Homo sapien
tccactcctttgtcaccctcctcattcctcgtc

SEQ ID NO: 890501 - DNA, 33 bp, Homo sapien
accaatcatctgatcacagtaagcagttccaac

SEQ ID NO: 890502 - DNA, 33 bp, Homo sapien
accaatcatctgatcagagtaagcagttccaac

SEQ ID NO: 890503 - DNA, 33 bp, Homo sapien
tgaaataatgatgtcacgtcaataaatgataaa

SEQ ID NO: 890504 - DNA, 33 bp, Homo sapien
tgaaataatgatgtcatgtcaataaatgataaa

SEQ ID NO: 890505 - DNA, 33 bp, Homo sapien
aggacaaaataagagacgggttttgaaagtatt

SEQ ID NO: 890506 - DNA, 33 bp, Homo sapien
aggacaaaataagagatgggttttgaaagtatt

SEQ ID NO: 890507 - DNA, 33 bp, Homo sapien
attttcctatgcttaacgtctgaaatactatta

SEQ ID NO: 890508 - DNA, 33 bp, Homo sapien
attttcctatgcttaatgtctgaaatactatta

SEQ ID NO: 890509 - DNA, 33 bp, Homo sapien
aatgtggtaagtggcaaccacaaatggtttaga

SEQ ID NO: 890510 - DNA, 33 bp, Homo sapien
aatgtggtaagtggcatccacaaatggtttaga

SEQ ID NO: 890511 - DNA, 33 bp, Homo sapien
cacataggaaatacaagggaaatcatagaaccc

SEQ ID NO: 890512 - DNA, 33 bp, Homo sapien
cacataggaaatacaatggaaatcatagaaccc

SEQ ID NO: 890513 - DNA, 33 bp, Homo sapien
atttgatttgaaacggaaccattagaagcatta

SEQ ID NO: 890514 - DNA, 33 bp, Homo sapien
atttgatttgaaacggcaccattagaagcatta

SEQ ID NO: 890515 - DNA, 33 bp, Homo sapien
ttttgtgtttttcaggcaaatagatttgtttta

SEQ ID NO: 890516 - DNA, 33 bp, Homo sapien
ttttgtgtttttcaggtaaatagatttgtttta

SEQ ID NO: 890517 - DNA, 33 bp, Homo sapien
gaacaaagtcacttcccaaaagtttttgcatca

SEQ ID NO: 890518 - DNA, 33 bp, Homo sapien
gaacaaagtcacttccgaaaagtttttgcatca

SEQ ID NO: 890519 - DNA, 33 bp, Homo sapien
ctagagacaaagttaaaattcttgtgctacagg

SEQ ID NO: 890520 - DNA, 33 bp, Homo sapien
ctagagacaaagttaatattcttgtgctacagg

SEQ ID NO: 890521 - DNA, 33 bp, Homo sapien
tttgggatctggaaacagggatggaaaggagat

SEQ ID NO: 890522 - DNA, 33 bp, Homo sapien
tttgggatctggaaacggggatggaaaggagat

SEQ ID NO: 890523 - DNA, 33 bp, Homo sapien
aattctatgcacatacgggcaaatacacacatt

SEQ ID NO: 890524 - DNA, 33 bp, Homo sapien
aattctatgcacatactggcaaatacacacatt

SEQ ID NO: 890525 - DNA, 33 bp, Homo sapien
aaacagattggtcttacgctatttcggaagttg

SEQ ID NO: 890526 - DNA, 33 bp, Homo sapien
aaacagattggtcttatgctatttcggaagttg

SEQ ID NO: 890527 - DNA, 33 bp, Homo sapien
acctaatgaaaaattaccacaagctgacctctt

SEQ ID NO: 890528 - DNA, 33 bp, Homo sapien
acctaatgaaaaattatcacaagctgacctctt

SEQ ID NO: 890529 - DNA, 33 bp, Homo sapien
ttacttttgcaccaaccaatacaatttatagaa

SEQ ID NO: 890530 - DNA, 33 bp, Homo sapien
ttacttttgcaccaacgaatacaatttatagaa

SEQ ID NO: 890531 - DNA, 33 bp, Homo sapien
gacttagtacattgaaaaaattaatcctttcac

SEQ ID NO: 890532 - DNA, 33 bp, Homo sapien
gacttagtacattgaacaaattaatcctttcac

SEQ ID NO: 890533 - DNA, 33 bp, Homo sapien
tgtttaattggtgctaactttctggtctctcta

SEQ ID NO: 890534 - DNA, 33 bp, Homo sapien
tgtttaattggtgctagctttctggtctctcta

SEQ ID NO: 890535 - DNA, 33 bp, Homo sapien
ggtttttctgaagggaatatgtgggctcctgga

SEQ ID NO: 890536 - DNA, 33 bp, Homo sapien
ggtttttctgaagggagtatgtgggctcctgga

SEQ ID NO: 890537 - DNA, 33 bp, Homo sapien
ggacagaaatacaaaccatatcattctgcccct

SEQ ID NO: 890538 - DNA, 33 bp, Homo sapien
ggacagaaatacaaactatatcattctgcccct

SEQ ID NO: 890539 - DNA, 33 bp, Homo sapien
tccaaaagaactcaaagtagaatccaataaata

SEQ ID NO: 890540 - DNA, 33 bp, Homo sapien
tccaaaagaactcaaattagaatccaataaata

SEQ ID NO: 890541 - DNA, 33 bp, Homo sapien
gaaaccatagtaacaaaatgttcaacagtaata

SEQ ID NO: 890542 - DNA, 33 bp, Homo sapien
gaaaccatagtaacaacatgttcaacagtaata

SEQ ID NO: 890543 - DNA, 33 bp, Homo sapien
cccagcagagattcttaaaacttactctctcat

SEQ ID NO: 890544 - DNA, 33 bp, Homo sapien
cccagcagagattcttgaaacttactctctcat

SEQ ID NO: 890545 - DNA, 33 bp, Homo sapien
atgcagggctgcaaaacgtaatcagcctaaatg

SEQ ID NO: 890546 - DNA, 33 bp, Homo sapien
atgcagggctgcaaaatgtaatcagcctaaatg

SEQ ID NO: 890547 - DNA, 33 bp, Homo sapien
tgaatggcagtgctaaaacagctataacacaag

SEQ ID NO: 890548 - DNA, 33 bp, Homo sapien
tgaatggcagtgctaacacagctataacacaag

SEQ ID NO: 890549 - DNA, 33 bp, Homo sapien
cgtagacagtagtcaaatagtggttacagtggg

SEQ ID NO: 890550 - DNA, 33 bp, Homo sapien
cgtagacagtagtcaagtagtggttacagtggg

SEQ ID NO: 890551 - DNA, 33 bp, Homo sapien
cctggtgacaaactcaacacttatgatagtatt

SEQ ID NO: 890552 - DNA, 33 bp, Homo sapien
cctggtgacaaactcagcacttatgatagtatt

SEQ ID NO: 890553 - DNA, 33 bp, Homo sapien
gtactagagctggtaaacaacagaggagtacag

SEQ ID NO: 890554 - DNA, 33 bp, Homo sapien
gtactagagctggtaagcaacagaggagtacag

SEQ ID NO: 890555 - DNA, 33 bp, Homo sapien
tttctgccaaaatgtacaatagagccttgcaat

SEQ ID NO: 890556 - DNA, 33 bp, Homo sapien
tttctgccaaaatgtagaatagagccttgcaat

SEQ ID NO: 890557 - DNA, 33 bp, Homo sapien
agattgtgcaaggaacacttaaatgacaaattg

SEQ ID NO: 890558 - DNA, 33 bp, Homo sapien
agattgtgcaaggaacgcttaaatgacaaattg

SEQ ID NO: 890559 - DNA, 33 bp, Homo sapien
atcgttactagcatatcaactccccctctggat

SEQ ID NO: 890560 - DNA, 33 bp, Homo sapien
atcgttactagcatatgaactccccctctggat

SEQ ID NO: 890561 - DNA, 33 bp, Homo sapien
atatcataccattgacacataaaagcaggtgtt

SEQ ID NO: 890562 - DNA, 33 bp, Homo sapien
atatcataccattgacgcataaaagcaggtgtt

SEQ ID NO: 890563 - DNA, 33 bp, Homo sapien
ttttgttttctagtaaagccctcaagtttattc

SEQ ID NO: 890564 - DNA, 33 bp, Homo sapien
ttttgttttctagtaatgccctcaagtttattc

SEQ ID NO: 890565 - DNA, 33 bp, Homo sapien
agaacttaaaagttgtcaaccatataattaaat

SEQ ID NO: 890566 - DNA, 33 bp, Homo sapien
agaacttaaaagttgtgaaccatataattaaat

SEQ ID NO: 890567 - DNA, 33 bp, Homo sapien
gccaactaggaccccactaaggaccacaaaggc

SEQ ID NO: 890568 - DNA, 33 bp, Homo sapien
gccaactaggaccccagtaaggaccacaaaggc

SEQ ID NO: 890569 - DNA, 33 bp, Homo sapien
actcatctgtgagataactgggagctcctggca

SEQ ID NO: 890570 - DNA, 33 bp, Homo sapien
actcatctgtgagatacctgggagctcctggca

SEQ ID NO: 890571 - DNA, 33 bp, Homo sapien
cattgtgcctgcccaactatactcacatttgca

SEQ ID NO: 890572 - DNA, 33 bp, Homo sapien
cattgtgcctgcccaagtatactcacatttgca

SEQ ID NO: 890573 - DNA, 33 bp, Homo sapien
acgttggccatctttcaagacattataaaacat

SEQ ID NO: 890574 - DNA, 33 bp, Homo sapien
acgttggccatctttcgagacattataaaacat

SEQ ID NO: 890575 - DNA, 33 bp, Homo sapien
acctgtcagggttactcagctacctgacatttg

SEQ ID NO: 890576 - DNA, 33 bp, Homo sapien
acctgtcagggttacttagctacctgacatttg

SEQ ID NO: 890577 - DNA, 33 bp, Homo sapien
agctactttcaaagtgcacatgagttgatttac

SEQ ID NO: 890578 - DNA, 33 bp, Homo sapien
agctactttcaaagtggacatgagttgatttac

SEQ ID NO: 890579 - DNA, 33 bp, Homo sapien
cttgtctacattttctaactcctgtccttgaat

SEQ ID NO: 890580 - DNA, 33 bp, Homo sapien
cttgtctacattttctgactcctgtccttgaat

SEQ ID NO: 890581 - DNA, 33 bp, Homo sapien
gctttcagacatcttccagaagcgtgtgcatct

SEQ ID NO: 890582 - DNA, 33 bp, Homo sapien
gctttcagacatcttcgagaagcgtgtgcatct

SEQ ID NO: 890583 - DNA, 33 bp, Homo sapien
attgctttgctaaccaatatcccaagctagaat

SEQ ID NO: 890584 - DNA, 33 bp, Homo sapien
attgctttgctaaccagtatcccaagctagaat

SEQ ID NO: 890585 - DNA, 33 bp, Homo sapien
agaagagagagctaatcagtgagcagacaaggc

SEQ ID NO: 890586 - DNA, 33 bp, Homo sapien
agaagagagagctaattagtgagcagacaaggc

SEQ ID NO: 890587 - DNA, 33 bp, Homo sapien
gctctggcttcccccaagaatgccaaatagaaa

SEQ ID NO: 890588 - DNA, 33 bp, Homo sapien
gctctggcttcccccacgaatgccaaatagaaa

SEQ ID NO: 890589 - DNA, 33 bp, Homo sapien
ttcccaggtcataaaaatcaagtttataaaatt

SEQ ID NO: 890590 - DNA, 33 bp, Homo sapien
ttcccaggtcataaaagtcaagtttataaaatt

SEQ ID NO: 890591 - DNA, 33 bp, Homo sapien
ttaattatgtctctggaatagaagctatattca

SEQ ID NO: 890592 - DNA, 33 bp, Homo sapien
ttaattatgtctctgggatagaagctatattca

SEQ ID NO: 890593 - DNA, 33 bp, Homo sapien
cacacacttgattttacgcagttcagcagcaag

SEQ ID NO: 890594 - DNA, 33 bp, Homo sapien
cacacacttgattttaggcagttcagcagcaag

SEQ ID NO: 890595 - DNA, 33 bp, Homo sapien
aaaatacctgagatacaatgaaaataatatgga

SEQ ID NO: 890596 - DNA, 33 bp, Homo sapien
aaaatacctgagatacgatgaaaataatatgga

SEQ ID NO: 890597 - DNA, 33 bp, Homo sapien
aaggtggcattttacacaatatagaggatgaga

SEQ ID NO: 890598 - DNA, 33 bp, Homo sapien
aaggtggcattttacagaatatagaggatgaga

SEQ ID NO: 890599 - DNA, 33 bp, Homo sapien
tgtggtaaattgttccacagagctaggcagtgc

SEQ ID NO: 890600 - DNA, 33 bp, Homo sapien
tgtggtaaattgttccgcagagctaggcagtgc

SEQ ID NO: 890601 - DNA, 33 bp, Homo sapien
gctttggaggacaaagaatcgagaggccaggaa

SEQ ID NO: 890602 - DNA, 33 bp, Homo sapien
gctttggaggacaaaggatcgagaggccaggaa

SEQ ID NO: 890603 - DNA, 33 bp, Homo sapien
ccatattttggcattacgtaaggaggtacagtc

SEQ ID NO: 890604 - DNA, 33 bp, Homo sapien
ccatattttggcattatgtaaggaggtacagtc

SEQ ID NO: 890605 - DNA, 33 bp, Homo sapien
aaaatcatagaaatcaccttatttgccaatatt

SEQ ID NO: 890606 - DNA, 33 bp, Homo sapien
aaaatcatagaaatcatcttatttgccaatatt

SEQ ID NO: 890607 - DNA, 33 bp, Homo sapien
gatgtagttttagatccctgttagtgctttcct

SEQ ID NO: 890608 - DNA, 33 bp, Homo sapien
gatgtagttttagatcgctgttagtgctttcct

SEQ ID NO: 890609 - DNA, 33 bp, Homo sapien
aataggttttaacaggacagcataatagtggcc

SEQ ID NO: 890610 - DNA, 33 bp, Homo sapien
aataggttttaacagggcagcataatagtggcc

SEQ ID NO: 890611 - DNA, 33 bp, Homo sapien
gaattaactctgaaaagggccactattatgctg

SEQ ID NO: 890612 - DNA, 33 bp, Homo sapien
gaattaactctgaaaatggccactattatgctg

SEQ ID NO: 890613 - DNA, 33 bp, Homo sapien
ttatgattaaagacaaacacatgattaaaatca

SEQ ID NO: 890614 - DNA, 33 bp, Homo sapien
ttatgattaaagacaagcacatgattaaaatca

SEQ ID NO: 890615 - DNA, 33 bp, Homo sapien
tagctgagaagtctgcaatgttataataagaaa

SEQ ID NO: 890616 - DNA, 33 bp, Homo sapien
tagctgagaagtctgcgatgttataataagaaa

SEQ ID NO: 890617 - DNA, 33 bp, Homo sapien
gagaacaaggtaaaacaaccagtcatggccact

SEQ ID NO: 890618 - DNA, 33 bp, Homo sapien
gagaacaaggtaaaaccaccagtcatggccact

SEQ ID NO: 890619 - DNA, 33 bp, Homo sapien
aaataaacaacaaaaggataaaagagaggataa

SEQ ID NO: 890620 - DNA, 33 bp, Homo sapien
aaataaacaacaaaagtataaaagagaggataa

SEQ ID NO: 890621 - DNA, 33 bp, Homo sapien
ggataattaacttctaaaggatagtggcagggt

SEQ ID NO: 890622 - DNA, 33 bp, Homo sapien
ggataattaacttctagaggatagtggcagggt

SEQ ID NO: 890623 - DNA, 33 bp, Homo sapien
tttggtggagaaaagaaagacagtctgaattag

SEQ ID NO: 890624 - DNA, 33 bp, Homo sapien
tttggtggagaaaagacagacagtctgaattag

SEQ ID NO: 890625 - DNA, 33 bp, Homo sapien
gaatgtagcactattaaagtgtaaaggtttatt

SEQ ID NO: 890626 - DNA, 33 bp, Homo sapien
gaatgtagcactattacagtgtaaaggtttatt

SEQ ID NO: 890627 - DNA, 33 bp, Homo sapien
ccagactcacattgatcaagcgcaaaaactaga

SEQ ID NO: 890628 - DNA, 33 bp, Homo sapien
ccagactcacattgatgaagcgcaaaaactaga

SEQ ID NO: 890629 - DNA, 33 bp, Homo sapien
ggatgttggacactgacaatgcaaaggcagggt

SEQ ID NO: 890630 - DNA, 33 bp, Homo sapien
ggatgttggacactgagaatgcaaaggcagggt

SEQ ID NO: 890631 - DNA, 33 bp, Homo sapien
agttggtttcactttaagaaaaagagtgatgac

SEQ ID NO: 890632 - DNA, 33 bp, Homo sapien
agttggtttcactttaggaaaaagagtgatgac

SEQ ID NO: 890633 - DNA, 33 bp, Homo sapien
tgaattgggaagttccagacaagaagtggttca

SEQ ID NO: 890634 - DNA, 33 bp, Homo sapien
tgaattgggaagttcccgacaagaagtggttca

SEQ ID NO: 890635 - DNA, 33 bp, Homo sapien
agtaagaggtatgagacagttatgggtaaattt

SEQ ID NO: 890636 - DNA, 33 bp, Homo sapien
agtaagaggtatgagagagttatgggtaaattt

SEQ ID NO: 890637 - DNA, 33 bp, Homo sapien
atatcaaactatggaacgtgaaggacatggaaa

SEQ ID NO: 890638 - DNA, 33 bp, Homo sapien
atatcaaactatggaatgtgaaggacatggaaa

SEQ ID NO: 890639 - DNA, 33 bp, Homo sapien
tggggcaagctaagaaaatagtggcagccaccc

SEQ ID NO: 890640 - DNA, 33 bp, Homo sapien
tggggcaagctaagaacatagtggcagccaccc

SEQ ID NO: 890641 - DNA, 33 bp, Homo sapien
tttgtgtttgatcagaagctgttcttaagcctg

SEQ ID NO: 890642 - DNA, 33 bp, Homo sapien
tttgtgtttgatcagaggctgttcttaagcctg

SEQ ID NO: 890643 - DNA, 33 bp, Homo sapien
tcccaaatcctttctggagcacttgatcatcat

SEQ ID NO: 890644 - DNA, 33 bp, Homo sapien
tcccaaatcctttctgtagcacttgatcatcat

SEQ ID NO: 890645 - DNA, 33 bp, Homo sapien
acttggatctctctgacgaaagtaagataaaac

SEQ ID NO: 890646 - DNA, 33 bp, Homo sapien
acttggatctctctgatgaaagtaagataaaac

SEQ ID NO: 890647 - DNA, 33 bp, Homo sapien
ttaaaatgattaaagcagaaacaaaatttaatt

SEQ ID NO: 890648 - DNA, 33 bp, Homo sapien
ttaaaatgattaaagccgaaacaaaatttaatt

SEQ ID NO: 890649 - DNA, 33 bp, Homo sapien
taatataacactgcgcaataagtttaaattgat

SEQ ID NO: 890650 - DNA, 33 bp, Homo sapien
taatataacactgcgccataagtttaaattgat

SEQ ID NO: 890651 - DNA, 33 bp, Homo sapien
catattagactttggacgtcatcaccagggtgt

SEQ ID NO: 890652 - DNA, 33 bp, Homo sapien
catattagactttggatgtcatcaccagggtgt

SEQ ID NO: 890653 - DNA, 33 bp, Homo sapien
aaatatcttttcagtaactcatcaggatctcct

SEQ ID NO: 890654 - DNA, 33 bp, Homo sapien
aaatatcttttcagtacctcatcaggatctcct

SEQ ID NO: 890655 - DNA, 33 bp, Homo sapien
ttgagtcttctccttaccaacactgagtactat

SEQ ID NO: 890656 - DNA, 33 bp, Homo sapien
ttgagtcttctccttagcaacactgagtactat

SEQ ID NO: 890657 - DNA, 33 bp, Homo sapien
atagtattgaaacaacagaatacacaggtcatt

SEQ ID NO: 890658 - DNA, 33 bp, Homo sapien
atagtattgaaacaacggaatacacaggtcatt

SEQ ID NO: 890659 - DNA, 33 bp, Homo sapien
gtatcagcaaatctcaaatcgactttcatgcca

SEQ ID NO: 890660 - DNA, 33 bp, Homo sapien
gtatcagcaaatctcagatcgactttcatgcca

SEQ ID NO: 890661 - DNA, 33 bp, Homo sapien
tgaggcttctccatgaatactctccacagaaaa

SEQ ID NO: 890662 - DNA, 33 bp, Homo sapien
tgaggcttctccatgattactctccacagaaaa

SEQ ID NO: 890663 - DNA, 33 bp, Homo sapien
ttttaaacgtaggacaacatatttgaatgtatt

SEQ ID NO: 890664 - DNA, 33 bp, Homo sapien
ttttaaacgtaggacagcatatttgaatgtatt

SEQ ID NO: 890665 - DNA, 33 bp, Homo sapien
aaatggagcttttacaatctgttttaatgtact

SEQ ID NO: 890666 - DNA, 33 bp, Homo sapien
aaatggagcttttacagtctgttttaatgtact

SEQ ID NO: 890667 - DNA, 33 bp, Homo sapien
ttggatgatttagaaacagaattatcaaattag

SEQ ID NO: 890668 - DNA, 33 bp, Homo sapien
ttggatgatttagaaagagaattatcaaattag

SEQ ID NO: 890669 - DNA, 33 bp, Homo sapien
tggtgactagctcaaaagaaaaggcagagagag

SEQ ID NO: 890670 - DNA, 33 bp, Homo sapien
tggtgactagctcaaatgaaaaggcagagagag

SEQ ID NO: 890671 - DNA, 33 bp, Homo sapien
tctagaacagtggtaaaacatcaatctgctgaa

SEQ ID NO: 890672 - DNA, 33 bp, Homo sapien
tctagaacagtggtaagacatcaatctgctgaa

SEQ ID NO: 890673 - DNA, 33 bp, Homo sapien
agttgctcctgttaaaacttcagctctaatgtt

SEQ ID NO: 890674 - DNA, 33 bp, Homo sapien
agttgctcctgttaaaccttcagctctaatgtt

SEQ ID NO: 890675 - DNA, 33 bp, Homo sapien
ttcctttttatactccagatgagtgaggtagag

SEQ ID NO: 890676 - DNA, 33 bp, Homo sapien
ttcctttttatactccggatgagtgaggtagag

SEQ ID NO: 890677 - DNA, 33 bp, Homo sapien
gaatctaacacaattccctccctttcatggtac

SEQ ID NO: 890678 - DNA, 33 bp, Homo sapien
gaatctaacacaattctctccctttcatggtac

SEQ ID NO: 890679 - DNA, 33 bp, Homo sapien
aaaactcgctgaattccaaacagtaaaatacaa

SEQ ID NO: 890680 - DNA, 33 bp, Homo sapien
aaaactcgctgaattctaaacagtaaaatacaa

SEQ ID NO: 890681 - DNA, 33 bp, Homo sapien
agcaacagcagaggtggagaagacaaggtgggg

SEQ ID NO: 890682 - DNA, 33 bp, Homo sapien
agcaacagcagaggtgtagaagacaaggtgggg

SEQ ID NO: 890683 - DNA, 33 bp, Homo sapien
aagaagtggactaagcactggttgaagagtgac

SEQ ID NO: 890684 - DNA, 33 bp, Homo sapien
aagaagtggactaagctctggttgaagagtgac

SEQ ID NO: 890685 - DNA, 33 bp, Homo sapien
ccttccgactttggtcactgagaagcactggag

SEQ ID NO: 890686 - DNA, 33 bp, Homo sapien
ccttccgactttggtcgctgagaagcactggag

SEQ ID NO: 890687 - DNA, 33 bp, Homo sapien
attaaaacaggatgaccataggcagaaaaccag

SEQ ID NO: 890688 - DNA, 33 bp, Homo sapien
attaaaacaggatgactataggcagaaaaccag

SEQ ID NO: 890689 - DNA, 33 bp, Homo sapien
attataaactcctcagaaagaagcctttacaat

SEQ ID NO: 890690 - DNA, 33 bp, Homo sapien
attataaactcctcaggaagaagcctttacaat

SEQ ID NO: 890691 - DNA, 33 bp, Homo sapien
tgaacaactgtgatttaaaaaggagatgtcaat

SEQ ID NO: 890692 - DNA, 33 bp, Homo sapien
tgaacaactgtgatttgaaaaggagatgtcaat

SEQ ID NO: 890693 - DNA, 33 bp, Homo sapien
ttctaatttctcaaataatttagcatctcttct

SEQ ID NO: 890694 - DNA, 33 bp, Homo sapien
ttctaatttctcaaatcatttagcatctcttct

SEQ ID NO: 890695 - DNA, 33 bp, Homo sapien
acccttgtgtatctaagggttcataaacttgaa

SEQ ID NO: 890696 - DNA, 33 bp, Homo sapien
acccttgtgtatctaatggttcataaacttgaa

SEQ ID NO: 890697 - DNA, 33 bp, Homo sapien
gacattcatcctcagcgcacgaagatgacggga

SEQ ID NO: 890698 - DNA, 33 bp, Homo sapien
gacattcatcctcagctcacgaagatgacggga

SEQ ID NO: 890699 - DNA, 33 bp, Homo sapien
aatagcacttgaataactccctctgatgtgttc

SEQ ID NO: 890700 - DNA, 33 bp, Homo sapien
aatagcacttgaataattccctctgatgtgttc

SEQ ID NO: 890701 - DNA, 33 bp, Homo sapien
aactttatacaagtaactgctggctaagtacat

SEQ ID NO: 890702 - DNA, 33 bp, Homo sapien
aactttatacaagtaattgctggctaagtacat

SEQ ID NO: 890703 - DNA, 33 bp, Homo sapien
aatcaatttaaatgccagagaatataatcaaat

SEQ ID NO: 890704 - DNA, 33 bp, Homo sapien
aatcaatttaaatgcctgagaatataatcaaat

SEQ ID NO: 890705 - DNA, 33 bp, Homo sapien
tcctgcttcagtgacaccatcaataattaagaa

SEQ ID NO: 890706 - DNA, 33 bp, Homo sapien
tcctgcttcagtgacagcatcaataattaagaa

SEQ ID NO: 890707 - DNA, 33 bp, Homo sapien
taatgactgattactcaataactggcttgcaga

SEQ ID NO: 890708 - DNA, 33 bp, Homo sapien
taatgactgattactcgataactggcttgcaga

SEQ ID NO: 890709 - DNA, 33 bp, Homo sapien
tacacatgatccatataacctcagggatacccc

SEQ ID NO: 890710 - DNA, 33 bp, Homo sapien
tacacatgatccatattacctcagggatacccc

SEQ ID NO: 890711 - DNA, 33 bp, Homo sapien
acaaaagggtaaattcaatctttgctcttcact

SEQ ID NO: 890712 - DNA, 33 bp, Homo sapien
acaaaagggtaaattccatctttgctcttcact

SEQ ID NO: 890713 - DNA, 33 bp, Homo sapien
agagcgctccggaacacactggtagctgccaag

SEQ ID NO: 890714 - DNA, 33 bp, Homo sapien
agagcgctccggaacagactggtagctgccaag

SEQ ID NO: 890715 - DNA, 33 bp, Homo sapien
ctttcaggaaactagaacttgctcttctactcc

SEQ ID NO: 890716 - DNA, 33 bp, Homo sapien
ctttcaggaaactagaccttgctcttctactcc

SEQ ID NO: 890717 - DNA, 33 bp, Homo sapien
agatgttttccttcaacgagagttacaatatgc

SEQ ID NO: 890718 - DNA, 33 bp, Homo sapien
agatgttttccttcaaggagagttacaatatgc

SEQ ID NO: 890719 - DNA, 33 bp, Homo sapien
cttacaggcaacaaacaagtgctggaacgtggc

SEQ ID NO: 890720 - DNA, 33 bp, Homo sapien
cttacaggcaacaaaccagtgctggaacgtggc

SEQ ID NO: 890721 - DNA, 33 bp, Homo sapien
aatcatcttcttagtaaatctttgccaataata

SEQ ID NO: 890722 - DNA, 33 bp, Homo sapien
aatcatcttcttagtagatctttgccaataata

SEQ ID NO: 890723 - DNA, 33 bp, Homo sapien
gattttttattactcaactttgaacataagtat

SEQ ID NO: 890724 - DNA, 33 bp, Homo sapien
gattttttattactcatctttgaacataagtat

SEQ ID NO: 890725 - DNA, 33 bp, Homo sapien
tttgcagttcaacataactgatttggtacaggc

SEQ ID NO: 890726 - DNA, 33 bp, Homo sapien
tttgcagttcaacatatctgatttggtacaggc

SEQ ID NO: 890727 - DNA, 33 bp, Homo sapien
tctctgaacaaagacaatcccctttaaattggt

SEQ ID NO: 890728 - DNA, 33 bp, Homo sapien
tctctgaacaaagacagtcccctttaaattggt

SEQ ID NO: 890729 - DNA, 33 bp, Homo sapien
aaggcaagaaatacaaattagatgacttaggaa

SEQ ID NO: 890730 - DNA, 33 bp, Homo sapien
aaggcaagaaatacaacttagatgacttaggaa

SEQ ID NO: 890731 - DNA, 33 bp, Homo sapien
aagctatggcccagagaaaatgcaagacattaa

SEQ ID NO: 890732 - DNA, 33 bp, Homo sapien
aagctatggcccagagcaaatgcaagacattaa

SEQ ID NO: 890733 - DNA, 33 bp, Homo sapien
agtaacaaagcaaagaaaaatcattgttgtttt

SEQ ID NO: 890734 - DNA, 33 bp, Homo sapien
agtaacaaagcaaagagaaatcattgttgtttt

SEQ ID NO: 890735 - DNA, 33 bp, Homo sapien
agagtgaaaactctaactcagcggtgacaaata

SEQ ID NO: 890736 - DNA, 33 bp, Homo sapien
agagtgaaaactctaattcagcggtgacaaata

SEQ ID NO: 890737 - DNA, 33 bp, Homo sapien
gtgatgaacgtgttaaataacttcattgtggta

SEQ ID NO: 890738 - DNA, 33 bp, Homo sapien
gtgatgaacgtgttaagtaacttcattgtggta

SEQ ID NO: 890739 - DNA, 33 bp, Homo sapien
attttgtgataatggtaaatcttaaactggtcc

SEQ ID NO: 890740 - DNA, 33 bp, Homo sapien
attttgtgataatggttaatcttaaactggtcc

SEQ ID NO: 890741 - DNA, 33 bp, Homo sapien
aatcagatttacacgacatttctcacaagaaga

SEQ ID NO: 890742 - DNA, 33 bp, Homo sapien
aatcagatttacacgagatttctcacaagaaga

SEQ ID NO: 890743 - DNA, 33 bp, Homo sapien
tgctcagtcctatgatcaaattttgtgagagtt

SEQ ID NO: 890744 - DNA, 33 bp, Homo sapien
tgctcagtcctatgatgaaattttgtgagagtt

SEQ ID NO: 890745 - DNA, 33 bp, Homo sapien
ctcagctctttataggaatcgactaaatggctg

SEQ ID NO: 890746 - DNA, 33 bp, Homo sapien
ctcagctctttatagggatcgactaaatggctg

SEQ ID NO: 890747 - DNA, 33 bp, Homo sapien
gggggtgttgcggaaagaacatgggtgtggcta

SEQ ID NO: 890748 - DNA, 33 bp, Homo sapien
gggggtgttgcggaaataacatgggtgtggcta

SEQ ID NO: 890749 - DNA, 33 bp, Homo sapien
acaaagatatgaagaacaaagatttgtcaaagt

SEQ ID NO: 890750 - DNA, 33 bp, Homo sapien
acaaagatatgaagaataaagatttgtcaaagt

SEQ ID NO: 890751 - DNA, 33 bp, Homo sapien
ccatgtggcatgatggaaaatctgggcttaaga

SEQ ID NO: 890752 - DNA, 33 bp, Homo sapien
ccatgtggcatgatggtaaatctgggcttaaga

SEQ ID NO: 890753 - DNA, 33 bp, Homo sapien
aaaacaagcacttactaacaattatacatgaca

SEQ ID NO: 890754 - DNA, 33 bp, Homo sapien
aaaacaagcacttactgacaattatacatgaca

SEQ ID NO: 890755 - DNA, 33 bp, Homo sapien
gctcaggaaaatggacactctgcatttgccaag

SEQ ID NO: 890756 - DNA, 33 bp, Homo sapien
gctcaggaaaatggacgctctgcatttgccaag

SEQ ID NO: 890757 - DNA, 33 bp, Homo sapien
aggtcctttgctcaaaactttaattgaccaact

SEQ ID NO: 890758 - DNA, 33 bp, Homo sapien
aggtcctttgctcaaacctttaattgaccaact

SEQ ID NO: 890759 - DNA, 33 bp, Homo sapien
tcttttgccatcctcaccttggcatttggagtt

SEQ ID NO: 890760 - DNA, 33 bp, Homo sapien
tcttttgccatcctcatcttggcatttggagtt

SEQ ID NO: 890761 - DNA, 33 bp, Homo sapien
ttttttgcactcatcaaattttttcatagtgga

SEQ ID NO: 890762 - DNA, 33 bp, Homo sapien
ttttttgcactcatcacattttttcatagtgga

SEQ ID NO: 890763 - DNA, 33 bp, Homo sapien
cacgcattgttcttcacgctggctacaatattt

SEQ ID NO: 890764 - DNA, 33 bp, Homo sapien
cacgcattgttcttcaggctggctacaatattt

SEQ ID NO: 890765 - DNA, 33 bp, Homo sapien
atgcatgataggtgtacgcagtttcagagtgca

SEQ ID NO: 890766 - DNA, 33 bp, Homo sapien
atgcatgataggtgtatgcagtttcagagtgca

SEQ ID NO: 890767 - DNA, 33 bp, Homo sapien
atggtacataagtcaccggaataacaagttcct

SEQ ID NO: 890768 - DNA, 33 bp, Homo sapien
atggtacataagtcactggaataacaagttcct

SEQ ID NO: 890769 - DNA, 33 bp, Homo sapien
gatagatgtttactccaaacactagttgaagag

SEQ ID NO: 890770 - DNA, 33 bp, Homo sapien
gatagatgtttactccgaacactagttgaagag

SEQ ID NO: 890771 - DNA, 33 bp, Homo sapien
tctgacatcagctttaaaattcattccgtcaac

SEQ ID NO: 890772 - DNA, 33 bp, Homo sapien
tctgacatcagctttataattcattccgtcaac

SEQ ID NO: 890773 - DNA, 33 bp, Homo sapien
cttgttttataactaactgaaagctgctggtcc

SEQ ID NO: 890774 - DNA, 33 bp, Homo sapien
cttgttttataactaattgaaagctgctggtcc

SEQ ID NO: 890775 - DNA, 33 bp, Homo sapien
gcatcagggattgaaaacagcccgttaatgaga

SEQ ID NO: 890776 - DNA, 33 bp, Homo sapien
gcatcagggattgaaatcagcccgttaatgaga

SEQ ID NO: 890777 - DNA, 33 bp, Homo sapien
cagtagcctaagaagacgctggaagaaaatgtt

SEQ ID NO: 890778 - DNA, 33 bp, Homo sapien
cagtagcctaagaagatgctggaagaaaatgtt

SEQ ID NO: 890779 - DNA, 33 bp, Homo sapien
taatgtaaatatcaaaccagtgtttttaaattt

SEQ ID NO: 890780 - DNA, 33 bp, Homo sapien
taatgtaaatatcaaagcagtgtttttaaattt

SEQ ID NO: 890781 - DNA, 33 bp, Homo sapien
agtagtctttgtaatagggaaactcagaataca

SEQ ID NO: 890782 - DNA, 33 bp, Homo sapien
agtagtctttgtaatatggaaactcagaataca

SEQ ID NO: 890783 - DNA, 33 bp, Homo sapien
ggttgttaaccaaatggcagaagctaagcaagc

SEQ ID NO: 890784 - DNA, 33 bp, Homo sapien
ggttgttaaccaaatgtcagaagctaagcaagc

SEQ ID NO: 890785 - DNA, 33 bp, Homo sapien
atttcttaatgacttacgatgattcctatcatt

SEQ ID NO: 890786 - DNA, 33 bp, Homo sapien
atttcttaatgacttatgatgattcctatcatt

SEQ ID NO: 890787 - DNA, 33 bp, Homo sapien
ttgtaggtgatttccacgtattctcaacaaaaa

SEQ ID NO: 890788 - DNA, 33 bp, Homo sapien
ttgtaggtgatttccatgtattctcaacaaaaa

SEQ ID NO: 890789 - DNA, 33 bp, Homo sapien
ggtagtgagtgaagtaacctataggcagtttct

SEQ ID NO: 890790 - DNA, 33 bp, Homo sapien
ggtagtgagtgaagtatcctataggcagtttct

SEQ ID NO: 890791 - DNA, 33 bp, Homo sapien
aagtaggaagtaaacactgaatacatagggaca

SEQ ID NO: 890792 - DNA, 33 bp, Homo sapien
aagtaggaagtaaacattgaatacatagggaca

SEQ ID NO: 890793 - DNA, 33 bp, Homo sapien
tgtgaagagcaggaaaagtggttgctttattta

SEQ ID NO: 890794 - DNA, 33 bp, Homo sapien
tgtgaagagcaggaaaggtggttgctttattta

SEQ ID NO: 890795 - DNA, 33 bp, Homo sapien
tctgggagccgttaagaacaaagacagcagtct

SEQ ID NO: 890796 - DNA, 33 bp, Homo sapien
tctgggagccgttaaggacaaagacagcagtct

SEQ ID NO: 890797 - DNA, 33 bp, Homo sapien
gcagttttgagtttcacatagccatctagcaga

SEQ ID NO: 890798 - DNA, 33 bp, Homo sapien
gcagttttgagtttcatatagccatctagcaga

SEQ ID NO: 890799 - DNA, 33 bp, Homo sapien
acacatatgccactaacctatgactcttcaatt

SEQ ID NO: 890800 - DNA, 33 bp, Homo sapien
acacatatgccactaatctatgactcttcaatt

SEQ ID NO: 890801 - DNA, 33 bp, Homo sapien
gggtgaggataagacaaaaacacatgctgaggt

SEQ ID NO: 890802 - DNA, 33 bp, Homo sapien
gggtgaggataagacagaaacacatgctgaggt

SEQ ID NO: 890803 - DNA, 33 bp, Homo sapien
aaaggactggtatccactacccctcttccttcc

SEQ ID NO: 890804 - DNA, 33 bp, Homo sapien
aaaggactggtatccattacccctcttccttcc

SEQ ID NO: 890805 - DNA, 33 bp, Homo sapien
actttcacaaaaatgacaagagaagggtttgag

SEQ ID NO: 890806 - DNA, 33 bp, Homo sapien
actttcacaaaaatgataagagaagggtttgag

SEQ ID NO: 890807 - DNA, 33 bp, Homo sapien
acatgagaaaccaagccactacttagtctaatt

SEQ ID NO: 890808 - DNA, 33 bp, Homo sapien
acatgagaaaccaagctactacttagtctaatt

SEQ ID NO: 890809 - DNA, 33 bp, Homo sapien
ctattaaacctcattaccagaaagctaagcata

SEQ ID NO: 890810 - DNA, 33 bp, Homo sapien
ctattaaacctcattatcagaaagctaagcata

SEQ ID NO: 890811 - DNA, 33 bp, Homo sapien
tatttaagaattttgaacaatgactatcatgtc

SEQ ID NO: 890812 - DNA, 33 bp, Homo sapien
tatttaagaattttgaccaatgactatcatgtc

SEQ ID NO: 890813 - DNA, 33 bp, Homo sapien
ctgttagacagaatacactaatcgctgatgatg

SEQ ID NO: 890814 - DNA, 33 bp, Homo sapien
ctgttagacagaataccctaatcgctgatgatg

SEQ ID NO: 890815 - DNA, 33 bp, Homo sapien
aattgaattaatcataaaagttggcctcttcca

SEQ ID NO: 890816 - DNA, 33 bp, Homo sapien
aattgaattaatcatagaagttggcctcttcca

SEQ ID NO: 890817 - DNA, 33 bp, Homo sapien
agagagagagacaatacgtttccataaggaagg

SEQ ID NO: 890818 - DNA, 33 bp, Homo sapien
agagagagagacaatatgtttccataaggaagg

SEQ ID NO: 890819 - DNA, 33 bp, Homo sapien
aaatcgaatgaaaaaaacagtgcttcaagaagg

SEQ ID NO: 890820 - DNA, 33 bp, Homo sapien
aaatcgaatgaaaaaagcagtgcttcaagaagg

SEQ ID NO: 890821 - DNA, 33 bp, Homo sapien
gtaatcagtgaaaacaatggccagtttataaat

SEQ ID NO: 890822 - DNA, 33 bp, Homo sapien
gtaatcagtgaaaacagtggccagtttataaat

SEQ ID NO: 890823 - DNA, 33 bp, Homo sapien
acagggtttcaaatcaagtcataacaggtgctc

SEQ ID NO: 890824 - DNA, 33 bp, Homo sapien
acagggtttcaaatcaggtcataacaggtgctc

SEQ ID NO: 890825 - DNA, 33 bp, Homo sapien
actaatagtatcacaacacatttggtttttcca

SEQ ID NO: 890826 - DNA, 33 bp, Homo sapien
actaatagtatcacaagacatttggtttttcca

SEQ ID NO: 890827 - DNA, 33 bp, Homo sapien
ctggcagccttaagcaacaccttagataaataa

SEQ ID NO: 890828 - DNA, 33 bp, Homo sapien
ctggcagccttaagcagcaccttagataaataa

SEQ ID NO: 890829 - DNA, 33 bp, Homo sapien
ttgtctttagctgagaactatcatctactatta

SEQ ID NO: 890830 - DNA, 33 bp, Homo sapien
ttgtctttagctgagacctatcatctactatta

SEQ ID NO: 890831 - DNA, 33 bp, Homo sapien
ctctgatctttggcaaccattacttatttatag

SEQ ID NO: 890832 - DNA, 33 bp, Homo sapien
ctctgatctttggcaatcattacttatttatag

SEQ ID NO: 890833 - DNA, 33 bp, Homo sapien
caggatgtgatgaaaaataccttgaaacagttt

SEQ ID NO: 890834 - DNA, 33 bp, Homo sapien
caggatgtgatgaaaattaccttgaaacagttt

SEQ ID NO: 890835 - DNA, 33 bp, Homo sapien
actcagatgtggagacaaagggttataaaaatt

SEQ ID NO: 890836 - DNA, 33 bp, Homo sapien
actcagatgtggagacgaagggttataaaaatt

SEQ ID NO: 890837 - DNA, 33 bp, Homo sapien
attctgccactgatatcaatgtgcctaaccaac

SEQ ID NO: 890838 - DNA, 33 bp, Homo sapien
attctgccactgatattaatgtgcctaaccaac

SEQ ID NO: 890839 - DNA, 33 bp, Homo sapien
ataagaaattaacagcacagagaaagagtactg

SEQ ID NO: 890840 - DNA, 33 bp, Homo sapien
ataagaaattaacagcgcagagaaagagtactg

SEQ ID NO: 890841 - DNA, 33 bp, Homo sapien
ctgaagattttaagaacggcagtttcccttgtg

SEQ ID NO: 890842 - DNA, 33 bp, Homo sapien
ctgaagattttaagaatggcagtttcccttgtg

SEQ ID NO: 890843 - DNA, 33 bp, Homo sapien
cactgtgggccactaaatacctgagctaataat

SEQ ID NO: 890844 - DNA, 33 bp, Homo sapien
cactgtgggccactaagtacctgagctaataat

SEQ ID NO: 890845 - DNA, 33 bp, Homo sapien
tactcctcatggtaaacagcacaagcagatttt

SEQ ID NO: 890846 - DNA, 33 bp, Homo sapien
tactcctcatggtaaatagcacaagcagatttt

SEQ ID NO: 890847 - DNA, 33 bp, Homo sapien
catcaggtcagccaaagctgttaggtaactggc

SEQ ID NO: 890848 - DNA, 33 bp, Homo sapien
catcaggtcagccaaatctgttaggtaactggc

SEQ ID NO: 890849 - DNA, 33 bp, Homo sapien
tgttgcttcacagaccaaatttattctcccctt

SEQ ID NO: 890850 - DNA, 33 bp, Homo sapien
tgttgcttcacagaccgaatttattctcccctt

SEQ ID NO: 890851 - DNA, 33 bp, Homo sapien
gctaccttctttttcaactattcagatataaat

SEQ ID NO: 890852 - DNA, 33 bp, Homo sapien
gctaccttctttttcagctattcagatataaat

SEQ ID NO: 890853 - DNA, 33 bp, Homo sapien
ctgattgtgtaaaatacctcaaatgagtgaagg

SEQ ID NO: 890854 - DNA, 33 bp, Homo sapien
ctgattgtgtaaaatatctcaaatgagtgaagg

SEQ ID NO: 890855 - DNA, 33 bp, Homo sapien
aataattgttactgcactgacaaagacaaataa

SEQ ID NO: 890856 - DNA, 33 bp, Homo sapien
aataattgttactgcattgacaaagacaaataa

SEQ ID NO: 890857 - DNA, 33 bp, Homo sapien
agtttatgtcaaattacctgagggaacatagta

SEQ ID NO: 890858 - DNA, 33 bp, Homo sapien
agtttatgtcaaattatctgagggaacatagta

SEQ ID NO: 890859 - DNA, 33 bp, Homo sapien
ttttatggaggtcacaatctacttgaggtgaca

SEQ ID NO: 890860 - DNA, 33 bp, Homo sapien
ttttatggaggtcacagtctacttgaggtgaca

SEQ ID NO: 890861 - DNA, 33 bp, Homo sapien
gtccattgcatgcaccagcaccgcctccaccag

SEQ ID NO: 890862 - DNA, 33 bp, Homo sapien
gtccattgcatgcaccggcaccgcctccaccag

SEQ ID NO: 890863 - DNA, 33 bp, Homo sapien
ccaccagggaccaggaagtatctatcagtaaaa

SEQ ID NO: 890864 - DNA, 33 bp, Homo sapien
ccaccagggaccaggaggtatctatcagtaaaa

SEQ ID NO: 890865 - DNA, 33 bp, Homo sapien
tttactgccagtggccaaaactaaattaacatt

SEQ ID NO: 890866 - DNA, 33 bp, Homo sapien
tttactgccagtggcccaaactaaattaacatt

SEQ ID NO: 890867 - DNA, 33 bp, Homo sapien
gattcacttcacaggacacttttccagaagaca

SEQ ID NO: 890868 - DNA, 33 bp, Homo sapien
gattcacttcacaggatacttttccagaagaca

SEQ ID NO: 890869 - DNA, 33 bp, Homo sapien
aactgaaagggttcatcaaggaaaacaataagc

SEQ ID NO: 890870 - DNA, 33 bp, Homo sapien
aactgaaagggttcatgaaggaaaacaataagc

SEQ ID NO: 890871 - DNA, 33 bp, Homo sapien
tgacaggctcaaaatcaaatagacatatctttt

SEQ ID NO: 890872 - DNA, 33 bp, Homo sapien
tgacaggctcaaaatcgaatagacatatctttt

SEQ ID NO: 890873 - DNA, 33 bp, Homo sapien
gcctgtcacagtattaaaaacatattttgcaat

SEQ ID NO: 890874 - DNA, 33 bp, Homo sapien
gcctgtcacagtattagaaacatattttgcaat

SEQ ID NO: 890875 - DNA, 33 bp, Homo sapien
taacacaggcttagaaagttcttactatcatac

SEQ ID NO: 890876 - DNA, 33 bp, Homo sapien
taacacaggcttagaacgttcttactatcatac

SEQ ID NO: 890877 - DNA, 33 bp, Homo sapien
cagaaggagcacttacaaaaccaccaatgaact

SEQ ID NO: 890878 - DNA, 33 bp, Homo sapien
cagaaggagcacttacgaaaccaccaatgaact

SEQ ID NO: 890879 - DNA, 33 bp, Homo sapien
aaaaacttcctgtccaaagagaacttactttct

SEQ ID NO: 890880 - DNA, 33 bp, Homo sapien
aaaaacttcctgtccacagagaacttactttct

SEQ ID NO: 890881 - DNA, 33 bp, Homo sapien
ctaatgtcggaaaatacgtaaagggtgcacctc

SEQ ID NO: 890882 - DNA, 33 bp, Homo sapien
ctaatgtcggaaaatatgtaaagggtgcacctc

SEQ ID NO: 890883 - DNA, 33 bp, Homo sapien
ttgagaattggcagcacaggtattctgaaagtt

SEQ ID NO: 890884 - DNA, 33 bp, Homo sapien
ttgagaattggcagcataggtattctgaaagtt

SEQ ID NO: 890885 - DNA, 33 bp, Homo sapien
tgcctttataaagcccaatggccctttgtgctc

SEQ ID NO: 890886 - DNA, 33 bp, Homo sapien
tgcctttataaagcccgatggccctttgtgctc

SEQ ID NO: 890887 - DNA, 33 bp, Homo sapien
gcttcaccaatgaagacatctgcagaactgaag

SEQ ID NO: 890888 - DNA, 33 bp, Homo sapien
gcttcaccaatgaagatatctgcagaactgaag

SEQ ID NO: 890889 - DNA, 33 bp, Homo sapien
aatgtttgcattaataaagggctatggcaattt

SEQ ID NO: 890890 - DNA, 33 bp, Homo sapien
aatgtttgcattaatatagggctatggcaattt

SEQ ID NO: 890891 - DNA, 33 bp, Homo sapien
gtggcttaaacaccaaacatcagattaattcat

SEQ ID NO: 890892 - DNA, 33 bp, Homo sapien
gtggcttaaacaccaaccatcagattaattcat

SEQ ID NO: 890893 - DNA, 33 bp, Homo sapien
atgtcctgaactccatcagtgaacattcccctt

SEQ ID NO: 890894 - DNA, 33 bp, Homo sapien
atgtcctgaactccattagtgaacattcccctt

SEQ ID NO: 890895 - DNA, 33 bp, Homo sapien
atgaaacattaatgtaacttagaaccaaatgta

SEQ ID NO: 890896 - DNA, 33 bp, Homo sapien
atgaaacattaatgtaccttagaaccaaatgta

SEQ ID NO: 890897 - DNA, 33 bp, Homo sapien
ataataaatagtgaaacaataagctgatgtcag

SEQ ID NO: 890898 - DNA, 33 bp, Homo sapien
ataataaatagtgaaagaataagctgatgtcag

SEQ ID NO: 890899 - DNA, 33 bp, Homo sapien
atgttttttatcacacccatgaaaagcagaatc

SEQ ID NO: 890900 - DNA, 33 bp, Homo sapien
atgttttttatcacactcatgaaaagcagaatc

SEQ ID NO: 890901 - DNA, 33 bp, Homo sapien
attatttcaccccttaaatctggattatgcctg

SEQ ID NO: 890902 - DNA, 33 bp, Homo sapien
attatttcaccccttacatctggattatgcctg

SEQ ID NO: 890903 - DNA, 33 bp, Homo sapien
attagagtatacgagccagaaaaataaattata

SEQ ID NO: 890904 - DNA, 33 bp, Homo sapien
attagagtatacgagctagaaaaataaattata

SEQ ID NO: 890905 - DNA, 33 bp, Homo sapien
cagtcctggactcatccaaatatcctatcatat

SEQ ID NO: 890906 - DNA, 33 bp, Homo sapien
cagtcctggactcatctaaatatcctatcatat

SEQ ID NO: 890907 - DNA, 33 bp, Homo sapien
ttcacattcatcagtacaaactaacacactcag

SEQ ID NO: 890908 - DNA, 33 bp, Homo sapien
ttcacattcatcagtagaaactaacacactcag

SEQ ID NO: 890909 - DNA, 33 bp, Homo sapien
ctaacacactcagggacaggagccactcactcc

SEQ ID NO: 890910 - DNA, 33 bp, Homo sapien
ctaacacactcagggataggagccactcactcc

SEQ ID NO: 890911 - DNA, 33 bp, Homo sapien
ctggaaaatttccaaaatagatgaaagacatca

SEQ ID NO: 890912 - DNA, 33 bp, Homo sapien
ctggaaaatttccaaagtagatgaaagacatca

SEQ ID NO: 890913 - DNA, 33 bp, Homo sapien
tattcaatgatgttcaaattttttacagcctta

SEQ ID NO: 890914 - DNA, 33 bp, Homo sapien
tattcaatgatgttcacattttttacagcctta

SEQ ID NO: 890915 - DNA, 33 bp, Homo sapien
gagattgtaagcattcaattacctgtagaaaaa

SEQ ID NO: 890916 - DNA, 33 bp, Homo sapien
gagattgtaagcattctattacctgtagaaaaa

SEQ ID NO: 890917 - DNA, 33 bp, Homo sapien
ttggccaggagcccaactactgagagatcttct

SEQ ID NO: 890918 - DNA, 33 bp, Homo sapien
ttggccaggagcccaattactgagagatcttct

SEQ ID NO: 890919 - DNA, 33 bp, Homo sapien
cattcatgaggattagcacttggtatagaacat

SEQ ID NO: 890920 - DNA, 33 bp, Homo sapien
cattcatgaggattaggacttggtatagaacat

SEQ ID NO: 890921 - DNA, 33 bp, Homo sapien
caagcaatatttacaaatcagtatgaagttatg

SEQ ID NO: 890922 - DNA, 33 bp, Homo sapien
caagcaatatttacaactcagtatgaagttatg

SEQ ID NO: 890923 - DNA, 33 bp, Homo sapien
agtgaataaagatccactgaagttttacagtag

SEQ ID NO: 890924 - DNA, 33 bp, Homo sapien
agtgaataaagatccagtgaagttttacagtag

SEQ ID NO: 890925 - DNA, 33 bp, Homo sapien
tacaattctttgaagaacagcttgaacttctga

SEQ ID NO: 890926 - DNA, 33 bp, Homo sapien
tacaattctttgaagaccagcttgaacttctga

SEQ ID NO: 890927 - DNA, 33 bp, Homo sapien
tgcagtatttcaaaaactgacaggtttaaagta

SEQ ID NO: 890928 - DNA, 33 bp, Homo sapien
tgcagtatttcaaaaattgacaggtttaaagta

SEQ ID NO: 890929 - DNA, 33 bp, Homo sapien
atcaccgaaaccaagacagtgagcatattcacc

SEQ ID NO: 890930 - DNA, 33 bp, Homo sapien
atcaccgaaaccaagagagtgagcatattcacc

SEQ ID NO: 890931 - DNA, 33 bp, Homo sapien
agcagccagagtgatacgtgtaataagatgcat

SEQ ID NO: 890932 - DNA, 33 bp, Homo sapien
agcagccagagtgatatgtgtaataagatgcat

SEQ ID NO: 890933 - DNA, 33 bp, Homo sapien
attgaaaagctcaatgaacctcaatcataagaa

SEQ ID NO: 890934 - DNA, 33 bp, Homo sapien
attgaaaagctcaatggacctcaatcataagaa

SEQ ID NO: 890935 - DNA, 33 bp, Homo sapien
actccaaataccatatcaggccacataaaactt

SEQ ID NO: 890936 - DNA, 33 bp, Homo sapien
actccaaataccatatgaggccacataaaactt

SEQ ID NO: 890937 - DNA, 33 bp, Homo sapien
ttctgtagctataactaagaacatttgaattgc

SEQ ID NO: 890938 - DNA, 33 bp, Homo sapien
ttctgtagctataactgagaacatttgaattgc

SEQ ID NO: 890939 - DNA, 33 bp, Homo sapien
aatcattaagcaaaaaacaagtcatgtaaaaac

SEQ ID NO: 890940 - DNA, 33 bp, Homo sapien
aatcattaagcaaaaagcaagtcatgtaaaaac

SEQ ID NO: 890941 - DNA, 33 bp, Homo sapien
catgtaaaaacaggccaaaaggtttgcaggttt

SEQ ID NO: 890942 - DNA, 33 bp, Homo sapien
catgtaaaaacaggccgaaaggtttgcaggttt

SEQ ID NO: 890943 - DNA, 33 bp, Homo sapien
ttagttattccctttcactaatatcttcagtta

SEQ ID NO: 890944 - DNA, 33 bp, Homo sapien
ttagttattccctttctctaatatcttcagtta

SEQ ID NO: 890945 - DNA, 33 bp, Homo sapien
aaccacaggcataaaaagcataatttaggaatt

SEQ ID NO: 890946 - DNA, 33 bp, Homo sapien
aaccacaggcataaaacgcataatttaggaatt

SEQ ID NO: 890947 - DNA, 33 bp, Homo sapien
ttttattgaggtataactgaaaaaatgattgca

SEQ ID NO: 890948 - DNA, 33 bp, Homo sapien
ttttattgaggtataattgaaaaaatgattgca

SEQ ID NO: 890949 - DNA, 33 bp, Homo sapien
agatatctttttggcacattgatttcaatttct

SEQ ID NO: 890950 - DNA, 33 bp, Homo sapien
agatatctttttggcatattgatttcaatttct

SEQ ID NO: 890951 - DNA, 33 bp, Homo sapien
taggagaggacttaagcaaagtgtgaaactgac

SEQ ID NO: 890952 - DNA, 33 bp, Homo sapien
taggagaggacttaaggaaagtgtgaaactgac

SEQ ID NO: 890953 - DNA, 33 bp, Homo sapien
gaacacaaagagccagcactaatacatcttaga

SEQ ID NO: 890954 - DNA, 33 bp, Homo sapien
gaacacaaagagccaggactaatacatcttaga

SEQ ID NO: 890955 - DNA, 33 bp, Homo sapien
tcccttcaacatatcccctgggttttgttgtca

SEQ ID NO: 890956 - DNA, 33 bp, Homo sapien
tcccttcaacatatcctctgggttttgttgtca

SEQ ID NO: 890957 - DNA, 33 bp, Homo sapien
acaggagtcaactgaaagagctatcagtatatt

SEQ ID NO: 890958 - DNA, 33 bp, Homo sapien
acaggagtcaactgaaggagctatcagtatatt

SEQ ID NO: 890959 - DNA, 33 bp, Homo sapien
tttcagcaatatgggaataaaagaacatattca

SEQ ID NO: 890960 - DNA, 33 bp, Homo sapien
tttcagcaatatgggactaaaagaacatattca

SEQ ID NO: 890961 - DNA, 33 bp, Homo sapien
gttcattatttgttgaaggaagttatttcaaat

SEQ ID NO: 890962 - DNA, 33 bp, Homo sapien
gttcattatttgttgagggaagttatttcaaat

SEQ ID NO: 890963 - DNA, 33 bp, Homo sapien
acttgatgtggcaattaaagaacaaagcagaat

SEQ ID NO: 890964 - DNA, 33 bp, Homo sapien
acttgatgtggcaattgaagaacaaagcagaat

SEQ ID NO: 890965 - DNA, 33 bp, Homo sapien
ttcttcttcgtattacccttgccttttcctgtc

SEQ ID NO: 890966 - DNA, 33 bp, Homo sapien
ttcttcttcgtattactcttgccttttcctgtc

SEQ ID NO: 890967 - DNA, 33 bp, Homo sapien
atccttcatattaaaaacagagagaccaatata

SEQ ID NO: 890968 - DNA, 33 bp, Homo sapien
atccttcatattaaaagcagagagaccaatata

SEQ ID NO: 890969 - DNA, 33 bp, Homo sapien
cattaattgagtaacacaatatctcccgaaact

SEQ ID NO: 890970 - DNA, 33 bp, Homo sapien
cattaattgagtaacataatatctcccgaaact

SEQ ID NO: 890971 - DNA, 33 bp, Homo sapien
acagcaagcatttgtcaaacgactttattatct

SEQ ID NO: 890972 - DNA, 33 bp, Homo sapien
acagcaagcatttgtcgaacgactttattatct

SEQ ID NO: 890973 - DNA, 33 bp, Homo sapien
gactctgaccatagcaccaggagaaaatagtgg

SEQ ID NO: 890974 - DNA, 33 bp, Homo sapien
gactctgaccatagcatcaggagaaaatagtgg

SEQ ID NO: 890975 - DNA, 33 bp, Homo sapien
ctaagtacaatttgaactaggcaatagatgtca

SEQ ID NO: 890976 - DNA, 33 bp, Homo sapien
ctaagtacaatttgaattaggcaatagatgtca

SEQ ID NO: 890977 - DNA, 33 bp, Homo sapien
ctacagtaaggtggtacggaaaagctgctgatt

SEQ ID NO: 890978 - DNA, 33 bp, Homo sapien
ctacagtaaggtggtatggaaaagctgctgatt

SEQ ID NO: 890979 - DNA, 33 bp, Homo sapien
catccattgagaaccacagtaccatcttctttg

SEQ ID NO: 890980 - DNA, 33 bp, Homo sapien
catccattgagaaccatagtaccatcttctttg

SEQ ID NO: 890981 - DNA, 33 bp, Homo sapien
atttttaaagttttcacggagttcaatttgtct

SEQ ID NO: 890982 - DNA, 33 bp, Homo sapien
atttttaaagttttcatggagttcaatttgtct

SEQ ID NO: 890983 - DNA, 33 bp, Homo sapien
gaaaatgagttattacaggcatagagtttcagt

SEQ ID NO: 890984 - DNA, 33 bp, Homo sapien
gaaaatgagttattacgggcatagagtttcagt

SEQ ID NO: 890985 - DNA, 33 bp, Homo sapien
tttctcaaattgtgcactaaaaagagtgaattt

SEQ ID NO: 890986 - DNA, 33 bp, Homo sapien
tttctcaaattgtgcattaaaaagagtgaattt

SEQ ID NO: 890987 - DNA, 33 bp, Homo sapien
ctattctctacttctaagagttccagtcttttt

SEQ ID NO: 890988 - DNA, 33 bp, Homo sapien
ctattctctacttctaggagttccagtcttttt

SEQ ID NO: 890989 - DNA, 33 bp, Homo sapien
cactgatggcccatcaacataggtagataaact

SEQ ID NO: 890990 - DNA, 33 bp, Homo sapien
cactgatggcccatcagcataggtagataaact

SEQ ID NO: 890991 - DNA, 33 bp, Homo sapien
tattaaagtaactacaatcaggtgtctcttaac

SEQ ID NO: 890992 - DNA, 33 bp, Homo sapien
tattaaagtaactacagtcaggtgtctcttaac

SEQ ID NO: 890993 - DNA, 33 bp, Homo sapien
aactgtacctttcccacgtttagatatacaaat

SEQ ID NO: 890994 - DNA, 33 bp, Homo sapien
aactgtacctttcccatgtttagatatacaaat

SEQ ID NO: 890995 - DNA, 33 bp, Homo sapien
gaacaagagtcttacaacagagaagtagtttct

SEQ ID NO: 890996 - DNA, 33 bp, Homo sapien
gaacaagagtcttacagcagagaagtagtttct

SEQ ID NO: 890997 - DNA, 33 bp, Homo sapien
cattgcaagccgaggcaacagttttagcagaag

SEQ ID NO: 890998 - DNA, 33 bp, Homo sapien
cattgcaagccgaggcgacagttttagcagaag

SEQ ID NO: 890999 - DNA, 33 bp, Homo sapien
tcttaacaagaaatcccacttctgcaaataaat

SEQ ID NO: 891000 - DNA, 33 bp, Homo sapien
tcttaacaagaaatcctacttctgcaaataaat

SEQ ID NO: 891001 - DNA, 33 bp, Homo sapien
tcaaattatttatgagaagtctcctgttagatg

SEQ ID NO: 891002 - DNA, 33 bp, Homo sapien
tcaaattatttatgagtagtctcctgttagatg

SEQ ID NO: 891003 - DNA, 33 bp, Homo sapien
ttagaagacacctggactataaaaataaagatt

SEQ ID NO: 891004 - DNA, 33 bp, Homo sapien
ttagaagacacctggagtataaaaataaagatt

SEQ ID NO: 891005 - DNA, 33 bp, Homo sapien
gttagacctttatttccattatatagccaatgt

SEQ ID NO: 891006 - DNA, 33 bp, Homo sapien
gttagacctttatttctattatatagccaatgt

SEQ ID NO: 891007 - DNA, 33 bp, Homo sapien
tggcattgtttgcatgaagaaggaaagaaacgt

SEQ ID NO: 891008 - DNA, 33 bp, Homo sapien
tggcattgtttgcatgcagaaggaaagaaacgt

SEQ ID NO: 891009 - DNA, 33 bp, Homo sapien
aagcataacgaagatactatattttactgtcag

SEQ ID NO: 891010 - DNA, 33 bp, Homo sapien
aagcataacgaagatattatattttactgtcag

SEQ ID NO: 891011 - DNA, 33 bp, Homo sapien
ctgagttttttacaaacgtcaaatccttctgag

SEQ ID NO: 891012 - DNA, 33 bp, Homo sapien
ctgagttttttacaaatgtcaaatccttctgag

SEQ ID NO: 891013 - DNA, 33 bp, Homo sapien
tggtgtcgcttttgtccaggaaaatggcttata

SEQ ID NO: 891014 - DNA, 33 bp, Homo sapien
tggtgtcgcttttgtctaggaaaatggcttata

SEQ ID NO: 891015 - DNA, 33 bp, Homo sapien
ccagtcaacactaaaaatagcgtgaaataatga

SEQ ID NO: 891016 - DNA, 33 bp, Homo sapien
ccagtcaacactaaaagtagcgtgaaataatga

SEQ ID NO: 891017 - DNA, 33 bp, Homo sapien
gaattcctgggtagctcaaacactgaaggaagt

SEQ ID NO: 891018 - DNA, 33 bp, Homo sapien
gaattcctgggtagctgaaacactgaaggaagt

SEQ ID NO: 891019 - DNA, 33 bp, Homo sapien
tcagattgcttaatacaggtttccacactcagt

SEQ ID NO: 891020 - DNA, 33 bp, Homo sapien
tcagattgcttaatacgggtttccacactcagt

SEQ ID NO: 891021 - DNA, 33 bp, Homo sapien
agaagaatctgtttccccagtaactcagaattc

SEQ ID NO: 891022 - DNA, 33 bp, Homo sapien
agaagaatctgtttccgcagtaactcagaattc

SEQ ID NO: 891023 - DNA, 33 bp, Homo sapien
atgaagcgcatgaccacgtacctagcatagcat

SEQ ID NO: 891024 - DNA, 33 bp, Homo sapien
atgaagcgcatgaccatgtacctagcatagcat

SEQ ID NO: 891025 - DNA, 33 bp, Homo sapien
gcctatccagagacaaaattaacagctttcttt

SEQ ID NO: 891026 - DNA, 33 bp, Homo sapien
gcctatccagagacaagattaacagctttcttt

SEQ ID NO: 891027 - DNA, 33 bp, Homo sapien
cagcattctgtcaaaactcaatttaagtcacat

SEQ ID NO: 891028 - DNA, 33 bp, Homo sapien
cagcattctgtcaaaattcaatttaagtcacat

SEQ ID NO: 891029 - DNA, 33 bp, Homo sapien
tcaattttttaacttacggtgtataatttcata

SEQ ID NO: 891030 - DNA, 33 bp, Homo sapien
tcaattttttaacttatggtgtataatttcata

SEQ ID NO: 891031 - DNA, 33 bp, Homo sapien
aattgaacttgagataaagtcgctggacacaaa

SEQ ID NO: 891032 - DNA, 33 bp, Homo sapien
aattgaacttgagatagagtcgctggacacaaa

SEQ ID NO: 891033 - DNA, 33 bp, Homo sapien
tcaaacttttccgaaactcacagatgttgaaac

SEQ ID NO: 891034 - DNA, 33 bp, Homo sapien
tcaaacttttccgaaagtcacagatgttgaaac

SEQ ID NO: 891035 - DNA, 33 bp, Homo sapien
gccacaaataaaataaatggtcattgtattagt

SEQ ID NO: 891036 - DNA, 33 bp, Homo sapien
gccacaaataaaataattggtcattgtattagt

SEQ ID NO: 891037 - DNA, 33 bp, Homo sapien
acaaactcttagcaaagatataactcttacata

SEQ ID NO: 891038 - DNA, 33 bp, Homo sapien
acaaactcttagcaaatatataactcttacata

SEQ ID NO: 891039 - DNA, 33 bp, Homo sapien
cctgttaaagccatcaaccaattactgaggata

SEQ ID NO: 891040 - DNA, 33 bp, Homo sapien
cctgttaaagccatcacccaattactgaggata

SEQ ID NO: 891041 - DNA, 33 bp, Homo sapien
ctttggttctcttttcaatggcataatgaaact

SEQ ID NO: 891042 - DNA, 33 bp, Homo sapien
ctttggttctcttttcgatggcataatgaaact

SEQ ID NO: 891043 - DNA, 33 bp, Homo sapien
attaaaaggcagacaaaattgccgcatgataca

SEQ ID NO: 891044 - DNA, 33 bp, Homo sapien
attaaaaggcagacaacattgccgcatgataca

SEQ ID NO: 891045 - DNA, 33 bp, Homo sapien
cttggagaataatgaaaaaagcagctttatatc

SEQ ID NO: 891046 - DNA, 33 bp, Homo sapien
cttggagaataatgaagaaagcagctttatatc

SEQ ID NO: 891047 - DNA, 33 bp, Homo sapien
gcctctgcacagggtacgttaacactgcctaat

SEQ ID NO: 891048 - DNA, 33 bp, Homo sapien
gcctctgcacagggtatgttaacactgcctaat

SEQ ID NO: 891049 - DNA, 33 bp, Homo sapien
tgtcatgccttttatacgtcatgaggagaatat

SEQ ID NO: 891050 - DNA, 33 bp, Homo sapien
tgtcatgccttttatatgtcatgaggagaatat

SEQ ID NO: 891051 - DNA, 33 bp, Homo sapien
ctttagaataaaaatcaaaaaggccaccaatag

SEQ ID NO: 891052 - DNA, 33 bp, Homo sapien
ctttagaataaaaatcgaaaaggccaccaatag

SEQ ID NO: 891053 - DNA, 33 bp, Homo sapien
aacaacagcacataggaacttttattatattat

SEQ ID NO: 891054 - DNA, 33 bp, Homo sapien
aacaacagcacataggcacttttattatattat

SEQ ID NO: 891055 - DNA, 33 bp, Homo sapien
taatatcatgttgtgacgctgaaccaatatttt

SEQ ID NO: 891056 - DNA, 33 bp, Homo sapien
taatatcatgttgtgatgctgaaccaatatttt

SEQ ID NO: 891057 - DNA, 33 bp, Homo sapien
tgtcttggaggagacactaaacatatccaagta

SEQ ID NO: 891058 - DNA, 33 bp, Homo sapien
tgtcttggaggagacagtaaacatatccaagta

SEQ ID NO: 891059 - DNA, 33 bp, Homo sapien
tgtggtcgtggtggtgcaattgacctcatggag

SEQ ID NO: 891060 - DNA, 33 bp, Homo sapien
tgtggtcgtggtggtgtaattgacctcatggag

SEQ ID NO: 891061 - DNA, 33 bp, Homo sapien
caatgctacaaacatccgaatagcacatttttt

SEQ ID NO: 891062 - DNA, 33 bp, Homo sapien
caatgctacaaacatctgaatagcacatttttt

SEQ ID NO: 891063 - DNA, 33 bp, Homo sapien
tattattgtgataacccgataataaagttatta

SEQ ID NO: 891064 - DNA, 33 bp, Homo sapien
tattattgtgataacctgataataaagttatta

SEQ ID NO: 891065 - DNA, 33 bp, Homo sapien
cattgacatttaataccgactcttgccatgctt

SEQ ID NO: 891066 - DNA, 33 bp, Homo sapien
cattgacatttaatactgactcttgccatgctt

SEQ ID NO: 891067 - DNA, 33 bp, Homo sapien
agttccttgatcaataaatggtagcaattattg

SEQ ID NO: 891068 - DNA, 33 bp, Homo sapien
agttccttgatcaatacatggtagcaattattg

SEQ ID NO: 891069 - DNA, 33 bp, Homo sapien
gcaagaagctggaatacaacaagctgtacattc

SEQ ID NO: 891070 - DNA, 33 bp, Homo sapien
gcaagaagctggaatagaacaagctgtacattc

SEQ ID NO: 891071 - DNA, 33 bp, Homo sapien
tgacttttccataatacatcactcatttttcca

SEQ ID NO: 891072 - DNA, 33 bp, Homo sapien
tgacttttccataatagatcactcatttttcca

SEQ ID NO: 891073 - DNA, 33 bp, Homo sapien
atgccgcttgcttacactgaccttcatcgtttc

SEQ ID NO: 891074 - DNA, 33 bp, Homo sapien
atgccgcttgcttacattgaccttcatcgtttc

SEQ ID NO: 891075 - DNA, 33 bp, Homo sapien
caacaattgcagaacacaggctcaaagtaaagg

SEQ ID NO: 891076 - DNA, 33 bp, Homo sapien
caacaattgcagaacagaggctcaaagtaaagg

SEQ ID NO: 891077 - DNA, 33 bp, Homo sapien
ctagatgcagaagataaaagacatgaaaaccaa

SEQ ID NO: 891078 - DNA, 33 bp, Homo sapien
ctagatgcagaagatagaagacatgaaaaccaa

SEQ ID NO: 891079 - DNA, 33 bp, Homo sapien
ctattcctatggacacaaccaatacctgaattt

SEQ ID NO: 891080 - DNA, 33 bp, Homo sapien
ctattcctatggacacgaccaatacctgaattt

SEQ ID NO: 891081 - DNA, 33 bp, Homo sapien
tcatttctaacagttacgtatcttcacctctgt

SEQ ID NO: 891082 - DNA, 33 bp, Homo sapien
tcatttctaacagttatgtatcttcacctctgt

SEQ ID NO: 891083 - DNA, 33 bp, Homo sapien
tgtcctggtacaagccgaacttcatcattcttt

SEQ ID NO: 891084 - DNA, 33 bp, Homo sapien
tgtcctggtacaagcctaacttcatcattcttt

SEQ ID NO: 891085 - DNA, 33 bp, Homo sapien
tctatatatcttgacactcattttcaagtatag

SEQ ID NO: 891086 - DNA, 33 bp, Homo sapien
tctatatatcttgacagtcattttcaagtatag

SEQ ID NO: 891087 - DNA, 33 bp, Homo sapien
ttatttctactgcagacggtgcattgtaccttt

SEQ ID NO: 891088 - DNA, 33 bp, Homo sapien
ttatttctactgcagatggtgcattgtaccttt

SEQ ID NO: 891089 - DNA, 33 bp, Homo sapien
gcagtgtgaatgttaaaaggtactgaataaacc

SEQ ID NO: 891090 - DNA, 33 bp, Homo sapien
gcagtgtgaatgttaataggtactgaataaacc

SEQ ID NO: 891091 - DNA, 33 bp, Homo sapien
gcatctccattgagaaaaacggacgatgccttg

SEQ ID NO: 891092 - DNA, 33 bp, Homo sapien
gcatctccattgagaataacggacgatgccttg

SEQ ID NO: 891093 - DNA, 33 bp, Homo sapien
cactaatatggttaaaccacaatcaaccacttt

SEQ ID NO: 891094 - DNA, 33 bp, Homo sapien
cactaatatggttaaatcacaatcaaccacttt

SEQ ID NO: 891095 - DNA, 33 bp, Homo sapien
ctaagatgttacattcacatccagttcagtaac

SEQ ID NO: 891096 - DNA, 33 bp, Homo sapien
ctaagatgttacattcgcatccagttcagtaac

SEQ ID NO: 891097 - DNA, 33 bp, Homo sapien; identical to SEQ ID NO: 891095

SEQ ID NO: 891098 - DNA, 33 bp, Homo sapien; identical to SEQ ID NO: 891096

SEQ ID NO: 891099 - DNA, 33 bp, Homo sapien
ttacaggagagtaattcaaagataaatatgaaa

SEQ ID NO: 891100 - DNA, 33 bp, Homo sapien
ttacaggagagtaattgaaagataaatatgaaa

SEQ ID NO: 891101 - DNA, 33 bp, Homo sapien
tggtttcagtttagaaccttttgtatcgtccac

SEQ ID NO: 891102 - DNA, 33 bp, Homo sapien
tggtttcagtttagaatcttttgtatcgtccac

SEQ ID NO: 891103 - DNA, 33 bp, Homo sapien
tgaggaaatctctaaaatgagcctggaagagta

SEQ ID NO: 891104 - DNA, 33 bp, Homo sapien
tgaggaaatctctaaactgagcctggaagagta

SEQ ID NO: 891105 - DNA, 33 bp, Homo sapien
atttaagtgcctgctaactttgccactatgtct

SEQ ID NO: 891106 - DNA, 33 bp, Homo sapien
atttaagtgcctgctagctttgccactatgtct

SEQ ID NO: 891107 - DNA, 33 bp, Homo sapien
aacccagaatcatcaaatgttacagccaaaaga

SEQ ID NO: 891108 - DNA, 33 bp, Homo sapien
aacccagaatcatcaagtgttacagccaaaaga

SEQ ID NO: 891109 - DNA, 33 bp, Homo sapien
gctagctgcataatcagggactaactgtgcaac

SEQ ID NO: 891110 - DNA, 33 bp, Homo sapien
gctagctgcataatcatggactaactgtgcaac

SEQ ID NO: 891111 - DNA, 33 bp, Homo sapien
ttgattaatttagccacgaaagagttggtttgt

SEQ ID NO: 891112 - DNA, 33 bp, Homo sapien
ttgattaatttagccatgaaagagttggtttgt

SEQ ID NO: 891113 - DNA, 33 bp, Homo sapien
attaggacaaatactccgaaataacttgatatt

SEQ ID NO: 891114 - DNA, 33 bp, Homo sapien
attaggacaaatactctgaaataacttgatatt

SEQ ID NO: 891115 - DNA, 33 bp, Homo sapien
ctaagcatacccagacacacgagaatcaaacat

SEQ ID NO: 891116 - DNA, 33 bp, Homo sapien
ctaagcatacccagacgcacgagaatcaaacat

SEQ ID NO: 891117 - DNA, 33 bp, Homo sapien
ctggttattatgatctaaacaatagtccttcat

SEQ ID NO: 891118 - DNA, 33 bp, Homo sapien
ctggttattatgatctgaacaatagtccttcat

SEQ ID NO: 891119 - DNA, 33 bp, Homo sapien
ttctgggaaaacttgccgaaactatgaaagttt

SEQ ID NO: 891120 - DNA, 33 bp, Homo sapien
ttctgggaaaacttgctgaaactatgaaagttt

SEQ ID NO: 891121 - DNA, 33 bp, Homo sapien
cttacattgtaccagcacctttttaacttacag

SEQ ID NO: 891122 - DNA, 33 bp, Homo sapien
cttacattgtaccagcgcctttttaacttacag

SEQ ID NO: 891123 - DNA, 33 bp, Homo sapien
gtgcctgttataaaaacgtatgcagtttgacat

SEQ ID NO: 891124 - DNA, 33 bp, Homo sapien
gtgcctgttataaaaatgtatgcagtttgacat

SEQ ID NO: 891125 - DNA, 33 bp, Homo sapien
aacaaaagacctttagaacattcataccatcat

SEQ ID NO: 891126 - DNA, 33 bp, Homo sapien
aacaaaagacctttaggacattcataccatcat

SEQ ID NO: 891127 - DNA, 33 bp, Homo sapien
gcacacatcacacaccaatcagtgagtctgtgc

SEQ ID NO: 891128 - DNA, 33 bp, Homo sapien
gcacacatcacacacccatcagtgagtctgtgc

SEQ ID NO: 891129 - DNA, 33 bp, Homo sapien
aaataaatgacgtttacaaagttacatacatac

SEQ ID NO: 891130 - DNA, 33 bp, Homo sapien
aaataaatgacgtttagaaagttacatacatac

SEQ ID NO: 891131 - DNA, 33 bp, Homo sapien
aggcttgagcaaatcacgtgggaattctgttgc

SEQ ID NO: 891132 - DNA, 33 bp, Homo sapien
aggcttgagcaaatcatgtgggaattctgttgc

SEQ ID NO: 891133 - DNA, 33 bp, Homo sapien
tattgtcaacattcaaaattcatattatacaca

SEQ ID NO: 891134 - DNA, 33 bp, Homo sapien
tattgtcaacattcaacattcatattatacaca

SEQ ID NO: 891135 - DNA, 33 bp, Homo sapien
gaatttgctcctacacagatgggaagctagaaa

SEQ ID NO: 891136 - DNA, 33 bp, Homo sapien
gaatttgctcctacacggatgggaagctagaaa

SEQ ID NO: 891137 - DNA, 33 bp, Homo sapien
tactttcactttttgccctgtgagtttcttcat

SEQ ID NO: 891138 - DNA, 33 bp, Homo sapien
tactttcactttttgctctgtgagtttcttcat

SEQ ID NO: 891139 - DNA, 33 bp, Homo sapien
gctggtctgattattacggattatcagaactta

SEQ ID NO: 891140 - DNA, 33 bp, Homo sapien
gctggtctgattattatggattatcagaactta

SEQ ID NO: 891141 - DNA, 33 bp, Homo sapien
ggccaattcaaacttcgaagtgcaaaatttcag

SEQ ID NO: 891142 - DNA, 33 bp, Homo sapien
ggccaattcaaacttctaagtgcaaaatttcag

SEQ ID NO: 891143 - DNA, 33 bp, Homo sapien
gtagtatgtcaagaaacagcaaaaagaccattt

SEQ ID NO: 891144 - DNA, 33 bp, Homo sapien
gtagtatgtcaagaaagagcaaaaagaccattt

SEQ ID NO: 891145 - DNA, 33 bp, Homo sapien
tgctaaactgagttcacggttcagtatgagagt

SEQ ID NO: 891146 - DNA, 33 bp, Homo sapien
tgctaaactgagttcatggttcagtatgagagt

SEQ ID NO: 891147 - DNA, 33 bp, Homo sapien
aggagtcatagatggacagttccttattgcaag

SEQ ID NO: 891148 - DNA, 33 bp, Homo sapien
aggagtcatagatggatagttccttattgcaag

SEQ ID NO: 891149 - DNA, 33 bp, Homo sapien
tcttttgatcacgaaaactggctacaaataggc

SEQ ID NO: 891150 - DNA, 33 bp, Homo sapien
tcttttgatcacgaaagctggctacaaataggc

SEQ ID NO: 891151 - DNA, 33 bp, Homo sapien
atactgttgaaaagacactaaataaccagatta

SEQ ID NO: 891152 - DNA, 33 bp, Homo sapien
atactgttgaaaagacgctaaataaccagatta

SEQ ID NO: 891153 - DNA, 33 bp, Homo sapien
tcagtatctatcataacacctgttgattaatct

SEQ ID NO: 891154 - DNA, 33 bp, Homo sapien
tcagtatctatcataatacctgttgattaatct

SEQ ID NO: 891155 - DNA, 33 bp, Homo sapien
aatgttgatgtgatgtaaaatgcattagcagag

SEQ ID NO: 891156 - DNA, 33 bp, Homo sapien
aatgttgatgtgatgtcaaatgcattagcagag

SEQ ID NO: 891157 - DNA, 33 bp, Homo sapien
ttttacaatgtagttcaaaccctaaagtagaag

SEQ ID NO: 891158 - DNA, 33 bp, Homo sapien
ttttacaatgtagttcgaaccctaaagtagaag

SEQ ID NO: 891159 - DNA, 33 bp, Homo sapien
ttattctgtgcctagagaggtaagcaattattt

SEQ ID NO: 891160 - DNA, 33 bp, Homo sapien
ttattctgtgcctagataggtaagcaattattt

SEQ ID NO: 891161 - DNA, 33 bp, Homo sapien
tgtggtcagacctgaacggatccttgaagcctg

SEQ ID NO: 891162 - DNA, 33 bp, Homo sapien
tgtggtcagacctgaatggatccttgaagcctg

SEQ ID NO: 891163 - DNA, 33 bp, Homo sapien
caatttctgtgtggcactgatgaagttatttag

SEQ ID NO: 891164 - DNA, 33 bp, Homo sapien
caatttctgtgtggcattgatgaagttatttag

SEQ ID NO: 891165 - DNA, 33 bp, Homo sapien
cagtgaatgtatgacaatatggatttcgatggt

SEQ ID NO: 891166 - DNA, 33 bp, Homo sapien
cagtgaatgtatgacagtatggatttcgatggt

SEQ ID NO: 891167 - DNA, 33 bp, Homo sapien
ttagtacactgtaaaaagctttctgtctgagta

SEQ ID NO: 891168 - DNA, 33 bp, Homo sapien
ttagtacactgtaaaaggctttctgtctgagta

SEQ ID NO: 891169 - DNA, 33 bp, Homo sapien
ttattttttgaaagctcaaatgtttagccaaga

SEQ ID NO: 891170 - DNA, 33 bp, Homo sapien
ttattttttgaaagcttaaatgtttagccaaga

SEQ ID NO: 891171 - DNA, 33 bp, Homo sapien
tggctaactttttgaacctctctacatcaaaag

SEQ ID NO: 891172 - DNA, 33 bp, Homo sapien
tggctaactttttgaatctctctacatcaaaag

SEQ ID NO: 891173 - DNA, 33 bp, Homo sapien
gataatgcactacagaactttcaaatagcaaca

SEQ ID NO: 891174 - DNA, 33 bp, Homo sapien
gataatgcactacagacctttcaaatagcaaca

SEQ ID NO: 891175 - DNA, 33 bp, Homo sapien
acatatgcaaacatcaaggcatggaagacaatt

SEQ ID NO: 891176 - DNA, 33 bp, Homo sapien
acatatgcaaacatcatggcatggaagacaatt

SEQ ID NO: 891177 - DNA, 33 bp, Homo sapien
gctccacatatgtccaataattcagaccaacaa

SEQ ID NO: 891178 - DNA, 33 bp, Homo sapien
gctccacatatgtccagtaattcagaccaacaa

SEQ ID NO: 891179 - DNA, 33 bp, Homo sapien
gcaggagccagcttacaccttttaaactaggtg

SEQ ID NO: 891180 - DNA, 33 bp, Homo sapien
gcaggagccagcttacgccttttaaactaggtg

SEQ ID NO: 891181 - DNA, 33 bp, Homo sapien
aagcatttccctttgcaacattcagacattaat

SEQ ID NO: 891182 - DNA, 33 bp, Homo sapien
aagcatttccctttgcgacattcagacattaat

SEQ ID NO: 891183 - DNA, 33 bp, Homo sapien
ttgttgaataattatggagccctgcttcactga

SEQ ID NO: 891184 - DNA, 33 bp, Homo sapien
ttgttgaataattatgtagccctgcttcactga

SEQ ID NO: 891185 - DNA, 33 bp, Homo sapien
tccactaaaaggtacactgaaattgattagaaa

SEQ ID NO: 891186 - DNA, 33 bp, Homo sapien
tccactaaaaggtacattgaaattgattagaaa

SEQ ID NO: 891187 - DNA, 33 bp, Homo sapien
taaaagctgcccttgcactaatcgttattattg

SEQ ID NO: 891188 - DNA, 33 bp, Homo sapien
taaaagctgcccttgcgctaatcgttattattg

SEQ ID NO: 891189 - DNA, 33 bp, Homo sapien
aattaattcactattacgcccttattaacatat

SEQ ID NO: 891190 - DNA, 33 bp, Homo sapien
aattaattcactattaggcccttattaacatat

SEQ ID NO: 891191 - DNA, 33 bp, Homo sapien
tcatactgttatctaaaaccaaatattttggaa

SEQ ID NO: 891192 - DNA, 33 bp, Homo sapien
tcatactgttatctaacaccaaatattttggaa

SEQ ID NO: 891193 - DNA, 33 bp, Homo sapien
ttttacagcctcaaccacagagtgattctagaa

SEQ ID NO: 891194 - DNA, 33 bp, Homo sapien
ttttacagcctcaaccgcagagtgattctagaa

SEQ ID NO: 891195 - DNA, 33 bp, Homo sapien
atatttaggtctccttaaaagaacaacaagctt

SEQ ID NO: 891196 - DNA, 33 bp, Homo sapien
atatttaggtctccttgaaagaacaacaagctt

SEQ ID NO: 891197 - DNA, 33 bp, Homo sapien
gctcaaacatggtttccaatttttcaaccaata

SEQ ID NO: 891198 - DNA, 33 bp, Homo sapien
gctcaaacatggtttctaatttttcaaccaata

SEQ ID NO: 891199 - DNA, 33 bp, Homo sapien
atccacgcttctaagaaataggaagggaggtat

SEQ ID NO: 891200 - DNA, 33 bp, Homo sapien
atccacgcttctaagagataggaagggaggtat

SEQ ID NO: 891201 - DNA, 33 bp, Homo sapien
aagtacacttgaaggaagtaaatgattgtatca

SEQ ID NO: 891202 - DNA, 33 bp, Homo sapien
aagtacacttgaaggaggtaaatgattgtatca

SEQ ID NO: 891203 - DNA, 33 bp, Homo sapien
caaagattcagaaaacaatgcttgagagaaatg

SEQ ID NO: 891204 - DNA, 33 bp, Homo sapien
caaagattcagaaaacgatgcttgagagaaatg

SEQ ID NO: 891205 - DNA, 33 bp, Homo sapien
tgcaaggcttaatttcaaaacagtcattagaaa

SEQ ID NO: 891206 - DNA, 33 bp, Homo sapien
tgcaaggcttaatttccaaacagtcattagaaa

SEQ ID NO: 891207 - DNA, 33 bp, Homo sapien
gctgcactcttaaatggcagcattccccagtta

SEQ ID NO: 891208 - DNA, 33 bp, Homo sapien
gctgcactcttaaatgtcagcattccccagtta

SEQ ID NO: 891209 - DNA, 33 bp, Homo sapien
agtgatgaataaaggaccacaggtgtaaaacag

SEQ ID NO: 891210 - DNA, 33 bp, Homo sapien
agtgatgaataaaggagcacaggtgtaaaacag

SEQ ID NO: 891211 - DNA, 33 bp, Homo sapien
gatttgaggcaaaaaacgaagtactatgcatgg

SEQ ID NO: 891212 - DNA, 33 bp, Homo sapien
gatttgaggcaaaaaatgaagtactatgcatgg

SEQ ID NO: 891213 - DNA, 33 bp, Homo sapien
gcttgctaaatacacaataatctcaggccatta

SEQ ID NO: 891214 - DNA, 33 bp, Homo sapien
gcttgctaaatacacagtaatctcaggccatta

SEQ ID NO: 891215 - DNA, 33 bp, Homo sapien
tacagagtagttgatacgctatgtcaatctcag

SEQ ID NO: 891216 - DNA, 33 bp, Homo sapien
tacagagtagttgatatgctatgtcaatctcag

SEQ ID NO: 891217 - DNA, 33 bp, Homo sapien
aatagtccagcaaacaatcctaccaataaatca

SEQ ID NO: 891218 - DNA, 33 bp, Homo sapien
aatagtccagcaaacagtcctaccaataaatca

SEQ ID NO: 891219 - DNA, 33 bp, Homo sapien
agttttgctgttaatgaaggactaaggacccct

SEQ ID NO: 891220 - DNA, 33 bp, Homo sapien
agttttgctgttaatgcaggactaaggacccct

SEQ ID NO: 891221 - DNA, 33 bp, Homo sapien
caaattcctaatcaagaagaaacaaaaagagac

SEQ ID NO: 891222 - DNA, 33 bp, Homo sapien
caaattcctaatcaaggagaaacaaaaagagac

SEQ ID NO: 891223 - DNA, 33 bp, Homo sapien
gtgaccattggaaggaggtccagttttcaccta

SEQ ID NO: 891224 - DNA, 33 bp, Homo sapien
gtgaccattggaaggatgtccagttttcaccta

SEQ ID NO: 891225 - DNA, 33 bp, Homo sapien
atttcttgaatagctaaagttgtggacacatac

SEQ ID NO: 891226 - DNA, 33 bp, Homo sapien
atttcttgaatagctacagttgtggacacatac

SEQ ID NO: 891227 - DNA, 33 bp, Homo sapien
tttttgatgttgagaaatcacatgaacctgctg

SEQ ID NO: 891228 - DNA, 33 bp, Homo sapien
tttttgatgttgagaagtcacatgaacctgctg

SEQ ID NO: 891229 - DNA, 33 bp, Homo sapien
tgagggcatggagtccaaagtcctaggggtagc

SEQ ID NO: 891230 - DNA, 33 bp, Homo sapien
tgagggcatggagtccgaagtcctaggggtagc

SEQ ID NO: 891231 - DNA, 33 bp, Homo sapien
gtccaacacctcaccacagagaagctgggcaca

SEQ ID NO: 891232 - DNA, 33 bp, Homo sapien
gtccaacacctcaccatagagaagctgggcaca

SEQ ID NO: 891233 - DNA, 33 bp, Homo sapien
aacgcaatgattatgaccggaggcagcagttga

SEQ ID NO: 891234 - DNA, 33 bp, Homo sapien
aacgcaatgattatgatcggaggcagcagttga

SEQ ID NO: 891235 - DNA, 33 bp, Homo sapien
ataaatagcccaattaaagcatggcagatgtcc

SEQ ID NO: 891236 - DNA, 33 bp, Homo sapien
ataaatagcccaattacagcatggcagatgtcc

SEQ ID NO: 891237 - DNA, 33 bp, Homo sapien
ttggcactcttatctaaaattagttgaccacag

SEQ ID NO: 891238 - DNA, 33 bp, Homo sapien
ttggcactcttatctagaattagttgaccacag

SEQ ID NO: 891239 - DNA, 33 bp, Homo sapien
aatctagctacttgtactaatgaaatgtttgtc

SEQ ID NO: 891240 - DNA, 33 bp, Homo sapien
aatctagctacttgtattaatgaaatgtttgtc

SEQ ID NO: 891241 - DNA, 33 bp, Homo sapien
ataatgctacagacataaatatagatacacgtg

SEQ ID NO: 891242 - DNA, 33 bp, Homo sapien
ataatgctacagacatgaatatagatacacgtg

SEQ ID NO: 891243 - DNA, 33 bp, Homo sapien
caaaagatgcagaaaaaatatgaaaggaagtaa

SEQ ID NO: 891244 - DNA, 33 bp, Homo sapien
caaaagatgcagaaaagatatgaaaggaagtaa

SEQ ID NO: 891245 - DNA, 33 bp, Homo sapien
ctaaggaaaaatgaaccatgtctctctatctcc

SEQ ID NO: 891246 - DNA, 33 bp, Homo sapien
ctaaggaaaaatgaactatgtctctctatctcc

SEQ ID NO: 891247 - DNA, 33 bp, Homo sapien
tgtctaaatactggccaagttttgtctatttca

SEQ ID NO: 891248 - DNA, 33 bp, Homo sapien
tgtctaaatactggccgagttttgtctatttca

SEQ ID NO: 891249 - DNA, 33 bp, Homo sapien
tctatcggtataattacgggtgagacctcagct

SEQ ID NO: 891250 - DNA, 33 bp, Homo sapien
tctatcggtataattaggggtgagacctcagct

SEQ ID NO: 891251 - DNA, 33 bp, Homo sapien
gcccttcaggatgttaactacccatcttagtcc

SEQ ID NO: 891252 - DNA, 33 bp, Homo sapien
gcccttcaggatgttagctacccatcttagtcc

SEQ ID NO: 891253 - DNA, 33 bp, Homo sapien
ctatttatctccctaaactcatctattgcaatt

SEQ ID NO: 891254 - DNA, 33 bp, Homo sapien
ctatttatctccctaagctcatctattgcaatt

SEQ ID NO: 891255 - DNA, 33 bp, Homo sapien
cccacttctctaagaccgagttagatgacttct

SEQ ID NO: 891256 - DNA, 33 bp, Homo sapien
cccacttctctaagactgagttagatgacttct

SEQ ID NO: 891257 - DNA, 33 bp, Homo sapien
atctgcctttcccttacattctcagaatattga

SEQ ID NO: 891258 - DNA, 33 bp, Homo sapien
atctgcctttcccttagattctcagaatattga

SEQ ID NO: 891259 - DNA, 33 bp, Homo sapien
agtcatctttctgctccacgtggcatgacaaga

SEQ ID NO: 891260 - DNA, 33 bp, Homo sapien
agtcatctttctgctctacgtggcatgacaaga

SEQ ID NO: 891261 - DNA, 33 bp, Homo sapien
cccattttaaaatagcaatagttaaccataaga

SEQ ID NO: 891262 - DNA, 33 bp, Homo sapien
cccattttaaaatagcgatagttaaccataaga

SEQ ID NO: 891263 - DNA, 33 bp, Homo sapien
aaatgccaaccatgataaaaatcatttagaaca

SEQ ID NO: 891264 - DNA, 33 bp, Homo sapien
aaatgccaaccatgatgaaaatcatttagaaca

SEQ ID NO: 891265 - DNA, 33 bp, Homo sapien
gctatttgcagagaaaacttgcactattcctga

SEQ ID NO: 891266 - DNA, 33 bp, Homo sapien
gctatttgcagagaaaccttgcactattcctga

SEQ ID NO: 891267 - DNA, 33 bp, Homo sapien
gctgcaacctgggagaaaaggatcacagtgttt

SEQ ID NO: 891268 - DNA, 33 bp, Homo sapien
gctgcaacctgggagagaaggatcacagtgttt

SEQ ID NO: 891269 - DNA, 33 bp, Homo sapien
gttccgtttgcctttaccaaggtgtttgtttag

SEQ ID NO: 891270 - DNA, 33 bp, Homo sapien
gttccgtttgcctttatcaaggtgtttgtttag

SEQ ID NO: 891271 - DNA, 33 bp, Homo sapien
aaagagatctggaaaacaaaagagtaaaaataa

SEQ ID NO: 891272 - DNA, 33 bp, Homo sapien
aaagagatctggaaaataaaagagtaaaaataa

SEQ ID NO: 891273 - DNA, 33 bp, Homo sapien
aggctttcaggctataagtgaagtctacactag

SEQ ID NO: 891274 - DNA, 33 bp, Homo sapien
aggctttcaggctatatgtgaagtctacactag

SEQ ID NO: 891275 - DNA, 33 bp, Homo sapien
acggggtcttctcttgcaaaatggcgctgcatg

SEQ ID NO: 891276 - DNA, 33 bp, Homo sapien
acggggtcttctcttgtaaaatggcgctgcatg

SEQ ID NO: 891277 - DNA, 33 bp, Homo sapien
gaacctaataataccaggaacatatgaagttgt

SEQ ID NO: 891278 - DNA, 33 bp, Homo sapien
gaacctaataataccatgaacatatgaagttgt

SEQ ID NO: 891279 - DNA, 33 bp, Homo sapien
cttcattctattaggactatggaatcagtttgg

SEQ ID NO: 891280 - DNA, 33 bp, Homo sapien
cttcattctattaggagtatggaatcagtttgg

SEQ ID NO: 891281 - DNA, 33 bp, Homo sapien
gaagtacaattagtaacagcttcccactggaaa

SEQ ID NO: 891282 - DNA, 33 bp, Homo sapien
gaagtacaattagtaatagcttcccactggaaa

SEQ ID NO: 891283 - DNA, 33 bp, Homo sapien
agtatggtccttaagccaattgcaatacttaga

SEQ ID NO: 891284 - DNA, 33 bp, Homo sapien
agtatggtccttaagctaattgcaatacttaga

SEQ ID NO: 891285 - DNA, 33 bp, Homo sapien
agtattggatttgaaactttattcttgtgaaaa

SEQ ID NO: 891286 - DNA, 33 bp, Homo sapien
agtattggatttgaaattttattcttgtgaaaa

SEQ ID NO: 891287 - DNA, 33 bp, Homo sapien
atacttcaatgattcaactaattttatctcaag

SEQ ID NO: 891288 - DNA, 33 bp, Homo sapien
atacttcaatgattcagctaattttatctcaag

SEQ ID NO: 891289 - DNA, 33 bp, Homo sapien
ttgaatgtactggcaaaatgattaatccccaaa

SEQ ID NO: 891290 - DNA, 33 bp, Homo sapien
ttgaatgtactggcaagatgattaatccccaaa

SEQ ID NO: 891291 - DNA, 33 bp, Homo sapien
gctaaaaaactgccagactaattgacagaaata

SEQ ID NO: 891292 - DNA, 33 bp, Homo sapien
gctaaaaaactgccaggctaattgacagaaata

SEQ ID NO: 891293 - DNA, 33 bp, Homo sapien
gaagccaaatccaatcgattctcaattcaacac

SEQ ID NO: 891294 - DNA, 33 bp, Homo sapien
gaagccaaatccaatctattctcaattcaacac

SEQ ID NO: 891295 - DNA, 33 bp, Homo sapien
ctaatcactttaagaaatcatcatctgtaattc

SEQ ID NO: 891296 - DNA, 33 bp, Homo sapien
ctaatcactttaagaagtcatcatctgtaattc

SEQ ID NO: 891297 - DNA, 33 bp, Homo sapien
ttccaggtctctcttcaaatgtcaccttctcag

SEQ ID NO: 891298 - DNA, 33 bp, Homo sapien
ttccaggtctctcttcgaatgtcaccttctcag

SEQ ID NO: 891299 - DNA, 33 bp, Homo sapien
gaaagcaggtagacaaccagcttgcacttgtgt

SEQ ID NO: 891300 - DNA, 33 bp, Homo sapien
gaaagcaggtagacaatcagcttgcacttgtgt

SEQ ID NO: 891301 - DNA, 33 bp, Homo sapien
gtttacctccaggatagtaatggcactcagaag

SEQ ID NO: 891302 - DNA, 33 bp, Homo sapien
gtttacctccaggatattaatggcactcagaag

SEQ ID NO: 891303 - DNA, 33 bp, Homo sapien
ttgaagtataatcaaacatgaaaaatcaactca

SEQ ID NO: 891304 - DNA, 33 bp, Homo sapien
ttgaagtataatcaaagatgaaaaatcaactca

SEQ ID NO: 891305 - DNA, 33 bp, Homo sapien
agccaacttgctctcaagtcaatttcttaccct

SEQ ID NO: 891306 - DNA, 33 bp, Homo sapien
agccaacttgctctcaggtcaatttcttaccct

SEQ ID NO: 891307 - DNA, 33 bp, Homo sapien
tatcttcatttctttaaatcagggtcaggcagg

SEQ ID NO: 891308 - DNA, 33 bp, Homo sapien
tatcttcatttctttatatcagggtcaggcagg

SEQ ID NO: 891309 - DNA, 33 bp, Homo sapien
ttcaaaatattcaagaagagatgccaatgtggt

SEQ ID NO: 891310 - DNA, 33 bp, Homo sapien
ttcaaaatattcaagaggagatgccaatgtggt

SEQ ID NO: 891311 - DNA, 33 bp, Homo sapien
gcatataacaatctcaaaacaagtttacactaa

SEQ ID NO: 891312 - DNA, 33 bp, Homo sapien
gcatataacaatctcagaacaagtttacactaa

SEQ ID NO: 891313 - DNA, 33 bp, Homo sapien
aattgcattttgagaccgagtgaaatgttttcc

SEQ ID NO: 891314 - DNA, 33 bp, Homo sapien
aattgcattttgagactgagtgaaatgttttcc

SEQ ID NO: 891315 - DNA, 33 bp, Homo sapien
ctctgtttctttattcacagagtttttgactgt

SEQ ID NO: 891316 - DNA, 33 bp, Homo sapien
ctctgtttctttattcgcagagtttttgactgt

SEQ ID NO: 891317 - DNA, 33 bp, Homo sapien
tctctataggcaaaaacgggtaataagaaagcg

SEQ ID NO: 891318 - DNA, 33 bp, Homo sapien
tctctataggcaaaaatgggtaataagaaagcg

SEQ ID NO: 891319 - DNA, 33 bp, Homo sapien
ggaaaatatgctccacccttaaaagtatgctaa

SEQ ID NO: 891320 - DNA, 33 bp, Homo sapien
ggaaaatatgctccactcttaaaagtatgctaa

SEQ ID NO: 891321 - DNA, 33 bp, Homo sapien
aatatttctcaagctacacaaaataacgaaaag

SEQ ID NO: 891322 - DNA, 33 bp, Homo sapien
aatatttctcaagctatacaaaataacgaaaag

SEQ ID NO: 891323 - DNA, 33 bp, Homo sapien
cattgatattggttaacgtcacaggcttatttc

SEQ ID NO: 891324 - DNA, 33 bp, Homo sapien
cattgatattggttaaggtcacaggcttatttc

SEQ ID NO: 891325 - DNA, 33 bp, Homo sapien
aggcttatttccaaaaatagactgtccattgtc

SEQ ID NO: 891326 - DNA, 33 bp, Homo sapien
aggcttatttccaaaagtagactgtccattgtc

SEQ ID NO: 891327 - DNA, 33 bp, Homo sapien
agatctgatggttctacacgggggagtttccct

SEQ ID NO: 891328 - DNA, 33 bp, Homo sapien
agatctgatggttctatacgggggagtttccct

SEQ ID NO: 891329 - DNA, 33 bp, Homo sapien
caaatatgcaaagtgaatagaaggttgaaagcg

SEQ ID NO: 891330 - DNA, 33 bp, Homo sapien
caaatatgcaaagtgagtagaaggttgaaagcg

SEQ ID NO: 891331 - DNA, 33 bp, Homo sapien
aacattttggcatcaacgtgaagaagcatctga

SEQ ID NO: 891332 - DNA, 33 bp, Homo sapien
aacattttggcatcaatgtgaagaagcatctga

SEQ ID NO: 891333 - DNA, 33 bp, Homo sapien
gctattgtgaggattccaagtgtgagatttgtg

SEQ ID NO: 891334 - DNA, 33 bp, Homo sapien
gctattgtgaggattctaagtgtgagatttgtg

SEQ ID NO: 891335 - DNA, 33 bp, Homo sapien
accagtctgcacagaactcacagggactttaaa

SEQ ID NO: 891336 - DNA, 33 bp, Homo sapien
accagtctgcacagaattcacagggactttaaa

SEQ ID NO: 891337 - DNA, 33 bp, Homo sapien
gcctgagttacagtcacgcgaaagaagaggaga

SEQ ID NO: 891338 - DNA, 33 bp, Homo sapien
gcctgagttacagtcatgcgaaagaagaggaga

SEQ ID NO: 891339 - DNA, 33 bp, Homo sapien
ctgagctcctccaggtgaaggaatgtaagttat

SEQ ID NO: 891340 - DNA, 33 bp, Homo sapien
ctgagctcctccaggttaaggaatgtaagttat

SEQ ID NO: 891341 - DNA, 33 bp, Homo sapien
tggggaagataattcacaggtcttaattgtgca

SEQ ID NO: 891342 - DNA, 33 bp, Homo sapien
tggggaagataattcataggtcttaattgtgca

SEQ ID NO: 891343 - DNA, 33 bp, Homo sapien
ttatcatgggcatttaacatttagctccttgat

SEQ ID NO: 891344 - DNA, 33 bp, Homo sapien
ttatcatgggcatttagcatttagctccttgat

SEQ ID NO: 891345 - DNA, 33 bp, Homo sapien
aaggggaaatcaaagagaaagtcaaatgttaag

SEQ ID NO: 891346 - DNA, 33 bp, Homo sapien
aaggggaaatcaaagataaagtcaaatgttaag

SEQ ID NO: 891347 - DNA, 33 bp, Homo sapien
acaagtgaatgaagaaacaactatggaaattaa

SEQ ID NO: 891348 - DNA, 33 bp, Homo sapien
acaagtgaatgaagaatcaactatggaaattaa

SEQ ID NO: 891349 - DNA, 33 bp, Homo sapien
ccagataatgcaggaaactatttgtcattgtga

SEQ ID NO: 891350 - DNA, 33 bp, Homo sapien
ccagataatgcaggaacctatttgtcattgtga

SEQ ID NO: 891351 - DNA, 33 bp, Homo sapien
tgtagtaatgagacacaggaaatagcttaaaaa

SEQ ID NO: 891352 - DNA, 33 bp, Homo sapien
tgtagtaatgagacactggaaatagcttaaaaa

SEQ ID NO: 891353 - DNA, 33 bp, Homo sapien
ccagtgagatactcaaaggcaagaattctacct

SEQ ID NO: 891354 - DNA, 33 bp, Homo sapien
ccagtgagatactcaatggcaagaattctacct

SEQ ID NO: 891355 - DNA, 33 bp, Homo sapien
tttgttttaataccaactcaaaaatctaaaacc

SEQ ID NO: 891356 - DNA, 33 bp, Homo sapien
tttgttttaataccaagtcaaaaatctaaaacc

SEQ ID NO: 891357 - DNA, 33 bp, Homo sapien
gtaaaaggtcataagcgctgattttccttaaat

SEQ ID NO: 891358 - DNA, 33 bp, Homo sapien
gtaaaaggtcataagctctgattttccttaaat

SEQ ID NO: 891359 - DNA, 33 bp, Homo sapien
gtggaagacaggctcaccacaggaatttagttc

SEQ ID NO: 891360 - DNA, 33 bp, Homo sapien
gtggaagacaggctcatcacaggaatttagttc

SEQ ID NO: 891361 - DNA, 33 bp, Homo sapien
acatgagggtaaacataagaccacatgaagtgg

SEQ ID NO: 891362 - DNA, 33 bp, Homo sapien
acatgagggtaaacattagaccacatgaagtgg

SEQ ID NO: 891363 - DNA, 33 bp, Homo sapien
agagaaagctagttagcccatttatgcctagtg

SEQ ID NO: 891364 - DNA, 33 bp, Homo sapien
agagaaagctagttagtccatttatgcctagtg

SEQ ID NO: 891365 - DNA, 33 bp, Homo sapien
aataacattatttctacatatgtcaggcagctt

SEQ ID NO: 891366 - DNA, 33 bp, Homo sapien
aataacattatttctagatatgtcaggcagctt

SEQ ID NO: 891367 - DNA, 33 bp, Homo sapien
ctctacttagcaaatagacttgattaactagca

SEQ ID NO: 891368 - DNA, 33 bp, Homo sapien
ctctacttagcaaatatacttgattaactagca

SEQ ID NO: 891369 - DNA, 33 bp, Homo sapien
actcgactatacgtcacgtgctactgctttcat

SEQ ID NO: 891370 - DNA, 33 bp, Homo sapien
actcgactatacgtcatgtgctactgctttcat

SEQ ID NO: 891371 - DNA, 33 bp, Homo sapien
aaatgtaagcattgccacaacattattttcagt

SEQ ID NO: 891372 - DNA, 33 bp, Homo sapien
aaatgtaagcattgccgcaacattattttcagt

SEQ ID NO: 891373 - DNA, 33 bp, Homo sapien
cagaggaagctcttagaagaaagaaagaacaaa

SEQ ID NO: 891374 - DNA, 33 bp, Homo sapien
cagaggaagctcttaggagaaagaaagaacaaa

SEQ ID NO: 891375 - DNA, 33 bp, Homo sapien
tttctagaactggctcacgtttttatagggaga

SEQ ID NO: 891376 - DNA, 33 bp, Homo sapien
tttctagaactggctctcgtttttatagggaga

SEQ ID NO: 891377 - DNA, 33 bp, Homo sapien
cctccataaatcacacaaagccaaatcttggct

SEQ ID NO: 891378 - DNA, 33 bp, Homo sapien
cctccataaatcacacgaagccaaatcttggct

SEQ ID NO: 891379 - DNA, 33 bp, Homo sapien
gctcagtgcagcaagacacatccttagttagtt

SEQ ID NO: 891380 - DNA, 33 bp, Homo sapien
gctcagtgcagcaagatacatccttagttagtt

SEQ ID NO: 891381 - DNA, 33 bp, Homo sapien
atttaacctctttggaggcttcatctaatttac

SEQ ID NO: 891382 - DNA, 33 bp, Homo sapien
atttaacctctttggatgcttcatctaatttac

SEQ ID NO: 891383 - DNA, 33 bp, Homo sapien
tcagagaagaaaatggaatctgagaagtcaaaa

SEQ ID NO: 891384 - DNA, 33 bp, Homo sapien
tcagagaagaaaatgggatctgagaagtcaaaa

SEQ ID NO: 891385 - DNA, 33 bp, Homo sapien
agttcaagaaattcctaagcatcatattatttc

SEQ ID NO: 891386 - DNA, 33 bp, Homo sapien
agttcaagaaattcctgagcatcatattatttc

SEQ ID NO: 891387 - DNA, 33 bp, Homo sapien
atagaataccaataaacgttaatctgtttgata

SEQ ID NO: 891388 - DNA, 33 bp, Homo sapien
atagaataccaataaatgttaatctgtttgata

SEQ ID NO: 891389 - DNA, 33 bp, Homo sapien
caacttggacaacctgaaaagttatggcaaata

SEQ ID NO: 891390 - DNA, 33 bp, Homo sapien
caacttggacaacctggaaagttatggcaaata

SEQ ID NO: 891391 - DNA, 33 bp, Homo sapien
tctagtagctttatcacgtgaatagaatacttt

SEQ ID NO: 891392 - DNA, 33 bp, Homo sapien
tctagtagctttatcatgtgaatagaatacttt

SEQ ID NO: 891393 - DNA, 33 bp, Homo sapien
ttttggtaccaaaatcagaaatggagttgatgg

SEQ ID NO: 891394 - DNA, 33 bp, Homo sapien
ttttggtaccaaaatccgaaatggagttgatgg

SEQ ID NO: 891395 - DNA, 33 bp, Homo sapien
ttctaatgtaaggcacaacatttacgatttcaa

SEQ ID NO: 891396 - DNA, 33 bp, Homo sapien
ttctaatgtaaggcaccacatttacgatttcaa

SEQ ID NO: 891397 - DNA, 33 bp, Homo sapien
aagctgttgtcgattaaaagggcaacagaaata

SEQ ID NO: 891398 - DNA, 33 bp, Homo sapien
aagctgttgtcgattacaagggcaacagaaata

SEQ ID NO: 891399 - DNA, 33 bp, Homo sapien
gatgtgaaagggtggaaaaatcatttgaggaca

SEQ ID NO: 891400 - DNA, 33 bp, Homo sapien
gatgtgaaagggtggacaaatcatttgaggaca

SEQ ID NO: 891401 - DNA, 33 bp, Homo sapien
taaattaaaagtaggaaagtgagaagttaagtg

SEQ ID NO: 891402 - DNA, 33 bp, Homo sapien
taaattaaaagtaggagagtgagaagttaagtg

SEQ ID NO: 891403 - DNA, 33 bp, Homo sapien
actttagggaaagtcaacaacctctcttttacc

SEQ ID NO: 891404 - DNA, 33 bp, Homo sapien
actttagggaaagtcaccaacctctcttttacc

SEQ ID NO: 891405 - DNA, 33 bp, Homo sapien
aatgtgtctctgccaacaagagtgttagtgctg

SEQ ID NO: 891406 - DNA, 33 bp, Homo sapien
aatgtgtctctgccaataagagtgttagtgctg

SEQ ID NO: 891407 - DNA, 33 bp, Homo sapien
tgtgcaacttgttctcacctctgttttcttaga

SEQ ID NO: 891408 - DNA, 33 bp, Homo sapien
tgtgcaacttgttctctcctctgttttcttaga

SEQ ID NO: 891409 - DNA, 33 bp, Homo sapien
ctcataatggctttccaatttcttctggataaa

SEQ ID NO: 891410 - DNA, 33 bp, Homo sapien
ctcataatggctttccgatttcttctggataaa

SEQ ID NO: 891411 - DNA, 33 bp, Homo sapien
tgtatggtgactaatacgtttatcatcattttt

SEQ ID NO: 891412 - DNA, 33 bp, Homo sapien
tgtatggtgactaatatgtttatcatcattttt

SEQ ID NO: 891413 - DNA, 33 bp, Homo sapien
aaaaagcaaaaagagaagacaggtgatgtagat

SEQ ID NO: 891414 - DNA, 33 bp, Homo sapien
aaaaagcaaaaagagacgacaggtgatgtagat

SEQ ID NO: 891415 - DNA, 33 bp, Homo sapien
tagagatgcatacttacattaatacctgttgta

SEQ ID NO: 891416 - DNA, 33 bp, Homo sapien
tagagatgcatacttatattaatacctgttgta

SEQ ID NO: 891417 - DNA, 33 bp, Homo sapien
tttgttacagggtttacacttttacaataagat

SEQ ID NO: 891418 - DNA, 33 bp, Homo sapien
tttgttacagggtttagacttttacaataagat

SEQ ID NO: 891419 - DNA, 33 bp, Homo sapien
accacaatgcttgtgaatattttcatcccacag

SEQ ID NO: 891420 - DNA, 33 bp, Homo sapien
accacaatgcttgtgactattttcatcccacag

SEQ ID NO: 891421 - DNA, 33 bp, Homo sapien
acttcaaagaccatgccccttatcatctgttat

SEQ ID NO: 891422 - DNA, 33 bp, Homo sapien
acttcaaagaccatgctccttatcatctgttat

SEQ ID NO: 891423 - DNA, 33 bp, Homo sapien
ggttcgcattttactcactcttcctcatatccc

SEQ ID NO: 891424 - DNA, 33 bp, Homo sapien
ggttcgcattttactcgctcttcctcatatccc

SEQ ID NO: 891425 - DNA, 33 bp, Homo sapien
ctgtagtatggagacacgattaaccatctgtga

SEQ ID NO: 891426 - DNA, 33 bp, Homo sapien
ctgtagtatggagacaggattaaccatctgtga

SEQ ID NO: 891427 - DNA, 33 bp, Homo sapien
agggtatacacattaaaagaaactacaatacag

SEQ ID NO: 891428 - DNA, 33 bp, Homo sapien
agggtatacacattaagagaaactacaatacag

SEQ ID NO: 891429 - DNA, 33 bp, Homo sapien
ctacaatacagagtacaaagtgcgaaaataaag

SEQ ID NO: 891430 - DNA, 33 bp, Homo sapien
ctacaatacagagtacgaagtgcgaaaataaag

SEQ ID NO: 891431 - DNA, 33 bp, Homo sapien
taggatttcctccgtacatgtttcctgtcagta

SEQ ID NO: 891432 - DNA, 33 bp, Homo sapien
taggatttcctccgtatatgtttcctgtcagta

SEQ ID NO: 891433 - DNA, 33 bp, Homo sapien
atattacggttttagacaactcatacattttag

SEQ ID NO: 891434 - DNA, 33 bp, Homo sapien
atattacggttttagataactcatacattttag

SEQ ID NO: 891435 - DNA, 33 bp, Homo sapien
ttattatgtagaactaaaaggtacagagtcagt

SEQ ID NO: 891436 - DNA, 33 bp, Homo sapien
ttattatgtagaactagaaggtacagagtcagt

SEQ ID NO: 891437 - DNA, 33 bp, Homo sapien
gcaaaaaatagcattggaagttaaccaagcaga

SEQ ID NO: 891438 - DNA, 33 bp, Homo sapien
gcaaaaaatagcattgtaagttaaccaagcaga

SEQ ID NO: 891439 - DNA, 33 bp, Homo sapien
tgaaatctgaagttacagaaaagccaaatagag

SEQ ID NO: 891440 - DNA, 33 bp, Homo sapien
tgaaatctgaagttacggaaaagccaaatagag

SEQ ID NO: 891441 - DNA, 33 bp, Homo sapien
atagaacctagtgcataaactaacttgcaaaac

SEQ ID NO: 891442 - DNA, 33 bp, Homo sapien
atagaacctagtgcatgaactaacttgcaaaac

SEQ ID NO: 891443 - DNA, 33 bp, Homo sapien
ttaattactctgtagcccttggcagatggaatc

SEQ ID NO: 891444 - DNA, 33 bp, Homo sapien
ttaattactctgtagctcttggcagatggaatc

SEQ ID NO: 891445 - DNA, 33 bp, Homo sapien
tatgattataaccatcaattaagattcagctag

SEQ ID NO: 891446 - DNA, 33 bp, Homo sapien
tatgattataaccatcgattaagattcagctag

SEQ ID NO: 891447 - DNA, 33 bp, Homo sapien
cgattataaccagttacgattagttagaaatta

SEQ ID NO: 891448 - DNA, 33 bp, Homo sapien
cgattataaccagttaggattagttagaaatta

SEQ ID NO: 891449 - DNA, 33 bp, Homo sapien
cagaaacacagaaaaactcagtactccagaccc

SEQ ID NO: 891450 - DNA, 33 bp, Homo sapien
cagaaacacagaaaaattcagtactccagaccc

SEQ ID NO: 891451 - DNA, 33 bp, Homo sapien
gttttccagagtgctgaaaaaccattttgaatt

SEQ ID NO: 891452 - DNA, 33 bp, Homo sapien
gttttccagagtgctggaaaaccattttgaatt

SEQ ID NO: 891453 - DNA, 33 bp, Homo sapien
acttatgaccattacaatccttttttccttgtt

SEQ ID NO: 891454 - DNA, 33 bp, Homo sapien
acttatgaccattacagtccttttttccttgtt

SEQ ID NO: 891455 - DNA, 33 bp, Homo sapien
agacacactcagaaaccatgtttaatttgggaa

SEQ ID NO: 891456 - DNA, 33 bp, Homo sapien
agacacactcagaaacgatgtttaatttgggaa

SEQ ID NO: 891457 - DNA, 33 bp, Homo sapien
ctactcagagctttaacagaacaaaaggtgtag

SEQ ID NO: 891458 - DNA, 33 bp, Homo sapien
ctactcagagctttaatagaacaaaaggtgtag

SEQ ID NO: 891459 - DNA, 33 bp, Homo sapien
ccaaaagtagcatagacgaagttaaagtaacaa

SEQ ID NO: 891460 - DNA, 33 bp, Homo sapien
ccaaaagtagcatagatgaagttaaagtaacaa

SEQ ID NO: 891461 - DNA, 33 bp, Homo sapien
gagtaatcctgttgtcagaaggagagacaagga

SEQ ID NO: 891462 - DNA, 33 bp, Homo sapien
gagtaatcctgttgtcggaaggagagacaagga

SEQ ID NO: 891463 - DNA, 33 bp, Homo sapien
cagataattttttacaaggattatgctcataaa

SEQ ID NO: 891464 - DNA, 33 bp, Homo sapien
cagataattttttacagggattatgctcataaa

SEQ ID NO: 891465 - DNA, 33 bp, Homo sapien
acgtgaaattattcaaattattcaacgtgaaat

SEQ ID NO: 891466 - DNA, 33 bp, Homo sapien
acgtgaaattattcaagttattcaacgtgaaat

SEQ ID NO: 891467 - DNA, 33 bp, Homo sapien
cctgaagttgatatgacatactcatttttccat

SEQ ID NO: 891468 - DNA, 33 bp, Homo sapien
cctgaagttgatatgatatactcatttttccat

SEQ ID NO: 891469 - DNA, 33 bp, Homo sapien
ctagtgacaggataaaaatgatcagctcaggga

SEQ ID NO: 891470 - DNA, 33 bp, Homo sapien
ctagtgacaggataaatatgatcagctcaggga

SEQ ID NO: 891471 - DNA, 33 bp, Homo sapien
atggacttcaggaaacgattagcccttatataa

SEQ ID NO: 891472 - DNA, 33 bp, Homo sapien
atggacttcaggaaactattagcccttatataa

SEQ ID NO: 891473 - DNA, 33 bp, Homo sapien
catagcatttcatatacaacacgcttacatgaa

SEQ ID NO: 891474 - DNA, 33 bp, Homo sapien
catagcatttcatatataacacgcttacatgaa

SEQ ID NO: 891475 - DNA, 33 bp, Homo sapien
tatctgtgtgttaagacacttagttttttaaaa

SEQ ID NO: 891476 - DNA, 33 bp, Homo sapien
tatctgtgtgttaagagacttagttttttaaaa

SEQ ID NO: 891477 - DNA, 33 bp, Homo sapien
aaaaggcattttacaacaaagaccattgcccag

SEQ ID NO: 891478 - DNA, 33 bp, Homo sapien
aaaaggcattttacaagaaagaccattgcccag

SEQ ID NO: 891479 - DNA, 33 bp, Homo sapien
ctttaattttctcaacggtgtaattaagaaaat

SEQ ID NO: 891480 - DNA, 33 bp, Homo sapien
ctttaattttctcaactgtgtaattaagaaaat

SEQ ID NO: 891481 - DNA, 33 bp, Homo sapien
cttgagtctatatcaactgtttatttccttaac

SEQ ID NO: 891482 - DNA, 33 bp, Homo sapien
cttgagtctatatcaattgtttatttccttaac

SEQ ID NO: 891483 - DNA, 33 bp, Homo sapien
ctagcatttaggagaaaaatcatagttacaggg

SEQ ID NO: 891484 - DNA, 33 bp, Homo sapien
ctagcatttaggagaacaatcatagttacaggg

SEQ ID NO: 891485 - DNA, 33 bp, Homo sapien
tgtgttagggataggaagcccacataaactaga

SEQ ID NO: 891486 - DNA, 33 bp, Homo sapien
tgtgttagggataggaggcccacataaactaga

SEQ ID NO: 891487 - DNA, 33 bp, Homo sapien
agagagctcagggagcaagttaagaagctatca

SEQ ID NO: 891488 - DNA, 33 bp, Homo sapien
agagagctcagggagcgagttaagaagctatca

SEQ ID NO: 891489 - DNA, 33 bp, Homo sapien
atggtcttcaggaacaatgttatacttcttcag

SEQ ID NO: 891490 - DNA, 33 bp, Homo sapien
atggtcttcaggaacactgttatacttcttcag

SEQ ID NO: 891491 - DNA, 33 bp, Homo sapien
aaaactgtcactttgacatttaaattctttata

SEQ ID NO: 891492 - DNA, 33 bp, Homo sapien
aaaactgtcactttgatatttaaattctttata

SEQ ID NO: 891493 - DNA, 33 bp, Homo sapien
ttaggatctctcttgcacattctatgggtttgg

SEQ ID NO: 891494 - DNA, 33 bp, Homo sapien
ttaggatctctcttgcgcattctatgggtttgg

SEQ ID NO: 891495 - DNA, 33 bp, Homo sapien
catcttgccaaagggaatattacattaaaaaaa

SEQ ID NO: 891496 - DNA, 33 bp, Homo sapien
catcttgccaaagggagtattacattaaaaaaa

SEQ ID NO: 891497 - DNA, 33 bp, Homo sapien
cgagattatagtgaggaaagtccactacaatat

SEQ ID NO: 891498 - DNA, 33 bp, Homo sapien
cgagattatagtgaggtaagtccactacaatat

SEQ ID NO: 891499 - DNA, 33 bp, Homo sapien
aagcatggtgactcctaaaaagtgaatgattaa

SEQ ID NO: 891500 - DNA, 33 bp, Homo sapien
aagcatggtgactcctgaaaagtgaatgattaa

SEQ ID NO: 891501 - DNA, 33 bp, Homo sapien
aattatcactgtatcaataagtgtagttgtgta

SEQ ID NO: 891502 - DNA, 33 bp, Homo sapien
aattatcactgtatcagtaagtgtagttgtgta

SEQ ID NO: 891503 - DNA, 33 bp, Homo sapien
gcagttttggatcataatacccagatgcttttc

SEQ ID NO: 891504 - DNA, 33 bp, Homo sapien
gcagttttggatcatagtacccagatgcttttc

SEQ ID NO: 891505 - DNA, 33 bp, Homo sapien
caagaagaaagtggagacaagtatttaaagtgt

SEQ ID NO: 891506 - DNA, 33 bp, Homo sapien
caagaagaaagtggagtcaagtatttaaagtgt

SEQ ID NO: 891507 - DNA, 33 bp, Homo sapien
ctgggattaatgctgaagagtaaaaccattgag

SEQ ID NO: 891508 - DNA, 33 bp, Homo sapien
ctgggattaatgctgaggagtaaaaccattgag

SEQ ID NO: 891509 - DNA, 33 bp, Homo sapien
cctaaataagacataccatattcatgaattaga

SEQ ID NO: 891510 - DNA, 33 bp, Homo sapien
cctaaataagacatacgatattcatgaattaga

SEQ ID NO: 891511 - DNA, 33 bp, Homo sapien
ttgcagataacagtagaatgaggcactggagaa

SEQ ID NO: 891512 - DNA, 33 bp, Homo sapien
ttgcagataacagtaggatgaggcactggagaa

SEQ ID NO: 891513 - DNA, 33 bp, Homo sapien
catgataaaaatactcaacaaaccagacataga

SEQ ID NO: 891514 - DNA, 33 bp, Homo sapien
catgataaaaatactcgacaaaccagacataga

SEQ ID NO: 891515 - DNA, 33 bp, Homo sapien
cctaaggcttgagaacaaaagtatcataagggt

SEQ ID NO: 891516 - DNA, 33 bp, Homo sapien
cctaaggcttgagaaccaaagtatcataagggt

SEQ ID NO: 891517 - DNA, 33 bp, Homo sapien
ggtatctaagagattaaacagaatacagagcaa

SEQ ID NO: 891518 - DNA, 33 bp, Homo sapien
ggtatctaagagattagacagaatacagagcaa

SEQ ID NO: 891519 - DNA, 33 bp, Homo sapien
ttaggcgtttaagatgcactgataacagataag

SEQ ID NO: 891520 - DNA, 33 bp, Homo sapien
ttaggcgtttaagatggactgataacagataag

SEQ ID NO: 891521 - DNA, 33 bp, Homo sapien
ccacacacgaggatgactataataaagacaggt

SEQ ID NO: 891522 - DNA, 33 bp, Homo sapien
ccacacacgaggatgattataataaagacaggt

SEQ ID NO: 891523 - DNA, 33 bp, Homo sapien
tctgtcaaaatcagtaactttcacataaaccag

SEQ ID NO: 891524 - DNA, 33 bp, Homo sapien
tctgtcaaaatcagtagctttcacataaaccag

SEQ ID NO: 891525 - DNA, 33 bp, Homo sapien
tctcctgtggccacttcaagaagagtgacccca

SEQ ID NO: 891526 - DNA, 33 bp, Homo sapien
tctcctgtggccactttaagaagagtgacccca

SEQ ID NO: 891527 - DNA, 33 bp, Homo sapien
gatctaagtttcacacaatgcagaaatgatcta

SEQ ID NO: 891528 - DNA, 33 bp, Homo sapien
gatctaagtttcacaccatgcagaaatgatcta

SEQ ID NO: 891529 - DNA, 33 bp, Homo sapien
tgttatttcctttctacggatttctctctgtcc

SEQ ID NO: 891530 - DNA, 33 bp, Homo sapien
tgttatttcctttctatggatttctctctgtcc

SEQ ID NO: 891531 - DNA, 33 bp, Homo sapien
aactaaatataaaatacagcctggtccagtagt

SEQ ID NO: 891532 - DNA, 33 bp, Homo sapien
aactaaatataaaatagagcctggtccagtagt

SEQ ID NO: 891533 - DNA, 33 bp, Homo sapien
ctctcccaagaatatcagaagtattatgtttaa

SEQ ID NO: 891534 - DNA, 33 bp, Homo sapien
ctctcccaagaatatcggaagtattatgtttaa

SEQ ID NO: 891535 - DNA, 33 bp, Homo sapien
gctaaaatacaccaaacgacaaagctttacaga

SEQ ID NO: 891536 - DNA, 33 bp, Homo sapien
gctaaaatacaccaaatgacaaagctttacaga

SEQ ID NO: 891537 - DNA, 33 bp, Homo sapien
gagtaagctgatgaggaaacaaggtctattagt

SEQ ID NO: 891538 - DNA, 33 bp, Homo sapien
gagtaagctgatgaggtaacaaggtctattagt

SEQ ID NO: 891539 - DNA, 33 bp, Homo sapien
tttgagaactggtgaacgtgagcactctaaatt

SEQ ID NO: 891540 - DNA, 33 bp, Homo sapien
tttgagaactggtgaatgtgagcactctaaatt

SEQ ID NO: 891541 - DNA, 33 bp, Homo sapien
aaggtgaagagcgatacagttgaaacaggactt

SEQ ID NO: 891542 - DNA, 33 bp, Homo sapien
aaggtgaagagcgatagagttgaaacaggactt

SEQ ID NO: 891543 - DNA, 33 bp, Homo sapien
ttaaacacggtagtcaaaaacaatgacactgcg

SEQ ID NO: 891544 - DNA, 33 bp, Homo sapien
ttaaacacggtagtcagaaacaatgacactgcg

SEQ ID NO: 891545 - DNA, 33 bp, Homo sapien
cttgagaaagagcagacggatctcgaagcccca

SEQ ID NO: 891546 - DNA, 33 bp, Homo sapien
cttgagaaagagcagatggatctcgaagcccca

SEQ ID NO: 891547 - DNA, 33 bp, Homo sapien
gactggaatagaataaataaggtccatccctgc

SEQ ID NO: 891548 - DNA, 33 bp, Homo sapien
gactggaatagaataattaaggtccatccctgc

SEQ ID NO: 891549 - DNA, 33 bp, Homo sapien
gtgagaggcaagtcaactgaagcagctgccagg

SEQ ID NO: 891550 - DNA, 33 bp, Homo sapien
gtgagaggcaagtcaattgaagcagctgccagg

SEQ ID NO: 891551 - DNA, 33 bp, Homo sapien
tcttggaagtgcaaggccatattgtgttcataa

SEQ ID NO: 891552 - DNA, 33 bp, Homo sapien
tcttggaagtgcaaggtcatattgtgttcataa

SEQ ID NO: 891553 - DNA, 33 bp, Homo sapien
cgtgaacttgtccttacggaaaggctttgcgtt

SEQ ID NO: 891554 - DNA, 33 bp, Homo sapien
cgtgaacttgtccttatggaaaggctttgcgtt

SEQ ID NO: 891555 - DNA, 33 bp, Homo sapien
ctgcctcactatcccccagactcagggcttata

SEQ ID NO: 891556 - DNA, 33 bp, Homo sapien
ctgcctcactatccccgagactcagggcttata

SEQ ID NO: 891557 - DNA, 33 bp, Homo sapien
ggcagcggtgagatacaacgatctgcctcacta

SEQ ID NO: 891558 - DNA, 33 bp, Homo sapien
ggcagcggtgagatacgacgatctgcctcacta

SEQ ID NO: 891559 - DNA, 33 bp, Homo sapien
tagtgtcaatactctacggaaggcacaatattt

SEQ ID NO: 891560 - DNA, 33 bp, Homo sapien
tagtgtcaatactctagggaaggcacaatattt

SEQ ID NO: 891561 - DNA, 33 bp, Homo sapien
accaagcctaaggggtcaagcctggatgtgagc

SEQ ID NO: 891562 - DNA, 33 bp, Homo sapien
accaagcctaaggggtgaagcctggatgtgagc

SEQ ID NO: 891563 - DNA, 33 bp, Homo sapien
ctgaaactgagtgtgcaaggttttaaaaatcct

SEQ ID NO: 891564 - DNA, 33 bp, Homo sapien
ctgaaactgagtgtgcgaggttttaaaaatcct

SEQ ID NO: 891565 - DNA, 33 bp, Homo sapien
ctctgaggcaaaagtagtaccttcactttaaaa

SEQ ID NO: 891566 - DNA, 33 bp, Homo sapien
ctctgaggcaaaagtattaccttcactttaaaa

SEQ ID NO: 891567 - DNA, 33 bp, Homo sapien
atttagtacatgctcaatgagaaaaagtgtaat

SEQ ID NO: 891568 - DNA, 33 bp, Homo sapien
atttagtacatgctcactgagaaaaagtgtaat

SEQ ID NO: 891569 - DNA, 33 bp, Homo sapien
ccaagctattgtcctcaaaggtgatgatgattt

SEQ ID NO: 891570 - DNA, 33 bp, Homo sapien
ccaagctattgtcctctaaggtgatgatgattt

SEQ ID NO: 891571 - DNA, 33 bp, Homo sapien
taccttgtaatcattgaaagttagcactaagga

SEQ ID NO: 891572 - DNA, 33 bp, Homo sapien
taccttgtaatcattggaagttagcactaagga

SEQ ID NO: 891573 - DNA, 33 bp, Homo sapien
tttatttttctttcacaggtccttagtgctaac

SEQ ID NO: 891574 - DNA, 33 bp, Homo sapien
tttatttttctttcacgggtccttagtgctaac

SEQ ID NO: 891575 - DNA, 33 bp, Homo sapien
aatcataggtcggtgaaccccgaatatctgaga

SEQ ID NO: 891576 - DNA, 33 bp, Homo sapien
aatcataggtcggtgagccccgaatatctgaga

SEQ ID NO: 891577 - DNA, 33 bp, Homo sapien
taaatattgagcagtaaaatttctggttaaaat

SEQ ID NO: 891578 - DNA, 33 bp, Homo sapien
taaatattgagcagtacaatttctggttaaaat

SEQ ID NO: 891579 - DNA, 33 bp, Homo sapien
tggctaaaattcctcaatgaaaagctgtaccac

SEQ ID NO: 891580 - DNA, 33 bp, Homo sapien
tggctaaaattcctcagtgaaaagctgtaccac

SEQ ID NO: 891581 - DNA, 33 bp, Homo sapien
tagcttgtattgttgaactccatataatattct

SEQ ID NO: 891582 - DNA, 33 bp, Homo sapien
tagcttgtattgttgagctccatataatattct

SEQ ID NO: 891583 - DNA, 33 bp, Homo sapien
caagtattccactataacaactttactaataca

SEQ ID NO: 891584 - DNA, 33 bp, Homo sapien
caagtattccactatatcaactttactaataca

SEQ ID NO: 891585 - DNA, 33 bp, Homo sapien
ttaaaagaaaaccacaatgagtggaagagagat

SEQ ID NO: 891586 - DNA, 33 bp, Homo sapien
ttaaaagaaaaccacagtgagtggaagagagat

SEQ ID NO: 891587 - DNA, 33 bp, Homo sapien
ttacatccacccaacacaattccaatcattttc

SEQ ID NO: 891588 - DNA, 33 bp, Homo sapien
ttacatccacccaacataattccaatcattttc

SEQ ID NO: 891589 - DNA, 33 bp, Homo sapien
agctaagaaagcagccaattcataaaaatgcat

SEQ ID NO: 891590 - DNA, 33 bp, Homo sapien
agctaagaaagcagccgattcataaaaatgcat

SEQ ID NO: 891591 - DNA, 33 bp, Homo sapien
cttgtttctttattcactctggatacaaatccc

SEQ ID NO: 891592 - DNA, 33 bp, Homo sapien
cttgtttctttattcattctggatacaaatccc

SEQ ID NO: 891593 - DNA, 33 bp, Homo sapien
gaagatgagcaaagccactacccttgcctgaac

SEQ ID NO: 891594 - DNA, 33 bp, Homo sapien
gaagatgagcaaagccgctacccttgcctgaac

SEQ ID NO: 891595 - DNA, 33 bp, Homo sapien
aaagaagcagaagcaccgaagatgagcaaagcc

SEQ ID NO: 891596 - DNA, 33 bp, Homo sapien
aaagaagcagaagcactgaagatgagcaaagcc

SEQ ID NO: 891597 - DNA, 33 bp, Homo sapien
atcaatagccacagggaagtgaacacaaagtcc

SEQ ID NO: 891598 - DNA, 33 bp, Homo sapien
atcaatagccacagggcagtgaacacaaagtcc

SEQ ID NO: 891599 - DNA, 33 bp, Homo sapien
agggatcctcttttgaacaagcttttattacaa

SEQ ID NO: 891600 - DNA, 33 bp, Homo sapien
agggatcctcttttgaccaagcttttattacaa

SEQ ID NO: 891601 - DNA, 33 bp, Homo sapien
caagactcagaaaatacagtaaaccagccccta

SEQ ID NO: 891602 - DNA, 33 bp, Homo sapien
caagactcagaaaatatagtaaaccagccccta

SEQ ID NO: 891603 - DNA, 33 bp, Homo sapien
gtaactatgagtttaaatggccgttcatgagct

SEQ ID NO: 891604 - DNA, 33 bp, Homo sapien
gtaactatgagtttaattggccgttcatgagct

SEQ ID NO: 891605 - DNA, 33 bp, Homo sapien
tgttcttgcttttcagaatataaaaatcgagca

SEQ ID NO: 891606 - DNA, 33 bp, Homo sapien
tgttcttgcttttcagtatataaaaatcgagca

SEQ ID NO: 891607 - DNA, 33 bp, Homo sapien
cactgtctcttttttgaaacactgacttctcta

SEQ ID NO: 891608 - DNA, 33 bp, Homo sapien
cactgtctcttttttggaacactgacttctcta

SEQ ID NO: 891609 - DNA, 33 bp, Homo sapien
atttcaaatgttttgacagtccaaaaagctaga

SEQ ID NO: 891610 - DNA, 33 bp, Homo sapien
atttcaaatgttttgatagtccaaaaagctaga

SEQ ID NO: 891611 - DNA, 33 bp, Homo sapien
agaatagaaagaactagaaagcagactgagaaa

SEQ ID NO: 891612 - DNA, 33 bp, Homo sapien
agaatagaaagaactataaagcagactgagaaa

SEQ ID NO: 891613 - DNA, 33 bp, Homo sapien
agtggtgtgtatgaaaagagaatgcaggtctac

SEQ ID NO: 891614 - DNA, 33 bp, Homo sapien
agtggtgtgtatgaaacgagaatgcaggtctac

SEQ ID NO: 891615 - DNA, 33 bp, Homo sapien
aaagggtatgagctaagtgtggtaaactgggga

SEQ ID NO: 891616 - DNA, 33 bp, Homo sapien
aaagggtatgagctaattgtggtaaactgggga

SEQ ID NO: 891617 - DNA, 33 bp, Homo sapien
gaatgtaagttttgcaagaataggaaccatggg

SEQ ID NO: 891618 - DNA, 33 bp, Homo sapien
gaatgtaagttttgcaggaataggaaccatggg

SEQ ID NO: 891619 - DNA, 33 bp, Homo sapien
cattctaataggcgcaatatctcttggtagtta

SEQ ID NO: 891620 - DNA, 33 bp, Homo sapien
cattctaataggcgcagtatctcttggtagtta

SEQ ID NO: 891621 - DNA, 33 bp, Homo sapien
aacgcaaatagatgacaccaagtgctgataagg

SEQ ID NO: 891622 - DNA, 33 bp, Homo sapien
aacgcaaatagatgaccccaagtgctgataagg

SEQ ID NO: 891623 - DNA, 33 bp, Homo sapien
ttagtgctccaatataactaacttttgagggaa

SEQ ID NO: 891624 - DNA, 33 bp, Homo sapien
ttagtgctccaatatacctaacttttgagggaa

SEQ ID NO: 891625 - DNA, 33 bp, Homo sapien
gagtggccagagtgaaacatttaaaacttaaat

SEQ ID NO: 891626 - DNA, 33 bp, Homo sapien
gagtggccagagtgaaccatttaaaacttaaat

SEQ ID NO: 891627 - DNA, 33 bp, Homo sapien
atatgagatctgagaacttattttttcaatgta

SEQ ID NO: 891628 - DNA, 33 bp, Homo sapien
atatgagatctgagaagttattttttcaatgta

SEQ ID NO: 891629 - DNA, 33 bp, Homo sapien
aggcaacttgtgacatcaatttaaaaatcttgg

SEQ ID NO: 891630 - DNA, 33 bp, Homo sapien
aggcaacttgtgacattaatttaaaaatcttgg

SEQ ID NO: 891631 - DNA, 33 bp, Homo sapien
gataaatgacaaagacaatgtgaagtcaaggaa

SEQ ID NO: 891632 - DNA, 33 bp, Homo sapien
gataaatgacaaagacgatgtgaagtcaaggaa

SEQ ID NO: 891633 - DNA, 33 bp, Homo sapien
taaaccgttttctaaacaccaatgtttcaatac

SEQ ID NO: 891634 - DNA, 33 bp, Homo sapien
taaaccgttttctaaataccaatgtttcaatac

SEQ ID NO: 891635 - DNA, 33 bp, Homo sapien
tttatgatgtgtcaaacactacccaataacatt

SEQ ID NO: 891636 - DNA, 33 bp, Homo sapien
tttatgatgtgtcaaatactacccaataacatt

SEQ ID NO: 891637 - DNA, 33 bp, Homo sapien
tactagttggccactacaaaaagatatgcatca

SEQ ID NO: 891638 - DNA, 33 bp, Homo sapien
tactagttggccactataaaaagatatgcatca

SEQ ID NO: 891639 - DNA, 33 bp, Homo sapien
atgccatgatcatgaaagcactagagcaatctg

SEQ ID NO: 891640 - DNA, 33 bp, Homo sapien
atgccatgatcatgaatgcactagagcaatctg

SEQ ID NO: 891641 - DNA, 33 bp, Homo sapien
tgaaacagtagcatctcaaaatcagtgaaatat

SEQ ID NO: 891642 - DNA, 33 bp, Homo sapien
tgaaacagtagcatctgaaaatcagtgaaatat

SEQ ID NO: 891643 - DNA, 33 bp, Homo sapien
ttgaataatagtcaaaataataatgcttaggct

SEQ ID NO: 891644 - DNA, 33 bp, Homo sapien
ttgaataatagtcaaagtaataatgcttaggct

SEQ ID NO: 891645 - DNA, 33 bp, Homo sapien
aagataggtttgtggaaatagagttctaggttt

SEQ ID NO: 891646 - DNA, 33 bp, Homo sapien
aagataggtttgtggacatagagttctaggttt

SEQ ID NO: 891647 - DNA, 33 bp, Homo sapien
gagccagtaataagaaatctcccaacaacaata

SEQ ID NO: 891648 - DNA, 33 bp, Homo sapien
gagccagtaataagaagtctcccaacaacaata

SEQ ID NO: 891649 - DNA, 33 bp, Homo sapien
gcttatcatagccttacagagccagtaataaga

SEQ ID NO: 891650 - DNA, 33 bp, Homo sapien
gcttatcatagccttatagagccagtaataaga

SEQ ID NO: 891651 - DNA, 33 bp, Homo sapien
gtaaaactacacttcaatagagtcttacagttc

SEQ ID NO: 891652 - DNA, 33 bp, Homo sapien
gtaaaactacacttcactagagtcttacagttc

SEQ ID NO: 891653 - DNA, 33 bp, Homo sapien
ttaaagagaaataaagaccagagagaagtttgt

SEQ ID NO: 891654 - DNA, 33 bp, Homo sapien
ttaaagagaaataaaggccagagagaagtttgt

SEQ ID NO: 891655 - DNA, 33 bp, Homo sapien
tgttttctaacagaataaggttaatggattttc

SEQ ID NO: 891656 - DNA, 33 bp, Homo sapien
tgttttctaacagaatgaggttaatggattttc

SEQ ID NO: 891657 - DNA, 33 bp, Homo sapien
cagtcttctaagtatagctctgcctcataatga

SEQ ID NO: 891658 - DNA, 33 bp, Homo sapien
cagtcttctaagtatatctctgcctcataatga

SEQ ID NO: 891659 - DNA, 33 bp, Homo sapien
aatttagacctattcacctttcccacgctgcta

SEQ ID NO: 891660 - DNA, 33 bp, Homo sapien
aatttagacctattcatctttcccacgctgcta

SEQ ID NO: 891661 - DNA, 33 bp, Homo sapien
tatgaatttcgcccaacgtgaattaaattctaa

SEQ ID NO: 891662 - DNA, 33 bp, Homo sapien
tatgaatttcgcccaatgtgaattaaattctaa

SEQ ID NO: 891663 - DNA, 33 bp, Homo sapien
atgctcttccagattgaagtttttgtacatcaa

SEQ ID NO: 891664 - DNA, 33 bp, Homo sapien
atgctcttccagattgcagtttttgtacatcaa

SEQ ID NO: 891665 - DNA, 33 bp, Homo sapien
atgtgtatatactcaacaatgaagcatttcatg

SEQ ID NO: 891666 - DNA, 33 bp, Homo sapien
atgtgtatatactcaagaatgaagcatttcatg

SEQ ID NO: 891667 - DNA, 33 bp, Homo sapien
ggctggaggctatcaaataaaaactttattatt

SEQ ID NO: 891668 - DNA, 33 bp, Homo sapien
ggctggaggctatcaagtaaaaactttattatt

SEQ ID NO: 891669 - DNA, 33 bp, Homo sapien
gtctatattttgttacactccagaaaactcttc

SEQ ID NO: 891670 - DNA, 33 bp, Homo sapien
gtctatattttgttacgctccagaaaactcttc

SEQ ID NO: 891671 - DNA, 33 bp, Homo sapien
atgtaggtttgattcacattaactgtccgcaaa

SEQ ID NO: 891672 - DNA, 33 bp, Homo sapien
atgtaggtttgattcatattaactgtccgcaaa

SEQ ID NO: 891673 - DNA, 33 bp, Homo sapien
aaaggaacagctagtaaatatttcaggcttagc

SEQ ID NO: 891674 - DNA, 33 bp, Homo sapien
aaaggaacagctagtatatatttcaggcttagc

SEQ ID NO: 891675 - DNA, 33 bp, Homo sapien
tctggcttcccattgaacctcagggcacactag

SEQ ID NO: 891676 - DNA, 33 bp, Homo sapien
tctggcttcccattgatcctcagggcacactag

SEQ ID NO: 891677 - DNA, 33 bp, Homo sapien
aacaccaggctgcagccatagtactcacatggg

SEQ ID NO: 891678 - DNA, 33 bp, Homo sapien
aacaccaggctgcagctatagtactcacatggg

SEQ ID NO: 891679 - DNA, 33 bp, Homo sapien
gtggtatgaaggcaaacgattaagacgggagaa

SEQ ID NO: 891680 - DNA, 33 bp, Homo sapien
gtggtatgaaggcaaatgattaagacgggagaa

SEQ ID NO: 891681 - DNA, 33 bp, Homo sapien
aagctatttttctaccactaactggcatgagaa

SEQ ID NO: 891682 - DNA, 33 bp, Homo sapien
aagctatttttctaccgctaactggcatgagaa

SEQ ID NO: 891683 - DNA, 33 bp, Homo sapien
atagcggtttattaagacatagaatgatggtga

SEQ ID NO: 891684 - DNA, 33 bp, Homo sapien
atagcggtttattaaggcatagaatgatggtga

SEQ ID NO: 891685 - DNA, 33 bp, Homo sapien
ttcacaagggcaaaatcaaggttcactccaagc

SEQ ID NO: 891686 - DNA, 33 bp, Homo sapien
ttcacaagggcaaaatgaaggttcactccaagc

SEQ ID NO: 891687 - DNA, 33 bp, Homo sapien
acatagaggtatgaaacaatgaatttgtgttat

SEQ ID NO: 891688 - DNA, 33 bp, Homo sapien
acatagaggtatgaaataatgaatttgtgttat

SEQ ID NO: 891689 - DNA, 33 bp, Homo sapien
cagataactaagcagaagggataataatagata

SEQ ID NO: 891690 - DNA, 33 bp, Homo sapien
cagataactaagcagaggggataataatagata

SEQ ID NO: 891691 - DNA, 33 bp, Homo sapien
cattagtaagcagcaaaaaaaatgacaggcaat

SEQ ID NO: 891692 - DNA, 33 bp, Homo sapien
cattagtaagcagcaagaaaaatgacaggcaat

SEQ ID NO: 891693 - DNA, 33 bp, Homo sapien
ggcgaaagtttgtaagaacatcgtcaccttcaa

SEQ ID NO: 891694 - DNA, 33 bp, Homo sapien
ggcgaaagtttgtaagtacatcgtcaccttcaa

SEQ ID NO: 891695 - DNA, 33 bp, Homo sapien
tatctacaaatgctaactgtagagatgagtatc

SEQ ID NO: 891696 - DNA, 33 bp, Homo sapien
tatctacaaatgctaagtgtagagatgagtatc

SEQ ID NO: 891697 - DNA, 33 bp, Homo sapien
ctatgctgtaccagaaccaggcacagagtaggc

SEQ ID NO: 891698 - DNA, 33 bp, Homo sapien
ctatgctgtaccagaagcaggcacagagtaggc

SEQ ID NO: 891699 - DNA, 33 bp, Homo sapien
gattagaaaacagcaacctgtcaaaacttcaat

SEQ ID NO: 891700 - DNA, 33 bp, Homo sapien
gattagaaaacagcaatctgtcaaaacttcaat

SEQ ID NO: 891701 - DNA, 33 bp, Homo sapien
caacagttcttagcaaacttcatactttcatgg

SEQ ID NO: 891702 - DNA, 33 bp, Homo sapien
caacagttcttagcaagcttcatactttcatgg

SEQ ID NO: 891703 - DNA, 33 bp, Homo sapien
gtgtatcatacattcaacatacagaatatgtgt

SEQ ID NO: 891704 - DNA, 33 bp, Homo sapien
gtgtatcatacattcagcatacagaatatgtgt

SEQ ID NO: 891705 - DNA, 33 bp, Homo sapien
ttcatataaaataacaataacaacagtgcctaa

SEQ ID NO: 891706 - DNA, 33 bp, Homo sapien
ttcatataaaataacagtaacaacagtgcctaa

SEQ ID NO: 891707 - DNA, 33 bp, Homo sapien
aaagtattgctttggacggtttaaaatctcttg

SEQ ID NO: 891708 - DNA, 33 bp, Homo sapien
aaagtattgctttggagggtttaaaatctcttg

SEQ ID NO: 891709 - DNA, 33 bp, Homo sapien
gactgaaaacctctagaaaagaaagatcctaca

SEQ ID NO: 891710 - DNA, 33 bp, Homo sapien
gactgaaaacctctagcaaagaaagatcctaca

SEQ ID NO: 891711 - DNA, 33 bp, Homo sapien
actttgggagtcaagaaagcaatttgatggcca

SEQ ID NO: 891712 - DNA, 33 bp, Homo sapien
actttgggagtcaagagagcaatttgatggcca

SEQ ID NO: 891713 - DNA, 33 bp, Homo sapien
aatctatttagcaggacacattgcatacacaat

SEQ ID NO: 891714 - DNA, 33 bp, Homo sapien
aatctatttagcaggatacattgcatacacaat

SEQ ID NO: 891715 - DNA, 33 bp, Homo sapien
caacatacttaccttcacttagagaattccctg

SEQ ID NO: 891716 - DNA, 33 bp, Homo sapien
caacatacttaccttcccttagagaattccctg

SEQ ID NO: 891717 - DNA, 33 bp, Homo sapien
tgtcatgaaaaaagtacagcagcccagatgtaa

SEQ ID NO: 891718 - DNA, 33 bp, Homo sapien
tgtcatgaaaaaagtatagcagcccagatgtaa

SEQ ID NO: 891719 - DNA, 33 bp, Homo sapien
ctgcatatatgtctacccatacccttaaaataa

SEQ ID NO: 891720 - DNA, 33 bp, Homo sapien
ctgcatatatgtctactcatacccttaaaataa

SEQ ID NO: 891721 - DNA, 33 bp, Homo sapien
ctagtatgcagaatttaaaaaagatgtctccat

SEQ ID NO: 891722 - DNA, 33 bp, Homo sapien
ctagtatgcagaattttaaaaagatgtctccat

SEQ ID NO: 891723 - DNA, 33 bp, Homo sapien
aggaggaagagcaagaacttttgaactttacca

SEQ ID NO: 891724 - DNA, 33 bp, Homo sapien
aggaggaagagcaagagcttttgaactttacca

SEQ ID NO: 891725 - DNA, 33 bp, Homo sapien
cccacactttatctaaccccttccaaactagag

SEQ ID NO: 891726 - DNA, 33 bp, Homo sapien
cccacactttatctaatcccttccaaactagag

SEQ ID NO: 891727 - DNA, 33 bp, Homo sapien
gtgggcttcccaagctcaaggactaacagcagt

SEQ ID NO: 891728 - DNA, 33 bp, Homo sapien
gtgggcttcccaagcttaaggactaacagcagt

SEQ ID NO: 891729 - DNA, 33 bp, Homo sapien
tgctcatggtttcacccataggcagataagaaa

SEQ ID NO: 891730 - DNA, 33 bp, Homo sapien
tgctcatggtttcacctataggcagataagaaa

SEQ ID NO: 891731 - DNA, 33 bp, Homo sapien
ctagatctctggattcaaacttggacttcctta

SEQ ID NO: 891732 - DNA, 33 bp, Homo sapien
ctagatctctggattcgaacttggacttcctta

SEQ ID NO: 891733 - DNA, 33 bp, Homo sapien
actctcagcattttcacggtcccctctccttgt

SEQ ID NO: 891734 - DNA, 33 bp, Homo sapien
actctcagcattttcatggtcccctctccttgt

SEQ ID NO: 891735 - DNA, 33 bp, Homo sapien
ttaagctcattgttaaagtcacttgaatctttc

SEQ ID NO: 891736 - DNA, 33 bp, Homo sapien
ttaagctcattgttaatgtcacttgaatctttc

SEQ ID NO: 891737 - DNA, 33 bp, Homo sapien
aatctttccaaagcaactattggccttcttgcc

SEQ ID NO: 891738 - DNA, 33 bp, Homo sapien
aatctttccaaagcaattattggccttcttgcc

SEQ ID NO: 891739 - DNA, 33 bp, Homo sapien
tttctaaaacatttgaccacttcttctgttttg

SEQ ID NO: 891740 - DNA, 33 bp, Homo sapien
tttctaaaacatttgatcacttcttctgttttg

SEQ ID NO: 891741 - DNA, 33 bp, Homo sapien
atgatgtcacatttgacgctgcacaccatgtga

SEQ ID NO: 891742 - DNA, 33 bp, Homo sapien
atgatgtcacatttgatgctgcacaccatgtga

SEQ ID NO: 891743 - DNA, 33 bp, Homo sapien
ctttacaaagaacaaacgaggcattatctaact

SEQ ID NO: 891744 - DNA, 33 bp, Homo sapien
ctttacaaagaacaaatgaggcattatctaact

SEQ ID NO: 891745 - DNA, 33 bp, Homo sapien
tttgacatttgtaacccgaagcaatcaaaagaa

SEQ ID NO: 891746 - DNA, 33 bp, Homo sapien
tttgacatttgtaacctgaagcaatcaaaagaa

SEQ ID NO: 891747 - DNA, 33 bp, Homo sapien
gtttgttgtttagatgaaaaaagaagagcaaca

SEQ ID NO: 891748 - DNA, 33 bp, Homo sapien
gtttgttgtttagatggaaaaagaagagcaaca

SEQ ID NO: 891749 - DNA, 33 bp, Homo sapien
gatgcaaatctgaagaataccttacacctacca

SEQ ID NO: 891750 - DNA, 33 bp, Homo sapien
gatgcaaatctgaagagtaccttacacctacca

SEQ ID NO: 891751 - DNA, 33 bp, Homo sapien
cagagattcaatgtcacgataaaaaagtattac

SEQ ID NO: 891752 - DNA, 33 bp, Homo sapien
cagagattcaatgtcatgataaaaaagtattac

SEQ ID NO: 891753 - DNA, 33 bp, Homo sapien
ccattacctctacttacgacaagcaagaacaac

SEQ ID NO: 891754 - DNA, 33 bp, Homo sapien
ccattacctctacttatgacaagcaagaacaac

SEQ ID NO: 891755 - DNA, 33 bp, Homo sapien
aactgtagaatcttaaagacaactcaatttatt

SEQ ID NO: 891756 - DNA, 33 bp, Homo sapien
aactgtagaatcttaaggacaactcaatttatt

SEQ ID NO: 891757 - DNA, 33 bp, Homo sapien
ctatgtactttcgagcaaagaattaataagcat

SEQ ID NO: 891758 - DNA, 33 bp, Homo sapien
ctatgtactttcgagctaagaattaataagcat

SEQ ID NO: 891759 - DNA, 33 bp, Homo sapien
gcattgtccaatttcacacctctagatagatgc

SEQ ID NO: 891760 - DNA, 33 bp, Homo sapien
gcattgtccaatttcatacctctagatagatgc

SEQ ID NO: 891761 - DNA, 33 bp, Homo sapien
tacaattgtttacatactagaagacagacagta

SEQ ID NO: 891762 - DNA, 33 bp, Homo sapien
tacaattgtttacatagtagaagacagacagta

SEQ ID NO: 891763 - DNA, 33 bp, Homo sapien
ggattttatatggaaaacgcaatccagacaaca

SEQ ID NO: 891764 - DNA, 33 bp, Homo sapien
ggattttatatggaaagcgcaatccagacaaca

SEQ ID NO: 891765 - DNA, 33 bp, Homo sapien
ttccttcaatatagtacggctctgaaatgctgt

SEQ ID NO: 891766 - DNA, 33 bp, Homo sapien
ttccttcaatatagtatggctctgaaatgctgt

SEQ ID NO: 891767 - DNA, 33 bp, Homo sapien
ttaacttgtgttaagacggaaacttcttccttc

SEQ ID NO: 891768 - DNA, 33 bp, Homo sapien
ttaacttgtgttaagatggaaacttcttccttc

SEQ ID NO: 891769 - DNA, 33 bp, Homo sapien
tcatattctatgcctacgtataattgacacatg

SEQ ID NO: 891770 - DNA, 33 bp, Homo sapien
tcatattctatgcctatgtataattgacacatg

SEQ ID NO: 891771 - DNA, 33 bp, Homo sapien
gttttcaggatccgccaatacaattcttttcaa

SEQ ID NO: 891772 - DNA, 33 bp, Homo sapien
gttttcaggatccgcccatacaattcttttcaa

SEQ ID NO: 891773 - DNA, 33 bp, Homo sapien
taagcttacttctagacggaaaagacaggcaga

SEQ ID NO: 891774 - DNA, 33 bp, Homo sapien
taagcttacttctagatggaaaagacaggcaga

SEQ ID NO: 891775 - DNA, 33 bp, Homo sapien
ttgaagaaataacaaaatgacttcattgcttat

SEQ ID NO: 891776 - DNA, 33 bp, Homo sapien
ttgaagaaataacaaagtgacttcattgcttat

SEQ ID NO: 891777 - DNA, 33 bp, Homo sapien
ggttgtctgttcatgccgatgatagtttctttt

SEQ ID NO: 891778 - DNA, 33 bp, Homo sapien
ggttgtctgttcatgctgatgatagtttctttt

SEQ ID NO: 891779 - DNA, 33 bp, Homo sapien
tgctcaaggctgttaaaatttaaatatagcatc

SEQ ID NO: 891780 - DNA, 33 bp, Homo sapien
tgctcaaggctgttaacatttaaatatagcatc

SEQ ID NO: 891781 - DNA, 33 bp, Homo sapien
ctgttaccatagtttcacaaaatgtctcatctg

SEQ ID NO: 891782 - DNA, 33 bp, Homo sapien
ctgttaccatagtttcgcaaaatgtctcatctg

SEQ ID NO: 891783 - DNA, 33 bp, Homo sapien
gttcatttctgcttaaaggggacaagtattata

SEQ ID NO: 891784 - DNA, 33 bp, Homo sapien
gttcatttctgcttaagggggacaagtattata

SEQ ID NO: 891785 - DNA, 33 bp, Homo sapien
gggaatggctacacccaagacagctattctttc

SEQ ID NO: 891786 - DNA, 33 bp, Homo sapien
gggaatggctacacccgagacagctattctttc

SEQ ID NO: 891787 - DNA, 33 bp, Homo sapien
tcagaaagttcccataagtactaagaagaatag

SEQ ID NO: 891788 - DNA, 33 bp, Homo sapien
tcagaaagttcccatacgtactaagaagaatag

SEQ ID NO: 891789 - DNA, 33 bp, Homo sapien
cttttgaacgctgccaataaaagacatacctga

SEQ ID NO: 891790 - DNA, 33 bp, Homo sapien
cttttgaacgctgccagtaaaagacatacctga

SEQ ID NO: 891791 - DNA, 33 bp, Homo sapien
aatctgcctgtgttacaagaccctgccaagtga

SEQ ID NO: 891792 - DNA, 33 bp, Homo sapien
aatctgcctgtgttacgagaccctgccaagtga

SEQ ID NO: 891793 - DNA, 33 bp, Homo sapien
aaactccaaagtgccacgtatacctggagtgga

SEQ ID NO: 891794 - DNA, 33 bp, Homo sapien
aaactccaaagtgccatgtatacctggagtgga

SEQ ID NO: 891795 - DNA, 33 bp, Homo sapien
aaaatgagctcaataacgatgtgttaaattcta

SEQ ID NO: 891796 - DNA, 33 bp, Homo sapien
aaaatgagctcaataaggatgtgttaaattcta

SEQ ID NO: 891797 - DNA, 33 bp, Homo sapien
ggcatgacagtggaaactggcgggaaagttgga

SEQ ID NO: 891798 - DNA, 33 bp, Homo sapien
ggcatgacagtggaaattggcgggaaagttgga

SEQ ID NO: 891799 - DNA, 33 bp, Homo sapien
tatagattagttgaaccggaaattcctgaatgt

SEQ ID NO: 891800 - DNA, 33 bp, Homo sapien
tatagattagttgaactggaaattcctgaatgt

SEQ ID NO: 891801 - DNA, 33 bp, Homo sapien
agcttcctctttgtaacaatttgggccaggccc

SEQ ID NO: 891802 - DNA, 33 bp, Homo sapien
agcttcctctttgtaagaatttgggccaggccc

SEQ ID NO: 891803 - DNA, 33 bp, Homo sapien
taagcagaacctgaaagaataggtgcaggcttg

SEQ ID NO: 891804 - DNA, 33 bp, Homo sapien
taagcagaacctgaaataataggtgcaggcttg

SEQ ID NO: 891805 - DNA, 33 bp, Homo sapien
aattacttttatctgccacaggtagtaactgca

SEQ ID NO: 891806 - DNA, 33 bp, Homo sapien
aattacttttatctgctacaggtagtaactgca

SEQ ID NO: 891807 - DNA, 33 bp, Homo sapien
ctattcagcatttctaaggacattgttcagccc

SEQ ID NO: 891808 - DNA, 33 bp, Homo sapien
ctattcagcatttctatggacattgttcagccc

SEQ ID NO: 891809 - DNA, 33 bp, Homo sapien
ttaaaagcagcaaaaaatgttgaaagaaaagtg

SEQ ID NO: 891810 - DNA, 33 bp, Homo sapien
ttaaaagcagcaaaaagtgttgaaagaaaagtg

SEQ ID NO: 891811 - DNA, 33 bp, Homo sapien
tttctttggactcatcaacagtgaaatacagta

SEQ ID NO: 891812 - DNA, 33 bp, Homo sapien
tttctttggactcatcgacagtgaaatacagta

SEQ ID NO: 891813 - DNA, 33 bp, Homo sapien
tatattttcctcttcagaaaccatacataatac

SEQ ID NO: 891814 - DNA, 33 bp, Homo sapien
tatattttcctcttcataaaccatacataatac

SEQ ID NO: 891815 - DNA, 33 bp, Homo sapien
ctgtcttcatttgctagagagtcccctgtttgc

SEQ ID NO: 891816 - DNA, 33 bp, Homo sapien
ctgtcttcatttgctatagagtcccctgtttgc

SEQ ID NO: 891817 - DNA, 33 bp, Homo sapien
aaatctggtttgaaaacgttgaaggtgtcttgg

SEQ ID NO: 891818 - DNA, 33 bp, Homo sapien
aaatctggtttgaaaatgttgaaggtgtcttgg

SEQ ID NO: 891819 - DNA, 33 bp, Homo sapien
ttctttcttcaactcaataagtatggttttctt

SEQ ID NO: 891820 - DNA, 33 bp, Homo sapien
ttctttcttcaactcattaagtatggttttctt

SEQ ID NO: 891821 - DNA, 33 bp, Homo sapien
acattgctattgccctcaagaattttacttaaa

SEQ ID NO: 891822 - DNA, 33 bp, Homo sapien
acattgctattgccctgaagaattttacttaaa

SEQ ID NO: 891823 - DNA, 33 bp, Homo sapien
ctattggtattttacactgcattataagatttg

SEQ ID NO: 891824 - DNA, 33 bp, Homo sapien
ctattggtattttacagtgcattataagatttg

SEQ ID NO: 891825 - DNA, 33 bp, Homo sapien
atgtcactctttgaaaactttggttaatgatca

SEQ ID NO: 891826 - DNA, 33 bp, Homo sapien
atgtcactctttgaaacctttggttaatgatca

SEQ ID NO: 891827 - DNA, 33 bp, Homo sapien
ggatgtttaactgaaccaaagaggaccctgcat

SEQ ID NO: 891828 - DNA, 33 bp, Homo sapien
ggatgtttaactgaactaaagaggaccctgcat

SEQ ID NO: 891829 - DNA, 33 bp, Homo sapien
gagttttagatagtgccagtgcaccagtgagtg

SEQ ID NO: 891830 - DNA, 33 bp, Homo sapien
gagttttagatagtgcgagtgcaccagtgagtg

SEQ ID NO: 891831 - DNA, 33 bp, Homo sapien
aaatggcctggaattacatggtattactgcata

SEQ ID NO: 891832 - DNA, 33 bp, Homo sapien
aaatggcctggaattagatggtattactgcata

SEQ ID NO: 891833 - DNA, 33 bp, Homo sapien
ccttctcagagtgtaaagactagcatttatgct

SEQ ID NO: 891834 - DNA, 33 bp, Homo sapien
ccttctcagagtgtaaggactagcatttatgct

SEQ ID NO: 891835 - DNA, 33 bp, Homo sapien
ttgctcccagtagagaatcattgcatatagata

SEQ ID NO: 891836 - DNA, 33 bp, Homo sapien
ttgctcccagtagagagtcattgcatatagata

SEQ ID NO: 891837 - DNA, 33 bp, Homo sapien
ctcaccaatggtcacaaatagtcacagaatgtt

SEQ ID NO: 891838 - DNA, 33 bp, Homo sapien
ctcaccaatggtcacagatagtcacagaatgtt

SEQ ID NO: 891839 - DNA, 33 bp, Homo sapien
tcaaaatatttgttcaaagtgtttcacaaggaa

SEQ ID NO: 891840 - DNA, 33 bp, Homo sapien
tcaaaatatttgttcagagtgtttcacaaggaa

SEQ ID NO: 891841 - DNA, 33 bp, Homo sapien
caaatattagaacttacatgtgagtacagaaaa

SEQ ID NO: 891842 - DNA, 33 bp, Homo sapien
caaatattagaacttatatgtgagtacagaaaa

SEQ ID NO: 891843 - DNA, 33 bp, Homo sapien
gagtgtatctctttgacgttgtgctggatataa

SEQ ID NO: 891844 - DNA, 33 bp, Homo sapien
gagtgtatctctttgatgttgtgctggatataa

SEQ ID NO: 891845 - DNA, 33 bp, Homo sapien
gtattagaagtgtagaaaaaatgtgaggaagta

SEQ ID NO: 891846 - DNA, 33 bp, Homo sapien
gtattagaagtgtagagaaaatgtgaggaagta

SEQ ID NO: 891847 - DNA, 33 bp, Homo sapien
gtatttagttctatgacgcctgccagatttatt

SEQ ID NO: 891848 - DNA, 33 bp, Homo sapien
gtatttagttctatgatgcctgccagatttatt

SEQ ID NO: 891849 - DNA, 33 bp, Homo sapien
aagtgcatataaaacactgaaatctgaataagg

SEQ ID NO: 891850 - DNA, 33 bp, Homo sapien
aagtgcatataaaacagtgaaatctgaataagg

SEQ ID NO: 891851 - DNA, 33 bp, Homo sapien
agtgagtattctctgaacatctttatctcttgt

SEQ ID NO: 891852 - DNA, 33 bp, Homo sapien
agtgagtattctctgagcatctttatctcttgt

SEQ ID NO: 891853 - DNA, 33 bp, Homo sapien
ggcagaagacttcacgacggttccaaaggccac

SEQ ID NO: 891854 - DNA, 33 bp, Homo sapien
ggcagaagacttcacggcggttccaaaggccac

SEQ ID NO: 891855 - DNA, 33 bp, Homo sapien
ctcctaatcatggggtcaaaaggatcaacttac

SEQ ID NO: 891856 - DNA, 33 bp, Homo sapien
ctcctaatcatggggtgaaaaggatcaacttac

SEQ ID NO: 891857 - DNA, 33 bp, Homo sapien
caataagatgtagaggcaaacttgtgacagcat

SEQ ID NO: 891858 - DNA, 33 bp, Homo sapien
caataagatgtagaggtaaacttgtgacagcat

SEQ ID NO: 891859 - DNA, 33 bp, Homo sapien
atatatgcttgatctcacaacttcaccattccc

SEQ ID NO: 891860 - DNA, 33 bp, Homo sapien
atatatgcttgatctctcaacttcaccattccc

SEQ ID NO: 891861 - DNA, 33 bp, Homo sapien
tataacaaatgacagcaaactgtgtaacttaat

SEQ ID NO: 891862 - DNA, 33 bp, Homo sapien
tataacaaatgacagccaactgtgtaacttaat

SEQ ID NO: 891863 - DNA, 33 bp, Homo sapien
ttattcctttcccccaatcattgctaaaagtta

SEQ ID NO: 891864 - DNA, 33 bp, Homo sapien
ttattcctttcccccagtcattgctaaaagtta

SEQ ID NO: 891865 - DNA, 33 bp, Homo sapien
tcctgttatgttttcactagtaaagactgataa

SEQ ID NO: 891866 - DNA, 33 bp, Homo sapien
tcctgttatgttttcagtagtaaagactgataa

SEQ ID NO: 891867 - DNA, 33 bp, Homo sapien
atgtcaacttggtattcaaactgtaagcatcaa

SEQ ID NO: 891868 - DNA, 33 bp, Homo sapien
atgtcaacttggtatttaaactgtaagcatcaa

SEQ ID NO: 891869 - DNA, 33 bp, Homo sapien
taacaatagaaaagcgaatagcactctggcacc

SEQ ID NO: 891870 - DNA, 33 bp, Homo sapien
taacaatagaaaagcggatagcactctggcacc

SEQ ID NO: 891871 - DNA, 33 bp, Homo sapien
ctactgatttccagaggaattaagcgatattgg

SEQ ID NO: 891872 - DNA, 33 bp, Homo sapien
ctactgatttccagagtaattaagcgatattgg

SEQ ID NO: 891873 - DNA, 33 bp, Homo sapien
ccataggatgaccaccccaggcagaacacccat

SEQ ID NO: 891874 - DNA, 33 bp, Homo sapien
ccataggatgaccaccgcaggcagaacacccat

SEQ ID NO: 891875 - DNA, 33 bp, Homo sapien
aaagcatggatcataacagtttctatttcatag

SEQ ID NO: 891876 - DNA, 33 bp, Homo sapien
aaagcatggatcataatagtttctatttcatag

SEQ ID NO: 891877 - DNA, 33 bp, Homo sapien
ataagataccactcacacttactagattgattg

SEQ ID NO: 891878 - DNA, 33 bp, Homo sapien
ataagataccactcacgcttactagattgattg

SEQ ID NO: 891879 - DNA, 33 bp, Homo sapien
taaatgggatcatgcaatatgtggtatcttttg

SEQ ID NO: 891880 - DNA, 33 bp, Homo sapien
taaatgggatcatgcattatgtggtatcttttg

SEQ ID NO: 891881 - DNA, 33 bp, Homo sapien
ttgttagagagggaaaatagattaattattgcc

SEQ ID NO: 891882 - DNA, 33 bp, Homo sapien
ttgttagagagggaaagtagattaattattgcc

SEQ ID NO: 891883 - DNA, 33 bp, Homo sapien
gaggaaagaattcataaatcagtgtctggtgga

SEQ ID NO: 891884 - DNA, 33 bp, Homo sapien
gaggaaagaattcatacatcagtgtctggtgga

SEQ ID NO: 891885 - DNA, 33 bp, Homo sapien
ctgaggtaaagaactgcagttgaggcttgaggc

SEQ ID NO: 891886 - DNA, 33 bp, Homo sapien
ctgaggtaaagaactgtagttgaggcttgaggc

SEQ ID NO: 891887 - DNA, 33 bp, Homo sapien
tgacagctacgtggaaaccactttactctaata

SEQ ID NO: 891888 - DNA, 33 bp, Homo sapien
tgacagctacgtggaagccactttactctaata

SEQ ID NO: 891889 - DNA, 33 bp, Homo sapien
attcagaatttcagaaaggaagaaaagccccat

SEQ ID NO: 891890 - DNA, 33 bp, Homo sapien
attcagaatttcagaacggaagaaaagccccat

SEQ ID NO: 891891 - DNA, 33 bp, Homo sapien
tgctgaagatctgaaacaataagatgaataaac

SEQ ID NO: 891892 - DNA, 33 bp, Homo sapien
tgctgaagatctgaaataataagatgaataaac

SEQ ID NO: 891893 - DNA, 33 bp, Homo sapien
gagaaagagggatgacaataggctaaaatgtca

SEQ ID NO: 891894 - DNA, 33 bp, Homo sapien
gagaaagagggatgacgataggctaaaatgtca

SEQ ID NO: 891895 - DNA, 33 bp, Homo sapien
tagagaaattttgcagaacaattgaggtgatag

SEQ ID NO: 891896 - DNA, 33 bp, Homo sapien
tagagaaattttgcaggacaattgaggtgatag

SEQ ID NO: 891897 - DNA, 33 bp, Homo sapien
ttggcaagtttcactgacaattcttctctctgt

SEQ ID NO: 891898 - DNA, 33 bp, Homo sapien
ttggcaagtttcactgtcaattcttctctctgt

SEQ ID NO: 891899 - DNA, 33 bp, Homo sapien
aatgcagatatccatccgagacccttcagaaac

SEQ ID NO: 891900 - DNA, 33 bp, Homo sapien
aatgcagatatccatcggagacccttcagaaac

SEQ ID NO: 891901 - DNA, 33 bp, Homo sapien
tgatgaaggactaggaccaattcatggaaattc

SEQ ID NO: 891902 - DNA, 33 bp, Homo sapien
tgatgaaggactaggatcaattcatggaaattc

SEQ ID NO: 891903 - DNA, 33 bp, Homo sapien
ttgtgctagaaagacaaaaagtagtgttcagat

SEQ ID NO: 891904 - DNA, 33 bp, Homo sapien
ttgtgctagaaagacagaaagtagtgttcagat

SEQ ID NO: 891905 - DNA, 33 bp, Homo sapien
agtaatttgcccacaactcacattcaccctatt

SEQ ID NO: 891906 - DNA, 33 bp, Homo sapien
agtaatttgcccacaagtcacattcaccctatt

SEQ ID NO: 891907 - DNA, 33 bp, Homo sapien
aactgtggtgtattacaaaaccagtagacatac

SEQ ID NO: 891908 - DNA, 33 bp, Homo sapien
aactgtggtgtattacgaaaccagtagacatac

SEQ ID NO: 891909 - DNA, 33 bp, Homo sapien
tttctttctttggcaccacactgaatttttcat

SEQ ID NO: 891910 - DNA, 33 bp, Homo sapien
tttctttctttggcactacactgaatttttcat

SEQ ID NO: 891911 - DNA, 33 bp, Homo sapien
gaaacactgaaaagtcaatttatgataacctta

SEQ ID NO: 891912 - DNA, 33 bp, Homo sapien
gaaacactgaaaagtcgatttatgataacctta

SEQ ID NO: 891913 - DNA, 33 bp, Homo sapien
atgttttatctattacacttatgcaacagaggt

SEQ ID NO: 891914 - DNA, 33 bp, Homo sapien
atgttttatctattacgcttatgcaacagaggt

SEQ ID NO: 891915 - DNA, 33 bp, Homo sapien
agcataaagcagagaaagttgagaacctaagta

SEQ ID NO: 891916 - DNA, 33 bp, Homo sapien
agcataaagcagagaaggttgagaacctaagta

SEQ ID NO: 891917 - DNA, 33 bp, Homo sapien
agaagttactgcattcaatattactattttcat

SEQ ID NO: 891918 - DNA, 33 bp, Homo sapien
agaagttactgcattcgatattactattttcat

SEQ ID NO: 891919 - DNA, 33 bp, Homo sapien
attatctgagtaaatacgtgagcctcctgtccg

SEQ ID NO: 891920 - DNA, 33 bp, Homo sapien
attatctgagtaaatatgtgagcctcctgtccg

SEQ ID NO: 891921 - DNA, 33 bp, Homo sapien
gcatgctaaaataatcaagagagcaaaggggat

SEQ ID NO: 891922 - DNA, 33 bp, Homo sapien
gcatgctaaaataatcgagagagcaaaggggat

SEQ ID NO: 891923 - DNA, 33 bp, Homo sapien
tgaactgtacttagcaccaacggagtaaaaaaa

SEQ ID NO: 891924 - DNA, 33 bp, Homo sapien
tgaactgtacttagcatcaacggagtaaaaaaa

SEQ ID NO: 891925 - DNA, 33 bp, Homo sapien
atgaatcatgcccaccaataagcagagactgat

SEQ ID NO: 891926 - DNA, 33 bp, Homo sapien
atgaatcatgcccacccataagcagagactgat

SEQ ID NO: 891927 - DNA, 33 bp, Homo sapien
agtgattgacactgctcaactaacttcctattg

SEQ ID NO: 891928 - DNA, 33 bp, Homo sapien
agtgattgacactgctgaactaacttcctattg

SEQ ID NO: 891929 - DNA, 33 bp, Homo sapien
tgtccttatttttcataactgctaactcagtcc

SEQ ID NO: 891930 - DNA, 33 bp, Homo sapien
tgtccttatttttcatcactgctaactcagtcc

SEQ ID NO: 891931 - DNA, 33 bp, Homo sapien
tgaaaacattttcaggacatatttttcacctaa

SEQ ID NO: 891932 - DNA, 33 bp, Homo sapien
tgaaaacattttcagggcatatttttcacctaa

SEQ ID NO: 891933 - DNA, 33 bp, Homo sapien
aaacaaacctagaggacagtatcattataagaa

SEQ ID NO: 891934 - DNA, 33 bp, Homo sapien
aaacaaacctagaggatagtatcattataagaa

SEQ ID NO: 891935 - DNA, 33 bp, Homo sapien
taggtacgttaaaccaagactgacaaaatccgc

SEQ ID NO: 891936 - DNA, 33 bp, Homo sapien
taggtacgttaaaccacgactgacaaaatccgc

SEQ ID NO: 891937 - DNA, 33 bp, Homo sapien
taccctatttgacaccaagcttctgaaattatt

SEQ ID NO: 891938 - DNA, 33 bp, Homo sapien
taccctatttgacaccgagcttctgaaattatt

SEQ ID NO: 891939 - DNA, 33 bp, Homo sapien
gattcccaaggtgcgaagttccagggcagtggc

SEQ ID NO: 891940 - DNA, 33 bp, Homo sapien
gattcccaaggtgcgacgttccagggcagtggc

SEQ ID NO: 891941 - DNA, 33 bp, Homo sapien
aattttggagtaggcaaaactattctatgatta

SEQ ID NO: 891942 - DNA, 33 bp, Homo sapien
aattttggagtaggcacaactattctatgatta

SEQ ID NO: 891943 - DNA, 33 bp, Homo sapien
aatcatgacgtgttgccgagtgaaagaagcctt

SEQ ID NO: 891944 - DNA, 33 bp, Homo sapien
aatcatgacgtgttgctgagtgaaagaagcctt

SEQ ID NO: 891945 - DNA, 33 bp, Homo sapien
tgatttccatttataccccttttccagcccttg

SEQ ID NO: 891946 - DNA, 33 bp, Homo sapien
tgatttccatttatactccttttccagcccttg

SEQ ID NO: 891947 - DNA, 33 bp, Homo sapien
caaaacagaatggttacattgatacttaaggta

SEQ ID NO: 891948 - DNA, 33 bp, Homo sapien
caaaacagaatggttatattgatacttaaggta

SEQ ID NO: 891949 - DNA, 33 bp, Homo sapien
agaccttaagagcaagcctgtctctggcattta

SEQ ID NO: 891950 - DNA, 33 bp, Homo sapien
agaccttaagagcaaggctgtctctggcattta

SEQ ID NO: 891951 - DNA, 33 bp, Homo sapien
aagtgactggaaaataacatttcattctgaaag

SEQ ID NO: 891952 - DNA, 33 bp, Homo sapien
aagtgactggaaaatagcatttcattctgaaag

SEQ ID NO: 891953 - DNA, 33 bp, Homo sapien
gtctggttaacaagaaatatggatgttagctta

SEQ ID NO: 891954 - DNA, 33 bp, Homo sapien
gtctggttaacaagaagtatggatgttagctta

SEQ ID NO: 891955 - DNA, 33 bp, Homo sapien
ttctaaaactaatgcacaatgagaacataatga

SEQ ID NO: 891956 - DNA, 33 bp, Homo sapien
ttctaaaactaatgcagaatgagaacataatga

SEQ ID NO: 891957 - DNA, 33 bp, Homo sapien
tgcaatcctataaaacaactaaagtgactatat

SEQ ID NO: 891958 - DNA, 33 bp, Homo sapien
tgcaatcctataaaacgactaaagtgactatat

SEQ ID NO: 891959 - DNA, 33 bp, Homo sapien
gaggaactcactgctccgaagaaaaggacacag

SEQ ID NO: 891960 - DNA, 33 bp, Homo sapien
gaggaactcactgctctgaagaaaaggacacag

SEQ ID NO: 891961 - DNA, 33 bp, Homo sapien
ttcctctctctccaaacacatcttgagcccctc

SEQ ID NO: 891962 - DNA, 33 bp, Homo sapien
ttcctctctctccaaatacatcttgagcccctc

SEQ ID NO: 891963 - DNA, 33 bp, Homo sapien
ggaaagtaaagcaggagtagaaatcttcaaaaa

SEQ ID NO: 891964 - DNA, 33 bp, Homo sapien
ggaaagtaaagcaggattagaaatcttcaaaaa

SEQ ID NO: 891965 - DNA, 33 bp, Homo sapien
agcttctttgcaaaccactgaggaagtggaaga

SEQ ID NO: 891966 - DNA, 33 bp, Homo sapien
agcttctttgcaaacctctgaggaagtggaaga

SEQ ID NO: 891967 - DNA, 33 bp, Homo sapien
tgaataaagcctaaaaagtctgtgggaaacaaa

SEQ ID NO: 891968 - DNA, 33 bp, Homo sapien
tgaataaagcctaaaaggtctgtgggaaacaaa

SEQ ID NO: 891969 - DNA, 33 bp, Homo sapien
ccaattatgtttcaaacgacaggaagaaccagg

SEQ ID NO: 891970 - DNA, 33 bp, Homo sapien
ccaattatgtttcaaatgacaggaagaaccagg

SEQ ID NO: 891971 - DNA, 33 bp, Homo sapien
aatggttttgcctaaaatagatttggattaaaa

SEQ ID NO: 891972 - DNA, 33 bp, Homo sapien
aatggttttgcctaaagtagatttggattaaaa

SEQ ID NO: 891973 - DNA, 33 bp, Homo sapien
gaagggctccacaatgaacatcatgaaggcaaa

SEQ ID NO: 891974 - DNA, 33 bp, Homo sapien
gaagggctccacaatggacatcatgaaggcaaa

SEQ ID NO: 891975 - DNA, 33 bp, Homo sapien
gagtcagaatttaaaaaggaatgaccaagaata

SEQ ID NO: 891976 - DNA, 33 bp, Homo sapien
gagtcagaatttaaaatggaatgaccaagaata

SEQ ID NO: 891977 - DNA, 33 bp, Homo sapien
aaaataattcattcacaggctgtaataagagta

SEQ ID NO: 891978 - DNA, 33 bp, Homo sapien
aaaataattcattcactggctgtaataagagta

SEQ ID NO: 891979 - DNA, 33 bp, Homo sapien
atgagaatgggacccactgatcttgggattcac

SEQ ID NO: 891980 - DNA, 33 bp, Homo sapien
atgagaatgggacccattgatcttgggattcac

SEQ ID NO: 891981 - DNA, 33 bp, Homo sapien
gactcaaaaagcagaacgtaaatagtacctaaa

SEQ ID NO: 891982 - DNA, 33 bp, Homo sapien
gactcaaaaagcagaatgtaaatagtacctaaa

SEQ ID NO: 891983 - DNA, 33 bp, Homo sapien
ttagaaagttctgcgaaaatctaaccaaattta

SEQ ID NO: 891984 - DNA, 33 bp, Homo sapien
ttagaaagttctgcgagaatctaaccaaattta

SEQ ID NO: 891985 - DNA, 33 bp, Homo sapien
cagacttctttcataactggtccttagaactaa

SEQ ID NO: 891986 - DNA, 33 bp, Homo sapien
cagacttctttcataagtggtccttagaactaa

SEQ ID NO: 891987 - DNA, 33 bp, Homo sapien
ggtgttgagtctgccacgtacgaggctatgtga

SEQ ID NO: 891988 - DNA, 33 bp, Homo sapien
ggtgttgagtctgccatgtacgaggctatgtga

SEQ ID NO: 891989 - DNA, 33 bp, Homo sapien
ttattgaatatctaagaaaagagagctgaagtt

SEQ ID NO: 891990 - DNA, 33 bp, Homo sapien
ttattgaatatctaaggaaagagagctgaagtt

SEQ ID NO: 891991 - DNA, 33 bp, Homo sapien
cacttcagtctacttacaaggttaattgctgat

SEQ ID NO: 891992 - DNA, 33 bp, Homo sapien
cacttcagtctacttagaaggttaattgctgat

SEQ ID NO: 891993 - DNA, 33 bp, Homo sapien
tccccaaattcagacacatattaaatgcacttg

SEQ ID NO: 891994 - DNA, 33 bp, Homo sapien
tccccaaattcagacagatattaaatgcacttg

SEQ ID NO: 891995 - DNA, 33 bp, Homo sapien
ctatttcattctgagacgtcaatggcattataa

SEQ ID NO: 891996 - DNA, 33 bp, Homo sapien
ctatttcattctgagatgtcaatggcattataa

SEQ ID NO: 891997 - DNA, 33 bp, Homo sapien
tttatctagactcatagctctgctttataaaac

SEQ ID NO: 891998 - DNA, 33 bp, Homo sapien
tttatctagactcatatctctgctttataaaac

SEQ ID NO: 891999 - DNA, 33 bp, Homo sapien
gaaattctacttaggcccataatcggatgcagt

SEQ ID NO: 892000 - DNA, 33 bp, Homo sapien
gaaattctacttaggctcataatcggatgcagt

SEQ ID NO: 892001 - DNA, 33 bp, Homo sapien
cttaatcctattggcaacggagaaagagttaat

SEQ ID NO: 892002 - DNA, 33 bp, Homo sapien
cttaatcctattggcagcggagaaagagttaat

SEQ ID NO: 892003 - DNA, 33 bp, Homo sapien
ttgggattagataccaagaggatgtgtaggctg

SEQ ID NO: 892004 - DNA, 33 bp, Homo sapien
ttgggattagataccaggaggatgtgtaggctg

SEQ ID NO: 892005 - DNA, 33 bp, Homo sapien
ttgagcacatccttaccaccagagaaatttaat

SEQ ID NO: 892006 - DNA, 33 bp, Homo sapien
ttgagcacatccttactaccagagaaatttaat

SEQ ID NO: 892007 - DNA, 33 bp, Homo sapien
accattctgactgacaggagattgcatctgatt

SEQ ID NO: 892008 - DNA, 33 bp, Homo sapien
accattctgactgacatgagattgcatctgatt

SEQ ID NO: 892009 - DNA, 33 bp, Homo sapien
ccttggtttaactcttcaaacaagtagtggtgc

SEQ ID NO: 892010 - DNA, 33 bp, Homo sapien
ccttggtttaactcttgaaacaagtagtggtgc

SEQ ID NO: 892011 - DNA, 33 bp, Homo sapien
gtagacagttgccaaacacagattttcagttat

SEQ ID NO: 892012 - DNA, 33 bp, Homo sapien
gtagacagttgccaaagacagattttcagttat

SEQ ID NO: 892013 - DNA, 33 bp, Homo sapien
aggcaatactgtctgaaagcaatataatattag

SEQ ID NO: 892014 - DNA, 33 bp, Homo sapien
aggcaatactgtctgacagcaatataatattag

SEQ ID NO: 892015 - DNA, 33 bp, Homo sapien
cgatgttgatttaaacagaatagcaagcagaac

SEQ ID NO: 892016 - DNA, 33 bp, Homo sapien
cgatgttgatttaaaccgaatagcaagcagaac

SEQ ID NO: 892017 - DNA, 33 bp, Homo sapien
aggaataacaaagtaacgtgggtattaacaact

SEQ ID NO: 892018 - DNA, 33 bp, Homo sapien
aggaataacaaagtaatgtgggtattaacaact

SEQ ID NO: 892019 - DNA, 33 bp, Homo sapien
tttccatccatctctcaacattgggctttaata

SEQ ID NO: 892020 - DNA, 33 bp, Homo sapien
tttccatccatctctcgacattgggctttaata

SEQ ID NO: 892021 - DNA, 33 bp, Homo sapien
agagtgaaactgtttgcaaatagctgtgctgtg

SEQ ID NO: 892022 - DNA, 33 bp, Homo sapien
agagtgaaactgtttggaaatagctgtgctgtg

SEQ ID NO: 892023 - DNA, 33 bp, Homo sapien
gatggcgaagatcatcactacggaaccaccagg

SEQ ID NO: 892024 - DNA, 33 bp, Homo sapien
gatggcgaagatcatcgctacggaaccaccagg

SEQ ID NO: 892025 - DNA, 33 bp, Homo sapien
ctggccagctgacaaccactctcttggggattg

SEQ ID NO: 892026 - DNA, 33 bp, Homo sapien
ctggccagctgacaacgactctcttggggattg

SEQ ID NO: 892027 - DNA, 33 bp, Homo sapien
agaaaaggagaagtaacgaggagagttctgatt

SEQ ID NO: 892028 - DNA, 33 bp, Homo sapien
agaaaaggagaagtaatgaggagagttctgatt

SEQ ID NO: 892029 - DNA, 33 bp, Homo sapien
atatatacacattgaaaaggagaaagtaaatct

SEQ ID NO: 892030 - DNA, 33 bp, Homo sapien
atatatacacattgaagaggagaaagtaaatct

SEQ ID NO: 892031 - DNA, 33 bp, Homo sapien
ttttgtcactgaatgcaaagggataccattcat

SEQ ID NO: 892032 - DNA, 33 bp, Homo sapien
ttttgtcactgaatgcgaagggataccattcat

SEQ ID NO: 892033 - DNA, 33 bp, Homo sapien
ctctaaatctctctggcattttgaagcacctac

SEQ ID NO: 892034 - DNA, 33 bp, Homo sapien
ctctaaatctctctggtattttgaagcacctac

SEQ ID NO: 892035 - DNA, 33 bp, Homo sapien
taggtctggcagacaccattggaaggctgtaaa

SEQ ID NO: 892036 - DNA, 33 bp, Homo sapien
taggtctggcagacactattggaaggctgtaaa

SEQ ID NO: 892037 - DNA, 33 bp, Homo sapien
accaccttgcaacctactaagagaatgatactt

SEQ ID NO: 892038 - DNA, 33 bp, Homo sapien
accaccttgcaacctattaagagaatgatactt

SEQ ID NO: 892039 - DNA, 33 bp, Homo sapien
taaagggattgaggagaaagcatagttaattga

SEQ ID NO: 892040 - DNA, 33 bp, Homo sapien
taaagggattgaggaggaagcatagttaattga

SEQ ID NO: 892041 - DNA, 33 bp, Homo sapien
tcatttatgttcttggaaattattgataggtaa

SEQ ID NO: 892042 - DNA, 33 bp, Homo sapien
tcatttatgttcttggcaattattgataggtaa

SEQ ID NO: 892043 - DNA, 33 bp, Homo sapien
gctttttttgcatctgaatgagattatatggtt

SEQ ID NO: 892044 - DNA, 33 bp, Homo sapien
gctttttttgcatctggatgagattatatggtt

SEQ ID NO: 892045 - DNA, 33 bp, Homo sapien
aaataccacgtaattcagaaatcccacttctgg

SEQ ID NO: 892046 - DNA, 33 bp, Homo sapien
aaataccacgtaattctgaaatcccacttctgg

SEQ ID NO: 892047 - DNA, 33 bp, Homo sapien
ggttatgtaagctacaaatcttattcatgtttt

SEQ ID NO: 892048 - DNA, 33 bp, Homo sapien
ggttatgtaagctacacatcttattcatgtttt

SEQ ID NO: 892049 - DNA, 33 bp, Homo sapien
tgcagagaaaatggaaatcgtacacaccattgg

SEQ ID NO: 892050 - DNA, 33 bp, Homo sapien
tgcagagaaaatggaactcgtacacaccattgg

SEQ ID NO: 892051 - DNA, 33 bp, Homo sapien
ctgttcctctgcctcaacaaagtctttcatctc

SEQ ID NO: 892052 - DNA, 33 bp, Homo sapien
ctgttcctctgcctcagcaaagtctttcatctc

SEQ ID NO: 892053 - DNA, 33 bp, Homo sapien
ttgggttggggcattgaacctcatgcagtcaaa

SEQ ID NO: 892054 - DNA, 33 bp, Homo sapien
ttgggttggggcattgcacctcatgcagtcaaa

SEQ ID NO: 892055 - DNA, 33 bp, Homo sapien
aggaataaaaaacttacctttggcacaacaatg

SEQ ID NO: 892056 - DNA, 33 bp, Homo sapien
aggaataaaaaacttatctttggcacaacaatg

SEQ ID NO: 892057 - DNA, 33 bp, Homo sapien
actgagattaaggaacccttgtttgttatattt

SEQ ID NO: 892058 - DNA, 33 bp, Homo sapien
actgagattaaggaacgcttgtttgttatattt

SEQ ID NO: 892059 - DNA, 33 bp, Homo sapien
gaaatttccttctagactccctgtattgcagga

SEQ ID NO: 892060 - DNA, 33 bp, Homo sapien
gaaatttccttctagagtccctgtattgcagga

SEQ ID NO: 892061 - DNA, 33 bp, Homo sapien
ttttctaagtggtccacgtagtaggttgcaaag

SEQ ID NO: 892062 - DNA, 33 bp, Homo sapien
ttttctaagtggtccatgtagtaggttgcaaag

SEQ ID NO: 892063 - DNA, 33 bp, Homo sapien
ggaagtggattttttgcatgggtcagcaaacta

SEQ ID NO: 892064 - DNA, 33 bp, Homo sapien
ggaagtggattttttgtatgggtcagcaaacta

SEQ ID NO: 892065 - DNA, 33 bp, Homo sapien
ttatctccgtgacttacagagttctaacaaacc

SEQ ID NO: 892066 - DNA, 33 bp, Homo sapien
ttatctccgtgacttatagagttctaacaaacc

SEQ ID NO: 892067 - DNA, 33 bp, Homo sapien
atctgggtagaaatcaccgtacattctgaattt

SEQ ID NO: 892068 - DNA, 33 bp, Homo sapien
atctgggtagaaatcatcgtacattctgaattt

SEQ ID NO: 892069 - DNA, 33 bp, Homo sapien
agatagttgagcaagaactaccacatagccaca

SEQ ID NO: 892070 - DNA, 33 bp, Homo sapien
agatagttgagcaagagctaccacatagccaca

SEQ ID NO: 892071 - DNA, 33 bp, Homo sapien
agaatacagaccacacagagaatcccaggtgaa

SEQ ID NO: 892072 - DNA, 33 bp, Homo sapien
agaatacagaccacacggagaatcccaggtgaa

SEQ ID NO: 892073 - DNA, 33 bp, Homo sapien
aatgcacttttgttagcatctacagtgtgtctt

SEQ ID NO: 892074 - DNA, 33 bp, Homo sapien
aatgcacttttgttagtatctacagtgtgtctt

SEQ ID NO: 892075 - DNA, 33 bp, Homo sapien
acataaggtttctaaaacatgctgattatagag

SEQ ID NO: 892076 - DNA, 33 bp, Homo sapien
acataaggtttctaaagcatgctgattatagag

SEQ ID NO: 892077 - DNA, 33 bp, Homo sapien
tttcttttgttcctacaactgcagatctaggag

SEQ ID NO: 892078 - DNA, 33 bp, Homo sapien
tttcttttgttcctacgactgcagatctaggag

SEQ ID NO: 892079 - DNA, 33 bp, Homo sapien
caaatgaccaaaagcaccaagaacaatcaagaa

SEQ ID NO: 892080 - DNA, 33 bp, Homo sapien
caaatgaccaaaagcatcaagaacaatcaagaa

SEQ ID NO: 892081 - DNA, 33 bp, Homo sapien
ctggcaactcttattacctgtttattaggctga

SEQ ID NO: 892082 - DNA, 33 bp, Homo sapien
ctggcaactcttattatctgtttattaggctga

SEQ ID NO: 892083 - DNA, 33 bp, Homo sapien
aataattaatgctgaaaacattcctaattgaat

SEQ ID NO: 892084 - DNA, 33 bp, Homo sapien
aataattaatgctgaagacattcctaattgaat

SEQ ID NO: 892085 - DNA, 33 bp, Homo sapien
tcttacctagggctaccatcaatgtgaaatgcc

SEQ ID NO: 892086 - DNA, 33 bp, Homo sapien
tcttacctagggctacgatcaatgtgaaatgcc

SEQ ID NO: 892087 - DNA, 33 bp, Homo sapien
cataacacagttttaacacagggaatagacttc

SEQ ID NO: 892088 - DNA, 33 bp, Homo sapien
cataacacagttttaatacagggaatagacttc

SEQ ID NO: 892089 - DNA, 33 bp, Homo sapien
gcaagcatttaatataacagtgtgcattaggtg

SEQ ID NO: 892090 - DNA, 33 bp, Homo sapien
gcaagcatttaatatagcagtgtgcattaggtg

SEQ ID NO: 892091 - DNA, 33 bp, Homo sapien
ttttaacagtgagagacggatgcacaaaggaag

SEQ ID NO: 892092 - DNA, 33 bp, Homo sapien
ttttaacagtgagagatggatgcacaaaggaag

SEQ ID NO: 892093 - DNA, 33 bp, Homo sapien
aagtaaatatgtttagaaggaaaatccgtacaa

SEQ ID NO: 892094 - DNA, 33 bp, Homo sapien
aagtaaatatgtttaggaggaaaatccgtacaa

SEQ ID NO: 892095 - DNA, 33 bp, Homo sapien
ttttcatttgtttgcacctgaatactgtatagt

SEQ ID NO: 892096 - DNA, 33 bp, Homo sapien
ttttcatttgtttgcatctgaatactgtatagt

SEQ ID NO: 892097 - DNA, 33 bp, Homo sapien
gtttgtatcagtactacgcagttcttttctctt

SEQ ID NO: 892098 - DNA, 33 bp, Homo sapien
gtttgtatcagtactatgcagttcttttctctt

SEQ ID NO: 892099 - DNA, 33 bp, Homo sapien
gtcagacttggaataacttagaaacaaggcgag

SEQ ID NO: 892100 - DNA, 33 bp, Homo sapien
gtcagacttggaataagttagaaacaaggcgag

SEQ ID NO: 892101 - DNA, 33 bp, Homo sapien
cgaaactacacagaagaatccactatgtaccta

SEQ ID NO: 892102 - DNA, 33 bp, Homo sapien
cgaaactacacagaagcatccactatgtaccta

SEQ ID NO: 892103 - DNA, 33 bp, Homo sapien
gtgatgaccttttgacaacgtacataattctca

SEQ ID NO: 892104 - DNA, 33 bp, Homo sapien
gtgatgaccttttgacgacgtacataattctca

SEQ ID NO: 892105 - DNA, 33 bp, Homo sapien
ttattattttgcctcaatgagatcctttggtct

SEQ ID NO: 892106 - DNA, 33 bp, Homo sapien
ttattattttgcctcagtgagatcctttggtct

SEQ ID NO: 892107 - DNA, 33 bp, Homo sapien
gatataggatacttgacaggcattcaataatat

SEQ ID NO: 892108 - DNA, 33 bp, Homo sapien
gatataggatacttgataggcattcaataatat

SEQ ID NO: 892109 - DNA, 33 bp, Homo sapien
caaacatacagtcagaaagaagaaataagtttt

SEQ ID NO: 892110 - DNA, 33 bp, Homo sapien
caaacatacagtcagatagaagaaataagtttt

SEQ ID NO: 892111 - DNA, 33 bp, Homo sapien
gttcttcactctctcaaagaatactgtgactgt

SEQ ID NO: 892112 - DNA, 33 bp, Homo sapien
gttcttcactctctcatagaatactgtgactgt

SEQ ID NO: 892113 - DNA, 33 bp, Homo sapien
taaattgatgcactcacaatgcaggttcagtac

SEQ ID NO: 892114 - DNA, 33 bp, Homo sapien
taaattgatgcactcagaatgcaggttcagtac

SEQ ID NO: 892115 - DNA, 33 bp, Homo sapien
tttatcctccagattaactaactactagatttg

SEQ ID NO: 892116 - DNA, 33 bp, Homo sapien
tttatcctccagattagctaactactagatttg

SEQ ID NO: 892117 - DNA, 33 bp, Homo sapien
tcttgagatctgtggaggaaaaggaagcagcac

SEQ ID NO: 892118 - DNA, 33 bp, Homo sapien
tcttgagatctgtggatgaaaaggaagcagcac

SEQ ID NO: 892119 - DNA, 33 bp, Homo sapien
taaaattgaacaaggacgattatgtttaaatca

SEQ ID NO: 892120 - DNA, 33 bp, Homo sapien
taaaattgaacaaggaggattatgtttaaatca

SEQ ID NO: 892121 - DNA, 33 bp, Homo sapien
ctcaaagttgtcaagacgtaatttctccccaac

SEQ ID NO: 892122 - DNA, 33 bp, Homo sapien
ctcaaagttgtcaagatgtaatttctccccaac

SEQ ID NO: 892123 - DNA, 33 bp, Homo sapien
attgttcacagtagtcaagatatggaaaaaacc

SEQ ID NO: 892124 - DNA, 33 bp, Homo sapien
attgttcacagtagtcgagatatggaaaaaacc

SEQ ID NO: 892125 - DNA, 33 bp, Homo sapien
tcaattgtttgaggaaactctgcattgcttgct

SEQ ID NO: 892126 - DNA, 33 bp, Homo sapien
tcaattgtttgaggaacctctgcattgcttgct

SEQ ID NO: 892127 - DNA, 33 bp, Homo sapien
aaagcaagtcaggcaaccaaatcaaggagaagg

SEQ ID NO: 892128 - DNA, 33 bp, Homo sapien
aaagcaagtcaggcaagcaaatcaaggagaagg

SEQ ID NO: 892129 - DNA, 33 bp, Homo sapien
atccttagccagatcactcatactgtttctgga

SEQ ID NO: 892130 - DNA, 33 bp, Homo sapien
atccttagccagatcattcatactgtttctgga

SEQ ID NO: 892131 - DNA, 33 bp, Homo sapien
ttccatcacagttcaaacagatgatgagccatt

SEQ ID NO: 892132 - DNA, 33 bp, Homo sapien
ttccatcacagttcaagcagatgatgagccatt

SEQ ID NO: 892133 - DNA, 33 bp, Homo sapien
caaaggcaagattctccactttttcagaagact

SEQ ID NO: 892134 - DNA, 33 bp, Homo sapien
caaaggcaagattctcgactttttcagaagact

SEQ ID NO: 892135 - DNA, 33 bp, Homo sapien
tattagaatttttgcgcaatgaaacgtccaggt

SEQ ID NO: 892136 - DNA, 33 bp, Homo sapien
tattagaatttttgcgtaatgaaacgtccaggt

SEQ ID NO: 892137 - DNA, 33 bp, Homo sapien
aattggaagtctcgcaacttcgtcctaacaagc

SEQ ID NO: 892138 - DNA, 33 bp, Homo sapien
aattggaagtctcgcagcttcgtcctaacaagc

SEQ ID NO: 892139 - DNA, 33 bp, Homo sapien
ctcaaatgtaattgacaaattcctagagaccta

SEQ ID NO: 892140 - DNA, 33 bp, Homo sapien
ctcaaatgtaattgacgaattcctagagaccta

SEQ ID NO: 892141 - DNA, 33 bp, Homo sapien
ccaactcatttttccaaacatcatagaaaccat

SEQ ID NO: 892142 - DNA, 33 bp, Homo sapien
ccaactcatttttccacacatcatagaaaccat

SEQ ID NO: 892143 - DNA, 33 bp, Homo sapien
agacaacctaccaaaccgaatctaaataaacca

SEQ ID NO: 892144 - DNA, 33 bp, Homo sapien
agacaacctaccaaactgaatctaaataaacca

SEQ ID NO: 892145 - DNA, 33 bp, Homo sapien
ttagcaaaccaattggaaatgacagtaagagga

SEQ ID NO: 892146 - DNA, 33 bp, Homo sapien
ttagcaaaccaattgggaatgacagtaagagga

SEQ ID NO: 892147 - DNA, 33 bp, Homo sapien
ttcacctactgaagaacgtttggttgcttccaa

SEQ ID NO: 892148 - DNA, 33 bp, Homo sapien
ttcacctactgaagaatgtttggttgcttccaa

SEQ ID NO: 892149 - DNA, 33 bp, Homo sapien
aactcttctgaatctgaagggagccttgaaaac

SEQ ID NO: 892150 - DNA, 33 bp, Homo sapien
aactcttctgaatctgtagggagccttgaaaac

SEQ ID NO: 892151 - DNA, 33 bp, Homo sapien
gaactgggacttggagaaaatccaaccttattt

SEQ ID NO: 892152 - DNA, 33 bp, Homo sapien
gaactgggacttggagcaaatccaaccttattt

SEQ ID NO: 892153 - DNA, 33 bp, Homo sapien
atatgtttttagttgacctgactcagtttccca

SEQ ID NO: 892154 - DNA, 33 bp, Homo sapien
atatgtttttagttgatctgactcagtttccca

SEQ ID NO: 892155 - DNA, 33 bp, Homo sapien
cagttgaggcgcacaacaagctaccaaaacact

SEQ ID NO: 892156 - DNA, 33 bp, Homo sapien
cagttgaggcgcacaagaagctaccaaaacact

SEQ ID NO: 892157 - DNA, 33 bp, Homo sapien
atataactgtcaggaggctatttaaggtgtcaa

SEQ ID NO: 892158 - DNA, 33 bp, Homo sapien
atataactgtcaggagtctatttaaggtgtcaa

SEQ ID NO: 892159 - DNA, 33 bp, Homo sapien
aggttgttaaggagacagtcccttgggtgggag

SEQ ID NO: 892160 - DNA, 33 bp, Homo sapien
aggttgttaaggagaccgtcccttgggtgggag

SEQ ID NO: 892161 - DNA, 33 bp, Homo sapien
tgcataaacatgagacggagaggtaccttaaaa

SEQ ID NO: 892162 - DNA, 33 bp, Homo sapien
tgcataaacatgagactgagaggtaccttaaaa

SEQ ID NO: 892163 - DNA, 33 bp, Homo sapien
cagatctaggaaatccaagagacactaaataag

SEQ ID NO: 892164 - DNA, 33 bp, Homo sapien
cagatctaggaaatccgagagacactaaataag

SEQ ID NO: 892165 - DNA, 33 bp, Homo sapien
cttattgccattaccgcattagtgttttggatt

SEQ ID NO: 892166 - DNA, 33 bp, Homo sapien
cttattgccattaccgtattagtgttttggatt

SEQ ID NO: 892167 - DNA, 33 bp, Homo sapien
catgagatatgaacaaccagaacagactgtact

SEQ ID NO: 892168 - DNA, 33 bp, Homo sapien
catgagatatgaacaatcagaacagactgtact

SEQ ID NO: 892169 - DNA, 33 bp, Homo sapien
ttggtagatgccagaacaaatgaggatgttggg

SEQ ID NO: 892170 - DNA, 33 bp, Homo sapien
ttggtagatgccagaataaatgaggatgttggg

SEQ ID NO: 892171 - DNA, 33 bp, Homo sapien
atagaacaggcttgaactagagtggtttgggtg

SEQ ID NO: 892172 - DNA, 33 bp, Homo sapien
atagaacaggcttgaagtagagtggtttgggtg

SEQ ID NO: 892173 - DNA, 33 bp, Homo sapien
atttttatttgttaaaaccataatgtctaagtt

SEQ ID NO: 892174 - DNA, 33 bp, Homo sapien
atttttatttgttaaatccataatgtctaagtt

SEQ ID NO: 892175 - DNA, 33 bp, Homo sapien
cagaatagaaaactgaacttactgtagaatcct

SEQ ID NO: 892176 - DNA, 33 bp, Homo sapien
cagaatagaaaactgagcttactgtagaatcct

SEQ ID NO: 892177 - DNA, 33 bp, Homo sapien
gttataaaggtcaataccaagtgtatcagtcac

SEQ ID NO: 892178 - DNA, 33 bp, Homo sapien
gttataaaggtcaatatcaagtgtatcagtcac

SEQ ID NO: 892179 - DNA, 33 bp, Homo sapien
gctacagacctcaataaagagtggaaataagcc

SEQ ID NO: 892180 - DNA, 33 bp, Homo sapien
gctacagacctcaatagagagtggaaataagcc

SEQ ID NO: 892181 - DNA, 33 bp, Homo sapien
gtgctggaaggtcacaaatgtctaactgccatt

SEQ ID NO: 892182 - DNA, 33 bp, Homo sapien
gtgctggaaggtcacagatgtctaactgccatt

SEQ ID NO: 892183 - DNA, 33 bp, Homo sapien
gtcaaaccaaatcccactccctcagtaagacac

SEQ ID NO: 892184 - DNA, 33 bp, Homo sapien
gtcaaaccaaatcccattccctcagtaagacac

SEQ ID NO: 892185 - DNA, 33 bp, Homo sapien
cataagtgacacgtgaccgtcaagtgatcgaca

SEQ ID NO: 892186 - DNA, 33 bp, Homo sapien
cataagtgacacgtgatcgtcaagtgatcgaca

SEQ ID NO: 892187 - DNA, 33 bp, Homo sapien
accttaatgccagcctaaatcgtggatatctga

SEQ ID NO: 892188 - DNA, 33 bp, Homo sapien
accttaatgccagccttaatcgtggatatctga

SEQ ID NO: 892189 - DNA, 33 bp, Homo sapien
ctctgttgagaaattacgcatgctttttgctta

SEQ ID NO: 892190 - DNA, 33 bp, Homo sapien
ctctgttgagaaattatgcatgctttttgctta

SEQ ID NO: 892191 - DNA, 33 bp, Homo sapien
gagatttttagtgtccacctatcttagactgcc

SEQ ID NO: 892192 - DNA, 33 bp, Homo sapien
gagatttttagtgtccgcctatcttagactgcc

SEQ ID NO: 892193 - DNA, 33 bp, Homo sapien
attagttctgtgctcacagcagtttcaggcaac

SEQ ID NO: 892194 - DNA, 33 bp, Homo sapien
attagttctgtgctcagagcagtttcaggcaac

SEQ ID NO: 892195 - DNA, 33 bp, Homo sapien
ttcttccttgttaagaaggtatcaacctattat

SEQ ID NO: 892196 - DNA, 33 bp, Homo sapien
ttcttccttgttaagagggtatcaacctattat

SEQ ID NO: 892197 - DNA, 33 bp, Homo sapien
gtgaacttttgcaataacattttggtcaaactt

SEQ ID NO: 892198 - DNA, 33 bp, Homo sapien
gtgaacttttgcaatagcattttggtcaaactt

SEQ ID NO: 892199 - DNA, 33 bp, Homo sapien
tataggttgaatataccaaatatgtcttgtttc

SEQ ID NO: 892200 - DNA, 33 bp, Homo sapien
tataggttgaatatactaaatatgtcttgtttc

SEQ ID NO: 892201 - DNA, 33 bp, Homo sapien
aggagatattatgagacccaatgcccaggtttt

SEQ ID NO: 892202 - DNA, 33 bp, Homo sapien
aggagatattatgagatccaatgcccaggtttt

SEQ ID NO: 892203 - DNA, 33 bp, Homo sapien
acagtgcagaagcagaagcaaaagaattaacca

SEQ ID NO: 892204 - DNA, 33 bp, Homo sapien
acagtgcagaagcagaggcaaaagaattaacca

SEQ ID NO: 892205 - DNA, 33 bp, Homo sapien
gaataacaggtacatactaatgcctgaagatga

SEQ ID NO: 892206 - DNA, 33 bp, Homo sapien
gaataacaggtacatagtaatgcctgaagatga

SEQ ID NO: 892207 - DNA, 33 bp, Homo sapien
cagaggtgagcgttgacccagatttaggtaaaa

SEQ ID NO: 892208 - DNA, 33 bp, Homo sapien
cagaggtgagcgttgatccagatttaggtaaaa

SEQ ID NO: 892209 - DNA, 33 bp, Homo sapien
gaacttcatacgtaaaatctctaagcccaagta

SEQ ID NO: 892210 - DNA, 33 bp, Homo sapien
gaacttcatacgtaaagtctctaagcccaagta

SEQ ID NO: 892211 - DNA, 33 bp, Homo sapien
gcaacataaaaggaaactggagaaatgtgtatt

SEQ ID NO: 892212 - DNA, 33 bp, Homo sapien
gcaacataaaaggaaattggagaaatgtgtatt

SEQ ID NO: 892213 - DNA, 33 bp, Homo sapien
ccatacaactcattcaatgaaggggttaagaag

SEQ ID NO: 892214 - DNA, 33 bp, Homo sapien
ccatacaactcattcattgaaggggttaagaag

SEQ ID NO: 892215 - DNA, 33 bp, Homo sapien
tgtcagatttattataccactttgatcactttg

SEQ ID NO: 892216 - DNA, 33 bp, Homo sapien
tgtcagatttattatatcactttgatcactttg

SEQ ID NO: 892217 - DNA, 33 bp, Homo sapien
attaggtttgaaagacaatataaagtgtgagtt

SEQ ID NO: 892218 - DNA, 33 bp, Homo sapien
attaggtttgaaagaccatataaagtgtgagtt

SEQ ID NO: 892219 - DNA, 33 bp, Homo sapien
atggaggggttagcgacgaagatgaggatttaa

SEQ ID NO: 892220 - DNA, 33 bp, Homo sapien
atggaggggttagcgatgaagatgaggatttaa

SEQ ID NO: 892221 - DNA, 33 bp, Homo sapien
taattctgaggaactgcagaagaaagttaaaga

SEQ ID NO: 892222 - DNA, 33 bp, Homo sapien
taattctgaggaactgtagaagaaagttaaaga

SEQ ID NO: 892223 - DNA, 33 bp, Homo sapien
aagctttacttctaatcacctccacagtttttt

SEQ ID NO: 892224 - DNA, 33 bp, Homo sapien
aagctttacttctaatgacctccacagtttttt

SEQ ID NO: 892225 - DNA, 33 bp, Homo sapien
tttgtatttcctctgcaaattcactattatttt

SEQ ID NO: 892226 - DNA, 33 bp, Homo sapien
tttgtatttcctctgcgaattcactattatttt

SEQ ID NO: 892227 - DNA, 33 bp, Homo sapien
tatcaaggtataacatcaaggtgaactcaagtt

SEQ ID NO: 892228 - DNA, 33 bp, Homo sapien
tatcaaggtataacatgaaggtgaactcaagtt

SEQ ID NO: 892229 - DNA, 33 bp, Homo sapien
ggattagctaactataaaatctgacttagaaaa

SEQ ID NO: 892230 - DNA, 33 bp, Homo sapien
ggattagctaactatacaatctgacttagaaaa

SEQ ID NO: 892231 - DNA, 33 bp, Homo sapien
aaaggtcaaaagatgcaagctctgggcaagtat

SEQ ID NO: 892232 - DNA, 33 bp, Homo sapien
aaaggtcaaaagatgccagctctgggcaagtat

SEQ ID NO: 892233 - DNA, 33 bp, Homo sapien
ctgctgaaaacaaccaatatttattatcctcct

SEQ ID NO: 892234 - DNA, 33 bp, Homo sapien
ctgctgaaaacaaccagtatttattatcctcct

SEQ ID NO: 892235 - DNA, 33 bp, Homo sapien
acacaacttcagcttaactaaaatgataacaat

SEQ ID NO: 892236 - DNA, 33 bp, Homo sapien
acacaacttcagcttacctaaaatgataacaat

SEQ ID NO: 892237 - DNA, 33 bp, Homo sapien
tgtttttatgatattcaatgaccaagctatcaa

SEQ ID NO: 892238 - DNA, 33 bp, Homo sapien
tgtttttatgatattcgatgaccaagctatcaa

SEQ ID NO: 892239 - DNA, 33 bp, Homo sapien
aaagtaaaacagttgacggtgcatgcgatccct

SEQ ID NO: 892240 - DNA, 33 bp, Homo sapien
aaagtaaaacagttgatggtgcatgcgatccct

SEQ ID NO: 892241 - DNA, 33 bp, Homo sapien
acttttgaatgttcctcaaattatgcttcataa

SEQ ID NO: 892242 - DNA, 33 bp, Homo sapien
acttttgaatgttcctgaaattatgcttcataa

SEQ ID NO: 892243 - DNA, 33 bp, Homo sapien
aaaccaaagattggcagatattacatcataact

SEQ ID NO: 892244 - DNA, 33 bp, Homo sapien
aaaccaaagattggcatatattacatcataact

SEQ ID NO: 892245 - DNA, 33 bp, Homo sapien
tctgacatacagtttaacattgaataccccata

SEQ ID NO: 892246 - DNA, 33 bp, Homo sapien
tctgacatacagtttagcattgaataccccata

SEQ ID NO: 892247 - DNA, 33 bp, Homo sapien
acttctgctccatacactctcactagatccagc

SEQ ID NO: 892248 - DNA, 33 bp, Homo sapien
acttctgctccatacagtctcactagatccagc

SEQ ID NO: 892249 - DNA, 33 bp, Homo sapien
ggcctagcccttttgccctgacaatatttcttc

SEQ ID NO: 892250 - DNA, 33 bp, Homo sapien
ggcctagcccttttgcgctgacaatatttcttc

SEQ ID NO: 892251 - DNA, 33 bp, Homo sapien
ctgagctagaaagagaaggtgtggaaaggtaga

SEQ ID NO: 892252 - DNA, 33 bp, Homo sapien
ctgagctagaaagagagggtgtggaaaggtaga

SEQ ID NO: 892253 - DNA, 33 bp, Homo sapien
aaagtgggtctttgacacatgtggattctgatt

SEQ ID NO: 892254 - DNA, 33 bp, Homo sapien
aaagtgggtctttgacgcatgtggattctgatt

SEQ ID NO: 892255 - DNA, 33 bp, Homo sapien
tctattgcttgatatgaagaagagctttacaag

SEQ ID NO: 892256 - DNA, 33 bp, Homo sapien
tctattgcttgatatggagaagagctttacaag

SEQ ID NO: 892257 - DNA, 33 bp, Homo sapien
gtcttcgtttttaaaccgctgagctataagact

SEQ ID NO: 892258 - DNA, 33 bp, Homo sapien
gtcttcgtttttaaactgctgagctataagact

SEQ ID NO: 892259 - DNA, 33 bp, Homo sapien
tatctaaactatgatacatgagaacatcctgtc

SEQ ID NO: 892260 - DNA, 33 bp, Homo sapien
tatctaaactatgatatatgagaacatcctgtc

SEQ ID NO: 892261 - DNA, 33 bp, Homo sapien
atgcctggtgagttagacaagtataaaatatat

SEQ ID NO: 892262 - DNA, 33 bp, Homo sapien
atgcctggtgagttaggcaagtataaaatatat

SEQ ID NO: 892263 - DNA, 33 bp, Homo sapien
attgcatcttgatgaagagctgctttttttttt

SEQ ID NO: 892264 - DNA, 33 bp, Homo sapien
attgcatcttgatgaatagctgctttttttttt

SEQ ID NO: 892265 - DNA, 33 bp, Homo sapien
aaattaatacttcttacgcaactatgggccacc

SEQ ID NO: 892266 - DNA, 33 bp, Homo sapien
aaattaatacttcttatgcaactatgggccacc

SEQ ID NO: 892267 - DNA, 33 bp, Homo sapien
acaatgacaaggaagacagagttgtcccaaagg

SEQ ID NO: 892268 - DNA, 33 bp, Homo sapien
acaatgacaaggaagatagagttgtcccaaagg

SEQ ID NO: 892269 - DNA, 33 bp, Homo sapien
ctagctgtggtgagtcaaggtagacagaaaaat

SEQ ID NO: 892270 - DNA, 33 bp, Homo sapien
ctagctgtggtgagtcgaggtagacagaaaaat

SEQ ID NO: 892271 - DNA, 33 bp, Homo sapien
gctagtacaagaaggaagagagtcacatggagc

SEQ ID NO: 892272 - DNA, 33 bp, Homo sapien
gctagtacaagaaggatgagagtcacatggagc

SEQ ID NO: 892273 - DNA, 33 bp, Homo sapien
ttgaagagacaaagaaaatcataagtaacagaa

SEQ ID NO: 892274 - DNA, 33 bp, Homo sapien
ttgaagagacaaagaatatcataagtaacagaa

SEQ ID NO: 892275 - DNA, 33 bp, Homo sapien
caactctgtgagtataataaaccgatttatttg

SEQ ID NO: 892276 - DNA, 33 bp, Homo sapien
caactctgtgagtatattaaaccgatttatttg

SEQ ID NO: 892277 - DNA, 33 bp, Homo sapien
tctgccttattctctaagattccacatttcagc

SEQ ID NO: 892278 - DNA, 33 bp, Homo sapien
tctgccttattctctaggattccacatttcagc

SEQ ID NO: 892279 - DNA, 33 bp, Homo sapien
tcacacctgtttgtctcactggggttgtcagtt

SEQ ID NO: 892280 - DNA, 33 bp, Homo sapien
tcacacctgtttgtcttactggggttgtcagtt

SEQ ID NO: 892281 - DNA, 33 bp, Homo sapien
ggtgagagagaagcaggctacttaagatgcatt

SEQ ID NO: 892282 - DNA, 33 bp, Homo sapien
ggtgagagagaagcagtctacttaagatgcatt

SEQ ID NO: 892283 - DNA, 33 bp, Homo sapien
gatgagtcataccagaacagtcaaaaatagaat

SEQ ID NO: 892284 - DNA, 33 bp, Homo sapien
gatgagtcataccagagcagtcaaaaatagaat

SEQ ID NO: 892285 - DNA, 33 bp, Homo sapien
ctagtccttttgatgggcactttgttttagcag

SEQ ID NO: 892286 - DNA, 33 bp, Homo sapien
ctagtccttttgatggtcactttgttttagcag

SEQ ID NO: 892287 - DNA, 33 bp, Homo sapien
catcttgattacattacgaaacgaatacaccaa

SEQ ID NO: 892288 - DNA, 33 bp, Homo sapien
catcttgattacattaggaaacgaatacaccaa

SEQ ID NO: 892289 - DNA, 33 bp, Homo sapien
agcctgtgtgtaggagaaaaaggaactagatta

SEQ ID NO: 892290 - DNA, 33 bp, Homo sapien
agcctgtgtgtaggaggaaaaggaactagatta

SEQ ID NO: 892291 - DNA, 33 bp, Homo sapien
caaaaagacacagaaggaggtaatagaaactca

SEQ ID NO: 892292 - DNA, 33 bp, Homo sapien
caaaaagacacagaagtaggtaatagaaactca

SEQ ID NO: 892293 - DNA, 33 bp, Homo sapien
cttcaatattatacacagaaccactttgaactg

SEQ ID NO: 892294 - DNA, 33 bp, Homo sapien
cttcaatattatacacggaaccactttgaactg

SEQ ID NO: 892295 - DNA, 33 bp, Homo sapien
ctgaatagaatttgtaaggcaaaaacatagaaa

SEQ ID NO: 892296 - DNA, 33 bp, Homo sapien
ctgaatagaatttgtacggcaaaaacatagaaa

SEQ ID NO: 892297 - DNA, 33 bp, Homo sapien
tttaatataaattaacactaggctgtaatctgt

SEQ ID NO: 892298 - DNA, 33 bp, Homo sapien
tttaatataaattaacgctaggctgtaatctgt

SEQ ID NO: 892299 - DNA, 33 bp, Homo sapien
tgtaatgtcacctttaccaagtaatttgctaat

SEQ ID NO: 892300 - DNA, 33 bp, Homo sapien
tgtaatgtcacctttatcaagtaatttgctaat

SEQ ID NO: 892301 - DNA, 33 bp, Homo sapien
atacatatgaaccagaaggtgaaataaaggcaa

SEQ ID NO: 892302 - DNA, 33 bp, Homo sapien
atacatatgaaccagagggtgaaataaaggcaa

SEQ ID NO: 892303 - DNA, 33 bp, Homo sapien
ctgaactgaacgtctcaagtaccttaaaaactc

SEQ ID NO: 892304 - DNA, 33 bp, Homo sapien
ctgaactgaacgtctcgagtaccttaaaaactc

SEQ ID NO: 892305 - DNA, 33 bp, Homo sapien
agattgggaaaatccaatccactaataggctgc

SEQ ID NO: 892306 - DNA, 33 bp, Homo sapien
agattgggaaaatccagtccactaataggctgc

SEQ ID NO: 892307 - DNA, 33 bp, Homo sapien
cctagagggagacttaataaacagtgagtgtta

SEQ ID NO: 892308 - DNA, 33 bp, Homo sapien
cctagagggagacttagtaaacagtgagtgtta

SEQ ID NO: 892309 - DNA, 33 bp, Homo sapien
aagacactactccatacgtgtaaaatgtgggta

SEQ ID NO: 892310 - DNA, 33 bp, Homo sapien
aagacactactccatatgtgtaaaatgtgggta

SEQ ID NO: 892311 - DNA, 33 bp, Homo sapien
agtattgtctcttcgaacctcatgaatacatta

SEQ ID NO: 892312 - DNA, 33 bp, Homo sapien
agtattgtctcttcgatcctcatgaatacatta

SEQ ID NO: 892313 - DNA, 33 bp, Homo sapien
gatgtactggtattcacgctctcactcagttct

SEQ ID NO: 892314 - DNA, 33 bp, Homo sapien
gatgtactggtattcatgctctcactcagttct

SEQ ID NO: 892315 - DNA, 33 bp, Homo sapien
attgaaactttctcaaaacttcctgattgtgat

SEQ ID NO: 892316 - DNA, 33 bp, Homo sapien
attgaaactttctcaagacttcctgattgtgat

SEQ ID NO: 892317 - DNA, 33 bp, Homo sapien
gataagttcatgaagacggggccctgtagtgaa

SEQ ID NO: 892318 - DNA, 33 bp, Homo sapien
gataagttcatgaagatggggccctgtagtgaa

SEQ ID NO: 892319 - DNA, 33 bp, Homo sapien
aagagttgtatgtcagaaaacaaggaagaaaac

SEQ ID NO: 892320 - DNA, 33 bp, Homo sapien
aagagttgtatgtcaggaaacaaggaagaaaac

SEQ ID NO: 892321 - DNA, 33 bp, Homo sapien
aaaattgagtcagagcagcagtccttcatgcag

SEQ ID NO: 892322 - DNA, 33 bp, Homo sapien
aaaattgagtcagagcggcagtccttcatgcag

SEQ ID NO: 892323 - DNA, 33 bp, Homo sapien
ctgactcaattttgcacgtgggaggaataaact

SEQ ID NO: 892324 - DNA, 33 bp, Homo sapien
ctgactcaattttgcaggtgggaggaataaact

SEQ ID NO: 892325 - DNA, 33 bp, Homo sapien
ccttaacatagtttacaaagtttttcaaagcct

SEQ ID NO: 892326 - DNA, 33 bp, Homo sapien
ccttaacatagtttacgaagtttttcaaagcct

SEQ ID NO: 892327 - DNA, 33 bp, Homo sapien
ctaattaattgcttgcacatctaacccagtttt

SEQ ID NO: 892328 - DNA, 33 bp, Homo sapien
ctaattaattgcttgcccatctaacccagtttt

SEQ ID NO: 892329 - DNA, 33 bp, Homo sapien
taactgctcttttcaacgacttcttcactgaca

SEQ ID NO: 892330 - DNA, 33 bp, Homo sapien
taactgctcttttcaatgacttcttcactgaca

SEQ ID NO: 892331 - DNA, 33 bp, Homo sapien
tgcctagtaagtataaaagcagtggcatcacgg

SEQ ID NO: 892332 - DNA, 33 bp, Homo sapien
tgcctagtaagtataagagcagtggcatcacgg

SEQ ID NO: 892333 - DNA, 33 bp, Homo sapien
gaggttattcattagccaccattcctcctccca

SEQ ID NO: 892334 - DNA, 33 bp, Homo sapien
gaggttattcattagctaccattcctcctccca

SEQ ID NO: 892335 - DNA, 33 bp, Homo sapien
aaagccaatcagatcaagtcatttctatgctgg

SEQ ID NO: 892336 - DNA, 33 bp, Homo sapien
aaagccaatcagatcaggtcatttctatgctgg

SEQ ID NO: 892337 - DNA, 33 bp, Homo sapien
gaagtatcctgattcacacaagcttcaccttgt

SEQ ID NO: 892338 - DNA, 33 bp, Homo sapien
gaagtatcctgattcatacaagcttcaccttgt

SEQ ID NO: 892339 - DNA, 33 bp, Homo sapien
ggttgcaaaaacaacacgtgtctaagacagagg

SEQ ID NO: 892340 - DNA, 33 bp, Homo sapien
ggttgcaaaaacaacatgtgtctaagacagagg

SEQ ID NO: 892341 - DNA, 33 bp, Homo sapien
attgtatgtatcaatccgaaagacacataaaca

SEQ ID NO: 892342 - DNA, 33 bp, Homo sapien
attgtatgtatcaatctgaaagacacataaaca

SEQ ID NO: 892343 - DNA, 33 bp, Homo sapien
aactttagaatgcacaagaagtaattaacccag

SEQ ID NO: 892344 - DNA, 33 bp, Homo sapien
aactttagaatgcacaggaagtaattaacccag

SEQ ID NO: 892345 - DNA, 33 bp, Homo sapien
tcagtgtgcagtaggtcaccaaaatatattgct

SEQ ID NO: 892346 - DNA, 33 bp, Homo sapien
tcagtgtgcagtaggtgaccaaaatatattgct

SEQ ID NO: 892347 - DNA, 33 bp, Homo sapien
tttttgaggatgttaacattttgactatcaccc

SEQ ID NO: 892348 - DNA, 33 bp, Homo sapien
tttttgaggatgttaatattttgactatcaccc

SEQ ID NO: 892349 - DNA, 33 bp, Homo sapien
tatgtcacttataatcccatcttatggtataag

SEQ ID NO: 892350 - DNA, 33 bp, Homo sapien
tatgtcacttataatctcatcttatggtataag

SEQ ID NO: 892351 - DNA, 33 bp, Homo sapien
ccccgacacaaagatcacaggaagcatcacaga

SEQ ID NO: 892352 - DNA, 33 bp, Homo sapien
ccccgacacaaagatcccaggaagcatcacaga

SEQ ID NO: 892353 - DNA, 33 bp, Homo sapien
gtagctagctgtgacaactgattagtcctctgg

SEQ ID NO: 892354 - DNA, 33 bp, Homo sapien
gtagctagctgtgacatctgattagtcctctgg

SEQ ID NO: 892355 - DNA, 33 bp, Homo sapien
ggcttagggacgcctcagactcagtttgaccct

SEQ ID NO: 892356 - DNA, 33 bp, Homo sapien
ggcttagggacgcctcggactcagtttgaccct

SEQ ID NO: 892357 - DNA, 33 bp, Homo sapien
catccgaattgaaggtaacacttacacagagct

SEQ ID NO: 892358 - DNA, 33 bp, Homo sapien
catccgaattgaaggtcacacttacacagagct

SEQ ID NO: 892359 - DNA, 33 bp, Homo sapien
ctggaagatattcaaaccgtctctatgcttacg

SEQ ID NO: 892360 - DNA, 33 bp, Homo sapien
ctggaagatattcaaatcgtctctatgcttacg

SEQ ID NO: 892361 - DNA, 33 bp, Homo sapien
tagcatgtgagaaaagaaagtgttgtgtggaaa

SEQ ID NO: 892362 - DNA, 33 bp, Homo sapien
tagcatgtgagaaaagtaagtgttgtgtggaaa

SEQ ID NO: 892363 - DNA, 33 bp, Homo sapien
tcttgtctttagcaaagaatgaacttgcaagac

SEQ ID NO: 892364 - DNA, 33 bp, Homo sapien
tcttgtctttagcaaataatgaacttgcaagac

SEQ ID NO: 892365 - DNA, 33 bp, Homo sapien
atctttaaattcatggaataggctattagagga

SEQ ID NO: 892366 - DNA, 33 bp, Homo sapien
atctttaaattcatgggataggctattagagga

SEQ ID NO: 892367 - DNA, 33 bp, Homo sapien
gcccgtgggaaagaaaactttagatggtgactg

SEQ ID NO: 892368 - DNA, 33 bp, Homo sapien
gcccgtgggaaagaaagctttagatggtgactg

SEQ ID NO: 892369 - DNA, 33 bp, Homo sapien
ctctaaggttacttaccatctgattgaagaatt

SEQ ID NO: 892370 - DNA, 33 bp, Homo sapien
ctctaaggttacttacgatctgattgaagaatt

SEQ ID NO: 892371 - DNA, 33 bp, Homo sapien
ctctagtaggtagcaacctctactctctctgaa

SEQ ID NO: 892372 - DNA, 33 bp, Homo sapien
ctctagtaggtagcaatctctactctctctgaa

SEQ ID NO: 892373 - DNA, 33 bp, Homo sapien
tattcagagcaaacaacggatttgaatggctgt

SEQ ID NO: 892374 - DNA, 33 bp, Homo sapien
tattcagagcaaacaagggatttgaatggctgt

SEQ ID NO: 892375 - DNA, 33 bp, Homo sapien
caatattgttagatgacaaatacactccttcgg

SEQ ID NO: 892376 - DNA, 33 bp, Homo sapien
caatattgttagatgataaatacactccttcgg

SEQ ID NO: 892377 - DNA, 33 bp, Homo sapien
caaaattatgcagaaaaaccttatgataaaaag

SEQ ID NO: 892378 - DNA, 33 bp, Homo sapien
caaaattatgcagaaagaccttatgataaaaag

SEQ ID NO: 892379 - DNA, 33 bp, Homo sapien
aataccacctaatgaccaagaaacccaaaagag

SEQ ID NO: 892380 - DNA, 33 bp, Homo sapien
aataccacctaatgactaagaaacccaaaagag

SEQ ID NO: 892381 - DNA, 33 bp, Homo sapien
tcaagtgggttcagaaaaagtgatttgggttca

SEQ ID NO: 892382 - DNA, 33 bp, Homo sapien
tcaagtgggttcagaagaagtgatttgggttca

SEQ ID NO: 892383 - DNA, 33 bp, Homo sapien
tggatacaatggctacagaagcttttctgaaat

SEQ ID NO: 892384 - DNA, 33 bp, Homo sapien
tggatacaatggctacggaagcttttctgaaat

SEQ ID NO: 892385 - DNA, 33 bp, Homo sapien
acctactttcacatcaaataaaagggcacacat

SEQ ID NO: 892386 - DNA, 33 bp, Homo sapien
acctactttcacatcatataaaagggcacacat

SEQ ID NO: 892387 - DNA, 33 bp, Homo sapien
gtataacttgctgaatgaagcagaacctattca

SEQ ID NO: 892388 - DNA, 33 bp, Homo sapien
gtataacttgctgaattaagcagaacctattca

SEQ ID NO: 892389 - DNA, 33 bp, Homo sapien
attttggcactagcacaaacaggacttgttaaa

SEQ ID NO: 892390 - DNA, 33 bp, Homo sapien
attttggcactagcaccaacaggacttgttaaa

SEQ ID NO: 892391 - DNA, 33 bp, Homo sapien
tgtggaatcctgatgagagtttgagtagggagt

SEQ ID NO: 892392 - DNA, 33 bp, Homo sapien
tgtggaatcctgatgatagtttgagtagggagt

SEQ ID NO: 892393 - DNA, 33 bp, Homo sapien
agctggccctgagagacgttacaagttatgggt

SEQ ID NO: 892394 - DNA, 33 bp, Homo sapien
agctggccctgagagaggttacaagttatgggt

SEQ ID NO: 892395 - DNA, 33 bp, Homo sapien
cctcaaaatctccaccaaggacattgagaatta

SEQ ID NO: 892396 - DNA, 33 bp, Homo sapien
cctcaaaatctccaccgaggacattgagaatta

SEQ ID NO: 892397 - DNA, 33 bp, Homo sapien
agcttttagcccagataaagtcctgcaaaaact

SEQ ID NO: 892398 - DNA, 33 bp, Homo sapien
agcttttagcccagatgaagtcctgcaaaaact

SEQ ID NO: 892399 - DNA, 33 bp, Homo sapien
tctttaatgtcatagacgaattcccatgttcaa

SEQ ID NO: 892400 - DNA, 33 bp, Homo sapien
tctttaatgtcatagatgaattcccatgttcaa

SEQ ID NO: 892401 - DNA, 33 bp, Homo sapien
aactagagaagagctcagaaatgggtatctaat

SEQ ID NO: 892402 - DNA, 33 bp, Homo sapien
aactagagaagagctcggaaatgggtatctaat

SEQ ID NO: 892403 - DNA, 33 bp, Homo sapien
aggacacacaattttcacaagatatggaggtga

SEQ ID NO: 892404 - DNA, 33 bp, Homo sapien
aggacacacaattttcgcaagatatggaggtga

SEQ ID NO: 892405 - DNA, 33 bp, Homo sapien
ggtcaatacagtgtaacctgtctctactaaaaa

SEQ ID NO: 892406 - DNA, 33 bp, Homo sapien
ggtcaatacagtgtaatctgtctctactaaaaa

SEQ ID NO: 892407 - DNA, 33 bp, Homo sapien
aatcaactagcaaacaataacataaatttgcat

SEQ ID NO: 892408 - DNA, 33 bp, Homo sapien
aatcaactagcaaacagtaacataaatttgcat

SEQ ID NO: 892409 - DNA, 33 bp, Homo sapien
cccctggaagccctagccatcgctagatttaat

SEQ ID NO: 892410 - DNA, 33 bp, Homo sapien
cccctggaagccctagtcatcgctagatttaat

SEQ ID NO: 892411 - DNA, 33 bp, Homo sapien
ttggtgatcccaggaagtagtagactgatactg

SEQ ID NO: 892412 - DNA, 33 bp, Homo sapien
ttggtgatcccaggaattagtagactgatactg

SEQ ID NO: 892413 - DNA, 33 bp, Homo sapien
agatttgttgaagaagaaagactggatttcaag

SEQ ID NO: 892414 - DNA, 33 bp, Homo sapien
agatttgttgaagaaggaagactggatttcaag

SEQ ID NO: 892415 - DNA, 33 bp, Homo sapien
tgctctttggttacatgaactgacttttgttga

SEQ ID NO: 892416 - DNA, 33 bp, Homo sapien
tgctctttggttacattaactgacttttgttga

SEQ ID NO: 892417 - DNA, 33 bp, Homo sapien
cttagttttattctcacaattgcatccagccag

SEQ ID NO: 892418 - DNA, 33 bp, Homo sapien
cttagttttattctcataattgcatccagccag

SEQ ID NO: 892419 - DNA, 33 bp, Homo sapien
ctttgaggaaaatgcaacaaaactggaactctc

SEQ ID NO: 892420 - DNA, 33 bp, Homo sapien
ctttgaggaaaatgcagcaaaactggaactctc

SEQ ID NO: 892421 - DNA, 33 bp, Homo sapien
ccacacattagatgtacgattctctgtgagaag

SEQ ID NO: 892422 - DNA, 33 bp, Homo sapien
ccacacattagatgtatgattctctgtgagaag

SEQ ID NO: 892423 - DNA, 33 bp, Homo sapien
tataaaggactacatcaatttttgaaatcctgt

SEQ ID NO: 892424 - DNA, 33 bp, Homo sapien
tataaaggactacatcgatttttgaaatcctgt

SEQ ID NO: 892425 - DNA, 33 bp, Homo sapien
ttgttgcttatccttgcagtccaattcgtatac

SEQ ID NO: 892426 - DNA, 33 bp, Homo sapien
ttgttgcttatccttgtagtccaattcgtatac

SEQ ID NO: 892427 - DNA, 33 bp, Homo sapien
ctgtcttacgtacttcaaatgagagatgacacc

SEQ ID NO: 892428 - DNA, 33 bp, Homo sapien
ctgtcttacgtacttcgaatgagagatgacacc

SEQ ID NO: 892429 - DNA, 33 bp, Homo sapien
cattttaagggataccactagcaccaaacagat

SEQ ID NO: 892430 - DNA, 33 bp, Homo sapien
cattttaagggataccgctagcaccaaacagat

SEQ ID NO: 892431 - DNA, 33 bp, Homo sapien
ccaaacgacaccatgtaaataatgcacatactc

SEQ ID NO: 892432 - DNA, 33 bp, Homo sapien
ccaaacgacaccatgtgaataatgcacatactc

SEQ ID NO: 892433 - DNA, 33 bp, Homo sapien
actcacaacatgatcaaaattaggagcagtctc

SEQ ID NO: 892434 - DNA, 33 bp, Homo sapien
actcacaacatgatcagaattaggagcagtctc

SEQ ID NO: 892435 - DNA, 33 bp, Homo sapien
agcagatctgaaaaacaatagttccaaagagta

SEQ ID NO: 892436 - DNA, 33 bp, Homo sapien
agcagatctgaaaaactatagttccaaagagta

SEQ ID NO: 892437 - DNA, 33 bp, Homo sapien
ccttcagccccttcgacgattatgtaagtacct

SEQ ID NO: 892438 - DNA, 33 bp, Homo sapien
ccttcagccccttcgatgattatgtaagtacct

SEQ ID NO: 892439 - DNA, 33 bp, Homo sapien
tgatgcaaaaggtagacacagcaactagtgaga

SEQ ID NO: 892440 - DNA, 33 bp, Homo sapien
tgatgcaaaaggtagatacagcaactagtgaga

SEQ ID NO: 892441 - DNA, 33 bp, Homo sapien
gggtaaaacaagagagaaaatgataagtactat

SEQ ID NO: 892442 - DNA, 33 bp, Homo sapien
gggtaaaacaagagaggaaatgataagtactat

SEQ ID NO: 892443 - DNA, 33 bp, Homo sapien
tccaatcaaaagttccccaatcaaagaaccagt

SEQ ID NO: 892444 - DNA, 33 bp, Homo sapien
tccaatcaaaagttccgcaatcaaagaaccagt

SEQ ID NO: 892445 - DNA, 33 bp, Homo sapien
tatttacagctaaaatgaaatgatgttttgaat

SEQ ID NO: 892446 - DNA, 33 bp, Homo sapien
tatttacagctaaaattaaatgatgttttgaat

SEQ ID NO: 892447 - DNA, 33 bp, Homo sapien
acctacagtgatgtcaactaagtccagttttgc

SEQ ID NO: 892448 - DNA, 33 bp, Homo sapien
acctacagtgatgtcagctaagtccagttttgc

SEQ ID NO: 892449 - DNA, 33 bp, Homo sapien
ggctgaattggatgtacaagtggagccctgaga

SEQ ID NO: 892450 - DNA, 33 bp, Homo sapien
ggctgaattggatgtagaagtggagccctgaga

SEQ ID NO: 892451 - DNA, 33 bp, Homo sapien
tggtgtattggaatgcgagtttttcttttggac

SEQ ID NO: 892452 - DNA, 33 bp, Homo sapien
tggtgtattggaatgctagtttttcttttggac

SEQ ID NO: 892453 - DNA, 33 bp, Homo sapien
cagcagtgaataagtcacaacagatggtgagtg

SEQ ID NO: 892454 - DNA, 33 bp, Homo sapien
cagcagtgaataagtcgcaacagatggtgagtg

SEQ ID NO: 892455 - DNA, 33 bp, Homo sapien
cagcctctcagaaacacgataatagagatccat

SEQ ID NO: 892456 - DNA, 33 bp, Homo sapien
cagcctctcagaaacatgataatagagatccat

SEQ ID NO: 892457 - DNA, 33 bp, Homo sapien
tagattgagttgctgagataaaatgcttgccct

SEQ ID NO: 892458 - DNA, 33 bp, Homo sapien
tagattgagttgctgatataaaatgcttgccct

SEQ ID NO: 892459 - DNA, 33 bp, Homo sapien
taaagacagtaaaagaagaacttggagaatgag

SEQ ID NO: 892460 - DNA, 33 bp, Homo sapien
taaagacagtaaaagatgaacttggagaatgag

SEQ ID NO: 892461 - DNA, 33 bp, Homo sapien
atgtgtacgtcttcaaagtgcagcaagtcgccc

SEQ ID NO: 892462 - DNA, 33 bp, Homo sapien
atgtgtacgtcttcaaggtgcagcaagtcgccc

SEQ ID NO: 892463 - DNA, 33 bp, Homo sapien
cagaatcctatgaagaatccgttggagagtctc

SEQ ID NO: 892464 - DNA, 33 bp, Homo sapien
cagaatcctatgaagagtccgttggagagtctc

SEQ ID NO: 892465 - DNA, 33 bp, Homo sapien
tgtcagtgcctggaacaactctgctttttccat

SEQ ID NO: 892466 - DNA, 33 bp, Homo sapien
tgtcagtgcctggaacgactctgctttttccat

SEQ ID NO: 892467 - DNA, 33 bp, Homo sapien
aacctgtcccttaggccaccgtagcttgcagag

SEQ ID NO: 892468 - DNA, 33 bp, Homo sapien
aacctgtcccttaggctaccgtagcttgcagag

SEQ ID NO: 892469 - DNA, 33 bp, Homo sapien
atgaaatacagtgacaccctctccttcccatcg

SEQ ID NO: 892470 - DNA, 33 bp, Homo sapien
atgaaatacagtgacatcctctccttcccatcg

SEQ ID NO: 892471 - DNA, 33 bp, Homo sapien
cagcatctctatatcaccagtttgaagtagaac

SEQ ID NO: 892472 - DNA, 33 bp, Homo sapien
cagcatctctatatcagcagtttgaagtagaac

SEQ ID NO: 892473 - DNA, 33 bp, Homo sapien
tagttatagcaagaaactaaaacgagatacaat

SEQ ID NO: 892474 - DNA, 33 bp, Homo sapien
tagttatagcaagaaagtaaaacgagatacaat

SEQ ID NO: 892475 - DNA, 33 bp, Homo sapien
tgtacacaaagtgaaagcctaattaaccttcaa

SEQ ID NO: 892476 - DNA, 33 bp, Homo sapien
tgtacacaaagtgaaatcctaattaaccttcaa

SEQ ID NO: 892477 - DNA, 33 bp, Homo sapien
atgaatgtccatttgacacttttattcatggct

SEQ ID NO: 892478 - DNA, 33 bp, Homo sapien
atgaatgtccatttgatacttttattcatggct

SEQ ID NO: 892479 - DNA, 33 bp, Homo sapien
ctttaatctgtcactaaatctttttgcttctat

SEQ ID NO: 892480 - DNA, 33 bp, Homo sapien
ctttaatctgtcactatatctttttgcttctat

SEQ ID NO: 892481 - DNA, 33 bp, Homo sapien
ttcgacggcattaacaaaagaaaagatacctat

SEQ ID NO: 892482 - DNA, 33 bp, Homo sapien
ttcgacggcattaacacaagaaaagatacctat

SEQ ID NO: 892483 - DNA, 33 bp, Homo sapien
cagaagctccacaatactattctcacaacagca

SEQ ID NO: 892484 - DNA, 33 bp, Homo sapien
cagaagctccacaatattattctcacaacagca

SEQ ID NO: 892485 - DNA, 33 bp, Homo sapien
caattagaacttgacaaaagcagaattgaaaag

SEQ ID NO: 892486 - DNA, 33 bp, Homo sapien
caattagaacttgacagaagcagaattgaaaag

SEQ ID NO: 892487 - DNA, 33 bp, Homo sapien
actttgtgtatggatcactgagaaaaaaacttc

SEQ ID NO: 892488 - DNA, 33 bp, Homo sapien
actttgtgtatggatcgctgagaaaaaaacttc

SEQ ID NO: 892489 - DNA, 33 bp, Homo sapien
tttatgtattgcatacagacaggtagttgtcaa

SEQ ID NO: 892490 - DNA, 33 bp, Homo sapien
tttatgtattgcatacggacaggtagttgtcaa

SEQ ID NO: 892491 - DNA, 33 bp, Homo sapien
ttttttttaatcctgcacggacaattggagtgc

SEQ ID NO: 892492 - DNA, 33 bp, Homo sapien
ttttttttaatcctgcgcggacaattggagtgc

SEQ ID NO: 892493 - DNA, 33 bp, Homo sapien
ttagctccatctgaggaacagcgcatcgataag

SEQ ID NO: 892494 - DNA, 33 bp, Homo sapien
ttagctccatctgaggcacagcgcatcgataag

SEQ ID NO: 892495 - DNA, 33 bp, Homo sapien
tagaaagaaacaaggacggaaactctggaacgc

SEQ ID NO: 892496 - DNA, 33 bp, Homo sapien
tagaaagaaacaaggatggaaactctggaacgc

SEQ ID NO: 892497 - DNA, 33 bp, Homo sapien
cccccaacactatgaacattttccctctgtgtg

SEQ ID NO: 892498 - DNA, 33 bp, Homo sapien
cccccaacactatgaatattttccctctgtgtg

SEQ ID NO: 892499 - DNA, 33 bp, Homo sapien
gagctcatgaagttgaaccgtgtgatggtaaac

SEQ ID NO: 892500 - DNA, 33 bp, Homo sapien
gagctcatgaagttgagccgtgtgatggtaaac

SEQ ID NO: 892501 - DNA, 33 bp, Homo sapien
tagttacagcattgatcaaatcacaatctctgg

SEQ ID NO: 892502 - DNA, 33 bp, Homo sapien
tagttacagcattgatgaaatcacaatctctgg

SEQ ID NO: 892503 - DNA, 33 bp, Homo sapien
tccctacacatatggaaccttttatattcaagg

SEQ ID NO: 892504 - DNA, 33 bp, Homo sapien
tccctacacatatggacccttttatattcaagg

SEQ ID NO: 892505 - DNA, 33 bp, Homo sapien
taaggccctaaggcaaagacttcactgctggtg

SEQ ID NO: 892506 - DNA, 33 bp, Homo sapien
taaggccctaaggcaaggacttcactgctggtg

SEQ ID NO: 892507 - DNA, 33 bp, Homo sapien
tttaggtgattcctaacagcctggctacttggc

SEQ ID NO: 892508 - DNA, 33 bp, Homo sapien
tttaggtgattcctaagagcctggctacttggc

SEQ ID NO: 892509 - DNA, 33 bp, Homo sapien
tatagctaaaatgttaactggcaaagcattgct

SEQ ID NO: 892510 - DNA, 33 bp, Homo sapien
tatagctaaaatgttagctggcaaagcattgct

SEQ ID NO: 892511 - DNA, 33 bp, Homo sapien
gtgttatttataaagacgattgcgatacataaa

SEQ ID NO: 892512 - DNA, 33 bp, Homo sapien
gtgttatttataaagaggattgcgatacataaa

SEQ ID NO: 892513 - DNA, 33 bp, Homo sapien
attattatgtggctccaaactttgctttatgaa

SEQ ID NO: 892514 - DNA, 33 bp, Homo sapien
attattatgtggctccgaactttgctttatgaa

SEQ ID NO: 892515 - DNA, 33 bp, Homo sapien
gttcattcgttgattacaaatatttattttgta

SEQ ID NO: 892516 - DNA, 33 bp, Homo sapien
gttcattcgttgattagaaatatttattttgta

SEQ ID NO: 892517 - DNA, 33 bp, Homo sapien
ataaaaaaggatgtgaaaagtctggccaacaca

SEQ ID NO: 892518 - DNA, 33 bp, Homo sapien
ataaaaaaggatgtgagaagtctggccaacaca

SEQ ID NO: 892519 - DNA, 33 bp, Homo sapien
gagatacctcatagcacgacctaatacctaccg

SEQ ID NO: 892520 - DNA, 33 bp, Homo sapien
gagatacctcatagcatgacctaatacctaccg

SEQ ID NO: 892521 - DNA, 33 bp, Homo sapien
tatttccactttcttcccagtgaccaattaaaa

SEQ ID NO: 892522 - DNA, 33 bp, Homo sapien
tatttccactttcttctcagtgaccaattaaaa

SEQ ID NO: 892523 - DNA, 33 bp, Homo sapien
tggtaaggaaagaaaacggcaagaggagatgga

SEQ ID NO: 892524 - DNA, 33 bp, Homo sapien
tggtaaggaaagaaaatggcaagaggagatgga

SEQ ID NO: 892525 - DNA, 33 bp, Homo sapien
gtgaggatgatgttgaaaagatcaaagcatgaa

SEQ ID NO: 892526 - DNA, 33 bp, Homo sapien
gtgaggatgatgttgagaagatcaaagcatgaa

SEQ ID NO: 892527 - DNA, 33 bp, Homo sapien
tcttttgttgtggtatcaagtattggcagtata

SEQ ID NO: 892528 - DNA, 33 bp, Homo sapien
tcttttgttgtggtatgaagtattggcagtata

SEQ ID NO: 892529 - DNA, 33 bp, Homo sapien
agtaaactcttgatgaactcagctaaagactca

SEQ ID NO: 892530 - DNA, 33 bp, Homo sapien
agtaaactcttgatgacctcagctaaagactca

SEQ ID NO: 892531 - DNA, 33 bp, Homo sapien
ctcaaagatacctcagaaatgtgtacttggaaa

SEQ ID NO: 892532 - DNA, 33 bp, Homo sapien
ctcaaagatacctcagcaatgtgtacttggaaa

SEQ ID NO: 892533 - DNA, 33 bp, Homo sapien
catgcatttgtgtccaatgagttataaggcttg

SEQ ID NO: 892534 - DNA, 33 bp, Homo sapien
catgcatttgtgtccagtgagttataaggcttg

SEQ ID NO: 892535 - DNA, 33 bp, Homo sapien
accctgtctagcactgaaagaattttaatttgc

SEQ ID NO: 892536 - DNA, 33 bp, Homo sapien
accctgtctagcactgtaagaattttaatttgc

SEQ ID NO: 892537 - DNA, 33 bp, Homo sapien
catgggtccaattaaccgcccttaaattagttt

SEQ ID NO: 892538 - DNA, 33 bp, Homo sapien
catgggtccaattaactgcccttaaattagttt

SEQ ID NO: 892539 - DNA, 33 bp, Homo sapien
ctagaacagaacctaacgtattccagaatgtgg

SEQ ID NO: 892540 - DNA, 33 bp, Homo sapien
ctagaacagaacctaatgtattccagaatgtgg

SEQ ID NO: 892541 - DNA, 33 bp, Homo sapien
tttgttaaaatagacaaatgcaaaagagttatt

SEQ ID NO: 892542 - DNA, 33 bp, Homo sapien
tttgttaaaatagacagatgcaaaagagttatt

SEQ ID NO: 892543 - DNA, 33 bp, Homo sapien
acttgaggtaggaaagcagttagcactctgtat

SEQ ID NO: 892544 - DNA, 33 bp, Homo sapien
acttgaggtaggaaaggagttagcactctgtat

SEQ ID NO: 892545 - DNA, 33 bp, Homo sapien
acacaataggcaaactcagtcatccaaaaatga

SEQ ID NO: 892546 - DNA, 33 bp, Homo sapien
acacaataggcaaactgagtcatccaaaaatga

SEQ ID NO: 892547 - DNA, 33 bp, Homo sapien
attctgtttccttgtaacatacgggcacattta

SEQ ID NO: 892548 - DNA, 33 bp, Homo sapien
attctgtttccttgtagcatacgggcacattta

SEQ ID NO: 892549 - DNA, 33 bp, Homo sapien
cttcattttctctctccctgaccctaacccctc

SEQ ID NO: 892550 - DNA, 33 bp, Homo sapien
cttcattttctctctctctgaccctaacccctc

SEQ ID NO: 892551 - DNA, 33 bp, Homo sapien
gaaaagaccaaattgaaaatacggcgatctttc

SEQ ID NO: 892552 - DNA, 33 bp, Homo sapien
gaaaagaccaaattgagaatacggcgatctttc

SEQ ID NO: 892553 - DNA, 33 bp, Homo sapien
actttgccagctatggccaatgagtgctatgtc

SEQ ID NO: 892554 - DNA, 33 bp, Homo sapien
actttgccagctatgggcaatgagtgctatgtc

SEQ ID NO: 892555 - DNA, 33 bp, Homo sapien
attagggaattattaaaccaatttcaactcacc

SEQ ID NO: 892556 - DNA, 33 bp, Homo sapien
attagggaattattaagccaatttcaactcacc

SEQ ID NO: 892557 - DNA, 33 bp, Homo sapien
ttgtgtatcttgcctaaaagttgatctatagtc

SEQ ID NO: 892558 - DNA, 33 bp, Homo sapien
ttgtgtatcttgcctataagttgatctatagtc

SEQ ID NO: 892559 - DNA, 33 bp, Homo sapien
tcattcaataggtgagcagataaatgtggccta

SEQ ID NO: 892560 - DNA, 33 bp, Homo sapien
tcattcaataggtgagtagataaatgtggccta

SEQ ID NO: 892561 - DNA, 33 bp, Homo sapien
atttgctaatatctccaccatgattacagaatg

SEQ ID NO: 892562 - DNA, 33 bp, Homo sapien
atttgctaatatctccgccatgattacagaatg

SEQ ID NO: 892563 - DNA, 33 bp, Homo sapien
tcctaaattctcgtaactggtagagttcaggtt

SEQ ID NO: 892564 - DNA, 33 bp, Homo sapien
tcctaaattctcgtaagtggtagagttcaggtt

SEQ ID NO: 892565 - DNA, 33 bp, Homo sapien
ttacccatgctcaaaacttagtatcttgtttca

SEQ ID NO: 892566 - DNA, 33 bp, Homo sapien
ttacccatgctcaaaatttagtatcttgtttca

SEQ ID NO: 892567 - DNA, 33 bp, Homo sapien
ggattcaaatccaatccaaaagctgaacattga

SEQ ID NO: 892568 - DNA, 33 bp, Homo sapien
ggattcaaatccaatcgaaaagctgaacattga

SEQ ID NO: 892569 - DNA, 33 bp, Homo sapien
aattcagtgttcctaaaataggattaagtttct

SEQ ID NO: 892570 - DNA, 33 bp, Homo sapien
aattcagtgttcctaagataggattaagtttct

SEQ ID NO: 892571 - DNA, 33 bp, Homo sapien
tattcctggaagtttaacaagcaacagtagtaa

SEQ ID NO: 892572 - DNA, 33 bp, Homo sapien
tattcctggaagtttagcaagcaacagtagtaa

SEQ ID NO: 892573 - DNA, 33 bp, Homo sapien
gagagagtattctttcccggttctgctatggct

SEQ ID NO: 892574 - DNA, 33 bp, Homo sapien
gagagagtattctttctcggttctgctatggct

SEQ ID NO: 892575 - DNA, 33 bp, Homo sapien
atagcaccatttactaggtgtaagttatatctc

SEQ ID NO: 892576 - DNA, 33 bp, Homo sapien
atagcaccatttactatgtgtaagttatatctc

SEQ ID NO: 892577 - DNA, 33 bp, Homo sapien
aaatattgctttaaccacattggagtaatacca

SEQ ID NO: 892578 - DNA, 33 bp, Homo sapien
aaatattgctttaacctcattggagtaatacca

SEQ ID NO: 892579 - DNA, 33 bp, Homo sapien
tgatgatagcagtgctgaagcaaaagaaatctg

SEQ ID NO: 892580 - DNA, 33 bp, Homo sapien
tgatgatagcagtgcttaagcaaaagaaatctg

SEQ ID NO: 892581 - DNA, 33 bp, Homo sapien
tattagtaattgttaacgattgcaataactgat

SEQ ID NO: 892582 - DNA, 33 bp, Homo sapien
tattagtaattgttaatgattgcaataactgat

SEQ ID NO: 892583 - DNA, 33 bp, Homo sapien
actggcctcctgtggactatctttgactgactc

SEQ ID NO: 892584 - DNA, 33 bp, Homo sapien
actggcctcctgtggagtatctttgactgactc

SEQ ID NO: 892585 - DNA, 33 bp, Homo sapien
taacacattaagactaaactgcagtagattata

SEQ ID NO: 892586 - DNA, 33 bp, Homo sapien
taacacattaagactacactgcagtagattata

SEQ ID NO: 892587 - DNA, 33 bp, Homo sapien
gttgcttcacctccccgcctcaaaacagagtag

SEQ ID NO: 892588 - DNA, 33 bp, Homo sapien
gttgcttcacctcccctcctcaaaacagagtag

SEQ ID NO: 892589 - DNA, 33 bp, Homo sapien
atattatagaagctaacagaggtgaggattaag

SEQ ID NO: 892590 - DNA, 33 bp, Homo sapien
atattatagaagctaatagaggtgaggattaag

SEQ ID NO: 892591 - DNA, 33 bp, Homo sapien
ataaaatggcgataaggacctttcccttaaagg

SEQ ID NO: 892592 - DNA, 33 bp, Homo sapien
ataaaatggcgataagtacctttcccttaaagg

SEQ ID NO: 892593 - DNA, 33 bp, Homo sapien
ttcaccttacctgctacgtatcaatcactgggt

SEQ ID NO: 892594 - DNA, 33 bp, Homo sapien
ttcaccttacctgctatgtatcaatcactgggt

SEQ ID NO: 892595 - DNA, 33 bp, Homo sapien
cttatatccatatacacgatgggctttgccact

SEQ ID NO: 892596 - DNA, 33 bp, Homo sapien
cttatatccatatacaggatgggctttgccact

SEQ ID NO: 892597 - DNA, 33 bp, Homo sapien
atctttaagaagtctacataggatgtttgtctc

SEQ ID NO: 892598 - DNA, 33 bp, Homo sapien
atctttaagaagtctatataggatgtttgtctc

SEQ ID NO: 892599 - DNA, 33 bp, Homo sapien
cagcacgaggtaggcagcagataaggctgggaa

SEQ ID NO: 892600 - DNA, 33 bp, Homo sapien
cagcacgaggtaggcatcagataaggctgggaa

SEQ ID NO: 892601 - DNA, 33 bp, Homo sapien
tgacaggaaattttcaaagctaaaatcatgtac

SEQ ID NO: 892602 - DNA, 33 bp, Homo sapien
tgacaggaaattttcagagctaaaatcatgtac

SEQ ID NO: 892603 - DNA, 33 bp, Homo sapien
tggtataacgatacaacggaaagagaatagaag

SEQ ID NO: 892604 - DNA, 33 bp, Homo sapien
tggtataacgatacaatggaaagagaatagaag

SEQ ID NO: 892605 - DNA, 33 bp, Homo sapien
ccacacagacagtggcgataagagtgaagctgc

SEQ ID NO: 892606 - DNA, 33 bp, Homo sapien
ccacacagacagtggctataagagtgaagctgc

SEQ ID NO: 892607 - DNA, 33 bp, Homo sapien
tcaaatgctgggcttacacaagtatatggtatc

SEQ ID NO: 892608 - DNA, 33 bp, Homo sapien
tcaaatgctgggcttatacaagtatatggtatc

SEQ ID NO: 892609 - DNA, 33 bp, Homo sapien
ccttccacttcaatcacactaattttcttcatt

SEQ ID NO: 892610 - DNA, 33 bp, Homo sapien
ccttccacttcaatcagactaattttcttcatt

SEQ ID NO: 892611 - DNA, 33 bp, Homo sapien
tgttcaccgactcttacagccaaattaattatt

SEQ ID NO: 892612 - DNA, 33 bp, Homo sapien
tgttcaccgactcttatagccaaattaattatt

SEQ ID NO: 892613 - DNA, 33 bp, Homo sapien
aataatgtttaattacacatcttgctaacattc

SEQ ID NO: 892614 - DNA, 33 bp, Homo sapien
aataatgtttaattacgcatcttgctaacattc

SEQ ID NO: 892615 - DNA, 33 bp, Homo sapien
gtattgtcatttaaaaatccttgccagtgttac

SEQ ID NO: 892616 - DNA, 33 bp, Homo sapien
gtattgtcatttaaaattccttgccagtgttac

SEQ ID NO: 892617 - DNA, 33 bp, Homo sapien
actgaaataggtagccaaattaccaaacacaga

SEQ ID NO: 892618 - DNA, 33 bp, Homo sapien
actgaaataggtagccgaattaccaaacacaga

SEQ ID NO: 892619 - DNA, 33 bp, Homo sapien
ctcccacttttagagaaaatcttggggtagatc

SEQ ID NO: 892620 - DNA, 33 bp, Homo sapien
ctcccacttttagagagaatcttggggtagatc

SEQ ID NO: 892621 - DNA, 33 bp, Homo sapien
agacaaatggttcttgcaataagcgacagcggt

SEQ ID NO: 892622 - DNA, 33 bp, Homo sapien
agacaaatggttcttggaataagcgacagcggt

SEQ ID NO: 892623 - DNA, 33 bp, Homo sapien
tgctggtgctggaagtaaagcgatcagggaact

SEQ ID NO: 892624 - DNA, 33 bp, Homo sapien
tgctggtgctggaagtgaagcgatcagggaact

SEQ ID NO: 892625 - DNA, 33 bp, Homo sapien
tgacttgctaaaatccaaacactgtgtctatag

SEQ ID NO: 892626 - DNA, 33 bp, Homo sapien
tgacttgctaaaatcccaacactgtgtctatag

SEQ ID NO: 892627 - DNA, 33 bp, Homo sapien
accatttgggtttgcacgaatatttggcaagga

SEQ ID NO: 892628 - DNA, 33 bp, Homo sapien
accatttgggtttgcatgaatatttggcaagga

SEQ ID NO: 892629 - DNA, 33 bp, Homo sapien
ctgtagacacgcaaaagctcaaaagctacagca

SEQ ID NO: 892630 - DNA, 33 bp, Homo sapien
ctgtagacacgcaaaatctcaaaagctacagca

SEQ ID NO: 892631 - DNA, 33 bp, Homo sapien
tcttccctattcaagactatgtttctcagcttc

SEQ ID NO: 892632 - DNA, 33 bp, Homo sapien
tcttccctattcaagattatgtttctcagcttc

SEQ ID NO: 892633 - DNA, 33 bp, Homo sapien
caatccaatatccccactaggtgaccaaggaaa

SEQ ID NO: 892634 - DNA, 33 bp, Homo sapien
caatccaatatccccattaggtgaccaaggaaa

SEQ ID NO: 892635 - DNA, 33 bp, Homo sapien
ccctcttggaatcagcaaacagctacatatata

SEQ ID NO: 892636 - DNA, 33 bp, Homo sapien
ccctcttggaatcagcgaacagctacatatata

SEQ ID NO: 892637 - DNA, 33 bp, Homo sapien
tcttatcaatcctatggcagtatctgttttgag

SEQ ID NO: 892638 - DNA, 33 bp, Homo sapien
tcttatcaatcctatgtcagtatctgttttgag

SEQ ID NO: 892639 - DNA, 33 bp, Homo sapien
aatgaaaattgtgtgacatgttgactttgttac

SEQ ID NO: 892640 - DNA, 33 bp, Homo sapien
aatgaaaattgtgtgatatgttgactttgttac

SEQ ID NO: 892641 - DNA, 33 bp, Homo sapien
cgaaataattactgtgaactttaggaccattta

SEQ ID NO: 892642 - DNA, 33 bp, Homo sapien
cgaaataattactgtggactttaggaccattta

SEQ ID NO: 892643 - DNA, 33 bp, Homo sapien
gtgaaatgtaggtattaaaattttcccaccatt

SEQ ID NO: 892644 - DNA, 33 bp, Homo sapien
gtgaaatgtaggtattcaaattttcccaccatt

SEQ ID NO: 892645 - DNA, 33 bp, Homo sapien
tcaataaagctatgaaggaaaagataaagaagc

SEQ ID NO: 892646 - DNA, 33 bp, Homo sapien
tcaataaagctatgaatgaaaagataaagaagc

SEQ ID NO: 892647 - DNA, 33 bp, Homo sapien
gatatcaaataagtggaactgacaataagggtg

SEQ ID NO: 892648 - DNA, 33 bp, Homo sapien
gatatcaaataagtgggactgacaataagggtg

SEQ ID NO: 892649 - DNA, 33 bp, Homo sapien
gtatagaatggttatgaaagagtttagtgcatt

SEQ ID NO: 892650 - DNA, 33 bp, Homo sapien
gtatagaatggttatgcaagagtttagtgcatt

SEQ ID NO: 892651 - DNA, 33 bp, Homo sapien
aatagaaatatttgcccagtggtattgctatca

SEQ ID NO: 892652 - DNA, 33 bp, Homo sapien
aatagaaatatttgcctagtggtattgctatca

SEQ ID NO: 892653 - DNA, 33 bp, Homo sapien
tgtgtagacctcatatgaagtgcccaaggccgt

SEQ ID NO: 892654 - DNA, 33 bp, Homo sapien
tgtgtagacctcatattaagtgcccaaggccgt

SEQ ID NO: 892655 - DNA, 33 bp, Homo sapien
atagtaacagtagataagaacagtagaataaca

SEQ ID NO: 892656 - DNA, 33 bp, Homo sapien
atagtaacagtagataggaacagtagaataaca

SEQ ID NO: 892657 - DNA, 33 bp, Homo sapien
gattaagtatcttttcaaactcagttggttctt

SEQ ID NO: 892658 - DNA, 33 bp, Homo sapien
gattaagtatcttttcgaactcagttggttctt

SEQ ID NO: 892659 - DNA, 33 bp, Homo sapien
tgtcttattatgttcaggctcaaagagattaag

SEQ ID NO: 892660 - DNA, 33 bp, Homo sapien
tgtcttattatgttcatgctcaaagagattaag

SEQ ID NO: 892661 - DNA, 33 bp, Homo sapien
ccagtgcttgttgaaacaggtgctcaataaatg

SEQ ID NO: 892662 - DNA, 33 bp, Homo sapien
ccagtgcttgttgaaataggtgctcaataaatg

SEQ ID NO: 892663 - DNA, 33 bp, Homo sapien
tgaagccatttgtaaaataagtctttcatcttt

SEQ ID NO: 892664 - DNA, 33 bp, Homo sapien
tgaagccatttgtaaagtaagtctttcatcttt

SEQ ID NO: 892665 - DNA, 33 bp, Homo sapien
ctaagatcatgcaagccctaacaagaaatgagt

SEQ ID NO: 892666 - DNA, 33 bp, Homo sapien
ctaagatcatgcaagctctaacaagaaatgagt

SEQ ID NO: 892667 - DNA, 33 bp, Homo sapien
cgtactttctttagtaaaatttatggcaattca

SEQ ID NO: 892668 - DNA, 33 bp, Homo sapien
cgtactttctttagtacaatttatggcaattca

SEQ ID NO: 892669 - DNA, 33 bp, Homo sapien
caactggtagtaagacaggagagtttcctggtc

SEQ ID NO: 892670 - DNA, 33 bp, Homo sapien
caactggtagtaagacgggagagtttcctggtc

SEQ ID NO: 892671 - DNA, 33 bp, Homo sapien
agcatgagaatgtttacagctgatttaaaagcc

SEQ ID NO: 892672 - DNA, 33 bp, Homo sapien
agcatgagaatgtttagagctgatttaaaagcc

SEQ ID NO: 892673 - DNA, 33 bp, Homo sapien
ctctatcaatttctgaccattaactctcatctt

SEQ ID NO: 892674 - DNA, 33 bp, Homo sapien
ctctatcaatttctgatcattaactctcatctt

SEQ ID NO: 892675 - DNA, 33 bp, Homo sapien
tatttcagtacttttccagtccatttcagagtt

SEQ ID NO: 892676 - DNA, 33 bp, Homo sapien
tatttcagtacttttcgagtccatttcagagtt

SEQ ID NO: 892677 - DNA, 33 bp, Homo sapien
tgggttgagtaacatccaaggattaatacctct

SEQ ID NO: 892678 - DNA, 33 bp, Homo sapien
tgggttgagtaacatcgaaggattaatacctct

SEQ ID NO: 892679 - DNA, 33 bp, Homo sapien
aaaggccaaaacttgacgatgagcaaatgaggc

SEQ ID NO: 892680 - DNA, 33 bp, Homo sapien
aaaggccaaaacttgatgatgagcaaatgaggc

SEQ ID NO: 892681 - DNA, 33 bp, Homo sapien
aaagcttctacatagcaaaggaaataatcagca

SEQ ID NO: 892682 - DNA, 33 bp, Homo sapien
aaagcttctacatagccaaggaaataatcagca

SEQ ID NO: 892683 - DNA, 33 bp, Homo sapien
gtcttgaaccccaccaaattctctatccattgc

SEQ ID NO: 892684 - DNA, 33 bp, Homo sapien
gtcttgaaccccaccacattctctatccattgc

SEQ ID NO: 892685 - DNA, 33 bp, Homo sapien
ctcaaaaggctcaatccaaatcaaccattgtag

SEQ ID NO: 892686 - DNA, 33 bp, Homo sapien
ctcaaaaggctcaatcgaaatcaaccattgtag

SEQ ID NO: 892687 - DNA, 33 bp, Homo sapien
taatcaagccagaaaacattgcctagcaacatc

SEQ ID NO: 892688 - DNA, 33 bp, Homo sapien
taatcaagccagaaaagattgcctagcaacatc

SEQ ID NO: 892689 - DNA, 33 bp, Homo sapien
ttgtgtagatttttcaaacctcaagattattca

SEQ ID NO: 892690 - DNA, 33 bp, Homo sapien
ttgtgtagatttttcagacctcaagattattca

SEQ ID NO: 892691 - DNA, 33 bp, Homo sapien
aaaataaatccacgctaaagtttctgctatgca

SEQ ID NO: 892692 - DNA, 33 bp, Homo sapien
aaaataaatccacgctgaagtttctgctatgca

SEQ ID NO: 892693 - DNA, 33 bp, Homo sapien
ttttttggcctactttaaaaattatcttcttac

SEQ ID NO: 892694 - DNA, 33 bp, Homo sapien
ttttttggcctacttttaaaattatcttcttac

SEQ ID NO: 892695 - DNA, 33 bp, Homo sapien
atacaaggtagatccactggaagtcacgttgag

SEQ ID NO: 892696 - DNA, 33 bp, Homo sapien
atacaaggtagatccagtggaagtcacgttgag

SEQ ID NO: 892697 - DNA, 33 bp, Homo sapien
aaaatacattggtgcaaaaaggctagcaaaggg

SEQ ID NO: 892698 - DNA, 33 bp, Homo sapien
aaaatacattggtgcacaaaggctagcaaaggg

SEQ ID NO: 892699 - DNA, 33 bp, Homo sapien
atagactacacgaatcacagtgtttatttgtat

SEQ ID NO: 892700 - DNA, 33 bp, Homo sapien
atagactacacgaatcccagtgtttatttgtat

SEQ ID NO: 892701 - DNA, 33 bp, Homo sapien
ccttgaaagatggggaaaccgttcaatacaaat

SEQ ID NO: 892702 - DNA, 33 bp, Homo sapien
ccttgaaagatggggacaccgttcaatacaaat

SEQ ID NO: 892703 - DNA, 33 bp, Homo sapien
gagtgctctcttggcacactaaaaataataata

SEQ ID NO: 892704 - DNA, 33 bp, Homo sapien
gagtgctctcttggcagactaaaaataataata

SEQ ID NO: 892705 - DNA, 33 bp, Homo sapien
gtctgggaatgaggtaaaaaaggatcataaaat

SEQ ID NO: 892706 - DNA, 33 bp, Homo sapien
gtctgggaatgaggtataaaaggatcataaaat

SEQ ID NO: 892707 - DNA, 33 bp, Homo sapien
gaatgaatgtataaaacctgagttaatctgaac

SEQ ID NO: 892708 - DNA, 33 bp, Homo sapien
gaatgaatgtataaaagctgagttaatctgaac

SEQ ID NO: 892709 - DNA, 33 bp, Homo sapien
ctagcttggcacaagaaatagatataccataga

SEQ ID NO: 892710 - DNA, 33 bp, Homo sapien
ctagcttggcacaagagatagatataccataga

SEQ ID NO: 892711 - DNA, 33 bp, Homo sapien
ctgatagaatgaagcccgaggacctatgaccgc

SEQ ID NO: 892712 - DNA, 33 bp, Homo sapien
ctgatagaatgaagcctgaggacctatgaccgc

SEQ ID NO: 892713 - DNA, 33 bp, Homo sapien
ggaaaaacaggaaaaactgtgaatgagcatgac

SEQ ID NO: 892714 - DNA, 33 bp, Homo sapien
ggaaaaacaggaaaaattgtgaatgagcatgac

SEQ ID NO: 892715 - DNA, 33 bp, Homo sapien
agttaacatctgttgacaaagcagtcgctagat

SEQ ID NO: 892716 - DNA, 33 bp, Homo sapien
agttaacatctgttgataaagcagtcgctagat

SEQ ID NO: 892717 - DNA, 33 bp, Homo sapien
acagacagtaaagggacgtatcatttgttaaag

SEQ ID NO: 892718 - DNA, 33 bp, Homo sapien
acagacagtaaagggaggtatcatttgttaaag

SEQ ID NO: 892719 - DNA, 33 bp, Homo sapien
gggttttgaggtgaaagaaatagaaatttgtag

SEQ ID NO: 892720 - DNA, 33 bp, Homo sapien
gggttttgaggtgaaataaatagaaatttgtag

SEQ ID NO: 892721 - DNA, 33 bp, Homo sapien
cccaggtttcattctacagacagaagtaacgta

SEQ ID NO: 892722 - DNA, 33 bp, Homo sapien
cccaggtttcattctatagacagaagtaacgta

SEQ ID NO: 892723 - DNA, 33 bp, Homo sapien
acaacacagatcaacaatgtctgagctattggt

SEQ ID NO: 892724 - DNA, 33 bp, Homo sapien
acaacacagatcaacagtgtctgagctattggt

SEQ ID NO: 892725 - DNA, 33 bp, Homo sapien
aagtcaacctaaattcacctttgtttccatgta

SEQ ID NO: 892726 - DNA, 33 bp, Homo sapien
aagtcaacctaaattcgcctttgtttccatgta

SEQ ID NO: 892727 - DNA, 33 bp, Homo sapien
ttattcccagggaaggccacgatacattgtctt

SEQ ID NO: 892728 - DNA, 33 bp, Homo sapien
ttattcccagggaaggtcacgatacattgtctt

SEQ ID NO: 892729 - DNA, 33 bp, Homo sapien
gacatataatgtagtaagtgagggaggtgcagt

SEQ ID NO: 892730 - DNA, 33 bp, Homo sapien
gacatataatgtagtaggtgagggaggtgcagt

SEQ ID NO: 892731 - DNA, 33 bp, Homo sapien
ctgatgagactagaatcaattaactccagtgcc

SEQ ID NO: 892732 - DNA, 33 bp, Homo sapien
ctgatgagactagaatgaattaactccagtgcc

SEQ ID NO: 892733 - DNA, 33 bp, Homo sapien
tgtattaatattagaacggctgtaactgccaat

SEQ ID NO: 892734 - DNA, 33 bp, Homo sapien
tgtattaatattagaatggctgtaactgccaat

SEQ ID NO: 892735 - DNA, 33 bp, Homo sapien
gcctcattctgttctactaatgtgatgcctgct

SEQ ID NO: 892736 - DNA, 33 bp, Homo sapien
gcctcattctgttctattaatgtgatgcctgct

SEQ ID NO: 892737 - DNA, 33 bp, Homo sapien
cttcactcagatccagacctcattccactgcag

SEQ ID NO: 892738 - DNA, 33 bp, Homo sapien
cttcactcagatccaggcctcattccactgcag

SEQ ID NO: 892739 - DNA, 33 bp, Homo sapien
ggaactggcttccacacgagtaagcataaaagt

SEQ ID NO: 892740 - DNA, 33 bp, Homo sapien
ggaactggcttccacatgagtaagcataaaagt

SEQ ID NO: 892741 - DNA, 33 bp, Homo sapien
gccacttacaagagacactgcaccagatcaccc

SEQ ID NO: 892742 - DNA, 33 bp, Homo sapien
gccacttacaagagacgctgcaccagatcaccc

SEQ ID NO: 892743 - DNA, 33 bp, Homo sapien
tgcatgcttggaggtaacatacacaactcctac

SEQ ID NO: 892744 - DNA, 33 bp, Homo sapien
tgcatgcttggaggtatcatacacaactcctac

SEQ ID NO: 892745 - DNA, 33 bp, Homo sapien
gcagagggcaacccccaaatctgaacatattct

SEQ ID NO: 892746 - DNA, 33 bp, Homo sapien
gcagagggcaacccccgaatctgaacatattct

SEQ ID NO: 892747 - DNA, 33 bp, Homo sapien
acattcatacattggcagaaattttggattgcc

SEQ ID NO: 892748 - DNA, 33 bp, Homo sapien
acattcatacattggcggaaattttggattgcc

SEQ ID NO: 892749 - DNA, 33 bp, Homo sapien
atggataatgagaatcaacttcatatgcatttt

SEQ ID NO: 892750 - DNA, 33 bp, Homo sapien
atggataatgagaatcgacttcatatgcatttt

SEQ ID NO: 892751 - DNA, 33 bp, Homo sapien
aattcctagactatctaaaggatgagattactt

SEQ ID NO: 892752 - DNA, 33 bp, Homo sapien
aattcctagactatctgaaggatgagattactt

SEQ ID NO: 892753 - DNA, 33 bp, Homo sapien
tttttttgtacattcactaaaggacctattatg

SEQ ID NO: 892754 - DNA, 33 bp, Homo sapien
tttttttgtacattcagtaaaggacctattatg

SEQ ID NO: 892755 - DNA, 33 bp, Homo sapien
aagagagaatgtaatacacaaccttgcttcatt

SEQ ID NO: 892756 - DNA, 33 bp, Homo sapien
aagagagaatgtaatatacaaccttgcttcatt

SEQ ID NO: 892757 - DNA, 33 bp, Homo sapien
taccgtattagcgcaacaattaatgagcctaaa

SEQ ID NO: 892758 - DNA, 33 bp, Homo sapien
taccgtattagcgcaataattaatgagcctaaa

SEQ ID NO: 892759 - DNA, 33 bp, Homo sapien
gcaatacaagccataaagaatatataaagggag

SEQ ID NO: 892760 - DNA, 33 bp, Homo sapien
gcaatacaagccataaggaatatataaagggag

SEQ ID NO: 892761 - DNA, 33 bp, Homo sapien
atataataggagctcaatatgttcgccttccct

SEQ ID NO: 892762 - DNA, 33 bp, Homo sapien
atataataggagctcagtatgttcgccttccct

SEQ ID NO: 892763 - DNA, 33 bp, Homo sapien
attgctgctgaggaaacgcaaactctttactct

SEQ ID NO: 892764 - DNA, 33 bp, Homo sapien
attgctgctgaggaaaggcaaactctttactct

SEQ ID NO: 892765 - DNA, 33 bp, Homo sapien
tttcctcagcagcaataagtctgtatctgcctt

SEQ ID NO: 892766 - DNA, 33 bp, Homo sapien
tttcctcagcagcaatgagtctgtatctgcctt

SEQ ID NO: 892767 - DNA, 33 bp, Homo sapien
ctatttggtgtgtgctcaaggtcttgttgggaa

SEQ ID NO: 892768 - DNA, 33 bp, Homo sapien
ctatttggtgtgtgctgaaggtcttgttgggaa

SEQ ID NO: 892769 - DNA, 33 bp, Homo sapien
tcaagataaaacagacaataatagtctcagtaa

SEQ ID NO: 892770 - DNA, 33 bp, Homo sapien
tcaagataaaacagacgataatagtctcagtaa

SEQ ID NO: 892771 - DNA, 33 bp, Homo sapien
aatttgatcaaaataaggcaaatggactttggc

SEQ ID NO: 892772 - DNA, 33 bp, Homo sapien
aatttgatcaaaataatgcaaatggactttggc

SEQ ID NO: 892773 - DNA, 33 bp, Homo sapien
gatatactttctcttaggtacaccacggtagaa

SEQ ID NO: 892774 - DNA, 33 bp, Homo sapien
gatatactttctcttatgtacaccacggtagaa

SEQ ID NO: 892775 - DNA, 33 bp, Homo sapien
ctcctttcattcaacacacgttttgaactgtga

SEQ ID NO: 892776 - DNA, 33 bp, Homo sapien
ctcctttcattcaacatacgttttgaactgtga

SEQ ID NO: 892777 - DNA, 33 bp, Homo sapien
attcaaaaagggtgaacgttacaatgcctctta

SEQ ID NO: 892778 - DNA, 33 bp, Homo sapien
attcaaaaagggtgaatgttacaatgcctctta

SEQ ID NO: 892779 - DNA, 33 bp, Homo sapien
aaaatgtgaattgtgccaaaaagattgtggtgg

SEQ ID NO: 892780 - DNA, 33 bp, Homo sapien
aaaatgtgaattgtgctaaaaagattgtggtgg

SEQ ID NO: 892781 - DNA, 33 bp, Homo sapien
acataaatatgtgcaacttcatggcatagagtg

SEQ ID NO: 892782 - DNA, 33 bp, Homo sapien
acataaatatgtgcaagttcatggcatagagtg

SEQ ID NO: 892783 - DNA, 33 bp, Homo sapien
agcatcttttcttcagccacctgactatggata

SEQ ID NO: 892784 - DNA, 33 bp, Homo sapien
agcatcttttcttcaggcacctgactatggata

SEQ ID NO: 892785 - DNA, 33 bp, Homo sapien
tgctttgggagctgtgaaataggaaaaagaaat

SEQ ID NO: 892786 - DNA, 33 bp, Homo sapien
tgctttgggagctgtgtaataggaaaaagaaat

SEQ ID NO: 892787 - DNA, 33 bp, Homo sapien
cagcagttttaagtccccaactctctcctgtct

SEQ ID NO: 892788 - DNA, 33 bp, Homo sapien
cagcagttttaagtccgcaactctctcctgtct

SEQ ID NO: 892789 - DNA, 33 bp, Homo sapien
agtacagaatacattcaagccggagaaactcag

SEQ ID NO: 892790 - DNA, 33 bp, Homo sapien
agtacagaatacattccagccggagaaactcag

SEQ ID NO: 892791 - DNA, 33 bp, Homo sapien
ttctttacttccacatcatgaagagcaaaataa

SEQ ID NO: 892792 - DNA, 33 bp, Homo sapien
ttctttacttccacattatgaagagcaaaataa

SEQ ID NO: 892793 - DNA, 33 bp, Homo sapien
tgtaatcagatttgtacggataatataagccac

SEQ ID NO: 892794 - DNA, 33 bp, Homo sapien
tgtaatcagatttgtatggataatataagccac

SEQ ID NO: 892795 - DNA, 33 bp, Homo sapien
ggaccatgcaagacgaaatatgaaatgtagtaa

SEQ ID NO: 892796 - DNA, 33 bp, Homo sapien
ggaccatgcaagacgagatatgaaatgtagtaa

SEQ ID NO: 892797 - DNA, 33 bp, Homo sapien
tcacgaatggtttagcaacatccccttcatgct

SEQ ID NO: 892798 - DNA, 33 bp, Homo sapien
tcacgaatggtttagctacatccccttcatgct

SEQ ID NO: 892799 - DNA, 33 bp, Homo sapien
tatccttctttatgacaaaacagcacgggaaga

SEQ ID NO: 892800 - DNA, 33 bp, Homo sapien
tatccttctttatgacgaaacagcacgggaaga

SEQ ID NO: 892801 - DNA, 33 bp, Homo sapien
tgaacccaggcaggaaccaactccggacacatt

SEQ ID NO: 892802 - DNA, 33 bp, Homo sapien
tgaacccaggcaggaagcaactccggacacatt

SEQ ID NO: 892803 - DNA, 33 bp, Homo sapien
ttaggtaaattataaacgcatgaggatatgtgt

SEQ ID NO: 892804 - DNA, 33 bp, Homo sapien
ttaggtaaattataaaggcatgaggatatgtgt

SEQ ID NO: 892805 - DNA, 33 bp, Homo sapien
ctagaaactggggaaccaaatacctcattgcca

SEQ ID NO: 892806 - DNA, 33 bp, Homo sapien
ctagaaactggggaactaaatacctcattgcca

SEQ ID NO: 892807 - DNA, 33 bp, Homo sapien
ctttatcgaatccaccactgatgagctcctagg

SEQ ID NO: 892808 - DNA, 33 bp, Homo sapien
ctttatcgaatccaccgctgatgagctcctagg

SEQ ID NO: 892809 - DNA, 33 bp, Homo sapien
ttatgcaaaagataaaactacagctatgattag

SEQ ID NO: 892810 - DNA, 33 bp, Homo sapien
ttatgcaaaagataaagctacagctatgattag

SEQ ID NO: 892811 - DNA, 33 bp, Homo sapien
ctaagaattatagtgaaaaactgaacaaatcaa

SEQ ID NO: 892812 - DNA, 33 bp, Homo sapien
ctaagaattatagtgagaaactgaacaaatcaa

SEQ ID NO: 892813 - DNA, 33 bp, Homo sapien
ctaactcttcaaaaacggagaaccatttccctc

SEQ ID NO: 892814 - DNA, 33 bp, Homo sapien
ctaactcttcaaaaactgagaaccatttccctc

SEQ ID NO: 892815 - DNA, 33 bp, Homo sapien
gagctcccacattcatcaatcagtcaaccacat

SEQ ID NO: 892816 - DNA, 33 bp, Homo sapien
gagctcccacattcatgaatcagtcaaccacat

SEQ ID NO: 892817 - DNA, 33 bp, Homo sapien
tcccattgtgactcacagtccagtctctctgct

SEQ ID NO: 892818 - DNA, 33 bp, Homo sapien
tcccattgtgactcactgtccagtctctctgct

SEQ ID NO: 892819 - DNA, 33 bp, Homo sapien
caagttgctcttaatcactctgtagttctgcct

SEQ ID NO: 892820 - DNA, 33 bp, Homo sapien
caagttgctcttaatctctctgtagttctgcct

SEQ ID NO: 892821 - DNA, 33 bp, Homo sapien
tctggtgccaagtgtcaacggtgtggctgtgca

SEQ ID NO: 892822 - DNA, 33 bp, Homo sapien
tctggtgccaagtgtccacggtgtggctgtgca

SEQ ID NO: 892823 - DNA, 33 bp, Homo sapien
taagagtctcctgactaaaatactgtttctgta

SEQ ID NO: 892824 - DNA, 33 bp, Homo sapien
taagagtctcctgactgaaatactgtttctgta

SEQ ID NO: 892825 - DNA, 33 bp, Homo sapien
cccttttcatttccctcacttcatgttgactca

SEQ ID NO: 892826 - DNA, 33 bp, Homo sapien
cccttttcatttcccttacttcatgttgactca

SEQ ID NO: 892827 - DNA, 33 bp, Homo sapien
ttgtaataggaacccaaacctggtatctaatca

SEQ ID NO: 892828 - DNA, 33 bp, Homo sapien
ttgtaataggaacccagacctggtatctaatca

SEQ ID NO: 892829 - DNA, 33 bp, Homo sapien
gaatggggcacctcagaagtcatctttggatca

SEQ ID NO: 892830 - DNA, 33 bp, Homo sapien
gaatggggcacctcagtagtcatctttggatca

SEQ ID NO: 892831 - DNA, 33 bp, Homo sapien
aaaagcatgctcctcaataagacttcccttact

SEQ ID NO: 892832 - DNA, 33 bp, Homo sapien
aaaagcatgctcctcagtaagacttcccttact

SEQ ID NO: 892833 - DNA, 33 bp, Homo sapien
atagaaaggagtgccaataagctagacagaatg

SEQ ID NO: 892834 - DNA, 33 bp, Homo sapien
atagaaaggagtgccactaagctagacagaatg

SEQ ID NO: 892835 - DNA, 33 bp, Homo sapien
cacaggcacaactgatcagccaagtgattgaat

SEQ ID NO: 892836 - DNA, 33 bp, Homo sapien
cacaggcacaactgattagccaagtgattgaat

SEQ ID NO: 892837 - DNA, 33 bp, Homo sapien
accctactctactagactataacttactcattc

SEQ ID NO: 892838 - DNA, 33 bp, Homo sapien
accctactctactagattataacttactcattc

SEQ ID NO: 892839 - DNA, 33 bp, Homo sapien
acttttgttgcttttacgaaatgattgatattt

SEQ ID NO: 892840 - DNA, 33 bp, Homo sapien
acttttgttgcttttatgaaatgattgatattt

SEQ ID NO: 892841 - DNA, 33 bp, Homo sapien
acaaagaatcattagccaaacgtgagacttaac

SEQ ID NO: 892842 - DNA, 33 bp, Homo sapien
acaaagaatcattagcgaaacgtgagacttaac

SEQ ID NO: 892843 - DNA, 33 bp, Homo sapien
tgatgaaggcatccccagctttagctcactatg

SEQ ID NO: 892844 - DNA, 33 bp, Homo sapien
tgatgaaggcatcccccgctttagctcactatg

SEQ ID NO: 892845 - DNA, 33 bp, Homo sapien
tttagacccaaaggccatagttataaaagattc

SEQ ID NO: 892846 - DNA, 33 bp, Homo sapien
tttagacccaaaggccgtagttataaaagattc

SEQ ID NO: 892847 - DNA, 33 bp, Homo sapien
gtcctactacacttcaatgaacagagtttaaga

SEQ ID NO: 892848 - DNA, 33 bp, Homo sapien
gtcctactacacttcagtgaacagagtttaaga

SEQ ID NO: 892849 - DNA, 33 bp, Homo sapien
atgcacagtaaaggacaaaaagcaggacgttta

SEQ ID NO: 892850 - DNA, 33 bp, Homo sapien
atgcacagtaaaggacgaaaagcaggacgttta

SEQ ID NO: 892851 - DNA, 33 bp, Homo sapien
gaccactaacaaagaccatccttgaccaaactt

SEQ ID NO: 892852 - DNA, 33 bp, Homo sapien
gaccactaacaaagactatccttgaccaaactt

SEQ ID NO: 892853 - DNA, 33 bp, Homo sapien
gaactttaatgtgtaactgggaattgtcaagtg

SEQ ID NO: 892854 - DNA, 33 bp, Homo sapien
gaactttaatgtgtaagtgggaattgtcaagtg

SEQ ID NO: 892855 - DNA, 33 bp, Homo sapien
aaaaaggcaagtaaaggcccaaatatgtggttg

SEQ ID NO: 892856 - DNA, 33 bp, Homo sapien
aaaaaggcaagtaaagtcccaaatatgtggttg

SEQ ID NO: 892857 - DNA, 33 bp, Homo sapien
agagtagaaagaacacagaactgaaagttaaga

SEQ ID NO: 892858 - DNA, 33 bp, Homo sapien
agagtagaaagaacactgaactgaaagttaaga

SEQ ID NO: 892859 - DNA, 33 bp, Homo sapien
atgctgactggtcccacaatcactcacaactgt

SEQ ID NO: 892860 - DNA, 33 bp, Homo sapien
atgctgactggtcccagaatcactcacaactgt

SEQ ID NO: 892861 - DNA, 33 bp, Homo sapien
caagatcatctactgcaatacttctcaaacttt

SEQ ID NO: 892862 - DNA, 33 bp, Homo sapien
caagatcatctactgctatacttctcaaacttt

SEQ ID NO: 892863 - DNA, 33 bp, Homo sapien
attggctgaaaaattccaagaggataatccaag

SEQ ID NO: 892864 - DNA, 33 bp, Homo sapien
attggctgaaaaattctaagaggataatccaag

SEQ ID NO: 892865 - DNA, 33 bp, Homo sapien
gcaaaaaattctatcaagttcccctcaagaacc

SEQ ID NO: 892866 - DNA, 33 bp, Homo sapien
gcaaaaaattctatcaggttcccctcaagaacc

SEQ ID NO: 892867 - DNA, 33 bp, Homo sapien
caggtgaagaacagaaaaactgataaagagacc

SEQ ID NO: 892868 - DNA, 33 bp, Homo sapien
caggtgaagaacagaataactgataaagagacc

SEQ ID NO: 892869 - DNA, 33 bp, Homo sapien
gtaatgaggtacttcaacttattttgatgacag

SEQ ID NO: 892870 - DNA, 33 bp, Homo sapien
gtaatgaggtacttcaccttattttgatgacag

SEQ ID NO: 892871 - DNA, 33 bp, Homo sapien
ctcccaccaggattaacactattgcaatacttt

SEQ ID NO: 892872 - DNA, 33 bp, Homo sapien
ctcccaccaggattaagactattgcaatacttt

SEQ ID NO: 892873 - DNA, 33 bp, Homo sapien
tcaaaagattaaatgacacaactgtttgctaga

SEQ ID NO: 892874 - DNA, 33 bp, Homo sapien
tcaaaagattaaatgagacaactgtttgctaga

SEQ ID NO: 892875 - DNA, 33 bp, Homo sapien
tcagaagatttaaagaaaaagccagatctcatc

SEQ ID NO: 892876 - DNA, 33 bp, Homo sapien
tcagaagatttaaagagaaagccagatctcatc

SEQ ID NO: 892877 - DNA, 33 bp, Homo sapien
catctcaccttttgcaatgaaaaaacacaacgg

SEQ ID NO: 892878 - DNA, 33 bp, Homo sapien
catctcaccttttgcagtgaaaaaacacaacgg

SEQ ID NO: 892879 - DNA, 33 bp, Homo sapien
ggataagaatgaggaagtattagaggagaaaga

SEQ ID NO: 892880 - DNA, 33 bp, Homo sapien
ggataagaatgaggaattattagaggagaaaga

SEQ ID NO: 892881 - DNA, 33 bp, Homo sapien
aattgggttgtcaaggaccaaaatactcaggct

SEQ ID NO: 892882 - DNA, 33 bp, Homo sapien
aattgggttgtcaaggtccaaaatactcaggct

SEQ ID NO: 892883 - DNA, 33 bp, Homo sapien
atggacgtgtgattcaatcctggctagtgtaat

SEQ ID NO: 892884 - DNA, 33 bp, Homo sapien
atggacgtgtgattcattcctggctagtgtaat

SEQ ID NO: 892885 - DNA, 33 bp, Homo sapien
ctttttctcgtttccaagtggacatatctttca

SEQ ID NO: 892886 - DNA, 33 bp, Homo sapien
ctttttctcgtttccacgtggacatatctttca

SEQ ID NO: 892887 - DNA, 33 bp, Homo sapien
tggtgatgacactaaaattcaggttctgtggaa

SEQ ID NO: 892888 - DNA, 33 bp, Homo sapien
tggtgatgacactaaagttcaggttctgtggaa

SEQ ID NO: 892889 - DNA, 33 bp, Homo sapien
aaaataaacaaaagacagcccattgaatagtaa

SEQ ID NO: 892890 - DNA, 33 bp, Homo sapien
aaaataaacaaaagacggcccattgaatagtaa

SEQ ID NO: 892891 - DNA, 33 bp, Homo sapien
ccatacctcaagatgagaagatgaagcattgct

SEQ ID NO: 892892 - DNA, 33 bp, Homo sapien
ccatacctcaagatgataagatgaagcattgct

SEQ ID NO: 892893 - DNA, 33 bp, Homo sapien
tagagaggttccataactagtaaattgcaaata

SEQ ID NO: 892894 - DNA, 33 bp, Homo sapien
tagagaggttccataagtagtaaattgcaaata

SEQ ID NO: 892895 - DNA, 33 bp, Homo sapien
taaagcagacaaaaaaatcagtaaagctataga

SEQ ID NO: 892896 - DNA, 33 bp, Homo sapien
taaagcagacaaaaaattcagtaaagctataga

SEQ ID NO: 892897 - DNA, 33 bp, Homo sapien
ttttttaacttataaaatgacactgatgaaccc

SEQ ID NO: 892898 - DNA, 33 bp, Homo sapien
ttttttaacttataaagtgacactgatgaaccc

SEQ ID NO: 892899 - DNA, 33 bp, Homo sapien
agagccaactcaagctaaaatagacctcttggt

SEQ ID NO: 892900 - DNA, 33 bp, Homo sapien
agagccaactcaagctgaaatagacctcttggt

SEQ ID NO: 892901 - DNA, 33 bp, Homo sapien
tacattgcttttaagaacaaacttcaatctgct

SEQ ID NO: 892902 - DNA, 33 bp, Homo sapien
tacattgcttttaagatcaaacttcaatctgct

SEQ ID NO: 892903 - DNA, 33 bp, Homo sapien
tcctcaaaaatcttcaccgtagtacctggagtg

SEQ ID NO: 892904 - DNA, 33 bp, Homo sapien
tcctcaaaaatcttcagcgtagtacctggagtg

SEQ ID NO: 892905 - DNA, 33 bp, Homo sapien
agctctgtattagaccagataaatgcttctcaa

SEQ ID NO: 892906 - DNA, 33 bp, Homo sapien
agctctgtattagaccggataaatgcttctcaa

SEQ ID NO: 892907 - DNA, 33 bp, Homo sapien
ggcaataattctaacacgaaaatcacaagtaaa

SEQ ID NO: 892908 - DNA, 33 bp, Homo sapien
ggcaataattctaacatgaaaatcacaagtaaa

SEQ ID NO: 892909 - DNA, 33 bp, Homo sapien
attctaaataggaaatgatcgtactcgtctttg

SEQ ID NO: 892910 - DNA, 33 bp, Homo sapien
attctaaataggaaattatcgtactcgtctttg

SEQ ID NO: 892911 - DNA, 33 bp, Homo sapien
ctcagtaaatggctaacgaatgaacaaatcatt

SEQ ID NO: 892912 - DNA, 33 bp, Homo sapien
ctcagtaaatggctaatgaatgaacaaatcatt

SEQ ID NO: 892913 - DNA, 33 bp, Homo sapien
tggaaagggcagttgcaagagttgttggagtca

SEQ ID NO: 892914 - DNA, 33 bp, Homo sapien
tggaaagggcagttgcgagagttgttggagtca

SEQ ID NO: 892915 - DNA, 33 bp, Homo sapien
actgattacacaaagccacaaatgatgaagagc

SEQ ID NO: 892916 - DNA, 33 bp, Homo sapien
actgattacacaaagctacaaatgatgaagagc

SEQ ID NO: 892917 - DNA, 33 bp, Homo sapien
tgttagctttagccaaatatgtttaggattaca

SEQ ID NO: 892918 - DNA, 33 bp, Homo sapien
tgttagctttagccaagtatgtttaggattaca

SEQ ID NO: 892919 - DNA, 33 bp, Homo sapien
gcaaggataaaaagtcaatcaaacaaaattgac

SEQ ID NO: 892920 - DNA, 33 bp, Homo sapien
gcaaggataaaaagtctatcaaacaaaattgac

SEQ ID NO: 892921 - DNA, 33 bp, Homo sapien
ttaatgaaagacaaagcagttatcactaagcag

SEQ ID NO: 892922 - DNA, 33 bp, Homo sapien
ttaatgaaagacaaaggagttatcactaagcag

SEQ ID NO: 892923 - DNA, 33 bp, Homo sapien
ttcaaccttttatgaaatgaaggcattcttgta

SEQ ID NO: 892924 - DNA, 33 bp, Homo sapien
ttcaaccttttatgaagtgaaggcattcttgta

SEQ ID NO: 892925 - DNA, 33 bp, Homo sapien
tatactaacgaccactaaattgtatgctttaaa

SEQ ID NO: 892926 - DNA, 33 bp, Homo sapien
tatactaacgaccactgaattgtatgctttaaa

SEQ ID NO: 892927 - DNA, 33 bp, Homo sapien
ttactgacaataaaaccaaggcctcacaggtcc

SEQ ID NO: 892928 - DNA, 33 bp, Homo sapien
ttactgacaataaaactaaggcctcacaggtcc

SEQ ID NO: 892929 - DNA, 33 bp, Homo sapien
agtgtgtggcgtaaaccgatagcagccaccatt

SEQ ID NO: 892930 - DNA, 33 bp, Homo sapien
agtgtgtggcgtaaactgatagcagccaccatt

SEQ ID NO: 892931 - DNA, 33 bp, Homo sapien
gaatttaggttgctaacaaaatgacctaaaatc

SEQ ID NO: 892932 - DNA, 33 bp, Homo sapien
gaatttaggttgctaataaaatgacctaaaatc

SEQ ID NO: 892933 - DNA, 33 bp, Homo sapien
tatctccttgggaatgaaatgtgctacatacaa

SEQ ID NO: 892934 - DNA, 33 bp, Homo sapien
tatctccttgggaatggaatgtgctacatacaa

SEQ ID NO: 892935 - DNA, 33 bp, Homo sapien
ccaataaaaatcagtgcagtaagactttttgat

SEQ ID NO: 892936 - DNA, 33 bp, Homo sapien
ccaataaaaatcagtggagtaagactttttgat

SEQ ID NO: 892937 - DNA, 33 bp, Homo sapien
cttatctagcattttcaaaacatgtcagatagt

SEQ ID NO: 892938 - DNA, 33 bp, Homo sapien
cttatctagcattttccaaacatgtcagatagt

SEQ ID NO: 892939 - DNA, 33 bp, Homo sapien
tctccaaatatgaaacactagtgctgttgaatg

SEQ ID NO: 892940 - DNA, 33 bp, Homo sapien
tctccaaatatgaaacgctagtgctgttgaatg

SEQ ID NO: 892941 - DNA, 33 bp, Homo sapien
ggcacattgtgttctacgcttggaaaattcctt

SEQ ID NO: 892942 - DNA, 33 bp, Homo sapien
ggcacattgtgttctatgcttggaaaattcctt

SEQ ID NO: 892943 - DNA, 33 bp, Homo sapien
gctaagaattgtgttaaataaaattgttaaaag

SEQ ID NO: 892944 - DNA, 33 bp, Homo sapien
gctaagaattgtgttacataaaattgttaaaag

SEQ ID NO: 892945 - DNA, 33 bp, Homo sapien
aataacataaaaattacccaaacatgatgaaat

SEQ ID NO: 892946 - DNA, 33 bp, Homo sapien
aataacataaaaattatccaaacatgatgaaat

SEQ ID NO: 892947 - DNA, 33 bp, Homo sapien
tttctgaggaccttcaataaaatacatagaaag

SEQ ID NO: 892948 - DNA, 33 bp, Homo sapien
tttctgaggaccttcagtaaaatacatagaaag

SEQ ID NO: 892949 - DNA, 33 bp, Homo sapien
ttaaattaggatcttaaactttctgtgtgtctc

SEQ ID NO: 892950 - DNA, 33 bp, Homo sapien
ttaaattaggatcttagactttctgtgtgtctc

SEQ ID NO: 892951 - DNA, 33 bp, Homo sapien
tttgatgtgtttttacactgtttgtcatgccag

SEQ ID NO: 892952 - DNA, 33 bp, Homo sapien
tttgatgtgtttttaccctgtttgtcatgccag

SEQ ID NO: 892953 - DNA, 33 bp, Homo sapien
tctggattaacatgaagtggcttgaggaatgtc

SEQ ID NO: 892954 - DNA, 33 bp, Homo sapien
tctggattaacatgaattggcttgaggaatgtc

SEQ ID NO: 892955 - DNA, 33 bp, Homo sapien
gatattttcttagccacctgtggttaaaaccat

SEQ ID NO: 892956 - DNA, 33 bp, Homo sapien
gatattttcttagccagctgtggttaaaaccat

SEQ ID NO: 892957 - DNA, 33 bp, Homo sapien
tctagataaggcataacagatttccaagtagca

SEQ ID NO: 892958 - DNA, 33 bp, Homo sapien
tctagataaggcataatagatttccaagtagca

SEQ ID NO: 892959 - DNA, 33 bp, Homo sapien
ttttacaacagtttgaactttaacactaagaaa

SEQ ID NO: 892960 - DNA, 33 bp, Homo sapien
ttttacaacagtttgagctttaacactaagaaa

SEQ ID NO: 892961 - DNA, 33 bp, Homo sapien
taaatacgcttttccaagaagtggtgccaccag

SEQ ID NO: 892962 - DNA, 33 bp, Homo sapien
taaatacgcttttccatgaagtggtgccaccag

SEQ ID NO: 892963 - DNA, 33 bp, Homo sapien
ttacgcttaggtccaccattcagtccctgtgga

SEQ ID NO: 892964 - DNA, 33 bp, Homo sapien
ttacgcttaggtccactattcagtccctgtgga

SEQ ID NO: 892965 - DNA, 33 bp, Homo sapien
gaggaagtgaaattcactaaattgggtagtgac

SEQ ID NO: 892966 - DNA, 33 bp, Homo sapien
gaggaagtgaaattcattaaattgggtagtgac

SEQ ID NO: 892967 - DNA, 33 bp, Homo sapien
ttcttttataagtggcccttttaattgtagttc

SEQ ID NO: 892968 - DNA, 33 bp, Homo sapien
ttcttttataagtggctcttttaattgtagttc

SEQ ID NO: 892969 - DNA, 33 bp, Homo sapien
attgaaacagtactggacagtatacattaaaaa

SEQ ID NO: 892970 - DNA, 33 bp, Homo sapien
attgaaacagtactggtcagtatacattaaaaa

SEQ ID NO: 892971 - DNA, 33 bp, Homo sapien
ttcctaatctgcaaaacgatggcatattaaatg

SEQ ID NO: 892972 - DNA, 33 bp, Homo sapien
ttcctaatctgcaaaaggatggcatattaaatg

SEQ ID NO: 892973 - DNA, 33 bp, Homo sapien
aattgaagtcactccaaagcaagatgtttccaa

SEQ ID NO: 892974 - DNA, 33 bp, Homo sapien
aattgaagtcactccacagcaagatgtttccaa

SEQ ID NO: 892975 - DNA, 33 bp, Homo sapien
aatacgtcacctcttacatttcatgcaatattc

SEQ ID NO: 892976 - DNA, 33 bp, Homo sapien
aatacgtcacctcttagatttcatgcaatattc

SEQ ID NO: 892977 - DNA, 33 bp, Homo sapien
attctcacatctcccaaaaagtaacattgaagg

SEQ ID NO: 892978 - DNA, 33 bp, Homo sapien
attctcacatctcccagaaagtaacattgaagg

SEQ ID NO: 892979 - DNA, 33 bp, Homo sapien
ccatgttttaatggaactgacaaaccacaatct

SEQ ID NO: 892980 - DNA, 33 bp, Homo sapien
ccatgttttaatggaattgacaaaccacaatct

SEQ ID NO: 892981 - DNA, 33 bp, Homo sapien
ccaaacagcaggtatgcataggcaagaatgtct

SEQ ID NO: 892982 - DNA, 33 bp, Homo sapien
ccaaacagcaggtatgtataggcaagaatgtct

SEQ ID NO: 892983 - DNA, 33 bp, Homo sapien
tgataagttataggccaaatactcaggtctgaa

SEQ ID NO: 892984 - DNA, 33 bp, Homo sapien
tgataagttataggcccaatactcaggtctgaa

SEQ ID NO: 892985 - DNA, 33 bp, Homo sapien
tgttatacaattttacacatctatcatattgac

SEQ ID NO: 892986 - DNA, 33 bp, Homo sapien
tgttatacaattttacgcatctatcatattgac

SEQ ID NO: 892987 - DNA, 33 bp, Homo sapien
tttttacttccatagacagtgagtggtgttaca

SEQ ID NO: 892988 - DNA, 33 bp, Homo sapien
tttttacttccatagatagtgagtggtgttaca

SEQ ID NO: 892989 - DNA, 33 bp, Homo sapien
taaatatatgaagacaataaaagagacatatta

SEQ ID NO: 892990 - DNA, 33 bp, Homo sapien
taaatatatgaagacagtaaaagagacatatta

SEQ ID NO: 892991 - DNA, 33 bp, Homo sapien
ctcaatggctatttgaaaaatgcagacacatgg

SEQ ID NO: 892992 - DNA, 33 bp, Homo sapien
ctcaatggctatttgagaaatgcagacacatgg

SEQ ID NO: 892993 - DNA, 33 bp, Homo sapien
atttaaatgttacagccctaaattcgtttttct

SEQ ID NO: 892994 - DNA, 33 bp, Homo sapien
atttaaatgttacagctctaaattcgtttttct

SEQ ID NO: 892995 - DNA, 33 bp, Homo sapien
aatgctaatgtgtcaaatctgtattatttccag

SEQ ID NO: 892996 - DNA, 33 bp, Homo sapien
aatgctaatgtgtcaagtctgtattatttccag

SEQ ID NO: 892997 - DNA, 33 bp, Homo sapien
ccataaaatctatgcgaaaatggttgttatttt

SEQ ID NO: 892998 - DNA, 33 bp, Homo sapien
ccataaaatctatgcggaaatggttgttatttt

SEQ ID NO: 892999 - DNA, 33 bp, Homo sapien
attttaagttttcaggaactcatttttctcaat

SEQ ID NO: 893000 - DNA, 33 bp, Homo sapien
attttaagttttcagggactcatttttctcaat

SEQ ID NO: 893001 - DNA, 33 bp, Homo sapien
gttactttggggcagacaaattctaccggtgca

SEQ ID NO: 893002 - DNA, 33 bp, Homo sapien
gttactttggggcagagaaattctaccggtgca

SEQ ID NO: 893003 - DNA, 33 bp, Homo sapien
tgcagtttggttattaagactggcagaaagaga

SEQ ID NO: 893004 - DNA, 33 bp, Homo sapien
tgcagtttggttattatgactggcagaaagaga

SEQ ID NO: 893005 - DNA, 33 bp, Homo sapien
tctcatatactgttcaagcacgtttcaccacat

SEQ ID NO: 893006 - DNA, 33 bp, Homo sapien
tctcatatactgttcaggcacgtttcaccacat

SEQ ID NO: 893007 - DNA, 33 bp, Homo sapien
gtggccaataaaatggcaagaaaagagttggga

SEQ ID NO: 893008 - DNA, 33 bp, Homo sapien
gtggccaataaaatggtaagaaaagagttggga

SEQ ID NO: 893009 - DNA, 33 bp, Homo sapien
atatattcactgaagcaattttatttcttcaca

SEQ ID NO: 893010 - DNA, 33 bp, Homo sapien
atatattcactgaagcgattttatttcttcaca

SEQ ID NO: 893011 - DNA, 33 bp, Homo sapien
aacctacaggtaatacaaataatgtgctatcca

SEQ ID NO: 893012 - DNA, 33 bp, Homo sapien
aacctacaggtaatacgaataatgtgctatcca

SEQ ID NO: 893013 - DNA, 33 bp, Homo sapien
aacttaaagccagagaagagcttatcatttgac

SEQ ID NO: 893014 - DNA, 33 bp, Homo sapien
aacttaaagccagagaggagcttatcatttgac

SEQ ID NO: 893015 - DNA, 33 bp, Homo sapien
tattcaaaaacttcagacatttgatttcattta

SEQ ID NO: 893016 - DNA, 33 bp, Homo sapien
tattcaaaaacttcaggcatttgatttcattta

SEQ ID NO: 893017 - DNA, 33 bp, Homo sapien
taatctgaggaagtaaacttgcaccaaactcaa

SEQ ID NO: 893018 - DNA, 33 bp, Homo sapien
taatctgaggaagtaagcttgcaccaaactcaa

SEQ ID NO: 893019 - DNA, 33 bp, Homo sapien
aatatgggtaaaccttaaaaccatgctgagtaa

SEQ ID NO: 893020 - DNA, 33 bp, Homo sapien
aatatgggtaaaccttgaaaccatgctgagtaa

SEQ ID NO: 893021 - DNA, 33 bp, Homo sapien
tagttaatcaagtaccaaagatgacttcattac

SEQ ID NO: 893022 - DNA, 33 bp, Homo sapien
tagttaatcaagtaccgaagatgacttcattac

SEQ ID NO: 893023 - DNA, 33 bp, Homo sapien
gctgtttgcttcagtacggataacccagtatag

SEQ ID NO: 893024 - DNA, 33 bp, Homo sapien
gctgtttgcttcagtagggataacccagtatag

SEQ ID NO: 893025 - DNA, 33 bp, Homo sapien
tttatcattgcagacacaagagaaacagagaag

SEQ ID NO: 893026 - DNA, 33 bp, Homo sapien
tttatcattgcagacataagagaaacagagaag

SEQ ID NO: 893027 - DNA, 33 bp, Homo sapien
ccacctgtgccttgtaaagtccaatcacaagtc

SEQ ID NO: 893028 - DNA, 33 bp, Homo sapien
ccacctgtgccttgtagagtccaatcacaagtc

SEQ ID NO: 893029 - DNA, 33 bp, Homo sapien
atgtaagaaaggactacgatgaagctagcttta

SEQ ID NO: 893030 - DNA, 33 bp, Homo sapien
atgtaagaaaggactatgatgaagctagcttta

SEQ ID NO: 893031 - DNA, 33 bp, Homo sapien
taaggtgactaatttaccctttctcacaaatag

SEQ ID NO: 893032 - DNA, 33 bp, Homo sapien
taaggtgactaatttatcctttctcacaaatag

SEQ ID NO: 893033 - DNA, 33 bp, Homo sapien
actatagtaaatgtgcacactgaggagtaacta

SEQ ID NO: 893034 - DNA, 33 bp, Homo sapien
actatagtaaatgtgcgcactgaggagtaacta

SEQ ID NO: 893035 - DNA, 33 bp, Homo sapien
ctactgaaactgccccagaagtcaggagatggg

SEQ ID NO: 893036 - DNA, 33 bp, Homo sapien
ctactgaaactgccccggaagtcaggagatggg

SEQ ID NO: 893037 - DNA, 33 bp, Homo sapien
gatttctgacattaaggagctcacagtcttcat

SEQ ID NO: 893038 - DNA, 33 bp, Homo sapien
gatttctgacattaagtagctcacagtcttcat

SEQ ID NO: 893039 - DNA, 33 bp, Homo sapien
cagttgaacagttgaaccaccgtacttcttgag

SEQ ID NO: 893040 - DNA, 33 bp, Homo sapien
cagttgaacagttgaagcaccgtacttcttgag

SEQ ID NO: 893041 - DNA, 33 bp, Homo sapien
atctgaaaatatgaaacagtagttcctcaagaa

SEQ ID NO: 893042 - DNA, 33 bp, Homo sapien
atctgaaaatatgaaatagtagttcctcaagaa

SEQ ID NO: 893043 - DNA, 33 bp, Homo sapien
tggttgtaagccttcaatatctttatttcaaaa

SEQ ID NO: 893044 - DNA, 33 bp, Homo sapien
tggttgtaagccttcagtatctttatttcaaaa

SEQ ID NO: 893045 - DNA, 33 bp, Homo sapien
aaaacttcaaagataaatatcaaacacatttta

SEQ ID NO: 893046 - DNA, 33 bp, Homo sapien
aaaacttcaaagataagtatcaaacacatttta

SEQ ID NO: 893047 - DNA, 33 bp, Homo sapien
gtggctgaaaggcagacattcatttgctttgaa

SEQ ID NO: 893048 - DNA, 33 bp, Homo sapien
gtggctgaaaggcagagattcatttgctttgaa

SEQ ID NO: 893049 - DNA, 33 bp, Homo sapien
gagacaggatttttgacatgatttccaccagca

SEQ ID NO: 893050 - DNA, 33 bp, Homo sapien
gagacaggatttttgatatgatttccaccagca

SEQ ID NO: 893051 - DNA, 33 bp, Homo sapien
aaagtttctatgaagacgacataccagttaaga

SEQ ID NO: 893052 - DNA, 33 bp, Homo sapien
aaagtttctatgaagatgacataccagttaaga

SEQ ID NO: 893053 - DNA, 33 bp, Homo sapien
agacaggggaaccacacaaaagtagggagaatg

SEQ ID NO: 893054 - DNA, 33 bp, Homo sapien
agacaggggaaccacagaaaagtagggagaatg

SEQ ID NO: 893055 - DNA, 33 bp, Homo sapien
cttcatttacattgaaataccctgaacgttttg

SEQ ID NO: 893056 - DNA, 33 bp, Homo sapien
cttcatttacattgaagtaccctgaacgttttg

SEQ ID NO: 893057 - DNA, 33 bp, Homo sapien
caatgataaaattggagaattctgattagtatg

SEQ ID NO: 893058 - DNA, 33 bp, Homo sapien
caatgataaaattggataattctgattagtatg

SEQ ID NO: 893059 - DNA, 33 bp, Homo sapien
aagctaatgaaagctccccatttgctcagatcc

SEQ ID NO: 893060 - DNA, 33 bp, Homo sapien
aagctaatgaaagctctccatttgctcagatcc

SEQ ID NO: 893061 - DNA, 33 bp, Homo sapien
gacatttcactcattgaaacagcaggaggggtg

SEQ ID NO: 893062 - DNA, 33 bp, Homo sapien
gacatttcactcattgcaacagcaggaggggtg

SEQ ID NO: 893063 - DNA, 33 bp, Homo sapien
cttagcagaaaacttaacaactcttgaaaacac

SEQ ID NO: 893064 - DNA, 33 bp, Homo sapien
cttagcagaaaacttagcaactcttgaaaacac

SEQ ID NO: 893065 - DNA, 33 bp, Homo sapien
acacttcttatttgcactaaggaattctgattg

SEQ ID NO: 893066 - DNA, 33 bp, Homo sapien
acacttcttatttgcattaaggaattctgattg

SEQ ID NO: 893067 - DNA, 33 bp, Homo sapien
acgacctggttagcatgaaggcaagaaagatgg

SEQ ID NO: 893068 - DNA, 33 bp, Homo sapien
acgacctggttagcattaaggcaagaaagatgg

SEQ ID NO: 893069 - DNA, 33 bp, Homo sapien
tgggactattgcatgacaaacaaacagcagtgc

SEQ ID NO: 893070 - DNA, 33 bp, Homo sapien
tgggactattgcatgataaacaaacagcagtgc

SEQ ID NO: 893071 - DNA, 33 bp, Homo sapien
attagacaaggcttaacaatttggtttaagacc

SEQ ID NO: 893072 - DNA, 33 bp, Homo sapien
attagacaaggcttaataatttggtttaagacc

SEQ ID NO: 893073 - DNA, 33 bp, Homo sapien
gtagatggttaatgaaatggttaaagactgtta

SEQ ID NO: 893074 - DNA, 33 bp, Homo sapien
gtagatggttaatgaagtggttaaagactgtta

SEQ ID NO: 893075 - DNA, 33 bp, Homo sapien
gcccttattcgtaagactccataagactgctgg

SEQ ID NO: 893076 - DNA, 33 bp, Homo sapien
gcccttattcgtaagattccataagactgctgg

SEQ ID NO: 893077 - DNA, 33 bp, Homo sapien
agccaagcatcatcaacttcctagtgactgggc

SEQ ID NO: 893078 - DNA, 33 bp, Homo sapien
agccaagcatcatcaatttcctagtgactgggc

SEQ ID NO: 893079 - DNA, 33 bp, Homo sapien
aatttttttctacttacggaaatatcctcaatt

SEQ ID NO: 893080 - DNA, 33 bp, Homo sapien
aatttttttctacttatggaaatatcctcaatt

SEQ ID NO: 893081 - DNA, 33 bp, Homo sapien
gtgataactatctgcaacattttttaacaagaa

SEQ ID NO: 893082 - DNA, 33 bp, Homo sapien
gtgataactatctgcagcattttttaacaagaa

SEQ ID NO: 893083 - DNA, 33 bp, Homo sapien
actgtaaatgaatgaaagtatcccaaaaatagg

SEQ ID NO: 893084 - DNA, 33 bp, Homo sapien
actgtaaatgaatgaatgtatcccaaaaatagg

SEQ ID NO: 893085 - DNA, 33 bp, Homo sapien
gatgctgtcaagactacagaggcagctgaccac

SEQ ID NO: 893086 - DNA, 33 bp, Homo sapien
gatgctgtcaagactatagaggcagctgaccac

SEQ ID NO: 893087 - DNA, 33 bp, Homo sapien
cagaatcactaaactaagtatgaatgattcagt

SEQ ID NO: 893088 - DNA, 33 bp, Homo sapien
cagaatcactaaactacgtatgaatgattcagt

SEQ ID NO: 893089 - DNA, 33 bp, Homo sapien
tcctcttcagaaacaacctatttgattaagtag

SEQ ID NO: 893090 - DNA, 33 bp, Homo sapien
tcctcttcagaaacaagctatttgattaagtag

SEQ ID NO: 893091 - DNA, 33 bp, Homo sapien
gggacccctgataagaagaaacctgctgaatcg

SEQ ID NO: 893092 - DNA, 33 bp, Homo sapien
gggacccctgataagacgaaacctgctgaatcg

SEQ ID NO: 893093 - DNA, 33 bp, Homo sapien
agtttgttcagcacgtaaaggcagtgttaatga

SEQ ID NO: 893094 - DNA, 33 bp, Homo sapien
agtttgttcagcacgtcaaggcagtgttaatga

SEQ ID NO: 893095 - DNA, 33 bp, Homo sapien
atataaccacaaggcacctgtaagttaatattg

SEQ ID NO: 893096 - DNA, 33 bp, Homo sapien
atataaccacaaggcagctgtaagttaatattg

SEQ ID NO: 893097 - DNA, 33 bp, Homo sapien
aaacctcaattatccaatatgcaaagtgttctt

SEQ ID NO: 893098 - DNA, 33 bp, Homo sapien
aaacctcaattatccagtatgcaaagtgttctt

SEQ ID NO: 893099 - DNA, 33 bp, Homo sapien
aggaacattggttttaactaatactactgtgag

SEQ ID NO: 893100 - DNA, 33 bp, Homo sapien
aggaacattggttttagctaatactactgtgag

SEQ ID NO: 893101 - DNA, 33 bp, Homo sapien
gtatctgtgatcatcaagttcattaaaatgaaa

SEQ ID NO: 893102 - DNA, 33 bp, Homo sapien
gtatctgtgatcatcaggttcattaaaatgaaa

SEQ ID NO: 893103 - DNA, 33 bp, Homo sapien
tgtgatgggcatagtaataatgagttttcactt

SEQ ID NO: 893104 - DNA, 33 bp, Homo sapien
tgtgatgggcatagtagtaatgagttttcactt

SEQ ID NO: 893105 - DNA, 33 bp, Homo sapien
gaaaaattagtgacaaaccttattttagctgaa

SEQ ID NO: 893106 - DNA, 33 bp, Homo sapien
gaaaaattagtgacaatccttattttagctgaa

SEQ ID NO: 893107 - DNA, 33 bp, Homo sapien
gcctgcacttcataaacttaagagatgcttgcc

SEQ ID NO: 893108 - DNA, 33 bp, Homo sapien
gcctgcacttcataaatttaagagatgcttgcc

SEQ ID NO: 893109 - DNA, 33 bp, Homo sapien
acataatctttttacagaatttgcagcatgaaa

SEQ ID NO: 893110 - DNA, 33 bp, Homo sapien
acataatctttttacataatttgcagcatgaaa

SEQ ID NO: 893111 - DNA, 33 bp, Homo sapien
tccatactcagttgaaacagattcaaattcagt

SEQ ID NO: 893112 - DNA, 33 bp, Homo sapien
tccatactcagttgaaccagattcaaattcagt

SEQ ID NO: 893113 - DNA, 33 bp, Homo sapien
aagatgtagccctttcaccagagcaaacatatt

SEQ ID NO: 893114 - DNA, 33 bp, Homo sapien
aagatgtagccctttcgccagagcaaacatatt

SEQ ID NO: 893115 - DNA, 33 bp, Homo sapien
tctcttttgttcaacactggaaggaagacatga

SEQ ID NO: 893116 - DNA, 33 bp, Homo sapien
tctcttttgttcaacattggaaggaagacatga

SEQ ID NO: 893117 - DNA, 33 bp, Homo sapien
cttcactgaatcatccaacaacaactgtgatgt

SEQ ID NO: 893118 - DNA, 33 bp, Homo sapien
cttcactgaatcatccgacaacaactgtgatgt

SEQ ID NO: 893119 - DNA, 33 bp, Homo sapien
aattaaggatgagaacaaaagaatcctatagtg

SEQ ID NO: 893120 - DNA, 33 bp, Homo sapien
aattaaggatgagaaccaaagaatcctatagtg

SEQ ID NO: 893121 - DNA, 33 bp, Homo sapien
tgattctttagaacacaatgggctagtgcaagt

SEQ ID NO: 893122 - DNA, 33 bp, Homo sapien
tgattctttagaacacgatgggctagtgcaagt

SEQ ID NO: 893123 - DNA, 33 bp, Homo sapien
gggtaacaaggtgagacacgaaagaaaagaaaa

SEQ ID NO: 893124 - DNA, 33 bp, Homo sapien
gggtaacaaggtgagatacgaaagaaaagaaaa

SEQ ID NO: 893125 - DNA, 33 bp, Homo sapien
cattctcaccttaccactccttaatacgccaaa

SEQ ID NO: 893126 - DNA, 33 bp, Homo sapien
cattctcaccttaccagtccttaatacgccaaa

SEQ ID NO: 893127 - DNA, 33 bp, Homo sapien
acacaggaccgtgatccgagacaaccaggttca

SEQ ID NO: 893128 - DNA, 33 bp, Homo sapien
acacaggaccgtgatctgagacaaccaggttca

SEQ ID NO: 893129 - DNA, 33 bp, Homo sapien
catctctcaccacaaaatctgtatttttatgta

SEQ ID NO: 893130 - DNA, 33 bp, Homo sapien
catctctcaccacaaattctgtatttttatgta

SEQ ID NO: 893131 - DNA, 33 bp, Homo sapien
aatgactaagtggtaaacaaaagctagctacta

SEQ ID NO: 893132 - DNA, 33 bp, Homo sapien
aatgactaagtggtaagcaaaagctagctacta

SEQ ID NO: 893133 - DNA, 33 bp, Homo sapien
tttctcatgaggttctgacacacttaaatacta

SEQ ID NO: 893134 - DNA, 33 bp, Homo sapien
tttctcatgaggttcttacacacttaaatacta

SEQ ID NO: 893135 - DNA, 33 bp, Homo sapien
taccaatcgttgttctcaatataaatacctgat

SEQ ID NO: 893136 - DNA, 33 bp, Homo sapien
taccaatcgttgttcttaatataaatacctgat

SEQ ID NO: 893137 - DNA, 33 bp, Homo sapien
atcaaacaaaatttccaagtcatacaatttttt

SEQ ID NO: 893138 - DNA, 33 bp, Homo sapien
atcaaacaaaatttcccagtcatacaatttttt

SEQ ID NO: 893139 - DNA, 33 bp, Homo sapien
aaatgtgttatggataaaagtaaaggatgaaag

SEQ ID NO: 893140 - DNA, 33 bp, Homo sapien
aaatgtgttatggatataagtaaaggatgaaag

SEQ ID NO: 893141 - DNA, 33 bp, Homo sapien
caacatgaggattccacgccatattgttggctc

SEQ ID NO: 893142 - DNA, 33 bp, Homo sapien
caacatgaggattccatgccatattgttggctc

SEQ ID NO: 893143 - DNA, 33 bp, Homo sapien
aaactctaattttccaaggctatacactagtag

SEQ ID NO: 893144 - DNA, 33 bp, Homo sapien
aaactctaattttccagggctatacactagtag

SEQ ID NO: 893145 - DNA, 33 bp, Homo sapien
tacagacaggactaaaggcattcgtgaaaaacc

SEQ ID NO: 893146 - DNA, 33 bp, Homo sapien
tacagacaggactaaatgcattcgtgaaaaacc

SEQ ID NO: 893147 - DNA, 33 bp, Homo sapien
tctattgctatggcaaggataggtacagaaaat

SEQ ID NO: 893148 - DNA, 33 bp, Homo sapien
tctattgctatggcaatgataggtacagaaaat

SEQ ID NO: 893149 - DNA, 33 bp, Homo sapien
taaatatttagtggaaccaaaaagactttatca

SEQ ID NO: 893150 - DNA, 33 bp, Homo sapien
taaatatttagtggaatcaaaaagactttatca

SEQ ID NO: 893151 - DNA, 33 bp, Homo sapien
aagctgaagtaactccagcatgaaggcagggaa

SEQ ID NO: 893152 - DNA, 33 bp, Homo sapien
aagctgaagtaactccggcatgaaggcagggaa

SEQ ID NO: 893153 - DNA, 33 bp, Homo sapien
gtgacccgctttgataaaactttttgaaacatc

SEQ ID NO: 893154 - DNA, 33 bp, Homo sapien
gtgacccgctttgatagaactttttgaaacatc

SEQ ID NO: 893155 - DNA, 33 bp, Homo sapien
acttcttgttcgaggaaaggcagaagtgtgaca

SEQ ID NO: 893156 - DNA, 33 bp, Homo sapien
acttcttgttcgaggagaggcagaagtgtgaca

SEQ ID NO: 893157 - DNA, 33 bp, Homo sapien
tacactaaattacgtgaagcagacattttccaa

SEQ ID NO: 893158 - DNA, 33 bp, Homo sapien
tacactaaattacgtgcagcagacattttccaa

SEQ ID NO: 893159 - DNA, 33 bp, Homo sapien
aacactacgctaggtcacgatagatctttaggg

SEQ ID NO: 893160 - DNA, 33 bp, Homo sapien
aacactacgctaggtcgcgatagatctttaggg

SEQ ID NO: 893161 - DNA, 33 bp, Homo sapien
cattaactgacagaacagcaagcagaaaaataa

SEQ ID NO: 893162 - DNA, 33 bp, Homo sapien
cattaactgacagaacggcaagcagaaaaataa

SEQ ID NO: 893163 - DNA, 33 bp, Homo sapien
ttttataactgcagatcaagtccctaaaataag

SEQ ID NO: 893164 - DNA, 33 bp, Homo sapien
ttttataactgcagatgaagtccctaaaataag

SEQ ID NO: 893165 - DNA, 33 bp, Homo sapien
tcaatgctccctttccaaataacttacttgaca

SEQ ID NO: 893166 - DNA, 33 bp, Homo sapien
tcaatgctccctttccgaataacttacttgaca

SEQ ID NO: 893167 - DNA, 33 bp, Homo sapien
aattgcacatttgctacgtaggtcacttctgaa

SEQ ID NO: 893168 - DNA, 33 bp, Homo sapien
aattgcacatttgctatgtaggtcacttctgaa

SEQ ID NO: 893169 - DNA, 33 bp, Homo sapien
acatgagaagccagctaaaaacaaaggttggca

SEQ ID NO: 893170 - DNA, 33 bp, Homo sapien
acatgagaagccagctgaaaacaaaggttggca

SEQ ID NO: 893171 - DNA, 33 bp, Homo sapien
agtcagtctttccatcacagataaacctcactt

SEQ ID NO: 893172 - DNA, 33 bp, Homo sapien
agtcagtctttccatcgcagataaacctcactt

SEQ ID NO: 893173 - DNA, 33 bp, Homo sapien
caaggaacaacttttccagagttccttctttct

SEQ ID NO: 893174 - DNA, 33 bp, Homo sapien
caaggaacaacttttcgagagttccttctttct

SEQ ID NO: 893175 - DNA, 33 bp, Homo sapien
tttaactagttctgacaaagagtcttgttacaa

SEQ ID NO: 893176 - DNA, 33 bp, Homo sapien
tttaactagttctgacgaagagtcttgttacaa

SEQ ID NO: 893177 - DNA, 33 bp, Homo sapien
tgaaactcttcacatagcttatagatgaggaaa

SEQ ID NO: 893178 - DNA, 33 bp, Homo sapien
tgaaactcttcacatatcttatagatgaggaaa

SEQ ID NO: 893179 - DNA, 33 bp, Homo sapien
gattgagccagaactaagtgtgttttggtgaag

SEQ ID NO: 893180 - DNA, 33 bp, Homo sapien
gattgagccagaactaggtgtgttttggtgaag

SEQ ID NO: 893181 - DNA, 33 bp, Homo sapien
gcagcattaattcttcaaagtattgtcttatcc

SEQ ID NO: 893182 - DNA, 33 bp, Homo sapien
gcagcattaattcttcgaagtattgtcttatcc

SEQ ID NO: 893183 - DNA, 33 bp, Homo sapien
acagtttaaatataagccacatgcaaacaggga

SEQ ID NO: 893184 - DNA, 33 bp, Homo sapien
acagtttaaatataagtcacatgcaaacaggga

SEQ ID NO: 893185 - DNA, 33 bp, Homo sapien
atacctcaaacactatcaacatgaggccactca

SEQ ID NO: 893186 - DNA, 33 bp, Homo sapien
atacctcaaacactattaacatgaggccactca

SEQ ID NO: 893187 - DNA, 33 bp, Homo sapien
accaatcaactaaatcagactcacttataaaaa

SEQ ID NO: 893188 - DNA, 33 bp, Homo sapien
accaatcaactaaatcggactcacttataaaaa

SEQ ID NO: 893189 - DNA, 33 bp, Homo sapien
attaggactgggaaaactctagggtgcttcttc

SEQ ID NO: 893190 - DNA, 33 bp, Homo sapien
attaggactgggaaaagtctagggtgcttcttc

SEQ ID NO: 893191 - DNA, 33 bp, Homo sapien
ctttaggatgtaggtaaaataaatgagaatgtt

SEQ ID NO: 893192 - DNA, 33 bp, Homo sapien
ctttaggatgtaggtagaataaatgagaatgtt

SEQ ID NO: 893193 - DNA, 33 bp, Homo sapien
ccaatatgatggtaacaagtttggtgttaaatg

SEQ ID NO: 893194 - DNA, 33 bp, Homo sapien
ccaatatgatggtaaccagtttggtgttaaatg

SEQ ID NO: 893195 - DNA, 33 bp, Homo sapien
aattctagaatgatacaacattttttcttctct

SEQ ID NO: 893196 - DNA, 33 bp, Homo sapien
aattctagaatgatacgacattttttcttctct

SEQ ID NO: 893197 - DNA, 33 bp, Homo sapien
gataagcaaatcaaaacctgactgtcttttatt

SEQ ID NO: 893198 - DNA, 33 bp, Homo sapien
gataagcaaatcaaaatctgactgtcttttatt

SEQ ID NO: 893199 - DNA, 33 bp, Homo sapien
ataggtgacaaaagaaattcatagtgactatta

SEQ ID NO: 893200 - DNA, 33 bp, Homo sapien
ataggtgacaaaagaatttcatagtgactatta

SEQ ID NO: 893201 - DNA, 33 bp, Homo sapien
agttggcttttgcaatcaggtaacatttctttc

SEQ ID NO: 893202 - DNA, 33 bp, Homo sapien
agttggcttttgcaattaggtaacatttctttc

SEQ ID NO: 893203 - DNA, 33 bp, Homo sapien
aatgtctctatactcagaatcttttgctcttaa

SEQ ID NO: 893204 - DNA, 33 bp, Homo sapien
aatgtctctatactcataatcttttgctcttaa

SEQ ID NO: 893205 - DNA, 33 bp, Homo sapien
aacacactttgctttacagtaaacacagataaa

SEQ ID NO: 893206 - DNA, 33 bp, Homo sapien
aacacactttgctttatagtaaacacagataaa

SEQ ID NO: 893207 - DNA, 33 bp, Homo sapien
tgcttttgtagagcaaatagtgactttaaaatt

SEQ ID NO: 893208 - DNA, 33 bp, Homo sapien
tgcttttgtagagcaattagtgactttaaaatt

SEQ ID NO: 893209 - DNA, 33 bp, Homo sapien
atgtctttcagattgcaatttcaaatcccagtt

SEQ ID NO: 893210 - DNA, 33 bp, Homo sapien
atgtctttcagattgcgatttcaaatcccagtt

SEQ ID NO: 893211 - DNA, 33 bp, Homo sapien
tcaggtcttcattacaatctgcttcccttgtcc

SEQ ID NO: 893212 - DNA, 33 bp, Homo sapien
tcaggtcttcattacagtctgcttcccttgtcc

SEQ ID NO: 893213 - DNA, 33 bp, Homo sapien
ttcatgttctttccaccgtattactgtccttcc

SEQ ID NO: 893214 - DNA, 33 bp, Homo sapien
ttcatgttctttccactgtattactgtccttcc

SEQ ID NO: 893215 - DNA, 33 bp, Homo sapien
ataaagtagtagagaaagggttcaaataaccaa

SEQ ID NO: 893216 - DNA, 33 bp, Homo sapien
ataaagtagtagagaaggggttcaaataaccaa

SEQ ID NO: 893217 - DNA, 33 bp, Homo sapien
ggtagttatctcctaaagatgttggaattcagc

SEQ ID NO: 893218 - DNA, 33 bp, Homo sapien
ggtagttatctcctaatgatgttggaattcagc

SEQ ID NO: 893219 - DNA, 33 bp, Homo sapien
ttcatgctaatcttcacgttagtttgtgcttga

SEQ ID NO: 893220 - DNA, 33 bp, Homo sapien
ttcatgctaatcttcatgttagtttgtgcttga

SEQ ID NO: 893221 - DNA, 33 bp, Homo sapien
tcttcacctgtcaggagaaatcattgcccttct

SEQ ID NO: 893222 - DNA, 33 bp, Homo sapien
tcttcacctgtcaggataaatcattgcccttct

SEQ ID NO: 893223 - DNA, 33 bp, Homo sapien
gctaactggctgtaataatcaacaagtgatgcc

SEQ ID NO: 893224 - DNA, 33 bp, Homo sapien
gctaactggctgtaatcatcaacaagtgatgcc

SEQ ID NO: 893225 - DNA, 33 bp, Homo sapien
atttgacaagaacatacggtgaaattgcaggca

SEQ ID NO: 893226 - DNA, 33 bp, Homo sapien
atttgacaagaacatatggtgaaattgcaggca

SEQ ID NO: 893227 - DNA, 33 bp, Homo sapien
tatccaacttttgaggacaatttgaaaatggac

SEQ ID NO: 893228 - DNA, 33 bp, Homo sapien
tatccaacttttgagggcaatttgaaaatggac

SEQ ID NO: 893229 - DNA, 33 bp, Homo sapien
ctctattacattttagcagagtcctgttatagt

SEQ ID NO: 893230 - DNA, 33 bp, Homo sapien
ctctattacattttaggagagtcctgttatagt

SEQ ID NO: 893231 - DNA, 33 bp, Homo sapien
tttaaacaatgttttgaatcatgccaaagttct

SEQ ID NO: 893232 - DNA, 33 bp, Homo sapien
tttaaacaatgttttggatcatgccaaagttct

SEQ ID NO: 893233 - DNA, 33 bp, Homo sapien
aaactttatgattctcagactttggtcagaata

SEQ ID NO: 893234 - DNA, 33 bp, Homo sapien
aaactttatgattctcggactttggtcagaata

SEQ ID NO: 893235 - DNA, 33 bp, Homo sapien
ccaacatcagccagtacatatattaaagtttta

SEQ ID NO: 893236 - DNA, 33 bp, Homo sapien
ccaacatcagccagtatatatattaaagtttta

SEQ ID NO: 893237 - DNA, 33 bp, Homo sapien
agggagcgtgaagcccagagtttgcttacttag

SEQ ID NO: 893238 - DNA, 33 bp, Homo sapien
agggagcgtgaagcccggagtttgcttacttag

SEQ ID NO: 893239 - DNA, 33 bp, Homo sapien
caacttggcattcttagattgagaaaaagaccc

SEQ ID NO: 893240 - DNA, 33 bp, Homo sapien
caacttggcattcttatattgagaaaaagaccc

SEQ ID NO: 893241 - DNA, 33 bp, Homo sapien
actgttttgtaaataacacagaactgaacccca

SEQ ID NO: 893242 - DNA, 33 bp, Homo sapien
actgttttgtaaataatacagaactgaacccca

SEQ ID NO: 893243 - DNA, 33 bp, Homo sapien
tagttagatttctgaccgacaaactttgtgtgt

SEQ ID NO: 893244 - DNA, 33 bp, Homo sapien
tagttagatttctgactgacaaactttgtgtgt

SEQ ID NO: 893245 - DNA, 33 bp, Homo sapien
attttatagttatctccgaacttactgtcttca

SEQ ID NO: 893246 - DNA, 33 bp, Homo sapien
attttatagttatctctgaacttactgtcttca

SEQ ID NO: 893247 - DNA, 33 bp, Homo sapien
tatctctcttctcatagccctagctctcagtag

SEQ ID NO: 893248 - DNA, 33 bp, Homo sapien
tatctctcttctcatatccctagctctcagtag

SEQ ID NO: 893249 - DNA, 33 bp, Homo sapien
gaagcagtttcttccaatcgtggtttactgtaa

SEQ ID NO: 893250 - DNA, 33 bp, Homo sapien
gaagcagtttcttccagtcgtggtttactgtaa

SEQ ID NO: 893251 - DNA, 33 bp, Homo sapien
ttaaattttattgctcacagttgttctgaatga

SEQ ID NO: 893252 - DNA, 33 bp, Homo sapien
ttaaattttattgctcgcagttgttctgaatga

SEQ ID NO: 893253 - DNA, 33 bp, Homo sapien
ttttaaaatgctgattcaagaggaattttttcc

SEQ ID NO: 893254 - DNA, 33 bp, Homo sapien
ttttaaaatgctgattgaagaggaattttttcc

SEQ ID NO: 893255 - DNA, 33 bp, Homo sapien
aggatcttaaaatgccaaaagaaaaaagattat

SEQ ID NO: 893256 - DNA, 33 bp, Homo sapien
aggatcttaaaatgccgaaagaaaaaagattat

SEQ ID NO: 893257 - DNA, 33 bp, Homo sapien
gcatattaggttaataagtgtgttcaaattgtt

SEQ ID NO: 893258 - DNA, 33 bp, Homo sapien
gcatattaggttaataggtgtgttcaaattgtt

SEQ ID NO: 893259 - DNA, 33 bp, Homo sapien
cttatgttatatgacaaatgaataagagaggga

SEQ ID NO: 893260 - DNA, 33 bp, Homo sapien
cttatgttatatgacagatgaataagagaggga

SEQ ID NO: 893261 - DNA, 33 bp, Homo sapien
aaggcaagaaaactccactgtggcaactgccga

SEQ ID NO: 893262 - DNA, 33 bp, Homo sapien
aaggcaagaaaactccgctgtggcaactgccga

SEQ ID NO: 893263 - DNA, 33 bp, Homo sapien
tagtggaattaattggaatggttacaaagaaca

SEQ ID NO: 893264 - DNA, 33 bp, Homo sapien
tagtggaattaattgggatggttacaaagaaca

SEQ ID NO: 893265 - DNA, 33 bp, Homo sapien
aattggaatactcatacactactggtgggaatg

SEQ ID NO: 893266 - DNA, 33 bp, Homo sapien
aattggaatactcatagactactggtgggaatg

SEQ ID NO: 893267 - DNA, 33 bp, Homo sapien
aagagtttcacatatgaatttttagggaacaca

SEQ ID NO: 893268 - DNA, 33 bp, Homo sapien
aagagtttcacatatgcatttttagggaacaca

SEQ ID NO: 893269 - DNA, 33 bp, Homo sapien
tgcgtagttagtgcaaattatctgagacactaa

SEQ ID NO: 893270 - DNA, 33 bp, Homo sapien
tgcgtagttagtgcaagttatctgagacactaa

SEQ ID NO: 893271 - DNA, 33 bp, Homo sapien
gtttgttagtaattcactgaatcaaaaattaag

SEQ ID NO: 893272 - DNA, 33 bp, Homo sapien
gtttgttagtaattcattgaatcaaaaattaag

SEQ ID NO: 893273 - DNA, 33 bp, Homo sapien
accttttaatacaagtaaatgctgcagactcct

SEQ ID NO: 893274 - DNA, 33 bp, Homo sapien
accttttaatacaagtcaatgctgcagactcct

SEQ ID NO: 893275 - DNA, 33 bp, Homo sapien
tgctatagctatcccacacagaaaggcacagaa

SEQ ID NO: 893276 - DNA, 33 bp, Homo sapien
tgctatagctatcccagacagaaaggcacagaa

SEQ ID NO: 893277 - DNA, 33 bp, Homo sapien
acatcacaattgaggaatggaggaactgcttac

SEQ ID NO: 893278 - DNA, 33 bp, Homo sapien
acatcacaattgaggactggaggaactgcttac

SEQ ID NO: 893279 - DNA, 33 bp, Homo sapien
aaatacaaaattgtcccgattattcattattgt

SEQ ID NO: 893280 - DNA, 33 bp, Homo sapien
aaatacaaaattgtcctgattattcattattgt

SEQ ID NO: 893281 - DNA, 33 bp, Homo sapien
tccttaaatgtttgtaccatcctgagaaatcag

SEQ ID NO: 893282 - DNA, 33 bp, Homo sapien
tccttaaatgtttgtatcatcctgagaaatcag

SEQ ID NO: 893283 - DNA, 33 bp, Homo sapien
cacacaagatttttaaccctatggctaggatac

SEQ ID NO: 893284 - DNA, 33 bp, Homo sapien
cacacaagatttttaagcctatggctaggatac

SEQ ID NO: 893285 - DNA, 33 bp, Homo sapien
ggctcatgataacacacagaataggaatatgaa

SEQ ID NO: 893286 - DNA, 33 bp, Homo sapien
ggctcatgataacacatagaataggaatatgaa

SEQ ID NO: 893287 - DNA, 33 bp, Homo sapien
actgaacatggtgatagtagtaaagcctgacca

SEQ ID NO: 893288 - DNA, 33 bp, Homo sapien
actgaacatggtgatattagtaaagcctgacca

SEQ ID NO: 893289 - DNA, 33 bp, Homo sapien
aattttgaaaattgcaacctgagttacacatga

SEQ ID NO: 893290 - DNA, 33 bp, Homo sapien
aattttgaaaattgcatcctgagttacacatga

SEQ ID NO: 893291 - DNA, 33 bp, Homo sapien
aaactaatccaccaaaactttaatcaagttatt

SEQ ID NO: 893292 - DNA, 33 bp, Homo sapien
aaactaatccaccaaagctttaatcaagttatt

SEQ ID NO: 893293 - DNA, 33 bp, Homo sapien
cactgtcacattatgaacctaattctccataac

SEQ ID NO: 893294 - DNA, 33 bp, Homo sapien
cactgtcacattatgagcctaattctccataac

SEQ ID NO: 893295 - DNA, 33 bp, Homo sapien
aaaaaccagtaggtgggcagaagcttcaccttt

SEQ ID NO: 893296 - DNA, 33 bp, Homo sapien
aaaaaccagtaggtggtcagaagcttcaccttt

SEQ ID NO: 893297 - DNA, 33 bp, Homo sapien
ctccaaagaattctaaaatgcagtgagatttga

SEQ ID NO: 893298 - DNA, 33 bp, Homo sapien
ctccaaagaattctaacatgcagtgagatttga

SEQ ID NO: 893299 - DNA, 33 bp, Homo sapien
ggtctagattgcaaagaccaggatataaaaggc

SEQ ID NO: 893300 - DNA, 33 bp, Homo sapien
ggtctagattgcaaaggccaggatataaaaggc

SEQ ID NO: 893301 - DNA, 33 bp, Homo sapien
ttcttagatctaaaggaacaggtagaatctaaa

SEQ ID NO: 893302 - DNA, 33 bp, Homo sapien
ttcttagatctaaagggacaggtagaatctaaa

SEQ ID NO: 893303 - DNA, 33 bp, Homo sapien
tcatgtttatttcaaaatggcttgaagagaaga

SEQ ID NO: 893304 - DNA, 33 bp, Homo sapien
tcatgtttatttcaaagtggcttgaagagaaga

SEQ ID NO: 893305 - DNA, 33 bp, Homo sapien
gcaggaagacagtcacactaaaaaataagaacc

SEQ ID NO: 893306 - DNA, 33 bp, Homo sapien
gcaggaagacagtcacgctaaaaaataagaacc

SEQ ID NO: 893307 - DNA, 33 bp, Homo sapien
tcccaatcatacacaacctctaaatgtgttact

SEQ ID NO: 893308 - DNA, 33 bp, Homo sapien
tcccaatcatacacaatctctaaatgtgttact

SEQ ID NO: 893309 - DNA, 33 bp, Homo sapien
tcagaaggatagccataagttattataaattct

SEQ ID NO: 893310 - DNA, 33 bp, Homo sapien
tcagaaggatagccatcagttattataaattct

SEQ ID NO: 893311 - DNA, 33 bp, Homo sapien
aaagtggacgtaattaccaatgaagcctgcagt

SEQ ID NO: 893312 - DNA, 33 bp, Homo sapien
aaagtggacgtaattagcaatgaagcctgcagt

SEQ ID NO: 893313 - DNA, 33 bp, Homo sapien
gccagctgagcaggcaggtgtacccaatagtag

SEQ ID NO: 893314 - DNA, 33 bp, Homo sapien
gccagctgagcaggcatgtgtacccaatagtag

SEQ ID NO: 893315 - DNA, 33 bp, Homo sapien
tctttattcttgtgcaaggtgggctcatagaga

SEQ ID NO: 893316 - DNA, 33 bp, Homo sapien
tctttattcttgtgcagggtgggctcatagaga

SEQ ID NO: 893317 - DNA, 33 bp, Homo sapien
ttatagaagtggcatcaaagtttggtagaagag

SEQ ID NO: 893318 - DNA, 33 bp, Homo sapien
ttatagaagtggcatcgaagtttggtagaagag

SEQ ID NO: 893319 - DNA, 33 bp, Homo sapien
tctcttcttccttgagaacaccaattattctta

SEQ ID NO: 893320 - DNA, 33 bp, Homo sapien
tctcttcttccttgagcacaccaattattctta

SEQ ID NO: 893321 - DNA, 33 bp, Homo sapien
atgacaaaattatagacgcgaataagagaacag

SEQ ID NO: 893322 - DNA, 33 bp, Homo sapien
atgacaaaattatagatgcgaataagagaacag

SEQ ID NO: 893323 - DNA, 33 bp, Homo sapien
aacatatctaggttgccaaataccatacataga

SEQ ID NO: 893324 - DNA, 33 bp, Homo sapien
aacatatctaggttgctaaataccatacataga

SEQ ID NO: 893325 - DNA, 33 bp, Homo sapien
attcttatataaaggaacactgaaattcaggtc

SEQ ID NO: 893326 - DNA, 33 bp, Homo sapien
attcttatataaaggaccactgaaattcaggtc

SEQ ID NO: 893327 - DNA, 33 bp, Homo sapien
tgtggcctatgtataacgtcacaccacaagttt

SEQ ID NO: 893328 - DNA, 33 bp, Homo sapien
tgtggcctatgtataatgtcacaccacaagttt

SEQ ID NO: 893329 - DNA, 33 bp, Homo sapien
gagcaagtcttgttgaaaaaagtgaaaagaaaa

SEQ ID NO: 893330 - DNA, 33 bp, Homo sapien
gagcaagtcttgttgataaaagtgaaaagaaaa

SEQ ID NO: 893331 - DNA, 33 bp, Homo sapien
atgttcagtgtattaaagcttaagtgctagtat

SEQ ID NO: 893332 - DNA, 33 bp, Homo sapien
atgttcagtgtattaacgcttaagtgctagtat

SEQ ID NO: 893333 - DNA, 33 bp, Homo sapien
taggtcaccttttgaccaacagcattcaaagat

SEQ ID NO: 893334 - DNA, 33 bp, Homo sapien
taggtcaccttttgactaacagcattcaaagat

SEQ ID NO: 893335 - DNA, 33 bp, Homo sapien
agcagggtcaagggcacatagcatttcttagca

SEQ ID NO: 893336 - DNA, 33 bp, Homo sapien
agcagggtcaagggcagatagcatttcttagca

SEQ ID NO: 893337 - DNA, 33 bp, Homo sapien
ttattttctttccttacgatgtttgaggtcccc

SEQ ID NO: 893338 - DNA, 33 bp, Homo sapien
ttattttctttccttatgatgtttgaggtcccc

SEQ ID NO: 893339 - DNA, 33 bp, Homo sapien
ctggaatccgttcccacgaggagattacaatat

SEQ ID NO: 893340 - DNA, 33 bp, Homo sapien
ctggaatccgttcccatgaggagattacaatat

SEQ ID NO: 893341 - DNA, 33 bp, Homo sapien
caaaaaccaggatttacagtctctgcttaaagg

SEQ ID NO: 893342 - DNA, 33 bp, Homo sapien
caaaaaccaggatttagagtctctgcttaaagg

SEQ ID NO: 893343 - DNA, 33 bp, Homo sapien
aatacaagaacactcacgttgcaacttcagcat

SEQ ID NO: 893344 - DNA, 33 bp, Homo sapien
aatacaagaacactcatgttgcaacttcagcat

SEQ ID NO: 893345 - DNA, 33 bp, Homo sapien
gtatacatgaaaattaccttgttttctgagaat

SEQ ID NO: 893346 - DNA, 33 bp, Homo sapien
gtatacatgaaaattatcttgttttctgagaat

SEQ ID NO: 893347 - DNA, 33 bp, Homo sapien
actttattaatgaaaactagaagtctgaactat

SEQ ID NO: 893348 - DNA, 33 bp, Homo sapien
actttattaatgaaaattagaagtctgaactat

SEQ ID NO: 893349 - DNA, 33 bp, Homo sapien
aagtggtttgtgataaccaatacatcttccttt

SEQ ID NO: 893350 - DNA, 33 bp, Homo sapien
aagtggtttgtgataagcaatacatcttccttt

SEQ ID NO: 893351 - DNA, 33 bp, Homo sapien
tttgttgaggacctaacacatgctggatactgt

SEQ ID NO: 893352 - DNA, 33 bp, Homo sapien
tttgttgaggacctaatacatgctggatactgt

SEQ ID NO: 893353 - DNA, 33 bp, Homo sapien
aatgttcttttcagacagtagagctattaatta

SEQ ID NO: 893354 - DNA, 33 bp, Homo sapien
aatgttcttttcagactgtagagctattaatta

SEQ ID NO: 893355 - DNA, 33 bp, Homo sapien
tcttgctttgttactacaaattgagggctgtgt

SEQ ID NO: 893356 - DNA, 33 bp, Homo sapien
tcttgctttgttactagaaattgagggctgtgt

SEQ ID NO: 893357 - DNA, 33 bp, Homo sapien
cctacatacataaccacaaaaaataatttcaat

SEQ ID NO: 893358 - DNA, 33 bp, Homo sapien
cctacatacataaccagaaaaaataatttcaat

SEQ ID NO: 893359 - DNA, 33 bp, Homo sapien
tccatctggctctatccagttctccaacctgtg

SEQ ID NO: 893360 - DNA, 33 bp, Homo sapien
tccatctggctctatcgagttctccaacctgtg

SEQ ID NO: 893361 - DNA, 33 bp, Homo sapien
cctcaagtctgtcctgcataacttataatctac

SEQ ID NO: 893362 - DNA, 33 bp, Homo sapien
cctcaagtctgtcctgtataacttataatctac

SEQ ID NO: 893363 - DNA, 33 bp, Homo sapien
acaggtcattcttggaactaagctgaaatttga

SEQ ID NO: 893364 - DNA, 33 bp, Homo sapien
acaggtcattcttggacctaagctgaaatttga

SEQ ID NO: 893365 - DNA, 33 bp, Homo sapien
attgtatatggaggtacacattcagtagatctt

SEQ ID NO: 893366 - DNA, 33 bp, Homo sapien
attgtatatggaggtagacattcagtagatctt

SEQ ID NO: 893367 - DNA, 33 bp, Homo sapien
atgctaggttggctaactgttttgaggctacaa

SEQ ID NO: 893368 - DNA, 33 bp, Homo sapien
atgctaggttggctaagtgttttgaggctacaa

SEQ ID NO: 893369 - DNA, 33 bp, Homo sapien
gttccagggtagaaaaacctgcactgtgatgaa

SEQ ID NO: 893370 - DNA, 33 bp, Homo sapien
gttccagggtagaaaagcctgcactgtgatgaa

SEQ ID NO: 893371 - DNA, 33 bp, Homo sapien
ttttctaccctggaacaaatttccacggaggtt

SEQ ID NO: 893372 - DNA, 33 bp, Homo sapien
ttttctaccctggaactaatttccacggaggtt

SEQ ID NO: 893373 - DNA, 33 bp, Homo sapien
acctgaaacatcaataactcttcttagacccat

SEQ ID NO: 893374 - DNA, 33 bp, Homo sapien
acctgaaacatcaatagctcttcttagacccat

SEQ ID NO: 893375 - DNA, 33 bp, Homo sapien
agggcatgggataagcaagaaaatgtatttaca

SEQ ID NO: 893376 - DNA, 33 bp, Homo sapien
agggcatgggataagccagaaaatgtatttaca

SEQ ID NO: 893377 - DNA, 33 bp, Homo sapien
atgcccttcgctctacactgaaaaaaaaaaaat

SEQ ID NO: 893378 - DNA, 33 bp, Homo sapien
atgcccttcgctctacgctgaaaaaaaaaaaat

SEQ ID NO: 893379 - DNA, 33 bp, Homo sapien
gatgacaaaaaaaaatcagcttcaaaattgata

SEQ ID NO: 893380 - DNA, 33 bp, Homo sapien
gatgacaaaaaaaaatgagcttcaaaattgata

SEQ ID NO: 893381 - DNA, 33 bp, Homo sapien
actcatgaacaaataaactcctttttgaaggtt

SEQ ID NO: 893382 - DNA, 33 bp, Homo sapien
actcatgaacaaataatctcctttttgaaggtt

SEQ ID NO: 893383 - DNA, 33 bp, Homo sapien
atataagtcaggtaaacgttcaacacaaaagaa

SEQ ID NO: 893384 - DNA, 33 bp, Homo sapien
atataagtcaggtaaatgttcaacacaaaagaa

SEQ ID NO: 893385 - DNA, 33 bp, Homo sapien
tcaatggaagcttcatcactaagaaacatattc

SEQ ID NO: 893386 - DNA, 33 bp, Homo sapien
tcaatggaagcttcatgactaagaaacatattc

SEQ ID NO: 893387 - DNA, 33 bp, Homo sapien
tctactctggatgacacacactcaatggaagct

SEQ ID NO: 893388 - DNA, 33 bp, Homo sapien
tctactctggatgacatacactcaatggaagct

SEQ ID NO: 893389 - DNA, 33 bp, Homo sapien
ccagagttatgtcttacagctagtttattcaaa

SEQ ID NO: 893390 - DNA, 33 bp, Homo sapien
ccagagttatgtcttatagctagtttattcaaa

SEQ ID NO: 893391 - DNA, 33 bp, Homo sapien
aaccactcttctagcaactcaggttttcataag

SEQ ID NO: 893392 - DNA, 33 bp, Homo sapien
aaccactcttctagcacctcaggttttcataag

SEQ ID NO: 893393 - DNA, 33 bp, Homo sapien
taaagctgattcaattaaaaaaaaatggctggg

SEQ ID NO: 893394 - DNA, 33 bp, Homo sapien
taaagctgattcaatttaaaaaaaatggctggg

SEQ ID NO: 893395 - DNA, 33 bp, Homo sapien
tctttgatctgtgttacgctgtcacaactagaa

SEQ ID NO: 893396 - DNA, 33 bp, Homo sapien
tctttgatctgtgttatgctgtcacaactagaa

SEQ ID NO: 893397 - DNA, 33 bp, Homo sapien
tcccaaacaactacataacaaaatccttgaata

SEQ ID NO: 893398 - DNA, 33 bp, Homo sapien
tcccaaacaactacatcacaaaatccttgaata

SEQ ID NO: 893399 - DNA, 33 bp, Homo sapien
agagtaagtgacttccaattgaaaaagatagct

SEQ ID NO: 893400 - DNA, 33 bp, Homo sapien
agagtaagtgacttcctattgaaaaagatagct

SEQ ID NO: 893401 - DNA, 33 bp, Homo sapien
tacttttttcaaggtagaatgaacagctttcta

SEQ ID NO: 893402 - DNA, 33 bp, Homo sapien
tacttttttcaaggtataatgaacagctttcta

SEQ ID NO: 893403 - DNA, 33 bp, Homo sapien
gatcatcttgaaaggaagctgtttaatactcat

SEQ ID NO: 893404 - DNA, 33 bp, Homo sapien
gatcatcttgaaaggaggctgtttaatactcat

SEQ ID NO: 893405 - DNA, 33 bp, Homo sapien
ggttcagtctaaccataacatttattaattttg

SEQ ID NO: 893406 - DNA, 33 bp, Homo sapien
ggttcagtctaaccatcacatttattaattttg

SEQ ID NO: 893407 - DNA, 33 bp, Homo sapien
aaatgtcatctgtagaacatattaaaggcaaga

SEQ ID NO: 893408 - DNA, 33 bp, Homo sapien
aaatgtcatctgtagagcatattaaaggcaaga

SEQ ID NO: 893409 - DNA, 33 bp, Homo sapien
atgatttttctaattacgtgtgactcactttat

SEQ ID NO: 893410 - DNA, 33 bp, Homo sapien
atgatttttctaattatgtgtgactcactttat

SEQ ID NO: 893411 - DNA, 33 bp, Homo sapien
aaaaagaaactcctagccaataaaagttctgcc

SEQ ID NO: 893412 - DNA, 33 bp, Homo sapien
aaaaagaaactcctagtcaataaaagttctgcc

SEQ ID NO: 893413 - DNA, 33 bp, Homo sapien
aaataaagatctttcccaatgatagacagaata

SEQ ID NO: 893414 - DNA, 33 bp, Homo sapien
aaataaagatctttcctaatgatagacagaata

SEQ ID NO: 893415 - DNA, 33 bp, Homo sapien
agagtaaccacttgcaaatgtatccatagcact

SEQ ID NO: 893416 - DNA, 33 bp, Homo sapien
agagtaaccacttgcagatgtatccatagcact

SEQ ID NO: 893417 - DNA, 33 bp, Homo sapien
tacatatatgagtggaaatgattgttcccataa

SEQ ID NO: 893418 - DNA, 33 bp, Homo sapien
tacatatatgagtggacatgattgttcccataa

SEQ ID NO: 893419 - DNA, 33 bp, Homo sapien
tataatgctactctcacaaaacacattgaaaaa

SEQ ID NO: 893420 - DNA, 33 bp, Homo sapien
tataatgctactctcataaaacacattgaaaaa

SEQ ID NO: 893421 - DNA, 33 bp, Homo sapien
ttcaatgcaatccctaagaaattaccattatca

SEQ ID NO: 893422 - DNA, 33 bp, Homo sapien
ttcaatgcaatccctatgaaattaccattatca

SEQ ID NO: 893423 - DNA, 33 bp, Homo sapien
gcagtagaatcaagcacgaagaagaaagaactt

SEQ ID NO: 893424 - DNA, 33 bp, Homo sapien
gcagtagaatcaagcatgaagaagaaagaactt

SEQ ID NO: 893425 - DNA, 33 bp, Homo sapien
tacaccaggtacacaaatatcatcaggacacag

SEQ ID NO: 893426 - DNA, 33 bp, Homo sapien
tacaccaggtacacaagtatcatcaggacacag

SEQ ID NO: 893427 - DNA, 33 bp, Homo sapien
agtgagataagtcagacataaacacatactatg

SEQ ID NO: 893428 - DNA, 33 bp, Homo sapien
agtgagataagtcagatataaacacatactatg

SEQ ID NO: 893429 - DNA, 33 bp, Homo sapien
caaattgcttatgaaactaaacatactctatgt

SEQ ID NO: 893430 - DNA, 33 bp, Homo sapien
caaattgcttatgaaattaaacatactctatgt

SEQ ID NO: 893431 - DNA, 33 bp, Homo sapien
tgttttttcatattctaaaccacatttctaatt

SEQ ID NO: 893432 - DNA, 33 bp, Homo sapien
tgttttttcatattctcaaccacatttctaatt

SEQ ID NO: 893433 - DNA, 33 bp, Homo sapien
aaatgaaggcagaggtgaagtgttcaagcattc

SEQ ID NO: 893434 - DNA, 33 bp, Homo sapien
aaatgaaggcagaggttaagtgttcaagcattc

SEQ ID NO: 893435 - DNA, 33 bp, Homo sapien
tctcctatcccataataacactcactttattgg

SEQ ID NO: 893436 - DNA, 33 bp, Homo sapien
tctcctatcccataatgacactcactttattgg

SEQ ID NO: 893437 - DNA, 33 bp, Homo sapien
tgggactcagacaaagcaatgcaatattgccta

SEQ ID NO: 893438 - DNA, 33 bp, Homo sapien
tgggactcagacaaagtaatgcaatattgccta

SEQ ID NO: 893439 - DNA, 33 bp, Homo sapien
ctgtcacaagtcacaactcactcaaggaaaata

SEQ ID NO: 893440 - DNA, 33 bp, Homo sapien
ctgtcacaagtcacaattcactcaaggaaaata

SEQ ID NO: 893441 - DNA, 33 bp, Homo sapien
atggttttatttttctcaacacgatcttaaaat

SEQ ID NO: 893442 - DNA, 33 bp, Homo sapien
atggttttatttttcttaacacgatcttaaaat

SEQ ID NO: 893443 - DNA, 33 bp, Homo sapien
cgctcagagagaatagaagttcacttgtgaata

SEQ ID NO: 893444 - DNA, 33 bp, Homo sapien
cgctcagagagaataggagttcacttgtgaata

SEQ ID NO: 893445 - DNA, 33 bp, Homo sapien
taataatgagcattcaaccattgtcctacacaa

SEQ ID NO: 893446 - DNA, 33 bp, Homo sapien
taataatgagcattcagccattgtcctacacaa

SEQ ID NO: 893447 - DNA, 33 bp, Homo sapien
caatacaaacatcttacctctgtgtcatgagac

SEQ ID NO: 893448 - DNA, 33 bp, Homo sapien
caatacaaacatcttatctctgtgtcatgagac

SEQ ID NO: 893449 - DNA, 33 bp, Homo sapien
gctatggaggtagagtaaccacagaaaatggcc

SEQ ID NO: 893450 - DNA, 33 bp, Homo sapien
gctatggaggtagagttaccacagaaaatggcc

SEQ ID NO: 893451 - DNA, 33 bp, Homo sapien
tagcaaagaagaaagaagtgagagactgaaagc

SEQ ID NO: 893452 - DNA, 33 bp, Homo sapien
tagcaaagaagaaagacgtgagagactgaaagc

SEQ ID NO: 893453 - DNA, 33 bp, Homo sapien
tttatgcagttggtaacgctgagagataaaata

SEQ ID NO: 893454 - DNA, 33 bp, Homo sapien
tttatgcagttggtaatgctgagagataaaata

SEQ ID NO: 893455 - DNA, 33 bp, Homo sapien
aagttagtaagacttgcaggaagcaagagactc

SEQ ID NO: 893456 - DNA, 33 bp, Homo sapien
aagttagtaagacttgtaggaagcaagagactc

SEQ ID NO: 893457 - DNA, 33 bp, Homo sapien
gacctgcctgcaaataggagttacctgctctgg

SEQ ID NO: 893458 - DNA, 33 bp, Homo sapien
gacctgcctgcaaatatgagttacctgctctgg

SEQ ID NO: 893459 - DNA, 33 bp, Homo sapien
taaagtactagaaaacgctgggtgaagacgaag

SEQ ID NO: 893460 - DNA, 33 bp, Homo sapien
taaagtactagaaaactctgggtgaagacgaag

SEQ ID NO: 893461 - DNA, 33 bp, Homo sapien
cttctgacacacattaacattgtgattcctagg

SEQ ID NO: 893462 - DNA, 33 bp, Homo sapien
cttctgacacacattaccattgtgattcctagg

SEQ ID NO: 893463 - DNA, 33 bp, Homo sapien
cttggcttcttcgcacagcagtagtcttctaaa

SEQ ID NO: 893464 - DNA, 33 bp, Homo sapien
cttggcttcttcgcactgcagtagtcttctaaa

SEQ ID NO: 893465 - DNA, 33 bp, Homo sapien
agcccattactgtactaaatatatgggcaattg

SEQ ID NO: 893466 - DNA, 33 bp, Homo sapien
agcccattactgtactgaatatatgggcaattg

SEQ ID NO: 893467 - DNA, 33 bp, Homo sapien
aagtactcctatcaataaatggtgcaagaataa

SEQ ID NO: 893468 - DNA, 33 bp, Homo sapien
aagtactcctatcaatgaatggtgcaagaataa

SEQ ID NO: 893469 - DNA, 33 bp, Homo sapien
aaagtttagagatttcgcaaggaacttagaact

SEQ ID NO: 893470 - DNA, 33 bp, Homo sapien
aaagtttagagatttctcaaggaacttagaact

SEQ ID NO: 893471 - DNA, 33 bp, Homo sapien
tacttcattgctcatcactaagaaaattgctga

SEQ ID NO: 893472 - DNA, 33 bp, Homo sapien
tacttcattgctcatcgctaagaaaattgctga

SEQ ID NO: 893473 - DNA, 33 bp, Homo sapien
gaaaattgctgagacaatgtatcaccttataag

SEQ ID NO: 893474 - DNA, 33 bp, Homo sapien
gaaaattgctgagacagtgtatcaccttataag

SEQ ID NO: 893475 - DNA, 33 bp, Homo sapien
tttactagacattacgaatgaatggaataatac

SEQ ID NO: 893476 - DNA, 33 bp, Homo sapien
tttactagacattacgtatgaatggaataatac

SEQ ID NO: 893477 - DNA, 33 bp, Homo sapien
ggtgcatacatggctccgaattacagttgttga

SEQ ID NO: 893478 - DNA, 33 bp, Homo sapien
ggtgcatacatggctctgaattacagttgttga

SEQ ID NO: 893479 - DNA, 33 bp, Homo sapien
aaacatccatattcataaccacaccaaaaagtt

SEQ ID NO: 893480 - DNA, 33 bp, Homo sapien
aaacatccatattcatgaccacaccaaaaagtt

SEQ ID NO: 893481 - DNA, 33 bp, Homo sapien
acctggaagtccttgacatgtatcactagcaga

SEQ ID NO: 893482 - DNA, 33 bp, Homo sapien
acctggaagtccttgatatgtatcactagcaga

SEQ ID NO: 893483 - DNA, 33 bp, Homo sapien
taagaacctctgatataaaagcaataatattgg

SEQ ID NO: 893484 - DNA, 33 bp, Homo sapien
taagaacctctgatatgaaagcaataatattgg

SEQ ID NO: 893485 - DNA, 33 bp, Homo sapien
attaatctttctgtgacagtctcggaagataat

SEQ ID NO: 893486 - DNA, 33 bp, Homo sapien
attaatctttctgtgatagtctcggaagataat

SEQ ID NO: 893487 - DNA, 33 bp, Homo sapien
aatgcttacagacgaacttaagccatcattctt

SEQ ID NO: 893488 - DNA, 33 bp, Homo sapien
aatgcttacagacgaatttaagccatcattctt

SEQ ID NO: 893489 - DNA, 33 bp, Homo sapien
agttggtgtgtttttcccattctcttaagatat

SEQ ID NO: 893490 - DNA, 33 bp, Homo sapien
agttggtgtgtttttctcattctcttaagatat

SEQ ID NO: 893491 - DNA, 33 bp, Homo sapien
aaaaacagtgtgataaatagcagtgtgctagta

SEQ ID NO: 893492 - DNA, 33 bp, Homo sapien
aaaaacagtgtgataagtagcagtgtgctagta

SEQ ID NO: 893493 - DNA, 33 bp, Homo sapien
ttttgaaaggaggaagcatcgactgatagacgt

SEQ ID NO: 893494 - DNA, 33 bp, Homo sapien
ttttgaaaggaggaaggatcgactgatagacgt

SEQ ID NO: 893495 - DNA, 33 bp, Homo sapien
aagtctattgatttaacagttaatcgcatctaa

SEQ ID NO: 893496 - DNA, 33 bp, Homo sapien
aagtctattgatttaatagttaatcgcatctaa

SEQ ID NO: 893497 - DNA, 33 bp, Homo sapien
gtcctctacctacgcaacccagttagcagacag

SEQ ID NO: 893498 - DNA, 33 bp, Homo sapien
gtcctctacctacgcagcccagttagcagacag

SEQ ID NO: 893499 - DNA, 33 bp, Homo sapien
cctcctcaagaccagaaagaaagcataatcagt

SEQ ID NO: 893500 - DNA, 33 bp, Homo sapien
cctcctcaagaccagatagaaagcataatcagt

SEQ ID NO: 893501 - DNA, 33 bp, Homo sapien
acttttcaggatatgcaatcattttcatcatta

SEQ ID NO: 893502 - DNA, 33 bp, Homo sapien
acttttcaggatatgcgatcattttcatcatta

SEQ ID NO: 893503 - DNA, 33 bp, Homo sapien
ttcctaattctccagaaggtattttgagagtcc

SEQ ID NO: 893504 - DNA, 33 bp, Homo sapien
ttcctaattctccagacggtattttgagagtcc

SEQ ID NO: 893505 - DNA, 33 bp, Homo sapien
agattatttctttgcacggtccacattttttta

SEQ ID NO: 893506 - DNA, 33 bp, Homo sapien
agattatttctttgcatggtccacattttttta

SEQ ID NO: 893507 - DNA, 33 bp, Homo sapien
ctcactaatagtgtgaacctggataaagctacc

SEQ ID NO: 893508 - DNA, 33 bp, Homo sapien
ctcactaatagtgtgagcctggataaagctacc

SEQ ID NO: 893509 - DNA, 33 bp, Homo sapien
gaacataaattagtggaaaagctgagcctggaa

SEQ ID NO: 893510 - DNA, 33 bp, Homo sapien
gaacataaattagtggcaaagctgagcctggaa

SEQ ID NO: 893511 - DNA, 33 bp, Homo sapien
atgcatacacaggattaaacttacagccaatga

SEQ ID NO: 893512 - DNA, 33 bp, Homo sapien
atgcatacacaggattcaacttacagccaatga

SEQ ID NO: 893513 - DNA, 33 bp, Homo sapien
tgttaccaacaaaatgcagtgaactattttccc

SEQ ID NO: 893514 - DNA, 33 bp, Homo sapien
tgttaccaacaaaatggagtgaactattttccc

SEQ ID NO: 893515 - DNA, 33 bp, Homo sapien
cataattgattaaaagcagatgactcacatacc

SEQ ID NO: 893516 - DNA, 33 bp, Homo sapien
cataattgattaaaagtagatgactcacatacc

SEQ ID NO: 893517 - DNA, 33 bp, Homo sapien
aagacaatactattggaaatgagaaatgccatg

SEQ ID NO: 893518 - DNA, 33 bp, Homo sapien
aagacaatactattgggaatgagaaatgccatg

SEQ ID NO: 893519 - DNA, 33 bp, Homo sapien
tagttagtattcttagaaaatgtggaataatgt

SEQ ID NO: 893520 - DNA, 33 bp, Homo sapien
tagttagtattcttaggaaatgtggaataatgt

SEQ ID NO: 893521 - DNA, 33 bp, Homo sapien
ctggaagacgatttaaacttcaagcagtattga

SEQ ID NO: 893522 - DNA, 33 bp, Homo sapien
ctggaagacgatttaagcttcaagcagtattga

SEQ ID NO: 893523 - DNA, 33 bp, Homo sapien
agttaggatgaggtagccacttaaggggaaaag

SEQ ID NO: 893524 - DNA, 33 bp, Homo sapien
agttaggatgaggtagtcacttaaggggaaaag

SEQ ID NO: 893525 - DNA, 33 bp, Homo sapien
aagctgctaggaaatcaatgacactttttaaag

SEQ ID NO: 893526 - DNA, 33 bp, Homo sapien
aagctgctaggaaatcgatgacactttttaaag

SEQ ID NO: 893527 - DNA, 33 bp, Homo sapien
cgaatttcttggaacaatcctgctttgagcact

SEQ ID NO: 893528 - DNA, 33 bp, Homo sapien
cgaatttcttggaacagtcctgctttgagcact

SEQ ID NO: 893529 - DNA, 33 bp, Homo sapien
ccatcccttgaattaactgaggttgtacaaagt

SEQ ID NO: 893530 - DNA, 33 bp, Homo sapien
ccatcccttgaattaattgaggttgtacaaagt

SEQ ID NO: 893531 - DNA, 33 bp, Homo sapien
aattaaagaattaaacaacacaatttcttaagt

SEQ ID NO: 893532 - DNA, 33 bp, Homo sapien
aattaaagaattaaacgacacaatttcttaagt

SEQ ID NO: 893533 - DNA, 33 bp, Homo sapien
tacccaatctgagtgaaaaagagcaaattggct

SEQ ID NO: 893534 - DNA, 33 bp, Homo sapien
tacccaatctgagtgagaaagagcaaattggct

SEQ ID NO: 893535 - DNA, 33 bp, Homo sapien
aaagaaacaatgtccacaaaccttcaaaatttg

SEQ ID NO: 893536 - DNA, 33 bp, Homo sapien
aaagaaacaatgtccagaaaccttcaaaatttg

SEQ ID NO: 893537 - DNA, 33 bp, Homo sapien
atgaatgtaccaaacaaattttccacagtggtt

SEQ ID NO: 893538 - DNA, 33 bp, Homo sapien
atgaatgtaccaaacacattttccacagtggtt

SEQ ID NO: 893539 - DNA, 33 bp, Homo sapien
ctctagtgattcagagaacccacctgcctgaat

SEQ ID NO: 893540 - DNA, 33 bp, Homo sapien
ctctagtgattcagagcacccacctgcctgaat

SEQ ID NO: 893541 - DNA, 33 bp, Homo sapien
cctaagtactaatacactgctaaaagacattat

SEQ ID NO: 893542 - DNA, 33 bp, Homo sapien
cctaagtactaatacattgctaaaagacattat

SEQ ID NO: 893543 - DNA, 33 bp, Homo sapien
tgtacaaactcaaaagccctaagccttctggcc

SEQ ID NO: 893544 - DNA, 33 bp, Homo sapien
tgtacaaactcaaaagtcctaagccttctggcc

SEQ ID NO: 893545 - DNA, 33 bp, Homo sapien
cacagacttccagaaacgaaaggttgctttacc

SEQ ID NO: 893546 - DNA, 33 bp, Homo sapien
cacagacttccagaaatgaaaggttgctttacc

SEQ ID NO: 893547 - DNA, 33 bp, Homo sapien
ttctaaagatgttttaaagtagatactaacagt

SEQ ID NO: 893548 - DNA, 33 bp, Homo sapien
ttctaaagatgttttacagtagatactaacagt

SEQ ID NO: 893549 - DNA, 33 bp, Homo sapien
gctagggataataggacgcagaagctctcagtt

SEQ ID NO: 893550 - DNA, 33 bp, Homo sapien
gctagggataataggatgcagaagctctcagtt

SEQ ID NO: 893551 - DNA, 33 bp, Homo sapien
gattgagaaactttaagcccagggaaggactat

SEQ ID NO: 893552 - DNA, 33 bp, Homo sapien
gattgagaaactttaatcccagggaaggactat

SEQ ID NO: 893553 - DNA, 33 bp, Homo sapien
ttgaatcagagctgtacattaccatttatgtaa

SEQ ID NO: 893554 - DNA, 33 bp, Homo sapien
ttgaatcagagctgtagattaccatttatgtaa

SEQ ID NO: 893555 - DNA, 33 bp, Homo sapien
actgtcttttccagtaaattttgtagctagggt

SEQ ID NO: 893556 - DNA, 33 bp, Homo sapien
actgtcttttccagtatattttgtagctagggt

SEQ ID NO: 893557 - DNA, 33 bp, Homo sapien
gtaaatgatgggcaggaaaagagggttgaagat

SEQ ID NO: 893558 - DNA, 33 bp, Homo sapien
gtaaatgatgggcaggtaaagagggttgaagat

SEQ ID NO: 893559 - DNA, 33 bp, Homo sapien
actcttgttgatgagtcaagtttacaactaaac

SEQ ID NO: 893560 - DNA, 33 bp, Homo sapien
actcttgttgatgagtgaagtttacaactaaac

SEQ ID NO: 893561 - DNA, 33 bp, Homo sapien
gcttgatagtgtcccaaaagtccctttgtgtct

SEQ ID NO: 893562 - DNA, 33 bp, Homo sapien
gcttgatagtgtcccataagtccctttgtgtct

SEQ ID NO: 893563 - DNA, 33 bp, Homo sapien
aagagccagggttgacagctctcagagagaaga

SEQ ID NO: 893564 - DNA, 33 bp, Homo sapien
aagagccagggttgacggctctcagagagaaga

SEQ ID NO: 893565 - DNA, 33 bp, Homo sapien
tactcagcaaaattgaactattaaatattaaaa

SEQ ID NO: 893566 - DNA, 33 bp, Homo sapien
tactcagcaaaattgagctattaaatattaaaa

SEQ ID NO: 893567 - DNA, 33 bp, Homo sapien
tttcaattactaaagagcttcacattttctatg

SEQ ID NO: 893568 - DNA, 33 bp, Homo sapien
tttcaattactaaagatcttcacattttctatg

SEQ ID NO: 893569 - DNA, 33 bp, Homo sapien
attagccagttaagaacgactgaggaaatcctt

SEQ ID NO: 893570 - DNA, 33 bp, Homo sapien
attagccagttaagaatgactgaggaaatcctt

SEQ ID NO: 893571 - DNA, 33 bp, Homo sapien
ttacagtgtatgtttaaccaagtatagatatat

SEQ ID NO: 893572 - DNA, 33 bp, Homo sapien
ttacagtgtatgtttagccaagtatagatatat

SEQ ID NO: 893573 - DNA, 33 bp, Homo sapien
tgtgtatttggaggtacgaactgtgagtgaggg

SEQ ID NO: 893574 - DNA, 33 bp, Homo sapien
tgtgtatttggaggtaggaactgtgagtgaggg

SEQ ID NO: 893575 - DNA, 33 bp, Homo sapien
atatatggggtctacaatgcttagcagtctata

SEQ ID NO: 893576 - DNA, 33 bp, Homo sapien
atatatggggtctacagtgcttagcagtctata

SEQ ID NO: 893577 - DNA, 33 bp, Homo sapien
ccattggtaaaatggaggtactcctgcaggtat

SEQ ID NO: 893578 - DNA, 33 bp, Homo sapien
ccattggtaaaatggatgtactcctgcaggtat

SEQ ID NO: 893579 - DNA, 33 bp, Homo sapien
ttcctcatccatggaggcagattttcctacatc

SEQ ID NO: 893580 - DNA, 33 bp, Homo sapien
ttcctcatccatggagtcagattttcctacatc

SEQ ID NO: 893581 - DNA, 33 bp, Homo sapien
agtggactgtcttctgaaaaataattgtgtatt

SEQ ID NO: 893582 - DNA, 33 bp, Homo sapien
agtggactgtcttctggaaaataattgtgtatt

SEQ ID NO: 893583 - DNA, 33 bp, Homo sapien
aaggaagtcttcgaaaagctaccaatcatactt

SEQ ID NO: 893584 - DNA, 33 bp, Homo sapien
aaggaagtcttcgaaatgctaccaatcatactt

SEQ ID NO: 893585 - DNA, 33 bp, Homo sapien
taaattgattctagtcacccttatcctcaaaca

SEQ ID NO: 893586 - DNA, 33 bp, Homo sapien
taaattgattctagtctcccttatcctcaaaca

SEQ ID NO: 893587 - DNA, 33 bp, Homo sapien
tgagctaatgtctttcaataagaacttttaata

SEQ ID NO: 893588 - DNA, 33 bp, Homo sapien
tgagctaatgtctttcgataagaacttttaata

SEQ ID NO: 893589 - DNA, 33 bp, Homo sapien
actttctgatcttaaaccactaaagcctaaatc

SEQ ID NO: 893590 - DNA, 33 bp, Homo sapien
actttctgatcttaaatcactaaagcctaaatc

SEQ ID NO: 893591 - DNA, 33 bp, Homo sapien
actctctaccatgtgacgatacaatgagaagac

SEQ ID NO: 893592 - DNA, 33 bp, Homo sapien
actctctaccatgtgaggatacaatgagaagac

SEQ ID NO: 893593 - DNA, 33 bp, Homo sapien
ttatgtttactagagaaaaatgagagaatcaag

SEQ ID NO: 893594 - DNA, 33 bp, Homo sapien
ttatgtttactagagagaaatgagagaatcaag

SEQ ID NO: 893595 - DNA, 33 bp, Homo sapien
ggaacttttgggcagaaactatggagatttcta

SEQ ID NO: 893596 - DNA, 33 bp, Homo sapien
ggaacttttgggcagagactatggagatttcta

SEQ ID NO: 893597 - DNA, 33 bp, Homo sapien
agtgcaggataagaccaattcatgaaacaatat

SEQ ID NO: 893598 - DNA, 33 bp, Homo sapien
agtgcaggataagaccgattcatgaaacaatat

SEQ ID NO: 893599 - DNA, 33 bp, Homo sapien
gaaaagtggcctgtgaaagaatgctaaggggac

SEQ ID NO: 893600 - DNA, 33 bp, Homo sapien
gaaaagtggcctgtgacagaatgctaaggggac

SEQ ID NO: 893601 - DNA, 33 bp, Homo sapien
aagcaccataaggtgagagagtcaaatgtacaa

SEQ ID NO: 893602 - DNA, 33 bp, Homo sapien
aagcaccataaggtgatagagtcaaatgtacaa

SEQ ID NO: 893603 - DNA, 33 bp, Homo sapien
gaggtggccaggtaaaattatctggagggtgta

SEQ ID NO: 893604 - DNA, 33 bp, Homo sapien
gaggtggccaggtaaagttatctggagggtgta

SEQ ID NO: 893605 - DNA, 33 bp, Homo sapien
tataccagtccagaaacaaataagcaggttaaa

SEQ ID NO: 893606 - DNA, 33 bp, Homo sapien
tataccagtccagaaagaaataagcaggttaaa

SEQ ID NO: 893607 - DNA, 33 bp, Homo sapien
tcactcttttaactcaatgaacactcattaatt

SEQ ID NO: 893608 - DNA, 33 bp, Homo sapien
tcactcttttaactcagtgaacactcattaatt

SEQ ID NO: 893609 - DNA, 33 bp, Homo sapien
ggcctctttcttcactcacagaaaccctctgga

SEQ ID NO: 893610 - DNA, 33 bp, Homo sapien
ggcctctttcttcactgacagaaaccctctgga

SEQ ID NO: 893611 - DNA, 33 bp, Homo sapien
gcagtagctcttagcacaaggtaatttcaaaag

SEQ ID NO: 893612 - DNA, 33 bp, Homo sapien
gcagtagctcttagcagaaggtaatttcaaaag

SEQ ID NO: 893613 - DNA, 33 bp, Homo sapien
gctaagttctggcaaacaggttaggtgggaatt

SEQ ID NO: 893614 - DNA, 33 bp, Homo sapien
gctaagttctggcaaataggttaggtgggaatt

SEQ ID NO: 893615 - DNA, 33 bp, Homo sapien
tataggcatgtacgaaaaagctgagttaagttg

SEQ ID NO: 893616 - DNA, 33 bp, Homo sapien
tataggcatgtacgaagaagctgagttaagttg

SEQ ID NO: 893617 - DNA, 33 bp, Homo sapien
tttcaatggagacaataagagaggaggatatga

SEQ ID NO: 893618 - DNA, 33 bp, Homo sapien
tttcaatggagacaattagagaggaggatatga

SEQ ID NO: 893619 - DNA, 33 bp, Homo sapien
gttctagcattagtaactcatgaacttgcgact

SEQ ID NO: 893620 - DNA, 33 bp, Homo sapien
gttctagcattagtaattcatgaacttgcgact

SEQ ID NO: 893621 - DNA, 33 bp, Homo sapien
tcaaaagtcattttccactaagcctattaagtg

SEQ ID NO: 893622 - DNA, 33 bp, Homo sapien
tcaaaagtcattttccgctaagcctattaagtg

SEQ ID NO: 893623 - DNA, 33 bp, Homo sapien
ccgaggagatgtgctacaatccagtttatgagt

SEQ ID NO: 893624 - DNA, 33 bp, Homo sapien
ccgaggagatgtgctataatccagtttatgagt

SEQ ID NO: 893625 - DNA, 33 bp, Homo sapien
gagtgatttctataaacgatttgcctacatgac

SEQ ID NO: 893626 - DNA, 33 bp, Homo sapien
gagtgatttctataaatgatttgcctacatgac

SEQ ID NO: 893627 - DNA, 33 bp, Homo sapien
gacacacaattctacaatcacttgaggaatgtg

SEQ ID NO: 893628 - DNA, 33 bp, Homo sapien
gacacacaattctacagtcacttgaggaatgtg

SEQ ID NO: 893629 - DNA, 33 bp, Homo sapien
acttaaaaaataaattcaacatcagaggagtaa

SEQ ID NO: 893630 - DNA, 33 bp, Homo sapien
acttaaaaaataaattgaacatcagaggagtaa

SEQ ID NO: 893631 - DNA, 33 bp, Homo sapien
gatcactcagaacagaagctacttttcccaacc

SEQ ID NO: 893632 - DNA, 33 bp, Homo sapien
gatcactcagaacagaggctacttttcccaacc

SEQ ID NO: 893633 - DNA, 33 bp, Homo sapien
aataagccatatggcacagagaaccaatgaaca

SEQ ID NO: 893634 - DNA, 33 bp, Homo sapien
aataagccatatggcagagagaaccaatgaaca

SEQ ID NO: 893635 - DNA, 33 bp, Homo sapien
tgatggataaataagaacctgagagaggcaaag

SEQ ID NO: 893636 - DNA, 33 bp, Homo sapien
tgatggataaataagagcctgagagaggcaaag

SEQ ID NO: 893637 - DNA, 33 bp, Homo sapien
aattgaaaacaggaaactctgtctgaatggtaa

SEQ ID NO: 893638 - DNA, 33 bp, Homo sapien
aattgaaaacaggaaattctgtctgaatggtaa

SEQ ID NO: 893639 - DNA, 33 bp, Homo sapien
ctgaatttaatttgaacagcaaagttatatttg

SEQ ID NO: 893640 - DNA, 33 bp, Homo sapien
ctgaatttaatttgaagagcaaagttatatttg

SEQ ID NO: 893641 - DNA, 33 bp, Homo sapien
ttggtatgtctttcatcagggtgagagtgggaa

SEQ ID NO: 893642 - DNA, 33 bp, Homo sapien
ttggtatgtctttcatgagggtgagagtgggaa

SEQ ID NO: 893643 - DNA, 33 bp, Homo sapien
acctctgagttaataaggatactatatggtatt

SEQ ID NO: 893644 - DNA, 33 bp, Homo sapien
acctctgagttaataatgatactatatggtatt

SEQ ID NO: 893645 - DNA, 33 bp, Homo sapien
gtcaggcaaggggataaagagagtgttccaggt

SEQ ID NO: 893646 - DNA, 33 bp, Homo sapien
gtcaggcaaggggatagagagagtgttccaggt

SEQ ID NO: 893647 - DNA, 33 bp, Homo sapien
gtctctctgaagataacgttaagctgcagctcc

SEQ ID NO: 893648 - DNA, 33 bp, Homo sapien
gtctctctgaagataatgttaagctgcagctcc

SEQ ID NO: 893649 - DNA, 33 bp, Homo sapien
aggtctatttcactgtcaatggtggttaagaag

SEQ ID NO: 893650 - DNA, 33 bp, Homo sapien
aggtctatttcactgtgaatggtggttaagaag

SEQ ID NO: 893651 - DNA, 33 bp, Homo sapien
aacattcctactgttacggtcatttattaaata

SEQ ID NO: 893652 - DNA, 33 bp, Homo sapien
aacattcctactgttatggtcatttattaaata

SEQ ID NO: 893653 - DNA, 33 bp, Homo sapien
tttctttcaatttactaactttcaaagtggaaa

SEQ ID NO: 893654 - DNA, 33 bp, Homo sapien
tttctttcaatttacttactttcaaagtggaaa

SEQ ID NO: 893655 - DNA, 33 bp, Homo sapien
agacatcagcaggcaaacttaaaattgagtaga

SEQ ID NO: 893656 - DNA, 33 bp, Homo sapien
agacatcagcaggcaagcttaaaattgagtaga

SEQ ID NO: 893657 - DNA, 33 bp, Homo sapien
acacttgactatcaaactgagtatcacaagtct

SEQ ID NO: 893658 - DNA, 33 bp, Homo sapien
acacttgactatcaaattgagtatcacaagtct

SEQ ID NO: 893659 - DNA, 33 bp, Homo sapien
tctcaaagaggttacaataccatcttcattttt

SEQ ID NO: 893660 - DNA, 33 bp, Homo sapien
tctcaaagaggttacagtaccatcttcattttt

SEQ ID NO: 893661 - DNA, 33 bp, Homo sapien
aacataaaggtaaagcaattgagtcaccaaaag

SEQ ID NO: 893662 - DNA, 33 bp, Homo sapien
aacataaaggtaaagcgattgagtcaccaaaag

SEQ ID NO: 893663 - DNA, 33 bp, Homo sapien
tccaagagagtatcgacaagtctgttcaaaagg

SEQ ID NO: 893664 - DNA, 33 bp, Homo sapien
tccaagagagtatcgagaagtctgttcaaaagg

SEQ ID NO: 893665 - DNA, 33 bp, Homo sapien
ttcttatattcactcaagatagacagtctaatc

SEQ ID NO: 893666 - DNA, 33 bp, Homo sapien
ttcttatattcactcacgatagacagtctaatc

SEQ ID NO: 893667 - DNA, 33 bp, Homo sapien
tgcattaaaaacaaaacagccgtcaaggggtgg

SEQ ID NO: 893668 - DNA, 33 bp, Homo sapien
tgcattaaaaacaaaagagccgtcaaggggtgg

SEQ ID NO: 893669 - DNA, 33 bp, Homo sapien
ggggtcttctcctggaacatagcagcagtgtgg

SEQ ID NO: 893670 - DNA, 33 bp, Homo sapien
ggggtcttctcctggagcatagcagcagtgtgg

SEQ ID NO: 893671 - DNA, 33 bp, Homo sapien
tcacttaacatgatagccactagtaaacttgaa

SEQ ID NO: 893672 - DNA, 33 bp, Homo sapien
tcacttaacatgatagtcactagtaaacttgaa

SEQ ID NO: 893673 - DNA, 33 bp, Homo sapien
aattgttaaacttacactgattttaaagataac

SEQ ID NO: 893674 - DNA, 33 bp, Homo sapien
aattgttaaacttacattgattttaaagataac

SEQ ID NO: 893675 - DNA, 33 bp, Homo sapien
cacctgtcagagttataaacacctgctcattta

SEQ ID NO: 893676 - DNA, 33 bp, Homo sapien
cacctgtcagagttatgaacacctgctcattta

SEQ ID NO: 893677 - DNA, 33 bp, Homo sapien
ccctaggaaatgaacacaatgagccaagcattc

SEQ ID NO: 893678 - DNA, 33 bp, Homo sapien
ccctaggaaatgaacagaatgagccaagcattc

SEQ ID NO: 893679 - DNA, 33 bp, Homo sapien
tttgtagcctaccttccagtcattatatgatca

SEQ ID NO: 893680 - DNA, 33 bp, Homo sapien
tttgtagcctaccttctagtcattatatgatca

SEQ ID NO: 893681 - DNA, 33 bp, Homo sapien
tagtgcatattatacaatccctttatagtttcc

SEQ ID NO: 893682 - DNA, 33 bp, Homo sapien
tagtgcatattatacagtccctttatagtttcc

SEQ ID NO: 893683 - DNA, 33 bp, Homo sapien
gttcctttgaaggtcacgctacccaatatgttt

SEQ ID NO: 893684 - DNA, 33 bp, Homo sapien
gttcctttgaaggtcatgctacccaatatgttt

SEQ ID NO: 893685 - DNA, 33 bp, Homo sapien
acaagcctttgattgcccctgacaattccttag

SEQ ID NO: 893686 - DNA, 33 bp, Homo sapien
acaagcctttgattgcgcctgacaattccttag

SEQ ID NO: 893687 - DNA, 33 bp, Homo sapien
gttgaggtggaacagaagtaagatcaccaaaga

SEQ ID NO: 893688 - DNA, 33 bp, Homo sapien
gttgaggtggaacagaggtaagatcaccaaaga

SEQ ID NO: 893689 - DNA, 33 bp, Homo sapien
aattgctagcagaaacaactgactagaagtggt

SEQ ID NO: 893690 - DNA, 33 bp, Homo sapien
aattgctagcagaaacgactgactagaagtggt

SEQ ID NO: 893691 - DNA, 33 bp, Homo sapien
gagggcttcagtgagactcatggtgataaattg

SEQ ID NO: 893692 - DNA, 33 bp, Homo sapien
gagggcttcagtgagattcatggtgataaattg

SEQ ID NO: 893693 - DNA, 33 bp, Homo sapien
gctacaggaaaattgagctactgatgaaggctt

SEQ ID NO: 893694 - DNA, 33 bp, Homo sapien
gctacaggaaaattgatctactgatgaaggctt

SEQ ID NO: 893695 - DNA, 33 bp, Homo sapien
ggcaagattagttttaaacatttggctgtggct

SEQ ID NO: 893696 - DNA, 33 bp, Homo sapien
ggcaagattagttttatacatttggctgtggct

SEQ ID NO: 893697 - DNA, 33 bp, Homo sapien
ctttgaatattgctgaaataaagtccaagccat

SEQ ID NO: 893698 - DNA, 33 bp, Homo sapien
ctttgaatattgctgagataaagtccaagccat

SEQ ID NO: 893699 - DNA, 33 bp, Homo sapien
aatggataaacaaaacagtatgtcatatacata

SEQ ID NO: 893700 - DNA, 33 bp, Homo sapien
aatggataaacaaaaccgtatgtcatatacata

SEQ ID NO: 893701 - DNA, 33 bp, Homo sapien
gcatagcaaaaagagacgtatctttcttgttct

SEQ ID NO: 893702 - DNA, 33 bp, Homo sapien
gcatagcaaaaagagaggtatctttcttgttct

SEQ ID NO: 893703 - DNA, 33 bp, Homo sapien
tctgtttcttctattcacctcccacatctcttt

SEQ ID NO: 893704 - DNA, 33 bp, Homo sapien
tctgtttcttctattcgcctcccacatctcttt

SEQ ID NO: 893705 - DNA, 33 bp, Homo sapien
agcccttagaacaatacctgatacatagaaaga

SEQ ID NO: 893706 - DNA, 33 bp, Homo sapien
agcccttagaacaatagctgatacatagaaaga

SEQ ID NO: 893707 - DNA, 33 bp, Homo sapien
tttttcatacaattcaacttacccaattctaca

SEQ ID NO: 893708 - DNA, 33 bp, Homo sapien
tttttcatacaattcagcttacccaattctaca

SEQ ID NO: 893709 - DNA, 33 bp, Homo sapien
agtgggtagtgttttccctaacatctgcaaagg

SEQ ID NO: 893710 - DNA, 33 bp, Homo sapien
agtgggtagtgttttctctaacatctgcaaagg

SEQ ID NO: 893711 - DNA, 33 bp, Homo sapien
taatagagacattttacggtgggtgctacctga

SEQ ID NO: 893712 - DNA, 33 bp, Homo sapien
taatagagacattttatggtgggtgctacctga

SEQ ID NO: 893713 - DNA, 33 bp, Homo sapien
catgaaagatgctgtacaccattaccattgcct

SEQ ID NO: 893714 - DNA, 33 bp, Homo sapien
catgaaagatgctgtataccattaccattgcct

SEQ ID NO: 893715 - DNA, 33 bp, Homo sapien
cagaaaatagaaatgaatatttgttcaacacat

SEQ ID NO: 893716 - DNA, 33 bp, Homo sapien
cagaaaatagaaatgagtatttgttcaacacat

SEQ ID NO: 893717 - DNA, 33 bp, Homo sapien
ataacttgatttattaaaagaatccaagcaatg

SEQ ID NO: 893718 - DNA, 33 bp, Homo sapien
ataacttgatttattagaagaatccaagcaatg

SEQ ID NO: 893719 - DNA, 33 bp, Homo sapien
tttatttaaactcaacagtatcagtaaataata

SEQ ID NO: 893720 - DNA, 33 bp, Homo sapien
tttatttaaactcaactgtatcagtaaataata

SEQ ID NO: 893721 - DNA, 33 bp, Homo sapien
cacgaaaattgggtcaaataaattcgtcccatt

SEQ ID NO: 893722 - DNA, 33 bp, Homo sapien
cacgaaaattgggtcagataaattcgtcccatt

SEQ ID NO: 893723 - DNA, 33 bp, Homo sapien
gaagacatccacccaaatgtacgttttcttcct

SEQ ID NO: 893724 - DNA, 33 bp, Homo sapien
gaagacatccacccaattgtacgttttcttcct

SEQ ID NO: 893725 - DNA, 33 bp, Homo sapien
tgtttgaaagtttagaatagtttcgaacatatc

SEQ ID NO: 893726 - DNA, 33 bp, Homo sapien
tgtttgaaagtttagagtagtttcgaacatatc

SEQ ID NO: 893727 - DNA, 33 bp, Homo sapien
ttatttttaatggtgacgtccatcttgtcttgt

SEQ ID NO: 893728 - DNA, 33 bp, Homo sapien
ttatttttaatggtgatgtccatcttgtcttgt

SEQ ID NO: 893729 - DNA, 33 bp, Homo sapien
ggggtagggagaaataaaaagcacagtcagcta

SEQ ID NO: 893730 - DNA, 33 bp, Homo sapien
ggggtagggagaaatataaagcacagtcagcta

SEQ ID NO: 893731 - DNA, 33 bp, Homo sapien
tctggcaacagaattacgtgagatgctgtattt

SEQ ID NO: 893732 - DNA, 33 bp, Homo sapien
tctggcaacagaattatgtgagatgctgtattt

SEQ ID NO: 893733 - DNA, 33 bp, Homo sapien
cttcacaatcattccaaagggcctggattctgt

SEQ ID NO: 893734 - DNA, 33 bp, Homo sapien
cttcacaatcattccagagggcctggattctgt

SEQ ID NO: 893735 - DNA, 33 bp, Homo sapien
ctttgaagtttagtcacgagtcatttaaggaca

SEQ ID NO: 893736 - DNA, 33 bp, Homo sapien
ctttgaagtttagtcatgagtcatttaaggaca

SEQ ID NO: 893737 - DNA, 33 bp, Homo sapien
tcaagaatacagtacaacaccattaactatatt

SEQ ID NO: 893738 - DNA, 33 bp, Homo sapien
tcaagaatacagtacatcaccattaactatatt

SEQ ID NO: 893739 - DNA, 33 bp, Homo sapien
atgcattcaggattgaacaccatggaaatgcca

SEQ ID NO: 893740 - DNA, 33 bp, Homo sapien
atgcattcaggattgagcaccatggaaatgcca

SEQ ID NO: 893741 - DNA, 33 bp, Homo sapien
gttgtttccctcaacaccatttcactataacgt

SEQ ID NO: 893742 - DNA, 33 bp, Homo sapien
gttgtttccctcaacatcatttcactataacgt

SEQ ID NO: 893743 - DNA, 33 bp, Homo sapien
gctaagaacaatgatgaaagattacaggagatg

SEQ ID NO: 893744 - DNA, 33 bp, Homo sapien
gctaagaacaatgatggaagattacaggagatg

SEQ ID NO: 893745 - DNA, 33 bp, Homo sapien
ctggtgctgagatgaacgactgcctgtgagttc

SEQ ID NO: 893746 - DNA, 33 bp, Homo sapien
ctggtgctgagatgaaggactgcctgtgagttc

SEQ ID NO: 893747 - DNA, 33 bp, Homo sapien
atggttgagaaagaacaaagaaggcatgaggaa

SEQ ID NO: 893748 - DNA, 33 bp, Homo sapien
atggttgagaaagaacgaagaaggcatgaggaa

SEQ ID NO: 893749 - DNA, 33 bp, Homo sapien
gccaaacaggttcagaccactgtgggagaacag

SEQ ID NO: 893750 - DNA, 33 bp, Homo sapien
gccaaacaggttcagatcactgtgggagaacag

SEQ ID NO: 893751 - DNA, 33 bp, Homo sapien
aacctctcaaaacataaacagtcagtgttgact

SEQ ID NO: 893752 - DNA, 33 bp, Homo sapien
aacctctcaaaacatagacagtcagtgttgact

SEQ ID NO: 893753 - DNA, 33 bp, Homo sapien
ataaaacatttatgacacactcacctttcttta

SEQ ID NO: 893754 - DNA, 33 bp, Homo sapien
ataaaacatttatgacgcactcacctttcttta

SEQ ID NO: 893755 - DNA, 33 bp, Homo sapien
gcttcattcgaaaccaccaacatctatgacctt

SEQ ID NO: 893756 - DNA, 33 bp, Homo sapien
gcttcattcgaaaccatcaacatctatgacctt

SEQ ID NO: 893757 - DNA, 33 bp, Homo sapien
tgcctacatgatgagaagaagtgaggcggatga

SEQ ID NO: 893758 - DNA, 33 bp, Homo sapien
tgcctacatgatgagatgaagtgaggcggatga

SEQ ID NO: 893759 - DNA, 33 bp, Homo sapien
acttcaattactctcaagcaggacctataatgt

SEQ ID NO: 893760 - DNA, 33 bp, Homo sapien
acttcaattactctcaggcaggacctataatgt

SEQ ID NO: 893761 - DNA, 33 bp, Homo sapien
ttctccaacagaattaagtgaaatctcatttat

SEQ ID NO: 893762 - DNA, 33 bp, Homo sapien
ttctccaacagaattatgtgaaatctcatttat

SEQ ID NO: 893763 - DNA, 33 bp, Homo sapien
accattgtttcatcctcaaattacagagatctt

SEQ ID NO: 893764 - DNA, 33 bp, Homo sapien
accattgtttcatccttaaattacagagatctt

SEQ ID NO: 893765 - DNA, 33 bp, Homo sapien
gcaggggtgaaggagtaaaaggataaaagattc

SEQ ID NO: 893766 - DNA, 33 bp, Homo sapien
gcaggggtgaaggagtgaaaggataaaagattc

SEQ ID NO: 893767 - DNA, 33 bp, Homo sapien
tgttaagcccataagaaataagctgatcagcca

SEQ ID NO: 893768 - DNA, 33 bp, Homo sapien
tgttaagcccataagagataagctgatcagcca

SEQ ID NO: 893769 - DNA, 33 bp, Homo sapien
cactgaaaagtagatccctaacaatggccaagt

SEQ ID NO: 893770 - DNA, 33 bp, Homo sapien
cactgaaaagtagatctctaacaatggccaagt

SEQ ID NO: 893771 - DNA, 33 bp, Homo sapien
aagggtgaaagcatccagccaattgtgaagcaa

SEQ ID NO: 893772 - DNA, 33 bp, Homo sapien
aagggtgaaagcatccggccaattgtgaagcaa

SEQ ID NO: 893773 - DNA, 33 bp, Homo sapien
catggaagctggaaaactctcaaaaagttgcaa

SEQ ID NO: 893774 - DNA, 33 bp, Homo sapien
catggaagctggaaaagtctcaaaaagttgcaa

SEQ ID NO: 893775 - DNA, 33 bp, Homo sapien
ctcaatgacaattgccacccaaaacaggatttt

SEQ ID NO: 893776 - DNA, 33 bp, Homo sapien
ctcaatgacaattgccgcccaaaacaggatttt

SEQ ID NO: 893777 - DNA, 33 bp, Homo sapien
actttatctagagaaacatgagtcagtctttgt

SEQ ID NO: 893778 - DNA, 33 bp, Homo sapien
actttatctagagaaatatgagtcagtctttgt

SEQ ID NO: 893779 - DNA, 33 bp, Homo sapien
taattactatcataaaaaattcaaaggacacat

SEQ ID NO: 893780 - DNA, 33 bp, Homo sapien
taattactatcataaacaattcaaaggacacat

SEQ ID NO: 893781 - DNA, 33 bp, Homo sapien
atcttccggggtcaacactgtggcttgatacta

SEQ ID NO: 893782 - DNA, 33 bp, Homo sapien
atcttccggggtcaacgctgtggcttgatacta

SEQ ID NO: 893783 - DNA, 33 bp, Homo sapien
tattttggatgaagaaagctcatcttacagatg

SEQ ID NO: 893784 - DNA, 33 bp, Homo sapien
tattttggatgaagaatgctcatcttacagatg

SEQ ID NO: 893785 - DNA, 33 bp, Homo sapien
cccaatggaggcaaccaaaatccactggacaga

SEQ ID NO: 893786 - DNA, 33 bp, Homo sapien
cccaatggaggcaaccgaaatccactggacaga

SEQ ID NO: 893787 - DNA, 33 bp, Homo sapien
aatatatcgaataccaacatgggacagaagcaa

SEQ ID NO: 893788 - DNA, 33 bp, Homo sapien
aatatatcgaataccatcatgggacagaagcaa

SEQ ID NO: 893789 - DNA, 33 bp, Homo sapien
aggtggaacctaccaaatggggtctccagccac

SEQ ID NO: 893790 - DNA, 33 bp, Homo sapien
aggtggaacctaccaactggggtctccagccac

SEQ ID NO: 893791 - DNA, 33 bp, Homo sapien
aaaatgtaacaaaccaactgcttaacaaatcaa

SEQ ID NO: 893792 - DNA, 33 bp, Homo sapien
aaaatgtaacaaaccagctgcttaacaaatcaa

SEQ ID NO: 893793 - DNA, 33 bp, Homo sapien
ctgtgtgtgtttcttcaccattattttcctagc

SEQ ID NO: 893794 - DNA, 33 bp, Homo sapien
ctgtgtgtgtttcttcgccattattttcctagc

SEQ ID NO: 893795 - DNA, 33 bp, Homo sapien
ccactaaaatctgatacacaaaaggaatctagt

SEQ ID NO: 893796 - DNA, 33 bp, Homo sapien
ccactaaaatctgatatacaaaaggaatctagt

SEQ ID NO: 893797 - DNA, 33 bp, Homo sapien
aattagggcttcacacggtcttctttctataaa

SEQ ID NO: 893798 - DNA, 33 bp, Homo sapien
aattagggcttcacactgtcttctttctataaa

SEQ ID NO: 893799 - DNA, 33 bp, Homo sapien
tgaatggccttggggacgtatgctctcttattt

SEQ ID NO: 893800 - DNA, 33 bp, Homo sapien
tgaatggccttggggatgtatgctctcttattt

SEQ ID NO: 893801 - DNA, 33 bp, Homo sapien
tggcagaaccaatgaaaagggagaaaaatatgc

SEQ ID NO: 893802 - DNA, 33 bp, Homo sapien
tggcagaaccaatgaatagggagaaaaatatgc

SEQ ID NO: 893803 - DNA, 33 bp, Homo sapien
ttgattttggactatgcagaaaattcctgttgc

SEQ ID NO: 893804 - DNA, 33 bp, Homo sapien
ttgattttggactatggagaaaattcctgttgc

SEQ ID NO: 893805 - DNA, 33 bp, Homo sapien
aaaggcacagaagatacactcaacagggaatcc

SEQ ID NO: 893806 - DNA, 33 bp, Homo sapien
aaaggcacagaagatatactcaacagggaatcc

SEQ ID NO: 893807 - DNA, 33 bp, Homo sapien
agtctagaatgggatccgagaatcaacattttt

SEQ ID NO: 893808 - DNA, 33 bp, Homo sapien
agtctagaatgggatctgagaatcaacattttt

SEQ ID NO: 893809 - DNA, 33 bp, Homo sapien
cttatatctcagttccaaacttggatgttttcc

SEQ ID NO: 893810 - DNA, 33 bp, Homo sapien
cttatatctcagttccgaacttggatgttttcc

SEQ ID NO: 893811 - DNA, 33 bp, Homo sapien
cttatacaccatagagcctatagctaacaatac

SEQ ID NO: 893812 - DNA, 33 bp, Homo sapien
cttatacaccatagagtctatagctaacaatac

SEQ ID NO: 893813 - DNA, 33 bp, Homo sapien
tatatatttatgaccaaacttctcgagttgtat

SEQ ID NO: 893814 - DNA, 33 bp, Homo sapien
tatatatttatgaccatacttctcgagttgtat

SEQ ID NO: 893815 - DNA, 33 bp, Homo sapien
tttaatctgccaaaaaattatcaaacagactaa

SEQ ID NO: 893816 - DNA, 33 bp, Homo sapien
tttaatctgccaaaaatttatcaaacagactaa

SEQ ID NO: 893817 - DNA, 33 bp, Homo sapien
tccatatatcatgatcggaaggtgtcttggaaa

SEQ ID NO: 893818 - DNA, 33 bp, Homo sapien
tccatatatcatgatctgaaggtgtcttggaaa

SEQ ID NO: 893819 - DNA, 33 bp, Homo sapien
ccatgtggctaacgtacatatgctcctttgaca

SEQ ID NO: 893820 - DNA, 33 bp, Homo sapien
ccatgtggctaacgtatatatgctcctttgaca

SEQ ID NO: 893821 - DNA, 33 bp, Homo sapien
gtggaggctcagaaaagaccttgtttacacgtc

SEQ ID NO: 893822 - DNA, 33 bp, Homo sapien
gtggaggctcagaaaataccttgtttacacgtc

SEQ ID NO: 893823 - DNA, 33 bp, Homo sapien
agtcaccataatgctaagaacaggtggaggctc

SEQ ID NO: 893824 - DNA, 33 bp, Homo sapien
agtcaccataatgctaggaacaggtggaggctc

SEQ ID NO: 893825 - DNA, 33 bp, Homo sapien
aaaaaaatcaattcaaagtgtatgcctatttga

SEQ ID NO: 893826 - DNA, 33 bp, Homo sapien
aaaaaaatcaattcaaggtgtatgcctatttga

SEQ ID NO: 893827 - DNA, 33 bp, Homo sapien
cttggactctgacaaaatcaaccttggagaatg

SEQ ID NO: 893828 - DNA, 33 bp, Homo sapien
cttggactctgacaaagtcaaccttggagaatg

SEQ ID NO: 893829 - DNA, 33 bp, Homo sapien
gcatatttaagtatacgaggcgccacagccact

SEQ ID NO: 893830 - DNA, 33 bp, Homo sapien
gcatatttaagtatactaggcgccacagccact

SEQ ID NO: 893831 - DNA, 33 bp, Homo sapien
gcctttctgaacttcaataactcagagggagct

SEQ ID NO: 893832 - DNA, 33 bp, Homo sapien
gcctttctgaacttcagtaactcagagggagct

SEQ ID NO: 893833 - DNA, 33 bp, Homo sapien
actagaagtcatcacaatatgagataattgagg

SEQ ID NO: 893834 - DNA, 33 bp, Homo sapien
actagaagtcatcacagtatgagataattgagg

SEQ ID NO: 893835 - DNA, 33 bp, Homo sapien
cctggagcgacagcaaagactaattatcagagg

SEQ ID NO: 893836 - DNA, 33 bp, Homo sapien
cctggagcgacagcaaggactaattatcagagg

SEQ ID NO: 893837 - DNA, 33 bp, Homo sapien
gatgaaattatgcttaacggaaaatttgctgca

SEQ ID NO: 893838 - DNA, 33 bp, Homo sapien
gatgaaattatgcttagcggaaaatttgctgca

SEQ ID NO: 893839 - DNA, 33 bp, Homo sapien
caaatcagttttagacactgggtagaaatgcaa

SEQ ID NO: 893840 - DNA, 33 bp, Homo sapien
caaatcagttttagacgctgggtagaaatgcaa

SEQ ID NO: 893841 - DNA, 33 bp, Homo sapien
tttaactgccatgcaaatcagtatacatcagaa

SEQ ID NO: 893842 - DNA, 33 bp, Homo sapien
tttaactgccatgcaattcagtatacatcagaa

SEQ ID NO: 893843 - DNA, 33 bp, Homo sapien
gtagtttacaccaggaaaatgttgagggcaata

SEQ ID NO: 893844 - DNA, 33 bp, Homo sapien
gtagtttacaccaggagaatgttgagggcaata

SEQ ID NO: 893845 - DNA, 33 bp, Homo sapien
ggatatttaaaagaaccaaggtatcattaacaa

SEQ ID NO: 893846 - DNA, 33 bp, Homo sapien
ggatatttaaaagaacgaaggtatcattaacaa

SEQ ID NO: 893847 - DNA, 33 bp, Homo sapien
aaaaagctattacataaccatactttcaaaata

SEQ ID NO: 893848 - DNA, 33 bp, Homo sapien
aaaaagctattacatatccatactttcaaaata

SEQ ID NO: 893849 - DNA, 33 bp, Homo sapien
aaataggagataaaaaagttttgccacatatat

SEQ ID NO: 893850 - DNA, 33 bp, Homo sapien
aaataggagataaaaaggttttgccacatatat

SEQ ID NO: 893851 - DNA, 33 bp, Homo sapien
aattcaagaggcattgaataacttcttccagat

SEQ ID NO: 893852 - DNA, 33 bp, Homo sapien
aattcaagaggcattgtataacttcttccagat

SEQ ID NO: 893853 - DNA, 33 bp, Homo sapien
acaacaaagcaaaacaacaataaaacaccaggc

SEQ ID NO: 893854 - DNA, 33 bp, Homo sapien
acaacaaagcaaaacatcaataaaacaccaggc

SEQ ID NO: 893855 - DNA, 33 bp, Homo sapien
gttgctattccagataaatattggtatcgtttg

SEQ ID NO: 893856 - DNA, 33 bp, Homo sapien
gttgctattccagatagatattggtatcgtttg

SEQ ID NO: 893857 - DNA, 33 bp, Homo sapien
aaggaattgataattacgcagtataggagaaaa

SEQ ID NO: 893858 - DNA, 33 bp, Homo sapien
aaggaattgataattatgcagtataggagaaaa

SEQ ID NO: 893859 - DNA, 33 bp, Homo sapien
ggttgtcatttgttcgcaagtacggcagagcct

SEQ ID NO: 893860 - DNA, 33 bp, Homo sapien
ggttgtcatttgttcggaagtacggcagagcct

SEQ ID NO: 893861 - DNA, 33 bp, Homo sapien
ggctggttttgaaggacaggcgaaatgcagaaa

SEQ ID NO: 893862 - DNA, 33 bp, Homo sapien
ggctggttttgaaggataggcgaaatgcagaaa

SEQ ID NO: 893863 - DNA, 33 bp, Homo sapien
atgagtttacaggaaacgtgaaaggagaaagag

SEQ ID NO: 893864 - DNA, 33 bp, Homo sapien
atgagtttacaggaaatgtgaaaggagaaagag

SEQ ID NO: 893865 - DNA, 33 bp, Homo sapien
ttttgtttaggagtaacagaagaatccagaatg

SEQ ID NO: 893866 - DNA, 33 bp, Homo sapien
ttttgtttaggagtaagagaagaatccagaatg

SEQ ID NO: 893867 - DNA, 33 bp, Homo sapien
ggttactttctctagacgggagatagcaatgtg

SEQ ID NO: 893868 - DNA, 33 bp, Homo sapien
ggttactttctctagatgggagatagcaatgtg

SEQ ID NO: 893869 - DNA, 33 bp, Homo sapien
gtacagttatacttctaaagcactaggccccaa

SEQ ID NO: 893870 - DNA, 33 bp, Homo sapien
gtacagttatacttctgaagcactaggccccaa

SEQ ID NO: 893871 - DNA, 33 bp, Homo sapien
ggaaccattgctggaaagtagttttcttgtaat

SEQ ID NO: 893872 - DNA, 33 bp, Homo sapien
ggaaccattgctggaaggtagttttcttgtaat

SEQ ID NO: 893873 - DNA, 33 bp, Homo sapien
aggtggatcacagacaagaagagaagagacata

SEQ ID NO: 893874 - DNA, 33 bp, Homo sapien
aggtggatcacagacaggaagagaagagacata

SEQ ID NO: 893875 - DNA, 33 bp, Homo sapien
ctcctagtttcctaaccgtgaatgagttgttcc

SEQ ID NO: 893876 - DNA, 33 bp, Homo sapien
ctcctagtttcctaactgtgaatgagttgttcc

SEQ ID NO: 893877 - DNA, 33 bp, Homo sapien
tcacaaaactgcccaaagtaattatgataatca

SEQ ID NO: 893878 - DNA, 33 bp, Homo sapien
tcacaaaactgcccaaggtaattatgataatca

SEQ ID NO: 893879 - DNA, 33 bp, Homo sapien
tagtggatgtattcaactggaattaggtgtacg

SEQ ID NO: 893880 - DNA, 33 bp, Homo sapien
tagtggatgtattcaattggaattaggtgtacg

SEQ ID NO: 893881 - DNA, 33 bp, Homo sapien
agatcagaaaaactggaattacaaacctagtag

SEQ ID NO: 893882 - DNA, 33 bp, Homo sapien
agatcagaaaaactgggattacaaacctagtag

SEQ ID NO: 893883 - DNA, 33 bp, Homo sapien
acgatagaggtagacaaatgaagaggttatgga

SEQ ID NO: 893884 - DNA, 33 bp, Homo sapien
acgatagaggtagacatatgaagaggttatgga

SEQ ID NO: 893885 - DNA, 33 bp, Homo sapien
tttcaaacacaaggtaaaatcaggttaatttcg

SEQ ID NO: 893886 - DNA, 33 bp, Homo sapien
tttcaaacacaaggtagaatcaggttaatttcg

SEQ ID NO: 893887 - DNA, 33 bp, Homo sapien
gactataatttgggaccgaccataacatttcct

SEQ ID NO: 893888 - DNA, 33 bp, Homo sapien
gactataatttgggactgaccataacatttcct

SEQ ID NO: 893889 - DNA, 33 bp, Homo sapien
aaagaatgaaggatggcaacaaagtacatgaac

SEQ ID NO: 893890 - DNA, 33 bp, Homo sapien
aaagaatgaaggatggtaacaaagtacatgaac

SEQ ID NO: 893891 - DNA, 33 bp, Homo sapien
catggggacgtggctacatgaaaaggacagcag

SEQ ID NO: 893892 - DNA, 33 bp, Homo sapien
catggggacgtggctatatgaaaaggacagcag

SEQ ID NO: 893893 - DNA, 33 bp, Homo sapien
gaggactatctcaaaccaatgggcatgacatgg

SEQ ID NO: 893894 - DNA, 33 bp, Homo sapien
gaggactatctcaaactaatgggcatgacatgg

SEQ ID NO: 893895 - DNA, 33 bp, Homo sapien
ttttgtgccagggaaactttatacgacgaaaat

SEQ ID NO: 893896 - DNA, 33 bp, Homo sapien
ttttgtgccagggaaattttatacgacgaaaat

SEQ ID NO: 893897 - DNA, 33 bp, Homo sapien
agaattttcgcgttcaaaacctattctttccct

SEQ ID NO: 893898 - DNA, 33 bp, Homo sapien
agaattttcgcgttcataacctattctttccct

SEQ ID NO: 893899 - DNA, 33 bp, Homo sapien
tgtgcgtgggtacaacactgctgcgtaaatagc

SEQ ID NO: 893900 - DNA, 33 bp, Homo sapien
tgtgcgtgggtacaacgctgctgcgtaaatagc

SEQ ID NO: 893901 - DNA, 33 bp, Homo sapien
tgaaaaacaacgtctacgtcaaatcgacaacca

SEQ ID NO: 893902 - DNA, 33 bp, Homo sapien
tgaaaaacaacgtctatgtcaaatcgacaacca

SEQ ID NO: 893903 - DNA, 33 bp, Homo sapien
gcttccacttattgtacacttaactattgtcag

SEQ ID NO: 893904 - DNA, 33 bp, Homo sapien
gcttccacttattgtatacttaactattgtcag

SEQ ID NO: 893905 - DNA, 33 bp, Homo sapien
tgatttcaatagatcactctggcagccagatgg

SEQ ID NO: 893906 - DNA, 33 bp, Homo sapien
tgatttcaatagatcattctggcagccagatgg

SEQ ID NO: 893907 - DNA, 33 bp, Homo sapien
gacactaacaacttggcatctcaagtcataagg

SEQ ID NO: 893908 - DNA, 33 bp, Homo sapien
gacactaacaacttggtatctcaagtcataagg

SEQ ID NO: 893909 - DNA, 33 bp, Homo sapien
ttaccatctgatttcccataagtacgtgccctt

SEQ ID NO: 893910 - DNA, 33 bp, Homo sapien
ttaccatctgatttcctataagtacgtgccctt

SEQ ID NO: 893911 - DNA, 33 bp, Homo sapien
cgatttctagtgcacaatggcatattaagtttt

SEQ ID NO: 893912 - DNA, 33 bp, Homo sapien
cgatttctagtgcacattggcatattaagtttt

SEQ ID NO: 893913 - DNA, 33 bp, Homo sapien
gtttttaatgtaaaacagaatatgcaatgacat

SEQ ID NO: 893914 - DNA, 33 bp, Homo sapien
gtttttaatgtaaaacggaatatgcaatgacat

SEQ ID NO: 893915 - DNA, 33 bp, Homo sapien
gggagattatctacagcagaacagctttgaaaa

SEQ ID NO: 893916 - DNA, 33 bp, Homo sapien
gggagattatctacagtagaacagctttgaaaa

SEQ ID NO: 893917 - DNA, 33 bp, Homo sapien
cagctttgaaaacagaccctcctaaatccagca

SEQ ID NO: 893918 - DNA, 33 bp, Homo sapien
cagctttgaaaacagatcctcctaaatccagca

SEQ ID NO: 893919 - DNA, 33 bp, Homo sapien
acctttaagatggtgaaaggtactcggattcca

SEQ ID NO: 893920 - DNA, 33 bp, Homo sapien
acctttaagatggtgagaggtactcggattcca

SEQ ID NO: 893921 - DNA, 33 bp, Homo sapien
aatccatttttcattcaccatgtcaagaagtgg

SEQ ID NO: 893922 - DNA, 33 bp, Homo sapien
aatccatttttcattcgccatgtcaagaagtgg

SEQ ID NO: 893923 - DNA, 33 bp, Homo sapien
ctggaatctccccagaactaaagcaattccctg

SEQ ID NO: 893924 - DNA, 33 bp, Homo sapien
ctggaatctccccagagctaaagcaattccctg

SEQ ID NO: 893925 - DNA, 33 bp, Homo sapien
aaaattaccaggcacaaaaatagcgtgaggatt

SEQ ID NO: 893926 - DNA, 33 bp, Homo sapien
aaaattaccaggcacagaaatagcgtgaggatt

SEQ ID NO: 893927 - DNA, 33 bp, Homo sapien
gagggaccttacactgcactttctactcctatg

SEQ ID NO: 893928 - DNA, 33 bp, Homo sapien
gagggaccttacactgtactttctactcctatg

SEQ ID NO: 893929 - DNA, 33 bp, Homo sapien
tgttctgttctataccacgaggcacaatattgt

SEQ ID NO: 893930 - DNA, 33 bp, Homo sapien
tgttctgttctataccgcgaggcacaatattgt

SEQ ID NO: 893931 - DNA, 33 bp, Homo sapien
aggtgggtctccttatcacttcaaagcagccac

SEQ ID NO: 893932 - DNA, 33 bp, Homo sapien
aggtgggtctccttatgacttcaaagcagccac

SEQ ID NO: 893933 - DNA, 33 bp, Homo sapien
cttagaggttgtagaaatatggttaaaataagc

SEQ ID NO: 893934 - DNA, 33 bp, Homo sapien
cttagaggttgtagaattatggttaaaataagc

SEQ ID NO: 893935 - DNA, 33 bp, Homo sapien
attctactacacattcactctcctctggtactg

SEQ ID NO: 893936 - DNA, 33 bp, Homo sapien
attctactacacattcgctctcctctggtactg

SEQ ID NO: 893937 - DNA, 33 bp, Homo sapien
aacttatgagtactcaaaatggcacctatccct

SEQ ID NO: 893938 - DNA, 33 bp, Homo sapien
aacttatgagtactcagaatggcacctatccct

SEQ ID NO: 893939 - DNA, 33 bp, Homo sapien
acgaagttcccttacaccacaagtttgcttcac

SEQ ID NO: 893940 - DNA, 33 bp, Homo sapien
acgaagttcccttacatcacaagtttgcttcac

SEQ ID NO: 893941 - DNA, 33 bp, Homo sapien
atcatcatgattaaaaagactgtttgtgaaata

SEQ ID NO: 893942 - DNA, 33 bp, Homo sapien
atcatcatgattaaaatgactgtttgtgaaata

SEQ ID NO: 893943 - DNA, 33 bp, Homo sapien
gattggtctctttctcacacatttttctctcct

SEQ ID NO: 893944 - DNA, 33 bp, Homo sapien
gattggtctctttctcgcacatttttctctcct

SEQ ID NO: 893945 - DNA, 33 bp, Homo sapien
ctggagtgtaaaccaccgacttttcaccatgga

SEQ ID NO: 893946 - DNA, 33 bp, Homo sapien
ctggagtgtaaaccactgacttttcaccatgga

SEQ ID NO: 893947 - DNA, 33 bp, Homo sapien
tatgtattggctttcacaggaaaagacattttc

SEQ ID NO: 893948 - DNA, 33 bp, Homo sapien
tatgtattggctttcataggaaaagacattttc

SEQ ID NO: 893949 - DNA, 33 bp, Homo sapien
caacaaaaagaaaatccatgaatggccttaaaa

SEQ ID NO: 893950 - DNA, 33 bp, Homo sapien
caacaaaaagaaaatctatgaatggccttaaaa

SEQ ID NO: 893951 - DNA, 33 bp, Homo sapien
cttacaaccatagcgaaaaacaaagggaaaaca

SEQ ID NO: 893952 - DNA, 33 bp, Homo sapien
cttacaaccatagcgacaaacaaagggaaaaca

SEQ ID NO: 893953 - DNA, 33 bp, Homo sapien
agtgcaattatttgaccacatcggaggtttgtg

SEQ ID NO: 893954 - DNA, 33 bp, Homo sapien
agtgcaattatttgactacatcggaggtttgtg

SEQ ID NO: 893955 - DNA, 33 bp, Homo sapien
actgatttggcctaagactatcattggctcctc

SEQ ID NO: 893956 - DNA, 33 bp, Homo sapien
actgatttggcctaaggctatcattggctcctc

SEQ ID NO: 893957 - DNA, 33 bp, Homo sapien
gaggatattgaaaaaacgattgaacacatcccc

SEQ ID NO: 893958 - DNA, 33 bp, Homo sapien
gaggatattgaaaaaatgattgaacacatcccc

SEQ ID NO: 893959 - DNA, 33 bp, Homo sapien
ccagacagtttttaagccacaggaatagctagt

SEQ ID NO: 893960 - DNA, 33 bp, Homo sapien
ccagacagtttttaaggcacaggaatagctagt

SEQ ID NO: 893961 - DNA, 33 bp, Homo sapien
ccattcaattggttaaaaggcaacatccagaag

SEQ ID NO: 893962 - DNA, 33 bp, Homo sapien
ccattcaattggttaacaggcaacatccagaag

SEQ ID NO: 893963 - DNA, 33 bp, Homo sapien
tagtttggtaatgaacaaagttgtatctattag

SEQ ID NO: 893964 - DNA, 33 bp, Homo sapien
tagtttggtaatgaacgaagttgtatctattag

SEQ ID NO: 893965 - DNA, 33 bp, Homo sapien
ttaaatcctcacaacacgggctaaggggttaaa

SEQ ID NO: 893966 - DNA, 33 bp, Homo sapien
ttaaatcctcacaacatgggctaaggggttaaa

SEQ ID NO: 893967 - DNA, 33 bp, Homo sapien
tgcggaatagaaagaaaactggatttgttgtgc

SEQ ID NO: 893968 - DNA, 33 bp, Homo sapien
tgcggaatagaaagaacactggatttgttgtgc

SEQ ID NO: 893969 - DNA, 33 bp, Homo sapien
atatatacactctgaccccttgtgtgtagatta

SEQ ID NO: 893970 - DNA, 33 bp, Homo sapien
atatatacactctgacgccttgtgtgtagatta

SEQ ID NO: 893971 - DNA, 33 bp, Homo sapien
tgatcttcggggttcaatcttgcccaaatctcc

SEQ ID NO: 893972 - DNA, 33 bp, Homo sapien
tgatcttcggggttcagtcttgcccaaatctcc

SEQ ID NO: 893973 - DNA, 33 bp, Homo sapien
tagtatcttccacatccatcactgaggctaccg

SEQ ID NO: 893974 - DNA, 33 bp, Homo sapien
tagtatcttccacatctatcactgaggctaccg

SEQ ID NO: 893975 - DNA, 33 bp, Homo sapien
taagtctctctgacccaactctcagcagcaaga

SEQ ID NO: 893976 - DNA, 33 bp, Homo sapien
taagtctctctgacccgactctcagcagcaaga

SEQ ID NO: 893977 - DNA, 33 bp, Homo sapien
aaggaagataaaaacaaacatatccaattattg

SEQ ID NO: 893978 - DNA, 33 bp, Homo sapien
aaggaagataaaaacagacatatccaattattg

SEQ ID NO: 893979 - DNA, 33 bp, Homo sapien
gttcttcacctctgcaactcattcatcataata

SEQ ID NO: 893980 - DNA, 33 bp, Homo sapien
gttcttcacctctgcacctcattcatcataata

SEQ ID NO: 893981 - DNA, 33 bp, Homo sapien
gcccaaaaggtatactcaagaggaccacaattt

SEQ ID NO: 893982 - DNA, 33 bp, Homo sapien
gcccaaaaggtatacttaagaggaccacaattt

SEQ ID NO: 893983 - DNA, 33 bp, Homo sapien
tgtagcaagatgtaagaaagttgagatgcactg

SEQ ID NO: 893984 - DNA, 33 bp, Homo sapien
tgtagcaagatgtaaggaagttgagatgcactg

SEQ ID NO: 893985 - DNA, 33 bp, Homo sapien
gtaaccctctacctccacatgacagataggaag

SEQ ID NO: 893986 - DNA, 33 bp, Homo sapien
gtaaccctctacctccgcatgacagataggaag

SEQ ID NO: 893987 - DNA, 33 bp, Homo sapien
attatacatagttttccaccaagagaatcaaag

SEQ ID NO: 893988 - DNA, 33 bp, Homo sapien
attatacatagttttcgaccaagagaatcaaag

SEQ ID NO: 893989 - DNA, 33 bp, Homo sapien
actgtttttgtataaccgtcctgtaaatctaaa

SEQ ID NO: 893990 - DNA, 33 bp, Homo sapien
actgtttttgtataactgtcctgtaaatctaaa

SEQ ID NO: 893991 - DNA, 33 bp, Homo sapien
catgctgggtactacactgaattcacacgaatg

SEQ ID NO: 893992 - DNA, 33 bp, Homo sapien
catgctgggtactacattgaattcacacgaatg

SEQ ID NO: 893993 - DNA, 33 bp, Homo sapien
attcaacccaaaaaagccacaagcaaagacact

SEQ ID NO: 893994 - DNA, 33 bp, Homo sapien
attcaacccaaaaaagtcacaagcaaagacact

SEQ ID NO: 893995 - DNA, 33 bp, Homo sapien
ttggcaacgggctttacgagaaaatgtcatgga

SEQ ID NO: 893996 - DNA, 33 bp, Homo sapien
ttggcaacgggctttatgagaaaatgtcatgga

SEQ ID NO: 893997 - DNA, 33 bp, Homo sapien
actggtgtaggcatcaaacatgtaaatgaatct

SEQ ID NO: 893998 - DNA, 33 bp, Homo sapien
actggtgtaggcatcagacatgtaaatgaatct

SEQ ID NO: 893999 - DNA, 33 bp, Homo sapien
ggagagtgatgtgatgaaaattgcactttagga

SEQ ID NO: 894000 - DNA, 33 bp, Homo sapien
ggagagtgatgtgatgcaaattgcactttagga

SEQ ID NO: 894001 - DNA, 33 bp, Homo sapien
tggatctattgagatactaagtgaaatcagtta

SEQ ID NO: 894002 - DNA, 33 bp, Homo sapien
tggatctattgagatagtaagtgaaatcagtta

SEQ ID NO: 894003 - DNA, 33 bp, Homo sapien
tagttccctctttcccacaaatagtggatgcaa

SEQ ID NO: 894004 - DNA, 33 bp, Homo sapien
tagttccctctttcccccaaatagtggatgcaa

SEQ ID NO: 894005 - DNA, 33 bp, Homo sapien
actgccaataaatgtaagagtccgtttctgttc

SEQ ID NO: 894006 - DNA, 33 bp, Homo sapien
actgccaataaatgtaggagtccgtttctgttc

SEQ ID NO: 894007 - DNA, 33 bp, Homo sapien
ttaaagaatcaccaacacacattaaataaggtg

SEQ ID NO: 894008 - DNA, 33 bp, Homo sapien
ttaaagaatcaccaacgcacattaaataaggtg

SEQ ID NO: 894009 - DNA, 33 bp, Homo sapien
tattaaaaacatttcaccttagccaaataactt

SEQ ID NO: 894010 - DNA, 33 bp, Homo sapien
tattaaaaacatttcatcttagccaaataactt

SEQ ID NO: 894011 - DNA, 33 bp, Homo sapien
atagttttattgctgaaaattcttgtttggttg

SEQ ID NO: 894012 - DNA, 33 bp, Homo sapien
atagttttattgctgacaattcttgtttggttg

SEQ ID NO: 894013 - DNA, 33 bp, Homo sapien
catagcctttagggccaaggagaaagaacttca

SEQ ID NO: 894014 - DNA, 33 bp, Homo sapien
catagcctttagggcccaggagaaagaacttca

SEQ ID NO: 894015 - DNA, 33 bp, Homo sapien
cggctagtactttatcacctttacacacacgca

SEQ ID NO: 894016 - DNA, 33 bp, Homo sapien
cggctagtactttatcgcctttacacacacgca

SEQ ID NO: 894017 - DNA, 33 bp, Homo sapien
ctgattaaaactttgaccgaaattctcttttca

SEQ ID NO: 894018 - DNA, 33 bp, Homo sapien
ctgattaaaactttgatcgaaattctcttttca

SEQ ID NO: 894019 - DNA, 33 bp, Homo sapien
gtaaagagaactaaatgaagagtacttcagaat

SEQ ID NO: 894020 - DNA, 33 bp, Homo sapien
gtaaagagaactaaattaagagtacttcagaat

SEQ ID NO: 894021 - DNA, 33 bp, Homo sapien
ttcatgtacatgtgtaataatagcctgaataat

SEQ ID NO: 894022 - DNA, 33 bp, Homo sapien
ttcatgtacatgtgtagtaatagcctgaataat

SEQ ID NO: 894023 - DNA, 33 bp, Homo sapien
tgtttccagattccatcaggtggactgtgcatg

SEQ ID NO: 894024 - DNA, 33 bp, Homo sapien
tgtttccagattccattaggtggactgtgcatg

SEQ ID NO: 894025 - DNA, 33 bp, Homo sapien
caaaccctgagaccaagccatgacaagatgccc

SEQ ID NO: 894026 - DNA, 33 bp, Homo sapien
caaaccctgagaccaatccatgacaagatgccc

SEQ ID NO: 894027 - DNA, 33 bp, Homo sapien
gtgtgtgatgtaaagtaaaggtcacattttatt

SEQ ID NO: 894028 - DNA, 33 bp, Homo sapien
gtgtgtgatgtaaagtgaaggtcacattttatt

SEQ ID NO: 894029 - DNA, 33 bp, Homo sapien
gtctgtgtcaattaaacatctcactctgtattt

SEQ ID NO: 894030 - DNA, 33 bp, Homo sapien
gtctgtgtcaattaaatatctcactctgtattt

SEQ ID NO: 894031 - DNA, 33 bp, Homo sapien
ctgttcccaactattacagtgttgctataaatg

SEQ ID NO: 894032 - DNA, 33 bp, Homo sapien
ctgttcccaactattagagtgttgctataaatg

SEQ ID NO: 894033 - DNA, 33 bp, Homo sapien
accaagtcttagtcagaatatagagcaaccatg

SEQ ID NO: 894034 - DNA, 33 bp, Homo sapien
accaagtcttagtcagcatatagagcaaccatg

SEQ ID NO: 894035 - DNA, 33 bp, Homo sapien
atagacattagtagaaataacaacctttgcact

SEQ ID NO: 894036 - DNA, 33 bp, Homo sapien
atagacattagtagaagtaacaacctttgcact

SEQ ID NO: 894037 - DNA, 33 bp, Homo sapien
gtagcaccccactacccctggagtgaaatacag

SEQ ID NO: 894038 - DNA, 33 bp, Homo sapien
gtagcaccccactaccgctggagtgaaatacag

SEQ ID NO: 894039 - DNA, 33 bp, Homo sapien
agtaaattacagagccaggaaattaggagggct

SEQ ID NO: 894040 - DNA, 33 bp, Homo sapien
agtaaattacagagccgggaaattaggagggct

SEQ ID NO: 894041 - DNA, 33 bp, Homo sapien
ttttatacagagaaagcacaatgcaagtagtca

SEQ ID NO: 894042 - DNA, 33 bp, Homo sapien
ttttatacagagaaaggacaatgcaagtagtca

SEQ ID NO: 894043 - DNA, 33 bp, Homo sapien
ctgaaattttgtgtaacataatccttcctctgt

SEQ ID NO: 894044 - DNA, 33 bp, Homo sapien
ctgaaattttgtgtaatataatccttcctctgt

SEQ ID NO: 894045 - DNA, 33 bp, Homo sapien
gaatcgagtagatggcaaaaggagattccctaa

SEQ ID NO: 894046 - DNA, 33 bp, Homo sapien
gaatcgagtagatggcgaaaggagattccctaa

SEQ ID NO: 894047 - DNA, 33 bp, Homo sapien
tctgtcccacagtccactctgccaatctggaaa

SEQ ID NO: 894048 - DNA, 33 bp, Homo sapien
tctgtcccacagtccattctgccaatctggaaa

SEQ ID NO: 894049 - DNA, 33 bp, Homo sapien
aaatacctcgaagaaaacacagattattggaag

SEQ ID NO: 894050 - DNA, 33 bp, Homo sapien
aaatacctcgaagaaagcacagattattggaag

SEQ ID NO: 894051 - DNA, 33 bp, Homo sapien
tggatgaaactcaaaaagtgaggctgggtgtgg

SEQ ID NO: 894052 - DNA, 33 bp, Homo sapien
tggatgaaactcaaaacgtgaggctgggtgtgg

SEQ ID NO: 894053 - DNA, 33 bp, Homo sapien
atggttttccaactcaccaatctaggagctggt

SEQ ID NO: 894054 - DNA, 33 bp, Homo sapien
atggttttccaactcagcaatctaggagctggt

SEQ ID NO: 894055 - DNA, 33 bp, Homo sapien
gaatcttcattttatcaaacattccagattact

SEQ ID NO: 894056 - DNA, 33 bp, Homo sapien
gaatcttcattttatccaacattccagattact

SEQ ID NO: 894057 - DNA, 33 bp, Homo sapien
caagtcagctggaaaccagccgaaagggactaa

SEQ ID NO: 894058 - DNA, 33 bp, Homo sapien
caagtcagctggaaactagccgaaagggactaa

SEQ ID NO: 894059 - DNA, 33 bp, Homo sapien
tttattcacataaataaataacaacactcttaa

SEQ ID NO: 894060 - DNA, 33 bp, Homo sapien
tttattcacataaatagataacaacactcttaa

SEQ ID NO: 894061 - DNA, 33 bp, Homo sapien
gcagtagtgagttacacgctgtttgcttctata

SEQ ID NO: 894062 - DNA, 33 bp, Homo sapien
gcagtagtgagttacatgctgtttgcttctata

SEQ ID NO: 894063 - DNA, 33 bp, Homo sapien
ctgtgcactgtttttgaatttgtatcaatgctt

SEQ ID NO: 894064 - DNA, 33 bp, Homo sapien
ctgtgcactgtttttggatttgtatcaatgctt

SEQ ID NO: 894065 - DNA, 33 bp, Homo sapien
gtaaaaagttagcacaatggatttttgcagcat

SEQ ID NO: 894066 - DNA, 33 bp, Homo sapien
gtaaaaagttagcacagtggatttttgcagcat

SEQ ID NO: 894067 - DNA, 33 bp, Homo sapien
ttcttatagtgccttggatatagtagatactca

SEQ ID NO: 894068 - DNA, 33 bp, Homo sapien
ttcttatagtgccttgtatatagtagatactca

SEQ ID NO: 894069 - DNA, 33 bp, Homo sapien
gagaggaaactggaaaaattggaaatggaggaa

SEQ ID NO: 894070 - DNA, 33 bp, Homo sapien
gagaggaaactggaaagattggaaatggaggaa

SEQ ID NO: 894071 - DNA, 33 bp, Homo sapien
attattacaaatggcaaagaaataaataaaggc

SEQ ID NO: 894072 - DNA, 33 bp, Homo sapien
attattacaaatggcagagaaataaataaaggc

SEQ ID NO: 894073 - DNA, 33 bp, Homo sapien
aacaaataatcatatccgacatctacctatcta

SEQ ID NO: 894074 - DNA, 33 bp, Homo sapien
aacaaataatcatatctgacatctacctatcta

SEQ ID NO: 894075 - DNA, 33 bp, Homo sapien
cactccattcaccaataagtctcaaagtgagga

SEQ ID NO: 894076 - DNA, 33 bp, Homo sapien
cactccattcaccaatgagtctcaaagtgagga

SEQ ID NO: 894077 - DNA, 33 bp, Homo sapien
aacagaaaccattataagtacccaaagcagaat

SEQ ID NO: 894078 - DNA, 33 bp, Homo sapien
aacagaaaccattataggtacccaaagcagaat

SEQ ID NO: 894079 - DNA, 33 bp, Homo sapien
taaatatattttaagacatgagagcaaactaga

SEQ ID NO: 894080 - DNA, 33 bp, Homo sapien
taaatatattttaagatatgagagcaaactaga

SEQ ID NO: 894081 - DNA, 33 bp, Homo sapien
ttgactaggattgcaacgtattgtgggctgcaa

SEQ ID NO: 894082 - DNA, 33 bp, Homo sapien
ttgactaggattgcaatgtattgtgggctgcaa

SEQ ID NO: 894083 - DNA, 33 bp, Homo sapien
gttgtggttaagaagaaccgactgtctggactg

SEQ ID NO: 894084 - DNA, 33 bp, Homo sapien
gttgtggttaagaagacccgactgtctggactg

SEQ ID NO: 894085 - DNA, 33 bp, Homo sapien
catttggtaagttgacagagtgaaatagtcagt

SEQ ID NO: 894086 - DNA, 33 bp, Homo sapien
catttggtaagttgacggagtgaaatagtcagt

SEQ ID NO: 894087 - DNA, 33 bp, Homo sapien
ttccttggccactttcactgcttaaggtaggca

SEQ ID NO: 894088 - DNA, 33 bp, Homo sapien
ttccttggccactttcgctgcttaaggtaggca

SEQ ID NO: 894089 - DNA, 33 bp, Homo sapien
agaaaagaaagaacaacggtggtgcccaaaagt

SEQ ID NO: 894090 - DNA, 33 bp, Homo sapien
agaaaagaaagaacaatggtggtgcccaaaagt

SEQ ID NO: 894091 - DNA, 33 bp, Homo sapien
actgtgtttcgaatgacgaactttttaatagca

SEQ ID NO: 894092 - DNA, 33 bp, Homo sapien
actgtgtttcgaatgatgaactttttaatagca

SEQ ID NO: 894093 - DNA, 33 bp, Homo sapien
tgggaagttacgttgccctgtgagttgtgccat

SEQ ID NO: 894094 - DNA, 33 bp, Homo sapien
tgggaagttacgttgcgctgtgagttgtgccat

SEQ ID NO: 894095 - DNA, 33 bp, Homo sapien
gaacaactgaattctacatgaggctttgttggc

SEQ ID NO: 894096 - DNA, 33 bp, Homo sapien
gaacaactgaattctatatgaggctttgttggc

SEQ ID NO: 894097 - DNA, 33 bp, Homo sapien
aagctgatagtaatgacaaaaccactgaagaga

SEQ ID NO: 894098 - DNA, 33 bp, Homo sapien
aagctgatagtaatgagaaaaccactgaagaga

SEQ ID NO: 894099 - DNA, 33 bp, Homo sapien
tgtgactataacatgaaggaactgccaaaatct

SEQ ID NO: 894100 - DNA, 33 bp, Homo sapien
tgtgactataacatgagggaactgccaaaatct

SEQ ID NO: 894101 - DNA, 33 bp, Homo sapien
tattaaatgaaaaacaacgaagtagaagacact

SEQ ID NO: 894102 - DNA, 33 bp, Homo sapien
tattaaatgaaaaacatcgaagtagaagacact

SEQ ID NO: 894103 - DNA, 33 bp, Homo sapien
aatacttgtccacaaaccgtaagtacttttaaa

SEQ ID NO: 894104 - DNA, 33 bp, Homo sapien
aatacttgtccacaaatcgtaagtacttttaaa

SEQ ID NO: 894105 - DNA, 33 bp, Homo sapien
ctggaagataactccaatgaaacaaggatttaa

SEQ ID NO: 894106 - DNA, 33 bp, Homo sapien
ctggaagataactccactgaaacaaggatttaa

SEQ ID NO: 894107 - DNA, 33 bp, Homo sapien
ttttatctaagactagacacaattctcaaatac

SEQ ID NO: 894108 - DNA, 33 bp, Homo sapien
ttttatctaagactaggcacaattctcaaatac

SEQ ID NO: 894109 - DNA, 33 bp, Homo sapien
ctgctaggttctagcaagtgatatgcacaatca

SEQ ID NO: 894110 - DNA, 33 bp, Homo sapien
ctgctaggttctagcacgtgatatgcacaatca

SEQ ID NO: 894111 - DNA, 33 bp, Homo sapien
taacccaccacatctggaatcaagtgctcattt

SEQ ID NO: 894112 - DNA, 33 bp, Homo sapien
taacccaccacatctgtaatcaagtgctcattt

SEQ ID NO: 894113 - DNA, 33 bp, Homo sapien
actagtgaaaataaaaatatatgtgtgcattga

SEQ ID NO: 894114 - DNA, 33 bp, Homo sapien
actagtgaaaataaaattatatgtgtgcattga

SEQ ID NO: 894115 - DNA, 33 bp, Homo sapien
gctgtgtttgtatggacgtggataataaacttg

SEQ ID NO: 894116 - DNA, 33 bp, Homo sapien
gctgtgtttgtatggatgtggataataaacttg

SEQ ID NO: 894117 - DNA, 33 bp, Homo sapien
aggacaagtgtgaaaccagctcaaacgtgaaaa

SEQ ID NO: 894118 - DNA, 33 bp, Homo sapien
aggacaagtgtgaaactagctcaaacgtgaaaa

SEQ ID NO: 894119 - DNA, 33 bp, Homo sapien
gttcctctctgcccacaacattcctccacaccc

SEQ ID NO: 894120 - DNA, 33 bp, Homo sapien
gttcctctctgcccacgacattcctccacaccc

SEQ ID NO: 894121 - DNA, 33 bp, Homo sapien
attactaaattttgcgcacattgtaattatacc

SEQ ID NO: 894122 - DNA, 33 bp, Homo sapien
attactaaattttgcgtacattgtaattatacc

SEQ ID NO: 894123 - DNA, 33 bp, Homo sapien
ttgtctaatttcaccaaatgaatgatccctgag

SEQ ID NO: 894124 - DNA, 33 bp, Homo sapien
ttgtctaatttcaccagatgaatgatccctgag

SEQ ID NO: 894125 - DNA, 33 bp, Homo sapien
cctctctgcttttctacgacatcctctatggtc

SEQ ID NO: 894126 - DNA, 33 bp, Homo sapien
cctctctgcttttctatgacatcctctatggtc

SEQ ID NO: 894127 - DNA, 33 bp, Homo sapien
acacaggccacctaaaaccagagagagaattat

SEQ ID NO: 894128 - DNA, 33 bp, Homo sapien
acacaggccacctaaatccagagagagaattat

SEQ ID NO: 894129 - DNA, 33 bp, Homo sapien
caaatcattgctaatacggtgcttcattctgtc

SEQ ID NO: 894130 - DNA, 33 bp, Homo sapien
caaatcattgctaatatggtgcttcattctgtc

SEQ ID NO: 894131 - DNA, 33 bp, Homo sapien
attgagctctacaaaactgccgccaaaaatggc

SEQ ID NO: 894132 - DNA, 33 bp, Homo sapien
attgagctctacaaaattgccgccaaaaatggc

SEQ ID NO: 894133 - DNA, 33 bp, Homo sapien
taagggtcaagatgttgaaaagaggcttttttc

SEQ ID NO: 894134 - DNA, 33 bp, Homo sapien
taagggtcaagatgtttaaaagaggcttttttc

SEQ ID NO: 894135 - DNA, 33 bp, Homo sapien
tagagaacttggtgaacgtaaaaatgtattttc

SEQ ID NO: 894136 - DNA, 33 bp, Homo sapien
tagagaacttggtgaatgtaaaaatgtattttc

SEQ ID NO: 894137 - DNA, 33 bp, Homo sapien
gtatacctcatcagggaagtaaactatactact

SEQ ID NO: 894138 - DNA, 33 bp, Homo sapien
gtatacctcatcaggggagtaaactatactact

SEQ ID NO: 894139 - DNA, 33 bp, Homo sapien
tttattcatggactaaaatccttgtctgacttt

SEQ ID NO: 894140 - DNA, 33 bp, Homo sapien
tttattcatggactaacatccttgtctgacttt

SEQ ID NO: 894141 - DNA, 33 bp, Homo sapien
gttgggtttgtttttgaatttctagcatgacca

SEQ ID NO: 894142 - DNA, 33 bp, Homo sapien
gttgggtttgtttttggatttctagcatgacca

SEQ ID NO: 894143 - DNA, 33 bp, Homo sapien
tgtctccagtgtggagaatatacttcaacaatt

SEQ ID NO: 894144 - DNA, 33 bp, Homo sapien
tgtctccagtgtggaggatatacttcaacaatt

SEQ ID NO: 894145 - DNA, 33 bp, Homo sapien
aacataacataagtcaagaagagcggatttctc

SEQ ID NO: 894146 - DNA, 33 bp, Homo sapien
aacataacataagtcacgaagagcggatttctc

SEQ ID NO: 894147 - DNA, 33 bp, Homo sapien
aaagcctcctttcctaagtccaacatatcaaac

SEQ ID NO: 894148 - DNA, 33 bp, Homo sapien
aaagcctcctttcctaggtccaacatatcaaac

SEQ ID NO: 894149 - DNA, 33 bp, Homo sapien
ctctctgccaaacaacaagaaagcttatagaaa

SEQ ID NO: 894150 - DNA, 33 bp, Homo sapien
ctctctgccaaacaacgagaaagcttatagaaa

SEQ ID NO: 894151 - DNA, 33 bp, Homo sapien
gactctagcctctctccaaaaggacaaatgaac

SEQ ID NO: 894152 - DNA, 33 bp, Homo sapien
gactctagcctctctctaaaaggacaaatgaac

SEQ ID NO: 894153 - DNA, 33 bp, Homo sapien
gtctcactttaaaaggaaccactgagttagcac

SEQ ID NO: 894154 - DNA, 33 bp, Homo sapien
gtctcactttaaaagggaccactgagttagcac

SEQ ID NO: 894155 - DNA, 33 bp, Homo sapien
gcttcaaataatcagcaatgaatatcaccgtac

SEQ ID NO: 894156 - DNA, 33 bp, Homo sapien
gcttcaaataatcagccatgaatatcaccgtac

SEQ ID NO: 894157 - DNA, 33 bp, Homo sapien
atttctctctttgctgaaattaaacaaagtgga

SEQ ID NO: 894158 - DNA, 33 bp, Homo sapien
atttctctctttgctgcaattaaacaaagtgga

SEQ ID NO: 894159 - DNA, 33 bp, Homo sapien
catagcacagaagtaaatctcaccctcactcaa

SEQ ID NO: 894160 - DNA, 33 bp, Homo sapien
catagcacagaagtaactctcaccctcactcaa

SEQ ID NO: 894161 - DNA, 33 bp, Homo sapien
tttcctaactgttttcaaactcagtgcttttca

SEQ ID NO: 894162 - DNA, 33 bp, Homo sapien
tttcctaactgttttcgaactcagtgcttttca

SEQ ID NO: 894163 - DNA, 33 bp, Homo sapien
gaagtgcaagaacgaacgtccagaggagtatgc

SEQ ID NO: 894164 - DNA, 33 bp, Homo sapien
gaagtgcaagaacgaatgtccagaggagtatgc

SEQ ID NO: 894165 - DNA, 33 bp, Homo sapien
gataatgctctactcaaaggtttcagccattaa

SEQ ID NO: 894166 - DNA, 33 bp, Homo sapien
gataatgctctactcacaggtttcagccattaa

SEQ ID NO: 894167 - DNA, 33 bp, Homo sapien
gttgaaaaagccagtgaaatcctcaaagattga

SEQ ID NO: 894168 - DNA, 33 bp, Homo sapien
gttgaaaaagccagtggaatcctcaaagattga

SEQ ID NO: 894169 - DNA, 33 bp, Homo sapien
ttaaggtccattagaaatgagtaattctgtgca

SEQ ID NO: 894170 - DNA, 33 bp, Homo sapien
ttaaggtccattagaagtgagtaattctgtgca

SEQ ID NO: 894171 - DNA, 33 bp, Homo sapien
tagtattcagtgcctcaatgtggccaaaaccgg

SEQ ID NO: 894172 - DNA, 33 bp, Homo sapien
tagtattcagtgcctcgatgtggccaaaaccgg

SEQ ID NO: 894173 - DNA, 33 bp, Homo sapien
ctcagaaagaattgacgcaaatgacagcctcac

SEQ ID NO: 894174 - DNA, 33 bp, Homo sapien
ctcagaaagaattgactcaaatgacagcctcac

SEQ ID NO: 894175 - DNA, 33 bp, Homo sapien
atctgatactcatgaaacacataggcatatttt

SEQ ID NO: 894176 - DNA, 33 bp, Homo sapien
atctgatactcatgaaccacataggcatatttt

SEQ ID NO: 894177 - DNA, 33 bp, Homo sapien
ctgtgaagtacaggacaggccttgttatcactg

SEQ ID NO: 894178 - DNA, 33 bp, Homo sapien
ctgtgaagtacaggacgggccttgttatcactg

SEQ ID NO: 894179 - DNA, 33 bp, Homo sapien
taggtaagggctttacaaactatcaaatactat

SEQ ID NO: 894180 - DNA, 33 bp, Homo sapien
taggtaagggctttaccaactatcaaatactat

SEQ ID NO: 894181 - DNA, 33 bp, Homo sapien
catttaagtaccatcaaaatgttacaaaagtta

SEQ ID NO: 894182 - DNA, 33 bp, Homo sapien
catttaagtaccatcagaatgttacaaaagtta

SEQ ID NO: 894183 - DNA, 33 bp, Homo sapien
tagaggggagtctccagaaattaatcaggctta

SEQ ID NO: 894184 - DNA, 33 bp, Homo sapien
tagaggggagtctccataaattaatcaggctta

SEQ ID NO: 894185 - DNA, 33 bp, Homo sapien
ttacctgctttagtaacactgacagtgtcatga

SEQ ID NO: 894186 - DNA, 33 bp, Homo sapien
ttacctgctttagtaatactgacagtgtcatga

SEQ ID NO: 894187 - DNA, 33 bp, Homo sapien
ggctgccgtttccacaatgagagattctgtaaa

SEQ ID NO: 894188 - DNA, 33 bp, Homo sapien
ggctgccgtttccacagtgagagattctgtaaa

SEQ ID NO: 894189 - DNA, 33 bp, Homo sapien
ggcagtgcttcattaacaatcgatttacagaat

SEQ ID NO: 894190 - DNA, 33 bp, Homo sapien
ggcagtgcttcattaataatcgatttacagaat

SEQ ID NO: 894191 - DNA, 33 bp, Homo sapien
tattatctccccaaaacggttcaaaaatcaatc

SEQ ID NO: 894192 - DNA, 33 bp, Homo sapien
tattatctccccaaaatggttcaaaaatcaatc

SEQ ID NO: 894193 - DNA, 33 bp, Homo sapien
atttgtatcacctctccaagacacagaactcag

SEQ ID NO: 894194 - DNA, 33 bp, Homo sapien
atttgtatcacctctctaagacacagaactcag

SEQ ID NO: 894195 - DNA, 33 bp, Homo sapien
acggttactgtggagaaccttaggacttgagat

SEQ ID NO: 894196 - DNA, 33 bp, Homo sapien
acggttactgtggagatccttaggacttgagat

SEQ ID NO: 894197 - DNA, 33 bp, Homo sapien
aggtgagggaagaggaccaagtgaggtttacac

SEQ ID NO: 894198 - DNA, 33 bp, Homo sapien
aggtgagggaagaggatcaagtgaggtttacac

SEQ ID NO: 894199 - DNA, 33 bp, Homo sapien
tgtcatcactcaaatggattaagtgcttgttgg

SEQ ID NO: 894200 - DNA, 33 bp, Homo sapien
tgtcatcactcaaatgtattaagtgcttgttgg

SEQ ID NO: 894201 - DNA, 33 bp, Homo sapien
ccctgcaatgggttaacagtccagtcagtcttc

SEQ ID NO: 894202 - DNA, 33 bp, Homo sapien
ccctgcaatgggttaagagtccagtcagtcttc

SEQ ID NO: 894203 - DNA, 33 bp, Homo sapien
aaaattacaagccaaacagatgttgacattatc

SEQ ID NO: 894204 - DNA, 33 bp, Homo sapien
aaaattacaagccaaagagatgttgacattatc

SEQ ID NO: 894205 - DNA, 33 bp, Homo sapien
aggaccctgaatcaaccggatgagaacttatgg

SEQ ID NO: 894206 - DNA, 33 bp, Homo sapien
aggaccctgaatcaactggatgagaacttatgg

SEQ ID NO: 894207 - DNA, 33 bp, Homo sapien
cctctgctgccaccaaatagcaaaccagctaaa

SEQ ID NO: 894208 - DNA, 33 bp, Homo sapien
cctctgctgccaccaactagcaaaccagctaaa

SEQ ID NO: 894209 - DNA, 33 bp, Homo sapien
tgatgggttaaataaccggccaagtatgttcag

SEQ ID NO: 894210 - DNA, 33 bp, Homo sapien
tgatgggttaaataactggccaagtatgttcag

SEQ ID NO: 894211 - DNA, 33 bp, Homo sapien
aaaaatccactgtccaatgaaggtaatacttta

SEQ ID NO: 894212 - DNA, 33 bp, Homo sapien
aaaaatccactgtccattgaaggtaatacttta

SEQ ID NO: 894213 - DNA, 33 bp, Homo sapien
gtatgttccatacaaaatgaaaagaggcaggca

SEQ ID NO: 894214 - DNA, 33 bp, Homo sapien
gtatgttccatacaaagtgaaaagaggcaggca

SEQ ID NO: 894215 - DNA, 33 bp, Homo sapien
tacaagttaccaattacggagtgaatcttggac

SEQ ID NO: 894216 - DNA, 33 bp, Homo sapien
tacaagttaccaattatggagtgaatcttggac

SEQ ID NO: 894217 - DNA, 33 bp, Homo sapien
gctgatcaatttcataaagtattctgaaactcc

SEQ ID NO: 894218 - DNA, 33 bp, Homo sapien
gctgatcaatttcatagagtattctgaaactcc

SEQ ID NO: 894219 - DNA, 33 bp, Homo sapien
ccaaatgctggatgaaatctctctaatgacagc

SEQ ID NO: 894220 - DNA, 33 bp, Homo sapien
ccaaatgctggatgaactctctctaatgacagc

SEQ ID NO: 894221 - DNA, 33 bp, Homo sapien
gaaatgtcttccttccactttcttatgcctagt

SEQ ID NO: 894222 - DNA, 33 bp, Homo sapien
gaaatgtcttccttcctctttcttatgcctagt

SEQ ID NO: 894223 - DNA, 33 bp, Homo sapien
agtgattgtaaagcaccgggccaattctgcagt

SEQ ID NO: 894224 - DNA, 33 bp, Homo sapien
agtgattgtaaagcactgggccaattctgcagt

SEQ ID NO: 894225 - DNA, 33 bp, Homo sapien
gtggtggctgtaccaacttgaagctggcatcac

SEQ ID NO: 894226 - DNA, 33 bp, Homo sapien
gtggtggctgtaccaagttgaagctggcatcac

SEQ ID NO: 894227 - DNA, 33 bp, Homo sapien
ttggcgcctgtaaaaacggctttggctccagta

SEQ ID NO: 894228 - DNA, 33 bp, Homo sapien
ttggcgcctgtaaaaatggctttggctccagta

SEQ ID NO: 894229 - DNA, 33 bp, Homo sapien
cattccttaaagttggaatcacctgttaaaagg

SEQ ID NO: 894230 - DNA, 33 bp, Homo sapien
cattccttaaagttgggatcacctgttaaaagg

SEQ ID NO: 894231 - DNA, 33 bp, Homo sapien
tttctgtatctcacaaaaaaacatggaaacaga

SEQ ID NO: 894232 - DNA, 33 bp, Homo sapien
tttctgtatctcacaataaaacatggaaacaga

SEQ ID NO: 894233 - DNA, 33 bp, Homo sapien
tacaaatgctcattaacatttcaaacaagtccc

SEQ ID NO: 894234 - DNA, 33 bp, Homo sapien
tacaaatgctcattaatatttcaaacaagtccc

SEQ ID NO: 894235 - DNA, 33 bp, Homo sapien
aagccttggacttgaactctgactgtggaccat

SEQ ID NO: 894236 - DNA, 33 bp, Homo sapien
aagccttggacttgaattctgactgtggaccat

SEQ ID NO: 894237 - DNA, 33 bp, Homo sapien
acatgattatgttttgaaaactctacaagacca

SEQ ID NO: 894238 - DNA, 33 bp, Homo sapien
acatgattatgttttggaaactctacaagacca

SEQ ID NO: 894239 - DNA, 33 bp, Homo sapien
cggtgcctgataggtacacctccgttgagtcac

SEQ ID NO: 894240 - DNA, 33 bp, Homo sapien
cggtgcctgataggtatacctccgttgagtcac

SEQ ID NO: 894241 - DNA, 33 bp, Homo sapien
tgaaatgttttcaaccagcttgttaaaatataa

SEQ ID NO: 894242 - DNA, 33 bp, Homo sapien
tgaaatgttttcaaccggcttgttaaaatataa

SEQ ID NO: 894243 - DNA, 33 bp, Homo sapien
tgagcccatcacaggagaattttcttgttcagt

SEQ ID NO: 894244 - DNA, 33 bp, Homo sapien
tgagcccatcacaggataattttcttgttcagt

SEQ ID NO: 894245 - DNA, 33 bp, Homo sapien
gaagagagtgagattacaaatgtaaacattaaa

SEQ ID NO: 894246 - DNA, 33 bp, Homo sapien
gaagagagtgagattataaatgtaaacattaaa

SEQ ID NO: 894247 - DNA, 33 bp, Homo sapien
tcgatgccaatcataaaccccagaaaaaccaca

SEQ ID NO: 894248 - DNA, 33 bp, Homo sapien
tcgatgccaatcataatccccagaaaaaccaca

SEQ ID NO: 894249 - DNA, 33 bp, Homo sapien
tttcattcctccagagcctccggcaccctttaa

SEQ ID NO: 894250 - DNA, 33 bp, Homo sapien
tttcattcctccagagtctccggcaccctttaa

SEQ ID NO: 894251 - DNA, 33 bp, Homo sapien
acaccccagtgacttaggaagccagcaatagaa

SEQ ID NO: 894252 - DNA, 33 bp, Homo sapien
acaccccagtgacttatgaagccagcaatagaa

SEQ ID NO: 894253 - DNA, 33 bp, Homo sapien
gactcaccactacagcccaggcttccttcttct

SEQ ID NO: 894254 - DNA, 33 bp, Homo sapien
gactcaccactacagctcaggcttccttcttct

SEQ ID NO: 894255 - DNA, 33 bp, Homo sapien
tacacagaaggcaatgacaatatgcaaacaggc

SEQ ID NO: 894256 - DNA, 33 bp, Homo sapien
tacacagaaggcaatggcaatatgcaaacaggc

SEQ ID NO: 894257 - DNA, 33 bp, Homo sapien
tttcacaacttttatcaccagctacatcctcat

SEQ ID NO: 894258 - DNA, 33 bp, Homo sapien
tttcacaacttttatcgccagctacatcctcat

SEQ ID NO: 894259 - DNA, 33 bp, Homo sapien
ttgttgcttcagagagcagtgtctgagtcgaag

SEQ ID NO: 894260 - DNA, 33 bp, Homo sapien
ttgttgcttcagagagtagtgtctgagtcgaag

SEQ ID NO: 894261 - DNA, 33 bp, Homo sapien
acatgcttcctctaagaacagtggcctccagtc

SEQ ID NO: 894262 - DNA, 33 bp, Homo sapien
acatgcttcctctaagtacagtggcctccagtc

SEQ ID NO: 894263 - DNA, 33 bp, Homo sapien
ggagttttaacaaacaaatcaattggctccaat

SEQ ID NO: 894264 - DNA, 33 bp, Homo sapien
ggagttttaacaaacacatcaattggctccaat

SEQ ID NO: 894265 - DNA, 33 bp, Homo sapien
tattttttgtctcctacgagcaggttttattga

SEQ ID NO: 894266 - DNA, 33 bp, Homo sapien
tattttttgtctcctatgagcaggttttattga

SEQ ID NO: 894267 - DNA, 33 bp, Homo sapien
cttccatgtctcttcacctctcaaagtctcagc

SEQ ID NO: 894268 - DNA, 33 bp, Homo sapien
cttccatgtctcttcatctctcaaagtctcagc

SEQ ID NO: 894269 - DNA, 33 bp, Homo sapien
ttcacatcttaaaagaaaacgcttataggctgg

SEQ ID NO: 894270 - DNA, 33 bp, Homo sapien
ttcacatcttaaaagagaacgcttataggctgg

SEQ ID NO: 894271 - DNA, 33 bp, Homo sapien
cattatacagtctataaaatattaactcttaaa

SEQ ID NO: 894272 - DNA, 33 bp, Homo sapien
cattatacagtctatacaatattaactcttaaa

SEQ ID NO: 894273 - DNA, 33 bp, Homo sapien
agcacaggaacaatccacccgcataattcaatc

SEQ ID NO: 894274 - DNA, 33 bp, Homo sapien
agcacaggaacaatccccccgcataattcaatc

SEQ ID NO: 894275 - DNA, 33 bp, Homo sapien
ggagggaacaaatggccgagatggtttagaacc

SEQ ID NO: 894276 - DNA, 33 bp, Homo sapien
ggagggaacaaatggctgagatggtttagaacc

SEQ ID NO: 894277 - DNA, 33 bp, Homo sapien
ttcaagaaggagggaaatgtcatctgtcaaaag

SEQ ID NO: 894278 - DNA, 33 bp, Homo sapien
ttcaagaaggagggaactgtcatctgtcaaaag

SEQ ID NO: 894279 - DNA, 33 bp, Homo sapien
ttgtaagttagggaatcacctgtgttgtttctc

SEQ ID NO: 894280 - DNA, 33 bp, Homo sapien
ttgtaagttagggaatgacctgtgttgtttctc

SEQ ID NO: 894281 - DNA, 33 bp, Homo sapien
gccttctatgccaaaaacctcagtgagcctcat

SEQ ID NO: 894282 - DNA, 33 bp, Homo sapien
gccttctatgccaaaagcctcagtgagcctcat

SEQ ID NO: 894283 - DNA, 33 bp, Homo sapien
taggtagcaaggtgtgaattattttattaacca

SEQ ID NO: 894284 - DNA, 33 bp, Homo sapien
taggtagcaaggtgtgtattattttattaacca

SEQ ID NO: 894285 - DNA, 33 bp, Homo sapien
accatgaagctaaggacggaccactaggggaat

SEQ ID NO: 894286 - DNA, 33 bp, Homo sapien
accatgaagctaaggatggaccactaggggaat

SEQ ID NO: 894287 - DNA, 33 bp, Homo sapien
aaaaaatgtcatggtacctatgggctggtgagt

SEQ ID NO: 894288 - DNA, 33 bp, Homo sapien
aaaaaatgtcatggtatctatgggctggtgagt

SEQ ID NO: 894289 - DNA, 33 bp, Homo sapien
gttaatctgccattaaaatcgtgggcattattt

SEQ ID NO: 894290 - DNA, 33 bp, Homo sapien
gttaatctgccattaagatcgtgggcattattt

SEQ ID NO: 894291 - DNA, 33 bp, Homo sapien
caaaggtacattgaaaactctcgtatgctgttg

SEQ ID NO: 894292 - DNA, 33 bp, Homo sapien
caaaggtacattgaaagctctcgtatgctgttg

SEQ ID NO: 894293 - DNA, 33 bp, Homo sapien
atgtatgaggtgaccaagattttaaaaagatat

SEQ ID NO: 894294 - DNA, 33 bp, Homo sapien
atgtatgaggtgaccaggattttaaaaagatat

SEQ ID NO: 894295 - DNA, 33 bp, Homo sapien
atttactatgcttcacccagtgcatcagctctc

SEQ ID NO: 894296 - DNA, 33 bp, Homo sapien
atttactatgcttcactcagtgcatcagctctc

SEQ ID NO: 894297 - DNA, 33 bp, Homo sapien
tttcaggttgagaatacagaaattgtggtcaga

SEQ ID NO: 894298 - DNA, 33 bp, Homo sapien
tttcaggttgagaatatagaaattgtggtcaga

SEQ ID NO: 894299 - DNA, 33 bp, Homo sapien
agaaagagagtaaaaaagttagatgaattcaac

SEQ ID NO: 894300 - DNA, 33 bp, Homo sapien
agaaagagagtaaaaatgttagatgaattcaac

SEQ ID NO: 894301 - DNA, 33 bp, Homo sapien
gttgcctagtacatggcatgaaatttgcatttt

SEQ ID NO: 894302 - DNA, 33 bp, Homo sapien
gttgcctagtacatggtatgaaatttgcatttt

SEQ ID NO: 894303 - DNA, 33 bp, Homo sapien
cagtttagagttaacaaagtagattgtgaaatt

SEQ ID NO: 894304 - DNA, 33 bp, Homo sapien
cagtttagagttaacagagtagattgtgaaatt

SEQ ID NO: 894305 - DNA, 33 bp, Homo sapien
attagaacaacatttaactggaaattgtgtatt

SEQ ID NO: 894306 - DNA, 33 bp, Homo sapien
attagaacaacatttagctggaaattgtgtatt

SEQ ID NO: 894307 - DNA, 33 bp, Homo sapien
aaagaaggaaaacggcacttatcttctagtcgg

SEQ ID NO: 894308 - DNA, 33 bp, Homo sapien
aaagaaggaaaacggcgcttatcttctagtcgg

SEQ ID NO: 894309 - DNA, 33 bp, Homo sapien
gaagttattcattgcaatatagccagtgattgt

SEQ ID NO: 894310 - DNA, 33 bp, Homo sapien
gaagttattcattgcagtatagccagtgattgt

SEQ ID NO: 894311 - DNA, 33 bp, Homo sapien
ggagaaccaatgtggaaactagagagaaaaagt

SEQ ID NO: 894312 - DNA, 33 bp, Homo sapien
ggagaaccaatgtggagactagagagaaaaagt

SEQ ID NO: 894313 - DNA, 33 bp, Homo sapien
ctgttttggggccttgaagtgtgaatctgagac

SEQ ID NO: 894314 - DNA, 33 bp, Homo sapien
ctgttttggggccttgcagtgtgaatctgagac

SEQ ID NO: 894315 - DNA, 33 bp, Homo sapien
tctcaacattgcaaaactcaactctcttcaagc

SEQ ID NO: 894316 - DNA, 33 bp, Homo sapien
tctcaacattgcaaaattcaactctcttcaagc

SEQ ID NO: 894317 - DNA, 33 bp, Homo sapien
ctgtgcttagataagagtataaagttttttttt

SEQ ID NO: 894318 - DNA, 33 bp, Homo sapien
ctgtgcttagataagattataaagttttttttt

SEQ ID NO: 894319 - DNA, 33 bp, Homo sapien
ctgatgttagaattccaagagacctgagaacaa

SEQ ID NO: 894320 - DNA, 33 bp, Homo sapien
ctgatgttagaattccgagagacctgagaacaa

SEQ ID NO: 894321 - DNA, 33 bp, Homo sapien
caagatggtaagggaccagacactgtggacatg

SEQ ID NO: 894322 - DNA, 33 bp, Homo sapien
caagatggtaagggactagacactgtggacatg

SEQ ID NO: 894323 - DNA, 33 bp, Homo sapien
ttaaaatgaaaaaaaaaatgtgtcttggaatca

SEQ ID NO: 894324 - DNA, 33 bp, Homo sapien
ttaaaatgaaaaaaaacatgtgtcttggaatca

SEQ ID NO: 894325 - DNA, 33 bp, Homo sapien
aaaactacaaaatgccactgattagtagatgca

SEQ ID NO: 894326 - DNA, 33 bp, Homo sapien
aaaactacaaaatgccgctgattagtagatgca

SEQ ID NO: 894327 - DNA, 33 bp, Homo sapien
actgcttggaacataaaaatgaaacaactattc

SEQ ID NO: 894328 - DNA, 33 bp, Homo sapien
actgcttggaacataagaatgaaacaactattc

SEQ ID NO: 894329 - DNA, 33 bp, Homo sapien
caagtttctcttttatcaggcagaacaaggtgt

SEQ ID NO: 894330 - DNA, 33 bp, Homo sapien
caagtttctcttttatgaggcagaacaaggtgt

SEQ ID NO: 894331 - DNA, 33 bp, Homo sapien
ttaatttctggagtgacgctgagactcatatag

SEQ ID NO: 894332 - DNA, 33 bp, Homo sapien
ttaatttctggagtgatgctgagactcatatag

SEQ ID NO: 894333 - DNA, 33 bp, Homo sapien
tcagtttaggatctaacgtaagattctcagtag

SEQ ID NO: 894334 - DNA, 33 bp, Homo sapien
tcagtttaggatctaatgtaagattctcagtag

SEQ ID NO: 894335 - DNA, 33 bp, Homo sapien
atcaagcaagtttgatgacaccgacttagttct

SEQ ID NO: 894336 - DNA, 33 bp, Homo sapien
atcaagcaagtttgattacaccgacttagttct

SEQ ID NO: 894337 - DNA, 33 bp, Homo sapien
atttattggaaccatacgtggaaagctcagaat

SEQ ID NO: 894338 - DNA, 33 bp, Homo sapien
atttattggaaccatatgtggaaagctcagaat

SEQ ID NO: 894339 - DNA, 33 bp, Homo sapien
tacttcagtatgtagacgtaagcagaatatttc

SEQ ID NO: 894340 - DNA, 33 bp, Homo sapien
tacttcagtatgtagatgtaagcagaatatttc

SEQ ID NO: 894341 - DNA, 33 bp, Homo sapien
ttttggttgcatggataaactatatagtggtga

SEQ ID NO: 894342 - DNA, 33 bp, Homo sapien
ttttggttgcatggatgaactatatagtggtga

SEQ ID NO: 894343 - DNA, 33 bp, Homo sapien
caagtactgcatcaaactacaaaatgatcctca

SEQ ID NO: 894344 - DNA, 33 bp, Homo sapien
caagtactgcatcaaagtacaaaatgatcctca

SEQ ID NO: 894345 - DNA, 33 bp, Homo sapien
ctaggaagaggcaaagaaggattcccctacagc

SEQ ID NO: 894346 - DNA, 33 bp, Homo sapien
ctaggaagaggcaaagtaggattcccctacagc

SEQ ID NO: 894347 - DNA, 33 bp, Homo sapien
ctatacacaagggggaaaaaacgatcaatagaa

SEQ ID NO: 894348 - DNA, 33 bp, Homo sapien
ctatacacaagggggagaaaacgatcaatagaa

SEQ ID NO: 894349 - DNA, 33 bp, Homo sapien
gtaacaaatacctaagaatgtgaacacagcttt

SEQ ID NO: 894350 - DNA, 33 bp, Homo sapien
gtaacaaatacctaaggatgtgaacacagcttt

SEQ ID NO: 894351 - DNA, 33 bp, Homo sapien
gtagctcattataagactaaagctgtctagatt

SEQ ID NO: 894352 - DNA, 33 bp, Homo sapien
gtagctcattataagattaaagctgtctagatt

SEQ ID NO: 894353 - DNA, 33 bp, Homo sapien
agagatgctttaacagaaattcaaacagccata

SEQ ID NO: 894354 - DNA, 33 bp, Homo sapien
agagatgctttaacagtaattcaaacagccata

SEQ ID NO: 894355 - DNA, 33 bp, Homo sapien
gagccacattttcctcacttatgttgtaagaga

SEQ ID NO: 894356 - DNA, 33 bp, Homo sapien
gagccacattttcctcgcttatgttgtaagaga

SEQ ID NO: 894357 - DNA, 33 bp, Homo sapien
aatgttgttgtacctgaatctctgtctcctctt

SEQ ID NO: 894358 - DNA, 33 bp, Homo sapien
aatgttgttgtacctggatctctgtctcctctt

SEQ ID NO: 894359 - DNA, 33 bp, Homo sapien
tcacgtctaagtcaagacaacttaaacagctaa

SEQ ID NO: 894360 - DNA, 33 bp, Homo sapien
tcacgtctaagtcaaggcaacttaaacagctaa

SEQ ID NO: 894361 - DNA, 33 bp, Homo sapien
ctggttaaatggccccactagataaaagagtaa

SEQ ID NO: 894362 - DNA, 33 bp, Homo sapien
ctggttaaatggccccgctagataaaagagtaa

SEQ ID NO: 894363 - DNA, 33 bp, Homo sapien
tcatctttatacctgaaaaaatgtctcacccaa

SEQ ID NO: 894364 - DNA, 33 bp, Homo sapien
tcatctttatacctgacaaaatgtctcacccaa

SEQ ID NO: 894365 - DNA, 33 bp, Homo sapien
ctagacaagctccttcaatgtcagggaactggg

SEQ ID NO: 894366 - DNA, 33 bp, Homo sapien
ctagacaagctccttcgatgtcagggaactggg

SEQ ID NO: 894367 - DNA, 33 bp, Homo sapien
cactaaacactaaccaccattcaattgctgaag

SEQ ID NO: 894368 - DNA, 33 bp, Homo sapien
cactaaacactaaccatcattcaattgctgaag

SEQ ID NO: 894369 - DNA, 33 bp, Homo sapien
tcatagaaacaatctacggtgaatcttagctat

SEQ ID NO: 894370 - DNA, 33 bp, Homo sapien
tcatagaaacaatctagggtgaatcttagctat

SEQ ID NO: 894371 - DNA, 33 bp, Homo sapien
actggccagtgctcaacctttcaggtcaaacct

SEQ ID NO: 894372 - DNA, 33 bp, Homo sapien
actggccagtgctcaagctttcaggtcaaacct

SEQ ID NO: 894373 - DNA, 33 bp, Homo sapien
aatgcaaatggaataaggaaatggattttcaga

SEQ ID NO: 894374 - DNA, 33 bp, Homo sapien
aatgcaaatggaataatgaaatggattttcaga

SEQ ID NO: 894375 - DNA, 33 bp, Homo sapien
atatggtaagtgttaccggcttggaaaaggatc

SEQ ID NO: 894376 - DNA, 33 bp, Homo sapien
atatggtaagtgttactggcttggaaaaggatc

SEQ ID NO: 894377 - DNA, 33 bp, Homo sapien
aatattttaacaaaggacccggtgtgagagtct

SEQ ID NO: 894378 - DNA, 33 bp, Homo sapien
aatattttaacaaaggccccggtgtgagagtct

SEQ ID NO: 894379 - DNA, 33 bp, Homo sapien
aattgtatcttctaaacgtattgaaccttacct

SEQ ID NO: 894380 - DNA, 33 bp, Homo sapien
aattgtatcttctaaatgtattgaaccttacct

SEQ ID NO: 894381 - DNA, 33 bp, Homo sapien
aaattctatcttagtacggaaatgactcaagcc

SEQ ID NO: 894382 - DNA, 33 bp, Homo sapien
aaattctatcttagtatggaaatgactcaagcc

SEQ ID NO: 894383 - DNA, 33 bp, Homo sapien
caggagatggtagcaccataaggcttgagtcat

SEQ ID NO: 894384 - DNA, 33 bp, Homo sapien
caggagatggtagcactataaggcttgagtcat

SEQ ID NO: 894385 - DNA, 33 bp, Homo sapien
cttctattttgaccaactgtttatggaaaccaa

SEQ ID NO: 894386 - DNA, 33 bp, Homo sapien
cttctattttgaccaagtgtttatggaaaccaa

SEQ ID NO: 894387 - DNA, 33 bp, Homo sapien
ggccaccattaaccatcatctctgcaacaaaga

SEQ ID NO: 894388 - DNA, 33 bp, Homo sapien
ggccaccattaaccatgatctctgcaacaaaga

SEQ ID NO: 894389 - DNA, 33 bp, Homo sapien
ctgtagtgcagttaacaaacattgaggatatct

SEQ ID NO: 894390 - DNA, 33 bp, Homo sapien
ctgtagtgcagttaacgaacattgaggatatct

SEQ ID NO: 894391 - DNA, 33 bp, Homo sapien
aattccttgagaagtacaatctatccaggcagc

SEQ ID NO: 894392 - DNA, 33 bp, Homo sapien
aattccttgagaagtataatctatccaggcagc

SEQ ID NO: 894393 - DNA, 33 bp, Homo sapien
tagggctctttgactactagaagacattgtgaa

SEQ ID NO: 894394 - DNA, 33 bp, Homo sapien
tagggctctttgactagtagaagacattgtgaa

SEQ ID NO: 894395 - DNA, 33 bp, Homo sapien
ttcagacagctgccaaagaatcatttttaaagt

SEQ ID NO: 894396 - DNA, 33 bp, Homo sapien
ttcagacagctgccaaggaatcatttttaaagt

SEQ ID NO: 894397 - DNA, 33 bp, Homo sapien
cttctgaggaaatggacaactatcacaagtggc

SEQ ID NO: 894398 - DNA, 33 bp, Homo sapien
cttctgaggaaatggagaactatcacaagtggc

SEQ ID NO: 894399 - DNA, 33 bp, Homo sapien
gattttcctgggcagacagttaacttccttact

SEQ ID NO: 894400 - DNA, 33 bp, Homo sapien
gattttcctgggcagagagttaacttccttact

SEQ ID NO: 894401 - DNA, 33 bp, Homo sapien
taaagcttattttgcaaacaaatcagtcctatc

SEQ ID NO: 894402 - DNA, 33 bp, Homo sapien
taaagcttattttgcacacaaatcagtcctatc

SEQ ID NO: 894403 - DNA, 33 bp, Homo sapien
atacctgtatgaattgcacaaattccccttgtc

SEQ ID NO: 894404 - DNA, 33 bp, Homo sapien
atacctgtatgaattggacaaattccccttgtc

SEQ ID NO: 894405 - DNA, 33 bp, Homo sapien
aaaagaatcttgagcgaataaaagatcaaactt

SEQ ID NO: 894406 - DNA, 33 bp, Homo sapien
aaaagaatcttgagcggataaaagatcaaactt

SEQ ID NO: 894407 - DNA, 33 bp, Homo sapien
aaaataaacacacagaagagttgctatcacttc

SEQ ID NO: 894408 - DNA, 33 bp, Homo sapien
aaaataaacacacagaggagttgctatcacttc

SEQ ID NO: 894409 - DNA, 33 bp, Homo sapien
tcctttaactttatggaatcttaagtcatacaa

SEQ ID NO: 894410 - DNA, 33 bp, Homo sapien
tcctttaactttatgggatcttaagtcatacaa

SEQ ID NO: 894411 - DNA, 33 bp, Homo sapien
ctgatgtgcacaatgaataactgttagccgtag

SEQ ID NO: 894412 - DNA, 33 bp, Homo sapien
ctgatgtgcacaatgattaactgttagccgtag

SEQ ID NO: 894413 - DNA, 33 bp, Homo sapien
aaaaatacaaaaagcaaactgatgtactggaaa

SEQ ID NO: 894414 - DNA, 33 bp, Homo sapien
aaaaatacaaaaagcagactgatgtactggaaa

SEQ ID NO: 894415 - DNA, 33 bp, Homo sapien
acagttttagtacaccacagtttttttctctgt

SEQ ID NO: 894416 - DNA, 33 bp, Homo sapien
acagttttagtacaccgcagtttttttctctgt

SEQ ID NO: 894417 - DNA, 33 bp, Homo sapien
caattgattctttgaaatgtacgagtgcagtat

SEQ ID NO: 894418 - DNA, 33 bp, Homo sapien
caattgattctttgaagtgtacgagtgcagtat

SEQ ID NO: 894419 - DNA, 33 bp, Homo sapien
ggttagcgccgctgaacgagctagtggaggagg

SEQ ID NO: 894420 - DNA, 33 bp, Homo sapien
ggttagcgccgctgaaggagctagtggaggagg

SEQ ID NO: 894421 - DNA, 33 bp, Homo sapien
ttgtattttggaagcccattctattttgcagat

SEQ ID NO: 894422 - DNA, 33 bp, Homo sapien
ttgtattttggaagcctattctattttgcagat

SEQ ID NO: 894423 - DNA, 33 bp, Homo sapien
ttagctgagttccttgcactttgacttcatgat

SEQ ID NO: 894424 - DNA, 33 bp, Homo sapien
ttagctgagttccttgtactttgacttcatgat

SEQ ID NO: 894425 - DNA, 33 bp, Homo sapien
tgttaatgcatggtaaatcatgtaacaaaggaa

SEQ ID NO: 894426 - DNA, 33 bp, Homo sapien
tgttaatgcatggtaagtcatgtaacaaaggaa

SEQ ID NO: 894427 - DNA, 33 bp, Homo sapien
tgattataaggtgacactggaataagagctgat

SEQ ID NO: 894428 - DNA, 33 bp, Homo sapien
tgattataaggtgacattggaataagagctgat

SEQ ID NO: 894429 - DNA, 33 bp, Homo sapien
tgtcaatctgtagtgacaaaaagattaattaga

SEQ ID NO: 894430 - DNA, 33 bp, Homo sapien
tgtcaatctgtagtgagaaaaagattaattaga

SEQ ID NO: 894431 - DNA, 33 bp, Homo sapien
agaagatgcctgagcaagtctatattcagctag

SEQ ID NO: 894432 - DNA, 33 bp, Homo sapien
agaagatgcctgagcaggtctatattcagctag

SEQ ID NO: 894433 - DNA, 33 bp, Homo sapien
cgtttgcaagactaggacacttcttgactgaca

SEQ ID NO: 894434 - DNA, 33 bp, Homo sapien
cgtttgcaagactagggcacttcttgactgaca

SEQ ID NO: 894435 - DNA, 33 bp, Homo sapien
attttgccagtaattacgctgcagatttatttt

SEQ ID NO: 894436 - DNA, 33 bp, Homo sapien
attttgccagtaattatgctgcagatttatttt

SEQ ID NO: 894437 - DNA, 33 bp, Homo sapien
tccagagtacaaacaaatgaaacagtgtcgcaa

SEQ ID NO: 894438 - DNA, 33 bp, Homo sapien
tccagagtacaaacaagtgaaacagtgtcgcaa

SEQ ID NO: 894439 - DNA, 33 bp, Homo sapien
agttcaaatgctttcactcttttctaatccagg

SEQ ID NO: 894440 - DNA, 33 bp, Homo sapien
agttcaaatgctttcagtcttttctaatccagg

SEQ ID NO: 894441 - DNA, 33 bp, Homo sapien
acatgagaaacaaaaaccacattaattatagca

SEQ ID NO: 894442 - DNA, 33 bp, Homo sapien
acatgagaaacaaaaagcacattaattatagca

SEQ ID NO: 894443 - DNA, 33 bp, Homo sapien
atatctcgggcaggtaccgtaatctcctggtcc

SEQ ID NO: 894444 - DNA, 33 bp, Homo sapien
atatctcgggcaggtatcgtaatctcctggtcc

SEQ ID NO: 894445 - DNA, 33 bp, Homo sapien; identical to SEQ ID NO: 894443

SEQ ID NO: 894446 - DNA, 33 bp, Homo sapien; identical to SEQ ID NO: 894444

SEQ ID NO: 894447 - DNA, 33 bp, Homo sapien
acaccaagttattaaacgaaagcttggccttga

SEQ ID NO: 894448 - DNA, 33 bp, Homo sapien
acaccaagttattaaatgaaagcttggccttga

SEQ ID NO: 894449 - DNA, 33 bp, Homo sapien
cagtaagtcacactgacaatggagaagatagca

SEQ ID NO: 894450 - DNA, 33 bp, Homo sapien
cagtaagtcacactgataatggagaagatagca

SEQ ID NO: 894451 - DNA, 33 bp, Homo sapien
acctaccccattcataccattttaactacgcgt

SEQ ID NO: 894452 - DNA, 33 bp, Homo sapien
acctaccccattcatagcattttaactacgcgt

SEQ ID NO: 894453 - DNA, 33 bp, Homo sapien
tttagtaacagtgtgacagcattttatgtaagt

SEQ ID NO: 894454 - DNA, 33 bp, Homo sapien
tttagtaacagtgtgatagcattttatgtaagt

SEQ ID NO: 894455 - DNA, 33 bp, Homo sapien
gttcctcacctgtgataaatccctgttcctcat

SEQ ID NO: 894456 - DNA, 33 bp, Homo sapien
gttcctcacctgtgatgaatccctgttcctcat

SEQ ID NO: 894457 - DNA, 33 bp, Homo sapien
ttgggttaacaaatacaaagcaatctcattaaa

SEQ ID NO: 894458 - DNA, 33 bp, Homo sapien
ttgggttaacaaatacgaagcaatctcattaaa

SEQ ID NO: 894459 - DNA, 33 bp, Homo sapien
agttaaactgcacttcaagaaaagtttgttaca

SEQ ID NO: 894460 - DNA, 33 bp, Homo sapien
agttaaactgcacttccagaaaagtttgttaca

SEQ ID NO: 894461 - DNA, 33 bp, Homo sapien
gccacttcaccaccaacatcctttcaagctctc

SEQ ID NO: 894462 - DNA, 33 bp, Homo sapien
gccacttcaccaccaagatcctttcaagctctc

SEQ ID NO: 894463 - DNA, 33 bp, Homo sapien
gagcagtgcctgataaaaagttagacaaccaga

SEQ ID NO: 894464 - DNA, 33 bp, Homo sapien
gagcagtgcctgataagaagttagacaaccaga

SEQ ID NO: 894465 - DNA, 33 bp, Homo sapien
gcagtgtagtgtatcaaatttttttttcatggc

SEQ ID NO: 894466 - DNA, 33 bp, Homo sapien
gcagtgtagtgtatcacatttttttttcatggc

SEQ ID NO: 894467 - DNA, 33 bp, Homo sapien
attatcatgccccggaaaatgcgaaaccctgca

SEQ ID NO: 894468 - DNA, 33 bp, Homo sapien
attatcatgccccggagaatgcgaaaccctgca

SEQ ID NO: 894469 - DNA, 33 bp, Homo sapien
tcttggcccaagttaccgcaagaacatgaaggt

SEQ ID NO: 894470 - DNA, 33 bp, Homo sapien
tcttggcccaagttactgcaagaacatgaaggt

SEQ ID NO: 894471 - DNA, 33 bp, Homo sapien
gactagatttgaataaatacttgatttgcattc

SEQ ID NO: 894472 - DNA, 33 bp, Homo sapien
gactagatttgaataagtacttgatttgcattc

SEQ ID NO: 894473 - DNA, 33 bp, Homo sapien
gggataaaatacaacacctctgagtacaaatct

SEQ ID NO: 894474 - DNA, 33 bp, Homo sapien
gggataaaatacaacagctctgagtacaaatct

SEQ ID NO: 894475 - DNA, 33 bp, Homo sapien
gttgtattttatcccacgtcaattatgtcaggg

SEQ ID NO: 894476 - DNA, 33 bp, Homo sapien
gttgtattttatcccatgtcaattatgtcaggg

SEQ ID NO: 894477 - DNA, 33 bp, Homo sapien
tctgtctgctttaggtaaaatgaactgcaggga

SEQ ID NO: 894478 - DNA, 33 bp, Homo sapien
tctgtctgctttaggtcaaatgaactgcaggga

SEQ ID NO: 894479 - DNA, 33 bp, Homo sapien
gatgatatttggattacatttgggacttagagt

SEQ ID NO: 894480 - DNA, 33 bp, Homo sapien
gatgatatttggattatatttgggacttagagt

SEQ ID NO: 894481 - DNA, 33 bp, Homo sapien
gttacttgaacgcaagcattgcagtacacaaca

SEQ ID NO: 894482 - DNA, 33 bp, Homo sapien
gttacttgaacgcaagtattgcagtacacaaca

SEQ ID NO: 894483 - DNA, 33 bp, Homo sapien
acaaatttaaaagcaaatgatgacaactagcag

SEQ ID NO: 894484 - DNA, 33 bp, Homo sapien
acaaatttaaaagcaagtgatgacaactagcag

SEQ ID NO: 894485 - DNA, 33 bp, Homo sapien
tcaacacagttttaatcaatttctcctaaatta

SEQ ID NO: 894486 - DNA, 33 bp, Homo sapien
tcaacacagttttaatgaatttctcctaaatta

SEQ ID NO: 894487 - DNA, 33 bp, Homo sapien
ctatgatttataaatgcaagattaagctacagt

SEQ ID NO: 894488 - DNA, 33 bp, Homo sapien
ctatgatttataaatggaagattaagctacagt

SEQ ID NO: 894489 - DNA, 33 bp, Homo sapien
ttgtcggtggtatagcaatgaatatgacatagt

SEQ ID NO: 894490 - DNA, 33 bp, Homo sapien
ttgtcggtggtatagcgatgaatatgacatagt

SEQ ID NO: 894491 - DNA, 33 bp, Homo sapien
agggttcatccagttacggcatattgcagaatt

SEQ ID NO: 894492 - DNA, 33 bp, Homo sapien
agggttcatccagttatggcatattgcagaatt

SEQ ID NO: 894493 - DNA, 33 bp, Homo sapien
gtccatcaacgaatgaataactaaggaaaatgt

SEQ ID NO: 894494 - DNA, 33 bp, Homo sapien
gtccatcaacgaatgagtaactaaggaaaatgt

SEQ ID NO: 894495 - DNA, 33 bp, Homo sapien
gcaagtgtttaagtaaatattttctgagccagg

SEQ ID NO: 894496 - DNA, 33 bp, Homo sapien
gcaagtgtttaagtaagtattttctgagccagg

SEQ ID NO: 894497 - DNA, 33 bp, Homo sapien
ccacattggataagaacaggagaagaagatgca

SEQ ID NO: 894498 - DNA, 33 bp, Homo sapien
ccacattggataagaataggagaagaagatgca

SEQ ID NO: 894499 - DNA, 33 bp, Homo sapien
ccctataagaactctacgttccaggcctttaga

SEQ ID NO: 894500 - DNA, 33 bp, Homo sapien
ccctataagaactctatgttccaggcctttaga

SEQ ID NO: 894501 - DNA, 33 bp, Homo sapien
aacctagaattgctcaataagattaacgtgaaa

SEQ ID NO: 894502 - DNA, 33 bp, Homo sapien
aacctagaattgctcagtaagattaacgtgaaa

SEQ ID NO: 894503 - DNA, 33 bp, Homo sapien
tgatgtgaagttgccaccccattacccatgctc

SEQ ID NO: 894504 - DNA, 33 bp, Homo sapien
tgatgtgaagttgccatcccattacccatgctc

SEQ ID NO: 894505 - DNA, 33 bp, Homo sapien
gtcctttatccacttacagctttttccaaattt

SEQ ID NO: 894506 - DNA, 33 bp, Homo sapien
gtcctttatccacttatagctttttccaaattt

SEQ ID NO: 894507 - DNA, 33 bp, Homo sapien
gcctcagtatttttcaagaataatcaagtctaa

SEQ ID NO: 894508 - DNA, 33 bp, Homo sapien
gcctcagtatttttcaggaataatcaagtctaa

SEQ ID NO: 894509 - DNA, 33 bp, Homo sapien
cagaaatcaccatctacgtacttcctgcagctc

SEQ ID NO: 894510 - DNA, 33 bp, Homo sapien
cagaaatcaccatctatgtacttcctgcagctc

SEQ ID NO: 894511 - DNA, 33 bp, Homo sapien
agctgtgctcttttctcaaattctcacaagtaa

SEQ ID NO: 894512 - DNA, 33 bp, Homo sapien
agctgtgctcttttctgaaattctcacaagtaa

SEQ ID NO: 894513 - DNA, 33 bp, Homo sapien
agctctgccaacgtatcaacaaaatttcaaaat

SEQ ID NO: 894514 - DNA, 33 bp, Homo sapien
agctctgccaacgtatgaacaaaatttcaaaat

SEQ ID NO: 894515 - DNA, 33 bp, Homo sapien
ttaaattgtctacagcaatacttaaatgaaaca

SEQ ID NO: 894516 - DNA, 33 bp, Homo sapien
ttaaattgtctacagcgatacttaaatgaaaca

SEQ ID NO: 894517 - DNA, 33 bp, Homo sapien
caacctcaggcaaaaacgctttccctgagttac

SEQ ID NO: 894518 - DNA, 33 bp, Homo sapien
caacctcaggcaaaaatgctttccctgagttac

SEQ ID NO: 894519 - DNA, 33 bp, Homo sapien
tattcaagtataaggacaaagctgataagaaac

SEQ ID NO: 894520 - DNA, 33 bp, Homo sapien
tattcaagtataaggagaaagctgataagaaac

SEQ ID NO: 894521 - DNA, 33 bp, Homo sapien
caagaattgagatataagtaaaaactatgcatt

SEQ ID NO: 894522 - DNA, 33 bp, Homo sapien
caagaattgagatataggtaaaaactatgcatt

SEQ ID NO: 894523 - DNA, 33 bp, Homo sapien
aaaaggtcagccatcacattccttagaatgtaa

SEQ ID NO: 894524 - DNA, 33 bp, Homo sapien
aaaaggtcagccatcatattccttagaatgtaa

SEQ ID NO: 894525 - DNA, 33 bp, Homo sapien
gtgcacatcctcctcactatgtatggtggaaaa

SEQ ID NO: 894526 - DNA, 33 bp, Homo sapien
gtgcacatcctcctcagtatgtatggtggaaaa

SEQ ID NO: 894527 - DNA, 33 bp, Homo sapien
tatcttccaagttagacgttgcttgacggctct

SEQ ID NO: 894528 - DNA, 33 bp, Homo sapien
tatcttccaagttagatgttgcttgacggctct

SEQ ID NO: 894529 - DNA, 33 bp, Homo sapien
agcagacctggcaatcacatacgaaatttgtgt

SEQ ID NO: 894530 - DNA, 33 bp, Homo sapien
agcagacctggcaatcgcatacgaaatttgtgt

SEQ ID NO: 894531 - DNA, 33 bp, Homo sapien
aagactttgtgtcaacacacactacctctccaa

SEQ ID NO: 894532 - DNA, 33 bp, Homo sapien
aagactttgtgtcaacgcacactacctctccaa

SEQ ID NO: 894533 - DNA, 33 bp, Homo sapien
aaatcctctgtccttacgtggtgccacttaaaa

SEQ ID NO: 894534 - DNA, 33 bp, Homo sapien
aaatcctctgtccttatgtggtgccacttaaaa

SEQ ID NO: 894535 - DNA, 33 bp, Homo sapien
taatgttttcaaatgacgtggcattccttaagg

SEQ ID NO: 894536 - DNA, 33 bp, Homo sapien
taatgttttcaaatgatgtggcattccttaagg

SEQ ID NO: 894537 - DNA, 33 bp, Homo sapien
tagattcagaagaaatcacaaagcatagtacag

SEQ ID NO: 894538 - DNA, 33 bp, Homo sapien
tagattcagaagaaattacaaagcatagtacag

SEQ ID NO: 894539 - DNA, 33 bp, Homo sapien
tcccctgagatccaaccgaggtattgggtgtat

SEQ ID NO: 894540 - DNA, 33 bp, Homo sapien
tcccctgagatccaactgaggtattgggtgtat

SEQ ID NO: 894541 - DNA, 33 bp, Homo sapien
gcataaatccacaaacaaccaaaaatgaaatta

SEQ ID NO: 894542 - DNA, 33 bp, Homo sapien
gcataaatccacaaacgaccaaaaatgaaatta

SEQ ID NO: 894543 - DNA, 33 bp, Homo sapien
tggcataatcactaccaattcaatggctgtgag

SEQ ID NO: 894544 - DNA, 33 bp, Homo sapien
tggcataatcactaccgattcaatggctgtgag

SEQ ID NO: 894545 - DNA, 33 bp, Homo sapien
tccagtaccaaaaatcgatgatcctgattccaa

SEQ ID NO: 894546 - DNA, 33 bp, Homo sapien
tccagtaccaaaaatctatgatcctgattccaa

SEQ ID NO: 894547 - DNA, 33 bp, Homo sapien
acatatctaccccgaaccaattatgtttataaa

SEQ ID NO: 894548 - DNA, 33 bp, Homo sapien
acatatctaccccgaatcaattatgtttataaa

SEQ ID NO: 894549 - DNA, 33 bp, Homo sapien
cccagagccacagagaagtaaaaaactctgagc

SEQ ID NO: 894550 - DNA, 33 bp, Homo sapien
cccagagccacagagaggtaaaaaactctgagc

SEQ ID NO: 894551 - DNA, 33 bp, Homo sapien
gagagtgaagccagataacttccactctgcctt

SEQ ID NO: 894552 - DNA, 33 bp, Homo sapien
gagagtgaagccagattacttccactctgcctt

SEQ ID NO: 894553 - DNA, 33 bp, Homo sapien
ccagcactattctaaggatttgacatgtgttaa

SEQ ID NO: 894554 - DNA, 33 bp, Homo sapien
ccagcactattctaagtatttgacatgtgttaa

SEQ ID NO: 894555 - DNA, 33 bp, Homo sapien
taaagtgaaaaatgagcccacaccaccagggtc

SEQ ID NO: 894556 - DNA, 33 bp, Homo sapien
taaagtgaaaaatgagtccacaccaccagggtc

SEQ ID NO: 894557 - DNA, 33 bp, Homo sapien
ttacagaatgtctgaaagttttgtcaagggaaa

SEQ ID NO: 894558 - DNA, 33 bp, Homo sapien
ttacagaatgtctgaaggttttgtcaagggaaa

SEQ ID NO: 894559 - DNA, 33 bp, Homo sapien
ttttagcgtacattgaaacaaaataaattagtg

SEQ ID NO: 894560 - DNA, 33 bp, Homo sapien
ttttagcgtacattgagacaaaataaattagtg

SEQ ID NO: 894561 - DNA, 33 bp, Homo sapien
gatttccacctttttacataggtcatagcttcc

SEQ ID NO: 894562 - DNA, 33 bp, Homo sapien
gatttccacctttttatataggtcatagcttcc

SEQ ID NO: 894563 - DNA, 33 bp, Homo sapien
gtaattgcaggctgaacgtcaactccacaaatg

SEQ ID NO: 894564 - DNA, 33 bp, Homo sapien
gtaattgcaggctgaatgtcaactccacaaatg

SEQ ID NO: 894565 - DNA, 33 bp, Homo sapien
taacaactcatgtttaagtaaggctttacctgt

SEQ ID NO: 894566 - DNA, 33 bp, Homo sapien
taacaactcatgtttatgtaaggctttacctgt

SEQ ID NO: 894567 - DNA, 33 bp, Homo sapien
gcatagacctagatgacacagcctattacacac

SEQ ID NO: 894568 - DNA, 33 bp, Homo sapien
gcatagacctagatgagacagcctattacacac

SEQ ID NO: 894569 - DNA, 33 bp, Homo sapien
tgtttttctggctgtacagagtctccctagata

SEQ ID NO: 894570 - DNA, 33 bp, Homo sapien
tgtttttctggctgtatagagtctccctagata

SEQ ID NO: 894571 - DNA, 33 bp, Homo sapien
tcaaagtagatgaaagacttaaatgtaatacct

SEQ ID NO: 894572 - DNA, 33 bp, Homo sapien
tcaaagtagatgaaagtcttaaatgtaatacct

SEQ ID NO: 894573 - DNA, 33 bp, Homo sapien
cttctatgtctagcaccgtgatttgtgcaaagc

SEQ ID NO: 894574 - DNA, 33 bp, Homo sapien
cttctatgtctagcactgtgatttgtgcaaagc

SEQ ID NO: 894575 - DNA, 33 bp, Homo sapien
gattgttacggttatgccacacgtaggagatag

SEQ ID NO: 894576 - DNA, 33 bp, Homo sapien
gattgttacggttatgtcacacgtaggagatag

SEQ ID NO: 894577 - DNA, 33 bp, Homo sapien
aaaagcagtcaaggtcaataatatacccagtaa

SEQ ID NO: 894578 - DNA, 33 bp, Homo sapien
aaaagcagtcaaggtcgataatatacccagtaa

SEQ ID NO: 894579 - DNA, 33 bp, Homo sapien
tgtaacctagaaaaccactagagttatgtccat

SEQ ID NO: 894580 - DNA, 33 bp, Homo sapien
tgtaacctagaaaaccgctagagttatgtccat

SEQ ID NO: 894581 - DNA, 33 bp, Homo sapien
caatttgtttctggaaaattggaatttatttta

SEQ ID NO: 894582 - DNA, 33 bp, Homo sapien
caatttgtttctggaacattggaatttatttta

SEQ ID NO: 894583 - DNA, 33 bp, Homo sapien
tagcacagatatggtactacagctctctcacat

SEQ ID NO: 894584 - DNA, 33 bp, Homo sapien
tagcacagatatggtattacagctctctcacat

SEQ ID NO: 894585 - DNA, 33 bp, Homo sapien
aaatagaattaccatacgatcaagcaattccac

SEQ ID NO: 894586 - DNA, 33 bp, Homo sapien
aaatagaattaccatatgatcaagcaattccac

SEQ ID NO: 894587 - DNA, 33 bp, Homo sapien
gcaaaagaatattcaactgcacggatatacaac

SEQ ID NO: 894588 - DNA, 33 bp, Homo sapien
gcaaaagaatattcaattgcacggatatacaac

SEQ ID NO: 894589 - DNA, 33 bp, Homo sapien
tctcatgaacataaatcataccgtttaatgcag

SEQ ID NO: 894590 - DNA, 33 bp, Homo sapien
tctcatgaacataaattataccgtttaatgcag

SEQ ID NO: 894591 - DNA, 33 bp, Homo sapien
ctagcaaagtaatacaataggtaaggactctaa

SEQ ID NO: 894592 - DNA, 33 bp, Homo sapien
ctagcaaagtaatacagtaggtaaggactctaa

SEQ ID NO: 894593 - DNA, 33 bp, Homo sapien
tctccaaagccagagaacatgtaaggtgcagcc

SEQ ID NO: 894594 - DNA, 33 bp, Homo sapien
tctccaaagccagagagcatgtaaggtgcagcc

SEQ ID NO: 894595 - DNA, 33 bp, Homo sapien
caactaccaagctataacctgtaggtgtttggt

SEQ ID NO: 894596 - DNA, 33 bp, Homo sapien
caactaccaagctataccctgtaggtgtttggt

SEQ ID NO: 894597 - DNA, 33 bp, Homo sapien
cagaaaccaatgaagaaggtgtcaggcacattt

SEQ ID NO: 894598 - DNA, 33 bp, Homo sapien
cagaaaccaatgaagagggtgtcaggcacattt

SEQ ID NO: 894599 - DNA, 33 bp, Homo sapien
atgtgttgcaagcatcaattaaatgtaagcaga

SEQ ID NO: 894600 - DNA, 33 bp, Homo sapien
atgtgttgcaagcatcgattaaatgtaagcaga

SEQ ID NO: 894601 - DNA, 33 bp, Homo sapien
aaatgtcctccatacagagacttgtgttccctt

SEQ ID NO: 894602 - DNA, 33 bp, Homo sapien
aaatgtcctccatacatagacttgtgttccctt

SEQ ID NO: 894603 - DNA, 33 bp, Homo sapien
catcagttcatcttcaatcttgaaccacaaagg

SEQ ID NO: 894604 - DNA, 33 bp, Homo sapien
catcagttcatcttcagtcttgaaccacaaagg

SEQ ID NO: 894605 - DNA, 33 bp, Homo sapien
agtaagttatacttcaatgaaaaagaaaaggaa

SEQ ID NO: 894606 - DNA, 33 bp, Homo sapien
agtaagttatacttcagtgaaaaagaaaaggaa

SEQ ID NO: 894607 - DNA, 33 bp, Homo sapien
actcacttaacatttacggagtatagaactgtc

SEQ ID NO: 894608 - DNA, 33 bp, Homo sapien
actcacttaacatttagggagtatagaactgtc

SEQ ID NO: 894609 - DNA, 33 bp, Homo sapien
gtaagtattttcttcaagacttctctatttcct

SEQ ID NO: 894610 - DNA, 33 bp, Homo sapien
gtaagtattttcttcatgacttctctatttcct

SEQ ID NO: 894611 - DNA, 33 bp, Homo sapien
tagacataagagtatagggcatgaaaaaccacc

SEQ ID NO: 894612 - DNA, 33 bp, Homo sapien
tagacataagagtatatggcatgaaaaaccacc

SEQ ID NO: 894613 - DNA, 33 bp, Homo sapien
aatataaccatagaaaataaagtttggcagaat

SEQ ID NO: 894614 - DNA, 33 bp, Homo sapien
aatataaccatagaaattaaagtttggcagaat

SEQ ID NO: 894615 - DNA, 33 bp, Homo sapien
ggcacacagaaagaaaagcctacatctagcatt

SEQ ID NO: 894616 - DNA, 33 bp, Homo sapien
ggcacacagaaagaaatgcctacatctagcatt

SEQ ID NO: 894617 - DNA, 33 bp, Homo sapien
tagtgcagctgcttgaaaaaaaaaattgcacac

SEQ ID NO: 894618 - DNA, 33 bp, Homo sapien
tagtgcagctgcttgagaaaaaaaattgcacac

SEQ ID NO: 894619 - DNA, 33 bp, Homo sapien
ttttgagtgccacaatcaactcagaagaaaatg

SEQ ID NO: 894620 - DNA, 33 bp, Homo sapien
ttttgagtgccacaattaactcagaagaaaatg

SEQ ID NO: 894621 - DNA, 33 bp, Homo sapien
gtgagtcaaaactatcacagctctcctctgacg

SEQ ID NO: 894622 - DNA, 33 bp, Homo sapien
gtgagtcaaaactatcgcagctctcctctgacg

SEQ ID NO: 894623 - DNA, 33 bp, Homo sapien
ccatacaaaaatataaagttctcaggtaaaggt

SEQ ID NO: 894624 - DNA, 33 bp, Homo sapien
ccatacaaaaatataaggttctcaggtaaaggt

SEQ ID NO: 894625 - DNA, 33 bp, Homo sapien
taatcctttagaaaataacaagtagagttataa

SEQ ID NO: 894626 - DNA, 33 bp, Homo sapien
taatcctttagaaaattacaagtagagttataa

SEQ ID NO: 894627 - DNA, 33 bp, Homo sapien
atgaaaactgtaaagacctctacgctactagga

SEQ ID NO: 894628 - DNA, 33 bp, Homo sapien
atgaaaactgtaaagatctctacgctactagga

SEQ ID NO: 894629 - DNA, 33 bp, Homo sapien
ggttcagtgcagcttacggtaacatgttattgt

SEQ ID NO: 894630 - DNA, 33 bp, Homo sapien
ggttcagtgcagcttatggtaacatgttattgt

SEQ ID NO: 894631 - DNA, 33 bp, Homo sapien
agaagctggtcacagaaaggacaatgatttgcc

SEQ ID NO: 894632 - DNA, 33 bp, Homo sapien
agaagctggtcacagagaggacaatgatttgcc

SEQ ID NO: 894633 - DNA, 33 bp, Homo sapien
aggtacatagtatcccaattttacggatgagaa

SEQ ID NO: 894634 - DNA, 33 bp, Homo sapien
aggtacatagtatcccgattttacggatgagaa

SEQ ID NO: 894635 - DNA, 33 bp, Homo sapien
ttttaagaaaagcaacataagcaacaaaagctt

SEQ ID NO: 894636 - DNA, 33 bp, Homo sapien
ttttaagaaaagcaacgtaagcaacaaaagctt

SEQ ID NO: 894637 - DNA, 33 bp, Homo sapien
ctacacaacaataaaaaggaaccagctgattaa

SEQ ID NO: 894638 - DNA, 33 bp, Homo sapien
ctacacaacaataaaagggaaccagctgattaa

SEQ ID NO: 894639 - DNA, 33 bp, Homo sapien
agagagaaactttttgaaggatgtgagcgggga

SEQ ID NO: 894640 - DNA, 33 bp, Homo sapien
agagagaaactttttggaggatgtgagcgggga

SEQ ID NO: 894641 - DNA, 33 bp, Homo sapien
agggcagaaaaccagtgacaggagcaattgtga

SEQ ID NO: 894642 - DNA, 33 bp, Homo sapien
agggcagaaaaccagttacaggagcaattgtga

SEQ ID NO: 894643 - DNA, 33 bp, Homo sapien
tctggtcatgcattcccctatttaaattcctcc

SEQ ID NO: 894644 - DNA, 33 bp, Homo sapien
tctggtcatgcattcctctatttaaattcctcc

SEQ ID NO: 894645 - DNA, 33 bp, Homo sapien
gagtaaacgtcatgggccagactcgaattacta

SEQ ID NO: 894646 - DNA, 33 bp, Homo sapien
gagtaaacgtcatgggtcagactcgaattacta

SEQ ID NO: 894647 - DNA, 33 bp, Homo sapien
gcttcacatactcgtaccactttgcattctggg

SEQ ID NO: 894648 - DNA, 33 bp, Homo sapien
gcttcacatactcgtatcactttgcattctggg

SEQ ID NO: 894649 - DNA, 33 bp, Homo sapien
ggaaaggcaagaaaaacctgagaaattgttata

SEQ ID NO: 894650 - DNA, 33 bp, Homo sapien
ggaaaggcaagaaaaagctgagaaattgttata

SEQ ID NO: 894651 - DNA, 33 bp, Homo sapien
gacacgtgtacctttgaaaggacgaggaaaaga

SEQ ID NO: 894652 - DNA, 33 bp, Homo sapien
gacacgtgtacctttgtaaggacgaggaaaaga

SEQ ID NO: 894653 - DNA, 33 bp, Homo sapien
taaaggaatgtagccaaagcaaagtttcctgga

SEQ ID NO: 894654 - DNA, 33 bp, Homo sapien
taaaggaatgtagccagagcaaagtttcctgga

SEQ ID NO: 894655 - DNA, 33 bp, Homo sapien
gcatgtccttcccacacataatcttgacctctg

SEQ ID NO: 894656 - DNA, 33 bp, Homo sapien
gcatgtccttcccacagataatcttgacctctg

SEQ ID NO: 894657 - DNA, 33 bp, Homo sapien
ctttgagtactcatcaaaataatcaggagcttt

SEQ ID NO: 894658 - DNA, 33 bp, Homo sapien
ctttgagtactcatcagaataatcaggagcttt

SEQ ID NO: 894659 - DNA, 33 bp, Homo sapien
cttaaaccactgctcaaattacttgttgcaggt

SEQ ID NO: 894660 - DNA, 33 bp, Homo sapien
cttaaaccactgctcagattacttgttgcaggt

SEQ ID NO: 894661 - DNA, 33 bp, Homo sapien
ttgcactttgcagttacagtaggaaagaatgaa

SEQ ID NO: 894662 - DNA, 33 bp, Homo sapien
ttgcactttgcagttatagtaggaaagaatgaa

SEQ ID NO: 894663 - DNA, 33 bp, Homo sapien
tcccttttaggtgaaacatgtagctgagatcag

SEQ ID NO: 894664 - DNA, 33 bp, Homo sapien
tcccttttaggtgaaatatgtagctgagatcag

SEQ ID NO: 894665 - DNA, 33 bp, Homo sapien
ggcctttattatctgagcctttcctgtgtatga

SEQ ID NO: 894666 - DNA, 33 bp, Homo sapien
ggcctttattatctgatcctttcctgtgtatga

SEQ ID NO: 894667 - DNA, 33 bp, Homo sapien
aataatgcatgcaaagacagaggatcataaaat

SEQ ID NO: 894668 - DNA, 33 bp, Homo sapien
aataatgcatgcaaaggcagaggatcataaaat

SEQ ID NO: 894669 - DNA, 33 bp, Homo sapien
tttttaactgcagaaaaatgttccttctatcat

SEQ ID NO: 894670 - DNA, 33 bp, Homo sapien
tttttaactgcagaaagatgttccttctatcat

SEQ ID NO: 894671 - DNA, 33 bp, Homo sapien
tggcggccatgaccacagtctgtttaacagaaa

SEQ ID NO: 894672 - DNA, 33 bp, Homo sapien
tggcggccatgaccacggtctgtttaacagaaa

SEQ ID NO: 894673 - DNA, 33 bp, Homo sapien
agagccatgaaatatgaatgtgaaagtaaagat

SEQ ID NO: 894674 - DNA, 33 bp, Homo sapien
agagccatgaaatatggatgtgaaagtaaagat

SEQ ID NO: 894675 - DNA, 33 bp, Homo sapien
cctcatacatcccctcacaccagttgagttgaa

SEQ ID NO: 894676 - DNA, 33 bp, Homo sapien
cctcatacatcccctcgcaccagttgagttgaa

SEQ ID NO: 894677 - DNA, 33 bp, Homo sapien
atggttgttgacctccacttgaacaatatacag

SEQ ID NO: 894678 - DNA, 33 bp, Homo sapien
atggttgttgacctccgcttgaacaatatacag

SEQ ID NO: 894679 - DNA, 33 bp, Homo sapien
aaaggtgctacatacaaacagtggaaacatgat

SEQ ID NO: 894680 - DNA, 33 bp, Homo sapien
aaaggtgctacatacagacagtggaaacatgat

SEQ ID NO: 894681 - DNA, 33 bp, Homo sapien
ataaatcactcaaatgaagggaatttcaagctg

SEQ ID NO: 894682 - DNA, 33 bp, Homo sapien
ataaatcactcaaatgtagggaatttcaagctg

SEQ ID NO: 894683 - DNA, 33 bp, Homo sapien
ggataagcgaggacaactcaaatataatcttaa

SEQ ID NO: 894684 - DNA, 33 bp, Homo sapien
ggataagcgaggacaattcaaatataatcttaa

SEQ ID NO: 894685 - DNA, 33 bp, Homo sapien
aaagatgcctttgaccacaattaactccttctg

SEQ ID NO: 894686 - DNA, 33 bp, Homo sapien
aaagatgcctttgacctcaattaactccttctg

SEQ ID NO: 894687 - DNA, 33 bp, Homo sapien
accagctgcctaagagaacatgatgagtaagtt

SEQ ID NO: 894688 - DNA, 33 bp, Homo sapien
accagctgcctaagaggacatgatgagtaagtt

SEQ ID NO: 894689 - DNA, 33 bp, Homo sapien
tgactggaaacaagatcagggaattttagatga

SEQ ID NO: 894690 - DNA, 33 bp, Homo sapien
tgactggaaacaagattagggaattttagatga

SEQ ID NO: 894691 - DNA, 33 bp, Homo sapien
aattgcaatgaaggagaaattccagagacttca

SEQ ID NO: 894692 - DNA, 33 bp, Homo sapien
aattgcaatgaaggaggaattccagagacttca

SEQ ID NO: 894693 - DNA, 33 bp, Homo sapien
tgtcatttatgactggaaacccaataacctact

SEQ ID NO: 894694 - DNA, 33 bp, Homo sapien
tgtcatttatgactgggaacccaataacctact

SEQ ID NO: 894695 - DNA, 33 bp, Homo sapien
tctttttggcagttatcagtggttattaccaca

SEQ ID NO: 894696 - DNA, 33 bp, Homo sapien
tctttttggcagttatgagtggttattaccaca

SEQ ID NO: 894697 - DNA, 33 bp, Homo sapien
tgtttcattcaccaaaatctatatcctctaaat

SEQ ID NO: 894698 - DNA, 33 bp, Homo sapien
tgtttcattcaccaaagtctatatcctctaaat

SEQ ID NO: 894699 - DNA, 33 bp, Homo sapien
aaacaaaaggaaattaagctttggaatgaatca

SEQ ID NO: 894700 - DNA, 33 bp, Homo sapien
aaacaaaaggaaattaggctttggaatgaatca

SEQ ID NO: 894701 - DNA, 33 bp, Homo sapien
ggtgttctcacctgaacgtagactgcaaagcaa

SEQ ID NO: 894702 - DNA, 33 bp, Homo sapien
ggtgttctcacctgaatgtagactgcaaagcaa

SEQ ID NO: 894703 - DNA, 33 bp, Homo sapien
catgaatggctggacacagagtaagaggattga

SEQ ID NO: 894704 - DNA, 33 bp, Homo sapien
catgaatggctggacagagagtaagaggattga

SEQ ID NO: 894705 - DNA, 33 bp, Homo sapien
taactgaagtaagtagaaggttgtagtagccca

SEQ ID NO: 894706 - DNA, 33 bp, Homo sapien
taactgaagtaagtaggaggttgtagtagccca

SEQ ID NO: 894707 - DNA, 33 bp, Homo sapien
tattttgtgcatatcagggtcctggtacatact

SEQ ID NO: 894708 - DNA, 33 bp, Homo sapien
tattttgtgcatatcatggtcctggtacatact

SEQ ID NO: 894709 - DNA, 33 bp, Homo sapien
acagtcagtgctaggccataggaccaattttac

SEQ ID NO: 894710 - DNA, 33 bp, Homo sapien
acagtcagtgctaggctataggaccaattttac

SEQ ID NO: 894711 - DNA, 33 bp, Homo sapien
taaattgctatccggaactaaaatgagtgacag

SEQ ID NO: 894712 - DNA, 33 bp, Homo sapien
taaattgctatccggagctaaaatgagtgacag

SEQ ID NO: 894713 - DNA, 33 bp, Homo sapien
gagtatgtactcccgtgacccaacactggcact

SEQ ID NO: 894714 - DNA, 33 bp, Homo sapien
gagtatgtactcccgttacccaacactggcact

SEQ ID NO: 894715 - DNA, 33 bp, Homo sapien
tgatgtctgggattaaacccgaaagattctaat

SEQ ID NO: 894716 - DNA, 33 bp, Homo sapien
tgatgtctgggattaaccccgaaagattctaat

SEQ ID NO: 894717 - DNA, 33 bp, Homo sapien
gaccttgggtgccaaaatttgaaaaccagtaac

SEQ ID NO: 894718 - DNA, 33 bp, Homo sapien
gaccttgggtgccaaagtttgaaaaccagtaac

SEQ ID NO: 894719 - DNA, 33 bp, Homo sapien
tctttttgctcctctaagactaatggcttttat

SEQ ID NO: 894720 - DNA, 33 bp, Homo sapien
tctttttgctcctctaggactaatggcttttat

SEQ ID NO: 894721 - DNA, 33 bp, Homo sapien
aattcctggaacccataaatatgttttgtcaca

SEQ ID NO: 894722 - DNA, 33 bp, Homo sapien
aattcctggaacccatgaatatgttttgtcaca

SEQ ID NO: 894723 - DNA, 33 bp, Homo sapien
gatagtggagaagtgagcgaggactctcacagg

SEQ ID NO: 894724 - DNA, 33 bp, Homo sapien
gatagtggagaagtgatcgaggactctcacagg

SEQ ID NO: 894725 - DNA, 33 bp, Homo sapien
cttgaaggctcagctcaagtgcagtccctcctg

SEQ ID NO: 894726 - DNA, 33 bp, Homo sapien
cttgaaggctcagctcgagtgcagtccctcctg

SEQ ID NO: 894727 - DNA, 33 bp, Homo sapien
cagaatgacctgtgtagggggtataatgctttg

SEQ ID NO: 894728 - DNA, 33 bp, Homo sapien
cagaatgacctgtgtatggggtataatgctttg

SEQ ID NO: 894729 - DNA, 33 bp, Homo sapien
ttgtccttttgcctcaatcctgtggtggaccta

SEQ ID NO: 894730 - DNA, 33 bp, Homo sapien
ttgtccttttgcctcagtcctgtggtggaccta

SEQ ID NO: 894731 - DNA, 33 bp, Homo sapien
acagtgggatgccacaaactcaaccaaatagta

SEQ ID NO: 894732 - DNA, 33 bp, Homo sapien
acagtgggatgccacagactcaaccaaatagta

SEQ ID NO: 894733 - DNA, 33 bp, Homo sapien
ttttcctcactgttgactatgtgattggaattg

SEQ ID NO: 894734 - DNA, 33 bp, Homo sapien
ttttcctcactgttgattatgtgattggaattg

SEQ ID NO: 894735 - DNA, 33 bp, Homo sapien
gggttttctgggctaagagtggacccactgcag

SEQ ID NO: 894736 - DNA, 33 bp, Homo sapien
gggttttctgggctaatagtggacccactgcag

SEQ ID NO: 894737 - DNA, 33 bp, Homo sapien
aagtgtttggagacctcaagaatgatgtccaaa

SEQ ID NO: 894738 - DNA, 33 bp, Homo sapien
aagtgtttggagaccttaagaatgatgtccaaa

SEQ ID NO: 894739 - DNA, 33 bp, Homo sapien
aattcattagaatcacaataggcctctctgata

SEQ ID NO: 894740 - DNA, 33 bp, Homo sapien
aattcattagaatcacgataggcctctctgata

SEQ ID NO: 894741 - DNA, 33 bp, Homo sapien
ttcacgttcccagaacaggttccgagtcaacca

SEQ ID NO: 894742 - DNA, 33 bp, Homo sapien
ttcacgttcccagaacgggttccgagtcaacca

SEQ ID NO: 894743 - DNA, 33 bp, Homo sapien
ggattggaactaacaagaatctctttgtaccaa

SEQ ID NO: 894744 - DNA, 33 bp, Homo sapien
ggattggaactaacaataatctctttgtaccaa

SEQ ID NO: 894745 - DNA, 33 bp, Homo sapien
ctgtataattgccaaacgattatagtgatacac

SEQ ID NO: 894746 - DNA, 33 bp, Homo sapien
ctgtataattgccaaatgattatagtgatacac

SEQ ID NO: 894747 - DNA, 33 bp, Homo sapien
gctttctgttgagtaaaatctggttctcacaat

SEQ ID NO: 894748 - DNA, 33 bp, Homo sapien
gctttctgttgagtaatatctggttctcacaat

SEQ ID NO: 894749 - DNA, 33 bp, Homo sapien
ccaagctccatagaatcaaagctacatccagct

SEQ ID NO: 894750 - DNA, 33 bp, Homo sapien
ccaagctccatagaattaaagctacatccagct

SEQ ID NO: 894751 - DNA, 33 bp, Homo sapien
ttccagggcattcccaagtgctttgtaatacag

SEQ ID NO: 894752 - DNA, 33 bp, Homo sapien
ttccagggcattcccaggtgctttgtaatacag

SEQ ID NO: 894753 - DNA, 33 bp, Homo sapien
caaaaatagcacatgaactacgactccttagat

SEQ ID NO: 894754 - DNA, 33 bp, Homo sapien
caaaaatagcacatgatctacgactccttagat

SEQ ID NO: 894755 - DNA, 33 bp, Homo sapien
tctcctaaagctataccgattcccagctgcata

SEQ ID NO: 894756 - DNA, 33 bp, Homo sapien
tctcctaaagctatactgattcccagctgcata

SEQ ID NO: 894757 - DNA, 33 bp, Homo sapien
cacctcaacacctctaaatttgttagctggttc

SEQ ID NO: 894758 - DNA, 33 bp, Homo sapien
cacctcaacacctctacatttgttagctggttc

SEQ ID NO: 894759 - DNA, 33 bp, Homo sapien
ttcatctacagtgctgaaaggaaaaatggcaag

SEQ ID NO: 894760 - DNA, 33 bp, Homo sapien
ttcatctacagtgctggaaggaaaaatggcaag

SEQ ID NO: 894761 - DNA, 33 bp, Homo sapien
tgtgggtagaaggcaaagtacatctgttgaatc

SEQ ID NO: 894762 - DNA, 33 bp, Homo sapien
tgtgggtagaaggcaaggtacatctgttgaatc

SEQ ID NO: 894763 - DNA, 33 bp, Homo sapien
tctacccacagaaagtaaagctcagaagtgagg

SEQ ID NO: 894764 - DNA, 33 bp, Homo sapien
tctacccacagaaagtgaagctcagaagtgagg

SEQ ID NO: 894765 - DNA, 33 bp, Homo sapien
ttcatattttcatataagtcttaggctatggaa

SEQ ID NO: 894766 - DNA, 33 bp, Homo sapien
ttcatattttcatataggtcttaggctatggaa

SEQ ID NO: 894767 - DNA, 33 bp, Homo sapien
tgctgcttgtgtctaacattgagtgcaaaaaag

SEQ ID NO: 894768 - DNA, 33 bp, Homo sapien
tgctgcttgtgtctaatattgagtgcaaaaaag

SEQ ID NO: 894769 - DNA, 33 bp, Homo sapien
gattgtttccctgaaaagtatgctatactccta

SEQ ID NO: 894770 - DNA, 33 bp, Homo sapien
gattgtttccctgaaaggtatgctatactccta

SEQ ID NO: 894771 - DNA, 33 bp, Homo sapien
attccgagttgtatcccgaagattatttttgct

SEQ ID NO: 894772 - DNA, 33 bp, Homo sapien
attccgagttgtatcctgaagattatttttgct

SEQ ID NO: 894773 - DNA, 33 bp, Homo sapien
agaaatgtagcagtaacatgaagttagaccaaa

SEQ ID NO: 894774 - DNA, 33 bp, Homo sapien
agaaatgtagcagtaatatgaagttagaccaaa

SEQ ID NO: 894775 - DNA, 33 bp, Homo sapien
agatttaatgtgttgcgctctaaacctccactt

SEQ ID NO: 894776 - DNA, 33 bp, Homo sapien
agatttaatgtgttgctctctaaacctccactt

SEQ ID NO: 894777 - DNA, 33 bp, Homo sapien
gaaatgtattcttagaaatttaaggtgttcttt

SEQ ID NO: 894778 - DNA, 33 bp, Homo sapien
gaaatgtattcttagagatttaaggtgttcttt

SEQ ID NO: 894779 - DNA, 33 bp, Homo sapien
tacagcccagagagaaaggacattttgctgaga

SEQ ID NO: 894780 - DNA, 33 bp, Homo sapien
tacagcccagagagaagggacattttgctgaga

SEQ ID NO: 894781 - DNA, 33 bp, Homo sapien
ggtgttcatcaaactccacagggcactggcctg

SEQ ID NO: 894782 - DNA, 33 bp, Homo sapien
ggtgttcatcaaactctacagggcactggcctg

SEQ ID NO: 894783 - DNA, 33 bp, Homo sapien
aaaagcatggatattgcagaatctggggggaag

SEQ ID NO: 894784 - DNA, 33 bp, Homo sapien
aaaagcatggatattgtagaatctggggggaag

SEQ ID NO: 894785 - DNA, 33 bp, Homo sapien
atgttcgctttaaataaaacttactgtgctgta

SEQ ID NO: 894786 - DNA, 33 bp, Homo sapien
atgttcgctttaaatacaacttactgtgctgta

SEQ ID NO: 894787 - DNA, 33 bp, Homo sapien
tttgaaaaatttaagccgcacactaggatactc

SEQ ID NO: 894788 - DNA, 33 bp, Homo sapien
tttgaaaaatttaagctgcacactaggatactc

SEQ ID NO: 894789 - DNA, 33 bp, Homo sapien
ccaacaacaaccaagtaaacagataacaatgtg

SEQ ID NO: 894790 - DNA, 33 bp, Homo sapien
ccaacaacaaccaagtcaacagataacaatgtg

SEQ ID NO: 894791 - DNA, 33 bp, Homo sapien
cacccaagcaggatcacaaatagataaggattc

SEQ ID NO: 894792 - DNA, 33 bp, Homo sapien
cacccaagcaggatcataaatagataaggattc

SEQ ID NO: 894793 - DNA, 33 bp, Homo sapien
gaagcaacataaaacactcctggcaatcccggc

SEQ ID NO: 894794 - DNA, 33 bp, Homo sapien
gaagcaacataaaacattcctggcaatcccggc

SEQ ID NO: 894795 - DNA, 33 bp, Homo sapien
aaaactagaggcaagactataaagggaaaaata

SEQ ID NO: 894796 - DNA, 33 bp, Homo sapien
aaaactagaggcaagattataaagggaaaaata

SEQ ID NO: 894797 - DNA, 33 bp, Homo sapien
tatcaagttaagccccacaatcctaggaggctt

SEQ ID NO: 894798 - DNA, 33 bp, Homo sapien
tatcaagttaagcccctcaatcctaggaggctt

SEQ ID NO: 894799 - DNA, 33 bp, Homo sapien
ctaaggagagaggtaaagcacatacatggataa

SEQ ID NO: 894800 - DNA, 33 bp, Homo sapien
ctaaggagagaggtaatgcacatacatggataa

SEQ ID NO: 894801 - DNA, 33 bp, Homo sapien
gaggccctgacatctaaattttaaccagccgtt

SEQ ID NO: 894802 - DNA, 33 bp, Homo sapien
gaggccctgacatctagattttaaccagccgtt

SEQ ID NO: 894803 - DNA, 33 bp, Homo sapien
gaaaacattgttagaacaggatttttaaatatt

SEQ ID NO: 894804 - DNA, 33 bp, Homo sapien
gaaaacattgttagaagaggatttttaaatatt

SEQ ID NO: 894805 - DNA, 33 bp, Homo sapien
aaactccattgatcaaataagtaaggaaaacag

SEQ ID NO: 894806 - DNA, 33 bp, Homo sapien
aaactccattgatcaagtaagtaaggaaaacag

SEQ ID NO: 894807 - DNA, 33 bp, Homo sapien
atagcacagtatcgtggatatagttatcaataa

SEQ ID NO: 894808 - DNA, 33 bp, Homo sapien
atagcacagtatcgtgtatatagttatcaataa

SEQ ID NO: 894809 - DNA, 33 bp, Homo sapien
cagaacatggttctacgacatttggtacatttc

SEQ ID NO: 894810 - DNA, 33 bp, Homo sapien
cagaacatggttctactacatttggtacatttc

SEQ ID NO: 894811 - DNA, 33 bp, Homo sapien
aattcatttgtaaaggaacgtggccttcactgt

SEQ ID NO: 894812 - DNA, 33 bp, Homo sapien
aattcatttgtaaaggtacgtggccttcactgt

SEQ ID NO: 894813 - DNA, 33 bp, Homo sapien
cttgaaagcaaggtataaagctcaattagaaag

SEQ ID NO: 894814 - DNA, 33 bp, Homo sapien
cttgaaagcaaggtatgaagctcaattagaaag

SEQ ID NO: 894815 - DNA, 33 bp, Homo sapien
tgaaacagatgagtaacgatagatacattttat

SEQ ID NO: 894816 - DNA, 33 bp, Homo sapien
tgaaacagatgagtaaggatagatacattttat

SEQ ID NO: 894817 - DNA, 33 bp, Homo sapien
tattagcaagtgacttgaaggccctaacaaggt

SEQ ID NO: 894818 - DNA, 33 bp, Homo sapien
tattagcaagtgactttaaggccctaacaaggt

SEQ ID NO: 894819 - DNA, 33 bp, Homo sapien
gatgtctctcaagtctaacgatctatctagaat

SEQ ID NO: 894820 - DNA, 33 bp, Homo sapien
gatgtctctcaagtcttacgatctatctagaat

SEQ ID NO: 894821 - DNA, 33 bp, Homo sapien
gcctattgaaatgaagcaatgcagggcaggggg

SEQ ID NO: 894822 - DNA, 33 bp, Homo sapien
gcctattgaaatgaagtaatgcagggcaggggg

SEQ ID NO: 894823 - DNA, 33 bp, Homo sapien
ggataatttataatgagctatcttcaggtcacg

SEQ ID NO: 894824 - DNA, 33 bp, Homo sapien
ggataatttataatgatctatcttcaggtcacg

SEQ ID NO: 894825 - DNA, 33 bp, Homo sapien
accattcaattggtctcactctaggaaatgtcc

SEQ ID NO: 894826 - DNA, 33 bp, Homo sapien
accattcaattggtctgactctaggaaatgtcc

SEQ ID NO: 894827 - DNA, 33 bp, Homo sapien
gccagacacacacagagtcaaacactaaaactc

SEQ ID NO: 894828 - DNA, 33 bp, Homo sapien
gccagacacacacagattcaaacactaaaactc

SEQ ID NO: 894829 - DNA, 33 bp, Homo sapien
acactgaagtgttctgcatatgtaacagttttt

SEQ ID NO: 894830 - DNA, 33 bp, Homo sapien
acactgaagtgttctggatatgtaacagttttt

SEQ ID NO: 894831 - DNA, 33 bp, Homo sapien
tcacctccatatcacaatattcctacctagtat

SEQ ID NO: 894832 - DNA, 33 bp, Homo sapien
tcacctccatatcacattattcctacctagtat

SEQ ID NO: 894833 - DNA, 33 bp, Homo sapien
acctgattaatgttcaactcccaatcctttttc

SEQ ID NO: 894834 - DNA, 33 bp, Homo sapien
acctgattaatgttcatctcccaatcctttttc

SEQ ID NO: 894835 - DNA, 33 bp, Homo sapien
atcagctaagagaagcaaaatagtttatataat

SEQ ID NO: 894836 - DNA, 33 bp, Homo sapien
atcagctaagagaagccaaatagtttatataat

SEQ ID NO: 894837 - DNA, 33 bp, Homo sapien
cctgcatcgagtgaccagccatctaagattgca

SEQ ID NO: 894838 - DNA, 33 bp, Homo sapien
cctgcatcgagtgaccggccatctaagattgca

SEQ ID NO: 894839 - DNA, 33 bp, Homo sapien
attactgccacatcaacttaagagaaagtgcaa

SEQ ID NO: 894840 - DNA, 33 bp, Homo sapien
attactgccacatcaatttaagagaaagtgcaa

SEQ ID NO: 894841 - DNA, 33 bp, Homo sapien
gggaggtttgcatctaggtatcctgtttccgta

SEQ ID NO: 894842 - DNA, 33 bp, Homo sapien
gggaggtttgcatctatgtatcctgtttccgta

SEQ ID NO: 894843 - DNA, 33 bp, Homo sapien
actgaacaaaagagaaaagaagccctgtcctta

SEQ ID NO: 894844 - DNA, 33 bp, Homo sapien
actgaacaaaagagaagagaagccctgtcctta

SEQ ID NO: 894845 - DNA, 33 bp, Homo sapien
atctctgcatttgaatgaagtcagattggccca

SEQ ID NO: 894846 - DNA, 33 bp, Homo sapien
atctctgcatttgaattaagtcagattggccca

SEQ ID NO: 894847 - DNA, 33 bp, Homo sapien
cgatgctggcagtttacagtctggctgggatgt

SEQ ID NO: 894848 - DNA, 33 bp, Homo sapien
cgatgctggcagtttatagtctggctgggatgt

SEQ ID NO: 894849 - DNA, 33 bp, Homo sapien
agatataatacaaccaactgcagttcatggctt

SEQ ID NO: 894850 - DNA, 33 bp, Homo sapien
agatataatacaaccacctgcagttcatggctt

SEQ ID NO: 894851 - DNA, 33 bp, Homo sapien
aggtgaggagaatcatcagctaggcatgcatgt

SEQ ID NO: 894852 - DNA, 33 bp, Homo sapien
aggtgaggagaatcattagctaggcatgcatgt

SEQ ID NO: 894853 - DNA, 33 bp, Homo sapien
aaatcagcagcccagagataaggatcttgggat

SEQ ID NO: 894854 - DNA, 33 bp, Homo sapien
aaatcagcagcccagatataaggatcttgggat

SEQ ID NO: 894855 - DNA, 33 bp, Homo sapien
tctagttcccttttcagtattcagagtcagact

SEQ ID NO: 894856 - DNA, 33 bp, Homo sapien
tctagttcccttttcattattcagagtcagact

SEQ ID NO: 894857 - DNA, 33 bp, Homo sapien
gctttccattgtgtccagaatggggatatttaa

SEQ ID NO: 894858 - DNA, 33 bp, Homo sapien
gctttccattgtgtccggaatggggatatttaa

SEQ ID NO: 894859 - DNA, 33 bp, Homo sapien
gttggctgtatatataaccaggaaggaaaacag

SEQ ID NO: 894860 - DNA, 33 bp, Homo sapien
gttggctgtatatatagccaggaaggaaaacag

SEQ ID NO: 894861 - DNA, 33 bp, Homo sapien
ggtcctttgaaaaacaccttcaatcatttcttt

SEQ ID NO: 894862 - DNA, 33 bp, Homo sapien
ggtcctttgaaaaacagcttcaatcatttcttt

SEQ ID NO: 894863 - DNA, 33 bp, Homo sapien
gcttatgtgggcccaaataaagacgatgggata

SEQ ID NO: 894864 - DNA, 33 bp, Homo sapien
gcttatgtgggcccaagtaaagacgatgggata

SEQ ID NO: 894865 - DNA, 33 bp, Homo sapien
gttaccaggcaagttacggtatgtattaagtat

SEQ ID NO: 894866 - DNA, 33 bp, Homo sapien
gttaccaggcaagttatggtatgtattaagtat

SEQ ID NO: 894867 - DNA, 33 bp, Homo sapien
ctggaccacaaatatcaagtcattcgcctaaga

SEQ ID NO: 894868 - DNA, 33 bp, Homo sapien
ctggaccacaaatatcgagtcattcgcctaaga

SEQ ID NO: 894869 - DNA, 33 bp, Homo sapien
agttcactcattagtacgccgggtacaccaaca

SEQ ID NO: 894870 - DNA, 33 bp, Homo sapien
agttcactcattagtatgccgggtacaccaaca

SEQ ID NO: 894871 - DNA, 33 bp, Homo sapien
aaaaggccattccaaacccaccggacttgtcac

SEQ ID NO: 894872 - DNA, 33 bp, Homo sapien
aaaaggccattccaaatccaccggacttgtcac

SEQ ID NO: 894873 - DNA, 33 bp, Homo sapien
gatagtgtgtgacggccctttgaatacgatatt

SEQ ID NO: 894874 - DNA, 33 bp, Homo sapien
gatagtgtgtgacggctctttgaatacgatatt

SEQ ID NO: 894875 - DNA, 33 bp, Homo sapien
agcatttgttgacatgaaaatgagcgtacaata

SEQ ID NO: 894876 - DNA, 33 bp, Homo sapien
agcatttgttgacatggaaatgagcgtacaata

SEQ ID NO: 894877 - DNA, 33 bp, Homo sapien
catgcatacacacacacactctcaggactctct

SEQ ID NO: 894878 - DNA, 33 bp, Homo sapien
catgcatacacacacatactctcaggactctct

SEQ ID NO: 894879 - DNA, 33 bp, Homo sapien
actttagaaaagcgtgcatacttgcaatttctc

SEQ ID NO: 894880 - DNA, 33 bp, Homo sapien
actttagaaaagcgtgtatacttgcaatttctc

SEQ ID NO: 894881 - DNA, 33 bp, Homo sapien
ccaaaataacatgctacgagctctgcagggcaa

SEQ ID NO: 894882 - DNA, 33 bp, Homo sapien
ccaaaataacatgctatgagctctgcagggcaa

SEQ ID NO: 894883 - DNA, 33 bp, Homo sapien
gcacataaactgcttgcattgtaccagacatat

SEQ ID NO: 894884 - DNA, 33 bp, Homo sapien
gcacataaactgcttggattgtaccagacatat

SEQ ID NO: 894885 - DNA, 33 bp, Homo sapien
tcagtcgtaagattaaagatgcacttgtggtag

SEQ ID NO: 894886 - DNA, 33 bp, Homo sapien
tcagtcgtaagattaatgatgcacttgtggtag

SEQ ID NO: 894887 - DNA, 33 bp, Homo sapien
tttttcgttactgcgcaaatactgtctttgtat

SEQ ID NO: 894888 - DNA, 33 bp, Homo sapien
tttttcgttactgcgccaatactgtctttgtat

SEQ ID NO: 894889 - DNA, 33 bp, Homo sapien
gaatcccagaatctaaaagaacctaaatgagtt

SEQ ID NO: 894890 - DNA, 33 bp, Homo sapien
gaatcccagaatctaacagaacctaaatgagtt

SEQ ID NO: 894891 - DNA, 33 bp, Homo sapien
tagatctcctctccttaaaactggtttggccta

SEQ ID NO: 894892 - DNA, 33 bp, Homo sapien
tagatctcctctccttgaaactggtttggccta

SEQ ID NO: 894893 - DNA, 33 bp, Homo sapien
aatatacgcttcctaactgtataggtatacttt

SEQ ID NO: 894894 - DNA, 33 bp, Homo sapien
aatatacgcttcctaattgtataggtatacttt

SEQ ID NO: 894895 - DNA, 33 bp, Homo sapien
gtagcatcctttatcacctccaccctactcctg

SEQ ID NO: 894896 - DNA, 33 bp, Homo sapien
gtagcatcctttatcagctccaccctactcctg

SEQ ID NO: 894897 - DNA, 33 bp, Homo sapien
gtaataagaaatctggccaatatgtaacttgta

SEQ ID NO: 894898 - DNA, 33 bp, Homo sapien
gtaataagaaatctggtcaatatgtaacttgta

SEQ ID NO: 894899 - DNA, 33 bp, Homo sapien
atgagattttcacttacgtcttccttgtttact

SEQ ID NO: 894900 - DNA, 33 bp, Homo sapien
atgagattttcacttatgtcttccttgtttact

SEQ ID NO: 894901 - DNA, 33 bp, Homo sapien
caccaatcctgctcacaccctctcaagctgcct

SEQ ID NO: 894902 - DNA, 33 bp, Homo sapien
caccaatcctgctcacgccctctcaagctgcct

SEQ ID NO: 894903 - DNA, 33 bp, Homo sapien
tcttcctgtcctaagggatgctggtcagtgtac

SEQ ID NO: 894904 - DNA, 33 bp, Homo sapien
tcttcctgtcctaaggtatgctggtcagtgtac

SEQ ID NO: 894905 - DNA, 33 bp, Homo sapien
actgatacaatacccaagaaaaatgtatgtgtc

SEQ ID NO: 894906 - DNA, 33 bp, Homo sapien
actgatacaatacccacgaaaaatgtatgtgtc

SEQ ID NO: 894907 - DNA, 33 bp, Homo sapien
cagaggaaatataattaaaggttgttccaattg

SEQ ID NO: 894908 - DNA, 33 bp, Homo sapien
cagaggaaatataattgaaggttgttccaattg

SEQ ID NO: 894909 - DNA, 33 bp, Homo sapien
gcaggacatcaaagacgccaagctgatactttt

SEQ ID NO: 894910 - DNA, 33 bp, Homo sapien
gcaggacatcaaagactccaagctgatactttt

SEQ ID NO: 894911 - DNA, 33 bp, Homo sapien
atataacgtgatgcatgaccgcactgaccagga

SEQ ID NO: 894912 - DNA, 33 bp, Homo sapien
atataacgtgatgcattaccgcactgaccagga

SEQ ID NO: 894913 - DNA, 33 bp, Homo sapien
gtgctttctcagactcacttttctgtctttctc

SEQ ID NO: 894914 - DNA, 33 bp, Homo sapien
gtgctttctcagactcgcttttctgtctttctc

SEQ ID NO: 894915 - DNA, 33 bp, Homo sapien
tttttgaaaaactcaacgtgtctcctaaataaa

SEQ ID NO: 894916 - DNA, 33 bp, Homo sapien
tttttgaaaaactcaatgtgtctcctaaataaa

SEQ ID NO: 894917 - DNA, 33 bp, Homo sapien
acttgggggctttagactccaaataaggctgtg

SEQ ID NO: 894918 - DNA, 33 bp, Homo sapien
acttgggggctttagattccaaataaggctgtg

SEQ ID NO: 894919 - DNA, 33 bp, Homo sapien
tcctgcaaactatgtaaacaaaattttgcacac

SEQ ID NO: 894920 - DNA, 33 bp, Homo sapien
tcctgcaaactatgtagacaaaattttgcacac

SEQ ID NO: 894921 - DNA, 33 bp, Homo sapien
tcacagtaatgtaaacaacttaggtgatacctc

SEQ ID NO: 894922 - DNA, 33 bp, Homo sapien
tcacagtaatgtaaaccacttaggtgatacctc

SEQ ID NO: 894923 - DNA, 33 bp, Homo sapien
tatgtgaaaagacaaaccaatacttgttaggat

SEQ ID NO: 894924 - DNA, 33 bp, Homo sapien
tatgtgaaaagacaaagcaatacttgttaggat

SEQ ID NO: 894925 - DNA, 33 bp, Homo sapien
ttgaagaagccataaaaatgactaggagttgca

SEQ ID NO: 894926 - DNA, 33 bp, Homo sapien
ttgaagaagccataaagatgactaggagttgca

SEQ ID NO: 894927 - DNA, 33 bp, Homo sapien
taggagttgcaaagaccggatgcagtacccttg

SEQ ID NO: 894928 - DNA, 33 bp, Homo sapien
taggagttgcaaagactggatgcagtacccttg

SEQ ID NO: 894929 - DNA, 33 bp, Homo sapien
tcatggtccagcctctaaagtgcttgaattcta

SEQ ID NO: 894930 - DNA, 33 bp, Homo sapien
tcatggtccagcctctgaagtgcttgaattcta

SEQ ID NO: 894931 - DNA, 33 bp, Homo sapien
ggttttatattgagaaatgttttttaagctgaa

SEQ ID NO: 894932 - DNA, 33 bp, Homo sapien
ggttttatattgagaagtgttttttaagctgaa

SEQ ID NO: 894933 - DNA, 33 bp, Homo sapien
ctgtcttacgcaatgaggcgatcctacagatac

SEQ ID NO: 894934 - DNA, 33 bp, Homo sapien
ctgtcttacgcaatgatgcgatcctacagatac

SEQ ID NO: 894935 - DNA, 33 bp, Homo sapien
tgaataaccttgaatacgttactgaaaatctgg

SEQ ID NO: 894936 - DNA, 33 bp, Homo sapien
tgaataaccttgaatatgttactgaaaatctgg

SEQ ID NO: 894937 - DNA, 33 bp, Homo sapien
ggcacagaacctacttaaagcatggtcattctc

SEQ ID NO: 894938 - DNA, 33 bp, Homo sapien
ggcacagaacctacttcaagcatggtcattctc

SEQ ID NO: 894939 - DNA, 33 bp, Homo sapien
attgttttttattcacagctagggcaccgaaga

SEQ ID NO: 894940 - DNA, 33 bp, Homo sapien
attgttttttattcactgctagggcaccgaaga

SEQ ID NO: 894941 - DNA, 33 bp, Homo sapien
caactgaagtctctcccgctttcttcctctttc

SEQ ID NO: 894942 - DNA, 33 bp, Homo sapien
caactgaagtctctcctgctttcttcctctttc

SEQ ID NO: 894943 - DNA, 33 bp, Homo sapien
atgcgggaaaacacccaaaagctatgcatctga

SEQ ID NO: 894944 - DNA, 33 bp, Homo sapien
atgcgggaaaacacccgaaagctatgcatctga

SEQ ID NO: 894945 - DNA, 33 bp, Homo sapien
atcgaggcgtaggtagaataaataagaataggc

SEQ ID NO: 894946 - DNA, 33 bp, Homo sapien
atcgaggcgtaggtagtataaataagaataggc

SEQ ID NO: 894947 - DNA, 33 bp, Homo sapien
gggacttgggcaaggaagattcagcacttgatc

SEQ ID NO: 894948 - DNA, 33 bp, Homo sapien
gggacttgggcaaggacgattcagcacttgatc

SEQ ID NO: 894949 - DNA, 33 bp, Homo sapien
ttatacatttttgtacacacaggtttttatttg

SEQ ID NO: 894950 - DNA, 33 bp, Homo sapien
ttatacatttttgtacgcacaggtttttatttg

SEQ ID NO: 894951 - DNA, 33 bp, Homo sapien
gcggacagttgtcagtaaattgtggcctcagcc

SEQ ID NO: 894952 - DNA, 33 bp, Homo sapien
gcggacagttgtcagttaattgtggcctcagcc

SEQ ID NO: 894953 - DNA, 33 bp, Homo sapien
tcactactaataaaagactcccatatgtgaaaa

SEQ ID NO: 894954 - DNA, 33 bp, Homo sapien
tcactactaataaaaggctcccatatgtgaaaa

SEQ ID NO: 894955 - DNA, 33 bp, Homo sapien
cccccaccgtacactaacagggcagcagctctg

SEQ ID NO: 894956 - DNA, 33 bp, Homo sapien
cccccaccgtacactagcagggcagcagctctg

SEQ ID NO: 894957 - DNA, 33 bp, Homo sapien
cttaattttcactgtcaagggctagctttgagt

SEQ ID NO: 894958 - DNA, 33 bp, Homo sapien
cttaattttcactgtcgagggctagctttgagt

SEQ ID NO: 894959 - DNA, 33 bp, Homo sapien
cacccacaccttgctaagacaaacaaaaaatga

SEQ ID NO: 894960 - DNA, 33 bp, Homo sapien
cacccacaccttgctacgacaaacaaaaaatga

SEQ ID NO: 894961 - DNA, 33 bp, Homo sapien
aaataaatgaggatgaacaatttcaatgcaggg

SEQ ID NO: 894962 - DNA, 33 bp, Homo sapien
aaataaatgaggatgagcaatttcaatgcaggg

SEQ ID NO: 894963 - DNA, 33 bp, Homo sapien
tggcttcaaaactggacggcttcaacagaaagt

SEQ ID NO: 894964 - DNA, 33 bp, Homo sapien
tggcttcaaaactggatggcttcaacagaaagt

SEQ ID NO: 894965 - DNA, 33 bp, Homo sapien
gtgaacatcaggaccaatgcctgcaaacctagg

SEQ ID NO: 894966 - DNA, 33 bp, Homo sapien
gtgaacatcaggaccagtgcctgcaaacctagg

SEQ ID NO: 894967 - DNA, 33 bp, Homo sapien
ctctgagtcatttcacccattccttaagcctaa

SEQ ID NO: 894968 - DNA, 33 bp, Homo sapien
ctctgagtcatttcacgcattccttaagcctaa

SEQ ID NO: 894969 - DNA, 33 bp, Homo sapien
ttctttaaatagctacacaataagtcaatatcc

SEQ ID NO: 894970 - DNA, 33 bp, Homo sapien
ttctttaaatagctacgcaataagtcaatatcc

SEQ ID NO: 894971 - DNA, 33 bp, Homo sapien
cttcttccatctctaactcagttcctatgatat

SEQ ID NO: 894972 - DNA, 33 bp, Homo sapien
cttcttccatctctaagtcagttcctatgatat

SEQ ID NO: 894973 - DNA, 33 bp, Homo sapien
aggacctcagtgttgcaagttgagaccacctgc

SEQ ID NO: 894974 - DNA, 33 bp, Homo sapien
aggacctcagtgttgcgagttgagaccacctgc

SEQ ID NO: 894975 - DNA, 33 bp, Homo sapien
ttgacgggatctgatacacatttttttgagata

SEQ ID NO: 894976 - DNA, 33 bp, Homo sapien
ttgacgggatctgatatacatttttttgagata

SEQ ID NO: 894977 - DNA, 33 bp, Homo sapien
tatctggcaagtctaaactagaataatctcttt

SEQ ID NO: 894978 - DNA, 33 bp, Homo sapien
tatctggcaagtctaagctagaataatctcttt

SEQ ID NO: 894979 - DNA, 33 bp, Homo sapien
caggaaaggttgcacacaacaggctaagcttga

SEQ ID NO: 894980 - DNA, 33 bp, Homo sapien
caggaaaggttgcacagaacaggctaagcttga

SEQ ID NO: 894981 - DNA, 33 bp, Homo sapien
ggaataagcagaaagaactgttttacagtacct

SEQ ID NO: 894982 - DNA, 33 bp, Homo sapien
ggaataagcagaaagagctgttttacagtacct

SEQ ID NO: 894983 - DNA, 33 bp, Homo sapien
ggccaagttaagcctgcaggagctcagaactta

SEQ ID NO: 894984 - DNA, 33 bp, Homo sapien
ggccaagttaagcctgtaggagctcagaactta

SEQ ID NO: 894985 - DNA, 33 bp, Homo sapien
aattccatgccagaaaccattttttgacaacag

SEQ ID NO: 894986 - DNA, 33 bp, Homo sapien
aattccatgccagaaatcattttttgacaacag

SEQ ID NO: 894987 - DNA, 33 bp, Homo sapien
aacttcatacttctacactcaacagttattgga

SEQ ID NO: 894988 - DNA, 33 bp, Homo sapien
aacttcatacttctaccctcaacagttattgga

SEQ ID NO: 894989 - DNA, 33 bp, Homo sapien
tggctttgttccatgacaggggcgaaaagatat

SEQ ID NO: 894990 - DNA, 33 bp, Homo sapien
tggctttgttccatgataggggcgaaaagatat

SEQ ID NO: 894991 - DNA, 33 bp, Homo sapien
aaaagaaacatctgacgagttagtgctcagctg

SEQ ID NO: 894992 - DNA, 33 bp, Homo sapien
aaaagaaacatctgactagttagtgctcagctg

SEQ ID NO: 894993 - DNA, 33 bp, Homo sapien
gactctaaaagggcatcaggttccattcaaagc

SEQ ID NO: 894994 - DNA, 33 bp, Homo sapien
gactctaaaagggcatgaggttccattcaaagc

SEQ ID NO: 894995 - DNA, 33 bp, Homo sapien
ggagttatctgatcaaatcttaaaggataaaca

SEQ ID NO: 894996 - DNA, 33 bp, Homo sapien
ggagttatctgatcaagtcttaaaggataaaca

SEQ ID NO: 894997 - DNA, 33 bp, Homo sapien
ttattttgaaaatacacaattgatggcctataa

SEQ ID NO: 894998 - DNA, 33 bp, Homo sapien
ttattttgaaaatacataattgatggcctataa

SEQ ID NO: 894999 - DNA, 33 bp, Homo sapien
ttgagaaagaaatccaatgagggtagcgtgcca

SEQ ID NO: 895000 - DNA, 33 bp, Homo sapien
ttgagaaagaaatccactgagggtagcgtgcca

SEQ ID NO: 895001 - DNA, 33 bp, Homo sapien
tgtcatgaactccatgaatacctgacttaagac

SEQ ID NO: 895002 - DNA, 33 bp, Homo sapien
tgtcatgaactccatgcatacctgacttaagac

SEQ ID NO: 895003 - DNA, 33 bp, Homo sapien
caagttcagaaaggcacgatttggccaagcaga

SEQ ID NO: 895004 - DNA, 33 bp, Homo sapien
caagttcagaaaggcatgatttggccaagcaga

SEQ ID NO: 895005 - DNA, 33 bp, Homo sapien
aaatagataaaagcaactcggaggaaataaaat

SEQ ID NO: 895006 - DNA, 33 bp, Homo sapien
aaatagataaaagcaattcggaggaaataaaat

SEQ ID NO: 895007 - DNA, 33 bp, Homo sapien
cttagatgtacagcctaaagaagttttacatat

SEQ ID NO: 895008 - DNA, 33 bp, Homo sapien
cttagatgtacagcctgaagaagttttacatat

SEQ ID NO: 895009 - DNA, 33 bp, Homo sapien
ctgaccaagtgtcaaaagatcagaaagaagtca

SEQ ID NO: 895010 - DNA, 33 bp, Homo sapien
ctgaccaagtgtcaaatgatcagaaagaagtca

SEQ ID NO: 895011 - DNA, 33 bp, Homo sapien
agtactggtttagaaacaaggtgatgagtaaat

SEQ ID NO: 895012 - DNA, 33 bp, Homo sapien
agtactggtttagaaataaggtgatgagtaaat

SEQ ID NO: 895013 - DNA, 33 bp, Homo sapien
cttctcacttgatccacagtttggcttgcaata

SEQ ID NO: 895014 - DNA, 33 bp, Homo sapien
cttctcacttgatccatagtttggcttgcaata

SEQ ID NO: 895015 - DNA, 33 bp, Homo sapien
tccctgccacagggccgctgtgcatgacaccca

SEQ ID NO: 895016 - DNA, 33 bp, Homo sapien
tccctgccacagggcctctgtgcatgacaccca

SEQ ID NO: 895017 - DNA, 33 bp, Homo sapien
taagagcaagcagttaaggaattctaaatacat

SEQ ID NO: 895018 - DNA, 33 bp, Homo sapien
taagagcaagcagttatggaattctaaatacat

SEQ ID NO: 895019 - DNA, 33 bp, Homo sapien
ttctgctctttcagaacgccttttgcaggtggg

SEQ ID NO: 895020 - DNA, 33 bp, Homo sapien
ttctgctctttcagaatgccttttgcaggtggg

SEQ ID NO: 895021 - DNA, 33 bp, Homo sapien
cagattgcagagggaaaaacttatatcagcgta

SEQ ID NO: 895022 - DNA, 33 bp, Homo sapien
cagattgcagagggaagaacttatatcagcgta

SEQ ID NO: 895023 - DNA, 33 bp, Homo sapien
tcctttttagccttcgaattccatgtatttaac

SEQ ID NO: 895024 - DNA, 33 bp, Homo sapien
tcctttttagccttcgtattccatgtatttaac

SEQ ID NO: 895025 - DNA, 33 bp, Homo sapien
acttctaaatctttgacgattatttccaagaca

SEQ ID NO: 895026 - DNA, 33 bp, Homo sapien
acttctaaatctttgatgattatttccaagaca

SEQ ID NO: 895027 - DNA, 33 bp, Homo sapien
ctggcacatggtagaggcccagtaaacatgagc

SEQ ID NO: 895028 - DNA, 33 bp, Homo sapien
ctggcacatggtagagtcccagtaaacatgagc

SEQ ID NO: 895029 - DNA, 33 bp, Homo sapien
acactccccaaatagaactcatacaatataact

SEQ ID NO: 895030 - DNA, 33 bp, Homo sapien
acactccccaaatagagctcatacaatataact

SEQ ID NO: 895031 - DNA, 33 bp, Homo sapien
actttgtagtcttgtaacatttctctcctttcc

SEQ ID NO: 895032 - DNA, 33 bp, Homo sapien
actttgtagtcttgtaccatttctctcctttcc

SEQ ID NO: 895033 - DNA, 33 bp, Homo sapien
attaattgtataataactgtgcttgtataataa

SEQ ID NO: 895034 - DNA, 33 bp, Homo sapien
attaattgtataataattgtgcttgtataataa

SEQ ID NO: 895035 - DNA, 33 bp, Homo sapien
aataggagtctctacaataagaaatactttttg

SEQ ID NO: 895036 - DNA, 33 bp, Homo sapien
aataggagtctctacattaagaaatactttttg

SEQ ID NO: 895037 - DNA, 33 bp, Homo sapien
gtcatcagcagaaactaagcatgcaaagcattg

SEQ ID NO: 895038 - DNA, 33 bp, Homo sapien
gtcatcagcagaaacttagcatgcaaagcattg

SEQ ID NO: 895039 - DNA, 33 bp, Homo sapien
tgtgccaggcactttaaataaatattgtgtcta

SEQ ID NO: 895040 - DNA, 33 bp, Homo sapien
tgtgccaggcactttagataaatattgtgtcta

SEQ ID NO: 895041 - DNA, 33 bp, Homo sapien
gttgaacaatgaaaaggccctctagtggtgttt

SEQ ID NO: 895042 - DNA, 33 bp, Homo sapien
gttgaacaatgaaaagtccctctagtggtgttt

SEQ ID NO: 895043 - DNA, 33 bp, Homo sapien
gttcacagtggaggaacaaacctatctctagaa

SEQ ID NO: 895044 - DNA, 33 bp, Homo sapien
gttcacagtggaggaataaacctatctctagaa

SEQ ID NO: 895045 - DNA, 33 bp, Homo sapien
accaagttacaaacacaacctaagaccatgcca

SEQ ID NO: 895046 - DNA, 33 bp, Homo sapien
accaagttacaaacacgacctaagaccatgcca

SEQ ID NO: 895047 - DNA, 33 bp, Homo sapien
ccttaatattgcatagaacatttagtcatttat

SEQ ID NO: 895048 - DNA, 33 bp, Homo sapien
ccttaatattgcatagtacatttagtcatttat

SEQ ID NO: 895049 - DNA, 33 bp, Homo sapien
cttaatgaaattgcaacaagtttcctttctgtt

SEQ ID NO: 895050 - DNA, 33 bp, Homo sapien
cttaatgaaattgcaagaagtttcctttctgtt

SEQ ID NO: 895051 - DNA, 33 bp, Homo sapien
gcaatgttaagccttccatgttctctttttagc

SEQ ID NO: 895052 - DNA, 33 bp, Homo sapien
gcaatgttaagccttctatgttctctttttagc

SEQ ID NO: 895053 - DNA, 33 bp, Homo sapien
gatcatttagtgaccaagtttccattcatcttt

SEQ ID NO: 895054 - DNA, 33 bp, Homo sapien
gatcatttagtgaccaggtttccattcatcttt

SEQ ID NO: 895055 - DNA, 33 bp, Homo sapien
ttattcttaataagaaacatgcagaaagtacaa

SEQ ID NO: 895056 - DNA, 33 bp, Homo sapien
ttattcttaataagaatcatgcagaaagtacaa

SEQ ID NO: 895057 - DNA, 33 bp, Homo sapien
ttggttcccatttcacggatgatgttgttgtgt

SEQ ID NO: 895058 - DNA, 33 bp, Homo sapien
ttggttcccatttcactgatgatgttgttgtgt

SEQ ID NO: 895059 - DNA, 33 bp, Homo sapien
acaatgaaaatattccaagacttgatgaaccac

SEQ ID NO: 895060 - DNA, 33 bp, Homo sapien
acaatgaaaatattccgagacttgatgaaccac

SEQ ID NO: 895061 - DNA, 33 bp, Homo sapien
taccattttgactttcaaatggcagatgtaata

SEQ ID NO: 895062 - DNA, 33 bp, Homo sapien
taccattttgactttcgaatggcagatgtaata

SEQ ID NO: 895063 - DNA, 33 bp, Homo sapien
acaaaattggaaatggaaacaagagttgctaca

SEQ ID NO: 895064 - DNA, 33 bp, Homo sapien
acaaaattggaaatgggaacaagagttgctaca

SEQ ID NO: 895065 - DNA, 33 bp, Homo sapien
ccacttatatttaaagccctgagtaatcaataa

SEQ ID NO: 895066 - DNA, 33 bp, Homo sapien
ccacttatatttaaagtcctgagtaatcaataa

SEQ ID NO: 895067 - DNA, 33 bp, Homo sapien
ggacaattttagtcccaagtgaatcatttctac

SEQ ID NO: 895068 - DNA, 33 bp, Homo sapien
ggacaattttagtcccgagtgaatcatttctac

SEQ ID NO: 895069 - DNA, 33 bp, Homo sapien
actgagattcagatgcacataggtttgagcttc

SEQ ID NO: 895070 - DNA, 33 bp, Homo sapien
actgagattcagatgcgcataggtttgagcttc

SEQ ID NO: 895071 - DNA, 33 bp, Homo sapien
gtgaatttcaggggaaaaaaatctcagcaatat

SEQ ID NO: 895072 - DNA, 33 bp, Homo sapien
gtgaatttcaggggaagaaaatctcagcaatat

SEQ ID NO: 895073 - DNA, 33 bp, Homo sapien
actgcacccaattccaataccatctggtgagct

SEQ ID NO: 895074 - DNA, 33 bp, Homo sapien
actgcacccaattccagtaccatctggtgagct

SEQ ID NO: 895075 - DNA, 33 bp, Homo sapien
attggagttaagcacacctatataccttcatta

SEQ ID NO: 895076 - DNA, 33 bp, Homo sapien
attggagttaagcacagctatataccttcatta

SEQ ID NO: 895077 - DNA, 33 bp, Homo sapien
ccattaagtttgataacacatgactcagcaaag

SEQ ID NO: 895078 - DNA, 33 bp, Homo sapien
ccattaagtttgataatacatgactcagcaaag

SEQ ID NO: 895079 - DNA, 33 bp, Homo sapien
ctattggaaaactgcaactactttctcttcccc

SEQ ID NO: 895080 - DNA, 33 bp, Homo sapien
ctattggaaaactgcagctactttctcttcccc

SEQ ID NO: 895081 - DNA, 33 bp, Homo sapien
caatagcccaaaactacactgactgataaagct

SEQ ID NO: 895082 - DNA, 33 bp, Homo sapien
caatagcccaaaactatactgactgataaagct

SEQ ID NO: 895083 - DNA, 33 bp, Homo sapien
aaagcgatagaacgggaactcgaactcaggtta

SEQ ID NO: 895084 - DNA, 33 bp, Homo sapien
aaagcgatagaacgggcactcgaactcaggtta

SEQ ID NO: 895085 - DNA, 33 bp, Homo sapien
gtgatatcaaagcacaagaatggagaacaatgt

SEQ ID NO: 895086 - DNA, 33 bp, Homo sapien
gtgatatcaaagcacaggaatggagaacaatgt

SEQ ID NO: 895087 - DNA, 33 bp, Homo sapien
tttggaaaagtaagtactaaggatgttcagctt

SEQ ID NO: 895088 - DNA, 33 bp, Homo sapien
tttggaaaagtaagtagtaaggatgttcagctt

SEQ ID NO: 895089 - DNA, 33 bp, Homo sapien
aaatatatctagctaaataaagacctaatcaaa

SEQ ID NO: 895090 - DNA, 33 bp, Homo sapien
aaatatatctagctaagtaaagacctaatcaaa

SEQ ID NO: 895091 - DNA, 33 bp, Homo sapien
ccaacacctacaatacacatcaaggggtacgtt

SEQ ID NO: 895092 - DNA, 33 bp, Homo sapien
ccaacacctacaatacgcatcaaggggtacgtt

SEQ ID NO: 895093 - DNA, 33 bp, Homo sapien
taaatatgcgttaatcaaaaaggacaaagcaat

SEQ ID NO: 895094 - DNA, 33 bp, Homo sapien
taaatatgcgttaatcgaaaaggacaaagcaat

SEQ ID NO: 895095 - DNA, 33 bp, Homo sapien
tagtagacacttggaacgtggtgctggcttata

SEQ ID NO: 895096 - DNA, 33 bp, Homo sapien
tagtagacacttggaatgtggtgctggcttata

SEQ ID NO: 895097 - DNA, 33 bp, Homo sapien
tgcaggatgtgtgaccacgaggagttaattaga

SEQ ID NO: 895098 - DNA, 33 bp, Homo sapien
tgcaggatgtgtgaccgcgaggagttaattaga

SEQ ID NO: 895099 - DNA, 33 bp, Homo sapien
ttggttctaggaatgacagaagtgagactatat

SEQ ID NO: 895100 - DNA, 33 bp, Homo sapien
ttggttctaggaatgatagaagtgagactatat

SEQ ID NO: 895101 - DNA, 33 bp, Homo sapien
ccacgattgaactggacaaaattccactgtgct

SEQ ID NO: 895102 - DNA, 33 bp, Homo sapien
ccacgattgaactggagaaaattccactgtgct

SEQ ID NO: 895103 - DNA, 33 bp, Homo sapien
cctctcctaaatttcacgcagcatatgagtttc

SEQ ID NO: 895104 - DNA, 33 bp, Homo sapien
cctctcctaaatttcatgcagcatatgagtttc

SEQ ID NO: 895105 - DNA, 33 bp, Homo sapien
gcaatgtactaaggtaagcaagttgattctgca

SEQ ID NO: 895106 - DNA, 33 bp, Homo sapien
gcaatgtactaaggtaggcaagttgattctgca

SEQ ID NO: 895107 - DNA, 33 bp, Homo sapien
agagttacagttcttcaattttaaaaagcaaag

SEQ ID NO: 895108 - DNA, 33 bp, Homo sapien
agagttacagttcttcgattttaaaaagcaaag

SEQ ID NO: 895109 - DNA, 33 bp, Homo sapien
tacagtactctggctacagtaagatttgatgca

SEQ ID NO: 895110 - DNA, 33 bp, Homo sapien
tacagtactctggctatagtaagatttgatgca

SEQ ID NO: 895111 - DNA, 33 bp, Homo sapien
agatatgttcttgctgccaagtatgaacgacac

SEQ ID NO: 895112 - DNA, 33 bp, Homo sapien
agatatgttcttgctgtcaagtatgaacgacac

SEQ ID NO: 895113 - DNA, 33 bp, Homo sapien
tgctacagatgatgtccacattaaagaactaca

SEQ ID NO: 895114 - DNA, 33 bp, Homo sapien
tgctacagatgatgtctacattaaagaactaca

SEQ ID NO: 895115 - DNA, 33 bp, Homo sapien
taatagattacttttcacccccaaatctttgtc

SEQ ID NO: 895116 - DNA, 33 bp, Homo sapien
taatagattacttttctcccccaaatctttgtc

SEQ ID NO: 895117 - DNA, 33 bp, Homo sapien
ctctcaaaagtaatcccggagacaaagatttgg

SEQ ID NO: 895118 - DNA, 33 bp, Homo sapien
ctctcaaaagtaatcctggagacaaagatttgg

SEQ ID NO: 895119 - DNA, 33 bp, Homo sapien
cccactgcagtgcataaggttatttatctgaca

SEQ ID NO: 895120 - DNA, 33 bp, Homo sapien
cccactgcagtgcatacggttatttatctgaca

SEQ ID NO: 895121 - DNA, 33 bp, Homo sapien
taaaagagagaacagacgaaggttttctggtct

SEQ ID NO: 895122 - DNA, 33 bp, Homo sapien
taaaagagagaacagatgaaggttttctggtct

SEQ ID NO: 895123 - DNA, 33 bp, Homo sapien
agtgttaggaataaagccatcagagtgccatag

SEQ ID NO: 895124 - DNA, 33 bp, Homo sapien
agtgttaggaataaaggcatcagagtgccatag

SEQ ID NO: 895125 - DNA, 33 bp, Homo sapien
tttcagagtggtctaacgattaacgcaaggtct

SEQ ID NO: 895126 - DNA, 33 bp, Homo sapien
tttcagagtggtctaatgattaacgcaaggtct

SEQ ID NO: 895127 - DNA, 33 bp, Homo sapien
gcaattctggctaccccggaggcattagttatt

SEQ ID NO: 895128 - DNA, 33 bp, Homo sapien
gcaattctggctaccctggaggcattagttatt

SEQ ID NO: 895129 - DNA, 33 bp, Homo sapien
aatcctaaattaattcactcagaatgaccacta

SEQ ID NO: 895130 - DNA, 33 bp, Homo sapien
aatcctaaattaattcgctcagaatgaccacta

SEQ ID NO: 895131 - DNA, 33 bp, Homo sapien
gtgtacaagtcaatcacctggcccaggctggtt

SEQ ID NO: 895132 - DNA, 33 bp, Homo sapien
gtgtacaagtcaatcatctggcccaggctggtt

SEQ ID NO: 895133 - DNA, 33 bp, Homo sapien
ccactaaaactcagaaagaaccaataagagtat

SEQ ID NO: 895134 - DNA, 33 bp, Homo sapien
ccactaaaactcagaaggaaccaataagagtat

SEQ ID NO: 895135 - DNA, 33 bp, Homo sapien
actccagcctggaaaacagaggaagattctgtc

SEQ ID NO: 895136 - DNA, 33 bp, Homo sapien
actccagcctggaaaagagaggaagattctgtc

SEQ ID NO: 895137 - DNA, 33 bp, Homo sapien
tttgggaggcaaaggacgaaggatagcttgaac

SEQ ID NO: 895138 - DNA, 33 bp, Homo sapien
tttgggaggcaaaggaggaaggatagcttgaac

SEQ ID NO: 895139 - DNA, 33 bp, Homo sapien
attcttacatcttgaaacttaatggaatcagga

SEQ ID NO: 895140 - DNA, 33 bp, Homo sapien
attcttacatcttgaatcttaatggaatcagga

SEQ ID NO: 895141 - DNA, 33 bp, Homo sapien
ggtagaggtagaattacactttcagtcatggga

SEQ ID NO: 895142 - DNA, 33 bp, Homo sapien
ggtagaggtagaattatactttcagtcatggga

SEQ ID NO: 895143 - DNA, 33 bp, Homo sapien
atcctagatccactacggcctactgaaagccta

SEQ ID NO: 895144 - DNA, 33 bp, Homo sapien
atcctagatccactactgcctactgaaagccta

SEQ ID NO: 895145 - DNA, 33 bp, Homo sapien
taatccgccactggtgaatggcccatagagctc

SEQ ID NO: 895146 - DNA, 33 bp, Homo sapien
taatccgccactggtgcatggcccatagagctc

SEQ ID NO: 895147 - DNA, 33 bp, Homo sapien
tgatgacttaagtacacttgctttacaggggaa

SEQ ID NO: 895148 - DNA, 33 bp, Homo sapien
tgatgacttaagtacatttgctttacaggggaa

SEQ ID NO: 895149 - DNA, 33 bp, Homo sapien
tttgttatttcttgatgaagattttttcccctt

SEQ ID NO: 895150 - DNA, 33 bp, Homo sapien
tttgttatttcttgattaagattttttcccctt

SEQ ID NO: 895151 - DNA, 33 bp, Homo sapien
atttaattacagtgaactatttttgacatttta

SEQ ID NO: 895152 - DNA, 33 bp, Homo sapien
atttaattacagtgaagtatttttgacatttta

SEQ ID NO: 895153 - DNA, 33 bp, Homo sapien
ttgatacacagagtaaatgaaccagattcactt

SEQ ID NO: 895154 - DNA, 33 bp, Homo sapien
ttgatacacagagtaagtgaaccagattcactt

SEQ ID NO: 895155 - DNA, 33 bp, Homo sapien
acttactggttagttcactaattttggtcaatt

SEQ ID NO: 895156 - DNA, 33 bp, Homo sapien
acttactggttagttcgctaattttggtcaatt

SEQ ID NO: 895157 - DNA, 33 bp, Homo sapien
ttcataatgattccaacacaacaccttagagtt

SEQ ID NO: 895158 - DNA, 33 bp, Homo sapien
ttcataatgattccaatacaacaccttagagtt

SEQ ID NO: 895159 - DNA, 33 bp, Homo sapien
aactgaaaaatgtcataacaatctccttctttg

SEQ ID NO: 895160 - DNA, 33 bp, Homo sapien
aactgaaaaatgtcatgacaatctccttctttg

SEQ ID NO: 895161 - DNA, 33 bp, Homo sapien
gcttttctctaggataactaaaatagtatttct

SEQ ID NO: 895162 - DNA, 33 bp, Homo sapien
gcttttctctaggatagctaaaatagtatttct

SEQ ID NO: 895163 - DNA, 33 bp, Homo sapien
tatataaggggtgtataacctttgattagttaa

SEQ ID NO: 895164 - DNA, 33 bp, Homo sapien
tatataaggggtgtatgacctttgattagttaa

SEQ ID NO: 895165 - DNA, 33 bp, Homo sapien
ttcttacctgaagtctaaattcctagaagtctt

SEQ ID NO: 895166 - DNA, 33 bp, Homo sapien
ttcttacctgaagtcttaattcctagaagtctt

SEQ ID NO: 895167 - DNA, 33 bp, Homo sapien
agatctctgggaactacggcactacgatgagca

SEQ ID NO: 895168 - DNA, 33 bp, Homo sapien
agatctctgggaactatggcactacgatgagca

SEQ ID NO: 895169 - DNA, 33 bp, Homo sapien
tgttgctgccatataaccttgctgaaacttctt

SEQ ID NO: 895170 - DNA, 33 bp, Homo sapien
tgttgctgccatataatcttgctgaaacttctt

SEQ ID NO: 895171 - DNA, 33 bp, Homo sapien
gccacatgaagacagacctcggaggacagcaga

SEQ ID NO: 895172 - DNA, 33 bp, Homo sapien
gccacatgaagacagatctcggaggacagcaga

SEQ ID NO: 895173 - DNA, 33 bp, Homo sapien
aaacatgggtgtgactaaagttgaaatgccaaa

SEQ ID NO: 895174 - DNA, 33 bp, Homo sapien
aaacatgggtgtgactgaagttgaaatgccaaa

SEQ ID NO: 895175 - DNA, 33 bp, Homo sapien
catgtgtaaagcgcgtaaatgattttgtcttct

SEQ ID NO: 895176 - DNA, 33 bp, Homo sapien
catgtgtaaagcgcgtgaatgattttgtcttct

SEQ ID NO: 895177 - DNA, 33 bp, Homo sapien
gtcaattacacttcaacagaaaagctgttgaaa

SEQ ID NO: 895178 - DNA, 33 bp, Homo sapien
gtcaattacacttcaatagaaaagctgttgaaa

SEQ ID NO: 895179 - DNA, 33 bp, Homo sapien
gatgacaatcagcgaacgtctcttagattctga

SEQ ID NO: 895180 - DNA, 33 bp, Homo sapien
gatgacaatcagcgaaggtctcttagattctga

SEQ ID NO: 895181 - DNA, 33 bp, Homo sapien
tgagaagacccagagaaattataaaagatgcag

SEQ ID NO: 895182 - DNA, 33 bp, Homo sapien
tgagaagacccagagagattataaaagatgcag

SEQ ID NO: 895183 - DNA, 33 bp, Homo sapien
tgttctatcctttttacgtcaaaccaatatata

SEQ ID NO: 895184 - DNA, 33 bp, Homo sapien
tgttctatcctttttatgtcaaaccaatatata

SEQ ID NO: 895185 - DNA, 33 bp, Homo sapien
tttcaagacaatgatacaacccatgcccaggtt

SEQ ID NO: 895186 - DNA, 33 bp, Homo sapien
tttcaagacaatgatataacccatgcccaggtt

SEQ ID NO: 895187 - DNA, 33 bp, Homo sapien
ggcaccaaatttagacagattcaaagattcctc

SEQ ID NO: 895188 - DNA, 33 bp, Homo sapien
ggcaccaaatttagacggattcaaagattcctc

SEQ ID NO: 895189 - DNA, 33 bp, Homo sapien
ttctaggcaaagacagaaacagcattttagaga

SEQ ID NO: 895190 - DNA, 33 bp, Homo sapien
ttctaggcaaagacagtaacagcattttagaga

SEQ ID NO: 895191 - DNA, 33 bp, Homo sapien
gctctcctcttgactgaataattaatctaagag

SEQ ID NO: 895192 - DNA, 33 bp, Homo sapien
gctctcctcttgactggataattaatctaagag

SEQ ID NO: 895193 - DNA, 33 bp, Homo sapien
aacttattgtcctaaacctgtatatcctatggt

SEQ ID NO: 895194 - DNA, 33 bp, Homo sapien
aacttattgtcctaaagctgtatatcctatggt

SEQ ID NO: 895195 - DNA, 33 bp, Homo sapien
tgatgagaattatccaagaataggaaagagaaa

SEQ ID NO: 895196 - DNA, 33 bp, Homo sapien
tgatgagaattatccaggaataggaaagagaaa

SEQ ID NO: 895197 - DNA, 33 bp, Homo sapien
tggtttatcagttgtacgaatagtatatgaatg

SEQ ID NO: 895198 - DNA, 33 bp, Homo sapien
tggtttatcagttgtatgaatagtatatgaatg

SEQ ID NO: 895199 - DNA, 33 bp, Homo sapien
gagaccatatcttttacatccaaaattcccttt

SEQ ID NO: 895200 - DNA, 33 bp, Homo sapien
gagaccatatcttttatatccaaaattcccttt

SEQ ID NO: 895201 - DNA, 33 bp, Homo sapien
ccctttagcacgtaacaatttgatataatcagc

SEQ ID NO: 895202 - DNA, 33 bp, Homo sapien
ccctttagcacgtaacgatttgatataatcagc

SEQ ID NO: 895203 - DNA, 33 bp, Homo sapien
atgaatgtaagtgttgaatctcctgagtactta

SEQ ID NO: 895204 - DNA, 33 bp, Homo sapien
atgaatgtaagtgttgtatctcctgagtactta

SEQ ID NO: 895205 - DNA, 33 bp, Homo sapien
ctttcttgctgagatccaagaaccaaccctctc

SEQ ID NO: 895206 - DNA, 33 bp, Homo sapien
ctttcttgctgagatcgaagaaccaaccctctc

SEQ ID NO: 895207 - DNA, 33 bp, Homo sapien
ttctttctactttccccgaagactgtggcctcc

SEQ ID NO: 895208 - DNA, 33 bp, Homo sapien
ttctttctactttcccggaagactgtggcctcc

SEQ ID NO: 895209 - DNA, 33 bp, Homo sapien; identical to SEQ ID NO: 895207

SEQ ID NO: 895210 - DNA, 33 bp, Homo sapien; identical to SEQ ID NO: 895208

SEQ ID NO: 895211 - DNA, 33 bp, Homo sapien
gataggattaaaaagaggtatgaagccaggtgc

SEQ ID NO: 895212 - DNA, 33 bp, Homo sapien
gataggattaaaaagatgtatgaagccaggtgc

SEQ ID NO: 895213 - DNA, 33 bp, Homo sapien
agcttccctggttttgcagtttgcagacaaccc

SEQ ID NO: 895214 - DNA, 33 bp, Homo sapien
agcttccctggttttgtagtttgcagacaaccc

SEQ ID NO: 895215 - DNA, 33 bp, Homo sapien
ctgacttctccaatgacagtgggctggtgggtt

SEQ ID NO: 895216 - DNA, 33 bp, Homo sapien
ctgacttctccaatgatagtgggctggtgggtt

SEQ ID NO: 895217 - DNA, 33 bp, Homo sapien
aactttctgagatagaaaggtgatgtccagaat

SEQ ID NO: 895218 - DNA, 33 bp, Homo sapien
aactttctgagatagagaggtgatgtccagaat

SEQ ID NO: 895219 - DNA, 33 bp, Homo sapien
tcagaaagttgcattcccggttattctgagaac

SEQ ID NO: 895220 - DNA, 33 bp, Homo sapien
tcagaaagttgcattctcggttattctgagaac

SEQ ID NO: 895221 - DNA, 33 bp, Homo sapien
gtgtgctcttgcgttacgaatcccacgaaaata

SEQ ID NO: 895222 - DNA, 33 bp, Homo sapien
gtgtgctcttgcgttatgaatcccacgaaaata

SEQ ID NO: 895223 - DNA, 33 bp, Homo sapien
atgaattaaagcataactggaacttgaaagctt

SEQ ID NO: 895224 - DNA, 33 bp, Homo sapien
atgaattaaagcataattggaacttgaaagctt

SEQ ID NO: 895225 - DNA, 33 bp, Homo sapien
aagaacagatgtaccacagaggaaaatgcaaca

SEQ ID NO: 895226 - DNA, 33 bp, Homo sapien
aagaacagatgtaccatagaggaaaatgcaaca

SEQ ID NO: 895227 - DNA, 33 bp, Homo sapien
agccacataaatctaaaggttagtcattcctca

SEQ ID NO: 895228 - DNA, 33 bp, Homo sapien
agccacataaatctaagggttagtcattcctca

SEQ ID NO: 895229 - DNA, 33 bp, Homo sapien
atccattctctcaaacacttatttctctttgtt

SEQ ID NO: 895230 - DNA, 33 bp, Homo sapien
atccattctctcaaacgcttatttctctttgtt

SEQ ID NO: 895231 - DNA, 33 bp, Homo sapien
attattttattagagacaggcttgctctgtcac

SEQ ID NO: 895232 - DNA, 33 bp, Homo sapien
attattttattagagataggcttgctctgtcac

SEQ ID NO: 895233 - DNA, 33 bp, Homo sapien
acagtgatatagaatactagaactttttcctcc

SEQ ID NO: 895234 - DNA, 33 bp, Homo sapien
acagtgatatagaatattagaactttttcctcc

SEQ ID NO: 895235 - DNA, 33 bp, Homo sapien
tatgcagaaaaataacaggacagttctctctgg

SEQ ID NO: 895236 - DNA, 33 bp, Homo sapien
tatgcagaaaaataacgggacagttctctctgg

SEQ ID NO: 895237 - DNA, 33 bp, Homo sapien
tatggcataggatactcaaactcttccatcctt

SEQ ID NO: 895238 - DNA, 33 bp, Homo sapien
tatggcataggatactgaaactcttccatcctt

SEQ ID NO: 895239 - DNA, 33 bp, Homo sapien
taattccattttcctacgcttgttgtgattcag

SEQ ID NO: 895240 - DNA, 33 bp, Homo sapien
taattccattttcctatgcttgttgtgattcag

SEQ ID NO: 895241 - DNA, 33 bp, Homo sapien
cccacttctcctaccacgtcacagtacataagc

SEQ ID NO: 895242 - DNA, 33 bp, Homo sapien
cccacttctcctaccatgtcacagtacataagc

SEQ ID NO: 895243 - DNA, 33 bp, Homo sapien
tacagctgttattaacggcctttgaaaatttgg

SEQ ID NO: 895244 - DNA, 33 bp, Homo sapien
tacagctgttattaactgcctttgaaaatttgg

SEQ ID NO: 895245 - DNA, 33 bp, Homo sapien
caagacttgataaaaactgaccttaggctttct

SEQ ID NO: 895246 - DNA, 33 bp, Homo sapien
caagacttgataaaaagtgaccttaggctttct

SEQ ID NO: 895247 - DNA, 33 bp, Homo sapien
agactatttacaaaaccagctaagggggtggat

SEQ ID NO: 895248 - DNA, 33 bp, Homo sapien
agactatttacaaaactagctaagggggtggat

SEQ ID NO: 895249 - DNA, 33 bp, Homo sapien
aatattcagtagtacagtagggagactatagtt

SEQ ID NO: 895250 - DNA, 33 bp, Homo sapien
aatattcagtagtacattagggagactatagtt

SEQ ID NO: 895251 - DNA, 33 bp, Homo sapien
cttaagtctatttgacacagtcttttctctggg

SEQ ID NO: 895252 - DNA, 33 bp, Homo sapien
cttaagtctatttgacgcagtcttttctctggg

SEQ ID NO: 895253 - DNA, 33 bp, Homo sapien
gctggaaggaataggcaattaggggaacaatat

SEQ ID NO: 895254 - DNA, 33 bp, Homo sapien
gctggaaggaataggccattaggggaacaatat

SEQ ID NO: 895255 - DNA, 33 bp, Homo sapien
tatatatcttccaaagccatttctgtttaagac

SEQ ID NO: 895256 - DNA, 33 bp, Homo sapien
tatatatcttccaaaggcatttctgtttaagac

SEQ ID NO: 895257 - DNA, 33 bp, Homo sapien
gtactttattcgtgcacaatttttcagttccat

SEQ ID NO: 895258 - DNA, 33 bp, Homo sapien
gtactttattcgtgcataatttttcagttccat

SEQ ID NO: 895259 - DNA, 33 bp, Homo sapien
ccctatggttctaaaaataaaagcttgtcactc

SEQ ID NO: 895260 - DNA, 33 bp, Homo sapien
ccctatggttctaaaactaaaagcttgtcactc

SEQ ID NO: 895261 - DNA, 33 bp, Homo sapien
ctgattttctgaagccccgatgccccttagcct

SEQ ID NO: 895262 - DNA, 33 bp, Homo sapien
ctgattttctgaagccgcgatgccccttagcct

SEQ ID NO: 895263 - DNA, 33 bp, Homo sapien
gtgatcagataatcaagcgagttaaatcagttt

SEQ ID NO: 895264 - DNA, 33 bp, Homo sapien
gtgatcagataatcaatcgagttaaatcagttt

SEQ ID NO: 895265 - DNA, 33 bp, Homo sapien
gggggggaggctaaaacttaacaataatagctc

SEQ ID NO: 895266 - DNA, 33 bp, Homo sapien
gggggggaggctaaaagttaacaataatagctc

SEQ ID NO: 895267 - DNA, 33 bp, Homo sapien
ctcctccagtgcagtaaaaccagatactcacac

SEQ ID NO: 895268 - DNA, 33 bp, Homo sapien
ctcctccagtgcagtagaaccagatactcacac

SEQ ID NO: 895269 - DNA, 33 bp, Homo sapien
gtgtgaacctctcacagtggtccttcaggctga

SEQ ID NO: 895270 - DNA, 33 bp, Homo sapien
gtgtgaacctctcacattggtccttcaggctga

SEQ ID NO: 895271 - DNA, 33 bp, Homo sapien
agggagttattggaaacgctgaaagagtggagg

SEQ ID NO: 895272 - DNA, 33 bp, Homo sapien
agggagttattggaaaggctgaaagagtggagg

SEQ ID NO: 895273 - DNA, 33 bp, Homo sapien
cagctgttaaaacgagcaaggtagatctctgta

SEQ ID NO: 895274 - DNA, 33 bp, Homo sapien
cagctgttaaaacgagtaaggtagatctctgta

SEQ ID NO: 895275 - DNA, 33 bp, Homo sapien
ctacctattcagaaataactcagacaggcattc

SEQ ID NO: 895276 - DNA, 33 bp, Homo sapien
ctacctattcagaaattactcagacaggcattc

SEQ ID NO: 895277 - DNA, 33 bp, Homo sapien
tactgccagtgagtacagtaaaacgcagaggaa

SEQ ID NO: 895278 - DNA, 33 bp, Homo sapien
tactgccagtgagtacggtaaaacgcagaggaa

SEQ ID NO: 895279 - DNA, 33 bp, Homo sapien
actttgatggaagtacaactatgacaagtcaac

SEQ ID NO: 895280 - DNA, 33 bp, Homo sapien
actttgatggaagtactactatgacaagtcaac

SEQ ID NO: 895281 - DNA, 33 bp, Homo sapien
ttacattacatgaaacgaataagtatttccatt

SEQ ID NO: 895282 - DNA, 33 bp, Homo sapien
ttacattacatgaaactaataagtatttccatt

SEQ ID NO: 895283 - DNA, 33 bp, Homo sapien
ggtcagaggacagtgacggggaaaatggcaccg

SEQ ID NO: 895284 - DNA, 33 bp, Homo sapien
ggtcagaggacagtgatggggaaaatggcaccg

SEQ ID NO: 895285 - DNA, 33 bp, Homo sapien
gttattggctgcattacatcatcattataggaa

SEQ ID NO: 895286 - DNA, 33 bp, Homo sapien
gttattggctgcattatatcatcattataggaa

SEQ ID NO: 895287 - DNA, 33 bp, Homo sapien
tgagagtttctgtgaacacagccaatgtgacac

SEQ ID NO: 895288 - DNA, 33 bp, Homo sapien
tgagagtttctgtgaatacagccaatgtgacac

SEQ ID NO: 895289 - DNA, 33 bp, Homo sapien
gtagcacttcttctaagccacaagtaatatctt

SEQ ID NO: 895290 - DNA, 33 bp, Homo sapien
gtagcacttcttctaatccacaagtaatatctt

SEQ ID NO: 895291 - DNA, 33 bp, Homo sapien
tttccaaatttttgtacagtcgctgcacatatt

SEQ ID NO: 895292 - DNA, 33 bp, Homo sapien
tttccaaatttttgtatagtcgctgcacatatt

SEQ ID NO: 895293 - DNA, 33 bp, Homo sapien
ggagacaaaatggacacagcaaccaaacgcaat

SEQ ID NO: 895294 - DNA, 33 bp, Homo sapien
ggagacaaaatggacagagcaaccaaacgcaat

SEQ ID NO: 895295 - DNA, 33 bp, Homo sapien
gggaagcttatcactccgacctctgcttactca

SEQ ID NO: 895296 - DNA, 33 bp, Homo sapien
gggaagcttatcactctgacctctgcttactca

SEQ ID NO: 895297 - DNA, 33 bp, Homo sapien
tttactaagcaaccaaggtctgaaaacaatgtc

SEQ ID NO: 895298 - DNA, 33 bp, Homo sapien
tttactaagcaaccaatgtctgaaaacaatgtc

SEQ ID NO: 895299 - DNA, 33 bp, Homo sapien
tactaatacttaaaagaagcaatacaccacaat

SEQ ID NO: 895300 - DNA, 33 bp, Homo sapien
tactaatacttaaaaggagcaatacaccacaat

SEQ ID NO: 895301 - DNA, 33 bp, Homo sapien
ccaaaacgttaatagcaacaaaagtgagaaacc

SEQ ID NO: 895302 - DNA, 33 bp, Homo sapien
ccaaaacgttaatagcgacaaaagtgagaaacc

SEQ ID NO: 895303 - DNA, 33 bp, Homo sapien
aaatctgagcagagaactcaagcacaggagcca

SEQ ID NO: 895304 - DNA, 33 bp, Homo sapien
aaatctgagcagagaagtcaagcacaggagcca

SEQ ID NO: 895305 - DNA, 33 bp, Homo sapien
ttctagccttttagtacggcaaatcatatttta

SEQ ID NO: 895306 - DNA, 33 bp, Homo sapien
ttctagccttttagtatggcaaatcatatttta

SEQ ID NO: 895307 - DNA, 33 bp, Homo sapien
agaaaaaagtgtcttaccttgatgttgtagcct

SEQ ID NO: 895308 - DNA, 33 bp, Homo sapien
agaaaaaagtgtcttatcttgatgttgtagcct

SEQ ID NO: 895309 - DNA, 33 bp, Homo sapien
cattttagggcactaccgacaaaacaaaattca

SEQ ID NO: 895310 - DNA, 33 bp, Homo sapien
cattttagggcactactgacaaaacaaaattca

SEQ ID NO: 895311 - DNA, 33 bp, Homo sapien
cggaaatggaaggctgcagaaattgagttatct

SEQ ID NO: 895312 - DNA, 33 bp, Homo sapien
cggaaatggaaggctggagaaattgagttatct

SEQ ID NO: 895313 - DNA, 33 bp, Homo sapien
tgtttggtgatgttccgaatggtggcaccttct

SEQ ID NO: 895314 - DNA, 33 bp, Homo sapien
tgtttggtgatgttcctaatggtggcaccttct

SEQ ID NO: 895315 - DNA, 33 bp, Homo sapien
gcccagttgcatggaacagactgtgtgccacca

SEQ ID NO: 895316 - DNA, 33 bp, Homo sapien
gcccagttgcatggaatagactgtgtgccacca

SEQ ID NO: 895317 - DNA, 33 bp, Homo sapien
acttcttttacagctcgaatggttcttacaaaa

SEQ ID NO: 895318 - DNA, 33 bp, Homo sapien
acttcttttacagctctaatggttcttacaaaa

SEQ ID NO: 895319 - DNA, 33 bp, Homo sapien
acagctacaggaaagaaggtaaaaacatagaca

SEQ ID NO: 895320 - DNA, 33 bp, Homo sapien
acagctacaggaaagatggtaaaaacatagaca

SEQ ID NO: 895321 - DNA, 33 bp, Homo sapien
cagtggcacgaccatacatcactgtagcctcaa

SEQ ID NO: 895322 - DNA, 33 bp, Homo sapien
cagtggcacgaccatagatcactgtagcctcaa

SEQ ID NO: 895323 - DNA, 33 bp, Homo sapien
tctgcctttgtagtcacgttgtgttctccctgt

SEQ ID NO: 895324 - DNA, 33 bp, Homo sapien
tctgcctttgtagtcatgttgtgttctccctgt

SEQ ID NO: 895325 - DNA, 33 bp, Homo sapien
atagggaagattgaacagatctccaaggagaga

SEQ ID NO: 895326 - DNA, 33 bp, Homo sapien
atagggaagattgaacggatctccaaggagaga

SEQ ID NO: 895327 - DNA, 33 bp, Homo sapien
gccagactttacatcactagaggtaatctggtg

SEQ ID NO: 895328 - DNA, 33 bp, Homo sapien
gccagactttacatcattagaggtaatctggtg

SEQ ID NO: 895329 - DNA, 33 bp, Homo sapien
tgagctgagcgagaagaagtaatgggagtcaga

SEQ ID NO: 895330 - DNA, 33 bp, Homo sapien
tgagctgagcgagaagtagtaatgggagtcaga

SEQ ID NO: 895331 - DNA, 33 bp, Homo sapien
ctcctagcagaaaacacaatgcaaatgcaatgc

SEQ ID NO: 895332 - DNA, 33 bp, Homo sapien
ctcctagcagaaaacataatgcaaatgcaatgc

SEQ ID NO: 895333 - DNA, 33 bp, Homo sapien
gtagatctgattgatacggtttacttttggttg

SEQ ID NO: 895334 - DNA, 33 bp, Homo sapien
gtagatctgattgatatggtttacttttggttg

SEQ ID NO: 895335 - DNA, 33 bp, Homo sapien
tttaccccaattatgacggaaagaagaaatgtg

SEQ ID NO: 895336 - DNA, 33 bp, Homo sapien
tttaccccaattatgatggaaagaagaaatgtg

SEQ ID NO: 895337 - DNA, 33 bp, Homo sapien
gttctatcagtaaaaaaaacctccaatgttctc

SEQ ID NO: 895338 - DNA, 33 bp, Homo sapien
gttctatcagtaaaaacaacctccaatgttctc

SEQ ID NO: 895339 - DNA, 33 bp, Homo sapien
tgtactagactgcaaactaaagaataagattgg

SEQ ID NO: 895340 - DNA, 33 bp, Homo sapien
tgtactagactgcaaagtaaagaataagattgg

SEQ ID NO: 895341 - DNA, 33 bp, Homo sapien
ttctttttatagtatgacacaggctatattaaa

SEQ ID NO: 895342 - DNA, 33 bp, Homo sapien
ttctttttatagtatgtcacaggctatattaaa

SEQ ID NO: 895343 - DNA, 33 bp, Homo sapien
actcaagaagccagaacaaatcctgaaaaggag

SEQ ID NO: 895344 - DNA, 33 bp, Homo sapien
actcaagaagccagaagaaatcctgaaaaggag

SEQ ID NO: 895345 - DNA, 33 bp, Homo sapien
aaagtggaaaagttgacaataaattaagcagag

SEQ ID NO: 895346 - DNA, 33 bp, Homo sapien
aaagtggaaaagttgagaataaattaagcagag

SEQ ID NO: 895347 - DNA, 33 bp, Homo sapien
tatactatgaaaatcaacaaatctacaaattag

SEQ ID NO: 895348 - DNA, 33 bp, Homo sapien
tatactatgaaaatcagcaaatctacaaattag

SEQ ID NO: 895349 - DNA, 33 bp, Homo sapien
tcagcttactcagagaaccctgaatgagtagat

SEQ ID NO: 895350 - DNA, 33 bp, Homo sapien
tcagcttactcagagagccctgaatgagtagat

SEQ ID NO: 895351 - DNA, 33 bp, Homo sapien
cattaatcatgtcaaaagaaagaaagtaaagtt

SEQ ID NO: 895352 - DNA, 33 bp, Homo sapien
cattaatcatgtcaaaggaaagaaagtaaagtt

SEQ ID NO: 895353 - DNA, 33 bp, Homo sapien
ataatgctattccatccacacactttccaccct

SEQ ID NO: 895354 - DNA, 33 bp, Homo sapien
ataatgctattccatctacacactttccaccct

SEQ ID NO: 895355 - DNA, 33 bp, Homo sapien
tgcctgccgcgggggcacattataggctggacg

SEQ ID NO: 895356 - DNA, 33 bp, Homo sapien
tgcctgccgcgggggcgcattataggctggacg

SEQ ID NO: 895357 - DNA, 33 bp, Homo sapien
acaataaaaaatgccacagcaacaaaagaattt

SEQ ID NO: 895358 - DNA, 33 bp, Homo sapien
acaataaaaaatgccagagcaacaaaagaattt

SEQ ID NO: 895359 - DNA, 33 bp, Homo sapien
ttttcattaatgctcaaatcatttcagatttta

SEQ ID NO: 895360 - DNA, 33 bp, Homo sapien
ttttcattaatgctcatatcatttcagatttta

SEQ ID NO: 895361 - DNA, 33 bp, Homo sapien
ttgttcattcagaataaactttgttcctttcta

SEQ ID NO: 895362 - DNA, 33 bp, Homo sapien
ttgttcattcagaatagactttgttcctttcta

SEQ ID NO: 895363 - DNA, 33 bp, Homo sapien
catagagcctggaaaactaagtactggattggc

SEQ ID NO: 895364 - DNA, 33 bp, Homo sapien
catagagcctggaaaagtaagtactggattggc

SEQ ID NO: 895365 - DNA, 33 bp, Homo sapien
ataatattagcaatagcacttacatcagctaca

SEQ ID NO: 895366 - DNA, 33 bp, Homo sapien
ataatattagcaatagtacttacatcagctaca

SEQ ID NO: 895367 - DNA, 33 bp, Homo sapien
ggaggccagaatataccattaacaaaatcttta

SEQ ID NO: 895368 - DNA, 33 bp, Homo sapien
ggaggccagaatatactattaacaaaatcttta

SEQ ID NO: 895369 - DNA, 33 bp, Homo sapien
cctctattgagtcccccagcttagggaacccac

SEQ ID NO: 895370 - DNA, 33 bp, Homo sapien
cctctattgagtccccgagcttagggaacccac

SEQ ID NO: 895371 - DNA, 33 bp, Homo sapien
gcctcatgcttgctcccactataagtacagact

SEQ ID NO: 895372 - DNA, 33 bp, Homo sapien
gcctcatgcttgctccgactataagtacagact

SEQ ID NO: 895373 - DNA, 33 bp, Homo sapien
ccttcatttccaaagcagactagcaacctgaac

SEQ ID NO: 895374 - DNA, 33 bp, Homo sapien
ccttcatttccaaagccgactagcaacctgaac

SEQ ID NO: 895375 - DNA, 33 bp, Homo sapien
atgagagtggtgacatcactatagactctacag

SEQ ID NO: 895376 - DNA, 33 bp, Homo sapien
atgagagtggtgacattactatagactctacag

SEQ ID NO: 895377 - DNA, 33 bp, Homo sapien
caattactttgacaacgcagatgaaatggacaa

SEQ ID NO: 895378 - DNA, 33 bp, Homo sapien
caattactttgacaactcagatgaaatggacaa

SEQ ID NO: 895379 - DNA, 33 bp, Homo sapien
caggtggagtcaaatacgtcagattccttcagc

SEQ ID NO: 895380 - DNA, 33 bp, Homo sapien
caggtggagtcaaatatgtcagattccttcagc

SEQ ID NO: 895381 - DNA, 33 bp, Homo sapien
tttctcagggtcagttaaaattcagttcctgtt

SEQ ID NO: 895382 - DNA, 33 bp, Homo sapien
tttctcagggtcagtttaaattcagttcctgtt

SEQ ID NO: 895383 - DNA, 33 bp, Homo sapien
ctctgccaccatgtagaagggtcataggctatg

SEQ ID NO: 895384 - DNA, 33 bp, Homo sapien
ctctgccaccatgtaggagggtcataggctatg

SEQ ID NO: 895385 - DNA, 33 bp, Homo sapien
gggctccagctaggaactgattttcttcttcaa

SEQ ID NO: 895386 - DNA, 33 bp, Homo sapien
gggctccagctaggaattgattttcttcttcaa

SEQ ID NO: 895387 - DNA, 33 bp, Homo sapien
agcctcaacctccagggcacaagagattctcca

SEQ ID NO: 895388 - DNA, 33 bp, Homo sapien
agcctcaacctccaggtcacaagagattctcca

SEQ ID NO: 895389 - DNA, 33 bp, Homo sapien
ctgtactcataggatactaagtgctaaagctcc

SEQ ID NO: 895390 - DNA, 33 bp, Homo sapien
ctgtactcataggatagtaagtgctaaagctcc

SEQ ID NO: 895391 - DNA, 33 bp, Homo sapien
atacacttaaacaccaagataaaccctccaatt

SEQ ID NO: 895392 - DNA, 33 bp, Homo sapien
atacacttaaacaccaggataaaccctccaatt

SEQ ID NO: 895393 - DNA, 33 bp, Homo sapien
gtgaaaatttcaaaaaacagaacatcttttctc

SEQ ID NO: 895394 - DNA, 33 bp, Homo sapien
gtgaaaatttcaaaaaccagaacatcttttctc

SEQ ID NO: 895395 - DNA, 33 bp, Homo sapien; identical to SEQ ID NO: 895393

SEQ ID NO: 895396 - DNA, 33 bp, Homo sapien; identical to SEQ ID NO: 895394

SEQ ID NO: 895397 - DNA, 33 bp, Homo sapien
tatgacactgaattaacagccattagaggtgaa

SEQ ID NO: 895398 - DNA, 33 bp, Homo sapien
tatgacactgaattaatagccattagaggtgaa

SEQ ID NO: 895399 - DNA, 33 bp, Homo sapien
tccattcatctggacagctaacttcacagcagt

SEQ ID NO: 895400 - DNA, 33 bp, Homo sapien
tccattcatctggacatctaacttcacagcagt

SEQ ID NO: 895401 - DNA, 33 bp, Homo sapien
caaactaaaaatagccaaagaattcatagctaa

SEQ ID NO: 895402 - DNA, 33 bp, Homo sapien
caaactaaaaatagccgaagaattcatagctaa

SEQ ID NO: 895403 - DNA, 33 bp, Homo sapien
gaagcagagatttttacagagactgcactggat

SEQ ID NO: 895404 - DNA, 33 bp, Homo sapien
gaagcagagatttttatagagactgcactggat

SEQ ID NO: 895405 - DNA, 33 bp, Homo sapien
catatatgtaaatagaaacagaaactctcaatc

SEQ ID NO: 895406 - DNA, 33 bp, Homo sapien
catatatgtaaatagacacagaaactctcaatc

SEQ ID NO: 895407 - DNA, 33 bp, Homo sapien
ataacatctttataggacagtggtaaggtccca

SEQ ID NO: 895408 - DNA, 33 bp, Homo sapien
ataacatctttataggtcagtggtaaggtccca

SEQ ID NO: 895409 - DNA, 33 bp, Homo sapien
tattttactcaagctacaactgacaatttcaca

SEQ ID NO: 895410 - DNA, 33 bp, Homo sapien
tattttactcaagctagaactgacaatttcaca

SEQ ID NO: 895411 - DNA, 33 bp, Homo sapien
tagaaaatgtgacaaccgaatgcctctgagaat

SEQ ID NO: 895412 - DNA, 33 bp, Homo sapien
tagaaaatgtgacaactgaatgcctctgagaat

SEQ ID NO: 895413 - DNA, 33 bp, Homo sapien
tggccagtaatcaaaaaagttcatgatttacta

SEQ ID NO: 895414 - DNA, 33 bp, Homo sapien
tggccagtaatcaaaacagttcatgatttacta

SEQ ID NO: 895415 - DNA, 33 bp, Homo sapien
gcacatttttggatgccattattagtattgttt

SEQ ID NO: 895416 - DNA, 33 bp, Homo sapien
gcacatttttggatgctattattagtattgttt

SEQ ID NO: 895417 - DNA, 33 bp, Homo sapien
atggtaagagataatcactaaggttcatttttt

SEQ ID NO: 895418 - DNA, 33 bp, Homo sapien
atggtaagagataatcgctaaggttcatttttt

SEQ ID NO: 895419 - DNA, 33 bp, Homo sapien
atcagtcttttctacagtctggcttttaggagg

SEQ ID NO: 895420 - DNA, 33 bp, Homo sapien
atcagtcttttctacattctggcttttaggagg

SEQ ID NO: 895421 - DNA, 33 bp, Homo sapien
agtggcagagctggaacataaactgaggtcaaa

SEQ ID NO: 895422 - DNA, 33 bp, Homo sapien
agtggcagagctggaatataaactgaggtcaaa

SEQ ID NO: 895423 - DNA, 33 bp, Homo sapien
tccactctctgaaagacgccagtgtgtgttgtt

SEQ ID NO: 895424 - DNA, 33 bp, Homo sapien
tccactctctgaaagatgccagtgtgtgttgtt

SEQ ID NO: 895425 - DNA, 33 bp, Homo sapien
tttgttgaacatcttccctgtgaaaggctcacc

SEQ ID NO: 895426 - DNA, 33 bp, Homo sapien
tttgttgaacatcttctctgtgaaaggctcacc

SEQ ID NO: 895427 - DNA, 33 bp, Homo sapien
ctccttccatcctcagccaggctacaagtttct

SEQ ID NO: 895428 - DNA, 33 bp, Homo sapien
ctccttccatcctcagtcaggctacaagtttct

SEQ ID NO: 895429 - DNA, 33 bp, Homo sapien
tagctgttagatcaaacatcaccttcttcaaaa

SEQ ID NO: 895430 - DNA, 33 bp, Homo sapien
tagctgttagatcaaatatcaccttcttcaaaa

SEQ ID NO: 895431 - DNA, 33 bp, Homo sapien
ttctgggacatgagcccgaattgaggattgtag

SEQ ID NO: 895432 - DNA, 33 bp, Homo sapien
ttctgggacatgagccggaattgaggattgtag

SEQ ID NO: 895433 - DNA, 33 bp, Homo sapien
cctgtgacatccgatccaggttgtaagttatgt

SEQ ID NO: 895434 - DNA, 33 bp, Homo sapien
cctgtgacatccgatcgaggttgtaagttatgt

SEQ ID NO: 895435 - DNA, 33 bp, Homo sapien
attactgtactgaataagtagggagctgtacca

SEQ ID NO: 895436 - DNA, 33 bp, Homo sapien
attactgtactgaatatgtagggagctgtacca

SEQ ID NO: 895437 - DNA, 33 bp, Homo sapien
cttgtccttactggtaaccatgaaaagctagag

SEQ ID NO: 895438 - DNA, 33 bp, Homo sapien
cttgtccttactggtagccatgaaaagctagag

SEQ ID NO: 895439 - DNA, 33 bp, Homo sapien
attctaaaagtcaagcaaagttctttttgcaga

SEQ ID NO: 895440 - DNA, 33 bp, Homo sapien
attctaaaagtcaagcgaagttctttttgcaga

SEQ ID NO: 895441 - DNA, 33 bp, Homo sapien
gcagtcgtccttgtcgaaggagtttcaggaaag

SEQ ID NO: 895442 - DNA, 33 bp, Homo sapien
gcagtcgtccttgtcgtaggagtttcaggaaag

SEQ ID NO: 895443 - DNA, 33 bp, Homo sapien
ggccagaggtggcccactcagaagggatggccg

SEQ ID NO: 895444 - DNA, 33 bp, Homo sapien
ggccagaggtggcccattcagaagggatggccg

SEQ ID NO: 895445 - DNA, 33 bp, Homo sapien
gcagggttctataaaaataagaaagagagcatg

SEQ ID NO: 895446 - DNA, 33 bp, Homo sapien
gcagggttctataaaactaagaaagagagcatg

SEQ ID NO: 895447 - DNA, 33 bp, Homo sapien
gaggtggcatttactgaaacagggaaaacacaa

SEQ ID NO: 895448 - DNA, 33 bp, Homo sapien
gaggtggcatttactggaacagggaaaacacaa

SEQ ID NO: 895449 - DNA, 33 bp, Homo sapien
aggaggattgaccagacgtattaatggatcaga

SEQ ID NO: 895450 - DNA, 33 bp, Homo sapien
aggaggattgaccagatgtattaatggatcaga

SEQ ID NO: 895451 - DNA, 33 bp, Homo sapien
tgctttcctaaattaacgaggcacagggattat

SEQ ID NO: 895452 - DNA, 33 bp, Homo sapien
tgctttcctaaattaatgaggcacagggattat

SEQ ID NO: 895453 - DNA, 33 bp, Homo sapien
ctgtggttgcattttgcatttgttacaaaccct

SEQ ID NO: 895454 - DNA, 33 bp, Homo sapien
ctgtggttgcattttggatttgttacaaaccct

SEQ ID NO: 895455 - DNA, 33 bp, Homo sapien
ttctctcttctcctatcacctgtgactccatca

SEQ ID NO: 895456 - DNA, 33 bp, Homo sapien
ttctctcttctcctattacctgtgactccatca

SEQ ID NO: 895457 - DNA, 33 bp, Homo sapien
catgaggttttgtctactaagggctggggagag

SEQ ID NO: 895458 - DNA, 33 bp, Homo sapien
catgaggttttgtctattaagggctggggagag

SEQ ID NO: 895459 - DNA, 33 bp, Homo sapien
acaatttttctctgtcaatttatgtaacatgag

SEQ ID NO: 895460 - DNA, 33 bp, Homo sapien
acaatttttctctgtctatttatgtaacatgag

SEQ ID NO: 895461 - DNA, 33 bp, Homo sapien
ggtggagaagaactgacgggaaataaatgagtg

SEQ ID NO: 895462 - DNA, 33 bp, Homo sapien
ggtggagaagaactgatgggaaataaatgagtg

SEQ ID NO: 895463 - DNA, 33 bp, Homo sapien
ctgtcttcacatggtaaagatgctaacaaggtc

SEQ ID NO: 895464 - DNA, 33 bp, Homo sapien
ctgtcttcacatggtagagatgctaacaaggtc

SEQ ID NO: 895465 - DNA, 33 bp, Homo sapien
tcagcacatcgcagtcacctggttttgctttca

SEQ ID NO: 895466 - DNA, 33 bp, Homo sapien
tcagcacatcgcagtcgcctggttttgctttca

SEQ ID NO: 895467 - DNA, 33 bp, Homo sapien
aaacggacttctgagacggacaggggcacacag

SEQ ID NO: 895468 - DNA, 33 bp, Homo sapien
aaacggacttctgagatggacaggggcacacag

SEQ ID NO: 895469 - DNA, 33 bp, Homo sapien
attactctttcagatgacagtatgcttttctct

SEQ ID NO: 895470 - DNA, 33 bp, Homo sapien
attactctttcagatggcagtatgcttttctct

SEQ ID NO: 895471 - DNA, 33 bp, Homo sapien
ttgttctaagtaaccaatcacgcaccaccaccc

SEQ ID NO: 895472 - DNA, 33 bp, Homo sapien
ttgttctaagtaaccagtcacgcaccaccaccc

SEQ ID NO: 895473 - DNA, 33 bp, Homo sapien
attgtgacatcaaaaactcaaaaacaggatggg

SEQ ID NO: 895474 - DNA, 33 bp, Homo sapien
attgtgacatcaaaaattcaaaaacaggatggg

SEQ ID NO: 895475 - DNA, 33 bp, Homo sapien
atcaccaccagacctaggttacaagaaatgtta

SEQ ID NO: 895476 - DNA, 33 bp, Homo sapien
atcaccaccagacctatgttacaagaaatgtta

SEQ ID NO: 895477 - DNA, 33 bp, Homo sapien
ttccagtcttcacagagtaactttgtctggaaa

SEQ ID NO: 895478 - DNA, 33 bp, Homo sapien
ttccagtcttcacagattaactttgtctggaaa

SEQ ID NO: 895479 - DNA, 33 bp, Homo sapien
attgcttcaggtagtacggtcattttcatgata

SEQ ID NO: 895480 - DNA, 33 bp, Homo sapien
attgcttcaggtagtatggtcattttcatgata

SEQ ID NO: 895481 - DNA, 33 bp, Homo sapien
atggaataaaaaagagcccaaatagcgaaagca

SEQ ID NO: 895482 - DNA, 33 bp, Homo sapien
atggaataaaaaagaggccaaatagcgaaagca

SEQ ID NO: 895483 - DNA, 33 bp, Homo sapien
acccagaaataaagcccgatacttataaccaac

SEQ ID NO: 895484 - DNA, 33 bp, Homo sapien
acccagaaataaagcctgatacttataaccaac

SEQ ID NO: 895485 - DNA, 33 bp, Homo sapien
catactgtgacactaaataaatacacagaaata

SEQ ID NO: 895486 - DNA, 33 bp, Homo sapien
catactgtgacactaagtaaatacacagaaata

SEQ ID NO: 895487 - DNA, 33 bp, Homo sapien
tttcaaaaacattcctaaacctttatctagcta

SEQ ID NO: 895488 - DNA, 33 bp, Homo sapien
tttcaaaaacattccttaacctttatctagcta

SEQ ID NO: 895489 - DNA, 33 bp, Homo sapien
ttgagggctgagaagcaaatgggatgaaaggaa

SEQ ID NO: 895490 - DNA, 33 bp, Homo sapien
ttgagggctgagaagcgaatgggatgaaaggaa

SEQ ID NO: 895491 - DNA, 33 bp, Homo sapien
ttctgctaattttcacagtagacatccttgcaa

SEQ ID NO: 895492 - DNA, 33 bp, Homo sapien
ttctgctaattttcacggtagacatccttgcaa

SEQ ID NO: 895493 - DNA, 33 bp, Homo sapien
tacccatctcatccttaaagacatcattttata

SEQ ID NO: 895494 - DNA, 33 bp, Homo sapien
tacccatctcatccttgaagacatcattttata

SEQ ID NO: 895495 - DNA, 33 bp, Homo sapien
agaatctaaaatgacaccaaaggggaaacaaaa

SEQ ID NO: 895496 - DNA, 33 bp, Homo sapien
agaatctaaaatgacagcaaaggggaaacaaaa

SEQ ID NO: 895497 - DNA, 33 bp, Homo sapien
tggctagaacaatggcactgggaatgggtctcc

SEQ ID NO: 895498 - DNA, 33 bp, Homo sapien
tggctagaacaatggctctgggaatgggtctcc

SEQ ID NO: 895499 - DNA, 33 bp, Homo sapien
cagaaattgaagttaaactggatttgtttgcaa

SEQ ID NO: 895500 - DNA, 33 bp, Homo sapien
cagaaattgaagttaagctggatttgtttgcaa

SEQ ID NO: 895501 - DNA, 33 bp, Homo sapien
gtcttatttgaatggaatatgtttggtgttctc

SEQ ID NO: 895502 - DNA, 33 bp, Homo sapien
gtcttatttgaatggagtatgtttggtgttctc

SEQ ID NO: 895503 - DNA, 33 bp, Homo sapien
tgctccattgaacttacgtctgcttttatacta

SEQ ID NO: 895504 - DNA, 33 bp, Homo sapien
tgctccattgaacttatgtctgcttttatacta

SEQ ID NO: 895505 - DNA, 33 bp, Homo sapien
aggcaaatctgacgtactacagcataaatgaac

SEQ ID NO: 895506 - DNA, 33 bp, Homo sapien
aggcaaatctgacgtagtacagcataaatgaac

SEQ ID NO: 895507 - DNA, 33 bp, Homo sapien
tatttagagcaatcaaaattgcagagacaggga

SEQ ID NO: 895508 - DNA, 33 bp, Homo sapien
tatttagagcaatcaacattgcagagacaggga

SEQ ID NO: 895509 - DNA, 33 bp, Homo sapien
tgaagtttgtcccattcaagagaagcaaagaaa

SEQ ID NO: 895510 - DNA, 33 bp, Homo sapien
tgaagtttgtcccatttaagagaagcaaagaaa

SEQ ID NO: 895511 - DNA, 33 bp, Homo sapien
gcattaagtgcagaaaaatcaactttcaaccgt

SEQ ID NO: 895512 - DNA, 33 bp, Homo sapien
gcattaagtgcagaaagatcaactttcaaccgt

SEQ ID NO: 895513 - DNA, 33 bp, Homo sapien
tatttatggagtggagactagcataagcaaagt

SEQ ID NO: 895514 - DNA, 33 bp, Homo sapien
tatttatggagtggagtctagcataagcaaagt

SEQ ID NO: 895515 - DNA, 33 bp, Homo sapien
gtcactcaactaataaatgaggggttaaatctg

SEQ ID NO: 895516 - DNA, 33 bp, Homo sapien
gtcactcaactaataagtgaggggttaaatctg

SEQ ID NO: 895517 - DNA, 33 bp, Homo sapien
ctgaccagattttaaaagcaaaatatactaatc

SEQ ID NO: 895518 - DNA, 33 bp, Homo sapien
ctgaccagattttaaaggcaaaatatactaatc

SEQ ID NO: 895519 - DNA, 33 bp, Homo sapien
attcatgttcaatcataatcaaaatcccttctt

SEQ ID NO: 895520 - DNA, 33 bp, Homo sapien
attcatgttcaatcattatcaaaatcccttctt

SEQ ID NO: 895521 - DNA, 33 bp, Homo sapien
cactaaaagagcagaggcccagaccaattacat

SEQ ID NO: 895522 - DNA, 33 bp, Homo sapien
cactaaaagagcagagtcccagaccaattacat

SEQ ID NO: 895523 - DNA, 33 bp, Homo sapien
tttgtgaagatgaagacgggacaaggagccagc

SEQ ID NO: 895524 - DNA, 33 bp, Homo sapien
tttgtgaagatgaagatgggacaaggagccagc

SEQ ID NO: 895525 - DNA, 33 bp, Homo sapien
ttcagtgattcactcaatatgttcagtttatcc

SEQ ID NO: 895526 - DNA, 33 bp, Homo sapien
ttcagtgattcactcagtatgttcagtttatcc

SEQ ID NO: 895527 - DNA, 33 bp, Homo sapien
ctagatatcctgtagtaacatcaaaatcaaaat

SEQ ID NO: 895528 - DNA, 33 bp, Homo sapien
ctagatatcctgtagtcacatcaaaatcaaaat

SEQ ID NO: 895529 - DNA, 33 bp, Homo sapien
tgttttgtctttcttaggtgtacagatgggtgc

SEQ ID NO: 895530 - DNA, 33 bp, Homo sapien
tgttttgtctttcttatgtgtacagatgggtgc

SEQ ID NO: 895531 - DNA, 33 bp, Homo sapien
tactaaaaattgtatacgactggatgagaatag

SEQ ID NO: 895532 - DNA, 33 bp, Homo sapien
tactaaaaattgtatatgactggatgagaatag

SEQ ID NO: 895533 - DNA, 33 bp, Homo sapien
ccacgactctaaatgacctgcttttactcttca

SEQ ID NO: 895534 - DNA, 33 bp, Homo sapien
ccacgactctaaatgatctgcttttactcttca

SEQ ID NO: 895535 - DNA, 33 bp, Homo sapien
gggtatactttccaccactctcttttctttgct

SEQ ID NO: 895536 - DNA, 33 bp, Homo sapien
gggtatactttccaccgctctcttttctttgct

SEQ ID NO: 895537 - DNA, 33 bp, Homo sapien
ccacttaccgtatttacactatgtaaccaggca

SEQ ID NO: 895538 - DNA, 33 bp, Homo sapien
ccacttaccgtatttatactatgtaaccaggca

SEQ ID NO: 895539 - DNA, 33 bp, Homo sapien
ggagacatttgtggtacgtaagagaactgatgg

SEQ ID NO: 895540 - DNA, 33 bp, Homo sapien
ggagacatttgtggtatgtaagagaactgatgg

SEQ ID NO: 895541 - DNA, 33 bp, Homo sapien
gcatcttttctcttaactgctctgaggtgagtt

SEQ ID NO: 895542 - DNA, 33 bp, Homo sapien
gcatcttttctcttaattgctctgaggtgagtt

SEQ ID NO: 895543 - DNA, 33 bp, Homo sapien
acctatctagaatggaagtttcttgcaggaaca

SEQ ID NO: 895544 - DNA, 33 bp, Homo sapien
acctatctagaatggatgtttcttgcaggaaca

SEQ ID NO: 895545 - DNA, 33 bp, Homo sapien
caacaccatcatctaacaacgtatacagtatct

SEQ ID NO: 895546 - DNA, 33 bp, Homo sapien
caacaccatcatctaagaacgtatacagtatct

SEQ ID NO: 895547 - DNA, 33 bp, Homo sapien
aaagagttctaagaagaagcatgtgggtagaca

SEQ ID NO: 895548 - DNA, 33 bp, Homo sapien
aaagagttctaagaagcagcatgtgggtagaca

SEQ ID NO: 895549 - DNA, 33 bp, Homo sapien
tcattcccttttgtagcgcaaatcagtagttgg

SEQ ID NO: 895550 - DNA, 33 bp, Homo sapien
tcattcccttttgtagtgcaaatcagtagttgg

SEQ ID NO: 895551 - DNA, 33 bp, Homo sapien
aaagcatgctttttccaccaatctgtgcaaccc

SEQ ID NO: 895552 - DNA, 33 bp, Homo sapien
aaagcatgctttttccgccaatctgtgcaaccc

SEQ ID NO: 895553 - DNA, 33 bp, Homo sapien
cactatggattctctacgcttggactgatttaa

SEQ ID NO: 895554 - DNA, 33 bp, Homo sapien
cactatggattctctatgcttggactgatttaa

SEQ ID NO: 895555 - DNA, 33 bp, Homo sapien
tgacttgttgtgtatccctggtcttcctgttac

SEQ ID NO: 895556 - DNA, 33 bp, Homo sapien
tgacttgttgtgtatctctggtcttcctgttac

SEQ ID NO: 895557 - DNA, 33 bp, Homo sapien
agtgaagcacttgtgaaattcaaggtggaaatg

SEQ ID NO: 895558 - DNA, 33 bp, Homo sapien
agtgaagcacttgtgacattcaaggtggaaatg

SEQ ID NO: 895559 - DNA, 33 bp, Homo sapien
ataagttggcacagaaagccttgagggtttcat

SEQ ID NO: 895560 - DNA, 33 bp, Homo sapien
ataagttggcacagaatgccttgagggtttcat

SEQ ID NO: 895561 - DNA, 33 bp, Homo sapien
ctctaaataaaaggataacatggacgatgaggg

SEQ ID NO: 895562 - DNA, 33 bp, Homo sapien
ctctaaataaaaggattacatggacgatgaggg

SEQ ID NO: 895563 - DNA, 33 bp, Homo sapien
ctataaacattgatcaaagttagcaatacctag

SEQ ID NO: 895564 - DNA, 33 bp, Homo sapien
ctataaacattgatcacagttagcaatacctag

SEQ ID NO: 895565 - DNA, 33 bp, Homo sapien
tgcaaacagaagtttacatttctagctgcccac

SEQ ID NO: 895566 - DNA, 33 bp, Homo sapien
tgcaaacagaagtttagatttctagctgcccac

SEQ ID NO: 895567 - DNA, 33 bp, Homo sapien
ccattatatgggccaaacaaggcaagcatctgg

SEQ ID NO: 895568 - DNA, 33 bp, Homo sapien
ccattatatgggccaagcaaggcaagcatctgg

SEQ ID NO: 895569 - DNA, 33 bp, Homo sapien
cttatcagattaatgcaaccctgatagatcccc

SEQ ID NO: 895570 - DNA, 33 bp, Homo sapien
cttatcagattaatgcgaccctgatagatcccc

SEQ ID NO: 895571 - DNA, 33 bp, Homo sapien
tggttctgtttctctggatagcctttcttctgt

SEQ ID NO: 895572 - DNA, 33 bp, Homo sapien
tggttctgtttctctgtatagcctttcttctgt

SEQ ID NO: 895573 - DNA, 33 bp, Homo sapien
tcttactctacaaagacggctataagaagcaat

SEQ ID NO: 895574 - DNA, 33 bp, Homo sapien
tcttactctacaaagatggctataagaagcaat

SEQ ID NO: 895575 - DNA, 33 bp, Homo sapien
gaaggacttgaatcaccgggacgtcacccaggt

SEQ ID NO: 895576 - DNA, 33 bp, Homo sapien
gaaggacttgaatcactgggacgtcacccaggt

SEQ ID NO: 895577 - DNA, 33 bp, Homo sapien
tgttcaaaccaaagaaagctaggatctttaaat

SEQ ID NO: 895578 - DNA, 33 bp, Homo sapien
tgttcaaaccaaagaaggctaggatctttaaat

SEQ ID NO: 895579 - DNA, 33 bp, Homo sapien
ctgtccccaaaatacaagtgagtccatctgtga

SEQ ID NO: 895580 - DNA, 33 bp, Homo sapien
ctgtccccaaaatacaggtgagtccatctgtga

SEQ ID NO: 895581 - DNA, 33 bp, Homo sapien
atatgatccagtgtcaaaattcatcacagatgg

SEQ ID NO: 895582 - DNA, 33 bp, Homo sapien
atatgatccagtgtcataattcatcacagatgg

SEQ ID NO: 895583 - DNA, 33 bp, Homo sapien
gaaaagaaaagcaaaaatgttgaaataaaagaa

SEQ ID NO: 895584 - DNA, 33 bp, Homo sapien
gaaaagaaaagcaaaattgttgaaataaaagaa

SEQ ID NO: 895585 - DNA, 33 bp, Homo sapien
ttccttccttccttaactcagcaatcattagtt

SEQ ID NO: 895586 - DNA, 33 bp, Homo sapien
ttccttccttccttaattcagcaatcattagtt

SEQ ID NO: 895587 - DNA, 33 bp, Homo sapien
tctcccttaatcaatcaagccactctgtgaatt

SEQ ID NO: 895588 - DNA, 33 bp, Homo sapien
tctcccttaatcaatcgagccactctgtgaatt

SEQ ID NO: 895589 - DNA, 33 bp, Homo sapien
gccactctgtgaattccagtcatttgcatattt

SEQ ID NO: 895590 - DNA, 33 bp, Homo sapien
gccactctgtgaattctagtcatttgcatattt

SEQ ID NO: 895591 - DNA, 33 bp, Homo sapien
ctttgcattcacagagaagaaaatatgcaaatg

SEQ ID NO: 895592 - DNA, 33 bp, Homo sapien
ctttgcattcacagaggagaaaatatgcaaatg

SEQ ID NO: 895593 - DNA, 33 bp, Homo sapien
ctgcctctatatcaaacaatcccattaccccct

SEQ ID NO: 895594 - DNA, 33 bp, Homo sapien
ctgcctctatatcaaagaatcccattaccccct

SEQ ID NO: 895595 - DNA, 33 bp, Homo sapien
cacagatgtgaaaccccgaggctcagctgcata

SEQ ID NO: 895596 - DNA, 33 bp, Homo sapien
cacagatgtgaaaccctgaggctcagctgcata

SEQ ID NO: 895597 - DNA, 33 bp, Homo sapien
gcatactggacccttgcaatgattctgccccgt

SEQ ID NO: 895598 - DNA, 33 bp, Homo sapien
gcatactggacccttgtaatgattctgccccgt

SEQ ID NO: 895599 - DNA, 33 bp, Homo sapien
ttcttgacttgtagtacggtcttgcaaggcaga

SEQ ID NO: 895600 - DNA, 33 bp, Homo sapien
ttcttgacttgtagtagggtcttgcaaggcaga

SEQ ID NO: 895601 - DNA, 33 bp, Homo sapien
caccagaaacgcatgccacaaaagggtggtgct

SEQ ID NO: 895602 - DNA, 33 bp, Homo sapien
caccagaaacgcatgctacaaaagggtggtgct

SEQ ID NO: 895603 - DNA, 33 bp, Homo sapien
taatccatgccagaaacgccagaagacaagatt

SEQ ID NO: 895604 - DNA, 33 bp, Homo sapien
taatccatgccagaaatgccagaagacaagatt

SEQ ID NO: 895605 - DNA, 33 bp, Homo sapien
gtttagtagggcaaaaaggtaagtatttgttgc

SEQ ID NO: 895606 - DNA, 33 bp, Homo sapien
gtttagtagggcaaaacggtaagtatttgttgc

SEQ ID NO: 895607 - DNA, 33 bp, Homo sapien
gggggacttctggaaacgagtcatcaccaacaa

SEQ ID NO: 895608 - DNA, 33 bp, Homo sapien
gggggacttctggaaaggagtcatcaccaacaa

SEQ ID NO: 895609 - DNA, 33 bp, Homo sapien
ggcagattccacatgacccatttggtgcccaaa

SEQ ID NO: 895610 - DNA, 33 bp, Homo sapien
ggcagattccacatgatccatttggtgcccaaa

SEQ ID NO: 895611 - DNA, 33 bp, Homo sapien
ctcaccttagtgtacaaccttgccttgcccatc

SEQ ID NO: 895612 - DNA, 33 bp, Homo sapien
ctcaccttagtgtacagccttgccttgcccatc

SEQ ID NO: 895613 - DNA, 33 bp, Homo sapien
tttactggctcgcccaacgctcctcctgctgtg

SEQ ID NO: 895614 - DNA, 33 bp, Homo sapien
tttactggctcgcccaccgctcctcctgctgtg

SEQ ID NO: 895615 - DNA, 33 bp, Homo sapien
tgtttgaggtgatgaaagtgctaactaccacgg

SEQ ID NO: 895616 - DNA, 33 bp, Homo sapien
tgtttgaggtgatgaatgtgctaactaccacgg

SEQ ID NO: 895617 - DNA, 33 bp, Homo sapien
tttgtcaaactcattgcagtgtactctaacaag

SEQ ID NO: 895618 - DNA, 33 bp, Homo sapien
tttgtcaaactcattgtagtgtactctaacaag

SEQ ID NO: 895619 - DNA, 33 bp, Homo sapien
aatgaatgaatgtctgaaaaaatgtgcaacatc

SEQ ID NO: 895620 - DNA, 33 bp, Homo sapien
aatgaatgaatgtctgcaaaaatgtgcaacatc

SEQ ID NO: 895621 - DNA, 33 bp, Homo sapien
ggagagagtgaaagtacgggggaaatgccagac

SEQ ID NO: 895622 - DNA, 33 bp, Homo sapien
ggagagagtgaaagtatgggggaaatgccagac

SEQ ID NO: 895623 - DNA, 33 bp, Homo sapien
agatccccaagtgaccaatttgcacagtaaggt

SEQ ID NO: 895624 - DNA, 33 bp, Homo sapien
agatccccaagtgaccgatttgcacagtaaggt

SEQ ID NO: 895625 - DNA, 33 bp, Homo sapien
tacaggtttcaaagaccatgatacagccagaga

SEQ ID NO: 895626 - DNA, 33 bp, Homo sapien
tacaggtttcaaagacgatgatacagccagaga

SEQ ID NO: 895627 - DNA, 33 bp, Homo sapien
actgcttgagagcagaaattatagaccagcctg

SEQ ID NO: 895628 - DNA, 33 bp, Homo sapien
actgcttgagagcagagattatagaccagcctg

SEQ ID NO: 895629 - DNA, 33 bp, Homo sapien
catccctgtcttcctccagtcacacaggttccc

SEQ ID NO: 895630 - DNA, 33 bp, Homo sapien
catccctgtcttcctctagtcacacaggttccc

SEQ ID NO: 895631 - DNA, 33 bp, Homo sapien
ataaaggacttgtatccgaaacatacacagaac

SEQ ID NO: 895632 - DNA, 33 bp, Homo sapien
ataaaggacttgtatctgaaacatacacagaac

SEQ ID NO: 895633 - DNA, 33 bp, Homo sapien
gattcttgaatatttccctactgatttttcttc

SEQ ID NO: 895634 - DNA, 33 bp, Homo sapien
gattcttgaatatttcgctactgatttttcttc

SEQ ID NO: 895635 - DNA, 33 bp, Homo sapien
tcaattcatctttccaactgccttaacagtaat

SEQ ID NO: 895636 - DNA, 33 bp, Homo sapien
tcaattcatctttccagctgccttaacagtaat

SEQ ID NO: 895637 - DNA, 33 bp, Homo sapien
tagaacacaggataaacggaaacaaggagggtt

SEQ ID NO: 895638 - DNA, 33 bp, Homo sapien
tagaacacaggataaatggaaacaaggagggtt

SEQ ID NO: 895639 - DNA, 33 bp, Homo sapien
ttgatagactccagtcaactaagacatgagtca

SEQ ID NO: 895640 - DNA, 33 bp, Homo sapien
ttgatagactccagtccactaagacatgagtca

SEQ ID NO: 895641 - DNA, 33 bp, Homo sapien
tccctgtcatctaaaacagcacccatatcactt

SEQ ID NO: 895642 - DNA, 33 bp, Homo sapien
tccctgtcatctaaaatagcacccatatcactt

SEQ ID NO: 895643 - DNA, 33 bp, Homo sapien
tccccacattgtcacaagacttgctccatcact

SEQ ID NO: 895644 - DNA, 33 bp, Homo sapien
tccccacattgtcacatgacttgctccatcact

SEQ ID NO: 895645 - DNA, 33 bp, Homo sapien
ctaggtggccatgtaacgtggctcctgccagtg

SEQ ID NO: 895646 - DNA, 33 bp, Homo sapien
ctaggtggccatgtaatgtggctcctgccagtg

SEQ ID NO: 895647 - DNA, 33 bp, Homo sapien
gggaatagtgctgggagagttaaatatcggtgt

SEQ ID NO: 895648 - DNA, 33 bp, Homo sapien
gggaatagtgctgggatagttaaatatcggtgt

SEQ ID NO: 895649 - DNA, 33 bp, Homo sapien
tctatgcactgccacccctacttttttgctctt

SEQ ID NO: 895650 - DNA, 33 bp, Homo sapien
tctatgcactgccacctctacttttttgctctt

SEQ ID NO: 895651 - DNA, 33 bp, Homo sapien
tcttggttttagaaagaaaaacagccaaaagat

SEQ ID NO: 895652 - DNA, 33 bp, Homo sapien
tcttggttttagaaagcaaaacagccaaaagat

SEQ ID NO: 895653 - DNA, 33 bp, Homo sapien
gccagctgtaagtggaaatggatctggttaacc

SEQ ID NO: 895654 - DNA, 33 bp, Homo sapien
gccagctgtaagtggagatggatctggttaacc

SEQ ID NO: 895655 - DNA, 33 bp, Homo sapien
tttccgagtgcactcaaatgattctggaagtgg

SEQ ID NO: 895656 - DNA, 33 bp, Homo sapien
tttccgagtgcactcacatgattctggaagtgg

SEQ ID NO: 895657 - DNA, 33 bp, Homo sapien
gacaggttgcctaccaagtctgctttcctcctc

SEQ ID NO: 895658 - DNA, 33 bp, Homo sapien
gacaggttgcctaccaggtctgctttcctcctc

SEQ ID NO: 895659 - DNA, 33 bp, Homo sapien
tttcactgccgatagaggcaaataataagcagg

SEQ ID NO: 895660 - DNA, 33 bp, Homo sapien
tttcactgccgatagatgcaaataataagcagg

SEQ ID NO: 895661 - DNA, 33 bp, Homo sapien
gaaaatctctcccatcccacatgctcctggaag

SEQ ID NO: 895662 - DNA, 33 bp, Homo sapien
gaaaatctctcccatctcacatgctcctggaag

SEQ ID NO: 895663 - DNA, 33 bp, Homo sapien
ctgtcacaagaagagacgcagcttcctcccttt

SEQ ID NO: 895664 - DNA, 33 bp, Homo sapien
ctgtcacaagaagagatgcagcttcctcccttt

SEQ ID NO: 895665 - DNA, 33 bp, Homo sapien
agtataaaatggaaaccatgaattctgtgggtc

SEQ ID NO: 895666 - DNA, 33 bp, Homo sapien
agtataaaatggaaacgatgaattctgtgggtc

SEQ ID NO: 895667 - DNA, 33 bp, Homo sapien
ttgcagcaaaaaaacaactggaatacatagcaa

SEQ ID NO: 895668 - DNA, 33 bp, Homo sapien
ttgcagcaaaaaaacacctggaatacatagcaa

SEQ ID NO: 895669 - DNA, 33 bp, Homo sapien
aatagtatcagaaataacaaatggaacaattat

SEQ ID NO: 895670 - DNA, 33 bp, Homo sapien
aatagtatcagaaatagcaaatggaacaattat

SEQ ID NO: 895671 - DNA, 33 bp, Homo sapien
attacagccacaaagaccaaggttggcgttcca

SEQ ID NO: 895672 - DNA, 33 bp, Homo sapien
attacagccacaaagagcaaggttggcgttcca

SEQ ID NO: 895673 - DNA, 33 bp, Homo sapien
gtcttccggccctggacgtggcttctacaccaa

SEQ ID NO: 895674 - DNA, 33 bp, Homo sapien
gtcttccggccctggatgtggcttctacaccaa

SEQ ID NO: 895675 - DNA, 33 bp, Homo sapien
tattgctggggaaacaaattccatgacctctcc

SEQ ID NO: 895676 - DNA, 33 bp, Homo sapien
tattgctggggaaacacattccatgacctctcc

SEQ ID NO: 895677 - DNA, 33 bp, Homo sapien
aggctggatggttctaggactagcgccaggaga

SEQ ID NO: 895678 - DNA, 33 bp, Homo sapien
aggctggatggttctatgactagcgccaggaga

SEQ ID NO: 895679 - DNA, 33 bp, Homo sapien
ccgcgccgggcctcaaattcaaattttcaaaat

SEQ ID NO: 895680 - DNA, 33 bp, Homo sapien
ccgcgccgggcctcaagttcaaattttcaaaat

SEQ ID NO: 895681 - DNA, 33 bp, Homo sapien
aaactgtaaggaccaacttctgcatagaataga

SEQ ID NO: 895682 - DNA, 33 bp, Homo sapien
aaactgtaaggaccaatttctgcatagaataga

SEQ ID NO: 895683 - DNA, 33 bp, Homo sapien
ctaaatacttattccaataattcactaacaggg

SEQ ID NO: 895684 - DNA, 33 bp, Homo sapien
ctaaatacttattccagtaattcactaacaggg

SEQ ID NO: 895685 - DNA, 33 bp, Homo sapien
agtgatacagccaggtaaatcattcaggatctc

SEQ ID NO: 895686 - DNA, 33 bp, Homo sapien
agtgatacagccaggtgaatcattcaggatctc

SEQ ID NO: 895687 - DNA, 33 bp, Homo sapien
ttcttttcaaaagagaaataacccactgccatc

SEQ ID NO: 895688 - DNA, 33 bp, Homo sapien
ttcttttcaaaagagagataacccactgccatc

SEQ ID NO: 895689 - DNA, 33 bp, Homo sapien
cttttagccactcttaaaatatctatgccccaa

SEQ ID NO: 895690 - DNA, 33 bp, Homo sapien
cttttagccactcttataatatctatgccccaa

SEQ ID NO: 895691 - DNA, 33 bp, Homo sapien
attgtctccagtgggacgaaataaggccaagaa

SEQ ID NO: 895692 - DNA, 33 bp, Homo sapien
attgtctccagtgggatgaaataaggccaagaa

SEQ ID NO: 895693 - DNA, 33 bp, Homo sapien
ggttctagtcctattacggagcaaagatatttt

SEQ ID NO: 895694 - DNA, 33 bp, Homo sapien
ggttctagtcctattatggagcaaagatatttt

SEQ ID NO: 895695 - DNA, 33 bp, Homo sapien
agagatgtatcaataacgtgtgagagagtgtgt

SEQ ID NO: 895696 - DNA, 33 bp, Homo sapien
agagatgtatcaataatgtgtgagagagtgtgt

SEQ ID NO: 895697 - DNA, 33 bp, Homo sapien
tgcatttgaatgttgacagttcttaccaaattt

SEQ ID NO: 895698 - DNA, 33 bp, Homo sapien
tgcatttgaatgttgatagttcttaccaaattt

SEQ ID NO: 895699 - DNA, 33 bp, Homo sapien
ctggaagctcaacctagagcctgcgtctttgcc

SEQ ID NO: 895700 - DNA, 33 bp, Homo sapien
ctggaagctcaacctatagcctgcgtctttgcc

SEQ ID NO: 895701 - DNA, 33 bp, Homo sapien
tccttgtagtaatggaggagttcttgctttatt

SEQ ID NO: 895702 - DNA, 33 bp, Homo sapien
tccttgtagtaatggatgagttcttgctttatt

SEQ ID NO: 895703 - DNA, 33 bp, Homo sapien
aagcacccccgagcaactctgagagccttgatt

SEQ ID NO: 895704 - DNA, 33 bp, Homo sapien
aagcacccccgagcaattctgagagccttgatt

SEQ ID NO: 895705 - DNA, 33 bp, Homo sapien
actgaactggatgcaaaattatgactgtgcaaa

SEQ ID NO: 895706 - DNA, 33 bp, Homo sapien
actgaactggatgcaagattatgactgtgcaaa

SEQ ID NO: 895707 - DNA, 33 bp, Homo sapien
ccagaaaatctttgagaaaatctcacacatgat

SEQ ID NO: 895708 - DNA, 33 bp, Homo sapien
ccagaaaatctttgaggaaatctcacacatgat

SEQ ID NO: 895709 - DNA, 33 bp, Homo sapien
agtaaaattaattgcaacctgattgacagactc

SEQ ID NO: 895710 - DNA, 33 bp, Homo sapien
agtaaaattaattgcaccctgattgacagactc

SEQ ID NO: 895711 - DNA, 33 bp, Homo sapien
aacgaaaataatcctcactattgtaatagattt

SEQ ID NO: 895712 - DNA, 33 bp, Homo sapien
aacgaaaataatcctcgctattgtaatagattt

SEQ ID NO: 895713 - DNA, 33 bp, Homo sapien
ttaaccataatcttacagacaaattaacaaatt

SEQ ID NO: 895714 - DNA, 33 bp, Homo sapien
ttaaccataatcttacggacaaattaacaaatt

SEQ ID NO: 895715 - DNA, 33 bp, Homo sapien
tataaaggagatagacacatgcttaaggaacta

SEQ ID NO: 895716 - DNA, 33 bp, Homo sapien
tataaaggagatagacgcatgcttaaggaacta

SEQ ID NO: 895717 - DNA, 33 bp, Homo sapien
gaagaaagaggcgatacggtatagaggcaacag

SEQ ID NO: 895718 - DNA, 33 bp, Homo sapien
gaagaaagaggcgatatggtatagaggcaacag

SEQ ID NO: 895719 - DNA, 33 bp, Homo sapien
gttctgggcagtaatcaccttcccctttcctag

SEQ ID NO: 895720 - DNA, 33 bp, Homo sapien
gttctgggcagtaatcgccttcccctttcctag

SEQ ID NO: 895721 - DNA, 33 bp, Homo sapien
agcacaaaagcagtcaccaacaatatggaaacc

SEQ ID NO: 895722 - DNA, 33 bp, Homo sapien
agcacaaaagcagtcatcaacaatatggaaacc

SEQ ID NO: 895723 - DNA, 33 bp, Homo sapien
cataaacctgtgtacacaaaaagttgaaaataa

SEQ ID NO: 895724 - DNA, 33 bp, Homo sapien
cataaacctgtgtacagaaaaagttgaaaataa

SEQ ID NO: 895725 - DNA, 33 bp, Homo sapien
atgtactgctatggaaagatatccctgatacac

SEQ ID NO: 895726 - DNA, 33 bp, Homo sapien
atgtactgctatggaatgatatccctgatacac

SEQ ID NO: 895727 - DNA, 33 bp, Homo sapien
ttgcatgagggaaggagagataaagctggagga

SEQ ID NO: 895728 - DNA, 33 bp, Homo sapien
ttgcatgagggaaggatagataaagctggagga

SEQ ID NO: 895729 - DNA, 33 bp, Homo sapien
agaagagaaaatgatgaactttacacatctttg

SEQ ID NO: 895730 - DNA, 33 bp, Homo sapien
agaagagaaaatgatggactttacacatctttg

SEQ ID NO: 895731 - DNA, 33 bp, Homo sapien
tagacaatatcaactacgtttattttactgact

SEQ ID NO: 895732 - DNA, 33 bp, Homo sapien
tagacaatatcaactaggtttattttactgact

SEQ ID NO: 895733 - DNA, 33 bp, Homo sapien
agtgagctaatacttaaaatagacctaacagtg

SEQ ID NO: 895734 - DNA, 33 bp, Homo sapien
agtgagctaatacttacaatagacctaacagtg

SEQ ID NO: 895735 - DNA, 33 bp, Homo sapien
ttatctctgtatttcaaaattatgtccagtgaa

SEQ ID NO: 895736 - DNA, 33 bp, Homo sapien
ttatctctgtatttcagaattatgtccagtgaa

SEQ ID NO: 895737 - DNA, 33 bp, Homo sapien
gctctgttttattgacagaaatgggcaaaatga

SEQ ID NO: 895738 - DNA, 33 bp, Homo sapien
gctctgttttattgacggaaatgggcaaaatga

SEQ ID NO: 895739 - DNA, 33 bp, Homo sapien
ttcttttctggtttgacagagtgatattttcat

SEQ ID NO: 895740 - DNA, 33 bp, Homo sapien
ttcttttctggtttgatagagtgatattttcat

SEQ ID NO: 895741 - DNA, 33 bp, Homo sapien
acttcagtgaatgttgaaaagcatagatggagg

SEQ ID NO: 895742 - DNA, 33 bp, Homo sapien
acttcagtgaatgttggaaagcatagatggagg

SEQ ID NO: 895743 - DNA, 33 bp, Homo sapien
tgcacaaaaactcctacggctggcacagcaatt

SEQ ID NO: 895744 - DNA, 33 bp, Homo sapien
tgcacaaaaactcctatggctggcacagcaatt

SEQ ID NO: 895745 - DNA, 33 bp, Homo sapien
cgcacctggccagcaacttctttaccaacacaa

SEQ ID NO: 895746 - DNA, 33 bp, Homo sapien
cgcacctggccagcaatttctttaccaacacaa

SEQ ID NO: 895747 - DNA, 33 bp, Homo sapien
aaaatgggagtgagaaaactatggaaaatcaga

SEQ ID NO: 895748 - DNA, 33 bp, Homo sapien
aaaatgggagtgagaagactatggaaaatcaga

SEQ ID NO: 895749 - DNA, 33 bp, Homo sapien
cctcctctcccctgcaatgaaatcactagaagt

SEQ ID NO: 895750 - DNA, 33 bp, Homo sapien
cctcctctcccctgcagtgaaatcactagaagt

SEQ ID NO: 895751 - DNA, 33 bp, Homo sapien
tattgttacatccagtcacaaatgttgaaactg

SEQ ID NO: 895752 - DNA, 33 bp, Homo sapien
tattgttacatccagttacaaatgttgaaactg

SEQ ID NO: 895753 - DNA, 33 bp, Homo sapien
cccatgaaatttagccacccatagctggccaac

SEQ ID NO: 895754 - DNA, 33 bp, Homo sapien
cccatgaaatttagccgcccatagctggccaac

SEQ ID NO: 895755 - DNA, 33 bp, Homo sapien
cgtgtggcaggcactacgcaagggggatactaa

SEQ ID NO: 895756 - DNA, 33 bp, Homo sapien
cgtgtggcaggcactatgcaagggggatactaa

SEQ ID NO: 895757 - DNA, 33 bp, Homo sapien
tagcaagaacccattcaaaagacagagataaat

SEQ ID NO: 895758 - DNA, 33 bp, Homo sapien
tagcaagaacccattcgaaagacagagataaat

SEQ ID NO: 895759 - DNA, 33 bp, Homo sapien
acattctcaattcaaaaccaaccactgtaataa

SEQ ID NO: 895760 - DNA, 33 bp, Homo sapien
acattctcaattcaaagccaaccactgtaataa

SEQ ID NO: 895761 - DNA, 33 bp, Homo sapien
cagtaagtcagaaggcaagaagcattatggaga

SEQ ID NO: 895762 - DNA, 33 bp, Homo sapien
cagtaagtcagaaggcgagaagcattatggaga

SEQ ID NO: 895763 - DNA, 33 bp, Homo sapien
aattccacaatggctacataataaggttacaag

SEQ ID NO: 895764 - DNA, 33 bp, Homo sapien
aattccacaatggctatataataaggttacaag

SEQ ID NO: 895765 - DNA, 33 bp, Homo sapien
aaagtcatagtgcagcccttgtgtctgtcattt

SEQ ID NO: 895766 - DNA, 33 bp, Homo sapien
aaagtcatagtgcagctcttgtgtctgtcattt

SEQ ID NO: 895767 - DNA, 33 bp, Homo sapien
cctgtgtagttagtcacgaaataccatttaaaa

SEQ ID NO: 895768 - DNA, 33 bp, Homo sapien
cctgtgtagttagtcatgaaataccatttaaaa

SEQ ID NO: 895769 - DNA, 33 bp, Homo sapien
attatcggactttaataatcagaatttcagaat

SEQ ID NO: 895770 - DNA, 33 bp, Homo sapien
attatcggactttaatgatcagaatttcagaat

SEQ ID NO: 895771 - DNA, 33 bp, Homo sapien
tagctccaatctgtcacggggagtgcaaagctc

SEQ ID NO: 895772 - DNA, 33 bp, Homo sapien
tagctccaatctgtcatggggagtgcaaagctc

SEQ ID NO: 895773 - DNA, 33 bp, Homo sapien
gaacttgatgatggaacgacaaggcaagtgtcg

SEQ ID NO: 895774 - DNA, 33 bp, Homo sapien
gaacttgatgatggaatgacaaggcaagtgtcg

SEQ ID NO: 895775 - DNA, 33 bp, Homo sapien
cggtccagaatctgagaatggttcttgtcatcc

SEQ ID NO: 895776 - DNA, 33 bp, Homo sapien
cggtccagaatctgaggatggttcttgtcatcc

SEQ ID NO: 895777 - DNA, 33 bp, Homo sapien
cagggctgggaaaatcaccgtcgccttttgagg

SEQ ID NO: 895778 - DNA, 33 bp, Homo sapien
cagggctgggaaaatcgccgtcgccttttgagg

SEQ ID NO: 895779 - DNA, 33 bp, Homo sapien
attttgagtgctagtgaaacagtaagaaataaa

SEQ ID NO: 895780 - DNA, 33 bp, Homo sapien
attttgagtgctagtgtaacagtaagaaataaa

SEQ ID NO: 895781 - DNA, 33 bp, Homo sapien
ttggttctggtttatgcaaactgcatggactct

SEQ ID NO: 895782 - DNA, 33 bp, Homo sapien
ttggttctggtttatgtaaactgcatggactct

SEQ ID NO: 895783 - DNA, 33 bp, Homo sapien
aatgaaatcctgccaagagtgcttttaaacaaa

SEQ ID NO: 895784 - DNA, 33 bp, Homo sapien
aatgaaatcctgccaatagtgcttttaaacaaa

SEQ ID NO: 895785 - DNA, 33 bp, Homo sapien
ctgtctcagcattggcgctgggtagaggaggaa

SEQ ID NO: 895786 - DNA, 33 bp, Homo sapien
ctgtctcagcattggctctgggtagaggaggaa

SEQ ID NO: 895787 - DNA, 33 bp, Homo sapien
ctagaagcaacaatcaaaacataaggggaatgc

SEQ ID NO: 895788 - DNA, 33 bp, Homo sapien
ctagaagcaacaatcacaacataaggggaatgc

SEQ ID NO: 895789 - DNA, 33 bp, Homo sapien
acagttaaggttagtaactctggatggtgagac

SEQ ID NO: 895790 - DNA, 33 bp, Homo sapien
acagttaaggttagtatctctggatggtgagac

SEQ ID NO: 895791 - DNA, 33 bp, Homo sapien
gttgtggatatctcaacaggggatattcaaatc

SEQ ID NO: 895792 - DNA, 33 bp, Homo sapien
gttgtggatatctcaagaggggatattcaaatc

SEQ ID NO: 895793 - DNA, 33 bp, Homo sapien
tttgatttataaagaccgctctgtcttcaaagt

SEQ ID NO: 895794 - DNA, 33 bp, Homo sapien
tttgatttataaagactgctctgtcttcaaagt

SEQ ID NO: 895795 - DNA, 33 bp, Homo sapien
gatggtctgaaacttaccatggggttgcatcct

SEQ ID NO: 895796 - DNA, 33 bp, Homo sapien
gatggtctgaaacttatcatggggttgcatcct

SEQ ID NO: 895797 - DNA, 33 bp, Homo sapien
aaggaaggaattatacacagaagaaactccaaa

SEQ ID NO: 895798 - DNA, 33 bp, Homo sapien
aaggaaggaattatacccagaagaaactccaaa

SEQ ID NO: 895799 - DNA, 33 bp, Homo sapien
cgagaccatccgaattaaagtatccactcagtc

SEQ ID NO: 895800 - DNA, 33 bp, Homo sapien
cgagaccatccgaattgaagtatccactcagtc

SEQ ID NO: 895801 - DNA, 33 bp, Homo sapien
tctactgagaagccccccttcatggagcagatg

SEQ ID NO: 895802 - DNA, 33 bp, Homo sapien
tctactgagaagcccctcttcatggagcagatg

SEQ ID NO: 895803 - DNA, 33 bp, Homo sapien
tagggatgtgaataggacctactttagattcaa

SEQ ID NO: 895804 - DNA, 33 bp, Homo sapien
tagggatgtgaatagggcctactttagattcaa

SEQ ID NO: 895805 - DNA, 33 bp, Homo sapien
aatgtttctattttcccgctctccaaatgtctc

SEQ ID NO: 895806 - DNA, 33 bp, Homo sapien
aatgtttctattttcctgctctccaaatgtctc

SEQ ID NO: 895807 - DNA, 33 bp, Homo sapien
ctgccaaccaaggagaaaaagagggcatccctt

SEQ ID NO: 895808 - DNA, 33 bp, Homo sapien
ctgccaaccaaggagagaaagagggcatccctt

SEQ ID NO: 895809 - DNA, 33 bp, Homo sapien
ttgtgacatgggaaaactgtatgcaattcgaaa

SEQ ID NO: 895810 - DNA, 33 bp, Homo sapien
ttgtgacatgggaaaattgtatgcaattcgaaa

SEQ ID NO: 895811 - DNA, 33 bp, Homo sapien
gacattgctcactgaaaggtttgaaggaatagg

SEQ ID NO: 895812 - DNA, 33 bp, Homo sapien
gacattgctcactgaatggtttgaaggaatagg

SEQ ID NO: 895813 - DNA, 33 bp, Homo sapien
atcctaatgtcagatacgagaaattcccaattt

SEQ ID NO: 895814 - DNA, 33 bp, Homo sapien
atcctaatgtcagatatgagaaattcccaattt

SEQ ID NO: 895815 - DNA, 33 bp, Homo sapien
tatttaacacatggggacatttaggtattatta

SEQ ID NO: 895816 - DNA, 33 bp, Homo sapien
tatttaacacatgggggcatttaggtattatta

SEQ ID NO: 895817 - DNA, 33 bp, Homo sapien
gctgtcaggaaaatcaatgagacacacatgaat

SEQ ID NO: 895818 - DNA, 33 bp, Homo sapien
gctgtcaggaaaatcagtgagacacacatgaat

SEQ ID NO: 895819 - DNA, 33 bp, Homo sapien
ctctgttgaaaactaaacttacaaactgcaaaa

SEQ ID NO: 895820 - DNA, 33 bp, Homo sapien
ctctgttgaaaactaagcttacaaactgcaaaa

SEQ ID NO: 895821 - DNA, 33 bp, Homo sapien
cacaaatgttcttttacgtattactcataatgg

SEQ ID NO: 895822 - DNA, 33 bp, Homo sapien
cacaaatgttcttttaggtattactcataatgg

SEQ ID NO: 895823 - DNA, 33 bp, Homo sapien
gcatgatacatcacagaaaatgatgaaaggagc

SEQ ID NO: 895824 - DNA, 33 bp, Homo sapien
gcatgatacatcacaggaaatgatgaaaggagc

SEQ ID NO: 895825 - DNA, 33 bp, Homo sapien
ctcaattaaaagtcacagataagtgtccaaaat

SEQ ID NO: 895826 - DNA, 33 bp, Homo sapien
ctcaattaaaagtcaccgataagtgtccaaaat

SEQ ID NO: 895827 - DNA, 33 bp, Homo sapien
ctcttagcagtggtagaaaaggaggctcatggg

SEQ ID NO: 895828 - DNA, 33 bp, Homo sapien
ctcttagcagtggtaggaaaggaggctcatggg

SEQ ID NO: 895829 - DNA, 33 bp, Homo sapien
gcttcttagcctgaaacgaacccgtggtaatct

SEQ ID NO: 895830 - DNA, 33 bp, Homo sapien
gcttcttagcctgaaaggaacccgtggtaatct

SEQ ID NO: 895831 - DNA, 33 bp, Homo sapien
gaatcaactttcatacactaaataaattccaaa

SEQ ID NO: 895832 - DNA, 33 bp, Homo sapien
gaatcaactttcatacgctaaataaattccaaa

SEQ ID NO: 895833 - DNA, 33 bp, Homo sapien
aaatgcatcttgtaatcagacagtgctgtatac

SEQ ID NO: 895834 - DNA, 33 bp, Homo sapien
aaatgcatcttgtaatgagacagtgctgtatac

SEQ ID NO: 895835 - DNA, 33 bp, Homo sapien
catctctccttggaaggccccgtcttttcttgg

SEQ ID NO: 895836 - DNA, 33 bp, Homo sapien
catctctccttggaagtccccgtcttttcttgg

SEQ ID NO: 895837 - DNA, 33 bp, Homo sapien
ttctaatggtttcaagaagaactgtcactattg

SEQ ID NO: 895838 - DNA, 33 bp, Homo sapien
ttctaatggtttcaaggagaactgtcactattg

SEQ ID NO: 895839 - DNA, 33 bp, Homo sapien
gagtcatggaattgagcatgttctctgatgttc

SEQ ID NO: 895840 - DNA, 33 bp, Homo sapien
gagtcatggaattgaggatgttctctgatgttc

SEQ ID NO: 895841 - DNA, 33 bp, Homo sapien
agctgttgtgaggctcaaatggaactttataat

SEQ ID NO: 895842 - DNA, 33 bp, Homo sapien
agctgttgtgaggctccaatggaactttataat

SEQ ID NO: 895843 - DNA, 33 bp, Homo sapien
taccagcttattagcaatagagaaaagccacat

SEQ ID NO: 895844 - DNA, 33 bp, Homo sapien
taccagcttattagcagtagagaaaagccacat

SEQ ID NO: 895845 - DNA, 33 bp, Homo sapien
atgaaacatatgccacaataaaattatatcagt

SEQ ID NO: 895846 - DNA, 33 bp, Homo sapien
atgaaacatatgccaccataaaattatatcagt

SEQ ID NO: 895847 - DNA, 33 bp, Homo sapien
cccatgcactgtctggcacaatttaaagtggct

SEQ ID NO: 895848 - DNA, 33 bp, Homo sapien
cccatgcactgtctggtacaatttaaagtggct

SEQ ID NO: 895849 - DNA, 33 bp, Homo sapien
acactcagttttgtcacacttaaaattgctcct

SEQ ID NO: 895850 - DNA, 33 bp, Homo sapien
acactcagttttgtcatacttaaaattgctcct

SEQ ID NO: 895851 - DNA, 33 bp, Homo sapien
ccatcacggacgcccaacttcgagtaactctca

SEQ ID NO: 895852 - DNA, 33 bp, Homo sapien
ccatcacggacgcccagcttcgagtaactctca

SEQ ID NO: 895853 - DNA, 33 bp, Homo sapien
gattcgactggctgaaaaagtgaatgatcattg

SEQ ID NO: 895854 - DNA, 33 bp, Homo sapien
gattcgactggctgaagaagtgaatgatcattg

SEQ ID NO: 895855 - DNA, 33 bp, Homo sapien
gtctaaaccttactcaaagtcagtatcaagcta

SEQ ID NO: 895856 - DNA, 33 bp, Homo sapien
gtctaaaccttactcagagtcagtatcaagcta

SEQ ID NO: 895857 - DNA, 33 bp, Homo sapien
aaatactcaaggaagacggtattcattcacata

SEQ ID NO: 895858 - DNA, 33 bp, Homo sapien
aaatactcaaggaagatggtattcattcacata

SEQ ID NO: 895859 - DNA, 33 bp, Homo sapien
ccatatatttcaggaacaatttgcaaagtatct

SEQ ID NO: 895860 - DNA, 33 bp, Homo sapien
ccatatatttcaggaagaatttgcaaagtatct

SEQ ID NO: 895861 - DNA, 33 bp, Homo sapien
atggtcttctggggtcaattttgaaagcaattt

SEQ ID NO: 895862 - DNA, 33 bp, Homo sapien
atggtcttctggggtcgattttgaaagcaattt

SEQ ID NO: 895863 - DNA, 33 bp, Homo sapien
ctcaaaaaaaaaaggcaaatgtgtccatgtgtc

SEQ ID NO: 895864 - DNA, 33 bp, Homo sapien
ctcaaaaaaaaaaggccaatgtgtccatgtgtc

SEQ ID NO: 895865 - DNA, 33 bp, Homo sapien
tgattgctttgcaaaaaaagggtaagacaaagg

SEQ ID NO: 895866 - DNA, 33 bp, Homo sapien
tgattgctttgcaaaacaagggtaagacaaagg

SEQ ID NO: 895867 - DNA, 33 bp, Homo sapien
agcagagcaaggataacaaggataaatgaatat

SEQ ID NO: 895868 - DNA, 33 bp, Homo sapien
agcagagcaaggataagaaggataaatgaatat

SEQ ID NO: 895869 - DNA, 33 bp, Homo sapien
tattcagtgttttagaaaagaccaaaggcatgg

SEQ ID NO: 895870 - DNA, 33 bp, Homo sapien
tattcagtgttttagagaagaccaaaggcatgg

SEQ ID NO: 895871 - DNA, 33 bp, Homo sapien
tgatctaccataaaggccatgaattgactcagt

SEQ ID NO: 895872 - DNA, 33 bp, Homo sapien
tgatctaccataaagggcatgaattgactcagt

SEQ ID NO: 895873 - DNA, 33 bp, Homo sapien
ggaaccagcgagataacatacttggctaagaag

SEQ ID NO: 895874 - DNA, 33 bp, Homo sapien
ggaaccagcgagataatatacttggctaagaag

SEQ ID NO: 895875 - DNA, 33 bp, Homo sapien
cagacattttttaccgaccctgatgaaagttta

SEQ ID NO: 895876 - DNA, 33 bp, Homo sapien
cagacattttttaccgtccctgatgaaagttta

SEQ ID NO: 895877 - DNA, 33 bp, Homo sapien
gcttcactcaatattacacctctgggggctgag

SEQ ID NO: 895878 - DNA, 33 bp, Homo sapien
gcttcactcaatattatacctctgggggctgag

SEQ ID NO: 895879 - DNA, 33 bp, Homo sapien
ccatgagccatggaacaccaagaatgctggcaa

SEQ ID NO: 895880 - DNA, 33 bp, Homo sapien
ccatgagccatggaacgccaagaatgctggcaa

SEQ ID NO: 895881 - DNA, 33 bp, Homo sapien
caaagtcactttcacacgtcccacgtggacatg

SEQ ID NO: 895882 - DNA, 33 bp, Homo sapien
caaagtcactttcacaggtcccacgtggacatg

SEQ ID NO: 895883 - DNA, 33 bp, Homo sapien
agacatggcgtttcaccgaggcttacatacaga

SEQ ID NO: 895884 - DNA, 33 bp, Homo sapien
agacatggcgtttcactgaggcttacatacaga

SEQ ID NO: 895885 - DNA, 33 bp, Homo sapien
caaaccacatcataaaggtttgaatgtctttgg

SEQ ID NO: 895886 - DNA, 33 bp, Homo sapien
caaaccacatcataaatgtttgaatgtctttgg

SEQ ID NO: 895887 - DNA, 33 bp, Homo sapien
caagaagagttttcaccaattgtaatgaaagcc

SEQ ID NO: 895888 - DNA, 33 bp, Homo sapien
caagaagagttttcacgaattgtaatgaaagcc

SEQ ID NO: 895889 - DNA, 33 bp, Homo sapien
tgcttctctggaagccacatagaaccaatcagc

SEQ ID NO: 895890 - DNA, 33 bp, Homo sapien
tgcttctctggaagccgcatagaaccaatcagc

SEQ ID NO: 895891 - DNA, 33 bp, Homo sapien
caaccccacaaagcagcacttcaccacagagca

SEQ ID NO: 895892 - DNA, 33 bp, Homo sapien
caaccccacaaagcaggacttcaccacagagca

SEQ ID NO: 895893 - DNA, 33 bp, Homo sapien
ggggtatttggggtggccaacattaaacacagc

SEQ ID NO: 895894 - DNA, 33 bp, Homo sapien
ggggtatttggggtggtcaacattaaacacagc

SEQ ID NO: 895895 - DNA, 33 bp, Homo sapien
caaagaatgagctcaaactggactggaccctct

SEQ ID NO: 895896 - DNA, 33 bp, Homo sapien
caaagaatgagctcaagctggactggaccctct

SEQ ID NO: 895897 - DNA, 33 bp, Homo sapien
cattctttttaaaagacgtgatgctcttgcacg

SEQ ID NO: 895898 - DNA, 33 bp, Homo sapien
cattctttttaaaagatgtgatgctcttgcacg

SEQ ID NO: 895899 - DNA, 33 bp, Homo sapien
atattgttacaattacagtaaaagactggtatt

SEQ ID NO: 895900 - DNA, 33 bp, Homo sapien
atattgttacaattacggtaaaagactggtatt

SEQ ID NO: 895901 - DNA, 33 bp, Homo sapien
aggacacgcctatatacaactgttttgagcaac

SEQ ID NO: 895902 - DNA, 33 bp, Homo sapien
aggacacgcctatatataactgttttgagcaac

SEQ ID NO: 895903 - DNA, 33 bp, Homo sapien
caaatggagtaccaaaaaaattttctgaggctc

SEQ ID NO: 895904 - DNA, 33 bp, Homo sapien
caaatggagtaccaaataaattttctgaggctc

SEQ ID NO: 895905 - DNA, 33 bp, Homo sapien
agggacaaagcatagaaagtttgtttttcagtg

SEQ ID NO: 895906 - DNA, 33 bp, Homo sapien
agggacaaagcatagagagtttgtttttcagtg

SEQ ID NO: 895907 - DNA, 33 bp, Homo sapien
gggtgagaagttcagaccttgttgtagggtcag

SEQ ID NO: 895908 - DNA, 33 bp, Homo sapien
gggtgagaagttcagatcttgttgtagggtcag

SEQ ID NO: 895909 - DNA, 33 bp, Homo sapien
ataatttctaatgcccaaggaaagagctccata

SEQ ID NO: 895910 - DNA, 33 bp, Homo sapien
ataatttctaatgcccgaggaaagagctccata

SEQ ID NO: 895911 - DNA, 33 bp, Homo sapien
tgtgtaaccaccagcaaggtgcagaaacagaat

SEQ ID NO: 895912 - DNA, 33 bp, Homo sapien
tgtgtaaccaccagcagggtgcagaaacagaat

SEQ ID NO: 895913 - DNA, 33 bp, Homo sapien
gttcctgattaaaaaaaaattgtgaaccatttg

SEQ ID NO: 895914 - DNA, 33 bp, Homo sapien
gttcctgattaaaaaagaattgtgaaccatttg

SEQ ID NO: 895915 - DNA, 33 bp, Homo sapien
caaaatttgaatttacagagctagatttgaact

SEQ ID NO: 895916 - DNA, 33 bp, Homo sapien
caaaatttgaatttacggagctagatttgaact

SEQ ID NO: 895917 - DNA, 33 bp, Homo sapien
ttttaaacaggaggccacctcaaaaaagtcaag

SEQ ID NO: 895918 - DNA, 33 bp, Homo sapien
ttttaaacaggaggccgcctcaaaaaagtcaag

SEQ ID NO: 895919 - DNA, 33 bp, Homo sapien
gtagaatttagaggccaattttaaatgagtatc

SEQ ID NO: 895920 - DNA, 33 bp, Homo sapien
gtagaatttagaggccgattttaaatgagtatc

SEQ ID NO: 895921 - DNA, 33 bp, Homo sapien
ttttgcactatgttcactctgttgggaactctt

SEQ ID NO: 895922 - DNA, 33 bp, Homo sapien
ttttgcactatgttcattctgttgggaactctt

SEQ ID NO: 895923 - DNA, 33 bp, Homo sapien
ttgattttggcccaataatactgatttcaaatg

SEQ ID NO: 895924 - DNA, 33 bp, Homo sapien
ttgattttggcccaattatactgatttcaaatg

SEQ ID NO: 895925 - DNA, 33 bp, Homo sapien
tttttaaaaggttggaatatcttgtgagacaaa

SEQ ID NO: 895926 - DNA, 33 bp, Homo sapien
tttttaaaaggttggactatcttgtgagacaaa

SEQ ID NO: 895927 - DNA, 33 bp, Homo sapien
tggaggacagtagggagattccttaaaatctac

SEQ ID NO: 895928 - DNA, 33 bp, Homo sapien
tggaggacagtagggatattccttaaaatctac

SEQ ID NO: 895929 - DNA, 33 bp, Homo sapien
aacttgggttgatataaagacgagtgctagaga

SEQ ID NO: 895930 - DNA, 33 bp, Homo sapien
aacttgggttgatatagagacgagtgctagaga

SEQ ID NO: 895931 - DNA, 33 bp, Homo sapien
gtttttgaaatacgtgaatctttacttgtgaac

SEQ ID NO: 895932 - DNA, 33 bp, Homo sapien
gtttttgaaatacgtggatctttacttgtgaac

SEQ ID NO: 895933 - DNA, 33 bp, Homo sapien
tctacagtaactaccacaaaaagatctccaagg

SEQ ID NO: 895934 - DNA, 33 bp, Homo sapien
tctacagtaactaccataaaaagatctccaagg

SEQ ID NO: 895935 - DNA, 33 bp, Homo sapien
ctagcaatttcttaagcatgaggtaggcaatcc

SEQ ID NO: 895936 - DNA, 33 bp, Homo sapien
ctagcaatttcttaagtatgaggtaggcaatcc

SEQ ID NO: 895937 - DNA, 33 bp, Homo sapien
tctagctgtttcacaactgttctaagaccagcc

SEQ ID NO: 895938 - DNA, 33 bp, Homo sapien
tctagctgtttcacaattgttctaagaccagcc

SEQ ID NO: 895939 - DNA, 33 bp, Homo sapien
agccatcccagcaagcaccgaaagtctgggtta

SEQ ID NO: 895940 - DNA, 33 bp, Homo sapien
agccatcccagcaagcgccgaaagtctgggtta

SEQ ID NO: 895941 - DNA, 33 bp, Homo sapien
actgtaaatgctcctacagtatattcctctgct

SEQ ID NO: 895942 - DNA, 33 bp, Homo sapien
actgtaaatgctcctagagtatattcctctgct

SEQ ID NO: 895943 - DNA, 33 bp, Homo sapien
gagaattcttagcatacattcagacgttttttc

SEQ ID NO: 895944 - DNA, 33 bp, Homo sapien
gagaattcttagcatatattcagacgttttttc

SEQ ID NO: 895945 - DNA, 33 bp, Homo sapien
tcttgtgtagcttttgcagatgttgctcagcct

SEQ ID NO: 895946 - DNA, 33 bp, Homo sapien
tcttgtgtagcttttgtagatgttgctcagcct

SEQ ID NO: 895947 - DNA, 33 bp, Homo sapien
atcgttagcttggtgccccctctggaaatgtca

SEQ ID NO: 895948 - DNA, 33 bp, Homo sapien
atcgttagcttggtgctccctctggaaatgtca

SEQ ID NO: 895949 - DNA, 33 bp, Homo sapien
ctgtcccagggagacagagcttctttcatccac

SEQ ID NO: 895950 - DNA, 33 bp, Homo sapien
ctgtcccagggagacatagcttctttcatccac

SEQ ID NO: 895951 - DNA, 33 bp, Homo sapien
gcaggcagcaggccacgcagttgacacataatg

SEQ ID NO: 895952 - DNA, 33 bp, Homo sapien
gcaggcagcaggccactcagttgacacataatg

SEQ ID NO: 895953 - DNA, 33 bp, Homo sapien
ggaattaattggtggcaccctcagggagctatg

SEQ ID NO: 895954 - DNA, 33 bp, Homo sapien
ggaattaattggtggcgccctcagggagctatg

SEQ ID NO: 895955 - DNA, 33 bp, Homo sapien
ggggcctggtatagggaattttaaagatttaca

SEQ ID NO: 895956 - DNA, 33 bp, Homo sapien
ggggcctggtataggggattttaaagatttaca

SEQ ID NO: 895957 - DNA, 33 bp, Homo sapien
atcaggccaaatgcaaaagaatccctagagcct

SEQ ID NO: 895958 - DNA, 33 bp, Homo sapien
atcaggccaaatgcaagagaatccctagagcct

SEQ ID NO: 895959 - DNA, 33 bp, Homo sapien
ttctgaaaaagaaaaacggatgtgagtggctta

SEQ ID NO: 895960 - DNA, 33 bp, Homo sapien
ttctgaaaaagaaaaatggatgtgagtggctta

SEQ ID NO: 895961 - DNA, 33 bp, Homo sapien
gccatgagcagataaacgaatgagctagaaaaa

SEQ ID NO: 895962 - DNA, 33 bp, Homo sapien
gccatgagcagataaatgaatgagctagaaaaa

SEQ ID NO: 895963 - DNA, 33 bp, Homo sapien
tacacattcattcaacaaatagaggaaaaaacc

SEQ ID NO: 895964 - DNA, 33 bp, Homo sapien
tacacattcattcaaccaatagaggaaaaaacc

SEQ ID NO: 895965 - DNA, 33 bp, Homo sapien
gtaagctttttgacaacgaaggcaggagagcag

SEQ ID NO: 895966 - DNA, 33 bp, Homo sapien
gtaagctttttgacaatgaaggcaggagagcag

SEQ ID NO: 895967 - DNA, 33 bp, Homo sapien
gctccttctacctccaatccttgtctgatgttc

SEQ ID NO: 895968 - DNA, 33 bp, Homo sapien
gctccttctacctccagtccttgtctgatgttc

SEQ ID NO: 895969 - DNA, 33 bp, Homo sapien
cttttcctaccttcacaacccagaatttctttg

SEQ ID NO: 895970 - DNA, 33 bp, Homo sapien
cttttcctaccttcacgacccagaatttctttg

SEQ ID NO: 895971 - DNA, 33 bp, Homo sapien
cagtttgtgcctaacaatgaagacttctgtcca

SEQ ID NO: 895972 - DNA, 33 bp, Homo sapien
cagtttgtgcctaacagtgaagacttctgtcca

SEQ ID NO: 895973 - DNA, 33 bp, Homo sapien
ctcctctcctcaagcacaaggaagggatctctt

SEQ ID NO: 895974 - DNA, 33 bp, Homo sapien
ctcctctcctcaagcagaaggaagggatctctt

SEQ ID NO: 895975 - DNA, 33 bp, Homo sapien
aaaggactttgtactggaaccagaataccagct

SEQ ID NO: 895976 - DNA, 33 bp, Homo sapien
aaaggactttgtactgtaaccagaataccagct

SEQ ID NO: 895977 - DNA, 33 bp, Homo sapien
cgcctaacaagggtgaagtgattctgtgataaa

SEQ ID NO: 895978 - DNA, 33 bp, Homo sapien
cgcctaacaagggtgaggtgattctgtgataaa

SEQ ID NO: 895979 - DNA, 33 bp, Homo sapien
aatatctcatggaaaacaaacattttgggcaat

SEQ ID NO: 895980 - DNA, 33 bp, Homo sapien
aatatctcatggaaaagaaacattttgggcaat

SEQ ID NO: 895981 - DNA, 33 bp, Homo sapien
ctctcatttttgacgacatttacgaggatactc

SEQ ID NO: 895982 - DNA, 33 bp, Homo sapien
ctctcatttttgacgagatttacgaggatactc

SEQ ID NO: 895983 - DNA, 33 bp, Homo sapien
atcttcctatccctacagcccagtacctgagct

SEQ ID NO: 895984 - DNA, 33 bp, Homo sapien
atcttcctatccctacggcccagtacctgagct

SEQ ID NO: 895985 - DNA, 33 bp, Homo sapien
aagacaggcaggagctcgaaaggagaaggagag

SEQ ID NO: 895986 - DNA, 33 bp, Homo sapien
aagacaggcaggagcttgaaaggagaaggagag

SEQ ID NO: 895987 - DNA, 33 bp, Homo sapien
ccatccatccctttcactatcccattcactatt

SEQ ID NO: 895988 - DNA, 33 bp, Homo sapien
ccatccatccctttcattatcccattcactatt

SEQ ID NO: 895989 - DNA, 33 bp, Homo sapien
atattagctctttttgcaacattaggaccagct

SEQ ID NO: 895990 - DNA, 33 bp, Homo sapien
atattagctctttttgtaacattaggaccagct

SEQ ID NO: 895991 - DNA, 33 bp, Homo sapien
tcactatacccggagcaacctttaggctgaact

SEQ ID NO: 895992 - DNA, 33 bp, Homo sapien
tcactatacccggagcgacctttaggctgaact

SEQ ID NO: 895993 - DNA, 33 bp, Homo sapien
attctgcttaggacaacggagaaacacctgctg

SEQ ID NO: 895994 - DNA, 33 bp, Homo sapien
attctgcttaggacaatggagaaacacctgctg

SEQ ID NO: 895995 - DNA, 33 bp, Homo sapien
atgtgtgccatgctatcacaaagattgggagca

SEQ ID NO: 895996 - DNA, 33 bp, Homo sapien
atgtgtgccatgctatgacaaagattgggagca

SEQ ID NO: 895997 - DNA, 33 bp, Homo sapien
aaattaatttggtgaaacagattgctttaaggt

SEQ ID NO: 895998 - DNA, 33 bp, Homo sapien
aaattaatttggtgaaccagattgctttaaggt

SEQ ID NO: 895999 - DNA, 33 bp, Homo sapien
aaattgttatgtaccaggaaaagcgcatctttc

SEQ ID NO: 896000 - DNA, 33 bp, Homo sapien
aaattgttatgtaccatgaaaagcgcatctttc

SEQ ID NO: 896001 - DNA, 33 bp, Homo sapien
aggcttttcctgcttcaacgtgggggtactgct

SEQ ID NO: 896002 - DNA, 33 bp, Homo sapien
aggcttttcctgcttccacgtgggggtactgct

SEQ ID NO: 896003 - DNA, 33 bp, Homo sapien
ctgttcactttctgcaaaccagaagcataacgt

SEQ ID NO: 896004 - DNA, 33 bp, Homo sapien
ctgttcactttctgcagaccagaagcataacgt

SEQ ID NO: 896005 - DNA, 33 bp, Homo sapien
tcatttttttttcctccatgcctcaggtttcta

SEQ ID NO: 896006 - DNA, 33 bp, Homo sapien
tcatttttttttcctcgatgcctcaggtttcta

SEQ ID NO: 896007 - DNA, 33 bp, Homo sapien
tgtttccaagtcacagccatattgtaaaccatt

SEQ ID NO: 896008 - DNA, 33 bp, Homo sapien
tgtttccaagtcacagtcatattgtaaaccatt

SEQ ID NO: 896009 - DNA, 33 bp, Homo sapien
ggtgtgagccatggcaaccgggctcttaagttt

SEQ ID NO: 896010 - DNA, 33 bp, Homo sapien
ggtgtgagccatggcacccgggctcttaagttt

SEQ ID NO: 896011 - DNA, 33 bp, Homo sapien
tctccctcaaatggaaatgcctcctggagacca

SEQ ID NO: 896012 - DNA, 33 bp, Homo sapien
tctccctcaaatggaagtgcctcctggagacca

SEQ ID NO: 896013 - DNA, 33 bp, Homo sapien
aaggggacttgatgtcactggtgagtctctgac

SEQ ID NO: 896014 - DNA, 33 bp, Homo sapien
aaggggacttgatgtcgctggtgagtctctgac

SEQ ID NO: 896015 - DNA, 33 bp, Homo sapien
tttaaatactgaacctaaaatagaatgagaata

SEQ ID NO: 896016 - DNA, 33 bp, Homo sapien
tttaaatactgaacctgaaatagaatgagaata

SEQ ID NO: 896017 - DNA, 33 bp, Homo sapien
gaagagtatcctttcaatatcacacctgctaga

SEQ ID NO: 896018 - DNA, 33 bp, Homo sapien
gaagagtatcctttcagtatcacacctgctaga

SEQ ID NO: 896019 - DNA, 33 bp, Homo sapien
aaaggagttgcttccacatcatccagaataatt

SEQ ID NO: 896020 - DNA, 33 bp, Homo sapien
aaaggagttgcttccatatcatccagaataatt

SEQ ID NO: 896021 - DNA, 33 bp, Homo sapien
gctggcagggaaccaacatactgcaggtcagag

SEQ ID NO: 896022 - DNA, 33 bp, Homo sapien
gctggcagggaaccaagatactgcaggtcagag

SEQ ID NO: 896023 - DNA, 33 bp, Homo sapien
cagggaggtcgtgcaacgggacagatggtatca

SEQ ID NO: 896024 - DNA, 33 bp, Homo sapien
cagggaggtcgtgcaatgggacagatggtatca

SEQ ID NO: 896025 - DNA, 33 bp, Homo sapien
caattaaattgtttaaagcaaggagctaagtgt

SEQ ID NO: 896026 - DNA, 33 bp, Homo sapien
caattaaattgtttaaggcaaggagctaagtgt

SEQ ID NO: 896027 - DNA, 33 bp, Homo sapien
tcttttgccaggaaaacgcttgtaaataactgc

SEQ ID NO: 896028 - DNA, 33 bp, Homo sapien
tcttttgccaggaaaatgcttgtaaataactgc

SEQ ID NO: 896029 - DNA, 33 bp, Homo sapien
agaaagtagttatgaacgccatgggtaccgctc

SEQ ID NO: 896030 - DNA, 33 bp, Homo sapien
agaaagtagttatgaatgccatgggtaccgctc

SEQ ID NO: 896031 - DNA, 33 bp, Homo sapien
caagagactccctgaaccaggaaaaggaagatc

SEQ ID NO: 896032 - DNA, 33 bp, Homo sapien
caagagactccctgaatcaggaaaaggaagatc

SEQ ID NO: 896033 - DNA, 33 bp, Homo sapien
cccacagggctcaggcaactgttgaataagtgc

SEQ ID NO: 896034 - DNA, 33 bp, Homo sapien
cccacagggctcaggcgactgttgaataagtgc

SEQ ID NO: 896035 - DNA, 33 bp, Homo sapien
taattagcaaatacctcacgtgacagttatgtg

SEQ ID NO: 896036 - DNA, 33 bp, Homo sapien
taattagcaaatacctgacgtgacagttatgtg

SEQ ID NO: 896037 - DNA, 33 bp, Homo sapien
gtgctgagactccaaacggtagcatgaaaggat

SEQ ID NO: 896038 - DNA, 33 bp, Homo sapien
gtgctgagactccaaagggtagcatgaaaggat

SEQ ID NO: 896039 - DNA, 33 bp, Homo sapien
aaagaaatgggactaaccattttcaatacccag

SEQ ID NO: 896040 - DNA, 33 bp, Homo sapien
aaagaaatgggactaagcattttcaatacccag

SEQ ID NO: 896041 - DNA, 33 bp, Homo sapien
aatgtccaggtgtttaccatttcagctgtctgg

SEQ ID NO: 896042 - DNA, 33 bp, Homo sapien
aatgtccaggtgtttatcatttcagctgtctgg

SEQ ID NO: 896043 - DNA, 33 bp, Homo sapien
aaattatccaaatttcacagctaaaaagcttag

SEQ ID NO: 896044 - DNA, 33 bp, Homo sapien
aaattatccaaatttcgcagctaaaaagcttag

SEQ ID NO: 896045 - DNA, 33 bp, Homo sapien
acagattacagactcacgatgtttagctatagc

SEQ ID NO: 896046 - DNA, 33 bp, Homo sapien
acagattacagactcatgatgtttagctatagc

SEQ ID NO: 896047 - DNA, 33 bp, Homo sapien
tcttttccttctcggcccctgctatagctaaac

SEQ ID NO: 896048 - DNA, 33 bp, Homo sapien
tcttttccttctcggcgcctgctatagctaaac

SEQ ID NO: 896049 - DNA, 33 bp, Homo sapien
gaatcatggagcctaaaaacgaattctagccca

SEQ ID NO: 896050 - DNA, 33 bp, Homo sapien
gaatcatggagcctaataacgaattctagccca

SEQ ID NO: 896051 - DNA, 33 bp, Homo sapien
cccagttccatgggcactcaccaaagttttgtc

SEQ ID NO: 896052 - DNA, 33 bp, Homo sapien
cccagttccatgggcagtcaccaaagttttgtc

SEQ ID NO: 896053 - DNA, 33 bp, Homo sapien
gcttcgtcatgtgaaagcaggcatgaataactg

SEQ ID NO: 896054 - DNA, 33 bp, Homo sapien
gcttcgtcatgtgaaatcaggcatgaataactg

SEQ ID NO: 896055 - DNA, 33 bp, Homo sapien
tgttgctgctgacttaactaggagactttttca

SEQ ID NO: 896056 - DNA, 33 bp, Homo sapien
tgttgctgctgacttacctaggagactttttca

SEQ ID NO: 896057 - DNA, 33 bp, Homo sapien
tgggcacatgaccaaacgtctatgaaaaaatgt

SEQ ID NO: 896058 - DNA, 33 bp, Homo sapien
tgggcacatgaccaaatgtctatgaaaaaatgt

SEQ ID NO: 896059 - DNA, 33 bp, Homo sapien
tgattggaacgtttcaccgcttttctctatcac

SEQ ID NO: 896060 - DNA, 33 bp, Homo sapien
tgattggaacgtttcatcgcttttctctatcac

SEQ ID NO: 896061 - DNA, 33 bp, Homo sapien
aaggattataatgaaaaggttattgcttctgag

SEQ ID NO: 896062 - DNA, 33 bp, Homo sapien
aaggattataatgaaagggttattgcttctgag

SEQ ID NO: 896063 - DNA, 33 bp, Homo sapien
atagaacataagtgaaatgaacagtgtcaacaa

SEQ ID NO: 896064 - DNA, 33 bp, Homo sapien
atagaacataagtgaattgaacagtgtcaacaa

SEQ ID NO: 896065 - DNA, 33 bp, Homo sapien
gaaaattggcctaattcaaacctgtgtcattat

SEQ ID NO: 896066 - DNA, 33 bp, Homo sapien
gaaaattggcctaattgaaacctgtgtcattat

SEQ ID NO: 896067 - DNA, 33 bp, Homo sapien
gcaatacaatgggccaagttcttaacaccacca

SEQ ID NO: 896068 - DNA, 33 bp, Homo sapien
gcaatacaatgggccatgttcttaacaccacca

SEQ ID NO: 896069 - DNA, 33 bp, Homo sapien
aaaagggttgactatacagcccaggtacaccag

SEQ ID NO: 896070 - DNA, 33 bp, Homo sapien
aaaagggttgactatatagcccaggtacaccag

SEQ ID NO: 896071 - DNA, 33 bp, Homo sapien
aaatggaccaaccgaaagcatatctatttatga

SEQ ID NO: 896072 - DNA, 33 bp, Homo sapien
aaatggaccaaccgaaggcatatctatttatga

SEQ ID NO: 896073 - DNA, 33 bp, Homo sapien
aatagtggctgtaacacctcctaaagttattgt

SEQ ID NO: 896074 - DNA, 33 bp, Homo sapien
aatagtggctgtaacatctcctaaagttattgt

SEQ ID NO: 896075 - DNA, 33 bp, Homo sapien
gatcaggtaagtttaaagcaaatgagaaaatag

SEQ ID NO: 896076 - DNA, 33 bp, Homo sapien
gatcaggtaagtttaatgcaaatgagaaaatag

SEQ ID NO: 896077 - DNA, 33 bp, Homo sapien
ttttcaaagtgtcttccacctttatgatttcta

SEQ ID NO: 896078 - DNA, 33 bp, Homo sapien
ttttcaaagtgtcttctacctttatgatttcta

SEQ ID NO: 896079 - DNA, 33 bp, Homo sapien
ctggatcagtctccacagaaaatactcactgac

SEQ ID NO: 896080 - DNA, 33 bp, Homo sapien
ctggatcagtctccacggaaaatactcactgac

SEQ ID NO: 896081 - DNA, 33 bp, Homo sapien
ggatttgctttgaaataatctgggggtgaggag

SEQ ID NO: 896082 - DNA, 33 bp, Homo sapien
ggatttgctttgaaatcatctgggggtgaggag

SEQ ID NO: 896083 - DNA, 33 bp, Homo sapien
tagttgatggtttacccactgatttgaacaaac

SEQ ID NO: 896084 - DNA, 33 bp, Homo sapien
tagttgatggtttacctactgatttgaacaaac

SEQ ID NO: 896085 - DNA, 33 bp, Homo sapien
tagaacagaacctggcacaagatagatgcgtaa

SEQ ID NO: 896086 - DNA, 33 bp, Homo sapien
tagaacagaacctggcccaagatagatgcgtaa

SEQ ID NO: 896087 - DNA, 33 bp, Homo sapien
tatagtaactgctcaactgaaaaaagtattaat

SEQ ID NO: 896088 - DNA, 33 bp, Homo sapien
tatagtaactgctcaattgaaaaaagtattaat

SEQ ID NO: 896089 - DNA, 33 bp, Homo sapien
atttggacttagcggaaaaggcagccttgactg

SEQ ID NO: 896090 - DNA, 33 bp, Homo sapien
atttggacttagcggataaggcagccttgactg

SEQ ID NO: 896091 - DNA, 33 bp, Homo sapien
tcgttctcaacactgcaagaagctgccactgat

SEQ ID NO: 896092 - DNA, 33 bp, Homo sapien
tcgttctcaacactgcgagaagctgccactgat

SEQ ID NO: 896093 - DNA, 33 bp, Homo sapien
atggaaagtgggaaaaacacttgtctaaagcag

SEQ ID NO: 896094 - DNA, 33 bp, Homo sapien
atggaaagtgggaaaagcacttgtctaaagcag

SEQ ID NO: 896095 - DNA, 33 bp, Homo sapien
gtgaataaaaatgaatcagtgagtgtcccttca

SEQ ID NO: 896096 - DNA, 33 bp, Homo sapien
gtgaataaaaatgaattagtgagtgtcccttca

SEQ ID NO: 896097 - DNA, 33 bp, Homo sapien
ttcctcctggctaccaccctttttgacacttta

SEQ ID NO: 896098 - DNA, 33 bp, Homo sapien
ttcctcctggctaccatcctttttgacacttta

SEQ ID NO: 896099 - DNA, 33 bp, Homo sapien
acaacatctattgggacgctgctaaacacccta

SEQ ID NO: 896100 - DNA, 33 bp, Homo sapien
acaacatctattgggatgctgctaaacacccta

SEQ ID NO: 896101 - DNA, 33 bp, Homo sapien
tatttgtttagccactgagagatttttaaaaaa

SEQ ID NO: 896102 - DNA, 33 bp, Homo sapien
tatttgtttagccacttagagatttttaaaaaa

SEQ ID NO: 896103 - DNA, 33 bp, Homo sapien
atatttcacgtaaaggacataatttaagtggaa

SEQ ID NO: 896104 - DNA, 33 bp, Homo sapien
atatttcacgtaaagggcataatttaagtggaa

SEQ ID NO: 896105 - DNA, 33 bp, Homo sapien
ttatggaggtagaaaacgaggatttgaagtgga

SEQ ID NO: 896106 - DNA, 33 bp, Homo sapien
ttatggaggtagaaaatgaggatttgaagtgga

SEQ ID NO: 896107 - DNA, 33 bp, Homo sapien
cctaagtgcttggacacaggagggggactgaat

SEQ ID NO: 896108 - DNA, 33 bp, Homo sapien
cctaagtgcttggacagaggagggggactgaat

SEQ ID NO: 896109 - DNA, 33 bp, Homo sapien
tatctatttcttgaacagtctctacgagccagg

SEQ ID NO: 896110 - DNA, 33 bp, Homo sapien
tatctatttcttgaactgtctctacgagccagg

SEQ ID NO: 896111 - DNA, 33 bp, Homo sapien
atgctctgtttaacacacagcaacactgaaagc

SEQ ID NO: 896112 - DNA, 33 bp, Homo sapien
atgctctgtttaacactcagcaacactgaaagc

SEQ ID NO: 896113 - DNA, 33 bp, Homo sapien
tcagttcaacactggggacacggtgtggagaac

SEQ ID NO: 896114 - DNA, 33 bp, Homo sapien
tcagttcaacactgggtacacggtgtggagaac

SEQ ID NO: 896115 - DNA, 33 bp, Homo sapien; identical to SEQ ID NO: 896113

SEQ ID NO: 896116 - DNA, 33 bp, Homo sapien; identical to SEQ ID NO: 896114

SEQ ID NO: 896117 - DNA, 33 bp, Homo sapien
gcactccacaatcacacacttatacagctccgc

SEQ ID NO: 896118 - DNA, 33 bp, Homo sapien
gcactccacaatcacatacttatacagctccgc

SEQ ID NO: 896119 - DNA, 33 bp, Homo sapien
tcaatctgaagcttgaagatgacttccattcct

SEQ ID NO: 896120 - DNA, 33 bp, Homo sapien
tcaatctgaagcttgaggatgacttccattcct

SEQ ID NO: 896121 - DNA, 33 bp, Homo sapien
atgctgggatccaagagatttgacacactgagt

SEQ ID NO: 896122 - DNA, 33 bp, Homo sapien
atgctgggatccaagatatttgacacactgagt

SEQ ID NO: 896123 - DNA, 33 bp, Homo sapien
ttataaagttcttaccgactacttctattttat

SEQ ID NO: 896124 - DNA, 33 bp, Homo sapien
ttataaagttcttacctactacttctattttat

SEQ ID NO: 896125 - DNA, 33 bp, Homo sapien
gagtcctcagcctaaaggagtttaataaggaaa

SEQ ID NO: 896126 - DNA, 33 bp, Homo sapien
gagtcctcagcctaaatgagtttaataaggaaa

SEQ ID NO: 896127 - DNA, 33 bp, Homo sapien
ctttggcctcgtcataagtacaacgaatctctg

SEQ ID NO: 896128 - DNA, 33 bp, Homo sapien
ctttggcctcgtcataggtacaacgaatctctg

SEQ ID NO: 896129 - DNA, 33 bp, Homo sapien
attttactttaaaaacagcaaatctccggtata

SEQ ID NO: 896130 - DNA, 33 bp, Homo sapien
attttactttaaaaacggcaaatctccggtata

SEQ ID NO: 896131 - DNA, 33 bp, Homo sapien
aagcaagccacatgagcatgaatggaagaagac

SEQ ID NO: 896132 - DNA, 33 bp, Homo sapien
aagcaagccacatgagtatgaatggaagaagac

SEQ ID NO: 896133 - DNA, 33 bp, Homo sapien
ggttagaaatccaacccatgtctcactgagctc

SEQ ID NO: 896134 - DNA, 33 bp, Homo sapien
ggttagaaatccaacctatgtctcactgagctc

SEQ ID NO: 896135 - DNA, 33 bp, Homo sapien
ttaacttctaacccaacgtatctgttgaaactt

SEQ ID NO: 896136 - DNA, 33 bp, Homo sapien
ttaacttctaacccaatgtatctgttgaaactt

SEQ ID NO: 896137 - DNA, 33 bp, Homo sapien
catttggaaaaggaaaaagtaagagagtagtat

SEQ ID NO: 896138 - DNA, 33 bp, Homo sapien
catttggaaaaggaaagagtaagagagtagtat

SEQ ID NO: 896139 - DNA, 33 bp, Homo sapien
ataatactctgtgttccgaaagagcctagaaaa

SEQ ID NO: 896140 - DNA, 33 bp, Homo sapien
ataatactctgtgttctgaaagagcctagaaaa

SEQ ID NO: 896141 - DNA, 33 bp, Homo sapien
aagagaaagattcacaaactcttccagaatctc

SEQ ID NO: 896142 - DNA, 33 bp, Homo sapien
aagagaaagattcacagactcttccagaatctc

SEQ ID NO: 896143 - DNA, 33 bp, Homo sapien
ggttacattacacaaaaatcccagagcacaggg

SEQ ID NO: 896144 - DNA, 33 bp, Homo sapien
ggttacattacacaaagatcccagagcacaggg

SEQ ID NO: 896145 - DNA, 33 bp, Homo sapien
cataatgtcacttgtacgtagaatctgaaaaac

SEQ ID NO: 896146 - DNA, 33 bp, Homo sapien
cataatgtcacttgtatgtagaatctgaaaaac

SEQ ID NO: 896147 - DNA, 33 bp, Homo sapien
catttgtgagaacatgaatgaacttgaagggca

SEQ ID NO: 896148 - DNA, 33 bp, Homo sapien
catttgtgagaacatggatgaacttgaagggca

SEQ ID NO: 896149 - DNA, 33 bp, Homo sapien
ataggttctttgaatgcatacagctattaccag

SEQ ID NO: 896150 - DNA, 33 bp, Homo sapien
ataggttctttgaatgtatacagctattaccag

SEQ ID NO: 896151 - DNA, 33 bp, Homo sapien
atactggagagttacaccttccaaagtttatta

SEQ ID NO: 896152 - DNA, 33 bp, Homo sapien
atactggagagttacatcttccaaagtttatta

SEQ ID NO: 896153 - DNA, 33 bp, Homo sapien
gtaatgcgaacctcataaaacaagttgcggagt

SEQ ID NO: 896154 - DNA, 33 bp, Homo sapien
gtaatgcgaacctcatgaaacaagttgcggagt

SEQ ID NO: 896155 - DNA, 33 bp, Homo sapien
gtattaatttgctagcactgccataatgaggta

SEQ ID NO: 896156 - DNA, 33 bp, Homo sapien
gtattaatttgctagcgctgccataatgaggta

SEQ ID NO: 896157 - DNA, 33 bp, Homo sapien
tctgtccaaatatttacgtttgcagaaagctgg

SEQ ID NO: 896158 - DNA, 33 bp, Homo sapien
tctgtccaaatatttaggtttgcagaaagctgg

SEQ ID NO: 896159 - DNA, 33 bp, Homo sapien
tgttttgcagctaagtgacacatttttggacct

SEQ ID NO: 896160 - DNA, 33 bp, Homo sapien
tgttttgcagctaagttacacatttttggacct

SEQ ID NO: 896161 - DNA, 33 bp, Homo sapien
tgctgggcctgtcacaatggtttgccaggtaaa

SEQ ID NO: 896162 - DNA, 33 bp, Homo sapien
tgctgggcctgtcacagtggtttgccaggtaaa

SEQ ID NO: 896163 - DNA, 33 bp, Homo sapien
gagaaattgctacacacctaaccactctaaata

SEQ ID NO: 896164 - DNA, 33 bp, Homo sapien
gagaaattgctacacatctaaccactctaaata

SEQ ID NO: 896165 - DNA, 33 bp, Homo sapien
tgaatgagtctttaaccctagtgctctcagtag

SEQ ID NO: 896166 - DNA, 33 bp, Homo sapien
tgaatgagtctttaactctagtgctctcagtag

SEQ ID NO: 896167 - DNA, 33 bp, Homo sapien
atcacctgggctaggacgaaatttttaaaagct

SEQ ID NO: 896168 - DNA, 33 bp, Homo sapien
atcacctgggctaggatgaaatttttaaaagct

SEQ ID NO: 896169 - DNA, 33 bp, Homo sapien
ttctttcctgctctcacggtttagcttttaaaa

SEQ ID NO: 896170 - DNA, 33 bp, Homo sapien
ttctttcctgctctcatggtttagcttttaaaa

SEQ ID NO: 896171 - DNA, 33 bp, Homo sapien
catgagaggctgtgtcaaggggaaagtttggga

SEQ ID NO: 896172 - DNA, 33 bp, Homo sapien
catgagaggctgtgtcgaggggaaagtttggga

SEQ ID NO: 896173 - DNA, 33 bp, Homo sapien
ctttggattttcagaaatggagagtattgtaaa

SEQ ID NO: 896174 - DNA, 33 bp, Homo sapien
ctttggattttcagaagtggagagtattgtaaa

SEQ ID NO: 896175 - DNA, 33 bp, Homo sapien
tttcaagattagataaaccctaccaaccaattt

SEQ ID NO: 896176 - DNA, 33 bp, Homo sapien
tttcaagattagataagccctaccaaccaattt

SEQ ID NO: 896177 - DNA, 33 bp, Homo sapien
ccctttctgtcttgtcaaaaagctagttgtttt

SEQ ID NO: 896178 - DNA, 33 bp, Homo sapien
ccctttctgtcttgtcgaaaagctagttgtttt

SEQ ID NO: 896179 - DNA, 33 bp, Homo sapien
catcttgtgatttcccccaagaatccttcctac

SEQ ID NO: 896180 - DNA, 33 bp, Homo sapien
catcttgtgatttcccgcaagaatccttcctac

SEQ ID NO: 896181 - DNA, 33 bp, Homo sapien
ttcccttgcatgccacagtatttcttctgtttc

SEQ ID NO: 896182 - DNA, 33 bp, Homo sapien
ttcccttgcatgccacggtatttcttctgtttc

SEQ ID NO: 896183 - DNA, 33 bp, Homo sapien
atcattcagggaccacaaagatatccagttttc

SEQ ID NO: 896184 - DNA, 33 bp, Homo sapien
atcattcagggaccacgaagatatccagttttc

SEQ ID NO: 896185 - DNA, 33 bp, Homo sapien; identical to SEQ ID NO: 896183

SEQ ID NO: 896186 - DNA, 33 bp, Homo sapien; identical to SEQ ID NO: 896184

SEQ ID NO: 896187 - DNA, 33 bp, Homo sapien
gtcagagctggaactaagagtctaatgtattta

SEQ ID NO: 896188 - DNA, 33 bp, Homo sapien
gtcagagctggaactaggagtctaatgtattta

SEQ ID NO: 896189 - DNA, 33 bp, Homo sapien
caaaaagacaaatcaccctaacatacatcagaa

SEQ ID NO: 896190 - DNA, 33 bp, Homo sapien
caaaaagacaaatcacgctaacatacatcagaa

SEQ ID NO: 896191 - DNA, 33 bp, Homo sapien
gggccactaattattacgctaacagcctttggc

SEQ ID NO: 896192 - DNA, 33 bp, Homo sapien
gggccactaattattatgctaacagcctttggc

SEQ ID NO: 896193 - DNA, 33 bp, Homo sapien
tgtggaattaagcaataaataatgatgcttgca

SEQ ID NO: 896194 - DNA, 33 bp, Homo sapien
tgtggaattaagcaatgaataatgatgcttgca

SEQ ID NO: 896195 - DNA, 33 bp, Homo sapien
tatattcatttttatgcatgagaactgagctca

SEQ ID NO: 896196 - DNA, 33 bp, Homo sapien
tatattcatttttatgtatgagaactgagctca

SEQ ID NO: 896197 - DNA, 33 bp, Homo sapien
gtctgcatttcatacaacatactatgacaacga

SEQ ID NO: 896198 - DNA, 33 bp, Homo sapien
gtctgcatttcatacatcatactatgacaacga

SEQ ID NO: 896199 - DNA, 33 bp, Homo sapien
cagtactattcatcgaaatgagaaacataggag

SEQ ID NO: 896200 - DNA, 33 bp, Homo sapien
cagtactattcatcgacatgagaaacataggag

SEQ ID NO: 896201 - DNA, 33 bp, Homo sapien
ctgaagggttactaaagcaaagaggtacttttc

SEQ ID NO: 896202 - DNA, 33 bp, Homo sapien
ctgaagggttactaaatcaaagaggtacttttc

SEQ ID NO: 896203 - DNA, 33 bp, Homo sapien
cagtaccttctactgaaagaacttaaaattatg

SEQ ID NO: 896204 - DNA, 33 bp, Homo sapien
cagtaccttctactgacagaacttaaaattatg

SEQ ID NO: 896205 - DNA, 33 bp, Homo sapien
ttaaaagcatttatcacgttccagaaattcttc

SEQ ID NO: 896206 - DNA, 33 bp, Homo sapien
ttaaaagcatttatcatgttccagaaattcttc

SEQ ID NO: 896207 - DNA, 33 bp, Homo sapien
tagaagttggaagagaacagactttatcaggca

SEQ ID NO: 896208 - DNA, 33 bp, Homo sapien
tagaagttggaagagagcagactttatcaggca

SEQ ID NO: 896209 - DNA, 33 bp, Homo sapien
tggaggaacagaaagaagttcatcgtcaagcaa

SEQ ID NO: 896210 - DNA, 33 bp, Homo sapien
tggaggaacagaaagaggttcatcgtcaagcaa

SEQ ID NO: 896211 - DNA, 33 bp, Homo sapien
caacagatttcctccccgataaagatgtggcca

SEQ ID NO: 896212 - DNA, 33 bp, Homo sapien
caacagatttcctcccggataaagatgtggcca

SEQ ID NO: 896213 - DNA, 33 bp, Homo sapien
cctccacgaaccacataagtgtaagtttaagca

SEQ ID NO: 896214 - DNA, 33 bp, Homo sapien
cctccacgaaccacatcagtgtaagtttaagca

SEQ ID NO: 896215 - DNA, 33 bp, Homo sapien
ttagagaatatttaaacgcgtaagtaggcacag

SEQ ID NO: 896216 - DNA, 33 bp, Homo sapien
ttagagaatatttaaatgcgtaagtaggcacag

SEQ ID NO: 896217 - DNA, 33 bp, Homo sapien
gggaggtccaatgtgcacccacagtggtttctc

SEQ ID NO: 896218 - DNA, 33 bp, Homo sapien
gggaggtccaatgtgcgcccacagtggtttctc

SEQ ID NO: 896219 - DNA, 33 bp, Homo sapien
atgctccattaatgaacgttggagtccctcttg

SEQ ID NO: 896220 - DNA, 33 bp, Homo sapien
atgctccattaatgaatgttggagtccctcttg

SEQ ID NO: 896221 - DNA, 33 bp, Homo sapien
ctaagataagaaaagacgactgtatgctccatt

SEQ ID NO: 896222 - DNA, 33 bp, Homo sapien
ctaagataagaaaagatgactgtatgctccatt

SEQ ID NO: 896223 - DNA, 33 bp, Homo sapien
agctaatgaacagaaacttctagagctagtcaa

SEQ ID NO: 896224 - DNA, 33 bp, Homo sapien
agctaatgaacagaaatttctagagctagtcaa

SEQ ID NO: 896225 - DNA, 33 bp, Homo sapien
agagtcagaaatgttaccaggacaatgggcgag

SEQ ID NO: 896226 - DNA, 33 bp, Homo sapien
agagtcagaaatgttatcaggacaatgggcgag

SEQ ID NO: 896227 - DNA, 33 bp, Homo sapien
tcttttatagtagaccaggctctaggggtgact

SEQ ID NO: 896228 - DNA, 33 bp, Homo sapien
tcttttatagtagaccgggctctaggggtgact

SEQ ID NO: 896229 - DNA, 33 bp, Homo sapien
ccccgcatcgtaatctcaccacagttcattcag

SEQ ID NO: 896230 - DNA, 33 bp, Homo sapien
ccccgcatcgtaatcttaccacagttcattcag

SEQ ID NO: 896231 - DNA, 33 bp, Homo sapien
ttgtatgtagagaaaaaggaccatctctatgac

SEQ ID NO: 896232 - DNA, 33 bp, Homo sapien
ttgtatgtagagaaaatggaccatctctatgac

SEQ ID NO: 896233 - DNA, 33 bp, Homo sapien
ttgtgatgttgctaaaaatagaagtccttaact

SEQ ID NO: 896234 - DNA, 33 bp, Homo sapien
ttgtgatgttgctaaatatagaagtccttaact

SEQ ID NO: 896235 - DNA, 33 bp, Homo sapien
tgtctctgagtttccaatctgtgcaatgtggtc

SEQ ID NO: 896236 - DNA, 33 bp, Homo sapien
tgtctctgagtttccagtctgtgcaatgtggtc

SEQ ID NO: 896237 - DNA, 33 bp, Homo sapien
agacatgctaatctgcccggtcaaattccacgg

SEQ ID NO: 896238 - DNA, 33 bp, Homo sapien
agacatgctaatctgctcggtcaaattccacgg

SEQ ID NO: 896239 - DNA, 33 bp, Homo sapien
ttatggtcaaacctgaagtcaaatatcaagaat

SEQ ID NO: 896240 - DNA, 33 bp, Homo sapien
ttatggtcaaacctgaggtcaaatatcaagaat

SEQ ID NO: 896241 - DNA, 33 bp, Homo sapien
ccgtggcttcgaaagactctctgggtcagtgga

SEQ ID NO: 896242 - DNA, 33 bp, Homo sapien
ccgtggcttcgaaagattctctgggtcagtgga

SEQ ID NO: 896243 - DNA, 33 bp, Homo sapien
ttgtagtacctgataacgtctccttataatgaa

SEQ ID NO: 896244 - DNA, 33 bp, Homo sapien
ttgtagtacctgataatgtctccttataatgaa

SEQ ID NO: 896245 - DNA, 33 bp, Homo sapien
tgtgcttacacaggaggaacagcccagctttcc

SEQ ID NO: 896246 - DNA, 33 bp, Homo sapien
tgtgcttacacaggagtaacagcccagctttcc

SEQ ID NO: 896247 - DNA, 33 bp, Homo sapien
cactgaaaagacacgcagagtaatccaaatctt

SEQ ID NO: 896248 - DNA, 33 bp, Homo sapien
cactgaaaagacacgcggagtaatccaaatctt

SEQ ID NO: 896249 - DNA, 33 bp, Homo sapien
gaataggtgctggaaacctcatatgctggttgt

SEQ ID NO: 896250 - DNA, 33 bp, Homo sapien
gaataggtgctggaaatctcatatgctggttgt

SEQ ID NO: 896251 - DNA, 33 bp, Homo sapien
ctactgttactattctcactttgcagatgagaa

SEQ ID NO: 896252 - DNA, 33 bp, Homo sapien
ctactgttactattcttactttgcagatgagaa

SEQ ID NO: 896253 - DNA, 33 bp, Homo sapien
tctaaacactgagctgaaattgagacattggac

SEQ ID NO: 896254 - DNA, 33 bp, Homo sapien
tctaaacactgagctggaattgagacattggac

SEQ ID NO: 896255 - DNA, 33 bp, Homo sapien
atgtatgcaaagtagcaactaatatatggcaaa

SEQ ID NO: 896256 - DNA, 33 bp, Homo sapien
atgtatgcaaagtagccactaatatatggcaaa

SEQ ID NO: 896257 - DNA, 33 bp, Homo sapien
gtattccccagaacaaatagccattcttctgtg

SEQ ID NO: 896258 - DNA, 33 bp, Homo sapien
gtattccccagaacaagtagccattcttctgtg

SEQ ID NO: 896259 - DNA, 33 bp, Homo sapien
cagtatttgatgaagacaaaatgtaacagggtc

SEQ ID NO: 896260 - DNA, 33 bp, Homo sapien
cagtatttgatgaagataaaatgtaacagggtc

SEQ ID NO: 896261 - DNA, 33 bp, Homo sapien
agggagcaaatactaaatataatcaactcaagc

SEQ ID NO: 896262 - DNA, 33 bp, Homo sapien
agggagcaaatactaagtataatcaactcaagc

SEQ ID NO: 896263 - DNA, 33 bp, Homo sapien
gagcccattttagttcaaggcagcaataggccc

SEQ ID NO: 896264 - DNA, 33 bp, Homo sapien
gagcccattttagttcgaggcagcaataggccc

SEQ ID NO: 896265 - DNA, 33 bp, Homo sapien
aatgaagaagcagaaaacctaagccaagacctg

SEQ ID NO: 896266 - DNA, 33 bp, Homo sapien
aatgaagaagcagaaaccctaagccaagacctg

SEQ ID NO: 896267 - DNA, 33 bp, Homo sapien
tcttgtaagatgacaaaaggataaagtgagagt

SEQ ID NO: 896268 - DNA, 33 bp, Homo sapien
tcttgtaagatgacaagaggataaagtgagagt

SEQ ID NO: 896269 - DNA, 33 bp, Homo sapien
cagtcagactggaaagacctgcaaaccctcact

SEQ ID NO: 896270 - DNA, 33 bp, Homo sapien
cagtcagactggaaaggcctgcaaaccctcact

SEQ ID NO: 896271 - DNA, 33 bp, Homo sapien
gccgttgggacagacaatagtacttttgggaca

SEQ ID NO: 896272 - DNA, 33 bp, Homo sapien
gccgttgggacagacagtagtacttttgggaca

SEQ ID NO: 896273 - DNA, 33 bp, Homo sapien
gttaggtaatagagacccctaaaatatgcatca

SEQ ID NO: 896274 - DNA, 33 bp, Homo sapien
gttaggtaatagagactcctaaaatatgcatca

SEQ ID NO: 896275 - DNA, 33 bp, Homo sapien
ctgcactaacctgttaactttctatatgaaaaa

SEQ ID NO: 896276 - DNA, 33 bp, Homo sapien
ctgcactaacctgttatctttctatatgaaaaa

SEQ ID NO: 896277 - DNA, 33 bp, Homo sapien
tgtgcaaggagctaccactattcccatgaacag

SEQ ID NO: 896278 - DNA, 33 bp, Homo sapien
tgtgcaaggagctaccgctattcccatgaacag

SEQ ID NO: 896279 - DNA, 33 bp, Homo sapien
ggtgaactaacactggaatgtatctgaaagatt

SEQ ID NO: 896280 - DNA, 33 bp, Homo sapien
ggtgaactaacactggcatgtatctgaaagatt

SEQ ID NO: 896281 - DNA, 33 bp, Homo sapien
aaatagcctgttgccaataagtgtgtggcttct

SEQ ID NO: 896282 - DNA, 33 bp, Homo sapien
aaatagcctgttgccagtaagtgtgtggcttct

SEQ ID NO: 896283 - DNA, 33 bp, Homo sapien
gcatattggaggtgacacagaaaaatggagcaa

SEQ ID NO: 896284 - DNA, 33 bp, Homo sapien
gcatattggaggtgactcagaaaaatggagcaa

SEQ ID NO: 896285 - DNA, 33 bp, Homo sapien
caatcccttctgcctacccctaagatgctgtta

SEQ ID NO: 896286 - DNA, 33 bp, Homo sapien
caatcccttctgcctatccctaagatgctgtta

SEQ ID NO: 896287 - DNA, 33 bp, Homo sapien
gcagtcaacagatagtaaagagtgaataccttc

SEQ ID NO: 896288 - DNA, 33 bp, Homo sapien
gcagtcaacagatagtgaagagtgaataccttc

SEQ ID NO: 896289 - DNA, 33 bp, Homo sapien
tgctaatttctatgccccaagctaaatgctttg

SEQ ID NO: 896290 - DNA, 33 bp, Homo sapien
tgctaatttctatgcctcaagctaaatgctttg

SEQ ID NO: 896291 - DNA, 33 bp, Homo sapien
aaacatgagaatagaaagtaatggatatacaag

SEQ ID NO: 896292 - DNA, 33 bp, Homo sapien
aaacatgagaatagaacgtaatggatatacaag

SEQ ID NO: 896293 - DNA, 33 bp, Homo sapien
acctcaaaatgtaccacatgttggactgcaaga

SEQ ID NO: 896294 - DNA, 33 bp, Homo sapien
acctcaaaatgtaccatatgttggactgcaaga

SEQ ID NO: 896295 - DNA, 33 bp, Homo sapien
aatgcatgaagggaaccggcaaattagtgactc

SEQ ID NO: 896296 - DNA, 33 bp, Homo sapien
aatgcatgaagggaactggcaaattagtgactc

SEQ ID NO: 896297 - DNA, 33 bp, Homo sapien
gagccatgataggtaacggaggttttgcagagc

SEQ ID NO: 896298 - DNA, 33 bp, Homo sapien
gagccatgataggtaatggaggttttgcagagc

SEQ ID NO: 896299 - DNA, 33 bp, Homo sapien
tctgatgtaatgaaagaccacaggctctggagc

SEQ ID NO: 896300 - DNA, 33 bp, Homo sapien
tctgatgtaatgaaagtccacaggctctggagc

SEQ ID NO: 896301 - DNA, 33 bp, Homo sapien
aatgttgccgtatagcacgcattctgcttacat

SEQ ID NO: 896302 - DNA, 33 bp, Homo sapien
aatgttgccgtatagctcgcattctgcttacat

SEQ ID NO: 896303 - DNA, 33 bp, Homo sapien
cagaaccctcaccaaacaagtggtaaatattgt

SEQ ID NO: 896304 - DNA, 33 bp, Homo sapien
cagaaccctcaccaaataagtggtaaatattgt

SEQ ID NO: 896305 - DNA, 33 bp, Homo sapien
ccaagtcatctcccaaagttggatcccatagct

SEQ ID NO: 896306 - DNA, 33 bp, Homo sapien
ccaagtcatctcccaatgttggatcccatagct

SEQ ID NO: 896307 - DNA, 33 bp, Homo sapien
tgggtgaaatcaaatccgagcgcttattcctct

SEQ ID NO: 896308 - DNA, 33 bp, Homo sapien
tgggtgaaatcaaatctgagcgcttattcctct

SEQ ID NO: 896309 - DNA, 33 bp, Homo sapien
ataataataacgggagaccattacacatttggg

SEQ ID NO: 896310 - DNA, 33 bp, Homo sapien
ataataataacgggaggccattacacatttggg

SEQ ID NO: 896311 - DNA, 33 bp, Homo sapien
atggggagggttagaacaaacaacggctgcaag

SEQ ID NO: 896312 - DNA, 33 bp, Homo sapien
atggggagggttagaataaacaacggctgcaag

SEQ ID NO: 896313 - DNA, 33 bp, Homo sapien
agcttggctcaacgagaccgtgcatctgctgca

SEQ ID NO: 896314 - DNA, 33 bp, Homo sapien
agcttggctcaacgaggccgtgcatctgctgca

SEQ ID NO: 896315 - DNA, 33 bp, Homo sapien
gaattcaggtccaaaggcttcctctctcattgg

SEQ ID NO: 896316 - DNA, 33 bp, Homo sapien
gaattcaggtccaaagtcttcctctctcattgg

SEQ ID NO: 896317 - DNA, 33 bp, Homo sapien
ctgaacactttttgaacggtgttttgaatggtg

SEQ ID NO: 896318 - DNA, 33 bp, Homo sapien
ctgaacactttttgaatggtgttttgaatggtg

SEQ ID NO: 896319 - DNA, 33 bp, Homo sapien
gtttagctccattttcccaaagataaaacatta

SEQ ID NO: 896320 - DNA, 33 bp, Homo sapien
gtttagctccattttcgcaaagataaaacatta

SEQ ID NO: 896321 - DNA, 33 bp, Homo sapien
tattgagtgagatagaactttcttatgaatgaa

SEQ ID NO: 896322 - DNA, 33 bp, Homo sapien
tattgagtgagatagagctttcttatgaatgaa

SEQ ID NO: 896323 - DNA, 33 bp, Homo sapien
gaatagcattttgttaaggtcagaattttccag

SEQ ID NO: 896324 - DNA, 33 bp, Homo sapien
gaatagcattttgttagggtcagaattttccag

SEQ ID NO: 896325 - DNA, 33 bp, Homo sapien
aagaagctgctgtttcaattggttggcatcaga

SEQ ID NO: 896326 - DNA, 33 bp, Homo sapien
aagaagctgctgtttccattggttggcatcaga

SEQ ID NO: 896327 - DNA, 33 bp, Homo sapien
taagtgacagaggcaacgattaagcctgagtct

SEQ ID NO: 896328 - DNA, 33 bp, Homo sapien
taagtgacagaggcaatgattaagcctgagtct

SEQ ID NO: 896329 - DNA, 33 bp, Homo sapien
ccgcaacctcagaatacgcactttaatttattt

SEQ ID NO: 896330 - DNA, 33 bp, Homo sapien
ccgcaacctcagaatatgcactttaatttattt

SEQ ID NO: 896331 - DNA, 33 bp, Homo sapien
atatgagattatgtgacgagactaaactatgat

SEQ ID NO: 896332 - DNA, 33 bp, Homo sapien
atatgagattatgtgatgagactaaactatgat

SEQ ID NO: 896333 - DNA, 33 bp, Homo sapien
tggctttttgagtttacggtgttttggcattga

SEQ ID NO: 896334 - DNA, 33 bp, Homo sapien
tggctttttgagtttatggtgttttggcattga

SEQ ID NO: 896335 - DNA, 33 bp, Homo sapien
cctgtaggtgcattcaagttggcaacaagtcag

SEQ ID NO: 896336 - DNA, 33 bp, Homo sapien
cctgtaggtgcattcaggttggcaacaagtcag

SEQ ID NO: 896337 - DNA, 33 bp, Homo sapien
gagcaagtgccctgccaaggagaatgccacaaa

SEQ ID NO: 896338 - DNA, 33 bp, Homo sapien
gagcaagtgccctgccgaggagaatgccacaaa

SEQ ID NO: 896339 - DNA, 33 bp, Homo sapien
accatcaaatgttattaaagagagctataaaaa

SEQ ID NO: 896340 - DNA, 33 bp, Homo sapien
accatcaaatgttatttaagagagctataaaaa

SEQ ID NO: 896341 - DNA, 33 bp, Homo sapien
ttatctatcatgcaaacttggggaagatgagat

SEQ ID NO: 896342 - DNA, 33 bp, Homo sapien
ttatctatcatgcaaatttggggaagatgagat

SEQ ID NO: 896343 - DNA, 33 bp, Homo sapien
actcctctcacctacaatcttcttaacatggtg

SEQ ID NO: 896344 - DNA, 33 bp, Homo sapien
actcctctcacctacactcttcttaacatggtg

SEQ ID NO: 896345 - DNA, 33 bp, Homo sapien
cagatatctcctgtggcacaagattgcccctgg

SEQ ID NO: 896346 - DNA, 33 bp, Homo sapien
cagatatctcctgtggtacaagattgcccctgg

SEQ ID NO: 896347 - DNA, 33 bp, Homo sapien
accaatgaaggggaaaatgagcaaatgcctttg

SEQ ID NO: 896348 - DNA, 33 bp, Homo sapien
accaatgaaggggaaagtgagcaaatgcctttg

SEQ ID NO: 896349 - DNA, 33 bp, Homo sapien
aaggtagatcttcaaaagggactttattcgata

SEQ ID NO: 896350 - DNA, 33 bp, Homo sapien
aaggtagatcttcaaaggggactttattcgata

SEQ ID NO: 896351 - DNA, 33 bp, Homo sapien
ttctacacgatgcaatgaaggcttactgccatt

SEQ ID NO: 896352 - DNA, 33 bp, Homo sapien
ttctacacgatgcaattaaggcttactgccatt

SEQ ID NO: 896353 - DNA, 33 bp, Homo sapien
ccccattcttctgttcccttcctcacacacatc

SEQ ID NO: 896354 - DNA, 33 bp, Homo sapien
ccccattcttctgttctcttcctcacacacatc

SEQ ID NO: 896355 - DNA, 33 bp, Homo sapien
agaacagtttgaacaacgggatgtgacataaga

SEQ ID NO: 896356 - DNA, 33 bp, Homo sapien
agaacagtttgaacaatgggatgtgacataaga

SEQ ID NO: 896357 - DNA, 33 bp, Homo sapien
gacacctgtcaagatcaaaagactggtgtcagg

SEQ ID NO: 896358 - DNA, 33 bp, Homo sapien
gacacctgtcaagatcgaaagactggtgtcagg

SEQ ID NO: 896359 - DNA, 33 bp, Homo sapien
atttgctgaataaataaatgtaactgcatgaaa

SEQ ID NO: 896360 - DNA, 33 bp, Homo sapien
atttgctgaataaatatatgtaactgcatgaaa

SEQ ID NO: 896361 - DNA, 33 bp, Homo sapien
tggcttggaataactactagtcaaaagaatgaa

SEQ ID NO: 896362 - DNA, 33 bp, Homo sapien
tggcttggaataactattagtcaaaagaatgaa

SEQ ID NO: 896363 - DNA, 33 bp, Homo sapien
cccaagtgcagagaggaaatcatcctttattag

SEQ ID NO: 896364 - DNA, 33 bp, Homo sapien
cccaagtgcagagaggtaatcatcctttattag

SEQ ID NO: 896365 - DNA, 33 bp, Homo sapien
aacagaatgtatttttaaaaaacagtgagctct

SEQ ID NO: 896366 - DNA, 33 bp, Homo sapien
aacagaatgtattttttaaaaacagtgagctct

SEQ ID NO: 896367 - DNA, 33 bp, Homo sapien
ataatgctgaaaagcactaaggtatcaagaaca

SEQ ID NO: 896368 - DNA, 33 bp, Homo sapien
ataatgctgaaaagcagtaaggtatcaagaaca

SEQ ID NO: 896369 - DNA, 33 bp, Homo sapien
agtgactagagattaccaggagatggtagtagg

SEQ ID NO: 896370 - DNA, 33 bp, Homo sapien
agtgactagagattactaggagatggtagtagg

SEQ ID NO: 896371 - DNA, 33 bp, Homo sapien
gtcttgtgttcccatccctaacagtttctggca

SEQ ID NO: 896372 - DNA, 33 bp, Homo sapien
gtcttgtgttcccatcgctaacagtttctggca

SEQ ID NO: 896373 - DNA, 33 bp, Homo sapien
cccagagatgatttgaacagccatgccaattag

SEQ ID NO: 896374 - DNA, 33 bp, Homo sapien
cccagagatgatttgagcagccatgccaattag

SEQ ID NO: 896375 - DNA, 33 bp, Homo sapien
ataggtcccgaaatggcgactcatgccctctcc

SEQ ID NO: 896376 - DNA, 33 bp, Homo sapien
ataggtcccgaaatggtgactcatgccctctcc

SEQ ID NO: 896377 - DNA, 33 bp, Homo sapien
tgctggtggcaaaatacacgacgtaatataaga

SEQ ID NO: 896378 - DNA, 33 bp, Homo sapien
tgctggtggcaaaatatacgacgtaatataaga

SEQ ID NO: 896379 - DNA, 33 bp, Homo sapien
ctttgtgcaagaaagaccaggaagaaccccacc

SEQ ID NO: 896380 - DNA, 33 bp, Homo sapien
ctttgtgcaagaaagatcaggaagaaccccacc

SEQ ID NO: 896381 - DNA, 33 bp, Homo sapien
aacctccacttcattagcttcccaggccaacta

SEQ ID NO: 896382 - DNA, 33 bp, Homo sapien
aacctccacttcattatcttcccaggccaacta

SEQ ID NO: 896383 - DNA, 33 bp, Homo sapien
gaaatccatctcttacccagttattggaaccac

SEQ ID NO: 896384 - DNA, 33 bp, Homo sapien
gaaatccatctcttactcagttattggaaccac

SEQ ID NO: 896385 - DNA, 33 bp, Homo sapien
cattcacctttaaacccgagatctcatcaactc

SEQ ID NO: 896386 - DNA, 33 bp, Homo sapien
cattcacctttaaacctgagatctcatcaactc

SEQ ID NO: 896387 - DNA, 33 bp, Homo sapien
atctgtgaaatgataaggctggatgtggtgatc

SEQ ID NO: 896388 - DNA, 33 bp, Homo sapien
atctgtgaaatgataatgctggatgtggtgatc

SEQ ID NO: 896389 - DNA, 33 bp, Homo sapien
ctccctgttacatccaacattcaatggtgggag

SEQ ID NO: 896390 - DNA, 33 bp, Homo sapien
ctccctgttacatccagcattcaatggtgggag

SEQ ID NO: 896391 - DNA, 33 bp, Homo sapien
agcatttgcatgccaaactttgggtttctctgg

SEQ ID NO: 896392 - DNA, 33 bp, Homo sapien
agcatttgcatgccaagctttgggtttctctgg

SEQ ID NO: 896393 - DNA, 33 bp, Homo sapien
tctggccataactagacagtgatgtgagatcaa

SEQ ID NO: 896394 - DNA, 33 bp, Homo sapien
tctggccataactagagagtgatgtgagatcaa

SEQ ID NO: 896395 - DNA, 33 bp, Homo sapien
gtggaccacctgaatgccatcctactggagtgt

SEQ ID NO: 896396 - DNA, 33 bp, Homo sapien
gtggaccacctgaatgtcatcctactggagtgt

SEQ ID NO: 896397 - DNA, 33 bp, Homo sapien
cttacacctaccccaacgtcttctgctgaagtt

SEQ ID NO: 896398 - DNA, 33 bp, Homo sapien
cttacacctaccccaatgtcttctgctgaagtt

SEQ ID NO: 896399 - DNA, 33 bp, Homo sapien
tggtggagagtgctcaatcttcccaattcaagt

SEQ ID NO: 896400 - DNA, 33 bp, Homo sapien
tggtggagagtgctcagtcttcccaattcaagt

SEQ ID NO: 896401 - DNA, 33 bp, Homo sapien
ctcctccaggtcttacaggaaaaatctgggagt

SEQ ID NO: 896402 - DNA, 33 bp, Homo sapien
ctcctccaggtcttaccggaaaaatctgggagt

SEQ ID NO: 896403 - DNA, 33 bp, Homo sapien
aacagcatttccatgaaagaatgctgtaacgta

SEQ ID NO: 896404 - DNA, 33 bp, Homo sapien
aacagcatttccatgagagaatgctgtaacgta

SEQ ID NO: 896405 - DNA, 33 bp, Homo sapien
gggcaaagtgccagtcacatttcggagccaggg

SEQ ID NO: 896406 - DNA, 33 bp, Homo sapien
gggcaaagtgccagtcgcatttcggagccaggg

SEQ ID NO: 896407 - DNA, 33 bp, Homo sapien
gcgccccgtggagagagagtgggtgttaaaatg

SEQ ID NO: 896408 - DNA, 33 bp, Homo sapien
gcgccccgtggagagatagtgggtgttaaaatg

SEQ ID NO: 896409 - DNA, 33 bp, Homo sapien
gacaaattggttctctaactctgcggttcacat

SEQ ID NO: 896410 - DNA, 33 bp, Homo sapien
gacaaattggttctctgactctgcggttcacat

SEQ ID NO: 896411 - DNA, 33 bp, Homo sapien
agatcatatacattacacttgcttcgtctatat

SEQ ID NO: 896412 - DNA, 33 bp, Homo sapien
agatcatatacattacgcttgcttcgtctatat

SEQ ID NO: 896413 - DNA, 33 bp, Homo sapien
gtttttgagcacatcacgcattgttttacccac

SEQ ID NO: 896414 - DNA, 33 bp, Homo sapien
gtttttgagcacatcaggcattgttttacccac

SEQ ID NO: 896415 - DNA, 33 bp, Homo sapien
attctttgccaactgacagcgaatgttagacat

SEQ ID NO: 896416 - DNA, 33 bp, Homo sapien
attctttgccaactgatagcgaatgttagacat

SEQ ID NO: 896417 - DNA, 33 bp, Homo sapien
tctctcccagctccaaacaatctctgacagatt

SEQ ID NO: 896418 - DNA, 33 bp, Homo sapien
tctctcccagctccaatcaatctctgacagatt

SEQ ID NO: 896419 - DNA, 33 bp, Homo sapien
tccaggtctctggtgcaaaatggtgtagtctct

SEQ ID NO: 896420 - DNA, 33 bp, Homo sapien
tccaggtctctggtgccaaatggtgtagtctct

SEQ ID NO: 896421 - DNA, 33 bp, Homo sapien
caaaggagtccaaattaaaaagtttataaagca

SEQ ID NO: 896422 - DNA, 33 bp, Homo sapien
caaaggagtccaaattgaaaagtttataaagca

SEQ ID NO: 896423 - DNA, 33 bp, Homo sapien
ttcaactctactcaaaatgaaatcataatcttc

SEQ ID NO: 896424 - DNA, 33 bp, Homo sapien
ttcaactctactcaaagtgaaatcataatcttc

SEQ ID NO: 896425 - DNA, 33 bp, Homo sapien
atctcctaacacctaactggagatgtattgacc

SEQ ID NO: 896426 - DNA, 33 bp, Homo sapien
atctcctaacacctaagtggagatgtattgacc

SEQ ID NO: 896427 - DNA, 33 bp, Homo sapien
caagttgatacagagacagcggaagtggctggt

SEQ ID NO: 896428 - DNA, 33 bp, Homo sapien
caagttgatacagagatagcggaagtggctggt

SEQ ID NO: 896429 - DNA, 33 bp, Homo sapien
ccaagtttcccatgtcacgtaaacaacaaaact

SEQ ID NO: 896430 - DNA, 33 bp, Homo sapien
ccaagtttcccatgtcgcgtaaacaacaaaact

SEQ ID NO: 896431 - DNA, 33 bp, Homo sapien
acttgattaaaatgagaacttaggtaaatttct

SEQ ID NO: 896432 - DNA, 33 bp, Homo sapien
acttgattaaaatgagtacttaggtaaatttct

SEQ ID NO: 896433 - DNA, 33 bp, Homo sapien
tgtgcctcatgatgcaaatgcgacagctctgaa

SEQ ID NO: 896434 - DNA, 33 bp, Homo sapien
tgtgcctcatgatgcatatgcgacagctctgaa

SEQ ID NO: 896435 - DNA, 33 bp, Homo sapien
tgaaaacagaaaacaccggtcattcaccatgca

SEQ ID NO: 896436 - DNA, 33 bp, Homo sapien
tgaaaacagaaaacactggtcattcaccatgca

SEQ ID NO: 896437 - DNA, 33 bp, Homo sapien
gcattgcttcctaaaccatcatgctatattgcc

SEQ ID NO: 896438 - DNA, 33 bp, Homo sapien
gcattgcttcctaaactatcatgctatattgcc

SEQ ID NO: 896439 - DNA, 33 bp, Homo sapien
ctagccaattcgctgaaatcaggagatgatttc

SEQ ID NO: 896440 - DNA, 33 bp, Homo sapien
ctagccaattcgctgagatcaggagatgatttc

SEQ ID NO: 896441 - DNA, 33 bp, Homo sapien
ggaatcagatcattggaaattttaataaaagtg

SEQ ID NO: 896442 - DNA, 33 bp, Homo sapien
ggaatcagatcattgggaattttaataaaagtg

SEQ ID NO: 896443 - DNA, 33 bp, Homo sapien
cttgagctggctagaaggatgcccatgtgaatg

SEQ ID NO: 896444 - DNA, 33 bp, Homo sapien
cttgagctggctagaatgatgcccatgtgaatg

SEQ ID NO: 896445 - DNA, 33 bp, Homo sapien
cagctgtctgcttaccactctggtcctcattga

SEQ ID NO: 896446 - DNA, 33 bp, Homo sapien
cagctgtctgcttacctctctggtcctcattga

SEQ ID NO: 896447 - DNA, 33 bp, Homo sapien
atagccgttgaatgtgaatacgctaaggaaaaa

SEQ ID NO: 896448 - DNA, 33 bp, Homo sapien
atagccgttgaatgtgcatacgctaaggaaaaa

SEQ ID NO: 896449 - DNA, 33 bp, Homo sapien
ggaacatcagaggtcaccttaactctccataac

SEQ ID NO: 896450 - DNA, 33 bp, Homo sapien
ggaacatcagaggtcatcttaactctccataac

SEQ ID NO: 896451 - DNA, 33 bp, Homo sapien
aaccctgctccaaaaaaataattgtttcaaagg

SEQ ID NO: 896452 - DNA, 33 bp, Homo sapien
aaccctgctccaaaaacataattgtttcaaagg

SEQ ID NO: 896453 - DNA, 33 bp, Homo sapien
catcttaactcttaccacaagctgagcccaaag

SEQ ID NO: 896454 - DNA, 33 bp, Homo sapien
catcttaactcttaccgcaagctgagcccaaag

SEQ ID NO: 896455 - DNA, 33 bp, Homo sapien
ttggttctttcctctacattcttctctccacat

SEQ ID NO: 896456 - DNA, 33 bp, Homo sapien
ttggttctttcctctatattcttctctccacat

SEQ ID NO: 896457 - DNA, 33 bp, Homo sapien
aaatgcacacatctcccgaaacgagcattaagt

SEQ ID NO: 896458 - DNA, 33 bp, Homo sapien
aaatgcacacatctcctgaaacgagcattaagt

SEQ ID NO: 896459 - DNA, 33 bp, Homo sapien
ggcacctctggaaagacgaactagaagccaatt

SEQ ID NO: 896460 - DNA, 33 bp, Homo sapien
ggcacctctggaaagatgaactagaagccaatt

SEQ ID NO: 896461 - DNA, 33 bp, Homo sapien
gcaactccatgtctccacacagtgataaatatg

SEQ ID NO: 896462 - DNA, 33 bp, Homo sapien
gcaactccatgtctccgcacagtgataaatatg

SEQ ID NO: 896463 - DNA, 33 bp, Homo sapien
ctcttgcccatggagccatctgacatctcttgg

SEQ ID NO: 896464 - DNA, 33 bp, Homo sapien
ctcttgcccatggagctatctgacatctcttgg

SEQ ID NO: 896465 - DNA, 33 bp, Homo sapien
gctggcttccttcaaagcaaggtaaaatgagat

SEQ ID NO: 896466 - DNA, 33 bp, Homo sapien
gctggcttccttcaaatcaaggtaaaatgagat

SEQ ID NO: 896467 - DNA, 33 bp, Homo sapien
atgggggaagcaggtacattttgcatgcagtga

SEQ ID NO: 896468 - DNA, 33 bp, Homo sapien
atgggggaagcaggtatattttgcatgcagtga

SEQ ID NO: 896469 - DNA, 33 bp, Homo sapien
ctaagtgccaggaaaacgcacttgtagcatgaa

SEQ ID NO: 896470 - DNA, 33 bp, Homo sapien
ctaagtgccaggaaaatgcacttgtagcatgaa

SEQ ID NO: 896471 - DNA, 33 bp, Homo sapien
aatctgttctacttaaaaagctatgccaaatag

SEQ ID NO: 896472 - DNA, 33 bp, Homo sapien
aatctgttctacttaataagctatgccaaatag

SEQ ID NO: 896473 - DNA, 33 bp, Homo sapien
attaaagaagtgtattaaaggtaccaagataga

SEQ ID NO: 896474 - DNA, 33 bp, Homo sapien
attaaagaagtgtattgaaggtaccaagataga

SEQ ID NO: 896475 - DNA, 33 bp, Homo sapien
caatgattttaagaaccgagtggcaggcacaac

SEQ ID NO: 896476 - DNA, 33 bp, Homo sapien
caatgattttaagaactgagtggcaggcacaac

SEQ ID NO: 896477 - DNA, 33 bp, Homo sapien
cttatctcttccagggaaagtgtgcagaagtgt

SEQ ID NO: 896478 - DNA, 33 bp, Homo sapien
cttatctcttccagggcaagtgtgcagaagtgt

SEQ ID NO: 896479 - DNA, 33 bp, Homo sapien
ccaatctgagcacatcaataataccaacagtaa

SEQ ID NO: 896480 - DNA, 33 bp, Homo sapien
ccaatctgagcacatcgataataccaacagtaa

SEQ ID NO: 896481 - DNA, 33 bp, Homo sapien
ctgtagaaataaatgcgccagttgttgctcggg

SEQ ID NO: 896482 - DNA, 33 bp, Homo sapien
ctgtagaaataaatgctccagttgttgctcggg

SEQ ID NO: 896483 - DNA, 33 bp, Homo sapien
gactttctgaaagaacaagatacgtaaataaag

SEQ ID NO: 896484 - DNA, 33 bp, Homo sapien
gactttctgaaagaacgagatacgtaaataaag

SEQ ID NO: 896485 - DNA, 33 bp, Homo sapien
taaccagctgaagggacaatgaacatggagaac

SEQ ID NO: 896486 - DNA, 33 bp, Homo sapien
taaccagctgaagggataatgaacatggagaac

SEQ ID NO: 896487 - DNA, 33 bp, Homo sapien
gtagctgtggtgctgacggtagacttctcctag

SEQ ID NO: 896488 - DNA, 33 bp, Homo sapien
gtagctgtggtgctgatggtagacttctcctag

SEQ ID NO: 896489 - DNA, 33 bp, Homo sapien
gaaaataaaggttagcccttcctgatctctgtg

SEQ ID NO: 896490 - DNA, 33 bp, Homo sapien
gaaaataaaggttagctcttcctgatctctgtg

SEQ ID NO: 896491 - DNA, 33 bp, Homo sapien
aattcaaaatgttcgacgtaaatcaaataatta

SEQ ID NO: 896492 - DNA, 33 bp, Homo sapien
aattcaaaatgttcgatgtaaatcaaataatta

SEQ ID NO: 896493 - DNA, 33 bp, Homo sapien
tttaatctgtagcttccctttcccgctggcttt

SEQ ID NO: 896494 - DNA, 33 bp, Homo sapien
tttaatctgtagcttctctttcccgctggcttt

SEQ ID NO: 896495 - DNA, 33 bp, Homo sapien
tgtgggttctcggtgccctgctctctactgtgg

SEQ ID NO: 896496 - DNA, 33 bp, Homo sapien
tgtgggttctcggtgctctgctctctactgtgg

SEQ ID NO: 896497 - DNA, 33 bp, Homo sapien
tgactgttccttcttcactcatttgccacaaat

SEQ ID NO: 896498 - DNA, 33 bp, Homo sapien
tgactgttccttcttcgctcatttgccacaaat

SEQ ID NO: 896499 - DNA, 33 bp, Homo sapien
gtctggaacagtttcaaaacacatgaagaactc

SEQ ID NO: 896500 - DNA, 33 bp, Homo sapien
gtctggaacagtttcagaacacatgaagaactc

SEQ ID NO: 896501 - DNA, 33 bp, Homo sapien
atccaacacttctcaacgaggattccaggaggc

SEQ ID NO: 896502 - DNA, 33 bp, Homo sapien
atccaacacttctcaatgaggattccaggaggc

SEQ ID NO: 896503 - DNA, 33 bp, Homo sapien
tttacccctaattctcaccttgaccatatccag

SEQ ID NO: 896504 - DNA, 33 bp, Homo sapien
tttacccctaattctcgccttgaccatatccag

SEQ ID NO: 896505 - DNA, 33 bp, Homo sapien
gctagattttacttgcggattttactggatatg

SEQ ID NO: 896506 - DNA, 33 bp, Homo sapien
gctagattttacttgctgattttactggatatg

SEQ ID NO: 896507 - DNA, 33 bp, Homo sapien
tcaacatttagagaaaacaagaggcaagctcta

SEQ ID NO: 896508 - DNA, 33 bp, Homo sapien
tcaacatttagagaaaccaagaggcaagctcta

SEQ ID NO: 896509 - DNA, 33 bp, Homo sapien
ggaaagacaatcactacggatttcaagaggact

SEQ ID NO: 896510 - DNA, 33 bp, Homo sapien
ggaaagacaatcactatggatttcaagaggact

SEQ ID NO: 896511 - DNA, 33 bp, Homo sapien
ctctgccattctgggaaaagtatctatcatggt

SEQ ID NO: 896512 - DNA, 33 bp, Homo sapien
ctctgccattctgggagaagtatctatcatggt

SEQ ID NO: 896513 - DNA, 33 bp, Homo sapien
ttccctcctttttcaacgtgagcctcagcatct

SEQ ID NO: 896514 - DNA, 33 bp, Homo sapien
ttccctcctttttcaatgtgagcctcagcatct

SEQ ID NO: 896515 - DNA, 33 bp, Homo sapien
agggctggtaattctagatctgcatcttgggcc

SEQ ID NO: 896516 - DNA, 33 bp, Homo sapien
agggctggtaattctatatctgcatcttgggcc

SEQ ID NO: 896517 - DNA, 33 bp, Homo sapien
catgttgtgcataaaacatctctggaagacgac

SEQ ID NO: 896518 - DNA, 33 bp, Homo sapien
catgttgtgcataaaatatctctggaagacgac

SEQ ID NO: 896519 - DNA, 33 bp, Homo sapien
gggcagtgggggctaacgttttgtgtacagagg

SEQ ID NO: 896520 - DNA, 33 bp, Homo sapien
gggcagtgggggctaatgttttgtgtacagagg

SEQ ID NO: 896521 - DNA, 33 bp, Homo sapien
accgggagaaggctaaatatttggttaagacaa

SEQ ID NO: 896522 - DNA, 33 bp, Homo sapien
accgggagaaggctaactatttggttaagacaa

SEQ ID NO: 896523 - DNA, 33 bp, Homo sapien
caagggcaaaagaatccacaggcaaatatcccc

SEQ ID NO: 896524 - DNA, 33 bp, Homo sapien
caagggcaaaagaatctacaggcaaatatcccc

SEQ ID NO: 896525 - DNA, 33 bp, Homo sapien
aactgcactctcctggaactaactaattaaatt

SEQ ID NO: 896526 - DNA, 33 bp, Homo sapien
aactgcactctcctgggactaactaattaaatt

SEQ ID NO: 896527 - DNA, 33 bp, Homo sapien
tcttgacaatcattccaagtacaacaagtttta

SEQ ID NO: 896528 - DNA, 33 bp, Homo sapien
tcttgacaatcattccgagtacaacaagtttta

SEQ ID NO: 896529 - DNA, 33 bp, Homo sapien
atgacaatctaaaccactggctgcttttttcca

SEQ ID NO: 896530 - DNA, 33 bp, Homo sapien
atgacaatctaaaccattggctgcttttttcca

SEQ ID NO: 896531 - DNA, 33 bp, Homo sapien
ctagttaccagcagaactgttttgcagatctcc

SEQ ID NO: 896532 - DNA, 33 bp, Homo sapien
ctagttaccagcagaattgttttgcagatctcc

SEQ ID NO: 896533 - DNA, 33 bp, Homo sapien
gagcgggaggaaggtaactttctttgatgccac

SEQ ID NO: 896534 - DNA, 33 bp, Homo sapien
gagcgggaggaaggtacctttctttgatgccac

SEQ ID NO: 896535 - DNA, 33 bp, Homo sapien
attgtaccaaaaaataactccaacacaggctaa

SEQ ID NO: 896536 - DNA, 33 bp, Homo sapien
attgtaccaaaaaatacctccaacacaggctaa

SEQ ID NO: 896537 - DNA, 33 bp, Homo sapien
ttatccacctgaaagggattccaaggggttaca

SEQ ID NO: 896538 - DNA, 33 bp, Homo sapien
ttatccacctgaaaggtattccaaggggttaca

SEQ ID NO: 896539 - DNA, 33 bp, Homo sapien
agaactttcaaattcccgatgtcagaatatatg

SEQ ID NO: 896540 - DNA, 33 bp, Homo sapien
agaactttcaaattcctgatgtcagaatatatg

SEQ ID NO: 896541 - DNA, 33 bp, Homo sapien
ttcaggcattcatctcacatctagttaacttta

SEQ ID NO: 896542 - DNA, 33 bp, Homo sapien
ttcaggcattcatctcgcatctagttaacttta

SEQ ID NO: 896543 - DNA, 33 bp, Homo sapien
aagggaacaaaaaacaatgtagaggaggagatg

SEQ ID NO: 896544 - DNA, 33 bp, Homo sapien
aagggaacaaaaaacagtgtagaggaggagatg

SEQ ID NO: 896545 - DNA, 33 bp, Homo sapien
gatagagctagagaaaagtcacagaagcatcta

SEQ ID NO: 896546 - DNA, 33 bp, Homo sapien
gatagagctagagaaaggtcacagaagcatcta

SEQ ID NO: 896547 - DNA, 33 bp, Homo sapien
aagattcctctgtccaagctaacacacgtaaaa

SEQ ID NO: 896548 - DNA, 33 bp, Homo sapien
aagattcctctgtccatgctaacacacgtaaaa

SEQ ID NO: 896549 - DNA, 33 bp, Homo sapien
agaattaatttcggcaaggcaaaggttatcaga

SEQ ID NO: 896550 - DNA, 33 bp, Homo sapien
agaattaatttcggcagggcaaaggttatcaga

SEQ ID NO: 896551 - DNA, 33 bp, Homo sapien
ggggcctggttatcaaaaatagcctcactgcac

SEQ ID NO: 896552 - DNA, 33 bp, Homo sapien
ggggcctggttatcaagaatagcctcactgcac

SEQ ID NO: 896553 - DNA, 33 bp, Homo sapien
attagctctatatggacgtgagggagagtcacg

SEQ ID NO: 896554 - DNA, 33 bp, Homo sapien
attagctctatatggatgtgagggagagtcacg

SEQ ID NO: 896555 - DNA, 33 bp, Homo sapien
caagtttaacgagtcaaaggtcaaacatcttag

SEQ ID NO: 896556 - DNA, 33 bp, Homo sapien
caagtttaacgagtcagaggtcaaacatcttag

SEQ ID NO: 896557 - DNA, 33 bp, Homo sapien
gttcctaattggtggaagctaccctcacattat

SEQ ID NO: 896558 - DNA, 33 bp, Homo sapien
gttcctaattggtggacgctaccctcacattat

SEQ ID NO: 896559 - DNA, 33 bp, Homo sapien
ccgagtcgtgactgaacacattcaacgactctg

SEQ ID NO: 896560 - DNA, 33 bp, Homo sapien
ccgagtcgtgactgaagacattcaacgactctg

SEQ ID NO: 896561 - DNA, 33 bp, Homo sapien
tactcacagaaataagaacaaattgtctaaact

SEQ ID NO: 896562 - DNA, 33 bp, Homo sapien
tactcacagaaataagtacaaattgtctaaact

SEQ ID NO: 896563 - DNA, 33 bp, Homo sapien
attctcactcgacacaatgacttcagccatcct

SEQ ID NO: 896564 - DNA, 33 bp, Homo sapien
attctcactcgacacagtgacttcagccatcct

SEQ ID NO: 896565 - DNA, 33 bp, Homo sapien
cttacaccattatcaccgctcaacattcacagt

SEQ ID NO: 896566 - DNA, 33 bp, Homo sapien
cttacaccattatcactgctcaacattcacagt

SEQ ID NO: 896567 - DNA, 33 bp, Homo sapien
aatggaaaggataaaacgctaaaaacatagatg

SEQ ID NO: 896568 - DNA, 33 bp, Homo sapien
aatggaaaggataaaatgctaaaaacatagatg

SEQ ID NO: 896569 - DNA, 33 bp, Homo sapien
cctctctgggactgcacacagtgaaggagcagc

SEQ ID NO: 896570 - DNA, 33 bp, Homo sapien
cctctctgggactgcatacagtgaaggagcagc

SEQ ID NO: 896571 - DNA, 33 bp, Homo sapien
ctggatttggagctgtaacaatctatgtctagg

SEQ ID NO: 896572 - DNA, 33 bp, Homo sapien
ctggatttggagctgtgacaatctatgtctagg

SEQ ID NO: 896573 - DNA, 33 bp, Homo sapien
gccctaacgagccaaagcttccctgaatgatag

SEQ ID NO: 896574 - DNA, 33 bp, Homo sapien
gccctaacgagccaaatcttccctgaatgatag

SEQ ID NO: 896575 - DNA, 33 bp, Homo sapien
tggataccaggagagacgccctaacgagccaaa

SEQ ID NO: 896576 - DNA, 33 bp, Homo sapien
tggataccaggagagatgccctaacgagccaaa

SEQ ID NO: 896577 - DNA, 33 bp, Homo sapien
tggtgtggtgattatcaattggcaagctcacct

SEQ ID NO: 896578 - DNA, 33 bp, Homo sapien
tggtgtggtgattatcgattggcaagctcacct

SEQ ID NO: 896579 - DNA, 33 bp, Homo sapien
ggatatgcattggtccacgtgaagcattgtagc

SEQ ID NO: 896580 - DNA, 33 bp, Homo sapien
ggatatgcattggtccgcgtgaagcattgtagc

SEQ ID NO: 896581 - DNA, 33 bp, Homo sapien
tcaaaaaaagaccttgaaagaatgcttctccaa

SEQ ID NO: 896582 - DNA, 33 bp, Homo sapien
tcaaaaaaagaccttggaagaatgcttctccaa

SEQ ID NO: 896583 - DNA, 33 bp, Homo sapien
ccaccactactaacgacatggcattgctaagtt

SEQ ID NO: 896584 - DNA, 33 bp, Homo sapien
ccaccactactaacgatatggcattgctaagtt

SEQ ID NO: 896585 - DNA, 33 bp, Homo sapien
aaagcacaaacactgacagctgtaaggtaaagt

SEQ ID NO: 896586 - DNA, 33 bp, Homo sapien
aaagcacaaacactgatagctgtaaggtaaagt

SEQ ID NO: 896587 - DNA, 33 bp, Homo sapien
ttgaatgcagccttccaagagttacccagggaa

SEQ ID NO: 896588 - DNA, 33 bp, Homo sapien
ttgaatgcagccttcctagagttacccagggaa

SEQ ID NO: 896589 - DNA, 33 bp, Homo sapien
gcattctaagagtttacactgaatttggcaggt

SEQ ID NO: 896590 - DNA, 33 bp, Homo sapien
gcattctaagagtttatactgaatttggcaggt

SEQ ID NO: 896591 - DNA, 33 bp, Homo sapien
tcatactaaagttggccgaccctaaaatccaag

SEQ ID NO: 896592 - DNA, 33 bp, Homo sapien
tcatactaaagttggctgaccctaaaatccaag

SEQ ID NO: 896593 - DNA, 33 bp, Homo sapien
tggacaatttggagccagcatatacgcccatct

SEQ ID NO: 896594 - DNA, 33 bp, Homo sapien
tggacaatttggagcctgcatatacgcccatct

SEQ ID NO: 896595 - DNA, 33 bp, Homo sapien
gatttgctccagtgaaaacccattcatgactac

SEQ ID NO: 896596 - DNA, 33 bp, Homo sapien
gatttgctccagtgaagacccattcatgactac

SEQ ID NO: 896597 - DNA, 33 bp, Homo sapien
taatgagtttttaaaaatagctttgcatcatgt

SEQ ID NO: 896598 - DNA, 33 bp, Homo sapien
taatgagtttttaaaactagctttgcatcatgt

SEQ ID NO: 896599 - DNA, 33 bp, Homo sapien
attctcagtgtttcaaattagaacagcctcagt

SEQ ID NO: 896600 - DNA, 33 bp, Homo sapien
attctcagtgtttcaagttagaacagcctcagt

SEQ ID NO: 896601 - DNA, 33 bp, Homo sapien
gcttgtcagtcctaaaaagaacttgagactgta

SEQ ID NO: 896602 - DNA, 33 bp, Homo sapien
gcttgtcagtcctaaagagaacttgagactgta

SEQ ID NO: 896603 - DNA, 33 bp, Homo sapien
agcacaccatcgtatcacaatatccctgaattt

SEQ ID NO: 896604 - DNA, 33 bp, Homo sapien
agcacaccatcgtatcgcaatatccctgaattt

SEQ ID NO: 896605 - DNA, 33 bp, Homo sapien
tcgcagaacacagagaagaaaagagagaccctg

SEQ ID NO: 896606 - DNA, 33 bp, Homo sapien
tcgcagaacacagagaggaaaagagagaccctg

SEQ ID NO: 896607 - DNA, 33 bp, Homo sapien
acccggcttagagagaaaggaaagcagtcttgt

SEQ ID NO: 896608 - DNA, 33 bp, Homo sapien
acccggcttagagagagaggaaagcagtcttgt

SEQ ID NO: 896609 - DNA, 33 bp, Homo sapien
agttatacatgcctgaagctagattttctggga

SEQ ID NO: 896610 - DNA, 33 bp, Homo sapien
agttatacatgcctgacgctagattttctggga

SEQ ID NO: 896611 - DNA, 33 bp, Homo sapien
gactcacattcccccaatgcttcagtaaaatta

SEQ ID NO: 896612 - DNA, 33 bp, Homo sapien
gactcacattcccccagtgcttcagtaaaatta

SEQ ID NO: 896613 - DNA, 33 bp, Homo sapien
cagatcttattctcctaaaaaaatgctgtatac

SEQ ID NO: 896614 - DNA, 33 bp, Homo sapien
cagatcttattctcctgaaaaaatgctgtatac

SEQ ID NO: 896615 - DNA, 33 bp, Homo sapien
ccacagtttgctgaaccctggtcagtttgcaga

SEQ ID NO: 896616 - DNA, 33 bp, Homo sapien
ccacagtttgctgaactctggtcagtttgcaga

SEQ ID NO: 896617 - DNA, 33 bp, Homo sapien
gagactcaggggaccaccaaaagcaaaaatatt

SEQ ID NO: 896618 - DNA, 33 bp, Homo sapien
gagactcaggggaccatcaaaagcaaaaatatt

SEQ ID NO: 896619 - DNA, 33 bp, Homo sapien
ccatggctgctctgaacgtaggaacctactgtg

SEQ ID NO: 896620 - DNA, 33 bp, Homo sapien
ccatggctgctctgaatgtaggaacctactgtg

SEQ ID NO: 896621 - DNA, 33 bp, Homo sapien
acgtctgcaaggtctaaataaacgctacataat

SEQ ID NO: 896622 - DNA, 33 bp, Homo sapien
acgtctgcaaggtctatataaacgctacataat

SEQ ID NO: 896623 - DNA, 33 bp, Homo sapien
gaaggcatttatacagccgtcagtcatctgcac

SEQ ID NO: 896624 - DNA, 33 bp, Homo sapien
gaaggcatttatacagtcgtcagtcatctgcac

SEQ ID NO: 896625 - DNA, 33 bp, Homo sapien
gttttgaaacggcaaaactgagactcaaagaag

SEQ ID NO: 896626 - DNA, 33 bp, Homo sapien
gttttgaaacggcaaacctgagactcaaagaag

SEQ ID NO: 896627 - DNA, 33 bp, Homo sapien
tgaagagggcagataaataatatgaaccaattg

SEQ ID NO: 896628 - DNA, 33 bp, Homo sapien
tgaagagggcagataagtaatatgaaccaattg

SEQ ID NO: 896629 - DNA, 33 bp, Homo sapien
caaaccgaagcaactcaatgggggaacagacat

SEQ ID NO: 896630 - DNA, 33 bp, Homo sapien
caaaccgaagcaactcgatgggggaacagacat

SEQ ID NO: 896631 - DNA, 33 bp, Homo sapien
gagcttgagccggcgacaaattgaggcgctaat

SEQ ID NO: 896632 - DNA, 33 bp, Homo sapien
gagcttgagccggcgataaattgaggcgctaat

SEQ ID NO: 896633 - DNA, 33 bp, Homo sapien
tgtatgggcgacatgacagcccagcagaaaaca

SEQ ID NO: 896634 - DNA, 33 bp, Homo sapien
tgtatgggcgacatgagagcccagcagaaaaca

SEQ ID NO: 896635 - DNA, 33 bp, Homo sapien
gtaactggcaacttcagccttccagctgcttag

SEQ ID NO: 896636 - DNA, 33 bp, Homo sapien
gtaactggcaacttcatccttccagctgcttag

SEQ ID NO: 896637 - DNA, 33 bp, Homo sapien
gaagttgccagttactaagacagggagaatgtg

SEQ ID NO: 896638 - DNA, 33 bp, Homo sapien
gaagttgccagttactgagacagggagaatgtg

SEQ ID NO: 896639 - DNA, 33 bp, Homo sapien
catgagaatgcagtagactacaactttctttct

SEQ ID NO: 896640 - DNA, 33 bp, Homo sapien
catgagaatgcagtaggctacaactttctttct

SEQ ID NO: 896641 - DNA, 33 bp, Homo sapien
gtattttacaccattaagttctttctgtttctt

SEQ ID NO: 896642 - DNA, 33 bp, Homo sapien
gtattttacaccattaggttctttctgtttctt

SEQ ID NO: 896643 - DNA, 33 bp, Homo sapien
tttagatcttcctagaaatagcaagttgctcca

SEQ ID NO: 896644 - DNA, 33 bp, Homo sapien
tttagatcttcctagagatagcaagttgctcca

SEQ ID NO: 896645 - DNA, 33 bp, Homo sapien
ttccatcttgctctaagaatcaggcattcgcca

SEQ ID NO: 896646 - DNA, 33 bp, Homo sapien
ttccatcttgctctaataatcaggcattcgcca

SEQ ID NO: 896647 - DNA, 33 bp, Homo sapien
gtgtttgagtcctgaaagagtcatccccacgca

SEQ ID NO: 896648 - DNA, 33 bp, Homo sapien
gtgtttgagtcctgaatgagtcatccccacgca

SEQ ID NO: 896649 - DNA, 33 bp, Homo sapien
atcacatcttctctctaactctcatcctcctgc

SEQ ID NO: 896650 - DNA, 33 bp, Homo sapien
atcacatcttctctctgactctcatcctcctgc

SEQ ID NO: 896651 - DNA, 33 bp, Homo sapien
ttttttctttttctaccatgaacgtgtattatt

SEQ ID NO: 896652 - DNA, 33 bp, Homo sapien
ttttttctttttctacgatgaacgtgtattatt

SEQ ID NO: 896653 - DNA, 33 bp, Homo sapien
ctacattcttgacttacgctgtctggggcagta

SEQ ID NO: 896654 - DNA, 33 bp, Homo sapien
ctacattcttgacttaggctgtctggggcagta

SEQ ID NO: 896655 - DNA, 33 bp, Homo sapien
gtgatttccaaatgatcacagcaggaagttttg

SEQ ID NO: 896656 - DNA, 33 bp, Homo sapien
gtgatttccaaatgatgacagcaggaagttttg

SEQ ID NO: 896657 - DNA, 33 bp, Homo sapien
ccattcacaatctgcaggaaaactcaaattatg

SEQ ID NO: 896658 - DNA, 33 bp, Homo sapien
ccattcacaatctgcatgaaaactcaaattatg

SEQ ID NO: 896659 - DNA, 33 bp, Homo sapien
cccctcctcttcaggacgggaagaacctgtgac

SEQ ID NO: 896660 - DNA, 33 bp, Homo sapien
cccctcctcttcaggatgggaagaacctgtgac

SEQ ID NO: 896661 - DNA, 33 bp, Homo sapien
gaaattggaatcctatcacagatgatcaaatta

SEQ ID NO: 896662 - DNA, 33 bp, Homo sapien
gaaattggaatcctattacagatgatcaaatta

SEQ ID NO: 896663 - DNA, 33 bp, Homo sapien
tgtgtttggcagagaacggttcatggctggcat

SEQ ID NO: 896664 - DNA, 33 bp, Homo sapien
tgtgtttggcagagaatggttcatggctggcat

SEQ ID NO: 896665 - DNA, 33 bp, Homo sapien
ccattttatggacataacaagataacactggaa

SEQ ID NO: 896666 - DNA, 33 bp, Homo sapien
ccattttatggacataccaagataacactggaa

SEQ ID NO: 896667 - DNA, 33 bp, Homo sapien
gtagaacagatatcccacagatcattacatatg

SEQ ID NO: 896668 - DNA, 33 bp, Homo sapien
gtagaacagatatccctcagatcattacatatg

SEQ ID NO: 896669 - DNA, 33 bp, Homo sapien
aaatacagagatccttcaacctgaaaagttgac

SEQ ID NO: 896670 - DNA, 33 bp, Homo sapien
aaatacagagatcctttaacctgaaaagttgac

SEQ ID NO: 896671 - DNA, 33 bp, Homo sapien
ctgagggcaccagaaacgcagaagaggcaagag

SEQ ID NO: 896672 - DNA, 33 bp, Homo sapien
ctgagggcaccagaaatgcagaagaggcaagag

SEQ ID NO: 896673 - DNA, 33 bp, Homo sapien
tggtttctgtcaaaaaactgagtatcagactgg

SEQ ID NO: 896674 - DNA, 33 bp, Homo sapien
tggtttctgtcaaaaagctgagtatcagactgg

SEQ ID NO: 896675 - DNA, 33 bp, Homo sapien
taacacaattaagtaccacatagctgcaacaat

SEQ ID NO: 896676 - DNA, 33 bp, Homo sapien
taacacaattaagtactacatagctgcaacaat

SEQ ID NO: 896677 - DNA, 33 bp, Homo sapien
catacagtcttactctaagaaactgctgccacc

SEQ ID NO: 896678 - DNA, 33 bp, Homo sapien
catacagtcttactctgagaaactgctgccacc

SEQ ID NO: 896679 - DNA, 33 bp, Homo sapien
aaacttcttcctacataaaatatctaaggtctt

SEQ ID NO: 896680 - DNA, 33 bp, Homo sapien
aaacttcttcctacatgaaatatctaaggtctt

SEQ ID NO: 896681 - DNA, 33 bp, Homo sapien
cttatcaggaaagttcactgaatcctcacacat

SEQ ID NO: 896682 - DNA, 33 bp, Homo sapien
cttatcaggaaagttcgctgaatcctcacacat

SEQ ID NO: 896683 - DNA, 33 bp, Homo sapien
aggccagggtaacccacatggagaaagagtaag

SEQ ID NO: 896684 - DNA, 33 bp, Homo sapien
aggccagggtaacccagatggagaaagagtaag

SEQ ID NO: 896685 - DNA, 33 bp, Homo sapien
ttagattcactcagaaataattacgttggtaca

SEQ ID NO: 896686 - DNA, 33 bp, Homo sapien
ttagattcactcagaactaattacgttggtaca

SEQ ID NO: 896687 - DNA, 33 bp, Homo sapien
gttcctacagaagtctcaaaaaacatccgaatt

SEQ ID NO: 896688 - DNA, 33 bp, Homo sapien
gttcctacagaagtctgaaaaaacatccgaatt

SEQ ID NO: 896689 - DNA, 33 bp, Homo sapien
gtgggcctctagtgtgaaccttctagcagtctt

SEQ ID NO: 896690 - DNA, 33 bp, Homo sapien
gtgggcctctagtgtgcaccttctagcagtctt

SEQ ID NO: 896691 - DNA, 33 bp, Homo sapien
cacttattctaagccaagcagtttcttatttaa

SEQ ID NO: 896692 - DNA, 33 bp, Homo sapien
cacttattctaagccaggcagtttcttatttaa

SEQ ID NO: 896693 - DNA, 33 bp, Homo sapien
aattaagggacttgcccgaggagttaagtggca

SEQ ID NO: 896694 - DNA, 33 bp, Homo sapien
aattaagggacttgcctgaggagttaagtggca

SEQ ID NO: 896695 - DNA, 33 bp, Homo sapien
gcttgcaaacagcttgcagcgtatataccattt

SEQ ID NO: 896696 - DNA, 33 bp, Homo sapien
gcttgcaaacagcttgtagcgtatataccattt

SEQ ID NO: 896697 - DNA, 33 bp, Homo sapien
ccaagcgactagatcacgcccaggtttgcaaat

SEQ ID NO: 896698 - DNA, 33 bp, Homo sapien
ccaagcgactagatcatgcccaggtttgcaaat

SEQ ID NO: 896699 - DNA, 33 bp, Homo sapien
caggcctgctgggaacaagaacagagagaggac

SEQ ID NO: 896700 - DNA, 33 bp, Homo sapien
caggcctgctgggaacgagaacagagagaggac

SEQ ID NO: 896701 - DNA, 33 bp, Homo sapien
ccaggcctggagacaaaagaaatggagaaaaga

SEQ ID NO: 896702 - DNA, 33 bp, Homo sapien
ccaggcctggagacaacagaaatggagaaaaga

SEQ ID NO: 896703 - DNA, 33 bp, Homo sapien
atggccagactcagacaagttttggtaattgtg

SEQ ID NO: 896704 - DNA, 33 bp, Homo sapien
atggccagactcagacgagttttggtaattgtg

SEQ ID NO: 896705 - DNA, 33 bp, Homo sapien
taaaatatatgtagcaaaaaatgaattaacagg

SEQ ID NO: 896706 - DNA, 33 bp, Homo sapien
taaaatatatgtagcagaaaatgaattaacagg

SEQ ID NO: 896707 - DNA, 33 bp, Homo sapien
tggcatcattgtgaaacgctctttctgccgctg

SEQ ID NO: 896708 - DNA, 33 bp, Homo sapien
tggcatcattgtgaaatgctctttctgccgctg

SEQ ID NO: 896709 - DNA, 33 bp, Homo sapien
aacccagattctggcacataacagacccttgct

SEQ ID NO: 896710 - DNA, 33 bp, Homo sapien
aacccagattctggcatataacagacccttgct

SEQ ID NO: 896711 - DNA, 33 bp, Homo sapien
taagaccggcatttcaatatttcagtatcaaag

SEQ ID NO: 896712 - DNA, 33 bp, Homo sapien
taagaccggcatttcattatttcagtatcaaag

SEQ ID NO: 896713 - DNA, 33 bp, Homo sapien
gaagatgctcaagtgagagttttaattggaaaa

SEQ ID NO: 896714 - DNA, 33 bp, Homo sapien
gaagatgctcaagtgatagttttaattggaaaa

SEQ ID NO: 896715 - DNA, 33 bp, Homo sapien
ccaggggaccactagaaatctaggtcttttttt

SEQ ID NO: 896716 - DNA, 33 bp, Homo sapien
ccaggggaccactagacatctaggtcttttttt

SEQ ID NO: 896717 - DNA, 33 bp, Homo sapien
gctacttgagtgcgttgaaaagacgttaatatt

SEQ ID NO: 896718 - DNA, 33 bp, Homo sapien
gctacttgagtgcgtttaaaagacgttaatatt

SEQ ID NO: 896719 - DNA, 33 bp, Homo sapien
gatatatgacaatacaaaatatgaattactcag

SEQ ID NO: 896720 - DNA, 33 bp, Homo sapien
gatatatgacaatacagaatatgaattactcag

SEQ ID NO: 896721 - DNA, 33 bp, Homo sapien
aaaccttaattgctcaatcattaaagccatccc

SEQ ID NO: 896722 - DNA, 33 bp, Homo sapien
aaaccttaattgctcagtcattaaagccatccc

SEQ ID NO: 896723 - DNA, 33 bp, Homo sapien
aggctagcaatcttaaatacaaacaatactaag

SEQ ID NO: 896724 - DNA, 33 bp, Homo sapien
aggctagcaatcttaagtacaaacaatactaag

SEQ ID NO: 896725 - DNA, 33 bp, Homo sapien
agggttgccaacttaactatgaaaaagactctt

SEQ ID NO: 896726 - DNA, 33 bp, Homo sapien
agggttgccaacttaattatgaaaaagactctt

SEQ ID NO: 896727 - DNA, 33 bp, Homo sapien
ttctgttacagacttacagcaactagcaataca

SEQ ID NO: 896728 - DNA, 33 bp, Homo sapien
ttctgttacagacttatagcaactagcaataca

SEQ ID NO: 896729 - DNA, 33 bp, Homo sapien
aatccaggaaacttaactgatggtcaccttttt

SEQ ID NO: 896730 - DNA, 33 bp, Homo sapien
aatccaggaaacttaagtgatggtcaccttttt

SEQ ID NO: 896731 - DNA, 33 bp, Homo sapien
ctcccccagaataatgaacttttgcagatgaat

SEQ ID NO: 896732 - DNA, 33 bp, Homo sapien
ctcccccagaataatgcacttttgcagatgaat

SEQ ID NO: 896733 - DNA, 33 bp, Homo sapien
agcctcctcagtcactaaaattacaggtgtgag

SEQ ID NO: 896734 - DNA, 33 bp, Homo sapien
agcctcctcagtcactgaaattacaggtgtgag

SEQ ID NO: 896735 - DNA, 33 bp, Homo sapien
tatcttcccctttctcactgatgtagcagctct

SEQ ID NO: 896736 - DNA, 33 bp, Homo sapien
tatcttcccctttctccctgatgtagcagctct

SEQ ID NO: 896737 - DNA, 33 bp, Homo sapien
gcaggagaaggagacaaacattccatgcagcct

SEQ ID NO: 896738 - DNA, 33 bp, Homo sapien
gcaggagaaggagacagacattccatgcagcct

SEQ ID NO: 896739 - DNA, 33 bp, Homo sapien
aaaccctgtgtggtggaaagggatgactgatga

SEQ ID NO: 896740 - DNA, 33 bp, Homo sapien
aaaccctgtgtggtggtaagggatgactgatga

SEQ ID NO: 896741 - DNA, 33 bp, Homo sapien
cttggatctatcctaacgggtgtgagttaattt

SEQ ID NO: 896742 - DNA, 33 bp, Homo sapien
cttggatctatcctaatgggtgtgagttaattt

SEQ ID NO: 896743 - DNA, 33 bp, Homo sapien
gacagcctagcagaggacactgggaggcagata

SEQ ID NO: 896744 - DNA, 33 bp, Homo sapien
gacagcctagcagaggtcactgggaggcagata

SEQ ID NO: 896745 - DNA, 33 bp, Homo sapien
gttgtcaattgttcttgaaacccacttggtatg

SEQ ID NO: 896746 - DNA, 33 bp, Homo sapien
gttgtcaattgttctttaaacccacttggtatg

SEQ ID NO: 896747 - DNA, 33 bp, Homo sapien
ggagtctggaccccaaagagtccaaggcagctg

SEQ ID NO: 896748 - DNA, 33 bp, Homo sapien
ggagtctggaccccaacgagtccaaggcagctg

SEQ ID NO: 896749 - DNA, 33 bp, Homo sapien
atggtttcatgctttcaacttgtgcagggtgag

SEQ ID NO: 896750 - DNA, 33 bp, Homo sapien
atggtttcatgctttccacttgtgcagggtgag

SEQ ID NO: 896751 - DNA, 33 bp, Homo sapien
aagtgttccaatcttacgtatgtagctcaatgg

SEQ ID NO: 896752 - DNA, 33 bp, Homo sapien
aagtgttccaatcttatgtatgtagctcaatgg

SEQ ID NO: 896753 - DNA, 33 bp, Homo sapien
tgtatgaatcttgttacgaggatggtaaataaa

SEQ ID NO: 896754 - DNA, 33 bp, Homo sapien
tgtatgaatcttgttatgaggatggtaaataaa

SEQ ID NO: 896755 - DNA, 33 bp, Homo sapien
ctgtttgtgttaaaaaattgcataaagctgggt

SEQ ID NO: 896756 - DNA, 33 bp, Homo sapien
ctgtttgtgttaaaaagttgcataaagctgggt

SEQ ID NO: 896757 - DNA, 33 bp, Homo sapien
cactggatatgggcccagaaataaattagcagt

SEQ ID NO: 896758 - DNA, 33 bp, Homo sapien
cactggatatgggccccgaaataaattagcagt

SEQ ID NO: 896759 - DNA, 33 bp, Homo sapien
acaccagactaaggtccatccataagtccttca

SEQ ID NO: 896760 - DNA, 33 bp, Homo sapien
acaccagactaaggtcgatccataagtccttca

SEQ ID NO: 896761 - DNA, 33 bp, Homo sapien
gcatttgcataaatagcctaagtaagaaggggt

SEQ ID NO: 896762 - DNA, 33 bp, Homo sapien
gcatttgcataaataggctaagtaagaaggggt

SEQ ID NO: 896763 - DNA, 33 bp, Homo sapien
attaaaccagaacaaactattccaggattactt

SEQ ID NO: 896764 - DNA, 33 bp, Homo sapien
attaaaccagaacaaattattccaggattactt

SEQ ID NO: 896765 - DNA, 33 bp, Homo sapien
acaattgctgtaatccacactaatgaggtagac

SEQ ID NO: 896766 - DNA, 33 bp, Homo sapien
acaattgctgtaatccgcactaatgaggtagac

SEQ ID NO: 896767 - DNA, 33 bp, Homo sapien
tcaaataaaaagccatcataagtcgctgatact

SEQ ID NO: 896768 - DNA, 33 bp, Homo sapien
tcaaataaaaagccattataagtcgctgatact

SEQ ID NO: 896769 - DNA, 33 bp, Homo sapien
ggtcttaagtgcgatcacacagagatataatgt

SEQ ID NO: 896770 - DNA, 33 bp, Homo sapien
ggtcttaagtgcgatcccacagagatataatgt

SEQ ID NO: 896771 - DNA, 33 bp, Homo sapien
tatcagtaaaattagcaatgccacagtgtcatg

SEQ ID NO: 896772 - DNA, 33 bp, Homo sapien
tatcagtaaaattagcgatgccacagtgtcatg

SEQ ID NO: 896773 - DNA, 33 bp, Homo sapien
tttcatttgccaaagacgttatgtgttttctca

SEQ ID NO: 896774 - DNA, 33 bp, Homo sapien
tttcatttgccaaagatgttatgtgttttctca

SEQ ID NO: 896775 - DNA, 33 bp, Homo sapien
aagcaactattcagtcaccaatgtagctgcttt

SEQ ID NO: 896776 - DNA, 33 bp, Homo sapien
aagcaactattcagtcgccaatgtagctgcttt

SEQ ID NO: 896777 - DNA, 33 bp, Homo sapien
tgtactttgttttgcacgtttaaatattccatg

SEQ ID NO: 896778 - DNA, 33 bp, Homo sapien
tgtactttgttttgcaggtttaaatattccatg

SEQ ID NO: 896779 - DNA, 33 bp, Homo sapien
aaggctattatgctgaaatggttatgttggcga

SEQ ID NO: 896780 - DNA, 33 bp, Homo sapien
aaggctattatgctgacatggttatgttggcga

SEQ ID NO: 896781 - DNA, 33 bp, Homo sapien
ttcttgaatctccagacctcagggtacttggta

SEQ ID NO: 896782 - DNA, 33 bp, Homo sapien
ttcttgaatctccagagctcagggtacttggta

SEQ ID NO: 896783 - DNA, 33 bp, Homo sapien
gaagttaagtcaactaagttcaagcctaaacaa

SEQ ID NO: 896784 - DNA, 33 bp, Homo sapien
gaagttaagtcaactaggttcaagcctaaacaa

SEQ ID NO: 896785 - DNA, 33 bp, Homo sapien
atagaacattccatcaccttagaaagctctatt

SEQ ID NO: 896786 - DNA, 33 bp, Homo sapien
atagaacattccatcatcttagaaagctctatt

SEQ ID NO: 896787 - DNA, 33 bp, Homo sapien
tcatgccaaaatgatacggatgcctcttctcac

SEQ ID NO: 896788 - DNA, 33 bp, Homo sapien
tcatgccaaaatgatatggatgcctcttctcac

SEQ ID NO: 896789 - DNA, 33 bp, Homo sapien
aggtgcacaccaccacagtcagttactttttgt

SEQ ID NO: 896790 - DNA, 33 bp, Homo sapien
aggtgcacaccaccacggtcagttactttttgt

SEQ ID NO: 896791 - DNA, 33 bp, Homo sapien
ctcatatctctctccaggagctcagcatcttca

SEQ ID NO: 896792 - DNA, 33 bp, Homo sapien
ctcatatctctctccatgagctcagcatcttca

SEQ ID NO: 896793 - DNA, 33 bp, Homo sapien
atataaccggttggtaagttgagattttcttgc

SEQ ID NO: 896794 - DNA, 33 bp, Homo sapien
atataaccggttggtacgttgagattttcttgc

SEQ ID NO: 896795 - DNA, 33 bp, Homo sapien
agcaatggtttccagccgactctgtgaagttct

SEQ ID NO: 896796 - DNA, 33 bp, Homo sapien
agcaatggtttccagctgactctgtgaagttct

SEQ ID NO: 896797 - DNA, 33 bp, Homo sapien
gcacaattataggttgcaagcactgaaaggtaa

SEQ ID NO: 896798 - DNA, 33 bp, Homo sapien
gcacaattataggttggaagcactgaaaggtaa

SEQ ID NO: 896799 - DNA, 33 bp, Homo sapien
ggctttgtttctatgacagtcaaaggcacaggg

SEQ ID NO: 896800 - DNA, 33 bp, Homo sapien
ggctttgtttctatgatagtcaaaggcacaggg

SEQ ID NO: 896801 - DNA, 33 bp, Homo sapien
acatgaaacatttacagcaggtaaatccacaga

SEQ ID NO: 896802 - DNA, 33 bp, Homo sapien
acatgaaacatttacatcaggtaaatccacaga

SEQ ID NO: 896803 - DNA, 33 bp, Homo sapien
ctgtgaaaaggcaagacgggaaaaaggagagaa

SEQ ID NO: 896804 - DNA, 33 bp, Homo sapien
ctgtgaaaaggcaagatgggaaaaaggagagaa

SEQ ID NO: 896805 - DNA, 33 bp, Homo sapien
tttcgcatcgcagctacctgcattttcaagtca

SEQ ID NO: 896806 - DNA, 33 bp, Homo sapien
tttcgcatcgcagctatctgcattttcaagtca

SEQ ID NO: 896807 - DNA, 33 bp, Homo sapien
gatttacatttttaaagatcctgtggccgctgt

SEQ ID NO: 896808 - DNA, 33 bp, Homo sapien
gatttacatttttaaatatcctgtggccgctgt

SEQ ID NO: 896809 - DNA, 33 bp, Homo sapien
gggattcaaatgactcactgcgacttggaacac

SEQ ID NO: 896810 - DNA, 33 bp, Homo sapien
gggattcaaatgactcgctgcgacttggaacac

SEQ ID NO: 896811 - DNA, 33 bp, Homo sapien
aggtagcacagaatgtaacacttttaccgtctc

SEQ ID NO: 896812 - DNA, 33 bp, Homo sapien
aggtagcacagaatgttacacttttaccgtctc

SEQ ID NO: 896813 - DNA, 33 bp, Homo sapien
tgtaactgaccaattacgtagcacttatttatt

SEQ ID NO: 896814 - DNA, 33 bp, Homo sapien
tgtaactgaccaattatgtagcacttatttatt

SEQ ID NO: 896815 - DNA, 33 bp, Homo sapien
aagacttctcgccaaccaccaattacactacta

SEQ ID NO: 896816 - DNA, 33 bp, Homo sapien
aagacttctcgccaactaccaattacactacta

SEQ ID NO: 896817 - DNA, 33 bp, Homo sapien
agatttgacatagtaactggcactaacccagct

SEQ ID NO: 896818 - DNA, 33 bp, Homo sapien
agatttgacatagtaagtggcactaacccagct

SEQ ID NO: 896819 - DNA, 33 bp, Homo sapien
gctgccctaaagtctcactctatcaggaacgca

SEQ ID NO: 896820 - DNA, 33 bp, Homo sapien
gctgccctaaagtctcgctctatcaggaacgca

SEQ ID NO: 896821 - DNA, 33 bp, Homo sapien
tcatcgtctctgttgcgctggacactatggaca

SEQ ID NO: 896822 - DNA, 33 bp, Homo sapien
tcatcgtctctgttgctctggacactatggaca

SEQ ID NO: 896823 - DNA, 33 bp, Homo sapien
tagatgccacttggaaaaggcgtatgctgccat

SEQ ID NO: 896824 - DNA, 33 bp, Homo sapien
tagatgccacttggaagaggcgtatgctgccat

SEQ ID NO: 896825 - DNA, 33 bp, Homo sapien
caagctcaataaaataaagatgtccaagaattc

SEQ ID NO: 896826 - DNA, 33 bp, Homo sapien
caagctcaataaaatagagatgtccaagaattc

SEQ ID NO: 896827 - DNA, 33 bp, Homo sapien
atggcttttacggctacgaatgatgtatgaccg

SEQ ID NO: 896828 - DNA, 33 bp, Homo sapien
atggcttttacggctatgaatgatgtatgaccg

SEQ ID NO: 896829 - DNA, 33 bp, Homo sapien
gtcacccaaccaatcaagattcagccaagggga

SEQ ID NO: 896830 - DNA, 33 bp, Homo sapien
gtcacccaaccaatcaggattcagccaagggga

SEQ ID NO: 896831 - DNA, 33 bp, Homo sapien
aagtgaaataccatcccggaggcaaaggctatg

SEQ ID NO: 896832 - DNA, 33 bp, Homo sapien
aagtgaaataccatcctggaggcaaaggctatg

SEQ ID NO: 896833 - DNA, 33 bp, Homo sapien
aacaaacaaatgagccactttaaaatattactg

SEQ ID NO: 896834 - DNA, 33 bp, Homo sapien
aacaaacaaatgagccgctttaaaatattactg

SEQ ID NO: 896835 - DNA, 33 bp, Homo sapien
tcaaacaactcaattccatccacttcaaaagag

SEQ ID NO: 896836 - DNA, 33 bp, Homo sapien
tcaaacaactcaattctatccacttcaaaagag

SEQ ID NO: 896837 - DNA, 33 bp, Homo sapien
tactgtctgcagaacactaaatttgaagataaa

SEQ ID NO: 896838 - DNA, 33 bp, Homo sapien
tactgtctgcagaacattaaatttgaagataaa

SEQ ID NO: 896839 - DNA, 33 bp, Homo sapien
atttatgacttaatgccctagggaccgtagtgg

SEQ ID NO: 896840 - DNA, 33 bp, Homo sapien
atttatgacttaatgctctagggaccgtagtgg

SEQ ID NO: 896841 - DNA, 33 bp, Homo sapien
gctcccacttcatcgccgagtacaggtcatgaa

SEQ ID NO: 896842 - DNA, 33 bp, Homo sapien
gctcccacttcatcgctgagtacaggtcatgaa

SEQ ID NO: 896843 - DNA, 33 bp, Homo sapien
aattggagcagatttaggttttaaaatgcctcc

SEQ ID NO: 896844 - DNA, 33 bp, Homo sapien
aattggagcagatttatgttttaaaatgcctcc

SEQ ID NO: 896845 - DNA, 33 bp, Homo sapien
tgactttgaactgattaaaaagaggggaaaagg

SEQ ID NO: 896846 - DNA, 33 bp, Homo sapien
tgactttgaactgattgaaaagaggggaaaagg

SEQ ID NO: 896847 - DNA, 33 bp, Homo sapien
tatctggccacttctacgtgcagaagctaaggc

SEQ ID NO: 896848 - DNA, 33 bp, Homo sapien
tatctggccacttctaggtgcagaagctaaggc

SEQ ID NO: 896849 - DNA, 33 bp, Homo sapien
atgggatgctaaactcaacttgtcctatgatac

SEQ ID NO: 896850 - DNA, 33 bp, Homo sapien
atgggatgctaaactctacttgtcctatgatac

SEQ ID NO: 896851 - DNA, 33 bp, Homo sapien
gtgttcgtccatctgcagcaagcgttcacactg

SEQ ID NO: 896852 - DNA, 33 bp, Homo sapien
gtgttcgtccatctgccgcaagcgttcacactg

SEQ ID NO: 896853 - DNA, 33 bp, Homo sapien
ccagcctattttacagacaaagaatctgaggta

SEQ ID NO: 896854 - DNA, 33 bp, Homo sapien
ccagcctattttacaggcaaagaatctgaggta

SEQ ID NO: 896855 - DNA, 33 bp, Homo sapien
taaccaggcctgcacaaggcaaaatgatccaaa

SEQ ID NO: 896856 - DNA, 33 bp, Homo sapien
taaccaggcctgcacatggcaaaatgatccaaa

SEQ ID NO: 896857 - DNA, 33 bp, Homo sapien
ctagagtggacctatgcatagctgagaagctga

SEQ ID NO: 896858 - DNA, 33 bp, Homo sapien
ctagagtggacctatgtatagctgagaagctga

SEQ ID NO: 896859 - DNA, 33 bp, Homo sapien
tgagtgttctaaccaacgagagagcagctaaaa

SEQ ID NO: 896860 - DNA, 33 bp, Homo sapien
tgagtgttctaaccaatgagagagcagctaaaa

SEQ ID NO: 896861 - DNA, 33 bp, Homo sapien
ggagaataacgttccagaattttagctgctctc

SEQ ID NO: 896862 - DNA, 33 bp, Homo sapien
ggagaataacgttccataattttagctgctctc

SEQ ID NO: 896863 - DNA, 33 bp, Homo sapien
tttgcaggggagctaacattcttccgagaaaaa

SEQ ID NO: 896864 - DNA, 33 bp, Homo sapien
tttgcaggggagctaagattcttccgagaaaaa

SEQ ID NO: 896865 - DNA, 33 bp, Homo sapien
ggcccagaggccaagaagaaggaattgagttca

SEQ ID NO: 896866 - DNA, 33 bp, Homo sapien
ggcccagaggccaagatgaaggaattgagttca

SEQ ID NO: 896867 - DNA, 33 bp, Homo sapien
aataggaatgctttggcagtaatgtagattagt

SEQ ID NO: 896868 - DNA, 33 bp, Homo sapien
aataggaatgctttggtagtaatgtagattagt

SEQ ID NO: 896869 - DNA, 33 bp, Homo sapien
tacaggataattaagtcacactgggttgcaagt

SEQ ID NO: 896870 - DNA, 33 bp, Homo sapien
tacaggataattaagtgacactgggttgcaagt

SEQ ID NO: 896871 - DNA, 33 bp, Homo sapien
ggaaatgcactataccaggagtgacgccagtat

SEQ ID NO: 896872 - DNA, 33 bp, Homo sapien
ggaaatgcactataccgggagtgacgccagtat

SEQ ID NO: 896873 - DNA, 33 bp, Homo sapien
gttcttggtatgctgcaaatagtaactcaaaac

SEQ ID NO: 896874 - DNA, 33 bp, Homo sapien
gttcttggtatgctgcgaatagtaactcaaaac

SEQ ID NO: 896875 - DNA, 33 bp, Homo sapien
tttaaccgttcacccactgaagggcatctggtt

SEQ ID NO: 896876 - DNA, 33 bp, Homo sapien
tttaaccgttcacccattgaagggcatctggtt

SEQ ID NO: 896877 - DNA, 33 bp, Homo sapien
tccctgcattcttataccttcaccaagtcaatc

SEQ ID NO: 896878 - DNA, 33 bp, Homo sapien
tccctgcattcttatagcttcaccaagtcaatc

SEQ ID NO: 896879 - DNA, 33 bp, Homo sapien
ttgaagcagaattcgacgtgtcattttatatcc

SEQ ID NO: 896880 - DNA, 33 bp, Homo sapien
ttgaagcagaattcgatgtgtcattttatatcc

SEQ ID NO: 896881 - DNA, 33 bp, Homo sapien
ttgggaatattggaagaactttatcatgattcc

SEQ ID NO: 896882 - DNA, 33 bp, Homo sapien
ttgggaatattggaagtactttatcatgattcc

SEQ ID NO: 896883 - DNA, 33 bp, Homo sapien
atcatcctcagccttcaacctttaacttcagtc

SEQ ID NO: 896884 - DNA, 33 bp, Homo sapien
atcatcctcagccttcgacctttaacttcagtc

SEQ ID NO: 896885 - DNA, 33 bp, Homo sapien
cagctctgttggcgcaatatatatgctggatgt

SEQ ID NO: 896886 - DNA, 33 bp, Homo sapien
cagctctgttggcgcagtatatatgctggatgt

SEQ ID NO: 896887 - DNA, 33 bp, Homo sapien
aataggtttgtaagtgcatttattaccatctcc

SEQ ID NO: 896888 - DNA, 33 bp, Homo sapien
aataggtttgtaagtggatttattaccatctcc

SEQ ID NO: 896889 - DNA, 33 bp, Homo sapien
catttgtcacaactccaaaagatgtgagaaagt

SEQ ID NO: 896890 - DNA, 33 bp, Homo sapien
catttgtcacaactccgaaagatgtgagaaagt

SEQ ID NO: 896891 - DNA, 33 bp, Homo sapien
gggaaaaaattgccacgctgcctgcttcagttc

SEQ ID NO: 896892 - DNA, 33 bp, Homo sapien
gggaaaaaattgccactctgcctgcttcagttc

SEQ ID NO: 896893 - DNA, 33 bp, Homo sapien
ggaaattcatgtttgaaaaatacaactgggagg

SEQ ID NO: 896894 - DNA, 33 bp, Homo sapien
ggaaattcatgtttgagaaatacaactgggagg

SEQ ID NO: 896895 - DNA, 33 bp, Homo sapien
ggctcttcttccacaaagaaatctcagagttca

SEQ ID NO: 896896 - DNA, 33 bp, Homo sapien
ggctcttcttccacaaggaaatctcagagttca

SEQ ID NO: 896897 - DNA, 33 bp, Homo sapien
gatttgctccagaaaccgtccttatggtgaaca

SEQ ID NO: 896898 - DNA, 33 bp, Homo sapien
gatttgctccagaaactgtccttatggtgaaca

SEQ ID NO: 896899 - DNA, 33 bp, Homo sapien
ttttgacacattttcaccacaattaccttgttt

SEQ ID NO: 896900 - DNA, 33 bp, Homo sapien
ttttgacacattttcagcacaattaccttgttt

SEQ ID NO: 896901 - DNA, 33 bp, Homo sapien
gaaaatgtgtcaaaaacataatttgcatctctt

SEQ ID NO: 896902 - DNA, 33 bp, Homo sapien
gaaaatgtgtcaaaaatataatttgcatctctt

SEQ ID NO: 896903 - DNA, 33 bp, Homo sapien; identical to SEQ ID NO: 896901

SEQ ID NO: 896904 - DNA, 33 bp, Homo sapien; identical to SEQ ID NO: 896902

SEQ ID NO: 896905 - DNA, 33 bp, Homo sapien
gggtttgggggtctccaaagcaagagaggcttt

SEQ ID NO: 896906 - DNA, 33 bp, Homo sapien
gggtttgggggtctcctaagcaagagaggcttt

SEQ ID NO: 896907 - DNA, 33 bp, Homo sapien
agacacaagtactgaacagtgtcaaaatgagct

SEQ ID NO: 896908 - DNA, 33 bp, Homo sapien
agacacaagtactgaatagtgtcaaaatgagct

SEQ ID NO: 896909 - DNA, 33 bp, Homo sapien
atccattactgatggacgccttccagaagacct

SEQ ID NO: 896910 - DNA, 33 bp, Homo sapien
atccattactgatggatgccttccagaagacct

SEQ ID NO: 896911 - DNA, 33 bp, Homo sapien
tggatgcgcttcttcaaatttcttgcaatgtga

SEQ ID NO: 896912 - DNA, 33 bp, Homo sapien
tggatgcgcttcttcagatttcttgcaatgtga

SEQ ID NO: 896913 - DNA, 33 bp, Homo sapien
cacaccagctcaaatcccaatatctcctgagga

SEQ ID NO: 896914 - DNA, 33 bp, Homo sapien
cacaccagctcaaatctcaatatctcctgagga

SEQ ID NO: 896915 - DNA, 33 bp, Homo sapien
aaatgcaagagttaaccagggttgagtcctcca

SEQ ID NO: 896916 - DNA, 33 bp, Homo sapien
aaatgcaagagttaactagggttgagtcctcca

SEQ ID NO: 896917 - DNA, 33 bp, Homo sapien
gatgtccatactcaagccttcgtacaggaaaaa

SEQ ID NO: 896918 - DNA, 33 bp, Homo sapien
gatgtccatactcaaggcttcgtacaggaaaaa

SEQ ID NO: 896919 - DNA, 33 bp, Homo sapien
actctacaggaacagacgcatttggtacaaata

SEQ ID NO: 896920 - DNA, 33 bp, Homo sapien
actctacaggaacagatgcatttggtacaaata

SEQ ID NO: 896921 - DNA, 33 bp, Homo sapien
ttacattagtcccccaaaattttgaaatactta

SEQ ID NO: 896922 - DNA, 33 bp, Homo sapien
ttacattagtcccccagaattttgaaatactta

SEQ ID NO: 896923 - DNA, 33 bp, Homo sapien
tttaaaaggccagctggatgtttgcacatcagt

SEQ ID NO: 896924 - DNA, 33 bp, Homo sapien
tttaaaaggccagctgtatgtttgcacatcagt

SEQ ID NO: 896925 - DNA, 33 bp, Homo sapien
gagaactaaaataacacgatgctgagagggaaa

SEQ ID NO: 896926 - DNA, 33 bp, Homo sapien
gagaactaaaataacatgatgctgagagggaaa

SEQ ID NO: 896927 - DNA, 33 bp, Homo sapien
ccgtgcacagcggtgacggcctttcaatcctaa

SEQ ID NO: 896928 - DNA, 33 bp, Homo sapien
ccgtgcacagcggtgatggcctttcaatcctaa

SEQ ID NO: 896929 - DNA, 33 bp, Homo sapien
tatctggaatgtttggaacacatgaacacacct

SEQ ID NO: 896930 - DNA, 33 bp, Homo sapien
tatctggaatgtttgggacacatgaacacacct

SEQ ID NO: 896931 - DNA, 33 bp, Homo sapien
ccgggtttcacagcaacttataaagcgaagagc

SEQ ID NO: 896932 - DNA, 33 bp, Homo sapien
ccgggtttcacagcaagttataaagcgaagagc

SEQ ID NO: 896933 - DNA, 33 bp, Homo sapien
ttttaaggatctgcgcccagggaaggggaagcg

SEQ ID NO: 896934 - DNA, 33 bp, Homo sapien
ttttaaggatctgcgctcagggaaggggaagcg

SEQ ID NO: 896935 - DNA, 33 bp, Homo sapien
aacactgtgggctacagctttcactgtgatctg

SEQ ID NO: 896936 - DNA, 33 bp, Homo sapien
aacactgtgggctacatctttcactgtgatctg

SEQ ID NO: 896937 - DNA, 33 bp, Homo sapien
aggtgaaaagcgagagaacataccaacccagag

SEQ ID NO: 896938 - DNA, 33 bp, Homo sapien
aggtgaaaagcgagagcacataccaacccagag

SEQ ID NO: 896939 - DNA, 33 bp, Homo sapien
tcatactattccttcccgaaggcaaggaccatg

SEQ ID NO: 896940 - DNA, 33 bp, Homo sapien
tcatactattccttcctgaaggcaaggaccatg

SEQ ID NO: 896941 - DNA, 33 bp, Homo sapien
caatgtaatcatgtatcaggatgcggagtgggc

SEQ ID NO: 896942 - DNA, 33 bp, Homo sapien
caatgtaatcatgtatgaggatgcggagtgggc

SEQ ID NO: 896943 - DNA, 33 bp, Homo sapien
gtttgtagaaataatacggttgcttcttagtac

SEQ ID NO: 896944 - DNA, 33 bp, Homo sapien
gtttgtagaaataatatggttgcttcttagtac

SEQ ID NO: 896945 - DNA, 33 bp, Homo sapien
tagcaagccctgagacaataataaagaataaag

SEQ ID NO: 896946 - DNA, 33 bp, Homo sapien
tagcaagccctgagacgataataaagaataaag

SEQ ID NO: 896947 - DNA, 33 bp, Homo sapien
gctggagtcatatgagccatgagatgttacaat

SEQ ID NO: 896948 - DNA, 33 bp, Homo sapien
gctggagtcatatgaggcatgagatgttacaat

SEQ ID NO: 896949 - DNA, 33 bp, Homo sapien
gatcagctgctttggaactgatatgataaccat

SEQ ID NO: 896950 - DNA, 33 bp, Homo sapien
gatcagctgctttggatctgatatgataaccat

SEQ ID NO: 896951 - DNA, 33 bp, Homo sapien
gtcaccatttctagaaaataatctgaagcatgt

SEQ ID NO: 896952 - DNA, 33 bp, Homo sapien
gtcaccatttctagaacataatctgaagcatgt

SEQ ID NO: 896953 - DNA, 33 bp, Homo sapien
ggcattcttccctagcgctgtaaatccaaatgc

SEQ ID NO: 896954 - DNA, 33 bp, Homo sapien
ggcattcttccctagctctgtaaatccaaatgc

SEQ ID NO: 896955 - DNA, 33 bp, Homo sapien
agctaaacacactagacgcttttgttacactaa

SEQ ID NO: 896956 - DNA, 33 bp, Homo sapien
agctaaacacactagatgcttttgttacactaa

SEQ ID NO: 896957 - DNA, 33 bp, Homo sapien
ttgacccatttaccaactgatttaatctgacta

SEQ ID NO: 896958 - DNA, 33 bp, Homo sapien
ttgacccatttaccaattgatttaatctgacta

SEQ ID NO: 896959 - DNA, 33 bp, Homo sapien
ttgcctctttacagcaatgagatttaatgaaat

SEQ ID NO: 896960 - DNA, 33 bp, Homo sapien
ttgcctctttacagcagtgagatttaatgaaat

SEQ ID NO: 896961 - DNA, 33 bp, Homo sapien
agtcccatttaggatgcatgaaaaccacttgag

SEQ ID NO: 896962 - DNA, 33 bp, Homo sapien
agtcccatttaggatgtatgaaaaccacttgag

SEQ ID NO: 896963 - DNA, 33 bp, Homo sapien
cctttccaactttccaaatagcaaactttccaa

SEQ ID NO: 896964 - DNA, 33 bp, Homo sapien
cctttccaactttccacatagcaaactttccaa

SEQ ID NO: 896965 - DNA, 33 bp, Homo sapien
tccagtaaagtaacacccagcgttatactgata

SEQ ID NO: 896966 - DNA, 33 bp, Homo sapien
tccagtaaagtaacactcagcgttatactgata

SEQ ID NO: 896967 - DNA, 33 bp, Homo sapien
tattcaggattaatcaatcttcttaggctcctg

SEQ ID NO: 896968 - DNA, 33 bp, Homo sapien
tattcaggattaatcagtcttcttaggctcctg

SEQ ID NO: 896969 - DNA, 33 bp, Homo sapien
tattttaggaaatcaacctgttggcaccacgta

SEQ ID NO: 896970 - DNA, 33 bp, Homo sapien
tattttaggaaatcaatctgttggcaccacgta

SEQ ID NO: 896971 - DNA, 33 bp, Homo sapien
caagcaaggagaaatacgaggcagaagttggta

SEQ ID NO: 896972 - DNA, 33 bp, Homo sapien
caagcaaggagaaatatgaggcagaagttggta

SEQ ID NO: 896973 - DNA, 33 bp, Homo sapien
acactacctgacaactgaattaactggctttca

SEQ ID NO: 896974 - DNA, 33 bp, Homo sapien
acactacctgacaacttaattaactggctttca

SEQ ID NO: 896975 - DNA, 33 bp, Homo sapien
gctgcatcccccagaaaagttgaatgctgtacc

SEQ ID NO: 896976 - DNA, 33 bp, Homo sapien
gctgcatcccccagaagagttgaatgctgtacc

SEQ ID NO: 896977 - DNA, 33 bp, Homo sapien
gtttctattatctccacactataagcttaaata

SEQ ID NO: 896978 - DNA, 33 bp, Homo sapien
gtttctattatctccatactataagcttaaata

SEQ ID NO: 896979 - DNA, 33 bp, Homo sapien
atatggtctaagctaacgttcactgcaaaataa

SEQ ID NO: 896980 - DNA, 33 bp, Homo sapien
atatggtctaagctaatgttcactgcaaaataa

SEQ ID NO: 896981 - DNA, 33 bp, Homo sapien
aatttgtcataaatgccagctttctaaacaaga

SEQ ID NO: 896982 - DNA, 33 bp, Homo sapien
aatttgtcataaatgctagctttctaaacaaga

SEQ ID NO: 896983 - DNA, 33 bp, Homo sapien
atgtatttttgctctacgtcaacttaaatgtct

SEQ ID NO: 896984 - DNA, 33 bp, Homo sapien
atgtatttttgctctatgtcaacttaaatgtct

SEQ ID NO: 896985 - DNA, 33 bp, Homo sapien
gcatctcactgaccaactgaagtttacttgttc

SEQ ID NO: 896986 - DNA, 33 bp, Homo sapien
gcatctcactgaccaattgaagtttacttgttc

SEQ ID NO: 896987 - DNA, 33 bp, Homo sapien
tcatcagggatggataaattggtatcatgttaa

SEQ ID NO: 896988 - DNA, 33 bp, Homo sapien
tcatcagggatggatagattggtatcatgttaa

SEQ ID NO: 896989 - DNA, 33 bp, Homo sapien
aaagctagacaaaagacagcagtttggaaattc

SEQ ID NO: 896990 - DNA, 33 bp, Homo sapien
aaagctagacaaaagatagcagtttggaaattc

SEQ ID NO: 896991 - DNA, 33 bp, Homo sapien
tctatagaagaagaagaaaacatagatcaggaa

SEQ ID NO: 896992 - DNA, 33 bp, Homo sapien
tctatagaagaagaaggaaacatagatcaggaa

SEQ ID NO: 896993 - DNA, 33 bp, Homo sapien
ttcgtgtgcgttcctacacgattcaatctttct

SEQ ID NO: 896994 - DNA, 33 bp, Homo sapien
ttcgtgtgcgttcctagacgattcaatctttct

SEQ ID NO: 896995 - DNA, 33 bp, Homo sapien
ttattagataaatccactgatggtcttgaagat

SEQ ID NO: 896996 - DNA, 33 bp, Homo sapien
ttattagataaatccagtgatggtcttgaagat

SEQ ID NO: 896997 - DNA, 33 bp, Homo sapien
tttctggaaaatatcaccttcatcttatgtggg

SEQ ID NO: 896998 - DNA, 33 bp, Homo sapien
tttctggaaaatatcatcttcatcttatgtggg

SEQ ID NO: 896999 - DNA, 33 bp, Homo sapien
tggagagataggaagaaaaaaatgtaaaatggc

SEQ ID NO: 897000 - DNA, 33 bp, Homo sapien
tggagagataggaagagaaaaatgtaaaatggc

SEQ ID NO: 897001 - DNA, 33 bp, Homo sapien
ttctaggtcagagagacgtggataacaccaata

SEQ ID NO: 897002 - DNA, 33 bp, Homo sapien
ttctaggtcagagagatgtggataacaccaata

SEQ ID NO: 897003 - DNA, 33 bp, Homo sapien
gagttgcaaagttaaaaggggaacttgatcatg

SEQ ID NO: 897004 - DNA, 33 bp, Homo sapien
gagttgcaaagttaaatggggaacttgatcatg

SEQ ID NO: 897005 - DNA, 33 bp, Homo sapien
ccatagctaatcagtccctaagtcccatcaact

SEQ ID NO: 897006 - DNA, 33 bp, Homo sapien
ccatagctaatcagtctctaagtcccatcaact

SEQ ID NO: 897007 - DNA, 33 bp, Homo sapien
ggagtgctttctcaggaaaccaaaatgtagctg

SEQ ID NO: 897008 - DNA, 33 bp, Homo sapien
ggagtgctttctcagggaaccaaaatgtagctg

SEQ ID NO: 897009 - DNA, 33 bp, Homo sapien
aataatgatggtaacaatatatcacaaaagtcc

SEQ ID NO: 897010 - DNA, 33 bp, Homo sapien
aataatgatggtaacagtatatcacaaaagtcc

SEQ ID NO: 897011 - DNA, 33 bp, Homo sapien
ctgttatacaataatccaatctgctaaagtcat

SEQ ID NO: 897012 - DNA, 33 bp, Homo sapien
ctgttatacaataatctaatctgctaaagtcat

SEQ ID NO: 897013 - DNA, 33 bp, Homo sapien
tactttagtcagataaaggcagttcagataaga

SEQ ID NO: 897014 - DNA, 33 bp, Homo sapien
tactttagtcagataagggcagttcagataaga

SEQ ID NO: 897015 - DNA, 33 bp, Homo sapien
tcaaatacagtatgaaccattagttaagtatca

SEQ ID NO: 897016 - DNA, 33 bp, Homo sapien
tcaaatacagtatgaatcattagttaagtatca

SEQ ID NO: 897017 - DNA, 33 bp, Homo sapien
taagtgccacttaaagcaagttgaggcccaaca

SEQ ID NO: 897018 - DNA, 33 bp, Homo sapien
taagtgccacttaaaggaagttgaggcccaaca

SEQ ID NO: 897019 - DNA, 33 bp, Homo sapien
cctcctataattcagcccataaaggtgtttaac

SEQ ID NO: 897020 - DNA, 33 bp, Homo sapien
cctcctataattcagctcataaaggtgtttaac

SEQ ID NO: 897021 - DNA, 33 bp, Homo sapien
tcttactgaggtagaaagttgtaccaaatagga

SEQ ID NO: 897022 - DNA, 33 bp, Homo sapien
tcttactgaggtagaaggttgtaccaaatagga

SEQ ID NO: 897023 - DNA, 33 bp, Homo sapien
gaaaatctgcttaaaacgctatgtgacactaat

SEQ ID NO: 897024 - DNA, 33 bp, Homo sapien
gaaaatctgcttaaaatgctatgtgacactaat

SEQ ID NO: 897025 - DNA, 33 bp, Homo sapien
gacttcttgagcaaaaccccgcaagcacaggca

SEQ ID NO: 897026 - DNA, 33 bp, Homo sapien
gacttcttgagcaaaatcccgcaagcacaggca

SEQ ID NO: 897027 - DNA, 33 bp, Homo sapien
aaaacattatgaaaacagtgattggtggttact

SEQ ID NO: 897028 - DNA, 33 bp, Homo sapien
aaaacattatgaaaacggtgattggtggttact

SEQ ID NO: 897029 - DNA, 33 bp, Homo sapien
aaatattttctttctacgtaatttgccacagaa

SEQ ID NO: 897030 - DNA, 33 bp, Homo sapien
aaatattttctttctatgtaatttgccacagaa

SEQ ID NO: 897031 - DNA, 33 bp, Homo sapien
tgctgtcttttaacaactgaaggcattgaaaaa

SEQ ID NO: 897032 - DNA, 33 bp, Homo sapien
tgctgtcttttaacaattgaaggcattgaaaaa

SEQ ID NO: 897033 - DNA, 33 bp, Homo sapien
aatttgttcaaagtcacagtgtcaaaccaggat

SEQ ID NO: 897034 - DNA, 33 bp, Homo sapien
aatttgttcaaagtcagagtgtcaaaccaggat

SEQ ID NO: 897035 - DNA, 33 bp, Homo sapien
atagtactgttgtcgtcaaatgcacagattatt

SEQ ID NO: 897036 - DNA, 33 bp, Homo sapien
atagtactgttgtcgttaaatgcacagattatt

SEQ ID NO: 897037 - DNA, 33 bp, Homo sapien
aaagtgtctagaacaaaggtctcaaactgatag

SEQ ID NO: 897038 - DNA, 33 bp, Homo sapien
aaagtgtctagaacaagggtctcaaactgatag

SEQ ID NO: 897039 - DNA, 33 bp, Homo sapien
ccatagtttgatgaacggtggaaagactaacat

SEQ ID NO: 897040 - DNA, 33 bp, Homo sapien
ccatagtttgatgaactgtggaaagactaacat

SEQ ID NO: 897041 - DNA, 33 bp, Homo sapien
tgcagttttgattttcacattggaccttggtac

SEQ ID NO: 897042 - DNA, 33 bp, Homo sapien
tgcagttttgattttcgcattggaccttggtac

SEQ ID NO: 897043 - DNA, 33 bp, Homo sapien
agcacaatgcaagttcaataatcactggaaata

SEQ ID NO: 897044 - DNA, 33 bp, Homo sapien
agcacaatgcaagttcgataatcactggaaata

SEQ ID NO: 897045 - DNA, 33 bp, Homo sapien
ctagcttcagttagaagatgccatactgtgtgt

SEQ ID NO: 897046 - DNA, 33 bp, Homo sapien
ctagcttcagttagaatatgccatactgtgtgt

SEQ ID NO: 897047 - DNA, 33 bp, Homo sapien
aaggttctgggatgaacgaaaacagcacaatgt

SEQ ID NO: 897048 - DNA, 33 bp, Homo sapien
aaggttctgggatgaatgaaaacagcacaatgt

SEQ ID NO: 897049 - DNA, 33 bp, Homo sapien
ttacaatataatgttacgtgcaaaatgtctgac

SEQ ID NO: 897050 - DNA, 33 bp, Homo sapien
ttacaatataatgttatgtgcaaaatgtctgac

SEQ ID NO: 897051 - DNA, 33 bp, Homo sapien
ccttctctgcagtttacattcaacaaataccta

SEQ ID NO: 897052 - DNA, 33 bp, Homo sapien
ccttctctgcagtttagattcaacaaataccta

SEQ ID NO: 897053 - DNA, 33 bp, Homo sapien
agtaagaaagatcaagcccagacactgtgactc

SEQ ID NO: 897054 - DNA, 33 bp, Homo sapien
agtaagaaagatcaaggccagacactgtgactc

SEQ ID NO: 897055 - DNA, 33 bp, Homo sapien
taacagagctacttaacggaaggcagaaaggtt

SEQ ID NO: 897056 - DNA, 33 bp, Homo sapien
taacagagctacttaatggaaggcagaaaggtt

SEQ ID NO: 897057 - DNA, 33 bp, Homo sapien
tcatgtaatctttttaaaagcagtatggactga

SEQ ID NO: 897058 - DNA, 33 bp, Homo sapien
tcatgtaatctttttataagcagtatggactga

SEQ ID NO: 897059 - DNA, 33 bp, Homo sapien
ctgtcagttagagtccacacaagctaatgcaag

SEQ ID NO: 897060 - DNA, 33 bp, Homo sapien
ctgtcagttagagtccgcacaagctaatgcaag

SEQ ID NO: 897061 - DNA, 33 bp, Homo sapien
tcaggccaacttccccaacaaagatcactatta

SEQ ID NO: 897062 - DNA, 33 bp, Homo sapien
tcaggccaacttcccccacaaagatcactatta

SEQ ID NO: 897063 - DNA, 33 bp, Homo sapien
tttaatttggagaaagaacacctaattttcttg

SEQ ID NO: 897064 - DNA, 33 bp, Homo sapien
tttaatttggagaaaggacacctaattttcttg

SEQ ID NO: 897065 - DNA, 33 bp, Homo sapien
catttttagtaaagccaagttttcatcatgttg

SEQ ID NO: 897066 - DNA, 33 bp, Homo sapien
catttttagtaaagccgagttttcatcatgttg

SEQ ID NO: 897067 - DNA, 33 bp, Homo sapien
agttgagctaaggaaacaggcttgagagttttc

SEQ ID NO: 897068 - DNA, 33 bp, Homo sapien
agttgagctaaggaaataggcttgagagttttc

SEQ ID NO: 897069 - DNA, 33 bp, Homo sapien
atagttggaatcatacagtagttagccttttta

SEQ ID NO: 897070 - DNA, 33 bp, Homo sapien
atagttggaatcatacggtagttagccttttta

SEQ ID NO: 897071 - DNA, 33 bp, Homo sapien
cagtattttgagaagactaaatttggagtaaca

SEQ ID NO: 897072 - DNA, 33 bp, Homo sapien
cagtattttgagaagagtaaatttggagtaaca

SEQ ID NO: 897073 - DNA, 33 bp, Homo sapien
ggaattccagccaaccaccagaaacagtgtcac

SEQ ID NO: 897074 - DNA, 33 bp, Homo sapien
ggaattccagccaaccgccagaaacagtgtcac

SEQ ID NO: 897075 - DNA, 33 bp, Homo sapien
atgtttctcccatggaaccttgcaacccttggg

SEQ ID NO: 897076 - DNA, 33 bp, Homo sapien
atgtttctcccatggacccttgcaacccttggg

SEQ ID NO: 897077 - DNA, 33 bp, Homo sapien
gactaatcaaggaaataagctatggagaatgaa

SEQ ID NO: 897078 - DNA, 33 bp, Homo sapien
gactaatcaaggaaatgagctatggagaatgaa

SEQ ID NO: 897079 - DNA, 33 bp, Homo sapien
agagggtataaaatgacccagaaggccaaacag

SEQ ID NO: 897080 - DNA, 33 bp, Homo sapien
agagggtataaaatgatccagaaggccaaacag

SEQ ID NO: 897081 - DNA, 33 bp, Homo sapien
atggcacttttagagacagcaacttcaaaccca

SEQ ID NO: 897082 - DNA, 33 bp, Homo sapien
atggcacttttagagatagcaacttcaaaccca

SEQ ID NO: 897083 - DNA, 33 bp, Homo sapien
tgcagcttattggcttaaaatgtactctccttt

SEQ ID NO: 897084 - DNA, 33 bp, Homo sapien
tgcagcttattggcttgaaatgtactctccttt

SEQ ID NO: 897085 - DNA, 33 bp, Homo sapien; identical to SEQ ID NO: 897083

SEQ ID NO: 897086 - DNA, 33 bp, Homo sapien; identical to SEQ ID NO: 897084

SEQ ID NO: 897087 - DNA, 33 bp, Homo sapien
gcttcttttaatgacagtatcaaggaacagttt

SEQ ID NO: 897088 - DNA, 33 bp, Homo sapien
gcttcttttaatgacattatcaaggaacagttt

SEQ ID NO: 897089 - DNA, 33 bp, Homo sapien
aatcacaaaatctatacggaacattccaacatg

SEQ ID NO: 897090 - DNA, 33 bp, Homo sapien
aatcacaaaatctatatggaacattccaacatg

SEQ ID NO: 897091 - DNA, 33 bp, Homo sapien
caaaccattctgtacacatgaactaccttctca

SEQ ID NO: 897092 - DNA, 33 bp, Homo sapien
caaaccattctgtacagatgaactaccttctca

SEQ ID NO: 897093 - DNA, 33 bp, Homo sapien
tgtagggcttgaagccaccatggatggcctgcc

SEQ ID NO: 897094 - DNA, 33 bp, Homo sapien
tgtagggcttgaagccgccatggatggcctgcc

SEQ ID NO: 897095 - DNA, 33 bp, Homo sapien
cagctcagcaacggaaaataaatgcagtcccta

SEQ ID NO: 897096 - DNA, 33 bp, Homo sapien
cagctcagcaacggaagataaatgcagtcccta

SEQ ID NO: 897097 - DNA, 33 bp, Homo sapien
gtaatctgactctacacagttatcaacattcat

SEQ ID NO: 897098 - DNA, 33 bp, Homo sapien
gtaatctgactctacatagttatcaacattcat

SEQ ID NO: 897099 - DNA, 33 bp, Homo sapien
taatgaaggagaacgaaaacctttataattcct

SEQ ID NO: 897100 - DNA, 33 bp, Homo sapien
taatgaaggagaacgagaacctttataattcct

SEQ ID NO: 897101 - DNA, 33 bp, Homo sapien
agaagagctgtgctaaaaagatagacagtggag

SEQ ID NO: 897102 - DNA, 33 bp, Homo sapien
agaagagctgtgctaagaagatagacagtggag

SEQ ID NO: 897103 - DNA, 33 bp, Homo sapien
ccccatttggcttcaaactcttggccagagtga

SEQ ID NO: 897104 - DNA, 33 bp, Homo sapien
ccccatttggcttcaagctcttggccagagtga

SEQ ID NO: 897105 - DNA, 33 bp, Homo sapien
ctgacactacgcgggaaccgctaatactgctca

SEQ ID NO: 897106 - DNA, 33 bp, Homo sapien
ctgacactacgcgggatccgctaatactgctca

SEQ ID NO: 897107 - DNA, 33 bp, Homo sapien
caagcgagatgttttccacctataacgacttgg

SEQ ID NO: 897108 - DNA, 33 bp, Homo sapien
caagcgagatgttttcgacctataacgacttgg

SEQ ID NO: 897109 - DNA, 33 bp, Homo sapien
caaccgtttggagatgacaatcaatgtttacat

SEQ ID NO: 897110 - DNA, 33 bp, Homo sapien
caaccgtttggagatgtcaatcaatgtttacat

SEQ ID NO: 897111 - DNA, 33 bp, Homo sapien
aatagtaaattgacaccgacccaccactatgtg

SEQ ID NO: 897112 - DNA, 33 bp, Homo sapien
aatagtaaattgacactgacccaccactatgtg

SEQ ID NO: 897113 - DNA, 33 bp, Homo sapien
agcattcatttcctccaattaaaattaagcata

SEQ ID NO: 897114 - DNA, 33 bp, Homo sapien
agcattcatttcctccgattaaaattaagcata

SEQ ID NO: 897115 - DNA, 33 bp, Homo sapien
ttaatatattgctagagctaagcgggctacttt

SEQ ID NO: 897116 - DNA, 33 bp, Homo sapien
ttaatatattgctagatctaagcgggctacttt

SEQ ID NO: 897117 - DNA, 33 bp, Homo sapien
aatctcaagaattcaggccccaagctttttctt

SEQ ID NO: 897118 - DNA, 33 bp, Homo sapien
aatctcaagaattcagtccccaagctttttctt

SEQ ID NO: 897119 - DNA, 33 bp, Homo sapien
ggtgcactgatttccccggaggagccctgagag

SEQ ID NO: 897120 - DNA, 33 bp, Homo sapien
ggtgcactgatttccctggaggagccctgagag

SEQ ID NO: 897121 - DNA, 33 bp, Homo sapien
agaaaaactgagacccagatcatgtcacaagtg

SEQ ID NO: 897122 - DNA, 33 bp, Homo sapien
agaaaaactgagacccggatcatgtcacaagtg

SEQ ID NO: 897123 - DNA, 33 bp, Homo sapien
acttcctgcagagaaaaaaggtcattttatttt

SEQ ID NO: 897124 - DNA, 33 bp, Homo sapien
acttcctgcagagaaagaaggtcattttatttt

SEQ ID NO: 897125 - DNA, 33 bp, Homo sapien
attctgtcactttggaccattctgtttcaatgt

SEQ ID NO: 897126 - DNA, 33 bp, Homo sapien
attctgtcactttggatcattctgtttcaatgt

SEQ ID NO: 897127 - DNA, 33 bp, Homo sapien
agcaccttaaattgaacgttccccaggccaaat

SEQ ID NO: 897128 - DNA, 33 bp, Homo sapien
agcaccttaaattgaatgttccccaggccaaat

SEQ ID NO: 897129 - DNA, 33 bp, Homo sapien
tatggagaggtagatgacataatatatttgcaa

SEQ ID NO: 897130 - DNA, 33 bp, Homo sapien
tatggagaggtagatgtcataatatatttgcaa

SEQ ID NO: 897131 - DNA, 33 bp, Homo sapien
gagggaaggtagccaccatattgtcccgacagt

SEQ ID NO: 897132 - DNA, 33 bp, Homo sapien
gagggaaggtagccacgatattgtcccgacagt

SEQ ID NO: 897133 - DNA, 33 bp, Homo sapien
taaccaagctgttgccagaagttgaaataagta

SEQ ID NO: 897134 - DNA, 33 bp, Homo sapien
taaccaagctgttgccggaagttgaaataagta

SEQ ID NO: 897135 - DNA, 33 bp, Homo sapien
aatatgtaatgaggcactataaaagcatttaaa

SEQ ID NO: 897136 - DNA, 33 bp, Homo sapien
aatatgtaatgaggcattataaaagcatttaaa

SEQ ID NO: 897137 - DNA, 33 bp, Homo sapien
gttatacctcccttaacgctgccttgaattgtt

SEQ ID NO: 897138 - DNA, 33 bp, Homo sapien
gttatacctcccttaatgctgccttgaattgtt

SEQ ID NO: 897139 - DNA, 33 bp, Homo sapien
cttaaattagataaaccacaaaacgagagacaa

SEQ ID NO: 897140 - DNA, 33 bp, Homo sapien
cttaaattagataaactacaaaacgagagacaa

SEQ ID NO: 897141 - DNA, 33 bp, Homo sapien
gtacatatgacaggtaaacagattatacattga

SEQ ID NO: 897142 - DNA, 33 bp, Homo sapien
gtacatatgacaggtagacagattatacattga

SEQ ID NO: 897143 - DNA, 33 bp, Homo sapien
gccttcctcctagcagaccttattttcacagag

SEQ ID NO: 897144 - DNA, 33 bp, Homo sapien
gccttcctcctagcaggccttattttcacagag

SEQ ID NO: 897145 - DNA, 33 bp, Homo sapien
gaaaagggacacttagacaaatctgaaaagaaa

SEQ ID NO: 897146 - DNA, 33 bp, Homo sapien
gaaaagggacacttagccaaatctgaaaagaaa

SEQ ID NO: 897147 - DNA, 33 bp, Homo sapien
ttccattgcctctgaacaagggctccaaaggga

SEQ ID NO: 897148 - DNA, 33 bp, Homo sapien
ttccattgcctctgaagaagggctccaaaggga

SEQ ID NO: 897149 - DNA, 33 bp, Homo sapien
catctctaacagaaacagagcatcaagacagaa

SEQ ID NO: 897150 - DNA, 33 bp, Homo sapien
catctctaacagaaactgagcatcaagacagaa

SEQ ID NO: 897151 - DNA, 33 bp, Homo sapien
aaactgcctgtcctcaaatcccggctttgtgac

SEQ ID NO: 897152 - DNA, 33 bp, Homo sapien
aaactgcctgtcctcacatcccggctttgtgac

SEQ ID NO: 897153 - DNA, 33 bp, Homo sapien
gctctttgggataataagatcaagtaaatgcaa

SEQ ID NO: 897154 - DNA, 33 bp, Homo sapien
gctctttgggataataggatcaagtaaatgcaa

SEQ ID NO: 897155 - DNA, 33 bp, Homo sapien
ttaaataattctaagcacgtgtccaattgatag

SEQ ID NO: 897156 - DNA, 33 bp, Homo sapien
ttaaataattctaagcgcgtgtccaattgatag

SEQ ID NO: 897157 - DNA, 33 bp, Homo sapien
ccagcattttcaccaacattcagcctctcagga

SEQ ID NO: 897158 - DNA, 33 bp, Homo sapien
ccagcattttcaccaatattcagcctctcagga

SEQ ID NO: 897159 - DNA, 33 bp, Homo sapien
gtcaatagtagtcataaaaaggaggtcagtgat

SEQ ID NO: 897160 - DNA, 33 bp, Homo sapien
gtcaatagtagtcatacaaaggaggtcagtgat

SEQ ID NO: 897161 - DNA, 33 bp, Homo sapien
gtcagtgggaaatttacagcaacattcgggctt

SEQ ID NO: 897162 - DNA, 33 bp, Homo sapien
gtcagtgggaaatttagagcaacattcgggctt

SEQ ID NO: 897163 - DNA, 33 bp, Homo sapien
tattcattttaatcatcatagtgtcaatgatga

SEQ ID NO: 897164 - DNA, 33 bp, Homo sapien
tattcattttaatcattatagtgtcaatgatga

SEQ ID NO: 897165 - DNA, 33 bp, Homo sapien
tggttgcagatactcaaataatctcaaaattta

SEQ ID NO: 897166 - DNA, 33 bp, Homo sapien
tggttgcagatactcagataatctcaaaattta

SEQ ID NO: 897167 - DNA, 33 bp, Homo sapien
aactcaggaggaggaacaggtttgatgagaaca

SEQ ID NO: 897168 - DNA, 33 bp, Homo sapien
aactcaggaggaggaagaggtttgatgagaaca

SEQ ID NO: 897169 - DNA, 33 bp, Homo sapien
cgcctcttggaagttacatggtttcactttcgc

SEQ ID NO: 897170 - DNA, 33 bp, Homo sapien
cgcctcttggaagttatatggtttcactttcgc

SEQ ID NO: 897171 - DNA, 33 bp, Homo sapien
aatcctgtggctgtcaagtggtaactttgtgac

SEQ ID NO: 897172 - DNA, 33 bp, Homo sapien
aatcctgtggctgtcacgtggtaactttgtgac

SEQ ID NO: 897173 - DNA, 33 bp, Homo sapien
aaaggttccacaccaaaggaagatgtgtcatat

SEQ ID NO: 897174 - DNA, 33 bp, Homo sapien
aaaggttccacaccaagggaagatgtgtcatat

SEQ ID NO: 897175 - DNA, 33 bp, Homo sapien
gtgctgtgatctcttacagcaaaactgaaatgc

SEQ ID NO: 897176 - DNA, 33 bp, Homo sapien
gtgctgtgatctcttatagcaaaactgaaatgc

SEQ ID NO: 897177 - DNA, 33 bp, Homo sapien
caatgatgctttgggacagatgaataattcggc

SEQ ID NO: 897178 - DNA, 33 bp, Homo sapien
caatgatgctttgggatagatgaataattcggc

SEQ ID NO: 897179 - DNA, 33 bp, Homo sapien
gattttggcaaatgaacagaccaatcagtggaa

SEQ ID NO: 897180 - DNA, 33 bp, Homo sapien
gattttggcaaatgaatagaccaatcagtggaa

SEQ ID NO: 897181 - DNA, 33 bp, Homo sapien
ctggcgggtggagacaatggccctacatcacag

SEQ ID NO: 897182 - DNA, 33 bp, Homo sapien
ctggcgggtggagacactggccctacatcacag

SEQ ID NO: 897183 - DNA, 33 bp, Homo sapien
tttggaattggcaagaactgtcctgagcttttc

SEQ ID NO: 897184 - DNA, 33 bp, Homo sapien
tttggaattggcaagatctgtcctgagcttttc

SEQ ID NO: 897185 - DNA, 33 bp, Homo sapien
ggtgctggaatcagaccgaaccgttggtttgaa

SEQ ID NO: 897186 - DNA, 33 bp, Homo sapien
ggtgctggaatcagactgaaccgttggtttgaa

SEQ ID NO: 897187 - DNA, 33 bp, Homo sapien
ttaacacctagagaaacggttcctgaaagtatc

SEQ ID NO: 897188 - DNA, 33 bp, Homo sapien
ttaacacctagagaaatggttcctgaaagtatc

SEQ ID NO: 897189 - DNA, 33 bp, Homo sapien
ggccccactgtccaatcagaggctccccaggat

SEQ ID NO: 897190 - DNA, 33 bp, Homo sapien
ggccccactgtccaatgagaggctccccaggat

SEQ ID NO: 897191 - DNA, 33 bp, Homo sapien
tctttgccaaaatgcacatttttgttgtgttat

SEQ ID NO: 897192 - DNA, 33 bp, Homo sapien
tctttgccaaaatgcatatttttgttgtgttat

SEQ ID NO: 897193 - DNA, 33 bp, Homo sapien
cagaagtgcacgtcccagaagtcaagaggaaat

SEQ ID NO: 897194 - DNA, 33 bp, Homo sapien
cagaagtgcacgtcccggaagtcaagaggaaat

SEQ ID NO: 897195 - DNA, 33 bp, Homo sapien
cctacctctttgatgacctttcttagttttctc

SEQ ID NO: 897196 - DNA, 33 bp, Homo sapien
cctacctctttgatgatctttcttagttttctc

SEQ ID NO: 897197 - DNA, 33 bp, Homo sapien
gaggaaagcaccagaacagaatgcctgggactg

SEQ ID NO: 897198 - DNA, 33 bp, Homo sapien
gaggaaagcaccagaatagaatgcctgggactg

SEQ ID NO: 897199 - DNA, 33 bp, Homo sapien
actgtctctcacggcaccgtcgttccatttatt

SEQ ID NO: 897200 - DNA, 33 bp, Homo sapien
actgtctctcacggcatcgtcgttccatttatt

SEQ ID NO: 897201 - DNA, 33 bp, Homo sapien
gttttgaccttacacaccacctaaaagggtctc

SEQ ID NO: 897202 - DNA, 33 bp, Homo sapien
gttttgaccttacacatcacctaaaagggtctc

SEQ ID NO: 897203 - DNA, 33 bp, Homo sapien
cctagttgttcaacacagtcccaaaaattgggg

SEQ ID NO: 897204 - DNA, 33 bp, Homo sapien
cctagttgttcaacactgtcccaaaaattgggg

SEQ ID NO: 897205 - DNA, 33 bp, Homo sapien
tctaaagtcttggaagcctcctgtattgccagc

SEQ ID NO: 897206 - DNA, 33 bp, Homo sapien
tctaaagtcttggaaggctcctgtattgccagc

SEQ ID NO: 897207 - DNA, 33 bp, Homo sapien
ggctggtggcaaggaaaccaaagaggacagtct

SEQ ID NO: 897208 - DNA, 33 bp, Homo sapien
ggctggtggcaaggaagccaaagaggacagtct

SEQ ID NO: 897209 - DNA, 33 bp, Homo sapien
tctacagtcaataataaagtgttgtaaatgctg

SEQ ID NO: 897210 - DNA, 33 bp, Homo sapien
tctacagtcaataatagagtgttgtaaatgctg

SEQ ID NO: 897211 - DNA, 33 bp, Homo sapien
ctagcatagagaagacaatccaaaaatacttga

SEQ ID NO: 897212 - DNA, 33 bp, Homo sapien
ctagcatagagaagaccatccaaaaatacttga

SEQ ID NO: 897213 - DNA, 33 bp, Homo sapien
tttaaatcattcaccaaaagttttacatgggga

SEQ ID NO: 897214 - DNA, 33 bp, Homo sapien
tttaaatcattcaccagaagttttacatgggga

SEQ ID NO: 897215 - DNA, 33 bp, Homo sapien
gcatttactgttaagacgttgttaagtcagtgt

SEQ ID NO: 897216 - DNA, 33 bp, Homo sapien
gcatttactgttaagatgttgttaagtcagtgt

SEQ ID NO: 897217 - DNA, 33 bp, Homo sapien
ccacaaaaactgcagaagataataaatgattgt

SEQ ID NO: 897218 - DNA, 33 bp, Homo sapien
ccacaaaaactgcagaggataataaatgattgt

SEQ ID NO: 897219 - DNA, 33 bp, Homo sapien
catatagatcagtaaaaaaaaattgagagacca

SEQ ID NO: 897220 - DNA, 33 bp, Homo sapien
catatagatcagtaaataaaaattgagagacca

SEQ ID NO: 897221 - DNA, 33 bp, Homo sapien
tactctgtttgctgaactaattgtggcaggtag

SEQ ID NO: 897222 - DNA, 33 bp, Homo sapien
tactctgtttgctgaattaattgtggcaggtag

SEQ ID NO: 897223 - DNA, 33 bp, Homo sapien
taaatgggcccaaagaagtaggctttaatctag

SEQ ID NO: 897224 - DNA, 33 bp, Homo sapien
taaatgggcccaaagaggtaggctttaatctag

SEQ ID NO: 897225 - DNA, 33 bp, Homo sapien
ggacagtacattctcaacagagattttgaaaaa

SEQ ID NO: 897226 - DNA, 33 bp, Homo sapien
ggacagtacattctcagcagagattttgaaaaa

SEQ ID NO: 897227 - DNA, 33 bp, Homo sapien
ttaccttttggtagccactattggactataagc

SEQ ID NO: 897228 - DNA, 33 bp, Homo sapien
ttaccttttggtagccgctattggactataagc

SEQ ID NO: 897229 - DNA, 33 bp, Homo sapien
ctggcctcagctgggaagatacgaactgtgaga

SEQ ID NO: 897230 - DNA, 33 bp, Homo sapien
ctggcctcagctgggaggatacgaactgtgaga

SEQ ID NO: 897231 - DNA, 33 bp, Homo sapien
atgctagtaaatgacacccaggtaaagaagaaa

SEQ ID NO: 897232 - DNA, 33 bp, Homo sapien
atgctagtaaatgacatccaggtaaagaagaaa

SEQ ID NO: 897233 - DNA, 33 bp, Homo sapien
agctaaaaaagaaatacacgagtcatagaatta

SEQ ID NO: 897234 - DNA, 33 bp, Homo sapien
agctaaaaaagaaatagacgagtcatagaatta

SEQ ID NO: 897235 - DNA, 33 bp, Homo sapien
ctttggggttctgataggtgagaatgagttcgg

SEQ ID NO: 897236 - DNA, 33 bp, Homo sapien
ctttggggttctgatatgtgagaatgagttcgg

SEQ ID NO: 897237 - DNA, 33 bp, Homo sapien
gaaaagaagaaaaacaacattatttgaggacct

SEQ ID NO: 897238 - DNA, 33 bp, Homo sapien
gaaaagaagaaaaacagcattatttgaggacct

SEQ ID NO: 897239 - DNA, 33 bp, Homo sapien
aaaactggcactgagaaaggctaagttacctgc

SEQ ID NO: 897240 - DNA, 33 bp, Homo sapien
aaaactggcactgagagaggctaagttacctgc

SEQ ID NO: 897241 - DNA, 33 bp, Homo sapien
cttgaaagatggcaagaccggtatttccagaga

SEQ ID NO: 897242 - DNA, 33 bp, Homo sapien
cttgaaagatggcaaggccggtatttccagaga

SEQ ID NO: 897243 - DNA, 33 bp, Homo sapien
ggactaatgtgaattacaatagagaaggtagag

SEQ ID NO: 897244 - DNA, 33 bp, Homo sapien
ggactaatgtgaattataatagagaaggtagag

SEQ ID NO: 897245 - DNA, 33 bp, Homo sapien
aatggcccatcagacaagacattaggcaaagac

SEQ ID NO: 897246 - DNA, 33 bp, Homo sapien
aatggcccatcagacaggacattaggcaaagac

SEQ ID NO: 897247 - DNA, 33 bp, Homo sapien
aattgggaaataaaaccaggctggtggccaaga

SEQ ID NO: 897248 - DNA, 33 bp, Homo sapien
aattgggaaataaaactaggctggtggccaaga

SEQ ID NO: 897249 - DNA, 33 bp, Homo sapien
ccccatatgatctggccaccctcattctgtgcc

SEQ ID NO: 897250 - DNA, 33 bp, Homo sapien
ccccatatgatctggctaccctcattctgtgcc

SEQ ID NO: 897251 - DNA, 33 bp, Homo sapien
actgatgacctaaaaaacattcaaacgaatact

SEQ ID NO: 897252 - DNA, 33 bp, Homo sapien
actgatgacctaaaaaccattcaaacgaatact

SEQ ID NO: 897253 - DNA, 33 bp, Homo sapien
catcaggttctcttccccactcgagaaaatcaa

SEQ ID NO: 897254 - DNA, 33 bp, Homo sapien
catcaggttctcttccgcactcgagaaaatcaa

SEQ ID NO: 897255 - DNA, 33 bp, Homo sapien
tatagcctctaccttacaattcaccacttgttt

SEQ ID NO: 897256 - DNA, 33 bp, Homo sapien
tatagcctctaccttataattcaccacttgttt

SEQ ID NO: 897257 - DNA, 33 bp, Homo sapien
acacaggcatattaaaaaattttcttactgatc

SEQ ID NO: 897258 - DNA, 33 bp, Homo sapien
acacaggcatattaaacaattttcttactgatc

SEQ ID NO: 897259 - DNA, 33 bp, Homo sapien
acatgacattttatgcccaatacttgtaacact

SEQ ID NO: 897260 - DNA, 33 bp, Homo sapien
acatgacattttatgctcaatacttgtaacact

SEQ ID NO: 897261 - DNA, 33 bp, Homo sapien
ggtgagtgagcaagaaccccgaatccaaacgtg

SEQ ID NO: 897262 - DNA, 33 bp, Homo sapien
ggtgagtgagcaagaatcccgaatccaaacgtg

SEQ ID NO: 897263 - DNA, 33 bp, Homo sapien
agatgtatagcaggaaggaaaagaaaaatcaaa

SEQ ID NO: 897264 - DNA, 33 bp, Homo sapien
agatgtatagcaggaatgaaaagaaaaatcaaa

SEQ ID NO: 897265 - DNA, 33 bp, Homo sapien
cattataaacttcctaaaaagtcagcactgagg

SEQ ID NO: 897266 - DNA, 33 bp, Homo sapien
cattataaacttcctacaaagtcagcactgagg

SEQ ID NO: 897267 - DNA, 33 bp, Homo sapien
taaaatgcaattgttccaatcattttctacaga

SEQ ID NO: 897268 - DNA, 33 bp, Homo sapien
taaaatgcaattgttctaatcattttctacaga

SEQ ID NO: 897269 - DNA, 33 bp, Homo sapien
caatagagacaccataacaagtcgtaaatggtc

SEQ ID NO: 897270 - DNA, 33 bp, Homo sapien
caatagagacaccatagcaagtcgtaaatggtc

SEQ ID NO: 897271 - DNA, 33 bp, Homo sapien
atctgcaggaagaatactaatctatgaatgcaa

SEQ ID NO: 897272 - DNA, 33 bp, Homo sapien
atctgcaggaagaatattaatctatgaatgcaa

SEQ ID NO: 897273 - DNA, 33 bp, Homo sapien
tcctgaaagctaaataactggagcacaaagaca

SEQ ID NO: 897274 - DNA, 33 bp, Homo sapien
tcctgaaagctaaatagctggagcacaaagaca

SEQ ID NO: 897275 - DNA, 33 bp, Homo sapien
tccgtcttgcaaataacgtatctttcagcttta

SEQ ID NO: 897276 - DNA, 33 bp, Homo sapien
tccgtcttgcaaataatgtatctttcagcttta

SEQ ID NO: 897277 - DNA, 33 bp, Homo sapien
aaccacaaagagattacactgaacactcatgag

SEQ ID NO: 897278 - DNA, 33 bp, Homo sapien
aaccacaaagagattatactgaacactcatgag

SEQ ID NO: 897279 - DNA, 33 bp, Homo sapien
aagagttacctgtttgaagtttggaatgtactt

SEQ ID NO: 897280 - DNA, 33 bp, Homo sapien
aagagttacctgtttggagtttggaatgtactt

SEQ ID NO: 897281 - DNA, 33 bp, Homo sapien
gagttgttccttaatacgtagttgagattgaga

SEQ ID NO: 897282 - DNA, 33 bp, Homo sapien
gagttgttccttaataggtagttgagattgaga

SEQ ID NO: 897283 - DNA, 33 bp, Homo sapien
aggaatggtgagtaaaactgctgcccttagcaa

SEQ ID NO: 897284 - DNA, 33 bp, Homo sapien
aggaatggtgagtaaagctgctgcccttagcaa

SEQ ID NO: 897285 - DNA, 33 bp, Homo sapien
tccccccagagtaagaatatgtgtaaagattta

SEQ ID NO: 897286 - DNA, 33 bp, Homo sapien
tccccccagagtaagagtatgtgtaaagattta

SEQ ID NO: 897287 - DNA, 33 bp, Homo sapien
ctgccaatgctatccaaggatcacaaacaaaac

SEQ ID NO: 897288 - DNA, 33 bp, Homo sapien
ctgccaatgctatccagggatcacaaacaaaac

SEQ ID NO: 897289 - DNA, 33 bp, Homo sapien
ttgttacacacaatgaataagttctggagagct

SEQ ID NO: 897290 - DNA, 33 bp, Homo sapien
ttgttacacacaatgagtaagttctggagagct

SEQ ID NO: 897291 - DNA, 33 bp, Homo sapien
gttgttagcaactctaagactagaatcagtttt

SEQ ID NO: 897292 - DNA, 33 bp, Homo sapien
gttgttagcaactctaggactagaatcagtttt

SEQ ID NO: 897293 - DNA, 33 bp, Homo sapien
aatttcttagtcaaccacagtggtcattcagga

SEQ ID NO: 897294 - DNA, 33 bp, Homo sapien
aatttcttagtcaaccgcagtggtcattcagga

SEQ ID NO: 897295 - DNA, 33 bp, Homo sapien
gagtagtattctaaaactgtaaatgggaacata

SEQ ID NO: 897296 - DNA, 33 bp, Homo sapien
gagtagtattctaaaagtgtaaatgggaacata

SEQ ID NO: 897297 - DNA, 33 bp, Homo sapien
gagctaccgaaacttacgtggaaactacataca

SEQ ID NO: 897298 - DNA, 33 bp, Homo sapien
gagctaccgaaacttatgtggaaactacataca

SEQ ID NO: 897299 - DNA, 33 bp, Homo sapien
aggtttatcaaggtgaatatgtggaaaagagcc

SEQ ID NO: 897300 - DNA, 33 bp, Homo sapien
aggtttatcaaggtgagtatgtggaaaagagcc

SEQ ID NO: 897301 - DNA, 33 bp, Homo sapien
taccacaagcaccgtcacttaaaacaacagaaa

SEQ ID NO: 897302 - DNA, 33 bp, Homo sapien
taccacaagcaccgtcgcttaaaacaacagaaa

SEQ ID NO: 897303 - DNA, 33 bp, Homo sapien
tctccacttgtaaacactgtatgatactgccct

SEQ ID NO: 897304 - DNA, 33 bp, Homo sapien
tctccacttgtaaacattgtatgatactgccct

SEQ ID NO: 897305 - DNA, 33 bp, Homo sapien
tagatttctagcttgacagttgttttttccttc

SEQ ID NO: 897306 - DNA, 33 bp, Homo sapien
tagatttctagcttgatagttgttttttccttc

SEQ ID NO: 897307 - DNA, 33 bp, Homo sapien
gtaaacatatccatcaccatacccctgagattg

SEQ ID NO: 897308 - DNA, 33 bp, Homo sapien
gtaaacatatccatcatcatacccctgagattg

SEQ ID NO: 897309 - DNA, 33 bp, Homo sapien
ggcagctcctgaaccaatcatttggcagaagga

SEQ ID NO: 897310 - DNA, 33 bp, Homo sapien
ggcagctcctgaaccagtcatttggcagaagga

SEQ ID NO: 897311 - DNA, 33 bp, Homo sapien
cacaaacagaccacaaaaatggatttatccaga

SEQ ID NO: 897312 - DNA, 33 bp, Homo sapien
cacaaacagaccacaacaatggatttatccaga

SEQ ID NO: 897313 - DNA, 33 bp, Homo sapien
ctagagagagaccttacgaaatgaggaaacaag

SEQ ID NO: 897314 - DNA, 33 bp, Homo sapien
ctagagagagaccttatgaaatgaggaaacaag

SEQ ID NO: 897315 - DNA, 33 bp, Homo sapien
ccagtttacagaggcacgtattacagtcttagg

SEQ ID NO: 897316 - DNA, 33 bp, Homo sapien
ccagtttacagaggcatgtattacagtcttagg

SEQ ID NO: 897317 - DNA, 33 bp, Homo sapien
gggcctgatgtttaaccacctgagtccgagggg

SEQ ID NO: 897318 - DNA, 33 bp, Homo sapien
gggcctgatgtttaactacctgagtccgagggg

SEQ ID NO: 897319 - DNA, 33 bp, Homo sapien
ggagacacagttgaaaaaccaattgcagttcag

SEQ ID NO: 897320 - DNA, 33 bp, Homo sapien
ggagacacagttgaaagaccaattgcagttcag

SEQ ID NO: 897321 - DNA, 33 bp, Homo sapien
gcaatcaaatgaagaaagctaaccagccatagg

SEQ ID NO: 897322 - DNA, 33 bp, Homo sapien
gcaatcaaatgaagaaggctaaccagccatagg

SEQ ID NO: 897323 - DNA, 33 bp, Homo sapien
tccaaatgaagtcacacaagacacgcctaactc

SEQ ID NO: 897324 - DNA, 33 bp, Homo sapien
tccaaatgaagtcacagaagacacgcctaactc

SEQ ID NO: 897325 - DNA, 33 bp, Homo sapien
aatttatggaagtcagaaaagagatggaatcat

SEQ ID NO: 897326 - DNA, 33 bp, Homo sapien
aatttatggaagtcaggaaagagatggaatcat

SEQ ID NO: 897327 - DNA, 33 bp, Homo sapien
tcctaaaactatttcaactctttagaatgcaaa

SEQ ID NO: 897328 - DNA, 33 bp, Homo sapien
tcctaaaactatttcagctctttagaatgcaaa

SEQ ID NO: 897329 - DNA, 33 bp, Homo sapien
aagaaagaacaaacaacagtgatttaagctgaa

SEQ ID NO: 897330 - DNA, 33 bp, Homo sapien
aagaaagaacaaacaatagtgatttaagctgaa

SEQ ID NO: 897331 - DNA, 33 bp, Homo sapien
aagggcaaggtagaaccgatggacataaggata

SEQ ID NO: 897332 - DNA, 33 bp, Homo sapien
aagggcaaggtagaactgatggacataaggata

SEQ ID NO: 897333 - DNA, 33 bp, Homo sapien
ggtgacactcttcactcaatgaggaacagtgac

SEQ ID NO: 897334 - DNA, 33 bp, Homo sapien
ggtgacactcttcactgaatgaggaacagtgac

SEQ ID NO: 897335 - DNA, 33 bp, Homo sapien
ctttgctcctttgagagatacactgttgtgtta

SEQ ID NO: 897336 - DNA, 33 bp, Homo sapien
ctttgctcctttgagatatacactgttgtgtta

SEQ ID NO: 897337 - DNA, 33 bp, Homo sapien
tctcatttttaaaggccctctttttagattgag

SEQ ID NO: 897338 - DNA, 33 bp, Homo sapien
tctcatttttaaaggctctctttttagattgag

SEQ ID NO: 897339 - DNA, 33 bp, Homo sapien
ctacataggaaggaaaagttaattgacccatag

SEQ ID NO: 897340 - DNA, 33 bp, Homo sapien
ctacataggaaggaaatgttaattgacccatag

SEQ ID NO: 897341 - DNA, 33 bp, Homo sapien
tcttttctggtattctcacctcacaccctatgc

SEQ ID NO: 897342 - DNA, 33 bp, Homo sapien
tcttttctggtattctgacctcacaccctatgc

SEQ ID NO: 897343 - DNA, 33 bp, Homo sapien
gaatactgaagctggacgaaccttagtcacctt

SEQ ID NO: 897344 - DNA, 33 bp, Homo sapien
gaatactgaagctggatgaaccttagtcacctt

SEQ ID NO: 897345 - DNA, 33 bp, Homo sapien
atcaaaagaccaccaaaataagtcattcacaga

SEQ ID NO: 897346 - DNA, 33 bp, Homo sapien
atcaaaagaccaccaacataagtcattcacaga

SEQ ID NO: 897347 - DNA, 33 bp, Homo sapien
gccaagttacaggtaccacaaccattactgtgt

SEQ ID NO: 897348 - DNA, 33 bp, Homo sapien
gccaagttacaggtactacaaccattactgtgt

SEQ ID NO: 897349 - DNA, 33 bp, Homo sapien
tctggctgaagataataaagagtccacactaaa

SEQ ID NO: 897350 - DNA, 33 bp, Homo sapien
tctggctgaagataatgaagagtccacactaaa

SEQ ID NO: 897351 - DNA, 33 bp, Homo sapien
cagagcagaaaactgacaaaaactctggttaag

SEQ ID NO: 897352 - DNA, 33 bp, Homo sapien
cagagcagaaaactgataaaaactctggttaag

SEQ ID NO: 897353 - DNA, 33 bp, Homo sapien
cacacactgtgtccagaaagttgggtggggtct

SEQ ID NO: 897354 - DNA, 33 bp, Homo sapien
cacacactgtgtccagcaagttgggtggggtct

SEQ ID NO: 897355 - DNA, 33 bp, Homo sapien
tgctcgtgtgtataacagtgacagtaatcccca

SEQ ID NO: 897356 - DNA, 33 bp, Homo sapien
tgctcgtgtgtataacggtgacagtaatcccca

SEQ ID NO: 897357 - DNA, 33 bp, Homo sapien
cttgtccttcacctaacgaaagcaaaggcatga

SEQ ID NO: 897358 - DNA, 33 bp, Homo sapien
cttgtccttcacctaatgaaagcaaaggcatga

SEQ ID NO: 897359 - DNA, 33 bp, Homo sapien
cttctggttatatacccacagaaaatgagatca

SEQ ID NO: 897360 - DNA, 33 bp, Homo sapien
cttctggttatatacctacagaaaatgagatca

SEQ ID NO: 897361 - DNA, 33 bp, Homo sapien
cagtaaaaacaatcctaaaactgatgtagaacc

SEQ ID NO: 897362 - DNA, 33 bp, Homo sapien
cagtaaaaacaatccttaaactgatgtagaacc

SEQ ID NO: 897363 - DNA, 33 bp, Homo sapien
ttttgtatattgataacgtatcctgcaacctta

SEQ ID NO: 897364 - DNA, 33 bp, Homo sapien
ttttgtatattgataatgtatcctgcaacctta

SEQ ID NO: 897365 - DNA, 33 bp, Homo sapien
aagggacagaatggaagagagagtatcagagta

SEQ ID NO: 897366 - DNA, 33 bp, Homo sapien
aagggacagaatggaatagagagtatcagagta

SEQ ID NO: 897367 - DNA, 33 bp, Homo sapien
aggctagtcggtcacaaagtgtcctctcatgac

SEQ ID NO: 897368 - DNA, 33 bp, Homo sapien
aggctagtcggtcacagagtgtcctctcatgac

SEQ ID NO: 897369 - DNA, 33 bp, Homo sapien
ttaatacttgacatttgaagaaactaggctggc

SEQ ID NO: 897370 - DNA, 33 bp, Homo sapien
ttaatacttgacattttaagaaactaggctggc

SEQ ID NO: 897371 - DNA, 33 bp, Homo sapien
gaggtcaagccttctccgagaaatatggaaata

SEQ ID NO: 897372 - DNA, 33 bp, Homo sapien
gaggtcaagccttctctgagaaatatggaaata

SEQ ID NO: 897373 - DNA, 33 bp, Homo sapien
tggccctgtaaaacctaaggtgaaaatagttgt

SEQ ID NO: 897374 - DNA, 33 bp, Homo sapien
tggccctgtaaaacctgaggtgaaaatagttgt

SEQ ID NO: 897375 - DNA, 33 bp, Homo sapien
tatctagaatacgtacagaactcctacaattca

SEQ ID NO: 897376 - DNA, 33 bp, Homo sapien
tatctagaatacgtacggaactcctacaattca

SEQ ID NO: 897377 - DNA, 33 bp, Homo sapien
cccatgtgttcaggaactgttgactgtcaatgg

SEQ ID NO: 897378 - DNA, 33 bp, Homo sapien
cccatgtgttcaggaagtgttgactgtcaatgg

SEQ ID NO: 897379 - DNA, 33 bp, Homo sapien
ctttgctataggatgaccccacgtcaaaggtca

SEQ ID NO: 897380 - DNA, 33 bp, Homo sapien
ctttgctataggatgatcccacgtcaaaggtca

SEQ ID NO: 897381 - DNA, 33 bp, Homo sapien
atgaatatagaacttgcaagagtgaatttaagg

SEQ ID NO: 897382 - DNA, 33 bp, Homo sapien
atgaatatagaacttggaagagtgaatttaagg

SEQ ID NO: 897383 - DNA, 33 bp, Homo sapien
atttttgatgtttacacggaatgttcttacagc

SEQ ID NO: 897384 - DNA, 33 bp, Homo sapien
atttttgatgtttacatggaatgttcttacagc

SEQ ID NO: 897385 - DNA, 33 bp, Homo sapien
caacataaatgttacaaaaagatcctggaaagt

SEQ ID NO: 897386 - DNA, 33 bp, Homo sapien
caacataaatgttacacaaagatcctggaaagt

SEQ ID NO: 897387 - DNA, 33 bp, Homo sapien
ggaagcctttcctgaccgggtcaaacttctctc

SEQ ID NO: 897388 - DNA, 33 bp, Homo sapien
ggaagcctttcctgactgggtcaaacttctctc

SEQ ID NO: 897389 - DNA, 33 bp, Homo sapien
gtgatctttctgaagccctcagtaatcacggct

SEQ ID NO: 897390 - DNA, 33 bp, Homo sapien
gtgatctttctgaagctctcagtaatcacggct

SEQ ID NO: 897391 - DNA, 33 bp, Homo sapien
cagcgagttagtaaaacgacctagaaacagcaa

SEQ ID NO: 897392 - DNA, 33 bp, Homo sapien
cagcgagttagtaaaatgacctagaaacagcaa

SEQ ID NO: 897393 - DNA, 33 bp, Homo sapien
ttttgaagcttcatagaacttttgcagtatcac

SEQ ID NO: 897394 - DNA, 33 bp, Homo sapien
ttttgaagcttcatagtacttttgcagtatcac

SEQ ID NO: 897395 - DNA, 33 bp, Homo sapien
tctcagtagatatagaagaaaatgtgtaagtcc

SEQ ID NO: 897396 - DNA, 33 bp, Homo sapien
tctcagtagatatagaggaaaatgtgtaagtcc

SEQ ID NO: 897397 - DNA, 33 bp, Homo sapien
acagaaagatgtggcactcactgatgctctttc

SEQ ID NO: 897398 - DNA, 33 bp, Homo sapien
acagaaagatgtggcagtcactgatgctctttc

SEQ ID NO: 897399 - DNA, 33 bp, Homo sapien
ggacacgcagagtaagcaaaaaataaactcctg

SEQ ID NO: 897400 - DNA, 33 bp, Homo sapien
ggacacgcagagtaaggaaaaaataaactcctg

SEQ ID NO: 897401 - DNA, 33 bp, Homo sapien
acctgtgggtagactagcttgttagcatgaaat

SEQ ID NO: 897402 - DNA, 33 bp, Homo sapien
acctgtgggtagactatcttgttagcatgaaat

SEQ ID NO: 897403 - DNA, 33 bp, Homo sapien
gtcaaaaatgtaactaacagagctggataacac

SEQ ID NO: 897404 - DNA, 33 bp, Homo sapien
gtcaaaaatgtaactatcagagctggataacac

SEQ ID NO: 897405 - DNA, 33 bp, Homo sapien
ctccctctgaacactactacaaaaggaactaca

SEQ ID NO: 897406 - DNA, 33 bp, Homo sapien
ctccctctgaacactattacaaaaggaactaca

SEQ ID NO: 897407 - DNA, 33 bp, Homo sapien
gtctgcaagcaagcgaaggccattaaaacctta

SEQ ID NO: 897408 - DNA, 33 bp, Homo sapien
gtctgcaagcaagcgagggccattaaaacctta

SEQ ID NO: 897409 - DNA, 33 bp, Homo sapien
cacaaggcctgggttaagaagaggtgcagagga

SEQ ID NO: 897410 - DNA, 33 bp, Homo sapien
cacaaggcctgggttacgaagaggtgcagagga

SEQ ID NO: 897411 - DNA, 33 bp, Homo sapien
caaagggtgtaactgacgagagcagctgttgtg

SEQ ID NO: 897412 - DNA, 33 bp, Homo sapien
caaagggtgtaactgatgagagcagctgttgtg

SEQ ID NO: 897413 - DNA, 33 bp, Homo sapien
ctgcattgtactacataagactacatcgagtag

SEQ ID NO: 897414 - DNA, 33 bp, Homo sapien
ctgcattgtactacatgagactacatcgagtag

SEQ ID NO: 897415 - DNA, 33 bp, Homo sapien
tgtggtttggtctacacaaatttcttaaaaagt

SEQ ID NO: 897416 - DNA, 33 bp, Homo sapien
tgtggtttggtctacataaatttcttaaaaagt

SEQ ID NO: 897417 - DNA, 33 bp, Homo sapien
tttctttgtctcttctaaagtacctggcaccca

SEQ ID NO: 897418 - DNA, 33 bp, Homo sapien
tttctttgtctcttctgaagtacctggcaccca

SEQ ID NO: 897419 - DNA, 33 bp, Homo sapien
tcatacttatttggcccaggagaactgtacatc

SEQ ID NO: 897420 - DNA, 33 bp, Homo sapien
tcatacttatttggccgaggagaactgtacatc

SEQ ID NO: 897421 - DNA, 33 bp, Homo sapien
gtttgcctattgaccacactaaggttagcagaa

SEQ ID NO: 897422 - DNA, 33 bp, Homo sapien
gtttgcctattgaccagactaaggttagcagaa

SEQ ID NO: 897423 - DNA, 33 bp, Homo sapien
ggatgcaaaggtaatacatttggtgcctgatta

SEQ ID NO: 897424 - DNA, 33 bp, Homo sapien
ggatgcaaaggtaatatatttggtgcctgatta

SEQ ID NO: 897425 - DNA, 33 bp, Homo sapien
ggatcagtaagtttaccaatgatttttaagtga

SEQ ID NO: 897426 - DNA, 33 bp, Homo sapien
ggatcagtaagtttacgaatgatttttaagtga

SEQ ID NO: 897427 - DNA, 33 bp, Homo sapien
tattggtaatgaaaaactggagatattccatct

SEQ ID NO: 897428 - DNA, 33 bp, Homo sapien
tattggtaatgaaaaattggagatattccatct

SEQ ID NO: 897429 - DNA, 33 bp, Homo sapien
aggctgtatacttcacaagcatatcttgcagcc

SEQ ID NO: 897430 - DNA, 33 bp, Homo sapien
aggctgtatacttcacgagcatatcttgcagcc

SEQ ID NO: 897431 - DNA, 33 bp, Homo sapien
ttctgaagtatctctaaaaagtgtctctataaa

SEQ ID NO: 897432 - DNA, 33 bp, Homo sapien
ttctgaagtatctctagaaagtgtctctataaa

SEQ ID NO: 897433 - DNA, 33 bp, Homo sapien
ttttcatttagagtaacgatctccaggagtaaa

SEQ ID NO: 897434 - DNA, 33 bp, Homo sapien
ttttcatttagagtaatgatctccaggagtaaa

SEQ ID NO: 897435 - DNA, 33 bp, Homo sapien
ggcaccatgaaggggaactgcccatgctcagga

SEQ ID NO: 897436 - DNA, 33 bp, Homo sapien
ggcaccatgaaggggacctgcccatgctcagga

SEQ ID NO: 897437 - DNA, 33 bp, Homo sapien
aacagaattggttgaacggcgacagtatgtaca

SEQ ID NO: 897438 - DNA, 33 bp, Homo sapien
aacagaattggttgaatggcgacagtatgtaca

SEQ ID NO: 897439 - DNA, 33 bp, Homo sapien
agacatggttgttgtacgaatatgcatgtccat

SEQ ID NO: 897440 - DNA, 33 bp, Homo sapien
agacatggttgttgtatgaatatgcatgtccat

SEQ ID NO: 897441 - DNA, 33 bp, Homo sapien
tgaagagtcaggtgacacattgggagagcagag

SEQ ID NO: 897442 - DNA, 33 bp, Homo sapien
tgaagagtcaggtgacgcattgggagagcagag

SEQ ID NO: 897443 - DNA, 33 bp, Homo sapien
gtgtgaacctcacagacgttgtttgtactaccc

SEQ ID NO: 897444 - DNA, 33 bp, Homo sapien
gtgtgaacctcacagatgttgtttgtactaccc

SEQ ID NO: 897445 - DNA, 33 bp, Homo sapien
taattttccaagtgtaagttaatatagtgtttt

SEQ ID NO: 897446 - DNA, 33 bp, Homo sapien
taattttccaagtgtaggttaatatagtgtttt

SEQ ID NO: 897447 - DNA, 33 bp, Homo sapien
cgttggtgaataacataacgcaactattcattc

SEQ ID NO: 897448 - DNA, 33 bp, Homo sapien
cgttggtgaataacattacgcaactattcattc

SEQ ID NO: 897449 - DNA, 33 bp, Homo sapien
ttatcttcactttaataagaatttgcccaatat

SEQ ID NO: 897450 - DNA, 33 bp, Homo sapien
ttatcttcactttaatgagaatttgcccaatat

SEQ ID NO: 897451 - DNA, 33 bp, Homo sapien
tgcttaagtaacatagaccatacttacataggt

SEQ ID NO: 897452 - DNA, 33 bp, Homo sapien
tgcttaagtaacatagtccatacttacataggt

SEQ ID NO: 897453 - DNA, 33 bp, Homo sapien
gaaagggctctacaccaaaattgagtggattat

SEQ ID NO: 897454 - DNA, 33 bp, Homo sapien
gaaagggctctacaccgaaattgagtggattat

SEQ ID NO: 897455 - DNA, 33 bp, Homo sapien
ggatgtcctatattctaaaactaggattcttag

SEQ ID NO: 897456 - DNA, 33 bp, Homo sapien
ggatgtcctatattctgaaactaggattcttag

SEQ ID NO: 897457 - DNA, 33 bp, Homo sapien
cttgtgacatggtggacgtgattcttaaggagg

SEQ ID NO: 897458 - DNA, 33 bp, Homo sapien
cttgtgacatggtggatgtgattcttaaggagg

SEQ ID NO: 897459 - DNA, 33 bp, Homo sapien
aggaggttctaaaatacgtactttgagaagaag

SEQ ID NO: 897460 - DNA, 33 bp, Homo sapien
aggaggttctaaaatatgtactttgagaagaag

SEQ ID NO: 897461 - DNA, 33 bp, Homo sapien
tcttcctgtcttgtcacattggcagtacaattg

SEQ ID NO: 897462 - DNA, 33 bp, Homo sapien
tcttcctgtcttgtcagattggcagtacaattg

SEQ ID NO: 897463 - DNA, 33 bp, Homo sapien
gtgtatgatgaggaaaaagtagatgactatatg

SEQ ID NO: 897464 - DNA, 33 bp, Homo sapien
gtgtatgatgaggaaagagtagatgactatatg

SEQ ID NO: 897465 - DNA, 33 bp, Homo sapien
gcatcctcacttctgcaaactgcaatagaacca

SEQ ID NO: 897466 - DNA, 33 bp, Homo sapien
gcatcctcacttctgcgaactgcaatagaacca

SEQ ID NO: 897467 - DNA, 33 bp, Homo sapien
acctgaattaaggtaaatattatcctcagtgaa

SEQ ID NO: 897468 - DNA, 33 bp, Homo sapien
acctgaattaaggtaactattatcctcagtgaa

SEQ ID NO: 897469 - DNA, 33 bp, Homo sapien
gactcagacatcaacacggatgagttctgttgt

SEQ ID NO: 897470 - DNA, 33 bp, Homo sapien
gactcagacatcaacagggatgagttctgttgt

SEQ ID NO: 897471 - DNA, 33 bp, Homo sapien
tttgcttccacgtccacatagaaaagaagaaaa

SEQ ID NO: 897472 - DNA, 33 bp, Homo sapien
tttgcttccacgtccagatagaaaagaagaaaa

SEQ ID NO: 897473 - DNA, 33 bp, Homo sapien
aaccgatgctgcagtcaataaaggttattaaca

SEQ ID NO: 897474 - DNA, 33 bp, Homo sapien
aaccgatgctgcagtcgataaaggttattaaca

SEQ ID NO: 897475 - DNA, 33 bp, Homo sapien
atgcttatagtcatccaagctagatcttctgga

SEQ ID NO: 897476 - DNA, 33 bp, Homo sapien
atgcttatagtcatccgagctagatcttctgga

SEQ ID NO: 897477 - DNA, 33 bp, Homo sapien
caacggatatttactgaataaactcatgattat

SEQ ID NO: 897478 - DNA, 33 bp, Homo sapien
caacggatatttactgcataaactcatgattat

SEQ ID NO: 897479 - DNA, 33 bp, Homo sapien
acccagccagtaaaaacattgggccctgacatt

SEQ ID NO: 897480 - DNA, 33 bp, Homo sapien
acccagccagtaaaaatattgggccctgacatt

SEQ ID NO: 897481 - DNA, 33 bp, Homo sapien
tttagattcaaaagtccatgtaagatttgggtc

SEQ ID NO: 897482 - DNA, 33 bp, Homo sapien
tttagattcaaaagtcgatgtaagatttgggtc

SEQ ID NO: 897483 - DNA, 33 bp, Homo sapien
atactgaccacatttcaagttccttcgttttta

SEQ ID NO: 897484 - DNA, 33 bp, Homo sapien
atactgaccacatttccagttccttcgttttta

SEQ ID NO: 897485 - DNA, 33 bp, Homo sapien
cttttcctaataagcagcagggcaaagttagca

SEQ ID NO: 897486 - DNA, 33 bp, Homo sapien
cttttcctaataagcatcagggcaaagttagca

SEQ ID NO: 897487 - DNA, 33 bp, Homo sapien
ttgtatttttttctcaaatagtgcctggatatt

SEQ ID NO: 897488 - DNA, 33 bp, Homo sapien
ttgtatttttttctcagatagtgcctggatatt

SEQ ID NO: 897489 - DNA, 33 bp, Homo sapien
tgctaaatattatataacccttttcaccaacta

SEQ ID NO: 897490 - DNA, 33 bp, Homo sapien
tgctaaatattatataccccttttcaccaacta

SEQ ID NO: 897491 - DNA, 33 bp, Homo sapien
gccagagtcacactatgaaagcacccattcatc

SEQ ID NO: 897492 - DNA, 33 bp, Homo sapien
gccagagtcacactattaaagcacccattcatc

SEQ ID NO: 897493 - DNA, 33 bp, Homo sapien
aaggtaattaatctaactgagctgaacacataa

SEQ ID NO: 897494 - DNA, 33 bp, Homo sapien
aaggtaattaatctaattgagctgaacacataa

SEQ ID NO: 897495 - DNA, 33 bp, Homo sapien
taatccaatcggggcactaactgggcctggata

SEQ ID NO: 897496 - DNA, 33 bp, Homo sapien
taatccaatcggggcattaactgggcctggata

SEQ ID NO: 897497 - DNA, 33 bp, Homo sapien
ttttaaccgtgaatcaaaatccagcagccatta

SEQ ID NO: 897498 - DNA, 33 bp, Homo sapien
ttttaaccgtgaatcagaatccagcagccatta

SEQ ID NO: 897499 - DNA, 33 bp, Homo sapien
gggcttgggtacctacaagagtctttgtggagg

SEQ ID NO: 897500 - DNA, 33 bp, Homo sapien
gggcttgggtacctacgagagtctttgtggagg

SEQ ID NO: 897501 - DNA, 33 bp, Homo sapien
cagctcaagccaggagacacccaaaagagctcc

SEQ ID NO: 897502 - DNA, 33 bp, Homo sapien
cagctcaagccaggaggcacccaaaagagctcc

SEQ ID NO: 897503 - DNA, 33 bp, Homo sapien
aagggtgctcgctcaccattccttagtctattg

SEQ ID NO: 897504 - DNA, 33 bp, Homo sapien
aagggtgctcgctcactattccttagtctattg

SEQ ID NO: 897505 - DNA, 33 bp, Homo sapien
ggaaattgcttccttacgtgtagctccaattgc

SEQ ID NO: 897506 - DNA, 33 bp, Homo sapien
ggaaattgcttccttatgtgtagctccaattgc

SEQ ID NO: 897507 - DNA, 33 bp, Homo sapien
tgactattaagaaacgacatctgtggagagggg

SEQ ID NO: 897508 - DNA, 33 bp, Homo sapien
tgactattaagaaacggcatctgtggagagggg

SEQ ID NO: 897509 - DNA, 33 bp, Homo sapien
ggacacaaggttgaagaagacatctatatcctg

SEQ ID NO: 897510 - DNA, 33 bp, Homo sapien
ggacacaaggttgaaggagacatctatatcctg

SEQ ID NO: 897511 - DNA, 33 bp, Homo sapien
gtcaattcaacttttacaggattgtattatggc

SEQ ID NO: 897512 - DNA, 33 bp, Homo sapien
gtcaattcaacttttataggattgtattatggc

SEQ ID NO: 897513 - DNA, 33 bp, Homo sapien
aaaatgcttcatgtgacgttacttaggggtaag

SEQ ID NO: 897514 - DNA, 33 bp, Homo sapien
aaaatgcttcatgtgatgttacttaggggtaag

SEQ ID NO: 897515 - DNA, 33 bp, Homo sapien
cattccaggacgctggcaaccactttgctgttt

SEQ ID NO: 897516 - DNA, 33 bp, Homo sapien
cattccaggacgctggtaaccactttgctgttt

SEQ ID NO: 897517 - DNA, 33 bp, Homo sapien
ttgagcctttagttcacgtaaggttgggcctat

SEQ ID NO: 897518 - DNA, 33 bp, Homo sapien
ttgagcctttagttcatgtaaggttgggcctat

SEQ ID NO: 897519 - DNA, 33 bp, Homo sapien
cattcctatggcttcaagagtctttatttcagg

SEQ ID NO: 897520 - DNA, 33 bp, Homo sapien
cattcctatggcttcaggagtctttatttcagg

SEQ ID NO: 897521 - DNA, 33 bp, Homo sapien
cattatcagctcatggccattaaatgtttaaca

SEQ ID NO: 897522 - DNA, 33 bp, Homo sapien
cattatcagctcatggtcattaaatgtttaaca

SEQ ID NO: 897523 - DNA, 33 bp, Homo sapien
gctcaggaattgagaacacaagtacagaagact

SEQ ID NO: 897524 - DNA, 33 bp, Homo sapien
gctcaggaattgagaatacaagtacagaagact

SEQ ID NO: 897525 - DNA, 33 bp, Homo sapien
aagttcagtgaagctcaatgaaggggagtgaat

SEQ ID NO: 897526 - DNA, 33 bp, Homo sapien
aagttcagtgaagctcgatgaaggggagtgaat

SEQ ID NO: 897527 - DNA, 33 bp, Homo sapien
catcacacagaaaaataaagagattaacgtata

SEQ ID NO: 897528 - DNA, 33 bp, Homo sapien
catcacacagaaaaatcaagagattaacgtata

SEQ ID NO: 897529 - DNA, 33 bp, Homo sapien
ttatagattgaatcaaaaacgataaataccaca

SEQ ID NO: 897530 - DNA, 33 bp, Homo sapien
ttatagattgaatcaagaacgataaataccaca

SEQ ID NO: 897531 - DNA, 33 bp, Homo sapien
cagagacaataattcaagaaagaaacaagaaaa

SEQ ID NO: 897532 - DNA, 33 bp, Homo sapien
cagagacaataattcaggaaagaaacaagaaaa

SEQ ID NO: 897533 - DNA, 33 bp, Homo sapien
ttctgagtgatgtagacatagtaagacacttat

SEQ ID NO: 897534 - DNA, 33 bp, Homo sapien
ttctgagtgatgtagatatagtaagacacttat

SEQ ID NO: 897535 - DNA, 33 bp, Homo sapien
gtgtttgtcgaatgaaagaagaatagaatagaa

SEQ ID NO: 897536 - DNA, 33 bp, Homo sapien
gtgtttgtcgaatgaacgaagaatagaatagaa

SEQ ID NO: 897537 - DNA, 33 bp, Homo sapien
accctagtggctgtcacctctaactcctgaagg

SEQ ID NO: 897538 - DNA, 33 bp, Homo sapien
accctagtggctgtcatctctaactcctgaagg

SEQ ID NO: 897539 - DNA, 33 bp, Homo sapien
atcgaccctactgctaacatgatcttggacttc

SEQ ID NO: 897540 - DNA, 33 bp, Homo sapien
atcgaccctactgctaccatgatcttggacttc

SEQ ID NO: 897541 - DNA, 33 bp, Homo sapien
tggcctttggttgtcaggcctcttcagtctctt

SEQ ID NO: 897542 - DNA, 33 bp, Homo sapien
tggcctttggttgtcatgcctcttcagtctctt

SEQ ID NO: 897543 - DNA, 33 bp, Homo sapien
ttcatcttcctgacaaacctacaggtagggtct

SEQ ID NO: 897544 - DNA, 33 bp, Homo sapien
ttcatcttcctgacaagcctacaggtagggtct

SEQ ID NO: 897545 - DNA, 33 bp, Homo sapien
ctttctctctgagtaacatggaagtcatgggtg

SEQ ID NO: 897546 - DNA, 33 bp, Homo sapien
ctttctctctgagtaagatggaagtcatgggtg

SEQ ID NO: 897547 - DNA, 33 bp, Homo sapien
tactttcatatttataaccaaactactgtctag

SEQ ID NO: 897548 - DNA, 33 bp, Homo sapien
tactttcatatttatacccaaactactgtctag

SEQ ID NO: 897549 - DNA, 33 bp, Homo sapien
tacatgccaattgtacagaaatactctccaata

SEQ ID NO: 897550 - DNA, 33 bp, Homo sapien
tacatgccaattgtacggaaatactctccaata

SEQ ID NO: 897551 - DNA, 33 bp, Homo sapien
aaggctgaagaaattccgaaagacctatagcgt

SEQ ID NO: 897552 - DNA, 33 bp, Homo sapien
aaggctgaagaaattctgaaagacctatagcgt

SEQ ID NO: 897553 - DNA, 33 bp, Homo sapien
gtgaatcatcacagtaccttgaggaaatttcta

SEQ ID NO: 897554 - DNA, 33 bp, Homo sapien
gtgaatcatcacagtatcttgaggaaatttcta

SEQ ID NO: 897555 - DNA, 33 bp, Homo sapien
tgttataatgctttacggaaacgtcaggccttg

SEQ ID NO: 897556 - DNA, 33 bp, Homo sapien
tgttataatgctttactgaaacgtcaggccttg

SEQ ID NO: 897557 - DNA, 33 bp, Homo sapien
aactgtacacatagaaatggttaaagtggtaca

SEQ ID NO: 897558 - DNA, 33 bp, Homo sapien
aactgtacacatagaagtggttaaagtggtaca

SEQ ID NO: 897559 - DNA, 33 bp, Homo sapien
cgtggtcccttccaggcatttccctaataagtc

SEQ ID NO: 897560 - DNA, 33 bp, Homo sapien
cgtggtcccttccaggtatttccctaataagtc

SEQ ID NO: 897561 - DNA, 33 bp, Homo sapien
ttagtcattaacagctaaaattgtaagcacagt

SEQ ID NO: 897562 - DNA, 33 bp, Homo sapien
ttagtcattaacagctcaaattgtaagcacagt

SEQ ID NO: 897563 - DNA, 33 bp, Homo sapien
gcgagattttcttgccaaaagagcagtactttg

SEQ ID NO: 897564 - DNA, 33 bp, Homo sapien
gcgagattttcttgccgaaagagcagtactttg

SEQ ID NO: 897565 - DNA, 33 bp, Homo sapien
aatgtctttcagaaaccaaattaagaatgctat

SEQ ID NO: 897566 - DNA, 33 bp, Homo sapien
aatgtctttcagaaacgaaattaagaatgctat

SEQ ID NO: 897567 - DNA, 33 bp, Homo sapien
ggaatgggtcatttggaaactacgtttaatctt

SEQ ID NO: 897568 - DNA, 33 bp, Homo sapien
ggaatgggtcatttgggaactacgtttaatctt

SEQ ID NO: 897569 - DNA, 33 bp, Homo sapien
aacacctctaaatgcaagaactcattgagcact

SEQ ID NO: 897570 - DNA, 33 bp, Homo sapien
aacacctctaaatgcatgaactcattgagcact

SEQ ID NO: 897571 - DNA, 33 bp, Homo sapien
tttgtccctagctatccaccttgtgtgtacctt

SEQ ID NO: 897572 - DNA, 33 bp, Homo sapien
tttgtccctagctatctaccttgtgtgtacctt

SEQ ID NO: 897573 - DNA, 33 bp, Homo sapien
tgaagtaaaacaatacaggtttttgagtgatcc

SEQ ID NO: 897574 - DNA, 33 bp, Homo sapien
tgaagtaaaacaatacgggtttttgagtgatcc

SEQ ID NO: 897575 - DNA, 33 bp, Homo sapien
cattcaaattctttacccgagaattagctgcaa

SEQ ID NO: 897576 - DNA, 33 bp, Homo sapien
cattcaaattctttacgcgagaattagctgcaa

SEQ ID NO: 897577 - DNA, 33 bp, Homo sapien
ttgtgtcaacattcagaagttttgattacattt

SEQ ID NO: 897578 - DNA, 33 bp, Homo sapien
ttgtgtcaacattcaggagttttgattacattt

SEQ ID NO: 897579 - DNA, 33 bp, Homo sapien
ccaaggacagctgaaacaactggttctctgacg

SEQ ID NO: 897580 - DNA, 33 bp, Homo sapien
ccaaggacagctgaaataactggttctctgacg

SEQ ID NO: 897581 - DNA, 33 bp, Homo sapien
cttggattgtggtcaaactgtctggcagggatt

SEQ ID NO: 897582 - DNA, 33 bp, Homo sapien
cttggattgtggtcaacctgtctggcagggatt

SEQ ID NO: 897583 - DNA, 33 bp, Homo sapien
ggtgttttaaatggaaactacttcagaaaataa

SEQ ID NO: 897584 - DNA, 33 bp, Homo sapien
ggtgttttaaatggaagctacttcagaaaataa

SEQ ID NO: 897585 - DNA, 33 bp, Homo sapien
ctaggaatatccatgcaagacaaaagtgtgctg

SEQ ID NO: 897586 - DNA, 33 bp, Homo sapien
ctaggaatatccatgccagacaaaagtgtgctg

SEQ ID NO: 897587 - DNA, 33 bp, Homo sapien
tgtagagaggattaaacacgctagagcatgtaa

SEQ ID NO: 897588 - DNA, 33 bp, Homo sapien
tgtagagaggattaaatacgctagagcatgtaa

SEQ ID NO: 897589 - DNA, 33 bp, Homo sapien
tatacctttggatgtccatacagttctaagtta

SEQ ID NO: 897590 - DNA, 33 bp, Homo sapien
tatacctttggatgtctatacagttctaagtta

SEQ ID NO: 897591 - DNA, 33 bp, Homo sapien
tgcaatgggttgacctcagctcactgtaacctc

SEQ ID NO: 897592 - DNA, 33 bp, Homo sapien
tgcaatgggttgaccttagctcactgtaacctc

SEQ ID NO: 897593 - DNA, 33 bp, Homo sapien
gaagcatttcttggagccaaaatttacaactct

SEQ ID NO: 897594 - DNA, 33 bp, Homo sapien
gaagcatttcttggaggcaaaatttacaactct

SEQ ID NO: 897595 - DNA, 33 bp, Homo sapien
gagacttcaacaaatacctaactcttcaattcc

SEQ ID NO: 897596 - DNA, 33 bp, Homo sapien
gagacttcaacaaatagctaactcttcaattcc

SEQ ID NO: 897597 - DNA, 33 bp, Homo sapien
tgtacaagatttgctagaatgaacagggagaaa

SEQ ID NO: 897598 - DNA, 33 bp, Homo sapien
tgtacaagatttgctataatgaacagggagaaa

SEQ ID NO: 897599 - DNA, 33 bp, Homo sapien
gtgatctttgatttaacacgacttagaaggcag

SEQ ID NO: 897600 - DNA, 33 bp, Homo sapien
gtgatctttgatttaatacgacttagaaggcag

SEQ ID NO: 897601 - DNA, 33 bp, Homo sapien
attttggggagtaatacatgattttctggaata

SEQ ID NO: 897602 - DNA, 33 bp, Homo sapien
attttggggagtaatatatgattttctggaata

SEQ ID NO: 897603 - DNA, 33 bp, Homo sapien
tcctggcctttaatcactgatatcatttcatat

SEQ ID NO: 897604 - DNA, 33 bp, Homo sapien
tcctggcctttaatcattgatatcatttcatat

SEQ ID NO: 897605 - DNA, 33 bp, Homo sapien
ttgtctgagtaaaactcactaatttccatcatt

SEQ ID NO: 897606 - DNA, 33 bp, Homo sapien
ttgtctgagtaaaactgactaatttccatcatt

SEQ ID NO: 897607 - DNA, 33 bp, Homo sapien
cctatttatttatagacgtcattttggttatgc

SEQ ID NO: 897608 - DNA, 33 bp, Homo sapien
cctatttatttatagatgtcattttggttatgc

SEQ ID NO: 897609 - DNA, 33 bp, Homo sapien
tcctgtggccgaaacacagcactccgtgtagca

SEQ ID NO: 897610 - DNA, 33 bp, Homo sapien
tcctgtggccgaaacatagcactccgtgtagca

SEQ ID NO: 897611 - DNA, 33 bp, Homo sapien
cagaacagcttcctccgctatataatcacgtgt

SEQ ID NO: 897612 - DNA, 33 bp, Homo sapien
cagaacagcttcctcctctatataatcacgtgt

SEQ ID NO: 897613 - DNA, 33 bp, Homo sapien
agcctgtgaggtcagcagagcatatttaagccc

SEQ ID NO: 897614 - DNA, 33 bp, Homo sapien
agcctgtgaggtcagcggagcatatttaagccc

SEQ ID NO: 897615 - DNA, 33 bp, Homo sapien
taaaacataaggagaaaagctgctaagctggtt

SEQ ID NO: 897616 - DNA, 33 bp, Homo sapien
taaaacataaggagaagagctgctaagctggtt

SEQ ID NO: 897617 - DNA, 33 bp, Homo sapien
agtactgtggtggttacgaaaggcagagagtgg

SEQ ID NO: 897618 - DNA, 33 bp, Homo sapien
agtactgtggtggttatgaaaggcagagagtgg

SEQ ID NO: 897619 - DNA, 33 bp, Homo sapien
gctcccacagcattcaatacatttccagagttt

SEQ ID NO: 897620 - DNA, 33 bp, Homo sapien
gctcccacagcattcagtacatttccagagttt

SEQ ID NO: 897621 - DNA, 33 bp, Homo sapien
tttttcttaatgttcccgcaatttgggtatgtc

SEQ ID NO: 897622 - DNA, 33 bp, Homo sapien
tttttcttaatgttcctgcaatttgggtatgtc

SEQ ID NO: 897623 - DNA, 33 bp, Homo sapien
cattgggactgatgaaaagatggccaaaaagga

SEQ ID NO: 897624 - DNA, 33 bp, Homo sapien
cattgggactgatgaagagatggccaaaaagga

SEQ ID NO: 897625 - DNA, 33 bp, Homo sapien
ggttggatgtggtgccagagaatcatgacttct

SEQ ID NO: 897626 - DNA, 33 bp, Homo sapien
ggttggatgtggtgccggagaatcatgacttct

SEQ ID NO: 897627 - DNA, 33 bp, Homo sapien
tctgattccactttcacgtttgtcttgctgtct

SEQ ID NO: 897628 - DNA, 33 bp, Homo sapien
tctgattccactttcatgtttgtcttgctgtct

SEQ ID NO: 897629 - DNA, 33 bp, Homo sapien
gatttctaaaaggggacgttatgtgagctgagg

SEQ ID NO: 897630 - DNA, 33 bp, Homo sapien
gatttctaaaaggggatgttatgtgagctgagg

SEQ ID NO: 897631 - DNA, 33 bp, Homo sapien
gtgacaaaatgttaaaaagtggtagtaggatat

SEQ ID NO: 897632 - DNA, 33 bp, Homo sapien
gtgacaaaatgttaaacagtggtagtaggatat

SEQ ID NO: 897633 - DNA, 33 bp, Homo sapien
agtccacaaaggaagaccatttgcttgtgtgac

SEQ ID NO: 897634 - DNA, 33 bp, Homo sapien
agtccacaaaggaagatcatttgcttgtgtgac

SEQ ID NO: 897635 - DNA, 33 bp, Homo sapien
aacataatttccttcaccattaaatgtgttcta

SEQ ID NO: 897636 - DNA, 33 bp, Homo sapien
aacataatttccttcatcattaaatgtgttcta

SEQ ID NO: 897637 - DNA, 33 bp, Homo sapien
tagtcttcaaaccatagcatgcatcagaatcac

SEQ ID NO: 897638 - DNA, 33 bp, Homo sapien
tagtcttcaaaccatatcatgcatcagaatcac

SEQ ID NO: 897639 - DNA, 33 bp, Homo sapien
tgctttaccagctatccgagtaccccttaactc

SEQ ID NO: 897640 - DNA, 33 bp, Homo sapien
tgctttaccagctatctgagtaccccttaactc

SEQ ID NO: 897641 - DNA, 33 bp, Homo sapien
atgctcacggaaaaaaatgcaggatggttgctt

SEQ ID NO: 897642 - DNA, 33 bp, Homo sapien
atgctcacggaaaaaagtgcaggatggttgctt

SEQ ID NO: 897643 - DNA, 33 bp, Homo sapien
aactaaatttaatgaaccagtgaaaatcgcctg

SEQ ID NO: 897644 - DNA, 33 bp, Homo sapien
aactaaatttaatgaatcagtgaaaatcgcctg

SEQ ID NO: 897645 - DNA, 33 bp, Homo sapien
aaaaaaaagtttagtacagttggcaatatcaat

SEQ ID NO: 897646 - DNA, 33 bp, Homo sapien
aaaaaaaagtttagtatagttggcaatatcaat

SEQ ID NO: 897647 - DNA, 33 bp, Homo sapien
ccagagacatgatttacagtaggtgaagatgaa

SEQ ID NO: 897648 - DNA, 33 bp, Homo sapien
ccagagacatgatttatagtaggtgaagatgaa

SEQ ID NO: 897649 - DNA, 33 bp, Homo sapien
tgggatgcaaaaaaaaccaatggcatcccaaga

SEQ ID NO: 897650 - DNA, 33 bp, Homo sapien
tgggatgcaaaaaaaatcaatggcatcccaaga

SEQ ID NO: 897651 - DNA, 33 bp, Homo sapien
tactacctgtcttttccctattatctgtgagga

SEQ ID NO: 897652 - DNA, 33 bp, Homo sapien
tactacctgtcttttctctattatctgtgagga

SEQ ID NO: 897653 - DNA, 33 bp, Homo sapien
ctggcaaaacttgaccaatcataaccaaaaaaa

SEQ ID NO: 897654 - DNA, 33 bp, Homo sapien
ctggcaaaacttgaccgatcataaccaaaaaaa

SEQ ID NO: 897655 - DNA, 33 bp, Homo sapien
tttaagatggggaataacaatgtctaaatagaa

SEQ ID NO: 897656 - DNA, 33 bp, Homo sapien
tttaagatggggaatagcaatgtctaaatagaa

SEQ ID NO: 897657 - DNA, 33 bp, Homo sapien
ttaaaaggtgacaaataaaaatgaataccttaa

SEQ ID NO: 897658 - DNA, 33 bp, Homo sapien
ttaaaaggtgacaaatgaaaatgaataccttaa

SEQ ID NO: 897659 - DNA, 33 bp, Homo sapien
tggggattgaaggcaaaggtctgtacagattca

SEQ ID NO: 897660 - DNA, 33 bp, Homo sapien
tggggattgaaggcaacggtctgtacagattca

SEQ ID NO: 897661 - DNA, 33 bp, Homo sapien
catttgtttcaagttacatgcatccactttaat

SEQ ID NO: 897662 - DNA, 33 bp, Homo sapien
catttgtttcaagttagatgcatccactttaat

SEQ ID NO: 897663 - DNA, 33 bp, Homo sapien
aagagcaacgctgaaaggttaacaccaactttt

SEQ ID NO: 897664 - DNA, 33 bp, Homo sapien
aagagcaacgctgaaatgttaacaccaactttt

SEQ ID NO: 897665 - DNA, 33 bp, Homo sapien
cttggcaatggccttcactgcacctttgacatt

SEQ ID NO: 897666 - DNA, 33 bp, Homo sapien
cttggcaatggccttcgctgcacctttgacatt

SEQ ID NO: 897667 - DNA, 33 bp, Homo sapien
tctcactaaagactcaataaataattctgctcc

SEQ ID NO: 897668 - DNA, 33 bp, Homo sapien
tctcactaaagactcagtaaataattctgctcc

SEQ ID NO: 897669 - DNA, 33 bp, Homo sapien
ttgtaggtgtactccacattcaagacagatcca

SEQ ID NO: 897670 - DNA, 33 bp, Homo sapien
ttgtaggtgtactccatattcaagacagatcca

SEQ ID NO: 897671 - DNA, 33 bp, Homo sapien
tggttttaagaaaacgcatcttctattgtgatt

SEQ ID NO: 897672 - DNA, 33 bp, Homo sapien
tggttttaagaaaacgtatcttctattgtgatt

SEQ ID NO: 897673 - DNA, 33 bp, Homo sapien
ttaaaatccacattcccaccagaatctaaaatc

SEQ ID NO: 897674 - DNA, 33 bp, Homo sapien
ttaaaatccacattccgaccagaatctaaaatc

SEQ ID NO: 897675 - DNA, 33 bp, Homo sapien
ctctggtacaaacttacatcttcttcttgccat

SEQ ID NO: 897676 - DNA, 33 bp, Homo sapien
ctctggtacaaacttatatcttcttcttgccat

SEQ ID NO: 897677 - DNA, 33 bp, Homo sapien
tttcctgctgaatatccaggtaaactgtaatag

SEQ ID NO: 897678 - DNA, 33 bp, Homo sapien
tttcctgctgaatatctaggtaaactgtaatag

SEQ ID NO: 897679 - DNA, 33 bp, Homo sapien
tctgtgaatgtaataacagagatcagttcaatt

SEQ ID NO: 897680 - DNA, 33 bp, Homo sapien
tctgtgaatgtaataagagagatcagttcaatt

SEQ ID NO: 897681 - DNA, 33 bp, Homo sapien
ctgtgttcacaaatcacagaatgttagaagcag

SEQ ID NO: 897682 - DNA, 33 bp, Homo sapien
ctgtgttcacaaatcatagaatgttagaagcag

SEQ ID NO: 897683 - DNA, 33 bp, Homo sapien
tccaacaaagattgagaagagagaatattccag

SEQ ID NO: 897684 - DNA, 33 bp, Homo sapien
tccaacaaagattgagcagagagaatattccag

SEQ ID NO: 897685 - DNA, 33 bp, Homo sapien
tttactaggctctgggaatacaaggctgaatgg

SEQ ID NO: 897686 - DNA, 33 bp, Homo sapien
tttactaggctctgggcatacaaggctgaatgg

SEQ ID NO: 897687 - DNA, 33 bp, Homo sapien
gagtcagtatcactcaccattgagtctcttaat

SEQ ID NO: 897688 - DNA, 33 bp, Homo sapien
gagtcagtatcactcatcattgagtctcttaat

SEQ ID NO: 897689 - DNA, 33 bp, Homo sapien
gtgaccagccaagctacctgaagaatttagaag

SEQ ID NO: 897690 - DNA, 33 bp, Homo sapien
gtgaccagccaagctatctgaagaatttagaag

SEQ ID NO: 897691 - DNA, 33 bp, Homo sapien
tggatacctcaccttcccctgagtctaatgacc

SEQ ID NO: 897692 - DNA, 33 bp, Homo sapien
tggatacctcaccttctcctgagtctaatgacc

SEQ ID NO: 897693 - DNA, 33 bp, Homo sapien
acaaacactggccttaactccaatatctgcgtt

SEQ ID NO: 897694 - DNA, 33 bp, Homo sapien
acaaacactggccttagctccaatatctgcgtt

SEQ ID NO: 897695 - DNA, 33 bp, Homo sapien
atcacttggaagatccaacctactctaacggaa

SEQ ID NO: 897696 - DNA, 33 bp, Homo sapien
atcacttggaagatccgacctactctaacggaa

SEQ ID NO: 897697 - DNA, 33 bp, Homo sapien
ttcattatttgataaaaagaacagaagtcagta

SEQ ID NO: 897698 - DNA, 33 bp, Homo sapien
ttcattatttgataaacagaacagaagtcagta

SEQ ID NO: 897699 - DNA, 33 bp, Homo sapien
tgccttctatgtttagcaaaatcttgttctact

SEQ ID NO: 897700 - DNA, 33 bp, Homo sapien
tgccttctatgtttagtaaaatcttgttctact

SEQ ID NO: 897701 - DNA, 33 bp, Homo sapien
aacagcatttttgttccaatagctagtcgctat

SEQ ID NO: 897702 - DNA, 33 bp, Homo sapien
aacagcatttttgttcgaatagctagtcgctat

SEQ ID NO: 897703 - DNA, 33 bp, Homo sapien
ttaaaattattttggcagaaagatgaagactgt

SEQ ID NO: 897704 - DNA, 33 bp, Homo sapien
ttaaaattattttggcggaaagatgaagactgt

SEQ ID NO: 897705 - DNA, 33 bp, Homo sapien
agggttctgtcttggccccccgtttctgagcct

SEQ ID NO: 897706 - DNA, 33 bp, Homo sapien
agggttctgtcttggctccccgtttctgagcct

SEQ ID NO: 897707 - DNA, 33 bp, Homo sapien
gtcatcagatctgcacaacatcgacccagccca

SEQ ID NO: 897708 - DNA, 33 bp, Homo sapien
gtcatcagatctgcacgacatcgacccagccca

SEQ ID NO: 897709 - DNA, 33 bp, Homo sapien
tctgaagacagactcccccgcacacacacacag

SEQ ID NO: 897710 - DNA, 33 bp, Homo sapien
tctgaagacagactcctccgcacacacacacag

SEQ ID NO: 897711 - DNA, 33 bp, Homo sapien
tgagttaaggtccccacagaaacagatggcaca

SEQ ID NO: 897712 - DNA, 33 bp, Homo sapien
tgagttaaggtccccatagaaacagatggcaca

SEQ ID NO: 897713 - DNA, 33 bp, Homo sapien
gaagagggagttcaaccgacctgtaggagtcag

SEQ ID NO: 897714 - DNA, 33 bp, Homo sapien
gaagagggagttcaactgacctgtaggagtcag

SEQ ID NO: 897715 - DNA, 33 bp, Homo sapien
tgctcaccttctcataaaataaaacacacagcc

SEQ ID NO: 897716 - DNA, 33 bp, Homo sapien
tgctcaccttctcatacaataaaacacacagcc

SEQ ID NO: 897717 - DNA, 33 bp, Homo sapien
ggttctgggtttttcccagcatatgatctacac

SEQ ID NO: 897718 - DNA, 33 bp, Homo sapien
ggttctgggtttttcctagcatatgatctacac

SEQ ID NO: 897719 - DNA, 33 bp, Homo sapien
taggagcccttcctacacatgaacgtggtttct

SEQ ID NO: 897720 - DNA, 33 bp, Homo sapien
taggagcccttcctacgcatgaacgtggtttct

SEQ ID NO: 897721 - DNA, 33 bp, Homo sapien
ccaagccattaataaaaaaacgcagggccttct

SEQ ID NO: 897722 - DNA, 33 bp, Homo sapien
ccaagccattaataaacaaacgcagggccttct

SEQ ID NO: 897723 - DNA, 33 bp, Homo sapien
aagactatgatagcaaagaaattcagtgcaaaa

SEQ ID NO: 897724 - DNA, 33 bp, Homo sapien
aagactatgatagcaacgaaattcagtgcaaaa

SEQ ID NO: 897725 - DNA, 33 bp, Homo sapien
agggaagatgcccacacaaagagagagagacac

SEQ ID NO: 897726 - DNA, 33 bp, Homo sapien
agggaagatgcccacagaaagagagagagacac

SEQ ID NO: 897727 - DNA, 33 bp, Homo sapien
ataaatgttgtcaataacacgaataaaattcaa

SEQ ID NO: 897728 - DNA, 33 bp, Homo sapien
ataaatgttgtcaatatcacgaataaaattcaa

SEQ ID NO: 897729 - DNA, 33 bp, Homo sapien
tttcatggaaaaaagtcaaaggtgctttcagta

SEQ ID NO: 897730 - DNA, 33 bp, Homo sapien
tttcatggaaaaaagttaaaggtgctttcagta

SEQ ID NO: 897731 - DNA, 33 bp, Homo sapien
ccaataatttgattcaaggcaaacagtgtttga

SEQ ID NO: 897732 - DNA, 33 bp, Homo sapien
ccaataatttgattcagggcaaacagtgtttga

SEQ ID NO: 897733 - DNA, 33 bp, Homo sapien
acagaaaggaattagcaagagaatgctgtttgc

SEQ ID NO: 897734 - DNA, 33 bp, Homo sapien
acagaaaggaattagcgagagaatgctgtttgc

SEQ ID NO: 897735 - DNA, 33 bp, Homo sapien
cccaggctgtaggacaaccctaaagtaaacacc

SEQ ID NO: 897736 - DNA, 33 bp, Homo sapien
cccaggctgtaggacatccctaaagtaaacacc

SEQ ID NO: 897737 - DNA, 33 bp, Homo sapien
taacaaagtaaaaatacccaacacaatagccta

SEQ ID NO: 897738 - DNA, 33 bp, Homo sapien
taacaaagtaaaaatatccaacacaatagccta

SEQ ID NO: 897739 - DNA, 33 bp, Homo sapien
actatgtttgtaggccaaattagtttgtatttg

SEQ ID NO: 897740 - DNA, 33 bp, Homo sapien
actatgtttgtaggcccaattagtttgtatttg

SEQ ID NO: 897741 - DNA, 33 bp, Homo sapien
gtcctaaatgaaatgaaccttatgacaaagcta

SEQ ID NO: 897742 - DNA, 33 bp, Homo sapien
gtcctaaatgaaatgagccttatgacaaagcta

SEQ ID NO: 897743 - DNA, 33 bp, Homo sapien
gacccagaatcagaatcaaagtgcaaccttatt

SEQ ID NO: 897744 - DNA, 33 bp, Homo sapien
gacccagaatcagaattaaagtgcaaccttatt

SEQ ID NO: 897745 - DNA, 33 bp, Homo sapien
acagaccagttgcctaaagcattagctgggcca

SEQ ID NO: 897746 - DNA, 33 bp, Homo sapien
acagaccagttgcctatagcattagctgggcca

SEQ ID NO: 897747 - DNA, 33 bp, Homo sapien
agatctgagagtgaaaataaaagggtgtatgtg

SEQ ID NO: 897748 - DNA, 33 bp, Homo sapien
agatctgagagtgaaagtaaaagggtgtatgtg

SEQ ID NO: 897749 - DNA, 33 bp, Homo sapien
tgtaatgccgaatttacgaacagctgtggtatg

SEQ ID NO: 897750 - DNA, 33 bp, Homo sapien
tgtaatgccgaatttatgaacagctgtggtatg

SEQ ID NO: 897751 - DNA, 33 bp, Homo sapien
aggtcaagaatgggaaaaaatgcagatggggat

SEQ ID NO: 897752 - DNA, 33 bp, Homo sapien
aggtcaagaatgggaagaaatgcagatggggat

SEQ ID NO: 897753 - DNA, 33 bp, Homo sapien
gggagaccttaagcaaaactgttaattactctg

SEQ ID NO: 897754 - DNA, 33 bp, Homo sapien
gggagaccttaagcaagactgttaattactctg

SEQ ID NO: 897755 - DNA, 33 bp, Homo sapien
tgattgcactcaatgacgatggaagtgcaattc

SEQ ID NO: 897756 - DNA, 33 bp, Homo sapien
tgattgcactcaatgatgatggaagtgcaattc

SEQ ID NO: 897757 - DNA, 33 bp, Homo sapien
aagtcaaacacattcacctttcatcctttaaaa

SEQ ID NO: 897758 - DNA, 33 bp, Homo sapien
aagtcaaacacattcagctttcatcctttaaaa

SEQ ID NO: 897759 - DNA, 33 bp, Homo sapien
gtgtgatggagaaaggaatagcagggaaggggc

SEQ ID NO: 897760 - DNA, 33 bp, Homo sapien
gtgtgatggagaaaggtatagcagggaaggggc

SEQ ID NO: 897761 - DNA, 33 bp, Homo sapien
ataacattacagcctaaagtggttaaagaccct

SEQ ID NO: 897762 - DNA, 33 bp, Homo sapien
ataacattacagcctagagtggttaaagaccct

SEQ ID NO: 897763 - DNA, 33 bp, Homo sapien
tttgaagttctaaacacaggaagttagaataca

SEQ ID NO: 897764 - DNA, 33 bp, Homo sapien
tttgaagttctaaacataggaagttagaataca

SEQ ID NO: 897765 - DNA, 33 bp, Homo sapien
ttcctgtttcctgctcactttttggacacttct

SEQ ID NO: 897766 - DNA, 33 bp, Homo sapien
ttcctgtttcctgctcgctttttggacacttct

SEQ ID NO: 897767 - DNA, 33 bp, Homo sapien
tgtctctgtgaacgtgaagtttggattcctgtt

SEQ ID NO: 897768 - DNA, 33 bp, Homo sapien
tgtctctgtgaacgtggagtttggattcctgtt

SEQ ID NO: 897769 - DNA, 33 bp, Homo sapien
caggcagcaatgtcacaacggtgtaattgtctc

SEQ ID NO: 897770 - DNA, 33 bp, Homo sapien
caggcagcaatgtcacgacggtgtaattgtctc

SEQ ID NO: 897771 - DNA, 33 bp, Homo sapien
ctcaacagaagccttacgaaggacttttaaaag

SEQ ID NO: 897772 - DNA, 33 bp, Homo sapien
ctcaacagaagccttatgaaggacttttaaaag

SEQ ID NO: 897773 - DNA, 33 bp, Homo sapien
tcatttgtatagcacactgaagtttacaaactg

SEQ ID NO: 897774 - DNA, 33 bp, Homo sapien
tcatttgtatagcacattgaagtttacaaactg

SEQ ID NO: 897775 - DNA, 33 bp, Homo sapien
ataagagataattttgcaagatatctggcaaat

SEQ ID NO: 897776 - DNA, 33 bp, Homo sapien
ataagagataattttgtaagatatctggcaaat

SEQ ID NO: 897777 - DNA, 33 bp, Homo sapien
cctggacattaggagcccttgacattggctatg

SEQ ID NO: 897778 - DNA, 33 bp, Homo sapien
cctggacattaggagctcttgacattggctatg

SEQ ID NO: 897779 - DNA, 33 bp, Homo sapien
tttgaaatagaaagagaaaactaaacagcatcc

SEQ ID NO: 897780 - DNA, 33 bp, Homo sapien
tttgaaatagaaagaggaaactaaacagcatcc

SEQ ID NO: 897781 - DNA, 33 bp, Homo sapien
ctgactggacttcaataaatatacaagaacagc

SEQ ID NO: 897782 - DNA, 33 bp, Homo sapien
ctgactggacttcaatgaatatacaagaacagc

SEQ ID NO: 897783 - DNA, 33 bp, Homo sapien
tgaattgcgcccaccacgctcagagacatatga

SEQ ID NO: 897784 - DNA, 33 bp, Homo sapien
tgaattgcgcccaccatgctcagagacatatga

SEQ ID NO: 897785 - DNA, 33 bp, Homo sapien
ttaactgtccaataaacgttagcagccattatt

SEQ ID NO: 897786 - DNA, 33 bp, Homo sapien
ttaactgtccaataaatgttagcagccattatt

SEQ ID NO: 897787 - DNA, 33 bp, Homo sapien
aactctagccttgatacacatatttaaattctg

SEQ ID NO: 897788 - DNA, 33 bp, Homo sapien
aactctagccttgatatacatatttaaattctg

SEQ ID NO: 897789 - DNA, 33 bp, Homo sapien
gtaagaaaccatctcaagtcacctcttcagaaa

SEQ ID NO: 897790 - DNA, 33 bp, Homo sapien
gtaagaaaccatctcaggtcacctcttcagaaa

SEQ ID NO: 897791 - DNA, 33 bp, Homo sapien
tgtaaaacaagtccaacgcaagagatctggatg

SEQ ID NO: 897792 - DNA, 33 bp, Homo sapien
tgtaaaacaagtccaatgcaagagatctggatg

SEQ ID NO: 897793 - DNA, 33 bp, Homo sapien
cttaatggtaccagacacatttcaaggaatttg

SEQ ID NO: 897794 - DNA, 33 bp, Homo sapien
cttaatggtaccagacgcatttcaaggaatttg

SEQ ID NO: 897795 - DNA, 33 bp, Homo sapien
cgtgaggtattcccaccggcagagttcgggctt

SEQ ID NO: 897796 - DNA, 33 bp, Homo sapien
cgtgaggtattcccactggcagagttcgggctt

SEQ ID NO: 897797 - DNA, 33 bp, Homo sapien
ctatctgctttgccaacggaatcgtggttaaaa

SEQ ID NO: 897798 - DNA, 33 bp, Homo sapien
ctatctgctttgccaatggaatcgtggttaaaa

SEQ ID NO: 897799 - DNA, 33 bp, Homo sapien
cttttatgtaaaatcaacattgaaatccaccga

SEQ ID NO: 897800 - DNA, 33 bp, Homo sapien
cttttatgtaaaatcagcattgaaatccaccga

SEQ ID NO: 897801 - DNA, 33 bp, Homo sapien
gtatcctggatcacacaatcttttggagggggc

SEQ ID NO: 897802 - DNA, 33 bp, Homo sapien
gtatcctggatcacaccatcttttggagggggc

SEQ ID NO: 897803 - DNA, 33 bp, Homo sapien
ttcttcagtacctttcaacaaaatacgcatcct

SEQ ID NO: 897804 - DNA, 33 bp, Homo sapien
ttcttcagtacctttcgacaaaatacgcatcct

SEQ ID NO: 897805 - DNA, 33 bp, Homo sapien
acttattgtctattgagctccaagcacacgatg

SEQ ID NO: 897806 - DNA, 33 bp, Homo sapien
acttattgtctattgatctccaagcacacgatg

SEQ ID NO: 897807 - DNA, 33 bp, Homo sapien
cagggactggagctatcaaaaagtaagtttaac

SEQ ID NO: 897808 - DNA, 33 bp, Homo sapien
cagggactggagctatgaaaaagtaagtttaac

SEQ ID NO: 897809 - DNA, 33 bp, Homo sapien
ttctcttcaagttaacagcaggcatttgttaca

SEQ ID NO: 897810 - DNA, 33 bp, Homo sapien
ttctcttcaagttaacggcaggcatttgttaca

SEQ ID NO: 897811 - DNA, 33 bp, Homo sapien
tcattcatttctaaccagattgtcttctactct

SEQ ID NO: 897812 - DNA, 33 bp, Homo sapien
tcattcatttctaaccggattgtcttctactct

SEQ ID NO: 897813 - DNA, 33 bp, Homo sapien
acttgcagcccttgacagacaaagttattaaaa

SEQ ID NO: 897814 - DNA, 33 bp, Homo sapien
acttgcagcccttgacggacaaagttattaaaa

SEQ ID NO: 897815 - DNA, 33 bp, Homo sapien
caatgttcaatgcctacctaataatcttttctc

SEQ ID NO: 897816 - DNA, 33 bp, Homo sapien
caatgttcaatgcctatctaataatcttttctc

SEQ ID NO: 897817 - DNA, 33 bp, Homo sapien
ataaaacaatacgtgcaaaatcctcagagatga

SEQ ID NO: 897818 - DNA, 33 bp, Homo sapien
ataaaacaatacgtgcgaaatcctcagagatga

SEQ ID NO: 897819 - DNA, 33 bp, Homo sapien
aatgttagcaatctaacctttgttgagtgcttg

SEQ ID NO: 897820 - DNA, 33 bp, Homo sapien
aatgttagcaatctaatctttgttgagtgcttg

SEQ ID NO: 897821 - DNA, 33 bp, Homo sapien
cctaatagcaacttcaagaacaatgggaaatgt

SEQ ID NO: 897822 - DNA, 33 bp, Homo sapien
cctaatagcaacttcaggaacaatgggaaatgt

SEQ ID NO: 897823 - DNA, 33 bp, Homo sapien
agccacattttttcgaactttttcagctgctgc

SEQ ID NO: 897824 - DNA, 33 bp, Homo sapien
agccacattttttcgagctttttcagctgctgc

SEQ ID NO: 897825 - DNA, 33 bp, Homo sapien
tggctaaccttcgagccgagggacagaaaatcc

SEQ ID NO: 897826 - DNA, 33 bp, Homo sapien
tggctaaccttcgagctgagggacagaaaatcc

SEQ ID NO: 897827 - DNA, 33 bp, Homo sapien
cattgttttcctcacaacatttatcattgtcta

SEQ ID NO: 897828 - DNA, 33 bp, Homo sapien
cattgttttcctcacagcatttatcattgtcta

SEQ ID NO: 897829 - DNA, 33 bp, Homo sapien
actaccacagggccaccgatattgctcatattt

SEQ ID NO: 897830 - DNA, 33 bp, Homo sapien
actaccacagggccactgatattgctcatattt

SEQ ID NO: 897831 - DNA, 33 bp, Homo sapien
tcccaaactcctggcaacctacctgacaattca

SEQ ID NO: 897832 - DNA, 33 bp, Homo sapien
tcccaaactcctggcagcctacctgacaattca

SEQ ID NO: 897833 - DNA, 33 bp, Homo sapien
ataaatcaatatttacactcaggaaagagtctc

SEQ ID NO: 897834 - DNA, 33 bp, Homo sapien
ataaatcaatatttactctcaggaaagagtctc

SEQ ID NO: 897835 - DNA, 33 bp, Homo sapien
caaaatttgataaacactggaaaaatccaggag

SEQ ID NO: 897836 - DNA, 33 bp, Homo sapien
caaaatttgataaacattggaaaaatccaggag

SEQ ID NO: 897837 - DNA, 33 bp, Homo sapien
gaagttggtaaatgcacgattctgttgaactaa

SEQ ID NO: 897838 - DNA, 33 bp, Homo sapien
gaagttggtaaatgcatgattctgttgaactaa

SEQ ID NO: 897839 - DNA, 33 bp, Homo sapien
taaaagacagcctacaataaaattacacattcg

SEQ ID NO: 897840 - DNA, 33 bp, Homo sapien
taaaagacagcctacagtaaaattacacattcg

SEQ ID NO: 897841 - DNA, 33 bp, Homo sapien
cctcagtttaatttcactcatgtctgtggctac

SEQ ID NO: 897842 - DNA, 33 bp, Homo sapien
cctcagtttaatttcattcatgtctgtggctac

SEQ ID NO: 897843 - DNA, 33 bp, Homo sapien
aagagaataaaattagcaaagtgagtaacaagt

SEQ ID NO: 897844 - DNA, 33 bp, Homo sapien
aagagaataaaattaggaaagtgagtaacaagt

SEQ ID NO: 897845 - DNA, 33 bp, Homo sapien
ttgcaagattcctgacgattaaccaattggctc

SEQ ID NO: 897846 - DNA, 33 bp, Homo sapien
ttgcaagattcctgactattaaccaattggctc

SEQ ID NO: 897847 - DNA, 33 bp, Homo sapien
caaactttctgtaagcacaagagagggatccct

SEQ ID NO: 897848 - DNA, 33 bp, Homo sapien
caaactttctgtaagcgcaagagagggatccct

SEQ ID NO: 897849 - DNA, 33 bp, Homo sapien
tgcactcacaggaaacagatccaaacaaagaac

SEQ ID NO: 897850 - DNA, 33 bp, Homo sapien
tgcactcacaggaaacggatccaaacaaagaac

SEQ ID NO: 897851 - DNA, 33 bp, Homo sapien
tatatgtgtaaagaaaagagatcaccatgtaaa

SEQ ID NO: 897852 - DNA, 33 bp, Homo sapien
tatatgtgtaaagaaatgagatcaccatgtaaa

SEQ ID NO: 897853 - DNA, 33 bp, Homo sapien
ttgaattggaagacataatacctgtgtacttaa

SEQ ID NO: 897854 - DNA, 33 bp, Homo sapien
ttgaattggaagacatgatacctgtgtacttaa

SEQ ID NO: 897855 - DNA, 33 bp, Homo sapien
aaaagagagttttagacgtagtgtattctccca

SEQ ID NO: 897856 - DNA, 33 bp, Homo sapien
aaaagagagttttagaggtagtgtattctccca

SEQ ID NO: 897857 - DNA, 33 bp, Homo sapien
gaagtctgtgatctcaagctattaaatattatc

SEQ ID NO: 897858 - DNA, 33 bp, Homo sapien
gaagtctgtgatctcaggctattaaatattatc

SEQ ID NO: 897859 - DNA, 33 bp, Homo sapien
gaaagtagggggaaaaacagacaagcaagatta

SEQ ID NO: 897860 - DNA, 33 bp, Homo sapien
gaaagtagggggaaaagcagacaagcaagatta

SEQ ID NO: 897861 - DNA, 33 bp, Homo sapien
tttaagggtgtcggcaacactctttgttcttcc

SEQ ID NO: 897862 - DNA, 33 bp, Homo sapien
tttaagggtgtcggcagcactctttgttcttcc

SEQ ID NO: 897863 - DNA, 33 bp, Homo sapien
catgcccaagtttgacaaagtttgttgaagtgg

SEQ ID NO: 897864 - DNA, 33 bp, Homo sapien
catgcccaagtttgacgaagtttgttgaagtgg

SEQ ID NO: 897865 - DNA, 33 bp, Homo sapien
cacagttgcataattaaaataggattctgtata

SEQ ID NO: 897866 - DNA, 33 bp, Homo sapien
cacagttgcataattacaataggattctgtata

SEQ ID NO: 897867 - DNA, 33 bp, Homo sapien
atggactgttgcagaaaatataactgtggcgga

SEQ ID NO: 897868 - DNA, 33 bp, Homo sapien
atggactgttgcagaacatataactgtggcgga

SEQ ID NO: 897869 - DNA, 33 bp, Homo sapien
tccttatttcatataccgataacgcagggaaaa

SEQ ID NO: 897870 - DNA, 33 bp, Homo sapien
tccttatttcatatactgataacgcagggaaaa

SEQ ID NO: 897871 - DNA, 33 bp, Homo sapien
gatctgttttccataacgggcttttccacaaga

SEQ ID NO: 897872 - DNA, 33 bp, Homo sapien
gatctgttttccataatgggcttttccacaaga

SEQ ID NO: 897873 - DNA, 33 bp, Homo sapien
gctcagtttctcaaatgattcctcagacagtcc

SEQ ID NO: 897874 - DNA, 33 bp, Homo sapien
gctcagtttctcaaattattcctcagacagtcc

SEQ ID NO: 897875 - DNA, 33 bp, Homo sapien
agttagtgtattttaacgaataatctgtggtgg

SEQ ID NO: 897876 - DNA, 33 bp, Homo sapien
agttagtgtattttaatgaataatctgtggtgg

SEQ ID NO: 897877 - DNA, 33 bp, Homo sapien
gaattgttttgtgtgaggatcaagtgcttggaa

SEQ ID NO: 897878 - DNA, 33 bp, Homo sapien
gaattgttttgtgtgatgatcaagtgcttggaa

SEQ ID NO: 897879 - DNA, 33 bp, Homo sapien
actaagaagcgaatacagcaaaatgtctacttc

SEQ ID NO: 897880 - DNA, 33 bp, Homo sapien
actaagaagcgaatacggcaaaatgtctacttc

SEQ ID NO: 897881 - DNA, 33 bp, Homo sapien
ggttgacattcaaaacaaagtggatatgcaacc

SEQ ID NO: 897882 - DNA, 33 bp, Homo sapien
ggttgacattcaaaacgaagtggatatgcaacc

SEQ ID NO: 897883 - DNA, 33 bp, Homo sapien
cactgacacagtgccaaagacctcagcatattc

SEQ ID NO: 897884 - DNA, 33 bp, Homo sapien
cactgacacagtgccagagacctcagcatattc

SEQ ID NO: 897885 - DNA, 33 bp, Homo sapien
gccaagttctagcttcacttgttccacagatac

SEQ ID NO: 897886 - DNA, 33 bp, Homo sapien
gccaagttctagcttcgcttgttccacagatac

SEQ ID NO: 897887 - DNA, 33 bp, Homo sapien
agatgatgtgcatttgcagaaaaaaattcaata

SEQ ID NO: 897888 - DNA, 33 bp, Homo sapien
agatgatgtgcatttggagaaaaaaattcaata

SEQ ID NO: 897889 - DNA, 33 bp, Homo sapien
gtatgtaaattccaaacggttcccactgcccag

SEQ ID NO: 897890 - DNA, 33 bp, Homo sapien
gtatgtaaattccaaatggttcccactgcccag

SEQ ID NO: 897891 - DNA, 33 bp, Homo sapien
actgggagagagtccaaattctttcctatgtgt

SEQ ID NO: 897892 - DNA, 33 bp, Homo sapien
actgggagagagtccagattctttcctatgtgt

SEQ ID NO: 897893 - DNA, 33 bp, Homo sapien
gagaaacctctgctgtaaataccaacaggcaaa

SEQ ID NO: 897894 - DNA, 33 bp, Homo sapien
gagaaacctctgctgtgaataccaacaggcaaa

SEQ ID NO: 897895 - DNA, 33 bp, Homo sapien
cagaagggaaagatgaaagactgttttttattt

SEQ ID NO: 897896 - DNA, 33 bp, Homo sapien
cagaagggaaagatgacagactgttttttattt

SEQ ID NO: 897897 - DNA, 33 bp, Homo sapien
aaaactctccaagtctaaacagcaactatgaaa

SEQ ID NO: 897898 - DNA, 33 bp, Homo sapien
aaaactctccaagtcttaacagcaactatgaaa

SEQ ID NO: 897899 - DNA, 33 bp, Homo sapien
acttgtagtaacttgaacacatctttatgtaaa

SEQ ID NO: 897900 - DNA, 33 bp, Homo sapien
acttgtagtaacttgagcacatctttatgtaaa

SEQ ID NO: 897901 - DNA, 33 bp, Homo sapien
tatgtaatgttaagccaaccagtgacaaggcat

SEQ ID NO: 897902 - DNA, 33 bp, Homo sapien
tatgtaatgttaagcctaccagtgacaaggcat

SEQ ID NO: 897903 - DNA, 33 bp, Homo sapien
attcttaccgtgcacaaagtaaacgcttagcaa

SEQ ID NO: 897904 - DNA, 33 bp, Homo sapien
attcttaccgtgcacagagtaaacgcttagcaa

SEQ ID NO: 897905 - DNA, 33 bp, Homo sapien
gctcaaggaagccagaataaaaaatacggaatc

SEQ ID NO: 897906 - DNA, 33 bp, Homo sapien
gctcaaggaagccagagtaaaaaatacggaatc

SEQ ID NO: 897907 - DNA, 33 bp, Homo sapien
tttttagaaatcatcaaacgtgccaagatgtat

SEQ ID NO: 897908 - DNA, 33 bp, Homo sapien
tttttagaaatcatcagacgtgccaagatgtat

SEQ ID NO: 897909 - DNA, 33 bp, Homo sapien
atagtggacaggagctgagaaaatacatggacc

SEQ ID NO: 897910 - DNA, 33 bp, Homo sapien
atagtggacaggagcttagaaaatacatggacc

SEQ ID NO: 897911 - DNA, 33 bp, Homo sapien
aaatcattctgcaaaacacagcttagacccatt

SEQ ID NO: 897912 - DNA, 33 bp, Homo sapien
aaatcattctgcaaaatacagcttagacccatt

SEQ ID NO: 897913 - DNA, 33 bp, Homo sapien
tgccgggtataaagtcacgtctccagaggcaga

SEQ ID NO: 897914 - DNA, 33 bp, Homo sapien
tgccgggtataaagtcgcgtctccagaggcaga

SEQ ID NO: 897915 - DNA, 33 bp, Homo sapien
tctattcctactttcacataatcatacaattaa

SEQ ID NO: 897916 - DNA, 33 bp, Homo sapien
tctattcctactttcagataatcatacaattaa

SEQ ID NO: 897917 - DNA, 33 bp, Homo sapien
ctgacaggcatttggccgaatcatggtagagga

SEQ ID NO: 897918 - DNA, 33 bp, Homo sapien
ctgacaggcatttggctgaatcatggtagagga

SEQ ID NO: 897919 - DNA, 33 bp, Homo sapien
accctgcaaaacaaaagtaaccattcagttttc

SEQ ID NO: 897920 - DNA, 33 bp, Homo sapien
accctgcaaaacaaaattaaccattcagttttc

SEQ ID NO: 897921 - DNA, 33 bp, Homo sapien
tatctttaaatgatggacagttgtctcaatatt

SEQ ID NO: 897922 - DNA, 33 bp, Homo sapien
tatctttaaatgatggtcagttgtctcaatatt

SEQ ID NO: 897923 - DNA, 33 bp, Homo sapien
aagtgcctcggatctccactttatctgttaata

SEQ ID NO: 897924 - DNA, 33 bp, Homo sapien
aagtgcctcggatctctactttatctgttaata

SEQ ID NO: 897925 - DNA, 33 bp, Homo sapien
tccaaataataccaccaagcatctcttcacctc

SEQ ID NO: 897926 - DNA, 33 bp, Homo sapien
tccaaataataccaccgagcatctcttcacctc

SEQ ID NO: 897927 - DNA, 33 bp, Homo sapien
tgtaagccttgattgcaaaagtccaaattttga

SEQ ID NO: 897928 - DNA, 33 bp, Homo sapien
tgtaagccttgattgcgaaagtccaaattttga

SEQ ID NO: 897929 - DNA, 33 bp, Homo sapien
tatatggaataaaacaatcaatcttagatggtt

SEQ ID NO: 897930 - DNA, 33 bp, Homo sapien
tatatggaataaaacagtcaatcttagatggtt

SEQ ID NO: 897931 - DNA, 33 bp, Homo sapien
gcagctccatacatcacagtgttaccatacttg

SEQ ID NO: 897932 - DNA, 33 bp, Homo sapien
gcagctccatacatcagagtgttaccatacttg

SEQ ID NO: 897933 - DNA, 33 bp, Homo sapien
agaaggtctgaggcaaatgttgaagagaggagt

SEQ ID NO: 897934 - DNA, 33 bp, Homo sapien
agaaggtctgaggcaagtgttgaagagaggagt

SEQ ID NO: 897935 - DNA, 33 bp, Homo sapien
gtgggtatcatacacaaaagtcggtcatacatt

SEQ ID NO: 897936 - DNA, 33 bp, Homo sapien
gtgggtatcatacacagaagtcggtcatacatt

SEQ ID NO: 897937 - DNA, 33 bp, Homo sapien
gggaggtgcctacatcagacaagaaaagaagaa

SEQ ID NO: 897938 - DNA, 33 bp, Homo sapien
gggaggtgcctacatccgacaagaaaagaagaa

SEQ ID NO: 897939 - DNA, 33 bp, Homo sapien
gattcctaatagtactaagaaaacatttgagca

SEQ ID NO: 897940 - DNA, 33 bp, Homo sapien
gattcctaatagtactgagaaaacatttgagca

SEQ ID NO: 897941 - DNA, 33 bp, Homo sapien
ttcaacccaacagaaaagttttcttggacacca

SEQ ID NO: 897942 - DNA, 33 bp, Homo sapien
ttcaacccaacagaaaggttttcttggacacca

SEQ ID NO: 897943 - DNA, 33 bp, Homo sapien
aagcagaagccaaagacaggtagaatctagtct

SEQ ID NO: 897944 - DNA, 33 bp, Homo sapien
aagcagaagccaaagagaggtagaatctagtct

SEQ ID NO: 897945 - DNA, 33 bp, Homo sapien
atttatttcagatctaggcaatgttagatgtaa

SEQ ID NO: 897946 - DNA, 33 bp, Homo sapien
atttatttcagatctatgcaatgttagatgtaa

SEQ ID NO: 897947 - DNA, 33 bp, Homo sapien
tggccagtgagattccaagccgtcactgagcat

SEQ ID NO: 897948 - DNA, 33 bp, Homo sapien
tggccagtgagattccgagccgtcactgagcat

SEQ ID NO: 897949 - DNA, 33 bp, Homo sapien
acaggactgttaatgacattgttagtcggctca

SEQ ID NO: 897950 - DNA, 33 bp, Homo sapien
acaggactgttaatgatattgttagtcggctca

SEQ ID NO: 897951 - DNA, 33 bp, Homo sapien
aggtttttgtaaaagagacgaagataaatggtc

SEQ ID NO: 897952 - DNA, 33 bp, Homo sapien
aggtttttgtaaaagatacgaagataaatggtc

SEQ ID NO: 897953 - DNA, 33 bp, Homo sapien
tcaacaatagaatggagagatatattggcttgt

SEQ ID NO: 897954 - DNA, 33 bp, Homo sapien
tcaacaatagaatggatagatatattggcttgt

SEQ ID NO: 897955 - DNA, 33 bp, Homo sapien
aaatatacactgataaatactcaaatccatttc

SEQ ID NO: 897956 - DNA, 33 bp, Homo sapien
aaatatacactgataagtactcaaatccatttc

SEQ ID NO: 897957 - DNA, 33 bp, Homo sapien
tctcctctacttacaaagatattggtcatatgg

SEQ ID NO: 897958 - DNA, 33 bp, Homo sapien
tctcctctacttacaaggatattggtcatatgg

SEQ ID NO: 897959 - DNA, 33 bp, Homo sapien
ttcttatttacacagaagggagaatgctatcat

SEQ ID NO: 897960 - DNA, 33 bp, Homo sapien
ttcttatttacacagaggggagaatgctatcat

SEQ ID NO: 897961 - DNA, 33 bp, Homo sapien
ctgtacttcactcttacaaagtctttgtttttt

SEQ ID NO: 897962 - DNA, 33 bp, Homo sapien
ctgtacttcactcttagaaagtctttgtttttt

SEQ ID NO: 897963 - DNA, 33 bp, Homo sapien
tgttagcaacttggtaactatccttctagatct

SEQ ID NO: 897964 - DNA, 33 bp, Homo sapien
tgttagcaacttggtatctatccttctagatct

SEQ ID NO: 897965 - DNA, 33 bp, Homo sapien
tagttaccaccatcgcaaagatagacttttgga

SEQ ID NO: 897966 - DNA, 33 bp, Homo sapien
tagttaccaccatcgccaagatagacttttgga

SEQ ID NO: 897967 - DNA, 33 bp, Homo sapien
cagtatcaaactttaaaatacatttcactctca

SEQ ID NO: 897968 - DNA, 33 bp, Homo sapien
cagtatcaaactttaacatacatttcactctca

SEQ ID NO: 897969 - DNA, 33 bp, Homo sapien
ccaagacttagttggagagggtcagtcgcttcc

SEQ ID NO: 897970 - DNA, 33 bp, Homo sapien
ccaagacttagttggatagggtcagtcgcttcc

SEQ ID NO: 897971 - DNA, 33 bp, Homo sapien
gagtttaatcccagaagccaaacaagcacattt

SEQ ID NO: 897972 - DNA, 33 bp, Homo sapien
gagtttaatcccagaatccaaacaagcacattt

SEQ ID NO: 897973 - DNA, 33 bp, Homo sapien
acaactggaaaatttcagaaaagacacaagagg

SEQ ID NO: 897974 - DNA, 33 bp, Homo sapien
acaactggaaaatttccgaaaagacacaagagg

SEQ ID NO: 897975 - DNA, 33 bp, Homo sapien
taggacacatcaccaaagactgggcatagtaag

SEQ ID NO: 897976 - DNA, 33 bp, Homo sapien
taggacacatcaccaaggactgggcatagtaag

SEQ ID NO: 897977 - DNA, 33 bp, Homo sapien
atccaatttgctgcatcaagctaatttgttttc

SEQ ID NO: 897978 - DNA, 33 bp, Homo sapien
atccaatttgctgcatgaagctaatttgttttc

SEQ ID NO: 897979 - DNA, 33 bp, Homo sapien
ccaatccagggtaccacagtgtgtttagcagag

SEQ ID NO: 897980 - DNA, 33 bp, Homo sapien
ccaatccagggtaccagagtgtgtttagcagag

SEQ ID NO: 897981 - DNA, 33 bp, Homo sapien
tgctttggttggtctcaataggaagttttgcta

SEQ ID NO: 897982 - DNA, 33 bp, Homo sapien
tgctttggttggtctccataggaagttttgcta

SEQ ID NO: 897983 - DNA, 33 bp, Homo sapien
aaaaaagccacaggagcaaccctgacagagaag

SEQ ID NO: 897984 - DNA, 33 bp, Homo sapien
aaaaaagccacaggaggaaccctgacagagaag

SEQ ID NO: 897985 - DNA, 33 bp, Homo sapien
ctaatcctgggcttctcaaattttgaagacagg

SEQ ID NO: 897986 - DNA, 33 bp, Homo sapien
ctaatcctgggcttcttaaattttgaagacagg

SEQ ID NO: 897987 - DNA, 33 bp, Homo sapien
tacatttctaaaaaccactttccagccaggcgt

SEQ ID NO: 897988 - DNA, 33 bp, Homo sapien
tacatttctaaaaaccgctttccagccaggcgt

SEQ ID NO: 897989 - DNA, 33 bp, Homo sapien
taacaaagacattacacagttaagagacattca

SEQ ID NO: 897990 - DNA, 33 bp, Homo sapien
taacaaagacattacatagttaagagacattca

SEQ ID NO: 897991 - DNA, 33 bp, Homo sapien
actttgacaattcaacaacagttgctgagcacc

SEQ ID NO: 897992 - DNA, 33 bp, Homo sapien
actttgacaattcaacgacagttgctgagcacc

SEQ ID NO: 897993 - DNA, 33 bp, Homo sapien
gtatagatgggaaaacagaaggtggaaattaat

SEQ ID NO: 897994 - DNA, 33 bp, Homo sapien
gtatagatgggaaaacggaaggtggaaattaat

SEQ ID NO: 897995 - DNA, 33 bp, Homo sapien
aatacgaaacattatcaaggctcccttttttta

SEQ ID NO: 897996 - DNA, 33 bp, Homo sapien
aatacgaaacattatcgaggctcccttttttta

SEQ ID NO: 897997 - DNA, 33 bp, Homo sapien
gcaattttcgatattccattctgcattgaaata

SEQ ID NO: 897998 - DNA, 33 bp, Homo sapien
gcaattttcgatattctattctgcattgaaata

SEQ ID NO: 897999 - DNA, 33 bp, Homo sapien
tggtgtctctcttaaacgcaaggcttgtgtctt

SEQ ID NO: 898000 - DNA, 33 bp, Homo sapien
tggtgtctctcttaaaggcaaggcttgtgtctt

SEQ ID NO: 898001 - DNA, 33 bp, Homo sapien
tctgaccacttcgcataactttcgtctccaaca

SEQ ID NO: 898002 - DNA, 33 bp, Homo sapien
tctgaccacttcgcatcactttcgtctccaaca

SEQ ID NO: 898003 - DNA, 33 bp, Homo sapien
agggttcaattataaagcaaccttatttgtgct

SEQ ID NO: 898004 - DNA, 33 bp, Homo sapien
agggttcaattataaatcaaccttatttgtgct

SEQ ID NO: 898005 - DNA, 33 bp, Homo sapien
cataccatgagagctgacaatgactggttgcta

SEQ ID NO: 898006 - DNA, 33 bp, Homo sapien
cataccatgagagctggcaatgactggttgcta

SEQ ID NO: 898007 - DNA, 33 bp, Homo sapien
ggacagaagttcgacaccgggaaacataccatg

SEQ ID NO: 898008 - DNA, 33 bp, Homo sapien
ggacagaagttcgacagcgggaaacataccatg

SEQ ID NO: 898009 - DNA, 33 bp, Homo sapien
gcaagaaaaagtaaacacatctgtgcaggtagc

SEQ ID NO: 898010 - DNA, 33 bp, Homo sapien
gcaagaaaaagtaaacccatctgtgcaggtagc

SEQ ID NO: 898011 - DNA, 33 bp, Homo sapien
ataatagttttggggaaaagattctcaaatgta

SEQ ID NO: 898012 - DNA, 33 bp, Homo sapien
ataatagttttggggacaagattctcaaatgta

SEQ ID NO: 898013 - DNA, 33 bp, Homo sapien
catcttacaaccttgacgtgcagtaagtaggat

SEQ ID NO: 898014 - DNA, 33 bp, Homo sapien
catcttacaaccttgatgtgcagtaagtaggat

SEQ ID NO: 898015 - DNA, 33 bp, Homo sapien
attaatattgcgggaaaagaaagcttgttaagg

SEQ ID NO: 898016 - DNA, 33 bp, Homo sapien
attaatattgcgggaagagaaagcttgttaagg

SEQ ID NO: 898017 - DNA, 33 bp, Homo sapien
gctttccagtatagaaagatgcataccctcaag

SEQ ID NO: 898018 - DNA, 33 bp, Homo sapien
gctttccagtatagaatgatgcataccctcaag

SEQ ID NO: 898019 - DNA, 33 bp, Homo sapien
acttcctaacaaagaacgcaataagtcactttc

SEQ ID NO: 898020 - DNA, 33 bp, Homo sapien
acttcctaacaaagaatgcaataagtcactttc

SEQ ID NO: 898021 - DNA, 33 bp, Homo sapien
gaaatcaagcactgaaccaatcgtctcaatccc

SEQ ID NO: 898022 - DNA, 33 bp, Homo sapien
gaaatcaagcactgaatcaatcgtctcaatccc

SEQ ID NO: 898023 - DNA, 33 bp, Homo sapien
cataaaagggaaatcaaagaagcctggaaaaga

SEQ ID NO: 898024 - DNA, 33 bp, Homo sapien
cataaaagggaaatcagagaagcctggaaaaga

SEQ ID NO: 898025 - DNA, 33 bp, Homo sapien
agttaagttgagtgcaatgacagaggtttgctt

SEQ ID NO: 898026 - DNA, 33 bp, Homo sapien
agttaagttgagtgcagtgacagaggtttgctt

SEQ ID NO: 898027 - DNA, 33 bp, Homo sapien
ttagtctaattgacaacgtagcactatcttaac

SEQ ID NO: 898028 - DNA, 33 bp, Homo sapien
ttagtctaattgacaatgtagcactatcttaac

SEQ ID NO: 898029 - DNA, 33 bp, Homo sapien
aaatttcaatagatgactaaaaaccactcaaca

SEQ ID NO: 898030 - DNA, 33 bp, Homo sapien
aaatttcaatagatgattaaaaaccactcaaca

SEQ ID NO: 898031 - DNA, 33 bp, Homo sapien
tgttgcctagctgttacacctcaataaatagat

SEQ ID NO: 898032 - DNA, 33 bp, Homo sapien
tgttgcctagctgttatacctcaataaatagat

SEQ ID NO: 898033 - DNA, 33 bp, Homo sapien
acaaaagtagttagaactgccagtgtaatcaac

SEQ ID NO: 898034 - DNA, 33 bp, Homo sapien
acaaaagtagttagaattgccagtgtaatcaac

SEQ ID NO: 898035 - DNA, 33 bp, Homo sapien
tttaatcggaataataaccatactgagaaattg

SEQ ID NO: 898036 - DNA, 33 bp, Homo sapien
tttaatcggaataatagccatactgagaaattg

SEQ ID NO: 898037 - DNA, 33 bp, Homo sapien
tacactactttgtgataaacatctcaccaggca

SEQ ID NO: 898038 - DNA, 33 bp, Homo sapien
tacactactttgtgatgaacatctcaccaggca

SEQ ID NO: 898039 - DNA, 33 bp, Homo sapien
agaggtgctaattactaaaaacaccagagatct

SEQ ID NO: 898040 - DNA, 33 bp, Homo sapien
agaggtgctaattactgaaaacaccagagatct

SEQ ID NO: 898041 - DNA, 33 bp, Homo sapien
aaggatcatcagagacgattatggacaacttta

SEQ ID NO: 898042 - DNA, 33 bp, Homo sapien
aaggatcatcagagactattatggacaacttta

SEQ ID NO: 898043 - DNA, 33 bp, Homo sapien
tggaccaagaaacagcaaagagctgaattgcac

SEQ ID NO: 898044 - DNA, 33 bp, Homo sapien
tggaccaagaaacagcgaagagctgaattgcac

SEQ ID NO: 898045 - DNA, 33 bp, Homo sapien
atgataaagtacacaacggtacaacaatttcca

SEQ ID NO: 898046 - DNA, 33 bp, Homo sapien
atgataaagtacacaatggtacaacaatttcca

SEQ ID NO: 898047 - DNA, 33 bp, Homo sapien
ataaaaatggagttacaaaacaagcaataaatg

SEQ ID NO: 898048 - DNA, 33 bp, Homo sapien
ataaaaatggagttacgaaacaagcaataaatg

SEQ ID NO: 898049 - DNA, 33 bp, Homo sapien
ctttcttgataaaaacactcaacagtctgggta

SEQ ID NO: 898050 - DNA, 33 bp, Homo sapien
ctttcttgataaaaacgctcaacagtctgggta

SEQ ID NO: 898051 - DNA, 33 bp, Homo sapien
agaattcaaatagcccaacagattgtttctctt

SEQ ID NO: 898052 - DNA, 33 bp, Homo sapien
agaattcaaatagccccacagattgtttctctt

SEQ ID NO: 898053 - DNA, 33 bp, Homo sapien
acagaaactacatgaaaacgtaattccagaaac

SEQ ID NO: 898054 - DNA, 33 bp, Homo sapien
acagaaactacatgaacacgtaattccagaaac

SEQ ID NO: 898055 - DNA, 33 bp, Homo sapien
gatgctccacattggccaaaatgaacccagtac

SEQ ID NO: 898056 - DNA, 33 bp, Homo sapien
gatgctccacattggctaaaatgaacccagtac

SEQ ID NO: 898057 - DNA, 33 bp, Homo sapien
agagtgtgccatgtacacctatgggggtaaaga

SEQ ID NO: 898058 - DNA, 33 bp, Homo sapien
agagtgtgccatgtacgcctatgggggtaaaga

SEQ ID NO: 898059 - DNA, 33 bp, Homo sapien
ctgaacaatcctaagacacaccattcctaatat

SEQ ID NO: 898060 - DNA, 33 bp, Homo sapien
ctgaacaatcctaagagacaccattcctaatat

SEQ ID NO: 898061 - DNA, 33 bp, Homo sapien
taatgattattacagacactttattgcagtttt

SEQ ID NO: 898062 - DNA, 33 bp, Homo sapien
taatgattattacagagactttattgcagtttt

SEQ ID NO: 898063 - DNA, 33 bp, Homo sapien
ttctacacaaaagataccaactttggcctactt

SEQ ID NO: 898064 - DNA, 33 bp, Homo sapien
ttctacacaaaagatatcaactttggcctactt

SEQ ID NO: 898065 - DNA, 33 bp, Homo sapien
caagtagtttgtttcacaaaagtaggccaaagt

SEQ ID NO: 898066 - DNA, 33 bp, Homo sapien
caagtagtttgtttcataaaagtaggccaaagt

SEQ ID NO: 898067 - DNA, 33 bp, Homo sapien
caaaacaacttctgatgaacatgatttccccca

SEQ ID NO: 898068 - DNA, 33 bp, Homo sapien
caaaacaacttctgattaacatgatttccccca

SEQ ID NO: 898069 - DNA, 33 bp, Homo sapien
tcatcagtgttgtatacgttataatctgaccac

SEQ ID NO: 898070 - DNA, 33 bp, Homo sapien
tcatcagtgttgtatatgttataatctgaccac

SEQ ID NO: 898071 - DNA, 33 bp, Homo sapien
ttttaggggagcaatgaaaggatatgcacaaat

SEQ ID NO: 898072 - DNA, 33 bp, Homo sapien
ttttaggggagcaatgtaaggatatgcacaaat

SEQ ID NO: 898073 - DNA, 33 bp, Homo sapien
tggaatacgagacaaaaagagatataacgaatg

SEQ ID NO: 898074 - DNA, 33 bp, Homo sapien
tggaatacgagacaaagagagatataacgaatg

SEQ ID NO: 898075 - DNA, 33 bp, Homo sapien
aagggcaaaagaaggaagccaatgaggagtcta

SEQ ID NO: 898076 - DNA, 33 bp, Homo sapien
aagggcaaaagaaggaggccaatgaggagtcta

SEQ ID NO: 898077 - DNA, 33 bp, Homo sapien
gtttttcataaatgatcagcttagcaagcttgg

SEQ ID NO: 898078 - DNA, 33 bp, Homo sapien
gtttttcataaatgatgagcttagcaagcttgg

SEQ ID NO: 898079 - DNA, 33 bp, Homo sapien
aatttcagttattttcactctccttgttgagat

SEQ ID NO: 898080 - DNA, 33 bp, Homo sapien
aatttcagttattttcgctctccttgttgagat

SEQ ID NO: 898081 - DNA, 33 bp, Homo sapien
aaaaatgaattagggaacttaatgggacacttt

SEQ ID NO: 898082 - DNA, 33 bp, Homo sapien
aaaaatgaattagggagcttaatgggacacttt

SEQ ID NO: 898083 - DNA, 33 bp, Homo sapien
catgtggttaaaacagaacatctcttctccatc

SEQ ID NO: 898084 - DNA, 33 bp, Homo sapien
catgtggttaaaacaggacatctcttctccatc

SEQ ID NO: 898085 - DNA, 33 bp, Homo sapien
ccctgctacagtatcaaaagatccaaagttgtc

SEQ ID NO: 898086 - DNA, 33 bp, Homo sapien
ccctgctacagtatcagaagatccaaagttgtc

SEQ ID NO: 898087 - DNA, 33 bp, Homo sapien
gagtaaaatcagaaagacgtttgggctctcagt

SEQ ID NO: 898088 - DNA, 33 bp, Homo sapien
gagtaaaatcagaaaggcgtttgggctctcagt

SEQ ID NO: 898089 - DNA, 33 bp, Homo sapien
cagcagagctgtgcacaagggaaatgacaaggg

SEQ ID NO: 898090 - DNA, 33 bp, Homo sapien
cagcagagctgtgcacgagggaaatgacaaggg

SEQ ID NO: 898091 - DNA, 33 bp, Homo sapien
gcttggcttctagcagaacctaacagtgggccc

SEQ ID NO: 898092 - DNA, 33 bp, Homo sapien
gcttggcttctagcaggacctaacagtgggccc

SEQ ID NO: 898093 - DNA, 33 bp, Homo sapien
cagaaaaatagcctgaccctgagagcccacact

SEQ ID NO: 898094 - DNA, 33 bp, Homo sapien
cagaaaaatagcctgatcctgagagcccacact

SEQ ID NO: 898095 - DNA, 33 bp, Homo sapien
ctacagcagccaaacccagacagaggtgatgtg

SEQ ID NO: 898096 - DNA, 33 bp, Homo sapien
ctacagcagccaaaccgagacagaggtgatgtg

SEQ ID NO: 898097 - DNA, 33 bp, Homo sapien
aatttggagggtttaacgacactttgcctcttc

SEQ ID NO: 898098 - DNA, 33 bp, Homo sapien
aatttggagggtttaatgacactttgcctcttc

SEQ ID NO: 898099 - DNA, 33 bp, Homo sapien
aacaatagaaaaacccacaatctctaaataaag

SEQ ID NO: 898100 - DNA, 33 bp, Homo sapien
aacaatagaaaaacccgcaatctctaaataaag

SEQ ID NO: 898101 - DNA, 33 bp, Homo sapien
tattctagaagtacaaatagaaccttattccta

SEQ ID NO: 898102 - DNA, 33 bp, Homo sapien
tattctagaagtacaagtagaaccttattccta

SEQ ID NO: 898103 - DNA, 33 bp, Homo sapien
ttgtgctgaatgagtcaaaggagggatcaggga

SEQ ID NO: 898104 - DNA, 33 bp, Homo sapien
ttgtgctgaatgagtcgaaggagggatcaggga

SEQ ID NO: 898105 - DNA, 33 bp, Homo sapien
aggtgtgctgagaaaacgtagaaggagactaaa

SEQ ID NO: 898106 - DNA, 33 bp, Homo sapien
aggtgtgctgagaaaaggtagaaggagactaaa

SEQ ID NO: 898107 - DNA, 33 bp, Homo sapien
cagccttcactttgccaacaggtatatccttgg

SEQ ID NO: 898108 - DNA, 33 bp, Homo sapien
cagccttcactttgccgacaggtatatccttgg

SEQ ID NO: 898109 - DNA, 33 bp, Homo sapien
atctgtgcttaaaaaacatgtaatttaatcagt

SEQ ID NO: 898110 - DNA, 33 bp, Homo sapien
atctgtgcttaaaaaatatgtaatttaatcagt

SEQ ID NO: 898111 - DNA, 33 bp, Homo sapien
cagctgttctgcacctcagctataagcattgaa

SEQ ID NO: 898112 - DNA, 33 bp, Homo sapien
cagctgttctgcaccttagctataagcattgaa

SEQ ID NO: 898113 - DNA, 33 bp, Homo sapien
gaaagatataccttgacagcaacctagataatc

SEQ ID NO: 898114 - DNA, 33 bp, Homo sapien
gaaagatataccttgatagcaacctagataatc

SEQ ID NO: 898115 - DNA, 33 bp, Homo sapien
gaggcaggcttggaaagaaataaacatctgttg

SEQ ID NO: 898116 - DNA, 33 bp, Homo sapien
gaggcaggcttggaaataaataaacatctgttg

SEQ ID NO: 898117 - DNA, 33 bp, Homo sapien
ctagaggctgattcaccgcatacgaatggagag

SEQ ID NO: 898118 - DNA, 33 bp, Homo sapien
ctagaggctgattcactgcatacgaatggagag

SEQ ID NO: 898119 - DNA, 33 bp, Homo sapien
tcaggcagaatggctcactttattttattgtgt

SEQ ID NO: 898120 - DNA, 33 bp, Homo sapien
tcaggcagaatggctccctttattttattgtgt

SEQ ID NO: 898121 - DNA, 33 bp, Homo sapien
ttattgtgatttgtctcaactagtgtaatgcaa

SEQ ID NO: 898122 - DNA, 33 bp, Homo sapien
ttattgtgatttgtcttaactagtgtaatgcaa

SEQ ID NO: 898123 - DNA, 33 bp, Homo sapien
gacacatctcataaagccgttttttaataaatc

SEQ ID NO: 898124 - DNA, 33 bp, Homo sapien
gacacatctcataaagtcgttttttaataaatc

SEQ ID NO: 898125 - DNA, 33 bp, Homo sapien
tgaattgttcatctccagacaagtatttagttt

SEQ ID NO: 898126 - DNA, 33 bp, Homo sapien
tgaattgttcatctccggacaagtatttagttt

SEQ ID NO: 898127 - DNA, 33 bp, Homo sapien
aaccaaaaagagcaggcatgataatatctacag

SEQ ID NO: 898128 - DNA, 33 bp, Homo sapien
aaccaaaaagagcagggatgataatatctacag

SEQ ID NO: 898129 - DNA, 33 bp, Homo sapien
aaatctgatccagagcgctcccattgctgtgtg

SEQ ID NO: 898130 - DNA, 33 bp, Homo sapien
aaatctgatccagagctctcccattgctgtgtg

SEQ ID NO: 898131 - DNA, 33 bp, Homo sapien
ggatgactccagtgagaatgttctaaccttgat

SEQ ID NO: 898132 - DNA, 33 bp, Homo sapien
ggatgactccagtgagcatgttctaaccttgat

SEQ ID NO: 898133 - DNA, 33 bp, Homo sapien
tactctaggtgtttaccgataattactcaagag

SEQ ID NO: 898134 - DNA, 33 bp, Homo sapien
tactctaggtgtttactgataattactcaagag

SEQ ID NO: 898135 - DNA, 33 bp, Homo sapien
aggacataaatagatacgtagcagtccatttgt

SEQ ID NO: 898136 - DNA, 33 bp, Homo sapien
aggacataaatagatatgtagcagtccatttgt

SEQ ID NO: 898137 - DNA, 33 bp, Homo sapien
tgttggtttcagataacggatgctttaaattta

SEQ ID NO: 898138 - DNA, 33 bp, Homo sapien
tgttggtttcagataatggatgctttaaattta

SEQ ID NO: 898139 - DNA, 33 bp, Homo sapien
tactactgaatctgaacggtatgtcactggagc

SEQ ID NO: 898140 - DNA, 33 bp, Homo sapien
tactactgaatctgaatggtatgtcactggagc

SEQ ID NO: 898141 - DNA, 33 bp, Homo sapien
cttttctcctaccgggaatgaatttttgctcat

SEQ ID NO: 898142 - DNA, 33 bp, Homo sapien
cttttctcctaccggggatgaatttttgctcat

SEQ ID NO: 898143 - DNA, 33 bp, Homo sapien
taaaaagtcaaaaaaacgagatgcttgtgaggt

SEQ ID NO: 898144 - DNA, 33 bp, Homo sapien
taaaaagtcaaaaaaatgagatgcttgtgaggt

SEQ ID NO: 898145 - DNA, 33 bp, Homo sapien
ttctgactactgccccgccttgctcattttctc

SEQ ID NO: 898146 - DNA, 33 bp, Homo sapien
ttctgactactgcccctccttgctcattttctc

SEQ ID NO: 898147 - DNA, 33 bp, Homo sapien
gggaagaagccctgaaccaatgggacaagagct

SEQ ID NO: 898148 - DNA, 33 bp, Homo sapien
gggaagaagccctgaatcaatgggacaagagct

SEQ ID NO: 898149 - DNA, 33 bp, Homo sapien
agcaaaacaacaatcacgcaacccccaaatcct

SEQ ID NO: 898150 - DNA, 33 bp, Homo sapien
agcaaaacaacaatcatgcaacccccaaatcct

SEQ ID NO: 898151 - DNA, 33 bp, Homo sapien
gggatgagatatatataaagcaccgaacatggt

SEQ ID NO: 898152 - DNA, 33 bp, Homo sapien
gggatgagatatatatcaagcaccgaacatggt

SEQ ID NO: 898153 - DNA, 33 bp, Homo sapien
gtttgtgggttaatgagaatgaatttggtctat

SEQ ID NO: 898154 - DNA, 33 bp, Homo sapien
gtttgtgggttaatgataatgaatttggtctat

SEQ ID NO: 898155 - DNA, 33 bp, Homo sapien
agaaccacgactgctccagtagtaactcccttg

SEQ ID NO: 898156 - DNA, 33 bp, Homo sapien
agaaccacgactgctctagtagtaactcccttg

SEQ ID NO: 898157 - DNA, 33 bp, Homo sapien
tgggaaggaataatcacgaggcaaggaggagac

SEQ ID NO: 898158 - DNA, 33 bp, Homo sapien
tgggaaggaataatcatgaggcaaggaggagac

SEQ ID NO: 898159 - DNA, 33 bp, Homo sapien
aaaagatgagaagggaaacatcaatcatggctg

SEQ ID NO: 898160 - DNA, 33 bp, Homo sapien
aaaagatgagaagggagacatcaatcatggctg

SEQ ID NO: 898161 - DNA, 33 bp, Homo sapien
accatcttgcgacacactagaataacaattaca

SEQ ID NO: 898162 - DNA, 33 bp, Homo sapien
accatcttgcgacacattagaataacaattaca

SEQ ID NO: 898163 - DNA, 33 bp, Homo sapien
ataatgctaatgatgacggctatttactgggag

SEQ ID NO: 898164 - DNA, 33 bp, Homo sapien
ataatgctaatgatgatggctatttactgggag

SEQ ID NO: 898165 - DNA, 33 bp, Homo sapien
gagtgaagatgcagatcaggcctgtgtttcccc

SEQ ID NO: 898166 - DNA, 33 bp, Homo sapien
gagtgaagatgcagattaggcctgtgtttcccc

SEQ ID NO: 898167 - DNA, 33 bp, Homo sapien
catcagtctcagcgaaatgaattctgctaacaa

SEQ ID NO: 898168 - DNA, 33 bp, Homo sapien
catcagtctcagcgaagtgaattctgctaacaa

SEQ ID NO: 898169 - DNA, 33 bp, Homo sapien
gaacaataaggaaccaaaattgaaaacaaatag

SEQ ID NO: 898170 - DNA, 33 bp, Homo sapien
gaacaataaggaaccagaattgaaaacaaatag

SEQ ID NO: 898171 - DNA, 33 bp, Homo sapien
attaaaaaagctgtagcatctttgagtccaatt

SEQ ID NO: 898172 - DNA, 33 bp, Homo sapien
attaaaaaagctgtagtatctttgagtccaatt

SEQ ID NO: 898173 - DNA, 33 bp, Homo sapien
tgcaacagccaaaatacaggaggagccaagtcc

SEQ ID NO: 898174 - DNA, 33 bp, Homo sapien
tgcaacagccaaaatataggaggagccaagtcc

SEQ ID NO: 898175 - DNA, 33 bp, Homo sapien
agaaaaatatttcaagccttccaagatcaaaga

SEQ ID NO: 898176 - DNA, 33 bp, Homo sapien
agaaaaatatttcaaggcttccaagatcaaaga

SEQ ID NO: 898177 - DNA, 33 bp, Homo sapien
catcacttattgataccgccacagttctggaat

SEQ ID NO: 898178 - DNA, 33 bp, Homo sapien
catcacttattgatactgccacagttctggaat

SEQ ID NO: 898179 - DNA, 33 bp, Homo sapien
gtgcctgccttgtaaccgcaagaagataccatt

SEQ ID NO: 898180 - DNA, 33 bp, Homo sapien
gtgcctgccttgtaactgcaagaagataccatt

SEQ ID NO: 898181 - DNA, 33 bp, Homo sapien
gagggaaccagatgcaatagaccaaatgaggtg

SEQ ID NO: 898182 - DNA, 33 bp, Homo sapien
gagggaaccagatgcagtagaccaaatgaggtg

SEQ ID NO: 898183 - DNA, 33 bp, Homo sapien
gtgctcaaaatagccaaagatgcagcgtaatac

SEQ ID NO: 898184 - DNA, 33 bp, Homo sapien
gtgctcaaaatagccagagatgcagcgtaatac

SEQ ID NO: 898185 - DNA, 33 bp, Homo sapien
catgtagctctaaggaatatcatgttttacgag

SEQ ID NO: 898186 - DNA, 33 bp, Homo sapien
catgtagctctaaggagtatcatgttttacgag

SEQ ID NO: 898187 - DNA, 33 bp, Homo sapien
aggccctaacttatgacgggacagaaagtaaaa

SEQ ID NO: 898188 - DNA, 33 bp, Homo sapien
aggccctaacttatgatgggacagaaagtaaaa

SEQ ID NO: 898189 - DNA, 33 bp, Homo sapien
ttgaaaaatcaccttgaacacaagattccctgg

SEQ ID NO: 898190 - DNA, 33 bp, Homo sapien
ttgaaaaatcaccttggacacaagattccctgg

SEQ ID NO: 898191 - DNA, 33 bp, Homo sapien
ggagggagttcacggcaattcttacatactgat

SEQ ID NO: 898192 - DNA, 33 bp, Homo sapien
ggagggagttcacggctattcttacatactgat

SEQ ID NO: 898193 - DNA, 33 bp, Homo sapien
aatgagtgtttccatccagtggtgtgaagcatg

SEQ ID NO: 898194 - DNA, 33 bp, Homo sapien
aatgagtgtttccatctagtggtgtgaagcatg

SEQ ID NO: 898195 - DNA, 33 bp, Homo sapien
ctgggccactttgccacgcaggctggttgctgc

SEQ ID NO: 898196 - DNA, 33 bp, Homo sapien
ctgggccactttgccatgcaggctggttgctgc

SEQ ID NO: 898197 - DNA, 33 bp, Homo sapien
tggattaattcttgtgaagagtacaataaacta

SEQ ID NO: 898198 - DNA, 33 bp, Homo sapien
tggattaattcttgtggagagtacaataaacta

SEQ ID NO: 898199 - DNA, 33 bp, Homo sapien
catctaaatattacctcaatcatttacctaact

SEQ ID NO: 898200 - DNA, 33 bp, Homo sapien
catctaaatattacctgaatcatttacctaact

SEQ ID NO: 898201 - DNA, 33 bp, Homo sapien
tgatgagttttgatcaactgttcaaaaaaacat

SEQ ID NO: 898202 - DNA, 33 bp, Homo sapien
tgatgagttttgatcagctgttcaaaaaaacat

SEQ ID NO: 898203 - DNA, 33 bp, Homo sapien
tggaaataacttactacgagcgttcatcgtttt

SEQ ID NO: 898204 - DNA, 33 bp, Homo sapien
tggaaataacttactatgagcgttcatcgtttt

SEQ ID NO: 898205 - DNA, 33 bp, Homo sapien
tgcaaaactgcaacaaggccaattaaacaacca

SEQ ID NO: 898206 - DNA, 33 bp, Homo sapien
tgcaaaactgcaacaatgccaattaaacaacca

SEQ ID NO: 898207 - DNA, 33 bp, Homo sapien
atagctaagctttctaaagtatggagtctgtcc

SEQ ID NO: 898208 - DNA, 33 bp, Homo sapien
atagctaagctttctagagtatggagtctgtcc

SEQ ID NO: 898209 - DNA, 33 bp, Homo sapien
aacatatgcgtcagaactggggaagaatctctt

SEQ ID NO: 898210 - DNA, 33 bp, Homo sapien
aacatatgcgtcagaattggggaagaatctctt

SEQ ID NO: 898211 - DNA, 33 bp, Homo sapien
tttcccagatcctcgacgtgcaaagtgtggtcc

SEQ ID NO: 898212 - DNA, 33 bp, Homo sapien
tttcccagatcctcgatgtgcaaagtgtggtcc

SEQ ID NO: 898213 - DNA, 33 bp, Homo sapien
gagtttatggtagacaatggcttttaaatgtgc

SEQ ID NO: 898214 - DNA, 33 bp, Homo sapien
gagtttatggtagacagtggcttttaaatgtgc

SEQ ID NO: 898215 - DNA, 33 bp, Homo sapien
agatgtgagtgaggaacgatgccatatcctaga

SEQ ID NO: 898216 - DNA, 33 bp, Homo sapien
agatgtgagtgaggaatgatgccatatcctaga

SEQ ID NO: 898217 - DNA, 33 bp, Homo sapien
attgctcctagtattggacctcattttaagtga

SEQ ID NO: 898218 - DNA, 33 bp, Homo sapien
attgctcctagtattgtacctcattttaagtga

SEQ ID NO: 898219 - DNA, 33 bp, Homo sapien
aacagtgtcactctaacagtaatgaaatggctt

SEQ ID NO: 898220 - DNA, 33 bp, Homo sapien
aacagtgtcactctaatagtaatgaaatggctt

SEQ ID NO: 898221 - DNA, 33 bp, Homo sapien
gtacagatttgccgaccaaacaatataatatta

SEQ ID NO: 898222 - DNA, 33 bp, Homo sapien
gtacagatttgccgactaaacaatataatatta

SEQ ID NO: 898223 - DNA, 33 bp, Homo sapien
gccttctttctggagccatctatttagggtagt

SEQ ID NO: 898224 - DNA, 33 bp, Homo sapien
gccttctttctggagctatctatttagggtagt

SEQ ID NO: 898225 - DNA, 33 bp, Homo sapien
ctgtaaaagcagtaccaatggctgtgcagacat

SEQ ID NO: 898226 - DNA, 33 bp, Homo sapien
ctgtaaaagcagtaccgatggctgtgcagacat

SEQ ID NO: 898227 - DNA, 33 bp, Homo sapien
atgccaaatgcttgaacaaatgtatgcaggaag

SEQ ID NO: 898228 - DNA, 33 bp, Homo sapien
atgccaaatgcttgaataaatgtatgcaggaag

SEQ ID NO: 898229 - DNA, 33 bp, Homo sapien
aggatgactcgactcacagaaaaacacaggtag

SEQ ID NO: 898230 - DNA, 33 bp, Homo sapien
aggatgactcgactcatagaaaaacacaggtag

SEQ ID NO: 898231 - DNA, 33 bp, Homo sapien
atgtgctccacttggcaaagtgacaactgaaga

SEQ ID NO: 898232 - DNA, 33 bp, Homo sapien
atgtgctccacttggctaagtgacaactgaaga

SEQ ID NO: 898233 - DNA, 33 bp, Homo sapien
cctaatttatcttacgcccacccttcagtagga

SEQ ID NO: 898234 - DNA, 33 bp, Homo sapien
cctaatttatcttacgtccacccttcagtagga

SEQ ID NO: 898235 - DNA, 33 bp, Homo sapien
gtgcttttaggtttacacttacacacagcagag

SEQ ID NO: 898236 - DNA, 33 bp, Homo sapien
gtgcttttaggtttactcttacacacagcagag

SEQ ID NO: 898237 - DNA, 33 bp, Homo sapien
aaacactggcccctaaattaacactcctttagg

SEQ ID NO: 898238 - DNA, 33 bp, Homo sapien
aaacactggcccctaagttaacactcctttagg

SEQ ID NO: 898239 - DNA, 33 bp, Homo sapien
tgatttgtgtcacctaagggatgaaattaattg

SEQ ID NO: 898240 - DNA, 33 bp, Homo sapien
tgatttgtgtcacctatgggatgaaattaattg

SEQ ID NO: 898241 - DNA, 33 bp, Homo sapien
ttgtggactcagcaccactttcttcagctcatg

SEQ ID NO: 898242 - DNA, 33 bp, Homo sapien
ttgtggactcagcaccgctttcttcagctcatg

SEQ ID NO: 898243 - DNA, 33 bp, Homo sapien
aaagattagtcagagacgattaacagagccccc

SEQ ID NO: 898244 - DNA, 33 bp, Homo sapien
aaagattagtcagagaggattaacagagccccc

SEQ ID NO: 898245 - DNA, 33 bp, Homo sapien
ataaagccccaaactgaaaggcagagagtcaga

SEQ ID NO: 898246 - DNA, 33 bp, Homo sapien
ataaagccccaaactgtaaggcagagagtcaga

SEQ ID NO: 898247 - DNA, 33 bp, Homo sapien
gttatggccaaaaaaaagtcaatgaaaacaagg

SEQ ID NO: 898248 - DNA, 33 bp, Homo sapien
gttatggccaaaaaaacgtcaatgaaaacaagg

SEQ ID NO: 898249 - DNA, 33 bp, Homo sapien
gaaacccaaagcagatcaagaaattgtgagctc

SEQ ID NO: 898250 - DNA, 33 bp, Homo sapien
gaaacccaaagcagattaagaaattgtgagctc

SEQ ID NO: 898251 - DNA, 33 bp, Homo sapien
gaattacttctgcagcaatgtcccaaatatgtg

SEQ ID NO: 898252 - DNA, 33 bp, Homo sapien
gaattacttctgcagcgatgtcccaaatatgtg

SEQ ID NO: 898253 - DNA, 33 bp, Homo sapien
tctgccacgaaacctaacgtgaaatggagattc

SEQ ID NO: 898254 - DNA, 33 bp, Homo sapien
tctgccacgaaacctagcgtgaaatggagattc

SEQ ID NO: 898255 - DNA, 33 bp, Homo sapien
agtaaggttggtgttacaaaagccagtacctcc

SEQ ID NO: 898256 - DNA, 33 bp, Homo sapien
agtaaggttggtgttagaaaagccagtacctcc

SEQ ID NO: 898257 - DNA, 33 bp, Homo sapien
aagagtgctacatctgaagttaactctgaagtc

SEQ ID NO: 898258 - DNA, 33 bp, Homo sapien
aagagtgctacatctgcagttaactctgaagtc

SEQ ID NO: 898259 - DNA, 33 bp, Homo sapien
taaatgaaactgttaaaagttgattcacatgca

SEQ ID NO: 898260 - DNA, 33 bp, Homo sapien
taaatgaaactgttaagagttgattcacatgca

SEQ ID NO: 898261 - DNA, 33 bp, Homo sapien
tgagtgtgatgagtaccaatcagtctacccagg

SEQ ID NO: 898262 - DNA, 33 bp, Homo sapien
tgagtgtgatgagtactaatcagtctacccagg

SEQ ID NO: 898263 - DNA, 33 bp, Homo sapien
gtgtaggaaaagattacgggctttggagtcaat

SEQ ID NO: 898264 - DNA, 33 bp, Homo sapien
gtgtaggaaaagattatgggctttggagtcaat

SEQ ID NO: 898265 - DNA, 33 bp, Homo sapien
gttttatattgtgaaaagattgctattagattg

SEQ ID NO: 898266 - DNA, 33 bp, Homo sapien
gttttatattgtgaaacgattgctattagattg

SEQ ID NO: 898267 - DNA, 33 bp, Homo sapien
aaacagcaagagtctacattccattactttaca

SEQ ID NO: 898268 - DNA, 33 bp, Homo sapien
aaacagcaagagtctatattccattactttaca

SEQ ID NO: 898269 - DNA, 33 bp, Homo sapien
ttcagagcaagtcacaatgaaaatcttattctc

SEQ ID NO: 898270 - DNA, 33 bp, Homo sapien
ttcagagcaagtcacagtgaaaatcttattctc

SEQ ID NO: 898271 - DNA, 33 bp, Homo sapien
ctggtcttggctccaaataacttatgccggttt

SEQ ID NO: 898272 - DNA, 33 bp, Homo sapien
ctggtcttggctccaagtaacttatgccggttt

SEQ ID NO: 898273 - DNA, 33 bp, Homo sapien
taaggtagttccaaaacagaaattccaaaaatg

SEQ ID NO: 898274 - DNA, 33 bp, Homo sapien
taaggtagttccaaaagagaaattccaaaaatg

SEQ ID NO: 898275 - DNA, 33 bp, Homo sapien
cagttcatcaaccaatcataaaaatacacagca

SEQ ID NO: 898276 - DNA, 33 bp, Homo sapien
cagttcatcaaccaatgataaaaatacacagca

SEQ ID NO: 898277 - DNA, 33 bp, Homo sapien
agccacatggtaataccactaactcttggcatg

SEQ ID NO: 898278 - DNA, 33 bp, Homo sapien
agccacatggtaatactactaactcttggcatg

SEQ ID NO: 898279 - DNA, 33 bp, Homo sapien
cttgctgtcatacatagaaccattcataaaaac

SEQ ID NO: 898280 - DNA, 33 bp, Homo sapien
cttgctgtcatacatataaccattcataaaaac

SEQ ID NO: 898281 - DNA, 33 bp, Homo sapien
gcattgccaatattccaacacataagtagaaaa

SEQ ID NO: 898282 - DNA, 33 bp, Homo sapien
gcattgccaatattcccacacataagtagaaaa

SEQ ID NO: 898283 - DNA, 33 bp, Homo sapien
ttgaatctactgtcctgaatgaagtcaccaagc

SEQ ID NO: 898284 - DNA, 33 bp, Homo sapien
ttgaatctactgtccttaatgaagtcaccaagc

SEQ ID NO: 898285 - DNA, 33 bp, Homo sapien
tggcaaatgaatgcacacctctgcttggtgaag

SEQ ID NO: 898286 - DNA, 33 bp, Homo sapien
tggcaaatgaatgcacgcctctgcttggtgaag

SEQ ID NO: 898287 - DNA, 33 bp, Homo sapien
acaggtaccctgatgacgctgaccagccgactt

SEQ ID NO: 898288 - DNA, 33 bp, Homo sapien
acaggtaccctgatgatgctgaccagccgactt

SEQ ID NO: 898289 - DNA, 33 bp, Homo sapien
tttaacttagattacacccgctcatgagactgg

SEQ ID NO: 898290 - DNA, 33 bp, Homo sapien
tttaacttagattacatccgctcatgagactgg

SEQ ID NO: 898291 - DNA, 33 bp, Homo sapien
aagaggaacggaagagaaaagtcatcctaatac

SEQ ID NO: 898292 - DNA, 33 bp, Homo sapien
aagaggaacggaagaggaaagtcatcctaatac

SEQ ID NO: 898293 - DNA, 33 bp, Homo sapien
caagtcacaagttctacgaccctgggcaaatcg

SEQ ID NO: 898294 - DNA, 33 bp, Homo sapien
caagtcacaagttctatgaccctgggcaaatcg

SEQ ID NO: 898295 - DNA, 33 bp, Homo sapien
tttcagtttcctctcacctgaactgactccatc

SEQ ID NO: 898296 - DNA, 33 bp, Homo sapien
tttcagtttcctctcatctgaactgactccatc

SEQ ID NO: 898297 - DNA, 33 bp, Homo sapien
ggccaggttttctgggaagcagattccaaggcc

SEQ ID NO: 898298 - DNA, 33 bp, Homo sapien
ggccaggttttctgggtagcagattccaaggcc

SEQ ID NO: 898299 - DNA, 33 bp, Homo sapien
aaaacctggccagcaacggttctccaggaagga

SEQ ID NO: 898300 - DNA, 33 bp, Homo sapien
aaaacctggccagcaatggttctccaggaagga

SEQ ID NO: 898301 - DNA, 33 bp, Homo sapien
ttatctcctagaatccaactttcaccccttctc

SEQ ID NO: 898302 - DNA, 33 bp, Homo sapien
ttatctcctagaatccgactttcaccccttctc

SEQ ID NO: 898303 - DNA, 33 bp, Homo sapien
gttacagtggcctaaaagctatagtggtgtatg

SEQ ID NO: 898304 - DNA, 33 bp, Homo sapien
gttacagtggcctaaaggctatagtggtgtatg

SEQ ID NO: 898305 - DNA, 33 bp, Homo sapien
aactgcatccaaaagcaaagttgaagaacattt

SEQ ID NO: 898306 - DNA, 33 bp, Homo sapien
aactgcatccaaaagcgaagttgaagaacattt

SEQ ID NO: 898307 - DNA, 33 bp, Homo sapien
acgcccatttaagcacccttgtctgctcattgt

SEQ ID NO: 898308 - DNA, 33 bp, Homo sapien
acgcccatttaagcactcttgtctgctcattgt

SEQ ID NO: 898309 - DNA, 33 bp, Homo sapien
ttcacatcaattgaagaatctcttgaaggcaaa

SEQ ID NO: 898310 - DNA, 33 bp, Homo sapien
ttcacatcaattgaagtatctcttgaaggcaaa

SEQ ID NO: 898311 - DNA, 33 bp, Homo sapien
gacttgggtgaggaaaatgagctgcaattttta

SEQ ID NO: 898312 - DNA, 33 bp, Homo sapien
gacttgggtgaggaaagtgagctgcaattttta

SEQ ID NO: 898313 - DNA, 33 bp, Homo sapien
acacactgctctaaacacttcacacatattatc

SEQ ID NO: 898314 - DNA, 33 bp, Homo sapien
acacactgctctaaacgcttcacacatattatc

SEQ ID NO: 898315 - DNA, 33 bp, Homo sapien
atgggtaagcatggcagtaaaatcactccagca

SEQ ID NO: 898316 - DNA, 33 bp, Homo sapien
atgggtaagcatggcattaaaatcactccagca

SEQ ID NO: 898317 - DNA, 33 bp, Homo sapien
gtaatactacagtttcaattccccactcttttt

SEQ ID NO: 898318 - DNA, 33 bp, Homo sapien
gtaatactacagtttccattccccactcttttt

SEQ ID NO: 898319 - DNA, 33 bp, Homo sapien
aactaaagtattatccaaacgtcctctatcaag

SEQ ID NO: 898320 - DNA, 33 bp, Homo sapien
aactaaagtattatccgaacgtcctctatcaag

SEQ ID NO: 898321 - DNA, 33 bp, Homo sapien
ctggtttgttggttaactggttggttcattgga

SEQ ID NO: 898322 - DNA, 33 bp, Homo sapien
ctggtttgttggttaattggttggttcattgga

SEQ ID NO: 898323 - DNA, 33 bp, Homo sapien
catctttgcattggagccatgagctgttatgca

SEQ ID NO: 898324 - DNA, 33 bp, Homo sapien
catctttgcattggaggcatgagctgttatgca

SEQ ID NO: 898325 - DNA, 33 bp, Homo sapien
ttgtttttataaattcacatcctaaaacacatc

SEQ ID NO: 898326 - DNA, 33 bp, Homo sapien
ttgtttttataaattcgcatcctaaaacacatc

SEQ ID NO: 898327 - DNA, 33 bp, Homo sapien
tcctgcccagatccagaaacacgcagcaaaatg

SEQ ID NO: 898328 - DNA, 33 bp, Homo sapien
tcctgcccagatccaggaacacgcagcaaaatg

SEQ ID NO: 898329 - DNA, 33 bp, Homo sapien
catttcatcctctcatgaccttcaataataaca

SEQ ID NO: 898330 - DNA, 33 bp, Homo sapien
catttcatcctctcattaccttcaataataaca

SEQ ID NO: 898331 - DNA, 33 bp, Homo sapien
tgctattgttccaggcacacgtcggccttaaga

SEQ ID NO: 898332 - DNA, 33 bp, Homo sapien
tgctattgttccaggcgcacgtcggccttaaga

SEQ ID NO: 898333 - DNA, 33 bp, Homo sapien
acagtcagaaaccagacggaaactatacactgt

SEQ ID NO: 898334 - DNA, 33 bp, Homo sapien
acagtcagaaaccagatggaaactatacactgt

SEQ ID NO: 898335 - DNA, 33 bp, Homo sapien
accagtctgaaacgaacatagcggtctttccag

SEQ ID NO: 898336 - DNA, 33 bp, Homo sapien
accagtctgaaacgaagatagcggtctttccag

SEQ ID NO: 898337 - DNA, 33 bp, Homo sapien
tttaaagaatacatgcaagtcacttatcgtggt

SEQ ID NO: 898338 - DNA, 33 bp, Homo sapien
tttaaagaatacatgcgagtcacttatcgtggt

SEQ ID NO: 898339 - DNA, 33 bp, Homo sapien
ctttcgggggatatacaatgcaacccgttatag

SEQ ID NO: 898340 - DNA, 33 bp, Homo sapien
ctttcgggggatatacgatgcaacccgttatag

SEQ ID NO: 898341 - DNA, 33 bp, Homo sapien
gtctactctttcattgaaatataccgtatctta

SEQ ID NO: 898342 - DNA, 33 bp, Homo sapien
gtctactctttcattgcaatataccgtatctta

SEQ ID NO: 898343 - DNA, 33 bp, Homo sapien
gttgatctatgaatacaaaagggatctcatatc

SEQ ID NO: 898344 - DNA, 33 bp, Homo sapien
gttgatctatgaatacgaaagggatctcatatc

SEQ ID NO: 898345 - DNA, 33 bp, Homo sapien
ttgctaaggttgctaacgacttccatgtatctg

SEQ ID NO: 898346 - DNA, 33 bp, Homo sapien
ttgctaaggttgctaatgacttccatgtatctg

SEQ ID NO: 898347 - DNA, 33 bp, Homo sapien
acaatatttaggtcaacaatgaaccacatatat

SEQ ID NO: 898348 - DNA, 33 bp, Homo sapien
acaatatttaggtcaagaatgaaccacatatat

SEQ ID NO: 898349 - DNA, 33 bp, Homo sapien
actccttagctgatggcatggcctataatctgt

SEQ ID NO: 898350 - DNA, 33 bp, Homo sapien
actccttagctgatggtatggcctataatctgt

SEQ ID NO: 898351 - DNA, 33 bp, Homo sapien
tcaaactactttgaaaatatgtgatatcaaatc

SEQ ID NO: 898352 - DNA, 33 bp, Homo sapien
tcaaactactttgaaattatgtgatatcaaatc

SEQ ID NO: 898353 - DNA, 33 bp, Homo sapien
ttgggcagtttgggtaagccgctttcctttcta

SEQ ID NO: 898354 - DNA, 33 bp, Homo sapien
ttgggcagtttgggtaggccgctttcctttcta

SEQ ID NO: 898355 - DNA, 33 bp, Homo sapien
gacagagaaggcttaacgagaaaaatggaatca

SEQ ID NO: 898356 - DNA, 33 bp, Homo sapien
gacagagaaggcttaatgagaaaaatggaatca

SEQ ID NO: 898357 - DNA, 33 bp, Homo sapien
ctctacaggataaatacaagtatcatctctaat

SEQ ID NO: 898358 - DNA, 33 bp, Homo sapien
ctctacaggataaatataagtatcatctctaat

SEQ ID NO: 898359 - DNA, 33 bp, Homo sapien
gatatgtcctaaaaacaagtcagttcccaaaag

SEQ ID NO: 898360 - DNA, 33 bp, Homo sapien
gatatgtcctaaaaacgagtcagttcccaaaag

SEQ ID NO: 898361 - DNA, 33 bp, Homo sapien
ttatacttttagacaaatgattatacaaacaga

SEQ ID NO: 898362 - DNA, 33 bp, Homo sapien
ttatacttttagacaactgattatacaaacaga

SEQ ID NO: 898363 - DNA, 33 bp, Homo sapien
ggcacatgacagattcccaataactgtttgcta

SEQ ID NO: 898364 - DNA, 33 bp, Homo sapien
ggcacatgacagattctcaataactgtttgcta

SEQ ID NO: 898365 - DNA, 33 bp, Homo sapien
atacattttacaaggcaaggacattggcaatga

SEQ ID NO: 898366 - DNA, 33 bp, Homo sapien
atacattttacaaggcgaggacattggcaatga

SEQ ID NO: 898367 - DNA, 33 bp, Homo sapien
aaaaataaaatgaaccaaaaattgtctacattg

SEQ ID NO: 898368 - DNA, 33 bp, Homo sapien
aaaaataaaatgaaccgaaaattgtctacattg

SEQ ID NO: 898369 - DNA, 33 bp, Homo sapien
aagacaatttcatgaacgcagaaaatctgggga

SEQ ID NO: 898370 - DNA, 33 bp, Homo sapien
aagacaatttcatgaatgcagaaaatctgggga

SEQ ID NO: 898371 - DNA, 33 bp, Homo sapien
atcctctgcagtccagcaaattctagcacttgc

SEQ ID NO: 898372 - DNA, 33 bp, Homo sapien
atcctctgcagtccaggaaattctagcacttgc

SEQ ID NO: 898373 - DNA, 33 bp, Homo sapien
acaaatccttttcttacgcttcttccatccctg

SEQ ID NO: 898374 - DNA, 33 bp, Homo sapien
acaaatccttttcttatgcttcttccatccctg

SEQ ID NO: 898375 - DNA, 33 bp, Homo sapien
cactattagaaagagacggagctatgatttaac

SEQ ID NO: 898376 - DNA, 33 bp, Homo sapien
cactattagaaagagatggagctatgatttaac

SEQ ID NO: 898377 - DNA, 33 bp, Homo sapien
ggctgacctttggcgacgccatgcttcttggat

SEQ ID NO: 898378 - DNA, 33 bp, Homo sapien
ggctgacctttggcgatgccatgcttcttggat

SEQ ID NO: 898379 - DNA, 33 bp, Homo sapien
taattgtggatccacacgattgttgctagtata

SEQ ID NO: 898380 - DNA, 33 bp, Homo sapien
taattgtggatccacatgattgttgctagtata

SEQ ID NO: 898381 - DNA, 33 bp, Homo sapien
taagataaatacattcaaaatggttaaagagac

SEQ ID NO: 898382 - DNA, 33 bp, Homo sapien
taagataaatacattcgaaatggttaaagagac

SEQ ID NO: 898383 - DNA, 33 bp, Homo sapien
cacatatatcttcccaagttttatacgactttt

SEQ ID NO: 898384 - DNA, 33 bp, Homo sapien
cacatatatcttcccaggttttatacgactttt

SEQ ID NO: 898385 - DNA, 33 bp, Homo sapien
ttaaggaaactttctgaaagcatcactcaacac

SEQ ID NO: 898386 - DNA, 33 bp, Homo sapien
ttaaggaaactttctggaagcatcactcaacac

SEQ ID NO: 898387 - DNA, 33 bp, Homo sapien
gcaactcgttgtgaaaataaactcataaaatat

SEQ ID NO: 898388 - DNA, 33 bp, Homo sapien
gcaactcgttgtgaaagtaaactcataaaatat

SEQ ID NO: 898389 - DNA, 33 bp, Homo sapien
atataatcagaaaaggcaagctgtggccactgc

SEQ ID NO: 898390 - DNA, 33 bp, Homo sapien
atataatcagaaaagggaagctgtggccactgc

SEQ ID NO: 898391 - DNA, 33 bp, Homo sapien
ccttctttaattgtggaaacacttcatttttgt

SEQ ID NO: 898392 - DNA, 33 bp, Homo sapien
ccttctttaattgtgggaacacttcatttttgt

SEQ ID NO: 898393 - DNA, 33 bp, Homo sapien
gttctcaaggcatacaaattcacttcctgggga

SEQ ID NO: 898394 - DNA, 33 bp, Homo sapien
gttctcaaggcatacagattcacttcctgggga

SEQ ID NO: 898395 - DNA, 33 bp, Homo sapien
tttttgtatgctttcaaaagtaatcatgctcac

SEQ ID NO: 898396 - DNA, 33 bp, Homo sapien
tttttgtatgctttcagaagtaatcatgctcac

SEQ ID NO: 898397 - DNA, 33 bp, Homo sapien
gatacccttgcaaccacctaactaaatatctgc

SEQ ID NO: 898398 - DNA, 33 bp, Homo sapien
gatacccttgcaaccagctaactaaatatctgc

SEQ ID NO: 898399 - DNA, 33 bp, Homo sapien
taaatataaaaaacagacccagctgtgacaagc

SEQ ID NO: 898400 - DNA, 33 bp, Homo sapien
taaatataaaaaacaggcccagctgtgacaagc

SEQ ID NO: 898401 - DNA, 33 bp, Homo sapien
aagcgttgaggagacgaaatggtggtaaattcc

SEQ ID NO: 898402 - DNA, 33 bp, Homo sapien
aagcgttgaggagacggaatggtggtaaattcc

SEQ ID NO: 898403 - DNA, 33 bp, Homo sapien
gtctcctgaccctttaaaaaaatctctctctct

SEQ ID NO: 898404 - DNA, 33 bp, Homo sapien
gtctcctgaccctttacaaaaatctctctctct

SEQ ID NO: 898405 - DNA, 33 bp, Homo sapien
agaaggatgcaggtgacgaaaccagagaggaag

SEQ ID NO: 898406 - DNA, 33 bp, Homo sapien
agaaggatgcaggtgatgaaaccagagaggaag

SEQ ID NO: 898407 - DNA, 33 bp, Homo sapien
cattctacaaaataccggaataatgctctttca

SEQ ID NO: 898408 - DNA, 33 bp, Homo sapien
cattctacaaaatacctgaataatgctctttca

SEQ ID NO: 898409 - DNA, 33 bp, Homo sapien
agctccccttgactaactccctgccctacaaga

SEQ ID NO: 898410 - DNA, 33 bp, Homo sapien
agctccccttgactaattccctgccctacaaga

SEQ ID NO: 898411 - DNA, 33 bp, Homo sapien
cattaggatagtagaaatgctgttgagttaaaa

SEQ ID NO: 898412 - DNA, 33 bp, Homo sapien
cattaggatagtagaagtgctgttgagttaaaa

SEQ ID NO: 898413 - DNA, 33 bp, Homo sapien
ttgcctggaatacacaatcgtttatgctagtga

SEQ ID NO: 898414 - DNA, 33 bp, Homo sapien
ttgcctggaatacacagtcgtttatgctagtga

SEQ ID NO: 898415 - DNA, 33 bp, Homo sapien
aaaattagaactggctcacctcaatgagtattt

SEQ ID NO: 898416 - DNA, 33 bp, Homo sapien
aaaattagaactggcttacctcaatgagtattt

SEQ ID NO: 898417 - DNA, 33 bp, Homo sapien
gcagggctggactatggatctagttggtcagtc

SEQ ID NO: 898418 - DNA, 33 bp, Homo sapien
gcagggctggactatgtatctagttggtcagtc

SEQ ID NO: 898419 - DNA, 33 bp, Homo sapien
gtttccaaagcaactacgtaactagtaccaaga

SEQ ID NO: 898420 - DNA, 33 bp, Homo sapien
gtttccaaagcaactatgtaactagtaccaaga

SEQ ID NO: 898421 - DNA, 33 bp, Homo sapien; identical to SEQ ID NO: 898419

SEQ ID NO: 898422 - DNA, 33 bp, Homo sapien; identical to SEQ ID NO: 898420

SEQ ID NO: 898423 - DNA, 33 bp, Homo sapien
tgaggaaaatctctacaaactgatatccagaat

SEQ ID NO: 898424 - DNA, 33 bp, Homo sapien
tgaggaaaatctctacgaactgatatccagaat

SEQ ID NO: 898425 - DNA, 33 bp, Homo sapien
ctttgtaaatttcatacgcgctcaattcgataa

SEQ ID NO: 898426 - DNA, 33 bp, Homo sapien
ctttgtaaatttcatatgcgctcaattcgataa

SEQ ID NO: 898427 - DNA, 33 bp, Homo sapien
ccattagatgcagaaaataaaattgataaaatt

SEQ ID NO: 898428 - DNA, 33 bp, Homo sapien
ccattagatgcagaaagtaaaattgataaaatt

SEQ ID NO: 898429 - DNA, 33 bp, Homo sapien
tgcgttctctatatacaatgaaatattatttag

SEQ ID NO: 898430 - DNA, 33 bp, Homo sapien
tgcgttctctatatacgatgaaatattatttag

SEQ ID NO: 898431 - DNA, 33 bp, Homo sapien
aaaagaaaactatagcacagaaaacacagtagt

SEQ ID NO: 898432 - DNA, 33 bp, Homo sapien
aaaagaaaactatagcgcagaaaacacagtagt

SEQ ID NO: 898433 - DNA, 33 bp, Homo sapien
acgaatacactcgatccagaccttcccagctct

SEQ ID NO: 898434 - DNA, 33 bp, Homo sapien
acgaatacactcgatctagaccttcccagctct

SEQ ID NO: 898435 - DNA, 33 bp, Homo sapien
gggatttacatgaaaaaaagcctatgagaggga

SEQ ID NO: 898436 - DNA, 33 bp, Homo sapien
gggatttacatgaaaagaagcctatgagaggga

SEQ ID NO: 898437 - DNA, 33 bp, Homo sapien
cacagacaggagtgacaccgctaccccaggtgt

SEQ ID NO: 898438 - DNA, 33 bp, Homo sapien
cacagacaggagtgacgccgctaccccaggtgt

SEQ ID NO: 898439 - DNA, 33 bp, Homo sapien
tttactctagaactcacagtattaaccacagtg

SEQ ID NO: 898440 - DNA, 33 bp, Homo sapien
tttactctagaactcatagtattaaccacagtg

SEQ ID NO: 898441 - DNA, 33 bp, Homo sapien
gtagagttgagaaagcaagggccagtggggcta

SEQ ID NO: 898442 - DNA, 33 bp, Homo sapien
gtagagttgagaaagcgagggccagtggggcta

SEQ ID NO: 898443 - DNA, 33 bp, Homo sapien
tctgtcactcaggctaaaatggagtagctcact

SEQ ID NO: 898444 - DNA, 33 bp, Homo sapien
tctgtcactcaggctagaatggagtagctcact

SEQ ID NO: 898445 - DNA, 33 bp, Homo sapien
gacactgggtttggaaagtctcagcaaccagaa

SEQ ID NO: 898446 - DNA, 33 bp, Homo sapien
gacactgggtttggaaggtctcagcaaccagaa

SEQ ID NO: 898447 - DNA, 33 bp, Homo sapien
taaaaatttatctgaagactgaagggtgaactg

SEQ ID NO: 898448 - DNA, 33 bp, Homo sapien
taaaaatttatctgaatactgaagggtgaactg

SEQ ID NO: 898449 - DNA, 33 bp, Homo sapien
agcataaaacagcaaaaccagtccacctgaaag

SEQ ID NO: 898450 - DNA, 33 bp, Homo sapien
agcataaaacagcaaagccagtccacctgaaag

SEQ ID NO: 898451 - DNA, 33 bp, Homo sapien
tacacacactggctaaccagcaaataattcaga

SEQ ID NO: 898452 - DNA, 33 bp, Homo sapien
tacacacactggctaagcagcaaataattcaga

SEQ ID NO: 898453 - DNA, 33 bp, Homo sapien
agctatagagacacaaaggccctaacacactca

SEQ ID NO: 898454 - DNA, 33 bp, Homo sapien
agctatagagacacaagggccctaacacactca

SEQ ID NO: 898455 - DNA, 33 bp, Homo sapien
agagaagagaactgaactctttcttttgtaaca

SEQ ID NO: 898456 - DNA, 33 bp, Homo sapien
agagaagagaactgaattctttcttttgtaaca

SEQ ID NO: 898457 - DNA, 33 bp, Homo sapien
taaaagtatccacacaatagaagcataaaagag

SEQ ID NO: 898458 - DNA, 33 bp, Homo sapien
taaaagtatccacacagtagaagcataaaagag

SEQ ID NO: 898459 - DNA, 33 bp, Homo sapien
cagacctaactttacaccaaatgtcctctgcac

SEQ ID NO: 898460 - DNA, 33 bp, Homo sapien
cagacctaactttacatcaaatgtcctctgcac

SEQ ID NO: 898461 - DNA, 33 bp, Homo sapien
ctcgcaccaaggattaaatgcagtaaagtacat

SEQ ID NO: 898462 - DNA, 33 bp, Homo sapien
ctcgcaccaaggattatatgcagtaaagtacat

SEQ ID NO: 898463 - DNA, 33 bp, Homo sapien
tggggggataaacaaagaaatggacaagcaggt

SEQ ID NO: 898464 - DNA, 33 bp, Homo sapien
tggggggataaacaaataaatggacaagcaggt

SEQ ID NO: 898465 - DNA, 33 bp, Homo sapien
ggaagttagtgaacaacgatttaacatgaaatt

SEQ ID NO: 898466 - DNA, 33 bp, Homo sapien
ggaagttagtgaacaatgatttaacatgaaatt

SEQ ID NO: 898467 - DNA, 33 bp, Homo sapien
cttctctttgtgtccaataatctgaaatcttat

SEQ ID NO: 898468 - DNA, 33 bp, Homo sapien
cttctctttgtgtccagtaatctgaaatcttat

SEQ ID NO: 898469 - DNA, 33 bp, Homo sapien
gaatgaaacaccagccagattattttaccaaag

SEQ ID NO: 898470 - DNA, 33 bp, Homo sapien
gaatgaaacaccagccggattattttaccaaag

SEQ ID NO: 898471 - DNA, 33 bp, Homo sapien
gtcttcccaattatcaatctattctccacttct

SEQ ID NO: 898472 - DNA, 33 bp, Homo sapien
gtcttcccaattatcagtctattctccacttct

SEQ ID NO: 898473 - DNA, 33 bp, Homo sapien
tggaaatgaatccctccctaatgtccgtaggaa

SEQ ID NO: 898474 - DNA, 33 bp, Homo sapien
tggaaatgaatccctctctaatgtccgtaggaa

SEQ ID NO: 898475 - DNA, 33 bp, Homo sapien
agagtgccaggcctgcacatggactgtgagagt

SEQ ID NO: 898476 - DNA, 33 bp, Homo sapien
agagtgccaggcctgcgcatggactgtgagagt

SEQ ID NO: 898477 - DNA, 33 bp, Homo sapien
ggtcttttatcaacccactcataaccccaaggt

SEQ ID NO: 898478 - DNA, 33 bp, Homo sapien
ggtcttttatcaacccgctcataaccccaaggt

SEQ ID NO: 898479 - DNA, 33 bp, Homo sapien
aagtgcctggcacataataaccttcagtaagtg

SEQ ID NO: 898480 - DNA, 33 bp, Homo sapien
aagtgcctggcacatagtaaccttcagtaagtg

SEQ ID NO: 898481 - DNA, 33 bp, Homo sapien
gagttgttttgggggacgagagatagttatgta

SEQ ID NO: 898482 - DNA, 33 bp, Homo sapien
gagttgttttgggggatgagagatagttatgta

SEQ ID NO: 898483 - DNA, 33 bp, Homo sapien
aataaagggttctcaacgtaaatgtagtaaagt

SEQ ID NO: 898484 - DNA, 33 bp, Homo sapien
aataaagggttctcaatgtaaatgtagtaaagt

SEQ ID NO: 898485 - DNA, 33 bp, Homo sapien
ataagccagactcaaacggacaaatgttgtatg

SEQ ID NO: 898486 - DNA, 33 bp, Homo sapien
ataagccagactcaaatggacaaatgttgtatg

SEQ ID NO: 898487 - DNA, 33 bp, Homo sapien
ctggctgcttttgtcaatctccagcacttagca

SEQ ID NO: 898488 - DNA, 33 bp, Homo sapien
ctggctgcttttgtcactctccagcacttagca

SEQ ID NO: 898489 - DNA, 33 bp, Homo sapien
tttaaatacaaaggggaaactggcttgataatc

SEQ ID NO: 898490 - DNA, 33 bp, Homo sapien
tttaaatacaaaggggcaactggcttgataatc

SEQ ID NO: 898491 - DNA, 33 bp, Homo sapien
tgagctaaccaaccacaattttccatttgccgt

SEQ ID NO: 898492 - DNA, 33 bp, Homo sapien
tgagctaaccaaccacgattttccatttgccgt

SEQ ID NO: 898493 - DNA, 33 bp, Homo sapien
cctctattgtgaacagaccttattaaaatggaa

SEQ ID NO: 898494 - DNA, 33 bp, Homo sapien
cctctattgtgaacaggccttattaaaatggaa

SEQ ID NO: 898495 - DNA, 33 bp, Homo sapien
acatgttcaggtcaaaagtccttgtggtcaata

SEQ ID NO: 898496 - DNA, 33 bp, Homo sapien
acatgttcaggtcaaaggtccttgtggtcaata

SEQ ID NO: 898497 - DNA, 33 bp, Homo sapien
agtgggaagtcaggccagcagtctgaaaatagc

SEQ ID NO: 898498 - DNA, 33 bp, Homo sapien
agtgggaagtcaggccggcagtctgaaaatagc

SEQ ID NO: 898499 - DNA, 33 bp, Homo sapien
aagcagatgacttatgaacttttattttttaaa

SEQ ID NO: 898500 - DNA, 33 bp, Homo sapien
aagcagatgacttatgcacttttattttttaaa

SEQ ID NO: 898501 - DNA, 33 bp, Homo sapien
cttccattctccttcacattcctaattcaaggc

SEQ ID NO: 898502 - DNA, 33 bp, Homo sapien
cttccattctccttcatattcctaattcaaggc

SEQ ID NO: 898503 - DNA, 33 bp, Homo sapien
atggagactcaccaataaacatgattccagggg

SEQ ID NO: 898504 - DNA, 33 bp, Homo sapien
atggagactcaccaattaacatgattccagggg

SEQ ID NO: 898505 - DNA, 33 bp, Homo sapien
catatgtcttacctgacggcagagacaaataag

SEQ ID NO: 898506 - DNA, 33 bp, Homo sapien
catatgtcttacctgatggcagagacaaataag

SEQ ID NO: 898507 - DNA, 33 bp, Homo sapien
ggttatgatagagaaacagagatttatgttcat

SEQ ID NO: 898508 - DNA, 33 bp, Homo sapien
ggttatgatagagaaatagagatttatgttcat

SEQ ID NO: 898509 - DNA, 33 bp, Homo sapien
catgttactgtactcaatgaatcctgtaggcaa

SEQ ID NO: 898510 - DNA, 33 bp, Homo sapien
catgttactgtactcagtgaatcctgtaggcaa

SEQ ID NO: 898511 - DNA, 33 bp, Homo sapien
atgaaagtggatgagagaaccttgatgggtatg

SEQ ID NO: 898512 - DNA, 33 bp, Homo sapien
atgaaagtggatgagataaccttgatgggtatg

SEQ ID NO: 898513 - DNA, 33 bp, Homo sapien
ctgcaagatgcttcataaatatatttgcaggaa

SEQ ID NO: 898514 - DNA, 33 bp, Homo sapien
ctgcaagatgcttcattaatatatttgcaggaa

SEQ ID NO: 898515 - DNA, 33 bp, Homo sapien
ataagtgaagacctcacggacactttgatcagc

SEQ ID NO: 898516 - DNA, 33 bp, Homo sapien
ataagtgaagacctcatggacactttgatcagc

SEQ ID NO: 898517 - DNA, 33 bp, Homo sapien
cgagtaatacaagaaaagtaaattgaggaaaag

SEQ ID NO: 898518 - DNA, 33 bp, Homo sapien
cgagtaatacaagaaaggtaaattgaggaaaag

SEQ ID NO: 898519 - DNA, 33 bp, Homo sapien
tccaaggtcttctggaaaacattcagatttgag

SEQ ID NO: 898520 - DNA, 33 bp, Homo sapien
tccaaggtcttctggagaacattcagatttgag

SEQ ID NO: 898521 - DNA, 33 bp, Homo sapien
ttttgctaaacctgcacgttctaaaagctgaat

SEQ ID NO: 898522 - DNA, 33 bp, Homo sapien
ttttgctaaacctgcatgttctaaaagctgaat

SEQ ID NO: 898523 - DNA, 33 bp, Homo sapien
cttcacaatggaaacccgagccctagaaatcca

SEQ ID NO: 898524 - DNA, 33 bp, Homo sapien
cttcacaatggaaaccggagccctagaaatcca

SEQ ID NO: 898525 - DNA, 33 bp, Homo sapien
ttttatcctaacatgcacagcagaagcgagggc

SEQ ID NO: 898526 - DNA, 33 bp, Homo sapien
ttttatcctaacatgcgcagcagaagcgagggc

SEQ ID NO: 898527 - DNA, 33 bp, Homo sapien
aatatctttattctagaacaagtgcactcatta

SEQ ID NO: 898528 - DNA, 33 bp, Homo sapien
aatatctttattctaggacaagtgcactcatta

SEQ ID NO: 898529 - DNA, 33 bp, Homo sapien
gggtatgctttctcctaaacagctttatatttt

SEQ ID NO: 898530 - DNA, 33 bp, Homo sapien
gggtatgctttctccttaacagctttatatttt

SEQ ID NO: 898531 - DNA, 33 bp, Homo sapien
agtaacgattcttagacgatcacaggttcaaaa

SEQ ID NO: 898532 - DNA, 33 bp, Homo sapien
agtaacgattcttagatgatcacaggttcaaaa

SEQ ID NO: 898533 - DNA, 33 bp, Homo sapien
ttgcttcaaatgcaaacggattaaactttccaa

SEQ ID NO: 898534 - DNA, 33 bp, Homo sapien
ttgcttcaaatgcaaatggattaaactttccaa

SEQ ID NO: 898535 - DNA, 33 bp, Homo sapien
gacatatacagtacagcctacccaacaacagca

SEQ ID NO: 898536 - DNA, 33 bp, Homo sapien
gacatatacagtacagtctacccaacaacagca

SEQ ID NO: 898537 - DNA, 33 bp, Homo sapien
ctacaatccactttgactagacttgcaggcgga

SEQ ID NO: 898538 - DNA, 33 bp, Homo sapien
ctacaatccactttgagtagacttgcaggcgga

SEQ ID NO: 898539 - DNA, 33 bp, Homo sapien
tggaaaagcaagaaacagatttaggcattcaga

SEQ ID NO: 898540 - DNA, 33 bp, Homo sapien
tggaaaagcaagaaaccgatttaggcattcaga

SEQ ID NO: 898541 - DNA, 33 bp, Homo sapien
taccatcaactacataccccatttcatctggtt

SEQ ID NO: 898542 - DNA, 33 bp, Homo sapien
taccatcaactacatatcccatttcatctggtt

SEQ ID NO: 898543 - DNA, 33 bp, Homo sapien
tggcccttttggccatcaaagagccaatctgta

SEQ ID NO: 898544 - DNA, 33 bp, Homo sapien
tggcccttttggccatgaaagagccaatctgta

SEQ ID NO: 898545 - DNA, 33 bp, Homo sapien
ttgcgactgaggcccacgtttattcacgagaca

SEQ ID NO: 898546 - DNA, 33 bp, Homo sapien
ttgcgactgaggcccatgtttattcacgagaca

SEQ ID NO: 898547 - DNA, 33 bp, Homo sapien
gagctctcagccttaggaaggaagcacgtggag

SEQ ID NO: 898548 - DNA, 33 bp, Homo sapien
gagctctcagccttagtaaggaagcacgtggag

SEQ ID NO: 898549 - DNA, 33 bp, Homo sapien
gtatatgcctgttagaccttagctgtggggttc

SEQ ID NO: 898550 - DNA, 33 bp, Homo sapien
gtatatgcctgttagatcttagctgtggggttc

SEQ ID NO: 898551 - DNA, 33 bp, Homo sapien
cttataaactaacagaacaggtatatgcctgtt

SEQ ID NO: 898552 - DNA, 33 bp, Homo sapien
cttataaactaacagagcaggtatatgcctgtt

SEQ ID NO: 898553 - DNA, 33 bp, Homo sapien
actcgttctaataacaacaggtcttatattatt

SEQ ID NO: 898554 - DNA, 33 bp, Homo sapien
actcgttctaataacaccaggtcttatattatt

SEQ ID NO: 898555 - DNA, 33 bp, Homo sapien
agacagctctcaattacggttgccttctttaag

SEQ ID NO: 898556 - DNA, 33 bp, Homo sapien
agacagctctcaattagggttgccttctttaag

SEQ ID NO: 898557 - DNA, 33 bp, Homo sapien
tttacaaaactgctgactaaaaagctcatggca

SEQ ID NO: 898558 - DNA, 33 bp, Homo sapien
tttacaaaactgctgagtaaaaagctcatggca

SEQ ID NO: 898559 - DNA, 33 bp, Homo sapien
tctatatccatctatcacctccttgccctctgt

SEQ ID NO: 898560 - DNA, 33 bp, Homo sapien
tctatatccatctatcgcctccttgccctctgt

SEQ ID NO: 898561 - DNA, 33 bp, Homo sapien
atcctttaagtgaacccgacattggaaacaaat

SEQ ID NO: 898562 - DNA, 33 bp, Homo sapien
atcctttaagtgaacctgacattggaaacaaat

SEQ ID NO: 898563 - DNA, 33 bp, Homo sapien
aatgtagtgactgctaagattccagatatttaa

SEQ ID NO: 898564 - DNA, 33 bp, Homo sapien
aatgtagtgactgctaggattccagatatttaa

SEQ ID NO: 898565 - DNA, 33 bp, Homo sapien
ttcccattttccatgcactgtgcttatgtgtgg

SEQ ID NO: 898566 - DNA, 33 bp, Homo sapien
ttcccattttccatgcgctgtgcttatgtgtgg

SEQ ID NO: 898567 - DNA, 33 bp, Homo sapien
ttaacctgaaagaaaccgctactgagggaaaga

SEQ ID NO: 898568 - DNA, 33 bp, Homo sapien
ttaacctgaaagaaactgctactgagggaaaga

SEQ ID NO: 898569 - DNA, 33 bp, Homo sapien
acagtgttctgagaaacggtgcaaggagccatc

SEQ ID NO: 898570 - DNA, 33 bp, Homo sapien
acagtgttctgagaaatggtgcaaggagccatc

SEQ ID NO: 898571 - DNA, 33 bp, Homo sapien
gacaaatccaagggctaagacacacagtcccat

SEQ ID NO: 898572 - DNA, 33 bp, Homo sapien
gacaaatccaagggctgagacacacagtcccat

SEQ ID NO: 898573 - DNA, 33 bp, Homo sapien
gtttctgacatttgaagtatctagatggtaata

SEQ ID NO: 898574 - DNA, 33 bp, Homo sapien
gtttctgacatttgaattatctagatggtaata

SEQ ID NO: 898575 - DNA, 33 bp, Homo sapien
caaaagacagtaagtcaagcaagcacaattaca

SEQ ID NO: 898576 - DNA, 33 bp, Homo sapien
caaaagacagtaagtcgagcaagcacaattaca

SEQ ID NO: 898577 - DNA, 33 bp, Homo sapien
ggatggctgcagtaagcattacaaaaggcaaca

SEQ ID NO: 898578 - DNA, 33 bp, Homo sapien
ggatggctgcagtaagtattacaaaaggcaaca

SEQ ID NO: 898579 - DNA, 33 bp, Homo sapien
caagaataggttcaacaaaagagaagtgtcgtg

SEQ ID NO: 898580 - DNA, 33 bp, Homo sapien
caagaataggttcaacgaaagagaagtgtcgtg

SEQ ID NO: 898581 - DNA, 33 bp, Homo sapien
tgtgaggaccggtatacgccactctgggatttc

SEQ ID NO: 898582 - DNA, 33 bp, Homo sapien
tgtgaggaccggtatatgccactctgggatttc

SEQ ID NO: 898583 - DNA, 33 bp, Homo sapien
ccacattccagcacacactatttctggatatga

SEQ ID NO: 898584 - DNA, 33 bp, Homo sapien
ccacattccagcacacgctatttctggatatga

SEQ ID NO: 898585 - DNA, 33 bp, Homo sapien
tgtgatgtgccaaagacagttttggaactgaga

SEQ ID NO: 898586 - DNA, 33 bp, Homo sapien
tgtgatgtgccaaagatagttttggaactgaga

SEQ ID NO: 898587 - DNA, 33 bp, Homo sapien
taaaggatggcacttgcaccctacgctgctccc

SEQ ID NO: 898588 - DNA, 33 bp, Homo sapien
taaaggatggcacttggaccctacgctgctccc

SEQ ID NO: 898589 - DNA, 33 bp, Homo sapien
ccttcaacgtgggaataaagtagctcattttga

SEQ ID NO: 898590 - DNA, 33 bp, Homo sapien
ccttcaacgtgggaatgaagtagctcattttga

SEQ ID NO: 898591 - DNA, 33 bp, Homo sapien
gagtatataggccaaaagataagttgtgtagag

SEQ ID NO: 898592 - DNA, 33 bp, Homo sapien
gagtatataggccaaaggataagttgtgtagag

SEQ ID NO: 898593 - DNA, 33 bp, Homo sapien
gatttaaatcgctttaagtatatgtcacagaag

SEQ ID NO: 898594 - DNA, 33 bp, Homo sapien
gatttaaatcgctttaggtatatgtcacagaag

SEQ ID NO: 898595 - DNA, 33 bp, Homo sapien
tagagtctggacaacacctgtttacactggcct

SEQ ID NO: 898596 - DNA, 33 bp, Homo sapien
tagagtctggacaacatctgtttacactggcct

SEQ ID NO: 898597 - DNA, 33 bp, Homo sapien
tgtaggtttgcacatactaactttaaaatacat

SEQ ID NO: 898598 - DNA, 33 bp, Homo sapien
tgtaggtttgcacatagtaactttaaaatacat

SEQ ID NO: 898599 - DNA, 33 bp, Homo sapien
ttctagataaaagcacacttaaaacaatgctca

SEQ ID NO: 898600 - DNA, 33 bp, Homo sapien
ttctagataaaagcacccttaaaacaatgctca

SEQ ID NO: 898601 - DNA, 33 bp, Homo sapien
cccatctgtactgtacactttgtgaatcagcaa

SEQ ID NO: 898602 - DNA, 33 bp, Homo sapien
cccatctgtactgtacgctttgtgaatcagcaa

SEQ ID NO: 898603 - DNA, 33 bp, Homo sapien
taggaaatctgttaggcaagtggcataatatgg

SEQ ID NO: 898604 - DNA, 33 bp, Homo sapien
taggaaatctgttagggaagtggcataatatgg

SEQ ID NO: 898605 - DNA, 33 bp, Homo sapien
taacatctctggattcactttctcctctgtaaa

SEQ ID NO: 898606 - DNA, 33 bp, Homo sapien
taacatctctggattccctttctcctctgtaaa

SEQ ID NO: 898607 - DNA, 33 bp, Homo sapien
aatggcagctaccaaagaacctatagcaaaaat

SEQ ID NO: 898608 - DNA, 33 bp, Homo sapien
aatggcagctaccaaataacctatagcaaaaat

SEQ ID NO: 898609 - DNA, 33 bp, Homo sapien
aagtgagggataggtcccgtagtgactcagaag

SEQ ID NO: 898610 - DNA, 33 bp, Homo sapien
aagtgagggataggtctcgtagtgactcagaag

SEQ ID NO: 898611 - DNA, 33 bp, Homo sapien
ttgctgcatcagattcaagagcttctaaagctt

SEQ ID NO: 898612 - DNA, 33 bp, Homo sapien
ttgctgcatcagattcgagagcttctaaagctt

SEQ ID NO: 898613 - DNA, 33 bp, Homo sapien
cttcacacaagcctgaaactgtccttggctgaa

SEQ ID NO: 898614 - DNA, 33 bp, Homo sapien
cttcacacaagcctgagactgtccttggctgaa

SEQ ID NO: 898615 - DNA, 33 bp, Homo sapien
tatgtgtatccaaccaccgttcagaagtaagaa

SEQ ID NO: 898616 - DNA, 33 bp, Homo sapien
tatgtgtatccaaccatcgttcagaagtaagaa

SEQ ID NO: 898617 - DNA, 33 bp, Homo sapien
tcaagaggtccggctaagaaaactcccgaggtt

SEQ ID NO: 898618 - DNA, 33 bp, Homo sapien
tcaagaggtccggctaggaaaactcccgaggtt

SEQ ID NO: 898619 - DNA, 33 bp, Homo sapien
gagagtagttacgtcaatacaagctcaagtgga

SEQ ID NO: 898620 - DNA, 33 bp, Homo sapien
gagagtagttacgtcagtacaagctcaagtgga

SEQ ID NO: 898621 - DNA, 33 bp, Homo sapien
gcaccctttcaactacactctgtgcgcaatgtt

SEQ ID NO: 898622 - DNA, 33 bp, Homo sapien
gcaccctttcaactacgctctgtgcgcaatgtt

SEQ ID NO: 898623 - DNA, 33 bp, Homo sapien
ttgaaacgcttacccaaatgctacaggttatca

SEQ ID NO: 898624 - DNA, 33 bp, Homo sapien
ttgaaacgcttacccagatgctacaggttatca

SEQ ID NO: 898625 - DNA, 33 bp, Homo sapien
catcgacgtgccttacaactagtcatcttttct

SEQ ID NO: 898626 - DNA, 33 bp, Homo sapien
catcgacgtgccttacgactagtcatcttttct

SEQ ID NO: 898627 - DNA, 33 bp, Homo sapien
aaacgttccctgttaaccaagctaacccacgat

SEQ ID NO: 898628 - DNA, 33 bp, Homo sapien
aaacgttccctgttaatcaagctaacccacgat

SEQ ID NO: 898629 - DNA, 33 bp, Homo sapien
aactataaaggagagaagttttcgttgaagtac

SEQ ID NO: 898630 - DNA, 33 bp, Homo sapien
aactataaaggagagaggttttcgttgaagtac

SEQ ID NO: 898631 - DNA, 33 bp, Homo sapien
gtgagtgtttccattacaactgtgcttcatgtc

SEQ ID NO: 898632 - DNA, 33 bp, Homo sapien
gtgagtgtttccattataactgtgcttcatgtc

SEQ ID NO: 898633 - DNA, 33 bp, Homo sapien
atcatttggaaaacacaaaagtgctgctcctga

SEQ ID NO: 898634 - DNA, 33 bp, Homo sapien
atcatttggaaaacacgaaagtgctgctcctga

SEQ ID NO: 898635 - DNA, 33 bp, Homo sapien
caacctgatggcataaatatatcatgagagtgc

SEQ ID NO: 898636 - DNA, 33 bp, Homo sapien
caacctgatggcataattatatcatgagagtgc

SEQ ID NO: 898637 - DNA, 33 bp, Homo sapien
gaaagaatagcagaaaacccaagtcatgagcat

SEQ ID NO: 898638 - DNA, 33 bp, Homo sapien
gaaagaatagcagaaagcccaagtcatgagcat

SEQ ID NO: 898639 - DNA, 33 bp, Homo sapien
aagccctggattccaacgtctttaacacaaatc

SEQ ID NO: 898640 - DNA, 33 bp, Homo sapien
aagccctggattccaatgtctttaacacaaatc

SEQ ID NO: 898641 - DNA, 33 bp, Homo sapien
taccatgatttctatgaaaactcattttgggga

SEQ ID NO: 898642 - DNA, 33 bp, Homo sapien
taccatgatttctatggaaactcattttgggga

SEQ ID NO: 898643 - DNA, 33 bp, Homo sapien
attttctctgggccaactcggagaaggctggct

SEQ ID NO: 898644 - DNA, 33 bp, Homo sapien
attttctctgggccaattcggagaaggctggct

SEQ ID NO: 898645 - DNA, 33 bp, Homo sapien
gaaacacagaaatgtaataatagctggcacatg

SEQ ID NO: 898646 - DNA, 33 bp, Homo sapien
gaaacacagaaatgtactaatagctggcacatg

SEQ ID NO: 898647 - DNA, 33 bp, Homo sapien
cctgtatcttgggttacgctgataggaacagaa

SEQ ID NO: 898648 - DNA, 33 bp, Homo sapien
cctgtatcttgggttatgctgataggaacagaa

SEQ ID NO: 898649 - DNA, 33 bp, Homo sapien
gctgaaaatcactgacaaggtagaagaatagga

SEQ ID NO: 898650 - DNA, 33 bp, Homo sapien
gctgaaaatcactgacgaggtagaagaatagga

SEQ ID NO: 898651 - DNA, 33 bp, Homo sapien
taggccagaaggaccacaaagtaggaagcttga

SEQ ID NO: 898652 - DNA, 33 bp, Homo sapien
taggccagaaggaccagaaagtaggaagcttga

SEQ ID NO: 898653 - DNA, 33 bp, Homo sapien
cctgagccaactcttcaccaaactggaaactcc

SEQ ID NO: 898654 - DNA, 33 bp, Homo sapien
cctgagccaactcttcgccaaactggaaactcc

SEQ ID NO: 898655 - DNA, 33 bp, Homo sapien
tcagaactgttatcaaagatttctaagttacct

SEQ ID NO: 898656 - DNA, 33 bp, Homo sapien
tcagaactgttatcaatgatttctaagttacct

SEQ ID NO: 898657 - DNA, 33 bp, Homo sapien
ggcaagtgttagtggccgagaacatgctcccag

SEQ ID NO: 898658 - DNA, 33 bp, Homo sapien
ggcaagtgttagtggctgagaacatgctcccag

SEQ ID NO: 898659 - DNA, 33 bp, Homo sapien
gactttaaatgtgatcagaccttatgtctcttc

SEQ ID NO: 898660 - DNA, 33 bp, Homo sapien
gactttaaatgtgatccgaccttatgtctcttc

SEQ ID NO: 898661 - DNA, 33 bp, Homo sapien
cagatctgcagctgaaactgtcctctgtcaata

SEQ ID NO: 898662 - DNA, 33 bp, Homo sapien
cagatctgcagctgaacctgtcctctgtcaata

SEQ ID NO: 898663 - DNA, 33 bp, Homo sapien
aattttctagtagttacgctaaaacaagaaaag

SEQ ID NO: 898664 - DNA, 33 bp, Homo sapien
aattttctagtagttaggctaaaacaagaaaag

SEQ ID NO: 898665 - DNA, 33 bp, Homo sapien
tagtggactctttatcaaagctagggtattttt

SEQ ID NO: 898666 - DNA, 33 bp, Homo sapien
tagtggactctttatccaagctagggtattttt

SEQ ID NO: 898667 - DNA, 33 bp, Homo sapien
tctgttgcccaagagacaatgaccaggcagggc

SEQ ID NO: 898668 - DNA, 33 bp, Homo sapien
tctgttgcccaagagagaatgaccaggcagggc

SEQ ID NO: 898669 - DNA, 33 bp, Homo sapien
tgcctctaaagacctcaagggaaggaaattctg

SEQ ID NO: 898670 - DNA, 33 bp, Homo sapien
tgcctctaaagacctccagggaaggaaattctg

SEQ ID NO: 898671 - DNA, 33 bp, Homo sapien
ccaggagatagggtgcaaagttcatattatttg

SEQ ID NO: 898672 - DNA, 33 bp, Homo sapien
ccaggagatagggtgccaagttcatattatttg

SEQ ID NO: 898673 - DNA, 33 bp, Homo sapien
ggtttggagtcaagccactgagatactgtctcg

SEQ ID NO: 898674 - DNA, 33 bp, Homo sapien
ggtttggagtcaagcccctgagatactgtctcg

SEQ ID NO: 898675 - DNA, 33 bp, Homo sapien
cctggatgattggctcaatttgaaaggctgaat

SEQ ID NO: 898676 - DNA, 33 bp, Homo sapien
cctggatgattggctcgatttgaaaggctgaat

SEQ ID NO: 898677 - DNA, 33 bp, Homo sapien
gcagaaggattagcaccgggacctgagcctaat

SEQ ID NO: 898678 - DNA, 33 bp, Homo sapien
gcagaaggattagcactgggacctgagcctaat

SEQ ID NO: 898679 - DNA, 33 bp, Homo sapien
cttcttactaccttcaacactgcccagcccgag

SEQ ID NO: 898680 - DNA, 33 bp, Homo sapien
cttcttactaccttcaccactgcccagcccgag

SEQ ID NO: 898681 - DNA, 33 bp, Homo sapien
aacattaaattgagaccgtaaggctgaaacttg

SEQ ID NO: 898682 - DNA, 33 bp, Homo sapien
aacattaaattgagactgtaaggctgaaacttg

SEQ ID NO: 898683 - DNA, 33 bp, Homo sapien
tcattgtagatatcaccgctgaggctgtctgtg

SEQ ID NO: 898684 - DNA, 33 bp, Homo sapien
tcattgtagatatcactgctgaggctgtctgtg

SEQ ID NO: 898685 - DNA, 33 bp, Homo sapien
atggaagaagatggcaatagaaagttagcttgg

SEQ ID NO: 898686 - DNA, 33 bp, Homo sapien
atggaagaagatggcactagaaagttagcttgg

SEQ ID NO: 898687 - DNA, 33 bp, Homo sapien
cccacagacagtgtagaaattggcagctttttt

SEQ ID NO: 898688 - DNA, 33 bp, Homo sapien
cccacagacagtgtagcaattggcagctttttt

SEQ ID NO: 898689 - DNA, 33 bp, Homo sapien
acctcatgactggagcaaatactaaaattattc

SEQ ID NO: 898690 - DNA, 33 bp, Homo sapien
acctcatgactggagcgaatactaaaattattc

SEQ ID NO: 898691 - DNA, 33 bp, Homo sapien
gaaatgtttaaagaaacctaggtataacagaga

SEQ ID NO: 898692 - DNA, 33 bp, Homo sapien
gaaatgtttaaagaaagctaggtataacagaga

SEQ ID NO: 898693 - DNA, 33 bp, Homo sapien
agacagctgatctctacgaactgaatttttagt

SEQ ID NO: 898694 - DNA, 33 bp, Homo sapien
agacagctgatctctaggaactgaatttttagt

SEQ ID NO: 898695 - DNA, 33 bp, Homo sapien
cttataagaactgacacaaatacttattcaaga

SEQ ID NO: 898696 - DNA, 33 bp, Homo sapien
cttataagaactgacagaaatacttattcaaga

SEQ ID NO: 898697 - DNA, 33 bp, Homo sapien
ctgaaacaaaggagaaagtaggtgaaagtactt

SEQ ID NO: 898698 - DNA, 33 bp, Homo sapien
ctgaaacaaaggagaaggtaggtgaaagtactt

SEQ ID NO: 898699 - DNA, 33 bp, Homo sapien
tacaggaatggcaaataagtatataaaaagatg

SEQ ID NO: 898700 - DNA, 33 bp, Homo sapien
tacaggaatggcaaatgagtatataaaaagatg

SEQ ID NO: 898701 - DNA, 33 bp, Homo sapien
attaactcaaattctaccacagatctgaatcta

SEQ ID NO: 898702 - DNA, 33 bp, Homo sapien
attaactcaaattctatcacagatctgaatcta

SEQ ID NO: 898703 - DNA, 33 bp, Homo sapien
cccagaattgtgagagaagatgatatatgattg

SEQ ID NO: 898704 - DNA, 33 bp, Homo sapien
cccagaattgtgagaggagatgatatatgattg

SEQ ID NO: 898705 - DNA, 33 bp, Homo sapien
tcatctttgctccttacagtattggctggagtt

SEQ ID NO: 898706 - DNA, 33 bp, Homo sapien
tcatctttgctccttatagtattggctggagtt

SEQ ID NO: 898707 - DNA, 33 bp, Homo sapien
attggctggagttggcaatgactcagcagatca

SEQ ID NO: 898708 - DNA, 33 bp, Homo sapien
attggctggagttggcgatgactcagcagatca

SEQ ID NO: 898709 - DNA, 33 bp, Homo sapien
acccagatgactcacaatgggagattttcccag

SEQ ID NO: 898710 - DNA, 33 bp, Homo sapien
acccagatgactcacagtgggagattttcccag

SEQ ID NO: 898711 - DNA, 33 bp, Homo sapien
tggatggttggatagacagaaagtagatggact

SEQ ID NO: 898712 - DNA, 33 bp, Homo sapien
tggatggttggatagatagaaagtagatggact

SEQ ID NO: 898713 - DNA, 33 bp, Homo sapien
tggaaagaaagagatacagccctcgtttacaga

SEQ ID NO: 898714 - DNA, 33 bp, Homo sapien
tggaaagaaagagatatagccctcgtttacaga

SEQ ID NO: 898715 - DNA, 33 bp, Homo sapien
aattaaagcaactgtacgtctttactacccgcc

SEQ ID NO: 898716 - DNA, 33 bp, Homo sapien
aattaaagcaactgtaggtctttactacccgcc

SEQ ID NO: 898717 - DNA, 33 bp, Homo sapien
gtggcctgagggcaaacacccatgcaaacagtt

SEQ ID NO: 898718 - DNA, 33 bp, Homo sapien
gtggcctgagggcaaagacccatgcaaacagtt

SEQ ID NO: 898719 - DNA, 33 bp, Homo sapien
cactgctacccagaacaatggggtgcattctca

SEQ ID NO: 898720 - DNA, 33 bp, Homo sapien
cactgctacccagaacgatggggtgcattctca

SEQ ID NO: 898721 - DNA, 33 bp, Homo sapien
ggttatggctctatcagcttctcaacctcttaa

SEQ ID NO: 898722 - DNA, 33 bp, Homo sapien
ggttatggctctatcatcttctcaacctcttaa

SEQ ID NO: 898723 - DNA, 33 bp, Homo sapien
tgggatttctgggcaacagctaggcggagcaga

SEQ ID NO: 898724 - DNA, 33 bp, Homo sapien
tgggatttctgggcaagagctaggcggagcaga

SEQ ID NO: 898725 - DNA, 33 bp, Homo sapien
ctctgggtctttgaacacactgttctctgcatc

SEQ ID NO: 898726 - DNA, 33 bp, Homo sapien
ctctgggtctttgaacccactgttctctgcatc

SEQ ID NO: 898727 - DNA, 33 bp, Homo sapien
taggagagtctggggacgcctctcaaggaatga

SEQ ID NO: 898728 - DNA, 33 bp, Homo sapien
taggagagtctggggatgcctctcaaggaatga

SEQ ID NO: 898729 - DNA, 33 bp, Homo sapien
acagaaagccagaaaaacaattactacctcatt

SEQ ID NO: 898730 - DNA, 33 bp, Homo sapien
acagaaagccagaaaagcaattactacctcatt

SEQ ID NO: 898731 - DNA, 33 bp, Homo sapien
atcaggaatgctaaagaagccacacctcactca

SEQ ID NO: 898732 - DNA, 33 bp, Homo sapien
atcaggaatgctaaagcagccacacctcactca

SEQ ID NO: 898733 - DNA, 33 bp, Homo sapien
tatggtggcaatgacacaacagaaggccaaggg

SEQ ID NO: 898734 - DNA, 33 bp, Homo sapien
tatggtggcaatgacagaacagaaggccaaggg

SEQ ID NO: 898735 - DNA, 33 bp, Homo sapien
tcttaatctgccaaaacctggcactaatctggt

SEQ ID NO: 898736 - DNA, 33 bp, Homo sapien
tcttaatctgccaaaatctggcactaatctggt

SEQ ID NO: 898737 - DNA, 33 bp, Homo sapien
ctaatatataattatgaaccattccgttttatt

SEQ ID NO: 898738 - DNA, 33 bp, Homo sapien
ctaatatataattatggaccattccgttttatt

SEQ ID NO: 898739 - DNA, 33 bp, Homo sapien
ctcctggattactgcaacaattcctagggtggt

SEQ ID NO: 898740 - DNA, 33 bp, Homo sapien
ctcctggattactgcatcaattcctagggtggt

SEQ ID NO: 898741 - DNA, 33 bp, Homo sapien
ataggtcttattgtccacgggattggttttgtc

SEQ ID NO: 898742 - DNA, 33 bp, Homo sapien
ataggtcttattgtccgcgggattggttttgtc

SEQ ID NO: 898743 - DNA, 33 bp, Homo sapien
taataatgaagtgatacggagcgccatacaaat

SEQ ID NO: 898744 - DNA, 33 bp, Homo sapien
taataatgaagtgatatggagcgccatacaaat

SEQ ID NO: 898745 - DNA, 33 bp, Homo sapien
gaagtcacagcccttccctttgcagacagcctc

SEQ ID NO: 898746 - DNA, 33 bp, Homo sapien
gaagtcacagcccttctctttgcagacagcctc

SEQ ID NO: 898747 - DNA, 33 bp, Homo sapien
taaatcctatcattaaactctccttaatatgta

SEQ ID NO: 898748 - DNA, 33 bp, Homo sapien
taaatcctatcattaatctctccttaatatgta

SEQ ID NO: 898749 - DNA, 33 bp, Homo sapien
acaagatgagcccctaaacgtatctaagaatgt

SEQ ID NO: 898750 - DNA, 33 bp, Homo sapien
acaagatgagcccctatacgtatctaagaatgt

SEQ ID NO: 898751 - DNA, 33 bp, Homo sapien
agcaccatatgctgaccaggcctgacccttctt

SEQ ID NO: 898752 - DNA, 33 bp, Homo sapien
agcaccatatgctgactaggcctgacccttctt

SEQ ID NO: 898753 - DNA, 33 bp, Homo sapien
ccatcgctaggacccaatctccgccagagcaac

SEQ ID NO: 898754 - DNA, 33 bp, Homo sapien
ccatcgctaggacccagtctccgccagagcaac

SEQ ID NO: 898755 - DNA, 33 bp, Homo sapien
tattcctgcaattggtaaaaggtcagaataaat

SEQ ID NO: 898756 - DNA, 33 bp, Homo sapien
tattcctgcaattggtgaaaggtcagaataaat

SEQ ID NO: 898757 - DNA, 33 bp, Homo sapien
ttacactccacaagtaacaaaataaatcagcag

SEQ ID NO: 898758 - DNA, 33 bp, Homo sapien
ttacactccacaagtatcaaaataaatcagcag

SEQ ID NO: 898759 - DNA, 33 bp, Homo sapien
gaacatccagagatggaccacaaaaacagacag

SEQ ID NO: 898760 - DNA, 33 bp, Homo sapien
gaacatccagagatgggccacaaaaacagacag

SEQ ID NO: 898761 - DNA, 33 bp, Homo sapien
tccccactaataagtaccaagtaccagggctcc

SEQ ID NO: 898762 - DNA, 33 bp, Homo sapien
tccccactaataagtatcaagtaccagggctcc

SEQ ID NO: 898763 - DNA, 33 bp, Homo sapien
cacagacttcagacagaatagtaaaaacggaag

SEQ ID NO: 898764 - DNA, 33 bp, Homo sapien
cacagacttcagacagtatagtaaaaacggaag

SEQ ID NO: 898765 - DNA, 33 bp, Homo sapien
gcatgagattatcacaagtggaaactagcaaaa

SEQ ID NO: 898766 - DNA, 33 bp, Homo sapien
gcatgagattatcacaggtggaaactagcaaaa

SEQ ID NO: 898767 - DNA, 33 bp, Homo sapien
aagcttaaatggcaccaggtagagccaacttta

SEQ ID NO: 898768 - DNA, 33 bp, Homo sapien
aagcttaaatggcaccgggtagagccaacttta

SEQ ID NO: 898769 - DNA, 33 bp, Homo sapien
tgtctagggtgcctacaaaggctctggagttcc

SEQ ID NO: 898770 - DNA, 33 bp, Homo sapien
tgtctagggtgcctacgaaggctctggagttcc

SEQ ID NO: 898771 - DNA, 33 bp, Homo sapien
aaaagtaggtgggtaaatgaatgaactggttgg

SEQ ID NO: 898772 - DNA, 33 bp, Homo sapien
aaaagtaggtgggtaattgaatgaactggttgg

SEQ ID NO: 898773 - DNA, 33 bp, Homo sapien
aaagggaggcgaggaacgcaagagctcagtgtc

SEQ ID NO: 898774 - DNA, 33 bp, Homo sapien
aaagggaggcgaggaatgcaagagctcagtgtc

SEQ ID NO: 898775 - DNA, 33 bp, Homo sapien
ctttgagggcacctgaatccacaagatgaggag

SEQ ID NO: 898776 - DNA, 33 bp, Homo sapien
ctttgagggcacctgattccacaagatgaggag

SEQ ID NO: 898777 - DNA, 33 bp, Homo sapien
attggtgaagtatggacctcataaatataaaac

SEQ ID NO: 898778 - DNA, 33 bp, Homo sapien
attggtgaagtatggatctcataaatataaaac

SEQ ID NO: 898779 - DNA, 33 bp, Homo sapien
cactggcattggcacaaataggtttggcacata

SEQ ID NO: 898780 - DNA, 33 bp, Homo sapien
cactggcattggcacacataggtttggcacata

SEQ ID NO: 898781 - DNA, 33 bp, Homo sapien
gggcataaaagcagtacgtatctcagagggagt

SEQ ID NO: 898782 - DNA, 33 bp, Homo sapien
gggcataaaagcagtatgtatctcagagggagt

SEQ ID NO: 898783 - DNA, 33 bp, Homo sapien
cctcctgcttcatttgaaaggccctccagaaca

SEQ ID NO: 898784 - DNA, 33 bp, Homo sapien
cctcctgcttcatttggaaggccctccagaaca

SEQ ID NO: 898785 - DNA, 33 bp, Homo sapien
aaggaacagagatagcaaatggtttctggtagt

SEQ ID NO: 898786 - DNA, 33 bp, Homo sapien
aaggaacagagatagcgaatggtttctggtagt

SEQ ID NO: 898787 - DNA, 33 bp, Homo sapien
tccggaccagcttcccaaaggcctccacgggga

SEQ ID NO: 898788 - DNA, 33 bp, Homo sapien
tccggaccagcttcccgaaggcctccacgggga

SEQ ID NO: 898789 - DNA, 33 bp, Homo sapien
gatatcaggatccctaaccatttcctgaaatgg

SEQ ID NO: 898790 - DNA, 33 bp, Homo sapien
gatatcaggatccctagccatttcctgaaatgg

SEQ ID NO: 898791 - DNA, 33 bp, Homo sapien
acagctcttctcgggcacaaagttcagggctcg

SEQ ID NO: 898792 - DNA, 33 bp, Homo sapien
acagctcttctcgggcgcaaagttcagggctcg

SEQ ID NO: 898793 - DNA, 33 bp, Homo sapien
ggagcccgtgttttccagaatagtgcaggctcc

SEQ ID NO: 898794 - DNA, 33 bp, Homo sapien
ggagcccgtgttttccggaatagtgcaggctcc

SEQ ID NO: 898795 - DNA, 33 bp, Homo sapien
catgtttacgttcttacggatccagcctccctg

SEQ ID NO: 898796 - DNA, 33 bp, Homo sapien
catgtttacgttcttagggatccagcctccctg

SEQ ID NO: 898797 - DNA, 33 bp, Homo sapien
agcacacaagcttaccacaaggctgaccataga

SEQ ID NO: 898798 - DNA, 33 bp, Homo sapien
agcacacaagcttaccgcaaggctgaccataga

SEQ ID NO: 898799 - DNA, 33 bp, Homo sapien
tctggtggatttctgacgatggtattaagccct

SEQ ID NO: 898800 - DNA, 33 bp, Homo sapien
tctggtggatttctgatgatggtattaagccct

SEQ ID NO: 898801 - DNA, 33 bp, Homo sapien
agagtgcatacaaagacccaacaatgaggacaa

SEQ ID NO: 898802 - DNA, 33 bp, Homo sapien
agagtgcatacaaagatccaacaatgaggacaa

SEQ ID NO: 898803 - DNA, 33 bp, Homo sapien
ttttaggaaatgcacacagaagtaggaagtatt

SEQ ID NO: 898804 - DNA, 33 bp, Homo sapien
ttttaggaaatgcacatagaagtaggaagtatt

SEQ ID NO: 898805 - DNA, 33 bp, Homo sapien
gcaagccaggttttgaagctcagttttgtcatg

SEQ ID NO: 898806 - DNA, 33 bp, Homo sapien
gcaagccaggttttgacgctcagttttgtcatg

SEQ ID NO: 898807 - DNA, 33 bp, Homo sapien
accacccactagaatgcagcctgcaggtattgg

SEQ ID NO: 898808 - DNA, 33 bp, Homo sapien
accacccactagaatggagcctgcaggtattgg

SEQ ID NO: 898809 - DNA, 33 bp, Homo sapien
aactgctggggacagccgagctgaaaatggcta

SEQ ID NO: 898810 - DNA, 33 bp, Homo sapien
aactgctggggacagctgagctgaaaatggcta

SEQ ID NO: 898811 - DNA, 33 bp, Homo sapien
ttttgatcaaagtgtacggttccgtgacattaa

SEQ ID NO: 898812 - DNA, 33 bp, Homo sapien
ttttgatcaaagtgtatggttccgtgacattaa

SEQ ID NO: 898813 - DNA, 33 bp, Homo sapien
gctgcatacgaatctacaattatcttgaaataa

SEQ ID NO: 898814 - DNA, 33 bp, Homo sapien
gctgcatacgaatctagaattatcttgaaataa

SEQ ID NO: 898815 - DNA, 33 bp, Homo sapien
tgcttggtggttatcacggattggcagctccct

SEQ ID NO: 898816 - DNA, 33 bp, Homo sapien
tgcttggtggttatcatggattggcagctccct

SEQ ID NO: 898817 - DNA, 33 bp, Homo sapien
tgcctctagactaaggccagcagatttagcaaa

SEQ ID NO: 898818 - DNA, 33 bp, Homo sapien
tgcctctagactaaggtcagcagatttagcaaa

SEQ ID NO: 898819 - DNA, 33 bp, Homo sapien
caatgcttgatcctcacaatcttgcaaaacatc

SEQ ID NO: 898820 - DNA, 33 bp, Homo sapien
caatgcttgatcctcataatcttgcaaaacatc

SEQ ID NO: 898821 - DNA, 33 bp, Homo sapien
acgaggctctctctgaaggataattctttatgt

SEQ ID NO: 898822 - DNA, 33 bp, Homo sapien
acgaggctctctctgatggataattctttatgt

SEQ ID NO: 898823 - DNA, 33 bp, Homo sapien
aatacagattctctcaacttactgacacttact

SEQ ID NO: 898824 - DNA, 33 bp, Homo sapien
aatacagattctctcaccttactgacacttact

SEQ ID NO: 898825 - DNA, 33 bp, Homo sapien
ctctctgtgctcttcacattgacctgcttcagt

SEQ ID NO: 898826 - DNA, 33 bp, Homo sapien
ctctctgtgctcttcagattgacctgcttcagt

SEQ ID NO: 898827 - DNA, 33 bp, Homo sapien
gtctgattgtgcgaggaatgatgtctgggccca

SEQ ID NO: 898828 - DNA, 33 bp, Homo sapien
gtctgattgtgcgaggcatgatgtctgggccca

SEQ ID NO: 898829 - DNA, 33 bp, Homo sapien
tgcactacacaaagacacctcgctgaggcagtg

SEQ ID NO: 898830 - DNA, 33 bp, Homo sapien
tgcactacacaaagacgcctcgctgaggcagtg

SEQ ID NO: 898831 - DNA, 33 bp, Homo sapien
gtgtgtctccccttgaagaactcacaggacctg

SEQ ID NO: 898832 - DNA, 33 bp, Homo sapien
gtgtgtctccccttgaggaactcacaggacctg

SEQ ID NO: 898833 - DNA, 33 bp, Homo sapien
attttcctgaacctgacgtttggaggcccaaaa

SEQ ID NO: 898834 - DNA, 33 bp, Homo sapien
attttcctgaacctgatgtttggaggcccaaaa

SEQ ID NO: 898835 - DNA, 33 bp, Homo sapien
tactttggatactcccacatctaggagatatgg

SEQ ID NO: 898836 - DNA, 33 bp, Homo sapien
tactttggatactcccgcatctaggagatatgg

SEQ ID NO: 898837 - DNA, 33 bp, Homo sapien
tacatcagcagggctacgttctgagaagtgcat

SEQ ID NO: 898838 - DNA, 33 bp, Homo sapien
tacatcagcagggctatgttctgagaagtgcat

SEQ ID NO: 898839 - DNA, 33 bp, Homo sapien
tctcacttctttagccacactttctggatctca

SEQ ID NO: 898840 - DNA, 33 bp, Homo sapien
tctcacttctttagccgcactttctggatctca

SEQ ID NO: 898841 - DNA, 33 bp, Homo sapien
ctcagatggtggcaaaatacttggtctcggttt

SEQ ID NO: 898842 - DNA, 33 bp, Homo sapien
ctcagatggtggcaaagtacttggtctcggttt

SEQ ID NO: 898843 - DNA, 33 bp, Homo sapien
cttccaatttggcatacgagacccgggcacgca

SEQ ID NO: 898844 - DNA, 33 bp, Homo sapien
cttccaatttggcatatgagacccgggcacgca

SEQ ID NO: 898845 - DNA, 33 bp, Homo sapien
ggcagaactcggctcgaccctctgctaaggcct

SEQ ID NO: 898846 - DNA, 33 bp, Homo sapien
ggcagaactcggctcgcccctctgctaaggcct

SEQ ID NO: 898847 - DNA, 33 bp, Homo sapien
ttgtgtaagccacctaacttctgtgagaatcat

SEQ ID NO: 898848 - DNA, 33 bp, Homo sapien
ttgtgtaagccacctagcttctgtgagaatcat

SEQ ID NO: 898849 - DNA, 33 bp, Homo sapien
tgaaggatctttagacaaggaaattatcctata

SEQ ID NO: 898850 - DNA, 33 bp, Homo sapien
tgaaggatctttagacgaggaaattatcctata

SEQ ID NO: 898851 - DNA, 33 bp, Homo sapien
ccaaaatcacgccatccatatccattcaaatca

SEQ ID NO: 898852 - DNA, 33 bp, Homo sapien
ccaaaatcacgccatctatatccattcaaatca

SEQ ID NO: 898853 - DNA, 33 bp, Homo sapien
ataccgtgggaatagaactgcttcatcatgtcc

SEQ ID NO: 898854 - DNA, 33 bp, Homo sapien
ataccgtgggaatagagctgcttcatcatgtcc

SEQ ID NO: 898855 - DNA, 33 bp, Homo sapien
aattctagcagggaagcccattttctagcatgg

SEQ ID NO: 898856 - DNA, 33 bp, Homo sapien
aattctagcagggaagtccattttctagcatgg

SEQ ID NO: 898857 - DNA, 33 bp, Homo sapien
tggctctgttcatgaacggcttcacggtggaac

SEQ ID NO: 898858 - DNA, 33 bp, Homo sapien
tggctctgttcatgaatggcttcacggtggaac

SEQ ID NO: 898859 - DNA, 33 bp, Homo sapien
tgatttactcagatcagatagttagtaaaaact

SEQ ID NO: 898860 - DNA, 33 bp, Homo sapien
tgatttactcagatcatatagttagtaaaaact

SEQ ID NO: 898861 - DNA, 33 bp, Homo sapien
tgccttctgtggggccaaaaagaatggatccca

SEQ ID NO: 898862 - DNA, 33 bp, Homo sapien
tgccttctgtggggccgaaaagaatggatccca

SEQ ID NO: 898863 - DNA, 33 bp, Homo sapien
actgctgcactctcacaacactccggatcaaca

SEQ ID NO: 898864 - DNA, 33 bp, Homo sapien
actgctgcactctcacgacactccggatcaaca

SEQ ID NO: 898865 - DNA, 33 bp, Homo sapien
aaaggatgggacattgcaacaacctgaatgaca

SEQ ID NO: 898866 - DNA, 33 bp, Homo sapien
aaaggatgggacattggaacaacctgaatgaca

SEQ ID NO: 898867 - DNA, 33 bp, Homo sapien
atttgccaaagttataaatctcttaaaccataa

SEQ ID NO: 898868 - DNA, 33 bp, Homo sapien
atttgccaaagttatacatctcttaaaccataa

SEQ ID NO: 898869 - DNA, 33 bp, Homo sapien
gaggaagattttagacacagatcagggagcagg

SEQ ID NO: 898870 - DNA, 33 bp, Homo sapien
gaggaagattttagacgcagatcagggagcagg

SEQ ID NO: 898871 - DNA, 33 bp, Homo sapien
ccagatgggaaaactcaaacttgcctgaaaaag

SEQ ID NO: 898872 - DNA, 33 bp, Homo sapien
ccagatgggaaaactcgaacttgcctgaaaaag

SEQ ID NO: 898873 - DNA, 33 bp, Homo sapien
ttttggtgtaccaacaaggctggaaggtccctt

SEQ ID NO: 898874 - DNA, 33 bp, Homo sapien
ttttggtgtaccaacatggctggaaggtccctt

SEQ ID NO: 898875 - DNA, 33 bp, Homo sapien
cctgctagtgagtgaacgctgcggacgtcatgg

SEQ ID NO: 898876 - DNA, 33 bp, Homo sapien
cctgctagtgagtgaatgctgcggacgtcatgg

SEQ ID NO: 898877 - DNA, 33 bp, Homo sapien
ggcagttcctgattacaaaactgtcctgatata

SEQ ID NO: 898878 - DNA, 33 bp, Homo sapien
ggcagttcctgattacgaaactgtcctgatata

SEQ ID NO: 898879 - DNA, 33 bp, Homo sapien
ccttcctagcttcccgacctctctctattctcc

SEQ ID NO: 898880 - DNA, 33 bp, Homo sapien
ccttcctagcttcccggcctctctctattctcc

SEQ ID NO: 898881 - DNA, 33 bp, Homo sapien
caagccaagcagtaaacatgaaatgcagttcct

SEQ ID NO: 898882 - DNA, 33 bp, Homo sapien
caagccaagcagtaaatatgaaatgcagttcct

SEQ ID NO: 898883 - DNA, 33 bp, Homo sapien
gcagtatcctcaggcaacatagggcaacagtgc

SEQ ID NO: 898884 - DNA, 33 bp, Homo sapien
gcagtatcctcaggcagcatagggcaacagtgc

SEQ ID NO: 898885 - DNA, 33 bp, Homo sapien
gtggctcagtccaagaccgaaaacttcgaaagt

SEQ ID NO: 898886 - DNA, 33 bp, Homo sapien
gtggctcagtccaagatcgaaaacttcgaaagt

SEQ ID NO: 898887 - DNA, 33 bp, Homo sapien
actggaagactcatcaagtcaactttttccatt

SEQ ID NO: 898888 - DNA, 33 bp, Homo sapien
actggaagactcatcaggtcaactttttccatt

SEQ ID NO: 898889 - DNA, 33 bp, Homo sapien
agcctagatccagtggacaatcatttatgacag

SEQ ID NO: 898890 - DNA, 33 bp, Homo sapien
agcctagatccagtgggcaatcatttatgacag

SEQ ID NO: 898891 - DNA, 33 bp, Homo sapien
atgctgcccttttccacagcgacgacactgacc

SEQ ID NO: 898892 - DNA, 33 bp, Homo sapien
atgctgcccttttccatagcgacgacactgacc

SEQ ID NO: 898893 - DNA, 33 bp, Homo sapien
acagaacctccaggcccctccatgttaggctgg

SEQ ID NO: 898894 - DNA, 33 bp, Homo sapien
acagaacctccaggcctctccatgttaggctgg

SEQ ID NO: 898895 - DNA, 33 bp, Homo sapien
agacacattgaatccccctccagttaccctttc

SEQ ID NO: 898896 - DNA, 33 bp, Homo sapien
agacacattgaatccctctccagttaccctttc

SEQ ID NO: 898897 - DNA, 33 bp, Homo sapien
gggtgactcaccatcacgggccctttgcattgt

SEQ ID NO: 898898 - DNA, 33 bp, Homo sapien
gggtgactcaccatcatgggccctttgcattgt

SEQ ID NO: 898899 - DNA, 33 bp, Homo sapien
ctgcaatggggataacaatctaggacccgtggt

SEQ ID NO: 898900 - DNA, 33 bp, Homo sapien
ctgcaatggggataacgatctaggacccgtggt

SEQ ID NO: 898901 - DNA, 33 bp, Homo sapien
gcaccatccgaacgtacctttggtgaaagtctt

SEQ ID NO: 898902 - DNA, 33 bp, Homo sapien
gcaccatccgaacgtatctttggtgaaagtctt

SEQ ID NO: 898903 - DNA, 33 bp, Homo sapien
atcatggatgagggaaaccttgctgttaccttg

SEQ ID NO: 898904 - DNA, 33 bp, Homo sapien
atcatggatgagggaacccttgctgttaccttg

SEQ ID NO: 898905 - DNA, 33 bp, Homo sapien
ttagccaaaggcactgaatgggttagtagtaag

SEQ ID NO: 898906 - DNA, 33 bp, Homo sapien
ttagccaaaggcactggatgggttagtagtaag

SEQ ID NO: 898907 - DNA, 33 bp, Homo sapien
agggccgcacagaggaacattgactgaaatctc

SEQ ID NO: 898908 - DNA, 33 bp, Homo sapien
agggccgcacagaggaccattgactgaaatctc

SEQ ID NO: 898909 - DNA, 33 bp, Homo sapien
ttgggtgaagacaaaaaacacagggaaggtcta

SEQ ID NO: 898910 - DNA, 33 bp, Homo sapien
ttgggtgaagacaaaagacacagggaaggtcta

SEQ ID NO: 898911 - DNA, 33 bp, Homo sapien
ggaatctgttctctgcagcacgtgtttctggtc

SEQ ID NO: 898912 - DNA, 33 bp, Homo sapien
ggaatctgttctctgcggcacgtgtttctggtc

SEQ ID NO: 898913 - DNA, 33 bp, Homo sapien
gaatggattttcttaccatgtgcagagtcttta

SEQ ID NO: 898914 - DNA, 33 bp, Homo sapien
gaatggattttcttactatgtgcagagtcttta

SEQ ID NO: 898915 - DNA, 33 bp, Homo sapien
aagagggtgaaaagtaataacctgctgggagta

SEQ ID NO: 898916 - DNA, 33 bp, Homo sapien
aagagggtgaaaagtactaacctgctgggagta

SEQ ID NO: 898917 - DNA, 33 bp, Homo sapien
ggctttcacgtcctgcactgttctccgcctgtc

SEQ ID NO: 898918 - DNA, 33 bp, Homo sapien
ggctttcacgtcctgcgctgttctccgcctgtc

SEQ ID NO: 898919 - DNA, 33 bp, Homo sapien
cacggggagagcaggggaggcgagtgatgtact

SEQ ID NO: 898920 - DNA, 33 bp, Homo sapien
cacggggagagcagggtaggcgagtgatgtact

SEQ ID NO: 898921 - DNA, 33 bp, Homo sapien
tggaggcccacctagccccagactgttacgcca

SEQ ID NO: 898922 - DNA, 33 bp, Homo sapien
tggaggcccacctagctccagactgttacgcca

SEQ ID NO: 898923 - DNA, 33 bp, Homo sapien
ttagtaaatcccatacactgtccttagcacttc

SEQ ID NO: 898924 - DNA, 33 bp, Homo sapien
ttagtaaatcccatacgctgtccttagcacttc

SEQ ID NO: 898925 - DNA, 33 bp, Homo sapien
tgctcccgactctgtccgacacaggactcctct

SEQ ID NO: 898926 - DNA, 33 bp, Homo sapien
tgctcccgactctgtctgacacaggactcctct

SEQ ID NO: 898927 - DNA, 33 bp, Homo sapien
ggaagggacagacgaactgagaggtgttgagga

SEQ ID NO: 898928 - DNA, 33 bp, Homo sapien
ggaagggacagacgaattgagaggtgttgagga

SEQ ID NO: 898929 - DNA, 33 bp, Homo sapien
acgcgccaagcaagaactgtgaaaggacccgga

SEQ ID NO: 898930 - DNA, 33 bp, Homo sapien
acgcgccaagcaagaattgtgaaaggacccgga

SEQ ID NO: 898931 - DNA, 33 bp, Homo sapien
cttggcgcgctttgaacgtgcagtagtaaatgt

SEQ ID NO: 898932 - DNA, 33 bp, Homo sapien
cttggcgcgctttgaatgtgcagtagtaaatgt

SEQ ID NO: 898933 - DNA, 33 bp, Homo sapien
gcatggagagagacgcacatgtagacacccccc

SEQ ID NO: 898934 - DNA, 33 bp, Homo sapien
gcatggagagagacgcgcatgtagacacccccc

SEQ ID NO: 898935 - DNA, 33 bp, Homo sapien
agtgtctgaagtttacaaaaataagcaacgggg

SEQ ID NO: 898936 - DNA, 33 bp, Homo sapien
agtgtctgaagtttacgaaaataagcaacgggg

SEQ ID NO: 898937 - DNA, 33 bp, Homo sapien
tggtggaataggtaaaccactgtcaaatagaat

SEQ ID NO: 898938 - DNA, 33 bp, Homo sapien
tggtggaataggtaaatcactgtcaaatagaat

SEQ ID NO: 898939 - DNA, 33 bp, Homo sapien
gagcagagcagcctgactcagaaagtgggagac

SEQ ID NO: 898940 - DNA, 33 bp, Homo sapien
gagcagagcagcctgattcagaaagtgggagac

SEQ ID NO: 898941 - DNA, 33 bp, Homo sapien
acacggtgggagaaagaaagatgtcagaatgtc

SEQ ID NO: 898942 - DNA, 33 bp, Homo sapien
acacggtgggagaaaggaagatgtcagaatgtc

SEQ ID NO: 898943 - DNA, 33 bp, Homo sapien
cccccatcagagccacacaactttaccaggtgc

SEQ ID NO: 898944 - DNA, 33 bp, Homo sapien
cccccatcagagccacgcaactttaccaggtgc

SEQ ID NO: 898945 - DNA, 33 bp, Homo sapien
atttaaattcaaatagccacatatgggtagtgg

SEQ ID NO: 898946 - DNA, 33 bp, Homo sapien
atttaaattcaaatagtcacatatgggtagtgg

SEQ ID NO: 898947 - DNA, 33 bp, Homo sapien
ctgacttacctctgtcccctatgtatgtgctga

SEQ ID NO: 898948 - DNA, 33 bp, Homo sapien
ctgacttacctctgtctcctatgtatgtgctga

SEQ ID NO: 898949 - DNA, 33 bp, Homo sapien
tggaaactcacactgccgatcttctgcactgcc

SEQ ID NO: 898950 - DNA, 33 bp, Homo sapien
tggaaactcacactgcggatcttctgcactgcc

SEQ ID NO: 898951 - DNA, 33 bp, Homo sapien
ttcaaacaatgtcttacgaagatctcattattt

SEQ ID NO: 898952 - DNA, 33 bp, Homo sapien
ttcaaacaatgtcttatgaagatctcattattt

SEQ ID NO: 898953 - DNA, 33 bp, Homo sapien
ccaaagatataaatcacgcccttcgcaacctaa

SEQ ID NO: 898954 - DNA, 33 bp, Homo sapien
ccaaagatataaatcatgcccttcgcaacctaa

SEQ ID NO: 898955 - DNA, 33 bp, Homo sapien
cactagattgtaaacactaacataactgatcta

SEQ ID NO: 898956 - DNA, 33 bp, Homo sapien
cactagattgtaaacagtaacataactgatcta

SEQ ID NO: 898957 - DNA, 33 bp, Homo sapien
atacagtaggtgttcaagatacttcattctcta

SEQ ID NO: 898958 - DNA, 33 bp, Homo sapien
atacagtaggtgttcaggatacttcattctcta

SEQ ID NO: 898959 - DNA, 33 bp, Homo sapien
tgtctgccagagataaagtctcttgccatcatg

SEQ ID NO: 898960 - DNA, 33 bp, Homo sapien
tgtctgccagagataatgtctcttgccatcatg

SEQ ID NO: 898961 - DNA, 33 bp, Homo sapien
ctactggaaatgagaacggaaatgaggctcagg

SEQ ID NO: 898962 - DNA, 33 bp, Homo sapien
ctactggaaatgagaatggaaatgaggctcagg

SEQ ID NO: 898963 - DNA, 33 bp, Homo sapien
ctcccaagtcccttcaaatacatggaaaacctt

SEQ ID NO: 898964 - DNA, 33 bp, Homo sapien
ctcccaagtcccttcagatacatggaaaacctt

SEQ ID NO: 898965 - DNA, 33 bp, Homo sapien
ggtgccattgactgaactgaggagcaaagggaa

SEQ ID NO: 898966 - DNA, 33 bp, Homo sapien
ggtgccattgactgaattgaggagcaaagggaa

SEQ ID NO: 898967 - DNA, 33 bp, Homo sapien
tgtgaactcaattctaaccacctgaggctttaa

SEQ ID NO: 898968 - DNA, 33 bp, Homo sapien
tgtgaactcaattctatccacctgaggctttaa

SEQ ID NO: 898969 - DNA, 33 bp, Homo sapien
ttgtggaatagctgtacatatctgggggggtat

SEQ ID NO: 898970 - DNA, 33 bp, Homo sapien
ttgtggaatagctgtatatatctgggggggtat

SEQ ID NO: 898971 - DNA, 33 bp, Homo sapien
ccacgctcttccaccaagtttttagtttttgcc

SEQ ID NO: 898972 - DNA, 33 bp, Homo sapien
ccacgctcttccaccaggtttttagtttttgcc

SEQ ID NO: 898973 - DNA, 33 bp, Homo sapien
aaaatcttaccaactacactcttgaaccacagc

SEQ ID NO: 898974 - DNA, 33 bp, Homo sapien
aaaatcttaccaactatactcttgaaccacagc

SEQ ID NO: 898975 - DNA, 33 bp, Homo sapien
aaaatgataagagtgaactaaattatatatttg

SEQ ID NO: 898976 - DNA, 33 bp, Homo sapien
aaaatgataagagtgacctaaattatatatttg

SEQ ID NO: 898977 - DNA, 33 bp, Homo sapien
ctgcataccctatagcaaataattttcagggaa

SEQ ID NO: 898978 - DNA, 33 bp, Homo sapien
ctgcataccctatagccaataattttcagggaa

SEQ ID NO: 898979 - DNA, 33 bp, Homo sapien
ttagatcagtctttcaaaaaaatacatggaaaa

SEQ ID NO: 898980 - DNA, 33 bp, Homo sapien
ttagatcagtctttcagaaaaatacatggaaaa

SEQ ID NO: 898981 - DNA, 33 bp, Homo sapien
accaatttctgagtaacacaaaaaacagaagaa

SEQ ID NO: 898982 - DNA, 33 bp, Homo sapien
accaatttctgagtaatacaaaaaacagaagaa

SEQ ID NO: 898983 - DNA, 33 bp, Homo sapien
atatattgatgaacgacggtcaggtcaatgttg

SEQ ID NO: 898984 - DNA, 33 bp, Homo sapien
atatattgatgaacgatggtcaggtcaatgttg

SEQ ID NO: 898985 - DNA, 33 bp, Homo sapien
ttgttggctaaaggacactaaactggctaaact

SEQ ID NO: 898986 - DNA, 33 bp, Homo sapien
ttgttggctaaaggaccctaaactggctaaact

SEQ ID NO: 898987 - DNA, 33 bp, Homo sapien
ttctaggtaattgttaccatgcactggtctatt

SEQ ID NO: 898988 - DNA, 33 bp, Homo sapien
ttctaggtaattgttatcatgcactggtctatt

SEQ ID NO: 898989 - DNA, 33 bp, Homo sapien
acatgtaatagtgatcaacttcaccaaccacca

SEQ ID NO: 898990 - DNA, 33 bp, Homo sapien
acatgtaatagtgatcgacttcaccaaccacca

SEQ ID NO: 898991 - DNA, 33 bp, Homo sapien
ggtcaggaagcccccaagtgagcagagaggcta

SEQ ID NO: 898992 - DNA, 33 bp, Homo sapien
ggtcaggaagcccccaggtgagcagagaggcta

SEQ ID NO: 898993 - DNA, 33 bp, Homo sapien
cctttttagatcaaaactggcagcctcacagtt

SEQ ID NO: 898994 - DNA, 33 bp, Homo sapien
cctttttagatcaaaagtggcagcctcacagtt

SEQ ID NO: 898995 - DNA, 33 bp, Homo sapien
ctagttggatctggaaaacagatagtagtgaga

SEQ ID NO: 898996 - DNA, 33 bp, Homo sapien
ctagttggatctggaagacagatagtagtgaga

SEQ ID NO: 898997 - DNA, 33 bp, Homo sapien
tacagtacttcagaaaactgagatatgaatata

SEQ ID NO: 898998 - DNA, 33 bp, Homo sapien
tacagtacttcagaaatctgagatatgaatata

SEQ ID NO: 898999 - DNA, 33 bp, Homo sapien
acaaaaattgatgttacgctcatctttctaaag

SEQ ID NO: 899000 - DNA, 33 bp, Homo sapien
acaaaaattgatgttatgctcatctttctaaag

SEQ ID NO: 899001 - DNA, 33 bp, Homo sapien
ctgagttgggatgggacgctataatctctctac

SEQ ID NO: 899002 - DNA, 33 bp, Homo sapien
ctgagttgggatgggatgctataatctctctac

SEQ ID NO: 899003 - DNA, 33 bp, Homo sapien
agaatgttgggaggttgaaataggctgcttcat

SEQ ID NO: 899004 - DNA, 33 bp, Homo sapien
agaatgttgggaggtttaaataggctgcttcat

SEQ ID NO: 899005 - DNA, 33 bp, Homo sapien
ggtattgtcctagccaatggaggtacagaggtg

SEQ ID NO: 899006 - DNA, 33 bp, Homo sapien
ggtattgtcctagccagtggaggtacagaggtg

SEQ ID NO: 899007 - DNA, 33 bp, Homo sapien
acattgaaacagacagcagaaattttatagtag

SEQ ID NO: 899008 - DNA, 33 bp, Homo sapien
acattgaaacagacagtagaaattttatagtag

SEQ ID NO: 899009 - DNA, 33 bp, Homo sapien
ctctctgttcctaatacaaaagtctccattcat

SEQ ID NO: 899010 - DNA, 33 bp, Homo sapien
ctctctgttcctaatagaaaagtctccattcat

SEQ ID NO: 899011 - DNA, 33 bp, Homo sapien
tgctgctccaaggctcaagtactttgtaagatt

SEQ ID NO: 899012 - DNA, 33 bp, Homo sapien
tgctgctccaaggctcgagtactttgtaagatt

SEQ ID NO: 899013 - DNA, 33 bp, Homo sapien
gggaagtggggcataccgagttttaagtaagtt

SEQ ID NO: 899014 - DNA, 33 bp, Homo sapien
gggaagtggggcatactgagttttaagtaagtt

SEQ ID NO: 899015 - DNA, 33 bp, Homo sapien
tctttcttttttaaatcatcaggaatgaagtgt

SEQ ID NO: 899016 - DNA, 33 bp, Homo sapien
tctttcttttttaaatgatcaggaatgaagtgt

SEQ ID NO: 899017 - DNA, 33 bp, Homo sapien
aagaaagcaaagcagacaagaaggataaggagt

SEQ ID NO: 899018 - DNA, 33 bp, Homo sapien
aagaaagcaaagcagagaagaaggataaggagt

SEQ ID NO: 899019 - DNA, 33 bp, Homo sapien
taagacgaaggcaatacggctaagtttacacac

SEQ ID NO: 899020 - DNA, 33 bp, Homo sapien
taagacgaaggcaatatggctaagtttacacac

SEQ ID NO: 899021 - DNA, 33 bp, Homo sapien
cacacatacacagacaaagaattcaactaaagt

SEQ ID NO: 899022 - DNA, 33 bp, Homo sapien
cacacatacacagacagagaattcaactaaagt

SEQ ID NO: 899023 - DNA, 33 bp, Homo sapien
actgaattcgtgaataacatactctgtttctgc

SEQ ID NO: 899024 - DNA, 33 bp, Homo sapien
actgaattcgtgaatagcatactctgtttctgc

SEQ ID NO: 899025 - DNA, 33 bp, Homo sapien
cttcacgtgagcccagaacacaactgcagttca

SEQ ID NO: 899026 - DNA, 33 bp, Homo sapien
cttcacgtgagcccaggacacaactgcagttca

SEQ ID NO: 899027 - DNA, 33 bp, Homo sapien
cacaactgtgtaggcaccactttccactgccac

SEQ ID NO: 899028 - DNA, 33 bp, Homo sapien
cacaactgtgtaggcatcactttccactgccac

SEQ ID NO: 899029 - DNA, 33 bp, Homo sapien
agttcttaaaaatctaccacaccaggagaaaga

SEQ ID NO: 899030 - DNA, 33 bp, Homo sapien
agttcttaaaaatctatcacaccaggagaaaga

SEQ ID NO: 899031 - DNA, 33 bp, Homo sapien
gaaaaattgcgtccacactggagtctcatctca

SEQ ID NO: 899032 - DNA, 33 bp, Homo sapien
gaaaaattgcgtccacgctggagtctcatctca

SEQ ID NO: 899033 - DNA, 33 bp, Homo sapien
ggtctagagagactgacaggatttctaattttc

SEQ ID NO: 899034 - DNA, 33 bp, Homo sapien
ggtctagagagactgagaggatttctaattttc

SEQ ID NO: 899035 - DNA, 33 bp, Homo sapien
atagtttaaagcagaaaaatgtttgtgtatcta

SEQ ID NO: 899036 - DNA, 33 bp, Homo sapien
atagtttaaagcagaataatgtttgtgtatcta

SEQ ID NO: 899037 - DNA, 33 bp, Homo sapien
ctactatgctgattaacgcctgaaatagtagga

SEQ ID NO: 899038 - DNA, 33 bp, Homo sapien
ctactatgctgattaatgcctgaaatagtagga

SEQ ID NO: 899039 - DNA, 33 bp, Homo sapien
ttaacagcattattcagggtagccaaaaagtgt

SEQ ID NO: 899040 - DNA, 33 bp, Homo sapien
ttaacagcattattcatggtagccaaaaagtgt

SEQ ID NO: 899041 - DNA, 33 bp, Homo sapien
aacatgacatagtggccgcatggaacatgggtg

SEQ ID NO: 899042 - DNA, 33 bp, Homo sapien
aacatgacatagtggctgcatggaacatgggtg

SEQ ID NO: 899043 - DNA, 33 bp, Homo sapien
caaaacgatttgttcagccaaacctatctggct

SEQ ID NO: 899044 - DNA, 33 bp, Homo sapien
caaaacgatttgttcatccaaacctatctggct

SEQ ID NO: 899045 - DNA, 33 bp, Homo sapien
aggacaactcaggtgaacaatcattacaaatga

SEQ ID NO: 899046 - DNA, 33 bp, Homo sapien
aggacaactcaggtgagcaatcattacaaatga

SEQ ID NO: 899047 - DNA, 33 bp, Homo sapien
gctcaataaatgtttaaccaaatctatttacat

SEQ ID NO: 899048 - DNA, 33 bp, Homo sapien
gctcaataaatgtttagccaaatctatttacat

SEQ ID NO: 899049 - DNA, 33 bp, Homo sapien
tagttgacaaacaatacctgtgttaatacctag

SEQ ID NO: 899050 - DNA, 33 bp, Homo sapien
tagttgacaaacaatatctgtgttaatacctag

SEQ ID NO: 899051 - DNA, 33 bp, Homo sapien
aagagaagcaagaccacagttttaatacttagt

SEQ ID NO: 899052 - DNA, 33 bp, Homo sapien
aagagaagcaagaccagagttttaatacttagt

SEQ ID NO: 899053 - DNA, 33 bp, Homo sapien
cagtttgctttcccagcagagctcttcctgttc

SEQ ID NO: 899054 - DNA, 33 bp, Homo sapien
cagtttgctttcccagtagagctcttcctgttc

SEQ ID NO: 899055 - DNA, 33 bp, Homo sapien
atgatattgggagatgaatttgcaacaatataa

SEQ ID NO: 899056 - DNA, 33 bp, Homo sapien
atgatattgggagatgcatttgcaacaatataa

SEQ ID NO: 899057 - DNA, 33 bp, Homo sapien
agtttcgccctgccaaaggtgcaagtattaggt

SEQ ID NO: 899058 - DNA, 33 bp, Homo sapien
agtttcgccctgccaacggtgcaagtattaggt

SEQ ID NO: 899059 - DNA, 33 bp, Homo sapien
atgactctgatacttacgctcctttacatttaa

SEQ ID NO: 899060 - DNA, 33 bp, Homo sapien
atgactctgatacttatgctcctttacatttaa

SEQ ID NO: 899061 - DNA, 33 bp, Homo sapien
cctgctcagcaacctcagagaaaaggaggcccc

SEQ ID NO: 899062 - DNA, 33 bp, Homo sapien
cctgctcagcaacctcggagaaaaggaggcccc

SEQ ID NO: 899063 - DNA, 33 bp, Homo sapien
aagtactgacacaatacgttagcaatttcagaa

SEQ ID NO: 899064 - DNA, 33 bp, Homo sapien
aagtactgacacaatatgttagcaatttcagaa

SEQ ID NO: 899065 - DNA, 33 bp, Homo sapien
aggaaacagtctttcacaatagctagcagtgat

SEQ ID NO: 899066 - DNA, 33 bp, Homo sapien
aggaaacagtctttcataatagctagcagtgat

SEQ ID NO: 899067 - DNA, 33 bp, Homo sapien
gtagataagaacactaaggaaccaagatttaga

SEQ ID NO: 899068 - DNA, 33 bp, Homo sapien
gtagataagaacactatggaaccaagatttaga

SEQ ID NO: 899069 - DNA, 33 bp, Homo sapien
gccctattgtctgaacactgttttgatgtagac

SEQ ID NO: 899070 - DNA, 33 bp, Homo sapien
gccctattgtctgaacgctgttttgatgtagac

SEQ ID NO: 899071 - DNA, 33 bp, Homo sapien
tgtctgatgccctttacgatgaagaatgagagt

SEQ ID NO: 899072 - DNA, 33 bp, Homo sapien
tgtctgatgccctttatgatgaagaatgagagt

SEQ ID NO: 899073 - DNA, 33 bp, Homo sapien
cactgtttgccggcaccagatttcacaggagtt

SEQ ID NO: 899074 - DNA, 33 bp, Homo sapien
cactgtttgccggcactagatttcacaggagtt

SEQ ID NO: 899075 - DNA, 33 bp, Homo sapien
tgaaacttaggcagaaattatgaggcttgggct

SEQ ID NO: 899076 - DNA, 33 bp, Homo sapien
tgaaacttaggcagaagttatgaggcttgggct

SEQ ID NO: 899077 - DNA, 33 bp, Homo sapien
agcagctttcagttcaccataatcacaaggtag

SEQ ID NO: 899078 - DNA, 33 bp, Homo sapien
agcagctttcagttcatcataatcacaaggtag

SEQ ID NO: 899079 - DNA, 33 bp, Homo sapien
ataaatgtatgacaaactgtgaaacagctgatt

SEQ ID NO: 899080 - DNA, 33 bp, Homo sapien
ataaatgtatgacaaattgtgaaacagctgatt

SEQ ID NO: 899081 - DNA, 33 bp, Homo sapien
tgctttctttcctgtcgctgtacccaaggtcca

SEQ ID NO: 899082 - DNA, 33 bp, Homo sapien
tgctttctttcctgtctctgtacccaaggtcca

SEQ ID NO: 899083 - DNA, 33 bp, Homo sapien
gcagtctaggctgttgcagactccaaaccaacc

SEQ ID NO: 899084 - DNA, 33 bp, Homo sapien
gcagtctaggctgttgtagactccaaaccaacc

SEQ ID NO: 899085 - DNA, 33 bp, Homo sapien
cagcactcctcgttccagctcattggacagaac

SEQ ID NO: 899086 - DNA, 33 bp, Homo sapien
cagcactcctcgttccggctcattggacagaac

SEQ ID NO: 899087 - DNA, 33 bp, Homo sapien
gctggctggatatttacgtggttaattttatgt

SEQ ID NO: 899088 - DNA, 33 bp, Homo sapien
gctggctggatatttatgtggttaattttatgt

SEQ ID NO: 899089 - DNA, 33 bp, Homo sapien
gctggaagtgcattccacctctgggacctggaa

SEQ ID NO: 899090 - DNA, 33 bp, Homo sapien
gctggaagtgcattccgcctctgggacctggaa

SEQ ID NO: 899091 - DNA, 33 bp, Homo sapien
ggcattttgcacaaacgctcaacaaacattcct

SEQ ID NO: 899092 - DNA, 33 bp, Homo sapien
ggcattttgcacaaactctcaacaaacattcct

SEQ ID NO: 899093 - DNA, 33 bp, Homo sapien
aatgattgaattgcaactaagagcctatgccat

SEQ ID NO: 899094 - DNA, 33 bp, Homo sapien
aatgattgaattgcaattaagagcctatgccat

SEQ ID NO: 899095 - DNA, 33 bp, Homo sapien
aactcaggtttccttcaatgacctcccacagct

SEQ ID NO: 899096 - DNA, 33 bp, Homo sapien
aactcaggtttccttcgatgacctcccacagct

SEQ ID NO: 899097 - DNA, 33 bp, Homo sapien
cttctgcgccctggagcatttgccacctttttt

SEQ ID NO: 899098 - DNA, 33 bp, Homo sapien
cttctgcgccctggaggatttgccacctttttt

SEQ ID NO: 899099 - DNA, 33 bp, Homo sapien
cttgagcttgttaccaaactctgtgggccagtc

SEQ ID NO: 899100 - DNA, 33 bp, Homo sapien
cttgagcttgttaccagactctgtgggccagtc

SEQ ID NO: 899101 - DNA, 33 bp, Homo sapien
ctctctccttgagcaaaatgaactatctctgtt

SEQ ID NO: 899102 - DNA, 33 bp, Homo sapien
ctctctccttgagcaagatgaactatctctgtt

SEQ ID NO: 899103 - DNA, 33 bp, Homo sapien
actttcaagggaaatacgagatgctgtgtgtgt

SEQ ID NO: 899104 - DNA, 33 bp, Homo sapien
actttcaagggaaataggagatgctgtgtgtgt

SEQ ID NO: 899105 - DNA, 33 bp, Homo sapien
attaaagcttgggatacgcagtgctggaagaca

SEQ ID NO: 899106 - DNA, 33 bp, Homo sapien
attaaagcttgggatatgcagtgctggaagaca

SEQ ID NO: 899107 - DNA, 33 bp, Homo sapien
tttggaatgacactgaactggcagacggggctt

SEQ ID NO: 899108 - DNA, 33 bp, Homo sapien
tttggaatgacactgatctggcagacggggctt

SEQ ID NO: 899109 - DNA, 33 bp, Homo sapien
aattgtttactcactacgagacttcagccatat

SEQ ID NO: 899110 - DNA, 33 bp, Homo sapien
aattgtttactcactatgagacttcagccatat

SEQ ID NO: 899111 - DNA, 33 bp, Homo sapien
tgtgacatataggaaaaaaaggacaggataaaa

SEQ ID NO: 899112 - DNA, 33 bp, Homo sapien
tgtgacatataggaaagaaaggacaggataaaa

SEQ ID NO: 899113 - DNA, 33 bp, Homo sapien
aggtggcaggcttaaaatagttgagattgcctg

SEQ ID NO: 899114 - DNA, 33 bp, Homo sapien
aggtggcaggcttaaagtagttgagattgcctg

SEQ ID NO: 899115 - DNA, 33 bp, Homo sapien
gcatggtagaaatgcaaaatcttaggctccacc

SEQ ID NO: 899116 - DNA, 33 bp, Homo sapien
gcatggtagaaatgcagaatcttaggctccacc

SEQ ID NO: 899117 - DNA, 33 bp, Homo sapien
gggtcacggcccataaatgaaaatacactagta

SEQ ID NO: 899118 - DNA, 33 bp, Homo sapien
gggtcacggcccataattgaaaatacactagta

SEQ ID NO: 899119 - DNA, 33 bp, Homo sapien
agatccccaaagacaacagatgagctctcacca

SEQ ID NO: 899120 - DNA, 33 bp, Homo sapien
agatccccaaagacaatagatgagctctcacca

SEQ ID NO: 899121 - DNA, 33 bp, Homo sapien
gcctgatagacataacaatttgaatgtatcatg

SEQ ID NO: 899122 - DNA, 33 bp, Homo sapien
gcctgatagacataactatttgaatgtatcatg

SEQ ID NO: 899123 - DNA, 33 bp, Homo sapien
aaaggaacaatctttaagactgtgcatagcctc

SEQ ID NO: 899124 - DNA, 33 bp, Homo sapien
aaaggaacaatctttacgactgtgcatagcctc

SEQ ID NO: 899125 - DNA, 33 bp, Homo sapien
cagatgaaacctttcacatactcctcctcaatt

SEQ ID NO: 899126 - DNA, 33 bp, Homo sapien
cagatgaaacctttcagatactcctcctcaatt

SEQ ID NO: 899127 - DNA, 33 bp, Homo sapien
aacacagtaagcattaaataagtgctaattatc

SEQ ID NO: 899128 - DNA, 33 bp, Homo sapien
aacacagtaagcattacataagtgctaattatc

SEQ ID NO: 899129 - DNA, 33 bp, Homo sapien
gagagggaaattctagaaccatttggaagctgg

SEQ ID NO: 899130 - DNA, 33 bp, Homo sapien
gagagggaaattctagcaccatttggaagctgg

SEQ ID NO: 899131 - DNA, 33 bp, Homo sapien
tttgtttttctcaacaatatgttgttacagcat

SEQ ID NO: 899132 - DNA, 33 bp, Homo sapien
tttgtttttctcaacagtatgttgttacagcat

SEQ ID NO: 899133 - DNA, 33 bp, Homo sapien
gtgtgagaagcaacaactgccctggagacccag

SEQ ID NO: 899134 - DNA, 33 bp, Homo sapien
gtgtgagaagcaacaagtgccctggagacccag

SEQ ID NO: 899135 - DNA, 33 bp, Homo sapien
atggttaaagccaagaaaccaggagctatgatg

SEQ ID NO: 899136 - DNA, 33 bp, Homo sapien
atggttaaagccaagagaccaggagctatgatg

SEQ ID NO: 899137 - DNA, 33 bp, Homo sapien
tggtcagacaccaagacgtgggggatttttgct

SEQ ID NO: 899138 - DNA, 33 bp, Homo sapien
tggtcagacaccaagatgtgggggatttttgct

SEQ ID NO: 899139 - DNA, 33 bp, Homo sapien
tgcggggtaggtaggacatttctgcaatgaggt

SEQ ID NO: 899140 - DNA, 33 bp, Homo sapien
tgcggggtaggtaggagatttctgcaatgaggt

SEQ ID NO: 899141 - DNA, 33 bp, Homo sapien
ttcatgacacttgttacagatgtcaagaaagac

SEQ ID NO: 899142 - DNA, 33 bp, Homo sapien
ttcatgacacttgttagagatgtcaagaaagac

SEQ ID NO: 899143 - DNA, 33 bp, Homo sapien
gatcattgtatatgagaaataaagtggccaaga

SEQ ID NO: 899144 - DNA, 33 bp, Homo sapien
gatcattgtatatgaggaataaagtggccaaga

SEQ ID NO: 899145 - DNA, 33 bp, Homo sapien
tttgcagaaatgaaaactgaggccttagataga

SEQ ID NO: 899146 - DNA, 33 bp, Homo sapien
tttgcagaaatgaaaagtgaggccttagataga

SEQ ID NO: 899147 - DNA, 33 bp, Homo sapien
agcccgggtatcattgaagtccatgtcaatggc

SEQ ID NO: 899148 - DNA, 33 bp, Homo sapien
agcccgggtatcattgtagtccatgtcaatggc

SEQ ID NO: 899149 - DNA, 33 bp, Homo sapien
tatcgagcctctactacgggtagggcacattct

SEQ ID NO: 899150 - DNA, 33 bp, Homo sapien
tatcgagcctctactatgggtagggcacattct

SEQ ID NO: 899151 - DNA, 33 bp, Homo sapien
ccctgataggcagaagaaatgaaatgcattaaa

SEQ ID NO: 899152 - DNA, 33 bp, Homo sapien
ccctgataggcagaaggaatgaaatgcattaaa

SEQ ID NO: 899153 - DNA, 33 bp, Homo sapien
ataccccttgtgaaggaatagggatgagcattc

SEQ ID NO: 899154 - DNA, 33 bp, Homo sapien
ataccccttgtgaaggcatagggatgagcattc

SEQ ID NO: 899155 - DNA, 33 bp, Homo sapien
ttggagtaagggaagtcaacaaggccaacaaag

SEQ ID NO: 899156 - DNA, 33 bp, Homo sapien
ttggagtaagggaagtgaacaaggccaacaaag

SEQ ID NO: 899157 - DNA, 33 bp, Homo sapien
tgttgcaatgtgcaaacaacaatgaggaaacaa

SEQ ID NO: 899158 - DNA, 33 bp, Homo sapien
tgttgcaatgtgcaaagaacaatgaggaaacaa

SEQ ID NO: 899159 - DNA, 33 bp, Homo sapien
agtgatcttggcttaactctaacctcatcctga

SEQ ID NO: 899160 - DNA, 33 bp, Homo sapien
agtgatcttggcttaattctaacctcatcctga

SEQ ID NO: 899161 - DNA, 33 bp, Homo sapien
gcactatgttcccaacactattctaatttaagc

SEQ ID NO: 899162 - DNA, 33 bp, Homo sapien
gcactatgttcccaacgctattctaatttaagc

SEQ ID NO: 899163 - DNA, 33 bp, Homo sapien
taaaataaacagcaagcagtaagtcattagcaa

SEQ ID NO: 899164 - DNA, 33 bp, Homo sapien
taaaataaacagcaagtagtaagtcattagcaa

SEQ ID NO: 899165 - DNA, 33 bp, Homo sapien
gggagaaaacaaaacaagattcctgctcgaggt

SEQ ID NO: 899166 - DNA, 33 bp, Homo sapien
gggagaaaacaaaacaggattcctgctcgaggt

SEQ ID NO: 899167 - DNA, 33 bp, Homo sapien
attgtaagattgaaaacgtagggatatgaattt

SEQ ID NO: 899168 - DNA, 33 bp, Homo sapien
attgtaagattgaaaatgtagggatatgaattt

SEQ ID NO: 899169 - DNA, 33 bp, Homo sapien
cacaacattttggagagctgcttgttccctgct

SEQ ID NO: 899170 - DNA, 33 bp, Homo sapien
cacaacattttggagatctgcttgttccctgct

SEQ ID NO: 899171 - DNA, 33 bp, Homo sapien
accctgtgctaacttcaatcattataccttacc

SEQ ID NO: 899172 - DNA, 33 bp, Homo sapien
accctgtgctaacttccatcattataccttacc

SEQ ID NO: 899173 - DNA, 33 bp, Homo sapien
aacctcattgaaacaaaagtgtggcttattcct

SEQ ID NO: 899174 - DNA, 33 bp, Homo sapien
aacctcattgaaacaacagtgtggcttattcct

SEQ ID NO: 899175 - DNA, 33 bp, Homo sapien
tagttgtcatattaccaacatatacttcctgcg

SEQ ID NO: 899176 - DNA, 33 bp, Homo sapien
tagttgtcatattaccgacatatacttcctgcg

SEQ ID NO: 899177 - DNA, 33 bp, Homo sapien
agtcaataagaaaactcaaattgccttttaaca

SEQ ID NO: 899178 - DNA, 33 bp, Homo sapien
agtcaataagaaaactgaaattgccttttaaca

SEQ ID NO: 899179 - DNA, 33 bp, Homo sapien
attcaataatgcatgacaaatggcctgtaaact

SEQ ID NO: 899180 - DNA, 33 bp, Homo sapien
attcaataatgcatgataaatggcctgtaaact

SEQ ID NO: 899181 - DNA, 33 bp, Homo sapien
gagtcagataggcctacgttgcgagtcagagag

SEQ ID NO: 899182 - DNA, 33 bp, Homo sapien
gagtcagataggcctatgttgcgagtcagagag

SEQ ID NO: 899183 - DNA, 33 bp, Homo sapien
aaaactgcaggtcttacggactgattgctgtcg

SEQ ID NO: 899184 - DNA, 33 bp, Homo sapien
aaaactgcaggtcttatggactgattgctgtcg

SEQ ID NO: 899185 - DNA, 33 bp, Homo sapien
tgatctttaaaataaaactgggcatagaatttc

SEQ ID NO: 899186 - DNA, 33 bp, Homo sapien
tgatctttaaaataaagctgggcatagaatttc

SEQ ID NO: 899187 - DNA, 33 bp, Homo sapien
gaagtttcagaacacgccatcgctgccctttca

SEQ ID NO: 899188 - DNA, 33 bp, Homo sapien
gaagtttcagaacacgtcatcgctgccctttca

SEQ ID NO: 899189 - DNA, 33 bp, Homo sapien
aggaatcacccagtcaaacagctgcaggtaaag

SEQ ID NO: 899190 - DNA, 33 bp, Homo sapien
aggaatcacccagtcacacagctgcaggtaaag

SEQ ID NO: 899191 - DNA, 33 bp, Homo sapien
gtccaaataattataacaagtccagagttcatt

SEQ ID NO: 899192 - DNA, 33 bp, Homo sapien
gtccaaataattataataagtccagagttcatt

SEQ ID NO: 899193 - DNA, 33 bp, Homo sapien
tgttaacattatgaaacaaacaatgaactctgg

SEQ ID NO: 899194 - DNA, 33 bp, Homo sapien
tgttaacattatgaaagaaacaatgaactctgg

SEQ ID NO: 899195 - DNA, 33 bp, Homo sapien
actctggtgtctgaaccagaagatatagatcct

SEQ ID NO: 899196 - DNA, 33 bp, Homo sapien
actctggtgtctgaactagaagatatagatcct

SEQ ID NO: 899197 - DNA, 33 bp, Homo sapien
agggagcccaaatggaactgggtgcagagctgc

SEQ ID NO: 899198 - DNA, 33 bp, Homo sapien
agggagcccaaatggagctgggtgcagagctgc

SEQ ID NO: 899199 - DNA, 33 bp, Homo sapien
ataaaatgcgtgaaaccaaagaaatgtattact

SEQ ID NO: 899200 - DNA, 33 bp, Homo sapien
ataaaatgcgtgaaacgaaagaaatgtattact

SEQ ID NO: 899201 - DNA, 33 bp, Homo sapien
agaaatgtattactcacaagtcccagactggct

SEQ ID NO: 899202 - DNA, 33 bp, Homo sapien
agaaatgtattactcagaagtcccagactggct

SEQ ID NO: 899203 - DNA, 33 bp, Homo sapien
catccatttttaggcccgacgtaagttgtttaa

SEQ ID NO: 899204 - DNA, 33 bp, Homo sapien
catccatttttaggcctgacgtaagttgtttaa

SEQ ID NO: 899205 - DNA, 33 bp, Homo sapien
aggttttttcccagccaactgaattacttttct

SEQ ID NO: 899206 - DNA, 33 bp, Homo sapien
aggttttttcccagccgactgaattacttttct

SEQ ID NO: 899207 - DNA, 33 bp, Homo sapien
tattcatccattatcccatcttcaaggaccaga

SEQ ID NO: 899208 - DNA, 33 bp, Homo sapien
tattcatccattatcctatcttcaaggaccaga

SEQ ID NO: 899209 - DNA, 33 bp, Homo sapien
ttgaccttcatgaacaacctgtaaaactagcag

SEQ ID NO: 899210 - DNA, 33 bp, Homo sapien
ttgaccttcatgaacatcctgtaaaactagcag

SEQ ID NO: 899211 - DNA, 33 bp, Homo sapien
tggtctgggatgtggacggagagcaaagaaatt

SEQ ID NO: 899212 - DNA, 33 bp, Homo sapien
tggtctgggatgtggatggagagcaaagaaatt

SEQ ID NO: 899213 - DNA, 33 bp, Homo sapien
actcacaaggagaagaagccatgtagagatgaa

SEQ ID NO: 899214 - DNA, 33 bp, Homo sapien
actcacaaggagaagaggccatgtagagatgaa

SEQ ID NO: 899215 - DNA, 33 bp, Homo sapien
atgggagaagattgtacagttttcaagtgggaa

SEQ ID NO: 899216 - DNA, 33 bp, Homo sapien
atgggagaagattgtatagttttcaagtgggaa

SEQ ID NO: 899217 - DNA, 33 bp, Homo sapien
gatttcaataccccaaatggagaagtctcagaa

SEQ ID NO: 899218 - DNA, 33 bp, Homo sapien
gatttcaataccccaagtggagaagtctcagaa

SEQ ID NO: 899219 - DNA, 33 bp, Homo sapien
gttcctcctgtcttaaagtctttctttctgttc

SEQ ID NO: 899220 - DNA, 33 bp, Homo sapien
gttcctcctgtcttaaggtctttctttctgttc

SEQ ID NO: 899221 - DNA, 33 bp, Homo sapien
tcctatctaacagaaaaatttctaccattgctc

SEQ ID NO: 899222 - DNA, 33 bp, Homo sapien
tcctatctaacagaaacatttctaccattgctc

SEQ ID NO: 899223 - DNA, 33 bp, Homo sapien
aaatgtcaaggaagacagatccaagaaatacta

SEQ ID NO: 899224 - DNA, 33 bp, Homo sapien
aaatgtcaaggaagacggatccaagaaatacta

SEQ ID NO: 899225 - DNA, 33 bp, Homo sapien
tacacagaaatagtaacagtgcctaccttaaag

SEQ ID NO: 899226 - DNA, 33 bp, Homo sapien
tacacagaaatagtaatagtgcctaccttaaag

SEQ ID NO: 899227 - DNA, 33 bp, Homo sapien
ttaaaatgtgacctgacgatacctcaaaatttt

SEQ ID NO: 899228 - DNA, 33 bp, Homo sapien
ttaaaatgtgacctgatgatacctcaaaatttt

SEQ ID NO: 899229 - DNA, 33 bp, Homo sapien
gtacatatgttttgtacacagctaattataata

SEQ ID NO: 899230 - DNA, 33 bp, Homo sapien
gtacatatgttttgtatacagctaattataata

SEQ ID NO: 899231 - DNA, 33 bp, Homo sapien
gctgtggcatctacacaggggttagtatgtggg

SEQ ID NO: 899232 - DNA, 33 bp, Homo sapien
gctgtggcatctacacgggggttagtatgtggg

SEQ ID NO: 899233 - DNA, 33 bp, Homo sapien
cttttctaaagtctcacgcttatcataagggat

SEQ ID NO: 899234 - DNA, 33 bp, Homo sapien
cttttctaaagtctcatgcttatcataagggat

SEQ ID NO: 899235 - DNA, 33 bp, Homo sapien
aacactgagttgtaaacaggtggagcattgaag

SEQ ID NO: 899236 - DNA, 33 bp, Homo sapien
aacactgagttgtaaataggtggagcattgaag

SEQ ID NO: 899237 - DNA, 33 bp, Homo sapien
ttctgcttcctttaaccgataggatgctgtttt

SEQ ID NO: 899238 - DNA, 33 bp, Homo sapien
ttctgcttcctttaactgataggatgctgtttt

SEQ ID NO: 899239 - DNA, 33 bp, Homo sapien
acactttctagaagtcacctttattctctttaa

SEQ ID NO: 899240 - DNA, 33 bp, Homo sapien
acactttctagaagtcgcctttattctctttaa

SEQ ID NO: 899241 - DNA, 33 bp, Homo sapien
tggatgccacaactaccggaaacgctctgacag

SEQ ID NO: 899242 - DNA, 33 bp, Homo sapien
tggatgccacaactactggaaacgctctgacag

SEQ ID NO: 899243 - DNA, 33 bp, Homo sapien
aagaagacaaaggtcaatatggaatcagggaag

SEQ ID NO: 899244 - DNA, 33 bp, Homo sapien
aagaagacaaaggtcagtatggaatcagggaag

SEQ ID NO: 899245 - DNA, 33 bp, Homo sapien
ctttaatctgtgtatactagtcacaacatttca

SEQ ID NO: 899246 - DNA, 33 bp, Homo sapien
ctttaatctgtgtatattagtcacaacatttca

SEQ ID NO: 899247 - DNA, 33 bp, Homo sapien
ggcgtcatcaaaggtacctgccatcacggagct

SEQ ID NO: 899248 - DNA, 33 bp, Homo sapien
ggcgtcatcaaaggtatctgccatcacggagct

SEQ ID NO: 899249 - DNA, 33 bp, Homo sapien
gaaccttctactggaaaccttcattcctaacag

SEQ ID NO: 899250 - DNA, 33 bp, Homo sapien
gaaccttctactggaagccttcattcctaacag

SEQ ID NO: 899251 - DNA, 33 bp, Homo sapien
agtttatatccttgtgaaatttgatctagcttg

SEQ ID NO: 899252 - DNA, 33 bp, Homo sapien
agtttatatccttgtgtaatttgatctagcttg

SEQ ID NO: 899253 - DNA, 33 bp, Homo sapien
tagtgcagaatgtgtcaaactcctttcccaaag

SEQ ID NO: 899254 - DNA, 33 bp, Homo sapien
tagtgcagaatgtgtcgaactcctttcccaaag

SEQ ID NO: 899255 - DNA, 33 bp, Homo sapien
agaggtgatggggtgtcaagtgtgataaagttg

SEQ ID NO: 899256 - DNA, 33 bp, Homo sapien
agaggtgatggggtgtgaagtgtgataaagttg

SEQ ID NO: 899257 - DNA, 33 bp, Homo sapien
aaaaagcaataggttccaaagtctgtcttgtcc

SEQ ID NO: 899258 - DNA, 33 bp, Homo sapien
aaaaagcaataggttcgaaagtctgtcttgtcc

SEQ ID NO: 899259 - DNA, 33 bp, Homo sapien
gttttccctttaataacctcaagacctctttca

SEQ ID NO: 899260 - DNA, 33 bp, Homo sapien
gttttccctttaataatctcaagacctctttca

SEQ ID NO: 899261 - DNA, 33 bp, Homo sapien
gtggagtttgactatacccagcctaccacagga

SEQ ID NO: 899262 - DNA, 33 bp, Homo sapien
gtggagtttgactatatccagcctaccacagga

SEQ ID NO: 899263 - DNA, 33 bp, Homo sapien
gtaatgccatgagggaagtttataatttgtatg

SEQ ID NO: 899264 - DNA, 33 bp, Homo sapien
gtaatgccatgagggaggtttataatttgtatg

SEQ ID NO: 899265 - DNA, 33 bp, Homo sapien
cagcagtgtccagcaccgggagttataagtggc

SEQ ID NO: 899266 - DNA, 33 bp, Homo sapien
cagcagtgtccagcactgggagttataagtggc

SEQ ID NO: 899267 - DNA, 33 bp, Homo sapien
acagaaaaaactgcaacataaactctctctctt

SEQ ID NO: 899268 - DNA, 33 bp, Homo sapien
acagaaaaaactgcaagataaactctctctctt

SEQ ID NO: 899269 - DNA, 33 bp, Homo sapien
gagccacagacattccaattacaggtgaggagt

SEQ ID NO: 899270 - DNA, 33 bp, Homo sapien
gagccacagacattccgattacaggtgaggagt

SEQ ID NO: 899271 - DNA, 33 bp, Homo sapien
acatgaatgttcacagaagcaatactcataata

SEQ ID NO: 899272 - DNA, 33 bp, Homo sapien
acatgaatgttcacaggagcaatactcataata

SEQ ID NO: 899273 - DNA, 33 bp, Homo sapien
ctagggcaaataatcaagagtgcaattgctggc

SEQ ID NO: 899274 - DNA, 33 bp, Homo sapien
ctagggcaaataatcaggagtgcaattgctggc

SEQ ID NO: 899275 - DNA, 33 bp, Homo sapien
tgtgcacagtttcccccgatggtgacattttgt

SEQ ID NO: 899276 - DNA, 33 bp, Homo sapien
tgtgcacagtttcccctgatggtgacattttgt

SEQ ID NO: 899277 - DNA, 33 bp, Homo sapien
cactcttgagtgcctacgtattcctaatattgg

SEQ ID NO: 899278 - DNA, 33 bp, Homo sapien
cactcttgagtgcctatgtattcctaatattgg

SEQ ID NO: 899279 - DNA, 33 bp, Homo sapien
atttaagtttaaatccagagtactttcaatcac

SEQ ID NO: 899280 - DNA, 33 bp, Homo sapien
atttaagtttaaatccggagtactttcaatcac

SEQ ID NO: 899281 - DNA, 33 bp, Homo sapien
tcagtgtttgtatagaaattgccaactccctgc

SEQ ID NO: 899282 - DNA, 33 bp, Homo sapien
tcagtgtttgtatagagattgccaactccctgc

SEQ ID NO: 899283 - DNA, 33 bp, Homo sapien
gtctgcacagagtgacactaaaagctgtgctca

SEQ ID NO: 899284 - DNA, 33 bp, Homo sapien
gtctgcacagagtgactctaaaagctgtgctca

SEQ ID NO: 899285 - DNA, 33 bp, Homo sapien
tcataatgtggatgggaaggtagtctctttact

SEQ ID NO: 899286 - DNA, 33 bp, Homo sapien
tcataatgtggatggggaggtagtctctttact

SEQ ID NO: 899287 - DNA, 33 bp, Homo sapien
aatgcagccactggaactctcagaagacagact

SEQ ID NO: 899288 - DNA, 33 bp, Homo sapien
aatgcagccactggaagtctcagaagacagact

SEQ ID NO: 899289 - DNA, 33 bp, Homo sapien
aagtcttatgtggataaaattgatagatagatg

SEQ ID NO: 899290 - DNA, 33 bp, Homo sapien
aagtcttatgtggatacaattgatagatagatg

SEQ ID NO: 899291 - DNA, 33 bp, Homo sapien
aagacgaagggatagaaagaggtaattggaagt

SEQ ID NO: 899292 - DNA, 33 bp, Homo sapien
aagacgaagggatagatagaggtaattggaagt

SEQ ID NO: 899293 - DNA, 33 bp, Homo sapien
agatattgaaataaggccaatcaataaccctac

SEQ ID NO: 899294 - DNA, 33 bp, Homo sapien
agatattgaaataaggtcaatcaataaccctac

SEQ ID NO: 899295 - DNA, 33 bp, Homo sapien
gacatgtagatactcccgacttaaggctcatcc

SEQ ID NO: 899296 - DNA, 33 bp, Homo sapien
gacatgtagatactcctgacttaaggctcatcc

SEQ ID NO: 899297 - DNA, 33 bp, Homo sapien
tgctgactccccaaaagttcctgggatttcagg

SEQ ID NO: 899298 - DNA, 33 bp, Homo sapien
tgctgactccccaaaatttcctgggatttcagg

SEQ ID NO: 899299 - DNA, 33 bp, Homo sapien
agaagggattggccacaaaaaggaaagcacagg

SEQ ID NO: 899300 - DNA, 33 bp, Homo sapien
agaagggattggccacgaaaaggaaagcacagg

SEQ ID NO: 899301 - DNA, 33 bp, Homo sapien
aattatgtattcatacacgcttatactggctac

SEQ ID NO: 899302 - DNA, 33 bp, Homo sapien
aattatgtattcatacgcgcttatactggctac

SEQ ID NO: 899303 - DNA, 33 bp, Homo sapien
ggatcatctttgtgcacgccacagagacccctg

SEQ ID NO: 899304 - DNA, 33 bp, Homo sapien
ggatcatctttgtgcaggccacagagacccctg

SEQ ID NO: 899305 - DNA, 33 bp, Homo sapien
gcatatcctagcagccagaatgattacattaga

SEQ ID NO: 899306 - DNA, 33 bp, Homo sapien
gcatatcctagcagccggaatgattacattaga

SEQ ID NO: 899307 - DNA, 33 bp, Homo sapien
tgtttctttttttccaagcagtgaatgactaac

SEQ ID NO: 899308 - DNA, 33 bp, Homo sapien
tgtttctttttttccaggcagtgaatgactaac

SEQ ID NO: 899309 - DNA, 33 bp, Homo sapien
gttatgaacttgggaaatagaatcaacagaatt

SEQ ID NO: 899310 - DNA, 33 bp, Homo sapien
gttatgaacttgggaagtagaatcaacagaatt

SEQ ID NO: 899311 - DNA, 33 bp, Homo sapien
gcaggtacaggactgacagagtgacaaggacaa

SEQ ID NO: 899312 - DNA, 33 bp, Homo sapien
gcaggtacaggactgagagagtgacaaggacaa

SEQ ID NO: 899313 - DNA, 33 bp, Homo sapien
actttctgaatctatgaatttgtccttgtcact

SEQ ID NO: 899314 - DNA, 33 bp, Homo sapien
actttctgaatctatgcatttgtccttgtcact

SEQ ID NO: 899315 - DNA, 33 bp, Homo sapien
agaattgggactttgcccagctactcaggaggc

SEQ ID NO: 899316 - DNA, 33 bp, Homo sapien
agaattgggactttgcgcagctactcaggaggc

SEQ ID NO: 899317 - DNA, 33 bp, Homo sapien
attcttttgggggcaactaacttttagagattg

SEQ ID NO: 899318 - DNA, 33 bp, Homo sapien
attcttttgggggcaagtaacttttagagattg

SEQ ID NO: 899319 - DNA, 33 bp, Homo sapien
caaattaaaacaactacatgctactacacacct

SEQ ID NO: 899320 - DNA, 33 bp, Homo sapien
caaattaaaacaactatatgctactacacacct

SEQ ID NO: 899321 - DNA, 33 bp, Homo sapien
ttgctgattggaatgcaaaatggtacagccact

SEQ ID NO: 899322 - DNA, 33 bp, Homo sapien
ttgctgattggaatgcgaaatggtacagccact

SEQ ID NO: 899323 - DNA, 33 bp, Homo sapien
aggtttggttcttctccactagtggtcggggat

SEQ ID NO: 899324 - DNA, 33 bp, Homo sapien
aggtttggttcttctctactagtggtcggggat

SEQ ID NO: 899325 - DNA, 33 bp, Homo sapien
tgttgttttccactaaatgagagcaatcaagag

SEQ ID NO: 899326 - DNA, 33 bp, Homo sapien
tgttgttttccactaagtgagagcaatcaagag

SEQ ID NO: 899327 - DNA, 33 bp, Homo sapien
agttgcaaatagctcacggaagatgaagaatga

SEQ ID NO: 899328 - DNA, 33 bp, Homo sapien
agttgcaaatagctcatggaagatgaagaatga

SEQ ID NO: 899329 - DNA, 33 bp, Homo sapien
aaaaatgaacttactcaaccatcttgaccggaa

SEQ ID NO: 899330 - DNA, 33 bp, Homo sapien
aaaaatgaacttactcgaccatcttgaccggaa

SEQ ID NO: 899331 - DNA, 33 bp, Homo sapien
caccagacataattaacctgtgtaactggtact

SEQ ID NO: 899332 - DNA, 33 bp, Homo sapien
caccagacataattaatctgtgtaactggtact

SEQ ID NO: 899333 - DNA, 33 bp, Homo sapien
agggctgtaaaccacaatcctctgccctacagg

SEQ ID NO: 899334 - DNA, 33 bp, Homo sapien
agggctgtaaaccacactcctctgccctacagg

SEQ ID NO: 899335 - DNA, 33 bp, Homo sapien
cattaatgcatacccaataagtgcctgtcacct

SEQ ID NO: 899336 - DNA, 33 bp, Homo sapien
cattaatgcatacccagtaagtgcctgtcacct

SEQ ID NO: 899337 - DNA, 33 bp, Homo sapien
agctagagctttggaaatattgcttttgcagtc

SEQ ID NO: 899338 - DNA, 33 bp, Homo sapien
agctagagctttggaagtattgcttttgcagtc

SEQ ID NO: 899339 - DNA, 33 bp, Homo sapien
gggatattgagtaaaaatgcagttatctattaa

SEQ ID NO: 899340 - DNA, 33 bp, Homo sapien
gggatattgagtaaaagtgcagttatctattaa

SEQ ID NO: 899341 - DNA, 33 bp, Homo sapien
cacagcacaggcctcacggaaccttcagtaata

SEQ ID NO: 899342 - DNA, 33 bp, Homo sapien
cacagcacaggcctcatggaaccttcagtaata

SEQ ID NO: 899343 - DNA, 33 bp, Homo sapien
agatgttagcaaaaaccgactcttgttgaaggc

SEQ ID NO: 899344 - DNA, 33 bp, Homo sapien
agatgttagcaaaaactgactcttgttgaaggc

SEQ ID NO: 899345 - DNA, 33 bp, Homo sapien
aattcagaatttcccaccggtcatatgtggaaa

SEQ ID NO: 899346 - DNA, 33 bp, Homo sapien
aattcagaatttcccatcggtcatatgtggaaa

SEQ ID NO: 899347 - DNA, 33 bp, Homo sapien
tgcgacaatcaggagaaaaaataggagctgaag

SEQ ID NO: 899348 - DNA, 33 bp, Homo sapien
tgcgacaatcaggagagaaaataggagctgaag

SEQ ID NO: 899349 - DNA, 33 bp, Homo sapien
agaggccccgttactaccttagttctgatattc

SEQ ID NO: 899350 - DNA, 33 bp, Homo sapien
agaggccccgttactatcttagttctgatattc

SEQ ID NO: 899351 - DNA, 33 bp, Homo sapien
ctaccttggcattataacattctaatagatttt

SEQ ID NO: 899352 - DNA, 33 bp, Homo sapien
ctaccttggcattataccattctaatagatttt

SEQ ID NO: 899353 - DNA, 33 bp, Homo sapien
aaatcactcaggaggaaatcatttttatcatgc

SEQ ID NO: 899354 - DNA, 33 bp, Homo sapien
aaatcactcaggaggacatcatttttatcatgc

SEQ ID NO: 899355 - DNA, 33 bp, Homo sapien
aaagtattatcaaagaaagcatatgacaggggg

SEQ ID NO: 899356 - DNA, 33 bp, Homo sapien
aaagtattatcaaagagagcatatgacaggggg

SEQ ID NO: 899357 - DNA, 33 bp, Homo sapien
tcttgctaattcaagaaaagagattcaacagca

SEQ ID NO: 899358 - DNA, 33 bp, Homo sapien
tcttgctaattcaagagaagagattcaacagca

SEQ ID NO: 899359 - DNA, 33 bp, Homo sapien
aatatatattttcacaatcataggaggttttaa

SEQ ID NO: 899360 - DNA, 33 bp, Homo sapien
aatatatattttcacagtcataggaggttttaa

SEQ ID NO: 899361 - DNA, 33 bp, Homo sapien
taagatgtaccaaacagtaagaataagtagaat

SEQ ID NO: 899362 - DNA, 33 bp, Homo sapien
taagatgtaccaaacattaagaataagtagaat

SEQ ID NO: 899363 - DNA, 33 bp, Homo sapien
acagtagactattcatcagaaactatagaggcc

SEQ ID NO: 899364 - DNA, 33 bp, Homo sapien
acagtagactattcattagaaactatagaggcc

SEQ ID NO: 899365 - DNA, 33 bp, Homo sapien
cagccctgccacttggccaccaaagggctctaa

SEQ ID NO: 899366 - DNA, 33 bp, Homo sapien
cagccctgccacttggtcaccaaagggctctaa

SEQ ID NO: 899367 - DNA, 33 bp, Homo sapien
ttgttttgattctctacgtgtcttacaatttat

SEQ ID NO: 899368 - DNA, 33 bp, Homo sapien
ttgttttgattctctatgtgtcttacaatttat

SEQ ID NO: 899369 - DNA, 33 bp, Homo sapien
ttatacatatttcagacgacaaaacaattaatc

SEQ ID NO: 899370 - DNA, 33 bp, Homo sapien
ttatacatatttcagatgacaaaacaattaatc

SEQ ID NO: 899371 - DNA, 33 bp, Homo sapien
agttgaacactggaaacgattcaagttctttat

SEQ ID NO: 899372 - DNA, 33 bp, Homo sapien
agttgaacactggaaatgattcaagttctttat

SEQ ID NO: 899373 - DNA, 33 bp, Homo sapien
taccatccctgaagttaaaagtctttgcctgta

SEQ ID NO: 899374 - DNA, 33 bp, Homo sapien
taccatccctgaagttcaaagtctttgcctgta

SEQ ID NO: 899375 - DNA, 33 bp, Homo sapien
agggtcaaccataaaaaaatttccaggagtttc

SEQ ID NO: 899376 - DNA, 33 bp, Homo sapien
agggtcaaccataaaataatttccaggagtttc

SEQ ID NO: 899377 - DNA, 33 bp, Homo sapien
aaaggagtcacgggaccgggttgactatgaaga

SEQ ID NO: 899378 - DNA, 33 bp, Homo sapien
aaaggagtcacgggactgggttgactatgaaga

SEQ ID NO: 899379 - DNA, 33 bp, Homo sapien
aggtaaaagtgaagtaagtcaaattatctgagc

SEQ ID NO: 899380 - DNA, 33 bp, Homo sapien
aggtaaaagtgaagtatgtcaaattatctgagc

SEQ ID NO: 899381 - DNA, 33 bp, Homo sapien
tgggttggtcttgatacaggatgatattcagat

SEQ ID NO: 899382 - DNA, 33 bp, Homo sapien
tgggttggtcttgatataggatgatattcagat

SEQ ID NO: 899383 - DNA, 33 bp, Homo sapien
tgagacttaatttttacgtaatatgtcttggat

SEQ ID NO: 899384 - DNA, 33 bp, Homo sapien
tgagacttaatttttatgtaatatgtcttggat

SEQ ID NO: 899385 - DNA, 33 bp, Homo sapien
tctactgcagccagaaacaagttgggtccaccc

SEQ ID NO: 899386 - DNA, 33 bp, Homo sapien
tctactgcagccagaagcaagttgggtccaccc

SEQ ID NO: 899387 - DNA, 33 bp, Homo sapien
ataagtgaaaataatacggattcttctggtcaa

SEQ ID NO: 899388 - DNA, 33 bp, Homo sapien
ataagtgaaaataatatggattcttctggtcaa

SEQ ID NO: 899389 - DNA, 33 bp, Homo sapien
tttttcttataaaccactgagtgaacgattttg

SEQ ID NO: 899390 - DNA, 33 bp, Homo sapien
tttttcttataaaccagtgagtgaacgattttg

SEQ ID NO: 899391 - DNA, 33 bp, Homo sapien
tgaggcactagggaagacagtggttcacacata

SEQ ID NO: 899392 - DNA, 33 bp, Homo sapien
tgaggcactagggaaggcagtggttcacacata

SEQ ID NO: 899393 - DNA, 33 bp, Homo sapien
caaaaatgtcattaataaactaaggctaagaac

SEQ ID NO: 899394 - DNA, 33 bp, Homo sapien
caaaaatgtcattaatgaactaaggctaagaac

SEQ ID NO: 899395 - DNA, 33 bp, Homo sapien
ataaaagaacggcaggcaagcctgagcatcagt

SEQ ID NO: 899396 - DNA, 33 bp, Homo sapien
ataaaagaacggcaggtaagcctgagcatcagt

SEQ ID NO: 899397 - DNA, 33 bp, Homo sapien
tgcttttctggtttaacgactcatcacagatta

SEQ ID NO: 899398 - DNA, 33 bp, Homo sapien
tgcttttctggtttaatgactcatcacagatta

SEQ ID NO: 899399 - DNA, 33 bp, Homo sapien
taacgttttgctaaaaatgggtaactctcactg

SEQ ID NO: 899400 - DNA, 33 bp, Homo sapien
taacgttttgctaaaactgggtaactctcactg

SEQ ID NO: 899401 - DNA, 33 bp, Homo sapien
ccattaaaaagcacatcaaaattaaaagctgta

SEQ ID NO: 899402 - DNA, 33 bp, Homo sapien
ccattaaaaagcacatgaaaattaaaagctgta

SEQ ID NO: 899403 - DNA, 33 bp, Homo sapien
gttatagaggaatagacccattaaaaagcacat

SEQ ID NO: 899404 - DNA, 33 bp, Homo sapien
gttatagaggaatagatccattaaaaagcacat

SEQ ID NO: 899405 - DNA, 33 bp, Homo sapien
tagacattgaatgactaagtactctggaggaac

SEQ ID NO: 899406 - DNA, 33 bp, Homo sapien
tagacattgaatgactgagtactctggaggaac

SEQ ID NO: 899407 - DNA, 33 bp, Homo sapien
gactatacaagtcgccccaacagtgagcacata

SEQ ID NO: 899408 - DNA, 33 bp, Homo sapien
gactatacaagtcgcctcaacagtgagcacata

SEQ ID NO: 899409 - DNA, 33 bp, Homo sapien
gtgaccaatcaaaaagcatcacaactcaggttg

SEQ ID NO: 899410 - DNA, 33 bp, Homo sapien
gtgaccaatcaaaaagtatcacaactcaggttg

SEQ ID NO: 899411 - DNA, 33 bp, Homo sapien
ttaaataaattaatgaataagcccagtataaat

SEQ ID NO: 899412 - DNA, 33 bp, Homo sapien
ttaaataaattaatgagtaagcccagtataaat

SEQ ID NO: 899413 - DNA, 33 bp, Homo sapien
caccactgacttataacaaaagtatccaaattg

SEQ ID NO: 899414 - DNA, 33 bp, Homo sapien
caccactgacttataataaaagtatccaaattg

SEQ ID NO: 899415 - DNA, 33 bp, Homo sapien
cagttgttttgttctggaagtagcaatggttaa

SEQ ID NO: 899416 - DNA, 33 bp, Homo sapien
cagttgttttgttctgtaagtagcaatggttaa

SEQ ID NO: 899417 - DNA, 33 bp, Homo sapien
agatcaccagtctagacagagaattctagaaaa

SEQ ID NO: 899418 - DNA, 33 bp, Homo sapien
agatcaccagtctagatagagaattctagaaaa

SEQ ID NO: 899419 - DNA, 33 bp, Homo sapien
caaatcctaaccactcaaaagatgactttacct

SEQ ID NO: 899420 - DNA, 33 bp, Homo sapien
caaatcctaaccactccaaagatgactttacct

SEQ ID NO: 899421 - DNA, 33 bp, Homo sapien
ataaaatgccagtgcaaaatggaaaacaataac

SEQ ID NO: 899422 - DNA, 33 bp, Homo sapien
ataaaatgccagtgcagaatggaaaacaataac

SEQ ID NO: 899423 - DNA, 33 bp, Homo sapien
ctttgtaattgtgccgccactcttcctggattt

SEQ ID NO: 899424 - DNA, 33 bp, Homo sapien
ctttgtaattgtgccgtcactcttcctggattt

SEQ ID NO: 899425 - DNA, 33 bp, Homo sapien
caggagagtcctgctaaccagccaaagcaggag

SEQ ID NO: 899426 - DNA, 33 bp, Homo sapien
caggagagtcctgctacccagccaaagcaggag

SEQ ID NO: 899427 - DNA, 33 bp, Homo sapien
taaatccctgaacccaatagtagggaccaaggt

SEQ ID NO: 899428 - DNA, 33 bp, Homo sapien
taaatccctgaacccagtagtagggaccaaggt

SEQ ID NO: 899429 - DNA, 33 bp, Homo sapien
gcagattctgcccaaaatgaagaatcagtgact

SEQ ID NO: 899430 - DNA, 33 bp, Homo sapien
gcagattctgcccaaagtgaagaatcagtgact

SEQ ID NO: 899431 - DNA, 33 bp, Homo sapien
tgtgaaggtgctatcccgaccagtctctttgca

SEQ ID NO: 899432 - DNA, 33 bp, Homo sapien
tgtgaaggtgctatcctgaccagtctctttgca

SEQ ID NO: 899433 - DNA, 33 bp, Homo sapien
caggatgtttctcttaacacgcagccttgtgct

SEQ ID NO: 899434 - DNA, 33 bp, Homo sapien
caggatgtttctcttaccacgcagccttgtgct

SEQ ID NO: 899435 - DNA, 33 bp, Homo sapien
tacatgttgaacggacacaactttgtgattgac

SEQ ID NO: 899436 - DNA, 33 bp, Homo sapien
tacatgttgaacggacccaactttgtgattgac

SEQ ID NO: 899437 - DNA, 33 bp, Homo sapien
ttcatacctctcttcgaatttcctccaacattg

SEQ ID NO: 899438 - DNA, 33 bp, Homo sapien
ttcatacctctcttcggatttcctccaacattg

SEQ ID NO: 899439 - DNA, 33 bp, Homo sapien
aatctcttatgacccacgatgttggttaaagat

SEQ ID NO: 899440 - DNA, 33 bp, Homo sapien
aatctcttatgacccatgatgttggttaaagat

SEQ ID NO: 899441 - DNA, 33 bp, Homo sapien
cataaactgtagataccagtattctgatccttt

SEQ ID NO: 899442 - DNA, 33 bp, Homo sapien
cataaactgtagatacgagtattctgatccttt

SEQ ID NO: 899443 - DNA, 33 bp, Homo sapien
attaaaatcaacattacaaggcaattgtgaaaa

SEQ ID NO: 899444 - DNA, 33 bp, Homo sapien
attaaaatcaacattataaggcaattgtgaaaa

SEQ ID NO: 899445 - DNA, 33 bp, Homo sapien
tagacttccagtgtaaatctaacaggtcccaag

SEQ ID NO: 899446 - DNA, 33 bp, Homo sapien
tagacttccagtgtaactctaacaggtcccaag

SEQ ID NO: 899447 - DNA, 33 bp, Homo sapien
ctgacatagaaaaatacccaagctacgggtgag

SEQ ID NO: 899448 - DNA, 33 bp, Homo sapien
ctgacatagaaaaatatccaagctacgggtgag

SEQ ID NO: 899449 - DNA, 33 bp, Homo sapien
tgacagtcaggcaaggacaagtaggtttgtttt

SEQ ID NO: 899450 - DNA, 33 bp, Homo sapien
tgacagtcaggcaagggcaagtaggtttgtttt

SEQ ID NO: 899451 - DNA, 33 bp, Homo sapien
gttaaggctgattccacgctttagtaaataaga

SEQ ID NO: 899452 - DNA, 33 bp, Homo sapien
gttaaggctgattccatgctttagtaaataaga

SEQ ID NO: 899453 - DNA, 33 bp, Homo sapien
tatatattgtcctttaacccctagccagattat

SEQ ID NO: 899454 - DNA, 33 bp, Homo sapien
tatatattgtcctttagcccctagccagattat

SEQ ID NO: 899455 - DNA, 33 bp, Homo sapien
ttcacttggattttgacgtggctcagtaatcac

SEQ ID NO: 899456 - DNA, 33 bp, Homo sapien
ttcacttggattttgatgtggctcagtaatcac

SEQ ID NO: 899457 - DNA, 33 bp, Homo sapien
cacaattcaatctagaaggcctgtatctgcttt

SEQ ID NO: 899458 - DNA, 33 bp, Homo sapien
cacaattcaatctagacggcctgtatctgcttt

SEQ ID NO: 899459 - DNA, 33 bp, Homo sapien
catgattgcacatttacatttaaaaaggcacat

SEQ ID NO: 899460 - DNA, 33 bp, Homo sapien
catgattgcacatttatatttaaaaaggcacat

SEQ ID NO: 899461 - DNA, 33 bp, Homo sapien
gcaagcagggactataaagtgaggtagcaggaa

SEQ ID NO: 899462 - DNA, 33 bp, Homo sapien
gcaagcagggactatagagtgaggtagcaggaa

SEQ ID NO: 899463 - DNA, 33 bp, Homo sapien
gcttaaataaacatcaataagaaaagctaaaag

SEQ ID NO: 899464 - DNA, 33 bp, Homo sapien
gcttaaataaacatcagtaagaaaagctaaaag

SEQ ID NO: 899465 - DNA, 33 bp, Homo sapien
gatctggcaattccaagtgaatgggagagtaaa

SEQ ID NO: 899466 - DNA, 33 bp, Homo sapien
gatctggcaattccaattgaatgggagagtaaa

SEQ ID NO: 899467 - DNA, 33 bp, Homo sapien
tgtgaggcggcccccacaatgttctgtcaacag

SEQ ID NO: 899468 - DNA, 33 bp, Homo sapien
tgtgaggcggcccccataatgttctgtcaacag

SEQ ID NO: 899469 - DNA, 33 bp, Homo sapien
gatgagatggaagaagaactactattttatgag

SEQ ID NO: 899470 - DNA, 33 bp, Homo sapien
gatgagatggaagaagcactactattttatgag

SEQ ID NO: 899471 - DNA, 33 bp, Homo sapien
ttaaagatggctgcaaatatctgtatcactccc

SEQ ID NO: 899472 - DNA, 33 bp, Homo sapien
ttaaagatggctgcaagtatctgtatcactccc

SEQ ID NO: 899473 - DNA, 33 bp, Homo sapien
agaatggtttctaacagggtcttaattgacttg

SEQ ID NO: 899474 - DNA, 33 bp, Homo sapien
agaatggtttctaacatggtcttaattgacttg

SEQ ID NO: 899475 - DNA, 33 bp, Homo sapien
accaactaattccaccacattgtttgagatgat

SEQ ID NO: 899476 - DNA, 33 bp, Homo sapien
accaactaattccacctcattgtttgagatgat

SEQ ID NO: 899477 - DNA, 33 bp, Homo sapien
ttgaaaaggtcatgcactaaaatttcctctctt

SEQ ID NO: 899478 - DNA, 33 bp, Homo sapien
ttgaaaaggtcatgcattaaaatttcctctctt

SEQ ID NO: 899479 - DNA, 33 bp, Homo sapien
ggaaggtaggctatcactgaaatgctattcaaa

SEQ ID NO: 899480 - DNA, 33 bp, Homo sapien
ggaaggtaggctatcattgaaatgctattcaaa

SEQ ID NO: 899481 - DNA, 33 bp, Homo sapien
agttacttaaagcttcaatgtgaggattttcta

SEQ ID NO: 899482 - DNA, 33 bp, Homo sapien
agttacttaaagcttctatgtgaggattttcta

SEQ ID NO: 899483 - DNA, 33 bp, Homo sapien
agtgagccagcagcctgactgttaataacataa

SEQ ID NO: 899484 - DNA, 33 bp, Homo sapien
agtgagccagcagccttactgttaataacataa

SEQ ID NO: 899485 - DNA, 33 bp, Homo sapien
ccaggaacatgttgagccatcagctctgaacac

SEQ ID NO: 899486 - DNA, 33 bp, Homo sapien
ccaggaacatgttgagtcatcagctctgaacac

SEQ ID NO: 899487 - DNA, 33 bp, Homo sapien
ttcctgggtcagtgacgcattcaaccttctctc

SEQ ID NO: 899488 - DNA, 33 bp, Homo sapien
ttcctgggtcagtgactcattcaaccttctctc

SEQ ID NO: 899489 - DNA, 33 bp, Homo sapien
cactaagcaggcagtgcacttcaaccaaagccg

SEQ ID NO: 899490 - DNA, 33 bp, Homo sapien
cactaagcaggcagtgtacttcaaccaaagccg

SEQ ID NO: 899491 - DNA, 33 bp, Homo sapien
gtagaagcagttgtcactccagacctcccagga

SEQ ID NO: 899492 - DNA, 33 bp, Homo sapien
gtagaagcagttgtcagtccagacctcccagga

SEQ ID NO: 899493 - DNA, 33 bp, Homo sapien
gtgccagtagtaactccccagtcatgacaaccc

SEQ ID NO: 899494 - DNA, 33 bp, Homo sapien
gtgccagtagtaactctccagtcatgacaaccc

SEQ ID NO: 899495 - DNA, 33 bp, Homo sapien
gccggtgttttattgaagttttcacattgatgt

SEQ ID NO: 899496 - DNA, 33 bp, Homo sapien
gccggtgttttattgaggttttcacattgatgt

SEQ ID NO: 899497 - DNA, 33 bp, Homo sapien
agttttttggctgaaggaaccaggggaaaatcc

SEQ ID NO: 899498 - DNA, 33 bp, Homo sapien
agttttttggctgaagtaaccaggggaaaatcc

SEQ ID NO: 899499 - DNA, 33 bp, Homo sapien
aagtgtctgggcctaacacaatctaaaacatct

SEQ ID NO: 899500 - DNA, 33 bp, Homo sapien
aagtgtctgggcctaatacaatctaaaacatct

SEQ ID NO: 899501 - DNA, 33 bp, Homo sapien
cttcttgccattcccacgtgctgtgataaattc

SEQ ID NO: 899502 - DNA, 33 bp, Homo sapien
cttcttgccattcccatgtgctgtgataaattc

SEQ ID NO: 899503 - DNA, 33 bp, Homo sapien
aacacacaagcataaacggcttgccatggtggg

SEQ ID NO: 899504 - DNA, 33 bp, Homo sapien
aacacacaagcataaagggcttgccatggtggg

SEQ ID NO: 899505 - DNA, 33 bp, Homo sapien
aatattcacataatggaatactctggtgtcttt

SEQ ID NO: 899506 - DNA, 33 bp, Homo sapien
aatattcacataatgggatactctggtgtcttt

SEQ ID NO: 899507 - DNA, 33 bp, Homo sapien
agcataaataagagaaagtaatgatcccacatt

SEQ ID NO: 899508 - DNA, 33 bp, Homo sapien
agcataaataagagaacgtaatgatcccacatt

SEQ ID NO: 899509 - DNA, 33 bp, Homo sapien
gcccctagtactaggaagcattcaaccaatatt

SEQ ID NO: 899510 - DNA, 33 bp, Homo sapien
gcccctagtactaggacgcattcaaccaatatt

SEQ ID NO: 899511 - DNA, 33 bp, Homo sapien
tggagtggagtggaaaacacaaaggcttggagg

SEQ ID NO: 899512 - DNA, 33 bp, Homo sapien
tggagtggagtggaaagcacaaaggcttggagg

SEQ ID NO: 899513 - DNA, 33 bp, Homo sapien
cccactgcataatccaatcacaaaagaaagagt

SEQ ID NO: 899514 - DNA, 33 bp, Homo sapien
cccactgcataatccagtcacaaaagaaagagt

SEQ ID NO: 899515 - DNA, 33 bp, Homo sapien
gcccacagtgtctgcacgtggagccacaaaacc

SEQ ID NO: 899516 - DNA, 33 bp, Homo sapien
gcccacagtgtctgcatgtggagccacaaaacc

SEQ ID NO: 899517 - DNA, 33 bp, Homo sapien
cctctggcattattagcaactgacattaatcca

SEQ ID NO: 899518 - DNA, 33 bp, Homo sapien
cctctggcattattagtaactgacattaatcca

SEQ ID NO: 899519 - DNA, 33 bp, Homo sapien
ggggacaaaaggcataacaggataagcgatgat

SEQ ID NO: 899520 - DNA, 33 bp, Homo sapien
ggggacaaaaggcatagcaggataagcgatgat

SEQ ID NO: 899521 - DNA, 33 bp, Homo sapien
gcaggagaggagaacacggagagtaaattaggg

SEQ ID NO: 899522 - DNA, 33 bp, Homo sapien
gcaggagaggagaacagggagagtaaattaggg

SEQ ID NO: 899523 - DNA, 33 bp, Homo sapien
ctgctgcatgcaagacagtaagtcaggcctgta

SEQ ID NO: 899524 - DNA, 33 bp, Homo sapien
ctgctgcatgcaagacggtaagtcaggcctgta

SEQ ID NO: 899525 - DNA, 33 bp, Homo sapien
agtgcaacagccaagtcacgtcttccttgccct

SEQ ID NO: 899526 - DNA, 33 bp, Homo sapien
agtgcaacagccaagtgacgtcttccttgccct

SEQ ID NO: 899527 - DNA, 33 bp, Homo sapien
aaatggggtaagataaagtggtgaagtcccctt

SEQ ID NO: 899528 - DNA, 33 bp, Homo sapien
aaatggggtaagataaggtggtgaagtcccctt

SEQ ID NO: 899529 - DNA, 33 bp, Homo sapien
atgctgataatgggacagctcactgattaggat

SEQ ID NO: 899530 - DNA, 33 bp, Homo sapien
atgctgataatgggacggctcactgattaggat

SEQ ID NO: 899531 - DNA, 33 bp, Homo sapien
gatcagcaaattatccagcaagttaatgcactt

SEQ ID NO: 899532 - DNA, 33 bp, Homo sapien
gatcagcaaattatcccgcaagttaatgcactt

SEQ ID NO: 899533 - DNA, 33 bp, Homo sapien
cagatccaagtcacgccaggaaaggcaagaatc

SEQ ID NO: 899534 - DNA, 33 bp, Homo sapien
cagatccaagtcacgctaggaaaggcaagaatc

SEQ ID NO: 899535 - DNA, 33 bp, Homo sapien
tttgtggcattcagtcaacttgagttccaaaaa

SEQ ID NO: 899536 - DNA, 33 bp, Homo sapien
tttgtggcattcagtctacttgagttccaaaaa

SEQ ID NO: 899537 - DNA, 33 bp, Homo sapien
aagcctgggtgtgtccaaacaggcctgcagcgt

SEQ ID NO: 899538 - DNA, 33 bp, Homo sapien
aagcctgggtgtgtccgaacaggcctgcagcgt

SEQ ID NO: 899539 - DNA, 33 bp, Homo sapien
gatagaggcaatgtgaagtgaatccttttataa

SEQ ID NO: 899540 - DNA, 33 bp, Homo sapien
gatagaggcaatgtgaggtgaatccttttataa

SEQ ID NO: 899541 - DNA, 33 bp, Homo sapien
gtgctaaaggacataaaccgcattgaaaaggaa

SEQ ID NO: 899542 - DNA, 33 bp, Homo sapien
gtgctaaaggacataacccgcattgaaaaggaa

SEQ ID NO: 899543 - DNA, 33 bp, Homo sapien
ccaatgcagagggtgacggagagaaactcaccc

SEQ ID NO: 899544 - DNA, 33 bp, Homo sapien
ccaatgcagagggtgatggagagaaactcaccc

SEQ ID NO: 899545 - DNA, 33 bp, Homo sapien
gctgccagcaaagcacaaagctcaaaatgtatc

SEQ ID NO: 899546 - DNA, 33 bp, Homo sapien
gctgccagcaaagcacgaagctcaaaatgtatc

SEQ ID NO: 899547 - DNA, 33 bp, Homo sapien
tgtagtggccaccctgacagaccgttccacgtg

SEQ ID NO: 899548 - DNA, 33 bp, Homo sapien
tgtagtggccaccctggcagaccgttccacgtg

SEQ ID NO: 899549 - DNA, 33 bp, Homo sapien
gtaccaggggacatgacgtttcagctgaatcct

SEQ ID NO: 899550 - DNA, 33 bp, Homo sapien
gtaccaggggacatgatgtttcagctgaatcct

SEQ ID NO: 899551 - DNA, 33 bp, Homo sapien
ttggttaatatttgatcaggggggcttgtgcca

SEQ ID NO: 899552 - DNA, 33 bp, Homo sapien
ttggttaatatttgatgaggggggcttgtgcca

SEQ ID NO: 899553 - DNA, 33 bp, Homo sapien
tatcactgtcagttcaactctgaagaacttgat

SEQ ID NO: 899554 - DNA, 33 bp, Homo sapien
tatcactgtcagttcacctctgaagaacttgat

SEQ ID NO: 899555 - DNA, 33 bp, Homo sapien
gcattggaagaatacacgcccaaagagggaaag

SEQ ID NO: 899556 - DNA, 33 bp, Homo sapien
gcattggaagaatacaggcccaaagagggaaag

SEQ ID NO: 899557 - DNA, 33 bp, Homo sapien
atttaatattatttcaactgtactcagaattga

SEQ ID NO: 899558 - DNA, 33 bp, Homo sapien
atttaatattatttcacctgtactcagaattga

SEQ ID NO: 899559 - DNA, 33 bp, Homo sapien
accaagcattcttctaagaggtgaacatgagaa

SEQ ID NO: 899560 - DNA, 33 bp, Homo sapien
accaagcattcttctatgaggtgaacatgagaa

SEQ ID NO: 899561 - DNA, 33 bp, Homo sapien
atagtaaacaacaccacctgacatattaaatat

SEQ ID NO: 899562 - DNA, 33 bp, Homo sapien
atagtaaacaacaccatctgacatattaaatat

SEQ ID NO: 899563 - DNA, 33 bp, Homo sapien
gataggatccatttcaccagtaaggatgctagc

SEQ ID NO: 899564 - DNA, 33 bp, Homo sapien
gataggatccatttcatcagtaaggatgctagc

SEQ ID NO: 899565 - DNA, 33 bp, Homo sapien
gaaggcaagatcattcaaggtgaggaagtcggt

SEQ ID NO: 899566 - DNA, 33 bp, Homo sapien
gaaggcaagatcattcgaggtgaggaagtcggt

SEQ ID NO: 899567 - DNA, 33 bp, Homo sapien
attttcactgaatggcaactttacccttttgct

SEQ ID NO: 899568 - DNA, 33 bp, Homo sapien
attttcactgaatggccactttacccttttgct

SEQ ID NO: 899569 - DNA, 33 bp, Homo sapien
tctcaatcttgggcacagctttccaatgagtgt

SEQ ID NO: 899570 - DNA, 33 bp, Homo sapien
tctcaatcttgggcacggctttccaatgagtgt

SEQ ID NO: 899571 - DNA, 33 bp, Homo sapien
gagatggtccatgaagaaagaacaccctgtcag

SEQ ID NO: 899572 - DNA, 33 bp, Homo sapien
gagatggtccatgaaggaagaacaccctgtcag

SEQ ID NO: 899573 - DNA, 33 bp, Homo sapien
ttccctcgaggacttcgctcattgcaatgaatt

SEQ ID NO: 899574 - DNA, 33 bp, Homo sapien
ttccctcgaggacttctctcattgcaatgaatt

SEQ ID NO: 899575 - DNA, 33 bp, Homo sapien
tttctatgaaatcacacgtcagtgctgtctctc

SEQ ID NO: 899576 - DNA, 33 bp, Homo sapien
tttctatgaaatcacatgtcagtgctgtctctc

SEQ ID NO: 899577 - DNA, 33 bp, Homo sapien
gagggaaatggaagaaggcaggacagggacagt

SEQ ID NO: 899578 - DNA, 33 bp, Homo sapien
gagggaaatggaagaatgcaggacagggacagt

SEQ ID NO: 899579 - DNA, 33 bp, Homo sapien
cacattcatgagaaggcacagaactttgtgtgt

SEQ ID NO: 899580 - DNA, 33 bp, Homo sapien
cacattcatgagaaggtacagaactttgtgtgt

SEQ ID NO: 899581 - DNA, 33 bp, Homo sapien
ccaacttggggaaatcaatgcagagtaagtgtg

SEQ ID NO: 899582 - DNA, 33 bp, Homo sapien
ccaacttggggaaatcgatgcagagtaagtgtg

SEQ ID NO: 899583 - DNA, 33 bp, Homo sapien
caagtgtttctgatgcactctcaagttaaaaag

SEQ ID NO: 899584 - DNA, 33 bp, Homo sapien
caagtgtttctgatgcgctctcaagttaaaaag

SEQ ID NO: 899585 - DNA, 33 bp, Homo sapien
gagccatagttttacactgggcactggggacta

SEQ ID NO: 899586 - DNA, 33 bp, Homo sapien
gagccatagttttacattgggcactggggacta

SEQ ID NO: 899587 - DNA, 33 bp, Homo sapien
aatgtgatacttagtgcagtgcatcgtagttgc

SEQ ID NO: 899588 - DNA, 33 bp, Homo sapien
aatgtgatacttagtgtagtgcatcgtagttgc

SEQ ID NO: 899589 - DNA, 33 bp, Homo sapien
tttgccacttcacctaaggcaagcttcacacaa

SEQ ID NO: 899590 - DNA, 33 bp, Homo sapien
tttgccacttcacctacggcaagcttcacacaa

SEQ ID NO: 899591 - DNA, 33 bp, Homo sapien
gcttcacacaaaaaaaattaatcctcggggatg

SEQ ID NO: 899592 - DNA, 33 bp, Homo sapien
gcttcacacaaaaaaagttaatcctcggggatg

SEQ ID NO: 899593 - DNA, 33 bp, Homo sapien
gatgattagtgactagacaccagtgcaagaaat

SEQ ID NO: 899594 - DNA, 33 bp, Homo sapien
gatgattagtgactaggcaccagtgcaagaaat

SEQ ID NO: 899595 - DNA, 33 bp, Homo sapien
gtgagatgaaactctgcattggatctggtatca

SEQ ID NO: 899596 - DNA, 33 bp, Homo sapien
gtgagatgaaactctgtattggatctggtatca

SEQ ID NO: 899597 - DNA, 33 bp, Homo sapien
tcagtcctgggcgcaccatggacattccctctt

SEQ ID NO: 899598 - DNA, 33 bp, Homo sapien
tcagtcctgggcgcactatggacattccctctt

SEQ ID NO: 899599 - DNA, 33 bp, Homo sapien
atccaattcaggccaacaggactgtgtcataga

SEQ ID NO: 899600 - DNA, 33 bp, Homo sapien
atccaattcaggccaataggactgtgtcataga

SEQ ID NO: 899601 - DNA, 33 bp, Homo sapien
tttcatctcattgtgaagttccatgccttccct

SEQ ID NO: 899602 - DNA, 33 bp, Homo sapien
tttcatctcattgtgatgttccatgccttccct

SEQ ID NO: 899603 - DNA, 33 bp, Homo sapien
acgttgcctgagaaatgaagaagctcattaact

SEQ ID NO: 899604 - DNA, 33 bp, Homo sapien
acgttgcctgagaaattaagaagctcattaact

SEQ ID NO: 899605 - DNA, 33 bp, Homo sapien
ggcatcttaagattcaaggtctacaggtgctac

SEQ ID NO: 899606 - DNA, 33 bp, Homo sapien
ggcatcttaagattcagggtctacaggtgctac

SEQ ID NO: 899607 - DNA, 33 bp, Homo sapien
tgtgacttcaagcaataatctctccaatcagga

SEQ ID NO: 899608 - DNA, 33 bp, Homo sapien
tgtgacttcaagcaatgatctctccaatcagga

SEQ ID NO: 899609 - DNA, 33 bp, Homo sapien
cattcagttaaacagaagaacaagtgattcatc

SEQ ID NO: 899610 - DNA, 33 bp, Homo sapien
cattcagttaaacagatgaacaagtgattcatc

SEQ ID NO: 899611 - DNA, 33 bp, Homo sapien
tggatattgagttttacctatcttgcagttcat

SEQ ID NO: 899612 - DNA, 33 bp, Homo sapien
tggatattgagttttatctatcttgcagttcat

SEQ ID NO: 899613 - DNA, 33 bp, Homo sapien
gttagtttcctcatccaaaaatgagaaattaaa

SEQ ID NO: 899614 - DNA, 33 bp, Homo sapien
gttagtttcctcatccgaaaatgagaaattaaa

SEQ ID NO: 899615 - DNA, 33 bp, Homo sapien
tttaaatagaactgcaatagaatagtatgtgga

SEQ ID NO: 899616 - DNA, 33 bp, Homo sapien
tttaaatagaactgcagtagaatagtatgtgga

SEQ ID NO: 899617 - DNA, 33 bp, Homo sapien
agaaaagcaaaggccacgtcatggaaggcccat

SEQ ID NO: 899618 - DNA, 33 bp, Homo sapien
agaaaagcaaaggccaggtcatggaaggcccat

SEQ ID NO: 899619 - DNA, 33 bp, Homo sapien
tgcaaaaccatcacaagtgacacagtaaatcct

SEQ ID NO: 899620 - DNA, 33 bp, Homo sapien
tgcaaaaccatcacaattgacacagtaaatcct

SEQ ID NO: 899621 - DNA, 33 bp, Homo sapien
gaaaacgggctaataccgtaaattgggttcctg

SEQ ID NO: 899622 - DNA, 33 bp, Homo sapien
gaaaacgggctaatactgtaaattgggttcctg

SEQ ID NO: 899623 - DNA, 33 bp, Homo sapien
aagcctcactcttccaatccaatagtgccatct

SEQ ID NO: 899624 - DNA, 33 bp, Homo sapien
aagcctcactcttccactccaatagtgccatct

SEQ ID NO: 899625 - DNA, 33 bp, Homo sapien
agggcttgaaatgagaggcatgaatactaagca

SEQ ID NO: 899626 - DNA, 33 bp, Homo sapien
agggcttgaaatgagatgcatgaatactaagca

SEQ ID NO: 899627 - DNA, 33 bp, Homo sapien
cttggcaacagaattaccgagagcaccaagaac

SEQ ID NO: 899628 - DNA, 33 bp, Homo sapien
cttggcaacagaattatcgagagcaccaagaac

SEQ ID NO: 899629 - DNA, 33 bp, Homo sapien
gaacgctgaaaccagaaagaatagacaggcagc

SEQ ID NO: 899630 - DNA, 33 bp, Homo sapien
gaacgctgaaaccagagagaatagacaggcagc

SEQ ID NO: 899631 - DNA, 33 bp, Homo sapien
aaatacactaaagaaagacaggaaggtgagcaa

SEQ ID NO: 899632 - DNA, 33 bp, Homo sapien
aaatacactaaagaaatacaggaaggtgagcaa

SEQ ID NO: 899633 - DNA, 33 bp, Homo sapien
tcataccaggaccagtaaaaaactcctgctacc

SEQ ID NO: 899634 - DNA, 33 bp, Homo sapien
tcataccaggaccagtgaaaaactcctgctacc

SEQ ID NO: 899635 - DNA, 33 bp, Homo sapien
aacagagtaacactcccacagccacccaaaagt

SEQ ID NO: 899636 - DNA, 33 bp, Homo sapien
aacagagtaacactcctacagccacccaaaagt

SEQ ID NO: 899637 - DNA, 33 bp, Homo sapien
tcacattcagtttctacacttaccaactggcat

SEQ ID NO: 899638 - DNA, 33 bp, Homo sapien
tcacattcagtttctatacttaccaactggcat

SEQ ID NO: 899639 - DNA, 33 bp, Homo sapien
acagtgtgcgatgggaaaggttgtattagagtt

SEQ ID NO: 899640 - DNA, 33 bp, Homo sapien
acagtgtgcgatgggacaggttgtattagagtt

SEQ ID NO: 899641 - DNA, 33 bp, Homo sapien
tttagtcaaattccacagaactattaacttggg

SEQ ID NO: 899642 - DNA, 33 bp, Homo sapien
tttagtcaaattccacggaactattaacttggg

SEQ ID NO: 899643 - DNA, 33 bp, Homo sapien
acaatctagagggaaaatgaatgatgcagaaaa

SEQ ID NO: 899644 - DNA, 33 bp, Homo sapien
acaatctagagggaaagtgaatgatgcagaaaa

SEQ ID NO: 899645 - DNA, 33 bp, Homo sapien
ggtttaccttttccacagaggtatggcagcact

SEQ ID NO: 899646 - DNA, 33 bp, Homo sapien
ggtttaccttttccacggaggtatggcagcact

SEQ ID NO: 899647 - DNA, 33 bp, Homo sapien
tgagctggcttcctaactcgcctccaacctcca

SEQ ID NO: 899648 - DNA, 33 bp, Homo sapien
tgagctggcttcctaattcgcctccaacctcca

SEQ ID NO: 899649 - DNA, 33 bp, Homo sapien
atgtacacgtagaccaagtgtgatgataaaata

SEQ ID NO: 899650 - DNA, 33 bp, Homo sapien
atgtacacgtagaccaggtgtgatgataaaata

SEQ ID NO: 899651 - DNA, 33 bp, Homo sapien
cctggccttggtgagaactctaagcaagcttca

SEQ ID NO: 899652 - DNA, 33 bp, Homo sapien
cctggccttggtgagacctctaagcaagcttca

SEQ ID NO: 899653 - DNA, 33 bp, Homo sapien
ggagaagatggccatcgacaagccaagaagaga

SEQ ID NO: 899654 - DNA, 33 bp, Homo sapien
ggagaagatggccatctacaagccaagaagaga

SEQ ID NO: 899655 - DNA, 33 bp, Homo sapien
ggccatcttctccctacatttttacatgatttt

SEQ ID NO: 899656 - DNA, 33 bp, Homo sapien
ggccatcttctccctatatttttacatgatttt

SEQ ID NO: 899657 - DNA, 33 bp, Homo sapien
tctgcaagaggttctacgaatcaggtggcagtg

SEQ ID NO: 899658 - DNA, 33 bp, Homo sapien
tctgcaagaggttctatgaatcaggtggcagtg

SEQ ID NO: 899659 - DNA, 33 bp, Homo sapien
ttcaaagaactatctcaccatgtgccctgggaa

SEQ ID NO: 899660 - DNA, 33 bp, Homo sapien
ttcaaagaactatctctccatgtgccctgggaa

SEQ ID NO: 899661 - DNA, 33 bp, Homo sapien
acatccatattactccaacaactcaagttgaca

SEQ ID NO: 899662 - DNA, 33 bp, Homo sapien
acatccatattactccgacaactcaagttgaca

SEQ ID NO: 899663 - DNA, 33 bp, Homo sapien
ttccaaatcttctttgaaaaggcaattctgatt

SEQ ID NO: 899664 - DNA, 33 bp, Homo sapien
ttccaaatcttctttgcaaaggcaattctgatt

SEQ ID NO: 899665 - DNA, 33 bp, Homo sapien
caaactcactgtaacaagcccccgttctgtttc

SEQ ID NO: 899666 - DNA, 33 bp, Homo sapien
caaactcactgtaacaggcccccgttctgtttc

SEQ ID NO: 899667 - DNA, 33 bp, Homo sapien
gtcaacattaagttccaaagaacaaacatgcct

SEQ ID NO: 899668 - DNA, 33 bp, Homo sapien
gtcaacattaagttccgaagaacaaacatgcct

SEQ ID NO: 899669 - DNA, 33 bp, Homo sapien
agtgaggaaattgagccgaatggagtagaagag

SEQ ID NO: 899670 - DNA, 33 bp, Homo sapien
agtgaggaaattgagctgaatggagtagaagag

SEQ ID NO: 899671 - DNA, 33 bp, Homo sapien
gaaagagatgtacaaaatgccaggggagcacga

SEQ ID NO: 899672 - DNA, 33 bp, Homo sapien
gaaagagatgtacaaagtgccaggggagcacga

SEQ ID NO: 899673 - DNA, 33 bp, Homo sapien
ttcattgtcattatacaaatcccacactggtag

SEQ ID NO: 899674 - DNA, 33 bp, Homo sapien
ttcattgtcattataccaatcccacactggtag

SEQ ID NO: 899675 - DNA, 33 bp, Homo sapien
atctggctaaactgccacatgctttcctcaagt

SEQ ID NO: 899676 - DNA, 33 bp, Homo sapien
atctggctaaactgccgcatgctttcctcaagt

SEQ ID NO: 899677 - DNA, 33 bp, Homo sapien
tagctcaagcaaatgaaataatttctgaacttg

SEQ ID NO: 899678 - DNA, 33 bp, Homo sapien
tagctcaagcaaatgacataatttctgaacttg

SEQ ID NO: 899679 - DNA, 33 bp, Homo sapien
gccctagtttgacagacggtatagaggctcaag

SEQ ID NO: 899680 - DNA, 33 bp, Homo sapien
gccctagtttgacagatggtatagaggctcaag

SEQ ID NO: 899681 - DNA, 33 bp, Homo sapien
tctccagaaatgagaacgcttttagttgtgcca

SEQ ID NO: 899682 - DNA, 33 bp, Homo sapien
tctccagaaatgagaaggcttttagttgtgcca

SEQ ID NO: 899683 - DNA, 33 bp, Homo sapien
actccaaagcttggaccctttccagtgtcagaa

SEQ ID NO: 899684 - DNA, 33 bp, Homo sapien
actccaaagcttggactctttccagtgtcagaa

SEQ ID NO: 899685 - DNA, 33 bp, Homo sapien
attcaacatccactctcaataatgaataaacag

SEQ ID NO: 899686 - DNA, 33 bp, Homo sapien
attcaacatccactctgaataatgaataaacag

SEQ ID NO: 899687 - DNA, 33 bp, Homo sapien
ggctgttaagagttacaatgcacatttctagaa

SEQ ID NO: 899688 - DNA, 33 bp, Homo sapien
ggctgttaagagttaccatgcacatttctagaa

SEQ ID NO: 899689 - DNA, 33 bp, Homo sapien
caagggcaagcagagacggatgtcccagtagag

SEQ ID NO: 899690 - DNA, 33 bp, Homo sapien
caagggcaagcagagatggatgtcccagtagag

SEQ ID NO: 899691 - DNA, 33 bp, Homo sapien
tttcagagataaaagaagcttggagagggtgag

SEQ ID NO: 899692 - DNA, 33 bp, Homo sapien
tttcagagataaaagaggcttggagagggtgag

SEQ ID NO: 899693 - DNA, 33 bp, Homo sapien
ttaaatcctctgcttcaccactttttcatatga

SEQ ID NO: 899694 - DNA, 33 bp, Homo sapien
ttaaatcctctgcttctccactttttcatatga

SEQ ID NO: 899695 - DNA, 33 bp, Homo sapien
agacacaaggaagaagccatgtcatcaatgtaa

SEQ ID NO: 899696 - DNA, 33 bp, Homo sapien
agacacaaggaagaagtcatgtcatcaatgtaa

SEQ ID NO: 899697 - DNA, 33 bp, Homo sapien
aggaaaaagttgtcaactgtgttatatccaaat

SEQ ID NO: 899698 - DNA, 33 bp, Homo sapien
aggaaaaagttgtcaattgtgttatatccaaat

SEQ ID NO: 899699 - DNA, 33 bp, Homo sapien
catgtttgccttcccccatgatcctcttcctgc

SEQ ID NO: 899700 - DNA, 33 bp, Homo sapien
catgtttgccttcccctatgatcctcttcctgc

SEQ ID NO: 899701 - DNA, 33 bp, Homo sapien
gagaagaaagttgtcaaaacactgcctcctgaa

SEQ ID NO: 899702 - DNA, 33 bp, Homo sapien
gagaagaaagttgtcagaacactgcctcctgaa

SEQ ID NO: 899703 - DNA, 33 bp, Homo sapien
ccatatcttgtcctaccaggttttcagagacaa

SEQ ID NO: 899704 - DNA, 33 bp, Homo sapien
ccatatcttgtcctactaggttttcagagacaa

SEQ ID NO: 899705 - DNA, 33 bp, Homo sapien
acctcctatggtagcaatgccttcttttggaac

SEQ ID NO: 899706 - DNA, 33 bp, Homo sapien
acctcctatggtagcagtgccttcttttggaac

SEQ ID NO: 899707 - DNA, 33 bp, Homo sapien
ttgtgtaacccaaacccctatcaaggtacaggc

SEQ ID NO: 899708 - DNA, 33 bp, Homo sapien
ttgtgtaacccaaaccgctatcaaggtacaggc

SEQ ID NO: 899709 - DNA, 33 bp, Homo sapien
caaaacaagaaaataaacagcaaatatcaaact

SEQ ID NO: 899710 - DNA, 33 bp, Homo sapien
caaaacaagaaaataatcagcaaatatcaaact

SEQ ID NO: 899711 - DNA, 33 bp, Homo sapien
aattacaatcttactcaaatctcacgacaaacc

SEQ ID NO: 899712 - DNA, 33 bp, Homo sapien
aattacaatcttactcgaatctcacgacaaacc

SEQ ID NO: 899713 - DNA, 33 bp, Homo sapien
tgaagctaatgagcaaatcttacaggaaacaga

SEQ ID NO: 899714 - DNA, 33 bp, Homo sapien
tgaagctaatgagcaactcttacaggaaacaga

SEQ ID NO: 899715 - DNA, 33 bp, Homo sapien
atcagattcacctacacggatgatccgttaatg

SEQ ID NO: 899716 - DNA, 33 bp, Homo sapien
atcagattcacctacatggatgatccgttaatg

SEQ ID NO: 899717 - DNA, 33 bp, Homo sapien
gaagtatgggagccaacgatcgagattccagag

SEQ ID NO: 899718 - DNA, 33 bp, Homo sapien
gaagtatgggagccaatgatcgagattccagag

SEQ ID NO: 899719 - DNA, 33 bp, Homo sapien
tgacttaataccctgaactgtactttcccattc

SEQ ID NO: 899720 - DNA, 33 bp, Homo sapien
tgacttaataccctgagctgtactttcccattc

SEQ ID NO: 899721 - DNA, 33 bp, Homo sapien
tctgcaattccagctacctaaacccacctctct

SEQ ID NO: 899722 - DNA, 33 bp, Homo sapien
tctgcaattccagctatctaaacccacctctct

SEQ ID NO: 899723 - DNA, 33 bp, Homo sapien
ggactatgggactataacataatgctgggagct

SEQ ID NO: 899724 - DNA, 33 bp, Homo sapien
ggactatgggactataccataatgctgggagct

SEQ ID NO: 899725 - DNA, 33 bp, Homo sapien
aattaaccactattaaagtcgatacatacctta

SEQ ID NO: 899726 - DNA, 33 bp, Homo sapien
aattaaccactattaaggtcgatacatacctta

SEQ ID NO: 899727 - DNA, 33 bp, Homo sapien
tggcctgctcacagaacaaaggaggagcactct

SEQ ID NO: 899728 - DNA, 33 bp, Homo sapien
tggcctgctcacagaagaaaggaggagcactct

SEQ ID NO: 899729 - DNA, 33 bp, Homo sapien
cgagttatctgccatcactttcagcttacttta

SEQ ID NO: 899730 - DNA, 33 bp, Homo sapien
cgagttatctgccatcgctttcagcttacttta

SEQ ID NO: 899731 - DNA, 33 bp, Homo sapien
cagaccactgtagaacaagatattatggaaaag

SEQ ID NO: 899732 - DNA, 33 bp, Homo sapien
cagaccactgtagaaccagatattatggaaaag

SEQ ID NO: 899733 - DNA, 33 bp, Homo sapien
gcttccaaagtacataataagtgatgatgagtc

SEQ ID NO: 899734 - DNA, 33 bp, Homo sapien
gcttccaaagtacatagtaagtgatgatgagtc

SEQ ID NO: 899735 - DNA, 33 bp, Homo sapien
tagcacacaaccatttaaaaatttacaattcag

SEQ ID NO: 899736 - DNA, 33 bp, Homo sapien
tagcacacaaccattttaaaatttacaattcag

SEQ ID NO: 899737 - DNA, 33 bp, Homo sapien
ctgatttctcctataacacagatgaaccttgaa

SEQ ID NO: 899738 - DNA, 33 bp, Homo sapien
ctgatttctcctataagacagatgaaccttgaa

SEQ ID NO: 899739 - DNA, 33 bp, Homo sapien
agagggaagaggcataccaaaaacattgggatc

SEQ ID NO: 899740 - DNA, 33 bp, Homo sapien
agagggaagaggcatatcaaaaacattgggatc

SEQ ID NO: 899741 - DNA, 33 bp, Homo sapien
ctccaacccagctactaaaaacacattggctac

SEQ ID NO: 899742 - DNA, 33 bp, Homo sapien
ctccaacccagctactgaaaacacattggctac

SEQ ID NO: 899743 - DNA, 33 bp, Homo sapien
ccaggcccaatgaaaaacatccaggatacttgg

SEQ ID NO: 899744 - DNA, 33 bp, Homo sapien
ccaggcccaatgaaaagcatccaggatacttgg

SEQ ID NO: 899745 - DNA, 33 bp, Homo sapien
ttggagggcaggactagactttgctctccaagt

SEQ ID NO: 899746 - DNA, 33 bp, Homo sapien
ttggagggcaggactatactttgctctccaagt

SEQ ID NO: 899747 - DNA, 33 bp, Homo sapien
ttggatttgcagaggccctgagaaaccaacaag

SEQ ID NO: 899748 - DNA, 33 bp, Homo sapien
ttggatttgcagaggctctgagaaaccaacaag

SEQ ID NO: 899749 - DNA, 33 bp, Homo sapien
ggtcaatgacacttgacagaaaagtggacttcc

SEQ ID NO: 899750 - DNA, 33 bp, Homo sapien
ggtcaatgacacttgatagaaaagtggacttcc

SEQ ID NO: 899751 - DNA, 33 bp, Homo sapien
catgatgaatagattaccaaaaccatgaaggta

SEQ ID NO: 899752 - DNA, 33 bp, Homo sapien
catgatgaatagattatcaaaaccatgaaggta

SEQ ID NO: 899753 - DNA, 33 bp, Homo sapien
aattgagaaatgacaaaacaggtattagaagcc

SEQ ID NO: 899754 - DNA, 33 bp, Homo sapien
aattgagaaatgacaacacaggtattagaagcc

SEQ ID NO: 899755 - DNA, 33 bp, Homo sapien
gtgcttagatcattggaacctgattcagagctc

SEQ ID NO: 899756 - DNA, 33 bp, Homo sapien
gtgcttagatcattgggacctgattcagagctc

SEQ ID NO: 899757 - DNA, 33 bp, Homo sapien
ctgtggagctggctaacaccaatgacaaataac

SEQ ID NO: 899758 - DNA, 33 bp, Homo sapien
ctgtggagctggctaataccaatgacaaataac

SEQ ID NO: 899759 - DNA, 33 bp, Homo sapien
ttatggacacaaaaaaatgcatgaaaggaggta

SEQ ID NO: 899760 - DNA, 33 bp, Homo sapien
ttatggacacaaaaaattgcatgaaaggaggta

SEQ ID NO: 899761 - DNA, 33 bp, Homo sapien
tattggatcacaccacaagggcaggtaaagggt

SEQ ID NO: 899762 - DNA, 33 bp, Homo sapien
tattggatcacaccacgagggcaggtaaagggt

SEQ ID NO: 899763 - DNA, 33 bp, Homo sapien
tagtacagcagagactcaagggctattggagtc

SEQ ID NO: 899764 - DNA, 33 bp, Homo sapien
tagtacagcagagacttaagggctattggagtc

SEQ ID NO: 899765 - DNA, 33 bp, Homo sapien
aatttcccgcctcaacaatgtggtgggcatact

SEQ ID NO: 899766 - DNA, 33 bp, Homo sapien
aatttcccgcctcaaccatgtggtgggcatact

SEQ ID NO: 899767 - DNA, 33 bp, Homo sapien
taaatttgataatggcacaggattatatgtaga

SEQ ID NO: 899768 - DNA, 33 bp, Homo sapien
taaatttgataatggcccaggattatatgtaga

SEQ ID NO: 899769 - DNA, 33 bp, Homo sapien
aaagcattgcccccaaaagttagaagcaaagtg

SEQ ID NO: 899770 - DNA, 33 bp, Homo sapien
aaagcattgcccccaagagttagaagcaaagtg

SEQ ID NO: 899771 - DNA, 33 bp, Homo sapien
gccagtgaacgcgacccacgcagctgactagat

SEQ ID NO: 899772 - DNA, 33 bp, Homo sapien
gccagtgaacgcgaccgacgcagctgactagat

SEQ ID NO: 899773 - DNA, 33 bp, Homo sapien
tgtttatctgatggaaaccttggaatctctcct

SEQ ID NO: 899774 - DNA, 33 bp, Homo sapien
tgtttatctgatggaagccttggaatctctcct

SEQ ID NO: 899775 - DNA, 33 bp, Homo sapien
gcatcaaaccaagggaacacaggaactacgagg

SEQ ID NO: 899776 - DNA, 33 bp, Homo sapien
gcatcaaaccaagggaccacaggaactacgagg

SEQ ID NO: 899777 - DNA, 33 bp, Homo sapien
gatatatgttttctaagaacccggtttgtctct

SEQ ID NO: 899778 - DNA, 33 bp, Homo sapien
gatatatgttttctaataacccggtttgtctct

SEQ ID NO: 899779 - DNA, 33 bp, Homo sapien
tttatcctatcagtaactgaactcttttgggca

SEQ ID NO: 899780 - DNA, 33 bp, Homo sapien
tttatcctatcagtaattgaactcttttgggca

SEQ ID NO: 899781 - DNA, 33 bp, Homo sapien
tttatgtaaagctagacagcatcaaatacattt

SEQ ID NO: 899782 - DNA, 33 bp, Homo sapien
tttatgtaaagctagagagcatcaaatacattt

SEQ ID NO: 899783 - DNA, 33 bp, Homo sapien
attcacttgaatgtataaaagtacatgctttaa

SEQ ID NO: 899784 - DNA, 33 bp, Homo sapien
attcacttgaatgtatgaaagtacatgctttaa

SEQ ID NO: 899785 - DNA, 33 bp, Homo sapien
tataggagtgtaaagcacagctgtttcaaatct

SEQ ID NO: 899786 - DNA, 33 bp, Homo sapien
tataggagtgtaaagcgcagctgtttcaaatct

SEQ ID NO: 899787 - DNA, 33 bp, Homo sapien
catattctccgaattcccaactctactgaagga

SEQ ID NO: 899788 - DNA, 33 bp, Homo sapien
catattctccgaattcgcaactctactgaagga

SEQ ID NO: 899789 - DNA, 33 bp, Homo sapien
ctctttcctctcaaaacgtcattaatactctaa

SEQ ID NO: 899790 - DNA, 33 bp, Homo sapien
ctctttcctctcaaaaggtcattaatactctaa

SEQ ID NO: 899791 - DNA, 33 bp, Homo sapien
cactgttacactattacctttacatacttatat

SEQ ID NO: 899792 - DNA, 33 bp, Homo sapien
cactgttacactattatctttacatacttatat

SEQ ID NO: 899793 - DNA, 33 bp, Homo sapien
gctattcactcatgtacatttttcaggctactc

SEQ ID NO: 899794 - DNA, 33 bp, Homo sapien
gctattcactcatgtatatttttcaggctactc

SEQ ID NO: 899795 - DNA, 33 bp, Homo sapien
tctgtgtaatgtaaacgattattctgcataata

SEQ ID NO: 899796 - DNA, 33 bp, Homo sapien
tctgtgtaatgtaaactattattctgcataata

SEQ ID NO: 899797 - DNA, 33 bp, Homo sapien
tctttctgttaaggggaaaataacctttctgca

SEQ ID NO: 899798 - DNA, 33 bp, Homo sapien
tctttctgttaagggggaaataacctttctgca

SEQ ID NO: 899799 - DNA, 33 bp, Homo sapien
tccatagtgtaattaactgcctaggttttttcc

SEQ ID NO: 899800 - DNA, 33 bp, Homo sapien
tccatagtgtaattaagtgcctaggttttttcc

SEQ ID NO: 899801 - DNA, 33 bp, Homo sapien
ccataaagctgcttcaacattattggttacatt

SEQ ID NO: 899802 - DNA, 33 bp, Homo sapien
ccataaagctgcttcatcattattggttacatt

SEQ ID NO: 899803 - DNA, 33 bp, Homo sapien
ataaaagaaattcctacgaacccaccaaccaac

SEQ ID NO: 899804 - DNA, 33 bp, Homo sapien
ataaaagaaattcctatgaacccaccaaccaac

SEQ ID NO: 899805 - DNA, 33 bp, Homo sapien
ccctgctggctgccacactgcaattaggtaaga

SEQ ID NO: 899806 - DNA, 33 bp, Homo sapien
ccctgctggctgccacgctgcaattaggtaaga

SEQ ID NO: 899807 - DNA, 33 bp, Homo sapien
tctagaagggggtaggaattgattataggagga

SEQ ID NO: 899808 - DNA, 33 bp, Homo sapien
tctagaagggggtagggattgattataggagga

SEQ ID NO: 899809 - DNA, 33 bp, Homo sapien
gtcatctgagaaaggacatctggtttcatgtta

SEQ ID NO: 899810 - DNA, 33 bp, Homo sapien
gtcatctgagaaaggatatctggtttcatgtta

SEQ ID NO: 899811 - DNA, 33 bp, Homo sapien
tggcccttatgaaacaagatgttagaatgaatt

SEQ ID NO: 899812 - DNA, 33 bp, Homo sapien
tggcccttatgaaacacgatgttagaatgaatt

SEQ ID NO: 899813 - DNA, 33 bp, Homo sapien
tcctttggaaagccaacgagaaaacaaattagg

SEQ ID NO: 899814 - DNA, 33 bp, Homo sapien
tcctttggaaagccaatgagaaaacaaattagg

SEQ ID NO: 899815 - DNA, 33 bp, Homo sapien
gcactcctggagcacacagatgtaggctaggcc

SEQ ID NO: 899816 - DNA, 33 bp, Homo sapien
gcactcctggagcacatagatgtaggctaggcc

SEQ ID NO: 899817 - DNA, 33 bp, Homo sapien
ctaggcccagaaaaatgatgaaagccacttact

SEQ ID NO: 899818 - DNA, 33 bp, Homo sapien
ctaggcccagaaaaattatgaaagccacttact

SEQ ID NO: 899819 - DNA, 33 bp, Homo sapien
aactagtgccttttcacgggtaacgacgttgtt

SEQ ID NO: 899820 - DNA, 33 bp, Homo sapien
aactagtgccttttcatgggtaacgacgttgtt

SEQ ID NO: 899821 - DNA, 33 bp, Homo sapien
atggagaagctacgaaattaagccagttcctaa

SEQ ID NO: 899822 - DNA, 33 bp, Homo sapien
atggagaagctacgaagttaagccagttcctaa

SEQ ID NO: 899823 - DNA, 33 bp, Homo sapien
tttcacttcatctccccaaaaacttcctatcac

SEQ ID NO: 899824 - DNA, 33 bp, Homo sapien
tttcacttcatctccctaaaaacttcctatcac

SEQ ID NO: 899825 - DNA, 33 bp, Homo sapien
catcctggtctcactcaactttgcccttcacga

SEQ ID NO: 899826 - DNA, 33 bp, Homo sapien
catcctggtctcactcgactttgcccttcacga

SEQ ID NO: 899827 - DNA, 33 bp, Homo sapien
gcacccaggagaatagaagtcgaactcgcttcc

SEQ ID NO: 899828 - DNA, 33 bp, Homo sapien
gcacccaggagaataggagtcgaactcgcttcc

SEQ ID NO: 899829 - DNA, 33 bp, Homo sapien
aagatttgacaagagaagtatttagttgatcca

SEQ ID NO: 899830 - DNA, 33 bp, Homo sapien
aagatttgacaagagaggtatttagttgatcca

SEQ ID NO: 899831 - DNA, 33 bp, Homo sapien
ccaaggtaggttttacggctaactacgctgtgt

SEQ ID NO: 899832 - DNA, 33 bp, Homo sapien
ccaaggtaggttttactgctaactacgctgtgt

SEQ ID NO: 899833 - DNA, 33 bp, Homo sapien
gtactttttaattgtacgtgttgacagtagggt

SEQ ID NO: 899834 - DNA, 33 bp, Homo sapien
gtactttttaattgtatgtgttgacagtagggt

SEQ ID NO: 899835 - DNA, 33 bp, Homo sapien
ttaatttgattccgccacctacttttaaatatt

SEQ ID NO: 899836 - DNA, 33 bp, Homo sapien
ttaatttgattccgccgcctacttttaaatatt

SEQ ID NO: 899837 - DNA, 33 bp, Homo sapien
gggagttaattaggcacaggtcaagatgagggg

SEQ ID NO: 899838 - DNA, 33 bp, Homo sapien
gggagttaattaggcagaggtcaagatgagggg

SEQ ID NO: 899839 - DNA, 33 bp, Homo sapien
ttttagcaatttcgaaatacgcagtacattatt

SEQ ID NO: 899840 - DNA, 33 bp, Homo sapien
ttttagcaatttcgaagtacgcagtacattatt

SEQ ID NO: 899841 - DNA, 33 bp, Homo sapien
cacataagaagtataacggtcatgaaaagttaa

SEQ ID NO: 899842 - DNA, 33 bp, Homo sapien
cacataagaagtataatggtcatgaaaagttaa

SEQ ID NO: 899843 - DNA, 33 bp, Homo sapien
cactagaactctcctacgcttatttataaaata

SEQ ID NO: 899844 - DNA, 33 bp, Homo sapien
cactagaactctcctatgcttatttataaaata

SEQ ID NO: 899845 - DNA, 33 bp, Homo sapien
gctgccataggaaaagccttactactactctga

SEQ ID NO: 899846 - DNA, 33 bp, Homo sapien
gctgccataggaaaaggcttactactactctga

SEQ ID NO: 899847 - DNA, 33 bp, Homo sapien
tacattcaggatttaaacatcaaccacatgggt

SEQ ID NO: 899848 - DNA, 33 bp, Homo sapien
tacattcaggatttaagcatcaaccacatgggt

SEQ ID NO: 899849 - DNA, 33 bp, Homo sapien
tgtctccgtacattcactgaaaattgattgatc

SEQ ID NO: 899850 - DNA, 33 bp, Homo sapien
tgtctccgtacattcattgaaaattgattgatc

SEQ ID NO: 899851 - DNA, 33 bp, Homo sapien
caatagtcaatcaacactgagctttcacttagc

SEQ ID NO: 899852 - DNA, 33 bp, Homo sapien
caatagtcaatcaacattgagctttcacttagc

SEQ ID NO: 899853 - DNA, 33 bp, Homo sapien
ctgactgtccgataccccagcgatcgtaggaga

SEQ ID NO: 899854 - DNA, 33 bp, Homo sapien
ctgactgtccgatacctcagcgatcgtaggaga

SEQ ID NO: 899855 - DNA, 33 bp, Homo sapien
aatctatgatgaattgacaattaaaatagcaca

SEQ ID NO: 899856 - DNA, 33 bp, Homo sapien
aatctatgatgaattgtcaattaaaatagcaca

SEQ ID NO: 899857 - DNA, 33 bp, Homo sapien
atttgcctttctctaacgaccattgatgatgac

SEQ ID NO: 899858 - DNA, 33 bp, Homo sapien
atttgcctttctctaatgaccattgatgatgac

SEQ ID NO: 899859 - DNA, 33 bp, Homo sapien
aggatgcagagaaatcagaacgcttttacactt

SEQ ID NO: 899860 - DNA, 33 bp, Homo sapien
aggatgcagagaaatcggaacgcttttacactt

SEQ ID NO: 899861 - DNA, 33 bp, Homo sapien
aaggagagagaaaagcgccaatcttcatcataa

SEQ ID NO: 899862 - DNA, 33 bp, Homo sapien
aaggagagagaaaagctccaatcttcatcataa

SEQ ID NO: 899863 - DNA, 33 bp, Homo sapien
gatagcggagggacagaaggcagagcgcacagc

SEQ ID NO: 899864 - DNA, 33 bp, Homo sapien
gatagcggagggacaggaggcagagcgcacagc

SEQ ID NO: 899865 - DNA, 33 bp, Homo sapien
tcaggggacaaacacaagtgaccaagaccacaa

SEQ ID NO: 899866 - DNA, 33 bp, Homo sapien
tcaggggacaaacacaggtgaccaagaccacaa

SEQ ID NO: 899867 - DNA, 33 bp, Homo sapien
tgttgtttcacttgaactgtttcattgtctaat

SEQ ID NO: 899868 - DNA, 33 bp, Homo sapien
tgttgtttcacttgaattgtttcattgtctaat

SEQ ID NO: 899869 - DNA, 33 bp, Homo sapien
aaatcttgtgaagctccagatacttcagaatcc

SEQ ID NO: 899870 - DNA, 33 bp, Homo sapien
aaatcttgtgaagctctagatacttcagaatcc

SEQ ID NO: 899871 - DNA, 33 bp, Homo sapien
cctgtggcattatcgcgccaaaacaatagtaga

SEQ ID NO: 899872 - DNA, 33 bp, Homo sapien
cctgtggcattatcgctccaaaacaatagtaga

SEQ ID NO: 899873 - DNA, 33 bp, Homo sapien
tgaatgagttaatgaacgaatgcttggaactct

SEQ ID NO: 899874 - DNA, 33 bp, Homo sapien
tgaatgagttaatgaatgaatgcttggaactct

SEQ ID NO: 899875 - DNA, 33 bp, Homo sapien
ccattgtgtttccttcccaaatagaatcgggta

SEQ ID NO: 899876 - DNA, 33 bp, Homo sapien
ccattgtgtttccttcgcaaatagaatcgggta

SEQ ID NO: 899877 - DNA, 33 bp, Homo sapien
aaatggactaggaaatgattaagagacaaaagt

SEQ ID NO: 899878 - DNA, 33 bp, Homo sapien
aaatggactaggaaattattaagagacaaaagt

SEQ ID NO: 899879 - DNA, 33 bp, Homo sapien
agttaattttgaaaaacggatcacttagaaatt

SEQ ID NO: 899880 - DNA, 33 bp, Homo sapien
agttaattttgaaaaatggatcacttagaaatt

SEQ ID NO: 899881 - DNA, 33 bp, Homo sapien
tcccattccaaattggacaaactggctaaaaca

SEQ ID NO: 899882 - DNA, 33 bp, Homo sapien
tcccattccaaattggtcaaactggctaaaaca

SEQ ID NO: 899883 - DNA, 33 bp, Homo sapien
ttatgttggagtatagccactgtgataatttta

SEQ ID NO: 899884 - DNA, 33 bp, Homo sapien
ttatgttggagtataggcactgtgataatttta

SEQ ID NO: 899885 - DNA, 33 bp, Homo sapien
aaacaaactttgtcaacaaatttggacactttg

SEQ ID NO: 899886 - DNA, 33 bp, Homo sapien
aaacaaactttgtcaataaatttggacactttg

SEQ ID NO: 899887 - DNA, 33 bp, Homo sapien
aatcaccccataaggggcagaagcatgtctcaa

SEQ ID NO: 899888 - DNA, 33 bp, Homo sapien
aatcaccccataagggtcagaagcatgtctcaa

SEQ ID NO: 899889 - DNA, 33 bp, Homo sapien
caggtaaatttttgaccagccagggtccctccc

SEQ ID NO: 899890 - DNA, 33 bp, Homo sapien
caggtaaatttttgactagccagggtccctccc

SEQ ID NO: 899891 - DNA, 33 bp, Homo sapien
taaagtttttagagtacgtggaaattttgccag

SEQ ID NO: 899892 - DNA, 33 bp, Homo sapien
taaagtttttagagtaggtggaaattttgccag

SEQ ID NO: 899893 - DNA, 33 bp, Homo sapien
acctataagcatgtaaaataaagagagcttaca

SEQ ID NO: 899894 - DNA, 33 bp, Homo sapien
acctataagcatgtaagataaagagagcttaca

SEQ ID NO: 899895 - DNA, 33 bp, Homo sapien
gaggttggaggagtacagagagctcagaagagg

SEQ ID NO: 899896 - DNA, 33 bp, Homo sapien
gaggttggaggagtacggagagctcagaagagg

SEQ ID NO: 899897 - DNA, 33 bp, Homo sapien
aatgacctggttaacccactctaaatcttgaag

SEQ ID NO: 899898 - DNA, 33 bp, Homo sapien
aatgacctggttaaccgactctaaatcttgaag

SEQ ID NO: 899899 - DNA, 33 bp, Homo sapien
atgagcgagctaaatacgtcacctaccaatatg

SEQ ID NO: 899900 - DNA, 33 bp, Homo sapien
atgagcgagctaaatatgtcacctaccaatatg

SEQ ID NO: 899901 - DNA, 33 bp, Homo sapien
cagtgttattccaaaacaggagatgaaatgaag

SEQ ID NO: 899902 - DNA, 33 bp, Homo sapien
cagtgttattccaaaagaggagatgaaatgaag

SEQ ID NO: 899903 - DNA, 33 bp, Homo sapien
actgccctttgaaacgaaaaattgtgtacgtgt

SEQ ID NO: 899904 - DNA, 33 bp, Homo sapien
actgccctttgaaacggaaaattgtgtacgtgt

SEQ ID NO: 899905 - DNA, 33 bp, Homo sapien
ttcatgttcagcaataaaactgcattatatgag

SEQ ID NO: 899906 - DNA, 33 bp, Homo sapien
ttcatgttcagcaatagaactgcattatatgag

SEQ ID NO: 899907 - DNA, 33 bp, Homo sapien
taagctgtgatgaagacgtccctgctacgctat

SEQ ID NO: 899908 - DNA, 33 bp, Homo sapien
taagctgtgatgaagatgtccctgctacgctat

SEQ ID NO: 899909 - DNA, 33 bp, Homo sapien
tcaatcaaaatcttccactttgctcctatagac

SEQ ID NO: 899910 - DNA, 33 bp, Homo sapien
tcaatcaaaatcttccgctttgctcctatagac

SEQ ID NO: 899911 - DNA, 33 bp, Homo sapien
gggagtcctcagacccagatgatttgttaccca

SEQ ID NO: 899912 - DNA, 33 bp, Homo sapien
gggagtcctcagacccggatgatttgttaccca

SEQ ID NO: 899913 - DNA, 33 bp, Homo sapien
ctagaataagctctaaaatgaacaatgaacatt

SEQ ID NO: 899914 - DNA, 33 bp, Homo sapien
ctagaataagctctaagatgaacaatgaacatt

SEQ ID NO: 899915 - DNA, 33 bp, Homo sapien
gattattcagatacatcaaatttattgtgcact

SEQ ID NO: 899916 - DNA, 33 bp, Homo sapien
gattattcagatacattaaatttattgtgcact

SEQ ID NO: 899917 - DNA, 33 bp, Homo sapien
agtcacactctaaacaactcctaagttagcatg

SEQ ID NO: 899918 - DNA, 33 bp, Homo sapien
agtcacactctaaacatctcctaagttagcatg

SEQ ID NO: 899919 - DNA, 33 bp, Homo sapien
cccgtttgcacctctacgatgagttttacctat

SEQ ID NO: 899920 - DNA, 33 bp, Homo sapien
cccgtttgcacctctatgatgagttttacctat

SEQ ID NO: 899921 - DNA, 33 bp, Homo sapien
ccgagcacagtattcaagtataaagtattcaaa

SEQ ID NO: 899922 - DNA, 33 bp, Homo sapien
ccgagcacagtattcaggtataaagtattcaaa

SEQ ID NO: 899923 - DNA, 33 bp, Homo sapien
ggtttataactggataactaagcacagtatagg

SEQ ID NO: 899924 - DNA, 33 bp, Homo sapien
ggtttataactggatagctaagcacagtatagg

SEQ ID NO: 899925 - DNA, 33 bp, Homo sapien
tggtatgcagtgaagaagccactaagaagacag

SEQ ID NO: 899926 - DNA, 33 bp, Homo sapien
tggtatgcagtgaagaggccactaagaagacag

SEQ ID NO: 899927 - DNA, 33 bp, Homo sapien
gatgggcattcccaggacaaaaaggtttcctaa

SEQ ID NO: 899928 - DNA, 33 bp, Homo sapien
gatgggcattcccaggtcaaaaaggtttcctaa

SEQ ID NO: 899929 - DNA, 33 bp, Homo sapien
taagggtaagaatcacagtcaaattgatcacaa

SEQ ID NO: 899930 - DNA, 33 bp, Homo sapien
taagggtaagaatcacggtcaaattgatcacaa

SEQ ID NO: 899931 - DNA, 33 bp, Homo sapien
cacatcctcccttttcccagtacctatagcatg

SEQ ID NO: 899932 - DNA, 33 bp, Homo sapien
cacatcctcccttttcgcagtacctatagcatg

SEQ ID NO: 899933 - DNA, 33 bp, Homo sapien
caatgcacgcttaccaaagaaataacagtaaaa

SEQ ID NO: 899934 - DNA, 33 bp, Homo sapien
caatgcacgcttaccacagaaataacagtaaaa

SEQ ID NO: 899935 - DNA, 33 bp, Homo sapien
cattcagggctatagaagctaataaggaatgag

SEQ ID NO: 899936 - DNA, 33 bp, Homo sapien
cattcagggctatagatgctaataaggaatgag

SEQ ID NO: 899937 - DNA, 33 bp, Homo sapien
ggaatgagttaagatacgaagccagttctgact

SEQ ID NO: 899938 - DNA, 33 bp, Homo sapien
ggaatgagttaagatatgaagccagttctgact

SEQ ID NO: 899939 - DNA, 33 bp, Homo sapien
atgcattgctactaccaaatcaatataggaata

SEQ ID NO: 899940 - DNA, 33 bp, Homo sapien
atgcattgctactaccgaatcaatataggaata

SEQ ID NO: 899941 - DNA, 33 bp, Homo sapien
taaactacattgataacgtaataaaattgtgaa

SEQ ID NO: 899942 - DNA, 33 bp, Homo sapien
taaactacattgataaggtaataaaattgtgaa

SEQ ID NO: 899943 - DNA, 33 bp, Homo sapien
ctgaggacagtagagacaaagccgataataaaa

SEQ ID NO: 899944 - DNA, 33 bp, Homo sapien
ctgaggacagtagagagaaagccgataataaaa

SEQ ID NO: 899945 - DNA, 33 bp, Homo sapien
gagctattagaaacaaaattcagtgtctttgat

SEQ ID NO: 899946 - DNA, 33 bp, Homo sapien
gagctattagaaacaacattcagtgtctttgat

SEQ ID NO: 899947 - DNA, 33 bp, Homo sapien
aattcatttacctaacagatggagtcccctttg

SEQ ID NO: 899948 - DNA, 33 bp, Homo sapien
aattcatttacctaacggatggagtcccctttg

SEQ ID NO: 899949 - DNA, 33 bp, Homo sapien
tctcactaggacatacaaaggaggtggctatgt

SEQ ID NO: 899950 - DNA, 33 bp, Homo sapien
tctcactaggacatacgaaggaggtggctatgt

SEQ ID NO: 899951 - DNA, 33 bp, Homo sapien
gcagcaaatggttttaactcagaagtttcattt

SEQ ID NO: 899952 - DNA, 33 bp, Homo sapien
gcagcaaatggttttatctcagaagtttcattt

SEQ ID NO: 899953 - DNA, 33 bp, Homo sapien
agaagtcatatacagaagaaattattgttttat

SEQ ID NO: 899954 - DNA, 33 bp, Homo sapien
agaagtcatatacagaggaaattattgttttat

SEQ ID NO: 899955 - DNA, 33 bp, Homo sapien
cttttcaagagtctcccgaagttttaacttatt

SEQ ID NO: 899956 - DNA, 33 bp, Homo sapien
cttttcaagagtctccggaagttttaacttatt

SEQ ID NO: 899957 - DNA, 33 bp, Homo sapien
catgcaaatcataaccaacatgaatttatatcc

SEQ ID NO: 899958 - DNA, 33 bp, Homo sapien
catgcaaatcataacccacatgaatttatatcc

SEQ ID NO: 899959 - DNA, 33 bp, Homo sapien
cacctacaaaactggaactcttgtcagtgactt

SEQ ID NO: 899960 - DNA, 33 bp, Homo sapien
cacctacaaaactggagctcttgtcagtgactt

SEQ ID NO: 899961 - DNA, 33 bp, Homo sapien
agagcagggtgtagcacatctcaactctgaatg

SEQ ID NO: 899962 - DNA, 33 bp, Homo sapien
agagcagggtgtagcatatctcaactctgaatg

SEQ ID NO: 899963 - DNA, 33 bp, Homo sapien
gtgaggttgtattccaaggccaagaatagtagc

SEQ ID NO: 899964 - DNA, 33 bp, Homo sapien
gtgaggttgtattccacggccaagaatagtagc

SEQ ID NO: 899965 - DNA, 33 bp, Homo sapien
cccccaaatcaacaaaccatgtcgggtaaatat

SEQ ID NO: 899966 - DNA, 33 bp, Homo sapien
cccccaaatcaacaaatcatgtcgggtaaatat

SEQ ID NO: 899967 - DNA, 33 bp, Homo sapien
atgcaacttacatgccacaatttacaaagagtg

SEQ ID NO: 899968 - DNA, 33 bp, Homo sapien
atgcaacttacatgcctcaatttacaaagagtg

SEQ ID NO: 899969 - DNA, 33 bp, Homo sapien
aagatgatgttggcaccggaagcccaggaaaaa

SEQ ID NO: 899970 - DNA, 33 bp, Homo sapien
aagatgatgttggcactggaagcccaggaaaaa

SEQ ID NO: 899971 - DNA, 33 bp, Homo sapien
ggttagcaactattgacggatagaaataatttt

SEQ ID NO: 899972 - DNA, 33 bp, Homo sapien
ggttagcaactattgatggatagaaataatttt

SEQ ID NO: 899973 - DNA, 33 bp, Homo sapien
aataacccaacagtagaaacagtgctagtagga

SEQ ID NO: 899974 - DNA, 33 bp, Homo sapien
aataacccaacagtaggaacagtgctagtagga

SEQ ID NO: 899975 - DNA, 33 bp, Homo sapien
gaaaagggggatttcacgagctaacgaagtggt

SEQ ID NO: 899976 - DNA, 33 bp, Homo sapien
gaaaagggggatttcaggagctaacgaagtggt

SEQ ID NO: 899977 - DNA, 33 bp, Homo sapien
agctgatgttaaacaacggctttcttgtttcag

SEQ ID NO: 899978 - DNA, 33 bp, Homo sapien
agctgatgttaaacaatggctttcttgtttcag

SEQ ID NO: 899979 - DNA, 33 bp, Homo sapien
gctaattcattgtttacggcggccttatacaga

SEQ ID NO: 899980 - DNA, 33 bp, Homo sapien
gctaattcattgtttatggcggccttatacaga

SEQ ID NO: 899981 - DNA, 33 bp, Homo sapien
tcagtgattaagccccactatctgagtagtaag

SEQ ID NO: 899982 - DNA, 33 bp, Homo sapien
tcagtgattaagcccctctatctgagtagtaag

SEQ ID NO: 899983 - DNA, 33 bp, Homo sapien
ttactgttttgtaccgcatttcaggtcaagaac

SEQ ID NO: 899984 - DNA, 33 bp, Homo sapien
ttactgttttgtaccggatttcaggtcaagaac

SEQ ID NO: 899985 - DNA, 33 bp, Homo sapien
aggccactctgtcaaaaaaggtgtaattaaaga

SEQ ID NO: 899986 - DNA, 33 bp, Homo sapien
aggccactctgtcaaagaaggtgtaattaaaga

SEQ ID NO: 899987 - DNA, 33 bp, Homo sapien
ctggcgtggtatatggcagacatccagtaaata

SEQ ID NO: 899988 - DNA, 33 bp, Homo sapien
ctggcgtggtatatggtagacatccagtaaata

SEQ ID NO: 899989 - DNA, 33 bp, Homo sapien
ggacgaaaacagaacacggtgaagagtaataaa

SEQ ID NO: 899990 - DNA, 33 bp, Homo sapien
ggacgaaaacagaacatggtgaagagtaataaa

SEQ ID NO: 899991 - DNA, 33 bp, Homo sapien
taaaatcaatgagagcacactttatcaggcctc

SEQ ID NO: 899992 - DNA, 33 bp, Homo sapien
taaaatcaatgagagcccactttatcaggcctc

SEQ ID NO: 899993 - DNA, 33 bp, Homo sapien
tactttattgcatggagctagttgttcttctgt

SEQ ID NO: 899994 - DNA, 33 bp, Homo sapien
tactttattgcatggatctagttgttcttctgt

SEQ ID NO: 899995 - DNA, 33 bp, Homo sapien
gtgacttcctgtcaataaggtcaaccatttttt

SEQ ID NO: 899996 - DNA, 33 bp, Homo sapien
gtgacttcctgtcaatgaggtcaaccatttttt

SEQ ID NO: 899997 - DNA, 33 bp, Homo sapien
attcacttttccctaccgaatctccaaaaagca

SEQ ID NO: 899998 - DNA, 33 bp, Homo sapien
attcacttttccctactgaatctccaaaaagca

SEQ ID NO: 899999 - DNA, 33 bp, Homo sapien
agctttgagttaatggacagtctgaatgaagaa

SEQ ID NO: 900000 - DNA, 33 bp, Homo sapien
agctttgagttaatggtcagtctgaatgaagaa

SEQ ID NO: 900001 - DNA, 33 bp, Homo sapien
atgattttgcaaagcactcaattaaattcaatt

SEQ ID NO: 900002 - DNA, 33 bp, Homo sapien
atgattttgcaaagcagtcaattaaattcaatt

SEQ ID NO: 900003 - DNA, 33 bp, Homo sapien
tgagactactgtgctgacagaccttataatcta

SEQ ID NO: 900004 - DNA, 33 bp, Homo sapien
tgagactactgtgctgtcagaccttataatcta

SEQ ID NO: 900005 - DNA, 33 bp, Homo sapien
gactgaggtggaaaaaaatactgtatataaaag

SEQ ID NO: 900006 - DNA, 33 bp, Homo sapien
gactgaggtggaaaaagatactgtatataaaag

SEQ ID NO: 900007 - DNA, 33 bp, Homo sapien
taaaaggttcatgttcacaaatttcaataaaag

SEQ ID NO: 900008 - DNA, 33 bp, Homo sapien
taaaaggttcatgttcgcaaatttcaataaaag

SEQ ID NO: 900009 - DNA, 33 bp, Homo sapien
ttctccaggtaagttaagttttggatgataaca

SEQ ID NO: 900010 - DNA, 33 bp, Homo sapien
ttctccaggtaagttacgttttggatgataaca

SEQ ID NO: 900011 - DNA, 33 bp, Homo sapien
tatttctcccaatacacctcttttcctgctatc

SEQ ID NO: 900012 - DNA, 33 bp, Homo sapien
tatttctcccaatacagctcttttcctgctatc

SEQ ID NO: 900013 - DNA, 33 bp, Homo sapien
tgtactatgtcttgaaaattttttgtaattatt

SEQ ID NO: 900014 - DNA, 33 bp, Homo sapien
tgtactatgtcttgaacattttttgtaattatt

SEQ ID NO: 900015 - DNA, 33 bp, Homo sapien
gtgctggtggtgttcactactcctgctggttat

SEQ ID NO: 900016 - DNA, 33 bp, Homo sapien
gtgctggtggtgttcagtactcctgctggttat

SEQ ID NO: 900017 - DNA, 33 bp, Homo sapien
aactgcctctattttccaccacaagatcaacac

SEQ ID NO: 900018 - DNA, 33 bp, Homo sapien
aactgcctctattttctaccacaagatcaacac

SEQ ID NO: 900019 - DNA, 33 bp, Homo sapien
agagaaaaatgaactccctaatttgagctggaa

SEQ ID NO: 900020 - DNA, 33 bp, Homo sapien
agagaaaaatgaactctctaatttgagctggaa

SEQ ID NO: 900021 - DNA, 33 bp, Homo sapien
agtgagtgatttatcacgacatcttgttgttta

SEQ ID NO: 900022 - DNA, 33 bp, Homo sapien
agtgagtgatttatcatgacatcttgttgttta

SEQ ID NO: 900023 - DNA, 33 bp, Homo sapien
cataatatcttccaccacaggtcaaggtcattg

SEQ ID NO: 900024 - DNA, 33 bp, Homo sapien
cataatatcttccaccgcaggtcaaggtcattg

SEQ ID NO: 900025 - DNA, 33 bp, Homo sapien
aggtgatttatccaaactgaacaggcaaatcat

SEQ ID NO: 900026 - DNA, 33 bp, Homo sapien
aggtgatttatccaaagtgaacaggcaaatcat

SEQ ID NO: 900027 - DNA, 33 bp, Homo sapien
tccaagaaaagatcatcaaaagtcacattaaag

SEQ ID NO: 900028 - DNA, 33 bp, Homo sapien
tccaagaaaagatcatgaaaagtcacattaaag

SEQ ID NO: 900029 - DNA, 33 bp, Homo sapien
agaggaagaaaaaatacacgaactatgacataa

SEQ ID NO: 900030 - DNA, 33 bp, Homo sapien
agaggaagaaaaaatatacgaactatgacataa

SEQ ID NO: 900031 - DNA, 33 bp, Homo sapien
tctgggtggtacctcaaaatgagagactgctac

SEQ ID NO: 900032 - DNA, 33 bp, Homo sapien
tctgggtggtacctcacaatgagagactgctac

SEQ ID NO: 900033 - DNA, 33 bp, Homo sapien
aaatgaaatgttgacacggtccattagaagata

SEQ ID NO: 900034 - DNA, 33 bp, Homo sapien
aaatgaaatgttgacatggtccattagaagata

SEQ ID NO: 900035 - DNA, 33 bp, Homo sapien
agttcaaacagttcaaatcagagggagctggga

SEQ ID NO: 900036 - DNA, 33 bp, Homo sapien
agttcaaacagttcaagtcagagggagctggga

SEQ ID NO: 900037 - DNA, 33 bp, Homo sapien
tttgcattttgtaatacaaggtttcttgccaat

SEQ ID NO: 900038 - DNA, 33 bp, Homo sapien
tttgcattttgtaatataaggtttcttgccaat

SEQ ID NO: 900039 - DNA, 33 bp, Homo sapien
caaccatttgtcaaaactgcatagttaaggttt

SEQ ID NO: 900040 - DNA, 33 bp, Homo sapien
caaccatttgtcaaaagtgcatagttaaggttt

SEQ ID NO: 900041 - DNA, 33 bp, Homo sapien
gttaatagcagttatcaagggcagattaaaggg

SEQ ID NO: 900042 - DNA, 33 bp, Homo sapien
gttaatagcagttatccagggcagattaaaggg

SEQ ID NO: 900043 - DNA, 33 bp, Homo sapien
tttccaacaaagccaacctataaaatgtgtaac

SEQ ID NO: 900044 - DNA, 33 bp, Homo sapien
tttccaacaaagccaatctataaaatgtgtaac

SEQ ID NO: 900045 - DNA, 33 bp, Homo sapien
agtgatattgcaaaaaaccaaattatcagtcta

SEQ ID NO: 900046 - DNA, 33 bp, Homo sapien
agtgatattgcaaaaagccaaattatcagtcta

SEQ ID NO: 900047 - DNA, 33 bp, Homo sapien
cttcttactcactttacgaatgggacacaatga

SEQ ID NO: 900048 - DNA, 33 bp, Homo sapien
cttcttactcactttaggaatgggacacaatga

SEQ ID NO: 900049 - DNA, 33 bp, Homo sapien
gtgtaaattgaaacctaaataatagtcattaca

SEQ ID NO: 900050 - DNA, 33 bp, Homo sapien
gtgtaaattgaaacctgaataatagtcattaca

SEQ ID NO: 900051 - DNA, 33 bp, Homo sapien
atggggaaatctatggaaagagcattgcaagcc

SEQ ID NO: 900052 - DNA, 33 bp, Homo sapien
atggggaaatctatgggaagagcattgcaagcc

SEQ ID NO: 900053 - DNA, 33 bp, Homo sapien
actatttgagcttatcagaggccatttggctaa

SEQ ID NO: 900054 - DNA, 33 bp, Homo sapien
actatttgagcttatcggaggccatttggctaa

SEQ ID NO: 900055 - DNA, 33 bp, Homo sapien
cttgtctgtaatattacaaatcatggaaaacct

SEQ ID NO: 900056 - DNA, 33 bp, Homo sapien
cttgtctgtaatattataaatcatggaaaacct

SEQ ID NO: 900057 - DNA, 33 bp, Homo sapien
atgagcttgactaatccatcaagtaaatcatgc

SEQ ID NO: 900058 - DNA, 33 bp, Homo sapien
atgagcttgactaatctatcaagtaaatcatgc

SEQ ID NO: 900059 - DNA, 33 bp, Homo sapien
catgatgaaagtatgaccaaagattatccctca

SEQ ID NO: 900060 - DNA, 33 bp, Homo sapien
catgatgaaagtatgatcaaagattatccctca

SEQ ID NO: 900061 - DNA, 33 bp, Homo sapien
gtttgtcccaaaaagaagcacttgagctatcca

SEQ ID NO: 900062 - DNA, 33 bp, Homo sapien
gtttgtcccaaaaagatgcacttgagctatcca

SEQ ID NO: 900063 - DNA, 33 bp, Homo sapien
agaacatccacctttacattcactcaagcatac

SEQ ID NO: 900064 - DNA, 33 bp, Homo sapien
agaacatccacctttatattcactcaagcatac

SEQ ID NO: 900065 - DNA, 33 bp, Homo sapien
tcttactctgtctgacccttgctagtttctcag

SEQ ID NO: 900066 - DNA, 33 bp, Homo sapien
tcttactctgtctgacgcttgctagtttctcag

SEQ ID NO: 900067 - DNA, 33 bp, Homo sapien
tgacattcaaaaattccgaagagttgcacccaa

SEQ ID NO: 900068 - DNA, 33 bp, Homo sapien
tgacattcaaaaattctgaagagttgcacccaa

SEQ ID NO: 900069 - DNA, 33 bp, Homo sapien
actgtcttcattagtaagtacatcaatatcact

SEQ ID NO: 900070 - DNA, 33 bp, Homo sapien
actgtcttcattagtacgtacatcaatatcact

SEQ ID NO: 900071 - DNA, 33 bp, Homo sapien
aaactcaaaaagtgaacgtagcaagtcagtaga

SEQ ID NO: 900072 - DNA, 33 bp, Homo sapien
aaactcaaaaagtgaatgtagcaagtcagtaga

SEQ ID NO: 900073 - DNA, 33 bp, Homo sapien
agcatttagtagatcaataatacctttagcttg

SEQ ID NO: 900074 - DNA, 33 bp, Homo sapien
agcatttagtagatcagtaatacctttagcttg

SEQ ID NO: 900075 - DNA, 33 bp, Homo sapien
gctcaaactgtagtaaagtcttgagtaaccttt

SEQ ID NO: 900076 - DNA, 33 bp, Homo sapien
gctcaaactgtagtaaggtcttgagtaaccttt

SEQ ID NO: 900077 - DNA, 33 bp, Homo sapien
ggaagttctaagcctgaattagcttgtggccca

SEQ ID NO: 900078 - DNA, 33 bp, Homo sapien
ggaagttctaagcctgcattagcttgtggccca

SEQ ID NO: 900079 - DNA, 33 bp, Homo sapien
tgtgggtacctaccaaatatgataaactaaggt

SEQ ID NO: 900080 - DNA, 33 bp, Homo sapien
tgtgggtacctaccaattatgataaactaaggt

SEQ ID NO: 900081 - DNA, 33 bp, Homo sapien
gatgaaatgtttccaaagtacttcaaatacatg

SEQ ID NO: 900082 - DNA, 33 bp, Homo sapien
gatgaaatgtttccaaggtacttcaaatacatg

SEQ ID NO: 900083 - DNA, 33 bp, Homo sapien
ataagagctttcgcaaaattttcaactgtattt

SEQ ID NO: 900084 - DNA, 33 bp, Homo sapien
ataagagctttcgcaacattttcaactgtattt

SEQ ID NO: 900085 - DNA, 33 bp, Homo sapien
caaaattgctatgaaaataacagggcttatgag

SEQ ID NO: 900086 - DNA, 33 bp, Homo sapien
caaaattgctatgaaagtaacagggcttatgag

SEQ ID NO: 900087 - DNA, 33 bp, Homo sapien
aggacaatattcaaagcctattcaaagtccact

SEQ ID NO: 900088 - DNA, 33 bp, Homo sapien
aggacaatattcaaagtctattcaaagtccact

SEQ ID NO: 900089 - DNA, 33 bp, Homo sapien
catctttccttattcactgaaatcagctctaat

SEQ ID NO: 900090 - DNA, 33 bp, Homo sapien
catctttccttattcattgaaatcagctctaat

SEQ ID NO: 900091 - DNA, 33 bp, Homo sapien
acatgattccactgcacgattctacttatgagg

SEQ ID NO: 900092 - DNA, 33 bp, Homo sapien
acatgattccactgcatgattctacttatgagg

SEQ ID NO: 900093 - DNA, 33 bp, Homo sapien
gcagtagcccagaatcactatctcatctcagaa

SEQ ID NO: 900094 - DNA, 33 bp, Homo sapien
gcagtagcccagaatcgctatctcatctcagaa

SEQ ID NO: 900095 - DNA, 33 bp, Homo sapien
tttctcattgagtgacgatagtgacagtgctta

SEQ ID NO: 900096 - DNA, 33 bp, Homo sapien
tttctcattgagtgactatagtgacagtgctta

SEQ ID NO: 900097 - DNA, 33 bp, Homo sapien
tgagagaataagagtgcactgaaatccgttaat

SEQ ID NO: 900098 - DNA, 33 bp, Homo sapien
tgagagaataagagtgtactgaaatccgttaat

SEQ ID NO: 900099 - DNA, 33 bp, Homo sapien
gtgagccggtttctgaggtagcttcccaagtat

SEQ ID NO: 900100 - DNA, 33 bp, Homo sapien
gtgagccggtttctgatgtagcttcccaagtat

SEQ ID NO: 900101 - DNA, 33 bp, Homo sapien
ggagtttggttgtcataagagagagagagagag

SEQ ID NO: 900102 - DNA, 33 bp, Homo sapien
ggagtttggttgtcatgagagagagagagagag

SEQ ID NO: 900103 - DNA, 33 bp, Homo sapien
tagtttgtttactagaaccagaatgacatgcta

SEQ ID NO: 900104 - DNA, 33 bp, Homo sapien
tagtttgtttactagacccagaatgacatgcta

SEQ ID NO: 900105 - DNA, 33 bp, Homo sapien
aattggcctgtttttcactaatgccctctcctt

SEQ ID NO: 900106 - DNA, 33 bp, Homo sapien
aattggcctgtttttcgctaatgccctctcctt

SEQ ID NO: 900107 - DNA, 33 bp, Homo sapien
tggcatcgtacatatcaatagaggaacaaagct

SEQ ID NO: 900108 - DNA, 33 bp, Homo sapien
tggcatcgtacatatccatagaggaacaaagct

SEQ ID NO: 900109 - DNA, 33 bp, Homo sapien
aataattatcaatatcagaggtgtgataggcta

SEQ ID NO: 900110 - DNA, 33 bp, Homo sapien
aataattatcaatatccgaggtgtgataggcta

SEQ ID NO: 900111 - DNA, 33 bp, Homo sapien
ggacagtgtttgatgacattaaaaaggtaggct

SEQ ID NO: 900112 - DNA, 33 bp, Homo sapien
ggacagtgtttgatgatattaaaaaggtaggct

SEQ ID NO: 900113 - DNA, 33 bp, Homo sapien
ggtatgtgttaaaaggcagcctaaatgcaatag

SEQ ID NO: 900114 - DNA, 33 bp, Homo sapien
ggtatgtgttaaaaggtagcctaaatgcaatag

SEQ ID NO: 900115 - DNA, 33 bp, Homo sapien
gggagaaaacactccacggttggctattgcatt

SEQ ID NO: 900116 - DNA, 33 bp, Homo sapien
gggagaaaacactccagggttggctattgcatt

SEQ ID NO: 900117 - DNA, 33 bp, Homo sapien
caaaaatggaaaggcaacattaaagagacagat

SEQ ID NO: 900118 - DNA, 33 bp, Homo sapien
caaaaatggaaaggcatcattaaagagacagat

SEQ ID NO: 900119 - DNA, 33 bp, Homo sapien
ttttggcttctgtgcaacatgattagagggaga

SEQ ID NO: 900120 - DNA, 33 bp, Homo sapien
ttttggcttctgtgcagcatgattagagggaga

SEQ ID NO: 900121 - DNA, 33 bp, Homo sapien
cacttaaaattgtgtcccctgtctacccttcca

SEQ ID NO: 900122 - DNA, 33 bp, Homo sapien
cacttaaaattgtgtctcctgtctacccttcca

SEQ ID NO: 900123 - DNA, 33 bp, Homo sapien
ggtagttactattgccactgtatgacaacaatg

SEQ ID NO: 900124 - DNA, 33 bp, Homo sapien
ggtagttactattgccgctgtatgacaacaatg

SEQ ID NO: 900125 - DNA, 33 bp, Homo sapien
aactttccttttcgacgaaactcaaaacttcat

SEQ ID NO: 900126 - DNA, 33 bp, Homo sapien
aactttccttttcgactaaactcaaaacttcat

SEQ ID NO: 900127 - DNA, 33 bp, Homo sapien
ctaaataccagatcaaccaagtggcttattaga

SEQ ID NO: 900128 - DNA, 33 bp, Homo sapien
ctaaataccagatcaagcaagtggcttattaga

SEQ ID NO: 900129 - DNA, 33 bp, Homo sapien
cacgtctgtttaatgacctggtgggtaaagctg

SEQ ID NO: 900130 - DNA, 33 bp, Homo sapien
cacgtctgtttaatgatctggtgggtaaagctg

SEQ ID NO: 900131 - DNA, 33 bp, Homo sapien
gttcaatggactccataaaggtccttagctttg

SEQ ID NO: 900132 - DNA, 33 bp, Homo sapien
gttcaatggactccatgaaggtccttagctttg

SEQ ID NO: 900133 - DNA, 33 bp, Homo sapien; identical to SEQ ID NO: 900131

SEQ ID NO: 900134 - DNA, 33 bp, Homo sapien; identical to SEQ ID NO: 900132

SEQ ID NO: 900135 - DNA, 33 bp, Homo sapien
tcaaatccaactctaagcctagattcaaatatt

SEQ ID NO: 900136 - DNA, 33 bp, Homo sapien
tcaaatccaactctaatcctagattcaaatatt

SEQ ID NO: 900137 - DNA, 33 bp, Homo sapien
tggagagagtagaaaaatttaaaaggctacagc

SEQ ID NO: 900138 - DNA, 33 bp, Homo sapien
tggagagagtagaaaagtttaaaaggctacagc

SEQ ID NO: 900139 - DNA, 33 bp, Homo sapien
tggctactacctctacaatttgggaaaggctag

SEQ ID NO: 900140 - DNA, 33 bp, Homo sapien
tggctactacctctacgatttgggaaaggctag

SEQ ID NO: 900141 - DNA, 33 bp, Homo sapien
cattctgatccgaaataaggacatttgattaga

SEQ ID NO: 900142 - DNA, 33 bp, Homo sapien
cattctgatccgaaatcaggacatttgattaga

SEQ ID NO: 900143 - DNA, 33 bp, Homo sapien
tctagcctatcacttacgttgccatgtgatttt

SEQ ID NO: 900144 - DNA, 33 bp, Homo sapien
tctagcctatcacttatgttgccatgtgatttt

SEQ ID NO: 900145 - DNA, 33 bp, Homo sapien
aaaggtcaataaacaactggatgtatggatcta

SEQ ID NO: 900146 - DNA, 33 bp, Homo sapien
aaaggtcaataaacaattggatgtatggatcta

SEQ ID NO: 900147 - DNA, 33 bp, Homo sapien
gactgtaagccaaggaagttctttctatgtgtt

SEQ ID NO: 900148 - DNA, 33 bp, Homo sapien
gactgtaagccaaggaggttctttctatgtgtt

SEQ ID NO: 900149 - DNA, 33 bp, Homo sapien
taatttgatcattgccaatggtatccttgtatc

SEQ ID NO: 900150 - DNA, 33 bp, Homo sapien
taatttgatcattgcccatggtatccttgtatc

SEQ ID NO: 900151 - DNA, 33 bp, Homo sapien
caaactcaaccaaaaacgtggctctaaaaccat

SEQ ID NO: 900152 - DNA, 33 bp, Homo sapien
caaactcaaccaaaaatgtggctctaaaaccat

SEQ ID NO: 900153 - DNA, 33 bp, Homo sapien
ctacttgacattgttccagaaattcaaagcagt

SEQ ID NO: 900154 - DNA, 33 bp, Homo sapien
ctacttgacattgttctagaaattcaaagcagt

SEQ ID NO: 900155 - DNA, 33 bp, Homo sapien
acaagataatatgacaaaaatggatgaaacatt

SEQ ID NO: 900156 - DNA, 33 bp, Homo sapien
acaagataatatgacacaaatggatgaaacatt

SEQ ID NO: 900157 - DNA, 33 bp, Homo sapien
ctttgactttgctcaaaatacatgatacttgcc

SEQ ID NO: 900158 - DNA, 33 bp, Homo sapien
ctttgactttgctcaagatacatgatacttgcc

SEQ ID NO: 900159 - DNA, 33 bp, Homo sapien
gtgtccctttctatgaccaatggtttagtttgc

SEQ ID NO: 900160 - DNA, 33 bp, Homo sapien
gtgtccctttctatgatcaatggtttagtttgc

SEQ ID NO: 900161 - DNA, 33 bp, Homo sapien
aagagaaactcctggaaacaattgtaaaatatt

SEQ ID NO: 900162 - DNA, 33 bp, Homo sapien
aagagaaactcctggagacaattgtaaaatatt

SEQ ID NO: 900163 - DNA, 33 bp, Homo sapien
cttcccacgatctctggaatagcttccttataa

SEQ ID NO: 900164 - DNA, 33 bp, Homo sapien
cttcccacgatctctgtaatagcttccttataa

SEQ ID NO: 900165 - DNA, 33 bp, Homo sapien
cgtgagaggtggtgcacggagcttgtttggact

SEQ ID NO: 900166 - DNA, 33 bp, Homo sapien
cgtgagaggtggtgcatggagcttgtttggact

SEQ ID NO: 900167 - DNA, 33 bp, Homo sapien
attacattcaggaaataagtaggaaattaaatt

SEQ ID NO: 900168 - DNA, 33 bp, Homo sapien
attacattcaggaaatgagtaggaaattaaatt

SEQ ID NO: 900169 - DNA, 33 bp, Homo sapien
cccttttgaagatttccaacttgtccttgtgtt

SEQ ID NO: 900170 - DNA, 33 bp, Homo sapien
cccttttgaagatttcgaacttgtccttgtgtt

SEQ ID NO: 900171 - DNA, 33 bp, Homo sapien
cggcctttgcgtctccaagggatcttacttttc

SEQ ID NO: 900172 - DNA, 33 bp, Homo sapien
cggcctttgcgtctccgagggatcttacttttc

SEQ ID NO: 900173 - DNA, 33 bp, Homo sapien
taaacctccatattgccctgacctttgagggtc

SEQ ID NO: 900174 - DNA, 33 bp, Homo sapien
taaacctccatattgctctgacctttgagggtc

SEQ ID NO: 900175 - DNA, 33 bp, Homo sapien
tgtagtgcaaccaactcagcctcagattttatt

SEQ ID NO: 900176 - DNA, 33 bp, Homo sapien
tgtagtgcaaccaacttagcctcagattttatt

SEQ ID NO: 900177 - DNA, 33 bp, Homo sapien
catgatggaaagatgacagacccacacaccagc

SEQ ID NO: 900178 - DNA, 33 bp, Homo sapien
catgatggaaagatgatagacccacacaccagc

SEQ ID NO: 900179 - DNA, 33 bp, Homo sapien
aatcttggttttgtcacctgctggaaaccaggg

SEQ ID NO: 900180 - DNA, 33 bp, Homo sapien
aatcttggttttgtcatctgctggaaaccaggg

SEQ ID NO: 900181 - DNA, 33 bp, Homo sapien
taaaacaaatgctttcacaaagtagaggtaaat

SEQ ID NO: 900182 - DNA, 33 bp, Homo sapien
taaaacaaatgctttcgcaaagtagaggtaaat

SEQ ID NO: 900183 - DNA, 33 bp, Homo sapien
gctgtgctcactgtaacgacccctcactgtaaa

SEQ ID NO: 900184 - DNA, 33 bp, Homo sapien
gctgtgctcactgtaatgacccctcactgtaaa

SEQ ID NO: 900185 - DNA, 33 bp, Homo sapien
gaggaaagagcatgggcaaagagacaggtaaga

SEQ ID NO: 900186 - DNA, 33 bp, Homo sapien
gaggaaagagcatgggtaaagagacaggtaaga

SEQ ID NO: 900187 - DNA, 33 bp, Homo sapien
ttaatttgtttttgaccaattaaatgttcatag

SEQ ID NO: 900188 - DNA, 33 bp, Homo sapien
ttaatttgtttttgacgaattaaatgttcatag

SEQ ID NO: 900189 - DNA, 33 bp, Homo sapien
ctttgtctgttttagtaaagagcttcatctctc

SEQ ID NO: 900190 - DNA, 33 bp, Homo sapien
ctttgtctgttttagttaagagcttcatctctc

SEQ ID NO: 900191 - DNA, 33 bp, Homo sapien
gatatccatcatatgactcaggtatagcccctg

SEQ ID NO: 900192 - DNA, 33 bp, Homo sapien
gatatccatcatatgagtcaggtatagcccctg

SEQ ID NO: 900193 - DNA, 33 bp, Homo sapien
cacactatgttgttcacggaaaatacaagcaca

SEQ ID NO: 900194 - DNA, 33 bp, Homo sapien
cacactatgttgttcatggaaaatacaagcaca

SEQ ID NO: 900195 - DNA, 33 bp, Homo sapien
catcaggtaatgtaccaatgtgatatgatttgg

SEQ ID NO: 900196 - DNA, 33 bp, Homo sapien
catcaggtaatgtaccgatgtgatatgatttgg

SEQ ID NO: 900197 - DNA, 33 bp, Homo sapien
cacttgggatacatcaataaaaaagagacaaag

SEQ ID NO: 900198 - DNA, 33 bp, Homo sapien
cacttgggatacatcagtaaaaaagagacaaag

SEQ ID NO: 900199 - DNA, 33 bp, Homo sapien
ggatgtgaaattggaacaactccagctgagaat

SEQ ID NO: 900200 - DNA, 33 bp, Homo sapien
ggatgtgaaattggaagaactccagctgagaat

SEQ ID NO: 900201 - DNA, 33 bp, Homo sapien
gggacaagatattcaaataaaactatagtcaat

SEQ ID NO: 900202 - DNA, 33 bp, Homo sapien
gggacaagatattcaagtaaaactatagtcaat

SEQ ID NO: 900203 - DNA, 33 bp, Homo sapien
gtgaatgctgaatcacagtgaccagattcgctt

SEQ ID NO: 900204 - DNA, 33 bp, Homo sapien
gtgaatgctgaatcacggtgaccagattcgctt

SEQ ID NO: 900205 - DNA, 33 bp, Homo sapien
cgactcctggaaatgcagaatattaggcatgga

SEQ ID NO: 900206 - DNA, 33 bp, Homo sapien
cgactcctggaaatgcggaatattaggcatgga

SEQ ID NO: 900207 - DNA, 33 bp, Homo sapien
tgtcagagagtggttcaaaggcaataggacaag

SEQ ID NO: 900208 - DNA, 33 bp, Homo sapien
tgtcagagagtggttcgaaggcaataggacaag

SEQ ID NO: 900209 - DNA, 33 bp, Homo sapien
ttcttatgacattccagccagtagagggcaaca

SEQ ID NO: 900210 - DNA, 33 bp, Homo sapien
ttcttatgacattccatccagtagagggcaaca

SEQ ID NO: 900211 - DNA, 33 bp, Homo sapien
tgggaagttgctgaggcactttactccagaaag

SEQ ID NO: 900212 - DNA, 33 bp, Homo sapien
tgggaagttgctgagggactttactccagaaag

SEQ ID NO: 900213 - DNA, 33 bp, Homo sapien
tctcattttgaatctccaactccagggtatagt

SEQ ID NO: 900214 - DNA, 33 bp, Homo sapien
tctcattttgaatctctaactccagggtatagt

SEQ ID NO: 900215 - DNA, 33 bp, Homo sapien
ttttaagagaatattcactcaacaactccccaa

SEQ ID NO: 900216 - DNA, 33 bp, Homo sapien
ttttaagagaatattcgctcaacaactccccaa

SEQ ID NO: 900217 - DNA, 33 bp, Homo sapien
agctttgccattgctacgatttctccctgaggc

SEQ ID NO: 900218 - DNA, 33 bp, Homo sapien
agctttgccattgctatgatttctccctgaggc

SEQ ID NO: 900219 - DNA, 33 bp, Homo sapien
aaagaatagcatcagaacaagagtcagacaaaa

SEQ ID NO: 900220 - DNA, 33 bp, Homo sapien
aaagaatagcatcagagcaagagtcagacaaaa

SEQ ID NO: 900221 - DNA, 33 bp, Homo sapien
atgctctcggaagtgaagccagtagtgtcttgc

SEQ ID NO: 900222 - DNA, 33 bp, Homo sapien
atgctctcggaagtgaggccagtagtgtcttgc

SEQ ID NO: 900223 - DNA, 33 bp, Homo sapien
ttatccttctctttataacttaccagtgctatg

SEQ ID NO: 900224 - DNA, 33 bp, Homo sapien
ttatccttctctttattacttaccagtgctatg

SEQ ID NO: 900225 - DNA, 33 bp, Homo sapien
atcatgtgccccaaacggtttctagcgaattca

SEQ ID NO: 900226 - DNA, 33 bp, Homo sapien
atcatgtgccccaaactgtttctagcgaattca

SEQ ID NO: 900227 - DNA, 33 bp, Homo sapien
ggtgatacatcagatacagttggactttgctct

SEQ ID NO: 900228 - DNA, 33 bp, Homo sapien
ggtgatacatcagatatagttggactttgctct

SEQ ID NO: 900229 - DNA, 33 bp, Homo sapien
cgttgggtttgtatcaatcgagccatctacctc

SEQ ID NO: 900230 - DNA, 33 bp, Homo sapien
cgttgggtttgtatcagtcgagccatctacctc

SEQ ID NO: 900231 - DNA, 33 bp, Homo sapien
aaatattagctaaatacatgacaaagatcggtt

SEQ ID NO: 900232 - DNA, 33 bp, Homo sapien
aaatattagctaaatagatgacaaagatcggtt

SEQ ID NO: 900233 - DNA, 33 bp, Homo sapien
tctatcctagaggtgacacattctcgccaactg

SEQ ID NO: 900234 - DNA, 33 bp, Homo sapien
tctatcctagaggtgagacattctcgccaactg

SEQ ID NO: 900235 - DNA, 33 bp, Homo sapien
aagctattttaagataccaatgtctcttcagca

SEQ ID NO: 900236 - DNA, 33 bp, Homo sapien
aagctattttaagatatcaatgtctcttcagca

SEQ ID NO: 900237 - DNA, 33 bp, Homo sapien
acacacacttatgtgaatacacgaagattttgg

SEQ ID NO: 900238 - DNA, 33 bp, Homo sapien
acacacacttatgtgagtacacgaagattttgg

SEQ ID NO: 900239 - DNA, 33 bp, Homo sapien
cttgaggtcctggtcaaaaatggatccaaatcg

SEQ ID NO: 900240 - DNA, 33 bp, Homo sapien
cttgaggtcctggtcacaaatggatccaaatcg

SEQ ID NO: 900241 - DNA, 33 bp, Homo sapien
agacgaggagacacaaataggctgagctcagag

SEQ ID NO: 900242 - DNA, 33 bp, Homo sapien
agacgaggagacacaagtaggctgagctcagag

SEQ ID NO: 900243 - DNA, 33 bp, Homo sapien
tatctaccacctcatggagttagctttgtgtgc

SEQ ID NO: 900244 - DNA, 33 bp, Homo sapien
tatctaccacctcatgtagttagctttgtgtgc

SEQ ID NO: 900245 - DNA, 33 bp, Homo sapien
gctgacatgattttggaaagtgaaacatgcttc

SEQ ID NO: 900246 - DNA, 33 bp, Homo sapien
gctgacatgattttgggaagtgaaacatgcttc

SEQ ID NO: 900247 - DNA, 33 bp, Homo sapien
caaaatctcagttgtgcaaaaggatttctaagt

SEQ ID NO: 900248 - DNA, 33 bp, Homo sapien
caaaatctcagttgtgtaaaaggatttctaagt

SEQ ID NO: 900249 - DNA, 33 bp, Homo sapien
atggggtggtattccaatgaggaacctgaggtc

SEQ ID NO: 900250 - DNA, 33 bp, Homo sapien
atggggtggtattccagtgaggaacctgaggtc

SEQ ID NO: 900251 - DNA, 33 bp, Homo sapien
ccctacagcagatgttgaaaacttactctacct

SEQ ID NO: 900252 - DNA, 33 bp, Homo sapien
ccctacagcagatgtttaaaacttactctacct

SEQ ID NO: 900253 - DNA, 33 bp, Homo sapien
ccttcacacctctttcaacctcctctcttttgc

SEQ ID NO: 900254 - DNA, 33 bp, Homo sapien
ccttcacacctctttccacctcctctcttttgc

SEQ ID NO: 900255 - DNA, 33 bp, Homo sapien
gtcttcccacttaagaacattgcgtgcctttcc

SEQ ID NO: 900256 - DNA, 33 bp, Homo sapien
gtcttcccacttaagagcattgcgtgcctttcc

SEQ ID NO: 900257 - DNA, 33 bp, Homo sapien
aactggcgtccttgtacctggggttgtgcctag

SEQ ID NO: 900258 - DNA, 33 bp, Homo sapien
aactggcgtccttgtatctggggttgtgcctag

SEQ ID NO: 900259 - DNA, 33 bp, Homo sapien
atggttcaagtggaaactgggaccaggtcttac

SEQ ID NO: 900260 - DNA, 33 bp, Homo sapien
atggttcaagtggaaattgggaccaggtcttac

SEQ ID NO: 900261 - DNA, 33 bp, Homo sapien
tcattagcggaacctcaatgaattaaaatggct

SEQ ID NO: 900262 - DNA, 33 bp, Homo sapien
tcattagcggaacctcgatgaattaaaatggct

SEQ ID NO: 900263 - DNA, 33 bp, Homo sapien
tcaactctgggcatacagccccaagcctgcatc

SEQ ID NO: 900264 - DNA, 33 bp, Homo sapien
tcaactctgggcatacggccccaagcctgcatc

SEQ ID NO: 900265 - DNA, 33 bp, Homo sapien
tgttaactgaaatgggaacaaggagaagacagg

SEQ ID NO: 900266 - DNA, 33 bp, Homo sapien
tgttaactgaaatggggacaaggagaagacagg

SEQ ID NO: 900267 - DNA, 33 bp, Homo sapien
ctttcctcaggttaaacaagaaatcagttctga

SEQ ID NO: 900268 - DNA, 33 bp, Homo sapien
ctttcctcaggttaaagaagaaatcagttctga

SEQ ID NO: 900269 - DNA, 33 bp, Homo sapien
atttgggaatatctcaaccgttcaaatgccctg

SEQ ID NO: 900270 - DNA, 33 bp, Homo sapien
atttgggaatatctcatccgttcaaatgccctg

SEQ ID NO: 900271 - DNA, 33 bp, Homo sapien
gtatggaaactccaacaaagctatgtcaaggag

SEQ ID NO: 900272 - DNA, 33 bp, Homo sapien
gtatggaaactccaacgaagctatgtcaaggag

SEQ ID NO: 900273 - DNA, 33 bp, Homo sapien
atgaagcctcctttcccgaaaatgtgttagagg

SEQ ID NO: 900274 - DNA, 33 bp, Homo sapien
atgaagcctcctttcctgaaaatgtgttagagg

SEQ ID NO: 900275 - DNA, 33 bp, Homo sapien
agaacactgggaacacacataagaactaagcgg

SEQ ID NO: 900276 - DNA, 33 bp, Homo sapien
agaacactgggaacacgcataagaactaagcgg

SEQ ID NO: 900277 - DNA, 33 bp, Homo sapien
gacttttcactcttccaaagggttctagaacaa

SEQ ID NO: 900278 - DNA, 33 bp, Homo sapien
gacttttcactcttcccaagggttctagaacaa

SEQ ID NO: 900279 - DNA, 33 bp, Homo sapien
cccccagtcctttgtaacgctactaaagggaga

SEQ ID NO: 900280 - DNA, 33 bp, Homo sapien
cccccagtcctttgtatcgctactaaagggaga

SEQ ID NO: 900281 - DNA, 33 bp, Homo sapien
cctctgaagaagtcataacaagctgagagctga

SEQ ID NO: 900282 - DNA, 33 bp, Homo sapien
cctctgaagaagtcattacaagctgagagctga

SEQ ID NO: 900283 - DNA, 33 bp, Homo sapien
ctgggtatttggcccccattagtaacaggagtg

SEQ ID NO: 900284 - DNA, 33 bp, Homo sapien
ctgggtatttggcccctattagtaacaggagtg

SEQ ID NO: 900285 - DNA, 33 bp, Homo sapien
gcactaactaaggatacagcagaaactaaacaa

SEQ ID NO: 900286 - DNA, 33 bp, Homo sapien
gcactaactaaggatatagcagaaactaaacaa

SEQ ID NO: 900287 - DNA, 33 bp, Homo sapien
ttagtgactagccagaaaattgaaaaaacaaag

SEQ ID NO: 900288 - DNA, 33 bp, Homo sapien
ttagtgactagccagataattgaaaaaacaaag

SEQ ID NO: 900289 - DNA, 33 bp, Homo sapien
gagcactaggactagacagtgaagccctcccct

SEQ ID NO: 900290 - DNA, 33 bp, Homo sapien
gagcactaggactagatagtgaagccctcccct

SEQ ID NO: 900291 - DNA, 33 bp, Homo sapien
tagtcctagtgctcaaaatgacactgacacaca

SEQ ID NO: 900292 - DNA, 33 bp, Homo sapien
tagtcctagtgctcaagatgacactgacacaca

SEQ ID NO: 900293 - DNA, 33 bp, Homo sapien
aatggttttcatgttcccttctagtctcctctt

SEQ ID NO: 900294 - DNA, 33 bp, Homo sapien
aatggttttcatgttctcttctagtctcctctt

SEQ ID NO: 900295 - DNA, 33 bp, Homo sapien
gcatcagtgagcaaaacaaacatccatgtccac

SEQ ID NO: 900296 - DNA, 33 bp, Homo sapien
gcatcagtgagcaaaataaacatccatgtccac

SEQ ID NO: 900297 - DNA, 33 bp, Homo sapien
ctgtccttgctcaaaaacttgcttggttgtact

SEQ ID NO: 900298 - DNA, 33 bp, Homo sapien
ctgtccttgctcaaaagcttgcttggttgtact

SEQ ID NO: 900299 - DNA, 33 bp, Homo sapien
ataaaggatagaggtacaaaagtgaagaacatg

SEQ ID NO: 900300 - DNA, 33 bp, Homo sapien
ataaaggatagaggtataaaagtgaagaacatg

SEQ ID NO: 900301 - DNA, 33 bp, Homo sapien
acaggacagggttggcaagaatcaatgactagg

SEQ ID NO: 900302 - DNA, 33 bp, Homo sapien
acaggacagggttggcgagaatcaatgactagg

SEQ ID NO: 900303 - DNA, 33 bp, Homo sapien
gggatctccctaaccaacatttcactgactaac

SEQ ID NO: 900304 - DNA, 33 bp, Homo sapien
gggatctccctaaccagcatttcactgactaac

SEQ ID NO: 900305 - DNA, 33 bp, Homo sapien
gtttacaaaatgaccaccgctcatgtgatccaa

SEQ ID NO: 900306 - DNA, 33 bp, Homo sapien
gtttacaaaatgaccatcgctcatgtgatccaa

SEQ ID NO: 900307 - DNA, 33 bp, Homo sapien
gcacatgtgatatgtacagtaactacttttcac

SEQ ID NO: 900308 - DNA, 33 bp, Homo sapien
gcacatgtgatatgtatagtaactacttttcac

SEQ ID NO: 900309 - DNA, 33 bp, Homo sapien
ataaaaaggcagtaaacacaaaatgtttttaaa

SEQ ID NO: 900310 - DNA, 33 bp, Homo sapien
ataaaaaggcagtaaatacaaaatgtttttaaa

SEQ ID NO: 900311 - DNA, 33 bp, Homo sapien
gatggaagcaagtctgcaagggcaagaaaagtc

SEQ ID NO: 900312 - DNA, 33 bp, Homo sapien
gatggaagcaagtctggaagggcaagaaaagtc

SEQ ID NO: 900313 - DNA, 33 bp, Homo sapien
gaagtgccactgtaaacatccatgactcttcat

SEQ ID NO: 900314 - DNA, 33 bp, Homo sapien
gaagtgccactgtaaatatccatgactcttcat

SEQ ID NO: 900315 - DNA, 33 bp, Homo sapien
tgcgacaaagaaatgtaaaacatgctccataac

SEQ ID NO: 900316 - DNA, 33 bp, Homo sapien
tgcgacaaagaaatgtgaaacatgctccataac

SEQ ID NO: 900317 - DNA, 33 bp, Homo sapien
tccttctttacgaagaatatctgaactcctggc

SEQ ID NO: 900318 - DNA, 33 bp, Homo sapien
tccttctttacgaagagtatctgaactcctggc

SEQ ID NO: 900319 - DNA, 33 bp, Homo sapien
ctccgctaggtcttcacgcttatttaaatcctg

SEQ ID NO: 900320 - DNA, 33 bp, Homo sapien
ctccgctaggtcttcatgcttatttaaatcctg

SEQ ID NO: 900321 - DNA, 33 bp, Homo sapien
tggcatgtgcctataacacacagttatattaga

SEQ ID NO: 900322 - DNA, 33 bp, Homo sapien
tggcatgtgcctataatacacagttatattaga

SEQ ID NO: 900323 - DNA, 33 bp, Homo sapien
aaaggataaggtggtccactggggaattttggc

SEQ ID NO: 900324 - DNA, 33 bp, Homo sapien
aaaggataaggtggtctactggggaattttggc

SEQ ID NO: 900325 - DNA, 33 bp, Homo sapien
gcaaaagtcttctggaataaagttgtttagagt

SEQ ID NO: 900326 - DNA, 33 bp, Homo sapien
gcaaaagtcttctggagtaaagttgtttagagt

SEQ ID NO: 900327 - DNA, 33 bp, Homo sapien
gggctcggagacataaagactgtccctggttgt

SEQ ID NO: 900328 - DNA, 33 bp, Homo sapien
gggctcggagacataacgactgtccctggttgt

SEQ ID NO: 900329 - DNA, 33 bp, Homo sapien
acctcatcattctgccacttccttttagtcagc

SEQ ID NO: 900330 - DNA, 33 bp, Homo sapien
acctcatcattctgccgcttccttttagtcagc

SEQ ID NO: 900331 - DNA, 33 bp, Homo sapien
gtggactgaacgctgactataggccaagctctg

SEQ ID NO: 900332 - DNA, 33 bp, Homo sapien
gtggactgaacgctgattataggccaagctctg

SEQ ID NO: 900333 - DNA, 33 bp, Homo sapien
tatctctgatgggaaaatggtccttgccaaact

SEQ ID NO: 900334 - DNA, 33 bp, Homo sapien
tatctctgatgggaaattggtccttgccaaact

SEQ ID NO: 900335 - DNA, 33 bp, Homo sapien
attgcttatgagagaccagaagaaagcaagact

SEQ ID NO: 900336 - DNA, 33 bp, Homo sapien
attgcttatgagagactagaagaaagcaagact

SEQ ID NO: 900337 - DNA, 33 bp, Homo sapien
acctggctttaagataagagacaagacagggag

SEQ ID NO: 900338 - DNA, 33 bp, Homo sapien
acctggctttaagatatgagacaagacagggag

SEQ ID NO: 900339 - DNA, 33 bp, Homo sapien
gtccctcactcatcaccagaagctgtgggtcct

SEQ ID NO: 900340 - DNA, 33 bp, Homo sapien
gtccctcactcatcacgagaagctgtgggtcct

SEQ ID NO: 900341 - DNA, 33 bp, Homo sapien
gctcacttcgactcaacgggcagggacataaaa

SEQ ID NO: 900342 - DNA, 33 bp, Homo sapien
gctcacttcgactcaatgggcagggacataaaa

SEQ ID NO: 900343 - DNA, 33 bp, Homo sapien
aggacctggtaacccaaataggagagacagttg

SEQ ID NO: 900344 - DNA, 33 bp, Homo sapien
aggacctggtaacccagataggagagacagttg

SEQ ID NO: 900345 - DNA, 33 bp, Homo sapien
agcatataatagagccacaagtttaaggtggaa

SEQ ID NO: 900346 - DNA, 33 bp, Homo sapien
agcatataatagagccgcaagtttaaggtggaa

SEQ ID NO: 900347 - DNA, 33 bp, Homo sapien
gatcacaacaccaaaacgctggtcctgctcatt

SEQ ID NO: 900348 - DNA, 33 bp, Homo sapien
gatcacaacaccaaaatgctggtcctgctcatt

SEQ ID NO: 900349 - DNA, 33 bp, Homo sapien
tcaattttcccacccaataagatgagatagtat

SEQ ID NO: 900350 - DNA, 33 bp, Homo sapien
tcaattttcccacccagtaagatgagatagtat

SEQ ID NO: 900351 - DNA, 33 bp, Homo sapien
tctcctctcaaaactacgatgctaaattctcac

SEQ ID NO: 900352 - DNA, 33 bp, Homo sapien
tctcctctcaaaactatgatgctaaattctcac

SEQ ID NO: 900353 - DNA, 33 bp, Homo sapien
ggtaaaataatttggacgttctttctattttct

SEQ ID NO: 900354 - DNA, 33 bp, Homo sapien
ggtaaaataatttggatgttctttctattttct

SEQ ID NO: 900355 - DNA, 33 bp, Homo sapien
cctgccctggagtacaactgagaagagagccag

SEQ ID NO: 900356 - DNA, 33 bp, Homo sapien
cctgccctggagtacagctgagaagagagccag

SEQ ID NO: 900357 - DNA, 33 bp, Homo sapien
tgctgaacaaaatgtacgccaaactaagctctg

SEQ ID NO: 900358 - DNA, 33 bp, Homo sapien
tgctgaacaaaatgtatgccaaactaagctctg

SEQ ID NO: 900359 - DNA, 33 bp, Homo sapien
tttcattcttagtctcccgtgtgtccctctttc

SEQ ID NO: 900360 - DNA, 33 bp, Homo sapien
tttcattcttagtctctcgtgtgtccctctttc

SEQ ID NO: 900361 - DNA, 33 bp, Homo sapien
aataacagggctgatacggaaacagctgtgggc

SEQ ID NO: 900362 - DNA, 33 bp, Homo sapien
aataacagggctgatatggaaacagctgtgggc

SEQ ID NO: 900363 - DNA, 33 bp, Homo sapien
ttgggaaaaaagacccacactaaggccaagaga

SEQ ID NO: 900364 - DNA, 33 bp, Homo sapien
ttgggaaaaaagacccgcactaaggccaagaga

SEQ ID NO: 900365 - DNA, 33 bp, Homo sapien
tatcattctcgatagacgcttctacttaccatg

SEQ ID NO: 900366 - DNA, 33 bp, Homo sapien
tatcattctcgatagatgcttctacttaccatg

SEQ ID NO: 900367 - DNA, 33 bp, Homo sapien
ccatggatgccgggaaagaatgtccaaagtgaa

SEQ ID NO: 900368 - DNA, 33 bp, Homo sapien
ccatggatgccgggaaggaatgtccaaagtgaa

SEQ ID NO: 900369 - DNA, 33 bp, Homo sapien
ggtatgctataagcagacgcagaatcattttaa

SEQ ID NO: 900370 - DNA, 33 bp, Homo sapien
ggtatgctataagcagtcgcagaatcattttaa

SEQ ID NO: 900371 - DNA, 33 bp, Homo sapien
tctacttccaagtcctatcttcttttcacttca

SEQ ID NO: 900372 - DNA, 33 bp, Homo sapien
tctacttccaagtcctgtcttcttttcacttca

SEQ ID NO: 900373 - DNA, 33 bp, Homo sapien
ggtaagttattcataacggtaagatccagttct

SEQ ID NO: 900374 - DNA, 33 bp, Homo sapien
ggtaagttattcataatggtaagatccagttct

SEQ ID NO: 900375 - DNA, 33 bp, Homo sapien
ttcatttaagtggtcaagtgtagattgttgtag

SEQ ID NO: 900376 - DNA, 33 bp, Homo sapien
ttcatttaagtggtcaggtgtagattgttgtag

SEQ ID NO: 900377 - DNA, 33 bp, Homo sapien
atctggcaatccgtgtaacaaaatcagtgctac

SEQ ID NO: 900378 - DNA, 33 bp, Homo sapien
atctggcaatccgtgtgacaaaatcagtgctac

SEQ ID NO: 900379 - DNA, 33 bp, Homo sapien
atgggcattacatccaactgatctggccactga

SEQ ID NO: 900380 - DNA, 33 bp, Homo sapien
atgggcattacatccacctgatctggccactga

SEQ ID NO: 900381 - DNA, 33 bp, Homo sapien
gaggtcataaatggcacgatgcacaaaccagac

SEQ ID NO: 900382 - DNA, 33 bp, Homo sapien
gaggtcataaatggcatgatgcacaaaccagac

SEQ ID NO: 900383 - DNA, 33 bp, Homo sapien
gttttggtcctattatcagctcaaacttggagg

SEQ ID NO: 900384 - DNA, 33 bp, Homo sapien
gttttggtcctattattagctcaaacttggagg

SEQ ID NO: 900385 - DNA, 33 bp, Homo sapien
acagctaaaaatcactcagctatgcaggaaaag

SEQ ID NO: 900386 - DNA, 33 bp, Homo sapien
acagctaaaaatcactgagctatgcaggaaaag

SEQ ID NO: 900387 - DNA, 33 bp, Homo sapien
atcctgtggataaaaccgtataaatgtgagaga

SEQ ID NO: 900388 - DNA, 33 bp, Homo sapien
atcctgtggataaaactgtataaatgtgagaga

SEQ ID NO: 900389 - DNA, 33 bp, Homo sapien
taaataaaatagtgaaatcagcacaatagagag

SEQ ID NO: 900390 - DNA, 33 bp, Homo sapien
taaataaaatagtgaagtcagcacaatagagag

SEQ ID NO: 900391 - DNA, 33 bp, Homo sapien
gctcttaggaagaagacaaagtgttcaccatcc

SEQ ID NO: 900392 - DNA, 33 bp, Homo sapien
gctcttaggaagaagataaagtgttcaccatcc

SEQ ID NO: 900393 - DNA, 33 bp, Homo sapien
gctggtactgtggatacgctgagtcaactcaga

SEQ ID NO: 900394 - DNA, 33 bp, Homo sapien
gctggtactgtggatatgctgagtcaactcaga

SEQ ID NO: 900395 - DNA, 33 bp, Homo sapien
tttaaacaagaaatcaagatatgcagtttgaca

SEQ ID NO: 900396 - DNA, 33 bp, Homo sapien
tttaaacaagaaatcaggatatgcagtttgaca

SEQ ID NO: 900397 - DNA, 33 bp, Homo sapien
tggccatctgttaccaatctcaggtgtatttta

SEQ ID NO: 900398 - DNA, 33 bp, Homo sapien
tggccatctgttaccagtctcaggtgtatttta

SEQ ID NO: 900399 - DNA, 33 bp, Homo sapien
gtgtgttggcaaatagcaggtggaatcttgacc

SEQ ID NO: 900400 - DNA, 33 bp, Homo sapien
gtgtgttggcaaatagtaggtggaatcttgacc

SEQ ID NO: 900401 - DNA, 33 bp, Homo sapien
ttaaaacatcttcttccctacttaaaccagaag

SEQ ID NO: 900402 - DNA, 33 bp, Homo sapien
ttaaaacatcttcttctctacttaaaccagaag

SEQ ID NO: 900403 - DNA, 33 bp, Homo sapien
gaagatgcatttttgccactctcactatccaag

SEQ ID NO: 900404 - DNA, 33 bp, Homo sapien
gaagatgcatttttgctactctcactatccaag

SEQ ID NO: 900405 - DNA, 33 bp, Homo sapien
aaagttttggcatttaggagaatttcaatgaac

SEQ ID NO: 900406 - DNA, 33 bp, Homo sapien
aaagttttggcatttatgagaatttcaatgaac

SEQ ID NO: 900407 - DNA, 33 bp, Homo sapien
tagaacagccacgtggaatatggctactcctgc

SEQ ID NO: 900408 - DNA, 33 bp, Homo sapien
tagaacagccacgtgggatatggctactcctgc

SEQ ID NO: 900409 - DNA, 33 bp, Homo sapien
ttgtgaattataaataagcagaggtagatggag

SEQ ID NO: 900410 - DNA, 33 bp, Homo sapien
ttgtgaattataaataggcagaggtagatggag

SEQ ID NO: 900411 - DNA, 33 bp, Homo sapien
ttcccttgtaaatcccagatggaatgaccaagg

SEQ ID NO: 900412 - DNA, 33 bp, Homo sapien
ttcccttgtaaatccccgatggaatgaccaagg

SEQ ID NO: 900413 - DNA, 33 bp, Homo sapien
agtgtggtgacattacagaatgtgtgctgggga

SEQ ID NO: 900414 - DNA, 33 bp, Homo sapien
agtgtggtgacattacggaatgtgtgctgggga

SEQ ID NO: 900415 - DNA, 33 bp, Homo sapien
tggaccagcatgacagaaagtcggtcacagttc

SEQ ID NO: 900416 - DNA, 33 bp, Homo sapien
tggaccagcatgacaggaagtcggtcacagttc

SEQ ID NO: 900417 - DNA, 33 bp, Homo sapien
ctccctttatagcagcccttcaaacctgtaaac

SEQ ID NO: 900418 - DNA, 33 bp, Homo sapien
ctccctttatagcagctcttcaaacctgtaaac

SEQ ID NO: 900419 - DNA, 33 bp, Homo sapien
aggtttgagaaaggaagagtttatttgaacagg

SEQ ID NO: 900420 - DNA, 33 bp, Homo sapien
aggtttgagaaaggaatagtttatttgaacagg

SEQ ID NO: 900421 - DNA, 33 bp, Homo sapien
atagcaccgttaataactggacttatggaatca

SEQ ID NO: 900422 - DNA, 33 bp, Homo sapien
atagcaccgttaataattggacttatggaatca

SEQ ID NO: 900423 - DNA, 33 bp, Homo sapien
caagagccagcggaaaccttgacacacagttca

SEQ ID NO: 900424 - DNA, 33 bp, Homo sapien
caagagccagcggaaagcttgacacacagttca

SEQ ID NO: 900425 - DNA, 33 bp, Homo sapien
aagttcttcatcatgcaccaggtagcgtgccac

SEQ ID NO: 900426 - DNA, 33 bp, Homo sapien
aagttcttcatcatgcgccaggtagcgtgccac

SEQ ID NO: 900427 - DNA, 33 bp, Homo sapien
catgtgcagatgttgacgcttgtggtgcaaatt

SEQ ID NO: 900428 - DNA, 33 bp, Homo sapien
catgtgcagatgttgatgcttgtggtgcaaatt

SEQ ID NO: 900429 - DNA, 33 bp, Homo sapien
agaacagtacagataaactagtgcaaaagtatt

SEQ ID NO: 900430 - DNA, 33 bp, Homo sapien
agaacagtacagataagctagtgcaaaagtatt

SEQ ID NO: 900431 - DNA, 33 bp, Homo sapien
cacacgcactcgatacaatgacacatatacatg

SEQ ID NO: 900432 - DNA, 33 bp, Homo sapien
cacacgcactcgatacgatgacacatatacatg

SEQ ID NO: 900433 - DNA, 33 bp, Homo sapien
atatttcatcctcatacgcaagcttctcccaat

SEQ ID NO: 900434 - DNA, 33 bp, Homo sapien
atatttcatcctcatatgcaagcttctcccaat

SEQ ID NO: 900435 - DNA, 33 bp, Homo sapien
cttcactgtgtcataaattagattttcctcaca

SEQ ID NO: 900436 - DNA, 33 bp, Homo sapien
cttcactgtgtcataacttagattttcctcaca

SEQ ID NO: 900437 - DNA, 33 bp, Homo sapien
atagcttcataagacaagtagaaatcaagagaa

SEQ ID NO: 900438 - DNA, 33 bp, Homo sapien
atagcttcataagacacgtagaaatcaagagaa

SEQ ID NO: 900439 - DNA, 33 bp, Homo sapien
agaacctggggcagccaaaaatgtcgctgtgaa

SEQ ID NO: 900440 - DNA, 33 bp, Homo sapien
agaacctggggcagccgaaaatgtcgctgtgaa

SEQ ID NO: 900441 - DNA, 33 bp, Homo sapien
acacccatcatatttacgctcagacttcacagc

SEQ ID NO: 900442 - DNA, 33 bp, Homo sapien
acacccatcatatttatgctcagacttcacagc

SEQ ID NO: 900443 - DNA, 33 bp, Homo sapien
ctctgggtataaaatcaacacactgtctgctct

SEQ ID NO: 900444 - DNA, 33 bp, Homo sapien
ctctgggtataaaatcgacacactgtctgctct

SEQ ID NO: 900445 - DNA, 33 bp, Homo sapien
cattccagttgtcacacgtcttgatacatcccg

SEQ ID NO: 900446 - DNA, 33 bp, Homo sapien
cattccagttgtcacaggtcttgatacatcccg

SEQ ID NO: 900447 - DNA, 33 bp, Homo sapien
tttagatacgatgatcagaaaagaacttctaga

SEQ ID NO: 900448 - DNA, 33 bp, Homo sapien
tttagatacgatgatcggaaaagaacttctaga

SEQ ID NO: 900449 - DNA, 33 bp, Homo sapien
gtccataacaactactcacctctgtccttgcag

SEQ ID NO: 900450 - DNA, 33 bp, Homo sapien
gtccataacaactactgacctctgtccttgcag

SEQ ID NO: 900451 - DNA, 33 bp, Homo sapien
ttaaagaaaagactcaatacaaactggctaaac

SEQ ID NO: 900452 - DNA, 33 bp, Homo sapien
ttaaagaaaagactcagtacaaactggctaaac

SEQ ID NO: 900453 - DNA, 33 bp, Homo sapien
gggccacctgtggaaccattgcctctcccctga

SEQ ID NO: 900454 - DNA, 33 bp, Homo sapien
gggccacctgtggaacgattgcctctcccctga

SEQ ID NO: 900455 - DNA, 33 bp, Homo sapien
agcattataattgcctgaaatggttatggttca

SEQ ID NO: 900456 - DNA, 33 bp, Homo sapien
agcattataattgccttaaatggttatggttca

SEQ ID NO: 900457 - DNA, 33 bp, Homo sapien
agctaacacctttcaactggttgtggccagctg

SEQ ID NO: 900458 - DNA, 33 bp, Homo sapien
agctaacacctttcaattggttgtggccagctg

SEQ ID NO: 900459 - DNA, 33 bp, Homo sapien
cttccctcctctttcaggttagagataaagtgt

SEQ ID NO: 900460 - DNA, 33 bp, Homo sapien
cttccctcctctttcatgttagagataaagtgt

SEQ ID NO: 900461 - DNA, 33 bp, Homo sapien
gattcgtatagtccgcaagtgcagcacacggct

SEQ ID NO: 900462 - DNA, 33 bp, Homo sapien
gattcgtatagtccgcgagtgcagcacacggct

SEQ ID NO: 900463 - DNA, 33 bp, Homo sapien
attatgggtgtactaaatgagaagcttaagggg

SEQ ID NO: 900464 - DNA, 33 bp, Homo sapien
attatgggtgtactaagtgagaagcttaagggg

SEQ ID NO: 900465 - DNA, 33 bp, Homo sapien
ttttcttttggttaagcagtctcagaaggaatc

SEQ ID NO: 900466 - DNA, 33 bp, Homo sapien
ttttcttttggttaagtagtctcagaaggaatc

SEQ ID NO: 900467 - DNA, 33 bp, Homo sapien
tgaaacctagtcaccaatgctataatattaaga

SEQ ID NO: 900468 - DNA, 33 bp, Homo sapien
tgaaacctagtcaccagtgctataatattaaga

SEQ ID NO: 900469 - DNA, 33 bp, Homo sapien
attttgctggtgtctccatcttggacaacctcc

SEQ ID NO: 900470 - DNA, 33 bp, Homo sapien
attttgctggtgtctcgatcttggacaacctcc

SEQ ID NO: 900471 - DNA, 33 bp, Homo sapien
gagacttaaaaattccgcatcaggggcagatca

SEQ ID NO: 900472 - DNA, 33 bp, Homo sapien
gagacttaaaaattcctcatcaggggcagatca

SEQ ID NO: 900473 - DNA, 33 bp, Homo sapien
acaggaagatactgcagctcatggactaatgga

SEQ ID NO: 900474 - DNA, 33 bp, Homo sapien
acaggaagatactgcatctcatggactaatgga

SEQ ID NO: 900475 - DNA, 33 bp, Homo sapien
cacaacacatagtagaacagttgctagagggac

SEQ ID NO: 900476 - DNA, 33 bp, Homo sapien
cacaacacatagtagagcagttgctagagggac

SEQ ID NO: 900477 - DNA, 33 bp, Homo sapien
tcatgggcaaactatcactgttgcctaactgac

SEQ ID NO: 900478 - DNA, 33 bp, Homo sapien
tcatgggcaaactatcgctgttgcctaactgac

SEQ ID NO: 900479 - DNA, 33 bp, Homo sapien
tataaaaagacaaaacactgctactttgataat

SEQ ID NO: 900480 - DNA, 33 bp, Homo sapien
tataaaaagacaaaactctgctactttgataat

SEQ ID NO: 900481 - DNA, 33 bp, Homo sapien
aataatttactcaggaccacaatgctgcttaac

SEQ ID NO: 900482 - DNA, 33 bp, Homo sapien
aataatttactcaggatcacaatgctgcttaac

SEQ ID NO: 900483 - DNA, 33 bp, Homo sapien
taccccctgtcagagcaccatcttcttcccatc

SEQ ID NO: 900484 - DNA, 33 bp, Homo sapien
taccccctgtcagagcgccatcttcttcccatc

SEQ ID NO: 900485 - DNA, 33 bp, Homo sapien
ggcctagcagagagcaactcctggtagaaaagc

SEQ ID NO: 900486 - DNA, 33 bp, Homo sapien
ggcctagcagagagcagctcctggtagaaaagc

SEQ ID NO: 900487 - DNA, 33 bp, Homo sapien
aagactctaaatactccacaaaacaagtaggca

SEQ ID NO: 900488 - DNA, 33 bp, Homo sapien
aagactctaaatactctacaaaacaagtaggca

SEQ ID NO: 900489 - DNA, 33 bp, Homo sapien
accagtctctcttacactcatgtacacagataa

SEQ ID NO: 900490 - DNA, 33 bp, Homo sapien
accagtctctcttacagtcatgtacacagataa

SEQ ID NO: 900491 - DNA, 33 bp, Homo sapien
agaagtatagatgcttcaagatttgagaggtga

SEQ ID NO: 900492 - DNA, 33 bp, Homo sapien
agaagtatagatgctttaagatttgagaggtga

SEQ ID NO: 900493 - DNA, 33 bp, Homo sapien
cctcttggtctggcaaactaggaacaaaatgac

SEQ ID NO: 900494 - DNA, 33 bp, Homo sapien
cctcttggtctggcaatctaggaacaaaatgac

SEQ ID NO: 900495 - DNA, 33 bp, Homo sapien
ggagtaggtaaggcaaatagagaagctactggc

SEQ ID NO: 900496 - DNA, 33 bp, Homo sapien
ggagtaggtaaggcaagtagagaagctactggc

SEQ ID NO: 900497 - DNA, 33 bp, Homo sapien
tagccattttcttacactgacttccagcggaga

SEQ ID NO: 900498 - DNA, 33 bp, Homo sapien
tagccattttcttacattgacttccagcggaga

SEQ ID NO: 900499 - DNA, 33 bp, Homo sapien
aatataccaatggccaataagaacattaaaata

SEQ ID NO: 900500 - DNA, 33 bp, Homo sapien
aatataccaatggccagtaagaacattaaaata

SEQ ID NO: 900501 - DNA, 33 bp, Homo sapien
ctgaagtgactcaggaagaaatagaaaatcttg

SEQ ID NO: 900502 - DNA, 33 bp, Homo sapien
ctgaagtgactcaggaggaaatagaaaatcttg

SEQ ID NO: 900503 - DNA, 33 bp, Homo sapien
agatagttttacttgcccctttccaatctagat

SEQ ID NO: 900504 - DNA, 33 bp, Homo sapien
agatagttttacttgctcctttccaatctagat

SEQ ID NO: 900505 - DNA, 33 bp, Homo sapien
tcacaggttagtcacactcaatatggaaatgac

SEQ ID NO: 900506 - DNA, 33 bp, Homo sapien
tcacaggttagtcacattcaatatggaaatgac

SEQ ID NO: 900507 - DNA, 33 bp, Homo sapien
tttattgaagaataacacacataatgaatagta

SEQ ID NO: 900508 - DNA, 33 bp, Homo sapien
tttattgaagaataacgcacataatgaatagta

SEQ ID NO: 900509 - DNA, 33 bp, Homo sapien
acatttgaaaaggtgcggaatttcattatttca

SEQ ID NO: 900510 - DNA, 33 bp, Homo sapien
acatttgaaaaggtgctgaatttcattatttca

SEQ ID NO: 900511 - DNA, 33 bp, Homo sapien
gtggaatccgttgatgcaatgagaaaacacaac

SEQ ID NO: 900512 - DNA, 33 bp, Homo sapien
gtggaatccgttgatgtaatgagaaaacacaac

SEQ ID NO: 900513 - DNA, 33 bp, Homo sapien
catttaataagcattacctcattgattaactgt

SEQ ID NO: 900514 - DNA, 33 bp, Homo sapien
catttaataagcattatctcattgattaactgt

SEQ ID NO: 900515 - DNA, 33 bp, Homo sapien
aggctaaatctaccaacgtttggatggaccaaa

SEQ ID NO: 900516 - DNA, 33 bp, Homo sapien
aggctaaatctaccaatgtttggatggaccaaa

SEQ ID NO: 900517 - DNA, 33 bp, Homo sapien
agctttgcgaacttcaaaattgtgaataatatg

SEQ ID NO: 900518 - DNA, 33 bp, Homo sapien
agctttgcgaacttcagaattgtgaataatatg

SEQ ID NO: 900519 - DNA, 33 bp, Homo sapien
tcactaagcaaaacaactatcaatcagaaagga

SEQ ID NO: 900520 - DNA, 33 bp, Homo sapien
tcactaagcaaaacaattatcaatcagaaagga

SEQ ID NO: 900521 - DNA, 33 bp, Homo sapien
aggctgtagtgcattacgatcatgcctgtggta

SEQ ID NO: 900522 - DNA, 33 bp, Homo sapien
aggctgtagtgcattatgatcatgcctgtggta

SEQ ID NO: 900523 - DNA, 33 bp, Homo sapien
gctcctggaattctcaaaacaactcttataaga

SEQ ID NO: 900524 - DNA, 33 bp, Homo sapien
gctcctggaattctcagaacaactcttataaga

SEQ ID NO: 900525 - DNA, 33 bp, Homo sapien
aatgtagggagaagaccaacataagtattagta

SEQ ID NO: 900526 - DNA, 33 bp, Homo sapien
aatgtagggagaagacgaacataagtattagta

SEQ ID NO: 900527 - DNA, 33 bp, Homo sapien
aagatgtatgatgtgccctttgaatataaaatt

SEQ ID NO: 900528 - DNA, 33 bp, Homo sapien
aagatgtatgatgtgctctttgaatataaaatt

SEQ ID NO: 900529 - DNA, 33 bp, Homo sapien
aaaagaactgagaatcaaggcaaagagctatgc

SEQ ID NO: 900530 - DNA, 33 bp, Homo sapien
aaaagaactgagaatcgaggcaaagagctatgc

SEQ ID NO: 900531 - DNA, 33 bp, Homo sapien
actaaagccttcattaacaaccgcacactgagc

SEQ ID NO: 900532 - DNA, 33 bp, Homo sapien
actaaagccttcattaccaaccgcacactgagc

SEQ ID NO: 900533 - DNA, 33 bp, Homo sapien
gactgataaacaacacacatctaagtgagactc

SEQ ID NO: 900534 - DNA, 33 bp, Homo sapien
gactgataaacaacacgcatctaagtgagactc

SEQ ID NO: 900535 - DNA, 33 bp, Homo sapien
ggagttcctttgactagctctacaggatcttcc

SEQ ID NO: 900536 - DNA, 33 bp, Homo sapien
ggagttcctttgactatctctacaggatcttcc

SEQ ID NO: 900537 - DNA, 33 bp, Homo sapien
atgttgatttactataccatcataggaacgttt

SEQ ID NO: 900538 - DNA, 33 bp, Homo sapien
atgttgatttactatatcatcataggaacgttt

SEQ ID NO: 900539 - DNA, 33 bp, Homo sapien
acatctggggacacaactcactcagcttgatgc

SEQ ID NO: 900540 - DNA, 33 bp, Homo sapien
acatctggggacacaattcactcagcttgatgc

SEQ ID NO: 900541 - DNA, 33 bp, Homo sapien
tcccagcaggattgcacaccagggacaactctc

SEQ ID NO: 900542 - DNA, 33 bp, Homo sapien
tcccagcaggattgcataccagggacaactctc

SEQ ID NO: 900543 - DNA, 33 bp, Homo sapien
gaggatcagatgttaccacaaactgctccacgt

SEQ ID NO: 900544 - DNA, 33 bp, Homo sapien
gaggatcagatgttacgacaaactgctccacgt

SEQ ID NO: 900545 - DNA, 33 bp, Homo sapien
gcagaagctgagaggaccattggggattataat

SEQ ID NO: 900546 - DNA, 33 bp, Homo sapien
gcagaagctgagaggatcattggggattataat

SEQ ID NO: 900547 - DNA, 33 bp, Homo sapien
cttccctccctactcaatcccttcaaggcaccc

SEQ ID NO: 900548 - DNA, 33 bp, Homo sapien
cttccctccctactcagtcccttcaaggcaccc

SEQ ID NO: 900549 - DNA, 33 bp, Homo sapien
aaggtgcagccacataaacattgacttatcaat

SEQ ID NO: 900550 - DNA, 33 bp, Homo sapien
aaggtgcagccacatagacattgacttatcaat

SEQ ID NO: 900551 - DNA, 33 bp, Homo sapien
tgtcagtgtactctaaatgaaagatagtttctt

SEQ ID NO: 900552 - DNA, 33 bp, Homo sapien
tgtcagtgtactctaagtgaaagatagtttctt

SEQ ID NO: 900553 - DNA, 33 bp, Homo sapien
ctctctggctactcaagtcagaaacctggaagt

SEQ ID NO: 900554 - DNA, 33 bp, Homo sapien
ctctctggctactcaattcagaaacctggaagt

SEQ ID NO: 900555 - DNA, 33 bp, Homo sapien
atctttccccattgcaaaggaacaacaccgtta

SEQ ID NO: 900556 - DNA, 33 bp, Homo sapien
atctttccccattgcagaggaacaacaccgtta

SEQ ID NO: 900557 - DNA, 33 bp, Homo sapien
actcttgcacttcacaatctgaggaaggaggtt

SEQ ID NO: 900558 - DNA, 33 bp, Homo sapien
actcttgcacttcacagtctgaggaaggaggtt

SEQ ID NO: 900559 - DNA, 33 bp, Homo sapien
ccagatctcacaagaactctcactatcaaacga

SEQ ID NO: 900560 - DNA, 33 bp, Homo sapien
ccagatctcacaagaagtctcactatcaaacga

SEQ ID NO: 900561 - DNA, 33 bp, Homo sapien
acctggaagggaaccacaagaggtatttttctc

SEQ ID NO: 900562 - DNA, 33 bp, Homo sapien
acctggaagggaaccagaagaggtatttttctc

SEQ ID NO: 900563 - DNA, 33 bp, Homo sapien
taagatttatacattaaaggataactggactgt

SEQ ID NO: 900564 - DNA, 33 bp, Homo sapien
taagatttatacattagaggataactggactgt

SEQ ID NO: 900565 - DNA, 33 bp, Homo sapien
atcttcttttaaaccacactactcatgatagtc

SEQ ID NO: 900566 - DNA, 33 bp, Homo sapien
atcttcttttaaaccatactactcatgatagtc

SEQ ID NO: 900567 - DNA, 33 bp, Homo sapien
atcaaggtgctacaccacattacagaacagaca

SEQ ID NO: 900568 - DNA, 33 bp, Homo sapien
atcaaggtgctacaccgcattacagaacagaca

SEQ ID NO: 900569 - DNA, 33 bp, Homo sapien
tctctgtgtactaatacggaaaatgtttccaga

SEQ ID NO: 900570 - DNA, 33 bp, Homo sapien
tctctgtgtactaatatggaaaatgtttccaga

SEQ ID NO: 900571 - DNA, 33 bp, Homo sapien
taattgcattgtgtcaaatgaaacttgtatcct

SEQ ID NO: 900572 - DNA, 33 bp, Homo sapien
taattgcattgtgtcagatgaaacttgtatcct

SEQ ID NO: 900573 - DNA, 33 bp, Homo sapien
tcactaggaccctacactccagtgacagcattc

SEQ ID NO: 900574 - DNA, 33 bp, Homo sapien
tcactaggaccctacattccagtgacagcattc

SEQ ID NO: 900575 - DNA, 33 bp, Homo sapien
ctagtggttcaaaacacggccttcagaatcaga

SEQ ID NO: 900576 - DNA, 33 bp, Homo sapien
ctagtggttcaaaacatggccttcagaatcaga

SEQ ID NO: 900577 - DNA, 33 bp, Homo sapien
caacattaggtaaacacgaaattggtaagcaga

SEQ ID NO: 900578 - DNA, 33 bp, Homo sapien
caacattaggtaaacatgaaattggtaagcaga

SEQ ID NO: 900579 - DNA, 33 bp, Homo sapien
tatgctctggctattcaatgaaaaatgagtccc

SEQ ID NO: 900580 - DNA, 33 bp, Homo sapien
tatgctctggctattcgatgaaaaatgagtccc

SEQ ID NO: 900581 - DNA, 33 bp, Homo sapien
tattttaagcattaagaatatgaggctcttttt

SEQ ID NO: 900582 - DNA, 33 bp, Homo sapien
tattttaagcattaaggatatgaggctcttttt

SEQ ID NO: 900583 - DNA, 33 bp, Homo sapien
catatatggctttcaaatgtaattgtaccaaag

SEQ ID NO: 900584 - DNA, 33 bp, Homo sapien
catatatggctttcaactgtaattgtaccaaag

SEQ ID NO: 900585 - DNA, 33 bp, Homo sapien
gttgtgtttccttccaaaaatattgtatctaat

SEQ ID NO: 900586 - DNA, 33 bp, Homo sapien
gttgtgtttccttccagaaatattgtatctaat

SEQ ID NO: 900587 - DNA, 33 bp, Homo sapien
ggtaccacttagaccacaggcactgagacactc

SEQ ID NO: 900588 - DNA, 33 bp, Homo sapien
ggtaccacttagaccataggcactgagacactc

SEQ ID NO: 900589 - DNA, 33 bp, Homo sapien
aataagtcaaggaataaacaaaatactctctta

SEQ ID NO: 900590 - DNA, 33 bp, Homo sapien
aataagtcaaggaatacacaaaatactctctta

SEQ ID NO: 900591 - DNA, 33 bp, Homo sapien
ttctgtaatcattaaaagcaactttgatgaata

SEQ ID NO: 900592 - DNA, 33 bp, Homo sapien
ttctgtaatcattaaatgcaactttgatgaata

SEQ ID NO: 900593 - DNA, 33 bp, Homo sapien
catacactaatagagccgagagggatggttatt

SEQ ID NO: 900594 - DNA, 33 bp, Homo sapien
catacactaatagagctgagagggatggttatt

SEQ ID NO: 900595 - DNA, 33 bp, Homo sapien
ctcctcttcttattcacgtgcaaatgtttaccc

SEQ ID NO: 900596 - DNA, 33 bp, Homo sapien
ctcctcttcttattcatgtgcaaatgtttaccc

SEQ ID NO: 900597 - DNA, 33 bp, Homo sapien
aagatatactgccatcaaaaggaatgcggtgtg

SEQ ID NO: 900598 - DNA, 33 bp, Homo sapien
aagatatactgccatcgaaaggaatgcggtgtg

SEQ ID NO: 900599 - DNA, 33 bp, Homo sapien
agagtgactatgcaaccaggaattgttccaagc

SEQ ID NO: 900600 - DNA, 33 bp, Homo sapien
agagtgactatgcaactaggaattgttccaagc

SEQ ID NO: 900601 - DNA, 33 bp, Homo sapien
gactttcacaggatttaaaagaccagtaccctc

SEQ ID NO: 900602 - DNA, 33 bp, Homo sapien
gactttcacaggatttgaaagaccagtaccctc

SEQ ID NO: 900603 - DNA, 33 bp, Homo sapien
atcctttcactttcaacttatttgtgtctttgg

SEQ ID NO: 900604 - DNA, 33 bp, Homo sapien
atcctttcactttcaatttatttgtgtctttgg

SEQ ID NO: 900605 - DNA, 33 bp, Homo sapien
tccatcctaaaacttaccagacatctcaagtaa

SEQ ID NO: 900606 - DNA, 33 bp, Homo sapien
tccatcctaaaacttatcagacatctcaagtaa

SEQ ID NO: 900607 - DNA, 33 bp, Homo sapien
aatagaagatagagcccggaaataaatatatga

SEQ ID NO: 900608 - DNA, 33 bp, Homo sapien
aatagaagatagagcctggaaataaatatatga

SEQ ID NO: 900609 - DNA, 33 bp, Homo sapien
gttacaattatgcaaaagcactataaattactc

SEQ ID NO: 900610 - DNA, 33 bp, Homo sapien
gttacaattatgcaaacgcactataaattactc

SEQ ID NO: 900611 - DNA, 33 bp, Homo sapien
atggtttggttgggtacaatagacacaaatgct

SEQ ID NO: 900612 - DNA, 33 bp, Homo sapien
atggtttggttgggtagaatagacacaaatgct

SEQ ID NO: 900613 - DNA, 33 bp, Homo sapien
ttcaaaaattaccacaacaactaactctcacca

SEQ ID NO: 900614 - DNA, 33 bp, Homo sapien
ttcaaaaattaccacatcaactaactctcacca

SEQ ID NO: 900615 - DNA, 33 bp, Homo sapien
attccaactaacaaataagtatgaagataggct

SEQ ID NO: 900616 - DNA, 33 bp, Homo sapien
attccaactaacaaatgagtatgaagataggct

SEQ ID NO: 900617 - DNA, 33 bp, Homo sapien
ccttgtgagataggcaaggaaggtatctttatg

SEQ ID NO: 900618 - DNA, 33 bp, Homo sapien
ccttgtgagataggcagggaaggtatctttatg

SEQ ID NO: 900619 - DNA, 33 bp, Homo sapien
gtgtttgtcaataagccacaacaccttgtgata

SEQ ID NO: 900620 - DNA, 33 bp, Homo sapien
gtgtttgtcaataagctacaacaccttgtgata

SEQ ID NO: 900621 - DNA, 33 bp, Homo sapien
aataaaggaatttggactaatcagtaggtgcat

SEQ ID NO: 900622 - DNA, 33 bp, Homo sapien
aataaaggaatttggagtaatcagtaggtgcat

SEQ ID NO: 900623 - DNA, 33 bp, Homo sapien
tgaacactgacttataacaatgagactgctgga

SEQ ID NO: 900624 - DNA, 33 bp, Homo sapien
tgaacactgacttatagcaatgagactgctgga

SEQ ID NO: 900625 - DNA, 33 bp, Homo sapien
atacttcaattgacacgcttaagttccagcagt

SEQ ID NO: 900626 - DNA, 33 bp, Homo sapien
atacttcaattgacactcttaagttccagcagt

SEQ ID NO: 900627 - DNA, 33 bp, Homo sapien
tcacaatactggctatcatacttcaattgacac

SEQ ID NO: 900628 - DNA, 33 bp, Homo sapien
tcacaatactggctatgatacttcaattgacac

SEQ ID NO: 900629 - DNA, 33 bp, Homo sapien
tggacagaaatgaaccacacatttgggaaaaga

SEQ ID NO: 900630 - DNA, 33 bp, Homo sapien
tggacagaaatgaaccgcacatttgggaaaaga

SEQ ID NO: 900631 - DNA, 33 bp, Homo sapien
gggaatccatctctatcgcatggcagccttacc

SEQ ID NO: 900632 - DNA, 33 bp, Homo sapien
gggaatccatctctattgcatggcagccttacc

SEQ ID NO: 900633 - DNA, 33 bp, Homo sapien
tcaagaatctaccagaagttttcaaggggaaat

SEQ ID NO: 900634 - DNA, 33 bp, Homo sapien
tcaagaatctaccagacgttttcaaggggaaat

SEQ ID NO: 900635 - DNA, 33 bp, Homo sapien
tactcataggtgagcacagaaacatgaactaag

SEQ ID NO: 900636 - DNA, 33 bp, Homo sapien
tactcataggtgagcatagaaacatgaactaag

SEQ ID NO: 900637 - DNA, 33 bp, Homo sapien
taggaaggaggcagaaattatcgctgggattga

SEQ ID NO: 900638 - DNA, 33 bp, Homo sapien
taggaaggaggcagaagttatcgctgggattga

SEQ ID NO: 900639 - DNA, 33 bp, Homo sapien
cacctacgctatacaacttccacctcatgatag

SEQ ID NO: 900640 - DNA, 33 bp, Homo sapien
cacctacgctatacaatttccacctcatgatag

SEQ ID NO: 900641 - DNA, 33 bp, Homo sapien
aggttaagctctccaacagtaaaaaacaaaccc

SEQ ID NO: 900642 - DNA, 33 bp, Homo sapien
aggttaagctctccaatagtaaaaaacaaaccc

SEQ ID NO: 900643 - DNA, 33 bp, Homo sapien
ttgttccctcatatcacagtagcaaacaggtca

SEQ ID NO: 900644 - DNA, 33 bp, Homo sapien
ttgttccctcatatcagagtagcaaacaggtca

SEQ ID NO: 900645 - DNA, 33 bp, Homo sapien
attactttggttcctacgacattgtagagattt

SEQ ID NO: 900646 - DNA, 33 bp, Homo sapien
attactttggttcctatgacattgtagagattt

SEQ ID NO: 900647 - DNA, 33 bp, Homo sapien
tgaattcgaaagtaacacaagtgcagtcccaca

SEQ ID NO: 900648 - DNA, 33 bp, Homo sapien
tgaattcgaaagtaacgcaagtgcagtcccaca

SEQ ID NO: 900649 - DNA, 33 bp, Homo sapien
atccagagtccactgaatcactttcctgtacag

SEQ ID NO: 900650 - DNA, 33 bp, Homo sapien
atccagagtccactgagtcactttcctgtacag

SEQ ID NO: 900651 - DNA, 33 bp, Homo sapien
aaactctcctgaaaataatggagctggagacat

SEQ ID NO: 900652 - DNA, 33 bp, Homo sapien
aaactctcctgaaaatcatggagctggagacat

SEQ ID NO: 900653 - DNA, 33 bp, Homo sapien
tgtcttacctactctacaccttgtgggcattcc

SEQ ID NO: 900654 - DNA, 33 bp, Homo sapien
tgtcttacctactctataccttgtgggcattcc

SEQ ID NO: 900655 - DNA, 33 bp, Homo sapien
aagactttcagaactaaaagacatcttttgaat

SEQ ID NO: 900656 - DNA, 33 bp, Homo sapien
aagactttcagaactagaagacatcttttgaat

SEQ ID NO: 900657 - DNA, 33 bp, Homo sapien
aatacaaaaattcgagaatgcttaagtccctta

SEQ ID NO: 900658 - DNA, 33 bp, Homo sapien
aatacaaaaattcgaggatgcttaagtccctta

SEQ ID NO: 900659 - DNA, 33 bp, Homo sapien
ttaggaatcaagcaggcaatgaatgtaaacatg

SEQ ID NO: 900660 - DNA, 33 bp, Homo sapien
ttaggaatcaagcaggtaatgaatgtaaacatg

SEQ ID NO: 900661 - DNA, 33 bp, Homo sapien
aaaatcaatttttgtcaaacactgtgctgatca

SEQ ID NO: 900662 - DNA, 33 bp, Homo sapien
aaaatcaatttttgtctaacactgtgctgatca

SEQ ID NO: 900663 - DNA, 33 bp, Homo sapien
agcacctgggtggtgaatagcacctgggaagct

SEQ ID NO: 900664 - DNA, 33 bp, Homo sapien
agcacctgggtggtgattagcacctgggaagct

SEQ ID NO: 900665 - DNA, 33 bp, Homo sapien
ccatgagaagaaagtcaagggaagataaaagtc

SEQ ID NO: 900666 - DNA, 33 bp, Homo sapien
ccatgagaagaaagtcgagggaagataaaagtc

SEQ ID NO: 900667 - DNA, 33 bp, Homo sapien
tctgttgagaagtgcacggtccacatatgcatg

SEQ ID NO: 900668 - DNA, 33 bp, Homo sapien
tctgttgagaagtgcatggtccacatatgcatg

SEQ ID NO: 900669 - DNA, 33 bp, Homo sapien
acacacagtccctagaaaatgatgacatgctgt

SEQ ID NO: 900670 - DNA, 33 bp, Homo sapien
acacacagtccctagataatgatgacatgctgt

SEQ ID NO: 900671 - DNA, 33 bp, Homo sapien
ttctaatcatcaagtcggaaaagaaatctggat

SEQ ID NO: 900672 - DNA, 33 bp, Homo sapien
ttctaatcatcaagtctgaaaagaaatctggat

SEQ ID NO: 900673 - DNA, 33 bp, Homo sapien
gaagtggaagaaagggcactttaatgtgtggtg

SEQ ID NO: 900674 - DNA, 33 bp, Homo sapien
gaagtggaagaaagggtactttaatgtgtggtg

SEQ ID NO: 900675 - DNA, 33 bp, Homo sapien
aaaaagtgagtgcctgaacagaatggaaaccta

SEQ ID NO: 900676 - DNA, 33 bp, Homo sapien
aaaaagtgagtgcctggacagaatggaaaccta

SEQ ID NO: 900677 - DNA, 33 bp, Homo sapien
ggcaggagagaatatactaaaataggttaaagt

SEQ ID NO: 900678 - DNA, 33 bp, Homo sapien
ggcaggagagaatatagtaaaataggttaaagt

SEQ ID NO: 900679 - DNA, 33 bp, Homo sapien
ttcagttttagaacacaacaaatcttattttta

SEQ ID NO: 900680 - DNA, 33 bp, Homo sapien
ttcagttttagaacacgacaaatcttattttta

SEQ ID NO: 900681 - DNA, 33 bp, Homo sapien
tgatgcctatatgaaaacataacaggtacatga

SEQ ID NO: 900682 - DNA, 33 bp, Homo sapien
tgatgcctatatgaaagcataacaggtacatga

SEQ ID NO: 900683 - DNA, 33 bp, Homo sapien
gtttattggagcttgaagcaattgtaattaaat

SEQ ID NO: 900684 - DNA, 33 bp, Homo sapien
gtttattggagcttgatgcaattgtaattaaat

SEQ ID NO: 900685 - DNA, 33 bp, Homo sapien
tttcttctggccatgcaactgttctgctagtct

SEQ ID NO: 900686 - DNA, 33 bp, Homo sapien
tttcttctggccatgcgactgttctgctagtct

SEQ ID NO: 900687 - DNA, 33 bp, Homo sapien
cagcaccatggggtccaccagatcatatgcctc

SEQ ID NO: 900688 - DNA, 33 bp, Homo sapien
cagcaccatggggtccgccagatcatatgcctc

SEQ ID NO: 900689 - DNA, 33 bp, Homo sapien
tccagtgaatcgccaaataatatctgtcaagat

SEQ ID NO: 900690 - DNA, 33 bp, Homo sapien
tccagtgaatcgccaattaatatctgtcaagat

SEQ ID NO: 900691 - DNA, 33 bp, Homo sapien
ttttcactatgaatgacagctattactttttaa

SEQ ID NO: 900692 - DNA, 33 bp, Homo sapien
ttttcactatgaatgagagctattactttttaa

SEQ ID NO: 900693 - DNA, 33 bp, Homo sapien
tacctgttctcatttaagaccactggtttccag

SEQ ID NO: 900694 - DNA, 33 bp, Homo sapien
tacctgttctcatttaggaccactggtttccag

SEQ ID NO: 900695 - DNA, 33 bp, Homo sapien
tacctgtccaaagaaacgaactctcccacacta

SEQ ID NO: 900696 - DNA, 33 bp, Homo sapien
tacctgtccaaagaaatgaactctcccacacta

SEQ ID NO: 900697 - DNA, 33 bp, Homo sapien
tcatatcaaagggctgcacattttatatttcaa

SEQ ID NO: 900698 - DNA, 33 bp, Homo sapien
tcatatcaaagggctgtacattttatatttcaa

SEQ ID NO: 900699 - DNA, 33 bp, Homo sapien
taacatcaagggactcaagtttccaaatgcagg

SEQ ID NO: 900700 - DNA, 33 bp, Homo sapien
taacatcaagggactcgagtttccaaatgcagg

SEQ ID NO: 900701 - DNA, 33 bp, Homo sapien
tacctggcataggtgccacaatttcatctcaga

SEQ ID NO: 900702 - DNA, 33 bp, Homo sapien
tacctggcataggtgctacaatttcatctcaga

SEQ ID NO: 900703 - DNA, 33 bp, Homo sapien
gggatgaggtcactaacggtaactgaaaaatag

SEQ ID NO: 900704 - DNA, 33 bp, Homo sapien
gggatgaggtcactaatggtaactgaaaaatag

SEQ ID NO: 900705 - DNA, 33 bp, Homo sapien
atggccatttggagacgaaattttcagcatgtg

SEQ ID NO: 900706 - DNA, 33 bp, Homo sapien
atggccatttggagactaaattttcagcatgtg

SEQ ID NO: 900707 - DNA, 33 bp, Homo sapien
tctgtttcagccaataggaacattaaaggttag

SEQ ID NO: 900708 - DNA, 33 bp, Homo sapien
tctgtttcagccaatatgaacattaaaggttag

SEQ ID NO: 900709 - DNA, 33 bp, Homo sapien
aggattcaagttttcacagggataccagtcctc

SEQ ID NO: 900710 - DNA, 33 bp, Homo sapien
aggattcaagttttcagagggataccagtcctc

SEQ ID NO: 900711 - DNA, 33 bp, Homo sapien
accgccttaatcatgacacatctagaagacctt

SEQ ID NO: 900712 - DNA, 33 bp, Homo sapien
accgccttaatcatgagacatctagaagacctt

SEQ ID NO: 900713 - DNA, 33 bp, Homo sapien
gaaatgcaaaaacatacatctttcagagtaaaa

SEQ ID NO: 900714 - DNA, 33 bp, Homo sapien
gaaatgcaaaaacatatatctttcagagtaaaa

SEQ ID NO: 900715 - DNA, 33 bp, Homo sapien
tgtttctcacttatatcaccgttcaatgaggat

SEQ ID NO: 900716 - DNA, 33 bp, Homo sapien
tgtttctcacttatatgaccgttcaatgaggat

SEQ ID NO: 900717 - DNA, 33 bp, Homo sapien
acattggtctttcttggaagcttagtaaaaata

SEQ ID NO: 900718 - DNA, 33 bp, Homo sapien
acattggtctttcttgtaagcttagtaaaaata

SEQ ID NO: 900719 - DNA, 33 bp, Homo sapien
aaaattaggtcatagtcacaagaacatactcaa

SEQ ID NO: 900720 - DNA, 33 bp, Homo sapien
aaaattaggtcatagtgacaagaacatactcaa

SEQ ID NO: 900721 - DNA, 33 bp, Homo sapien
atttggccctgcaatgccatctcatctgaccca

SEQ ID NO: 900722 - DNA, 33 bp, Homo sapien
atttggccctgcaatggcatctcatctgaccca

SEQ ID NO: 900723 - DNA, 33 bp, Homo sapien
caagaaacccaggttaagagagtatatcggttt

SEQ ID NO: 900724 - DNA, 33 bp, Homo sapien
caagaaacccaggttaggagagtatatcggttt

SEQ ID NO: 900725 - DNA, 33 bp, Homo sapien
actggttagaatcttacgagaaaactatccaga

SEQ ID NO: 900726 - DNA, 33 bp, Homo sapien
actggttagaatcttatgagaaaactatccaga

SEQ ID NO: 900727 - DNA, 33 bp, Homo sapien
ggcttcaaacaatgcagtataaattgattctca

SEQ ID NO: 900728 - DNA, 33 bp, Homo sapien
ggcttcaaacaatgcattataaattgattctca

SEQ ID NO: 900729 - DNA, 33 bp, Homo sapien
aggtttctgaaacttcaaaaacaattcttaaaa

SEQ ID NO: 900730 - DNA, 33 bp, Homo sapien
aggtttctgaaacttcgaaaacaattcttaaaa

SEQ ID NO: 900731 - DNA, 33 bp, Homo sapien
aggttttttttcattccatgctttgctggggta

SEQ ID NO: 900732 - DNA, 33 bp, Homo sapien
aggttttttttcattctatgctttgctggggta

SEQ ID NO: 900733 - DNA, 33 bp, Homo sapien
ttatagacataaattcaagtaccaaaaaattct

SEQ ID NO: 900734 - DNA, 33 bp, Homo sapien
ttatagacataaattccagtaccaaaaaattct

SEQ ID NO: 900735 - DNA, 33 bp, Homo sapien
tttggaagcattaccaactgaaaatacttcaga

SEQ ID NO: 900736 - DNA, 33 bp, Homo sapien
tttggaagcattaccacctgaaaatacttcaga

SEQ ID NO: 900737 - DNA, 33 bp, Homo sapien
aggaaactgttgatgacggttatctctgggagt

SEQ ID NO: 900738 - DNA, 33 bp, Homo sapien
aggaaactgttgatgatggttatctctgggagt

SEQ ID NO: 900739 - DNA, 33 bp, Homo sapien
atttatgttgatgctcaaattgttccacacttg

SEQ ID NO: 900740 - DNA, 33 bp, Homo sapien
atttatgttgatgctccaattgttccacacttg

SEQ ID NO: 900741 - DNA, 33 bp, Homo sapien
ttttggtttgtttatacgcccttcatgtttcca

SEQ ID NO: 900742 - DNA, 33 bp, Homo sapien
ttttggtttgtttatatgcccttcatgtttcca

SEQ ID NO: 900743 - DNA, 33 bp, Homo sapien
ggctttgcgttggctcacaggtttagaggataa

SEQ ID NO: 900744 - DNA, 33 bp, Homo sapien
ggctttgcgttggctcgcaggtttagaggataa

SEQ ID NO: 900745 - DNA, 33 bp, Homo sapien
gttcagtatgattgacagtaagatacatgggca

SEQ ID NO: 900746 - DNA, 33 bp, Homo sapien
gttcagtatgattgaccgtaagatacatgggca

SEQ ID NO: 900747 - DNA, 33 bp, Homo sapien
ctaaggaatctcaaaaatagcttaattttccaa

SEQ ID NO: 900748 - DNA, 33 bp, Homo sapien
ctaaggaatctcaaaagtagcttaattttccaa

SEQ ID NO: 900749 - DNA, 33 bp, Homo sapien; identical to SEQ ID NO: 900747

SEQ ID NO: 900750 - DNA, 33 bp, Homo sapien; identical to SEQ ID NO: 900748

SEQ ID NO: 900751 - DNA, 33 bp, Homo sapien
cgtgtgcctaattaacgcctagtcatccttcac

SEQ ID NO: 900752 - DNA, 33 bp, Homo sapien
cgtgtgcctaattaactcctagtcatccttcac

SEQ ID NO: 900753 - DNA, 33 bp, Homo sapien
ttatttatgtccttcaacatttctcaaactgct

SEQ ID NO: 900754 - DNA, 33 bp, Homo sapien
ttatttatgtccttcaccatttctcaaactgct

SEQ ID NO: 900755 - DNA, 33 bp, Homo sapien
atcaaagtatgacaatcaggcttataactctag

SEQ ID NO: 900756 - DNA, 33 bp, Homo sapien
atcaaagtatgacaattaggcttataactctag

SEQ ID NO: 900757 - DNA, 33 bp, Homo sapien
ctcctgccgaaacaaacgtgccagcatttacat

SEQ ID NO: 900758 - DNA, 33 bp, Homo sapien
ctcctgccgaaacaaatgtgccagcatttacat

SEQ ID NO: 900759 - DNA, 33 bp, Homo sapien
gctgcaagctttcaaaaaaggaatgccagcagt

SEQ ID NO: 900760 - DNA, 33 bp, Homo sapien
gctgcaagctttcaaagaaggaatgccagcagt

SEQ ID NO: 900761 - DNA, 33 bp, Homo sapien
caagggaatcgctaaacggaagcccagggaagg

SEQ ID NO: 900762 - DNA, 33 bp, Homo sapien
caagggaatcgctaaatggaagcccagggaagg

SEQ ID NO: 900763 - DNA, 33 bp, Homo sapien
cagccctgttttaaaaccatcattgctaattac

SEQ ID NO: 900764 - DNA, 33 bp, Homo sapien
cagccctgttttaaaatcatcattgctaattac

SEQ ID NO: 900765 - DNA, 33 bp, Homo sapien
cacatcaagggcaaacaaggagagctgcaaggg

SEQ ID NO: 900766 - DNA, 33 bp, Homo sapien
cacatcaagggcaaactaggagagctgcaaggg

SEQ ID NO: 900767 - DNA, 33 bp, Homo sapien
gagtatcattatgatacgatggattttaacata

SEQ ID NO: 900768 - DNA, 33 bp, Homo sapien
gagtatcattatgatatgatggattttaacata

SEQ ID NO: 900769 - DNA, 33 bp, Homo sapien
agaaaaaaatgatagactaggtaccacagtttg

SEQ ID NO: 900770 - DNA, 33 bp, Homo sapien
agaaaaaaatgatagattaggtaccacagtttg

SEQ ID NO: 900771 - DNA, 33 bp, Homo sapien
ataggagaaaaaaacaatcttaccagtgcaaca

SEQ ID NO: 900772 - DNA, 33 bp, Homo sapien
ataggagaaaaaaacagtcttaccagtgcaaca

SEQ ID NO: 900773 - DNA, 33 bp, Homo sapien
tattagcggatattagaccttcatatattttgt

SEQ ID NO: 900774 - DNA, 33 bp, Homo sapien
tattagcggatattaggccttcatatattttgt

SEQ ID NO: 900775 - DNA, 33 bp, Homo sapien
cctttcttcctgccttaaaaatctgtaatttgt

SEQ ID NO: 900776 - DNA, 33 bp, Homo sapien
cctttcttcctgcctttaaaatctgtaatttgt

SEQ ID NO: 900777 - DNA, 33 bp, Homo sapien
atgtaaattgctactcgattgctcttcacattt

SEQ ID NO: 900778 - DNA, 33 bp, Homo sapien
atgtaaattgctactctattgctcttcacattt

SEQ ID NO: 900779 - DNA, 33 bp, Homo sapien
agatgctaagagcccacgctaagaatcacagcc

SEQ ID NO: 900780 - DNA, 33 bp, Homo sapien
agatgctaagagcccatgctaagaatcacagcc

SEQ ID NO: 900781 - DNA, 33 bp, Homo sapien
gacctcctataccacaaaaccttgccctcagca

SEQ ID NO: 900782 - DNA, 33 bp, Homo sapien
gacctcctataccacagaaccttgccctcagca

SEQ ID NO: 900783 - DNA, 33 bp, Homo sapien
tggagctaatgccaaagaaaaacgtgatggttg

SEQ ID NO: 900784 - DNA, 33 bp, Homo sapien
tggagctaatgccaaataaaaacgtgatggttg

SEQ ID NO: 900785 - DNA, 33 bp, Homo sapien
ttatgctaaatttaagaagctaggctcaaaaag

SEQ ID NO: 900786 - DNA, 33 bp, Homo sapien
ttatgctaaatttaagcagctaggctcaaaaag

SEQ ID NO: 900787 - DNA, 33 bp, Homo sapien; identical to SEQ ID NO: 900785

SEQ ID NO: 900788 - DNA, 33 bp, Homo sapien; identical to SEQ ID NO: 900786

SEQ ID NO: 900789 - DNA, 33 bp, Homo sapien
tctatttacacatcaccgctttttctttttgca

SEQ ID NO: 900790 - DNA, 33 bp, Homo sapien
tctatttacacatcactgctttttctttttgca

SEQ ID NO: 900791 - DNA, 33 bp, Homo sapien; identical to SEQ ID NO: 900789

SEQ ID NO: 900792 - DNA, 33 bp, Homo sapien; identical to SEQ ID NO: 900790

SEQ ID NO: 900793 - DNA, 33 bp, Homo sapien
agaaaagcacaataagaaagtcaatatctattt

SEQ ID NO: 900794 - DNA, 33 bp, Homo sapien
agaaaagcacaataaggaagtcaatatctattt

SEQ ID NO: 900795 - DNA, 33 bp, Homo sapien
ttaggtaactctgggaacctaaataagcatcaa

SEQ ID NO: 900796 - DNA, 33 bp, Homo sapien
ttaggtaactctgggagcctaaataagcatcaa

SEQ ID NO: 900797 - DNA, 33 bp, Homo sapien
aatatatatgaaaacaccgtatgtgtatggaac

SEQ ID NO: 900798 - DNA, 33 bp, Homo sapien
aatatatatgaaaacatcgtatgtgtatggaac

SEQ ID NO: 900799 - DNA, 33 bp, Homo sapien
atacaaaagaactagacaaattgctagaatatt

SEQ ID NO: 900800 - DNA, 33 bp, Homo sapien
atacaaaagaactagataaattgctagaatatt

SEQ ID NO: 900801 - DNA, 33 bp, Homo sapien
tgaaaacatgtaacacaatagaaataacagttt

SEQ ID NO: 900802 - DNA, 33 bp, Homo sapien
tgaaaacatgtaacacgatagaaataacagttt

SEQ ID NO: 900803 - DNA, 33 bp, Homo sapien
tctagagcacttaaccaacagtactatttatct

SEQ ID NO: 900804 - DNA, 33 bp, Homo sapien
tctagagcacttaaccgacagtactatttatct

SEQ ID NO: 900805 - DNA, 33 bp, Homo sapien
acgtgttaacagtttaaagtgttctatagatat

SEQ ID NO: 900806 - DNA, 33 bp, Homo sapien
acgtgttaacagtttacagtgttctatagatat

SEQ ID NO: 900807 - DNA, 33 bp, Homo sapien
tctgtgccagccctacaaggttagtactgtttc

SEQ ID NO: 900808 - DNA, 33 bp, Homo sapien
tctgtgccagccctacgaggttagtactgtttc

SEQ ID NO: 900809 - DNA, 33 bp, Homo sapien
atgtctcctgagagtcacgctttctgctagctc

SEQ ID NO: 900810 - DNA, 33 bp, Homo sapien
atgtctcctgagagtcccgctttctgctagctc

SEQ ID NO: 900811 - DNA, 33 bp, Homo sapien
caaagatggtcataaggagataataagaaagtt

SEQ ID NO: 900812 - DNA, 33 bp, Homo sapien
caaagatggtcataagtagataataagaaagtt

SEQ ID NO: 900813 - DNA, 33 bp, Homo sapien
tcaagtaccatccttccaagactgtagctttat

SEQ ID NO: 900814 - DNA, 33 bp, Homo sapien
tcaagtaccatccttctaagactgtagctttat

SEQ ID NO: 900815 - DNA, 33 bp, Homo sapien
tttgctgatagtcataagtccttatatcaaaga

SEQ ID NO: 900816 - DNA, 33 bp, Homo sapien
tttgctgatagtcatatgtccttatatcaaaga

SEQ ID NO: 900817 - DNA, 33 bp, Homo sapien
cttcttctagaacagaaatctgaccaagttagt

SEQ ID NO: 900818 - DNA, 33 bp, Homo sapien
cttcttctagaacagagatctgaccaagttagt

SEQ ID NO: 900819 - DNA, 33 bp, Homo sapien
ctctgagaactgaaaccgaatttcgcaccatgg

SEQ ID NO: 900820 - DNA, 33 bp, Homo sapien
ctctgagaactgaaactgaatttcgcaccatgg

SEQ ID NO: 900821 - DNA, 33 bp, Homo sapien
gtggagttctgtcaaacttaaaatacaaagatg

SEQ ID NO: 900822 - DNA, 33 bp, Homo sapien
gtggagttctgtcaaatttaaaatacaaagatg

SEQ ID NO: 900823 - DNA, 33 bp, Homo sapien
gaaaaagtcaagtagacggaatttaatgatgac

SEQ ID NO: 900824 - DNA, 33 bp, Homo sapien
gaaaaagtcaagtagatggaatttaatgatgac

SEQ ID NO: 900825 - DNA, 33 bp, Homo sapien
ctctctatactccaaccctgctgtctcacctgc

SEQ ID NO: 900826 - DNA, 33 bp, Homo sapien
ctctctatactccaactctgctgtctcacctgc

SEQ ID NO: 900827 - DNA, 33 bp, Homo sapien
tgaagccaatttcaaaactgggtaatgaaaagc

SEQ ID NO: 900828 - DNA, 33 bp, Homo sapien
tgaagccaatttcaaatctgggtaatgaaaagc

SEQ ID NO: 900829 - DNA, 33 bp, Homo sapien
taattaaattgctttacgaaaacagtaatattg

SEQ ID NO: 900830 - DNA, 33 bp, Homo sapien
taattaaattgctttatgaaaacagtaatattg

SEQ ID NO: 900831 - DNA, 33 bp, Homo sapien
aaaagaattttgttaacagtcatcaacgattcc

SEQ ID NO: 900832 - DNA, 33 bp, Homo sapien
aaaagaattttgttaatagtcatcaacgattcc

SEQ ID NO: 900833 - DNA, 33 bp, Homo sapien
aagaaataaacaggtaaaagctcataaaaatag

SEQ ID NO: 900834 - DNA, 33 bp, Homo sapien
aagaaataaacaggtacaagctcataaaaatag

SEQ ID NO: 900835 - DNA, 33 bp, Homo sapien
agacttcaaataaaagccttgctggtaagtaaa

SEQ ID NO: 900836 - DNA, 33 bp, Homo sapien
agacttcaaataaaaggcttgctggtaagtaaa

SEQ ID NO: 900837 - DNA, 33 bp, Homo sapien
tcacttcagctattgagataggtattgttagat

SEQ ID NO: 900838 - DNA, 33 bp, Homo sapien
tcacttcagctattgatataggtattgttagat

SEQ ID NO: 900839 - DNA, 33 bp, Homo sapien
agaatttcaacctctacgatttagctaaaggct

SEQ ID NO: 900840 - DNA, 33 bp, Homo sapien
agaatttcaacctctaggatttagctaaaggct

SEQ ID NO: 900841 - DNA, 33 bp, Homo sapien
gacttgtggagtcagaacttcagtcatcaccat

SEQ ID NO: 900842 - DNA, 33 bp, Homo sapien
gacttgtggagtcagagcttcagtcatcaccat

SEQ ID NO: 900843 - DNA, 33 bp, Homo sapien
cccaacgagagaatggacaactcagcctacaag

SEQ ID NO: 900844 - DNA, 33 bp, Homo sapien
cccaacgagagaatgggcaactcagcctacaag

SEQ ID NO: 900845 - DNA, 33 bp, Homo sapien
ttctggtgttagggcacagaattcatactccgt

SEQ ID NO: 900846 - DNA, 33 bp, Homo sapien
ttctggtgttagggcatagaattcatactccgt

SEQ ID NO: 900847 - DNA, 33 bp, Homo sapien
tctgcagcagtttatggatgatcatgtaatttt

SEQ ID NO: 900848 - DNA, 33 bp, Homo sapien
tctgcagcagtttatgtatgatcatgtaatttt

SEQ ID NO: 900849 - DNA, 33 bp, Homo sapien
ctcataagtcgttgcacaagacaatgagagata

SEQ ID NO: 900850 - DNA, 33 bp, Homo sapien
ctcataagtcgttgcataagacaatgagagata

SEQ ID NO: 900851 - DNA, 33 bp, Homo sapien
ctggagggacctagaccatagcagagaagaagt

SEQ ID NO: 900852 - DNA, 33 bp, Homo sapien
ctggagggacctagactatagcagagaagaagt

SEQ ID NO: 900853 - DNA, 33 bp, Homo sapien
agaggctattttctacagactagtttacattag

SEQ ID NO: 900854 - DNA, 33 bp, Homo sapien
agaggctattttctacggactagtttacattag

SEQ ID NO: 900855 - DNA, 33 bp, Homo sapien
caactcaaaattaaaggcattctgattgacaga

SEQ ID NO: 900856 - DNA, 33 bp, Homo sapien
caactcaaaattaaagtcattctgattgacaga

SEQ ID NO: 900857 - DNA, 33 bp, Homo sapien
tacctcttctgttccacattatagtggattttc

SEQ ID NO: 900858 - DNA, 33 bp, Homo sapien
tacctcttctgttccatattatagtggattttc

SEQ ID NO: 900859 - DNA, 33 bp, Homo sapien
gccagttgatcctaaaagtaacatggaaaaaag

SEQ ID NO: 900860 - DNA, 33 bp, Homo sapien
gccagttgatcctaaacgtaacatggaaaaaag

SEQ ID NO: 900861 - DNA, 33 bp, Homo sapien
ggaaattttccctaaacagtgatcaaggcttaa

SEQ ID NO: 900862 - DNA, 33 bp, Homo sapien
ggaaattttccctaaagagtgatcaaggcttaa

SEQ ID NO: 900863 - DNA, 33 bp, Homo sapien
ttcacaatggtaggtaacttagatcttgcctag

SEQ ID NO: 900864 - DNA, 33 bp, Homo sapien
ttcacaatggtaggtatcttagatcttgcctag

SEQ ID NO: 900865 - DNA, 33 bp, Homo sapien
tgagtgagtcgcctagaaggtgacaatgtctgg

SEQ ID NO: 900866 - DNA, 33 bp, Homo sapien
tgagtgagtcgcctagcaggtgacaatgtctgg

SEQ ID NO: 900867 - DNA, 33 bp, Homo sapien
gcgtgggacttttagacaagtggctagaagtgc

SEQ ID NO: 900868 - DNA, 33 bp, Homo sapien
gcgtgggacttttagataagtggctagaagtgc

SEQ ID NO: 900869 - DNA, 33 bp, Homo sapien
gtgctgcaaccccagaaaggtggaaatcatcgc

SEQ ID NO: 900870 - DNA, 33 bp, Homo sapien
gtgctgcaaccccagagaggtggaaatcatcgc

SEQ ID NO: 900871 - DNA, 33 bp, Homo sapien
gggcacagggtgaaatgacatggaatgtgtact

SEQ ID NO: 900872 - DNA, 33 bp, Homo sapien
gggcacagggtgaaattacatggaatgtgtact

SEQ ID NO: 900873 - DNA, 33 bp, Homo sapien
gcaaatatgattgcaaaggaaatttttgctacc

SEQ ID NO: 900874 - DNA, 33 bp, Homo sapien
gcaaatatgattgcaagggaaatttttgctacc

SEQ ID NO: 900875 - DNA, 33 bp, Homo sapien
ttccttcttgcgtgaaacctaaatcaccctaat

SEQ ID NO: 900876 - DNA, 33 bp, Homo sapien
ttccttcttgcgtgaaccctaaatcaccctaat

SEQ ID NO: 900877 - DNA, 33 bp, Homo sapien
cctattttcttcctgacgaatgtgtcctcttca

SEQ ID NO: 900878 - DNA, 33 bp, Homo sapien
cctattttcttcctgatgaatgtgtcctcttca

SEQ ID NO: 900879 - DNA, 33 bp, Homo sapien
ctgcaggccacctgtgcagtcatgtgctgggtt

SEQ ID NO: 900880 - DNA, 33 bp, Homo sapien
ctgcaggccacctgtggagtcatgtgctgggtt

SEQ ID NO: 900881 - DNA, 33 bp, Homo sapien
gaatgagtcaatcttacaattttatggccactc

SEQ ID NO: 900882 - DNA, 33 bp, Homo sapien
gaatgagtcaatcttataattttatggccactc

SEQ ID NO: 900883 - DNA, 33 bp, Homo sapien
agttccacggctaaaaagaattctgaaaatcac

SEQ ID NO: 900884 - DNA, 33 bp, Homo sapien
agttccacggctaaaatgaattctgaaaatcac

SEQ ID NO: 900885 - DNA, 33 bp, Homo sapien
aaaagaatttgaaaaccactgattcagtccaat

SEQ ID NO: 900886 - DNA, 33 bp, Homo sapien
aaaagaatttgaaaactactgattcagtccaat

SEQ ID NO: 900887 - DNA, 33 bp, Homo sapien
agtgcagatgtcagaacaaaatctccaagaggc

SEQ ID NO: 900888 - DNA, 33 bp, Homo sapien
agtgcagatgtcagaagaaaatctccaagaggc

SEQ ID NO: 900889 - DNA, 33 bp, Homo sapien
tcattgacctgtcactgaaaaaatcatgggtag

SEQ ID NO: 900890 - DNA, 33 bp, Homo sapien
tcattgacctgtcacttaaaaaatcatgggtag

SEQ ID NO: 900891 - DNA, 33 bp, Homo sapien
actcagatataggaagccacaggcagtaccaac

SEQ ID NO: 900892 - DNA, 33 bp, Homo sapien
actcagatataggaagtcacaggcagtaccaac

SEQ ID NO: 900893 - DNA, 33 bp, Homo sapien
tcttttgctgtcggcaaatggggtaataacctc

SEQ ID NO: 900894 - DNA, 33 bp, Homo sapien
tcttttgctgtcggcatatggggtaataacctc

SEQ ID NO: 900895 - DNA, 33 bp, Homo sapien
ataatctctctggatcccagtggtttaatctgc

SEQ ID NO: 900896 - DNA, 33 bp, Homo sapien
ataatctctctggatctcagtggtttaatctgc

SEQ ID NO: 900897 - DNA, 33 bp, Homo sapien
aatataatcacaaaaaatcatgtatcagtatct

SEQ ID NO: 900898 - DNA, 33 bp, Homo sapien
aatataatcacaaaaagtcatgtatcagtatct

SEQ ID NO: 900899 - DNA, 33 bp, Homo sapien
ttcaatttgtccaacaggaattttgttattttc

SEQ ID NO: 900900 - DNA, 33 bp, Homo sapien
ttcaatttgtccaacatgaattttgttattttc

SEQ ID NO: 900901 - DNA, 33 bp, Homo sapien
acccattgttactgcacgcggagacatactcac

SEQ ID NO: 900902 - DNA, 33 bp, Homo sapien
acccattgttactgcatgcggagacatactcac

SEQ ID NO: 900903 - DNA, 33 bp, Homo sapien
atttcagaggcctggcaataaagcactggagaa

SEQ ID NO: 900904 - DNA, 33 bp, Homo sapien
atttcagaggcctggccataaagcactggagaa

SEQ ID NO: 900905 - DNA, 33 bp, Homo sapien
catgaaatgcaaataactaagaaaacatgtagt

SEQ ID NO: 900906 - DNA, 33 bp, Homo sapien
catgaaatgcaaataattaagaaaacatgtagt

SEQ ID NO: 900907 - DNA, 33 bp, Homo sapien
gaactaccagacagggaaaattatggtaattct

SEQ ID NO: 900908 - DNA, 33 bp, Homo sapien
gaactaccagacagggcaaattatggtaattct

SEQ ID NO: 900909 - DNA, 33 bp, Homo sapien
ctagaccagtctttacaaaatgcgagggtatct

SEQ ID NO: 900910 - DNA, 33 bp, Homo sapien
ctagaccagtctttacgaaatgcgagggtatct

SEQ ID NO: 900911 - DNA, 33 bp, Homo sapien
caccatgcccagccaaaagagttctaaacctgg

SEQ ID NO: 900912 - DNA, 33 bp, Homo sapien
caccatgcccagccaagagagttctaaacctgg

SEQ ID NO: 900913 - DNA, 33 bp, Homo sapien
aatgatgaatgatcctaaagtcttgatgcaaac

SEQ ID NO: 900914 - DNA, 33 bp, Homo sapien
aatgatgaatgatcctcaagtcttgatgcaaac

SEQ ID NO: 900915 - DNA, 33 bp, Homo sapien
gtttatttctctctcacgtaaacatagcagtcc

SEQ ID NO: 900916 - DNA, 33 bp, Homo sapien
gtttatttctctctcatgtaaacatagcagtcc

SEQ ID NO: 900917 - DNA, 33 bp, Homo sapien
catacttaaagtgatacagaaagtttgaaaata

SEQ ID NO: 900918 - DNA, 33 bp, Homo sapien
catacttaaagtgatagagaaagtttgaaaata

SEQ ID NO: 900919 - DNA, 33 bp, Homo sapien
aatgaacatcttggaaagagacacagagaggcc

SEQ ID NO: 900920 - DNA, 33 bp, Homo sapien
aatgaacatcttggaaggagacacagagaggcc

SEQ ID NO: 900921 - DNA, 33 bp, Homo sapien
tccctataacacattgccaagtagtggaggcaa

SEQ ID NO: 900922 - DNA, 33 bp, Homo sapien
tccctataacacattgtcaagtagtggaggcaa

SEQ ID NO: 900923 - DNA, 33 bp, Homo sapien
ttcctagtctggaccactaaagtgataaattat

SEQ ID NO: 900924 - DNA, 33 bp, Homo sapien
ttcctagtctggaccagtaaagtgataaattat

SEQ ID NO: 900925 - DNA, 33 bp, Homo sapien
cataaaagattacaccccttatccagaactgtt

SEQ ID NO: 900926 - DNA, 33 bp, Homo sapien
cataaaagattacaccgcttatccagaactgtt

SEQ ID NO: 900927 - DNA, 33 bp, Homo sapien
cacaccacgccttcagaccagctttatcttcat

SEQ ID NO: 900928 - DNA, 33 bp, Homo sapien
cacaccacgccttcagcccagctttatcttcat

SEQ ID NO: 900929 - DNA, 33 bp, Homo sapien
taaacagttttgtaaacagcaataggttgggag

SEQ ID NO: 900930 - DNA, 33 bp, Homo sapien
taaacagttttgtaaagagcaataggttgggag

SEQ ID NO: 900931 - DNA, 33 bp, Homo sapien
gatgggcccaaatctccctggttgcttcactca

SEQ ID NO: 900932 - DNA, 33 bp, Homo sapien
gatgggcccaaatctctctggttgcttcactca

SEQ ID NO: 900933 - DNA, 33 bp, Homo sapien
cctgaacggttttcccagaatccaagcctgaat

SEQ ID NO: 900934 - DNA, 33 bp, Homo sapien
cctgaacggttttcccggaatccaagcctgaat

SEQ ID NO: 900935 - DNA, 33 bp, Homo sapien
aaggagataatctgacactcattttaaaaaatt

SEQ ID NO: 900936 - DNA, 33 bp, Homo sapien
aaggagataatctgacgctcattttaaaaaatt

SEQ ID NO: 900937 - DNA, 33 bp, Homo sapien
gatagtagaaaaaaataaatgatccaagaatgg

SEQ ID NO: 900938 - DNA, 33 bp, Homo sapien
gatagtagaaaaaaatgaatgatccaagaatgg

SEQ ID NO: 900939 - DNA, 33 bp, Homo sapien
gaggtggctgcattaaacgggcccttgaaggct

SEQ ID NO: 900940 - DNA, 33 bp, Homo sapien
gaggtggctgcattaagcgggcccttgaaggct

SEQ ID NO: 900941 - DNA, 33 bp, Homo sapien
cttgtgttttcagcacccacttaatatcaaagt

SEQ ID NO: 900942 - DNA, 33 bp, Homo sapien
cttgtgttttcagcactcacttaatatcaaagt

SEQ ID NO: 900943 - DNA, 33 bp, Homo sapien
ttagaaagtgatggaacggaacccatggtcatg

SEQ ID NO: 900944 - DNA, 33 bp, Homo sapien
ttagaaagtgatggaatggaacccatggtcatg

SEQ ID NO: 900945 - DNA, 33 bp, Homo sapien
aacgcttctcttgacaaagtattccaactgtgt

SEQ ID NO: 900946 - DNA, 33 bp, Homo sapien
aacgcttctcttgacagagtattccaactgtgt

SEQ ID NO: 900947 - DNA, 33 bp, Homo sapien
tttgaatagtttgaaaccctacttgcttcttat

SEQ ID NO: 900948 - DNA, 33 bp, Homo sapien
tttgaatagtttgaaatcctacttgcttcttat

SEQ ID NO: 900949 - DNA, 33 bp, Homo sapien
ttcaactttgtctaacccaggccgcactgattt

SEQ ID NO: 900950 - DNA, 33 bp, Homo sapien
ttcaactttgtctaactcaggccgcactgattt

SEQ ID NO: 900951 - DNA, 33 bp, Homo sapien
gactcaacagtttgaacccactctatagcttag

SEQ ID NO: 900952 - DNA, 33 bp, Homo sapien
gactcaacagtttgaatccactctatagcttag

SEQ ID NO: 900953 - DNA, 33 bp, Homo sapien
aaggaatccttcctgacgagcttgggatcctat

SEQ ID NO: 900954 - DNA, 33 bp, Homo sapien
aaggaatccttcctgatgagcttgggatcctat

SEQ ID NO: 900955 - DNA, 33 bp, Homo sapien
cttctgttgtaactgaacatcttcccaagctgc

SEQ ID NO: 900956 - DNA, 33 bp, Homo sapien
cttctgttgtaactgagcatcttcccaagctgc

SEQ ID NO: 900957 - DNA, 33 bp, Homo sapien
actaaggcatagtccaacttgggagacagatac

SEQ ID NO: 900958 - DNA, 33 bp, Homo sapien
actaaggcatagtccaccttgggagacagatac

SEQ ID NO: 900959 - DNA, 33 bp, Homo sapien
ttaatggaacttggcaccccgaagtacagggca

SEQ ID NO: 900960 - DNA, 33 bp, Homo sapien
ttaatggaacttggcatcccgaagtacagggca

SEQ ID NO: 900961 - DNA, 33 bp, Homo sapien
acagaatttaatagcacgagatttgaaattttc

SEQ ID NO: 900962 - DNA, 33 bp, Homo sapien
acagaatttaatagcatgagatttgaaattttc

SEQ ID NO: 900963 - DNA, 33 bp, Homo sapien
ccagcactcagaaagccatgcacttctctgtgg

SEQ ID NO: 900964 - DNA, 33 bp, Homo sapien
ccagcactcagaaagctatgcacttctctgtgg

SEQ ID NO: 900965 - DNA, 33 bp, Homo sapien
tacaaacatacagtgcagagtgatatgctcacc

SEQ ID NO: 900966 - DNA, 33 bp, Homo sapien
tacaaacatacagtgcggagtgatatgctcacc

SEQ ID NO: 900967 - DNA, 33 bp, Homo sapien
aggggatttttaaagacaaggctgaatgacttc

SEQ ID NO: 900968 - DNA, 33 bp, Homo sapien
aggggatttttaaagataaggctgaatgacttc

SEQ ID NO: 900969 - DNA, 33 bp, Homo sapien
ctaggttttaaagctccagaaaagctggcaatt

SEQ ID NO: 900970 - DNA, 33 bp, Homo sapien
ctaggttttaaagctctagaaaagctggcaatt

SEQ ID NO: 900971 - DNA, 33 bp, Homo sapien
cccgctggatgcaagagggtaattgggcccttc

SEQ ID NO: 900972 - DNA, 33 bp, Homo sapien
cccgctggatgcaagatggtaattgggcccttc

SEQ ID NO: 900973 - DNA, 33 bp, Homo sapien
tgccagataattgctacccctactccacagagc

SEQ ID NO: 900974 - DNA, 33 bp, Homo sapien
tgccagataattgctagccctactccacagagc

SEQ ID NO: 900975 - DNA, 33 bp, Homo sapien
agcataaacttcttaacaaagcgtcaatgtttt

SEQ ID NO: 900976 - DNA, 33 bp, Homo sapien
agcataaacttcttaataaagcgtcaatgtttt

SEQ ID NO: 900977 - DNA, 33 bp, Homo sapien
aggcatttgggtcaagaagcgtggaaggcagac

SEQ ID NO: 900978 - DNA, 33 bp, Homo sapien
aggcatttgggtcaagtagcgtggaaggcagac

SEQ ID NO: 900979 - DNA, 33 bp, Homo sapien
ctgactctggaacaaggagcacagacgacgagc

SEQ ID NO: 900980 - DNA, 33 bp, Homo sapien
ctgactctggaacaagtagcacagacgacgagc

SEQ ID NO: 900981 - DNA, 33 bp, Homo sapien
cttggagatgcatttcaaaaacaaccttggaag

SEQ ID NO: 900982 - DNA, 33 bp, Homo sapien
cttggagatgcatttcgaaaacaaccttggaag

SEQ ID NO: 900983 - DNA, 33 bp, Homo sapien
cttgggcctttttcagaacatatatgagctata

SEQ ID NO: 900984 - DNA, 33 bp, Homo sapien
cttgggcctttttcaggacatatatgagctata

SEQ ID NO: 900985 - DNA, 33 bp, Homo sapien
cagcatctgatttaagcagggcccaaagattaa

SEQ ID NO: 900986 - DNA, 33 bp, Homo sapien
cagcatctgatttaagtagggcccaaagattaa

SEQ ID NO: 900987 - DNA, 33 bp, Homo sapien
aataaatagcaatagagagcaaatatacctagt

SEQ ID NO: 900988 - DNA, 33 bp, Homo sapien
aataaatagcaatagatagcaaatatacctagt

SEQ ID NO: 900989 - DNA, 33 bp, Homo sapien
ttgtccgtgtttgatacaaatcaccagggtccc

SEQ ID NO: 900990 - DNA, 33 bp, Homo sapien
ttgtccgtgtttgatagaaatcaccagggtccc

SEQ ID NO: 900991 - DNA, 33 bp, Homo sapien
ggccagataagcactgaattgaaggtaatggaa

SEQ ID NO: 900992 - DNA, 33 bp, Homo sapien
ggccagataagcactgcattgaaggtaatggaa

SEQ ID NO: 900993 - DNA, 33 bp, Homo sapien
taggctcggatagcaaaggaacctctttactgc

SEQ ID NO: 900994 - DNA, 33 bp, Homo sapien
taggctcggatagcaacggaacctctttactgc

SEQ ID NO: 900995 - DNA, 33 bp, Homo sapien
gtacatagaggacaccaccattagttggcctaa

SEQ ID NO: 900996 - DNA, 33 bp, Homo sapien
gtacatagaggacaccgccattagttggcctaa

SEQ ID NO: 900997 - DNA, 33 bp, Homo sapien
agtctcctcttcattaccaatttaggtatgtgt

SEQ ID NO: 900998 - DNA, 33 bp, Homo sapien
agtctcctcttcattatcaatttaggtatgtgt

SEQ ID NO: 900999 - DNA, 33 bp, Homo sapien
caatggcaagacaaatcacgcaggctctgcagc

SEQ ID NO: 901000 - DNA, 33 bp, Homo sapien
caatggcaagacaaatgacgcaggctctgcagc

SEQ ID NO: 901001 - DNA, 33 bp, Homo sapien
tttctaagttcagatacgttatgcagttgcctg

SEQ ID NO: 901002 - DNA, 33 bp, Homo sapien
tttctaagttcagatatgttatgcagttgcctg

SEQ ID NO: 901003 - DNA, 33 bp, Homo sapien
aaatcatgagaaaagacggccagggtgttgaga

SEQ ID NO: 901004 - DNA, 33 bp, Homo sapien
aaatcatgagaaaagatggccagggtgttgaga

SEQ ID NO: 901005 - DNA, 33 bp, Homo sapien
ctttaaaaaatccacactggacttagcaggaga

SEQ ID NO: 901006 - DNA, 33 bp, Homo sapien
ctttaaaaaatccacattggacttagcaggaga

SEQ ID NO: 901007 - DNA, 33 bp, Homo sapien
agcctcagggaaactacgcctccagaaacaaat

SEQ ID NO: 901008 - DNA, 33 bp, Homo sapien
agcctcagggaaactatgcctccagaaacaaat

SEQ ID NO: 901009 - DNA, 33 bp, Homo sapien
agtggcagtggctcagaactatggtaatttgtt

SEQ ID NO: 901010 - DNA, 33 bp, Homo sapien
agtggcagtggctcaggactatggtaatttgtt

SEQ ID NO: 901011 - DNA, 33 bp, Homo sapien
gaggggctccgactacactcaagccccttttca

SEQ ID NO: 901012 - DNA, 33 bp, Homo sapien
gaggggctccgactacgctcaagccccttttca

SEQ ID NO: 901013 - DNA, 33 bp, Homo sapien
tgagctgtaggaagcacggattgtacaaagagg

SEQ ID NO: 901014 - DNA, 33 bp, Homo sapien
tgagctgtaggaagcatggattgtacaaagagg

SEQ ID NO: 901015 - DNA, 33 bp, Homo sapien
attcccacaacctgccacttaaaacaacagata

SEQ ID NO: 901016 - DNA, 33 bp, Homo sapien
attcccacaacctgccgcttaaaacaacagata

SEQ ID NO: 901017 - DNA, 33 bp, Homo sapien
ttacggtaaactacgtaaaatccaatcctgaca

SEQ ID NO: 901018 - DNA, 33 bp, Homo sapien
ttacggtaaactacgtgaaatccaatcctgaca

SEQ ID NO: 901019 - DNA, 33 bp, Homo sapien
agggcatatcagcatacccgaaggcagtgctgt

SEQ ID NO: 901020 - DNA, 33 bp, Homo sapien
agggcatatcagcatatccgaaggcagtgctgt

SEQ ID NO: 901021 - DNA, 33 bp, Homo sapien
gagggagatgtcaaacagtagaatgaggggaga

SEQ ID NO: 901022 - DNA, 33 bp, Homo sapien
gagggagatgtcaaacggtagaatgaggggaga

SEQ ID NO: 901023 - DNA, 33 bp, Homo sapien
ccccaagaataacacaatggaaattagatagcc

SEQ ID NO: 901024 - DNA, 33 bp, Homo sapien
ccccaagaataacacagtggaaattagatagcc

SEQ ID NO: 901025 - DNA, 33 bp, Homo sapien
gccagatgatgaaggaaaaaggatcaatgtcac

SEQ ID NO: 901026 - DNA, 33 bp, Homo sapien
gccagatgatgaaggagaaaggatcaatgtcac

SEQ ID NO: 901027 - DNA, 33 bp, Homo sapien
gcactggccctggaggaaggggttgctgtagac

SEQ ID NO: 901028 - DNA, 33 bp, Homo sapien
gcactggccctggaggtaggggttgctgtagac

SEQ ID NO: 901029 - DNA, 33 bp, Homo sapien
ctcctcttcttgaggcccttcctgccacatgtc

SEQ ID NO: 901030 - DNA, 33 bp, Homo sapien
ctcctcttcttgaggctcttcctgccacatgtc

SEQ ID NO: 901031 - DNA, 33 bp, Homo sapien
tcttgcaaaccactccactggacatgagatctc

SEQ ID NO: 901032 - DNA, 33 bp, Homo sapien
tcttgcaaaccactccgctggacatgagatctc

SEQ ID NO: 901033 - DNA, 33 bp, Homo sapien
tagaaacataacatacaacaaggttacgtattg

SEQ ID NO: 901034 - DNA, 33 bp, Homo sapien
tagaaacataacataccacaaggttacgtattg

SEQ ID NO: 901035 - DNA, 33 bp, Homo sapien
ctggctgttttctaaactattcttaggctgaat

SEQ ID NO: 901036 - DNA, 33 bp, Homo sapien
ctggctgttttctaaagtattcttaggctgaat

SEQ ID NO: 901037 - DNA, 33 bp, Homo sapien
atgagcaaattcttaccaatgaacctgctattc

SEQ ID NO: 901038 - DNA, 33 bp, Homo sapien
atgagcaaattcttactaatgaacctgctattc

SEQ ID NO: 901039 - DNA, 33 bp, Homo sapien
tctgctgatcaatttaagatatcccttttttgc

SEQ ID NO: 901040 - DNA, 33 bp, Homo sapien
tctgctgatcaatttaggatatcccttttttgc

SEQ ID NO: 901041 - DNA, 33 bp, Homo sapien
atgtattgctgtattacgaattactccaaaact

SEQ ID NO: 901042 - DNA, 33 bp, Homo sapien
atgtattgctgtattatgaattactccaaaact

SEQ ID NO: 901043 - DNA, 33 bp, Homo sapien
tggatgggtgattctaacttaggatttctcatg

SEQ ID NO: 901044 - DNA, 33 bp, Homo sapien
tggatgggtgattctagcttaggatttctcatg

SEQ ID NO: 901045 - DNA, 33 bp, Homo sapien
agtgattctctgtgcaatcattaaactctgcca

SEQ ID NO: 901046 - DNA, 33 bp, Homo sapien
agtgattctctgtgcattcattaaactctgcca

SEQ ID NO: 901047 - DNA, 33 bp, Homo sapien
ctttgtttcatttagcaaaaaaaagtatcgcta

SEQ ID NO: 901048 - DNA, 33 bp, Homo sapien
ctttgtttcatttagcgaaaaaaagtatcgcta

SEQ ID NO: 901049 - DNA, 33 bp, Homo sapien
actgaatgaaatgaaaagcttgttttgagtctc

SEQ ID NO: 901050 - DNA, 33 bp, Homo sapien
actgaatgaaatgaaatgcttgttttgagtctc

SEQ ID NO: 901051 - DNA, 33 bp, Homo sapien
ttacattttgctataaaccactaaaatgtctat

SEQ ID NO: 901052 - DNA, 33 bp, Homo sapien
ttacattttgctataagccactaaaatgtctat

SEQ ID NO: 901053 - DNA, 33 bp, Homo sapien
ccaaatgagaagcctgcacatcagcctggacct

SEQ ID NO: 901054 - DNA, 33 bp, Homo sapien
ccaaatgagaagcctgtacatcagcctggacct

SEQ ID NO: 901055 - DNA, 33 bp, Homo sapien
gtcattttgtctttcacaattgcctagaaacca

SEQ ID NO: 901056 - DNA, 33 bp, Homo sapien
gtcattttgtctttcataattgcctagaaacca

SEQ ID NO: 901057 - DNA, 33 bp, Homo sapien
tgaacaaccatgtagacaaagccagtgatccaa

SEQ ID NO: 901058 - DNA, 33 bp, Homo sapien
tgaacaaccatgtagagaaagccagtgatccaa

SEQ ID NO: 901059 - DNA, 33 bp, Homo sapien
cgttattgcagcgaagaaaatgcactatgatac

SEQ ID NO: 901060 - DNA, 33 bp, Homo sapien
cgttattgcagcgaaggaaatgcactatgatac

SEQ ID NO: 901061 - DNA, 33 bp, Homo sapien
ctgatgcagcagttgaaatcctggaaatgtatc

SEQ ID NO: 901062 - DNA, 33 bp, Homo sapien
ctgatgcagcagttgacatcctggaaatgtatc

SEQ ID NO: 901063 - DNA, 33 bp, Homo sapien
acacagctgcatgggaacctaaaaaaggctgga

SEQ ID NO: 901064 - DNA, 33 bp, Homo sapien
acacagctgcatgggagcctaaaaaaggctgga

SEQ ID NO: 901065 - DNA, 33 bp, Homo sapien
ggaaagctcagggaaacaagagtaggtcctgaa

SEQ ID NO: 901066 - DNA, 33 bp, Homo sapien
ggaaagctcagggaaataagagtaggtcctgaa

SEQ ID NO: 901067 - DNA, 33 bp, Homo sapien
tattaaaataagggaaccactgggagaatttct

SEQ ID NO: 901068 - DNA, 33 bp, Homo sapien
tattaaaataagggaatcactgggagaatttct

SEQ ID NO: 901069 - DNA, 33 bp, Homo sapien
cccacatatactgtcaactggaccaaagtgaaa

SEQ ID NO: 901070 - DNA, 33 bp, Homo sapien
cccacatatactgtcagctggaccaaagtgaaa

SEQ ID NO: 901071 - DNA, 33 bp, Homo sapien
gctgccacacggcctcgacttaactctaaaggg

SEQ ID NO: 901072 - DNA, 33 bp, Homo sapien
gctgccacacggcctctacttaactctaaaggg

SEQ ID NO: 901073 - DNA, 33 bp, Homo sapien
gttagctctgaactccccctgagggctgacaga

SEQ ID NO: 901074 - DNA, 33 bp, Homo sapien
gttagctctgaactcctcctgagggctgacaga

SEQ ID NO: 901075 - DNA, 33 bp, Homo sapien
cttctctctgaacacaactttgtaaaaggactg

SEQ ID NO: 901076 - DNA, 33 bp, Homo sapien
cttctctctgaacacagctttgtaaaaggactg

SEQ ID NO: 901077 - DNA, 33 bp, Homo sapien
tcctatctgtgtttccaagttaaaattctcaaa

SEQ ID NO: 901078 - DNA, 33 bp, Homo sapien
tcctatctgtgtttcccagttaaaattctcaaa

SEQ ID NO: 901079 - DNA, 33 bp, Homo sapien
tgtaattgtgttttaacggcttattccaattta

SEQ ID NO: 901080 - DNA, 33 bp, Homo sapien
tgtaattgtgttttaatggcttattccaattta

SEQ ID NO: 901081 - DNA, 33 bp, Homo sapien
agctcaaatgttatcacctctgaagcccttccc

SEQ ID NO: 901082 - DNA, 33 bp, Homo sapien
agctcaaatgttatcatctctgaagcccttccc

SEQ ID NO: 901083 - DNA, 33 bp, Homo sapien
ggcaaagctggtttacactggcttacctggctc

SEQ ID NO: 901084 - DNA, 33 bp, Homo sapien
ggcaaagctggtttacgctggcttacctggctc

SEQ ID NO: 901085 - DNA, 33 bp, Homo sapien
gtagattgagttcagggccgtttcaagtttctc

SEQ ID NO: 901086 - DNA, 33 bp, Homo sapien
gtagattgagttcaggtccgtttcaagtttctc

SEQ ID NO: 901087 - DNA, 33 bp, Homo sapien
caaccctggtccaaacaatgttctccaagatcc

SEQ ID NO: 901088 - DNA, 33 bp, Homo sapien
caaccctggtccaaaccatgttctccaagatcc

SEQ ID NO: 901089 - DNA, 33 bp, Homo sapien
gacggtagtagtctgaccaattgtaatgcccct

SEQ ID NO: 901090 - DNA, 33 bp, Homo sapien
gacggtagtagtctgatcaattgtaatgcccct

SEQ ID NO: 901091 - DNA, 33 bp, Homo sapien
ttgtctcagtcactatcataaaggacacaaagg

SEQ ID NO: 901092 - DNA, 33 bp, Homo sapien
ttgtctcagtcactattataaaggacacaaagg

SEQ ID NO: 901093 - DNA, 33 bp, Homo sapien
attagttcaaaatgtaagggctatgaagagaat

SEQ ID NO: 901094 - DNA, 33 bp, Homo sapien
attagttcaaaatgtaggggctatgaagagaat

SEQ ID NO: 901095 - DNA, 33 bp, Homo sapien
ggaggcaatgatgagacagaagagataaaacac

SEQ ID NO: 901096 - DNA, 33 bp, Homo sapien
ggaggcaatgatgagagagaagagataaaacac

SEQ ID NO: 901097 - DNA, 33 bp, Homo sapien
ggtaaaacctctctgaagagtccacaactctat

SEQ ID NO: 901098 - DNA, 33 bp, Homo sapien
ggtaaaacctctctgaggagtccacaactctat

SEQ ID NO: 901099 - DNA, 33 bp, Homo sapien
tccccaatgcccctaacaggaaatgacaccatc

SEQ ID NO: 901100 - DNA, 33 bp, Homo sapien
tccccaatgcccctaataggaaatgacaccatc

SEQ ID NO: 901101 - DNA, 33 bp, Homo sapien
cttcacaaaggtaaccacagggaaagtgttgaa

SEQ ID NO: 901102 - DNA, 33 bp, Homo sapien
cttcacaaaggtaaccgcagggaaagtgttgaa

SEQ ID NO: 901103 - DNA, 33 bp, Homo sapien
cagatggtttttgtaaaattggcaaaagggatt

SEQ ID NO: 901104 - DNA, 33 bp, Homo sapien
cagatggtttttgtaacattggcaaaagggatt

SEQ ID NO: 901105 - DNA, 33 bp, Homo sapien
tgaattactagataagaagccactttttgtaac

SEQ ID NO: 901106 - DNA, 33 bp, Homo sapien
tgaattactagataaggagccactttttgtaac

SEQ ID NO: 901107 - DNA, 33 bp, Homo sapien
ctggatatttaaaaaaattataacaagctgggc

SEQ ID NO: 901108 - DNA, 33 bp, Homo sapien
ctggatatttaaaaaatttataacaagctgggc

SEQ ID NO: 901109 - DNA, 33 bp, Homo sapien
attggtttgatggagaaatcttcagttattatt

SEQ ID NO: 901110 - DNA, 33 bp, Homo sapien
attggtttgatggagacatcttcagttattatt

SEQ ID NO: 901111 - DNA, 33 bp, Homo sapien
taaaatctattgaggaacgataatggaacccct

SEQ ID NO: 901112 - DNA, 33 bp, Homo sapien
taaaatctattgaggagcgataatggaacccct

SEQ ID NO: 901113 - DNA, 33 bp, Homo sapien; identical to SEQ ID NO: 901111

SEQ ID NO: 901114 - DNA, 33 bp, Homo sapien; identical to SEQ ID NO: 901112

SEQ ID NO: 901115 - DNA, 33 bp, Homo sapien
caataacaagtatggaaaagaatgtggaaaaac

SEQ ID NO: 901116 - DNA, 33 bp, Homo sapien
caataacaagtatggacaagaatgtggaaaaac

SEQ ID NO: 901117 - DNA, 33 bp, Homo sapien
tgcagtttaaacatcaagctacaaaaatccaag

SEQ ID NO: 901118 - DNA, 33 bp, Homo sapien
tgcagtttaaacatcaggctacaaaaatccaag

SEQ ID NO: 901119 - DNA, 33 bp, Homo sapien
agtatgtctgtttctggaatggtatctttctct

SEQ ID NO: 901120 - DNA, 33 bp, Homo sapien
agtatgtctgtttctgtaatggtatctttctct

SEQ ID NO: 901121 - DNA, 33 bp, Homo sapien
gtcagtggaatctgcacggtcttggcgaggtct

SEQ ID NO: 901122 - DNA, 33 bp, Homo sapien
gtcagtggaatctgcatggtcttggcgaggtct

SEQ ID NO: 901123 - DNA, 33 bp, Homo sapien
ctagttttgagttacacgaatcagaaaaagtag

SEQ ID NO: 901124 - DNA, 33 bp, Homo sapien
ctagttttgagttacatgaatcagaaaaagtag

SEQ ID NO: 901125 - DNA, 33 bp, Homo sapien; identical to SEQ ID NO: 901123

SEQ ID NO: 901126 - DNA, 33 bp, Homo sapien; identical to SEQ ID NO: 901124

SEQ ID NO: 901127 - DNA, 33 bp, Homo sapien
atccctgtctccttacactgagacctcaaatcc

SEQ ID NO: 901128 - DNA, 33 bp, Homo sapien
atccctgtctccttacgctgagacctcaaatcc

SEQ ID NO: 901129 - DNA, 33 bp, Homo sapien
gactgaggaagaataactggaaaattctgcagt

SEQ ID NO: 901130 - DNA, 33 bp, Homo sapien
gactgaggaagaataattggaaaattctgcagt

SEQ ID NO: 901131 - DNA, 33 bp, Homo sapien; identical to SEQ ID NO: 901129

SEQ ID NO: 901132 - DNA, 33 bp, Homo sapien; identical to SEQ ID NO: 901130

SEQ ID NO: 901133 - DNA, 33 bp, Homo sapien
gattgaagctgagatacgataaacactttttgg

SEQ ID NO: 901134 - DNA, 33 bp, Homo sapien
gattgaagctgagatatgataaacactttttgg

SEQ ID NO: 901135 - DNA, 33 bp, Homo sapien; identical to SEQ ID NO: 901133

SEQ ID NO: 901136 - DNA, 33 bp, Homo sapien; identical to SEQ ID NO: 901134

SEQ ID NO: 901137 - DNA, 33 bp, Homo sapien
acatctcttttttcgaacccaacatgaaaccac

SEQ ID NO: 901138 - DNA, 33 bp, Homo sapien
acatctcttttttcgaccccaacatgaaaccac

SEQ ID NO: 901139 - DNA, 33 bp, Homo sapien
atgatgaacactgtaaacctactacctggctta

SEQ ID NO: 901140 - DNA, 33 bp, Homo sapien
atgatgaacactgtaagcctactacctggctta

SEQ ID NO: 901141 - DNA, 33 bp, Homo sapien
aacaataactattaaccatccacatactgccta

SEQ ID NO: 901142 - DNA, 33 bp, Homo sapien
aacaataactattaactatccacatactgccta

SEQ ID NO: 901143 - DNA, 33 bp, Homo sapien
cctattaataacatcaagaatgacctagttcaa

SEQ ID NO: 901144 - DNA, 33 bp, Homo sapien
cctattaataacatcaggaatgacctagttcaa

SEQ ID NO: 901145 - DNA, 33 bp, Homo sapien
caaagaaatgtaccaacgttatgcctttacaaa

SEQ ID NO: 901146 - DNA, 33 bp, Homo sapien
caaagaaatgtaccaatgttatgcctttacaaa

SEQ ID NO: 901147 - DNA, 33 bp, Homo sapien
tctgtgtcattcttccgagctagcctgtctttc

SEQ ID NO: 901148 - DNA, 33 bp, Homo sapien
tctgtgtcattcttcctagctagcctgtctttc

SEQ ID NO: 901149 - DNA, 33 bp, Homo sapien
gtacatttaaagaaaaattaggaagagatgcca

SEQ ID NO: 901150 - DNA, 33 bp, Homo sapien
gtacatttaaagaaaacttaggaagagatgcca

SEQ ID NO: 901151 - DNA, 33 bp, Homo sapien
accctcctttgccagacgcacagttctgttggc

SEQ ID NO: 901152 - DNA, 33 bp, Homo sapien
accctcctttgccagatgcacagttctgttggc

SEQ ID NO: 901153 - DNA, 33 bp, Homo sapien
tcactatcgtcctaaaatcttctatcatttggt

SEQ ID NO: 901154 - DNA, 33 bp, Homo sapien
tcactatcgtcctaaagtcttctatcatttggt

SEQ ID NO: 901155 - DNA, 33 bp, Homo sapien
cccatttgtcctgttcacaccaagtagccagac

SEQ ID NO: 901156 - DNA, 33 bp, Homo sapien
cccatttgtcctgttcgcaccaagtagccagac

SEQ ID NO: 901157 - DNA, 33 bp, Homo sapien
atgtggctttttatcacggggatggaaagtaac

SEQ ID NO: 901158 - DNA, 33 bp, Homo sapien
atgtggctttttatcatggggatggaaagtaac

SEQ ID NO: 901159 - DNA, 33 bp, Homo sapien
agcagagaaggaagacagtagggaagccaagca

SEQ ID NO: 901160 - DNA, 33 bp, Homo sapien
agcagagaaggaagacggtagggaagccaagca

SEQ ID NO: 901161 - DNA, 33 bp, Homo sapien
gacaaagggaaaattaggttgagctggttgggg

SEQ ID NO: 901162 - DNA, 33 bp, Homo sapien
gacaaagggaaaattatgttgagctggttgggg

SEQ ID NO: 901163 - DNA, 33 bp, Homo sapien
ggtaaatgagctcaaaagtgatctacagcttcc

SEQ ID NO: 901164 - DNA, 33 bp, Homo sapien
ggtaaatgagctcaaaggtgatctacagcttcc

SEQ ID NO: 901165 - DNA, 33 bp, Homo sapien
acacacacttctccagcccatcccatgtggcac

SEQ ID NO: 901166 - DNA, 33 bp, Homo sapien
acacacacttctccaggccatcccatgtggcac

SEQ ID NO: 901167 - DNA, 33 bp, Homo sapien
atgctttcttggataaactcattcaatctacgc

SEQ ID NO: 901168 - DNA, 33 bp, Homo sapien
atgctttcttggataatctcattcaatctacgc

SEQ ID NO: 901169 - DNA, 33 bp, Homo sapien
ggtttcctcttgaaaacgcactataccatactc

SEQ ID NO: 901170 - DNA, 33 bp, Homo sapien
ggtttcctcttgaaaatgcactataccatactc

SEQ ID NO: 901171 - DNA, 33 bp, Homo sapien
gcatttttaaccccaacttcatgattgtacccc

SEQ ID NO: 901172 - DNA, 33 bp, Homo sapien
gcatttttaaccccaatttcatgattgtacccc

SEQ ID NO: 901173 - DNA, 33 bp, Homo sapien
agagccctaaaaccaacaggctcactcagcctg

SEQ ID NO: 901174 - DNA, 33 bp, Homo sapien
agagccctaaaaccaagaggctcactcagcctg

SEQ ID NO: 901175 - DNA, 33 bp, Homo sapien
taagacagctttgaaacctcacgtatccacaaa

SEQ ID NO: 901176 - DNA, 33 bp, Homo sapien
taagacagctttgaaatctcacgtatccacaaa

SEQ ID NO: 901177 - DNA, 33 bp, Homo sapien
ggagagatgtggcaaacgttgacacacgaggtt

SEQ ID NO: 901178 - DNA, 33 bp, Homo sapien
ggagagatgtggcaaatgttgacacacgaggtt

SEQ ID NO: 901179 - DNA, 33 bp, Homo sapien
tctcctgataaagttacagcacaattttaaagc

SEQ ID NO: 901180 - DNA, 33 bp, Homo sapien
tctcctgataaagttatagcacaattttaaagc

SEQ ID NO: 901181 - DNA, 33 bp, Homo sapien
tccatctgcaacccagaatccaaatttcaaaag

SEQ ID NO: 901182 - DNA, 33 bp, Homo sapien
tccatctgcaacccaggatccaaatttcaaaag

SEQ ID NO: 901183 - DNA, 33 bp, Homo sapien
cgtggaactgtgaaatgagcagtgcaaaataat

SEQ ID NO: 901184 - DNA, 33 bp, Homo sapien
cgtggaactgtgaaattagcagtgcaaaataat

SEQ ID NO: 901185 - DNA, 33 bp, Homo sapien
tgttatcccatttccactcaaaaatagacacgg

SEQ ID NO: 901186 - DNA, 33 bp, Homo sapien
tgttatcccatttccattcaaaaatagacacgg

SEQ ID NO: 901187 - DNA, 33 bp, Homo sapien
atcttcagactccaagcagaaggtaactgcagg

SEQ ID NO: 901188 - DNA, 33 bp, Homo sapien
atcttcagactccaagtagaaggtaactgcagg

SEQ ID NO: 901189 - DNA, 33 bp, Homo sapien
taagaccatccctggaacgaggccactcagcag

SEQ ID NO: 901190 - DNA, 33 bp, Homo sapien
taagaccatccctggagcgaggccactcagcag

SEQ ID NO: 901191 - DNA, 33 bp, Homo sapien
tctggttagtgaccagacatatgaagaccaata

SEQ ID NO: 901192 - DNA, 33 bp, Homo sapien
tctggttagtgaccaggcatatgaagaccaata

SEQ ID NO: 901193 - DNA, 33 bp, Homo sapien
aggcagcatgttcaaaactgtgaagcacagaag

SEQ ID NO: 901194 - DNA, 33 bp, Homo sapien
aggcagcatgttcaaagctgtgaagcacagaag

SEQ ID NO: 901195 - DNA, 33 bp, Homo sapien
aaaagagagtgtgttccacattgcttttgcccc

SEQ ID NO: 901196 - DNA, 33 bp, Homo sapien
aaaagagagtgtgttctacattgcttttgcccc

SEQ ID NO: 901197 - DNA, 33 bp, Homo sapien
tctaaaatctggaaaactctgaatcctaaaaca

SEQ ID NO: 901198 - DNA, 33 bp, Homo sapien
tctaaaatctggaaaattctgaatcctaaaaca

SEQ ID NO: 901199 - DNA, 33 bp, Homo sapien
tacattcatatctccacagtgaaattgttacca

SEQ ID NO: 901200 - DNA, 33 bp, Homo sapien
tacattcatatctccagagtgaaattgttacca

SEQ ID NO: 901201 - DNA, 33 bp, Homo sapien
gttccagcgtcctccacgtgaactccgatcttg

SEQ ID NO: 901202 - DNA, 33 bp, Homo sapien
gttccagcgtcctccatgtgaactccgatcttg

SEQ ID NO: 901203 - DNA, 33 bp, Homo sapien
agggggcttcagcacacggcagcgcgtggcccc

SEQ ID NO: 901204 - DNA, 33 bp, Homo sapien
agggggcttcagcacatggcagcgcgtggcccc

SEQ ID NO: 901205 - DNA, 33 bp, Homo sapien
cctgcttgccagtagcacgccttggaaagtcac

SEQ ID NO: 901206 - DNA, 33 bp, Homo sapien
cctgcttgccagtagcgcgccttggaaagtcac

SEQ ID NO: 901207 - DNA, 33 bp, Homo sapien
caagttgttcgtgataccactgacctccttcag

SEQ ID NO: 901208 - DNA, 33 bp, Homo sapien
caagttgttcgtgatagcactgacctccttcag

SEQ ID NO: 901209 - DNA, 33 bp, Homo sapien
agagctaggaccttgaaagaacctacagctaac

SEQ ID NO: 901210 - DNA, 33 bp, Homo sapien
agagctaggaccttgatagaacctacagctaac

SEQ ID NO: 901211 - DNA, 33 bp, Homo sapien
tgatgaatccatatgccagttttgtggacctga

SEQ ID NO: 901212 - DNA, 33 bp, Homo sapien
tgatgaatccatatgctagttttgtggacctga

SEQ ID NO: 901213 - DNA, 33 bp, Homo sapien
acgtcctggtgctctcactgcaatggcttccat

SEQ ID NO: 901214 - DNA, 33 bp, Homo sapien
acgtcctggtgctctcgctgcaatggcttccat

SEQ ID NO: 901215 - DNA, 33 bp, Homo sapien
ttgggtgacactaaacagatctgggatacaatc

SEQ ID NO: 901216 - DNA, 33 bp, Homo sapien
ttgggtgacactaaacggatctgggatacaatc

SEQ ID NO: 901217 - DNA, 33 bp, Homo sapien
ttctagaaagaatgtggatctaatttgcatcat

SEQ ID NO: 901218 - DNA, 33 bp, Homo sapien
ttctagaaagaatgtgtatctaatttgcatcat

SEQ ID NO: 901219 - DNA, 33 bp, Homo sapien
ctggatattgaattccagattgacagttttttc

SEQ ID NO: 901220 - DNA, 33 bp, Homo sapien
ctggatattgaattccggattgacagttttttc

SEQ ID NO: 901221 - DNA, 33 bp, Homo sapien
catatgttaaaccttaccaaactgttatgcccc

SEQ ID NO: 901222 - DNA, 33 bp, Homo sapien
catatgttaaaccttatcaaactgttatgcccc

SEQ ID NO: 901223 - DNA, 33 bp, Homo sapien
caccacctgaggtttcactatctgcactctgct

SEQ ID NO: 901224 - DNA, 33 bp, Homo sapien
caccacctgaggtttcgctatctgcactctgct

SEQ ID NO: 901225 - DNA, 33 bp, Homo sapien
agtgcccctcatgccacccagaactcttccagg

SEQ ID NO: 901226 - DNA, 33 bp, Homo sapien
agtgcccctcatgccatccagaactcttccagg

SEQ ID NO: 901227 - DNA, 33 bp, Homo sapien
agtaaaaaaaatcgtaactagtccacttactca

SEQ ID NO: 901228 - DNA, 33 bp, Homo sapien
agtaaaaaaaatcgtatctagtccacttactca

SEQ ID NO: 901229 - DNA, 33 bp, Homo sapien
cgtctggataaaggacaatttatttttcctcca

SEQ ID NO: 901230 - DNA, 33 bp, Homo sapien
cgtctggataaaggacgatttatttttcctcca

SEQ ID NO: 901231 - DNA, 33 bp, Homo sapien
actctcgcctgaaacactgatatatctttctct

SEQ ID NO: 901232 - DNA, 33 bp, Homo sapien
actctcgcctgaaacattgatatatctttctct

SEQ ID NO: 901233 - DNA, 33 bp, Homo sapien
tgctctgcaaaagacagtaagcgaatgagaagg

SEQ ID NO: 901234 - DNA, 33 bp, Homo sapien
tgctctgcaaaagacattaagcgaatgagaagg

SEQ ID NO: 901235 - DNA, 33 bp, Homo sapien
actgtccatacaagcccgaggatctttttagcc

SEQ ID NO: 901236 - DNA, 33 bp, Homo sapien
actgtccatacaagcctgaggatctttttagcc

SEQ ID NO: 901237 - DNA, 33 bp, Homo sapien
gatctacagcacctaacgagatcgatgcagaag

SEQ ID NO: 901238 - DNA, 33 bp, Homo sapien
gatctacagcacctaatgagatcgatgcagaag

SEQ ID NO: 901239 - DNA, 33 bp, Homo sapien
gggtgaataaatctccagaaacatggaacagtg

SEQ ID NO: 901240 - DNA, 33 bp, Homo sapien
gggtgaataaatctccggaaacatggaacagtg

SEQ ID NO: 901241 - DNA, 33 bp, Homo sapien
agaacaggttcactgcactgaaagttctgacta

SEQ ID NO: 901242 - DNA, 33 bp, Homo sapien
agaacaggttcactgcgctgaaagttctgacta

SEQ ID NO: 901243 - DNA, 33 bp, Homo sapien
tctgtgtgtttctcagcataggcagagctcaga

SEQ ID NO: 901244 - DNA, 33 bp, Homo sapien
tctgtgtgtttctcaggataggcagagctcaga

SEQ ID NO: 901245 - DNA, 33 bp, Homo sapien
ctccagagatagtcaacgatacgtggggcaaaa

SEQ ID NO: 901246 - DNA, 33 bp, Homo sapien
ctccagagatagtcaatgatacgtggggcaaaa

SEQ ID NO: 901247 - DNA, 33 bp, Homo sapien
aaaacatctaattgcccggagcctccccctcaa

SEQ ID NO: 901248 - DNA, 33 bp, Homo sapien
aaaacatctaattgcctggagcctccccctcaa

SEQ ID NO: 901249 - DNA, 33 bp, Homo sapien
attgcttctgcttatcgcagggaatgatatggt

SEQ ID NO: 901250 - DNA, 33 bp, Homo sapien
attgcttctgcttatctcagggaatgatatggt

SEQ ID NO: 901251 - DNA, 33 bp, Homo sapien
attctttatgtttccccggcattcataaagtag

SEQ ID NO: 901252 - DNA, 33 bp, Homo sapien
attctttatgtttccctggcattcataaagtag

SEQ ID NO: 901253 - DNA, 33 bp, Homo sapien
aattaagaaaagtaaaacagagtaggagacaca

SEQ ID NO: 901254 - DNA, 33 bp, Homo sapien
aattaagaaaagtaaagcagagtaggagacaca

SEQ ID NO: 901255 - DNA, 33 bp, Homo sapien
gcattggacaaaatccaacatccattcatgaaa

SEQ ID NO: 901256 - DNA, 33 bp, Homo sapien
gcattggacaaaatccgacatccattcatgaaa

SEQ ID NO: 901257 - DNA, 33 bp, Homo sapien
ttaacagacacctcaacgaaaaaagatatacaa

SEQ ID NO: 901258 - DNA, 33 bp, Homo sapien
ttaacagacacctcaatgaaaaaagatatacaa

SEQ ID NO: 901259 - DNA, 33 bp, Homo sapien
aaagcagaattacatacctgtgtgtagaagatg

SEQ ID NO: 901260 - DNA, 33 bp, Homo sapien
aaagcagaattacatatctgtgtgtagaagatg

SEQ ID NO: 901261 - DNA, 33 bp, Homo sapien
cctctcttcacctccaaagtgtcctggtttgta

SEQ ID NO: 901262 - DNA, 33 bp, Homo sapien
cctctcttcacctccagagtgtcctggtttgta

SEQ ID NO: 901263 - DNA, 33 bp, Homo sapien
actttggttgtaaaatgagcggcagcccaagtt

SEQ ID NO: 901264 - DNA, 33 bp, Homo sapien
actttggttgtaaaattagcggcagcccaagtt

SEQ ID NO: 901265 - DNA, 33 bp, Homo sapien
atactttgaccctggacgtttagtgttctctga

SEQ ID NO: 901266 - DNA, 33 bp, Homo sapien
atactttgaccctggatgtttagtgttctctga

SEQ ID NO: 901267 - DNA, 33 bp, Homo sapien
gctcctcaacgcttggccagaaagaatatcaca

SEQ ID NO: 901268 - DNA, 33 bp, Homo sapien
gctcctcaacgcttggtcagaaagaatatcaca

SEQ ID NO: 901269 - DNA, 33 bp, Homo sapien
acccttcacattcataggtcctagaagatgaat

SEQ ID NO: 901270 - DNA, 33 bp, Homo sapien
acccttcacattcatatgtcctagaagatgaat

SEQ ID NO: 901271 - DNA, 33 bp, Homo sapien
ttcttatgtaggccacagggaaaatgagcaagt

SEQ ID NO: 901272 - DNA, 33 bp, Homo sapien
ttcttatgtaggccacggggaaaatgagcaagt

SEQ ID NO: 901273 - DNA, 33 bp, Homo sapien
atgggtgaatgagtgaataagaaaggaatggat

SEQ ID NO: 901274 - DNA, 33 bp, Homo sapien
atgggtgaatgagtgagtaagaaaggaatggat

SEQ ID NO: 901275 - DNA, 33 bp, Homo sapien
gtcaacacacacatcaatcattacagatagtgg

SEQ ID NO: 901276 - DNA, 33 bp, Homo sapien
gtcaacacacacatcagtcattacagatagtgg

SEQ ID NO: 901277 - DNA, 33 bp, Homo sapien
gttaagctgggccttaaattgttttacctagag

SEQ ID NO: 901278 - DNA, 33 bp, Homo sapien
gttaagctgggccttagattgttttacctagag

SEQ ID NO: 901279 - DNA, 33 bp, Homo sapien
tagaacatccaaagcacgtgcaaccttaaatgt

SEQ ID NO: 901280 - DNA, 33 bp, Homo sapien
tagaacatccaaagcatgtgcaaccttaaatgt

SEQ ID NO: 901281 - DNA, 33 bp, Homo sapien
cccagcctgaacagaacagctttttatcatcaa

SEQ ID NO: 901282 - DNA, 33 bp, Homo sapien
cccagcctgaacagaagagctttttatcatcaa

SEQ ID NO: 901283 - DNA, 33 bp, Homo sapien
tgtgagtagggcatcaagtgcttaccagagagt

SEQ ID NO: 901284 - DNA, 33 bp, Homo sapien
tgtgagtagggcatcatgtgcttaccagagagt

SEQ ID NO: 901285 - DNA, 33 bp, Homo sapien
gttactgttgtacccacgttgtttatttaagct

SEQ ID NO: 901286 - DNA, 33 bp, Homo sapien
gttactgttgtacccatgttgtttatttaagct

SEQ ID NO: 901287 - DNA, 33 bp, Homo sapien
aatgcagctttctctagcatttaaactgtgaaa

SEQ ID NO: 901288 - DNA, 33 bp, Homo sapien
aatgcagctttctctatcatttaaactgtgaaa

SEQ ID NO: 901289 - DNA, 33 bp, Homo sapien
agatattgtgatgaaactgccagagctcacctc

SEQ ID NO: 901290 - DNA, 33 bp, Homo sapien
agatattgtgatgaaattgccagagctcacctc

SEQ ID NO: 901291 - DNA, 33 bp, Homo sapien
agaaacagaaatcaacaatgcttgatttaagca

SEQ ID NO: 901292 - DNA, 33 bp, Homo sapien
agaaacagaaatcaacgatgcttgatttaagca

SEQ ID NO: 901293 - DNA, 33 bp, Homo sapien
acagcatatgaagggccctggaaatacacactg

SEQ ID NO: 901294 - DNA, 33 bp, Homo sapien
acagcatatgaagggctctggaaatacacactg

SEQ ID NO: 901295 - DNA, 33 bp, Homo sapien
ttctttcgtaactaggcagtagactgttgatcc

SEQ ID NO: 901296 - DNA, 33 bp, Homo sapien
ttctttcgtaactaggtagtagactgttgatcc

SEQ ID NO: 901297 - DNA, 33 bp, Homo sapien
gaaacaccagaagtaacccatgggcctcataag

SEQ ID NO: 901298 - DNA, 33 bp, Homo sapien
gaaacaccagaagtaagccatgggcctcataag

SEQ ID NO: 901299 - DNA, 33 bp, Homo sapien
gatttgtttttcttagcatttggaatattttta

SEQ ID NO: 901300 - DNA, 33 bp, Homo sapien
gatttgtttttcttaggatttggaatattttta

SEQ ID NO: 901301 - DNA, 33 bp, Homo sapien
gatttcaagattctggcattcaacaaaattcta

SEQ ID NO: 901302 - DNA, 33 bp, Homo sapien
gatttcaagattctggtattcaacaaaattcta

SEQ ID NO: 901303 - DNA, 33 bp, Homo sapien
aataatttgcttaaaacgtcagatccagtgtca

SEQ ID NO: 901304 - DNA, 33 bp, Homo sapien
aataatttgcttaaaatgtcagatccagtgtca

SEQ ID NO: 901305 - DNA, 33 bp, Homo sapien
taaaataaacccattgcaacaaaggaagctgcc

SEQ ID NO: 901306 - DNA, 33 bp, Homo sapien
taaaataaacccattggaacaaaggaagctgcc

SEQ ID NO: 901307 - DNA, 33 bp, Homo sapien
ggtctctagacttacaatgatttctatgtccac

SEQ ID NO: 901308 - DNA, 33 bp, Homo sapien
ggtctctagacttacagtgatttctatgtccac

SEQ ID NO: 901309 - DNA, 33 bp, Homo sapien
gaaaactggaatgtgaagctaatgattccctga

SEQ ID NO: 901310 - DNA, 33 bp, Homo sapien
gaaaactggaatgtgaggctaatgattccctga

SEQ ID NO: 901311 - DNA, 33 bp, Homo sapien
ctcattattttatactcactgtctcttagcaac

SEQ ID NO: 901312 - DNA, 33 bp, Homo sapien
ctcattattttatactgactgtctcttagcaac

SEQ ID NO: 901313 - DNA, 33 bp, Homo sapien
actgtgtaaccatctaccgtatgtattcatgat

SEQ ID NO: 901314 - DNA, 33 bp, Homo sapien
actgtgtaaccatctatcgtatgtattcatgat

SEQ ID NO: 901315 - DNA, 33 bp, Homo sapien
gaatgggggcgttcaaaaatagtgtgactcggg

SEQ ID NO: 901316 - DNA, 33 bp, Homo sapien
gaatgggggcgttcaagaatagtgtgactcggg

SEQ ID NO: 901317 - DNA, 33 bp, Homo sapien
aaagtctcatttaccacgttgagtttgaagttc

SEQ ID NO: 901318 - DNA, 33 bp, Homo sapien
aaagtctcatttaccatgttgagtttgaagttc

SEQ ID NO: 901319 - DNA, 33 bp, Homo sapien
ctgtgatggaaggaaaccccgtgctcacgaggg

SEQ ID NO: 901320 - DNA, 33 bp, Homo sapien
ctgtgatggaaggaaatcccgtgctcacgaggg

SEQ ID NO: 901321 - DNA, 33 bp, Homo sapien
ttttgtagagggttcacaaacttacttgataat

SEQ ID NO: 901322 - DNA, 33 bp, Homo sapien
ttttgtagagggttcataaacttacttgataat

SEQ ID NO: 901323 - DNA, 33 bp, Homo sapien
gcctttgcttacctggcattctgtaaattctga

SEQ ID NO: 901324 - DNA, 33 bp, Homo sapien
gcctttgcttacctggtattctgtaaattctga

SEQ ID NO: 901325 - DNA, 33 bp, Homo sapien
tctgcccccaaaccaacgtttcactgtgccctg

SEQ ID NO: 901326 - DNA, 33 bp, Homo sapien
tctgcccccaaaccaatgtttcactgtgccctg

SEQ ID NO: 901327 - DNA, 33 bp, Homo sapien
aagtaatccaagataaactagttaggaaggtgg

SEQ ID NO: 901328 - DNA, 33 bp, Homo sapien
aagtaatccaagataatctagttaggaaggtgg

SEQ ID NO: 901329 - DNA, 33 bp, Homo sapien
ttgttgcagaaactaaattaattgcaagtccaa

SEQ ID NO: 901330 - DNA, 33 bp, Homo sapien
ttgttgcagaaactaagttaattgcaagtccaa

SEQ ID NO: 901331 - DNA, 33 bp, Homo sapien
aagatgcaaagatataagtaactgaatgtaata

SEQ ID NO: 901332 - DNA, 33 bp, Homo sapien
aagatgcaaagatatacgtaactgaatgtaata

SEQ ID NO: 901333 - DNA, 33 bp, Homo sapien
taaaagtggattaaaaacaaggtccaactatat

SEQ ID NO: 901334 - DNA, 33 bp, Homo sapien
taaaagtggattaaaaccaaggtccaactatat

SEQ ID NO: 901335 - DNA, 33 bp, Homo sapien
agaagcattatccaaaactcccttctagatcct

SEQ ID NO: 901336 - DNA, 33 bp, Homo sapien
agaagcattatccaaagctcccttctagatcct

SEQ ID NO: 901337 - DNA, 33 bp, Homo sapien
tctcagtttcataataccccttgcaaggttttt

SEQ ID NO: 901338 - DNA, 33 bp, Homo sapien
tctcagtttcataatagcccttgcaaggttttt

SEQ ID NO: 901339 - DNA, 33 bp, Homo sapien
ttgttatatttagcagaccaaacatggttaata

SEQ ID NO: 901340 - DNA, 33 bp, Homo sapien
ttgttatatttagcaggccaaacatggttaata

SEQ ID NO: 901341 - DNA, 33 bp, Homo sapien
ttttagaaatgtgaaccgtaagcaagggtgtcc

SEQ ID NO: 901342 - DNA, 33 bp, Homo sapien
ttttagaaatgtgaacggtaagcaagggtgtcc

SEQ ID NO: 901343 - DNA, 33 bp, Homo sapien
ctcccgggaccctgtacgtcaaaagcctctgac

SEQ ID NO: 901344 - DNA, 33 bp, Homo sapien
ctcccgggaccctgtaggtcaaaagcctctgac

SEQ ID NO: 901345 - DNA, 33 bp, Homo sapien
ggttaagcccaagctcaagttcaaattcaaggt

SEQ ID NO: 901346 - DNA, 33 bp, Homo sapien
ggttaagcccaagctcgagttcaaattcaaggt

SEQ ID NO: 901347 - DNA, 33 bp, Homo sapien
ggagggagggaatgaacgtattgtatgctgtgc

SEQ ID NO: 901348 - DNA, 33 bp, Homo sapien
ggagggagggaatgaatgtattgtatgctgtgc

SEQ ID NO: 901349 - DNA, 33 bp, Homo sapien
gctgcatctcaggcccaattcctttattaccag

SEQ ID NO: 901350 - DNA, 33 bp, Homo sapien
gctgcatctcaggcccgattcctttattaccag

SEQ ID NO: 901351 - DNA, 33 bp, Homo sapien
gctggggggacagagactcccacatgggcgatg

SEQ ID NO: 901352 - DNA, 33 bp, Homo sapien
gctggggggacagagattcccacatgggcgatg

SEQ ID NO: 901353 - DNA, 33 bp, Homo sapien
tccttagcgcgggactcacaggggcctggattc

SEQ ID NO: 901354 - DNA, 33 bp, Homo sapien
tccttagcgcgggactgacaggggcctggattc

SEQ ID NO: 901355 - DNA, 33 bp, Homo sapien
agggctgctttctttcaaagtcaaggggatgct

SEQ ID NO: 901356 - DNA, 33 bp, Homo sapien
agggctgctttctttcgaagtcaaggggatgct

SEQ ID NO: 901357 - DNA, 33 bp, Homo sapien
tctcagggcatctgaccgcagggccagtggtgt

SEQ ID NO: 901358 - DNA, 33 bp, Homo sapien
tctcagggcatctgactgcagggccagtggtgt

SEQ ID NO: 901359 - DNA, 33 bp, Homo sapien
gtatttctcaaagtataagcctcagagcatggc

SEQ ID NO: 901360 - DNA, 33 bp, Homo sapien
gtatttctcaaagtatgagcctcagagcatggc

SEQ ID NO: 901361 - DNA, 33 bp, Homo sapien
actgttacatcttcatgaaaatatggtcctaca

SEQ ID NO: 901362 - DNA, 33 bp, Homo sapien
actgttacatcttcattaaaatatggtcctaca

SEQ ID NO: 901363 - DNA, 33 bp, Homo sapien
aaaatctccagaactccatagtctcttgaaatg

SEQ ID NO: 901364 - DNA, 33 bp, Homo sapien
aaaatctccagaactctatagtctcttgaaatg

SEQ ID NO: 901365 - DNA, 33 bp, Homo sapien
ttttacatcctgccataagtttcaagacattaa

SEQ ID NO: 901366 - DNA, 33 bp, Homo sapien
ttttacatcctgccatgagtttcaagacattaa

SEQ ID NO: 901367 - DNA, 33 bp, Homo sapien
ttttctgacattacgacatgattttgttaataa

SEQ ID NO: 901368 - DNA, 33 bp, Homo sapien
ttttctgacattacgatatgattttgttaataa

SEQ ID NO: 901369 - DNA, 33 bp, Homo sapien
aagacttagcttcacactatttttagtttattg

SEQ ID NO: 901370 - DNA, 33 bp, Homo sapien
aagacttagcttcacagtatttttagtttattg

SEQ ID NO: 901371 - DNA, 33 bp, Homo sapien
taaatgtgcgacaagacgagtattacctgtata

SEQ ID NO: 901372 - DNA, 33 bp, Homo sapien
taaatgtgcgacaagatgagtattacctgtata

SEQ ID NO: 901373 - DNA, 33 bp, Homo sapien
ttatacagttgtttatcagagccatgtgctgaa

SEQ ID NO: 901374 - DNA, 33 bp, Homo sapien
ttatacagttgtttatgagagccatgtgctgaa

SEQ ID NO: 901375 - DNA, 33 bp, Homo sapien
tgttttcaaaatagaacgcatctagttcattca

SEQ ID NO: 901376 - DNA, 33 bp, Homo sapien
tgttttcaaaatagaaggcatctagttcattca

SEQ ID NO: 901377 - DNA, 33 bp, Homo sapien
gaaaaaggctctaaatgaaccatgctgttggct

SEQ ID NO: 901378 - DNA, 33 bp, Homo sapien
gaaaaaggctctaaattaaccatgctgttggct

SEQ ID NO: 901379 - DNA, 33 bp, Homo sapien
gaacaagattcaaaaaaccctaagacttctttc

SEQ ID NO: 901380 - DNA, 33 bp, Homo sapien
gaacaagattcaaaaacccctaagacttctttc

SEQ ID NO: 901381 - DNA, 33 bp, Homo sapien
atcagtaagtaacacacgactgtacatattcac

SEQ ID NO: 901382 - DNA, 33 bp, Homo sapien
atcagtaagtaacacatgactgtacatattcac

SEQ ID NO: 901383 - DNA, 33 bp, Homo sapien
atgctatttccagacccagggttcatttattct

SEQ ID NO: 901384 - DNA, 33 bp, Homo sapien
atgctatttccagacctagggttcatttattct

SEQ ID NO: 901385 - DNA, 33 bp, Homo sapien
ctgaccctaaaattcacgtggaagaacaatgag

SEQ ID NO: 901386 - DNA, 33 bp, Homo sapien
ctgaccctaaaattcatgtggaagaacaatgag

SEQ ID NO: 901387 - DNA, 33 bp, Homo sapien
cttcacagattagggaactttttttgtgtatct

SEQ ID NO: 901388 - DNA, 33 bp, Homo sapien
cttcacagattagggatctttttttgtgtatct

SEQ ID NO: 901389 - DNA, 33 bp, Homo sapien
tattatatggtattcaaccaggaaaataggggc

SEQ ID NO: 901390 - DNA, 33 bp, Homo sapien
tattatatggtattcagccaggaaaataggggc

SEQ ID NO: 901391 - DNA, 33 bp, Homo sapien
gtacaaacccatctcaaagtgaaaacgaagatc

SEQ ID NO: 901392 - DNA, 33 bp, Homo sapien
gtacaaacccatctcacagtgaaaacgaagatc

SEQ ID NO: 901393 - DNA, 33 bp, Homo sapien
ctttattttcacgttacgcttcctaaaagcagg

SEQ ID NO: 901394 - DNA, 33 bp, Homo sapien
ctttattttcacgttaggcttcctaaaagcagg

SEQ ID NO: 901395 - DNA, 33 bp, Homo sapien
ggtagtggctagaagacatgaagaaaagtatga

SEQ ID NO: 901396 - DNA, 33 bp, Homo sapien
ggtagtggctagaagagatgaagaaaagtatga

SEQ ID NO: 901397 - DNA, 33 bp, Homo sapien
tccactataaaatctacggtctcatatctcatc

SEQ ID NO: 901398 - DNA, 33 bp, Homo sapien
tccactataaaatctatggtctcatatctcatc

SEQ ID NO: 901399 - DNA, 33 bp, Homo sapien
aacttgagcagtgaaactaacattttgactttc

SEQ ID NO: 901400 - DNA, 33 bp, Homo sapien
aacttgagcagtgaaagtaacattttgactttc

SEQ ID NO: 901401 - DNA, 33 bp, Homo sapien
atactgtcagtacaacacagtcttggtttattt

SEQ ID NO: 901402 - DNA, 33 bp, Homo sapien
atactgtcagtacaacgcagtcttggtttattt

SEQ ID NO: 901403 - DNA, 33 bp, Homo sapien
cagcgagttactcttacaggattttaagcagag

SEQ ID NO: 901404 - DNA, 33 bp, Homo sapien
cagcgagttactcttataggattttaagcagag

SEQ ID NO: 901405 - DNA, 33 bp, Homo sapien
tgcatataacgtctcacctaattagttttttag

SEQ ID NO: 901406 - DNA, 33 bp, Homo sapien
tgcatataacgtctcatctaattagttttttag

SEQ ID NO: 901407 - DNA, 33 bp, Homo sapien
ttagatgggctcttaacgagcttgttagatctc

SEQ ID NO: 901408 - DNA, 33 bp, Homo sapien
ttagatgggctcttaatgagcttgttagatctc

SEQ ID NO: 901409 - DNA, 33 bp, Homo sapien
ttgagattgaaataacaacattcctttctttct

SEQ ID NO: 901410 - DNA, 33 bp, Homo sapien
ttgagattgaaataacgacattcctttctttct

SEQ ID NO: 901411 - DNA, 33 bp, Homo sapien
agaaagactacaagtaaatgaggtacagagtaa

SEQ ID NO: 901412 - DNA, 33 bp, Homo sapien
agaaagactacaagtacatgaggtacagagtaa

SEQ ID NO: 901413 - DNA, 33 bp, Homo sapien
caggaggtgaagactacaagtgagctgtgatca

SEQ ID NO: 901414 - DNA, 33 bp, Homo sapien
caggaggtgaagactataagtgagctgtgatca

SEQ ID NO: 901415 - DNA, 33 bp, Homo sapien
agggtatatcttgaaacccaaaagaaaaagaaa

SEQ ID NO: 901416 - DNA, 33 bp, Homo sapien
agggtatatcttgaaatccaaaagaaaaagaaa

SEQ ID NO: 901417 - DNA, 33 bp, Homo sapien
ggttgttttaggggcaagtctttaacatcttca

SEQ ID NO: 901418 - DNA, 33 bp, Homo sapien
ggttgttttaggggcacgtctttaacatcttca

SEQ ID NO: 901419 - DNA, 33 bp, Homo sapien
ttgtcacgtgcatccaccttctgtgcagaactg

SEQ ID NO: 901420 - DNA, 33 bp, Homo sapien
ttgtcacgtgcatccagcttctgtgcagaactg

SEQ ID NO: 901421 - DNA, 33 bp, Homo sapien
tataacctcttccttacgtaaacaaacaatgtg

SEQ ID NO: 901422 - DNA, 33 bp, Homo sapien
tataacctcttccttatgtaaacaaacaatgtg

SEQ ID NO: 901423 - DNA, 33 bp, Homo sapien
tacaacctcttccttacgtaaacaaccaatgtg

SEQ ID NO: 901424 - DNA, 33 bp, Homo sapien
tacaacctcttccttatgtaaacaaccaatgtg

SEQ ID NO: 901425 - DNA, 33 bp, Homo sapien
ttttcatcataaatccggcaaattcacactaac

SEQ ID NO: 901426 - DNA, 33 bp, Homo sapien
ttttcatcataaatcctgcaaattcacactaac

SEQ ID NO: 901427 - DNA, 33 bp, Homo sapien
gccacatcggaggataccaaagcattgtggcaa

SEQ ID NO: 901428 - DNA, 33 bp, Homo sapien
gccacatcggaggatatcaaagcattgtggcaa

SEQ ID NO: 901429 - DNA, 33 bp, Homo sapien
attactctggattgtacccataagcagtagaac

SEQ ID NO: 901430 - DNA, 33 bp, Homo sapien
attactctggattgtagccataagcagtagaac

SEQ ID NO: 901431 - DNA, 33 bp, Homo sapien
ttccatgagacttacacgagcctggagtctcta

SEQ ID NO: 901432 - DNA, 33 bp, Homo sapien
ttccatgagacttacatgagcctggagtctcta

SEQ ID NO: 901433 - DNA, 33 bp, Homo sapien
gagcacaatacccaaagaaatccttagcgagcc

SEQ ID NO: 901434 - DNA, 33 bp, Homo sapien
gagcacaatacccaaataaatccttagcgagcc

SEQ ID NO: 901435 - DNA, 33 bp, Homo sapien
agagccttagcttgtacgaatatttatgctaga

SEQ ID NO: 901436 - DNA, 33 bp, Homo sapien
agagccttagcttgtatgaatatttatgctaga

SEQ ID NO: 901437 - DNA, 33 bp, Homo sapien
acacgggttctgtactcagatttaatgagaaac

SEQ ID NO: 901438 - DNA, 33 bp, Homo sapien
acacgggttctgtacttagatttaatgagaaac

SEQ ID NO: 901439 - DNA, 33 bp, Homo sapien
ttatttcaggaacagcagaagggttactgatcc

SEQ ID NO: 901440 - DNA, 33 bp, Homo sapien
ttatttcaggaacagcggaagggttactgatcc

SEQ ID NO: 901441 - DNA, 33 bp, Homo sapien
ctgctttcaaactcacgcaggctgttggcagat

SEQ ID NO: 901442 - DNA, 33 bp, Homo sapien
ctgctttcaaactcactcaggctgttggcagat

SEQ ID NO: 901443 - DNA, 33 bp, Homo sapien
ctggcatgcttatcaccaaactagagacttgtg

SEQ ID NO: 901444 - DNA, 33 bp, Homo sapien
ctggcatgcttatcactaaactagagacttgtg

SEQ ID NO: 901445 - DNA, 33 bp, Homo sapien
cgcctcgtggaagttaaaacaggaaattgcggt

SEQ ID NO: 901446 - DNA, 33 bp, Homo sapien
cgcctcgtggaagttataacaggaaattgcggt

SEQ ID NO: 901447 - DNA, 33 bp, Homo sapien
tgggtgctctgattaactgggatcttctggtta

SEQ ID NO: 901448 - DNA, 33 bp, Homo sapien
tgggtgctctgattaagtgggatcttctggtta

SEQ ID NO: 901449 - DNA, 33 bp, Homo sapien
tggttccctaccaaatcaccctccacgccgcta

SEQ ID NO: 901450 - DNA, 33 bp, Homo sapien
tggttccctaccaaattaccctccacgccgcta

SEQ ID NO: 901451 - DNA, 33 bp, Homo sapien
aatattacgagccccaaaatgatgaaaagcaat

SEQ ID NO: 901452 - DNA, 33 bp, Homo sapien
aatattacgagccccagaatgatgaaaagcaat

SEQ ID NO: 901453 - DNA, 33 bp, Homo sapien
ttcttgaaaactcaaactgaggacactgttcac

SEQ ID NO: 901454 - DNA, 33 bp, Homo sapien
ttcttgaaaactcaaattgaggacactgttcac

SEQ ID NO: 901455 - DNA, 33 bp, Homo sapien
aataaatgtgaagatccagttttggtgcagggc

SEQ ID NO: 901456 - DNA, 33 bp, Homo sapien
aataaatgtgaagatctagttttggtgcagggc

SEQ ID NO: 901457 - DNA, 33 bp, Homo sapien
atcaacgtgggagaaacctcctaggcatttctc

SEQ ID NO: 901458 - DNA, 33 bp, Homo sapien
atcaacgtgggagaaagctcctaggcatttctc

SEQ ID NO: 901459 - DNA, 33 bp, Homo sapien
ctgcattcaaacacaacccacaggtcatctcta

SEQ ID NO: 901460 - DNA, 33 bp, Homo sapien
ctgcattcaaacacaatccacaggtcatctcta

SEQ ID NO: 901461 - DNA, 33 bp, Homo sapien
cctttgagaaaagtcaagcttggccagtcacaa

SEQ ID NO: 901462 - DNA, 33 bp, Homo sapien
cctttgagaaaagtcaggcttggccagtcacaa

SEQ ID NO: 901463 - DNA, 33 bp, Homo sapien
cccagacactcagatgcataggtgagagatcga

SEQ ID NO: 901464 - DNA, 33 bp, Homo sapien
cccagacactcagatggataggtgagagatcga

SEQ ID NO: 901465 - DNA, 33 bp, Homo sapien
ctctcagaacttcctcaataccaaaatggcctg

SEQ ID NO: 901466 - DNA, 33 bp, Homo sapien
ctctcagaacttcctcgataccaaaatggcctg

SEQ ID NO: 901467 - DNA, 33 bp, Homo sapien
aagaccagagtaagataatccaaaaagtataac

SEQ ID NO: 901468 - DNA, 33 bp, Homo sapien
aagaccagagtaagatgatccaaaaagtataac

SEQ ID NO: 901469 - DNA, 33 bp, Homo sapien
ggatagtaagaagtaacctttgagaagtaacaa

SEQ ID NO: 901470 - DNA, 33 bp, Homo sapien
ggatagtaagaagtaatctttgagaagtaacaa

SEQ ID NO: 901471 - DNA, 33 bp, Homo sapien
gggcaatgcggacgaacaagtagcagttctaga

SEQ ID NO: 901472 - DNA, 33 bp, Homo sapien
gggcaatgcggacgaagaagtagcagttctaga

SEQ ID NO: 901473 - DNA, 33 bp, Homo sapien
tccaacaaagtggcaactaaatggtgtcaatgg

SEQ ID NO: 901474 - DNA, 33 bp, Homo sapien
tccaacaaagtggcaattaaatggtgtcaatgg

SEQ ID NO: 901475 - DNA, 33 bp, Homo sapien
tggatttgcagctcccagggaaagaaaagggaa

SEQ ID NO: 901476 - DNA, 33 bp, Homo sapien
tggatttgcagctcccggggaaagaaaagggaa

SEQ ID NO: 901477 - DNA, 33 bp, Homo sapien
gttgtggaatggtgccaatgaacataatgaaca

SEQ ID NO: 901478 - DNA, 33 bp, Homo sapien
gttgtggaatggtgccgatgaacataatgaaca

SEQ ID NO: 901479 - DNA, 33 bp, Homo sapien
tgggcccaattctgcacggagaactgatacaga

SEQ ID NO: 901480 - DNA, 33 bp, Homo sapien
tgggcccaattctgcatggagaactgatacaga

SEQ ID NO: 901481 - DNA, 33 bp, Homo sapien
atttccagcagaaacccagattttcctagcagt

SEQ ID NO: 901482 - DNA, 33 bp, Homo sapien
atttccagcagaaacctagattttcctagcagt

SEQ ID NO: 901483 - DNA, 33 bp, Homo sapien
ttcatatccaagtcccccgtaactgtgtctgtt

SEQ ID NO: 901484 - DNA, 33 bp, Homo sapien
ttcatatccaagtccctcgtaactgtgtctgtt

SEQ ID NO: 901485 - DNA, 33 bp, Homo sapien
tgtttgaggaataaaacagccagactgtctctg

SEQ ID NO: 901486 - DNA, 33 bp, Homo sapien
tgtttgaggaataaaatagccagactgtctctg

SEQ ID NO: 901487 - DNA, 33 bp, Homo sapien
gactgggaatggttctaaaagatcctttgagtt

SEQ ID NO: 901488 - DNA, 33 bp, Homo sapien
gactgggaatggttctgaaagatcctttgagtt

SEQ ID NO: 901489 - DNA, 33 bp, Homo sapien
tttcttgaacacttacaatgtaccatccccaca

SEQ ID NO: 901490 - DNA, 33 bp, Homo sapien
tttcttgaacacttaccatgtaccatccccaca

SEQ ID NO: 901491 - DNA, 33 bp, Homo sapien
ttctactggaaggtgcacagtagaaataaatgc

SEQ ID NO: 901492 - DNA, 33 bp, Homo sapien
ttctactggaaggtgcgcagtagaaataaatgc

SEQ ID NO: 901493 - DNA, 33 bp, Homo sapien
acaagcagcctgcttcactgcttaaaagggatg

SEQ ID NO: 901494 - DNA, 33 bp, Homo sapien
acaagcagcctgcttctctgcttaaaagggatg

SEQ ID NO: 901495 - DNA, 33 bp, Homo sapien
cccatctgtggcaatccaggacaagcagagcca

SEQ ID NO: 901496 - DNA, 33 bp, Homo sapien
cccatctgtggcaatcgaggacaagcagagcca

SEQ ID NO: 901497 - DNA, 33 bp, Homo sapien
atcatcaaaaagacataaagtgacaagtagtcc

SEQ ID NO: 901498 - DNA, 33 bp, Homo sapien
atcatcaaaaagacatgaagtgacaagtagtcc

SEQ ID NO: 901499 - DNA, 33 bp, Homo sapien
taacccctggtaaccacggatatctttgtagtc

SEQ ID NO: 901500 - DNA, 33 bp, Homo sapien
taacccctggtaaccatggatatctttgtagtc

SEQ ID NO: 901501 - DNA, 33 bp, Homo sapien
aaaaatgaacctaaaactaacgatcttaaatga

SEQ ID NO: 901502 - DNA, 33 bp, Homo sapien
aaaaatgaacctaaaattaacgatcttaaatga

SEQ ID NO: 901503 - DNA, 33 bp, Homo sapien
cagcctaacacatgtacattcaatgcaatatca

SEQ ID NO: 901504 - DNA, 33 bp, Homo sapien
cagcctaacacatgtagattcaatgcaatatca

SEQ ID NO: 901505 - DNA, 33 bp, Homo sapien
gtagccttctcagttaccggattgattgtcacc

SEQ ID NO: 901506 - DNA, 33 bp, Homo sapien
gtagccttctcagttatcggattgattgtcacc

SEQ ID NO: 901507 - DNA, 33 bp, Homo sapien
catacacaaggctcataaggaactggtttctga

SEQ ID NO: 901508 - DNA, 33 bp, Homo sapien
catacacaaggctcatcaggaactggtttctga

SEQ ID NO: 901509 - DNA, 33 bp, Homo sapien
gtattttcacatctccaagttacagaagaagaa

SEQ ID NO: 901510 - DNA, 33 bp, Homo sapien
gtattttcacatctccgagttacagaagaagaa

SEQ ID NO: 901511 - DNA, 33 bp, Homo sapien
cttctatttcacttaagacctcatctactgttt

SEQ ID NO: 901512 - DNA, 33 bp, Homo sapien
cttctatttcacttaatacctcatctactgttt

SEQ ID NO: 901513 - DNA, 33 bp, Homo sapien
tatatttgaaatcacactgagagagcacactgc

SEQ ID NO: 901514 - DNA, 33 bp, Homo sapien
tatatttgaaatcacattgagagagcacactgc

SEQ ID NO: 901515 - DNA, 33 bp, Homo sapien
agaactagatactacccgacttataaaaatacg

SEQ ID NO: 901516 - DNA, 33 bp, Homo sapien
agaactagatactacctgacttataaaaatacg

SEQ ID NO: 901517 - DNA, 33 bp, Homo sapien
aataaaacttggataacggcaaatttgtttgtg

SEQ ID NO: 901518 - DNA, 33 bp, Homo sapien
aataaaacttggataatggcaaatttgtttgtg

SEQ ID NO: 901519 - DNA, 33 bp, Homo sapien
gctattttgtctacatcaacaatcatttgctta

SEQ ID NO: 901520 - DNA, 33 bp, Homo sapien
gctattttgtctacattaacaatcatttgctta

SEQ ID NO: 901521 - DNA, 33 bp, Homo sapien
tcattgccatgtaacaaaatataaccgtggaag

SEQ ID NO: 901522 - DNA, 33 bp, Homo sapien
tcattgccatgtaacagaatataaccgtggaag

SEQ ID NO: 901523 - DNA, 33 bp, Homo sapien
cagctgtaagaagaaacagggttgatacatgcc

SEQ ID NO: 901524 - DNA, 33 bp, Homo sapien
cagctgtaagaagaaatagggttgatacatgcc

SEQ ID NO: 901525 - DNA, 33 bp, Homo sapien
gagaaaagctcagatgaaatcagttttacttct

SEQ ID NO: 901526 - DNA, 33 bp, Homo sapien
gagaaaagctcagatggaatcagttttacttct

SEQ ID NO: 901527 - DNA, 33 bp, Homo sapien
ggataagtctgatggccacatgctgcaaatgga

SEQ ID NO: 901528 - DNA, 33 bp, Homo sapien
ggataagtctgatggctacatgctgcaaatgga

SEQ ID NO: 901529 - DNA, 33 bp, Homo sapien
attatgagaattcccacgttatgagagctacaa

SEQ ID NO: 901530 - DNA, 33 bp, Homo sapien
attatgagaattcccatgttatgagagctacaa

SEQ ID NO: 901531 - DNA, 33 bp, Homo sapien
accaccctagtttggccatatcatttaagaatc

SEQ ID NO: 901532 - DNA, 33 bp, Homo sapien
accaccctagtttggctatatcatttaagaatc

SEQ ID NO: 901533 - DNA, 33 bp, Homo sapien
gtggctaaacacatggaaacgctgagaactgac

SEQ ID NO: 901534 - DNA, 33 bp, Homo sapien
gtggctaaacacatggcaacgctgagaactgac

SEQ ID NO: 901535 - DNA, 33 bp, Homo sapien
aaggaaaagaaaacaacattgtatctgcacaat

SEQ ID NO: 901536 - DNA, 33 bp, Homo sapien
aaggaaaagaaaacaagattgtatctgcacaat

SEQ ID NO: 901537 - DNA, 33 bp, Homo sapien
aaaccttcaacaacaaagatcttcacattgggg

SEQ ID NO: 901538 - DNA, 33 bp, Homo sapien
aaaccttcaacaacaaggatcttcacattgggg

SEQ ID NO: 901539 - DNA, 33 bp, Homo sapien
tttacacatgaatttaaaaaaatcacagacccc

SEQ ID NO: 901540 - DNA, 33 bp, Homo sapien
tttacacatgaatttacaaaaatcacagacccc

SEQ ID NO: 901541 - DNA, 33 bp, Homo sapien
cagcaatacgactgggaagcaatcttctaatta

SEQ ID NO: 901542 - DNA, 33 bp, Homo sapien
cagcaatacgactggggagcaatcttctaatta

SEQ ID NO: 901543 - DNA, 33 bp, Homo sapien
catgcacaggaagaacagaaaattcctaataag

SEQ ID NO: 901544 - DNA, 33 bp, Homo sapien
catgcacaggaagaacggaaaattcctaataag

SEQ ID NO: 901545 - DNA, 33 bp, Homo sapien
agtttacagaatctgacgaaatcctgccaacac

SEQ ID NO: 901546 - DNA, 33 bp, Homo sapien
agtttacagaatctgatgaaatcctgccaacac

SEQ ID NO: 901547 - DNA, 33 bp, Homo sapien
ccttacttgagacaataaagttcagatcataaa

SEQ ID NO: 901548 - DNA, 33 bp, Homo sapien
ccttacttgagacaatgaagttcagatcataaa

SEQ ID NO: 901549 - DNA, 33 bp, Homo sapien
tgtctcaacaaatttaagaatgtatatgcctct

SEQ ID NO: 901550 - DNA, 33 bp, Homo sapien
tgtctcaacaaatttaggaatgtatatgcctct

SEQ ID NO: 901551 - DNA, 33 bp, Homo sapien
agctgtcagagcctcacagcttagtacagctcc

SEQ ID NO: 901552 - DNA, 33 bp, Homo sapien
agctgtcagagcctcatagcttagtacagctcc

SEQ ID NO: 901553 - DNA, 33 bp, Homo sapien
ctagccttcctgatgacgacttttcacagtaat

SEQ ID NO: 901554 - DNA, 33 bp, Homo sapien
ctagccttcctgatgatgacttttcacagtaat

SEQ ID NO: 901555 - DNA, 33 bp, Homo sapien
gattcagagaggcaaaaaactgcgaagggttgg

SEQ ID NO: 901556 - DNA, 33 bp, Homo sapien
gattcagagaggcaaagaactgcgaagggttgg

SEQ ID NO: 901557 - DNA, 33 bp, Homo sapien
gagtggggactgagataaaaggacagatcagga

SEQ ID NO: 901558 - DNA, 33 bp, Homo sapien
gagtggggactgagatgaaaggacagatcagga

SEQ ID NO: 901559 - DNA, 33 bp, Homo sapien
atagagaggtcatgcaaaataaagactgagaat

SEQ ID NO: 901560 - DNA, 33 bp, Homo sapien
atagagaggtcatgcagaataaagactgagaat

SEQ ID NO: 901561 - DNA, 33 bp, Homo sapien
ctcatggcttagaaaacacacatttattatctt

SEQ ID NO: 901562 - DNA, 33 bp, Homo sapien
ctcatggcttagaaaagacacatttattatctt

SEQ ID NO: 901563 - DNA, 33 bp, Homo sapien
tgtcttgttctgcagacgaaacctctctcgggt

SEQ ID NO: 901564 - DNA, 33 bp, Homo sapien
tgtcttgttctgcagatgaaacctctctcgggt

SEQ ID NO: 901565 - DNA, 33 bp, Homo sapien
cagcactttggaacaacaaggcaggcagatcgc

SEQ ID NO: 901566 - DNA, 33 bp, Homo sapien
cagcactttggaacaataaggcaggcagatcgc

SEQ ID NO: 901567 - DNA, 33 bp, Homo sapien
ccttctgtgtctgtgacgttcagtctgagtggt

SEQ ID NO: 901568 - DNA, 33 bp, Homo sapien
ccttctgtgtctgtgatgttcagtctgagtggt

SEQ ID NO: 901569 - DNA, 33 bp, Homo sapien
gagggctatttgtccgcagagctcttgaatatt

SEQ ID NO: 901570 - DNA, 33 bp, Homo sapien
gagggctatttgtccggagagctcttgaatatt

SEQ ID NO: 901571 - DNA, 33 bp, Homo sapien
cttctggctacagacacaggtgaggatgtggct

SEQ ID NO: 901572 - DNA, 33 bp, Homo sapien
cttctggctacagacataggtgaggatgtggct

SEQ ID NO: 901573 - DNA, 33 bp, Homo sapien
tttgaatctgatgatacatggttagaatacagg

SEQ ID NO: 901574 - DNA, 33 bp, Homo sapien
tttgaatctgatgatatatggttagaatacagg

SEQ ID NO: 901575 - DNA, 33 bp, Homo sapien
aggtgaacaaactgcaatctttatacttccaag

SEQ ID NO: 901576 - DNA, 33 bp, Homo sapien
aggtgaacaaactgcattctttatacttccaag

SEQ ID NO: 901577 - DNA, 33 bp, Homo sapien
gctattttcccaacaaccatcttagcaaatggt

SEQ ID NO: 901578 - DNA, 33 bp, Homo sapien
gctattttcccaacaagcatcttagcaaatggt

SEQ ID NO: 901579 - DNA, 33 bp, Homo sapien
aatgtctggaaagtgagattcactctgttcgaa

SEQ ID NO: 901580 - DNA, 33 bp, Homo sapien
aatgtctggaaagtgatattcactctgttcgaa

SEQ ID NO: 901581 - DNA, 33 bp, Homo sapien
cttggatatattaccacgtgctatttctgcttt

SEQ ID NO: 901582 - DNA, 33 bp, Homo sapien
cttggatatattaccatgtgctatttctgcttt

SEQ ID NO: 901583 - DNA, 33 bp, Homo sapien
actttttatgtgcagacactttgtcatgaattt

SEQ ID NO: 901584 - DNA, 33 bp, Homo sapien
actttttatgtgcagatactttgtcatgaattt

SEQ ID NO: 901585 - DNA, 33 bp, Homo sapien
tctgaattgctatcccaagaactttttatgtgc

SEQ ID NO: 901586 - DNA, 33 bp, Homo sapien
tctgaattgctatcccgagaactttttatgtgc

SEQ ID NO: 901587 - DNA, 33 bp, Homo sapien
gaactaaaggctgacaatcactttcaagtggat

SEQ ID NO: 901588 - DNA, 33 bp, Homo sapien
gaactaaaggctgacagtcactttcaagtggat

SEQ ID NO: 901589 - DNA, 33 bp, Homo sapien; identical to SEQ ID NO: 901587

SEQ ID NO: 901590 - DNA, 33 bp, Homo sapien; identical to SEQ ID NO: 901588

SEQ ID NO: 901591 - DNA, 33 bp, Homo sapien
atctctatcctgtagacgtgtatagaagctaag

SEQ ID NO: 901592 - DNA, 33 bp, Homo sapien
atctctatcctgtagatgtgtatagaagctaag

SEQ ID NO: 901593 - DNA, 33 bp, Homo sapien
gagactcagtcatcacaagaaaataatccaaag

SEQ ID NO: 901594 - DNA, 33 bp, Homo sapien
gagactcagtcatcacgagaaaataatccaaag

SEQ ID NO: 901595 - DNA, 33 bp, Homo sapien
attattttaaaagtgacatttaccctgacaccc

SEQ ID NO: 901596 - DNA, 33 bp, Homo sapien
attattttaaaagtgatatttaccctgacaccc

SEQ ID NO: 901597 - DNA, 33 bp, Homo sapien
gtgagatggtatttggcatggtggttttgattt

SEQ ID NO: 901598 - DNA, 33 bp, Homo sapien
gtgagatggtatttggtatggtggttttgattt

SEQ ID NO: 901599 - DNA, 33 bp, Homo sapien
aacatttaagggcaggaaaagctaatagtaatt

SEQ ID NO: 901600 - DNA, 33 bp, Homo sapien
aacatttaagggcagggaaagctaatagtaatt

SEQ ID NO: 901601 - DNA, 33 bp, Homo sapien
taaaggagatgaaaacacttgctacatgggctg

SEQ ID NO: 901602 - DNA, 33 bp, Homo sapien
taaaggagatgaaaacgcttgctacatgggctg

SEQ ID NO: 901603 - DNA, 33 bp, Homo sapien
cttcttcaggcagttaaaactctccagccccaa

SEQ ID NO: 901604 - DNA, 33 bp, Homo sapien
cttcttcaggcagttacaactctccagccccaa

SEQ ID NO: 901605 - DNA, 33 bp, Homo sapien
atgcaattacaattcaatatgtctatgccaaaa

SEQ ID NO: 901606 - DNA, 33 bp, Homo sapien
atgcaattacaattcagtatgtctatgccaaaa

SEQ ID NO: 901607 - DNA, 33 bp, Homo sapien
gagctgaggtgagttacagaacttaagaaggaa

SEQ ID NO: 901608 - DNA, 33 bp, Homo sapien
gagctgaggtgagttatagaacttaagaaggaa

SEQ ID NO: 901609 - DNA, 33 bp, Homo sapien
acagtatatccattgcaagatgaactaacaatg

SEQ ID NO: 901610 - DNA, 33 bp, Homo sapien
acagtatatccattgccagatgaactaacaatg

SEQ ID NO: 901611 - DNA, 33 bp, Homo sapien
gaggcaggaagaaagaagcaaagagcactttta

SEQ ID NO: 901612 - DNA, 33 bp, Homo sapien
gaggcaggaagaaagaggcaaagagcactttta

SEQ ID NO: 901613 - DNA, 33 bp, Homo sapien
tgtagcagataatgggaaatactaaggtgttaa

SEQ ID NO: 901614 - DNA, 33 bp, Homo sapien
tgtagcagataatggggaatactaaggtgttaa

SEQ ID NO: 901615 - DNA, 33 bp, Homo sapien
gccagaacatagatccagaagtcagaagactag

SEQ ID NO: 901616 - DNA, 33 bp, Homo sapien
gccagaacatagatccggaagtcagaagactag

SEQ ID NO: 901617 - DNA, 33 bp, Homo sapien
gcatggtgttggtttaagggtaggccatgcagc

SEQ ID NO: 901618 - DNA, 33 bp, Homo sapien
gcatggtgttggtttacgggtaggccatgcagc

SEQ ID NO: 901619 - DNA, 33 bp, Homo sapien
gattttgtaagttacccagtattgacttctatc

SEQ ID NO: 901620 - DNA, 33 bp, Homo sapien
gattttgtaagttacctagtattgacttctatc

SEQ ID NO: 901621 - DNA, 33 bp, Homo sapien
gctgactcaacactgtaaacaatgctaactcaa

SEQ ID NO: 901622 - DNA, 33 bp, Homo sapien
gctgactcaacactgtgaacaatgctaactcaa

SEQ ID NO: 901623 - DNA, 33 bp, Homo sapien
ttataatagaagtgcacaaatgatagagatgac

SEQ ID NO: 901624 - DNA, 33 bp, Homo sapien
ttataatagaagtgcagaaatgatagagatgac

SEQ ID NO: 901625 - DNA, 33 bp, Homo sapien
cttctcagggctgttgccaacaaaactgtgaag

SEQ ID NO: 901626 - DNA, 33 bp, Homo sapien
cttctcagggctgttggcaacaaaactgtgaag

SEQ ID NO: 901627 - DNA, 33 bp, Homo sapien
acgtggagcctcagtacgtcttgcaataaaaca

SEQ ID NO: 901628 - DNA, 33 bp, Homo sapien
acgtggagcctcagtaggtcttgcaataaaaca

SEQ ID NO: 901629 - DNA, 33 bp, Homo sapien
tgtttgcaagctgcgaagggattattttttttt

SEQ ID NO: 901630 - DNA, 33 bp, Homo sapien
tgtttgcaagctgcgaggggattattttttttt

SEQ ID NO: 901631 - DNA, 33 bp, Homo sapien
ttgtcagtggtttgcactcaagaataactcagg

SEQ ID NO: 901632 - DNA, 33 bp, Homo sapien
ttgtcagtggtttgcattcaagaataactcagg

SEQ ID NO: 901633 - DNA, 33 bp, Homo sapien
gcagcacaagaaggtaggaaggaggaatgactg

SEQ ID NO: 901634 - DNA, 33 bp, Homo sapien
gcagcacaagaaggtatgaaggaggaatgactg

SEQ ID NO: 901635 - DNA, 33 bp, Homo sapien
aattgggacaagaaacaccacatacgagtcaac

SEQ ID NO: 901636 - DNA, 33 bp, Homo sapien
aattgggacaagaaacgccacatacgagtcaac

SEQ ID NO: 901637 - DNA, 33 bp, Homo sapien
ctatgactggaaatgacgagagaggaaagttaa

SEQ ID NO: 901638 - DNA, 33 bp, Homo sapien
ctatgactggaaatgatgagagaggaaagttaa

SEQ ID NO: 901639 - DNA, 33 bp, Homo sapien
gtaattagcttaatgaaggccaaagctgtaatt

SEQ ID NO: 901640 - DNA, 33 bp, Homo sapien
gtaattagcttaatgagggccaaagctgtaatt

SEQ ID NO: 901641 - DNA, 33 bp, Homo sapien
gtcctgtgcattgtacaacgtgtagcagcatcc

SEQ ID NO: 901642 - DNA, 33 bp, Homo sapien
gtcctgtgcattgtacgacgtgtagcagcatcc

SEQ ID NO: 901643 - DNA, 33 bp, Homo sapien
ctctggaagtttaaacactctgagcaatggtga

SEQ ID NO: 901644 - DNA, 33 bp, Homo sapien
ctctggaagtttaaacgctctgagcaatggtga

SEQ ID NO: 901645 - DNA, 33 bp, Homo sapien
ataagattagttcctacgggaattgtctcttgg

SEQ ID NO: 901646 - DNA, 33 bp, Homo sapien
ataagattagttcctatgggaattgtctcttgg

SEQ ID NO: 901647 - DNA, 33 bp, Homo sapien
aagaatgcaaaagatacatagtactggagattt

SEQ ID NO: 901648 - DNA, 33 bp, Homo sapien
aagaatgcaaaagatatatagtactggagattt

SEQ ID NO: 901649 - DNA, 33 bp, Homo sapien
ctggatgtgtttcccaactctctttgatttgcg

SEQ ID NO: 901650 - DNA, 33 bp, Homo sapien
ctggatgtgtttcccagctctctttgatttgcg

SEQ ID NO: 901651 - DNA, 33 bp, Homo sapien
accagtactagctgctcaagacgtaatggatgc

SEQ ID NO: 901652 - DNA, 33 bp, Homo sapien
accagtactagctgcttaagacgtaatggatgc

SEQ ID NO: 901653 - DNA, 33 bp, Homo sapien
tcaagactttgtaaacaggaagaatctggagtg

SEQ ID NO: 901654 - DNA, 33 bp, Homo sapien
tcaagactttgtaaacgggaagaatctggagtg

SEQ ID NO: 901655 - DNA, 33 bp, Homo sapien
tgaaagcaaccttagacagaataggccaaggag

SEQ ID NO: 901656 - DNA, 33 bp, Homo sapien
tgaaagcaaccttagatagaataggccaaggag

SEQ ID NO: 901657 - DNA, 33 bp, Homo sapien
tgtttggccatttgcccaggactggtcacaaga

SEQ ID NO: 901658 - DNA, 33 bp, Homo sapien
tgtttggccatttgcctaggactggtcacaaga

SEQ ID NO: 901659 - DNA, 33 bp, Homo sapien
atgcagtatcttccaaatggagaagatgagttc

SEQ ID NO: 901660 - DNA, 33 bp, Homo sapien
atgcagtatcttccaagtggagaagatgagttc

SEQ ID NO: 901661 - DNA, 33 bp, Homo sapien
aactgataagatgctcacaggaaagagaagaaa

SEQ ID NO: 901662 - DNA, 33 bp, Homo sapien
aactgataagatgctcgcaggaaagagaagaaa

SEQ ID NO: 901663 - DNA, 33 bp, Homo sapien
acaggtgggacttcacagaattttctcatctgg

SEQ ID NO: 901664 - DNA, 33 bp, Homo sapien
acaggtgggacttcacggaattttctcatctgg

SEQ ID NO: 901665 - DNA, 33 bp, Homo sapien
ctatataaaaatcatcaatcgggcaatttttta

SEQ ID NO: 901666 - DNA, 33 bp, Homo sapien
ctatataaaaatcatcgatcgggcaatttttta

SEQ ID NO: 901667 - DNA, 33 bp, Homo sapien
agcaaaagctggattgcattctttttgaattcc

SEQ ID NO: 901668 - DNA, 33 bp, Homo sapien
agcaaaagctggattgtattctttttgaattcc

SEQ ID NO: 901669 - DNA, 33 bp, Homo sapien
atgggtcatcaggatacgagttgttatctcctt

SEQ ID NO: 901670 - DNA, 33 bp, Homo sapien
atgggtcatcaggataggagttgttatctcctt

SEQ ID NO: 901671 - DNA, 33 bp, Homo sapien
gcaccaggcttggagaagtgaccatgatttgca

SEQ ID NO: 901672 - DNA, 33 bp, Homo sapien
gcaccaggcttggagaggtgaccatgatttgca

SEQ ID NO: 901673 - DNA, 33 bp, Homo sapien
atttctccacaaattaggttatagagcttattc

SEQ ID NO: 901674 - DNA, 33 bp, Homo sapien
atttctccacaaattatgttatagagcttattc

SEQ ID NO: 901675 - DNA, 33 bp, Homo sapien
ggatagaatgacagaaatactcagaagaaggct

SEQ ID NO: 901676 - DNA, 33 bp, Homo sapien
ggatagaatgacagaagtactcagaagaaggct

SEQ ID NO: 901677 - DNA, 33 bp, Homo sapien
ccatcctgggaaagaacaagcgccattactgat

SEQ ID NO: 901678 - DNA, 33 bp, Homo sapien
ccatcctgggaaagaataagcgccattactgat

SEQ ID NO: 901679 - DNA, 33 bp, Homo sapien
ttcatataatccacaacggaatctggaattcag

SEQ ID NO: 901680 - DNA, 33 bp, Homo sapien
ttcatataatccacaatggaatctggaattcag

SEQ ID NO: 901681 - DNA, 33 bp, Homo sapien
tcccaaccctctacccactgaatttacagccct

SEQ ID NO: 901682 - DNA, 33 bp, Homo sapien
tcccaaccctctacccgctgaatttacagccct

SEQ ID NO: 901683 - DNA, 33 bp, Homo sapien
ctccaacttattatcaagtaaagcagaacagtg

SEQ ID NO: 901684 - DNA, 33 bp, Homo sapien
ctccaacttattatcaggtaaagcagaacagtg

SEQ ID NO: 901685 - DNA, 33 bp, Homo sapien
cattaccatatcttcaaatcgggttgtgccctt

SEQ ID NO: 901686 - DNA, 33 bp, Homo sapien
cattaccatatcttcagatcgggttgtgccctt

SEQ ID NO: 901687 - DNA, 33 bp, Homo sapien
acaaataatcacactacatccaaaaatgatact

SEQ ID NO: 901688 - DNA, 33 bp, Homo sapien
acaaataatcacactagatccaaaaatgatact

SEQ ID NO: 901689 - DNA, 33 bp, Homo sapien
atgccatatgtacccaacgaattatctagttaa

SEQ ID NO: 901690 - DNA, 33 bp, Homo sapien
atgccatatgtacccagcgaattatctagttaa

SEQ ID NO: 901691 - DNA, 33 bp, Homo sapien
tcaaccataatttataactctgtgtcaaacaaa

SEQ ID NO: 901692 - DNA, 33 bp, Homo sapien
tcaaccataatttatacctctgtgtcaaacaaa

SEQ ID NO: 901693 - DNA, 33 bp, Homo sapien
gaagttcctcaagtgaatatgttcaatgccaac

SEQ ID NO: 901694 - DNA, 33 bp, Homo sapien
gaagttcctcaagtgagtatgttcaatgccaac

SEQ ID NO: 901695 - DNA, 33 bp, Homo sapien
tatatctattctgaacaaaaacaatatccagtc

SEQ ID NO: 901696 - DNA, 33 bp, Homo sapien
tatatctattctgaacgaaaacaatatccagtc

SEQ ID NO: 901697 - DNA, 33 bp, Homo sapien
acttgaatcatagcaacgtccatgaaagactgc

SEQ ID NO: 901698 - DNA, 33 bp, Homo sapien
acttgaatcatagcaatgtccatgaaagactgc

SEQ ID NO: 901699 - DNA, 33 bp, Homo sapien
ttctgttacatttgtgcattgccataatattac

SEQ ID NO: 901700 - DNA, 33 bp, Homo sapien
ttctgttacatttgtgtattgccataatattac

SEQ ID NO: 901701 - DNA, 33 bp, Homo sapien
tgcacttgctagtataactatgaggcccactct

SEQ ID NO: 901702 - DNA, 33 bp, Homo sapien
tgcacttgctagtatacctatgaggcccactct

SEQ ID NO: 901703 - DNA, 33 bp, Homo sapien
agttagcatttcatcaccttttcagtgcagttt

SEQ ID NO: 901704 - DNA, 33 bp, Homo sapien
agttagcatttcatcatcttttcagtgcagttt

SEQ ID NO: 901705 - DNA, 33 bp, Homo sapien
ccaagaatgaaagtgacggatggtacttctcaa

SEQ ID NO: 901706 - DNA, 33 bp, Homo sapien
ccaagaatgaaagtgatggatggtacttctcaa

SEQ ID NO: 901707 - DNA, 33 bp, Homo sapien
gctaggcacagtcacacgccaaagtgtcagcca

SEQ ID NO: 901708 - DNA, 33 bp, Homo sapien
gctaggcacagtcacatgccaaagtgtcagcca

SEQ ID NO: 901709 - DNA, 33 bp, Homo sapien
gaaaggaggagacaaccaagggcagtgcagagc

SEQ ID NO: 901710 - DNA, 33 bp, Homo sapien
gaaaggaggagacaacgaagggcagtgcagagc

SEQ ID NO: 901711 - DNA, 33 bp, Homo sapien
acatataaatctttccgcacaggcttaataaca

SEQ ID NO: 901712 - DNA, 33 bp, Homo sapien
acatataaatctttcctcacaggcttaataaca

SEQ ID NO: 901713 - DNA, 33 bp, Homo sapien
aagattaaatgggaaaacaaaatggaagtaaag

SEQ ID NO: 901714 - DNA, 33 bp, Homo sapien
aagattaaatgggaaagcaaaatggaagtaaag

SEQ ID NO: 901715 - DNA, 33 bp, Homo sapien
cagtaaaccaagtcctaaagttttctgagacaa

SEQ ID NO: 901716 - DNA, 33 bp, Homo sapien
cagtaaaccaagtcctgaagttttctgagacaa

SEQ ID NO: 901717 - DNA, 33 bp, Homo sapien
aattgcacatacagaggcataataaaggccata

SEQ ID NO: 901718 - DNA, 33 bp, Homo sapien
aattgcacatacagagtcataataaaggccata

SEQ ID NO: 901719 - DNA, 33 bp, Homo sapien
gagcgtgttccagataaagatctacttctgtgg

SEQ ID NO: 901720 - DNA, 33 bp, Homo sapien
gagcgtgttccagatagagatctacttctgtgg

SEQ ID NO: 901721 - DNA, 33 bp, Homo sapien
ggagaatgctaagtaaaaaagtctgaaacctct

SEQ ID NO: 901722 - DNA, 33 bp, Homo sapien
ggagaatgctaagtaagaaagtctgaaacctct

SEQ ID NO: 901723 - DNA, 33 bp, Homo sapien
taataacactgggtcaatgaagcaaaacacatc

SEQ ID NO: 901724 - DNA, 33 bp, Homo sapien
taataacactgggtcagtgaagcaaaacacatc

SEQ ID NO: 901725 - DNA, 33 bp, Homo sapien
atgctagacttcagaagatctttaactgaatat

SEQ ID NO: 901726 - DNA, 33 bp, Homo sapien
atgctagacttcagaatatctttaactgaatat

SEQ ID NO: 901727 - DNA, 33 bp, Homo sapien
taatccctaggaacaaacattgttatcaccatt

SEQ ID NO: 901728 - DNA, 33 bp, Homo sapien
taatccctaggaacaagcattgttatcaccatt

SEQ ID NO: 901729 - DNA, 33 bp, Homo sapien
gttgattttagttccaaagtaactcattcaaac

SEQ ID NO: 901730 - DNA, 33 bp, Homo sapien
gttgattttagttccagagtaactcattcaaac

SEQ ID NO: 901731 - DNA, 33 bp, Homo sapien
aagcttcctggaggaagtgacatctaggctcag

SEQ ID NO: 901732 - DNA, 33 bp, Homo sapien
aagcttcctggaggaattgacatctaggctcag

SEQ ID NO: 901733 - DNA, 33 bp, Homo sapien
gagaaatgccttcttacatttcacgtcagactc

SEQ ID NO: 901734 - DNA, 33 bp, Homo sapien
gagaaatgccttcttatatttcacgtcagactc

SEQ ID NO: 901735 - DNA, 33 bp, Homo sapien
tcctaatcccaggtataaaatctggttttgctg

SEQ ID NO: 901736 - DNA, 33 bp, Homo sapien
tcctaatcccaggtatgaaatctggttttgctg

SEQ ID NO: 901737 - DNA, 33 bp, Homo sapien
ctgaaactttgggcaaactacccaattgtcagt

SEQ ID NO: 901738 - DNA, 33 bp, Homo sapien
ctgaaactttgggcaagctacccaattgtcagt

SEQ ID NO: 901739 - DNA, 33 bp, Homo sapien
tagggcttttcatagactaagtgaatattcact

SEQ ID NO: 901740 - DNA, 33 bp, Homo sapien
tagggcttttcatagattaagtgaatattcact

SEQ ID NO: 901741 - DNA, 33 bp, Homo sapien
aaaaaaaaagaattccacatagcctgttgtaaa

SEQ ID NO: 901742 - DNA, 33 bp, Homo sapien
aaaaaaaaagaattccgcatagcctgttgtaaa

SEQ ID NO: 901743 - DNA, 33 bp, Homo sapien
catagaagtttatatcacaaattctgttccttt

SEQ ID NO: 901744 - DNA, 33 bp, Homo sapien
catagaagtttatatcgcaaattctgttccttt

SEQ ID NO: 901745 - DNA, 33 bp, Homo sapien
actagtgcacctgcaaatgacggggagaatgga

SEQ ID NO: 901746 - DNA, 33 bp, Homo sapien
actagtgcacctgcaagtgacggggagaatgga

SEQ ID NO: 901747 - DNA, 33 bp, Homo sapien; identical to SEQ ID NO: 901745

SEQ ID NO: 901748 - DNA, 33 bp, Homo sapien; identical to SEQ ID NO: 901746

SEQ ID NO: 901749 - DNA, 33 bp, Homo sapien
ctaaataagtgagcctaaaggggtttcagcaca

SEQ ID NO: 901750 - DNA, 33 bp, Homo sapien
ctaaataagtgagcctgaaggggtttcagcaca

SEQ ID NO: 901751 - DNA, 33 bp, Homo sapien
ccattctatgatgcccaaaactaaaggaatagc

SEQ ID NO: 901752 - DNA, 33 bp, Homo sapien
ccattctatgatgcccgaaactaaaggaatagc

SEQ ID NO: 901753 - DNA, 33 bp, Homo sapien
aagaataagtgtaaagaaaatttgatgaatttt

SEQ ID NO: 901754 - DNA, 33 bp, Homo sapien
aagaataagtgtaaaggaaatttgatgaatttt

SEQ ID NO: 901755 - DNA, 33 bp, Homo sapien
aaatgaaacgtgttgccctgaagcaaagtaatt

SEQ ID NO: 901756 - DNA, 33 bp, Homo sapien
aaatgaaacgtgttgctctgaagcaaagtaatt

SEQ ID NO: 901757 - DNA, 33 bp, Homo sapien
gtaatacaaacccagcaaaggggtaattatcag

SEQ ID NO: 901758 - DNA, 33 bp, Homo sapien
gtaatacaaacccagcgaaggggtaattatcag

SEQ ID NO: 901759 - DNA, 33 bp, Homo sapien
agctttccaaagctaaacttttctttcctacat

SEQ ID NO: 901760 - DNA, 33 bp, Homo sapien
agctttccaaagctaaccttttctttcctacat

SEQ ID NO: 901761 - DNA, 33 bp, Homo sapien
tttgactgctgtccaacgagcactcacctggtc

SEQ ID NO: 901762 - DNA, 33 bp, Homo sapien
tttgactgctgtccaatgagcactcacctggtc

SEQ ID NO: 901763 - DNA, 33 bp, Homo sapien
ttctgcacttccaaaaccacaattggacctaga

SEQ ID NO: 901764 - DNA, 33 bp, Homo sapien
ttctgcacttccaaaatcacaattggacctaga

SEQ ID NO: 901765 - DNA, 33 bp, Homo sapien
ttgataagcactatttaaaaaacttgttagtta

SEQ ID NO: 901766 - DNA, 33 bp, Homo sapien
ttgataagcactattttaaaaacttgttagtta

SEQ ID NO: 901767 - DNA, 33 bp, Homo sapien
cgtttgtgccaggaaactgagaatctcctacat

SEQ ID NO: 901768 - DNA, 33 bp, Homo sapien
cgtttgtgccaggaaagtgagaatctcctacat

SEQ ID NO: 901769 - DNA, 33 bp, Homo sapien
agtaaataaggaggacgcaaggcataaacaaag

SEQ ID NO: 901770 - DNA, 33 bp, Homo sapien
agtaaataaggaggactcaaggcataaacaaag

SEQ ID NO: 901771 - DNA, 33 bp, Homo sapien
taatactcattaagtgaaagtattaggtcattt

SEQ ID NO: 901772 - DNA, 33 bp, Homo sapien
taatactcattaagtggaagtattaggtcattt

SEQ ID NO: 901773 - DNA, 33 bp, Homo sapien
tataaaaatgattgtaagagattataagggatt

SEQ ID NO: 901774 - DNA, 33 bp, Homo sapien
tataaaaatgattgtaggagattataagggatt

SEQ ID NO: 901775 - DNA, 33 bp, Homo sapien
agtagctctgtggctaaatagatatcaccatct

SEQ ID NO: 901776 - DNA, 33 bp, Homo sapien
agtagctctgtggctagatagatatcaccatct

SEQ ID NO: 901777 - DNA, 33 bp, Homo sapien
agccaactcagtggaacgctgcagaataaacag

SEQ ID NO: 901778 - DNA, 33 bp, Homo sapien
agccaactcagtggaatgctgcagaataaacag

SEQ ID NO: 901779 - DNA, 33 bp, Homo sapien
gttttcattttctgaacgttgtgaaaactgagg

SEQ ID NO: 901780 - DNA, 33 bp, Homo sapien
gttttcattttctgaatgttgtgaaaactgagg

SEQ ID NO: 901781 - DNA, 33 bp, Homo sapien
tttcatcttgcctgaaccagaggtgttttcatt

SEQ ID NO: 901782 - DNA, 33 bp, Homo sapien
tttcatcttgcctgaagcagaggtgttttcatt

SEQ ID NO: 901783 - DNA, 33 bp, Homo sapien
ttacgaaaatttccacaggtcctgcttaggaaa

SEQ ID NO: 901784 - DNA, 33 bp, Homo sapien
ttacgaaaatttccacgggtcctgcttaggaaa

SEQ ID NO: 901785 - DNA, 33 bp, Homo sapien
aattaaatagatcctgcaatttggaaggcattt

SEQ ID NO: 901786 - DNA, 33 bp, Homo sapien
aattaaatagatcctgtaatttggaaggcattt

SEQ ID NO: 901787 - DNA, 33 bp, Homo sapien
tataaaagggacacaaccatttttgctttaaaa

SEQ ID NO: 901788 - DNA, 33 bp, Homo sapien
tataaaagggacacaatcatttttgctttaaaa

SEQ ID NO: 901789 - DNA, 33 bp, Homo sapien
aaacaaaagctcctagcaggcagtttcattgtc

SEQ ID NO: 901790 - DNA, 33 bp, Homo sapien
aaacaaaagctcctagtaggcagtttcattgtc

SEQ ID NO: 901791 - DNA, 33 bp, Homo sapien
cttgtggcagaaccaactcatatcagcaggtga

SEQ ID NO: 901792 - DNA, 33 bp, Homo sapien
cttgtggcagaaccaattcatatcagcaggtga

SEQ ID NO: 901793 - DNA, 33 bp, Homo sapien
ggaaaattttttcttacgagcttgccttccaga

SEQ ID NO: 901794 - DNA, 33 bp, Homo sapien
ggaaaattttttcttatgagcttgccttccaga

SEQ ID NO: 901795 - DNA, 33 bp, Homo sapien
ctagcttgagctgtcaatgaaaaaagaaacata

SEQ ID NO: 901796 - DNA, 33 bp, Homo sapien
ctagcttgagctgtcagtgaaaaaagaaacata

SEQ ID NO: 901797 - DNA, 33 bp, Homo sapien
ggactattgttttgtcaagttatactttcattg

SEQ ID NO: 901798 - DNA, 33 bp, Homo sapien
ggactattgttttgtcgagttatactttcattg

SEQ ID NO: 901799 - DNA, 33 bp, Homo sapien
atgcagatagtcttgcacttttggcttttgtat

SEQ ID NO: 901800 - DNA, 33 bp, Homo sapien
atgcagatagtcttgcgcttttggcttttgtat

SEQ ID NO: 901801 - DNA, 33 bp, Homo sapien
aaaaccactccatctaaagaagccatcagtcac

SEQ ID NO: 901802 - DNA, 33 bp, Homo sapien
aaaaccactccatctacagaagccatcagtcac

SEQ ID NO: 901803 - DNA, 33 bp, Homo sapien
gtgctctttgaggaagaatgtcctgttcctccc

SEQ ID NO: 901804 - DNA, 33 bp, Homo sapien
gtgctctttgaggaaggatgtcctgttcctccc

SEQ ID NO: 901805 - DNA, 33 bp, Homo sapien
aagcacttcttaaaacaaaaatttcagaaaagt

SEQ ID NO: 901806 - DNA, 33 bp, Homo sapien
aagcacttcttaaaacgaaaatttcagaaaagt

SEQ ID NO: 901807 - DNA, 33 bp, Homo sapien
aagaacaagaggaaacggacgcaggcactgcat

SEQ ID NO: 901808 - DNA, 33 bp, Homo sapien
aagaacaagaggaaactgacgcaggcactgcat

SEQ ID NO: 901809 - DNA, 33 bp, Homo sapien
gcctggcaaattgcaaatgctaaaaagaaatga

SEQ ID NO: 901810 - DNA, 33 bp, Homo sapien
gcctggcaaattgcaagtgctaaaaagaaatga

SEQ ID NO: 901811 - DNA, 33 bp, Homo sapien
ttttttatcctattcagtcctcagtctgtttca

SEQ ID NO: 901812 - DNA, 33 bp, Homo sapien
ttttttatcctattcattcctcagtctgtttca

SEQ ID NO: 901813 - DNA, 33 bp, Homo sapien
caagagagagatgacacgtttgctaacagcaaa

SEQ ID NO: 901814 - DNA, 33 bp, Homo sapien
caagagagagatgacatgtttgctaacagcaaa

SEQ ID NO: 901815 - DNA, 33 bp, Homo sapien
agacagaggaagcatacaaagtgctgttattgc

SEQ ID NO: 901816 - DNA, 33 bp, Homo sapien
agacagaggaagcatagaaagtgctgttattgc

SEQ ID NO: 901817 - DNA, 33 bp, Homo sapien
tgactgctcattacagaaactttctgaaagacc

SEQ ID NO: 901818 - DNA, 33 bp, Homo sapien
tgactgctcattacaggaactttctgaaagacc

SEQ ID NO: 901819 - DNA, 33 bp, Homo sapien
tctggaactatgtttacgttgacttcacactgc

SEQ ID NO: 901820 - DNA, 33 bp, Homo sapien
tctggaactatgtttatgttgacttcacactgc

SEQ ID NO: 901821 - DNA, 33 bp, Homo sapien
tcatttaagcttttagaattcacagtagtctta

SEQ ID NO: 901822 - DNA, 33 bp, Homo sapien
tcatttaagcttttaggattcacagtagtctta

SEQ ID NO: 901823 - DNA, 33 bp, Homo sapien
agcagcaacagtgaggcaattttctccattgat

SEQ ID NO: 901824 - DNA, 33 bp, Homo sapien
agcagcaacagtgaggtaattttctccattgat

SEQ ID NO: 901825 - DNA, 33 bp, Homo sapien
tttccagaagttatccaaaggttaaactgtgtc

SEQ ID NO: 901826 - DNA, 33 bp, Homo sapien
tttccagaagttatccgaaggttaaactgtgtc

SEQ ID NO: 901827 - DNA, 33 bp, Homo sapien
gatgtctggagtcacaactgggaagacatgaat

SEQ ID NO: 901828 - DNA, 33 bp, Homo sapien
gatgtctggagtcacatctgggaagacatgaat

SEQ ID NO: 901829 - DNA, 33 bp, Homo sapien
agtttgcttgcaacacagaaatcgtgaaccaag

SEQ ID NO: 901830 - DNA, 33 bp, Homo sapien
agtttgcttgcaacacggaaatcgtgaaccaag

SEQ ID NO: 901831 - DNA, 33 bp, Homo sapien
aggagataatagatagcaagctcttcgaaggca

SEQ ID NO: 901832 - DNA, 33 bp, Homo sapien
aggagataatagatagtaagctcttcgaaggca

SEQ ID NO: 901833 - DNA, 33 bp, Homo sapien
attttgtctgtgattaccaggaaggttagagat

SEQ ID NO: 901834 - DNA, 33 bp, Homo sapien
attttgtctgtgattatcaggaaggttagagat

SEQ ID NO: 901835 - DNA, 33 bp, Homo sapien
atgtcctcaggcaaaaaaagattcccagaaaat

SEQ ID NO: 901836 - DNA, 33 bp, Homo sapien
atgtcctcaggcaaaacaagattcccagaaaat

SEQ ID NO: 901837 - DNA, 33 bp, Homo sapien
tccttttctctccaaccgcattcatttattttt

SEQ ID NO: 901838 - DNA, 33 bp, Homo sapien
tccttttctctccaactgcattcatttattttt

SEQ ID NO: 901839 - DNA, 33 bp, Homo sapien
agtgcttaaaaaaaaaactacctgacagatgct

SEQ ID NO: 901840 - DNA, 33 bp, Homo sapien
agtgcttaaaaaaaaacctacctgacagatgct

SEQ ID NO: 901841 - DNA, 33 bp, Homo sapien
caggacaccactgagaaaggatagcatgttgac

SEQ ID NO: 901842 - DNA, 33 bp, Homo sapien
caggacaccactgagagaggatagcatgttgac

SEQ ID NO: 901843 - DNA, 33 bp, Homo sapien
ctgtgtaacttgctcaaagcctcacagcacatg

SEQ ID NO: 901844 - DNA, 33 bp, Homo sapien
ctgtgtaacttgctcatagcctcacagcacatg

SEQ ID NO: 901845 - DNA, 33 bp, Homo sapien
gagtctggaatcccaaacacttcaataagcagc

SEQ ID NO: 901846 - DNA, 33 bp, Homo sapien
gagtctggaatcccaagcacttcaataagcagc

SEQ ID NO: 901847 - DNA, 33 bp, Homo sapien
ccccaggagcttcttacacatggactttgctgt

SEQ ID NO: 901848 - DNA, 33 bp, Homo sapien
ccccaggagcttcttagacatggactttgctgt

SEQ ID NO: 901849 - DNA, 33 bp, Homo sapien
acagatgcagatgaaaagccctgcccctggcca

SEQ ID NO: 901850 - DNA, 33 bp, Homo sapien
acagatgcagatgaaaggccctgcccctggcca

SEQ ID NO: 901851 - DNA, 33 bp, Homo sapien
ggctctaatgtgcaaacagattgtgtgaatttt

SEQ ID NO: 901852 - DNA, 33 bp, Homo sapien
ggctctaatgtgcaaatagattgtgtgaatttt

SEQ ID NO: 901853 - DNA, 33 bp, Homo sapien
gtggcttcagaaatgacggaacacggtgtgttc

SEQ ID NO: 901854 - DNA, 33 bp, Homo sapien
gtggcttcagaaatgagggaacacggtgtgttc

SEQ ID NO: 901855 - DNA, 33 bp, Homo sapien
ttggcttgcaatataacggaaacttgcagagaa

SEQ ID NO: 901856 - DNA, 33 bp, Homo sapien
ttggcttgcaatataatggaaacttgcagagaa

SEQ ID NO: 901857 - DNA, 33 bp, Homo sapien
aataaattcctcattacgctaaatcagcttgag

SEQ ID NO: 901858 - DNA, 33 bp, Homo sapien
aataaattcctcattatgctaaatcagcttgag

SEQ ID NO: 901859 - DNA, 33 bp, Homo sapien
caaaggtgaccaggacccaacttgttctaaatc

SEQ ID NO: 901860 - DNA, 33 bp, Homo sapien
caaaggtgaccaggactcaacttgttctaaatc

SEQ ID NO: 901861 - DNA, 33 bp, Homo sapien
aaagtgaaagagatgaaaaggaaaaaatctata

SEQ ID NO: 901862 - DNA, 33 bp, Homo sapien
aaagtgaaagagatgagaaggaaaaaatctata

SEQ ID NO: 901863 - DNA, 33 bp, Homo sapien
tcatttctgactaacactctgccagggccttag

SEQ ID NO: 901864 - DNA, 33 bp, Homo sapien
tcatttctgactaacattctgccagggccttag

SEQ ID NO: 901865 - DNA, 33 bp, Homo sapien
gttctgaggtaaacaccgattgaggattgaagt

SEQ ID NO: 901866 - DNA, 33 bp, Homo sapien
gttctgaggtaaacactgattgaggattgaagt

SEQ ID NO: 901867 - DNA, 33 bp, Homo sapien
actcctttctgctatcaccaaacaggaccaata

SEQ ID NO: 901868 - DNA, 33 bp, Homo sapien
actcctttctgctatcgccaaacaggaccaata

SEQ ID NO: 901869 - DNA, 33 bp, Homo sapien
gccaggattcttcagacaggaaagcaaatttag

SEQ ID NO: 901870 - DNA, 33 bp, Homo sapien
gccaggattcttcagagaggaaagcaaatttag

SEQ ID NO: 901871 - DNA, 33 bp, Homo sapien
gagtatgcagcttctagcacaaaggatatggcc

SEQ ID NO: 901872 - DNA, 33 bp, Homo sapien
gagtatgcagcttctatcacaaaggatatggcc

SEQ ID NO: 901873 - DNA, 33 bp, Homo sapien
gtgcctgctagggaaacactgcctcaaagtttg

SEQ ID NO: 901874 - DNA, 33 bp, Homo sapien
gtgcctgctagggaaatactgcctcaaagtttg

SEQ ID NO: 901875 - DNA, 33 bp, Homo sapien
ccacactgtggagcatcaagaggcaggaataat

SEQ ID NO: 901876 - DNA, 33 bp, Homo sapien
ccacactgtggagcatgaagaggcaggaataat

SEQ ID NO: 901877 - DNA, 33 bp, Homo sapien
tagcgctttcatcccccgagaagtcacccatgc

SEQ ID NO: 901878 - DNA, 33 bp, Homo sapien
tagcgctttcatcccctgagaagtcacccatgc

SEQ ID NO: 901879 - DNA, 33 bp, Homo sapien
ctgggcaacttgtccacgaggaaaagtctaagc

SEQ ID NO: 901880 - DNA, 33 bp, Homo sapien
ctgggcaacttgtccatgaggaaaagtctaagc

SEQ ID NO: 901881 - DNA, 33 bp, Homo sapien
aaagaagctgtaaataagacctcagtcagactg

SEQ ID NO: 901882 - DNA, 33 bp, Homo sapien
aaagaagctgtaaataggacctcagtcagactg

SEQ ID NO: 901883 - DNA, 33 bp, Homo sapien
catttatcctgattaccggaatgtttcaaggtc

SEQ ID NO: 901884 - DNA, 33 bp, Homo sapien
catttatcctgattactggaatgtttcaaggtc

SEQ ID NO: 901885 - DNA, 33 bp, Homo sapien
atctaacacttggaaacaggcaaataggcaaaa

SEQ ID NO: 901886 - DNA, 33 bp, Homo sapien
atctaacacttggaaataggcaaataggcaaaa

SEQ ID NO: 901887 - DNA, 33 bp, Homo sapien
agttttgtcaagtataagttaggctactgtaaa

SEQ ID NO: 901888 - DNA, 33 bp, Homo sapien
agttttgtcaagtatatgttaggctactgtaaa

SEQ ID NO: 901889 - DNA, 33 bp, Homo sapien
gaaggagatcttgtcacgtgctacaactcagat

SEQ ID NO: 901890 - DNA, 33 bp, Homo sapien
gaaggagatcttgtcatgtgctacaactcagat

SEQ ID NO: 901891 - DNA, 33 bp, Homo sapien
aaacacatagtttgaacgatgatgtgtagcact

SEQ ID NO: 901892 - DNA, 33 bp, Homo sapien
aaacacatagtttgaatgatgatgtgtagcact

SEQ ID NO: 901893 - DNA, 33 bp, Homo sapien
ccacaatacaaaggacaaagaggaaagctaggc

SEQ ID NO: 901894 - DNA, 33 bp, Homo sapien
ccacaatacaaaggacgaagaggaaagctaggc

SEQ ID NO: 901895 - DNA, 33 bp, Homo sapien
cagtaaatcaaccaaaagcccactatgtgtaag

SEQ ID NO: 901896 - DNA, 33 bp, Homo sapien
cagtaaatcaaccaaaggcccactatgtgtaag

SEQ ID NO: 901897 - DNA, 33 bp, Homo sapien
atataactaagaatcaacttacttgccatgaag

SEQ ID NO: 901898 - DNA, 33 bp, Homo sapien
atataactaagaatcagcttacttgccatgaag

SEQ ID NO: 901899 - DNA, 33 bp, Homo sapien
agtgtggatttaaaaagtaacaggctttgtatg

SEQ ID NO: 901900 - DNA, 33 bp, Homo sapien
agtgtggatttaaaaattaacaggctttgtatg

SEQ ID NO: 901901 - DNA, 33 bp, Homo sapien
gagcattctacccctaagtattttctagatcag

SEQ ID NO: 901902 - DNA, 33 bp, Homo sapien
gagcattctacccctacgtattttctagatcag

SEQ ID NO: 901903 - DNA, 33 bp, Homo sapien
caagagttctaaagcaagtgtttttcctggagg

SEQ ID NO: 901904 - DNA, 33 bp, Homo sapien
caagagttctaaagcaggtgtttttcctggagg

SEQ ID NO: 901905 - DNA, 33 bp, Homo sapien
tggctccaggcatatacacattggttagctggt

SEQ ID NO: 901906 - DNA, 33 bp, Homo sapien
tggctccaggcatatatacattggttagctggt

SEQ ID NO: 901907 - DNA, 33 bp, Homo sapien
agaattttggagaagaggttcaaaactcataca

SEQ ID NO: 901908 - DNA, 33 bp, Homo sapien
agaattttggagaagatgttcaaaactcataca

SEQ ID NO: 901909 - DNA, 33 bp, Homo sapien
tcttcatctctggaacaatttatcctgatgttc

SEQ ID NO: 901910 - DNA, 33 bp, Homo sapien
tcttcatctctggaacgatttatcctgatgttc

SEQ ID NO: 901911 - DNA, 33 bp, Homo sapien
ctcaaagacgaaggaaccattttaaaggactgt

SEQ ID NO: 901912 - DNA, 33 bp, Homo sapien
ctcaaagacgaaggaagcattttaaaggactgt

SEQ ID NO: 901913 - DNA, 33 bp, Homo sapien
catatcatatggtccaagcacttcactcacaaa

SEQ ID NO: 901914 - DNA, 33 bp, Homo sapien
catatcatatggtccaggcacttcactcacaaa

SEQ ID NO: 901915 - DNA, 33 bp, Homo sapien
ccagcacgttcaattacaccagctttcactttc

SEQ ID NO: 901916 - DNA, 33 bp, Homo sapien
ccagcacgttcaattagaccagctttcactttc

SEQ ID NO: 901917 - DNA, 33 bp, Homo sapien
gtcagccttttatttaccttctctgcttggctg

SEQ ID NO: 901918 - DNA, 33 bp, Homo sapien
gtcagccttttatttatcttctctgcttggctg

SEQ ID NO: 901919 - DNA, 33 bp, Homo sapien
gataaatgaaatgaggaaggtgggtagcaaagc

SEQ ID NO: 901920 - DNA, 33 bp, Homo sapien
gataaatgaaatgagggaggtgggtagcaaagc

SEQ ID NO: 901921 - DNA, 33 bp, Homo sapien
atgctagctcatcaaacagaattaactacagta

SEQ ID NO: 901922 - DNA, 33 bp, Homo sapien
atgctagctcatcaaagagaattaactacagta

SEQ ID NO: 901923 - DNA, 33 bp, Homo sapien
caaattctgctcgtaccgtacctgcacttatat

SEQ ID NO: 901924 - DNA, 33 bp, Homo sapien
caaattctgctcgtactgtacctgcacttatat

SEQ ID NO: 901925 - DNA, 33 bp, Homo sapien
gtctttttctgtcccccaacctggagcaccgtg

SEQ ID NO: 901926 - DNA, 33 bp, Homo sapien
gtctttttctgtcccctaacctggagcaccgtg

SEQ ID NO: 901927 - DNA, 33 bp, Homo sapien
aggcagcatgcacattaaaccacagccttccag

SEQ ID NO: 901928 - DNA, 33 bp, Homo sapien
aggcagcatgcacatttaaccacagccttccag

SEQ ID NO: 901929 - DNA, 33 bp, Homo sapien
caggggacccagataacgcggcccagcagtcat

SEQ ID NO: 901930 - DNA, 33 bp, Homo sapien
caggggacccagataatgcggcccagcagtcat

SEQ ID NO: 901931 - DNA, 33 bp, Homo sapien
attcagaaactaaataaatacaggtgatggaga

SEQ ID NO: 901932 - DNA, 33 bp, Homo sapien
attcagaaactaaatacatacaggtgatggaga

SEQ ID NO: 901933 - DNA, 33 bp, Homo sapien
gacctgtttctacatcccactctagaccaaatg

SEQ ID NO: 901934 - DNA, 33 bp, Homo sapien
gacctgtttctacatctcactctagaccaaatg

SEQ ID NO: 901935 - DNA, 33 bp, Homo sapien
aatacacccaagaaaccgaatggaataacaatt

SEQ ID NO: 901936 - DNA, 33 bp, Homo sapien
aatacacccaagaaactgaatggaataacaatt

SEQ ID NO: 901937 - DNA, 33 bp, Homo sapien
cgggaagatgaaactgaaagacactgagagacc

SEQ ID NO: 901938 - DNA, 33 bp, Homo sapien
cgggaagatgaaactgcaagacactgagagacc

SEQ ID NO: 901939 - DNA, 33 bp, Homo sapien
acttaaagaacttatccaaaatacagatcatcc

SEQ ID NO: 901940 - DNA, 33 bp, Homo sapien
acttaaagaacttatcgaaaatacagatcatcc

SEQ ID NO: 901941 - DNA, 33 bp, Homo sapien
actgcatcttacatccagaagagctggtcctct

SEQ ID NO: 901942 - DNA, 33 bp, Homo sapien
actgcatcttacatccggaagagctggtcctct

SEQ ID NO: 901943 - DNA, 33 bp, Homo sapien
gctggctgtgaacttcaactcttttacctactc

SEQ ID NO: 901944 - DNA, 33 bp, Homo sapien
gctggctgtgaacttcgactcttttacctactc

SEQ ID NO: 901945 - DNA, 33 bp, Homo sapien
acaacagatgatacacaccaaattcaggatggt

SEQ ID NO: 901946 - DNA, 33 bp, Homo sapien
acaacagatgatacaccccaaattcaggatggt

SEQ ID NO: 901947 - DNA, 33 bp, Homo sapien
agagtgggggtaaatacagatagaaagatagga

SEQ ID NO: 901948 - DNA, 33 bp, Homo sapien
agagtgggggtaaatagagatagaaagatagga

SEQ ID NO: 901949 - DNA, 33 bp, Homo sapien
gttcttccatttactcaaacaatttggatgcag

SEQ ID NO: 901950 - DNA, 33 bp, Homo sapien
gttcttccatttactcgaacaatttggatgcag

SEQ ID NO: 901951 - DNA, 33 bp, Homo sapien
atgtgagcatctactgaagggaactgagctagg

SEQ ID NO: 901952 - DNA, 33 bp, Homo sapien
atgtgagcatctactgcagggaactgagctagg

SEQ ID NO: 901953 - DNA, 33 bp, Homo sapien
tgacaatataatataacgagagccactgtgtgt

SEQ ID NO: 901954 - DNA, 33 bp, Homo sapien
tgacaatataatataatgagagccactgtgtgt

SEQ ID NO: 901955 - DNA, 33 bp, Homo sapien
acttttatttttaaggaagtgcttgttatgggt

SEQ ID NO: 901956 - DNA, 33 bp, Homo sapien
acttttatttttaagggagtgcttgttatgggt

SEQ ID NO: 901957 - DNA, 33 bp, Homo sapien
agcgttaaattactgagccaggtgattttcatg

SEQ ID NO: 901958 - DNA, 33 bp, Homo sapien
agcgttaaattactgatccaggtgattttcatg

SEQ ID NO: 901959 - DNA, 33 bp, Homo sapien
tgacacagcattccaaatactcaactctagcaa

SEQ ID NO: 901960 - DNA, 33 bp, Homo sapien
tgacacagcattccaagtactcaactctagcaa

SEQ ID NO: 901961 - DNA, 33 bp, Homo sapien
gaaaatagattaaggaagatagagaatgagaga

SEQ ID NO: 901962 - DNA, 33 bp, Homo sapien
gaaaatagattaaggaggatagagaatgagaga

SEQ ID NO: 901963 - DNA, 33 bp, Homo sapien
tggtgtctgctacagacgtcaacaggatccaca

SEQ ID NO: 901964 - DNA, 33 bp, Homo sapien
tggtgtctgctacagatgtcaacaggatccaca

SEQ ID NO: 901965 - DNA, 33 bp, Homo sapien
agagtgtaagaaatcaggaagatagagagaaaa

SEQ ID NO: 901966 - DNA, 33 bp, Homo sapien
agagtgtaagaaatcatgaagatagagagaaaa

SEQ ID NO: 901967 - DNA, 33 bp, Homo sapien
gaagatattgcctccgaatgcctagtatcacaa

SEQ ID NO: 901968 - DNA, 33 bp, Homo sapien
gaagatattgcctccggatgcctagtatcacaa

SEQ ID NO: 901969 - DNA, 33 bp, Homo sapien
tcaccaagatccaacaagttacctgcctaagaa

SEQ ID NO: 901970 - DNA, 33 bp, Homo sapien
tcaccaagatccaacaggttacctgcctaagaa

SEQ ID NO: 901971 - DNA, 33 bp, Homo sapien
tgcatccctctgtcacaaggttatttggtattg

SEQ ID NO: 901972 - DNA, 33 bp, Homo sapien
tgcatccctctgtcacgaggttatttggtattg

SEQ ID NO: 901973 - DNA, 33 bp, Homo sapien
tttatatgattgttaacctcaccttgagacaca

SEQ ID NO: 901974 - DNA, 33 bp, Homo sapien
tttatatgattgttaagctcaccttgagacaca

SEQ ID NO: 901975 - DNA, 33 bp, Homo sapien
acagaataattcctagcataaggtgagctagga

SEQ ID NO: 901976 - DNA, 33 bp, Homo sapien
acagaataattcctagtataaggtgagctagga

SEQ ID NO: 901977 - DNA, 33 bp, Homo sapien
aattcatggcaccacaagagcttagagaacggc

SEQ ID NO: 901978 - DNA, 33 bp, Homo sapien
aattcatggcaccacaggagcttagagaacggc

SEQ ID NO: 901979 - DNA, 33 bp, Homo sapien
gtgcacttgtagactccatgacctgcttgctag

SEQ ID NO: 901980 - DNA, 33 bp, Homo sapien
gtgcacttgtagactctatgacctgcttgctag

SEQ ID NO: 901981 - DNA, 33 bp, Homo sapien
agtgcttacggggaaccaagtctcttctaagtt

SEQ ID NO: 901982 - DNA, 33 bp, Homo sapien
agtgcttacggggaactaagtctcttctaagtt

SEQ ID NO: 901983 - DNA, 33 bp, Homo sapien
gatgtcaataaactgacgtgaaaaatgagctgg

SEQ ID NO: 901984 - DNA, 33 bp, Homo sapien
gatgtcaataaactgatgtgaaaaatgagctgg

SEQ ID NO: 901985 - DNA, 33 bp, Homo sapien
caggcctattttggtaaccaggagaaggggagg

SEQ ID NO: 901986 - DNA, 33 bp, Homo sapien
caggcctattttggtagccaggagaaggggagg

SEQ ID NO: 901987 - DNA, 33 bp, Homo sapien
aagtgtaaatcatttacgcaatttcgaagcagg

SEQ ID NO: 901988 - DNA, 33 bp, Homo sapien
aagtgtaaatcatttatgcaatttcgaagcagg

SEQ ID NO: 901989 - DNA, 33 bp, Homo sapien
tcatgtttatatgcaccagaatttctgcaaggg

SEQ ID NO: 901990 - DNA, 33 bp, Homo sapien
tcatgtttatatgcactagaatttctgcaaggg

SEQ ID NO: 901991 - DNA, 33 bp, Homo sapien
gttacccaggtgggcaatgaatttaatgacgag

SEQ ID NO: 901992 - DNA, 33 bp, Homo sapien
gttacccaggtgggcactgaatttaatgacgag

SEQ ID NO: 901993 - DNA, 33 bp, Homo sapien
accataacttgaggtacaatggggtgtgtattg

SEQ ID NO: 901994 - DNA, 33 bp, Homo sapien
accataacttgaggtagaatggggtgtgtattg

SEQ ID NO: 901995 - DNA, 33 bp, Homo sapien
gaaaaagtcaattatacatcgtcttccactcag

SEQ ID NO: 901996 - DNA, 33 bp, Homo sapien
gaaaaagtcaattatatatcgtcttccactcag

SEQ ID NO: 901997 - DNA, 33 bp, Homo sapien
tgaactcaaagttttcaaatcttatctcaggag

SEQ ID NO: 901998 - DNA, 33 bp, Homo sapien
tgaactcaaagttttcgaatcttatctcaggag

SEQ ID NO: 901999 - DNA, 33 bp, Homo sapien
tgactccaagaaagcaaataggattaacaggct

SEQ ID NO: 902000 - DNA, 33 bp, Homo sapien
tgactccaagaaagcagataggattaacaggct

SEQ ID NO: 902001 - DNA, 33 bp, Homo sapien
accagtggtgtttccacggttctttctgatgat

SEQ ID NO: 902002 - DNA, 33 bp, Homo sapien
accagtggtgtttccatggttctttctgatgat

SEQ ID NO: 902003 - DNA, 33 bp, Homo sapien
ctcaggatgaaacagaagtaacaagggtttgcc

SEQ ID NO: 902004 - DNA, 33 bp, Homo sapien
ctcaggatgaaacagaggtaacaagggtttgcc

SEQ ID NO: 902005 - DNA, 33 bp, Homo sapien
catcctctggcatccaagaaaatttattcatta

SEQ ID NO: 902006 - DNA, 33 bp, Homo sapien
catcctctggcatccacgaaaatttattcatta

SEQ ID NO: 902007 - DNA, 33 bp, Homo sapien
tgctaaaacactttggaagaccagaaatgagct

SEQ ID NO: 902008 - DNA, 33 bp, Homo sapien
tgctaaaacactttgggagaccagaaatgagct

SEQ ID NO: 902009 - DNA, 33 bp, Homo sapien
ggtggggaaacaatagcattagtagttggaaga

SEQ ID NO: 902010 - DNA, 33 bp, Homo sapien
ggtggggaaacaatagtattagtagttggaaga

SEQ ID NO: 902011 - DNA, 33 bp, Homo sapien
tatttagttatcctaacaccatttttttagaag

SEQ ID NO: 902012 - DNA, 33 bp, Homo sapien
tatttagttatcctaagaccatttttttagaag

SEQ ID NO: 902013 - DNA, 33 bp, Homo sapien
attttttaacagcacacgatttagagacagaca

SEQ ID NO: 902014 - DNA, 33 bp, Homo sapien
attttttaacagcacatgatttagagacagaca

SEQ ID NO: 902015 - DNA, 33 bp, Homo sapien
catgtttttttacctcacatcttcagggtctac

SEQ ID NO: 902016 - DNA, 33 bp, Homo sapien
catgtttttttacctcgcatcttcagggtctac

SEQ ID NO: 902017 - DNA, 33 bp, Homo sapien
tggctgtacaagtaacaacacaggggagtgaca

SEQ ID NO: 902018 - DNA, 33 bp, Homo sapien
tggctgtacaagtaacgacacaggggagtgaca

SEQ ID NO: 902019 - DNA, 33 bp, Homo sapien
aggtcatttttattccacaagtctgccttaatg

SEQ ID NO: 902020 - DNA, 33 bp, Homo sapien
aggtcatttttattcctcaagtctgccttaatg

SEQ ID NO: 902021 - DNA, 33 bp, Homo sapien; identical to SEQ ID NO: 902019

SEQ ID NO: 902022 - DNA, 33 bp, Homo sapien; identical to SEQ ID NO: 902020

SEQ ID NO: 902023 - DNA, 33 bp, Homo sapien; identical to SEQ ID NO: 902019

SEQ ID NO: 902024 - DNA, 33 bp, Homo sapien; identical to SEQ ID NO: 902020

SEQ ID NO: 902025 - DNA, 33 bp, Homo sapien
ccaatgccattcagaactggacccagttggatg

SEQ ID NO: 902026 - DNA, 33 bp, Homo sapien
ccaatgccattcagaattggacccagttggatg

SEQ ID NO: 902027 - DNA, 33 bp, Homo sapien; identical to SEQ ID NO: 902025

SEQ ID NO: 902028 - DNA, 33 bp, Homo sapien; identical to SEQ ID NO: 902026

SEQ ID NO: 902029 - DNA, 33 bp, Homo sapien
ttgtctttctttgaagcccagatccaagttagg

SEQ ID NO: 902030 - DNA, 33 bp, Homo sapien
ttgtctttctttgaagtccagatccaagttagg

SEQ ID NO: 902031 - DNA, 33 bp, Homo sapien
cccagtggatacttgcacaggagagcagtagta

SEQ ID NO: 902032 - DNA, 33 bp, Homo sapien
cccagtggatacttgcgcaggagagcagtagta

SEQ ID NO: 902033 - DNA, 33 bp, Homo sapien
gtatccactgggctcccaccctctcttgctgga

SEQ ID NO: 902034 - DNA, 33 bp, Homo sapien
gtatccactgggctcctaccctctcttgctgga

SEQ ID NO: 902035 - DNA, 33 bp, Homo sapien
ctggccctggagtgcagtatgggaaaattatag

SEQ ID NO: 902036 - DNA, 33 bp, Homo sapien
ctggccctggagtgcattatgggaaaattatag

SEQ ID NO: 902037 - DNA, 33 bp, Homo sapien
ctccaaaagtgaactcaagaagcaaaagtgagt

SEQ ID NO: 902038 - DNA, 33 bp, Homo sapien
ctccaaaagtgaactcgagaagcaaaagtgagt

SEQ ID NO: 902039 - DNA, 33 bp, Homo sapien
atcctacccacttcaaaaacactattctcagag

SEQ ID NO: 902040 - DNA, 33 bp, Homo sapien
atcctacccacttcaacaacactattctcagag

SEQ ID NO: 902041 - DNA, 33 bp, Homo sapien
aggatcttgcatgtaacgacatcaattctcatc

SEQ ID NO: 902042 - DNA, 33 bp, Homo sapien
aggatcttgcatgtaatgacatcaattctcatc

SEQ ID NO: 902043 - DNA, 33 bp, Homo sapien
tcagttgaaattgtatcagcactgtccccaaat

SEQ ID NO: 902044 - DNA, 33 bp, Homo sapien
tcagttgaaattgtattagcactgtccccaaat

SEQ ID NO: 902045 - DNA, 33 bp, Homo sapien
ctccctccttaaccacggacaacaatgaatctg

SEQ ID NO: 902046 - DNA, 33 bp, Homo sapien
ctccctccttaaccactgacaacaatgaatctg

SEQ ID NO: 902047 - DNA, 33 bp, Homo sapien
ccatgtggaggagttacgcagaaactgtggctt

SEQ ID NO: 902048 - DNA, 33 bp, Homo sapien
ccatgtggaggagttatgcagaaactgtggctt

SEQ ID NO: 902049 - DNA, 33 bp, Homo sapien
aggaaaagatggcagaactactttgtgtcctaa

SEQ ID NO: 902050 - DNA, 33 bp, Homo sapien
aggaaaagatggcagacctactttgtgtcctaa

SEQ ID NO: 902051 - DNA, 33 bp, Homo sapien
ttttatcatatctgggaaagaaggaatctgcat

SEQ ID NO: 902052 - DNA, 33 bp, Homo sapien
ttttatcatatctggggaagaaggaatctgcat

SEQ ID NO: 902053 - DNA, 33 bp, Homo sapien
cccaatagtatttctccgaagggacactggtaa

SEQ ID NO: 902054 - DNA, 33 bp, Homo sapien
cccaatagtatttctctgaagggacactggtaa

SEQ ID NO: 902055 - DNA, 33 bp, Homo sapien
tttcaacttgcacatcaaaaccttaaattatct

SEQ ID NO: 902056 - DNA, 33 bp, Homo sapien
tttcaacttgcacatcgaaaccttaaattatct

SEQ ID NO: 902057 - DNA, 33 bp, Homo sapien
agattgttgacctaaacgtgaaaagtgagacaa

SEQ ID NO: 902058 - DNA, 33 bp, Homo sapien
agattgttgacctaaatgtgaaaagtgagacaa

SEQ ID NO: 902059 - DNA, 33 bp, Homo sapien
gcctctgcatcaggaaactcttcaatttcagca

SEQ ID NO: 902060 - DNA, 33 bp, Homo sapien
gcctctgcatcaggaagctcttcaatttcagca

SEQ ID NO: 902061 - DNA, 33 bp, Homo sapien
aggtctcacctctaacaccgggaattacatctt

SEQ ID NO: 902062 - DNA, 33 bp, Homo sapien
aggtctcacctctaacgccgggaattacatctt

SEQ ID NO: 902063 - DNA, 33 bp, Homo sapien
tacctcatctttctaccatcaagctacagtgga

SEQ ID NO: 902064 - DNA, 33 bp, Homo sapien
tacctcatctttctactatcaagctacagtgga

SEQ ID NO: 902065 - DNA, 33 bp, Homo sapien
acagtgatcagtgttacgaagaacatggcttgg

SEQ ID NO: 902066 - DNA, 33 bp, Homo sapien
acagtgatcagtgttatgaagaacatggcttgg

SEQ ID NO: 902067 - DNA, 33 bp, Homo sapien
ttttaatttggtatgaacatgagcattttaggt

SEQ ID NO: 902068 - DNA, 33 bp, Homo sapien
ttttaatttggtatgatcatgagcattttaggt

SEQ ID NO: 902069 - DNA, 33 bp, Homo sapien
ttcttgtttctctaggacccaaatgtacagcta

SEQ ID NO: 902070 - DNA, 33 bp, Homo sapien
ttcttgtttctctaggccccaaatgtacagcta

SEQ ID NO: 902071 - DNA, 33 bp, Homo sapien
aagatccgctccacaaatactctcagtcctttc

SEQ ID NO: 902072 - DNA, 33 bp, Homo sapien
aagatccgctccacaattactctcagtcctttc

SEQ ID NO: 902073 - DNA, 33 bp, Homo sapien
atattgatcaagagccaatctgagagtggtgag

SEQ ID NO: 902074 - DNA, 33 bp, Homo sapien
atattgatcaagagcctatctgagagtggtgag

SEQ ID NO: 902075 - DNA, 33 bp, Homo sapien
tatttgtaaaaaatcaataagtgaacacacatt

SEQ ID NO: 902076 - DNA, 33 bp, Homo sapien
tatttgtaaaaaatcagtaagtgaacacacatt

SEQ ID NO: 902077 - DNA, 33 bp, Homo sapien
cagctatttgaggaaacgttcccatcagagata

SEQ ID NO: 902078 - DNA, 33 bp, Homo sapien
cagctatttgaggaaatgttcccatcagagata

SEQ ID NO: 902079 - DNA, 33 bp, Homo sapien
tggagcagttatgaatcatacagaggaaccagc

SEQ ID NO: 902080 - DNA, 33 bp, Homo sapien
tggagcagttatgaatgatacagaggaaccagc

SEQ ID NO: 902081 - DNA, 33 bp, Homo sapien
aggatgtgtgtggaaccgaatataacccagtta

SEQ ID NO: 902082 - DNA, 33 bp, Homo sapien
aggatgtgtgtggaactgaatataacccagtta

SEQ ID NO: 902083 - DNA, 33 bp, Homo sapien
gcctctaagctttccaatgagaaatctgctgcc

SEQ ID NO: 902084 - DNA, 33 bp, Homo sapien
gcctctaagctttccagtgagaaatctgctgcc

SEQ ID NO: 902085 - DNA, 33 bp, Homo sapien
gatttatgctggcctacgacatcctccttttat

SEQ ID NO: 902086 - DNA, 33 bp, Homo sapien
gatttatgctggcctatgacatcctccttttat

SEQ ID NO: 902087 - DNA, 33 bp, Homo sapien
aatagctgaggtggaacggaaggctgaccagga

SEQ ID NO: 902088 - DNA, 33 bp, Homo sapien
aatagctgaggtggaatggaaggctgaccagga

SEQ ID NO: 902089 - DNA, 33 bp, Homo sapien
tccacctcagctattaagtcttagtcatctggg

SEQ ID NO: 902090 - DNA, 33 bp, Homo sapien
tccacctcagctattatgtcttagtcatctggg

SEQ ID NO: 902091 - DNA, 33 bp, Homo sapien
catgtcaggtcaaagaacttttatcagttgaat

SEQ ID NO: 902092 - DNA, 33 bp, Homo sapien
catgtcaggtcaaagagcttttatcagttgaat

SEQ ID NO: 902093 - DNA, 33 bp, Homo sapien
catgggaataccactaactgacctcagcccaca

SEQ ID NO: 902094 - DNA, 33 bp, Homo sapien
catgggaataccactatctgacctcagcccaca

SEQ ID NO: 902095 - DNA, 33 bp, Homo sapien
tgtgaggtttttctctaaaatttactgttggaa

SEQ ID NO: 902096 - DNA, 33 bp, Homo sapien
tgtgaggtttttctctgaaatttactgttggaa

SEQ ID NO: 902097 - DNA, 33 bp, Homo sapien
tatcagagaatagtaaatcagtgaatcaaaaga

SEQ ID NO: 902098 - DNA, 33 bp, Homo sapien
tatcagagaatagtaagtcagtgaatcaaaaga

SEQ ID NO: 902099 - DNA, 33 bp, Homo sapien
ttaatctctgatggcacagtatttttttaattc

SEQ ID NO: 902100 - DNA, 33 bp, Homo sapien
ttaatctctgatggcatagtatttttttaattc

SEQ ID NO: 902101 - DNA, 33 bp, Homo sapien
gcccctgaggacctaaactgtattttgcatttt

SEQ ID NO: 902102 - DNA, 33 bp, Homo sapien
gcccctgaggacctaagctgtattttgcatttt

SEQ ID NO: 902103 - DNA, 33 bp, Homo sapien
gacggctcatatggcaaatatttatcaccttac

SEQ ID NO: 902104 - DNA, 33 bp, Homo sapien
gacggctcatatggcacatatttatcaccttac

SEQ ID NO: 902105 - DNA, 33 bp, Homo sapien
atatttatgacaagccaaaacatataaggaatt

SEQ ID NO: 902106 - DNA, 33 bp, Homo sapien
atatttatgacaagccgaaacatataaggaatt

SEQ ID NO: 902107 - DNA, 33 bp, Homo sapien
aagatacattcaaagcactgaagagagggaata

SEQ ID NO: 902108 - DNA, 33 bp, Homo sapien
aagatacattcaaagcgctgaagagagggaata

SEQ ID NO: 902109 - DNA, 33 bp, Homo sapien
taaaattagatagcaaactagtgcatttggaaa

SEQ ID NO: 902110 - DNA, 33 bp, Homo sapien
taaaattagatagcaagctagtgcatttggaaa

SEQ ID NO: 902111 - DNA, 33 bp, Homo sapien
tcatatatatttagaaatcatgagaacacacaa

SEQ ID NO: 902112 - DNA, 33 bp, Homo sapien
tcatatatatttagaagtcatgagaacacacaa

SEQ ID NO: 902113 - DNA, 33 bp, Homo sapien
tggtgtggaccttgcaaagcaatgcaaccttta

SEQ ID NO: 902114 - DNA, 33 bp, Homo sapien
tggtgtggaccttgcagagcaatgcaaccttta

SEQ ID NO: 902115 - DNA, 33 bp, Homo sapien
atgaactgaacgaagacgaaattctgcattttg

SEQ ID NO: 902116 - DNA, 33 bp, Homo sapien
atgaactgaacgaagatgaaattctgcattttg

SEQ ID NO: 902117 - DNA, 33 bp, Homo sapien
catgtggtcaggtgaaaggaaacagaacaatag

SEQ ID NO: 902118 - DNA, 33 bp, Homo sapien
catgtggtcaggtgaagggaaacagaacaatag

SEQ ID NO: 902119 - DNA, 33 bp, Homo sapien
atttcgttgtccaacacggtagctactaggcat

SEQ ID NO: 902120 - DNA, 33 bp, Homo sapien
atttcgttgtccaacatggtagctactaggcat

SEQ ID NO: 902121 - DNA, 33 bp, Homo sapien
cattaaaagacatggcacatatcactaagtaaa

SEQ ID NO: 902122 - DNA, 33 bp, Homo sapien
cattaaaagacatggcgcatatcactaagtaaa

SEQ ID NO: 902123 - DNA, 33 bp, Homo sapien
aggcacaatggtataaaataatggatctggtac

SEQ ID NO: 902124 - DNA, 33 bp, Homo sapien
aggcacaatggtataacataatggatctggtac

SEQ ID NO: 902125 - DNA, 33 bp, Homo sapien
agaaatagtggctaccaagcaaaactggatggt

SEQ ID NO: 902126 - DNA, 33 bp, Homo sapien
agaaatagtggctaccgagcaaaactggatggt

SEQ ID NO: 902127 - DNA, 33 bp, Homo sapien
aaatcgtgtattcagtaaaagcctcatcagaga

SEQ ID NO: 902128 - DNA, 33 bp, Homo sapien
aaatcgtgtattcagtgaaagcctcatcagaga

SEQ ID NO: 902129 - DNA, 33 bp, Homo sapien
aactcttcgaagtcacactacaaaataaaatga

SEQ ID NO: 902130 - DNA, 33 bp, Homo sapien
aactcttcgaagtcacgctacaaaataaaatga

SEQ ID NO: 902131 - DNA, 33 bp, Homo sapien
ttaattccaagttgtacgcaggataaaggaact

SEQ ID NO: 902132 - DNA, 33 bp, Homo sapien
ttaattccaagttgtatgcaggataaaggaact

SEQ ID NO: 902133 - DNA, 33 bp, Homo sapien
aacaaaaagcgttctacgaagcactcattaatg

SEQ ID NO: 902134 - DNA, 33 bp, Homo sapien
aacaaaaagcgttctatgaagcactcattaatg

SEQ ID NO: 902135 - DNA, 33 bp, Homo sapien
aataaatgttccccctaaattgtagagtacata

SEQ ID NO: 902136 - DNA, 33 bp, Homo sapien
aataaatgttccccctgaattgtagagtacata

SEQ ID NO: 902137 - DNA, 33 bp, Homo sapien
atcagcttcatgccaaatatggagatgcgtgag

SEQ ID NO: 902138 - DNA, 33 bp, Homo sapien
atcagcttcatgccaagtatggagatgcgtgag

SEQ ID NO: 902139 - DNA, 33 bp, Homo sapien
ttgaatcagttgttgcgctttggtattttttca

SEQ ID NO: 902140 - DNA, 33 bp, Homo sapien
ttgaatcagttgttgctctttggtattttttca

SEQ ID NO: 902141 - DNA, 33 bp, Homo sapien
ttcttttcaaggataacggtcattaggaagaaa

SEQ ID NO: 902142 - DNA, 33 bp, Homo sapien
ttcttttcaaggataatggtcattaggaagaaa

SEQ ID NO: 902143 - DNA, 33 bp, Homo sapien
tcaaataacagcaaataattccagatcttgaca

SEQ ID NO: 902144 - DNA, 33 bp, Homo sapien
tcaaataacagcaaatcattccagatcttgaca

SEQ ID NO: 902145 - DNA, 33 bp, Homo sapien
aataacatggccaccaacattataaatcagaaa

SEQ ID NO: 902146 - DNA, 33 bp, Homo sapien
aataacatggccaccaccattataaatcagaaa

SEQ ID NO: 902147 - DNA, 33 bp, Homo sapien
actgtcacaaaggtaacaggatatcatttaaag

SEQ ID NO: 902148 - DNA, 33 bp, Homo sapien
actgtcacaaaggtaataggatatcatttaaag

SEQ ID NO: 902149 - DNA, 33 bp, Homo sapien
gaatcagagtaccatcaagggaattaaacaaag

SEQ ID NO: 902150 - DNA, 33 bp, Homo sapien
gaatcagagtaccatcgagggaattaaacaaag

SEQ ID NO: 902151 - DNA, 33 bp, Homo sapien
gttagcctgtaatttcgatgtggtggttataaa

SEQ ID NO: 902152 - DNA, 33 bp, Homo sapien
gttagcctgtaatttctatgtggtggttataaa

SEQ ID NO: 902153 - DNA, 33 bp, Homo sapien
ttattataagagtcaaatgaaataaagtgtgta

SEQ ID NO: 902154 - DNA, 33 bp, Homo sapien
ttattataagagtcaactgaaataaagtgtgta

SEQ ID NO: 902155 - DNA, 33 bp, Homo sapien
agcagttaaaagcagagactccctgggttcagg

SEQ ID NO: 902156 - DNA, 33 bp, Homo sapien
agcagttaaaagcagatactccctgggttcagg

SEQ ID NO: 902157 - DNA, 33 bp, Homo sapien
tttgcactacaatgaaataacctaatgtcacat

SEQ ID NO: 902158 - DNA, 33 bp, Homo sapien
tttgcactacaatgaagtaacctaatgtcacat

SEQ ID NO: 902159 - DNA, 33 bp, Homo sapien
tctgttgggcccatcaatcgtctccattctgca

SEQ ID NO: 902160 - DNA, 33 bp, Homo sapien
tctgttgggcccatcagtcgtctccattctgca

SEQ ID NO: 902161 - DNA, 33 bp, Homo sapien
gtgtcttctaccatgacataaaaagcctcatgc

SEQ ID NO: 902162 - DNA, 33 bp, Homo sapien
gtgtcttctaccatgatataaaaagcctcatgc

SEQ ID NO: 902163 - DNA, 33 bp, Homo sapien
aatgtggggaagaagacagtaggagagatcaaa

SEQ ID NO: 902164 - DNA, 33 bp, Homo sapien
aatgtggggaagaagagagtaggagagatcaaa

SEQ ID NO: 902165 - DNA, 33 bp, Homo sapien
agcattagcataaatcagactataacaagaagc

SEQ ID NO: 902166 - DNA, 33 bp, Homo sapien
agcattagcataaatcggactataacaagaagc

SEQ ID NO: 902167 - DNA, 33 bp, Homo sapien
ctggtttccaggactacagtagattagaagcat

SEQ ID NO: 902168 - DNA, 33 bp, Homo sapien
ctggtttccaggactatagtagattagaagcat

SEQ ID NO: 902169 - DNA, 33 bp, Homo sapien
ttaccaatatttctacaatgttaccacaaaaat

SEQ ID NO: 902170 - DNA, 33 bp, Homo sapien
ttaccaatatttctacgatgttaccacaaaaat

SEQ ID NO: 902171 - DNA, 33 bp, Homo sapien
gcatttaaactagttcaatagtgtaaccatagg

SEQ ID NO: 902172 - DNA, 33 bp, Homo sapien
gcatttaaactagttcgatagtgtaaccatagg

SEQ ID NO: 902173 - DNA, 33 bp, Homo sapien
agtttttgctgagatacgttgccaaagttggct

SEQ ID NO: 902174 - DNA, 33 bp, Homo sapien
agtttttgctgagatatgttgccaaagttggct

SEQ ID NO: 902175 - DNA, 33 bp, Homo sapien
ttaaacatagtaagtgaaaaggataaatgagac

SEQ ID NO: 902176 - DNA, 33 bp, Homo sapien
ttaaacatagtaagtggaaaggataaatgagac

SEQ ID NO: 902177 - DNA, 33 bp, Homo sapien
tctgtgtgtgctgctggatcaagtttctgagcc

SEQ ID NO: 902178 - DNA, 33 bp, Homo sapien
tctgtgtgtgctgctgtatcaagtttctgagcc

SEQ ID NO: 902179 - DNA, 33 bp, Homo sapien
caccatgtgccttctcactctcaacagggggaa

SEQ ID NO: 902180 - DNA, 33 bp, Homo sapien
caccatgtgccttctcgctctcaacagggggaa

SEQ ID NO: 902181 - DNA, 33 bp, Homo sapien
caatatagaggttgagaaaatcacactgattag

SEQ ID NO: 902182 - DNA, 33 bp, Homo sapien
caatatagaggttgaggaaatcacactgattag

SEQ ID NO: 902183 - DNA, 33 bp, Homo sapien
tttatcatatctgaagacaggtgatgtaccttc

SEQ ID NO: 902184 - DNA, 33 bp, Homo sapien
tttatcatatctgaagtcaggtgatgtaccttc

SEQ ID NO: 902185 - DNA, 33 bp, Homo sapien
gcatgttctcacttataagcgggagctgaatga

SEQ ID NO: 902186 - DNA, 33 bp, Homo sapien
gcatgttctcacttatgagcgggagctgaatga

SEQ ID NO: 902187 - DNA, 33 bp, Homo sapien
acaaggttaggatcataagtatcaccctctttc

SEQ ID NO: 902188 - DNA, 33 bp, Homo sapien
acaaggttaggatcatcagtatcaccctctttc

SEQ ID NO: 902189 - DNA, 33 bp, Homo sapien
ccctgctgctgatatacgcctatcccaagacag

SEQ ID NO: 902190 - DNA, 33 bp, Homo sapien
ccctgctgctgatatatgcctatcccaagacag

SEQ ID NO: 902191 - DNA, 33 bp, Homo sapien
aagtgtccatattagccatctagtcagttcata

SEQ ID NO: 902192 - DNA, 33 bp, Homo sapien
aagtgtccatattagctatctagtcagttcata

SEQ ID NO: 902193 - DNA, 33 bp, Homo sapien
ttggccttcctagaacactgcttcataacctct

SEQ ID NO: 902194 - DNA, 33 bp, Homo sapien
ttggccttcctagaacgctgcttcataacctct

SEQ ID NO: 902195 - DNA, 33 bp, Homo sapien
tctagagaaaaaagacaagggcaaggacagagg

SEQ ID NO: 902196 - DNA, 33 bp, Homo sapien
tctagagaaaaaagacgagggcaaggacagagg

SEQ ID NO: 902197 - DNA, 33 bp, Homo sapien
ctgagatcctgatcaaccctccatggaccaaca

SEQ ID NO: 902198 - DNA, 33 bp, Homo sapien
ctgagatcctgatcaatcctccatggaccaaca

SEQ ID NO: 902199 - DNA, 33 bp, Homo sapien
aagatagagaaaataaaagtagtatcaacctca

SEQ ID NO: 902200 - DNA, 33 bp, Homo sapien
aagatagagaaaataacagtagtatcaacctca

SEQ ID NO: 902201 - DNA, 33 bp, Homo sapien
tagagaaatgttttaacgtattccccagtcttt

SEQ ID NO: 902202 - DNA, 33 bp, Homo sapien
tagagaaatgttttaatgtattccccagtcttt

SEQ ID NO: 902203 - DNA, 33 bp, Homo sapien; identical to SEQ ID NO: 902201

SEQ ID NO: 902204 - DNA, 33 bp, Homo sapien; identical to SEQ ID NO: 902202

SEQ ID NO: 902205 - DNA, 33 bp, Homo sapien
tgggtatgtcttcaaggaactttatttctacag

SEQ ID NO: 902206 - DNA, 33 bp, Homo sapien
tgggtatgtcttcaagtaactttatttctacag

SEQ ID NO: 902207 - DNA, 33 bp, Homo sapien
ggaagggccataagccccgttaagaatctgatg

SEQ ID NO: 902208 - DNA, 33 bp, Homo sapien
ggaagggccataagcctcgttaagaatctgatg

SEQ ID NO: 902209 - DNA, 33 bp, Homo sapien
gaagtgggagaatgagaacaatgtgagatgagg

SEQ ID NO: 902210 - DNA, 33 bp, Homo sapien
gaagtgggagaatgaggacaatgtgagatgagg

SEQ ID NO: 902211 - DNA, 33 bp, Homo sapien
ttctcaaaatgcccaaatgtccttcaacctcat

SEQ ID NO: 902212 - DNA, 33 bp, Homo sapien
ttctcaaaatgcccaagtgtccttcaacctcat

SEQ ID NO: 902213 - DNA, 33 bp, Homo sapien
gacttattctcttccgccctgtagcaaatttat

SEQ ID NO: 902214 - DNA, 33 bp, Homo sapien
gacttattctcttccgtcctgtagcaaatttat

SEQ ID NO: 902215 - DNA, 33 bp, Homo sapien
gtctttttaaatatgaagtttgcattaaaaatc

SEQ ID NO: 902216 - DNA, 33 bp, Homo sapien
gtctttttaaatatgaggtttgcattaaaaatc

SEQ ID NO: 902217 - DNA, 33 bp, Homo sapien
agttattcacattcaaaatttgttcttttcttt

SEQ ID NO: 902218 - DNA, 33 bp, Homo sapien
agttattcacattcaacatttgttcttttcttt

SEQ ID NO: 902219 - DNA, 33 bp, Homo sapien
acatatgagctaatatcacagggtctaacaggg

SEQ ID NO: 902220 - DNA, 33 bp, Homo sapien
acatatgagctaatattacagggtctaacaggg

SEQ ID NO: 902221 - DNA, 33 bp, Homo sapien
ccatgtggtgttttaacggtcataggatctaat

SEQ ID NO: 902222 - DNA, 33 bp, Homo sapien
ccatgtggtgttttaatggtcataggatctaat

SEQ ID NO: 902223 - DNA, 33 bp, Homo sapien
gataagctaaaggtaaagaatgtaaatcttatt

SEQ ID NO: 902224 - DNA, 33 bp, Homo sapien
gataagctaaaggtaaggaatgtaaatcttatt

SEQ ID NO: 902225 - DNA, 33 bp, Homo sapien
gcaggattactctttcaagactctgatttgaaa

SEQ ID NO: 902226 - DNA, 33 bp, Homo sapien
gcaggattactctttccagactctgatttgaaa

SEQ ID NO: 902227 - DNA, 33 bp, Homo sapien
tctatagcagtgccaaagagagaggtatccttg

SEQ ID NO: 902228 - DNA, 33 bp, Homo sapien
tctatagcagtgccaaggagagaggtatccttg

SEQ ID NO: 902229 - DNA, 33 bp, Homo sapien
gggagacccacacttacacccactgtcatagag

SEQ ID NO: 902230 - DNA, 33 bp, Homo sapien
gggagacccacacttatacccactgtcatagag

SEQ ID NO: 902231 - DNA, 33 bp, Homo sapien
agtgaaattggaagagaagaggcagaccacgca

SEQ ID NO: 902232 - DNA, 33 bp, Homo sapien
agtgaaattggaagagtagaggcagaccacgca

SEQ ID NO: 902233 - DNA, 33 bp, Homo sapien
cagaagatgcataagacgttttggaaataaaaa

SEQ ID NO: 902234 - DNA, 33 bp, Homo sapien
cagaagatgcataagaggttttggaaataaaaa

SEQ ID NO: 902235 - DNA, 33 bp, Homo sapien
aaaatgagagttacagaagaaaaaatggacaaa

SEQ ID NO: 902236 - DNA, 33 bp, Homo sapien
aaaatgagagttacaggagaaaaaatggacaaa

SEQ ID NO: 902237 - DNA, 33 bp, Homo sapien
ttaaaaggctcaccaactgtctgttatgataat

SEQ ID NO: 902238 - DNA, 33 bp, Homo sapien
ttaaaaggctcaccaattgtctgttatgataat

SEQ ID NO: 902239 - DNA, 33 bp, Homo sapien
aaaagacaaggcatgaagtagaaggaaatatat

SEQ ID NO: 902240 - DNA, 33 bp, Homo sapien
aaaagacaaggcatgacgtagaaggaaatatat

SEQ ID NO: 902241 - DNA, 33 bp, Homo sapien
aactgaacactgaaaaaaaaatctaaatctcct

SEQ ID NO: 902242 - DNA, 33 bp, Homo sapien
aactgaacactgaaaacaaaatctaaatctcct

SEQ ID NO: 902243 - DNA, 33 bp, Homo sapien
cttgagaccaaggtgacagagttattggctgga

SEQ ID NO: 902244 - DNA, 33 bp, Homo sapien
cttgagaccaaggtgatagagttattggctgga

SEQ ID NO: 902245 - DNA, 33 bp, Homo sapien
ccttgaggacattccaactgttagacaataaat

SEQ ID NO: 902246 - DNA, 33 bp, Homo sapien
ccttgaggacattccatctgttagacaataaat

SEQ ID NO: 902247 - DNA, 33 bp, Homo sapien
tctggagctgggaagactcttcagagaataccc

SEQ ID NO: 902248 - DNA, 33 bp, Homo sapien
tctggagctgggaagattcttcagagaataccc

SEQ ID NO: 902249 - DNA, 33 bp, Homo sapien
agaggccttatggacactacatttgcaggtggg

SEQ ID NO: 902250 - DNA, 33 bp, Homo sapien
agaggccttatggacattacatttgcaggtggg

SEQ ID NO: 902251 - DNA, 33 bp, Homo sapien
tcaagtattttagtataaacagatgatgtgtgt

SEQ ID NO: 902252 - DNA, 33 bp, Homo sapien
tcaagtattttagtatgaacagatgatgtgtgt

SEQ ID NO: 902253 - DNA, 33 bp, Homo sapien
gttataattcatcatacgtatttgaggttactg

SEQ ID NO: 902254 - DNA, 33 bp, Homo sapien
gttataattcatcatatgtatttgaggttactg

SEQ ID NO: 902255 - DNA, 33 bp, Homo sapien
acacccttctattaagcacgctatcttgcaatg

SEQ ID NO: 902256 - DNA, 33 bp, Homo sapien
acacccttctattaaggacgctatcttgcaatg

SEQ ID NO: 902257 - DNA, 33 bp, Homo sapien
ccatgtaacacagggaaaaaaaacactaagctc

SEQ ID NO: 902258 - DNA, 33 bp, Homo sapien
ccatgtaacacagggagaaaaaacactaagctc

SEQ ID NO: 902259 - DNA, 33 bp, Homo sapien
cagccaggggggataacggaaagcctagttatg

SEQ ID NO: 902260 - DNA, 33 bp, Homo sapien
cagccaggggggataatggaaagcctagttatg

SEQ ID NO: 902261 - DNA, 33 bp, Homo sapien
ctctgtggtaattctaaattcttcaaacaagct

SEQ ID NO: 902262 - DNA, 33 bp, Homo sapien
ctctgtggtaattctatattcttcaaacaagct

SEQ ID NO: 902263 - DNA, 33 bp, Homo sapien
tttaaggcaagtatcaataagtggggtctgata

SEQ ID NO: 902264 - DNA, 33 bp, Homo sapien
tttaaggcaagtatcagtaagtggggtctgata

SEQ ID NO: 902265 - DNA, 33 bp, Homo sapien
tttaaaaccagtgctaggtttccagttgctctt

SEQ ID NO: 902266 - DNA, 33 bp, Homo sapien
tttaaaaccagtgctatgtttccagttgctctt

SEQ ID NO: 902267 - DNA, 33 bp, Homo sapien
ccacttagcataaataactacttcttctttctc

SEQ ID NO: 902268 - DNA, 33 bp, Homo sapien
ccacttagcataaatacctacttcttctttctc

SEQ ID NO: 902269 - DNA, 33 bp, Homo sapien
gaaaatgtttcccaaaagatttagcagaacgtg

SEQ ID NO: 902270 - DNA, 33 bp, Homo sapien
gaaaatgtttcccaaatgatttagcagaacgtg

SEQ ID NO: 902271 - DNA, 33 bp, Homo sapien
cttcaggtggattcccagaagctcaagccttcc

SEQ ID NO: 902272 - DNA, 33 bp, Homo sapien
cttcaggtggattcccggaagctcaagccttcc

SEQ ID NO: 902273 - DNA, 33 bp, Homo sapien
tttgtcagtgaaactaaaaccctctgcttctca

SEQ ID NO: 902274 - DNA, 33 bp, Homo sapien
tttgtcagtgaaactacaaccctctgcttctca

SEQ ID NO: 902275 - DNA, 33 bp, Homo sapien
attcttccagtttttccatcatcgacaagattt

SEQ ID NO: 902276 - DNA, 33 bp, Homo sapien
attcttccagtttttctatcatcgacaagattt

SEQ ID NO: 902277 - DNA, 33 bp, Homo sapien
tgtcatctttgctaataagtttgatatttttaa

SEQ ID NO: 902278 - DNA, 33 bp, Homo sapien
tgtcatctttgctaatcagtttgatatttttaa

SEQ ID NO: 902279 - DNA, 33 bp, Homo sapien
accctgcagataccaaaggatgactgtactgat

SEQ ID NO: 902280 - DNA, 33 bp, Homo sapien
accctgcagataccaatggatgactgtactgat

SEQ ID NO: 902281 - DNA, 33 bp, Homo sapien
aaccagcgtgcccagccaaccattttctttaca

SEQ ID NO: 902282 - DNA, 33 bp, Homo sapien
aaccagcgtgcccagctaaccattttctttaca

SEQ ID NO: 902283 - DNA, 33 bp, Homo sapien
atctcattttctatgaactaaagaatgagcaca

SEQ ID NO: 902284 - DNA, 33 bp, Homo sapien
atctcattttctatgagctaaagaatgagcaca

SEQ ID NO: 902285 - DNA, 33 bp, Homo sapien
tgatacactgaaatgacggtcaatagatattgt

SEQ ID NO: 902286 - DNA, 33 bp, Homo sapien
tgatacactgaaatgatggtcaatagatattgt

SEQ ID NO: 902287 - DNA, 33 bp, Homo sapien
tttgcaaacaaagcacgatgaggaggattcggt

SEQ ID NO: 902288 - DNA, 33 bp, Homo sapien
tttgcaaacaaagcactatgaggaggattcggt

SEQ ID NO: 902289 - DNA, 33 bp, Homo sapien
atgcaagtctgctatacaaatttgcgtaagtaa

SEQ ID NO: 902290 - DNA, 33 bp, Homo sapien
atgcaagtctgctatagaaatttgcgtaagtaa

SEQ ID NO: 902291 - DNA, 33 bp, Homo sapien
tgcctcaacagccatccatttttttcatccaag

SEQ ID NO: 902292 - DNA, 33 bp, Homo sapien
tgcctcaacagccatctatttttttcatccaag

SEQ ID NO: 902293 - DNA, 33 bp, Homo sapien
aggaactgatcgaaaagctggtgacagacttct

SEQ ID NO: 902294 - DNA, 33 bp, Homo sapien
aggaactgatcgaaaatctggtgacagacttct

SEQ ID NO: 902295 - DNA, 33 bp, Homo sapien
ctggtttcaattacataatagctttctgttatt

SEQ ID NO: 902296 - DNA, 33 bp, Homo sapien
ctggtttcaattacatgatagctttctgttatt

SEQ ID NO: 902297 - DNA, 33 bp, Homo sapien
gatgataaattttcaacccttattagatctgat

SEQ ID NO: 902298 - DNA, 33 bp, Homo sapien
gatgataaattttcaatccttattagatctgat

SEQ ID NO: 902299 - DNA, 33 bp, Homo sapien
ggtctgtcagtacttacgggaaggtgctaaaaa

SEQ ID NO: 902300 - DNA, 33 bp, Homo sapien
ggtctgtcagtacttatgggaaggtgctaaaaa

SEQ ID NO: 902301 - DNA, 33 bp, Homo sapien
ttgaggtttgcctcaacatcattagttatatgc

SEQ ID NO: 902302 - DNA, 33 bp, Homo sapien
ttgaggtttgcctcaatatcattagttatatgc

SEQ ID NO: 902303 - DNA, 33 bp, Homo sapien
gttgcatagtattccacgttctatatgtaccac

SEQ ID NO: 902304 - DNA, 33 bp, Homo sapien
gttgcatagtattccatgttctatatgtaccac

SEQ ID NO: 902305 - DNA, 33 bp, Homo sapien
tttgtgtgatttataccgaaaccattgccatat

SEQ ID NO: 902306 - DNA, 33 bp, Homo sapien
tttgtgtgatttatactgaaaccattgccatat

SEQ ID NO: 902307 - DNA, 33 bp, Homo sapien
ctagttttatttttaacgtggtcagagaaaaca

SEQ ID NO: 902308 - DNA, 33 bp, Homo sapien
ctagttttatttttaatgtggtcagagaaaaca

SEQ ID NO: 902309 - DNA, 33 bp, Homo sapien
gctgaagtttctgcaaagtctaagggcttttta

SEQ ID NO: 902310 - DNA, 33 bp, Homo sapien
gctgaagtttctgcaaggtctaagggcttttta

SEQ ID NO: 902311 - DNA, 33 bp, Homo sapien
caaatacctcaaagaaagagagaacaggatgga

SEQ ID NO: 902312 - DNA, 33 bp, Homo sapien
caaatacctcaaagaaggagagaacaggatgga

SEQ ID NO: 902313 - DNA, 33 bp, Homo sapien
tacctaacacatgccaagcatatctttgggtgc

SEQ ID NO: 902314 - DNA, 33 bp, Homo sapien
tacctaacacatgccaggcatatctttgggtgc

SEQ ID NO: 902315 - DNA, 33 bp, Homo sapien
tgtgattttttaggacagctaaaagtagatttt

SEQ ID NO: 902316 - DNA, 33 bp, Homo sapien
tgtgattttttaggacggctaaaagtagatttt

SEQ ID NO: 902317 - DNA, 33 bp, Homo sapien
acattaatttatctcccgaactccgactgtttt

SEQ ID NO: 902318 - DNA, 33 bp, Homo sapien
acattaatttatctcctgaactccgactgtttt

SEQ ID NO: 902319 - DNA, 33 bp, Homo sapien
ctagtgcagggaacaaatgaaggagcaacttgg

SEQ ID NO: 902320 - DNA, 33 bp, Homo sapien
ctagtgcagggaacaagtgaaggagcaacttgg

SEQ ID NO: 902321 - DNA, 33 bp, Homo sapien
catgtctctaagccaaatcatctccaaagacct

SEQ ID NO: 902322 - DNA, 33 bp, Homo sapien
catgtctctaagccaagtcatctccaaagacct

SEQ ID NO: 902323 - DNA, 33 bp, Homo sapien
tgttagatgttagctaagtatattgagaaacag

SEQ ID NO: 902324 - DNA, 33 bp, Homo sapien
tgttagatgttagctacgtatattgagaaacag

SEQ ID NO: 902325 - DNA, 33 bp, Homo sapien
gttttgctttttgtaacagtcatcctaatcggt

SEQ ID NO: 902326 - DNA, 33 bp, Homo sapien
gttttgctttttgtaatagtcatcctaatcggt

SEQ ID NO: 902327 - DNA, 33 bp, Homo sapien
tctccatattctcaccaatacttattttctgtc

SEQ ID NO: 902328 - DNA, 33 bp, Homo sapien
tctccatattctcaccgatacttattttctgtc

SEQ ID NO: 902329 - DNA, 33 bp, Homo sapien
gtgacaaattcagaggcaggtgagcagaaaggg

SEQ ID NO: 902330 - DNA, 33 bp, Homo sapien
gtgacaaattcagagggaggtgagcagaaaggg

SEQ ID NO: 902331 - DNA, 33 bp, Homo sapien
tactgtagttccataaaatatcttgtatccact

SEQ ID NO: 902332 - DNA, 33 bp, Homo sapien
tactgtagttccataacatatcttgtatccact

SEQ ID NO: 902333 - DNA, 33 bp, Homo sapien
gtccccttctccaccacgtaggatctgaagaag

SEQ ID NO: 902334 - DNA, 33 bp, Homo sapien
gtccccttctccaccatgtaggatctgaagaag

SEQ ID NO: 902335 - DNA, 33 bp, Homo sapien
ccagaaacttcagcctcaaactgacttctgtct

SEQ ID NO: 902336 - DNA, 33 bp, Homo sapien
ccagaaacttcagcctgaaactgacttctgtct

SEQ ID NO: 902337 - DNA, 33 bp, Homo sapien
tttatgccaaagtccccctcgaaacacctggct

SEQ ID NO: 902338 - DNA, 33 bp, Homo sapien
tttatgccaaagtcccgctcgaaacacctggct

SEQ ID NO: 902339 - DNA, 33 bp, Homo sapien
ctcctgtaataaaaacaaccatttgctgagagt

SEQ ID NO: 902340 - DNA, 33 bp, Homo sapien
ctcctgtaataaaaacgaccatttgctgagagt

SEQ ID NO: 902341 - DNA, 33 bp, Homo sapien
aactggaggagatatcaacatgaaatgaactca

SEQ ID NO: 902342 - DNA, 33 bp, Homo sapien
aactggaggagatatcgacatgaaatgaactca

SEQ ID NO: 902343 - DNA, 33 bp, Homo sapien
tctaagtgatgacatacgtgaaatcaaattatg

SEQ ID NO: 902344 - DNA, 33 bp, Homo sapien
tctaagtgatgacatatgtgaaatcaaattatg

SEQ ID NO: 902345 - DNA, 33 bp, Homo sapien
cagatatgttacaatacagtccagtggatcttc

SEQ ID NO: 902346 - DNA, 33 bp, Homo sapien
cagatatgttacaatatagtccagtggatcttc

SEQ ID NO: 902347 - DNA, 33 bp, Homo sapien
ttcactatcagaaagcacaggcccatggattgt

SEQ ID NO: 902348 - DNA, 33 bp, Homo sapien
ttcactatcagaaagctcaggcccatggattgt

SEQ ID NO: 902349 - DNA, 33 bp, Homo sapien
aagtttgttgttgctactaagttgtctggattg

SEQ ID NO: 902350 - DNA, 33 bp, Homo sapien
aagtttgttgttgctattaagttgtctggattg

SEQ ID NO: 902351 - DNA, 33 bp, Homo sapien
aagctgaatgaaaataacagagaatggctccct

SEQ ID NO: 902352 - DNA, 33 bp, Homo sapien
aagctgaatgaaaatagcagagaatggctccct

SEQ ID NO: 902353 - DNA, 33 bp, Homo sapien
cagcttgttttggatacaagaaattggagcaac

SEQ ID NO: 902354 - DNA, 33 bp, Homo sapien
cagcttgttttggatagaagaaattggagcaac

SEQ ID NO: 902355 - DNA, 33 bp, Homo sapien
tatcacttcatctttacatatcaggtgttcatg

SEQ ID NO: 902356 - DNA, 33 bp, Homo sapien
tatcacttcatctttatatatcaggtgttcatg

SEQ ID NO: 902357 - DNA, 33 bp, Homo sapien
ctgtcaaacatagtaactgtgtgctttttattc

SEQ ID NO: 902358 - DNA, 33 bp, Homo sapien
ctgtcaaacatagtaattgtgtgctttttattc

SEQ ID NO: 902359 - DNA, 33 bp, Homo sapien
gaggttttcaaagttacagtgatctgtcaaaca

SEQ ID NO: 902360 - DNA, 33 bp, Homo sapien
gaggttttcaaagttagagtgatctgtcaaaca

SEQ ID NO: 902361 - DNA, 33 bp, Homo sapien
ggtgattcatggtgtccaaacgggaaaagtttt

SEQ ID NO: 902362 - DNA, 33 bp, Homo sapien
ggtgattcatggtgtcgaaacgggaaaagtttt

SEQ ID NO: 902363 - DNA, 33 bp, Homo sapien
gcagttggaacaacctaaaatatctatttccag

SEQ ID NO: 902364 - DNA, 33 bp, Homo sapien
gcagttggaacaacctgaaatatctatttccag

SEQ ID NO: 902365 - DNA, 33 bp, Homo sapien
gagatggcatcataaaataatcgaatttgtatc

SEQ ID NO: 902366 - DNA, 33 bp, Homo sapien
gagatggcatcataaagtaatcgaatttgtatc

SEQ ID NO: 902367 - DNA, 33 bp, Homo sapien
atgagccatctgacaaatatcacttcaataaca

SEQ ID NO: 902368 - DNA, 33 bp, Homo sapien
atgagccatctgacaactatcacttcaataaca

SEQ ID NO: 902369 - DNA, 33 bp, Homo sapien
agaaaaaattctccaaagacatgggaagttgct

SEQ ID NO: 902370 - DNA, 33 bp, Homo sapien
agaaaaaattctccaatgacatgggaagttgct

SEQ ID NO: 902371 - DNA, 33 bp, Homo sapien
acccagctaactttgaacagggcacagtggtgg

SEQ ID NO: 902372 - DNA, 33 bp, Homo sapien
acccagctaactttgagcagggcacagtggtgg

SEQ ID NO: 902373 - DNA, 33 bp, Homo sapien
cttatttaatccaaacaatattttgaggcagga

SEQ ID NO: 902374 - DNA, 33 bp, Homo sapien
cttatttaatccaaacgatattttgaggcagga

SEQ ID NO: 902375 - DNA, 33 bp, Homo sapien
atactttactgtagtcccgttctctttatattt

SEQ ID NO: 902376 - DNA, 33 bp, Homo sapien
atactttactgtagtctcgttctctttatattt

SEQ ID NO: 902377 - DNA, 33 bp, Homo sapien
tggaattccaggcagaaagtgactaaatgaaga

SEQ ID NO: 902378 - DNA, 33 bp, Homo sapien
tggaattccaggcagagagtgactaaatgaaga

SEQ ID NO: 902379 - DNA, 33 bp, Homo sapien
cacctgggaatagagacataaacagcacatgat

SEQ ID NO: 902380 - DNA, 33 bp, Homo sapien
cacctgggaatagagagataaacagcacatgat

SEQ ID NO: 902381 - DNA, 33 bp, Homo sapien
ttagtgttaaaagtgaaataactcttataatga

SEQ ID NO: 902382 - DNA, 33 bp, Homo sapien
ttagtgttaaaagtgagataactcttataatga

SEQ ID NO: 902383 - DNA, 33 bp, Homo sapien
ctgtatctccatctataagtccaggtccactgc

SEQ ID NO: 902384 - DNA, 33 bp, Homo sapien
ctgtatctccatctatgagtccaggtccactgc

SEQ ID NO: 902385 - DNA, 33 bp, Homo sapien
gttgccaaataaaatacgcaatacccaggtaaa

SEQ ID NO: 902386 - DNA, 33 bp, Homo sapien
gttgccaaataaaatatgcaatacccaggtaaa

SEQ ID NO: 902387 - DNA, 33 bp, Homo sapien
accagtggatgtagacagcatttattacagtaa

SEQ ID NO: 902388 - DNA, 33 bp, Homo sapien
accagtggatgtagacggcatttattacagtaa

SEQ ID NO: 902389 - DNA, 33 bp, Homo sapien
aaaggccaatctcacccagaatctgtatgcaat

SEQ ID NO: 902390 - DNA, 33 bp, Homo sapien
aaaggccaatctcacctagaatctgtatgcaat

SEQ ID NO: 902391 - DNA, 33 bp, Homo sapien
tgcctctggttcacagaatagagccgccccctc

SEQ ID NO: 902392 - DNA, 33 bp, Homo sapien
tgcctctggttcacaggatagagccgccccctc

SEQ ID NO: 902393 - DNA, 33 bp, Homo sapien
gcattagctgctgcaactctgaagggcagggtg

SEQ ID NO: 902394 - DNA, 33 bp, Homo sapien
gcattagctgctgcaattctgaagggcagggtg

SEQ ID NO: 902395 - DNA, 33 bp, Homo sapien
aatatttgtttccataaggtaagtcaatatcca

SEQ ID NO: 902396 - DNA, 33 bp, Homo sapien
aatatttgtttccatatggtaagtcaatatcca

SEQ ID NO: 902397 - DNA, 33 bp, Homo sapien
gcaatgcatggcaaacaacagtcaacgaatgtt

SEQ ID NO: 902398 - DNA, 33 bp, Homo sapien
gcaatgcatggcaaacgacagtcaacgaatgtt

SEQ ID NO: 902399 - DNA, 33 bp, Homo sapien
ttcttaaatgagactccgaaacacccaaagtat

SEQ ID NO: 902400 - DNA, 33 bp, Homo sapien
ttcttaaatgagactcggaaacacccaaagtat

SEQ ID NO: 902401 - DNA, 33 bp, Homo sapien
gttaccaaatgtccgactccatttactgaagtc

SEQ ID NO: 902402 - DNA, 33 bp, Homo sapien
gttaccaaatgtccgattccatttactgaagtc

SEQ ID NO: 902403 - DNA, 33 bp, Homo sapien
accagccatcccattgccaaaagagtcaacagt

SEQ ID NO: 902404 - DNA, 33 bp, Homo sapien
accagccatcccattggcaaaagagtcaacagt

SEQ ID NO: 902405 - DNA, 33 bp, Homo sapien
atcagtctgtaaatcactaagagcataataaca

SEQ ID NO: 902406 - DNA, 33 bp, Homo sapien
atcagtctgtaaatcattaagagcataataaca

SEQ ID NO: 902407 - DNA, 33 bp, Homo sapien
aatgtacaaagcattaactatactttatacagt

SEQ ID NO: 902408 - DNA, 33 bp, Homo sapien
aatgtacaaagcattagctatactttatacagt

SEQ ID NO: 902409 - DNA, 33 bp, Homo sapien
ctattcatcaacactccgacttctcttctgctg

SEQ ID NO: 902410 - DNA, 33 bp, Homo sapien
ctattcatcaacactctgacttctcttctgctg

SEQ ID NO: 902411 - DNA, 33 bp, Homo sapien
gggagtgaaagaaataaaattgaatctcgggac

SEQ ID NO: 902412 - DNA, 33 bp, Homo sapien
gggagtgaaagaaatataattgaatctcgggac

SEQ ID NO: 902413 - DNA, 33 bp, Homo sapien
tatcaattcaactgagactaaaagccaattagt

SEQ ID NO: 902414 - DNA, 33 bp, Homo sapien
tatcaattcaactgaggctaaaagccaattagt

SEQ ID NO: 902415 - DNA, 33 bp, Homo sapien
cagagaaggatcatccactatctgcgtatcctc

SEQ ID NO: 902416 - DNA, 33 bp, Homo sapien
cagagaaggatcatccgctatctgcgtatcctc

SEQ ID NO: 902417 - DNA, 33 bp, Homo sapien
aaatacggcattggaaatattttggtaagagca

SEQ ID NO: 902418 - DNA, 33 bp, Homo sapien
aaatacggcattggaagtattttggtaagagca

SEQ ID NO: 902419 - DNA, 33 bp, Homo sapien
tgacttatccatatcaatactaaaggtcagaag

SEQ ID NO: 902420 - DNA, 33 bp, Homo sapien
tgacttatccatatcagtactaaaggtcagaag

SEQ ID NO: 902421 - DNA, 33 bp, Homo sapien
aacactatagagaatcaatttagtgatatgagg

SEQ ID NO: 902422 - DNA, 33 bp, Homo sapien
aacactatagagaatcgatttagtgatatgagg

SEQ ID NO: 902423 - DNA, 33 bp, Homo sapien
tcctccagctccatagaaaattagtggaagagt

SEQ ID NO: 902424 - DNA, 33 bp, Homo sapien
tcctccagctccatagcaaattagtggaagagt

SEQ ID NO: 902425 - DNA, 33 bp, Homo sapien
tcagaatccattttaaagaaaagcccaagaggt

SEQ ID NO: 902426 - DNA, 33 bp, Homo sapien
tcagaatccattttaaggaaaagcccaagaggt

SEQ ID NO: 902427 - DNA, 33 bp, Homo sapien
tatgtactctggggagaagaaagcagcagaggc

SEQ ID NO: 902428 - DNA, 33 bp, Homo sapien
tatgtactctggggaggagaaagcagcagaggc

SEQ ID NO: 902429 - DNA, 33 bp, Homo sapien
caggtagaacaaagcagtaacaggtctgattac

SEQ ID NO: 902430 - DNA, 33 bp, Homo sapien
caggtagaacaaagcattaacaggtctgattac

SEQ ID NO: 902431 - DNA, 33 bp, Homo sapien
cataagcaatcaaaacacacctctatttgtcct

SEQ ID NO: 902432 - DNA, 33 bp, Homo sapien
cataagcaatcaaaacgcacctctatttgtcct

SEQ ID NO: 902433 - DNA, 33 bp, Homo sapien
taaggaaagtacaaacaccaatgaaaattattt

SEQ ID NO: 902434 - DNA, 33 bp, Homo sapien
taaggaaagtacaaacgccaatgaaaattattt

SEQ ID NO: 902435 - DNA, 33 bp, Homo sapien
aaaaaggaaagttcgacagatctagctattcat

SEQ ID NO: 902436 - DNA, 33 bp, Homo sapien
aaaaaggaaagttcgatagatctagctattcat

SEQ ID NO: 902437 - DNA, 33 bp, Homo sapien
ctaagaatgttgagaccataccatgtgtactct

SEQ ID NO: 902438 - DNA, 33 bp, Homo sapien
ctaagaatgttgagactataccatgtgtactct

SEQ ID NO: 902439 - DNA, 33 bp, Homo sapien
aatcataaattaaaaacctgacatagaatgatc

SEQ ID NO: 902440 - DNA, 33 bp, Homo sapien
aatcataaattaaaaatctgacatagaatgatc

SEQ ID NO: 902441 - DNA, 33 bp, Homo sapien
ctcattataagcatagaccctatccctcttcct

SEQ ID NO: 902442 - DNA, 33 bp, Homo sapien
ctcattataagcataggccctatccctcttcct

SEQ ID NO: 902443 - DNA, 33 bp, Homo sapien
ctctgactagtggaaacacagatgactaaactg

SEQ ID NO: 902444 - DNA, 33 bp, Homo sapien
ctctgactagtggaaagacagatgactaaactg

SEQ ID NO: 902445 - DNA, 33 bp, Homo sapien
ccatgatatagtggtaggagggcctttactcaa

SEQ ID NO: 902446 - DNA, 33 bp, Homo sapien
ccatgatatagtggtatgagggcctttactcaa

SEQ ID NO: 902447 - DNA, 33 bp, Homo sapien
gttcaatctaactgtacgtttgcatccactaac

SEQ ID NO: 902448 - DNA, 33 bp, Homo sapien
gttcaatctaactgtatgtttgcatccactaac

SEQ ID NO: 902449 - DNA, 33 bp, Homo sapien
actgtagtcagcaacaatgtattaggtatttca

SEQ ID NO: 902450 - DNA, 33 bp, Homo sapien
actgtagtcagcaacactgtattaggtatttca

SEQ ID NO: 902451 - DNA, 33 bp, Homo sapien
gacaatgtgtcagacacgaagaaaggtcacatg

SEQ ID NO: 902452 - DNA, 33 bp, Homo sapien
gacaatgtgtcagacatgaagaaaggtcacatg

SEQ ID NO: 902453 - DNA, 33 bp, Homo sapien
gtcactgaaggccagaaataaatgtaaaagcac

SEQ ID NO: 902454 - DNA, 33 bp, Homo sapien
gtcactgaaggccagacataaatgtaaaagcac

SEQ ID NO: 902455 - DNA, 33 bp, Homo sapien
atagggcaaaggagaacacttgcacctgtattt

SEQ ID NO: 902456 - DNA, 33 bp, Homo sapien
atagggcaaaggagaagacttgcacctgtattt

SEQ ID NO: 902457 - DNA, 33 bp, Homo sapien
aacaaagtattgagaaacacttgtaggaaaaga

SEQ ID NO: 902458 - DNA, 33 bp, Homo sapien
aacaaagtattgagaatcacttgtaggaaaaga

SEQ ID NO: 902459 - DNA, 33 bp, Homo sapien
aaaacaaaaagctttaagccgcttgaggagggg

SEQ ID NO: 902460 - DNA, 33 bp, Homo sapien
aaaacaaaaagctttacgccgcttgaggagggg

SEQ ID NO: 902461 - DNA, 33 bp, Homo sapien
tacttttattgctccccgagaagcagtagatct

SEQ ID NO: 902462 - DNA, 33 bp, Homo sapien
tacttttattgctccctgagaagcagtagatct

SEQ ID NO: 902463 - DNA, 33 bp, Homo sapien
tctctagcccttggcaaccatcattctatgtat

SEQ ID NO: 902464 - DNA, 33 bp, Homo sapien
tctctagcccttggcatccatcattctatgtat

SEQ ID NO: 902465 - DNA, 33 bp, Homo sapien
gggctagagagagttgaaaaatgacagttgcta

SEQ ID NO: 902466 - DNA, 33 bp, Homo sapien
gggctagagagagttggaaaatgacagttgcta

SEQ ID NO: 902467 - DNA, 33 bp, Homo sapien
gtttattgcatggcaaattattttcaaaattat

SEQ ID NO: 902468 - DNA, 33 bp, Homo sapien
gtttattgcatggcaatttattttcaaaattat

SEQ ID NO: 902469 - DNA, 33 bp, Homo sapien
acaaatctgagttgaaacctgtgtctgtcattt

SEQ ID NO: 902470 - DNA, 33 bp, Homo sapien
acaaatctgagttgaagcctgtgtctgtcattt

SEQ ID NO: 902471 - DNA, 33 bp, Homo sapien
ctttaaaaaagaaatgccaatagtgacctttgc

SEQ ID NO: 902472 - DNA, 33 bp, Homo sapien
ctttaaaaaagaaatggcaatagtgacctttgc

SEQ ID NO: 902473 - DNA, 33 bp, Homo sapien
ctgaaaagttattaacacaagtttctattattt

SEQ ID NO: 902474 - DNA, 33 bp, Homo sapien
ctgaaaagttattaacgcaagtttctattattt

SEQ ID NO: 902475 - DNA, 33 bp, Homo sapien
gtaaaggagccaacaaatgctttcctcataaat

SEQ ID NO: 902476 - DNA, 33 bp, Homo sapien
gtaaaggagccaacaagtgctttcctcataaat

SEQ ID NO: 902477 - DNA, 33 bp, Homo sapien
gggggattgagatgaacgggtgaagttgggaca

SEQ ID NO: 902478 - DNA, 33 bp, Homo sapien
gggggattgagatgaaggggtgaagttgggaca

SEQ ID NO: 902479 - DNA, 33 bp, Homo sapien
caaagtgtgactttaactgatacgatgaataat

SEQ ID NO: 902480 - DNA, 33 bp, Homo sapien
caaagtgtgactttaattgatacgatgaataat

SEQ ID NO: 902481 - DNA, 33 bp, Homo sapien
tttgcaacatatcaaacgtatccctaatgaaaa

SEQ ID NO: 902482 - DNA, 33 bp, Homo sapien
tttgcaacatatcaaatgtatccctaatgaaaa

SEQ ID NO: 902483 - DNA, 33 bp, Homo sapien
attgtaaatgttgacacatgaatgcctgttttg

SEQ ID NO: 902484 - DNA, 33 bp, Homo sapien
attgtaaatgttgacatatgaatgcctgttttg

SEQ ID NO: 902485 - DNA, 33 bp, Homo sapien
tgaggagtatgagctaacagaattgtgaaactt

SEQ ID NO: 902486 - DNA, 33 bp, Homo sapien
tgaggagtatgagctaccagaattgtgaaactt

SEQ ID NO: 902487 - DNA, 33 bp, Homo sapien
atgaggataatgtaaccaaaggcaccattctcc

SEQ ID NO: 902488 - DNA, 33 bp, Homo sapien
atgaggataatgtaactaaaggcaccattctcc

SEQ ID NO: 902489 - DNA, 33 bp, Homo sapien
cacacttcctggccttaaaatctgagctctgcc

SEQ ID NO: 902490 - DNA, 33 bp, Homo sapien
cacacttcctggccttcaaatctgagctctgcc

SEQ ID NO: 902491 - DNA, 33 bp, Homo sapien
tggataacactattatcactcaactaacacttt

SEQ ID NO: 902492 - DNA, 33 bp, Homo sapien
tggataacactattattactcaactaacacttt

SEQ ID NO: 902493 - DNA, 33 bp, Homo sapien
aattatgcaaagggtaggtgtttcataaatgct

SEQ ID NO: 902494 - DNA, 33 bp, Homo sapien
aattatgcaaagggtatgtgtttcataaatgct

SEQ ID NO: 902495 - DNA, 33 bp, Homo sapien
actctgggagcctctactactgcaatattcaaa

SEQ ID NO: 902496 - DNA, 33 bp, Homo sapien
actctgggagcctctattactgcaatattcaaa

SEQ ID NO: 902497 - DNA, 33 bp, Homo sapien
tttctaaatgtcaaagccctttgtagaaagtct

SEQ ID NO: 902498 - DNA, 33 bp, Homo sapien
tttctaaatgtcaaagtcctttgtagaaagtct

SEQ ID NO: 902499 - DNA, 33 bp, Homo sapien
aatgcagaacagtttgaaaagcaagggccgtta

SEQ ID NO: 902500 - DNA, 33 bp, Homo sapien
aatgcagaacagtttggaaagcaagggccgtta

SEQ ID NO: 902501 - DNA, 33 bp, Homo sapien
taatctctttaacaaaggatcacgtggctatac

SEQ ID NO: 902502 - DNA, 33 bp, Homo sapien
taatctctttaacaaatgatcacgtggctatac

SEQ ID NO: 902503 - DNA, 33 bp, Homo sapien
caacttatcaaaaaaaatgtattcatctgggaa

SEQ ID NO: 902504 - DNA, 33 bp, Homo sapien
caacttatcaaaaaaagtgtattcatctgggaa

SEQ ID NO: 902505 - DNA, 33 bp, Homo sapien
gatgtggttataaaaaatcaatacaagggattc

SEQ ID NO: 902506 - DNA, 33 bp, Homo sapien
gatgtggttataaaaagtcaatacaagggattc

SEQ ID NO: 902507 - DNA, 33 bp, Homo sapien
tatgtcatctgcagacaaaatgagtgtaatttc

SEQ ID NO: 902508 - DNA, 33 bp, Homo sapien
tatgtcatctgcagacgaaatgagtgtaatttc

SEQ ID NO: 902509 - DNA, 33 bp, Homo sapien
cctgtttgtatattagaagagacaaggagaaag

SEQ ID NO: 902510 - DNA, 33 bp, Homo sapien
cctgtttgtatattaggagagacaaggagaaag

SEQ ID NO: 902511 - DNA, 33 bp, Homo sapien
acagttttccctacctaaggattcacactgtac

SEQ ID NO: 902512 - DNA, 33 bp, Homo sapien
acagttttccctacctgaggattcacactgtac

SEQ ID NO: 902513 - DNA, 33 bp, Homo sapien
gcaaagggagcaaaataaaacctgtgatgattt

SEQ ID NO: 902514 - DNA, 33 bp, Homo sapien
gcaaagggagcaaaatgaaacctgtgatgattt

SEQ ID NO: 902515 - DNA, 33 bp, Homo sapien
ttcttatgtttatcaagtcttccctagttataa

SEQ ID NO: 902516 - DNA, 33 bp, Homo sapien
ttcttatgtttatcaattcttccctagttataa

SEQ ID NO: 902517 - DNA, 33 bp, Homo sapien
actggaaggaccatcacagtaaagaaggatcaa

SEQ ID NO: 902518 - DNA, 33 bp, Homo sapien
actggaaggaccatcagagtaaagaaggatcaa

SEQ ID NO: 902519 - DNA, 33 bp, Homo sapien
ccaccctgggcttgaacactattgaaagatcac

SEQ ID NO: 902520 - DNA, 33 bp, Homo sapien
ccaccctgggcttgaatactattgaaagatcac

SEQ ID NO: 902521 - DNA, 33 bp, Homo sapien
aatgttgccaatgcaaccaagaaagcctagagt

SEQ ID NO: 902522 - DNA, 33 bp, Homo sapien
aatgttgccaatgcaatcaagaaagcctagagt

SEQ ID NO: 902523 - DNA, 33 bp, Homo sapien
taaaactatctgtgaaatacatgtgcattgaga

SEQ ID NO: 902524 - DNA, 33 bp, Homo sapien
taaaactatctgtgaattacatgtgcattgaga

SEQ ID NO: 902525 - DNA, 33 bp, Homo sapien
tgaggtttagggtacaatggattctgaacatag

SEQ ID NO: 902526 - DNA, 33 bp, Homo sapien
tgaggtttagggtacagtggattctgaacatag

SEQ ID NO: 902527 - DNA, 33 bp, Homo sapien
ggaatgtggcccaagtcacgttgtgctactgat

SEQ ID NO: 902528 - DNA, 33 bp, Homo sapien
ggaatgtggcccaagttacgttgtgctactgat

SEQ ID NO: 902529 - DNA, 33 bp, Homo sapien
ggttaaactaacagggaaggcatatggccactg

SEQ ID NO: 902530 - DNA, 33 bp, Homo sapien
ggttaaactaacagggcaggcatatggccactg

SEQ ID NO: 902531 - DNA, 33 bp, Homo sapien
aagtcagatgccttaacaaacacatcatgatta

SEQ ID NO: 902532 - DNA, 33 bp, Homo sapien
aagtcagatgccttaataaacacatcatgatta

SEQ ID NO: 902533 - DNA, 33 bp, Homo sapien
gtagagatgacttccaagaggcttcacaggtat

SEQ ID NO: 902534 - DNA, 33 bp, Homo sapien
gtagagatgacttccaggaggcttcacaggtat

SEQ ID NO: 902535 - DNA, 33 bp, Homo sapien
cattggaaacaaacacaatagctgcgtcacctg

SEQ ID NO: 902536 - DNA, 33 bp, Homo sapien
cattggaaacaaacacgatagctgcgtcacctg

SEQ ID NO: 902537 - DNA, 33 bp, Homo sapien
ccttgaaaatgaataaacgggatggtggtgatt

SEQ ID NO: 902538 - DNA, 33 bp, Homo sapien
ccttgaaaatgaataagcgggatggtggtgatt

SEQ ID NO: 902539 - DNA, 33 bp, Homo sapien
ttgaaagattgaagaacaaagtctcagaggtgt

SEQ ID NO: 902540 - DNA, 33 bp, Homo sapien
ttgaaagattgaagaataaagtctcagaggtgt

SEQ ID NO: 902541 - DNA, 33 bp, Homo sapien
acttactgagttctgccctataatgacagggtt

SEQ ID NO: 902542 - DNA, 33 bp, Homo sapien
acttactgagttctgctctataatgacagggtt

SEQ ID NO: 902543 - DNA, 33 bp, Homo sapien
tcaaattctaaaccccagaaacacatgaccatc

SEQ ID NO: 902544 - DNA, 33 bp, Homo sapien
tcaaattctaaaccccggaaacacatgaccatc

SEQ ID NO: 902545 - DNA, 33 bp, Homo sapien
gaggttagtcatttacaaccacctaacaccgtc

SEQ ID NO: 902546 - DNA, 33 bp, Homo sapien
gaggttagtcatttactaccacctaacaccgtc

SEQ ID NO: 902547 - DNA, 33 bp, Homo sapien
catcagaatttttaaaagggcattctctgagca

SEQ ID NO: 902548 - DNA, 33 bp, Homo sapien
catcagaatttttaaacgggcattctctgagca

SEQ ID NO: 902549 - DNA, 33 bp, Homo sapien
ggtcccaaaagtggaacgattctgcaaagttcc

SEQ ID NO: 902550 - DNA, 33 bp, Homo sapien
ggtcccaaaagtggaatgattctgcaaagttcc

SEQ ID NO: 902551 - DNA, 33 bp, Homo sapien
cagcaatatgtgcagcaaaagacatcagagaaa

SEQ ID NO: 902552 - DNA, 33 bp, Homo sapien
cagcaatatgtgcagcgaaagacatcagagaaa

SEQ ID NO: 902553 - DNA, 33 bp, Homo sapien
gattccatgtgatctactaacaacctgtgaggt

SEQ ID NO: 902554 - DNA, 33 bp, Homo sapien
gattccatgtgatctattaacaacctgtgaggt

SEQ ID NO: 902555 - DNA, 33 bp, Homo sapien
cacaatggccagtgaaacccgaatacagagtag

SEQ ID NO: 902556 - DNA, 33 bp, Homo sapien
cacaatggccagtgaagcccgaatacagagtag

SEQ ID NO: 902557 - DNA, 33 bp, Homo sapien
ttgaagccagagagaactatgatcagatgcatg

SEQ ID NO: 902558 - DNA, 33 bp, Homo sapien
ttgaagccagagagaagtatgatcagatgcatg

SEQ ID NO: 902559 - DNA, 33 bp, Homo sapien
aactttcatgatgacaaattcctgttaaatgga

SEQ ID NO: 902560 - DNA, 33 bp, Homo sapien
aactttcatgatgacagattcctgttaaatgga

SEQ ID NO: 902561 - DNA, 33 bp, Homo sapien
ctgtgtctgtttcccacagctgttataacaact

SEQ ID NO: 902562 - DNA, 33 bp, Homo sapien
ctgtgtctgtttcccatagctgttataacaact

SEQ ID NO: 902563 - DNA, 33 bp, Homo sapien
ttttgggatgatgaaaatattccggaactagac

SEQ ID NO: 902564 - DNA, 33 bp, Homo sapien
ttttgggatgatgaaattattccggaactagac

SEQ ID NO: 902565 - DNA, 33 bp, Homo sapien
gaagatccacccaatacgaaagcaactaaccag

SEQ ID NO: 902566 - DNA, 33 bp, Homo sapien
gaagatccacccaatatgaaagcaactaaccag

SEQ ID NO: 902567 - DNA, 33 bp, Homo sapien
gtcttcccatcattctgaactgcttccaaataa

SEQ ID NO: 902568 - DNA, 33 bp, Homo sapien
gtcttcccatcattcttaactgcttccaaataa

SEQ ID NO: 902569 - DNA, 33 bp, Homo sapien
gtggctgccttccaaccaattagactaaaagta

SEQ ID NO: 902570 - DNA, 33 bp, Homo sapien
gtggctgccttccaactaattagactaaaagta

SEQ ID NO: 902571 - DNA, 33 bp, Homo sapien
cctgcaatctctgacacatagtaaggaaaagaa

SEQ ID NO: 902572 - DNA, 33 bp, Homo sapien
cctgcaatctctgacatatagtaaggaaaagaa

SEQ ID NO: 902573 - DNA, 33 bp, Homo sapien
agttacatcctgtagccgcacagtgtagccagg

SEQ ID NO: 902574 - DNA, 33 bp, Homo sapien
agttacatcctgtagctgcacagtgtagccagg

SEQ ID NO: 902575 - DNA, 33 bp, Homo sapien
catctttggctctagcagaggccagtggcatgg

SEQ ID NO: 902576 - DNA, 33 bp, Homo sapien
catctttggctctagcggaggccagtggcatgg

SEQ ID NO: 902577 - DNA, 33 bp, Homo sapien
tttaaactcagactacgacttgcttgtgcagag

SEQ ID NO: 902578 - DNA, 33 bp, Homo sapien
tttaaactcagactactacttgcttgtgcagag

SEQ ID NO: 902579 - DNA, 33 bp, Homo sapien
aatgaatgattcattaaggtaggccctctttag

SEQ ID NO: 902580 - DNA, 33 bp, Homo sapien
aatgaatgattcattagggtaggccctctttag

SEQ ID NO: 902581 - DNA, 33 bp, Homo sapien
gacccccctcctttggcagcgtagtgttgcagt

SEQ ID NO: 902582 - DNA, 33 bp, Homo sapien
gacccccctcctttggtagcgtagtgttgcagt

SEQ ID NO: 902583 - DNA, 33 bp, Homo sapien
tttctctaaaggccccaaacacgctgctgctgg

SEQ ID NO: 902584 - DNA, 33 bp, Homo sapien
tttctctaaaggccccgaacacgctgctgctgg

SEQ ID NO: 902585 - DNA, 33 bp, Homo sapien
cagatacaagacgtaaattaagaggaagccata

SEQ ID NO: 902586 - DNA, 33 bp, Homo sapien
cagatacaagacgtaagttaagaggaagccata

SEQ ID NO: 902587 - DNA, 33 bp, Homo sapien
aacaggttggattccacattagttctctaatac

SEQ ID NO: 902588 - DNA, 33 bp, Homo sapien
aacaggttggattccatattagttctctaatac

SEQ ID NO: 902589 - DNA, 33 bp, Homo sapien
tgctccaggaaacgtaccttgtcaatgaaggag

SEQ ID NO: 902590 - DNA, 33 bp, Homo sapien
tgctccaggaaacgtatcttgtcaatgaaggag

SEQ ID NO: 902591 - DNA, 33 bp, Homo sapien; identical to SEQ ID NO: 902589

SEQ ID NO: 902592 - DNA, 33 bp, Homo sapien; identical to SEQ ID NO: 902590

SEQ ID NO: 902593 - DNA, 33 bp, Homo sapien
ctcctggcaaatgcaacagaaagctgtacctgt

SEQ ID NO: 902594 - DNA, 33 bp, Homo sapien
ctcctggcaaatgcaagagaaagctgtacctgt

SEQ ID NO: 902595 - DNA, 33 bp, Homo sapien
tatgcatgattagagacgttatgttcattttac

SEQ ID NO: 902596 - DNA, 33 bp, Homo sapien
tatgcatgattagagatgttatgttcattttac

SEQ ID NO: 902597 - DNA, 33 bp, Homo sapien
ggaagtccaaatctagccactaggtgctcagga

SEQ ID NO: 902598 - DNA, 33 bp, Homo sapien
ggaagtccaaatctagtcactaggtgctcagga

SEQ ID NO: 902599 - DNA, 33 bp, Homo sapien
tgtgaggataaagttaacagagtgcctagtttt

SEQ ID NO: 902600 - DNA, 33 bp, Homo sapien
tgtgaggataaagttaccagagtgcctagtttt

SEQ ID NO: 902601 - DNA, 33 bp, Homo sapien
ccctaacgcgacatacaagcttataaatatcta

SEQ ID NO: 902602 - DNA, 33 bp, Homo sapien
ccctaacgcgacatacgagcttataaatatcta

SEQ ID NO: 902603 - DNA, 33 bp, Homo sapien
aaggaagatgaagccaataactgtaagacacaa

SEQ ID NO: 902604 - DNA, 33 bp, Homo sapien
aaggaagatgaagccagtaactgtaagacacaa

SEQ ID NO: 902605 - DNA, 33 bp, Homo sapien
gctgcctgaaagcgtcaccaactgtggttatcc

SEQ ID NO: 902606 - DNA, 33 bp, Homo sapien
gctgcctgaaagcgtcgccaactgtggttatcc

SEQ ID NO: 902607 - DNA, 33 bp, Homo sapien
gcgatctgggttccaacaagcctgccaggtgac

SEQ ID NO: 902608 - DNA, 33 bp, Homo sapien
gcgatctgggttccaataagcctgccaggtgac

SEQ ID NO: 902609 - DNA, 33 bp, Homo sapien
aacatctgaccatagaaccctacattactgaat

SEQ ID NO: 902610 - DNA, 33 bp, Homo sapien
aacatctgaccatagatccctacattactgaat

SEQ ID NO: 902611 - DNA, 33 bp, Homo sapien
acttccaagaactaacactccttaagacatgaa

SEQ ID NO: 902612 - DNA, 33 bp, Homo sapien
acttccaagaactaacgctccttaagacatgaa

SEQ ID NO: 902613 - DNA, 33 bp, Homo sapien
ttttctctcagtgtaaccagttatgtctagatt

SEQ ID NO: 902614 - DNA, 33 bp, Homo sapien
ttttctctcagtgtaatcagttatgtctagatt

SEQ ID NO: 902615 - DNA, 33 bp, Homo sapien
ggtacctgatagggtacagtgctatgttttcta

SEQ ID NO: 902616 - DNA, 33 bp, Homo sapien
ggtacctgatagggtagagtgctatgttttcta

SEQ ID NO: 902617 - DNA, 33 bp, Homo sapien
tatctgtttgtcaggacctattgtgggaaatct

SEQ ID NO: 902618 - DNA, 33 bp, Homo sapien
tatctgtttgtcaggatctattgtgggaaatct

SEQ ID NO: 902619 - DNA, 33 bp, Homo sapien
aagaataagattctcactctattgccaggttat

SEQ ID NO: 902620 - DNA, 33 bp, Homo sapien
aagaataagattctcattctattgccaggttat

SEQ ID NO: 902621 - DNA, 33 bp, Homo sapien
catccaaatttagtcacacatttgtagatgtta

SEQ ID NO: 902622 - DNA, 33 bp, Homo sapien
catccaaatttagtcagacatttgtagatgtta

SEQ ID NO: 902623 - DNA, 33 bp, Homo sapien
actgtgacaattaaacaagttgccattacgaaa

SEQ ID NO: 902624 - DNA, 33 bp, Homo sapien
actgtgacaattaaacgagttgccattacgaaa

SEQ ID NO: 902625 - DNA, 33 bp, Homo sapien
ttctcctcacaggcaaaattaagtctatcaata

SEQ ID NO: 902626 - DNA, 33 bp, Homo sapien
ttctcctcacaggcaagattaagtctatcaata

SEQ ID NO: 902627 - DNA, 33 bp, Homo sapien
ggaagttatagcaaagcaccattttagtagtgt

SEQ ID NO: 902628 - DNA, 33 bp, Homo sapien
ggaagttatagcaaagtaccattttagtagtgt

SEQ ID NO: 902629 - DNA, 33 bp, Homo sapien
aatgagcttttcttccagctacttcaacctcga

SEQ ID NO: 902630 - DNA, 33 bp, Homo sapien
aatgagcttttcttccggctacttcaacctcga

SEQ ID NO: 902631 - DNA, 33 bp, Homo sapien
tttgcctattaatttacgacccagcagagttaa

SEQ ID NO: 902632 - DNA, 33 bp, Homo sapien
tttgcctattaatttatgacccagcagagttaa

SEQ ID NO: 902633 - DNA, 33 bp, Homo sapien
aattaaattgtcacataatcagtcaaatagctg

SEQ ID NO: 902634 - DNA, 33 bp, Homo sapien
aattaaattgtcacattatcagtcaaatagctg

SEQ ID NO: 902635 - DNA, 33 bp, Homo sapien
ccaaaactattcttaaatatctggataaacaca

SEQ ID NO: 902636 - DNA, 33 bp, Homo sapien
ccaaaactattcttaagtatctggataaacaca

SEQ ID NO: 902637 - DNA, 33 bp, Homo sapien
gaagacatattaacaacaggttttggttgtcat

SEQ ID NO: 902638 - DNA, 33 bp, Homo sapien
gaagacatattaacaagaggttttggttgtcat

SEQ ID NO: 902639 - DNA, 33 bp, Homo sapien
ttataaaacattatcaatctcctcggaatcatt

SEQ ID NO: 902640 - DNA, 33 bp, Homo sapien
ttataaaacattatcagtctcctcggaatcatt

SEQ ID NO: 902641 - DNA, 33 bp, Homo sapien
gtgagattaatgaagacgaaaattttgaatgaa

SEQ ID NO: 902642 - DNA, 33 bp, Homo sapien
gtgagattaatgaagatgaaaattttgaatgaa

SEQ ID NO: 902643 - DNA, 33 bp, Homo sapien
tggattaaacataataacattgtctttcagggg

SEQ ID NO: 902644 - DNA, 33 bp, Homo sapien
tggattaaacataatatcattgtctttcagggg

SEQ ID NO: 902645 - DNA, 33 bp, Homo sapien
ctggcttcctacctcactcaaattaaaagccaa

SEQ ID NO: 902646 - DNA, 33 bp, Homo sapien
ctggcttcctacctcagtcaaattaaaagccaa

SEQ ID NO: 902647 - DNA, 33 bp, Homo sapien
tgatcctccagaaagacggtgtccaagaccgca

SEQ ID NO: 902648 - DNA, 33 bp, Homo sapien
tgatcctccagaaagatggtgtccaagaccgca

SEQ ID NO: 902649 - DNA, 33 bp, Homo sapien
agatagatttatcagcacaaaacagaggagaat

SEQ ID NO: 902650 - DNA, 33 bp, Homo sapien
agatagatttatcagcgcaaaacagaggagaat

SEQ ID NO: 902651 - DNA, 33 bp, Homo sapien
agtgatttatcaacttcaaagatcacaaggtga

SEQ ID NO: 902652 - DNA, 33 bp, Homo sapien
agtgatttatcaacttgaaagatcacaaggtga

SEQ ID NO: 902653 - DNA, 33 bp, Homo sapien
ggatttaaatattcaacattagaaaagatcatg

SEQ ID NO: 902654 - DNA, 33 bp, Homo sapien
ggatttaaatattcaagattagaaaagatcatg

SEQ ID NO: 902655 - DNA, 33 bp, Homo sapien
tgattcagtaattccaatcctaagaatcaatgg

SEQ ID NO: 902656 - DNA, 33 bp, Homo sapien
tgattcagtaattccagtcctaagaatcaatgg

SEQ ID NO: 902657 - DNA, 33 bp, Homo sapien
acactgtcctttctacagatgtctgcaaatgat

SEQ ID NO: 902658 - DNA, 33 bp, Homo sapien
acactgtcctttctacggatgtctgcaaatgat

SEQ ID NO: 902659 - DNA, 33 bp, Homo sapien
aattattaaacttcacaaatacactgattatta

SEQ ID NO: 902660 - DNA, 33 bp, Homo sapien
aattattaaacttcacgaatacactgattatta

SEQ ID NO: 902661 - DNA, 33 bp, Homo sapien
cagcagtggcaaagaaccaacctctactatatc

SEQ ID NO: 902662 - DNA, 33 bp, Homo sapien
cagcagtggcaaagaagcaacctctactatatc

SEQ ID NO: 902663 - DNA, 33 bp, Homo sapien
aggacccttttgaaaacggtatctcctgtagta

SEQ ID NO: 902664 - DNA, 33 bp, Homo sapien
aggacccttttgaaaatggtatctcctgtagta

SEQ ID NO: 902665 - DNA, 33 bp, Homo sapien
ttttaaacaactgctgaaattatgacttgaaaa

SEQ ID NO: 902666 - DNA, 33 bp, Homo sapien
ttttaaacaactgctggaattatgacttgaaaa

SEQ ID NO: 902667 - DNA, 33 bp, Homo sapien
tccctaaatcaccacacgagcgacacccctgaa

SEQ ID NO: 902668 - DNA, 33 bp, Homo sapien
tccctaaatcaccacatgagcgacacccctgaa

SEQ ID NO: 902669 - DNA, 33 bp, Homo sapien
gaacctttactcttctaacattctaggaacttt

SEQ ID NO: 902670 - DNA, 33 bp, Homo sapien
gaacctttactcttctgacattctaggaacttt

SEQ ID NO: 902671 - DNA, 33 bp, Homo sapien
gaaaactgagatccaacaatgaaagtaactaag

SEQ ID NO: 902672 - DNA, 33 bp, Homo sapien
gaaaactgagatccaataatgaaagtaactaag

SEQ ID NO: 902673 - DNA, 33 bp, Homo sapien
ttgtggaacatgactcggaattgggtagtagac

SEQ ID NO: 902674 - DNA, 33 bp, Homo sapien
ttgtggaacatgactctgaattgggtagtagac

SEQ ID NO: 902675 - DNA, 33 bp, Homo sapien
attgaaagaatctttgaagcagatctataaact

SEQ ID NO: 902676 - DNA, 33 bp, Homo sapien
attgaaagaatctttggagcagatctataaact

SEQ ID NO: 902677 - DNA, 33 bp, Homo sapien
aaattaaaaagaacagcctattgatagattaat

SEQ ID NO: 902678 - DNA, 33 bp, Homo sapien
aaattaaaaagaacaggctattgatagattaat

SEQ ID NO: 902679 - DNA, 33 bp, Homo sapien
atttctattttcatccccattctacagaggaag

SEQ ID NO: 902680 - DNA, 33 bp, Homo sapien
atttctattttcatccgcattctacagaggaag

SEQ ID NO: 902681 - DNA, 33 bp, Homo sapien
ggctgtgaccaaaaaaagatagcacagggaacc

SEQ ID NO: 902682 - DNA, 33 bp, Homo sapien
ggctgtgaccaaaaaaggatagcacagggaacc

SEQ ID NO: 902683 - DNA, 33 bp, Homo sapien
ggaaaagttggacttacgcatatttctctagag

SEQ ID NO: 902684 - DNA, 33 bp, Homo sapien
ggaaaagttggacttatgcatatttctctagag

SEQ ID NO: 902685 - DNA, 33 bp, Homo sapien
cagcctcactaatctcagaagggaagaggaaac

SEQ ID NO: 902686 - DNA, 33 bp, Homo sapien
cagcctcactaatctcggaagggaagaggaaac

SEQ ID NO: 902687 - DNA, 33 bp, Homo sapien
atcatttgtgaaacaacgtccatttttcagcaa

SEQ ID NO: 902688 - DNA, 33 bp, Homo sapien
atcatttgtgaaacaaggtccatttttcagcaa

SEQ ID NO: 902689 - DNA, 33 bp, Homo sapien
atctatacacgatatgaaaaatagtacaaacta

SEQ ID NO: 902690 - DNA, 33 bp, Homo sapien
atctatacacgatatggaaaatagtacaaacta

SEQ ID NO: 902691 - DNA, 33 bp, Homo sapien
tgacagcatcagaaaacgaatctgaacttgttt

SEQ ID NO: 902692 - DNA, 33 bp, Homo sapien
tgacagcatcagaaaatgaatctgaacttgttt

SEQ ID NO: 902693 - DNA, 33 bp, Homo sapien
tttcatgttctcctgacgcctgcgcaattgaaa

SEQ ID NO: 902694 - DNA, 33 bp, Homo sapien
tttcatgttctcctgatgcctgcgcaattgaaa

SEQ ID NO: 902695 - DNA, 33 bp, Homo sapien
tctcttcctttaacccagattccaagaaagctt

SEQ ID NO: 902696 - DNA, 33 bp, Homo sapien
tctcttcctttaacccggattccaagaaagctt

SEQ ID NO: 902697 - DNA, 33 bp, Homo sapien
ctcactctgatgttggacatttgtgttctaata

SEQ ID NO: 902698 - DNA, 33 bp, Homo sapien
ctcactctgatgttgggcatttgtgttctaata

SEQ ID NO: 902699 - DNA, 33 bp, Homo sapien
ctctctgttcctgagtaaagtcactgaaattta

SEQ ID NO: 902700 - DNA, 33 bp, Homo sapien
ctctctgttcctgagtcaagtcactgaaattta

SEQ ID NO: 902701 - DNA, 33 bp, Homo sapien
ttttcttctaatgagaacttgttatgtctgatc

SEQ ID NO: 902702 - DNA, 33 bp, Homo sapien
ttttcttctaatgagagcttgttatgtctgatc

SEQ ID NO: 902703 - DNA, 33 bp, Homo sapien
attataatctgagacacgagtctatgactaact

SEQ ID NO: 902704 - DNA, 33 bp, Homo sapien
attataatctgagacaggagtctatgactaact

SEQ ID NO: 902705 - DNA, 33 bp, Homo sapien
aatcctgcaagacaacacatcagactgaggatt

SEQ ID NO: 902706 - DNA, 33 bp, Homo sapien
aatcctgcaagacaacgcatcagactgaggatt

SEQ ID NO: 902707 - DNA, 33 bp, Homo sapien
gaacccagaaataaggccacacattacaaccat

SEQ ID NO: 902708 - DNA, 33 bp, Homo sapien
gaacccagaaataaggtcacacattacaaccat

SEQ ID NO: 902709 - DNA, 33 bp, Homo sapien
ataacaaatcaccccaaaatttatggctgaaaa

SEQ ID NO: 902710 - DNA, 33 bp, Homo sapien
ataacaaatcaccccagaatttatggctgaaaa

SEQ ID NO: 902711 - DNA, 33 bp, Homo sapien
cattaaccatgagaaaaatcaatgtgtgaaatg

SEQ ID NO: 902712 - DNA, 33 bp, Homo sapien
cattaaccatgagaaagatcaatgtgtgaaatg

SEQ ID NO: 902713 - DNA, 33 bp, Homo sapien
acatatgatggattgcgatctctcagcgcagca

SEQ ID NO: 902714 - DNA, 33 bp, Homo sapien
acatatgatggattgctatctctcagcgcagca

SEQ ID NO: 902715 - DNA, 33 bp, Homo sapien
cagtaattctgcacggcattaagaaccataact

SEQ ID NO: 902716 - DNA, 33 bp, Homo sapien
cagtaattctgcacggtattaagaaccataact

SEQ ID NO: 902717 - DNA, 33 bp, Homo sapien
agaaccagctctttacgccattctctgtcattc

SEQ ID NO: 902718 - DNA, 33 bp, Homo sapien
agaaccagctctttactccattctctgtcattc

SEQ ID NO: 902719 - DNA, 33 bp, Homo sapien
gccattcagaacttacagctcccatagcaacaa

SEQ ID NO: 902720 - DNA, 33 bp, Homo sapien
gccattcagaacttacggctcccatagcaacaa

SEQ ID NO: 902721 - DNA, 33 bp, Homo sapien
aataacttgtacccctcaagcatatgtagtatt

SEQ ID NO: 902722 - DNA, 33 bp, Homo sapien
aataacttgtacccctgaagcatatgtagtatt

SEQ ID NO: 902723 - DNA, 33 bp, Homo sapien
tctgttcataatgagaaattttttagagggagc

SEQ ID NO: 902724 - DNA, 33 bp, Homo sapien
tctgttcataatgagagattttttagagggagc

SEQ ID NO: 902725 - DNA, 33 bp, Homo sapien
gttagagtttataaacaaagagttgataatagg

SEQ ID NO: 902726 - DNA, 33 bp, Homo sapien
gttagagtttataaacgaagagttgataatagg

SEQ ID NO: 902727 - DNA, 33 bp, Homo sapien
aggtcttctttgataacatgtcaaggagttaca

SEQ ID NO: 902728 - DNA, 33 bp, Homo sapien
aggtcttctttgataatatgtcaaggagttaca

SEQ ID NO: 902729 - DNA, 33 bp, Homo sapien
tgtggaaagccaacacaatttagttatcttcgt

SEQ ID NO: 902730 - DNA, 33 bp, Homo sapien
tgtggaaagccaacacgatttagttatcttcgt

SEQ ID NO: 902731 - DNA, 33 bp, Homo sapien
ttgacacttctatttcaagatatctgcaattag

SEQ ID NO: 902732 - DNA, 33 bp, Homo sapien
ttgacacttctatttcgagatatctgcaattag

SEQ ID NO: 902733 - DNA, 33 bp, Homo sapien
gttctcctttgtttgcccatgacctattgtcaa

SEQ ID NO: 902734 - DNA, 33 bp, Homo sapien
gttctcctttgtttgctcatgacctattgtcaa

SEQ ID NO: 902735 - DNA, 33 bp, Homo sapien
tatgataacctaaagcagattactgtatccctg

SEQ ID NO: 902736 - DNA, 33 bp, Homo sapien
tatgataacctaaagcggattactgtatccctg

SEQ ID NO: 902737 - DNA, 33 bp, Homo sapien
tcctgatgctttccagccagggatacagtaatc

SEQ ID NO: 902738 - DNA, 33 bp, Homo sapien
tcctgatgctttccaggcagggatacagtaatc

SEQ ID NO: 902739 - DNA, 33 bp, Homo sapien
gctaaagactggcaaaaaatatccacaatacat

SEQ ID NO: 902740 - DNA, 33 bp, Homo sapien
gctaaagactggcaaacaatatccacaatacat

SEQ ID NO: 902741 - DNA, 33 bp, Homo sapien
tgcctaaattcatcccagagtatcagaggagac

SEQ ID NO: 902742 - DNA, 33 bp, Homo sapien
tgcctaaattcatccctgagtatcagaggagac

SEQ ID NO: 902743 - DNA, 33 bp, Homo sapien
tgtacatgaaagtagcacatcctgtggaagagc

SEQ ID NO: 902744 - DNA, 33 bp, Homo sapien
tgtacatgaaagtagcgcatcctgtggaagagc

SEQ ID NO: 902745 - DNA, 33 bp, Homo sapien
taaaactgtgtggagaagagctttgtgttagac

SEQ ID NO: 902746 - DNA, 33 bp, Homo sapien
taaaactgtgtggagaggagctttgtgttagac

SEQ ID NO: 902747 - DNA, 33 bp, Homo sapien
tgaattaagacttccaatgagatgcttcttcct

SEQ ID NO: 902748 - DNA, 33 bp, Homo sapien
tgaattaagacttccagtgagatgcttcttcct

SEQ ID NO: 902749 - DNA, 33 bp, Homo sapien
tacctaatccgatatcacaccaagttgagcccc

SEQ ID NO: 902750 - DNA, 33 bp, Homo sapien
tacctaatccgatatcgcaccaagttgagcccc

SEQ ID NO: 902751 - DNA, 33 bp, Homo sapien
ggtcctccattgtccaagttttcaggaatccca

SEQ ID NO: 902752 - DNA, 33 bp, Homo sapien
ggtcctccattgtccaggttttcaggaatccca

SEQ ID NO: 902753 - DNA, 33 bp, Homo sapien
actggtgattggcttagctgggaaacatattaa

SEQ ID NO: 902754 - DNA, 33 bp, Homo sapien
actggtgattggcttatctgggaaacatattaa

SEQ ID NO: 902755 - DNA, 33 bp, Homo sapien
gtaaaaacaggtgagccgaagtcttcataaaca

SEQ ID NO: 902756 - DNA, 33 bp, Homo sapien
gtaaaaacaggtgagctgaagtcttcataaaca

SEQ ID NO: 902757 - DNA, 33 bp, Homo sapien
ataattggcaataaaaacgtgtttaataaatat

SEQ ID NO: 902758 - DNA, 33 bp, Homo sapien
ataattggcaataaaagcgtgtttaataaatat

SEQ ID NO: 902759 - DNA, 33 bp, Homo sapien
tgaatttttcactcaacgcctactgggtaaaaa

SEQ ID NO: 902760 - DNA, 33 bp, Homo sapien
tgaatttttcactcaatgcctactgggtaaaaa

SEQ ID NO: 902761 - DNA, 33 bp, Homo sapien
gaaatcctttctgtcggagtgaagagaggattt

SEQ ID NO: 902762 - DNA, 33 bp, Homo sapien
gaaatcctttctgtcgtagtgaagagaggattt

SEQ ID NO: 902763 - DNA, 33 bp, Homo sapien
gctcaggaaccatttaagcatgaacttggcaat

SEQ ID NO: 902764 - DNA, 33 bp, Homo sapien
gctcaggaaccatttaggcatgaacttggcaat

SEQ ID NO: 902765 - DNA, 33 bp, Homo sapien
gcattgcatccaaagtaaaaaatttgtggttga

SEQ ID NO: 902766 - DNA, 33 bp, Homo sapien
gcattgcatccaaagtcaaaaatttgtggttga

SEQ ID NO: 902767 - DNA, 33 bp, Homo sapien
tgttgttgtcattaaacggtcctaaaaacaaca

SEQ ID NO: 902768 - DNA, 33 bp, Homo sapien
tgttgttgtcattaaatggtcctaaaaacaaca

SEQ ID NO: 902769 - DNA, 33 bp, Homo sapien
atgaaatgccagtctgcagaacttttcacaaaa

SEQ ID NO: 902770 - DNA, 33 bp, Homo sapien
atgaaatgccagtctgtagaacttttcacaaaa

SEQ ID NO: 902771 - DNA, 33 bp, Homo sapien
gctattagacctaatacagagttgataccatta

SEQ ID NO: 902772 - DNA, 33 bp, Homo sapien
gctattagacctaatatagagttgataccatta

SEQ ID NO: 902773 - DNA, 33 bp, Homo sapien
catagacgaaacaggacctaaaacaaacagaga

SEQ ID NO: 902774 - DNA, 33 bp, Homo sapien
catagacgaaacaggagctaaaacaaacagaga

SEQ ID NO: 902775 - DNA, 33 bp, Homo sapien
tccctcttatttaaatcaccgtgagatggataa

SEQ ID NO: 902776 - DNA, 33 bp, Homo sapien
tccctcttatttaaattaccgtgagatggataa

SEQ ID NO: 902777 - DNA, 33 bp, Homo sapien
gaacttcctccagccccctgcttttcaaaggcc

SEQ ID NO: 902778 - DNA, 33 bp, Homo sapien
gaacttcctccagcccgctgcttttcaaaggcc

SEQ ID NO: 902779 - DNA, 33 bp, Homo sapien
ctcctgagagaagtcaaccttgtttggagccca

SEQ ID NO: 902780 - DNA, 33 bp, Homo sapien
ctcctgagagaagtcatccttgtttggagccca

SEQ ID NO: 902781 - DNA, 33 bp, Homo sapien
atttcagagaaatcacaataggctcctaatata

SEQ ID NO: 902782 - DNA, 33 bp, Homo sapien
atttcagagaaatcacgataggctcctaatata

SEQ ID NO: 902783 - DNA, 33 bp, Homo sapien
ccgaacaatctaacacaattggtcacatattga

SEQ ID NO: 902784 - DNA, 33 bp, Homo sapien
ccgaacaatctaacaccattggtcacatattga

SEQ ID NO: 902785 - DNA, 33 bp, Homo sapien
tactttagaagatttgaagagtgtgcatgagtg

SEQ ID NO: 902786 - DNA, 33 bp, Homo sapien
tactttagaagatttggagagtgtgcatgagtg

SEQ ID NO: 902787 - DNA, 33 bp, Homo sapien
atatatggcttctgaaatgattagattcattaa

SEQ ID NO: 902788 - DNA, 33 bp, Homo sapien
atatatggcttctgaagtgattagattcattaa

SEQ ID NO: 902789 - DNA, 33 bp, Homo sapien
ctagattcacagtaaacaaagggaaagattact

SEQ ID NO: 902790 - DNA, 33 bp, Homo sapien
ctagattcacagtaaataaagggaaagattact

SEQ ID NO: 902791 - DNA, 33 bp, Homo sapien
tacacattttggctgacagagacataatgacct

SEQ ID NO: 902792 - DNA, 33 bp, Homo sapien
tacacattttggctgatagagacataatgacct

SEQ ID NO: 902793 - DNA, 33 bp, Homo sapien
catgcacaactgcagagaatcaagtcgggttaa

SEQ ID NO: 902794 - DNA, 33 bp, Homo sapien
catgcacaactgcagataatcaagtcgggttaa

SEQ ID NO: 902795 - DNA, 33 bp, Homo sapien
ggattatgttcttgtcgatgttctatgtcttat

SEQ ID NO: 902796 - DNA, 33 bp, Homo sapien
ggattatgttcttgtctatgttctatgtcttat

SEQ ID NO: 902797 - DNA, 33 bp, Homo sapien
ataccacgtaagatgacgacacatgagaagaca

SEQ ID NO: 902798 - DNA, 33 bp, Homo sapien
ataccacgtaagatgatgacacatgagaagaca

SEQ ID NO: 902799 - DNA, 33 bp, Homo sapien
gtggataagatgaacacgaacaggtatttgtgc

SEQ ID NO: 902800 - DNA, 33 bp, Homo sapien
gtggataagatgaacatgaacaggtatttgtgc

SEQ ID NO: 902801 - DNA, 33 bp, Homo sapien
agtctcttcctgaaagaactgcagagagccatg

SEQ ID NO: 902802 - DNA, 33 bp, Homo sapien
agtctcttcctgaaaggactgcagagagccatg

SEQ ID NO: 902803 - DNA, 33 bp, Homo sapien
gaatctcctttgcgctaagactgccatatgcaa

SEQ ID NO: 902804 - DNA, 33 bp, Homo sapien
gaatctcctttgcgctgagactgccatatgcaa

SEQ ID NO: 902805 - DNA, 33 bp, Homo sapien
ccagcagtggcttagacgttacccaggcaaggc

SEQ ID NO: 902806 - DNA, 33 bp, Homo sapien
ccagcagtggcttagatgttacccaggcaaggc

SEQ ID NO: 902807 - DNA, 33 bp, Homo sapien
tccctgacttttacaacgtgatgcatgaagttg

SEQ ID NO: 902808 - DNA, 33 bp, Homo sapien
tccctgacttttacaaggtgatgcatgaagttg

SEQ ID NO: 902809 - DNA, 33 bp, Homo sapien
gctgaacgtttgcagaaaatttgacattggata

SEQ ID NO: 902810 - DNA, 33 bp, Homo sapien
gctgaacgtttgcagagaatttgacattggata

SEQ ID NO: 902811 - DNA, 33 bp, Homo sapien
gagccgccttccaaccagacggattagtttatg

SEQ ID NO: 902812 - DNA, 33 bp, Homo sapien
gagccgccttccaaccggacggattagtttatg

SEQ ID NO: 902813 - DNA, 33 bp, Homo sapien
atttcatgtgtaaaataaagtctttcacaggct

SEQ ID NO: 902814 - DNA, 33 bp, Homo sapien
atttcatgtgtaaaatgaagtctttcacaggct

SEQ ID NO: 902815 - DNA, 33 bp, Homo sapien
taggcaaattctcaaacggctaaaaatgcacaa

SEQ ID NO: 902816 - DNA, 33 bp, Homo sapien
taggcaaattctcaaatggctaaaaatgcacaa

SEQ ID NO: 902817 - DNA, 33 bp, Homo sapien
cctgcgccctccaggacgtttctctactgcatt

SEQ ID NO: 902818 - DNA, 33 bp, Homo sapien
cctgcgccctccaggatgtttctctactgcatt

SEQ ID NO: 902819 - DNA, 33 bp, Homo sapien
ggggcttttgtacaccaattcttttcttttgag

SEQ ID NO: 902820 - DNA, 33 bp, Homo sapien
ggggcttttgtacaccgattcttttcttttgag

SEQ ID NO: 902821 - DNA, 33 bp, Homo sapien
ttttcaagtttgctaactggcgtaaagtaaagc

SEQ ID NO: 902822 - DNA, 33 bp, Homo sapien
ttttcaagtttgctaattggcgtaaagtaaagc

SEQ ID NO: 902823 - DNA, 33 bp, Homo sapien
aataaagcggggtggtgaatgatagctgggaca

SEQ ID NO: 902824 - DNA, 33 bp, Homo sapien
aataaagcggggtggttaatgatagctgggaca

SEQ ID NO: 902825 - DNA, 33 bp, Homo sapien
aagaaagagaaaacaacagggcagcatttgttt

SEQ ID NO: 902826 - DNA, 33 bp, Homo sapien
aagaaagagaaaacaatagggcagcatttgttt

SEQ ID NO: 902827 - DNA, 33 bp, Homo sapien
atgctggagggagctacacacattcttaaaaaa

SEQ ID NO: 902828 - DNA, 33 bp, Homo sapien
atgctggagggagctatacacattcttaaaaaa

SEQ ID NO: 902829 - DNA, 33 bp, Homo sapien
atggaaattgatcccaaatcagaagattccttg

SEQ ID NO: 902830 - DNA, 33 bp, Homo sapien
atggaaattgatcccacatcagaagattccttg

SEQ ID NO: 902831 - DNA, 33 bp, Homo sapien
caagtactgtggttagaacttttcatattatta

SEQ ID NO: 902832 - DNA, 33 bp, Homo sapien
caagtactgtggttaggacttttcatattatta

SEQ ID NO: 902833 - DNA, 33 bp, Homo sapien
tcaccagaagtagctaccaaacggaaatcatat

SEQ ID NO: 902834 - DNA, 33 bp, Homo sapien
tcaccagaagtagctagcaaacggaaatcatat

SEQ ID NO: 902835 - DNA, 33 bp, Homo sapien
gagcctgtacctcctgaatcacacagatgtctt

SEQ ID NO: 902836 - DNA, 33 bp, Homo sapien
gagcctgtacctcctggatcacacagatgtctt

SEQ ID NO: 902837 - DNA, 33 bp, Homo sapien
gtaaaaaatgaaaagcagcagcatcatacagca

SEQ ID NO: 902838 - DNA, 33 bp, Homo sapien
gtaaaaaatgaaaagcggcagcatcatacagca

SEQ ID NO: 902839 - DNA, 33 bp, Homo sapien
accataaagaaagggacacagcgaacacgtaat

SEQ ID NO: 902840 - DNA, 33 bp, Homo sapien
accataaagaaagggagacagcgaacacgtaat

SEQ ID NO: 902841 - DNA, 33 bp, Homo sapien
aagtcagatgttaaaacgccaaatggatgatcc

SEQ ID NO: 902842 - DNA, 33 bp, Homo sapien
aagtcagatgttaaaatgccaaatggatgatcc

SEQ ID NO: 902843 - DNA, 33 bp, Homo sapien
aatgagacaattttaaaaggtagtagcaggtga

SEQ ID NO: 902844 - DNA, 33 bp, Homo sapien
aatgagacaattttaacaggtagtagcaggtga

SEQ ID NO: 902845 - DNA, 33 bp, Homo sapien
gagatctccttattcactaatagttctttatct

SEQ ID NO: 902846 - DNA, 33 bp, Homo sapien
gagatctccttattcattaatagttctttatct

SEQ ID NO: 902847 - DNA, 33 bp, Homo sapien
tcacttaagctgcttcaagaaagagggtgtcca

SEQ ID NO: 902848 - DNA, 33 bp, Homo sapien
tcacttaagctgcttcgagaaagagggtgtcca

SEQ ID NO: 902849 - DNA, 33 bp, Homo sapien
gggttttaatgggctaacatcaagtgtcggctg

SEQ ID NO: 902850 - DNA, 33 bp, Homo sapien
gggttttaatgggctatcatcaagtgtcggctg

SEQ ID NO: 902851 - DNA, 33 bp, Homo sapien
tatgcatttgaatcaaaatcacatacagcatca

SEQ ID NO: 902852 - DNA, 33 bp, Homo sapien
tatgcatttgaatcaacatcacatacagcatca

SEQ ID NO: 902853 - DNA, 33 bp, Homo sapien
cgtctatggggaaaaaagtagagtaagtgtggc

SEQ ID NO: 902854 - DNA, 33 bp, Homo sapien
cgtctatggggaaaaatgtagagtaagtgtggc

SEQ ID NO: 902855 - DNA, 33 bp, Homo sapien
atatcagatgagcagaacatggtaccttaggaa

SEQ ID NO: 902856 - DNA, 33 bp, Homo sapien
atatcagatgagcagagcatggtaccttaggaa

SEQ ID NO: 902857 - DNA, 33 bp, Homo sapien
ttcagaatctactcaacaccctttgttctctgc

SEQ ID NO: 902858 - DNA, 33 bp, Homo sapien
ttcagaatctactcaataccctttgttctctgc

SEQ ID NO: 902859 - DNA, 33 bp, Homo sapien
aagacatatgaaaacacgttcatttagaaatca

SEQ ID NO: 902860 - DNA, 33 bp, Homo sapien
aagacatatgaaaacaggttcatttagaaatca

SEQ ID NO: 902861 - DNA, 33 bp, Homo sapien
gcttttccatgccactcaagaaataagaaatgg

SEQ ID NO: 902862 - DNA, 33 bp, Homo sapien
gcttttccatgccactgaagaaataagaaatgg

SEQ ID NO: 902863 - DNA, 33 bp, Homo sapien
gtgagtgactaatacacgacatacgatgagcat

SEQ ID NO: 902864 - DNA, 33 bp, Homo sapien
gtgagtgactaatacatgacatacgatgagcat

SEQ ID NO: 902865 - DNA, 33 bp, Homo sapien
atgttcaaggagaggccagaaaactgtatttga

SEQ ID NO: 902866 - DNA, 33 bp, Homo sapien
atgttcaaggagaggctagaaaactgtatttga

SEQ ID NO: 902867 - DNA, 33 bp, Homo sapien
ggatcactgggaacgtaaagctgttttcctcat

SEQ ID NO: 902868 - DNA, 33 bp, Homo sapien
ggatcactgggaacgttaagctgttttcctcat

SEQ ID NO: 902869 - DNA, 33 bp, Homo sapien
ctgttttcctcatctaacctcaaagaagataat

SEQ ID NO: 902870 - DNA, 33 bp, Homo sapien
ctgttttcctcatctagcctcaaagaagataat

SEQ ID NO: 902871 - DNA, 33 bp, Homo sapien
gagaaaccatagtgaacaaaaccaggtgtagaa

SEQ ID NO: 902872 - DNA, 33 bp, Homo sapien
gagaaaccatagtgaagaaaaccaggtgtagaa

SEQ ID NO: 902873 - DNA, 33 bp, Homo sapien
gcttctctttggcaaaggtgaatggccagcatc

SEQ ID NO: 902874 - DNA, 33 bp, Homo sapien
gcttctctttggcaaatgtgaatggccagcatc

SEQ ID NO: 902875 - DNA, 33 bp, Homo sapien
ctgcacagaggctgccaacatgatgggaactcg

SEQ ID NO: 902876 - DNA, 33 bp, Homo sapien
ctgcacagaggctgccgacatgatgggaactcg

SEQ ID NO: 902877 - DNA, 33 bp, Homo sapien
gcttggaagtcatcaccggttgcctggaacata

SEQ ID NO: 902878 - DNA, 33 bp, Homo sapien
gcttggaagtcatcactggttgcctggaacata

SEQ ID NO: 902879 - DNA, 33 bp, Homo sapien
aacatagtaggctctcaataaatacatggtgcc

SEQ ID NO: 902880 - DNA, 33 bp, Homo sapien
aacatagtaggctctcgataaatacatggtgcc

SEQ ID NO: 902881 - DNA, 33 bp, Homo sapien
ccctggtcacgctccactcctggccatctgcaa

SEQ ID NO: 902882 - DNA, 33 bp, Homo sapien
ccctggtcacgctccattcctggccatctgcaa

SEQ ID NO: 902883 - DNA, 33 bp, Homo sapien
gccatccacagccagcagacggggatgtcccac

SEQ ID NO: 902884 - DNA, 33 bp, Homo sapien
gccatccacagccagcggacggggatgtcccac

SEQ ID NO: 902885 - DNA, 33 bp, Homo sapien
agacagaaacaatgtccagtccatgcagaagat

SEQ ID NO: 902886 - DNA, 33 bp, Homo sapien
agacagaaacaatgtctagtccatgcagaagat

SEQ ID NO: 902887 - DNA, 33 bp, Homo sapien
ccatctgtgtctttaacatggcttggtgtaata

SEQ ID NO: 902888 - DNA, 33 bp, Homo sapien
ccatctgtgtctttaatatggcttggtgtaata

SEQ ID NO: 902889 - DNA, 33 bp, Homo sapien
catggctgttattataagcaacagagtggttgc

SEQ ID NO: 902890 - DNA, 33 bp, Homo sapien
catggctgttattatacgcaacagagtggttgc

SEQ ID NO: 902891 - DNA, 33 bp, Homo sapien
ggcaagttgtatgttacgtgtattgtactacaa

SEQ ID NO: 902892 - DNA, 33 bp, Homo sapien
ggcaagttgtatgttatgtgtattgtactacaa

SEQ ID NO: 902893 - DNA, 33 bp, Homo sapien
tcattctcaggctgggaagagccggactgactg

SEQ ID NO: 902894 - DNA, 33 bp, Homo sapien
tcattctcaggctggggagagccggactgactg

SEQ ID NO: 902895 - DNA, 33 bp, Homo sapien
gacctatccaaagttacgagttagttggaggca

SEQ ID NO: 902896 - DNA, 33 bp, Homo sapien
gacctatccaaagttatgagttagttggaggca

SEQ ID NO: 902897 - DNA, 33 bp, Homo sapien
aatcttcaggaccatcaagttttcaatagccaa

SEQ ID NO: 902898 - DNA, 33 bp, Homo sapien
aatcttcaggaccatcgagttttcaatagccaa

SEQ ID NO: 902899 - DNA, 33 bp, Homo sapien
tatctatagtcgaggacggaaaaaaagtaggca

SEQ ID NO: 902900 - DNA, 33 bp, Homo sapien
tatctatagtcgaggatggaaaaaaagtaggca

SEQ ID NO: 902901 - DNA, 33 bp, Homo sapien
ctgggaactcaagtcaacaaattctaattacag

SEQ ID NO: 902902 - DNA, 33 bp, Homo sapien
ctgggaactcaagtcagcaaattctaattacag

SEQ ID NO: 902903 - DNA, 33 bp, Homo sapien
agtttttcagaactgaagaagtttatatccagt

SEQ ID NO: 902904 - DNA, 33 bp, Homo sapien
agtttttcagaactgaggaagtttatatccagt

SEQ ID NO: 902905 - DNA, 33 bp, Homo sapien
agacacatatggccacaaatgaacacagatggc

SEQ ID NO: 902906 - DNA, 33 bp, Homo sapien
agacacatatggccacgaatgaacacagatggc

SEQ ID NO: 902907 - DNA, 33 bp, Homo sapien
agttattctagaagtacgctggagagagagcta

SEQ ID NO: 902908 - DNA, 33 bp, Homo sapien
agttattctagaagtatgctggagagagagcta

SEQ ID NO: 902909 - DNA, 33 bp, Homo sapien
acctcattagcataaacttgggtgtggttgaaa

SEQ ID NO: 902910 - DNA, 33 bp, Homo sapien
acctcattagcataaagttgggtgtggttgaaa

SEQ ID NO: 902911 - DNA, 33 bp, Homo sapien
aagttatatagtacccaactccactctgaggtg

SEQ ID NO: 902912 - DNA, 33 bp, Homo sapien
aagttatatagtacccgactccactctgaggtg

SEQ ID NO: 902913 - DNA, 33 bp, Homo sapien
cttctggtctctaaggacataaattgaagccac

SEQ ID NO: 902914 - DNA, 33 bp, Homo sapien
cttctggtctctaagggcataaattgaagccac

SEQ ID NO: 902915 - DNA, 33 bp, Homo sapien
taaggtcatatttcaacgaagggttaactcggc

SEQ ID NO: 902916 - DNA, 33 bp, Homo sapien
taaggtcatatttcaatgaagggttaactcggc

SEQ ID NO: 902917 - DNA, 33 bp, Homo sapien
cataaaactgaaacccacactgttgacaagagt

SEQ ID NO: 902918 - DNA, 33 bp, Homo sapien
cataaaactgaaacccgcactgttgacaagagt

SEQ ID NO: 902919 - DNA, 33 bp, Homo sapien
tattcatcatggtaaacaatttccactttaaaa

SEQ ID NO: 902920 - DNA, 33 bp, Homo sapien
tattcatcatggtaaataatttccactttaaaa

SEQ ID NO: 902921 - DNA, 33 bp, Homo sapien
ctgatggattgaaagacctgaggaagtcaccga

SEQ ID NO: 902922 - DNA, 33 bp, Homo sapien
ctgatggattgaaagatctgaggaagtcaccga

SEQ ID NO: 902923 - DNA, 33 bp, Homo sapien
taccttcattctcaaagaagagattcccctaca

SEQ ID NO: 902924 - DNA, 33 bp, Homo sapien
taccttcattctcaaataagagattcccctaca

SEQ ID NO: 902925 - DNA, 33 bp, Homo sapien
actggctcttaatcgcaccgacaccctgcccca

SEQ ID NO: 902926 - DNA, 33 bp, Homo sapien
actggctcttaatcgcgccgacaccctgcccca

SEQ ID NO: 902927 - DNA, 33 bp, Homo sapien
agaggcatgacaaatactacttcacagaggtgt

SEQ ID NO: 902928 - DNA, 33 bp, Homo sapien
agaggcatgacaaatattacttcacagaggtgt

SEQ ID NO: 902929 - DNA, 33 bp, Homo sapien
catctgaacatatcgacacttataaaatggcat

SEQ ID NO: 902930 - DNA, 33 bp, Homo sapien
catctgaacatatcgatacttataaaatggcat

SEQ ID NO: 902931 - DNA, 33 bp, Homo sapien
ttgtagctgaaaacaactgagacaccagagaaa

SEQ ID NO: 902932 - DNA, 33 bp, Homo sapien
ttgtagctgaaaacaattgagacaccagagaaa

SEQ ID NO: 902933 - DNA, 33 bp, Homo sapien
ggtttttatgattggcaagcctcagaatcacag

SEQ ID NO: 902934 - DNA, 33 bp, Homo sapien
ggtttttatgattggcgagcctcagaatcacag

SEQ ID NO: 902935 - DNA, 33 bp, Homo sapien
cacttgaaatgcaaccgcaggcaattctgtagg

SEQ ID NO: 902936 - DNA, 33 bp, Homo sapien
cacttgaaatgcaacctcaggcaattctgtagg

SEQ ID NO: 902937 - DNA, 33 bp, Homo sapien
agagcacccaattttcaacatttctcgaccctg

SEQ ID NO: 902938 - DNA, 33 bp, Homo sapien
agagcacccaattttctacatttctcgaccctg

SEQ ID NO: 902939 - DNA, 33 bp, Homo sapien
ttactagttccttgagactatcaactaaatccg

SEQ ID NO: 902940 - DNA, 33 bp, Homo sapien
ttactagttccttgagtctatcaactaaatccg

SEQ ID NO: 902941 - DNA, 33 bp, Homo sapien
aacaattttcaccgtacgtaagttaacaacatg

SEQ ID NO: 902942 - DNA, 33 bp, Homo sapien
aacaattttcaccgtatgtaagttaacaacatg

SEQ ID NO: 902943 - DNA, 33 bp, Homo sapien
tgacttggttataaaaatgttattgctattatc

SEQ ID NO: 902944 - DNA, 33 bp, Homo sapien
tgacttggttataaaattgttattgctattatc

SEQ ID NO: 902945 - DNA, 33 bp, Homo sapien
aaagtgatagcaactgcatcattaaaggccatc

SEQ ID NO: 902946 - DNA, 33 bp, Homo sapien
aaagtgatagcaactggatcattaaaggccatc

SEQ ID NO: 902947 - DNA, 33 bp, Homo sapien
gttgtttaaatttgcccgccacctttctgctcc

SEQ ID NO: 902948 - DNA, 33 bp, Homo sapien
gttgtttaaatttgcctgccacctttctgctcc

SEQ ID NO: 902949 - DNA, 33 bp, Homo sapien
tctttaaaaaggacagacatcatttacatttaa

SEQ ID NO: 902950 - DNA, 33 bp, Homo sapien
tctttaaaaaggacagccatcatttacatttaa

SEQ ID NO: 902951 - DNA, 33 bp, Homo sapien
tacttttgatgcaataccctctgcttggaatgt

SEQ ID NO: 902952 - DNA, 33 bp, Homo sapien
tacttttgatgcaatatcctctgcttggaatgt

SEQ ID NO: 902953 - DNA, 33 bp, Homo sapien
taaagaatgaatagaaattagataggtcaacaa

SEQ ID NO: 902954 - DNA, 33 bp, Homo sapien
taaagaatgaatagaagttagataggtcaacaa

SEQ ID NO: 902955 - DNA, 33 bp, Homo sapien
ttcaatacactaggaactagaatattcaccaag

SEQ ID NO: 902956 - DNA, 33 bp, Homo sapien
ttcaatacactaggaagtagaatattcaccaag

SEQ ID NO: 902957 - DNA, 33 bp, Homo sapien
tgtctttgaagtgtcaatgaaaactacagtatc

SEQ ID NO: 902958 - DNA, 33 bp, Homo sapien
tgtctttgaagtgtcagtgaaaactacagtatc

SEQ ID NO: 902959 - DNA, 33 bp, Homo sapien
agatttagggtctccacataagaaaacaattcc

SEQ ID NO: 902960 - DNA, 33 bp, Homo sapien
agatttagggtctccagataagaaaacaattcc

SEQ ID NO: 902961 - DNA, 33 bp, Homo sapien
aggagtgtgttaaaaactaagagtgaagcttgt

SEQ ID NO: 902962 - DNA, 33 bp, Homo sapien
aggagtgtgttaaaaagtaagagtgaagcttgt

SEQ ID NO: 902963 - DNA, 33 bp, Homo sapien
tttggaggtcaggaaaaggaggagcaacaggcc

SEQ ID NO: 902964 - DNA, 33 bp, Homo sapien
tttggaggtcaggaaagggaggagcaacaggcc

SEQ ID NO: 902965 - DNA, 33 bp, Homo sapien
gccagtccctgtgatagatcttcatcctgacct

SEQ ID NO: 902966 - DNA, 33 bp, Homo sapien
gccagtccctgtgatatatcttcatcctgacct

SEQ ID NO: 902967 - DNA, 33 bp, Homo sapien
actaccattttttacacgctgcctatggctgtt

SEQ ID NO: 902968 - DNA, 33 bp, Homo sapien
actaccattttttacatgctgcctatggctgtt

SEQ ID NO: 902969 - DNA, 33 bp, Homo sapien
tgtgagattaaagagacattacaaagaggatta

SEQ ID NO: 902970 - DNA, 33 bp, Homo sapien
tgtgagattaaagagatattacaaagaggatta

SEQ ID NO: 902971 - DNA, 33 bp, Homo sapien
tgctttatgtctcaaactgttagtcacagacgt

SEQ ID NO: 902972 - DNA, 33 bp, Homo sapien
tgctttatgtctcaaattgttagtcacagacgt

SEQ ID NO: 902973 - DNA, 33 bp, Homo sapien
ccttcttcttccttcactaacttttcaaagccc

SEQ ID NO: 902974 - DNA, 33 bp, Homo sapien
ccttcttcttccttcattaacttttcaaagccc

SEQ ID NO: 902975 - DNA, 33 bp, Homo sapien
gctgaatgtgtggaaccagaggggggtcacgac

SEQ ID NO: 902976 - DNA, 33 bp, Homo sapien
gctgaatgtgtggaacgagaggggggtcacgac

SEQ ID NO: 902977 - DNA, 33 bp, Homo sapien
taaatatcccatttgcagaccttcagacagttt

SEQ ID NO: 902978 - DNA, 33 bp, Homo sapien
taaatatcccatttgcggaccttcagacagttt

SEQ ID NO: 902979 - DNA, 33 bp, Homo sapien
gaattctgcttcctcaggttctttctctttccc

SEQ ID NO: 902980 - DNA, 33 bp, Homo sapien
gaattctgcttcctcatgttctttctctttccc

SEQ ID NO: 902981 - DNA, 33 bp, Homo sapien
ccagaggcaggtacccaactaggatatttgttc

SEQ ID NO: 902982 - DNA, 33 bp, Homo sapien
ccagaggcaggtacccgactaggatatttgttc

SEQ ID NO: 902983 - DNA, 33 bp, Homo sapien
tcttagttctcacctacgtaagcaaaagagact

SEQ ID NO: 902984 - DNA, 33 bp, Homo sapien
tcttagttctcacctatgtaagcaaaagagact

SEQ ID NO: 902985 - DNA, 33 bp, Homo sapien
ttgctcaatttacataaatctcttgcaatacgc

SEQ ID NO: 902986 - DNA, 33 bp, Homo sapien
ttgctcaatttacatacatctcttgcaatacgc

SEQ ID NO: 902987 - DNA, 33 bp, Homo sapien
tgctgctgaacatggcactccctgaaagaagtt

SEQ ID NO: 902988 - DNA, 33 bp, Homo sapien
tgctgctgaacatggcgctccctgaaagaagtt

SEQ ID NO: 902989 - DNA, 33 bp, Homo sapien
ctgggtgccataagaaacacaaagattagtaca

SEQ ID NO: 902990 - DNA, 33 bp, Homo sapien
ctgggtgccataagaatcacaaagattagtaca

SEQ ID NO: 902991 - DNA, 33 bp, Homo sapien
tcctttgctacaaccactatgaatttccctaag

SEQ ID NO: 902992 - DNA, 33 bp, Homo sapien
tcctttgctacaaccagtatgaatttccctaag

SEQ ID NO: 902993 - DNA, 33 bp, Homo sapien
tccctggaccagagtacatttgactccctgcag

SEQ ID NO: 902994 - DNA, 33 bp, Homo sapien
tccctggaccagagtatatttgactccctgcag

SEQ ID NO: 902995 - DNA, 33 bp, Homo sapien
caatcaaggttataagaaaggtgcagaagtcat

SEQ ID NO: 902996 - DNA, 33 bp, Homo sapien
caatcaaggttataaggaaggtgcagaagtcat

SEQ ID NO: 902997 - DNA, 33 bp, Homo sapien
aatgattcagcatttacactttaaaaattacct

SEQ ID NO: 902998 - DNA, 33 bp, Homo sapien
aatgattcagcatttagactttaaaaattacct

SEQ ID NO: 902999 - DNA, 33 bp, Homo sapien
tgaaacaaaatttcaaatgaggtggtttatttg

SEQ ID NO: 903000 - DNA, 33 bp, Homo sapien
tgaaacaaaatttcaagtgaggtggtttatttg

SEQ ID NO: 903001 - DNA, 33 bp, Homo sapien
gagaaagcgttactagactaaatattttctttt

SEQ ID NO: 903002 - DNA, 33 bp, Homo sapien
gagaaagcgttactaggctaaatattttctttt

SEQ ID NO: 903003 - DNA, 33 bp, Homo sapien
ttatccactgtcaccaagtcaatgtaaaaccag

SEQ ID NO: 903004 - DNA, 33 bp, Homo sapien
ttatccactgtcaccatgtcaatgtaaaaccag

SEQ ID NO: 903005 - DNA, 33 bp, Homo sapien
ggcacaaatccatgaaatgaagtttctcgagag

SEQ ID NO: 903006 - DNA, 33 bp, Homo sapien
ggcacaaatccatgaactgaagtttctcgagag

SEQ ID NO: 903007 - DNA, 33 bp, Homo sapien
tgcaaatggaaagaaacaacgtagagaggaatt

SEQ ID NO: 903008 - DNA, 33 bp, Homo sapien
tgcaaatggaaagaaagaacgtagagaggaatt

SEQ ID NO: 903009 - DNA, 33 bp, Homo sapien
gaacaatgaataccctcacctaaagatgtttat

SEQ ID NO: 903010 - DNA, 33 bp, Homo sapien
gaacaatgaatacccttacctaaagatgtttat

SEQ ID NO: 903011 - DNA, 33 bp, Homo sapien
atccgaaaactatccccgctagccacctgtcca

SEQ ID NO: 903012 - DNA, 33 bp, Homo sapien
atccgaaaactatccctgctagccacctgtcca

SEQ ID NO: 903013 - DNA, 33 bp, Homo sapien
ttgttgtgtgatcccgaacatgtttgcactgga

SEQ ID NO: 903014 - DNA, 33 bp, Homo sapien
ttgttgtgtgatcccggacatgtttgcactgga

SEQ ID NO: 903015 - DNA, 33 bp, Homo sapien
atacatcaggatcaagacatataaggattaagg

SEQ ID NO: 903016 - DNA, 33 bp, Homo sapien
atacatcaggatcaaggcatataaggattaagg

SEQ ID NO: 903017 - DNA, 33 bp, Homo sapien
atttgtctttctttcaatcctttagagttaaga

SEQ ID NO: 903018 - DNA, 33 bp, Homo sapien
atttgtctttctttcagtcctttagagttaaga

SEQ ID NO: 903019 - DNA, 33 bp, Homo sapien
aggcattctggttgccagataattggctgcagc

SEQ ID NO: 903020 - DNA, 33 bp, Homo sapien
aggcattctggttgcccgataattggctgcagc

SEQ ID NO: 903021 - DNA, 33 bp, Homo sapien
tacatgttggtgcagaatatagtcataggaaaa

SEQ ID NO: 903022 - DNA, 33 bp, Homo sapien
tacatgttggtgcagagtatagtcataggaaaa

SEQ ID NO: 903023 - DNA, 33 bp, Homo sapien
atgttctcaatacccaagtaaaagagtggctga

SEQ ID NO: 903024 - DNA, 33 bp, Homo sapien
atgttctcaatacccaggtaaaagagtggctga

SEQ ID NO: 903025 - DNA, 33 bp, Homo sapien
aaattttttgccatacacttaacagttcaaact

SEQ ID NO: 903026 - DNA, 33 bp, Homo sapien
aaattttttgccatacgcttaacagttcaaact

SEQ ID NO: 903027 - DNA, 33 bp, Homo sapien
gttaagtcagactgcaaacatttgtgtattcat

SEQ ID NO: 903028 - DNA, 33 bp, Homo sapien
gttaagtcagactgcagacatttgtgtattcat

SEQ ID NO: 903029 - DNA, 33 bp, Homo sapien
aggtcagaggtaagaacggtttagtgctggaat

SEQ ID NO: 903030 - DNA, 33 bp, Homo sapien
aggtcagaggtaagaatggtttagtgctggaat

SEQ ID NO: 903031 - DNA, 33 bp, Homo sapien
cctcagtggctacataaaagtcatttgcagcaa

SEQ ID NO: 903032 - DNA, 33 bp, Homo sapien
cctcagtggctacatagaagtcatttgcagcaa

SEQ ID NO: 903033 - DNA, 33 bp, Homo sapien
agaaaaaacaagcaaacgcaaactttcccttag

SEQ ID NO: 903034 - DNA, 33 bp, Homo sapien
agaaaaaacaagcaaatgcaaactttcccttag

SEQ ID NO: 903035 - DNA, 33 bp, Homo sapien
ggttgcagtgagctgactagccaggcctggtgg

SEQ ID NO: 903036 - DNA, 33 bp, Homo sapien
ggttgcagtgagctgattagccaggcctggtgg

SEQ ID NO: 903037 - DNA, 33 bp, Homo sapien
ttaatctattaaaagaatcatgcaacgatcacc

SEQ ID NO: 903038 - DNA, 33 bp, Homo sapien
ttaatctattaaaagagtcatgcaacgatcacc

SEQ ID NO: 903039 - DNA, 33 bp, Homo sapien
ctaaaaaagcttttccacttgccaggcctctaa

SEQ ID NO: 903040 - DNA, 33 bp, Homo sapien
ctaaaaaagcttttccgcttgccaggcctctaa

SEQ ID NO: 903041 - DNA, 33 bp, Homo sapien
gctgtgagacaatcaaattctgttgttttaagt

SEQ ID NO: 903042 - DNA, 33 bp, Homo sapien
gctgtgagacaatcaatttctgttgttttaagt

SEQ ID NO: 903043 - DNA, 33 bp, Homo sapien
ctggaaaagtagccagcatcactcaaaagcctc

SEQ ID NO: 903044 - DNA, 33 bp, Homo sapien
ctggaaaagtagccaggatcactcaaaagcctc

SEQ ID NO: 903045 - DNA, 33 bp, Homo sapien
caaactgccccagaacacagtgctgagagcagg

SEQ ID NO: 903046 - DNA, 33 bp, Homo sapien
caaactgccccagaactcagtgctgagagcagg

SEQ ID NO: 903047 - DNA, 33 bp, Homo sapien
ctcaaactcatgggctcaaggggtccttccacc

SEQ ID NO: 903048 - DNA, 33 bp, Homo sapien
ctcaaactcatgggcttaaggggtccttccacc

SEQ ID NO: 903049 - DNA, 33 bp, Homo sapien
acattttgtagatggagtccagatgtagaaagt

SEQ ID NO: 903050 - DNA, 33 bp, Homo sapien
acattttgtagatggattccagatgtagaaagt

SEQ ID NO: 903051 - DNA, 33 bp, Homo sapien
catagacatttctgaaaaaagacctgaaactca

SEQ ID NO: 903052 - DNA, 33 bp, Homo sapien
catagacatttctgaagaaagacctgaaactca

SEQ ID NO: 903053 - DNA, 33 bp, Homo sapien
taactagttggtgaaacgtgtggaatgtttatt

SEQ ID NO: 903054 - DNA, 33 bp, Homo sapien
taactagttggtgaaatgtgtggaatgtttatt

SEQ ID NO: 903055 - DNA, 33 bp, Homo sapien
ttctcctgctaaacacacaatctagttatctgt

SEQ ID NO: 903056 - DNA, 33 bp, Homo sapien
ttctcctgctaaacacgcaatctagttatctgt

SEQ ID NO: 903057 - DNA, 33 bp, Homo sapien
gtcaaaaaaattgcacgcaaaatgtaggatgag

SEQ ID NO: 903058 - DNA, 33 bp, Homo sapien
gtcaaaaaaattgcactcaaaatgtaggatgag

SEQ ID NO: 903059 - DNA, 33 bp, Homo sapien
gtgacaactgttggcacattctagtagcttgag

SEQ ID NO: 903060 - DNA, 33 bp, Homo sapien
gtgacaactgttggcatattctagtagcttgag

SEQ ID NO: 903061 - DNA, 33 bp, Homo sapien
aatgcttagacgtgcaaacaaaattacatttca

SEQ ID NO: 903062 - DNA, 33 bp, Homo sapien
aatgcttagacgtgcagacaaaattacatttca

SEQ ID NO: 903063 - DNA, 33 bp, Homo sapien
ttcaactgtttattcacggattcaacaaatact

SEQ ID NO: 903064 - DNA, 33 bp, Homo sapien
ttcaactgtttattcatggattcaacaaatact

SEQ ID NO: 903065 - DNA, 33 bp, Homo sapien
gattcctgcttcttccacgtatttatttacttt

SEQ ID NO: 903066 - DNA, 33 bp, Homo sapien
gattcctgcttcttccgcgtatttatttacttt

SEQ ID NO: 903067 - DNA, 33 bp, Homo sapien
tcagagccaatttgtacgatatggagcagcatt

SEQ ID NO: 903068 - DNA, 33 bp, Homo sapien
tcagagccaatttgtatgatatggagcagcatt

SEQ ID NO: 903069 - DNA, 33 bp, Homo sapien
aagctcaggtcacaaaaacacacaggagttcca

SEQ ID NO: 903070 - DNA, 33 bp, Homo sapien
aagctcaggtcacaaagacacacaggagttcca

SEQ ID NO: 903071 - DNA, 33 bp, Homo sapien; identical to SEQ ID NO: 903069

SEQ ID NO: 903072 - DNA, 33 bp, Homo sapien; identical to SEQ ID NO: 903070

SEQ ID NO: 903073 - DNA, 33 bp, Homo sapien
agtgcacatccctttcaagattttctgacagtg

SEQ ID NO: 903074 - DNA, 33 bp, Homo sapien
agtgcacatccctttcgagattttctgacagtg

SEQ ID NO: 903075 - DNA, 33 bp, Homo sapien
ctgttgggcaataccacctttgtttcacaggag

SEQ ID NO: 903076 - DNA, 33 bp, Homo sapien
ctgttgggcaataccatctttgtttcacaggag

SEQ ID NO: 903077 - DNA, 33 bp, Homo sapien
tgctttgactttacatcatctcatgaggcgtta

SEQ ID NO: 903078 - DNA, 33 bp, Homo sapien
tgctttgactttacattatctcatgaggcgtta

SEQ ID NO: 903079 - DNA, 33 bp, Homo sapien
gaccttaacaccagaactacacaaaacaaaaca

SEQ ID NO: 903080 - DNA, 33 bp, Homo sapien
gaccttaacaccagaattacacaaaacaaaaca

SEQ ID NO: 903081 - DNA, 33 bp, Homo sapien
aacacattctgttctacgttctttaaatttcaa

SEQ ID NO: 903082 - DNA, 33 bp, Homo sapien
aacacattctgttctatgttctttaaatttcaa

SEQ ID NO: 903083 - DNA, 33 bp, Homo sapien
agtatgtgtaacctcaataacattctaagacaa

SEQ ID NO: 903084 - DNA, 33 bp, Homo sapien
agtatgtgtaacctcagtaacattctaagacaa

SEQ ID NO: 903085 - DNA, 33 bp, Homo sapien
atgttaggcgacttctaaatgcctcaataaaca

SEQ ID NO: 903086 - DNA, 33 bp, Homo sapien
atgttaggcgacttctcaatgcctcaataaaca

SEQ ID NO: 903087 - DNA, 33 bp, Homo sapien
taggtacagtgtccaacgtttgggtgatgggta

SEQ ID NO: 903088 - DNA, 33 bp, Homo sapien
taggtacagtgtccaatgtttgggtgatgggta

SEQ ID NO: 903089 - DNA, 33 bp, Homo sapien
gaaaaattggtctgaactgtacttaatccaaaa

SEQ ID NO: 903090 - DNA, 33 bp, Homo sapien
gaaaaattggtctgaagtgtacttaatccaaaa

SEQ ID NO: 903091 - DNA, 33 bp, Homo sapien
aaccaattttttcccaactgatgctgtcatcta

SEQ ID NO: 903092 - DNA, 33 bp, Homo sapien
aaccaattttttcccacctgatgctgtcatcta

SEQ ID NO: 903093 - DNA, 33 bp, Homo sapien
tgaacaagtaatggctcaagttgccagacattt

SEQ ID NO: 903094 - DNA, 33 bp, Homo sapien
tgaacaagtaatggctgaagttgccagacattt

SEQ ID NO: 903095 - DNA, 33 bp, Homo sapien
gtggatacttttaacaatccaagcattccaatt

SEQ ID NO: 903096 - DNA, 33 bp, Homo sapien
gtggatacttttaacagtccaagcattccaatt

SEQ ID NO: 903097 - DNA, 33 bp, Homo sapien
tattgttacttatcggcaatttgctgttattat

SEQ ID NO: 903098 - DNA, 33 bp, Homo sapien
tattgttacttatcggtaatttgctgttattat

SEQ ID NO: 903099 - DNA, 33 bp, Homo sapien
agatcctttttggctcccaaatcatcccataaa

SEQ ID NO: 903100 - DNA, 33 bp, Homo sapien
agatcctttttggctctcaaatcatcccataaa

SEQ ID NO: 903101 - DNA, 33 bp, Homo sapien
agctatatatactttacgtttgacagggcatct

SEQ ID NO: 903102 - DNA, 33 bp, Homo sapien
agctatatatactttatgtttgacagggcatct

SEQ ID NO: 903103 - DNA, 33 bp, Homo sapien
agttatggagtaaaaaacgaagaagacagaagc

SEQ ID NO: 903104 - DNA, 33 bp, Homo sapien
agttatggagtaaaaagcgaagaagacagaagc

SEQ ID NO: 903105 - DNA, 33 bp, Homo sapien
agaaaagctttcctacgccaaagttatttaaac

SEQ ID NO: 903106 - DNA, 33 bp, Homo sapien
agaaaagctttcctactccaaagttatttaaac

SEQ ID NO: 903107 - DNA, 33 bp, Homo sapien
aaaatgtgtaccacataaaatttgtcaggcaga

SEQ ID NO: 903108 - DNA, 33 bp, Homo sapien
aaaatgtgtaccacattaaatttgtcaggcaga

SEQ ID NO: 903109 - DNA, 33 bp, Homo sapien
tctgaggctgcagtcacatttgtttttttgtgt

SEQ ID NO: 903110 - DNA, 33 bp, Homo sapien
tctgaggctgcagtcatatttgtttttttgtgt

SEQ ID NO: 903111 - DNA, 33 bp, Homo sapien
acctggccctggtctacgtctatctttatgcta

SEQ ID NO: 903112 - DNA, 33 bp, Homo sapien
acctggccctggtctatgtctatctttatgcta

SEQ ID NO: 903113 - DNA, 33 bp, Homo sapien
aaacattaatttgagacagattctagacataca

SEQ ID NO: 903114 - DNA, 33 bp, Homo sapien
aaacattaatttgagatagattctagacataca

SEQ ID NO: 903115 - DNA, 33 bp, Homo sapien
tctagacatacatacaaaaggttaatgtcaaag

SEQ ID NO: 903116 - DNA, 33 bp, Homo sapien
tctagacatacatacagaaggttaatgtcaaag

SEQ ID NO: 903117 - DNA, 33 bp, Homo sapien
gaaatagcaaaaactcacaatcttggcagcaaa

SEQ ID NO: 903118 - DNA, 33 bp, Homo sapien
gaaatagcaaaaactcgcaatcttggcagcaaa

SEQ ID NO: 903119 - DNA, 33 bp, Homo sapien
cagggagatagctgaaagtctcattattcattc

SEQ ID NO: 903120 - DNA, 33 bp, Homo sapien
cagggagatagctgaacgtctcattattcattc

SEQ ID NO: 903121 - DNA, 33 bp, Homo sapien
actttttaagttgggaccaggatttattaagta

SEQ ID NO: 903122 - DNA, 33 bp, Homo sapien
actttttaagttgggatcaggatttattaagta

SEQ ID NO: 903123 - DNA, 33 bp, Homo sapien
ttatcggaatagttaacgcttactgatgtagca

SEQ ID NO: 903124 - DNA, 33 bp, Homo sapien
ttatcggaatagttaatgcttactgatgtagca

SEQ ID NO: 903125 - DNA, 33 bp, Homo sapien; identical to SEQ ID NO: 903123

SEQ ID NO: 903126 - DNA, 33 bp, Homo sapien; identical to SEQ ID NO: 903124

SEQ ID NO: 903127 - DNA, 33 bp, Homo sapien
cggctgggtcacttgaagtcaggattgaggtca

SEQ ID NO: 903128 - DNA, 33 bp, Homo sapien
cggctgggtcacttgaggtcaggattgaggtca

SEQ ID NO: 903129 - DNA, 33 bp, Homo sapien
gaatctaatggttgtacagtattcttctgtatt

SEQ ID NO: 903130 - DNA, 33 bp, Homo sapien
gaatctaatggttgtatagtattcttctgtatt

SEQ ID NO: 903131 - DNA, 33 bp, Homo sapien
gagaacataaagcagcagcagagcaattgaagc

SEQ ID NO: 903132 - DNA, 33 bp, Homo sapien
gagaacataaagcagcggcagagcaattgaagc

SEQ ID NO: 903133 - DNA, 33 bp, Homo sapien
ttaaacactaactcccaagtctctccttcctcc

SEQ ID NO: 903134 - DNA, 33 bp, Homo sapien
ttaaacactaactcccgagtctctccttcctcc

SEQ ID NO: 903135 - DNA, 33 bp, Homo sapien
taaaattgtctaagaaatactcagaggaatgag

SEQ ID NO: 903136 - DNA, 33 bp, Homo sapien
taaaattgtctaagaagtactcagaggaatgag

SEQ ID NO: 903137 - DNA, 33 bp, Homo sapien
aatagactgtttacctcaaaggagaataaaatg

SEQ ID NO: 903138 - DNA, 33 bp, Homo sapien
aatagactgtttacctgaaaggagaataaaatg

SEQ ID NO: 903139 - DNA, 33 bp, Homo sapien
gagaacactaaaaacaatatcagggcccaagat

SEQ ID NO: 903140 - DNA, 33 bp, Homo sapien
gagaacactaaaaacagtatcagggcccaagat

SEQ ID NO: 903141 - DNA, 33 bp, Homo sapien
gtacagttgacccttgaataacatgaatttgag

SEQ ID NO: 903142 - DNA, 33 bp, Homo sapien
gtacagttgacccttggataacatgaatttgag

SEQ ID NO: 903143 - DNA, 33 bp, Homo sapien
catgtagaccaaaggaacagcatagaaagctca

SEQ ID NO: 903144 - DNA, 33 bp, Homo sapien
catgtagaccaaaggagcagcatagaaagctca

SEQ ID NO: 903145 - DNA, 33 bp, Homo sapien
catcacagctcactacaaaagaggtctttcctg

SEQ ID NO: 903146 - DNA, 33 bp, Homo sapien
catcacagctcactaccaaagaggtctttcctg

SEQ ID NO: 903147 - DNA, 33 bp, Homo sapien
acgtcagttacctcaacatctcttttagcgaaa

SEQ ID NO: 903148 - DNA, 33 bp, Homo sapien
acgtcagttacctcaagatctcttttagcgaaa

SEQ ID NO: 903149 - DNA, 33 bp, Homo sapien
agaagacacttgaaacagaagacttgctatcac

SEQ ID NO: 903150 - DNA, 33 bp, Homo sapien
agaagacacttgaaactgaagacttgctatcac

SEQ ID NO: 903151 - DNA, 33 bp, Homo sapien
ttagaattgtaagatgacaaagctagaacgagc

SEQ ID NO: 903152 - DNA, 33 bp, Homo sapien
ttagaattgtaagatgtcaaagctagaacgagc

SEQ ID NO: 903153 - DNA, 33 bp, Homo sapien
tgtgaaagtgcagtagaaatcagataaattaag

SEQ ID NO: 903154 - DNA, 33 bp, Homo sapien
tgtgaaagtgcagtaggaatcagataaattaag

SEQ ID NO: 903155 - DNA, 33 bp, Homo sapien
agatggaagtctagaactggatgactcaaagtt

SEQ ID NO: 903156 - DNA, 33 bp, Homo sapien
agatggaagtctagaagtggatgactcaaagtt

SEQ ID NO: 903157 - DNA, 33 bp, Homo sapien
cgattggaaaacctacaaagcctgtcattaaaa

SEQ ID NO: 903158 - DNA, 33 bp, Homo sapien
cgattggaaaacctaccaagcctgtcattaaaa

SEQ ID NO: 903159 - DNA, 33 bp, Homo sapien
aagtacatttctatcactgaagaacagacaaac

SEQ ID NO: 903160 - DNA, 33 bp, Homo sapien
aagtacatttctatcattgaagaacagacaaac

SEQ ID NO: 903161 - DNA, 33 bp, Homo sapien
aagtacctattggatacgacatacactatttgg

SEQ ID NO: 903162 - DNA, 33 bp, Homo sapien
aagtacctattggatatgacatacactatttgg

SEQ ID NO: 903163 - DNA, 33 bp, Homo sapien
catcacttacttatgaacctaataccattttag

SEQ ID NO: 903164 - DNA, 33 bp, Homo sapien
catcacttacttatgatcctaataccattttag

SEQ ID NO: 903165 - DNA, 33 bp, Homo sapien
ttcacagccatacttacacatcaacatgatttg

SEQ ID NO: 903166 - DNA, 33 bp, Homo sapien
ttcacagccatacttatacatcaacatgatttg

SEQ ID NO: 903167 - DNA, 33 bp, Homo sapien
ttttcaagtttggagaacggccaaaggattctg

SEQ ID NO: 903168 - DNA, 33 bp, Homo sapien
ttttcaagtttggagatcggccaaaggattctg

SEQ ID NO: 903169 - DNA, 33 bp, Homo sapien
tgtgacccatgagctacgaatagttttctcact

SEQ ID NO: 903170 - DNA, 33 bp, Homo sapien
tgtgacccatgagctatgaatagttttctcact

SEQ ID NO: 903171 - DNA, 33 bp, Homo sapien
atttagcaagtacctacggagaatcgaatacta

SEQ ID NO: 903172 - DNA, 33 bp, Homo sapien
atttagcaagtacctatggagaatcgaatacta

SEQ ID NO: 903173 - DNA, 33 bp, Homo sapien
ttacccccatgatataagagtagagaaacaccc

SEQ ID NO: 903174 - DNA, 33 bp, Homo sapien
ttacccccatgatataggagtagagaaacaccc

SEQ ID NO: 903175 - DNA, 33 bp, Homo sapien
ttattcagttgcaataaatcctaggctcctgct

SEQ ID NO: 903176 - DNA, 33 bp, Homo sapien
ttattcagttgcaatacatcctaggctcctgct

SEQ ID NO: 903177 - DNA, 33 bp, Homo sapien
ctcttcagtatcataccaccattccccacgagc

SEQ ID NO: 903178 - DNA, 33 bp, Homo sapien
ctcttcagtatcatactaccattccccacgagc

SEQ ID NO: 903179 - DNA, 33 bp, Homo sapien
ccactccctcttccacaaactctatgttagttg

SEQ ID NO: 903180 - DNA, 33 bp, Homo sapien
ccactccctcttccacgaactctatgttagttg

SEQ ID NO: 903181 - DNA, 33 bp, Homo sapien
tttcactaatcactatgaatacattcttacatg

SEQ ID NO: 903182 - DNA, 33 bp, Homo sapien
tttcactaatcactattaatacattcttacatg

SEQ ID NO: 903183 - DNA, 33 bp, Homo sapien
ctttatatgttgacacaagaagacattcaagat

SEQ ID NO: 903184 - DNA, 33 bp, Homo sapien
ctttatatgttgacacgagaagacattcaagat

SEQ ID NO: 903185 - DNA, 33 bp, Homo sapien
tgaggggtggaagttagcctggattatcttggc

SEQ ID NO: 903186 - DNA, 33 bp, Homo sapien
tgaggggtggaagttatcctggattatcttggc

SEQ ID NO: 903187 - DNA, 33 bp, Homo sapien
gatgtcttgagacacacaggtaaggagaaggca

SEQ ID NO: 903188 - DNA, 33 bp, Homo sapien
gatgtcttgagacacagaggtaaggagaaggca

SEQ ID NO: 903189 - DNA, 33 bp, Homo sapien
cagatgttagacttaccagacaaagactagact

SEQ ID NO: 903190 - DNA, 33 bp, Homo sapien
cagatgttagacttactagacaaagactagact

SEQ ID NO: 903191 - DNA, 33 bp, Homo sapien
ctattgtttaccccaaatattatccactgtttc

SEQ ID NO: 903192 - DNA, 33 bp, Homo sapien
ctattgtttaccccaactattatccactgtttc

SEQ ID NO: 903193 - DNA, 33 bp, Homo sapien
taagtatagccctgaaccctgtccatagatttc

SEQ ID NO: 903194 - DNA, 33 bp, Homo sapien
taagtatagccctgaatcctgtccatagatttc

SEQ ID NO: 903195 - DNA, 33 bp, Homo sapien
actgactgaggctttaacaattaggtcagccca

SEQ ID NO: 903196 - DNA, 33 bp, Homo sapien
actgactgaggctttagcaattaggtcagccca

SEQ ID NO: 903197 - DNA, 33 bp, Homo sapien
tacctgtccacctctcaatctccatgacagcct

SEQ ID NO: 903198 - DNA, 33 bp, Homo sapien
tacctgtccacctctctatctccatgacagcct

SEQ ID NO: 903199 - DNA, 33 bp, Homo sapien
atccgtataatcatcaagaaggcatcccagtac

SEQ ID NO: 903200 - DNA, 33 bp, Homo sapien
atccgtataatcatcaggaaggcatcccagtac

SEQ ID NO: 903201 - DNA, 33 bp, Homo sapien
attgctaatgagattgaaagttttttttatgtt

SEQ ID NO: 903202 - DNA, 33 bp, Homo sapien
attgctaatgagattgtaagttttttttatgtt

SEQ ID NO: 903203 - DNA, 33 bp, Homo sapien
cagctgctgatactccgaaggttctcctcttct

SEQ ID NO: 903204 - DNA, 33 bp, Homo sapien
cagctgctgatactcctaaggttctcctcttct

SEQ ID NO: 903205 - DNA, 33 bp, Homo sapien
tacatcttgtgaatctcaattatatgtcacata

SEQ ID NO: 903206 - DNA, 33 bp, Homo sapien
tacatcttgtgaatctgaattatatgtcacata

SEQ ID NO: 903207 - DNA, 33 bp, Homo sapien
gggtgatcatctgtgaagaaggaagtttgggga

SEQ ID NO: 903208 - DNA, 33 bp, Homo sapien
gggtgatcatctgtgaggaaggaagtttgggga

SEQ ID NO: 903209 - DNA, 33 bp, Homo sapien
acacacagacaaaaaacttgactcatttgctta

SEQ ID NO: 903210 - DNA, 33 bp, Homo sapien
acacacagacaaaaaatttgactcatttgctta

SEQ ID NO: 903211 - DNA, 33 bp, Homo sapien
ataggatattcatgcgcataaaggataaggcag

SEQ ID NO: 903212 - DNA, 33 bp, Homo sapien
ataggatattcatgcgtataaaggataaggcag

SEQ ID NO: 903213 - DNA, 33 bp, Homo sapien
cattactttggccaacaatttcacaccatcttt

SEQ ID NO: 903214 - DNA, 33 bp, Homo sapien
cattactttggccaacgatttcacaccatcttt

SEQ ID NO: 903215 - DNA, 33 bp, Homo sapien
attgctccatcaagagccaagaaatgttccagg

SEQ ID NO: 903216 - DNA, 33 bp, Homo sapien
attgctccatcaagagtcaagaaatgttccagg

SEQ ID NO: 903217 - DNA, 33 bp, Homo sapien
tatcgtggtcatacaacataagaagatctgaat

SEQ ID NO: 903218 - DNA, 33 bp, Homo sapien
tatcgtggtcatacaatataagaagatctgaat

SEQ ID NO: 903219 - DNA, 33 bp, Homo sapien
ataaaagtaagtacacaatcaaattcagaatat

SEQ ID NO: 903220 - DNA, 33 bp, Homo sapien
ataaaagtaagtacacgatcaaattcagaatat

SEQ ID NO: 903221 - DNA, 33 bp, Homo sapien
ggatgataaggatgggacaatgtaggttcactg

SEQ ID NO: 903222 - DNA, 33 bp, Homo sapien
ggatgataaggatgggtcaatgtaggttcactg

SEQ ID NO: 903223 - DNA, 33 bp, Homo sapien
atctgtttccatgtgactacactgtgatacatt

SEQ ID NO: 903224 - DNA, 33 bp, Homo sapien
atctgtttccatgtgagtacactgtgatacatt

SEQ ID NO: 903225 - DNA, 33 bp, Homo sapien
ttacctagtctgaagacacggtttacttagaga

SEQ ID NO: 903226 - DNA, 33 bp, Homo sapien
ttacctagtctgaagatacggtttacttagaga

SEQ ID NO: 903227 - DNA, 33 bp, Homo sapien
ccagaaagctctgaccaccaatgaatggaacac

SEQ ID NO: 903228 - DNA, 33 bp, Homo sapien
ccagaaagctctgaccgccaatgaatggaacac

SEQ ID NO: 903229 - DNA, 33 bp, Homo sapien
tccttcacgcctctggaataaatttatgatttt

SEQ ID NO: 903230 - DNA, 33 bp, Homo sapien
tccttcacgcctctgggataaatttatgatttt

SEQ ID NO: 903231 - DNA, 33 bp, Homo sapien
gtgtttaaaagaattaaaagtgatgagaagtgt

SEQ ID NO: 903232 - DNA, 33 bp, Homo sapien
gtgtttaaaagaattagaagtgatgagaagtgt

SEQ ID NO: 903233 - DNA, 33 bp, Homo sapien
tctcccagcttttcaacggccccaagttgccag

SEQ ID NO: 903234 - DNA, 33 bp, Homo sapien
tctcccagcttttcaatggccccaagttgccag

SEQ ID NO: 903235 - DNA, 33 bp, Homo sapien
tggtcacatttctaaccattagagttttaggtt

SEQ ID NO: 903236 - DNA, 33 bp, Homo sapien
tggtcacatttctaacgattagagttttaggtt

SEQ ID NO: 903237 - DNA, 33 bp, Homo sapien
aatagctaaattggacagcccataattatgatg

SEQ ID NO: 903238 - DNA, 33 bp, Homo sapien
aatagctaaattggacggcccataattatgatg

SEQ ID NO: 903239 - DNA, 33 bp, Homo sapien
gccaggtaagaaggtgaaggccagtaaaactta

SEQ ID NO: 903240 - DNA, 33 bp, Homo sapien
gccaggtaagaaggtggaggccagtaaaactta

SEQ ID NO: 903241 - DNA, 33 bp, Homo sapien
tatacatgaatgcccaaaacaattatcacctct

SEQ ID NO: 903242 - DNA, 33 bp, Homo sapien
tatacatgaatgcccagaacaattatcacctct

SEQ ID NO: 903243 - DNA, 33 bp, Homo sapien
gaccacctggttttctcaaataatatcctacag

SEQ ID NO: 903244 - DNA, 33 bp, Homo sapien
gaccacctggttttctgaaataatatcctacag

SEQ ID NO: 903245 - DNA, 33 bp, Homo sapien
tggtaactttgaccaaggaatgacagctaccat

SEQ ID NO: 903246 - DNA, 33 bp, Homo sapien
tggtaactttgaccaatgaatgacagctaccat

SEQ ID NO: 903247 - DNA, 33 bp, Homo sapien
atggcacctataatacaaagagctcaataaatg

SEQ ID NO: 903248 - DNA, 33 bp, Homo sapien
atggcacctataataccaagagctcaataaatg

SEQ ID NO: 903249 - DNA, 33 bp, Homo sapien
tactttacacagggaacgactgactgtttacag

SEQ ID NO: 903250 - DNA, 33 bp, Homo sapien
tactttacacagggaatgactgactgtttacag

SEQ ID NO: 903251 - DNA, 33 bp, Homo sapien
tggaacgagtgaaacaaggaaagactctgaagg

SEQ ID NO: 903252 - DNA, 33 bp, Homo sapien
tggaacgagtgaaacagggaaagactctgaagg

SEQ ID NO: 903253 - DNA, 33 bp, Homo sapien
tttttcatatgtcatcaactctgaaatactatt

SEQ ID NO: 903254 - DNA, 33 bp, Homo sapien
tttttcatatgtcatcgactctgaaatactatt

SEQ ID NO: 903255 - DNA, 33 bp, Homo sapien
agctggtctatattcaagccacggtgtgcatga

SEQ ID NO: 903256 - DNA, 33 bp, Homo sapien
agctggtctatattcaggccacggtgtgcatga

SEQ ID NO: 903257 - DNA, 33 bp, Homo sapien
caggcattaaatgcaaacttcattaacccactg

SEQ ID NO: 903258 - DNA, 33 bp, Homo sapien
caggcattaaatgcaagcttcattaacccactg

SEQ ID NO: 903259 - DNA, 33 bp, Homo sapien
tcaagatcaggagacaaggtgttcgctatatgg

SEQ ID NO: 903260 - DNA, 33 bp, Homo sapien
tcaagatcaggagacagggtgttcgctatatgg

SEQ ID NO: 903261 - DNA, 33 bp, Homo sapien
aggggcctaacttctacgtgtctcactgtccta

SEQ ID NO: 903262 - DNA, 33 bp, Homo sapien
aggggcctaacttctatgtgtctcactgtccta

SEQ ID NO: 903263 - DNA, 33 bp, Homo sapien
atgtcaatcgatgctaacctatcatatctacaa

SEQ ID NO: 903264 - DNA, 33 bp, Homo sapien
atgtcaatcgatgctagcctatcatatctacaa

SEQ ID NO: 903265 - DNA, 33 bp, Homo sapien
atactacaactcactcaatattaaacacataat

SEQ ID NO: 903266 - DNA, 33 bp, Homo sapien
atactacaactcactcgatattaaacacataat

SEQ ID NO: 903267 - DNA, 33 bp, Homo sapien
cagcttttatcattgcacagcctgcatcccaac

SEQ ID NO: 903268 - DNA, 33 bp, Homo sapien
cagcttttatcattgcgcagcctgcatcccaac

SEQ ID NO: 903269 - DNA, 33 bp, Homo sapien
gaactcgttctgaccaatgagacataaacagga

SEQ ID NO: 903270 - DNA, 33 bp, Homo sapien
gaactcgttctgaccagtgagacataaacagga

SEQ ID NO: 903271 - DNA, 33 bp, Homo sapien
taagttagcctttacaaacatccatttcttttc

SEQ ID NO: 903272 - DNA, 33 bp, Homo sapien
taagttagcctttacacacatccatttcttttc

SEQ ID NO: 903273 - DNA, 33 bp, Homo sapien
cctatagttagaccacactaggcatgagcacac

SEQ ID NO: 903274 - DNA, 33 bp, Homo sapien
cctatagttagaccacgctaggcatgagcacac

SEQ ID NO: 903275 - DNA, 33 bp, Homo sapien
ttgtacaattttgtgacaggaagttccaagaga

SEQ ID NO: 903276 - DNA, 33 bp, Homo sapien
ttgtacaattttgtgataggaagttccaagaga

SEQ ID NO: 903277 - DNA, 33 bp, Homo sapien
cttttcaaaattcccactcttcactgtactgac

SEQ ID NO: 903278 - DNA, 33 bp, Homo sapien
cttttcaaaattcccagtcttcactgtactgac

SEQ ID NO: 903279 - DNA, 33 bp, Homo sapien
attggactattattaaacagtcagaaagcctag

SEQ ID NO: 903280 - DNA, 33 bp, Homo sapien
attggactattattaaccagtcagaaagcctag

SEQ ID NO: 903281 - DNA, 33 bp, Homo sapien
taaacctagattctagaccccccactgccagac

SEQ ID NO: 903282 - DNA, 33 bp, Homo sapien
taaacctagattctagtccccccactgccagac

SEQ ID NO: 903283 - DNA, 33 bp, Homo sapien
cacagtcctttggctacgggtactaaccccttc

SEQ ID NO: 903284 - DNA, 33 bp, Homo sapien
cacagtcctttggctatgggtactaaccccttc

SEQ ID NO: 903285 - DNA, 33 bp, Homo sapien
attgtgtttggagaaacaggtgaggcccccatg

SEQ ID NO: 903286 - DNA, 33 bp, Homo sapien
attgtgtttggagaaataggtgaggcccccatg

SEQ ID NO: 903287 - DNA, 33 bp, Homo sapien
gactctcctgtgttcaaatccaaccacgtcatt

SEQ ID NO: 903288 - DNA, 33 bp, Homo sapien
gactctcctgtgttcagatccaaccacgtcatt

SEQ ID NO: 903289 - DNA, 33 bp, Homo sapien
ccaagatatatcctcacagattatcaggagcta

SEQ ID NO: 903290 - DNA, 33 bp, Homo sapien
ccaagatatatcctcatagattatcaggagcta

SEQ ID NO: 903291 - DNA, 33 bp, Homo sapien
gaaggtcttattgaaacgttttctagtccgtga

SEQ ID NO: 903292 - DNA, 33 bp, Homo sapien
gaaggtcttattgaaatgttttctagtccgtga

SEQ ID NO: 903293 - DNA, 33 bp, Homo sapien
cacagaaagaacactgaagccccaacctgtggc

SEQ ID NO: 903294 - DNA, 33 bp, Homo sapien
cacagaaagaacactgcagccccaacctgtggc

SEQ ID NO: 903295 - DNA, 33 bp, Homo sapien
cttctcccattcaagcggagattttcttgatat

SEQ ID NO: 903296 - DNA, 33 bp, Homo sapien
cttctcccattcaagctgagattttcttgatat

SEQ ID NO: 903297 - DNA, 33 bp, Homo sapien
ctgtgctccaagcagacgtttgttttcatttct

SEQ ID NO: 903298 - DNA, 33 bp, Homo sapien
ctgtgctccaagcagatgtttgttttcatttct

SEQ ID NO: 903299 - DNA, 33 bp, Homo sapien
tgtctaaactctgtaacgttggtggagttttgt

SEQ ID NO: 903300 - DNA, 33 bp, Homo sapien
tgtctaaactctgtaatgttggtggagttttgt

SEQ ID NO: 903301 - DNA, 33 bp, Homo sapien
aattcaggccattccacagttaggcagaagagg

SEQ ID NO: 903302 - DNA, 33 bp, Homo sapien
aattcaggccattccagagttaggcagaagagg

SEQ ID NO: 903303 - DNA, 33 bp, Homo sapien
tgtattccttccatcaatagttgatataattgt

SEQ ID NO: 903304 - DNA, 33 bp, Homo sapien
tgtattccttccatcagtagttgatataattgt

SEQ ID NO: 903305 - DNA, 33 bp, Homo sapien
gatttaccatacatcccatttgaatttcatgga

SEQ ID NO: 903306 - DNA, 33 bp, Homo sapien
gatttaccatacatcctatttgaatttcatgga

SEQ ID NO: 903307 - DNA, 33 bp, Homo sapien
gccctgagaggtttcacgttgcctagaatcccc

SEQ ID NO: 903308 - DNA, 33 bp, Homo sapien
gccctgagaggtttcatgttgcctagaatcccc

SEQ ID NO: 903309 - DNA, 33 bp, Homo sapien
aaactcaatcagtcccccattcactccctcttg

SEQ ID NO: 903310 - DNA, 33 bp, Homo sapien
aaactcaatcagtccctcattcactccctcttg

SEQ ID NO: 903311 - DNA, 33 bp, Homo sapien
aggctgaactgatcaacttcatggaagccagaa

SEQ ID NO: 903312 - DNA, 33 bp, Homo sapien
aggctgaactgatcaatttcatggaagccagaa

SEQ ID NO: 903313 - DNA, 33 bp, Homo sapien
gaaatatccaaagagaaatgtcagtgggtcttt

SEQ ID NO: 903314 - DNA, 33 bp, Homo sapien
gaaatatccaaagagagatgtcagtgggtcttt

SEQ ID NO: 903315 - DNA, 33 bp, Homo sapien
gaacccagaaactcaggattcttctttgatcct

SEQ ID NO: 903316 - DNA, 33 bp, Homo sapien
gaacccagaaactcagtattcttctttgatcct

SEQ ID NO: 903317 - DNA, 33 bp, Homo sapien
agtagatttacaagacacatccatgtaaaataa

SEQ ID NO: 903318 - DNA, 33 bp, Homo sapien
agtagatttacaagacgcatccatgtaaaataa

SEQ ID NO: 903319 - DNA, 33 bp, Homo sapien
tcctttactcagctcaatacttatgcctgactt

SEQ ID NO: 903320 - DNA, 33 bp, Homo sapien
tcctttactcagctcagtacttatgcctgactt

SEQ ID NO: 903321 - DNA, 33 bp, Homo sapien
aagatttctatttccaaatatgccagtggttgg

SEQ ID NO: 903322 - DNA, 33 bp, Homo sapien
aagatttctatttccagatatgccagtggttgg

SEQ ID NO: 903323 - DNA, 33 bp, Homo sapien
gtctacagaaaaattaacctcttgactttcaag

SEQ ID NO: 903324 - DNA, 33 bp, Homo sapien
gtctacagaaaaattaccctcttgactttcaag

SEQ ID NO: 903325 - DNA, 33 bp, Homo sapien
gtgctaagcagaatacaaaagatgtgtgagaca

SEQ ID NO: 903326 - DNA, 33 bp, Homo sapien
gtgctaagcagaatactaaagatgtgtgagaca

SEQ ID NO: 903327 - DNA, 33 bp, Homo sapien
ttgttgctcctagaataaaaaaaatatgaatcc

SEQ ID NO: 903328 - DNA, 33 bp, Homo sapien
ttgttgctcctagaattaaaaaaatatgaatcc

SEQ ID NO: 903329 - DNA, 33 bp, Homo sapien
gagtgcaatggagtcacaaagtatgaatgagca

SEQ ID NO: 903330 - DNA, 33 bp, Homo sapien
gagtgcaatggagtcataaagtatgaatgagca

SEQ ID NO: 903331 - DNA, 33 bp, Homo sapien
cctgatttctcatataaatagacttttctgggc

SEQ ID NO: 903332 - DNA, 33 bp, Homo sapien
cctgatttctcatatagatagacttttctgggc

SEQ ID NO: 903333 - DNA, 33 bp, Homo sapien
tgccttgacctagatggaggatttggtttcttt

SEQ ID NO: 903334 - DNA, 33 bp, Homo sapien
tgccttgacctagatgtaggatttggtttcttt

SEQ ID NO: 903335 - DNA, 33 bp, Homo sapien
gaagactaagaccagggatgacagatgttaggt

SEQ ID NO: 903336 - DNA, 33 bp, Homo sapien
gaagactaagaccaggtatgacagatgttaggt

SEQ ID NO: 903337 - DNA, 33 bp, Homo sapien
cacccactgcggttaacctcttggctgcctaac

SEQ ID NO: 903338 - DNA, 33 bp, Homo sapien
cacccactgcggttaatctcttggctgcctaac

SEQ ID NO: 903339 - DNA, 33 bp, Homo sapien
aaccaggcactgggaaattacctttgaatcaac

SEQ ID NO: 903340 - DNA, 33 bp, Homo sapien
aaccaggcactgggaagttacctttgaatcaac

SEQ ID NO: 903341 - DNA, 33 bp, Homo sapien
ttgggagttgtggaaaagtattacacaagtaag

SEQ ID NO: 903342 - DNA, 33 bp, Homo sapien
ttgggagttgtggaaaggtattacacaagtaag

SEQ ID NO: 903343 - DNA, 33 bp, Homo sapien
tatatttctagctcaccggttagattgtcattt

SEQ ID NO: 903344 - DNA, 33 bp, Homo sapien
tatatttctagctcactggttagattgtcattt

SEQ ID NO: 903345 - DNA, 33 bp, Homo sapien
tttctcatagaaggaaacatatctcggtctctt

SEQ ID NO: 903346 - DNA, 33 bp, Homo sapien
tttctcatagaaggaaccatatctcggtctctt

SEQ ID NO: 903347 - DNA, 33 bp, Homo sapien
gctgggaaaagccgagacatctgattgtgctgt

SEQ ID NO: 903348 - DNA, 33 bp, Homo sapien
gctgggaaaagccgaggcatctgattgtgctgt

SEQ ID NO: 903349 - DNA, 33 bp, Homo sapien
ctagaagacatagtccaatttggaagaatgcta

SEQ ID NO: 903350 - DNA, 33 bp, Homo sapien
ctagaagacatagtccgatttggaagaatgcta

SEQ ID NO: 903351 - DNA, 33 bp, Homo sapien
atccaaaatagagcaaaattcaaggagaggcca

SEQ ID NO: 903352 - DNA, 33 bp, Homo sapien
atccaaaatagagcaagattcaaggagaggcca

SEQ ID NO: 903353 - DNA, 33 bp, Homo sapien
atcttctctcctctaaagaaaaagcactgactg

SEQ ID NO: 903354 - DNA, 33 bp, Homo sapien
atcttctctcctctaaggaaaaagcactgactg

SEQ ID NO: 903355 - DNA, 33 bp, Homo sapien
ttaaagaaactgcaaccgacgatcatgttccaa

SEQ ID NO: 903356 - DNA, 33 bp, Homo sapien
ttaaagaaactgcaactgacgatcatgttccaa

SEQ ID NO: 903357 - DNA, 33 bp, Homo sapien
acactgtcttccactacggttgaagtagtttac

SEQ ID NO: 903358 - DNA, 33 bp, Homo sapien
acactgtcttccactatggttgaagtagtttac

SEQ ID NO: 903359 - DNA, 33 bp, Homo sapien
gcagacaactcttctactagaaatttactccca

SEQ ID NO: 903360 - DNA, 33 bp, Homo sapien
gcagacaactcttctagtagaaatttactccca

SEQ ID NO: 903361 - DNA, 33 bp, Homo sapien
caagctagaccgataaaagcttcatatttgggt

SEQ ID NO: 903362 - DNA, 33 bp, Homo sapien
caagctagaccgataagagcttcatatttgggt

SEQ ID NO: 903363 - DNA, 33 bp, Homo sapien
atgtgaggccccaccaacctgatttgcttgaga

SEQ ID NO: 903364 - DNA, 33 bp, Homo sapien
atgtgaggccccaccagcctgatttgcttgaga

SEQ ID NO: 903365 - DNA, 33 bp, Homo sapien
gtggactcggcagacacggttccactgtttggt

SEQ ID NO: 903366 - DNA, 33 bp, Homo sapien
gtggactcggcagacatggttccactgtttggt

SEQ ID NO: 903367 - DNA, 33 bp, Homo sapien
cttgaagcagattttcacaagtacttcctataa

SEQ ID NO: 903368 - DNA, 33 bp, Homo sapien
cttgaagcagattttcgcaagtacttcctataa

SEQ ID NO: 903369 - DNA, 33 bp, Homo sapien
taggtggtcaataaacacttgttataggctaag

SEQ ID NO: 903370 - DNA, 33 bp, Homo sapien
taggtggtcaataaactcttgttataggctaag

SEQ ID NO: 903371 - DNA, 33 bp, Homo sapien
ggtttcttgaagggaaatgtatacaaaaccatg

SEQ ID NO: 903372 - DNA, 33 bp, Homo sapien
ggtttcttgaagggaagtgtatacaaaaccatg

SEQ ID NO: 903373 - DNA, 33 bp, Homo sapien
aaaggtttaaagcaacagtcaaatgagctgcac

SEQ ID NO: 903374 - DNA, 33 bp, Homo sapien
aaaggtttaaagcaacggtcaaatgagctgcac

SEQ ID NO: 903375 - DNA, 33 bp, Homo sapien
tgaaattactatgcccactcacacgtttttgac

SEQ ID NO: 903376 - DNA, 33 bp, Homo sapien
tgaaattactatgcccgctcacacgtttttgac

SEQ ID NO: 903377 - DNA, 33 bp, Homo sapien
gatttgcaatattatcactaaagtccaaagtct

SEQ ID NO: 903378 - DNA, 33 bp, Homo sapien
gatttgcaatattatctctaaagtccaaagtct

SEQ ID NO: 903379 - DNA, 33 bp, Homo sapien
tccacttgtgaaactaggaaaccaaacaagttg

SEQ ID NO: 903380 - DNA, 33 bp, Homo sapien
tccacttgtgaaactatgaaaccaaacaagttg

SEQ ID NO: 903381 - DNA, 33 bp, Homo sapien
tacaacctactggcaagaataatggctattatg

SEQ ID NO: 903382 - DNA, 33 bp, Homo sapien
tacaacctactggcaataataatggctattatg

SEQ ID NO: 903383 - DNA, 33 bp, Homo sapien
cttgaggaacacaagacggataaaacactaaca

SEQ ID NO: 903384 - DNA, 33 bp, Homo sapien
cttgaggaacacaagagggataaaacactaaca

SEQ ID NO: 903385 - DNA, 33 bp, Homo sapien
caaatagaggcaaaccaatcatttccaatctaa

SEQ ID NO: 903386 - DNA, 33 bp, Homo sapien
caaatagaggcaaaccgatcatttccaatctaa

SEQ ID NO: 903387 - DNA, 33 bp, Homo sapien
tgggctgtgttttcaacaggttaaggcattctt

SEQ ID NO: 903388 - DNA, 33 bp, Homo sapien
tgggctgtgttttcaagaggttaaggcattctt

SEQ ID NO: 903389 - DNA, 33 bp, Homo sapien
ctaaagtccgctaccccaaactttcctggagag

SEQ ID NO: 903390 - DNA, 33 bp, Homo sapien
ctaaagtccgctacccgaaactttcctggagag

SEQ ID NO: 903391 - DNA, 33 bp, Homo sapien
agtaacagcccataaggcgtgaattatgtggtc

SEQ ID NO: 903392 - DNA, 33 bp, Homo sapien
agtaacagcccataagtcgtgaattatgtggtc

SEQ ID NO: 903393 - DNA, 33 bp, Homo sapien
gatgtgtcatttgataacattaggaaatcatgg

SEQ ID NO: 903394 - DNA, 33 bp, Homo sapien
gatgtgtcatttgatagcattaggaaatcatgg

SEQ ID NO: 903395 - DNA, 33 bp, Homo sapien
agcctgatgcccgttaccatttgaagggtagaa

SEQ ID NO: 903396 - DNA, 33 bp, Homo sapien
agcctgatgcccgttatcatttgaagggtagaa

SEQ ID NO: 903397 - DNA, 33 bp, Homo sapien
aagctaaagagcaaaaattaaattgtaagtgac

SEQ ID NO: 903398 - DNA, 33 bp, Homo sapien
aagctaaagagcaaaacttaaattgtaagtgac

SEQ ID NO: 903399 - DNA, 33 bp, Homo sapien
acatacaaaacagttgcataaagtataacaaca

SEQ ID NO: 903400 - DNA, 33 bp, Homo sapien
acatacaaaacagttggataaagtataacaaca

SEQ ID NO: 903401 - DNA, 33 bp, Homo sapien
aatggaagtttccacaaaatcattgaatagtgt

SEQ ID NO: 903402 - DNA, 33 bp, Homo sapien
aatggaagtttccacagaatcattgaatagtgt

SEQ ID NO: 903403 - DNA, 33 bp, Homo sapien
cttgagaaatatatgcacgagaaccatatactc

SEQ ID NO: 903404 - DNA, 33 bp, Homo sapien
cttgagaaatatatgcccgagaaccatatactc

SEQ ID NO: 903405 - DNA, 33 bp, Homo sapien
aacatttgtaagtcccagagcagtcaaaatggg

SEQ ID NO: 903406 - DNA, 33 bp, Homo sapien
aacatttgtaagtcccggagcagtcaaaatggg

SEQ ID NO: 903407 - DNA, 33 bp, Homo sapien
tcaactcagagaaatcccgatgtgaatgttgta

SEQ ID NO: 903408 - DNA, 33 bp, Homo sapien
tcaactcagagaaatctcgatgtgaatgttgta

SEQ ID NO: 903409 - DNA, 33 bp, Homo sapien
gagttgaacagtctcacggggtgtgcaaacgca

SEQ ID NO: 903410 - DNA, 33 bp, Homo sapien
gagttgaacagtctcatggggtgtgcaaacgca

SEQ ID NO: 903411 - DNA, 33 bp, Homo sapien
tgatttggataaagaccgtacaagacttctcac

SEQ ID NO: 903412 - DNA, 33 bp, Homo sapien
tgatttggataaagactgtacaagacttctcac

SEQ ID NO: 903413 - DNA, 33 bp, Homo sapien
cctgagttaggaatcacccttagcacccaccaa

SEQ ID NO: 903414 - DNA, 33 bp, Homo sapien
cctgagttaggaatcatccttagcacccaccaa

SEQ ID NO: 903415 - DNA, 33 bp, Homo sapien
ctgctgctgtaatgcacgttccctctgcactga

SEQ ID NO: 903416 - DNA, 33 bp, Homo sapien
ctgctgctgtaatgcatgttccctctgcactga

SEQ ID NO: 903417 - DNA, 33 bp, Homo sapien
tggagccctgtgcccaatatctagtagggtctc

SEQ ID NO: 903418 - DNA, 33 bp, Homo sapien
tggagccctgtgcccagtatctagtagggtctc

SEQ ID NO: 903419 - DNA, 33 bp, Homo sapien
ttcagaagttgcagtaagtcagatcaacaactg

SEQ ID NO: 903420 - DNA, 33 bp, Homo sapien
ttcagaagttgcagtaggtcagatcaacaactg

SEQ ID NO: 903421 - DNA, 33 bp, Homo sapien
ttttagtaacctgggacaagtgacttcgactct

SEQ ID NO: 903422 - DNA, 33 bp, Homo sapien
ttttagtaacctgggataagtgacttcgactct

SEQ ID NO: 903423 - DNA, 33 bp, Homo sapien
gctttagtgtccttggaaaatgtctagatagac

SEQ ID NO: 903424 - DNA, 33 bp, Homo sapien
gctttagtgtccttggcaaatgtctagatagac

SEQ ID NO: 903425 - DNA, 33 bp, Homo sapien
aatccgtgttttaagaagccctctgagtgattc

SEQ ID NO: 903426 - DNA, 33 bp, Homo sapien
aatccgtgttttaagaggccctctgagtgattc

SEQ ID NO: 903427 - DNA, 33 bp, Homo sapien
tgagtttgacgacctacgttattggctagcaga

SEQ ID NO: 903428 - DNA, 33 bp, Homo sapien
tgagtttgacgacctatgttattggctagcaga

SEQ ID NO: 903429 - DNA, 33 bp, Homo sapien
aagcctgtgcattgtcaccgaagcctgttgtca

SEQ ID NO: 903430 - DNA, 33 bp, Homo sapien
aagcctgtgcattgtcgccgaagcctgttgtca

SEQ ID NO: 903431 - DNA, 33 bp, Homo sapien
ctctccccttcaccacactgtccagaaagaaag

SEQ ID NO: 903432 - DNA, 33 bp, Homo sapien
ctctccccttcaccacgctgtccagaaagaaag

SEQ ID NO: 903433 - DNA, 33 bp, Homo sapien
tctcattcttgagaaccggacaagtttcctgag

SEQ ID NO: 903434 - DNA, 33 bp, Homo sapien
tctcattcttgagaactggacaagtttcctgag

SEQ ID NO: 903435 - DNA, 33 bp, Homo sapien
ctatggtggtagagaacgtttgcaggtgaaccc

SEQ ID NO: 903436 - DNA, 33 bp, Homo sapien
ctatggtggtagagaatgtttgcaggtgaaccc

SEQ ID NO: 903437 - DNA, 33 bp, Homo sapien
aatcggacctccattaacgaaatttcagaatag

SEQ ID NO: 903438 - DNA, 33 bp, Homo sapien
aatcggacctccattatcgaaatttcagaatag

SEQ ID NO: 903439 - DNA, 33 bp, Homo sapien
ggttttgccgtagataacatttaagtccaagta

SEQ ID NO: 903440 - DNA, 33 bp, Homo sapien
ggttttgccgtagatagcatttaagtccaagta

SEQ ID NO: 903441 - DNA, 33 bp, Homo sapien
aagaacaatagatgggacatagtatatctttca

SEQ ID NO: 903442 - DNA, 33 bp, Homo sapien
aagaacaatagatggggcatagtatatctttca

SEQ ID NO: 903443 - DNA, 33 bp, Homo sapien
tactggtgtctcctaccgtaaaaggcacagtgg

SEQ ID NO: 903444 - DNA, 33 bp, Homo sapien
tactggtgtctcctactgtaaaaggcacagtgg

SEQ ID NO: 903445 - DNA, 33 bp, Homo sapien
gccctccaagcacaaccgcgtattgaggtacaa

SEQ ID NO: 903446 - DNA, 33 bp, Homo sapien
gccctccaagcacaactgcgtattgaggtacaa

SEQ ID NO: 903447 - DNA, 33 bp, Homo sapien
tttaataaaattcaacaaccattgctaatttgt

SEQ ID NO: 903448 - DNA, 33 bp, Homo sapien
tttaataaaattcaacgaccattgctaatttgt

SEQ ID NO: 903449 - DNA, 33 bp, Homo sapien
actgacatagaattcaatagatacttctgtggc

SEQ ID NO: 903450 - DNA, 33 bp, Homo sapien
actgacatagaattcagtagatacttctgtggc

SEQ ID NO: 903451 - DNA, 33 bp, Homo sapien
aaccagtgcctggagacgtatggtgacttcttc

SEQ ID NO: 903452 - DNA, 33 bp, Homo sapien
aaccagtgcctggagatgtatggtgacttcttc

SEQ ID NO: 903453 - DNA, 33 bp, Homo sapien
tgggaatgaaaatgtacaatttgcagctcttta

SEQ ID NO: 903454 - DNA, 33 bp, Homo sapien
tgggaatgaaaatgtataatttgcagctcttta

SEQ ID NO: 903455 - DNA, 33 bp, Homo sapien
aaagttagctctagaactgtagattggagttca

SEQ ID NO: 903456 - DNA, 33 bp, Homo sapien
aaagttagctctagaattgtagattggagttca

SEQ ID NO: 903457 - DNA, 33 bp, Homo sapien
atcttaaaagagttccagaggtatgtggagatc

SEQ ID NO: 903458 - DNA, 33 bp, Homo sapien
atcttaaaagagttccggaggtatgtggagatc

SEQ ID NO: 903459 - DNA, 33 bp, Homo sapien
attttggtctgccctgcaaaaactgtcatatta

SEQ ID NO: 903460 - DNA, 33 bp, Homo sapien
attttggtctgccctgtaaaaactgtcatatta

SEQ ID NO: 903461 - DNA, 33 bp, Homo sapien
aattatacattggtcaaaggaagaaagttgaat

SEQ ID NO: 903462 - DNA, 33 bp, Homo sapien
aattatacattggtcagaggaagaaagttgaat

SEQ ID NO: 903463 - DNA, 33 bp, Homo sapien
tagacaatcgggtctgcagaaagagttttcatt

SEQ ID NO: 903464 - DNA, 33 bp, Homo sapien
tagacaatcgggtctgtagaaagagttttcatt

SEQ ID NO: 903465 - DNA, 33 bp, Homo sapien
atctgaaaaaatgaaaaaggaaggagagatgtg

SEQ ID NO: 903466 - DNA, 33 bp, Homo sapien
atctgaaaaaatgaaacaggaaggagagatgtg

SEQ ID NO: 903467 - DNA, 33 bp, Homo sapien
ggtgtcctaggcaataaccaatcatagatgaat

SEQ ID NO: 903468 - DNA, 33 bp, Homo sapien
ggtgtcctaggcaatagccaatcatagatgaat

SEQ ID NO: 903469 - DNA, 33 bp, Homo sapien
aacccactgtggattacagaattttgcaaatta

SEQ ID NO: 903470 - DNA, 33 bp, Homo sapien
aacccactgtggattatagaattttgcaaatta

SEQ ID NO: 903471 - DNA, 33 bp, Homo sapien
accgcagcctgagaagaagagttcttacatccc

SEQ ID NO: 903472 - DNA, 33 bp, Homo sapien
accgcagcctgagaaggagagttcttacatccc

SEQ ID NO: 903473 - DNA, 33 bp, Homo sapien
taaccttatgtggaaacctttctggaaaacact

SEQ ID NO: 903474 - DNA, 33 bp, Homo sapien
taaccttatgtggaaatctttctggaaaacact

SEQ ID NO: 903475 - DNA, 33 bp, Homo sapien
cattactgggaaacaaaggattttgcaactctt

SEQ ID NO: 903476 - DNA, 33 bp, Homo sapien
cattactgggaaacaagggattttgcaactctt

SEQ ID NO: 903477 - DNA, 33 bp, Homo sapien
ttaatgcctaaattcacgtgacctgaaaaaaaa

SEQ ID NO: 903478 - DNA, 33 bp, Homo sapien
ttaatgcctaaattcatgtgacctgaaaaaaaa

SEQ ID NO: 903479 - DNA, 33 bp, Homo sapien
cctgttttctagctaaaatcagtaaggagaggt

SEQ ID NO: 903480 - DNA, 33 bp, Homo sapien
cctgttttctagctaagatcagtaaggagaggt

SEQ ID NO: 903481 - DNA, 33 bp, Homo sapien
attaggagagaaatgtaaacttaggtgtctcaa

SEQ ID NO: 903482 - DNA, 33 bp, Homo sapien
attaggagagaaatgtcaacttaggtgtctcaa

SEQ ID NO: 903483 - DNA, 33 bp, Homo sapien
caataccaagagaatacctttaaagcagcctgt

SEQ ID NO: 903484 - DNA, 33 bp, Homo sapien
caataccaagagaatagctttaaagcagcctgt

SEQ ID NO: 903485 - DNA, 33 bp, Homo sapien
tgtgggagcagagtgaagccggtgactgctggc

SEQ ID NO: 903486 - DNA, 33 bp, Homo sapien
tgtgggagcagagtgaggccggtgactgctggc

SEQ ID NO: 903487 - DNA, 33 bp, Homo sapien
aagtcttgattttagcaaatgagtatggaggat

SEQ ID NO: 903488 - DNA, 33 bp, Homo sapien
aagtcttgattttagcgaatgagtatggaggat

SEQ ID NO: 903489 - DNA, 33 bp, Homo sapien
gggaaaatgtcagtgacagtgaaggttcttgaa

SEQ ID NO: 903490 - DNA, 33 bp, Homo sapien
gggaaaatgtcagtgatagtgaaggttcttgaa

SEQ ID NO: 903491 - DNA, 33 bp, Homo sapien
ataatatttttaaagcccctgcctagaagaaaa

SEQ ID NO: 903492 - DNA, 33 bp, Homo sapien
ataatatttttaaagctcctgcctagaagaaaa

SEQ ID NO: 903493 - DNA, 33 bp, Homo sapien
tgcttaaagagatttacaagaggacatcttcct

SEQ ID NO: 903494 - DNA, 33 bp, Homo sapien
tgcttaaagagatttataagaggacatcttcct

SEQ ID NO: 903495 - DNA, 33 bp, Homo sapien
ccatacaaagactgtaaaatgaagcttcctacc

SEQ ID NO: 903496 - DNA, 33 bp, Homo sapien
ccatacaaagactgtagaatgaagcttcctacc

SEQ ID NO: 903497 - DNA, 33 bp, Homo sapien
gacacaaatgctcagaccgtaacaaagaggtaa

SEQ ID NO: 903498 - DNA, 33 bp, Homo sapien
gacacaaatgctcagatcgtaacaaagaggtaa

SEQ ID NO: 903499 - DNA, 33 bp, Homo sapien
gctttgagcaagtgccggatgttatgatttggt

SEQ ID NO: 903500 - DNA, 33 bp, Homo sapien
gctttgagcaagtgcctgatgttatgatttggt

SEQ ID NO: 903501 - DNA, 33 bp, Homo sapien
tttgtatgtatctgaacaggaaacttaatgtgg

SEQ ID NO: 903502 - DNA, 33 bp, Homo sapien
tttgtatgtatctgaataggaaacttaatgtgg

SEQ ID NO: 903503 - DNA, 33 bp, Homo sapien
ccttctctagctcctacgggatgggcccatgaa

SEQ ID NO: 903504 - DNA, 33 bp, Homo sapien
ccttctctagctcctatgggatgggcccatgaa

SEQ ID NO: 903505 - DNA, 33 bp, Homo sapien
aggaccaccttagccaacatatttcagagtaag

SEQ ID NO: 903506 - DNA, 33 bp, Homo sapien
aggaccaccttagccagcatatttcagagtaag

SEQ ID NO: 903507 - DNA, 33 bp, Homo sapien
ggttaagaaatcccctcagacttttgtttccca

SEQ ID NO: 903508 - DNA, 33 bp, Homo sapien
ggttaagaaatcccctgagacttttgtttccca

SEQ ID NO: 903509 - DNA, 33 bp, Homo sapien
gtttgtacatctctcaatattgtattcacccac

SEQ ID NO: 903510 - DNA, 33 bp, Homo sapien
gtttgtacatctctcagtattgtattcacccac

SEQ ID NO: 903511 - DNA, 33 bp, Homo sapien
ttccagattctaaaccggcattttttgcattcc

SEQ ID NO: 903512 - DNA, 33 bp, Homo sapien
ttccagattctaaacctgcattttttgcattcc

SEQ ID NO: 903513 - DNA, 33 bp, Homo sapien
ccaataccttccatcacgtagccacagtttagc

SEQ ID NO: 903514 - DNA, 33 bp, Homo sapien
ccaataccttccatcatgtagccacagtttagc

SEQ ID NO: 903515 - DNA, 33 bp, Homo sapien
gttcagacctatctacaaaattggaatttgtca

SEQ ID NO: 903516 - DNA, 33 bp, Homo sapien
gttcagacctatctaccaaattggaatttgtca

SEQ ID NO: 903517 - DNA, 33 bp, Homo sapien
aagagcagaaagactacaggatgagaagtcaca

SEQ ID NO: 903518 - DNA, 33 bp, Homo sapien
aagagcagaaagactagaggatgagaagtcaca

SEQ ID NO: 903519 - DNA, 33 bp, Homo sapien
ttctaaggcattcccccactttgatttgcattt

SEQ ID NO: 903520 - DNA, 33 bp, Homo sapien
ttctaaggcattccccgactttgatttgcattt

SEQ ID NO: 903521 - DNA, 33 bp, Homo sapien
gctgaatttgtcagccccgtttctaacctacag

SEQ ID NO: 903522 - DNA, 33 bp, Homo sapien
gctgaatttgtcagcctcgtttctaacctacag

SEQ ID NO: 903523 - DNA, 33 bp, Homo sapien
gattagctagaagggcacctaacgcaaagcaga

SEQ ID NO: 903524 - DNA, 33 bp, Homo sapien
gattagctagaagggctcctaacgcaaagcaga

SEQ ID NO: 903525 - DNA, 33 bp, Homo sapien
atgcgtagccatgactcagccatcccctcaacc

SEQ ID NO: 903526 - DNA, 33 bp, Homo sapien
atgcgtagccatgacttagccatcccctcaacc

SEQ ID NO: 903527 - DNA, 33 bp, Homo sapien
ccggaggcaactcttaaaggacttgaagaccag

SEQ ID NO: 903528 - DNA, 33 bp, Homo sapien
ccggaggcaactcttacaggacttgaagaccag

SEQ ID NO: 903529 - DNA, 33 bp, Homo sapien
cttgtgtttataaaaaagagtagaagccaggaa

SEQ ID NO: 903530 - DNA, 33 bp, Homo sapien
cttgtgtttataaaaaggagtagaagccaggaa

SEQ ID NO: 903531 - DNA, 33 bp, Homo sapien
ctatctgcacaactcaaatgggtaatgcttgtt

SEQ ID NO: 903532 - DNA, 33 bp, Homo sapien
ctatctgcacaactcatatgggtaatgcttgtt

SEQ ID NO: 903533 - DNA, 33 bp, Homo sapien
cctctcatgacattataaagagctgtgcaggtg

SEQ ID NO: 903534 - DNA, 33 bp, Homo sapien
cctctcatgacattatgaagagctgtgcaggtg

SEQ ID NO: 903535 - DNA, 33 bp, Homo sapien
tggagtgccatatttcaaaccatgaaacgtgtg

SEQ ID NO: 903536 - DNA, 33 bp, Homo sapien
tggagtgccatatttcgaaccatgaaacgtgtg

SEQ ID NO: 903537 - DNA, 33 bp, Homo sapien
ccgctttccttttgtacagaatcagtttacctt

SEQ ID NO: 903538 - DNA, 33 bp, Homo sapien
ccgctttccttttgtatagaatcagtttacctt

SEQ ID NO: 903539 - DNA, 33 bp, Homo sapien
agtttacagttggagcagagaaaaaccttattc

SEQ ID NO: 903540 - DNA, 33 bp, Homo sapien
agtttacagttggagcggagaaaaaccttattc

SEQ ID NO: 903541 - DNA, 33 bp, Homo sapien
tttgggtctagccatacgatttggctgctggag

SEQ ID NO: 903542 - DNA, 33 bp, Homo sapien
tttgggtctagccatatgatttggctgctggag

SEQ ID NO: 903543 - DNA, 33 bp, Homo sapien
cctgaaactgattgctcagagtgattaaataat

SEQ ID NO: 903544 - DNA, 33 bp, Homo sapien
cctgaaactgattgcttagagtgattaaataat

SEQ ID NO: 903545 - DNA, 33 bp, Homo sapien
caacctgattataaggcaccgacctgaattcag

SEQ ID NO: 903546 - DNA, 33 bp, Homo sapien
caacctgattataaggtaccgacctgaattcag

SEQ ID NO: 903547 - DNA, 33 bp, Homo sapien
ttcttgttttagacaccatttggggccaaacat

SEQ ID NO: 903548 - DNA, 33 bp, Homo sapien
ttcttgttttagacacgatttggggccaaacat

SEQ ID NO: 903549 - DNA, 33 bp, Homo sapien
atgcacaccaaataccgggtagaggaaagataa

SEQ ID NO: 903550 - DNA, 33 bp, Homo sapien
atgcacaccaaatacctggtagaggaaagataa

SEQ ID NO: 903551 - DNA, 33 bp, Homo sapien
aaatattctactcttacgtactttgttcttcac

SEQ ID NO: 903552 - DNA, 33 bp, Homo sapien
aaatattctactcttatgtactttgttcttcac

SEQ ID NO: 903553 - DNA, 33 bp, Homo sapien
agtaaattatacagcaacccctgatatattcag

SEQ ID NO: 903554 - DNA, 33 bp, Homo sapien
agtaaattatacagcaccccctgatatattcag

SEQ ID NO: 903555 - DNA, 33 bp, Homo sapien
gtcctaagctgtgaagaccttatttgaattaag

SEQ ID NO: 903556 - DNA, 33 bp, Homo sapien
gtcctaagctgtgaaggccttatttgaattaag

SEQ ID NO: 903557 - DNA, 33 bp, Homo sapien
caaaagcctaattatgcatccaaagttatgatt

SEQ ID NO: 903558 - DNA, 33 bp, Homo sapien
caaaagcctaattatggatccaaagttatgatt

SEQ ID NO: 903559 - DNA, 33 bp, Homo sapien
ctcattcataaaatacgctgtatctaggccctg

SEQ ID NO: 903560 - DNA, 33 bp, Homo sapien
ctcattcataaaatactctgtatctaggccctg

SEQ ID NO: 903561 - DNA, 33 bp, Homo sapien
tgtcttcctctccataagatctcttcacaggag

SEQ ID NO: 903562 - DNA, 33 bp, Homo sapien
tgtcttcctctccatatgatctcttcacaggag

SEQ ID NO: 903563 - DNA, 33 bp, Homo sapien
ctcacactggaaatagaagcaggaatctgataa

SEQ ID NO: 903564 - DNA, 33 bp, Homo sapien
ctcacactggaaataggagcaggaatctgataa

SEQ ID NO: 903565 - DNA, 33 bp, Homo sapien
tgtcctctctagaaaacgtaaaagcatcacttt

SEQ ID NO: 903566 - DNA, 33 bp, Homo sapien
tgtcctctctagaaaatgtaaaagcatcacttt

SEQ ID NO: 903567 - DNA, 33 bp, Homo sapien
aatgtcacagaggaacagaattatacaactttt

SEQ ID NO: 903568 - DNA, 33 bp, Homo sapien
aatgtcacagaggaacggaattatacaactttt

SEQ ID NO: 903569 - DNA, 33 bp, Homo sapien
tatcttgtttttaacacggtttgtcattatcta

SEQ ID NO: 903570 - DNA, 33 bp, Homo sapien
tatcttgtttttaacatggtttgtcattatcta

SEQ ID NO: 903571 - DNA, 33 bp, Homo sapien
tcctggaaaagaggcacgtgattgcaccagtgt

SEQ ID NO: 903572 - DNA, 33 bp, Homo sapien
tcctggaaaagaggcatgtgattgcaccagtgt

SEQ ID NO: 903573 - DNA, 33 bp, Homo sapien
agctcagaaacaggacaagttgcaaaaaggata

SEQ ID NO: 903574 - DNA, 33 bp, Homo sapien
agctcagaaacaggaccagttgcaaaaaggata

SEQ ID NO: 903575 - DNA, 33 bp, Homo sapien
tgaatggacaatttcacatcaagtggtcctacc

SEQ ID NO: 903576 - DNA, 33 bp, Homo sapien
tgaatggacaatttcatatcaagtggtcctacc

SEQ ID NO: 903577 - DNA, 33 bp, Homo sapien
aggaggctctcataaaacctggtcataatacac

SEQ ID NO: 903578 - DNA, 33 bp, Homo sapien
aggaggctctcataaagcctggtcataatacac

SEQ ID NO: 903579 - DNA, 33 bp, Homo sapien
aaggacttatctttccccgtgctatgactggag

SEQ ID NO: 903580 - DNA, 33 bp, Homo sapien
aaggacttatctttccgcgtgctatgactggag

SEQ ID NO: 903581 - DNA, 33 bp, Homo sapien
tcacattctggaaaaaaatacacacattacaca

SEQ ID NO: 903582 - DNA, 33 bp, Homo sapien
tcacattctggaaaaagatacacacattacaca

SEQ ID NO: 903583 - DNA, 33 bp, Homo sapien
aggaaggaaagagacaataagtaacttactggg

SEQ ID NO: 903584 - DNA, 33 bp, Homo sapien
aggaaggaaagagacattaagtaacttactggg

SEQ ID NO: 903585 - DNA, 33 bp, Homo sapien
gagaatccaaccacacaggattttcaatattga

SEQ ID NO: 903586 - DNA, 33 bp, Homo sapien
gagaatccaaccacacgggattttcaatattga

SEQ ID NO: 903587 - DNA, 33 bp, Homo sapien
ctcttgggtgggtgacaaactaccctattttgt

SEQ ID NO: 903588 - DNA, 33 bp, Homo sapien
ctcttgggtgggtgaccaactaccctattttgt

SEQ ID NO: 903589 - DNA, 33 bp, Homo sapien
aactcttatcattataacccactgcttatcaat

SEQ ID NO: 903590 - DNA, 33 bp, Homo sapien
aactcttatcattataccccactgcttatcaat

SEQ ID NO: 903591 - DNA, 33 bp, Homo sapien
tctgactttgtaatcaaccctattcataagaac

SEQ ID NO: 903592 - DNA, 33 bp, Homo sapien
tctgactttgtaatcagccctattcataagaac

SEQ ID NO: 903593 - DNA, 33 bp, Homo sapien
gtcattacaggcaaccaaattagcttcagtctt

SEQ ID NO: 903594 - DNA, 33 bp, Homo sapien
gtcattacaggcaaccgaattagcttcagtctt

SEQ ID NO: 903595 - DNA, 33 bp, Homo sapien
acttttgcataagatacgtaaatttcacttagg

SEQ ID NO: 903596 - DNA, 33 bp, Homo sapien
acttttgcataagataggtaaatttcacttagg

SEQ ID NO: 903597 - DNA, 33 bp, Homo sapien
tatggtataaaatgaccgtacaggacatatata

SEQ ID NO: 903598 - DNA, 33 bp, Homo sapien
tatggtataaaatgactgtacaggacatatata

SEQ ID NO: 903599 - DNA, 33 bp, Homo sapien
ccctctttcacaaaaaatgcaaggaaagcggac

SEQ ID NO: 903600 - DNA, 33 bp, Homo sapien
ccctctttcacaaaaagtgcaaggaaagcggac

SEQ ID NO: 903601 - DNA, 33 bp, Homo sapien
attcatgtgagcataactgtaaatagtagccaa

SEQ ID NO: 903602 - DNA, 33 bp, Homo sapien
attcatgtgagcataagtgtaaatagtagccaa

SEQ ID NO: 903603 - DNA, 33 bp, Homo sapien
gaggaagaacacacaaagcttcatcgttattgc

SEQ ID NO: 903604 - DNA, 33 bp, Homo sapien
gaggaagaacacacaacgcttcatcgttattgc

SEQ ID NO: 903605 - DNA, 33 bp, Homo sapien
aaaatgagaattacaaagcagatgaggaagtct

SEQ ID NO: 903606 - DNA, 33 bp, Homo sapien
aaaatgagaattacaacgcagatgaggaagtct

SEQ ID NO: 903607 - DNA, 33 bp, Homo sapien
aacaaggctagatcaaaccataatgttgagtga

SEQ ID NO: 903608 - DNA, 33 bp, Homo sapien
aacaaggctagatcaacccataatgttgagtga

SEQ ID NO: 903609 - DNA, 33 bp, Homo sapien
gtaaacacactgatgacgtttccactctcgtgg

SEQ ID NO: 903610 - DNA, 33 bp, Homo sapien
gtaaacacactgatgatgtttccactctcgtgg

SEQ ID NO: 903611 - DNA, 33 bp, Homo sapien
caaagacatccgtacacgacagtaagggttctg

SEQ ID NO: 903612 - DNA, 33 bp, Homo sapien
caaagacatccgtacatgacagtaagggttctg

SEQ ID NO: 903613 - DNA, 33 bp, Homo sapien
atcagctgttgtgatcaaaaatgtaaaagtaaa

SEQ ID NO: 903614 - DNA, 33 bp, Homo sapien
atcagctgttgtgatcgaaaatgtaaaagtaaa

SEQ ID NO: 903615 - DNA, 33 bp, Homo sapien
gggcaaaggtttgtaacaggtgagacattatat

SEQ ID NO: 903616 - DNA, 33 bp, Homo sapien
gggcaaaggtttgtaataggtgagacattatat

SEQ ID NO: 903617 - DNA, 33 bp, Homo sapien
cagacaaggcaacagaagtttaagacattactc

SEQ ID NO: 903618 - DNA, 33 bp, Homo sapien
cagacaaggcaacagatgtttaagacattactc

SEQ ID NO: 903619 - DNA, 33 bp, Homo sapien
cagcttattcaaggcagccctgctctagaacat

SEQ ID NO: 903620 - DNA, 33 bp, Homo sapien
cagcttattcaaggcatccctgctctagaacat

SEQ ID NO: 903621 - DNA, 33 bp, Homo sapien
ggagagtctgtgagtacagtagcagcggagcag

SEQ ID NO: 903622 - DNA, 33 bp, Homo sapien
ggagagtctgtgagtatagtagcagcggagcag

SEQ ID NO: 903623 - DNA, 33 bp, Homo sapien
caaacacttaaccagccagaattgtggaaaagt

SEQ ID NO: 903624 - DNA, 33 bp, Homo sapien
caaacacttaaccagctagaattgtggaaaagt

SEQ ID NO: 903625 - DNA, 33 bp, Homo sapien
gctagaggtcatcactaagatttttcactgacc

SEQ ID NO: 903626 - DNA, 33 bp, Homo sapien
gctagaggtcatcactgagatttttcactgacc

SEQ ID NO: 903627 - DNA, 33 bp, Homo sapien
taagttgctattgaacagcctatcagctagtta

SEQ ID NO: 903628 - DNA, 33 bp, Homo sapien
taagttgctattgaactgcctatcagctagtta

SEQ ID NO: 903629 - DNA, 33 bp, Homo sapien
aagtccagggctatccacaaaacagtaaatata

SEQ ID NO: 903630 - DNA, 33 bp, Homo sapien
aagtccagggctatccgcaaaacagtaaatata

SEQ ID NO: 903631 - DNA, 33 bp, Homo sapien
tggtgatacagcaaaacgatgcaggtgccattt

SEQ ID NO: 903632 - DNA, 33 bp, Homo sapien
tggtgatacagcaaaaggatgcaggtgccattt

SEQ ID NO: 903633 - DNA, 33 bp, Homo sapien
actaagccttcccttcaaggagtgtggtataaa

SEQ ID NO: 903634 - DNA, 33 bp, Homo sapien
actaagccttcccttcgaggagtgtggtataaa

SEQ ID NO: 903635 - DNA, 33 bp, Homo sapien
atataaaaaagcgttaaagaactgacaagtgta

SEQ ID NO: 903636 - DNA, 33 bp, Homo sapien
atataaaaaagcgttagagaactgacaagtgta

SEQ ID NO: 903637 - DNA, 33 bp, Homo sapien
cttaaaatataaaagacgtctaccaatcaatta

SEQ ID NO: 903638 - DNA, 33 bp, Homo sapien
cttaaaatataaaagatgtctaccaatcaatta

SEQ ID NO: 903639 - DNA, 33 bp, Homo sapien
ctggtgacatttcccccgcacccaatattttgc

SEQ ID NO: 903640 - DNA, 33 bp, Homo sapien
ctggtgacatttcccctgcacccaatattttgc

SEQ ID NO: 903641 - DNA, 33 bp, Homo sapien
agcaagggtgatgacaagctctgcagaggagcc

SEQ ID NO: 903642 - DNA, 33 bp, Homo sapien
agcaagggtgatgacaggctctgcagaggagcc

SEQ ID NO: 903643 - DNA, 33 bp, Homo sapien
atctcctcaaactacaagaataactatttgaaa

SEQ ID NO: 903644 - DNA, 33 bp, Homo sapien
atctcctcaaactacaggaataactatttgaaa

SEQ ID NO: 903645 - DNA, 33 bp, Homo sapien
tcagcaaaggttcagacggaagtaatgaggtca

SEQ ID NO: 903646 - DNA, 33 bp, Homo sapien
tcagcaaaggttcagatggaagtaatgaggtca

SEQ ID NO: 903647 - DNA, 33 bp, Homo sapien
gcacaaaacttgatgacagtgatttgaccacat

SEQ ID NO: 903648 - DNA, 33 bp, Homo sapien
gcacaaaacttgatgagagtgatttgaccacat

SEQ ID NO: 903649 - DNA, 33 bp, Homo sapien
gacaaaacaaggaataagtgacttttttcaaga

SEQ ID NO: 903650 - DNA, 33 bp, Homo sapien
gacaaaacaaggaataggtgacttttttcaaga

SEQ ID NO: 903651 - DNA, 33 bp, Homo sapien
cagcagcttcccgtcaacatgacataaatctac

SEQ ID NO: 903652 - DNA, 33 bp, Homo sapien
cagcagcttcccgtcagcatgacataaatctac

SEQ ID NO: 903653 - DNA, 33 bp, Homo sapien
aaaggataatcataacacataaatccatggaaa

SEQ ID NO: 903654 - DNA, 33 bp, Homo sapien
aaaggataatcataacgcataaatccatggaaa

SEQ ID NO: 903655 - DNA, 33 bp, Homo sapien
ggttcctaatcacctccagataaatggttataa

SEQ ID NO: 903656 - DNA, 33 bp, Homo sapien
ggttcctaatcacctctagataaatggttataa

SEQ ID NO: 903657 - DNA, 33 bp, Homo sapien
aggtatgtctttatgaacagtgcaaaaaaggac

SEQ ID NO: 903658 - DNA, 33 bp, Homo sapien
aggtatgtctttatgagcagtgcaaaaaaggac

SEQ ID NO: 903659 - DNA, 33 bp, Homo sapien
ataaacagcctcaggaaattctatgattagggg

SEQ ID NO: 903660 - DNA, 33 bp, Homo sapien
ataaacagcctcaggatattctatgattagggg

SEQ ID NO: 903661 - DNA, 33 bp, Homo sapien
ctcaggggtgaacctcacttcaaaacatacaca

SEQ ID NO: 903662 - DNA, 33 bp, Homo sapien
ctcaggggtgaacctctcttcaaaacatacaca

SEQ ID NO: 903663 - DNA, 33 bp, Homo sapien
tttccaaaagttcctgcaagactgtatgtgaaa

SEQ ID NO: 903664 - DNA, 33 bp, Homo sapien
tttccaaaagttcctgtaagactgtatgtgaaa

SEQ ID NO: 903665 - DNA, 33 bp, Homo sapien
aattgaggagttggaaacaggtacaaccaaaca

SEQ ID NO: 903666 - DNA, 33 bp, Homo sapien
aattgaggagttggaagcaggtacaaccaaaca

SEQ ID NO: 903667 - DNA, 33 bp, Homo sapien
ttctggacagagttaccacctccctgattttta

SEQ ID NO: 903668 - DNA, 33 bp, Homo sapien
ttctggacagagttactacctccctgattttta

SEQ ID NO: 903669 - DNA, 33 bp, Homo sapien
cttcctgtgttttttgcaatgatctggcaatcc

SEQ ID NO: 903670 - DNA, 33 bp, Homo sapien
cttcctgtgttttttgtaatgatctggcaatcc

SEQ ID NO: 903671 - DNA, 33 bp, Homo sapien
cttcgcttgccctgtacagtcagagagcgttac

SEQ ID NO: 903672 - DNA, 33 bp, Homo sapien
cttcgcttgccctgtatagtcagagagcgttac

SEQ ID NO: 903673 - DNA, 33 bp, Homo sapien
gtcattccttggaacagatgcgaaggattcata

SEQ ID NO: 903674 - DNA, 33 bp, Homo sapien
gtcattccttggaacatatgcgaaggattcata

SEQ ID NO: 903675 - DNA, 33 bp, Homo sapien
tagcacagcattaaagacttcatgatttgaatg

SEQ ID NO: 903676 - DNA, 33 bp, Homo sapien
tagcacagcattaaagccttcatgatttgaatg

SEQ ID NO: 903677 - DNA, 33 bp, Homo sapien
cttcctacaaagcagcaatatggggaaaaatta

SEQ ID NO: 903678 - DNA, 33 bp, Homo sapien
cttcctacaaagcagcgatatggggaaaaatta

SEQ ID NO: 903679 - DNA, 33 bp, Homo sapien
cactcatctttaagtagaatgtacacatgtcac

SEQ ID NO: 903680 - DNA, 33 bp, Homo sapien
cactcatctttaagtataatgtacacatgtcac

SEQ ID NO: 903681 - DNA, 33 bp, Homo sapien
ctcaacaatgcaatcagacccttcttttaacag

SEQ ID NO: 903682 - DNA, 33 bp, Homo sapien
ctcaacaatgcaatcatacccttcttttaacag

SEQ ID NO: 903683 - DNA, 33 bp, Homo sapien; identical to SEQ ID NO: 903681

SEQ ID NO: 903684 - DNA, 33 bp, Homo sapien; identical to SEQ ID NO: 903682

SEQ ID NO: 903685 - DNA, 33 bp, Homo sapien
ttttggttataagttgaaatcataccaagaata

SEQ ID NO: 903686 - DNA, 33 bp, Homo sapien
ttttggttataagttggaatcataccaagaata

SEQ ID NO: 903687 - DNA, 33 bp, Homo sapien; identical to SEQ ID NO: 903685

SEQ ID NO: 903688 - DNA, 33 bp, Homo sapien; identical to SEQ ID NO: 903686

SEQ ID NO: 903689 - DNA, 33 bp, Homo sapien
tgaatcccactattcagggtaaagcagaagctg

SEQ ID NO: 903690 - DNA, 33 bp, Homo sapien
tgaatcccactattcatggtaaagcagaagctg

SEQ ID NO: 903691 - DNA, 33 bp, Homo sapien
taataactctctgatacaggtgttgtcttagtc

SEQ ID NO: 903692 - DNA, 33 bp, Homo sapien
taataactctctgatataggtgttgtcttagtc

SEQ ID NO: 903693 - DNA, 33 bp, Homo sapien
tttattattctcagtaaaccagtgacctaaaaa

SEQ ID NO: 903694 - DNA, 33 bp, Homo sapien
tttattattctcagtagaccagtgacctaaaaa

SEQ ID NO: 903695 - DNA, 33 bp, Homo sapien
gccactaggtatacaaacattaattagactatt

SEQ ID NO: 903696 - DNA, 33 bp, Homo sapien
gccactaggtatacaagcattaattagactatt

SEQ ID NO: 903697 - DNA, 33 bp, Homo sapien
ccattgtttaggggatcactgatacttggtaag

SEQ ID NO: 903698 - DNA, 33 bp, Homo sapien
ccattgtttaggggattactgatacttggtaag

SEQ ID NO: 903699 - DNA, 33 bp, Homo sapien
ccagaaagttccccaaacactagctgtgaaatt

SEQ ID NO: 903700 - DNA, 33 bp, Homo sapien
ccagaaagttccccaagcactagctgtgaaatt

SEQ ID NO: 903701 - DNA, 33 bp, Homo sapien
cagctaatctgaagtgcactgagattcacccag

SEQ ID NO: 903702 - DNA, 33 bp, Homo sapien
cagctaatctgaagtgtactgagattcacccag

SEQ ID NO: 903703 - DNA, 33 bp, Homo sapien
tctgtatacaaaccacactaacacttagacaat

SEQ ID NO: 903704 - DNA, 33 bp, Homo sapien
tctgtatacaaaccaccctaacacttagacaat

SEQ ID NO: 903705 - DNA, 33 bp, Homo sapien
gttcctggaaataaaccgaagatgaagctgttt

SEQ ID NO: 903706 - DNA, 33 bp, Homo sapien
gttcctggaaataaactgaagatgaagctgttt

SEQ ID NO: 903707 - DNA, 33 bp, Homo sapien
ggcttaggctgtcagcagcaaagatcttctctt

SEQ ID NO: 903708 - DNA, 33 bp, Homo sapien
ggcttaggctgtcagcggcaaagatcttctctt

SEQ ID NO: 903709 - DNA, 33 bp, Homo sapien
tctctactatatgctacggattcttcttagcac

SEQ ID NO: 903710 - DNA, 33 bp, Homo sapien
tctctactatatgctagggattcttcttagcac

SEQ ID NO: 903711 - DNA, 33 bp, Homo sapien
ggcaaagagctaagcactgaaacttgcattaca

SEQ ID NO: 903712 - DNA, 33 bp, Homo sapien
ggcaaagagctaagcattgaaacttgcattaca

SEQ ID NO: 903713 - DNA, 33 bp, Homo sapien
aatctttcttttgctacccctttgtaggcactt

SEQ ID NO: 903714 - DNA, 33 bp, Homo sapien
aatctttcttttgctatccctttgtaggcactt

SEQ ID NO: 903715 - DNA, 33 bp, Homo sapien
tttcagcttaccatacactgctgaaggaggtag

SEQ ID NO: 903716 - DNA, 33 bp, Homo sapien
tttcagcttaccatactctgctgaaggaggtag

SEQ ID NO: 903717 - DNA, 33 bp, Homo sapien
ccagagaagacttcacagagaagagaggtcatg

SEQ ID NO: 903718 - DNA, 33 bp, Homo sapien
ccagagaagacttcacggagaagagaggtcatg

SEQ ID NO: 903719 - DNA, 33 bp, Homo sapien
acacaacactagaacacatctgggcctgagaaa

SEQ ID NO: 903720 - DNA, 33 bp, Homo sapien
acacaacactagaacagatctgggcctgagaaa

SEQ ID NO: 903721 - DNA, 33 bp, Homo sapien
ttatcttttattcatccaatccaatggttccaa

SEQ ID NO: 903722 - DNA, 33 bp, Homo sapien
ttatcttttattcatctaatccaatggttccaa

SEQ ID NO: 903723 - DNA, 33 bp, Homo sapien
agataatttagatctacgtggagacttgcacag

SEQ ID NO: 903724 - DNA, 33 bp, Homo sapien
agataatttagatctatgtggagacttgcacag

SEQ ID NO: 903725 - DNA, 33 bp, Homo sapien
tgaggaccggctgtacaaggatggtgatgaggt

SEQ ID NO: 903726 - DNA, 33 bp, Homo sapien
tgaggaccggctgtaccaggatggtgatgaggt

SEQ ID NO: 903727 - DNA, 33 bp, Homo sapien
aatcccaaactggacactgtagaatatgcatta

SEQ ID NO: 903728 - DNA, 33 bp, Homo sapien
aatcccaaactggacattgtagaatatgcatta

SEQ ID NO: 903729 - DNA, 33 bp, Homo sapien
aatgactggagaggagcccttccttagtgttgc

SEQ ID NO: 903730 - DNA, 33 bp, Homo sapien
aatgactggagaggaggccttccttagtgttgc

SEQ ID NO: 903731 - DNA, 33 bp, Homo sapien
tcagtatccaacagaaagtggctgggactttgg

SEQ ID NO: 903732 - DNA, 33 bp, Homo sapien
tcagtatccaacagaacgtggctgggactttgg

SEQ ID NO: 903733 - DNA, 33 bp, Homo sapien
aaaggcaactggatacaagctgtcattgaatcc

SEQ ID NO: 903734 - DNA, 33 bp, Homo sapien
aaaggcaactggatacgagctgtcattgaatcc

SEQ ID NO: 903735 - DNA, 33 bp, Homo sapien
gcaaattgaaggctcaaggtaggaatttaatgc

SEQ ID NO: 903736 - DNA, 33 bp, Homo sapien
gcaaattgaaggctcagggtaggaatttaatgc

SEQ ID NO: 903737 - DNA, 33 bp, Homo sapien
gttccaaatttagtaaaagtctgccctgcagaa

SEQ ID NO: 903738 - DNA, 33 bp, Homo sapien
gttccaaatttagtaagagtctgccctgcagaa

SEQ ID NO: 903739 - DNA, 33 bp, Homo sapien
ggaagtttctgtaataaaagcaggagaaaataa

SEQ ID NO: 903740 - DNA, 33 bp, Homo sapien
ggaagtttctgtaatagaagcaggagaaaataa

SEQ ID NO: 903741 - DNA, 33 bp, Homo sapien
tactatcaggttgagaaatcacgcctcaaacct

SEQ ID NO: 903742 - DNA, 33 bp, Homo sapien
tactatcaggttgagagatcacgcctcaaacct

SEQ ID NO: 903743 - DNA, 33 bp, Homo sapien
gacaaatatccttcaacggagaacatctaagag

SEQ ID NO: 903744 - DNA, 33 bp, Homo sapien
gacaaatatccttcaatggagaacatctaagag

SEQ ID NO: 903745 - DNA, 33 bp, Homo sapien
ttaggctgttgtagaaaagactatttgcaaggc

SEQ ID NO: 903746 - DNA, 33 bp, Homo sapien
ttaggctgttgtagaatagactatttgcaaggc

SEQ ID NO: 903747 - DNA, 33 bp, Homo sapien
gagtcggtaagaatgaatcattaggctgttgta

SEQ ID NO: 903748 - DNA, 33 bp, Homo sapien
gagtcggtaagaatgagtcattaggctgttgta

SEQ ID NO: 903749 - DNA, 33 bp, Homo sapien
gatctagaaactgttaaaggccaaataaacttg

SEQ ID NO: 903750 - DNA, 33 bp, Homo sapien
gatctagaaactgttagaggccaaataaacttg

SEQ ID NO: 903751 - DNA, 33 bp, Homo sapien
cctgcctggaccttcgctatccttctctaacta

SEQ ID NO: 903752 - DNA, 33 bp, Homo sapien
cctgcctggaccttcgttatccttctctaacta

SEQ ID NO: 903753 - DNA, 33 bp, Homo sapien
ctacatcaaagtggaaatgttaggtaactggtt

SEQ ID NO: 903754 - DNA, 33 bp, Homo sapien
ctacatcaaagtggaagtgttaggtaactggtt

SEQ ID NO: 903755 - DNA, 33 bp, Homo sapien
tagcatctaacataagactagattcagcatata

SEQ ID NO: 903756 - DNA, 33 bp, Homo sapien
tagcatctaacataagcctagattcagcatata

SEQ ID NO: 903757 - DNA, 33 bp, Homo sapien
gaggaaacagatatcaaagtgacctgccaggac

SEQ ID NO: 903758 - DNA, 33 bp, Homo sapien
gaggaaacagatatcagagtgacctgccaggac

SEQ ID NO: 903759 - DNA, 33 bp, Homo sapien
ccacctcagtcatataaatcccagaagatgccc

SEQ ID NO: 903760 - DNA, 33 bp, Homo sapien
ccacctcagtcatatagatcccagaagatgccc

SEQ ID NO: 903761 - DNA, 33 bp, Homo sapien
gtttttattgagacgaccacttagcccaagaca

SEQ ID NO: 903762 - DNA, 33 bp, Homo sapien
gtttttattgagacgagcacttagcccaagaca

SEQ ID NO: 903763 - DNA, 33 bp, Homo sapien
tatgtaactggtggtaactttgaactggtagga

SEQ ID NO: 903764 - DNA, 33 bp, Homo sapien
tatgtaactggtggtagctttgaactggtagga

SEQ ID NO: 903765 - DNA, 33 bp, Homo sapien
catgacagatagcagactctgaaggaaatacta

SEQ ID NO: 903766 - DNA, 33 bp, Homo sapien
catgacagatagcagattctgaaggaaatacta

SEQ ID NO: 903767 - DNA, 33 bp, Homo sapien
gaggaattcaaagaccaggaataaactcattga

SEQ ID NO: 903768 - DNA, 33 bp, Homo sapien
gaggaattcaaagaccgggaataaactcattga

SEQ ID NO: 903769 - DNA, 33 bp, Homo sapien
tcagttgtctgtatacacatgagattgtttgga

SEQ ID NO: 903770 - DNA, 33 bp, Homo sapien
tcagttgtctgtatacgcatgagattgtttgga

SEQ ID NO: 903771 - DNA, 33 bp, Homo sapien
acttgctcactattataagagcagcagaaggga

SEQ ID NO: 903772 - DNA, 33 bp, Homo sapien
acttgctcactattatgagagcagcagaaggga

SEQ ID NO: 903773 - DNA, 33 bp, Homo sapien
aaataaagtcatacaaatgatgaactcctttgt

SEQ ID NO: 903774 - DNA, 33 bp, Homo sapien
aaataaagtcatacaagtgatgaactcctttgt

SEQ ID NO: 903775 - DNA, 33 bp, Homo sapien
ataaaacagtttaccaaagaatacaagtataat

SEQ ID NO: 903776 - DNA, 33 bp, Homo sapien
ataaaacagtttaccagagaatacaagtataat

SEQ ID NO: 903777 - DNA, 33 bp, Homo sapien
gtcagtgttcactatacattgctaagttttata

SEQ ID NO: 903778 - DNA, 33 bp, Homo sapien
gtcagtgttcactatatattgctaagttttata

SEQ ID NO: 903779 - DNA, 33 bp, Homo sapien
tttagtgtggtcacagactgctcaaacacttaa

SEQ ID NO: 903780 - DNA, 33 bp, Homo sapien
tttagtgtggtcacagtctgctcaaacacttaa

SEQ ID NO: 903781 - DNA, 33 bp, Homo sapien
caatgcagtaggtagagcaattggtcgggagac

SEQ ID NO: 903782 - DNA, 33 bp, Homo sapien
caatgcagtaggtagatcaattggtcgggagac

SEQ ID NO: 903783 - DNA, 33 bp, Homo sapien
agccttaaagcttggaacattcctgctaatacc

SEQ ID NO: 903784 - DNA, 33 bp, Homo sapien
agccttaaagcttggagcattcctgctaatacc

SEQ ID NO: 903785 - DNA, 33 bp, Homo sapien
gttgaaataaattgaccaaaattgaaaacagta

SEQ ID NO: 903786 - DNA, 33 bp, Homo sapien
gttgaaataaattgacgaaaattgaaaacagta

SEQ ID NO: 903787 - DNA, 33 bp, Homo sapien
caatgaccagagtggaagtatcagaataatagt

SEQ ID NO: 903788 - DNA, 33 bp, Homo sapien
caatgaccagagtggaggtatcagaataatagt

SEQ ID NO: 903789 - DNA, 33 bp, Homo sapien
tcaaatttcagttttaacagactactatgttct

SEQ ID NO: 903790 - DNA, 33 bp, Homo sapien
tcaaatttcagttttagcagactactatgttct

SEQ ID NO: 903791 - DNA, 33 bp, Homo sapien
gggatggagaacagcactcaaatccttcttgct

SEQ ID NO: 903792 - DNA, 33 bp, Homo sapien
gggatggagaacagcattcaaatccttcttgct

SEQ ID NO: 903793 - DNA, 33 bp, Homo sapien
ctctgcaatagtataaattagccattaggactg

SEQ ID NO: 903794 - DNA, 33 bp, Homo sapien
ctctgcaatagtataatttagccattaggactg

SEQ ID NO: 903795 - DNA, 33 bp, Homo sapien
aatcccatagtttggaaaaaagccaatttggaa

SEQ ID NO: 903796 - DNA, 33 bp, Homo sapien
aatcccatagtttggagaaaagccaatttggaa

SEQ ID NO: 903797 - DNA, 33 bp, Homo sapien
tggtctgctagacatccactgtggacaatgggg

SEQ ID NO: 903798 - DNA, 33 bp, Homo sapien
tggtctgctagacatctactgtggacaatgggg

SEQ ID NO: 903799 - DNA, 33 bp, Homo sapien
tgccttgtaaagtccaccaatcaaagaccaaag

SEQ ID NO: 903800 - DNA, 33 bp, Homo sapien
tgccttgtaaagtccatcaatcaaagaccaaag

SEQ ID NO: 903801 - DNA, 33 bp, Homo sapien
tcctgagatgagtaacaatcatgggaatctcac

SEQ ID NO: 903802 - DNA, 33 bp, Homo sapien
tcctgagatgagtaaccatcatgggaatctcac

SEQ ID NO: 903803 - DNA, 33 bp, Homo sapien
taatttatgtactgaaactgtttaactggtaaa

SEQ ID NO: 903804 - DNA, 33 bp, Homo sapien
taatttatgtactgaagctgtttaactggtaaa

SEQ ID NO: 903805 - DNA, 33 bp, Homo sapien
tcctcatttcccaaaaaagtaaggaatgtgctg

SEQ ID NO: 903806 - DNA, 33 bp, Homo sapien
tcctcatttcccaaaacagtaaggaatgtgctg

SEQ ID NO: 903807 - DNA, 33 bp, Homo sapien
tatcttctctggggacgcatctattcaagtact

SEQ ID NO: 903808 - DNA, 33 bp, Homo sapien
tatcttctctggggactcatctattcaagtact

SEQ ID NO: 903809 - DNA, 33 bp, Homo sapien
cagttactatatctaacaagtcataggcataac

SEQ ID NO: 903810 - DNA, 33 bp, Homo sapien
cagttactatatctaataagtcataggcataac

SEQ ID NO: 903811 - DNA, 33 bp, Homo sapien
atgtgtgtaatctatactataaagttgcctcta

SEQ ID NO: 903812 - DNA, 33 bp, Homo sapien
atgtgtgtaatctatattataaagttgcctcta

SEQ ID NO: 903813 - DNA, 33 bp, Homo sapien
ggaaacaaattattgaactagaatgggaatgga

SEQ ID NO: 903814 - DNA, 33 bp, Homo sapien
ggaaacaaattattgagctagaatgggaatgga

SEQ ID NO: 903815 - DNA, 33 bp, Homo sapien
aaggaacgcccttcaccgaggcagaaataaagg

SEQ ID NO: 903816 - DNA, 33 bp, Homo sapien
aaggaacgcccttcactgaggcagaaataaagg

SEQ ID NO: 903817 - DNA, 33 bp, Homo sapien
aagtaatagatgtggcaaggattccaaggaata

SEQ ID NO: 903818 - DNA, 33 bp, Homo sapien
aagtaatagatgtggcgaggattccaaggaata

SEQ ID NO: 903819 - DNA, 33 bp, Homo sapien
ttcaaaattgtagaaaacaagactttgatgttt

SEQ ID NO: 903820 - DNA, 33 bp, Homo sapien
ttcaaaattgtagaaagcaagactttgatgttt

SEQ ID NO: 903821 - DNA, 33 bp, Homo sapien
attaaagtgtgaattccgatttgaggatttata

SEQ ID NO: 903822 - DNA, 33 bp, Homo sapien
attaaagtgtgaattctgatttgaggatttata

SEQ ID NO: 903823 - DNA, 33 bp, Homo sapien
agaccctgtctgtaaagaaacaaatacgtattt

SEQ ID NO: 903824 - DNA, 33 bp, Homo sapien
agaccctgtctgtaaataaacaaatacgtattt

SEQ ID NO: 903825 - DNA, 33 bp, Homo sapien
cactcacacaatgtctaacagtactaaccagtg

SEQ ID NO: 903826 - DNA, 33 bp, Homo sapien
cactcacacaatgtctgacagtactaaccagtg

SEQ ID NO: 903827 - DNA, 33 bp, Homo sapien
tgatgggtagctaccacggtaaactagcaatgt

SEQ ID NO: 903828 - DNA, 33 bp, Homo sapien
tgatgggtagctaccatggtaaactagcaatgt

SEQ ID NO: 903829 - DNA, 33 bp, Homo sapien
tttaaaatgtattgcagagtttttggcttattt

SEQ ID NO: 903830 - DNA, 33 bp, Homo sapien
tttaaaatgtattgcatagtttttggcttattt

SEQ ID NO: 903831 - DNA, 33 bp, Homo sapien
tactaggtccatgctcactggtcatcactcggg

SEQ ID NO: 903832 - DNA, 33 bp, Homo sapien
tactaggtccatgctcgctggtcatcactcggg

SEQ ID NO: 903833 - DNA, 33 bp, Homo sapien
actgtctggtttattacgattctctggtatttg

SEQ ID NO: 903834 - DNA, 33 bp, Homo sapien
actgtctggtttattatgattctctggtatttg

SEQ ID NO: 903835 - DNA, 33 bp, Homo sapien
tttgtactaaatacaactgagataagtgaaagg

SEQ ID NO: 903836 - DNA, 33 bp, Homo sapien
tttgtactaaatacaagtgagataagtgaaagg

SEQ ID NO: 903837 - DNA, 33 bp, Homo sapien
tatgaccagaaactgacgacactcgctccagag

SEQ ID NO: 903838 - DNA, 33 bp, Homo sapien
tatgaccagaaactgatgacactcgctccagag

SEQ ID NO: 903839 - DNA, 33 bp, Homo sapien
gctgatgacagaagtcaatgttccagtcactga

SEQ ID NO: 903840 - DNA, 33 bp, Homo sapien
gctgatgacagaagtcgatgttccagtcactga

SEQ ID NO: 903841 - DNA, 33 bp, Homo sapien
tcaatttcttatcttcaaaatggcaataacaat

SEQ ID NO: 903842 - DNA, 33 bp, Homo sapien
tcaatttcttatcttccaaatggcaataacaat

SEQ ID NO: 903843 - DNA, 33 bp, Homo sapien
aacctgtactaagagaagccaggagagtatcta

SEQ ID NO: 903844 - DNA, 33 bp, Homo sapien
aacctgtactaagagaggccaggagagtatcta

SEQ ID NO: 903845 - DNA, 33 bp, Homo sapien
gcttaggcacactaaccggaggagaaatgctga

SEQ ID NO: 903846 - DNA, 33 bp, Homo sapien
gcttaggcacactaactggaggagaaatgctga

SEQ ID NO: 903847 - DNA, 33 bp, Homo sapien
attctgtaaagcatcacaccattcttcaagtgg

SEQ ID NO: 903848 - DNA, 33 bp, Homo sapien
attctgtaaagcatcataccattcttcaagtgg

SEQ ID NO: 903849 - DNA, 33 bp, Homo sapien
ttgcttactggctctccagtggtagttgctttc

SEQ ID NO: 903850 - DNA, 33 bp, Homo sapien
ttgcttactggctctctagtggtagttgctttc

SEQ ID NO: 903851 - DNA, 33 bp, Homo sapien
tgtatcttcagtctaccagcaatagatacctgt

SEQ ID NO: 903852 - DNA, 33 bp, Homo sapien
tgtatcttcagtctactagcaatagatacctgt

SEQ ID NO: 903853 - DNA, 33 bp, Homo sapien
agcctgatagagtaccaaatgaccacctgaagc

SEQ ID NO: 903854 - DNA, 33 bp, Homo sapien
agcctgatagagtaccgaatgaccacctgaagc

SEQ ID NO: 903855 - DNA, 33 bp, Homo sapien
agcagattctagaaaaaggagagagaaatcaga

SEQ ID NO: 903856 - DNA, 33 bp, Homo sapien
agcagattctagaaaagggagagagaaatcaga

SEQ ID NO: 903857 - DNA, 33 bp, Homo sapien
ttacatccagtggaaaactcagcctgtggtcca

SEQ ID NO: 903858 - DNA, 33 bp, Homo sapien
ttacatccagtggaaagctcagcctgtggtcca

SEQ ID NO: 903859 - DNA, 33 bp, Homo sapien
tacagtcacctacagaaactggttcttcctcac

SEQ ID NO: 903860 - DNA, 33 bp, Homo sapien
tacagtcacctacagagactggttcttcctcac

SEQ ID NO: 903861 - DNA, 33 bp, Homo sapien
tccttcatcctttttagccactggtgataagta

SEQ ID NO: 903862 - DNA, 33 bp, Homo sapien
tccttcatcctttttatccactggtgataagta

SEQ ID NO: 903863 - DNA, 33 bp, Homo sapien
cttcaggatacacacacgctttctagctcatgt

SEQ ID NO: 903864 - DNA, 33 bp, Homo sapien
cttcaggatacacacaggctttctagctcatgt

SEQ ID NO: 903865 - DNA, 33 bp, Homo sapien
ccagcaggtctgtaccagggttttgactgtggt

SEQ ID NO: 903866 - DNA, 33 bp, Homo sapien
ccagcaggtctgtaccggggttttgactgtggt

SEQ ID NO: 903867 - DNA, 33 bp, Homo sapien
tttcagaagtacaggaactaatccagtgttttt

SEQ ID NO: 903868 - DNA, 33 bp, Homo sapien
tttcagaagtacaggagctaatccagtgttttt

SEQ ID NO: 903869 - DNA, 33 bp, Homo sapien
gaattttttattaagcagcaaactgggtaggca

SEQ ID NO: 903870 - DNA, 33 bp, Homo sapien
gaattttttattaagcggcaaactgggtaggca

SEQ ID NO: 903871 - DNA, 33 bp, Homo sapien
tcagttcaaaacaacacatgaaaccaggataca

SEQ ID NO: 903872 - DNA, 33 bp, Homo sapien
tcagttcaaaacaacatatgaaaccaggataca

SEQ ID NO: 903873 - DNA, 33 bp, Homo sapien
taatgtctgtgttaaacgttttctaaccatttt

SEQ ID NO: 903874 - DNA, 33 bp, Homo sapien
taatgtctgtgttaaatgttttctaaccatttt

SEQ ID NO: 903875 - DNA, 33 bp, Homo sapien
gtgaaatcattctacagactcatgacggctgtg

SEQ ID NO: 903876 - DNA, 33 bp, Homo sapien
gtgaaatcattctacatactcatgacggctgtg

SEQ ID NO: 903877 - DNA, 33 bp, Homo sapien
gtccaccgtagtcctcaatcagggaaagtactg

SEQ ID NO: 903878 - DNA, 33 bp, Homo sapien
gtccaccgtagtcctcgatcagggaaagtactg

SEQ ID NO: 903879 - DNA, 33 bp, Homo sapien
gtgtaaagaggattcaagagagggacggactgc

SEQ ID NO: 903880 - DNA, 33 bp, Homo sapien
gtgtaaagaggattcaggagagggacggactgc

SEQ ID NO: 903881 - DNA, 33 bp, Homo sapien
agaaaagccaagtcccaacactgagcttcccga

SEQ ID NO: 903882 - DNA, 33 bp, Homo sapien
agaaaagccaagtcccgacactgagcttcccga

SEQ ID NO: 903883 - DNA, 33 bp, Homo sapien
gttctgctgcagtgaaacatagtccagctttcc

SEQ ID NO: 903884 - DNA, 33 bp, Homo sapien
gttctgctgcagtgaagcatagtccagctttcc

SEQ ID NO: 903885 - DNA, 33 bp, Homo sapien
tgacagttactgtgctaaacactgaaaaggcaa

SEQ ID NO: 903886 - DNA, 33 bp, Homo sapien
tgacagttactgtgctcaacactgaaaaggcaa

SEQ ID NO: 903887 - DNA, 33 bp, Homo sapien
caaaatctccatacacacaatatgagtatccac

SEQ ID NO: 903888 - DNA, 33 bp, Homo sapien
caaaatctccatacacgcaatatgagtatccac

SEQ ID NO: 903889 - DNA, 33 bp, Homo sapien
tggcacacaaatgaatgaatccctatagcctac

SEQ ID NO: 903890 - DNA, 33 bp, Homo sapien
tggcacacaaatgaattaatccctatagcctac

SEQ ID NO: 903891 - DNA, 33 bp, Homo sapien
gagtttgtggcatagacaagaacaaaattcagg

SEQ ID NO: 903892 - DNA, 33 bp, Homo sapien
gagtttgtggcatagataagaacaaaattcagg

SEQ ID NO: 903893 - DNA, 33 bp, Homo sapien
tcaatattctacttaaggtcttctggattttat

SEQ ID NO: 903894 - DNA, 33 bp, Homo sapien
tcaatattctacttaatgtcttctggattttat

SEQ ID NO: 903895 - DNA, 33 bp, Homo sapien
gagtagaggaactgtaacacattcatcctggta

SEQ ID NO: 903896 - DNA, 33 bp, Homo sapien
gagtagaggaactgtatcacattcatcctggta

SEQ ID NO: 903897 - DNA, 33 bp, Homo sapien
ttcttactaggagtaacggattttgtacttcat

SEQ ID NO: 903898 - DNA, 33 bp, Homo sapien
ttcttactaggagtaatggattttgtacttcat

SEQ ID NO: 903899 - DNA, 33 bp, Homo sapien
aagactcggtaaaagcaagcttgtaaacaaaga

SEQ ID NO: 903900 - DNA, 33 bp, Homo sapien
aagactcggtaaaagcgagcttgtaaacaaaga

SEQ ID NO: 903901 - DNA, 33 bp, Homo sapien
tacactgatgtataggcattggatcaggtagag

SEQ ID NO: 903902 - DNA, 33 bp, Homo sapien
tacactgatgtataggtattggatcaggtagag

SEQ ID NO: 903903 - DNA, 33 bp, Homo sapien
tagttctcagtaaggcccataaccagccaagcc

SEQ ID NO: 903904 - DNA, 33 bp, Homo sapien
tagttctcagtaaggcgcataaccagccaagcc

SEQ ID NO: 903905 - DNA, 33 bp, Homo sapien
tccactgtagcacataagggcagatcattctct

SEQ ID NO: 903906 - DNA, 33 bp, Homo sapien
tccactgtagcacataggggcagatcattctct

SEQ ID NO: 903907 - DNA, 33 bp, Homo sapien
cagcaggtaggacacccaggccgcacaggccag

SEQ ID NO: 903908 - DNA, 33 bp, Homo sapien
cagcaggtaggacaccgaggccgcacaggccag

SEQ ID NO: 903909 - DNA, 33 bp, Homo sapien
ttgtaggaaattgtggaatgaatacatgaacta

SEQ ID NO: 903910 - DNA, 33 bp, Homo sapien
ttgtaggaaattgtggcatgaatacatgaacta

SEQ ID NO: 903911 - DNA, 33 bp, Homo sapien
attggaatggtaagtaagagctgattacaatat

SEQ ID NO: 903912 - DNA, 33 bp, Homo sapien
attggaatggtaagtaggagctgattacaatat

SEQ ID NO: 903913 - DNA, 33 bp, Homo sapien
tgatttcaatccacagaacattcttaacccttc

SEQ ID NO: 903914 - DNA, 33 bp, Homo sapien
tgatttcaatccacaggacattcttaacccttc

SEQ ID NO: 903915 - DNA, 33 bp, Homo sapien
taactttctcaacagcaaaaggtacaggagaga

SEQ ID NO: 903916 - DNA, 33 bp, Homo sapien
taactttctcaacagcgaaaggtacaggagaga

SEQ ID NO: 903917 - DNA, 33 bp, Homo sapien
cacacagtgatagtcacaaagataacacacaaa

SEQ ID NO: 903918 - DNA, 33 bp, Homo sapien
cacacagtgatagtcagaaagataacacacaaa

SEQ ID NO: 903919 - DNA, 33 bp, Homo sapien
catgtctgtttttgcacgtgaaggtacaagcac

SEQ ID NO: 903920 - DNA, 33 bp, Homo sapien
catgtctgtttttgcatgtgaaggtacaagcac

SEQ ID NO: 903921 - DNA, 33 bp, Homo sapien
acactttctgtcaagcaaggaactatccacggt

SEQ ID NO: 903922 - DNA, 33 bp, Homo sapien
acactttctgtcaagccaggaactatccacggt

SEQ ID NO: 903923 - DNA, 33 bp, Homo sapien
gtagagacagtaagtagggcaaatctttttatc

SEQ ID NO: 903924 - DNA, 33 bp, Homo sapien
gtagagacagtaagtatggcaaatctttttatc

SEQ ID NO: 903925 - DNA, 33 bp, Homo sapien
ttcagcagctacaaacggtcttagtggaataca

SEQ ID NO: 903926 - DNA, 33 bp, Homo sapien
ttcagcagctacaaactgtcttagtggaataca

SEQ ID NO: 903927 - DNA, 33 bp, Homo sapien
ttctagcttgcgctcacattgagagttcctgtt

SEQ ID NO: 903928 - DNA, 33 bp, Homo sapien
ttctagcttgcgctcatattgagagttcctgtt

SEQ ID NO: 903929 - DNA, 33 bp, Homo sapien
gctgacacattagtctaaattcaaggtaagcta

SEQ ID NO: 903930 - DNA, 33 bp, Homo sapien
gctgacacattagtctcaattcaaggtaagcta

SEQ ID NO: 903931 - DNA, 33 bp, Homo sapien
tatatgtagtgtactgcagagtgtatgtagtga

SEQ ID NO: 903932 - DNA, 33 bp, Homo sapien
tatatgtagtgtactgtagagtgtatgtagtga

SEQ ID NO: 903933 - DNA, 33 bp, Homo sapien
atgatgctgttctctacgtcttgagcaaagttc

SEQ ID NO: 903934 - DNA, 33 bp, Homo sapien
atgatgctgttctctatgtcttgagcaaagttc

SEQ ID NO: 903935 - DNA, 33 bp, Homo sapien
aaaatgaaaaacgagcacttcttcagcttggaa

SEQ ID NO: 903936 - DNA, 33 bp, Homo sapien
aaaatgaaaaacgagcgcttcttcagcttggaa

SEQ ID NO: 903937 - DNA, 33 bp, Homo sapien
cattttgcaaggtttacgcagctatagcatttt

SEQ ID NO: 903938 - DNA, 33 bp, Homo sapien
cattttgcaaggtttaggcagctatagcatttt

SEQ ID NO: 903939 - DNA, 33 bp, Homo sapien
cacagtgtctgtcacaacataggtatttgacga

SEQ ID NO: 903940 - DNA, 33 bp, Homo sapien
cacagtgtctgtcacagcataggtatttgacga

SEQ ID NO: 903941 - DNA, 33 bp, Homo sapien
ccttgatataaaatgggattgaatggtgaaact

SEQ ID NO: 903942 - DNA, 33 bp, Homo sapien
ccttgatataaaatggtattgaatggtgaaact

SEQ ID NO: 903943 - DNA, 33 bp, Homo sapien
cagtatagctctctgcaaaaacatccctagttt

SEQ ID NO: 903944 - DNA, 33 bp, Homo sapien
cagtatagctctctgccaaaacatccctagttt

SEQ ID NO: 903945 - DNA, 33 bp, Homo sapien
cttgctaactttttgaatatgaagtaacagatt

SEQ ID NO: 903946 - DNA, 33 bp, Homo sapien
cttgctaactttttgagtatgaagtaacagatt

SEQ ID NO: 903947 - DNA, 33 bp, Homo sapien
gttctaacatggcttcccttctattgggtttac

SEQ ID NO: 903948 - DNA, 33 bp, Homo sapien
gttctaacatggcttctcttctattgggtttac

SEQ ID NO: 903949 - DNA, 33 bp, Homo sapien
gtttggctgacattcccatcaatcaagtgactt

SEQ ID NO: 903950 - DNA, 33 bp, Homo sapien
gtttggctgacattcctatcaatcaagtgactt

SEQ ID NO: 903951 - DNA, 33 bp, Homo sapien
ttaaaccaaaatcagaggtctttggtcaaatca

SEQ ID NO: 903952 - DNA, 33 bp, Homo sapien
ttaaaccaaaatcagatgtctttggtcaaatca

SEQ ID NO: 903953 - DNA, 33 bp, Homo sapien
gaaaatacaatggaacacccctcttccaattca

SEQ ID NO: 903954 - DNA, 33 bp, Homo sapien
gaaaatacaatggaactcccctcttccaattca

SEQ ID NO: 903955 - DNA, 33 bp, Homo sapien
ttatggatggggaaaccgaccttctccagtgtt

SEQ ID NO: 903956 - DNA, 33 bp, Homo sapien
ttatggatggggaaactgaccttctccagtgtt

SEQ ID NO: 903957 - DNA, 33 bp, Homo sapien
tccccatcagagcccaactgaataggtttgttg

SEQ ID NO: 903958 - DNA, 33 bp, Homo sapien
tccccatcagagcccagctgaataggtttgttg

SEQ ID NO: 903959 - DNA, 33 bp, Homo sapien
gcagtcttgcactctcaaaatgagtgtaggcca

SEQ ID NO: 903960 - DNA, 33 bp, Homo sapien
gcagtcttgcactctcgaaatgagtgtaggcca

SEQ ID NO: 903961 - DNA, 33 bp, Homo sapien
aaggccccaggtgacacaagtgaaggtggttca

SEQ ID NO: 903962 - DNA, 33 bp, Homo sapien
aaggccccaggtgacataagtgaaggtggttca

SEQ ID NO: 903963 - DNA, 33 bp, Homo sapien
gacaaaacacactttcaaaacagtctgacattc

SEQ ID NO: 903964 - DNA, 33 bp, Homo sapien
gacaaaacacactttcgaaacagtctgacattc

SEQ ID NO: 903965 - DNA, 33 bp, Homo sapien
tgaaagcctgagtcctaagcctgagttggggga

SEQ ID NO: 903966 - DNA, 33 bp, Homo sapien
tgaaagcctgagtcctgagcctgagttggggga

SEQ ID NO: 903967 - DNA, 33 bp, Homo sapien
atcctcatgcagcccgcagtttccatgctgctc

SEQ ID NO: 903968 - DNA, 33 bp, Homo sapien
atcctcatgcagcccgtagtttccatgctgctc

SEQ ID NO: 903969 - DNA, 33 bp, Homo sapien
agaaatacagaagtacagagcagtgtgaagaag

SEQ ID NO: 903970 - DNA, 33 bp, Homo sapien
agaaatacagaagtacggagcagtgtgaagaag

SEQ ID NO: 903971 - DNA, 33 bp, Homo sapien
atcaaaacactaatagaatccataaacacagac

SEQ ID NO: 903972 - DNA, 33 bp, Homo sapien
atcaaaacactaataggatccataaacacagac

SEQ ID NO: 903973 - DNA, 33 bp, Homo sapien
gagcaaacagaaactacagcccctgggccccac

SEQ ID NO: 903974 - DNA, 33 bp, Homo sapien
gagcaaacagaaactatagcccctgggccccac

SEQ ID NO: 903975 - DNA, 33 bp, Homo sapien
tttgtgtggatgactcaattcatctggaacaca

SEQ ID NO: 903976 - DNA, 33 bp, Homo sapien
tttgtgtggatgactcgattcatctggaacaca

SEQ ID NO: 903977 - DNA, 33 bp, Homo sapien
ttccctcttcgacttgaatcacacctccccacc

SEQ ID NO: 903978 - DNA, 33 bp, Homo sapien
ttccctcttcgacttggatcacacctccccacc

SEQ ID NO: 903979 - DNA, 33 bp, Homo sapien
ttaaaattaaaaggtaccaagtagccacaacaa

SEQ ID NO: 903980 - DNA, 33 bp, Homo sapien
ttaaaattaaaaggtatcaagtagccacaacaa

SEQ ID NO: 903981 - DNA, 33 bp, Homo sapien
acaatatcacttctggccaatttgtggttatac

SEQ ID NO: 903982 - DNA, 33 bp, Homo sapien
acaatatcacttctgggcaatttgtggttatac

SEQ ID NO: 903983 - DNA, 33 bp, Homo sapien
gtgtaattctctctccagaaatgtgaaaataga

SEQ ID NO: 903984 - DNA, 33 bp, Homo sapien
gtgtaattctctctccggaaatgtgaaaataga

SEQ ID NO: 903985 - DNA, 33 bp, Homo sapien
tcagtttaggcacaacacttgagaaataaataa

SEQ ID NO: 903986 - DNA, 33 bp, Homo sapien
tcagtttaggcacaacgcttgagaaataaataa

SEQ ID NO: 903987 - DNA, 33 bp, Homo sapien
ttccaggaaggaaaaaaataagccatctacaaa

SEQ ID NO: 903988 - DNA, 33 bp, Homo sapien
ttccaggaaggaaaaacataagccatctacaaa

SEQ ID NO: 903989 - DNA, 33 bp, Homo sapien
cattacaactccagaacgtgcttatatttttat

SEQ ID NO: 903990 - DNA, 33 bp, Homo sapien
cattacaactccagaatgtgcttatatttttat

SEQ ID NO: 903991 - DNA, 33 bp, Homo sapien
aaagccagtggaagaaatgttgtgatttgattt

SEQ ID NO: 903992 - DNA, 33 bp, Homo sapien
aaagccagtggaagaagtgttgtgatttgattt

SEQ ID NO: 903993 - DNA, 33 bp, Homo sapien
agactcttgcaggagagaaacaaacagctcctc

SEQ ID NO: 903994 - DNA, 33 bp, Homo sapien
agactcttgcaggagataaacaaacagctcctc

SEQ ID NO: 903995 - DNA, 33 bp, Homo sapien
gataggcctttaaacaaaagcaggatttgaagg

SEQ ID NO: 903996 - DNA, 33 bp, Homo sapien
gataggcctttaaacataagcaggatttgaagg

SEQ ID NO: 903997 - DNA, 33 bp, Homo sapien
cctggaacaggttagccgagtttggttattcat

SEQ ID NO: 903998 - DNA, 33 bp, Homo sapien
cctggaacaggttagctgagtttggttattcat

SEQ ID NO: 903999 - DNA, 33 bp, Homo sapien
agatcgcagcctctttaaaaatttgaactagag

SEQ ID NO: 904000 - DNA, 33 bp, Homo sapien
agatcgcagcctctttgaaaatttgaactagag

SEQ ID NO: 904001 - DNA, 33 bp, Homo sapien
ttgtacttctctcataagcatgggctaaatatt

SEQ ID NO: 904002 - DNA, 33 bp, Homo sapien
ttgtacttctctcatatgcatgggctaaatatt

SEQ ID NO: 904003 - DNA, 33 bp, Homo sapien
caattttatgggtatccctgtaaactatgaatc

SEQ ID NO: 904004 - DNA, 33 bp, Homo sapien
caattttatgggtatctctgtaaactatgaatc

SEQ ID NO: 904005 - DNA, 33 bp, Homo sapien
ttgtcttggtatcaaacgaaaaagtgctggtaa

SEQ ID NO: 904006 - DNA, 33 bp, Homo sapien
ttgtcttggtatcaaatgaaaaagtgctggtaa

SEQ ID NO: 904007 - DNA, 33 bp, Homo sapien
acactaaactgaggagacagactggaatgggaa

SEQ ID NO: 904008 - DNA, 33 bp, Homo sapien
acactaaactgaggagccagactggaatgggaa

SEQ ID NO: 904009 - DNA, 33 bp, Homo sapien
taagggcggaaaatgaagcagagtccacaatta

SEQ ID NO: 904010 - DNA, 33 bp, Homo sapien
taagggcggaaaatgaggcagagtccacaatta

SEQ ID NO: 904011 - DNA, 33 bp, Homo sapien
ttttgaacacatactaactgccagaaacagtgt

SEQ ID NO: 904012 - DNA, 33 bp, Homo sapien
ttttgaacacatactacctgccagaaacagtgt

SEQ ID NO: 904013 - DNA, 33 bp, Homo sapien
gctcctttttaactcaatattacctgtggtttt

SEQ ID NO: 904014 - DNA, 33 bp, Homo sapien
gctcctttttaactcagtattacctgtggtttt

SEQ ID NO: 904015 - DNA, 33 bp, Homo sapien
gaatgccacagaaaaacgactaagattgcttcc

SEQ ID NO: 904016 - DNA, 33 bp, Homo sapien
gaatgccacagaaaaatgactaagattgcttcc

SEQ ID NO: 904017 - DNA, 33 bp, Homo sapien
cgacatttccacttacaggcccattctgcgaca

SEQ ID NO: 904018 - DNA, 33 bp, Homo sapien
cgacatttccacttacgggcccattctgcgaca

SEQ ID NO: 904019 - DNA, 33 bp, Homo sapien
ctttcctgtggtcagccaggcttgaaaccgcac

SEQ ID NO: 904020 - DNA, 33 bp, Homo sapien
ctttcctgtggtcagcgaggcttgaaaccgcac

SEQ ID NO: 904021 - DNA, 33 bp, Homo sapien
ttcaaggttgaggaaactgaaataaattttccc

SEQ ID NO: 904022 - DNA, 33 bp, Homo sapien
ttcaaggttgaggaaagtgaaataaattttccc

SEQ ID NO: 904023 - DNA, 33 bp, Homo sapien
aacccgaggtccaagaccaactcaagacaaatg

SEQ ID NO: 904024 - DNA, 33 bp, Homo sapien
aacccgaggtccaagagcaactcaagacaaatg

SEQ ID NO: 904025 - DNA, 33 bp, Homo sapien
ttcagttttaaattgaacctgagggagatatat

SEQ ID NO: 904026 - DNA, 33 bp, Homo sapien
ttcagttttaaattgatcctgagggagatatat

SEQ ID NO: 904027 - DNA, 33 bp, Homo sapien
cactgatttgtatgagccaacctgctattctta

SEQ ID NO: 904028 - DNA, 33 bp, Homo sapien
cactgatttgtatgagtcaacctgctattctta

SEQ ID NO: 904029 - DNA, 33 bp, Homo sapien
atagttttacagaactcagaaatggtaacaagt

SEQ ID NO: 904030 - DNA, 33 bp, Homo sapien
atagttttacagaactgagaaatggtaacaagt

SEQ ID NO: 904031 - DNA, 33 bp, Homo sapien
cttacctcaaacccagccaagcggaaatcagag

SEQ ID NO: 904032 - DNA, 33 bp, Homo sapien
cttacctcaaacccagtcaagcggaaatcagag

SEQ ID NO: 904033 - DNA, 33 bp, Homo sapien
cctctgaaacctggaaaagaaatttctcccttg

SEQ ID NO: 904034 - DNA, 33 bp, Homo sapien
cctctgaaacctggaagagaaatttctcccttg

SEQ ID NO: 904035 - DNA, 33 bp, Homo sapien
tgctcacctcatgcccactgtgagcgagtttcc

SEQ ID NO: 904036 - DNA, 33 bp, Homo sapien
tgctcacctcatgcccgctgtgagcgagtttcc

SEQ ID NO: 904037 - DNA, 33 bp, Homo sapien
ccatctattgacataccgatccaaatactgaaa

SEQ ID NO: 904038 - DNA, 33 bp, Homo sapien
ccatctattgacatacggatccaaatactgaaa

SEQ ID NO: 904039 - DNA, 33 bp, Homo sapien
ctatccagcttgctccaataatcactttttgtg

SEQ ID NO: 904040 - DNA, 33 bp, Homo sapien
ctatccagcttgctccgataatcactttttgtg

SEQ ID NO: 904041 - DNA, 33 bp, Homo sapien
tggatagaatttgagtaacctctatgatgcttg

SEQ ID NO: 904042 - DNA, 33 bp, Homo sapien
tggatagaatttgagtcacctctatgatgcttg

SEQ ID NO: 904043 - DNA, 33 bp, Homo sapien
aaaaattactctactacatccgtttgaagatta

SEQ ID NO: 904044 - DNA, 33 bp, Homo sapien
aaaaattactctactatatccgtttgaagatta

SEQ ID NO: 904045 - DNA, 33 bp, Homo sapien
tacaggaaaccaaccaagtaatttacatttcct

SEQ ID NO: 904046 - DNA, 33 bp, Homo sapien
tacaggaaaccaaccacgtaatttacatttcct

SEQ ID NO: 904047 - DNA, 33 bp, Homo sapien
ttaatgataagttagaacagagtgttaagcacc

SEQ ID NO: 904048 - DNA, 33 bp, Homo sapien
ttaatgataagttagaccagagtgttaagcacc

SEQ ID NO: 904049 - DNA, 33 bp, Homo sapien
tggcctccagtttaaacttgcacttcttttgtt

SEQ ID NO: 904050 - DNA, 33 bp, Homo sapien
tggcctccagtttaaatttgcacttcttttgtt

SEQ ID NO: 904051 - DNA, 33 bp, Homo sapien
acatatgaaccagaaagaccccaagtagccaaa

SEQ ID NO: 904052 - DNA, 33 bp, Homo sapien
acatatgaaccagaaataccccaagtagccaaa

SEQ ID NO: 904053 - DNA, 33 bp, Homo sapien
aacaaagaaggaagtaggctacaacatggatga

SEQ ID NO: 904054 - DNA, 33 bp, Homo sapien
aacaaagaaggaagtatgctacaacatggatga

SEQ ID NO: 904055 - DNA, 33 bp, Homo sapien
atcccctttataaccacctaagcagtagaggaa

SEQ ID NO: 904056 - DNA, 33 bp, Homo sapien
atcccctttataaccatctaagcagtagaggaa

SEQ ID NO: 904057 - DNA, 33 bp, Homo sapien
tccctcaagactcatcaaacgctggagtaatgt

SEQ ID NO: 904058 - DNA, 33 bp, Homo sapien
tccctcaagactcatcgaacgctggagtaatgt

SEQ ID NO: 904059 - DNA, 33 bp, Homo sapien
cattttcctgatgggagatttgtggcccagagg

SEQ ID NO: 904060 - DNA, 33 bp, Homo sapien
cattttcctgatgggatatttgtggcccagagg

SEQ ID NO: 904061 - DNA, 33 bp, Homo sapien
aaaaacatgaacttcaaaagtacatctccaagt

SEQ ID NO: 904062 - DNA, 33 bp, Homo sapien
aaaaacatgaacttcagaagtacatctccaagt

SEQ ID NO: 904063 - DNA, 33 bp, Homo sapien
caaagttagttattggccacttcctttccagct

SEQ ID NO: 904064 - DNA, 33 bp, Homo sapien
caaagttagttattggtcacttcctttccagct

SEQ ID NO: 904065 - DNA, 33 bp, Homo sapien
ttgtaggatgagatgaaccctaaaggactgctg

SEQ ID NO: 904066 - DNA, 33 bp, Homo sapien
ttgtaggatgagatgatccctaaaggactgctg

SEQ ID NO: 904067 - DNA, 33 bp, Homo sapien
gcagaagaatgaatgcaccatttccctttttag

SEQ ID NO: 904068 - DNA, 33 bp, Homo sapien
gcagaagaatgaatgcgccatttccctttttag

SEQ ID NO: 904069 - DNA, 33 bp, Homo sapien
agaatggttatttttcaaagggaagaatatcat

SEQ ID NO: 904070 - DNA, 33 bp, Homo sapien
agaatggttatttttcgaagggaagaatatcat

SEQ ID NO: 904071 - DNA, 33 bp, Homo sapien
gcttgacatccccagcagaagaaggaattctcc

SEQ ID NO: 904072 - DNA, 33 bp, Homo sapien
gcttgacatccccagcggaagaaggaattctcc

SEQ ID NO: 904073 - DNA, 33 bp, Homo sapien
tcacctgatgatcctgaagcatcagcgtgtcct

SEQ ID NO: 904074 - DNA, 33 bp, Homo sapien
tcacctgatgatcctgcagcatcagcgtgtcct

SEQ ID NO: 904075 - DNA, 33 bp, Homo sapien
gctgatttcctcaagacaccacattctccaaac

SEQ ID NO: 904076 - DNA, 33 bp, Homo sapien
gctgatttcctcaagataccacattctccaaac

SEQ ID NO: 904077 - DNA, 33 bp, Homo sapien
attgaaacgatgcatgaaaaagagctttggaaa

SEQ ID NO: 904078 - DNA, 33 bp, Homo sapien
attgaaacgatgcatgtaaaagagctttggaaa

SEQ ID NO: 904079 - DNA, 33 bp, Homo sapien
aatgcacttatgcagacagcaattataaaagcc

SEQ ID NO: 904080 - DNA, 33 bp, Homo sapien
aatgcacttatgcagatagcaattataaaagcc

SEQ ID NO: 904081 - DNA, 33 bp, Homo sapien
tcaaggccacaaaaggcagcctataaatctcat

SEQ ID NO: 904082 - DNA, 33 bp, Homo sapien
tcaaggccacaaaaggtagcctataaatctcat

SEQ ID NO: 904083 - DNA, 33 bp, Homo sapien
tttgttacaagcaagcacaagtggaattcagct

SEQ ID NO: 904084 - DNA, 33 bp, Homo sapien
tttgttacaagcaagcccaagtggaattcagct

SEQ ID NO: 904085 - DNA, 33 bp, Homo sapien
ataatggctgtatttcacaaccagctcacagaa

SEQ ID NO: 904086 - DNA, 33 bp, Homo sapien
ataatggctgtatttcgcaaccagctcacagaa

SEQ ID NO: 904087 - DNA, 33 bp, Homo sapien
gaattcgtgttggaaacatgatgtctggatacc

SEQ ID NO: 904088 - DNA, 33 bp, Homo sapien
gaattcgtgttggaaagatgatgtctggatacc

SEQ ID NO: 904089 - DNA, 33 bp, Homo sapien
tcatatatgaactcaaagcaattccaatcaaaa

SEQ ID NO: 904090 - DNA, 33 bp, Homo sapien
tcatatatgaactcaatgcaattccaatcaaaa

SEQ ID NO: 904091 - DNA, 33 bp, Homo sapien
actgtaaataaggcaccgaactaatgattctga

SEQ ID NO: 904092 - DNA, 33 bp, Homo sapien
actgtaaataaggcactgaactaatgattctga

SEQ ID NO: 904093 - DNA, 33 bp, Homo sapien
attttttaaaattagccaactatgaataaaata

SEQ ID NO: 904094 - DNA, 33 bp, Homo sapien
attttttaaaattagcgaactatgaataaaata

SEQ ID NO: 904095 - DNA, 33 bp, Homo sapien
gggcacgtggtagtcagagcttcaagttcaaag

SEQ ID NO: 904096 - DNA, 33 bp, Homo sapien
gggcacgtggtagtcatagcttcaagttcaaag

SEQ ID NO: 904097 - DNA, 33 bp, Homo sapien
ctactgtacacttcttaaacaagatgctcttag

SEQ ID NO: 904098 - DNA, 33 bp, Homo sapien
ctactgtacacttcttgaacaagatgctcttag

SEQ ID NO: 904099 - DNA, 33 bp, Homo sapien
ttagaaagacaaacaaatctgggcacagaaaag

SEQ ID NO: 904100 - DNA, 33 bp, Homo sapien
ttagaaagacaaacaattctgggcacagaaaag

SEQ ID NO: 904101 - DNA, 33 bp, Homo sapien
cttgtcctcagaaacaataatcatctgggttaa

SEQ ID NO: 904102 - DNA, 33 bp, Homo sapien
cttgtcctcagaaacattaatcatctgggttaa

SEQ ID NO: 904103 - DNA, 33 bp, Homo sapien
gggaaaaaggagaacacgacatcaagggagcac

SEQ ID NO: 904104 - DNA, 33 bp, Homo sapien
gggaaaaaggagaacatgacatcaagggagcac

SEQ ID NO: 904105 - DNA, 33 bp, Homo sapien
tcattggacttgaaaccatacccctatccccca

SEQ ID NO: 904106 - DNA, 33 bp, Homo sapien
tcattggacttgaaactatacccctatccccca

SEQ ID NO: 904107 - DNA, 33 bp, Homo sapien
agaactaccaaaggaaaataccaggaaagccaa

SEQ ID NO: 904108 - DNA, 33 bp, Homo sapien
agaactaccaaaggaacataccaggaaagccaa

SEQ ID NO: 904109 - DNA, 33 bp, Homo sapien
ctatggtaactaaaacaatatgatactggtaaa

SEQ ID NO: 904110 - DNA, 33 bp, Homo sapien
ctatggtaactaaaactatatgatactggtaaa

SEQ ID NO: 904111 - DNA, 33 bp, Homo sapien
ggtttgacccagagaaacaaaatgaattagaca

SEQ ID NO: 904112 - DNA, 33 bp, Homo sapien
ggtttgacccagagaagcaaaatgaattagaca

SEQ ID NO: 904113 - DNA, 33 bp, Homo sapien
aagtgcttctatctaaaccttaagaagtcagac

SEQ ID NO: 904114 - DNA, 33 bp, Homo sapien
aagtgcttctatctaagccttaagaagtcagac

SEQ ID NO: 904115 - DNA, 33 bp, Homo sapien
agattgtaggaaaaacggctgtttgcattcttc

SEQ ID NO: 904116 - DNA, 33 bp, Homo sapien
agattgtaggaaaaactgctgtttgcattcttc

SEQ ID NO: 904117 - DNA, 33 bp, Homo sapien
aatagtcattctgtgaaatattaacaagtgctt

SEQ ID NO: 904118 - DNA, 33 bp, Homo sapien
aatagtcattctgtgagatattaacaagtgctt

SEQ ID NO: 904119 - DNA, 33 bp, Homo sapien
ctgaaattgaacccaaccatctttagagctttc

SEQ ID NO: 904120 - DNA, 33 bp, Homo sapien
ctgaaattgaacccaagcatctttagagctttc

SEQ ID NO: 904121 - DNA, 33 bp, Homo sapien
aaaagtatgctactccaagtcacagactacctc

SEQ ID NO: 904122 - DNA, 33 bp, Homo sapien
aaaagtatgctactccgagtcacagactacctc

SEQ ID NO: 904123 - DNA, 33 bp, Homo sapien
tgcaccacaccagaaaataggtggaggccgcag

SEQ ID NO: 904124 - DNA, 33 bp, Homo sapien
tgcaccacaccagaaagtaggtggaggccgcag

SEQ ID NO: 904125 - DNA, 33 bp, Homo sapien
cagtcaggaaaacagtaacaggcccagaacagc

SEQ ID NO: 904126 - DNA, 33 bp, Homo sapien
cagtcaggaaaacagtgacaggcccagaacagc

SEQ ID NO: 904127 - DNA, 33 bp, Homo sapien
cccaaactcacccgtgaacacaaacaacagggc

SEQ ID NO: 904128 - DNA, 33 bp, Homo sapien
cccaaactcacccgtggacacaaacaacagggc

SEQ ID NO: 904129 - DNA, 33 bp, Homo sapien
tagacaaaaagttctacggaagtcgaaatgtca

SEQ ID NO: 904130 - DNA, 33 bp, Homo sapien
tagacaaaaagttctatggaagtcgaaatgtca

SEQ ID NO: 904131 - DNA, 33 bp, Homo sapien
tttctcaaacacgtcaaaactatatcattttaa

SEQ ID NO: 904132 - DNA, 33 bp, Homo sapien
tttctcaaacacgtcagaactatatcattttaa

SEQ ID NO: 904133 - DNA, 33 bp, Homo sapien
taatactcaaatcataaaaaataaaagcctagg

SEQ ID NO: 904134 - DNA, 33 bp, Homo sapien
taatactcaaatcatagaaaataaaagcctagg

SEQ ID NO: 904135 - DNA, 33 bp, Homo sapien
tatgatttgagtattacatttaggatctgtact

SEQ ID NO: 904136 - DNA, 33 bp, Homo sapien
tatgatttgagtattagatttaggatctgtact

SEQ ID NO: 904137 - DNA, 33 bp, Homo sapien
cttctagtgcagtgtgaagaacgaattagagag

SEQ ID NO: 904138 - DNA, 33 bp, Homo sapien
cttctagtgcagtgtggagaacgaattagagag

SEQ ID NO: 904139 - DNA, 33 bp, Homo sapien
tttattgagctgtaatgaaacattagagtattc

SEQ ID NO: 904140 - DNA, 33 bp, Homo sapien
tttattgagctgtaattaaacattagagtattc

SEQ ID NO: 904141 - DNA, 33 bp, Homo sapien
taattggtcacacataagcaaccagatctttta

SEQ ID NO: 904142 - DNA, 33 bp, Homo sapien
taattggtcacacataggcaaccagatctttta

SEQ ID NO: 904143 - DNA, 33 bp, Homo sapien
atttgatatattcatcacattgatcgttcaaga

SEQ ID NO: 904144 - DNA, 33 bp, Homo sapien
atttgatatattcatctcattgatcgttcaaga

SEQ ID NO: 904145 - DNA, 33 bp, Homo sapien
aaataaagcaaaaacaataacaggatatggttt

SEQ ID NO: 904146 - DNA, 33 bp, Homo sapien
aaataaagcaaaaacagtaacaggatatggttt

SEQ ID NO: 904147 - DNA, 33 bp, Homo sapien
aaaccactttgtaagcccctgataagcctatgt

SEQ ID NO: 904148 - DNA, 33 bp, Homo sapien
aaaccactttgtaagctcctgataagcctatgt

SEQ ID NO: 904149 - DNA, 33 bp, Homo sapien
accatgtgttgtgctaaatgctgactatacaac

SEQ ID NO: 904150 - DNA, 33 bp, Homo sapien
accatgtgttgtgctagatgctgactatacaac

SEQ ID NO: 904151 - DNA, 33 bp, Homo sapien
caaggcaagtgaatccccccattgtcataacct

SEQ ID NO: 904152 - DNA, 33 bp, Homo sapien
caaggcaagtgaatcctcccattgtcataacct

SEQ ID NO: 904153 - DNA, 33 bp, Homo sapien
tgccctggaaatgtgcaagggaagagctagcaa

SEQ ID NO: 904154 - DNA, 33 bp, Homo sapien
tgccctggaaatgtgcgagggaagagctagcaa

SEQ ID NO: 904155 - DNA, 33 bp, Homo sapien
gtacactgaactcaagacatttgttttgttttg

SEQ ID NO: 904156 - DNA, 33 bp, Homo sapien
gtacactgaactcaaggcatttgttttgttttg

SEQ ID NO: 904157 - DNA, 33 bp, Homo sapien
acaaagtcagaagcacaaaattgttagtatgcc

SEQ ID NO: 904158 - DNA, 33 bp, Homo sapien
acaaagtcagaagcacgaaattgttagtatgcc

SEQ ID NO: 904159 - DNA, 33 bp, Homo sapien
catgtcatccacaaataaagagctgattcagaa

SEQ ID NO: 904160 - DNA, 33 bp, Homo sapien
catgtcatccacaaattaagagctgattcagaa

SEQ ID NO: 904161 - DNA, 33 bp, Homo sapien
tacttaatatggattacgttttgatagcacaaa

SEQ ID NO: 904162 - DNA, 33 bp, Homo sapien
tacttaatatggattatgttttgatagcacaaa

SEQ ID NO: 904163 - DNA, 33 bp, Homo sapien
tgtaatctgtagactcactgcgtttgcatagta

SEQ ID NO: 904164 - DNA, 33 bp, Homo sapien
tgtaatctgtagactccctgcgtttgcatagta

SEQ ID NO: 904165 - DNA, 33 bp, Homo sapien
aggctttccgtaaacacggctcattctcagagc

SEQ ID NO: 904166 - DNA, 33 bp, Homo sapien
aggctttccgtaaacatggctcattctcagagc

SEQ ID NO: 904167 - DNA, 33 bp, Homo sapien
atcttggctgagatcacctacattcatggctgg

SEQ ID NO: 904168 - DNA, 33 bp, Homo sapien
atcttggctgagatcatctacattcatggctgg

SEQ ID NO: 904169 - DNA, 33 bp, Homo sapien
tgttggctggggtgaccggggtgactgatctct

SEQ ID NO: 904170 - DNA, 33 bp, Homo sapien
tgttggctggggtgactggggtgactgatctct

SEQ ID NO: 904171 - DNA, 33 bp, Homo sapien
gtcctaagaactggcaaacagaaagataaataa

SEQ ID NO: 904172 - DNA, 33 bp, Homo sapien
gtcctaagaactggcagacagaaagataaataa

SEQ ID NO: 904173 - DNA, 33 bp, Homo sapien
agtttaattatgagaaaaatatcaggcatcatg

SEQ ID NO: 904174 - DNA, 33 bp, Homo sapien
agtttaattatgagaacaatatcaggcatcatg

SEQ ID NO: 904175 - DNA, 33 bp, Homo sapien
ccaaaataattaagcaccttcttagcaggttta

SEQ ID NO: 904176 - DNA, 33 bp, Homo sapien
ccaaaataattaagcagcttcttagcaggttta

SEQ ID NO: 904177 - DNA, 33 bp, Homo sapien
gcagtggcttcctgaacggagtattacagagct

SEQ ID NO: 904178 - DNA, 33 bp, Homo sapien
gcagtggcttcctgaatggagtattacagagct

SEQ ID NO: 904179 - DNA, 33 bp, Homo sapien
gaaaagaaaacaatgcaacaaaaaagagaggga

SEQ ID NO: 904180 - DNA, 33 bp, Homo sapien
gaaaagaaaacaatgcgacaaaaaagagaggga

SEQ ID NO: 904181 - DNA, 33 bp, Homo sapien
taatggaaattatccaatataaatggcacagag

SEQ ID NO: 904182 - DNA, 33 bp, Homo sapien
taatggaaattatccagtataaatggcacagag

SEQ ID NO: 904183 - DNA, 33 bp, Homo sapien
ctttactgctgccttgaatatgtgttcttttta

SEQ ID NO: 904184 - DNA, 33 bp, Homo sapien
ctttactgctgccttgcatatgtgttcttttta

SEQ ID NO: 904185 - DNA, 33 bp, Homo sapien
gaaaacaagaaaataaatcaatggttttgagga

SEQ ID NO: 904186 - DNA, 33 bp, Homo sapien
gaaaacaagaaaataagtcaatggttttgagga

SEQ ID NO: 904187 - DNA, 33 bp, Homo sapien
agaagcagagagaagcgaataggtggaagccac

SEQ ID NO: 904188 - DNA, 33 bp, Homo sapien
agaagcagagagaagctaataggtggaagccac

SEQ ID NO: 904189 - DNA, 33 bp, Homo sapien
caagtagctgagagccagaaagggagagcacgc

SEQ ID NO: 904190 - DNA, 33 bp, Homo sapien
caagtagctgagagccggaaagggagagcacgc

SEQ ID NO: 904191 - DNA, 33 bp, Homo sapien
aagtgagagaaagagaaaagggataggattctc

SEQ ID NO: 904192 - DNA, 33 bp, Homo sapien
aagtgagagaaagagagaagggataggattctc

SEQ ID NO: 904193 - DNA, 33 bp, Homo sapien
aagagcctgtggatcaagtctccgaggaaggca

SEQ ID NO: 904194 - DNA, 33 bp, Homo sapien
aagagcctgtggatcacgtctccgaggaaggca

SEQ ID NO: 904195 - DNA, 33 bp, Homo sapien
gccccatcctggcacacaatcaagagcctgtgg

SEQ ID NO: 904196 - DNA, 33 bp, Homo sapien
gccccatcctggcacagaatcaagagcctgtgg

SEQ ID NO: 904197 - DNA, 33 bp, Homo sapien
aagacacacaagatgaagatgctagaaaagctc

SEQ ID NO: 904198 - DNA, 33 bp, Homo sapien
aagacacacaagatgaggatgctagaaaagctc

SEQ ID NO: 904199 - DNA, 33 bp, Homo sapien
acttagcttcccaaacaggatcattctaaagcc

SEQ ID NO: 904200 - DNA, 33 bp, Homo sapien
acttagcttcccaaacgggatcattctaaagcc

SEQ ID NO: 904201 - DNA, 33 bp, Homo sapien
tgaggaccccccaggaaagaaacagttttgaga

SEQ ID NO: 904202 - DNA, 33 bp, Homo sapien
tgaggaccccccaggagagaaacagttttgaga

SEQ ID NO: 904203 - DNA, 33 bp, Homo sapien
catagacaaattcatacacacatctctcatttc

SEQ ID NO: 904204 - DNA, 33 bp, Homo sapien
catagacaaattcatatacacatctctcatttc

SEQ ID NO: 904205 - DNA, 33 bp, Homo sapien
aaggaaaaggatgctaacagggaagaaagagcc

SEQ ID NO: 904206 - DNA, 33 bp, Homo sapien
aaggaaaaggatgctatcagggaagaaagagcc

SEQ ID NO: 904207 - DNA, 33 bp, Homo sapien
aatattagtagatacaatgcaaaccagagcttc

SEQ ID NO: 904208 - DNA, 33 bp, Homo sapien
aatattagtagatacagtgcaaaccagagcttc

SEQ ID NO: 904209 - DNA, 33 bp, Homo sapien
tttcttaatagttccaagtttagactcattttc

SEQ ID NO: 904210 - DNA, 33 bp, Homo sapien
tttcttaatagttccatgtttagactcattttc

SEQ ID NO: 904211 - DNA, 33 bp, Homo sapien
caaactcaacattttcaaatctttctggtcatt

SEQ ID NO: 904212 - DNA, 33 bp, Homo sapien
caaactcaacattttccaatctttctggtcatt

SEQ ID NO: 904213 - DNA, 33 bp, Homo sapien
tcatctatcaatcatcaattttttgtggaaaag

SEQ ID NO: 904214 - DNA, 33 bp, Homo sapien
tcatctatcaatcatcgattttttgtggaaaag

SEQ ID NO: 904215 - DNA, 33 bp, Homo sapien
taccaaaactcagcaacatcagttgtaccaatc

SEQ ID NO: 904216 - DNA, 33 bp, Homo sapien
taccaaaactcagcaatatcagttgtaccaatc

SEQ ID NO: 904217 - DNA, 33 bp, Homo sapien
ctgctttataacataggaacaactttttgagag

SEQ ID NO: 904218 - DNA, 33 bp, Homo sapien
ctgctttataacatagtaacaactttttgagag

SEQ ID NO: 904219 - DNA, 33 bp, Homo sapien
ggtagtcacttagtgaatatgtgttgaatgaac

SEQ ID NO: 904220 - DNA, 33 bp, Homo sapien
ggtagtcacttagtgagtatgtgttgaatgaac

SEQ ID NO: 904221 - DNA, 33 bp, Homo sapien
acagccaaatcatatcagaacataaatagtttt

SEQ ID NO: 904222 - DNA, 33 bp, Homo sapien
acagccaaatcatatcggaacataaatagtttt

SEQ ID NO: 904223 - DNA, 33 bp, Homo sapien
aaattcctcatctccacgtgtgaccaactcaac

SEQ ID NO: 904224 - DNA, 33 bp, Homo sapien
aaattcctcatctccatgtgtgaccaactcaac

SEQ ID NO: 904225 - DNA, 33 bp, Homo sapien
gccaatgtacagctcacgtctttgccacagaga

SEQ ID NO: 904226 - DNA, 33 bp, Homo sapien
gccaatgtacagctcaggtctttgccacagaga

SEQ ID NO: 904227 - DNA, 33 bp, Homo sapien
ggacacaaagatggacacaaaatagacactgcg

SEQ ID NO: 904228 - DNA, 33 bp, Homo sapien
ggacacaaagatggacgcaaaatagacactgcg

SEQ ID NO: 904229 - DNA, 33 bp, Homo sapien
ctgatgtgtctttggtaaattgttccagccttt

SEQ ID NO: 904230 - DNA, 33 bp, Homo sapien
ctgatgtgtctttggtgaattgttccagccttt

SEQ ID NO: 904231 - DNA, 33 bp, Homo sapien
aacaaaagcaaccttaataactccaaatatggt

SEQ ID NO: 904232 - DNA, 33 bp, Homo sapien
aacaaaagcaaccttagtaactccaaatatggt

SEQ ID NO: 904233 - DNA, 33 bp, Homo sapien
aatgctcatgatatatcaagtcaaaacaatgta

SEQ ID NO: 904234 - DNA, 33 bp, Homo sapien
aatgctcatgatatatgaagtcaaaacaatgta

SEQ ID NO: 904235 - DNA, 33 bp, Homo sapien
cattcacctgtcgataacatttgcattgttcct

SEQ ID NO: 904236 - DNA, 33 bp, Homo sapien
cattcacctgtcgatagcatttgcattgttcct

SEQ ID NO: 904237 - DNA, 33 bp, Homo sapien
agtaatgtgcttaagaatatgagttttcaagtt

SEQ ID NO: 904238 - DNA, 33 bp, Homo sapien
agtaatgtgcttaagagtatgagttttcaagtt

SEQ ID NO: 904239 - DNA, 33 bp, Homo sapien
tattatgaggagactaaggaattatgattacac

SEQ ID NO: 904240 - DNA, 33 bp, Homo sapien
tattatgaggagactagggaattatgattacac

SEQ ID NO: 904241 - DNA, 33 bp, Homo sapien
acaagcacaacttaacagcccctcagggaatgg

SEQ ID NO: 904242 - DNA, 33 bp, Homo sapien
acaagcacaacttaactgcccctcagggaatgg

SEQ ID NO: 904243 - DNA, 33 bp, Homo sapien
gggtgcttgtaacataggaatcacgtccattat

SEQ ID NO: 904244 - DNA, 33 bp, Homo sapien
gggtgcttgtaacatatgaatcacgtccattat

SEQ ID NO: 904245 - DNA, 33 bp, Homo sapien
tgtagactcaatgagaaagacaaatccccattg

SEQ ID NO: 904246 - DNA, 33 bp, Homo sapien
tgtagactcaatgagagagacaaatccccattg

SEQ ID NO: 904247 - DNA, 33 bp, Homo sapien
cacacacacacagacacgtaaacacacgcacaa

SEQ ID NO: 904248 - DNA, 33 bp, Homo sapien
cacacacacacagacatgtaaacacacgcacaa

SEQ ID NO: 904249 - DNA, 33 bp, Homo sapien
gagccagcaggggatgcacaggcagctccactg

SEQ ID NO: 904250 - DNA, 33 bp, Homo sapien
gagccagcaggggatgtacaggcagctccactg

SEQ ID NO: 904251 - DNA, 33 bp, Homo sapien
accatagcacaagtcaataagtgagtaaaacaa

SEQ ID NO: 904252 - DNA, 33 bp, Homo sapien
accatagcacaagtcagtaagtgagtaaaacaa

SEQ ID NO: 904253 - DNA, 33 bp, Homo sapien
cctggggaagatatgcacatttggaagaatatg

SEQ ID NO: 904254 - DNA, 33 bp, Homo sapien
cctggggaagatatgcgcatttggaagaatatg

SEQ ID NO: 904255 - DNA, 33 bp, Homo sapien
taacttttttttcatcaaagagaagcctctctg

SEQ ID NO: 904256 - DNA, 33 bp, Homo sapien
taacttttttttcatcgaagagaagcctctctg

SEQ ID NO: 904257 - DNA, 33 bp, Homo sapien
caaactttgactggaacttatgccatcaactct

SEQ ID NO: 904258 - DNA, 33 bp, Homo sapien
caaactttgactggaagttatgccatcaactct

SEQ ID NO: 904259 - DNA, 33 bp, Homo sapien
ttatttgtgtattgcactagttctgtgactgct

SEQ ID NO: 904260 - DNA, 33 bp, Homo sapien
ttatttgtgtattgcattagttctgtgactgct

SEQ ID NO: 904261 - DNA, 33 bp, Homo sapien
tctttatattgccttcgcctctacttagcctaa

SEQ ID NO: 904262 - DNA, 33 bp, Homo sapien
tctttatattgccttctcctctacttagcctaa

SEQ ID NO: 904263 - DNA, 33 bp, Homo sapien
agcagcctcctagtggaactttcttacctgctc

SEQ ID NO: 904264 - DNA, 33 bp, Homo sapien
agcagcctcctagtggcactttcttacctgctc

SEQ ID NO: 904265 - DNA, 33 bp, Homo sapien
aagtaaaaggaccagcaacgggcctcggggttc

SEQ ID NO: 904266 - DNA, 33 bp, Homo sapien
aagtaaaaggaccagcgacgggcctcggggttc

SEQ ID NO: 904267 - DNA, 33 bp, Homo sapien
taactgcaacattataacatctcagtcaaaaaa

SEQ ID NO: 904268 - DNA, 33 bp, Homo sapien
taactgcaacattatagcatctcagtcaaaaaa

SEQ ID NO: 904269 - DNA, 33 bp, Homo sapien
gccagctctctcccaagggtcacttatcccatg

SEQ ID NO: 904270 - DNA, 33 bp, Homo sapien
gccagctctctcccaatggtcacttatcccatg

SEQ ID NO: 904271 - DNA, 33 bp, Homo sapien
cgtgtcctttatctgccacactgcgttgaatta

SEQ ID NO: 904272 - DNA, 33 bp, Homo sapien
cgtgtcctttatctgctacactgcgttgaatta

SEQ ID NO: 904273 - DNA, 33 bp, Homo sapien
ggtgaatggatcctggcacccaacagacctagt

SEQ ID NO: 904274 - DNA, 33 bp, Homo sapien
ggtgaatggatcctggtacccaacagacctagt

SEQ ID NO: 904275 - DNA, 33 bp, Homo sapien
tccttccttgatatccaagaattcccaatttag

SEQ ID NO: 904276 - DNA, 33 bp, Homo sapien
tccttccttgatatccgagaattcccaatttag

SEQ ID NO: 904277 - DNA, 33 bp, Homo sapien
agctacctgcagaaaagaagtcactgtctggag

SEQ ID NO: 904278 - DNA, 33 bp, Homo sapien
agctacctgcagaaaataagtcactgtctggag

SEQ ID NO: 904279 - DNA, 33 bp, Homo sapien
agacatctgttgactgcagttggcttattcttt

SEQ ID NO: 904280 - DNA, 33 bp, Homo sapien
agacatctgttgactggagttggcttattcttt

SEQ ID NO: 904281 - DNA, 33 bp, Homo sapien
ctaataataaaaaccaacattctctggctccat

SEQ ID NO: 904282 - DNA, 33 bp, Homo sapien
ctaataataaaaaccagcattctctggctccat

SEQ ID NO: 904283 - DNA, 33 bp, Homo sapien
aaaagaaaatagcctacggttagttgtaagtgt

SEQ ID NO: 904284 - DNA, 33 bp, Homo sapien
aaaagaaaatagcctagggttagttgtaagtgt

SEQ ID NO: 904285 - DNA, 33 bp, Homo sapien
agaaataattaacagaaagcagagataacttat

SEQ ID NO: 904286 - DNA, 33 bp, Homo sapien
agaaataattaacagagagcagagataacttat

SEQ ID NO: 904287 - DNA, 33 bp, Homo sapien
ctaagagggtaaacttcaaatgttctcaccacg

SEQ ID NO: 904288 - DNA, 33 bp, Homo sapien
ctaagagggtaaacttgaaatgttctcaccacg

SEQ ID NO: 904289 - DNA, 33 bp, Homo sapien
agctgataagaaagatcagtataagctcatttt

SEQ ID NO: 904290 - DNA, 33 bp, Homo sapien
agctgataagaaagattagtataagctcatttt

SEQ ID NO: 904291 - DNA, 33 bp, Homo sapien
ggttatggcatatgtaaaacaggaaagcatttt

SEQ ID NO: 904292 - DNA, 33 bp, Homo sapien
ggttatggcatatgtacaacaggaaagcatttt

SEQ ID NO: 904293 - DNA, 33 bp, Homo sapien
caaatctgtcagaagacataattgaaaaatttt

SEQ ID NO: 904294 - DNA, 33 bp, Homo sapien
caaatctgtcagaagatataattgaaaaatttt

SEQ ID NO: 904295 - DNA, 33 bp, Homo sapien
atattcaccttctccacgtacttgtaaaactgg

SEQ ID NO: 904296 - DNA, 33 bp, Homo sapien
atattcaccttctccatgtacttgtaaaactgg

SEQ ID NO: 904297 - DNA, 33 bp, Homo sapien
aagcagtattgctcacaagatgcacaagctgcc

SEQ ID NO: 904298 - DNA, 33 bp, Homo sapien
aagcagtattgctcacgagatgcacaagctgcc

SEQ ID NO: 904299 - DNA, 33 bp, Homo sapien
tctaaggacagagtgaaaattgaatgcagggat

SEQ ID NO: 904300 - DNA, 33 bp, Homo sapien
tctaaggacagagtgagaattgaatgcagggat

SEQ ID NO: 904301 - DNA, 33 bp, Homo sapien
acctacacccagccatcatctgtgacaactgcc

SEQ ID NO: 904302 - DNA, 33 bp, Homo sapien
acctacacccagccatgatctgtgacaactgcc

SEQ ID NO: 904303 - DNA, 33 bp, Homo sapien
cattcaagatgcagcccattaaactactgtgtg

SEQ ID NO: 904304 - DNA, 33 bp, Homo sapien
cattcaagatgcagcctattaaactactgtgtg

SEQ ID NO: 904305 - DNA, 33 bp, Homo sapien
gtgtgtcttaaaatcacgaaattcaccaagact

SEQ ID NO: 904306 - DNA, 33 bp, Homo sapien
gtgtgtcttaaaatcaggaaattcaccaagact

SEQ ID NO: 904307 - DNA, 33 bp, Homo sapien
tctgaccataagtttaccaatagtctatcctga

SEQ ID NO: 904308 - DNA, 33 bp, Homo sapien
tctgaccataagtttatcaatagtctatcctga

SEQ ID NO: 904309 - DNA, 33 bp, Homo sapien
tttttctgtggtgatcaaactggaggactctaa

SEQ ID NO: 904310 - DNA, 33 bp, Homo sapien
tttttctgtggtgatcgaactggaggactctaa

SEQ ID NO: 904311 - DNA, 33 bp, Homo sapien
tgaacatatttgagcaaggaaaagtaaaagttt

SEQ ID NO: 904312 - DNA, 33 bp, Homo sapien
tgaacatatttgagcatggaaaagtaaaagttt

SEQ ID NO: 904313 - DNA, 33 bp, Homo sapien
ctcattttcgttacacaagggggcacataatat

SEQ ID NO: 904314 - DNA, 33 bp, Homo sapien
ctcattttcgttacacgagggggcacataatat

SEQ ID NO: 904315 - DNA, 33 bp, Homo sapien
tacaatttacatttccggaacaactttcctggc

SEQ ID NO: 904316 - DNA, 33 bp, Homo sapien
tacaatttacatttcctgaacaactttcctggc

SEQ ID NO: 904317 - DNA, 33 bp, Homo sapien
ggtattgatcagtgaaatcctagggtgctctat

SEQ ID NO: 904318 - DNA, 33 bp, Homo sapien
ggtattgatcagtgaagtcctagggtgctctat

SEQ ID NO: 904319 - DNA, 33 bp, Homo sapien
attagctccattgctgaaacaactaacatggtg

SEQ ID NO: 904320 - DNA, 33 bp, Homo sapien
attagctccattgctggaacaactaacatggtg

SEQ ID NO: 904321 - DNA, 33 bp, Homo sapien
gtacaagataacatccaacttctcttattacaa

SEQ ID NO: 904322 - DNA, 33 bp, Homo sapien
gtacaagataacatccgacttctcttattacaa

SEQ ID NO: 904323 - DNA, 33 bp, Homo sapien
gaactcgaggtcattacgttaagcaaaataagc

SEQ ID NO: 904324 - DNA, 33 bp, Homo sapien
gaactcgaggtcattatgttaagcaaaataagc

SEQ ID NO: 904325 - DNA, 33 bp, Homo sapien
gagaagggaagaagaaatgaaggaagttggtta

SEQ ID NO: 904326 - DNA, 33 bp, Homo sapien
gagaagggaagaagaactgaaggaagttggtta

SEQ ID NO: 904327 - DNA, 33 bp, Homo sapien
agtttacttctgattacgagaggctagaaacaa

SEQ ID NO: 904328 - DNA, 33 bp, Homo sapien
agtttacttctgattatgagaggctagaaacaa

SEQ ID NO: 904329 - DNA, 33 bp, Homo sapien
atattaatcttatcaactgtttaaagcttcttt

SEQ ID NO: 904330 - DNA, 33 bp, Homo sapien
atattaatcttatcaagtgtttaaagcttcttt

SEQ ID NO: 904331 - DNA, 33 bp, Homo sapien
gcatgcaatttggaggaaggacaggaagaaagc

SEQ ID NO: 904332 - DNA, 33 bp, Homo sapien
gcatgcaatttggaggtaggacaggaagaaagc

SEQ ID NO: 904333 - DNA, 33 bp, Homo sapien
actcccacttggtcacgactcaaactctcaagg

SEQ ID NO: 904334 - DNA, 33 bp, Homo sapien
actcccacttggtcactactcaaactctcaagg

SEQ ID NO: 904335 - DNA, 33 bp, Homo sapien
ctcataaggtatacaaacagtcatatttgccca

SEQ ID NO: 904336 - DNA, 33 bp, Homo sapien
ctcataaggtatacaagcagtcatatttgccca

SEQ ID NO: 904337 - DNA, 33 bp, Homo sapien
taaaagtcttaccttacggtcaaactaatagac

SEQ ID NO: 904338 - DNA, 33 bp, Homo sapien
taaaagtcttaccttatggtcaaactaatagac

SEQ ID NO: 904339 - DNA, 33 bp, Homo sapien
tttttcttgttttagacgatcggtctcttgatt

SEQ ID NO: 904340 - DNA, 33 bp, Homo sapien
tttttcttgttttagatgatcggtctcttgatt

SEQ ID NO: 904341 - DNA, 33 bp, Homo sapien
atcagttgaaggcctgaatggaccaaaagacta

SEQ ID NO: 904342 - DNA, 33 bp, Homo sapien
atcagttgaaggcctgcatggaccaaaagacta

SEQ ID NO: 904343 - DNA, 33 bp, Homo sapien
gaaggctggcaaggccaaagtctgcagagctca

SEQ ID NO: 904344 - DNA, 33 bp, Homo sapien
gaaggctggcaaggccgaagtctgcagagctca

SEQ ID NO: 904345 - DNA, 33 bp, Homo sapien
ccacttctcattacccaaccttctgtgaccaca

SEQ ID NO: 904346 - DNA, 33 bp, Homo sapien
ccacttctcattacccgaccttctgtgaccaca

SEQ ID NO: 904347 - DNA, 33 bp, Homo sapien
tggggttgtataataacgttggaagcctaggag

SEQ ID NO: 904348 - DNA, 33 bp, Homo sapien
tggggttgtataataatgttggaagcctaggag

SEQ ID NO: 904349 - DNA, 33 bp, Homo sapien
tcttggctttggctccggatattccatcagtcc

SEQ ID NO: 904350 - DNA, 33 bp, Homo sapien
tcttggctttggctcctgatattccatcagtcc

SEQ ID NO: 904351 - DNA, 33 bp, Homo sapien
cccaactgtaaacagtcaatttggtgtgccatc

SEQ ID NO: 904352 - DNA, 33 bp, Homo sapien
cccaactgtaaacagtgaatttggtgtgccatc

SEQ ID NO: 904353 - DNA, 33 bp, Homo sapien
ggctcctcttaccaacagtgtgaaaggagtcaa

SEQ ID NO: 904354 - DNA, 33 bp, Homo sapien
ggctcctcttaccaactgtgtgaaaggagtcaa

SEQ ID NO: 904355 - DNA, 33 bp, Homo sapien
tatacttaatgtctgagattagagaaacataaa

SEQ ID NO: 904356 - DNA, 33 bp, Homo sapien
tatacttaatgtctgatattagagaaacataaa

SEQ ID NO: 904357 - DNA, 33 bp, Homo sapien
tagaaggagatttacaaacctaggcattcctta

SEQ ID NO: 904358 - DNA, 33 bp, Homo sapien
tagaaggagatttacagacctaggcattcctta

SEQ ID NO: 904359 - DNA, 33 bp, Homo sapien
tcttctaaagacagacaaattcttagtgttttt

SEQ ID NO: 904360 - DNA, 33 bp, Homo sapien
tcttctaaagacagacgaattcttagtgttttt

SEQ ID NO: 904361 - DNA, 33 bp, Homo sapien
tagaagaatgctttcaatctggattggccttgc

SEQ ID NO: 904362 - DNA, 33 bp, Homo sapien
tagaagaatgctttcagtctggattggccttgc

SEQ ID NO: 904363 - DNA, 33 bp, Homo sapien
caaaaggttgatagtgaaagacagtgtagggat

SEQ ID NO: 904364 - DNA, 33 bp, Homo sapien
caaaaggttgatagtggaagacagtgtagggat

SEQ ID NO: 904365 - DNA, 33 bp, Homo sapien
ctggtaaaagcacctcaaattctcttgggagaa

SEQ ID NO: 904366 - DNA, 33 bp, Homo sapien
ctggtaaaagcacctcgaattctcttgggagaa

SEQ ID NO: 904367 - DNA, 33 bp, Homo sapien
cccatggtgctgacagccgaaggtagaatgctg

SEQ ID NO: 904368 - DNA, 33 bp, Homo sapien
cccatggtgctgacagtcgaaggtagaatgctg

SEQ ID NO: 904369 - DNA, 33 bp, Homo sapien
ggtcgggctgccttgacgtcagtattttcagat

SEQ ID NO: 904370 - DNA, 33 bp, Homo sapien
ggtcgggctgccttgaggtcagtattttcagat

SEQ ID NO: 904371 - DNA, 33 bp, Homo sapien
aaaaaaaaagctgaaccaggtcatgtattatgc

SEQ ID NO: 904372 - DNA, 33 bp, Homo sapien
aaaaaaaaagctgaactaggtcatgtattatgc

SEQ ID NO: 904373 - DNA, 33 bp, Homo sapien
gtcagtatagcttccacataaaatctgtgattg

SEQ ID NO: 904374 - DNA, 33 bp, Homo sapien
gtcagtatagcttccatataaaatctgtgattg

SEQ ID NO: 904375 - DNA, 33 bp, Homo sapien
agttttaaacatttggcaaaagtctgcatcaga

SEQ ID NO: 904376 - DNA, 33 bp, Homo sapien
agttttaaacatttggtaaaagtctgcatcaga

SEQ ID NO: 904377 - DNA, 33 bp, Homo sapien
tttctagcatagaagtaaaccttttttaactat

SEQ ID NO: 904378 - DNA, 33 bp, Homo sapien
tttctagcatagaagtgaaccttttttaactat

SEQ ID NO: 904379 - DNA, 33 bp, Homo sapien
cagtccaaaatcatgaacagatactcgactcaa

SEQ ID NO: 904380 - DNA, 33 bp, Homo sapien
cagtccaaaatcatgagcagatactcgactcaa

SEQ ID NO: 904381 - DNA, 33 bp, Homo sapien
gattttggactgcttgcatttcttctctgggga

SEQ ID NO: 904382 - DNA, 33 bp, Homo sapien
gattttggactgcttgtatttcttctctgggga

SEQ ID NO: 904383 - DNA, 33 bp, Homo sapien
gtggctggttctgatacaagatacaattgacat

SEQ ID NO: 904384 - DNA, 33 bp, Homo sapien
gtggctggttctgatataagatacaattgacat

SEQ ID NO: 904385 - DNA, 33 bp, Homo sapien
aaatgagtccttaaaccgtgtgctaaaagaggt

SEQ ID NO: 904386 - DNA, 33 bp, Homo sapien
aaatgagtccttaaactgtgtgctaaaagaggt

SEQ ID NO: 904387 - DNA, 33 bp, Homo sapien
atttgattctcacaagcccaagtcaggaaatat

SEQ ID NO: 904388 - DNA, 33 bp, Homo sapien
atttgattctcacaaggccaagtcaggaaatat

SEQ ID NO: 904389 - DNA, 33 bp, Homo sapien
atattctgtggtgatagcagtcccctggagagt

SEQ ID NO: 904390 - DNA, 33 bp, Homo sapien
atattctgtggtgatatcagtcccctggagagt

SEQ ID NO: 904391 - DNA, 33 bp, Homo sapien
gtggcaggaactcaaaacaccaggcgaggctat

SEQ ID NO: 904392 - DNA, 33 bp, Homo sapien
gtggcaggaactcaaagcaccaggcgaggctat

SEQ ID NO: 904393 - DNA, 33 bp, Homo sapien
acgttctttaagacccacgcctgtcagagctgt

SEQ ID NO: 904394 - DNA, 33 bp, Homo sapien
acgttctttaagacccgcgcctgtcagagctgt

SEQ ID NO: 904395 - DNA, 33 bp, Homo sapien
accagctatctcattcaaaaaatgaattcaaag

SEQ ID NO: 904396 - DNA, 33 bp, Homo sapien
accagctatctcattcgaaaaatgaattcaaag

SEQ ID NO: 904397 - DNA, 33 bp, Homo sapien
ttctttcctgctgggactatttctgatcacagg

SEQ ID NO: 904398 - DNA, 33 bp, Homo sapien
ttctttcctgctgggattatttctgatcacagg

SEQ ID NO: 904399 - DNA, 33 bp, Homo sapien
tgaccagagattccaacgggtgataggaaaatt

SEQ ID NO: 904400 - DNA, 33 bp, Homo sapien
tgaccagagattccaatgggtgataggaaaatt

SEQ ID NO: 904401 - DNA, 33 bp, Homo sapien
gattttcacatttacacccttgttctactttat

SEQ ID NO: 904402 - DNA, 33 bp, Homo sapien
gattttcacatttacatccttgttctactttat

SEQ ID NO: 904403 - DNA, 33 bp, Homo sapien
tgtaaatgtgaaaatcacccctgtggagcaaga

SEQ ID NO: 904404 - DNA, 33 bp, Homo sapien
tgtaaatgtgaaaatctcccctgtggagcaaga

SEQ ID NO: 904405 - DNA, 33 bp, Homo sapien
gccatggaggctataaaaggaagaatcactgct

SEQ ID NO: 904406 - DNA, 33 bp, Homo sapien
gccatggaggctataagaggaagaatcactgct

SEQ ID NO: 904407 - DNA, 33 bp, Homo sapien; identical to SEQ ID NO: 904405

SEQ ID NO: 904408 - DNA, 33 bp, Homo sapien; identical to SEQ ID NO: 904406

SEQ ID NO: 904409 - DNA, 33 bp, Homo sapien
tgcttttctcaagcaaatcggtttcttgatgtc

SEQ ID NO: 904410 - DNA, 33 bp, Homo sapien
tgcttttctcaagcaagtcggtttcttgatgtc

SEQ ID NO: 904411 - DNA, 33 bp, Homo sapien
ttgggtggtgagttaaagtggataaatagggac

SEQ ID NO: 904412 - DNA, 33 bp, Homo sapien
ttgggtggtgagttaaggtggataaatagggac

SEQ ID NO: 904413 - DNA, 33 bp, Homo sapien
ttgtatttttaccatcaagagtgaaacaactat

SEQ ID NO: 904414 - DNA, 33 bp, Homo sapien
ttgtatttttaccatcgagagtgaaacaactat

SEQ ID NO: 904415 - DNA, 33 bp, Homo sapien
ttcaagttaactgttaagtaaaatatgttcaat

SEQ ID NO: 904416 - DNA, 33 bp, Homo sapien
ttcaagttaactgttatgtaaaatatgttcaat

SEQ ID NO: 904417 - DNA, 33 bp, Homo sapien
aattgcaaaaatacccactaagcatcaccagag

SEQ ID NO: 904418 - DNA, 33 bp, Homo sapien
aattgcaaaaataccccctaagcatcaccagag

SEQ ID NO: 904419 - DNA, 33 bp, Homo sapien
ggaaattggtttgctacgtgagttggacaaagg

SEQ ID NO: 904420 - DNA, 33 bp, Homo sapien
ggaaattggtttgctatgtgagttggacaaagg

SEQ ID NO: 904421 - DNA, 33 bp, Homo sapien
ataatgcccatgcaacagaatcttccacctttt

SEQ ID NO: 904422 - DNA, 33 bp, Homo sapien
ataatgcccatgcaaccgaatcttccacctttt

SEQ ID NO: 904423 - DNA, 33 bp, Homo sapien
gagatttatgtttctcaaactgctctgacttga

SEQ ID NO: 904424 - DNA, 33 bp, Homo sapien
gagatttatgtttctccaactgctctgacttga

SEQ ID NO: 904425 - DNA, 33 bp, Homo sapien
cacaaggaattatgaagaacggtaaagaaaaaa

SEQ ID NO: 904426 - DNA, 33 bp, Homo sapien
cacaaggaattatgaataacggtaaagaaaaaa

SEQ ID NO: 904427 - DNA, 33 bp, Homo sapien
ttttataaatgtcatacatcacagtaccatttg

SEQ ID NO: 904428 - DNA, 33 bp, Homo sapien
ttttataaatgtcatatatcacagtaccatttg

SEQ ID NO: 904429 - DNA, 33 bp, Homo sapien
ttgtcaaaatcaaatacgtcacaataaaatatg

SEQ ID NO: 904430 - DNA, 33 bp, Homo sapien
ttgtcaaaatcaaatatgtcacaataaaatatg

SEQ ID NO: 904431 - DNA, 33 bp, Homo sapien
tgctttgtctttggacattttcacctttaacca

SEQ ID NO: 904432 - DNA, 33 bp, Homo sapien
tgctttgtctttggacgttttcacctttaacca

SEQ ID NO: 904433 - DNA, 33 bp, Homo sapien
agggacccaaggtcaacggcaggtacactcagt

SEQ ID NO: 904434 - DNA, 33 bp, Homo sapien
agggacccaaggtcaatggcaggtacactcagt

SEQ ID NO: 904435 - DNA, 33 bp, Homo sapien
cacaaatgaacacttgaaaaaggacggagtcag

SEQ ID NO: 904436 - DNA, 33 bp, Homo sapien
cacaaatgaacacttgcaaaaggacggagtcag

SEQ ID NO: 904437 - DNA, 33 bp, Homo sapien
agaacaaactcatatacacgcacgccttgcatt

SEQ ID NO: 904438 - DNA, 33 bp, Homo sapien
agaacaaactcatatatacgcacgccttgcatt

SEQ ID NO: 904439 - DNA, 33 bp, Homo sapien
atgtaattgctttgggacatcatgaactgcaca

SEQ ID NO: 904440 - DNA, 33 bp, Homo sapien
atgtaattgctttggggcatcatgaactgcaca

SEQ ID NO: 904441 - DNA, 33 bp, Homo sapien
cagcaaattgtccagaagatccaggtaagatca

SEQ ID NO: 904442 - DNA, 33 bp, Homo sapien
cagcaaattgtccagaggatccaggtaagatca

SEQ ID NO: 904443 - DNA, 33 bp, Homo sapien
actaattatattttccaaagatggacacagcta

SEQ ID NO: 904444 - DNA, 33 bp, Homo sapien
actaattatattttccgaagatggacacagcta

SEQ ID NO: 904445 - DNA, 33 bp, Homo sapien
ccatgatcaccaaaggcagaataatatgtcaag

SEQ ID NO: 904446 - DNA, 33 bp, Homo sapien
ccatgatcaccaaaggtagaataatatgtcaag

SEQ ID NO: 904447 - DNA, 33 bp, Homo sapien
gaacttgtctgggagcccttttattgacttgtg

SEQ ID NO: 904448 - DNA, 33 bp, Homo sapien
gaacttgtctgggagctcttttattgacttgtg

SEQ ID NO: 904449 - DNA, 33 bp, Homo sapien
cacagtagtcttgccaaaatgatgtttgggtta

SEQ ID NO: 904450 - DNA, 33 bp, Homo sapien
cacagtagtcttgccagaatgatgtttgggtta

SEQ ID NO: 904451 - DNA, 33 bp, Homo sapien
tgttaaagcaaatctaactgaaatcaattggtc

SEQ ID NO: 904452 - DNA, 33 bp, Homo sapien
tgttaaagcaaatctatctgaaatcaattggtc

SEQ ID NO: 904453 - DNA, 33 bp, Homo sapien
tggaggaaactttcacgacctagaaatgcaaag

SEQ ID NO: 904454 - DNA, 33 bp, Homo sapien
tggaggaaactttcactacctagaaatgcaaag

SEQ ID NO: 904455 - DNA, 33 bp, Homo sapien
acgaatctgctgttacacctgtaagattgttgt

SEQ ID NO: 904456 - DNA, 33 bp, Homo sapien
acgaatctgctgttacgcctgtaagattgttgt

SEQ ID NO: 904457 - DNA, 33 bp, Homo sapien
tgttcattcgcaaaccggggctttgtgctaggc

SEQ ID NO: 904458 - DNA, 33 bp, Homo sapien
tgttcattcgcaaacctgggctttgtgctaggc

SEQ ID NO: 904459 - DNA, 33 bp, Homo sapien
gggagctttgtttatacggaccactacctctgt

SEQ ID NO: 904460 - DNA, 33 bp, Homo sapien
gggagctttgtttatagggaccactacctctgt

SEQ ID NO: 904461 - DNA, 33 bp, Homo sapien
catagcccgtggtgtacgcttcctttcggcatt

SEQ ID NO: 904462 - DNA, 33 bp, Homo sapien
catagcccgtggtgtatgcttcctttcggcatt

SEQ ID NO: 904463 - DNA, 33 bp, Homo sapien
tctctctctgtctctcacacaggctgaacatat

SEQ ID NO: 904464 - DNA, 33 bp, Homo sapien
tctctctctgtctctcgcacaggctgaacatat

SEQ ID NO: 904465 - DNA, 33 bp, Homo sapien
tgcaacccctgctaccactattttccagccacc

SEQ ID NO: 904466 - DNA, 33 bp, Homo sapien
tgcaacccctgctacctctattttccagccacc

SEQ ID NO: 904467 - DNA, 33 bp, Homo sapien
attccacctatcaagactcatttaaggctaggc

SEQ ID NO: 904468 - DNA, 33 bp, Homo sapien
attccacctatcaagattcatttaaggctaggc

SEQ ID NO: 904469 - DNA, 33 bp, Homo sapien
ttctgaaaatttaacaatcttctctcacaaggc

SEQ ID NO: 904470 - DNA, 33 bp, Homo sapien
ttctgaaaatttaacagtcttctctcacaaggc

SEQ ID NO: 904471 - DNA, 33 bp, Homo sapien
tgctcaaagatcaagaacaagataatcgtcata

SEQ ID NO: 904472 - DNA, 33 bp, Homo sapien
tgctcaaagatcaagagcaagataatcgtcata

SEQ ID NO: 904473 - DNA, 33 bp, Homo sapien
cctcacaaggtaagccactcctgtcatcaggac

SEQ ID NO: 904474 - DNA, 33 bp, Homo sapien
cctcacaaggtaagccgctcctgtcatcaggac

SEQ ID NO: 904475 - DNA, 33 bp, Homo sapien
gtgttgggtaaataacactgaatttccttgatt

SEQ ID NO: 904476 - DNA, 33 bp, Homo sapien
gtgttgggtaaataactctgaatttccttgatt

SEQ ID NO: 904477 - DNA, 33 bp, Homo sapien
tgagaaatgctctaaccatcccaaatggggcag

SEQ ID NO: 904478 - DNA, 33 bp, Homo sapien
tgagaaatgctctaactatcccaaatggggcag

SEQ ID NO: 904479 - DNA, 33 bp, Homo sapien
atatcaaatcccaaaccggagtctgtctcaagt

SEQ ID NO: 904480 - DNA, 33 bp, Homo sapien
atatcaaatcccaaactggagtctgtctcaagt

SEQ ID NO: 904481 - DNA, 33 bp, Homo sapien
aatagctacaaagccaacaagatgggaaacctt

SEQ ID NO: 904482 - DNA, 33 bp, Homo sapien
aatagctacaaagccagcaagatgggaaacctt

SEQ ID NO: 904483 - DNA, 33 bp, Homo sapien
aaggctagagtttgtaacatttgaacttttatc

SEQ ID NO: 904484 - DNA, 33 bp, Homo sapien
aaggctagagtttgtatcatttgaacttttatc

SEQ ID NO: 904485 - DNA, 33 bp, Homo sapien
tggtgttttcacatgacgtggattcactgaatt

SEQ ID NO: 904486 - DNA, 33 bp, Homo sapien
tggtgttttcacatgatgtggattcactgaatt

SEQ ID NO: 904487 - DNA, 33 bp, Homo sapien
ccttgtgggcacattacgagggagttgtgtagc

SEQ ID NO: 904488 - DNA, 33 bp, Homo sapien
ccttgtgggcacattatgagggagttgtgtagc

SEQ ID NO: 904489 - DNA, 33 bp, Homo sapien
attaagagggccctgacagatgatgccgtcagc

SEQ ID NO: 904490 - DNA, 33 bp, Homo sapien
attaagagggccctgatagatgatgccgtcagc

SEQ ID NO: 904491 - DNA, 33 bp, Homo sapien
ctgacaactaggcaatcaatctgttcttaaaag

SEQ ID NO: 904492 - DNA, 33 bp, Homo sapien
ctgacaactaggcaatgaatctgttcttaaaag

SEQ ID NO: 904493 - DNA, 33 bp, Homo sapien
gacaatggaagaaatacgcaggaaaacttggtt

SEQ ID NO: 904494 - DNA, 33 bp, Homo sapien
gacaatggaagaaatatgcaggaaaacttggtt

SEQ ID NO: 904495 - DNA, 33 bp, Homo sapien
atctataggtaaatataactagcagttggccag

SEQ ID NO: 904496 - DNA, 33 bp, Homo sapien
atctataggtaaatatcactagcagttggccag

SEQ ID NO: 904497 - DNA, 33 bp, Homo sapien
acaggtaagtaattgcagaaaatgcagataaga

SEQ ID NO: 904498 - DNA, 33 bp, Homo sapien
acaggtaagtaattgcggaaaatgcagataaga

SEQ ID NO: 904499 - DNA, 33 bp, Homo sapien
gcttttagatgcttcaataaaattcctgtttcc

SEQ ID NO: 904500 - DNA, 33 bp, Homo sapien
gcttttagatgcttcagtaaaattcctgtttcc

SEQ ID NO: 904501 - DNA, 33 bp, Homo sapien
taacccgaccatccacactcttcttttttacta

SEQ ID NO: 904502 - DNA, 33 bp, Homo sapien
taacccgaccatccacgctcttcttttttacta

SEQ ID NO: 904503 - DNA, 33 bp, Homo sapien
gaatgatgcaaaggagacataaacctgaattaa

SEQ ID NO: 904504 - DNA, 33 bp, Homo sapien
gaatgatgcaaaggagccataaacctgaattaa

SEQ ID NO: 904505 - DNA, 33 bp, Homo sapien
aaaatgtcacaattacacttgtttgtttgttta

SEQ ID NO: 904506 - DNA, 33 bp, Homo sapien
aaaatgtcacaattactcttgtttgtttgttta

SEQ ID NO: 904507 - DNA, 33 bp, Homo sapien
ggtggtgccctggttacgggaagaggcacagtg

SEQ ID NO: 904508 - DNA, 33 bp, Homo sapien
ggtggtgccctggttatgggaagaggcacagtg

SEQ ID NO: 904509 - DNA, 33 bp, Homo sapien
acactcggctttgttacgccaccaggtgggtaa

SEQ ID NO: 904510 - DNA, 33 bp, Homo sapien
acactcggctttgttatgccaccaggtgggtaa

SEQ ID NO: 904511 - DNA, 33 bp, Homo sapien
gactcagaatgccaacactgtgctttctcaggc

SEQ ID NO: 904512 - DNA, 33 bp, Homo sapien
gactcagaatgccaacgctgtgctttctcaggc

SEQ ID NO: 904513 - DNA, 33 bp, Homo sapien
aaataacttccaaatccgaaattgtctgtgaat

SEQ ID NO: 904514 - DNA, 33 bp, Homo sapien
aaataacttccaaatctgaaattgtctgtgaat

SEQ ID NO: 904515 - DNA, 33 bp, Homo sapien
atcagaaaggtctaataaagcttacagaaacag

SEQ ID NO: 904516 - DNA, 33 bp, Homo sapien
atcagaaaggtctaatgaagcttacagaaacag

SEQ ID NO: 904517 - DNA, 33 bp, Homo sapien
ttccctttaatagtcacggtcagggatttatag

SEQ ID NO: 904518 - DNA, 33 bp, Homo sapien
ttccctttaatagtcagggtcagggatttatag

SEQ ID NO: 904519 - DNA, 33 bp, Homo sapien
catgcaatgagaaatacaccagtatggggaccc

SEQ ID NO: 904520 - DNA, 33 bp, Homo sapien
catgcaatgagaaatataccagtatggggaccc

SEQ ID NO: 904521 - DNA, 33 bp, Homo sapien
tcaaagccactctacacacaaaatgaatctctt

SEQ ID NO: 904522 - DNA, 33 bp, Homo sapien
tcaaagccactctacatacaaaatgaatctctt

SEQ ID NO: 904523 - DNA, 33 bp, Homo sapien
tcaactgcaactgggaaaagcaactaccaattg

SEQ ID NO: 904524 - DNA, 33 bp, Homo sapien
tcaactgcaactgggagaagcaactaccaattg

SEQ ID NO: 904525 - DNA, 33 bp, Homo sapien
ctttgctagtagtttcaatcttgtcttcttttt

SEQ ID NO: 904526 - DNA, 33 bp, Homo sapien
ctttgctagtagtttcgatcttgtcttcttttt

SEQ ID NO: 904527 - DNA, 33 bp, Homo sapien
caaagctgtttatcacacattattctagttgat

SEQ ID NO: 904528 - DNA, 33 bp, Homo sapien
caaagctgtttatcacgcattattctagttgat

SEQ ID NO: 904529 - DNA, 33 bp, Homo sapien
aggcaaagcagactaacggtgctgggagtcact

SEQ ID NO: 904530 - DNA, 33 bp, Homo sapien
aggcaaagcagactaatggtgctgggagtcact

SEQ ID NO: 904531 - DNA, 33 bp, Homo sapien
tcctaaatggcctctcaataaaaactctttgta

SEQ ID NO: 904532 - DNA, 33 bp, Homo sapien
tcctaaatggcctctcgataaaaactctttgta

SEQ ID NO: 904533 - DNA, 33 bp, Homo sapien
gactgaatcacacaaactctttcaatctgggcc

SEQ ID NO: 904534 - DNA, 33 bp, Homo sapien
gactgaatcacacaaattctttcaatctgggcc

SEQ ID NO: 904535 - DNA, 33 bp, Homo sapien
acctgagatgagggctcacaacttgagatgata

SEQ ID NO: 904536 - DNA, 33 bp, Homo sapien
acctgagatgagggcttacaacttgagatgata

SEQ ID NO: 904537 - DNA, 33 bp, Homo sapien
tttttctagcttggcaatatgaaaatcaatggt

SEQ ID NO: 904538 - DNA, 33 bp, Homo sapien
tttttctagcttggcagtatgaaaatcaatggt

SEQ ID NO: 904539 - DNA, 33 bp, Homo sapien
ccaccctctgtaggccaatcattcttacctggt

SEQ ID NO: 904540 - DNA, 33 bp, Homo sapien
ccaccctctgtaggccgatcattcttacctggt

SEQ ID NO: 904541 - DNA, 33 bp, Homo sapien
aacagataactgagccactcaaaaatgctcatt

SEQ ID NO: 904542 - DNA, 33 bp, Homo sapien
aacagataactgagccgctcaaaaatgctcatt

SEQ ID NO: 904543 - DNA, 33 bp, Homo sapien
tcataccacgagtataactagatgctgagtctt

SEQ ID NO: 904544 - DNA, 33 bp, Homo sapien
tcataccacgagtatatctagatgctgagtctt

SEQ ID NO: 904545 - DNA, 33 bp, Homo sapien
tggcccttaatggccaataatcctatacagctg

SEQ ID NO: 904546 - DNA, 33 bp, Homo sapien
tggcccttaatggccactaatcctatacagctg

SEQ ID NO: 904547 - DNA, 33 bp, Homo sapien
gaaagttcaataaccaaagagtcaaaaggagaa

SEQ ID NO: 904548 - DNA, 33 bp, Homo sapien
gaaagttcaataaccagagagtcaaaaggagaa

SEQ ID NO: 904549 - DNA, 33 bp, Homo sapien
agtttatctcactccaaaggttctttagaggct

SEQ ID NO: 904550 - DNA, 33 bp, Homo sapien
agtttatctcactccagaggttctttagaggct

SEQ ID NO: 904551 - DNA, 33 bp, Homo sapien
cagtgaccatgtggtacgtctgattgctattat

SEQ ID NO: 904552 - DNA, 33 bp, Homo sapien
cagtgaccatgtggtatgtctgattgctattat

SEQ ID NO: 904553 - DNA, 33 bp, Homo sapien
taacaaacacatagccccaaaccagttgttact

SEQ ID NO: 904554 - DNA, 33 bp, Homo sapien
taacaaacacatagcctcaaaccagttgttact

SEQ ID NO: 904555 - DNA, 33 bp, Homo sapien
acaaccacacaaaaacaggtggtgggccacatt

SEQ ID NO: 904556 - DNA, 33 bp, Homo sapien
acaaccacacaaaaacgggtggtgggccacatt

SEQ ID NO: 904557 - DNA, 33 bp, Homo sapien
aatgactttgtttccaataagaatcaaatccaa

SEQ ID NO: 904558 - DNA, 33 bp, Homo sapien
aatgactttgtttccagtaagaatcaaatccaa

SEQ ID NO: 904559 - DNA, 33 bp, Homo sapien
gctttgtgggtcaagaggtaaaaagctaaataa

SEQ ID NO: 904560 - DNA, 33 bp, Homo sapien
gctttgtgggtcaagatgtaaaaagctaaataa

SEQ ID NO: 904561 - DNA, 33 bp, Homo sapien
gacacttttcttagctcagagccatacaaccct

SEQ ID NO: 904562 - DNA, 33 bp, Homo sapien
gacacttttcttagctgagagccatacaaccct

SEQ ID NO: 904563 - DNA, 33 bp, Homo sapien
gctagtggaaatacaacattgttgactgcctgg

SEQ ID NO: 904564 - DNA, 33 bp, Homo sapien
gctagtggaaatacaatattgttgactgcctgg

SEQ ID NO: 904565 - DNA, 33 bp, Homo sapien
ctgtttggcttactacacttttccatgaggaat

SEQ ID NO: 904566 - DNA, 33 bp, Homo sapien
ctgtttggcttactacgcttttccatgaggaat

SEQ ID NO: 904567 - DNA, 33 bp, Homo sapien
acttttctgctcagaccgtatgaggagactgga

SEQ ID NO: 904568 - DNA, 33 bp, Homo sapien
acttttctgctcagactgtatgaggagactgga

SEQ ID NO: 904569 - DNA, 33 bp, Homo sapien
ctaggtctgtcttgccaaaaatgataagctcca

SEQ ID NO: 904570 - DNA, 33 bp, Homo sapien
ctaggtctgtcttgccgaaaatgataagctcca

SEQ ID NO: 904571 - DNA, 33 bp, Homo sapien
agtcaggtctgtaggacgagatatgtttcaggt

SEQ ID NO: 904572 - DNA, 33 bp, Homo sapien
agtcaggtctgtaggatgagatatgtttcaggt

SEQ ID NO: 904573 - DNA, 33 bp, Homo sapien
gaaccatgagaaataacggtaagaagaaatgtt

SEQ ID NO: 904574 - DNA, 33 bp, Homo sapien
gaaccatgagaaataatggtaagaagaaatgtt

SEQ ID NO: 904575 - DNA, 33 bp, Homo sapien
ggaattacagagagaaacatttgttgtaattca

SEQ ID NO: 904576 - DNA, 33 bp, Homo sapien
ggaattacagagagaatcatttgttgtaattca

SEQ ID NO: 904577 - DNA, 33 bp, Homo sapien
aagattttgttcttacaattgtgcttaaattta

SEQ ID NO: 904578 - DNA, 33 bp, Homo sapien
aagattttgttcttacgattgtgcttaaattta

SEQ ID NO: 904579 - DNA, 33 bp, Homo sapien
aagtggccattcatcacgctaaagatcacttgt

SEQ ID NO: 904580 - DNA, 33 bp, Homo sapien
aagtggccattcatcatgctaaagatcacttgt

SEQ ID NO: 904581 - DNA, 33 bp, Homo sapien
ttcttgtaagttgctacaagaagtgattgaaac

SEQ ID NO: 904582 - DNA, 33 bp, Homo sapien
ttcttgtaagttgctataagaagtgattgaaac

SEQ ID NO: 904583 - DNA, 33 bp, Homo sapien
tgggttatactgatgccctatagccaaactata

SEQ ID NO: 904584 - DNA, 33 bp, Homo sapien
tgggttatactgatgctctatagccaaactata

SEQ ID NO: 904585 - DNA, 33 bp, Homo sapien
taattgttaaattagcgaaggtattcctgatgc

SEQ ID NO: 904586 - DNA, 33 bp, Homo sapien
taattgttaaattagctaaggtattcctgatgc

SEQ ID NO: 904587 - DNA, 33 bp, Homo sapien
tatgatttaaagctgcaactctgaatgcctcag

SEQ ID NO: 904588 - DNA, 33 bp, Homo sapien
tatgatttaaagctgcgactctgaatgcctcag

SEQ ID NO: 904589 - DNA, 33 bp, Homo sapien
ggccaaacccaaccataaaccagaggacagagg

SEQ ID NO: 904590 - DNA, 33 bp, Homo sapien
ggccaaacccaaccatgaaccagaggacagagg

SEQ ID NO: 904591 - DNA, 33 bp, Homo sapien
ttaaaatgtgttatccaggacttcttaagttcc

SEQ ID NO: 904592 - DNA, 33 bp, Homo sapien
ttaaaatgtgttatccgggacttcttaagttcc

SEQ ID NO: 904593 - DNA, 33 bp, Homo sapien
gtccaataatcagagaagtctaatatgtgagtg

SEQ ID NO: 904594 - DNA, 33 bp, Homo sapien
gtccaataatcagagaggtctaatatgtgagtg

SEQ ID NO: 904595 - DNA, 33 bp, Homo sapien
gaaaagtacttcataactgctaagttctattac

SEQ ID NO: 904596 - DNA, 33 bp, Homo sapien
gaaaagtacttcataattgctaagttctattac

SEQ ID NO: 904597 - DNA, 33 bp, Homo sapien
ggtgaaggtttagaagccttaattatttgagct

SEQ ID NO: 904598 - DNA, 33 bp, Homo sapien
ggtgaaggtttagaagtcttaattatttgagct

SEQ ID NO: 904599 - DNA, 33 bp, Homo sapien
caagcccagaattatacagaaaatttgaccata

SEQ ID NO: 904600 - DNA, 33 bp, Homo sapien
caagcccagaattatatagaaaatttgaccata

SEQ ID NO: 904601 - DNA, 33 bp, Homo sapien
cattctagccacacccagatgggtcaggaatgg

SEQ ID NO: 904602 - DNA, 33 bp, Homo sapien
cattctagccacacccggatgggtcaggaatgg

SEQ ID NO: 904603 - DNA, 33 bp, Homo sapien
agtgataaaagaaaaagtcaccatcagactact

SEQ ID NO: 904604 - DNA, 33 bp, Homo sapien
agtgataaaagaaaaattcaccatcagactact

SEQ ID NO: 904605 - DNA, 33 bp, Homo sapien
ctagcatctcttgtcacaatatatgcagctggt

SEQ ID NO: 904606 - DNA, 33 bp, Homo sapien
ctagcatctcttgtcataatatatgcagctggt

SEQ ID NO: 904607 - DNA, 33 bp, Homo sapien
acttggcacaagatgcaaagtcagaatgcagaa

SEQ ID NO: 904608 - DNA, 33 bp, Homo sapien
acttggcacaagatgcgaagtcagaatgcagaa

SEQ ID NO: 904609 - DNA, 33 bp, Homo sapien
actttccttcaggtgacatcgtcctcatattgg

SEQ ID NO: 904610 - DNA, 33 bp, Homo sapien
actttccttcaggtgatatcgtcctcatattgg

SEQ ID NO: 904611 - DNA, 33 bp, Homo sapien
tgcagcactcaggttacggggggagattatttt

SEQ ID NO: 904612 - DNA, 33 bp, Homo sapien
tgcagcactcaggttatggggggagattatttt

SEQ ID NO: 904613 - DNA, 33 bp, Homo sapien
ttggccattgtcaattgaaactaaagagtagct

SEQ ID NO: 904614 - DNA, 33 bp, Homo sapien
ttggccattgtcaatttaaactaaagagtagct

SEQ ID NO: 904615 - DNA, 33 bp, Homo sapien
tattcttttctttccaacatatcctgtactata

SEQ ID NO: 904616 - DNA, 33 bp, Homo sapien
tattcttttctttccatcatatcctgtactata

SEQ ID NO: 904617 - DNA, 33 bp, Homo sapien
tcttatgcatatgacacactgaaggggaaaagc

SEQ ID NO: 904618 - DNA, 33 bp, Homo sapien
tcttatgcatatgacagactgaaggggaaaagc

SEQ ID NO: 904619 - DNA, 33 bp, Homo sapien
ccaactaactgtgcccaattttgaccacagggc

SEQ ID NO: 904620 - DNA, 33 bp, Homo sapien
ccaactaactgtgccctattttgaccacagggc

SEQ ID NO: 904621 - DNA, 33 bp, Homo sapien
tgatgggtctcaataaagaaccaattcctctgt

SEQ ID NO: 904622 - DNA, 33 bp, Homo sapien
tgatgggtctcaataatgaaccaattcctctgt

SEQ ID NO: 904623 - DNA, 33 bp, Homo sapien
gaataaatctgtcaggcagaaaaggggagaggg

SEQ ID NO: 904624 - DNA, 33 bp, Homo sapien
gaataaatctgtcagggagaaaaggggagaggg

SEQ ID NO: 904625 - DNA, 33 bp, Homo sapien
cttctttcaggatggaaaaggcactagaagaag

SEQ ID NO: 904626 - DNA, 33 bp, Homo sapien
cttctttcaggatggagaaggcactagaagaag

SEQ ID NO: 904627 - DNA, 33 bp, Homo sapien
cgacaaatcagaaaccaaggaatccattgtaac

SEQ ID NO: 904628 - DNA, 33 bp, Homo sapien
cgacaaatcagaaaccgaggaatccattgtaac

SEQ ID NO: 904629 - DNA, 33 bp, Homo sapien
aagttgccaaccaggagatttaacaggtacagt

SEQ ID NO: 904630 - DNA, 33 bp, Homo sapien
aagttgccaaccaggatatttaacaggtacagt

SEQ ID NO: 904631 - DNA, 33 bp, Homo sapien
caagagatttacagaaatgtagttttggcactt

SEQ ID NO: 904632 - DNA, 33 bp, Homo sapien
caagagatttacagaagtgtagttttggcactt

SEQ ID NO: 904633 - DNA, 33 bp, Homo sapien
gtctgattagggtgtcacacaaagctctctccc

SEQ ID NO: 904634 - DNA, 33 bp, Homo sapien
gtctgattagggtgtcgcacaaagctctctccc

SEQ ID NO: 904635 - DNA, 33 bp, Homo sapien
tttgttttgaatagtgaattttctaacaatgtg

SEQ ID NO: 904636 - DNA, 33 bp, Homo sapien
tttgttttgaatagtggattttctaacaatgtg

SEQ ID NO: 904637 - DNA, 33 bp, Homo sapien
tctgcacctctattccccacatagcttagaatc

SEQ ID NO: 904638 - DNA, 33 bp, Homo sapien
tctgcacctctattcctcacatagcttagaatc

SEQ ID NO: 904639 - DNA, 33 bp, Homo sapien
ggccatctactctaaactgtccattttacagac

SEQ ID NO: 904640 - DNA, 33 bp, Homo sapien
ggccatctactctaaattgtccattttacagac

SEQ ID NO: 904641 - DNA, 33 bp, Homo sapien
aaacctcttaggtgtcaaaataaggcaatgagt

SEQ ID NO: 904642 - DNA, 33 bp, Homo sapien
aaacctcttaggtgtcgaaataaggcaatgagt

SEQ ID NO: 904643 - DNA, 33 bp, Homo sapien
ttgcttcctttccaaacgccagggttggttctg

SEQ ID NO: 904644 - DNA, 33 bp, Homo sapien
ttgcttcctttccaaatgccagggttggttctg

SEQ ID NO: 904645 - DNA, 33 bp, Homo sapien
tgcatttttcaaaatacgaaaggagccagtgac

SEQ ID NO: 904646 - DNA, 33 bp, Homo sapien
tgcatttttcaaaatatgaaaggagccagtgac

SEQ ID NO: 904647 - DNA, 33 bp, Homo sapien
ttgcctgggtctttccactgtcaattctatttt

SEQ ID NO: 904648 - DNA, 33 bp, Homo sapien
ttgcctgggtctttccgctgtcaattctatttt

SEQ ID NO: 904649 - DNA, 33 bp, Homo sapien
gggaatagctgcatgaccataagcaagtttcag

SEQ ID NO: 904650 - DNA, 33 bp, Homo sapien
gggaatagctgcatgatcataagcaagtttcag

SEQ ID NO: 904651 - DNA, 33 bp, Homo sapien
gtctttatcctccaaaggccctaatttggcccc

SEQ ID NO: 904652 - DNA, 33 bp, Homo sapien
gtctttatcctccaaatgccctaatttggcccc

SEQ ID NO: 904653 - DNA, 33 bp, Homo sapien
tcaatgtttgtggcatcaatctaacaggatgtt

SEQ ID NO: 904654 - DNA, 33 bp, Homo sapien
tcaatgtttgtggcattaatctaacaggatgtt

SEQ ID NO: 904655 - DNA, 33 bp, Homo sapien
ttaaaagacaaactacagaatgttcctgttgat

SEQ ID NO: 904656 - DNA, 33 bp, Homo sapien
ttaaaagacaaactacggaatgttcctgttgat

SEQ ID NO: 904657 - DNA, 33 bp, Homo sapien
gtcaactaaaatgtcacggtgacaggtactatt

SEQ ID NO: 904658 - DNA, 33 bp, Homo sapien
gtcaactaaaatgtcatggtgacaggtactatt

SEQ ID NO: 904659 - DNA, 33 bp, Homo sapien
tattacagaaagtgaaataatccgaattctttc

SEQ ID NO: 904660 - DNA, 33 bp, Homo sapien
tattacagaaagtgaagtaatccgaattctttc

SEQ ID NO: 904661 - DNA, 33 bp, Homo sapien
gtgtctgtctttctaccggtactatgctgtttt

SEQ ID NO: 904662 - DNA, 33 bp, Homo sapien
gtgtctgtctttctactggtactatgctgtttt

SEQ ID NO: 904663 - DNA, 33 bp, Homo sapien; identical to SEQ ID NO: 904661

SEQ ID NO: 904664 - DNA, 33 bp, Homo sapien; identical to SEQ ID NO: 904662

SEQ ID NO: 904665 - DNA, 33 bp, Homo sapien
atatctaggtgaaaaaacattgttctgtgcaac

SEQ ID NO: 904666 - DNA, 33 bp, Homo sapien
atatctaggtgaaaaatcattgttctgtgcaac

SEQ ID NO: 904667 - DNA, 33 bp, Homo sapien
acactggagttattcccgctacaaaggttaacc

SEQ ID NO: 904668 - DNA, 33 bp, Homo sapien
acactggagttattcctgctacaaaggttaacc

SEQ ID NO: 904669 - DNA, 33 bp, Homo sapien
tttctaaagactaccactgcacaccagaagtca

SEQ ID NO: 904670 - DNA, 33 bp, Homo sapien
tttctaaagactaccattgcacaccagaagtca

SEQ ID NO: 904671 - DNA, 33 bp, Homo sapien
tcatagagatgtttacaatttggaaaactatcc

SEQ ID NO: 904672 - DNA, 33 bp, Homo sapien
tcatagagatgtttacgatttggaaaactatcc

SEQ ID NO: 904673 - DNA, 33 bp, Homo sapien
tttatgggtattaccacgatttattttccatta

SEQ ID NO: 904674 - DNA, 33 bp, Homo sapien
tttatgggtattaccatgatttattttccatta

SEQ ID NO: 904675 - DNA, 33 bp, Homo sapien
tcgtaactgaaaagacagcatacttgccataaa

SEQ ID NO: 904676 - DNA, 33 bp, Homo sapien
tcgtaactgaaaagacggcatacttgccataaa

SEQ ID NO: 904677 - DNA, 33 bp, Homo sapien
caaagagctgatgaacactacagtccaaaaaat

SEQ ID NO: 904678 - DNA, 33 bp, Homo sapien
caaagagctgatgaacgctacagtccaaaaaat

SEQ ID NO: 904679 - DNA, 33 bp, Homo sapien
ttcaattttattcaaaccagatgtcccccctcc

SEQ ID NO: 904680 - DNA, 33 bp, Homo sapien
ttcaattttattcaaatcagatgtcccccctcc

SEQ ID NO: 904681 - DNA, 33 bp, Homo sapien; identical to SEQ ID NO: 904679

SEQ ID NO: 904682 - DNA, 33 bp, Homo sapien; identical to SEQ ID NO: 904680

SEQ ID NO: 904683 - DNA, 33 bp, Homo sapien
aatagtccaagaagccactccggaccctcagca

SEQ ID NO: 904684 - DNA, 33 bp, Homo sapien
aatagtccaagaagccgctccggaccctcagca

SEQ ID NO: 904685 - DNA, 33 bp, Homo sapien
tgcaaaggagaaatgaaggacacaataagaaaa

SEQ ID NO: 904686 - DNA, 33 bp, Homo sapien
tgcaaaggagaaatgagggacacaataagaaaa

SEQ ID NO: 904687 - DNA, 33 bp, Homo sapien
tgtgatgctccttaaccccctgtgacttacagc

SEQ ID NO: 904688 - DNA, 33 bp, Homo sapien
tgtgatgctccttaactccctgtgacttacagc

SEQ ID NO: 904689 - DNA, 33 bp, Homo sapien
cagtgaaagtgtagagaaaggaaatcatatgac

SEQ ID NO: 904690 - DNA, 33 bp, Homo sapien
cagtgaaagtgtagaggaaggaaatcatatgac

SEQ ID NO: 904691 - DNA, 33 bp, Homo sapien
gctggcagggtcccgacgagcaagatggaagcc

SEQ ID NO: 904692 - DNA, 33 bp, Homo sapien
gctggcagggtcccgatgagcaagatggaagcc

SEQ ID NO: 904693 - DNA, 33 bp, Homo sapien
acgacaggaaaacaacaaaagacacagctggaa

SEQ ID NO: 904694 - DNA, 33 bp, Homo sapien
acgacaggaaaacaaccaaagacacagctggaa

SEQ ID NO: 904695 - DNA, 33 bp, Homo sapien
tgcttgagatttctaacatactctttacccaag

SEQ ID NO: 904696 - DNA, 33 bp, Homo sapien
tgcttgagatttctaatatactctttacccaag

SEQ ID NO: 904697 - DNA, 33 bp, Homo sapien
ctaagtagctttcaaagaagcatctttcaaaca

SEQ ID NO: 904698 - DNA, 33 bp, Homo sapien
ctaagtagctttcaaataagcatctttcaaaca

SEQ ID NO: 904699 - DNA, 33 bp, Homo sapien
gacatgagaagacgagcaaaagacagggtttgg

SEQ ID NO: 904700 - DNA, 33 bp, Homo sapien
gacatgagaagacgaggaaaagacagggtttgg

SEQ ID NO: 904701 - DNA, 33 bp, Homo sapien
tcctgaaggagctgcacgtccgactggagagac

SEQ ID NO: 904702 - DNA, 33 bp, Homo sapien
tcctgaaggagctgcatgtccgactggagagac

SEQ ID NO: 904703 - DNA, 33 bp, Homo sapien
ctaagcatcaaagcagcatcatacacgttgctt

SEQ ID NO: 904704 - DNA, 33 bp, Homo sapien
ctaagcatcaaagcagtatcatacacgttgctt

SEQ ID NO: 904705 - DNA, 33 bp, Homo sapien
ctgccagacaacaaaccagcccgtccactggct

SEQ ID NO: 904706 - DNA, 33 bp, Homo sapien
ctgccagacaacaaacgagcccgtccactggct

SEQ ID NO: 904707 - DNA, 33 bp, Homo sapien
acttgagcctaggagagagagaatgattctgtc

SEQ ID NO: 904708 - DNA, 33 bp, Homo sapien
acttgagcctaggagatagagaatgattctgtc

SEQ ID NO: 904709 - DNA, 33 bp, Homo sapien
gttttttgataatagcaactctaactgggatat

SEQ ID NO: 904710 - DNA, 33 bp, Homo sapien
gttttttgataatagccactctaactgggatat

SEQ ID NO: 904711 - DNA, 33 bp, Homo sapien
tactaacctataaaatcaggctgatcatccctg

SEQ ID NO: 904712 - DNA, 33 bp, Homo sapien
tactaacctataaaatgaggctgatcatccctg

SEQ ID NO: 904713 - DNA, 33 bp, Homo sapien
tcctctctgaaaatccagaaatagatttctttt

SEQ ID NO: 904714 - DNA, 33 bp, Homo sapien
tcctctctgaaaatcctgaaatagatttctttt

SEQ ID NO: 904715 - DNA, 33 bp, Homo sapien
tgagacagccaagcaacgggcaaagacaagaga

SEQ ID NO: 904716 - DNA, 33 bp, Homo sapien
tgagacagccaagcaaggggcaaagacaagaga

SEQ ID NO: 904717 - DNA, 33 bp, Homo sapien
cgctgaaggtaaatgaaactatttgcattggtg

SEQ ID NO: 904718 - DNA, 33 bp, Homo sapien
cgctgaaggtaaatgacactatttgcattggtg

SEQ ID NO: 904719 - DNA, 33 bp, Homo sapien
aaaataactgcctcagaatgttgcatggactcc

SEQ ID NO: 904720 - DNA, 33 bp, Homo sapien
aaaataactgcctcaggatgttgcatggactcc

SEQ ID NO: 904721 - DNA, 33 bp, Homo sapien
aaacagaataaaatatcagtgcatttcacatag

SEQ ID NO: 904722 - DNA, 33 bp, Homo sapien
aaacagaataaaatattagtgcatttcacatag

SEQ ID NO: 904723 - DNA, 33 bp, Homo sapien
tagtcatgtacttgtgaaaagttaatgttaaaa

SEQ ID NO: 904724 - DNA, 33 bp, Homo sapien
tagtcatgtacttgtggaaagttaatgttaaaa

SEQ ID NO: 904725 - DNA, 33 bp, Homo sapien
taacaatagggatccacacgtggcctttcaggg

SEQ ID NO: 904726 - DNA, 33 bp, Homo sapien
taacaatagggatccatacgtggcctttcaggg

SEQ ID NO: 904727 - DNA, 33 bp, Homo sapien
cttgtgtagacagtgccctgtaatttagcagtg

SEQ ID NO: 904728 - DNA, 33 bp, Homo sapien
cttgtgtagacagtgcgctgtaatttagcagtg

SEQ ID NO: 904729 - DNA, 33 bp, Homo sapien
ttttgctcttgcttctaaaaacataatcatctc

SEQ ID NO: 904730 - DNA, 33 bp, Homo sapien
ttttgctcttgcttctgaaaacataatcatctc

SEQ ID NO: 904731 - DNA, 33 bp, Homo sapien
tgcattcctgtaactaataagcagtaggctctc

SEQ ID NO: 904732 - DNA, 33 bp, Homo sapien
tgcattcctgtaactagtaagcagtaggctctc

SEQ ID NO: 904733 - DNA, 33 bp, Homo sapien
cttattttcaaaggcactattgaattataagat

SEQ ID NO: 904734 - DNA, 33 bp, Homo sapien
cttattttcaaaggcattattgaattataagat

SEQ ID NO: 904735 - DNA, 33 bp, Homo sapien
gctgggccctcaatccaagatcagggacttctg

SEQ ID NO: 904736 - DNA, 33 bp, Homo sapien
gctgggccctcaatccgagatcagggacttctg

SEQ ID NO: 904737 - DNA, 33 bp, Homo sapien
agacctctctagaaatcaagggaagacgttgag

SEQ ID NO: 904738 - DNA, 33 bp, Homo sapien
agacctctctagaaatgaagggaagacgttgag

SEQ ID NO: 904739 - DNA, 33 bp, Homo sapien
aggttatgtaacaaaccgtgattgttctctctg

SEQ ID NO: 904740 - DNA, 33 bp, Homo sapien
aggttatgtaacaaactgtgattgttctctctg

SEQ ID NO: 904741 - DNA, 33 bp, Homo sapien
tctctaaagactgagcatagggttcccagttcc

SEQ ID NO: 904742 - DNA, 33 bp, Homo sapien
tctctaaagactgagcgtagggttcccagttcc

SEQ ID NO: 904743 - DNA, 33 bp, Homo sapien
tgtctttcctaataaaatggcctgcccaacaca

SEQ ID NO: 904744 - DNA, 33 bp, Homo sapien
tgtctttcctaataaagtggcctgcccaacaca

SEQ ID NO: 904745 - DNA, 33 bp, Homo sapien
tcaactacagctgttccccttcttttcccagta

SEQ ID NO: 904746 - DNA, 33 bp, Homo sapien
tcaactacagctgttctccttcttttcccagta

SEQ ID NO: 904747 - DNA, 33 bp, Homo sapien
ctctcccgtatacttacagagctcacttgccca

SEQ ID NO: 904748 - DNA, 33 bp, Homo sapien
ctctcccgtatacttatagagctcacttgccca

SEQ ID NO: 904749 - DNA, 33 bp, Homo sapien
tgagtaaagatgtaagaacttgaaggagatggg

SEQ ID NO: 904750 - DNA, 33 bp, Homo sapien
tgagtaaagatgtaagtacttgaaggagatggg

SEQ ID NO: 904751 - DNA, 33 bp, Homo sapien
aataataaaatccatacgccaaatccccaaact

SEQ ID NO: 904752 - DNA, 33 bp, Homo sapien
aataataaaatccataggccaaatccccaaact

SEQ ID NO: 904753 - DNA, 33 bp, Homo sapien
tctggggtctagggttaaaaagctaaggcaaaa

SEQ ID NO: 904754 - DNA, 33 bp, Homo sapien
tctggggtctagggttgaaaagctaaggcaaaa

SEQ ID NO: 904755 - DNA, 33 bp, Homo sapien
aacagaaatgtgacccagcagccagtgcactgc

SEQ ID NO: 904756 - DNA, 33 bp, Homo sapien
aacagaaatgtgacccggcagccagtgcactgc

SEQ ID NO: 904757 - DNA, 33 bp, Homo sapien
gggtgaacaggactggccaacatgtccccaagt

SEQ ID NO: 904758 - DNA, 33 bp, Homo sapien
gggtgaacaggactggtcaacatgtccccaagt

SEQ ID NO: 904759 - DNA, 33 bp, Homo sapien
caccgtctaattctccgggaccagattctcatg

SEQ ID NO: 904760 - DNA, 33 bp, Homo sapien
caccgtctaattctcctggaccagattctcatg

SEQ ID NO: 904761 - DNA, 33 bp, Homo sapien
cccagctcttgatttacggcagatctaatgcca

SEQ ID NO: 904762 - DNA, 33 bp, Homo sapien
cccagctcttgatttatggcagatctaatgcca

SEQ ID NO: 904763 - DNA, 33 bp, Homo sapien
gcagcacttagaagcacatcagaagcaaagtgg

SEQ ID NO: 904764 - DNA, 33 bp, Homo sapien
gcagcacttagaagcatatcagaagcaaagtgg

SEQ ID NO: 904765 - DNA, 33 bp, Homo sapien
cagtttattgagcacacgggggccttgcagtgg

SEQ ID NO: 904766 - DNA, 33 bp, Homo sapien
cagtttattgagcacatgggggccttgcagtgg

SEQ ID NO: 904767 - DNA, 33 bp, Homo sapien
acaggccctctcaggaacacagtaagccctggc

SEQ ID NO: 904768 - DNA, 33 bp, Homo sapien
acaggccctctcaggagcacagtaagccctggc

SEQ ID NO: 904769 - DNA, 33 bp, Homo sapien
agccttgcctagctcacataaggtgccagccct

SEQ ID NO: 904770 - DNA, 33 bp, Homo sapien
agccttgcctagctcatataaggtgccagccct

SEQ ID NO: 904771 - DNA, 33 bp, Homo sapien
ctccaaccccaggagacgctgatgtacacacta

SEQ ID NO: 904772 - DNA, 33 bp, Homo sapien
ctccaaccccaggagatgctgatgtacacacta

SEQ ID NO: 904773 - DNA, 33 bp, Homo sapien
atatttgcttttaacaaatagctctgtgggcct

SEQ ID NO: 904774 - DNA, 33 bp, Homo sapien
atatttgcttttaacagatagctctgtgggcct

SEQ ID NO: 904775 - DNA, 33 bp, Homo sapien
atccaccatgattcaacagtctaagaaagaccc

SEQ ID NO: 904776 - DNA, 33 bp, Homo sapien
atccaccatgattcaatagtctaagaaagaccc

SEQ ID NO: 904777 - DNA, 33 bp, Homo sapien
ccaccatccatttctcccaggaacttcaaaata

SEQ ID NO: 904778 - DNA, 33 bp, Homo sapien
ccaccatccatttctcgcaggaacttcaaaata

SEQ ID NO: 904779 - DNA, 33 bp, Homo sapien
atgcccagatgtccacaggcttgccatacgcct

SEQ ID NO: 904780 - DNA, 33 bp, Homo sapien
atgcccagatgtccacgggcttgccatacgcct

SEQ ID NO: 904781 - DNA, 33 bp, Homo sapien
tgtgtatcacaggaccaacggaaggggtgcaac

SEQ ID NO: 904782 - DNA, 33 bp, Homo sapien
tgtgtatcacaggaccgacggaaggggtgcaac

SEQ ID NO: 904783 - DNA, 33 bp, Homo sapien
gtggtgttgacataagcataaatacatagatca

SEQ ID NO: 904784 - DNA, 33 bp, Homo sapien
gtggtgttgacataaggataaatacatagatca

SEQ ID NO: 904785 - DNA, 33 bp, Homo sapien
gtcctttctaagagaggagagtaggacacacag

SEQ ID NO: 904786 - DNA, 33 bp, Homo sapien
gtcctttctaagagagtagagtaggacacacag

SEQ ID NO: 904787 - DNA, 33 bp, Homo sapien
gagaaactggagataacgtgaaggagtggtcca

SEQ ID NO: 904788 - DNA, 33 bp, Homo sapien
gagaaactggagataatgtgaaggagtggtcca

SEQ ID NO: 904789 - DNA, 33 bp, Homo sapien
caggtctggcacattgaagatgatctgtgttgg

SEQ ID NO: 904790 - DNA, 33 bp, Homo sapien
caggtctggcacattggagatgatctgtgttgg

SEQ ID NO: 904791 - DNA, 33 bp, Homo sapien
cctcaacaaaacacaaaaatggatgacttcagc

SEQ ID NO: 904792 - DNA, 33 bp, Homo sapien
cctcaacaaaacacaagaatggatgacttcagc

SEQ ID NO: 904793 - DNA, 33 bp, Homo sapien
tgaaaataggcaagaacggacgagacacagcaa

SEQ ID NO: 904794 - DNA, 33 bp, Homo sapien
tgaaaataggcaagaatggacgagacacagcaa

SEQ ID NO: 904795 - DNA, 33 bp, Homo sapien
ctacactgggcactacactggtcagacaggaac

SEQ ID NO: 904796 - DNA, 33 bp, Homo sapien
ctacactgggcactacgctggtcagacaggaac

SEQ ID NO: 904797 - DNA, 33 bp, Homo sapien
tcctgtaaaacacataccattaccatttaccat

SEQ ID NO: 904798 - DNA, 33 bp, Homo sapien
tcctgtaaaacacatatcattaccatttaccat

SEQ ID NO: 904799 - DNA, 33 bp, Homo sapien
taataacaaaatgggaaaacagatctgcaatac

SEQ ID NO: 904800 - DNA, 33 bp, Homo sapien
taataacaaaatgggacaacagatctgcaatac

SEQ ID NO: 904801 - DNA, 33 bp, Homo sapien
ttagaagttgcttaggaaaaaatgcaggaaaac

SEQ ID NO: 904802 - DNA, 33 bp, Homo sapien
ttagaagttgcttagggaaaaatgcaggaaaac

SEQ ID NO: 904803 - DNA, 33 bp, Homo sapien
gctattcattcattcaaaaacttatccagagtg

SEQ ID NO: 904804 - DNA, 33 bp, Homo sapien
gctattcattcattcagaaacttatccagagtg

SEQ ID NO: 904805 - DNA, 33 bp, Homo sapien
tcacctcttttataaacacagccatagactctc

SEQ ID NO: 904806 - DNA, 33 bp, Homo sapien
tcacctcttttataaatacagccatagactctc

SEQ ID NO: 904807 - DNA, 33 bp, Homo sapien
caaaagtgtcaatgaaaagaagtctccagtttc

SEQ ID NO: 904808 - DNA, 33 bp, Homo sapien
caaaagtgtcaatgaagagaagtctccagtttc

SEQ ID NO: 904809 - DNA, 33 bp, Homo sapien
ggtgcgtgctaattaacgttaaagttggggtgt

SEQ ID NO: 904810 - DNA, 33 bp, Homo sapien
ggtgcgtgctaattaatgttaaagttggggtgt

SEQ ID NO: 904811 - DNA, 33 bp, Homo sapien
tctctgccaatcacaaatgacttccaagtatca

SEQ ID NO: 904812 - DNA, 33 bp, Homo sapien
tctctgccaatcacaagtgacttccaagtatca

SEQ ID NO: 904813 - DNA, 33 bp, Homo sapien
ataattctttaagtgacgagcctgagtagcctg

SEQ ID NO: 904814 - DNA, 33 bp, Homo sapien
ataattctttaagtgatgagcctgagtagcctg

SEQ ID NO: 904815 - DNA, 33 bp, Homo sapien
tagatgggaaacatacagaaactttctacagaa

SEQ ID NO: 904816 - DNA, 33 bp, Homo sapien
tagatgggaaacatacggaaactttctacagaa

SEQ ID NO: 904817 - DNA, 33 bp, Homo sapien
attcccagagcctgaaaccatacatctgtgatt

SEQ ID NO: 904818 - DNA, 33 bp, Homo sapien
attcccagagcctgaagccatacatctgtgatt

SEQ ID NO: 904819 - DNA, 33 bp, Homo sapien
aagacatggtgacagacgagtgtgtgaactgtg

SEQ ID NO: 904820 - DNA, 33 bp, Homo sapien
aagacatggtgacagatgagtgtgtgaactgtg

SEQ ID NO: 904821 - DNA, 33 bp, Homo sapien
caacacaacattgttgaaaggaatttcttcttt

SEQ ID NO: 904822 - DNA, 33 bp, Homo sapien
caacacaacattgttggaaggaatttcttcttt

SEQ ID NO: 904823 - DNA, 33 bp, Homo sapien
taggaagcatttctggaatttgagaaaatgagc

SEQ ID NO: 904824 - DNA, 33 bp, Homo sapien
taggaagcatttctggcatttgagaaaatgagc

SEQ ID NO: 904825 - DNA, 33 bp, Homo sapien
atgcgaagaattctcaaatatgctcttcaccca

SEQ ID NO: 904826 - DNA, 33 bp, Homo sapien
atgcgaagaattctcacatatgctcttcaccca

SEQ ID NO: 904827 - DNA, 33 bp, Homo sapien
cagctctgtcctatagaatttgctttgagaccc

SEQ ID NO: 904828 - DNA, 33 bp, Homo sapien
cagctctgtcctataggatttgctttgagaccc

SEQ ID NO: 904829 - DNA, 33 bp, Homo sapien
aagggttcacagcacactccagggatatgacaa

SEQ ID NO: 904830 - DNA, 33 bp, Homo sapien
aagggttcacagcacattccagggatatgacaa

SEQ ID NO: 904831 - DNA, 33 bp, Homo sapien
attttaagaggattaacggtccctaaatcaaga

SEQ ID NO: 904832 - DNA, 33 bp, Homo sapien
attttaagaggattaatggtccctaaatcaaga

SEQ ID NO: 904833 - DNA, 33 bp, Homo sapien
caaaaaacccatatcccgcttccatgagcttga

SEQ ID NO: 904834 - DNA, 33 bp, Homo sapien
caaaaaacccatatcctgcttccatgagcttga

SEQ ID NO: 904835 - DNA, 33 bp, Homo sapien
taaagcaaaagaattaataacatgacatcctaa

SEQ ID NO: 904836 - DNA, 33 bp, Homo sapien
taaagcaaaagaattagtaacatgacatcctaa

SEQ ID NO: 904837 - DNA, 33 bp, Homo sapien
taaaatgttaactatacgtgacagaatgtatat

SEQ ID NO: 904838 - DNA, 33 bp, Homo sapien
taaaatgttaactatatgtgacagaatgtatat

SEQ ID NO: 904839 - DNA, 33 bp, Homo sapien
ttaaatttgtaaagagcctaaatattttccaaa

SEQ ID NO: 904840 - DNA, 33 bp, Homo sapien
ttaaatttgtaaagaggctaaatattttccaaa

SEQ ID NO: 904841 - DNA, 33 bp, Homo sapien
atctttttttgtcagcgatgtatgtctcaaaca

SEQ ID NO: 904842 - DNA, 33 bp, Homo sapien
atctttttttgtcagctatgtatgtctcaaaca

SEQ ID NO: 904843 - DNA, 33 bp, Homo sapien
ccgtcatcctcagctacgtgggtgagtgcccag

SEQ ID NO: 904844 - DNA, 33 bp, Homo sapien
ccgtcatcctcagctatgtgggtgagtgcccag

SEQ ID NO: 904845 - DNA, 33 bp, Homo sapien
gacccagcaaattcacaccagagtcccatcagg

SEQ ID NO: 904846 - DNA, 33 bp, Homo sapien
gacccagcaaattcacgccagagtcccatcagg

SEQ ID NO: 904847 - DNA, 33 bp, Homo sapien
tagggaccaatgaggccgagccctgctggttaa

SEQ ID NO: 904848 - DNA, 33 bp, Homo sapien
tagggaccaatgaggctgagccctgctggttaa

SEQ ID NO: 904849 - DNA, 33 bp, Homo sapien
gctactgttttgaagacggccttttttaaattg

SEQ ID NO: 904850 - DNA, 33 bp, Homo sapien
gctactgttttgaagatggccttttttaaattg

SEQ ID NO: 904851 - DNA, 33 bp, Homo sapien
catgcattttgcttctaaaagctgaggtcctgg

SEQ ID NO: 904852 - DNA, 33 bp, Homo sapien
catgcattttgcttctgaaagctgaggtcctgg

SEQ ID NO: 904853 - DNA, 33 bp, Homo sapien
ggatgtggtaggaataacaccgcatggagctgg

SEQ ID NO: 904854 - DNA, 33 bp, Homo sapien
ggatgtggtaggaatagcaccgcatggagctgg

SEQ ID NO: 904855 - DNA, 33 bp, Homo sapien
attctccaattctgacccaactggcagcctatg

SEQ ID NO: 904856 - DNA, 33 bp, Homo sapien
attctccaattctgacgcaactggcagcctatg

SEQ ID NO: 904857 - DNA, 33 bp, Homo sapien
acccctgtgtttctaaacttgtttgcttggtcc

SEQ ID NO: 904858 - DNA, 33 bp, Homo sapien
acccctgtgtttctaaccttgtttgcttggtcc

SEQ ID NO: 904859 - DNA, 33 bp, Homo sapien
gtaaccttcggctctgaatgcacctgagtttac

SEQ ID NO: 904860 - DNA, 33 bp, Homo sapien
gtaaccttcggctctggatgcacctgagtttac

SEQ ID NO: 904861 - DNA, 33 bp, Homo sapien
aacggttccattgttgaagagtcctctgtatgt

SEQ ID NO: 904862 - DNA, 33 bp, Homo sapien
aacggttccattgttggagagtcctctgtatgt

SEQ ID NO: 904863 - DNA, 33 bp, Homo sapien
agctgattctctgtccactcttggctgcaggtg

SEQ ID NO: 904864 - DNA, 33 bp, Homo sapien
agctgattctctgtccgctcttggctgcaggtg

SEQ ID NO: 904865 - DNA, 33 bp, Homo sapien
agcttttggtggtggacgaagctgaccttcttt

SEQ ID NO: 904866 - DNA, 33 bp, Homo sapien
agcttttggtggtggatgaagctgaccttcttt

SEQ ID NO: 904867 - DNA, 33 bp, Homo sapien
gctgtacctgaatgaagctacacagtgttgtgg

SEQ ID NO: 904868 - DNA, 33 bp, Homo sapien
gctgtacctgaatgaatctacacagtgttgtgg

SEQ ID NO: 904869 - DNA, 33 bp, Homo sapien
ctgctgcaacactactcagcagtactttgatca

SEQ ID NO: 904870 - DNA, 33 bp, Homo sapien
ctgctgcaacactacttagcagtactttgatca

SEQ ID NO: 904871 - DNA, 33 bp, Homo sapien
ctatcttttctacttacagaattattgtgagaa

SEQ ID NO: 904872 - DNA, 33 bp, Homo sapien
ctatcttttctacttagagaattattgtgagaa

SEQ ID NO: 904873 - DNA, 33 bp, Homo sapien
cgtaatcttcgacaaaccactttcttttctttc

SEQ ID NO: 904874 - DNA, 33 bp, Homo sapien
cgtaatcttcgacaaagcactttcttttctttc

SEQ ID NO: 904875 - DNA, 33 bp, Homo sapien
actagttcaaaggataaaatttttctctgcatt

SEQ ID NO: 904876 - DNA, 33 bp, Homo sapien
actagttcaaaggatataatttttctctgcatt

SEQ ID NO: 904877 - DNA, 33 bp, Homo sapien
caagccttagtaccacaagtccacagtgaagtc

SEQ ID NO: 904878 - DNA, 33 bp, Homo sapien
caagccttagtaccacgagtccacagtgaagtc

SEQ ID NO: 904879 - DNA, 33 bp, Homo sapien
ccctccctgcgtgtaactactcaactccaggac

SEQ ID NO: 904880 - DNA, 33 bp, Homo sapien
ccctccctgcgtgtaattactcaactccaggac

SEQ ID NO: 904881 - DNA, 33 bp, Homo sapien
ggatgtcgagatgcacacgctacaaggaaacat

SEQ ID NO: 904882 - DNA, 33 bp, Homo sapien
ggatgtcgagatgcacccgctacaaggaaacat

SEQ ID NO: 904883 - DNA, 33 bp, Homo sapien
ctacaaggaaacatggaatgtatgagtggtggg

SEQ ID NO: 904884 - DNA, 33 bp, Homo sapien
ctacaaggaaacatgggatgtatgagtggtggg

SEQ ID NO: 904885 - DNA, 33 bp, Homo sapien
agacaaacatcggcagaaattgcttcatggctt

SEQ ID NO: 904886 - DNA, 33 bp, Homo sapien
agacaaacatcggcaggaattgcttcatggctt

SEQ ID NO: 904887 - DNA, 33 bp, Homo sapien
ccaagtgggtgtgcctcaagacaaaaggacatg

SEQ ID NO: 904888 - DNA, 33 bp, Homo sapien
ccaagtgggtgtgcctgaagacaaaaggacatg

SEQ ID NO: 904889 - DNA, 33 bp, Homo sapien
ctccacttagtttcacccatagaaaacaccagt

SEQ ID NO: 904890 - DNA, 33 bp, Homo sapien
ctccacttagtttcactcatagaaaacaccagt

SEQ ID NO: 904891 - DNA, 33 bp, Homo sapien
tgacttatcagaaatacatgtagtcattccttg

SEQ ID NO: 904892 - DNA, 33 bp, Homo sapien
tgacttatcagaaatatatgtagtcattccttg

SEQ ID NO: 904893 - DNA, 33 bp, Homo sapien
cactgtgaggaaagtgcattatggttgcataga

SEQ ID NO: 904894 - DNA, 33 bp, Homo sapien
cactgtgaggaaagtgtattatggttgcataga

SEQ ID NO: 904895 - DNA, 33 bp, Homo sapien
aatacagcaggaaactaagcaggagtcagtctg

SEQ ID NO: 904896 - DNA, 33 bp, Homo sapien
aatacagcaggaaactgagcaggagtcagtctg

SEQ ID NO: 904897 - DNA, 33 bp, Homo sapien
taagtgttggccttaactggggaggagtgcaga

SEQ ID NO: 904898 - DNA, 33 bp, Homo sapien
taagtgttggccttaattggggaggagtgcaga

SEQ ID NO: 904899 - DNA, 33 bp, Homo sapien
tgttggagacttcgcaaaataccagttcactgt

SEQ ID NO: 904900 - DNA, 33 bp, Homo sapien
tgttggagacttcgcagaataccagttcactgt

SEQ ID NO: 904901 - DNA, 33 bp, Homo sapien
aagactccattttcacaacagtttacagacatt

SEQ ID NO: 904902 - DNA, 33 bp, Homo sapien
aagactccattttcacgacagtttacagacatt

SEQ ID NO: 904903 - DNA, 33 bp, Homo sapien
tgcacatgtgtgaagaaacaccagacaagtaga

SEQ ID NO: 904904 - DNA, 33 bp, Homo sapien
tgcacatgtgtgaagagacaccagacaagtaga

SEQ ID NO: 904905 - DNA, 33 bp, Homo sapien
ttttgtcttatgttcacgaggggtattgatctt

SEQ ID NO: 904906 - DNA, 33 bp, Homo sapien
ttttgtcttatgttcatgaggggtattgatctt

SEQ ID NO: 904907 - DNA, 33 bp, Homo sapien
gatgagacttagtgggccaggaccgtgtgtgtg

SEQ ID NO: 904908 - DNA, 33 bp, Homo sapien
gatgagacttagtgggtcaggaccgtgtgtgtg

SEQ ID NO: 904909 - DNA, 33 bp, Homo sapien
cagagggcgatgagtgaaaggagttgaggttgg

SEQ ID NO: 904910 - DNA, 33 bp, Homo sapien
cagagggcgatgagtgcaaggagttgaggttgg

SEQ ID NO: 904911 - DNA, 33 bp, Homo sapien
agaaataggtgtctgcactgtttgagcctgtgt

SEQ ID NO: 904912 - DNA, 33 bp, Homo sapien
agaaataggtgtctgcgctgtttgagcctgtgt

SEQ ID NO: 904913 - DNA, 33 bp, Homo sapien
agggggcgcccctctccgaagtgccaatcctgc

SEQ ID NO: 904914 - DNA, 33 bp, Homo sapien
agggggcgcccctctctgaagtgccaatcctgc

SEQ ID NO: 904915 - DNA, 33 bp, Homo sapien
tgtagttatcttcctgaatgcttatagccaaga

SEQ ID NO: 904916 - DNA, 33 bp, Homo sapien
tgtagttatcttcctggatgcttatagccaaga

SEQ ID NO: 904917 - DNA, 33 bp, Homo sapien
acttggcgcgtgtcttaaaagttaaatattgag

SEQ ID NO: 904918 - DNA, 33 bp, Homo sapien
acttggcgcgtgtcttcaaagttaaatattgag

SEQ ID NO: 904919 - DNA, 33 bp, Homo sapien
gaagagcatacataaacgacaaatatagccaat

SEQ ID NO: 904920 - DNA, 33 bp, Homo sapien
gaagagcatacataaatgacaaatatagccaat

SEQ ID NO: 904921 - DNA, 33 bp, Homo sapien
aaaggaagaacaatcactatgactggcaaccac

SEQ ID NO: 904922 - DNA, 33 bp, Homo sapien
aaaggaagaacaatcattatgactggcaaccac

SEQ ID NO: 904923 - DNA, 33 bp, Homo sapien
agggctcagggtcctcgcaaagccttgacccgc

SEQ ID NO: 904924 - DNA, 33 bp, Homo sapien
agggctcagggtcctctcaaagccttgacccgc

SEQ ID NO: 904925 - DNA, 33 bp, Homo sapien
ggtaggtactatcatcaccactttaaggatgaa

SEQ ID NO: 904926 - DNA, 33 bp, Homo sapien
ggtaggtactatcatcgccactttaaggatgaa

SEQ ID NO: 904927 - DNA, 33 bp, Homo sapien
cagtgagcttggaagaaagcaccttgaggcaca

SEQ ID NO: 904928 - DNA, 33 bp, Homo sapien
cagtgagcttggaagagagcaccttgaggcaca

SEQ ID NO: 904929 - DNA, 33 bp, Homo sapien
ctctaaaatgaagaaaaaccacgctgggctgtc

SEQ ID NO: 904930 - DNA, 33 bp, Homo sapien
ctctaaaatgaagaaataccacgctgggctgtc

SEQ ID NO: 904931 - DNA, 33 bp, Homo sapien
gagttaggttgaaaaaaactggttctcattgta

SEQ ID NO: 904932 - DNA, 33 bp, Homo sapien
gagttaggttgaaaaagactggttctcattgta

SEQ ID NO: 904933 - DNA, 33 bp, Homo sapien
tctagagcaccttctccccatgactgtgtgggt

SEQ ID NO: 904934 - DNA, 33 bp, Homo sapien
tctagagcaccttctctccatgactgtgtgggt

SEQ ID NO: 904935 - DNA, 33 bp, Homo sapien
ttacagtaagcaatgacggcaacactacaacat

SEQ ID NO: 904936 - DNA, 33 bp, Homo sapien
ttacagtaagcaatgatggcaacactacaacat

SEQ ID NO: 904937 - DNA, 33 bp, Homo sapien
aatttgggaaattaccaaaggtgggtttgcaga

SEQ ID NO: 904938 - DNA, 33 bp, Homo sapien
aatttgggaaattaccgaaggtgggtttgcaga

SEQ ID NO: 904939 - DNA, 33 bp, Homo sapien
attactaccaggtaacaaagagtgactgctgat

SEQ ID NO: 904940 - DNA, 33 bp, Homo sapien
attactaccaggtaacgaagagtgactgctgat

SEQ ID NO: 904941 - DNA, 33 bp, Homo sapien
gccctacttcatggaaactcagagtctgcgtgg

SEQ ID NO: 904942 - DNA, 33 bp, Homo sapien
gccctacttcatggaagctcagagtctgcgtgg

SEQ ID NO: 904943 - DNA, 33 bp, Homo sapien
tcacctaagcattcaaacaagttacagaagtaa

SEQ ID NO: 904944 - DNA, 33 bp, Homo sapien
tcacctaagcattcaagcaagttacagaagtaa

SEQ ID NO: 904945 - DNA, 33 bp, Homo sapien
caggtgattgaatcccagaaaggttcattgtct

SEQ ID NO: 904946 - DNA, 33 bp, Homo sapien
caggtgattgaatcccggaaaggttcattgtct

SEQ ID NO: 904947 - DNA, 33 bp, Homo sapien
ctacagcagcaatcccaagatgctggagctaga

SEQ ID NO: 904948 - DNA, 33 bp, Homo sapien
ctacagcagcaatccctagatgctggagctaga

SEQ ID NO: 904949 - DNA, 33 bp, Homo sapien
gaaaatgagtaattctcaaaggagtggcttaga

SEQ ID NO: 904950 - DNA, 33 bp, Homo sapien
gaaaatgagtaattctgaaaggagtggcttaga

SEQ ID NO: 904951 - DNA, 33 bp, Homo sapien
cactctaatcaactctaaagtgtctttccttca

SEQ ID NO: 904952 - DNA, 33 bp, Homo sapien
cactctaatcaactctgaagtgtctttccttca

SEQ ID NO: 904953 - DNA, 33 bp, Homo sapien
gtcctctgcatgcatcactgtgtccttgtgaac

SEQ ID NO: 904954 - DNA, 33 bp, Homo sapien
gtcctctgcatgcatcgctgtgtccttgtgaac

SEQ ID NO: 904955 - DNA, 33 bp, Homo sapien
ttgttagcgcgcttcgcactccttggctttttt

SEQ ID NO: 904956 - DNA, 33 bp, Homo sapien
ttgttagcgcgcttcgtactccttggctttttt

SEQ ID NO: 904957 - DNA, 33 bp, Homo sapien
aattagccgggcatggcaacacgcacctatagt

SEQ ID NO: 904958 - DNA, 33 bp, Homo sapien
aattagccgggcatgggaacacgcacctatagt

SEQ ID NO: 904959 - DNA, 33 bp, Homo sapien
caagacatggggaaaactgagatacccagggcc

SEQ ID NO: 904960 - DNA, 33 bp, Homo sapien
caagacatggggaaaattgagatacccagggcc

SEQ ID NO: 904961 - DNA, 33 bp, Homo sapien
catgtcaaggacaagacgggaagcatgtccaga

SEQ ID NO: 904962 - DNA, 33 bp, Homo sapien
catgtcaaggacaagatgggaagcatgtccaga

SEQ ID NO: 904963 - DNA, 33 bp, Homo sapien
tgctaaaaatgataaaaggagggataaacagaa

SEQ ID NO: 904964 - DNA, 33 bp, Homo sapien
tgctaaaaatgataaacggagggataaacagaa

SEQ ID NO: 904965 - DNA, 33 bp, Homo sapien
tgttgaaaaatatggccagatgttagccctccc

SEQ ID NO: 904966 - DNA, 33 bp, Homo sapien
tgttgaaaaatatggcgagatgttagccctccc

SEQ ID NO: 904967 - DNA, 33 bp, Homo sapien
atccatatggaatataggccacctcagataact

SEQ ID NO: 904968 - DNA, 33 bp, Homo sapien
atccatatggaatatatgccacctcagataact

SEQ ID NO: 904969 - DNA, 33 bp, Homo sapien
aaaaaaagtgcttccagaagagcttgctgggac

SEQ ID NO: 904970 - DNA, 33 bp, Homo sapien
aaaaaaagtgcttccataagagcttgctgggac

SEQ ID NO: 904971 - DNA, 33 bp, Homo sapien
tggtagcaggcacagaagtaggaccacagtcct

SEQ ID NO: 904972 - DNA, 33 bp, Homo sapien
tggtagcaggcacagaggtaggaccacagtcct

SEQ ID NO: 904973 - DNA, 33 bp, Homo sapien
tactattctacagtgaaggtcatcatcaaaagt

SEQ ID NO: 904974 - DNA, 33 bp, Homo sapien
tactattctacagtgacggtcatcatcaaaagt

SEQ ID NO: 904975 - DNA, 33 bp, Homo sapien
ttaagtggaacaacaaattcccctctctgctac

SEQ ID NO: 904976 - DNA, 33 bp, Homo sapien
ttaagtggaacaacaacttcccctctctgctac

SEQ ID NO: 904977 - DNA, 33 bp, Homo sapien
ctcgccagattctcaacgaactactgaccttaa

SEQ ID NO: 904978 - DNA, 33 bp, Homo sapien
ctcgccagattctcaatgaactactgaccttaa

SEQ ID NO: 904979 - DNA, 33 bp, Homo sapien
agaaatcactttatacccactcacatggctaaa

SEQ ID NO: 904980 - DNA, 33 bp, Homo sapien
agaaatcactttatacgcactcacatggctaaa

SEQ ID NO: 904981 - DNA, 33 bp, Homo sapien
aggcttagaaaatgtgcaaattgtggtgatggt

SEQ ID NO: 904982 - DNA, 33 bp, Homo sapien
aggcttagaaaatgtggaaattgtggtgatggt

SEQ ID NO: 904983 - DNA, 33 bp, Homo sapien
ccagaacaaagcgacccagcaagtccttgcttc

SEQ ID NO: 904984 - DNA, 33 bp, Homo sapien
ccagaacaaagcgacctagcaagtccttgcttc

SEQ ID NO: 904985 - DNA, 33 bp, Homo sapien
agcaagtggtgcttgacgaatgcagccacaggg

SEQ ID NO: 904986 - DNA, 33 bp, Homo sapien
agcaagtggtgcttgatgaatgcagccacaggg

SEQ ID NO: 904987 - DNA, 33 bp, Homo sapien
caaaggtttgcaggaaagcttttgacatatggg

SEQ ID NO: 904988 - DNA, 33 bp, Homo sapien
caaaggtttgcaggaacgcttttgacatatggg

SEQ ID NO: 904989 - DNA, 33 bp, Homo sapien
gcagttaccctcttcaaaaacaaagcaggcacc

SEQ ID NO: 904990 - DNA, 33 bp, Homo sapien
gcagttaccctcttcagaaacaaagcaggcacc

SEQ ID NO: 904991 - DNA, 33 bp, Homo sapien
aacaaaagttccatgaaacattagtgaatcccc

SEQ ID NO: 904992 - DNA, 33 bp, Homo sapien
aacaaaagttccatgagacattagtgaatcccc

SEQ ID NO: 904993 - DNA, 33 bp, Homo sapien
atgcccacgtctgtctcaagtttcaaggacctt

SEQ ID NO: 904994 - DNA, 33 bp, Homo sapien
atgcccacgtctgtcttaagtttcaaggacctt

SEQ ID NO: 904995 - DNA, 33 bp, Homo sapien
ctaggtgaacgttttagcttgcccttgtcgcat

SEQ ID NO: 904996 - DNA, 33 bp, Homo sapien
ctaggtgaacgttttatcttgcccttgtcgcat

SEQ ID NO: 904997 - DNA, 33 bp, Homo sapien
tctttttgagatggtaaaagtgtcctggaattg

SEQ ID NO: 904998 - DNA, 33 bp, Homo sapien
tctttttgagatggtacaagtgtcctggaattg

SEQ ID NO: 904999 - DNA, 33 bp, Homo sapien
agttagcacagacctcacaggttaagggctcag

SEQ ID NO: 905000 - DNA, 33 bp, Homo sapien
agttagcacagacctcgcaggttaagggctcag

SEQ ID NO: 905001 - DNA, 33 bp, Homo sapien
tccgtggcacccgctcacttggcacagaagggt

SEQ ID NO: 905002 - DNA, 33 bp, Homo sapien
tccgtggcacccgctctcttggcacagaagggt

SEQ ID NO: 905003 - DNA, 33 bp, Homo sapien
tactttaagtgaaaaaagcaaaacacaaacaag

SEQ ID NO: 905004 - DNA, 33 bp, Homo sapien
tactttaagtgaaaaaggcaaaacacaaacaag

SEQ ID NO: 905005 - DNA, 33 bp, Homo sapien
agagtcacctgtgtagaaatcaggacagacata

SEQ ID NO: 905006 - DNA, 33 bp, Homo sapien
agagtcacctgtgtagcaatcaggacagacata

SEQ ID NO: 905007 - DNA, 33 bp, Homo sapien
cttcaataaaaagtaaagtcatggctgggagca

SEQ ID NO: 905008 - DNA, 33 bp, Homo sapien
cttcaataaaaagtaatgtcatggctgggagca

SEQ ID NO: 905009 - DNA, 33 bp, Homo sapien
aacgttgttgtcaccacaaaaataaacccccta

SEQ ID NO: 905010 - DNA, 33 bp, Homo sapien
aacgttgttgtcaccataaaaataaacccccta

SEQ ID NO: 905011 - DNA, 33 bp, Homo sapien
gctagaatgtggtatacccatgtgatagaatat

SEQ ID NO: 905012 - DNA, 33 bp, Homo sapien
gctagaatgtggtatatccatgtgatagaatat

SEQ ID NO: 905013 - DNA, 33 bp, Homo sapien
attcctcctacttggccgagggtgaagagttat

SEQ ID NO: 905014 - DNA, 33 bp, Homo sapien
attcctcctacttggctgagggtgaagagttat

SEQ ID NO: 905015 - DNA, 33 bp, Homo sapien
aagactagatggagtgaaacccagagggccatg

SEQ ID NO: 905016 - DNA, 33 bp, Homo sapien
aagactagatggagtggaacccagagggccatg

SEQ ID NO: 905017 - DNA, 33 bp, Homo sapien
gccatgtgtaagcagacggcaaggacacaggct

SEQ ID NO: 905018 - DNA, 33 bp, Homo sapien
gccatgtgtaagcagatggcaaggacacaggct

SEQ ID NO: 905019 - DNA, 33 bp, Homo sapien
aggactccgctggaacggtctcaggcttgcaaa

SEQ ID NO: 905020 - DNA, 33 bp, Homo sapien
aggactccgctggaactgtctcaggcttgcaaa

SEQ ID NO: 905021 - DNA, 33 bp, Homo sapien
tcggacaggttgcaccacttccagacgtccacc

SEQ ID NO: 905022 - DNA, 33 bp, Homo sapien
tcggacaggttgcaccgcttccagacgtccacc

SEQ ID NO: 905023 - DNA, 33 bp, Homo sapien
ctggcccatcaacaggaaagagctgcctcctgc

SEQ ID NO: 905024 - DNA, 33 bp, Homo sapien
ctggcccatcaacagggaagagctgcctcctgc

SEQ ID NO: 905025 - DNA, 33 bp, Homo sapien
ttcaggatgttctagacgaagctagatggactc

SEQ ID NO: 905026 - DNA, 33 bp, Homo sapien
ttcaggatgttctagatgaagctagatggactc

SEQ ID NO: 905027 - DNA, 33 bp, Homo sapien
gtgcgttggaggcagcaatagtgtgtgtattct

SEQ ID NO: 905028 - DNA, 33 bp, Homo sapien
gtgcgttggaggcagcgatagtgtgtgtattct

SEQ ID NO: 905029 - DNA, 33 bp, Homo sapien
tccacatctgcaaaatgagacattaataatgat

SEQ ID NO: 905030 - DNA, 33 bp, Homo sapien
tccacatctgcaaaattagacattaataatgat

SEQ ID NO: 905031 - DNA, 33 bp, Homo sapien
gctgccctactgaatccagccctgagaggtgac

SEQ ID NO: 905032 - DNA, 33 bp, Homo sapien
gctgccctactgaatctagccctgagaggtgac

SEQ ID NO: 905033 - DNA, 33 bp, Homo sapien
gaatgaccgctcatagaaagcagccgccatgag

SEQ ID NO: 905034 - DNA, 33 bp, Homo sapien
gaatgaccgctcataggaagcagccgccatgag

SEQ ID NO: 905035 - DNA, 33 bp, Homo sapien
ctactcgtaagtgagaagagtgaatgccagcaa

SEQ ID NO: 905036 - DNA, 33 bp, Homo sapien
ctactcgtaagtgagaggagtgaatgccagcaa

SEQ ID NO: 905037 - DNA, 33 bp, Homo sapien
acacttccattgatgacccgttgcaacccactg

SEQ ID NO: 905038 - DNA, 33 bp, Homo sapien
acacttccattgatgagccgttgcaacccactg

SEQ ID NO: 905039 - DNA, 33 bp, Homo sapien
gtaggtcagaggtgccaaaactggtcttttccg

SEQ ID NO: 905040 - DNA, 33 bp, Homo sapien
gtaggtcagaggtgccgaaactggtcttttccg

SEQ ID NO: 905041 - DNA, 33 bp, Homo sapien
tattcatctccatcaccagttcaaaggtgagta

SEQ ID NO: 905042 - DNA, 33 bp, Homo sapien
tattcatctccatcactagttcaaaggtgagta

SEQ ID NO: 905043 - DNA, 33 bp, Homo sapien
ctgaatcaagtactcacagggtctaactttagc

SEQ ID NO: 905044 - DNA, 33 bp, Homo sapien
ctgaatcaagtactcatagggtctaactttagc

SEQ ID NO: 905045 - DNA, 33 bp, Homo sapien
aagtttattctttctacggctttaatcctttct

SEQ ID NO: 905046 - DNA, 33 bp, Homo sapien
aagtttattctttctatggctttaatcctttct

SEQ ID NO: 905047 - DNA, 33 bp, Homo sapien
ggttcctgaacatttaagttgctctctagcttt

SEQ ID NO: 905048 - DNA, 33 bp, Homo sapien
ggttcctgaacatttaggttgctctctagcttt

SEQ ID NO: 905049 - DNA, 33 bp, Homo sapien
gacccaggtgcagagaagttatgcttcgtggcc

SEQ ID NO: 905050 - DNA, 33 bp, Homo sapien
gacccaggtgcagagacgttatgcttcgtggcc

SEQ ID NO: 905051 - DNA, 33 bp, Homo sapien
gggactgcagagtggaagctgttgtttctggga

SEQ ID NO: 905052 - DNA, 33 bp, Homo sapien
gggactgcagagtggacgctgttgtttctggga

SEQ ID NO: 905053 - DNA, 33 bp, Homo sapien
aagaaagagatcataaaaatgaaatgccaggga

SEQ ID NO: 905054 - DNA, 33 bp, Homo sapien
aagaaagagatcataataatgaaatgccaggga

SEQ ID NO: 905055 - DNA, 33 bp, Homo sapien
actaatatagtccagaaagtccagattttactc

SEQ ID NO: 905056 - DNA, 33 bp, Homo sapien
actaatatagtccagatagtccagattttactc

SEQ ID NO: 905057 - DNA, 33 bp, Homo sapien
tgatcaatgctccccactgaaaaataaactaca

SEQ ID NO: 905058 - DNA, 33 bp, Homo sapien
tgatcaatgctccccagtgaaaaataaactaca

SEQ ID NO: 905059 - DNA, 33 bp, Homo sapien
tcatgagattcctttacaaacctagtgaccagc

SEQ ID NO: 905060 - DNA, 33 bp, Homo sapien
tcatgagattcctttagaaacctagtgaccagc

SEQ ID NO: 905061 - DNA, 33 bp, Homo sapien
gaatctctagtggttacaaacaaaattctcttt

SEQ ID NO: 905062 - DNA, 33 bp, Homo sapien
gaatctctagtggttagaaacaaaattctcttt

SEQ ID NO: 905063 - DNA, 33 bp, Homo sapien
ccatctccaatagtacaacaaaggccagctgga

SEQ ID NO: 905064 - DNA, 33 bp, Homo sapien
ccatctccaatagtaccacaaaggccagctgga

SEQ ID NO: 905065 - DNA, 33 bp, Homo sapien
tacattccaggtcagaccatgtcccatctttct

SEQ ID NO: 905066 - DNA, 33 bp, Homo sapien
tacattccaggtcagatcatgtcccatctttct

SEQ ID NO: 905067 - DNA, 33 bp, Homo sapien
ctaagacaacacagaaagattttgcttagcaaa

SEQ ID NO: 905068 - DNA, 33 bp, Homo sapien
ctaagacaacacagaatgattttgcttagcaaa

SEQ ID NO: 905069 - DNA, 33 bp, Homo sapien
gtccattctcaagccaatcaaagagcacccact

SEQ ID NO: 905070 - DNA, 33 bp, Homo sapien
gtccattctcaagccagtcaaagagcacccact

SEQ ID NO: 905071 - DNA, 33 bp, Homo sapien
aattattaaacagtagaaacactagcaaaattt

SEQ ID NO: 905072 - DNA, 33 bp, Homo sapien
aattattaaacagtaggaacactagcaaaattt

SEQ ID NO: 905073 - DNA, 33 bp, Homo sapien
caaggtgacctctgaaccagttcctggcgaggg

SEQ ID NO: 905074 - DNA, 33 bp, Homo sapien
caaggtgacctctgaatcagttcctggcgaggg

SEQ ID NO: 905075 - DNA, 33 bp, Homo sapien
gattggagtaagagaacgggtgtgtaggtaccc

SEQ ID NO: 905076 - DNA, 33 bp, Homo sapien
gattggagtaagagaatgggtgtgtaggtaccc

SEQ ID NO: 905077 - DNA, 33 bp, Homo sapien
aaatcacagatagttccatatccaattacagtt

SEQ ID NO: 905078 - DNA, 33 bp, Homo sapien
aaatcacagatagttcgatatccaattacagtt

SEQ ID NO: 905079 - DNA, 33 bp, Homo sapien
ccacctgcacggacccaatatctctggcgcgtc

SEQ ID NO: 905080 - DNA, 33 bp, Homo sapien
ccacctgcacggacccgatatctctggcgcgtc

SEQ ID NO: 905081 - DNA, 33 bp, Homo sapien
tttccaaacagtgacacggaggcacacagagac

SEQ ID NO: 905082 - DNA, 33 bp, Homo sapien
tttccaaacagtgacatggaggcacacagagac

SEQ ID NO: 905083 - DNA, 33 bp, Homo sapien
aggctaacctggtaccaccgattcatagtcttt

SEQ ID NO: 905084 - DNA, 33 bp, Homo sapien
aggctaacctggtaccgccgattcatagtcttt

SEQ ID NO: 905085 - DNA, 33 bp, Homo sapien
aaccccacactgggaagactcgccacaatgcct

SEQ ID NO: 905086 - DNA, 33 bp, Homo sapien
aaccccacactgggaatactcgccacaatgcct

SEQ ID NO: 905087 - DNA, 33 bp, Homo sapien
gggatcaagatcaaacacctaagcttggatgaa

SEQ ID NO: 905088 - DNA, 33 bp, Homo sapien
gggatcaagatcaaacgcctaagcttggatgaa

SEQ ID NO: 905089 - DNA, 33 bp, Homo sapien
aatttcaaaagcttgacaaaaattatctgagag

SEQ ID NO: 905090 - DNA, 33 bp, Homo sapien
aatttcaaaagcttgagaaaaattatctgagag

SEQ ID NO: 905091 - DNA, 33 bp, Homo sapien
attttcaggaatataacaacttagatgatttac

SEQ ID NO: 905092 - DNA, 33 bp, Homo sapien
attttcaggaatataagaacttagatgatttac

SEQ ID NO: 905093 - DNA, 33 bp, Homo sapien
tggcaggatggaaacactggtgacatagcttcc

SEQ ID NO: 905094 - DNA, 33 bp, Homo sapien
tggcaggatggaaacagtggtgacatagcttcc

SEQ ID NO: 905095 - DNA, 33 bp, Homo sapien
gatagataatctagccaggagaatgaaggttga

SEQ ID NO: 905096 - DNA, 33 bp, Homo sapien
gatagataatctagccgggagaatgaaggttga

SEQ ID NO: 905097 - DNA, 33 bp, Homo sapien
tcccctgtactgccaacgtttttcataagctca

SEQ ID NO: 905098 - DNA, 33 bp, Homo sapien
tcccctgtactgccaatgtttttcataagctca

SEQ ID NO: 905099 - DNA, 33 bp, Homo sapien
tgagattctcttcttccaggactgcaacttggt

SEQ ID NO: 905100 - DNA, 33 bp, Homo sapien
tgagattctcttcttctaggactgcaacttggt

SEQ ID NO: 905101 - DNA, 33 bp, Homo sapien
tcttttttatgtgtgaggataacacaagatcta

SEQ ID NO: 905102 - DNA, 33 bp, Homo sapien
tcttttttatgtgtgatgataacacaagatcta

SEQ ID NO: 905103 - DNA, 33 bp, Homo sapien
aagtagcagacataaagtgaggtttcttctgag

SEQ ID NO: 905104 - DNA, 33 bp, Homo sapien
aagtagcagacataaattgaggtttcttctgag

SEQ ID NO: 905105 - DNA, 33 bp, Homo sapien
aggcctgtcttcgtgacccccagtggtgcatat

SEQ ID NO: 905106 - DNA, 33 bp, Homo sapien
aggcctgtcttcgtgatccccagtggtgcatat

SEQ ID NO: 905107 - DNA, 33 bp, Homo sapien
gtaaatagggatattagattggctttaactctc

SEQ ID NO: 905108 - DNA, 33 bp, Homo sapien
gtaaatagggatattatattggctttaactctc

SEQ ID NO: 905109 - DNA, 33 bp, Homo sapien
gtgcccttgctgaagaagagttgcaatcatttg

SEQ ID NO: 905110 - DNA, 33 bp, Homo sapien
gtgcccttgctgaagaggagttgcaatcatttg

SEQ ID NO: 905111 - DNA, 33 bp, Homo sapien
tcaggcaatctgaagcaccaggctcaaagggaa

SEQ ID NO: 905112 - DNA, 33 bp, Homo sapien
tcaggcaatctgaagcgccaggctcaaagggaa

SEQ ID NO: 905113 - DNA, 33 bp, Homo sapien
tatggtgctcccttgacctgaacggcagcctgt

SEQ ID NO: 905114 - DNA, 33 bp, Homo sapien
tatggtgctcccttgatctgaacggcagcctgt

SEQ ID NO: 905115 - DNA, 33 bp, Homo sapien
taggttctgaaaactgccaggtcaatttggaga

SEQ ID NO: 905116 - DNA, 33 bp, Homo sapien
taggttctgaaaactggcaggtcaatttggaga

SEQ ID NO: 905117 - DNA, 33 bp, Homo sapien
taagagcccaggggtcccgagtttccacatgca

SEQ ID NO: 905118 - DNA, 33 bp, Homo sapien
taagagcccaggggtctcgagtttccacatgca

SEQ ID NO: 905119 - DNA, 33 bp, Homo sapien
gtattagttcacaaacaatttaagaactttaag

SEQ ID NO: 905120 - DNA, 33 bp, Homo sapien
gtattagttcacaaactatttaagaactttaag

SEQ ID NO: 905121 - DNA, 33 bp, Homo sapien
gtgtgtatgtagaagacacgaagcagtcttaaa

SEQ ID NO: 905122 - DNA, 33 bp, Homo sapien
gtgtgtatgtagaagatacgaagcagtcttaaa

SEQ ID NO: 905123 - DNA, 33 bp, Homo sapien
agcaaagcccacccaacgatgaatataatcctt

SEQ ID NO: 905124 - DNA, 33 bp, Homo sapien
agcaaagcccacccaatgatgaatataatcctt

SEQ ID NO: 905125 - DNA, 33 bp, Homo sapien
gcattcattttgaatacaagttggacttctttt

SEQ ID NO: 905126 - DNA, 33 bp, Homo sapien
gcattcattttgaatataagttggacttctttt

SEQ ID NO: 905127 - DNA, 33 bp, Homo sapien
ctcatgaaaggacaagacaagatacatctagat

SEQ ID NO: 905128 - DNA, 33 bp, Homo sapien
ctcatgaaaggacaagtcaagatacatctagat

SEQ ID NO: 905129 - DNA, 33 bp, Homo sapien
acaggacctttctgggaagatagaagcactcag

SEQ ID NO: 905130 - DNA, 33 bp, Homo sapien
acaggacctttctgggcagatagaagcactcag

SEQ ID NO: 905131 - DNA, 33 bp, Homo sapien
gactagatgtggatctaacaacatctggatcaa

SEQ ID NO: 905132 - DNA, 33 bp, Homo sapien
gactagatgtggatctgacaacatctggatcaa

SEQ ID NO: 905133 - DNA, 33 bp, Homo sapien
atgaaataggaatacaatagcatttagatatgc

SEQ ID NO: 905134 - DNA, 33 bp, Homo sapien
atgaaataggaatacagtagcatttagatatgc

SEQ ID NO: 905135 - DNA, 33 bp, Homo sapien
gcccctgcacatccaccctgcagggagaatcag

SEQ ID NO: 905136 - DNA, 33 bp, Homo sapien
gcccctgcacatccactctgcagggagaatcag

SEQ ID NO: 905137 - DNA, 33 bp, Homo sapien
aaacttcttatttgatccatgtgttacttagaa

SEQ ID NO: 905138 - DNA, 33 bp, Homo sapien
aaacttcttatttgattcatgtgttacttagaa

SEQ ID NO: 905139 - DNA, 33 bp, Homo sapien
acagtcttagaagagactcacacaaaatctgtt

SEQ ID NO: 905140 - DNA, 33 bp, Homo sapien
acagtcttagaagagattcacacaaaatctgtt

SEQ ID NO: 905141 - DNA, 33 bp, Homo sapien
ggagaactccctgagacgtaaagtaataaaata

SEQ ID NO: 905142 - DNA, 33 bp, Homo sapien
ggagaactccctgagatgtaaagtaataaaata

SEQ ID NO: 905143 - DNA, 33 bp, Homo sapien
gtgtccgatgattcaagtcaagtctgacaccaa

SEQ ID NO: 905144 - DNA, 33 bp, Homo sapien
gtgtccgatgattcaattcaagtctgacaccaa

SEQ ID NO: 905145 - DNA, 33 bp, Homo sapien
actcacagaatggtgaaacgtgcttattttcca

SEQ ID NO: 905146 - DNA, 33 bp, Homo sapien
actcacagaatggtgagacgtgcttattttcca

SEQ ID NO: 905147 - DNA, 33 bp, Homo sapien
gacacttcaactggggaaagcagttttcctgtc

SEQ ID NO: 905148 - DNA, 33 bp, Homo sapien
gacacttcaactgggggaagcagttttcctgtc

SEQ ID NO: 905149 - DNA, 33 bp, Homo sapien
gggtcaggaagcaaaacctctgggggtccatct

SEQ ID NO: 905150 - DNA, 33 bp, Homo sapien
gggtcaggaagcaaaatctctgggggtccatct

SEQ ID NO: 905151 - DNA, 33 bp, Homo sapien
gacctttcataaaccccgagaagcagagaaaaa

SEQ ID NO: 905152 - DNA, 33 bp, Homo sapien
gacctttcataaaccctgagaagcagagaaaaa

SEQ ID NO: 905153 - DNA, 33 bp, Homo sapien
gaaaagcatgaaaatcagaaagcgaaaataaaa

SEQ ID NO: 905154 - DNA, 33 bp, Homo sapien
gaaaagcatgaaaatcggaaagcgaaaataaaa

SEQ ID NO: 905155 - DNA, 33 bp, Homo sapien
tgcttttccgttaaggccagaaccgaagatgaa

SEQ ID NO: 905156 - DNA, 33 bp, Homo sapien
tgcttttccgttaaggtcagaaccgaagatgaa

SEQ ID NO: 905157 - DNA, 33 bp, Homo sapien
taatccagattgccaaagataggtcaatattta

SEQ ID NO: 905158 - DNA, 33 bp, Homo sapien
taatccagattgccaacgataggtcaatattta

SEQ ID NO: 905159 - DNA, 33 bp, Homo sapien
tacctgtctcagagaaaagtccccatggagatt

SEQ ID NO: 905160 - DNA, 33 bp, Homo sapien
tacctgtctcagagaagagtccccatggagatt

SEQ ID NO: 905161 - DNA, 33 bp, Homo sapien
aagacagcatgagctacaatacggaaaatgctt

SEQ ID NO: 905162 - DNA, 33 bp, Homo sapien
aagacagcatgagctataatacggaaaatgctt

SEQ ID NO: 905163 - DNA, 33 bp, Homo sapien
tttttacttattagagaaaacatgaacatctat

SEQ ID NO: 905164 - DNA, 33 bp, Homo sapien
tttttacttattagaggaaacatgaacatctat

SEQ ID NO: 905165 - DNA, 33 bp, Homo sapien
tcaagatacacaatgaataaaggacagtctgtt

SEQ ID NO: 905166 - DNA, 33 bp, Homo sapien
tcaagatacacaatgagtaaaggacagtctgtt

SEQ ID NO: 905167 - DNA, 33 bp, Homo sapien
agtgatggaaatgtgaacatggcctggtcttga

SEQ ID NO: 905168 - DNA, 33 bp, Homo sapien
agtgatggaaatgtgagcatggcctggtcttga

SEQ ID NO: 905169 - DNA, 33 bp, Homo sapien
actaggatccaatcaagattcttggattgcaac

SEQ ID NO: 905170 - DNA, 33 bp, Homo sapien
actaggatccaatcaatattcttggattgcaac

SEQ ID NO: 905171 - DNA, 33 bp, Homo sapien
atctgccggacaaggggagtatattagtcaggg

SEQ ID NO: 905172 - DNA, 33 bp, Homo sapien
atctgccggacaagggtagtatattagtcaggg

SEQ ID NO: 905173 - DNA, 33 bp, Homo sapien
gtcatataggtacaatcagtgacccaaaagcaa

SEQ ID NO: 905174 - DNA, 33 bp, Homo sapien
gtcatataggtacaattagtgacccaaaagcaa

SEQ ID NO: 905175 - DNA, 33 bp, Homo sapien
tcacactggtcaaaaactgggtatttcaaggct

SEQ ID NO: 905176 - DNA, 33 bp, Homo sapien
tcacactggtcaaaaagtgggtatttcaaggct

SEQ ID NO: 905177 - DNA, 33 bp, Homo sapien
acttagtaaaactgaacagctgcagcgaggcgc

SEQ ID NO: 905178 - DNA, 33 bp, Homo sapien
acttagtaaaactgaatagctgcagcgaggcgc

SEQ ID NO: 905179 - DNA, 33 bp, Homo sapien
atgggcttagattacaagtttatgacaaggagt

SEQ ID NO: 905180 - DNA, 33 bp, Homo sapien
atgggcttagattacaggtttatgacaaggagt

SEQ ID NO: 905181 - DNA, 33 bp, Homo sapien
acgtagagacagatcaaatgaggagaccggcag

SEQ ID NO: 905182 - DNA, 33 bp, Homo sapien
acgtagagacagatcagatgaggagaccggcag

SEQ ID NO: 905183 - DNA, 33 bp, Homo sapien
ataccaacatgtaccaatgggaattgtggccca

SEQ ID NO: 905184 - DNA, 33 bp, Homo sapien
ataccaacatgtaccactgggaattgtggccca

SEQ ID NO: 905185 - DNA, 33 bp, Homo sapien
gacttcaaacaaagtacgaaaaagacagatgtg

SEQ ID NO: 905186 - DNA, 33 bp, Homo sapien
gacttcaaacaaagtaggaaaaagacagatgtg

SEQ ID NO: 905187 - DNA, 33 bp, Homo sapien
atacattccagggtagacactttatggtggtgc

SEQ ID NO: 905188 - DNA, 33 bp, Homo sapien
atacattccagggtaggcactttatggtggtgc

SEQ ID NO: 905189 - DNA, 33 bp, Homo sapien
tggctaaaaaacatggcagatgtatgcttaact

SEQ ID NO: 905190 - DNA, 33 bp, Homo sapien
tggctaaaaaacatggtagatgtatgcttaact

SEQ ID NO: 905191 - DNA, 33 bp, Homo sapien
agttttcttaacaggaacatgaactggttgaac

SEQ ID NO: 905192 - DNA, 33 bp, Homo sapien
agttttcttaacaggagcatgaactggttgaac

SEQ ID NO: 905193 - DNA, 33 bp, Homo sapien
tccattatttgaggtcgccagcatatccatttg

SEQ ID NO: 905194 - DNA, 33 bp, Homo sapien
tccattatttgaggtctccagcatatccatttg

SEQ ID NO: 905195 - DNA, 33 bp, Homo sapien
aaacagtagaaggaagaacagcaccctttaagg

SEQ ID NO: 905196 - DNA, 33 bp, Homo sapien
aaacagtagaaggaaggacagcaccctttaagg

SEQ ID NO: 905197 - DNA, 33 bp, Homo sapien
aagtttcaggtgaacaagtgaagtggccagagc

SEQ ID NO: 905198 - DNA, 33 bp, Homo sapien
aagtttcaggtgaacaggtgaagtggccagagc

SEQ ID NO: 905199 - DNA, 33 bp, Homo sapien
gcaggacctgaagctacgtgcacagtcgtcccc

SEQ ID NO: 905200 - DNA, 33 bp, Homo sapien
gcaggacctgaagctatgtgcacagtcgtcccc

SEQ ID NO: 905201 - DNA, 33 bp, Homo sapien
attaagtaaaacattacggcaatcagtttcaaa

SEQ ID NO: 905202 - DNA, 33 bp, Homo sapien
attaagtaaaacattatggcaatcagtttcaaa

SEQ ID NO: 905203 - DNA, 33 bp, Homo sapien
gtgagatgtagtcatacactgattcataagctg

SEQ ID NO: 905204 - DNA, 33 bp, Homo sapien
gtgagatgtagtcatatactgattcataagctg

SEQ ID NO: 905205 - DNA, 33 bp, Homo sapien
gcaaattctccctggtaaaaggagcctggcttc

SEQ ID NO: 905206 - DNA, 33 bp, Homo sapien
gcaaattctccctggtgaaaggagcctggcttc

SEQ ID NO: 905207 - DNA, 33 bp, Homo sapien
gcctcaggaacaaagacaaaaaattgacaggct

SEQ ID NO: 905208 - DNA, 33 bp, Homo sapien
gcctcaggaacaaagagaaaaaattgacaggct

SEQ ID NO: 905209 - DNA, 33 bp, Homo sapien
aacatttcaaagaacaacaaagccaagaaaaag

SEQ ID NO: 905210 - DNA, 33 bp, Homo sapien
aacatttcaaagaacaccaaagccaagaaaaag

SEQ ID NO: 905211 - DNA, 33 bp, Homo sapien
atggccagtaacagagaacaagatgacgactaa

SEQ ID NO: 905212 - DNA, 33 bp, Homo sapien
atggccagtaacagaggacaagatgacgactaa

SEQ ID NO: 905213 - DNA, 33 bp, Homo sapien
tggccacgaatatgccactagactgcacacagt

SEQ ID NO: 905214 - DNA, 33 bp, Homo sapien
tggccacgaatatgccgctagactgcacacagt

SEQ ID NO: 905215 - DNA, 33 bp, Homo sapien
gcaagtttccttgatgaaagatgctgtttctcc

SEQ ID NO: 905216 - DNA, 33 bp, Homo sapien
gcaagtttccttgatggaagatgctgtttctcc

SEQ ID NO: 905217 - DNA, 33 bp, Homo sapien
actcaagtagcaacataacctcctccctgcggc

SEQ ID NO: 905218 - DNA, 33 bp, Homo sapien
actcaagtagcaacattacctcctccctgcggc

SEQ ID NO: 905219 - DNA, 33 bp, Homo sapien
atagagagaagttaaaaaaatcattatgaagag

SEQ ID NO: 905220 - DNA, 33 bp, Homo sapien
atagagagaagttaaagaaatcattatgaagag

SEQ ID NO: 905221 - DNA, 33 bp, Homo sapien
gcatatactggtcaaactatttactaaaaatca

SEQ ID NO: 905222 - DNA, 33 bp, Homo sapien
gcatatactggtcaaattatttactaaaaatca

SEQ ID NO: 905223 - DNA, 33 bp, Homo sapien
tcatgtgtgttcttcactattttgtaactgtta

SEQ ID NO: 905224 - DNA, 33 bp, Homo sapien
tcatgtgtgttcttcattattttgtaactgtta

SEQ ID NO: 905225 - DNA, 33 bp, Homo sapien
tgggctcagagaagtgcaacagccttgcccaat

SEQ ID NO: 905226 - DNA, 33 bp, Homo sapien
tgggctcagagaagtggaacagccttgcccaat

SEQ ID NO: 905227 - DNA, 33 bp, Homo sapien
tctccgcacatctggccgatttactaccaatgg

SEQ ID NO: 905228 - DNA, 33 bp, Homo sapien
tctccgcacatctggctgatttactaccaatgg

SEQ ID NO: 905229 - DNA, 33 bp, Homo sapien
actgactcttttgaacaaaacatgcacaataga

SEQ ID NO: 905230 - DNA, 33 bp, Homo sapien
actgactcttttgaacgaaacatgcacaataga

SEQ ID NO: 905231 - DNA, 33 bp, Homo sapien
gtgacttgactacaatcatacttacctcataag

SEQ ID NO: 905232 - DNA, 33 bp, Homo sapien
gtgacttgactacaattatacttacctcataag

SEQ ID NO: 905233 - DNA, 33 bp, Homo sapien
caccaactctagttcacacctcattgttgctgc

SEQ ID NO: 905234 - DNA, 33 bp, Homo sapien
caccaactctagttcatacctcattgttgctgc

SEQ ID NO: 905235 - DNA, 33 bp, Homo sapien
gatggataaatccacaaagtttcttaacagttc

SEQ ID NO: 905236 - DNA, 33 bp, Homo sapien
gatggataaatccacacagtttcttaacagttc

SEQ ID NO: 905237 - DNA, 33 bp, Homo sapien
cccagcagttctcaaacgcagaaaacaatgccc

SEQ ID NO: 905238 - DNA, 33 bp, Homo sapien
cccagcagttctcaaatgcagaaaacaatgccc

SEQ ID NO: 905239 - DNA, 33 bp, Homo sapien
ctaggccctgcttcacaggcaatgaacagtggg

SEQ ID NO: 905240 - DNA, 33 bp, Homo sapien
ctaggccctgcttcacgggcaatgaacagtggg

SEQ ID NO: 905241 - DNA, 33 bp, Homo sapien
cattccaagggtagacacaccagcagagtcccg

SEQ ID NO: 905242 - DNA, 33 bp, Homo sapien
cattccaagggtagacgcaccagcagagtcccg

SEQ ID NO: 905243 - DNA, 33 bp, Homo sapien
tttgtacattaaaatacatctggcagttggggt

SEQ ID NO: 905244 - DNA, 33 bp, Homo sapien
tttgtacattaaaatatatctggcagttggggt

SEQ ID NO: 905245 - DNA, 33 bp, Homo sapien
gtctgtttttaaagagcatggaaaaatactgcc

SEQ ID NO: 905246 - DNA, 33 bp, Homo sapien
gtctgtttttaaagaggatggaaaaatactgcc

SEQ ID NO: 905247 - DNA, 33 bp, Homo sapien
taaaacaaggacattacctacactcacatagcc

SEQ ID NO: 905248 - DNA, 33 bp, Homo sapien
taaaacaaggacattatctacactcacatagcc

SEQ ID NO: 905249 - DNA, 33 bp, Homo sapien
tagagataagtaggtagatagactagatagatg

SEQ ID NO: 905250 - DNA, 33 bp, Homo sapien
tagagataagtaggtatatagactagatagatg

SEQ ID NO: 905251 - DNA, 33 bp, Homo sapien
tgtgatgagcagcaagccggttctgtaagtgtt

SEQ ID NO: 905252 - DNA, 33 bp, Homo sapien
tgtgatgagcagcaagtcggttctgtaagtgtt

SEQ ID NO: 905253 - DNA, 33 bp, Homo sapien
ctggggtctcaactcacgttttcaaacaaagca

SEQ ID NO: 905254 - DNA, 33 bp, Homo sapien
ctggggtctcaactcatgttttcaaacaaagca

SEQ ID NO: 905255 - DNA, 33 bp, Homo sapien
cttttatttcccattcaccaggcaacactgtgt

SEQ ID NO: 905256 - DNA, 33 bp, Homo sapien
cttttatttcccattccccaggcaacactgtgt

SEQ ID NO: 905257 - DNA, 33 bp, Homo sapien
ggtggctatgtgaacacaaggatgaacttttat

SEQ ID NO: 905258 - DNA, 33 bp, Homo sapien
ggtggctatgtgaacagaaggatgaacttttat

SEQ ID NO: 905259 - DNA, 33 bp, Homo sapien
agagatggcataatcaataacacaaatgaaaaa

SEQ ID NO: 905260 - DNA, 33 bp, Homo sapien
agagatggcataatcagtaacacaaatgaaaaa

SEQ ID NO: 905261 - DNA, 33 bp, Homo sapien
gacaggtggtgggttacagttaggtaggtgtac

SEQ ID NO: 905262 - DNA, 33 bp, Homo sapien
gacaggtggtgggttatagttaggtaggtgtac

SEQ ID NO: 905263 - DNA, 33 bp, Homo sapien
gagaaacatatatgccccacgccagctccagat

SEQ ID NO: 905264 - DNA, 33 bp, Homo sapien
gagaaacatatatgcctcacgccagctccagat

SEQ ID NO: 905265 - DNA, 33 bp, Homo sapien
tttaatatccattccactgaaaactgttcctct

SEQ ID NO: 905266 - DNA, 33 bp, Homo sapien
tttaatatccattccattgaaaactgttcctct

SEQ ID NO: 905267 - DNA, 33 bp, Homo sapien
cctgcattagctcaccaccctgttacctgagtt

SEQ ID NO: 905268 - DNA, 33 bp, Homo sapien
cctgcattagctcaccgccctgttacctgagtt

SEQ ID NO: 905269 - DNA, 33 bp, Homo sapien
ccatgttgtgaaagacacatcattgttcccacg

SEQ ID NO: 905270 - DNA, 33 bp, Homo sapien
ccatgttgtgaaagacgcatcattgttcccacg

SEQ ID NO: 905271 - DNA, 33 bp, Homo sapien
tttaatagatcattgcaatccaggctcttgcat

SEQ ID NO: 905272 - DNA, 33 bp, Homo sapien
tttaatagatcattgccatccaggctcttgcat

SEQ ID NO: 905273 - DNA, 33 bp, Homo sapien
cttggtttttgcctaacgttcttctcctgtgcc

SEQ ID NO: 905274 - DNA, 33 bp, Homo sapien
cttggtttttgcctaatgttcttctcctgtgcc

SEQ ID NO: 905275 - DNA, 33 bp, Homo sapien
gcatctgcagtgttgccaggaaaagagctctga

SEQ ID NO: 905276 - DNA, 33 bp, Homo sapien
gcatctgcagtgttgctaggaaaagagctctga

SEQ ID NO: 905277 - DNA, 33 bp, Homo sapien
taggcatttaagaaaacctctgttaaatcacca

SEQ ID NO: 905278 - DNA, 33 bp, Homo sapien
taggcatttaagaaaatctctgttaaatcacca

SEQ ID NO: 905279 - DNA, 33 bp, Homo sapien
cctacaagtagcaacaacaaatcctggggagaa

SEQ ID NO: 905280 - DNA, 33 bp, Homo sapien
cctacaagtagcaacagcaaatcctggggagaa

SEQ ID NO: 905281 - DNA, 33 bp, Homo sapien
agcccagagagaaatacgtttagaagatccaca

SEQ ID NO: 905282 - DNA, 33 bp, Homo sapien
agcccagagagaaataggtttagaagatccaca

SEQ ID NO: 905283 - DNA, 33 bp, Homo sapien
gctctgcatttataaacaccatacaaacggaga

SEQ ID NO: 905284 - DNA, 33 bp, Homo sapien
gctctgcatttataaagaccatacaaacggaga

SEQ ID NO: 905285 - DNA, 33 bp, Homo sapien
agaattatctctgggggagaaaggtgcaccagg

SEQ ID NO: 905286 - DNA, 33 bp, Homo sapien
agaattatctctggggtagaaaggtgcaccagg

SEQ ID NO: 905287 - DNA, 33 bp, Homo sapien; identical to SEQ ID NO: 905285

SEQ ID NO: 905288 - DNA, 33 bp, Homo sapien; identical to SEQ ID NO: 905286

SEQ ID NO: 905289 - DNA, 33 bp, Homo sapien
ttgggcatactctgggcacagaaagagcacagg

SEQ ID NO: 905290 - DNA, 33 bp, Homo sapien
ttgggcatactctgggtacagaaagagcacagg

SEQ ID NO: 905291 - DNA, 33 bp, Homo sapien
ttctgaaagattcttcacatctgccaagatcct

SEQ ID NO: 905292 - DNA, 33 bp, Homo sapien
ttctgaaagattcttcgcatctgccaagatcct

SEQ ID NO: 905293 - DNA, 33 bp, Homo sapien
agaagctccacgtctgaaaagctctcaactccg

SEQ ID NO: 905294 - DNA, 33 bp, Homo sapien
agaagctccacgtctggaaagctctcaactccg

SEQ ID NO: 905295 - DNA, 33 bp, Homo sapien
catactccaccataagaacaactagaagctcca

SEQ ID NO: 905296 - DNA, 33 bp, Homo sapien
catactccaccataaggacaactagaagctcca

SEQ ID NO: 905297 - DNA, 33 bp, Homo sapien
tgcttgagcaaaaagacagggttgactgcccaa

SEQ ID NO: 905298 - DNA, 33 bp, Homo sapien
tgcttgagcaaaaagagagggttgactgcccaa

SEQ ID NO: 905299 - DNA, 33 bp, Homo sapien
cacactgctattaaaccgcccagtggccaaagc

SEQ ID NO: 905300 - DNA, 33 bp, Homo sapien
cacactgctattaaactgcccagtggccaaagc

SEQ ID NO: 905301 - DNA, 33 bp, Homo sapien
gccaagcgatccaaacaaacatcacggtaataa

SEQ ID NO: 905302 - DNA, 33 bp, Homo sapien
gccaagcgatccaaacgaacatcacggtaataa

SEQ ID NO: 905303 - DNA, 33 bp, Homo sapien
tactcaattcttatcccggaatggcaagactga

SEQ ID NO: 905304 - DNA, 33 bp, Homo sapien
tactcaattcttatcctggaatggcaagactga

SEQ ID NO: 905305 - DNA, 33 bp, Homo sapien
agttgatgcatgaacactggagcacctgcccct

SEQ ID NO: 905306 - DNA, 33 bp, Homo sapien
agttgatgcatgaacattggagcacctgcccct

SEQ ID NO: 905307 - DNA, 33 bp, Homo sapien
tttaggccagcagttacggcaggttgggctagt

SEQ ID NO: 905308 - DNA, 33 bp, Homo sapien
tttaggccagcagttagggcaggttgggctagt

SEQ ID NO: 905309 - DNA, 33 bp, Homo sapien
ggttgacttacctcaccgcaccttaaatgtctt

SEQ ID NO: 905310 - DNA, 33 bp, Homo sapien
ggttgacttacctcacggcaccttaaatgtctt

SEQ ID NO: 905311 - DNA, 33 bp, Homo sapien
gacagggactgacagacacattgttttgacaaa

SEQ ID NO: 905312 - DNA, 33 bp, Homo sapien
gacagggactgacagagacattgttttgacaaa

SEQ ID NO: 905313 - DNA, 33 bp, Homo sapien
aatttgtctgacggggcatgtgtgaactatgag

SEQ ID NO: 905314 - DNA, 33 bp, Homo sapien
aatttgtctgacggggtatgtgtgaactatgag

SEQ ID NO: 905315 - DNA, 33 bp, Homo sapien
ttaaactgtgaatgacgctgaatgctcctaagt

SEQ ID NO: 905316 - DNA, 33 bp, Homo sapien
ttaaactgtgaatgactctgaatgctcctaagt

SEQ ID NO: 905317 - DNA, 33 bp, Homo sapien
ttctgttcttggcaaactttctttatcttatgt

SEQ ID NO: 905318 - DNA, 33 bp, Homo sapien
ttctgttcttggcaaattttctttatcttatgt

SEQ ID NO: 905319 - DNA, 33 bp, Homo sapien
atgggcatcacctcacaagtttgacagagtgca

SEQ ID NO: 905320 - DNA, 33 bp, Homo sapien
atgggcatcacctcacgagtttgacagagtgca

SEQ ID NO: 905321 - DNA, 33 bp, Homo sapien
gaccgagctggtctcagcatataatatattgct

SEQ ID NO: 905322 - DNA, 33 bp, Homo sapien
gaccgagctggtctcatcatataatatattgct

SEQ ID NO: 905323 - DNA, 33 bp, Homo sapien
gttttctgcttggagacatggaccagacctgca

SEQ ID NO: 905324 - DNA, 33 bp, Homo sapien
gttttctgcttggagatatggaccagacctgca

SEQ ID NO: 905325 - DNA, 33 bp, Homo sapien
cttggcaaagtttagaaaaaacatagacaaagc

SEQ ID NO: 905326 - DNA, 33 bp, Homo sapien
cttggcaaagtttagagaaaacatagacaaagc

SEQ ID NO: 905327 - DNA, 33 bp, Homo sapien
ccccaggttgagaccacgtacttctgacccacc

SEQ ID NO: 905328 - DNA, 33 bp, Homo sapien
ccccaggttgagaccatgtacttctgacccacc

SEQ ID NO: 905329 - DNA, 33 bp, Homo sapien
aggctgccaacaagtaaatgagtgagcttggaa

SEQ ID NO: 905330 - DNA, 33 bp, Homo sapien
aggctgccaacaagtacatgagtgagcttggaa

SEQ ID NO: 905331 - DNA, 33 bp, Homo sapien
atctcttctcaactccacagtcagtgacatcat

SEQ ID NO: 905332 - DNA, 33 bp, Homo sapien
atctcttctcaactccgcagtcagtgacatcat

SEQ ID NO: 905333 - DNA, 33 bp, Homo sapien
atgaccatttgtgtacagatttttgtgtgagcg

SEQ ID NO: 905334 - DNA, 33 bp, Homo sapien
atgaccatttgtgtacggatttttgtgtgagcg

SEQ ID NO: 905335 - DNA, 33 bp, Homo sapien
agtagaacaaaaggcaataggcagcttctgcag

SEQ ID NO: 905336 - DNA, 33 bp, Homo sapien
agtagaacaaaaggcagtaggcagcttctgcag

SEQ ID NO: 905337 - DNA, 33 bp, Homo sapien
gagcacaaactttcaacttactagacaaatact

SEQ ID NO: 905338 - DNA, 33 bp, Homo sapien
gagcacaaactttcaatttactagacaaatact

SEQ ID NO: 905339 - DNA, 33 bp, Homo sapien
aaaagaaaagctggtgaatggaatttccagaga

SEQ ID NO: 905340 - DNA, 33 bp, Homo sapien
aaaagaaaagctggtgcatggaatttccagaga

SEQ ID NO: 905341 - DNA, 33 bp, Homo sapien
gaatcttaccaaagcacgaaagtgtacacattg

SEQ ID NO: 905342 - DNA, 33 bp, Homo sapien
gaatcttaccaaagcatgaaagtgtacacattg

SEQ ID NO: 905343 - DNA, 33 bp, Homo sapien
aaaacatgaagaaagaccaaaacaatgtgacgc

SEQ ID NO: 905344 - DNA, 33 bp, Homo sapien
aaaacatgaagaaagatcaaaacaatgtgacgc

SEQ ID NO: 905345 - DNA, 33 bp, Homo sapien
gccagcactgagttaaatcttttccataccctg

SEQ ID NO: 905346 - DNA, 33 bp, Homo sapien
gccagcactgagttaagtcttttccataccctg

SEQ ID NO: 905347 - DNA, 33 bp, Homo sapien
acatgacttgtctaccaagaagatcccaaggaa

SEQ ID NO: 905348 - DNA, 33 bp, Homo sapien
acatgacttgtctaccgagaagatcccaaggaa

SEQ ID NO: 905349 - DNA, 33 bp, Homo sapien
tatatgtaaattcccacctgagaaacctggttt

SEQ ID NO: 905350 - DNA, 33 bp, Homo sapien
tatatgtaaattcccatctgagaaacctggttt

SEQ ID NO: 905351 - DNA, 33 bp, Homo sapien
tgagatggattatcaacccgtaacactgcaaac

SEQ ID NO: 905352 - DNA, 33 bp, Homo sapien
tgagatggattatcaagccgtaacactgcaaac

SEQ ID NO: 905353 - DNA, 33 bp, Homo sapien
catagtggcagaaacacgaatgaataatggaat

SEQ ID NO: 905354 - DNA, 33 bp, Homo sapien
catagtggcagaaacaggaatgaataatggaat

SEQ ID NO: 905355 - DNA, 33 bp, Homo sapien
aagtgtgaaagcaaaaatttaaatataacatat

SEQ ID NO: 905356 - DNA, 33 bp, Homo sapien
aagtgtgaaagcaaaattttaaatataacatat

SEQ ID NO: 905357 - DNA, 33 bp, Homo sapien
aacaacacaaaaggcaaaacaatgttatgctta

SEQ ID NO: 905358 - DNA, 33 bp, Homo sapien
aacaacacaaaaggcagaacaatgttatgctta

SEQ ID NO: 905359 - DNA, 33 bp, Homo sapien
aactttgttcttgatacgtgattgtctttccag

SEQ ID NO: 905360 - DNA, 33 bp, Homo sapien
aactttgttcttgataggtgattgtctttccag

SEQ ID NO: 905361 - DNA, 33 bp, Homo sapien
cataactgcaagttaaactcagaccaaatggga

SEQ ID NO: 905362 - DNA, 33 bp, Homo sapien
cataactgcaagttaagctcagaccaaatggga

SEQ ID NO: 905363 - DNA, 33 bp, Homo sapien
catggcttgtctcaaccgcatggcccagcgtcc

SEQ ID NO: 905364 - DNA, 33 bp, Homo sapien
catggcttgtctcaactgcatggcccagcgtcc

SEQ ID NO: 905365 - DNA, 33 bp, Homo sapien
cctaagtaagctgagacgcaaacaaatgaaaag

SEQ ID NO: 905366 - DNA, 33 bp, Homo sapien
cctaagtaagctgagatgcaaacaaatgaaaag

SEQ ID NO: 905367 - DNA, 33 bp, Homo sapien
taaaccctattaccacagaaagagcatttttgt

SEQ ID NO: 905368 - DNA, 33 bp, Homo sapien
taaaccctattaccacggaaagagcatttttgt

SEQ ID NO: 905369 - DNA, 33 bp, Homo sapien
catctaattttaggatcaaattgtcagtttctc

SEQ ID NO: 905370 - DNA, 33 bp, Homo sapien
catctaattttaggattaaattgtcagtttctc

SEQ ID NO: 905371 - DNA, 33 bp, Homo sapien
taatatcatgctgttacaataatagtgtatata

SEQ ID NO: 905372 - DNA, 33 bp, Homo sapien
taatatcatgctgttataataatagtgtatata

SEQ ID NO: 905373 - DNA, 33 bp, Homo sapien
tatcactctgttgctaaaggatatggcttaatt

SEQ ID NO: 905374 - DNA, 33 bp, Homo sapien
tatcactctgttgctagaggatatggcttaatt

SEQ ID NO: 905375 - DNA, 33 bp, Homo sapien
tgttctcttccacaacaagactatcatctctgc

SEQ ID NO: 905376 - DNA, 33 bp, Homo sapien
tgttctcttccacaaccagactatcatctctgc

SEQ ID NO: 905377 - DNA, 33 bp, Homo sapien
tagagcaaaattggaaactcccgactcactgaa

SEQ ID NO: 905378 - DNA, 33 bp, Homo sapien
tagagcaaaattggaacctcccgactcactgaa

SEQ ID NO: 905379 - DNA, 33 bp, Homo sapien
tcctcaacaatgctaaaggaaaagtccaaaaca

SEQ ID NO: 905380 - DNA, 33 bp, Homo sapien
tcctcaacaatgctaagggaaaagtccaaaaca

SEQ ID NO: 905381 - DNA, 33 bp, Homo sapien
ccatctttgttgccacactcataatttatgaaa

SEQ ID NO: 905382 - DNA, 33 bp, Homo sapien
ccatctttgttgccacgctcataatttatgaaa

SEQ ID NO: 905383 - DNA, 33 bp, Homo sapien
cttatattctttttctcacaagatgtttgttaa

SEQ ID NO: 905384 - DNA, 33 bp, Homo sapien
cttatattctttttctgacaagatgtttgttaa

SEQ ID NO: 905385 - DNA, 33 bp, Homo sapien
tggtcacagccaaaggacctgctttgcccacag

SEQ ID NO: 905386 - DNA, 33 bp, Homo sapien
tggtcacagccaaaggtcctgctttgcccacag

SEQ ID NO: 905387 - DNA, 33 bp, Homo sapien
tgatgtggattcatgcacctggttgaaagtggc

SEQ ID NO: 905388 - DNA, 33 bp, Homo sapien
tgatgtggattcatgcgcctggttgaaagtggc

SEQ ID NO: 905389 - DNA, 33 bp, Homo sapien
ctctgctgccacctcgaacggacagatgcaaac

SEQ ID NO: 905390 - DNA, 33 bp, Homo sapien
ctctgctgccacctcggacggacagatgcaaac

SEQ ID NO: 905391 - DNA, 33 bp, Homo sapien
ccaacaaagaaaatgcaaaggtcacggaaggat

SEQ ID NO: 905392 - DNA, 33 bp, Homo sapien
ccaacaaagaaaatgcgaaggtcacggaaggat

SEQ ID NO: 905393 - DNA, 33 bp, Homo sapien
agttcctacaatgtgccagctgcctttatccta

SEQ ID NO: 905394 - DNA, 33 bp, Homo sapien
agttcctacaatgtgcgagctgcctttatccta

SEQ ID NO: 905395 - DNA, 33 bp, Homo sapien
gaaattacagtgatgacggaaatgccctataat

SEQ ID NO: 905396 - DNA, 33 bp, Homo sapien
gaaattacagtgatgatggaaatgccctataat

SEQ ID NO: 905397 - DNA, 33 bp, Homo sapien
gtctggcttcttcttacggagtttggtttcaaa

SEQ ID NO: 905398 - DNA, 33 bp, Homo sapien
gtctggcttcttcttatggagtttggtttcaaa

SEQ ID NO: 905399 - DNA, 33 bp, Homo sapien
tcttgctggaagaaacaaacactaaaaattata

SEQ ID NO: 905400 - DNA, 33 bp, Homo sapien
tcttgctggaagaaacgaacactaaaaattata

SEQ ID NO: 905401 - DNA, 33 bp, Homo sapien
catacaatcccacaaaaaaagctgtggccacct

SEQ ID NO: 905402 - DNA, 33 bp, Homo sapien
catacaatcccacaaacaaagctgtggccacct

SEQ ID NO: 905403 - DNA, 33 bp, Homo sapien
caccttgccaccaagaaacagacagggcacctg

SEQ ID NO: 905404 - DNA, 33 bp, Homo sapien
caccttgccaccaagatacagacagggcacctg

SEQ ID NO: 905405 - DNA, 33 bp, Homo sapien
ctgtaatgatgaaaaactatgacaaaaagatac

SEQ ID NO: 905406 - DNA, 33 bp, Homo sapien
ctgtaatgatgaaaaattatgacaaaaagatac

SEQ ID NO: 905407 - DNA, 33 bp, Homo sapien
gtctggcagtgccatccaggtggaggaagacag

SEQ ID NO: 905408 - DNA, 33 bp, Homo sapien
gtctggcagtgccatctaggtggaggaagacag

SEQ ID NO: 905409 - DNA, 33 bp, Homo sapien
ccagacatctgcctacggacaccctcacgtttc

SEQ ID NO: 905410 - DNA, 33 bp, Homo sapien
ccagacatctgcctactgacaccctcacgtttc

SEQ ID NO: 905411 - DNA, 33 bp, Homo sapien
atgaactgcggatttccctctgctctcccagcc

SEQ ID NO: 905412 - DNA, 33 bp, Homo sapien
atgaactgcggatttctctctgctctcccagcc

SEQ ID NO: 905413 - DNA, 33 bp, Homo sapien
caaattctcaagagaaaatatgagttgccgctg

SEQ ID NO: 905414 - DNA, 33 bp, Homo sapien
caaattctcaagagaagatatgagttgccgctg

SEQ ID NO: 905415 - DNA, 33 bp, Homo sapien
cttggaatccacatccacatccttttctcctga

SEQ ID NO: 905416 - DNA, 33 bp, Homo sapien
cttggaatccacatccgcatccttttctcctga

SEQ ID NO: 905417 - DNA, 33 bp, Homo sapien
cataggaaagtggtcaccaggggatgatttata

SEQ ID NO: 905418 - DNA, 33 bp, Homo sapien
cataggaaagtggtcagcaggggatgatttata

SEQ ID NO: 905419 - DNA, 33 bp, Homo sapien
gaggctggctcataacaaatcacaggctcaaaa

SEQ ID NO: 905420 - DNA, 33 bp, Homo sapien
gaggctggctcataaccaatcacaggctcaaaa

SEQ ID NO: 905421 - DNA, 33 bp, Homo sapien
tcctgagttactttcacggcttaccagtacaaa

SEQ ID NO: 905422 - DNA, 33 bp, Homo sapien
tcctgagttactttcatggcttaccagtacaaa

SEQ ID NO: 905423 - DNA, 33 bp, Homo sapien
actgtatagagtcacacatgagtcttcacactc

SEQ ID NO: 905424 - DNA, 33 bp, Homo sapien
actgtatagagtcacatatgagtcttcacactc

SEQ ID NO: 905425 - DNA, 33 bp, Homo sapien
cttccaagtgcttggccaatctctctccttttt

SEQ ID NO: 905426 - DNA, 33 bp, Homo sapien
cttccaagtgcttggctaatctctctccttttt

SEQ ID NO: 905427 - DNA, 33 bp, Homo sapien
agccaagtagataatcaagtgttttcccctaca

SEQ ID NO: 905428 - DNA, 33 bp, Homo sapien
agccaagtagataatccagtgttttcccctaca

SEQ ID NO: 905429 - DNA, 33 bp, Homo sapien
gcattggctagtataccatttgctgtacatgat

SEQ ID NO: 905430 - DNA, 33 bp, Homo sapien
gcattggctagtatactatttgctgtacatgat

SEQ ID NO: 905431 - DNA, 33 bp, Homo sapien
ttaacgttgcctgtctcaatatgttttctgttg

SEQ ID NO: 905432 - DNA, 33 bp, Homo sapien
ttaacgttgcctgtctgaatatgttttctgttg

SEQ ID NO: 905433 - DNA, 33 bp, Homo sapien
ggaaagagtttttccaagaatcaagacaaaagg

SEQ ID NO: 905434 - DNA, 33 bp, Homo sapien
ggaaagagtttttccacgaatcaagacaaaagg

SEQ ID NO: 905435 - DNA, 33 bp, Homo sapien
actcacctttcttaaaaagcatcctggagaggc

SEQ ID NO: 905436 - DNA, 33 bp, Homo sapien
actcacctttcttaaagagcatcctggagaggc

SEQ ID NO: 905437 - DNA, 33 bp, Homo sapien
gaaagctgcaaactacagaaaaacatgaactta

SEQ ID NO: 905438 - DNA, 33 bp, Homo sapien
gaaagctgcaaactacggaaaaacatgaactta

SEQ ID NO: 905439 - DNA, 33 bp, Homo sapien
tagtggaacgacaaccaaaggaaggacagaggg

SEQ ID NO: 905440 - DNA, 33 bp, Homo sapien
tagtggaacgacaaccgaaggaaggacagaggg

SEQ ID NO: 905441 - DNA, 33 bp, Homo sapien
tgtgtgtgggaaacaacgacttttttgtctaca

SEQ ID NO: 905442 - DNA, 33 bp, Homo sapien
tgtgtgtgggaaacaatgacttttttgtctaca

SEQ ID NO: 905443 - DNA, 33 bp, Homo sapien
tgggaagttatgaaaactcttctggtaaattgc

SEQ ID NO: 905444 - DNA, 33 bp, Homo sapien
tgggaagttatgaaaattcttctggtaaattgc

SEQ ID NO: 905445 - DNA, 33 bp, Homo sapien
ctacatgaattccttacacatacagccaacgag

SEQ ID NO: 905446 - DNA, 33 bp, Homo sapien
ctacatgaattccttatacatacagccaacgag

SEQ ID NO: 905447 - DNA, 33 bp, Homo sapien
gtgagaatgggagaatcagactgagccggaact

SEQ ID NO: 905448 - DNA, 33 bp, Homo sapien
gtgagaatgggagaatgagactgagccggaact

SEQ ID NO: 905449 - DNA, 33 bp, Homo sapien
ctatcaatatttactaagtagttaccaacaaca

SEQ ID NO: 905450 - DNA, 33 bp, Homo sapien
ctatcaatatttactaggtagttaccaacaaca

SEQ ID NO: 905451 - DNA, 33 bp, Homo sapien
tggaagaacttctgaacggaaaaagctccgcta

SEQ ID NO: 905452 - DNA, 33 bp, Homo sapien
tggaagaacttctgaatggaaaaagctccgcta

SEQ ID NO: 905453 - DNA, 33 bp, Homo sapien
tcttgtaaaaatgcaaatcactaataatcagtg

SEQ ID NO: 905454 - DNA, 33 bp, Homo sapien
tcttgtaaaaatgcaagtcactaataatcagtg

SEQ ID NO: 905455 - DNA, 33 bp, Homo sapien
ttgcaaactgaaattacgatgaaactccctatt

SEQ ID NO: 905456 - DNA, 33 bp, Homo sapien
ttgcaaactgaaattatgatgaaactccctatt

SEQ ID NO: 905457 - DNA, 33 bp, Homo sapien
ttacttcctagatagcaacattcagaatcagac

SEQ ID NO: 905458 - DNA, 33 bp, Homo sapien
ttacttcctagatagcgacattcagaatcagac

SEQ ID NO: 905459 - DNA, 33 bp, Homo sapien
tgttattgaaatatcaagagatgagagaaaaag

SEQ ID NO: 905460 - DNA, 33 bp, Homo sapien
tgttattgaaatatcaggagatgagagaaaaag

SEQ ID NO: 905461 - DNA, 33 bp, Homo sapien
atgcaaccaaatacagaaagttgtactggatta

SEQ ID NO: 905462 - DNA, 33 bp, Homo sapien
atgcaaccaaatacaggaagttgtactggatta

SEQ ID NO: 905463 - DNA, 33 bp, Homo sapien
gaagatacaaacatctcaaaaaggaaaaatata

SEQ ID NO: 905464 - DNA, 33 bp, Homo sapien
gaagatacaaacatctgaaaaaggaaaaatata

SEQ ID NO: 905465 - DNA, 33 bp, Homo sapien
aggagaaaaaacataaatcatgactttgcaagt

SEQ ID NO: 905466 - DNA, 33 bp, Homo sapien
aggagaaaaaacataactcatgactttgcaagt

SEQ ID NO: 905467 - DNA, 33 bp, Homo sapien
ctgatctcttggctgaagaaagcattttgtttt

SEQ ID NO: 905468 - DNA, 33 bp, Homo sapien
ctgatctcttggctgaggaaagcattttgtttt

SEQ ID NO: 905469 - DNA, 33 bp, Homo sapien
tgaacttccttcctaacccagcagtaatgaggc

SEQ ID NO: 905470 - DNA, 33 bp, Homo sapien
tgaacttccttcctaatccagcagtaatgaggc

SEQ ID NO: 905471 - DNA, 33 bp, Homo sapien
ccttctggaccttcaccacccctcagtggtagt

SEQ ID NO: 905472 - DNA, 33 bp, Homo sapien
ccttctggaccttcactacccctcagtggtagt

SEQ ID NO: 905473 - DNA, 33 bp, Homo sapien
atacaccattattttaagagagagaaacagtcc

SEQ ID NO: 905474 - DNA, 33 bp, Homo sapien
atacaccattattttaggagagagaaacagtcc

SEQ ID NO: 905475 - DNA, 33 bp, Homo sapien
cagggaggccacaagacaggcatagattaatgt

SEQ ID NO: 905476 - DNA, 33 bp, Homo sapien
cagggaggccacaagataggcatagattaatgt

SEQ ID NO: 905477 - DNA, 33 bp, Homo sapien
tggaaatttgaagttaacctccccagaataatt

SEQ ID NO: 905478 - DNA, 33 bp, Homo sapien
tggaaatttgaagttatcctccccagaataatt

SEQ ID NO: 905479 - DNA, 33 bp, Homo sapien
gctgtgataacagagaaaagaagtgaggcaggt

SEQ ID NO: 905480 - DNA, 33 bp, Homo sapien
gctgtgataacagagagaagaagtgaggcaggt

SEQ ID NO: 905481 - DNA, 33 bp, Homo sapien
aatggtagtaaggccaatgacaatgagagggtt

SEQ ID NO: 905482 - DNA, 33 bp, Homo sapien
aatggtagtaaggccagtgacaatgagagggtt

SEQ ID NO: 905483 - DNA, 33 bp, Homo sapien
tctctcatccttaacagaacctcatctcaatca

SEQ ID NO: 905484 - DNA, 33 bp, Homo sapien
tctctcatccttaacataacctcatctcaatca

SEQ ID NO: 905485 - DNA, 33 bp, Homo sapien
agtacattgccaaatagcataatccaaactttc

SEQ ID NO: 905486 - DNA, 33 bp, Homo sapien
agtacattgccaaatatcataatccaaactttc

SEQ ID NO: 905487 - DNA, 33 bp, Homo sapien
ttttaatattggttccagcttattgaataaaat

SEQ ID NO: 905488 - DNA, 33 bp, Homo sapien
ttttaatattggttccggcttattgaataaaat

SEQ ID NO: 905489 - DNA, 33 bp, Homo sapien
ctaaaaaggaacagcacgataaatatcttggtt

SEQ ID NO: 905490 - DNA, 33 bp, Homo sapien
ctaaaaaggaacagcatgataaatatcttggtt

SEQ ID NO: 905491 - DNA, 33 bp, Homo sapien
tcagctttctgatcaaactttcccttgcccttg

SEQ ID NO: 905492 - DNA, 33 bp, Homo sapien
tcagctttctgatcaacctttcccttgcccttg

SEQ ID NO: 905493 - DNA, 33 bp, Homo sapien
taatatgtctgataaaaagcttgaatccacgat

SEQ ID NO: 905494 - DNA, 33 bp, Homo sapien
taatatgtctgataaagagcttgaatccacgat

SEQ ID NO: 905495 - DNA, 33 bp, Homo sapien
cagggaccaaacagcaacttcctcattcttcct

SEQ ID NO: 905496 - DNA, 33 bp, Homo sapien
cagggaccaaacagcagcttcctcattcttcct

SEQ ID NO: 905497 - DNA, 33 bp, Homo sapien
taaattttaacagtgacgaaatgcttcaactga

SEQ ID NO: 905498 - DNA, 33 bp, Homo sapien
taaattttaacagtgatgaaatgcttcaactga

SEQ ID NO: 905499 - DNA, 33 bp, Homo sapien
tccttccctcgctcccgatcttcctgtggtttc

SEQ ID NO: 905500 - DNA, 33 bp, Homo sapien
tccttccctcgctccctatcttcctgtggtttc

SEQ ID NO: 905501 - DNA, 33 bp, Homo sapien
gaccctctgagaacatcaggcaatcctgataac

SEQ ID NO: 905502 - DNA, 33 bp, Homo sapien
gaccctctgagaacatgaggcaatcctgataac

SEQ ID NO: 905503 - DNA, 33 bp, Homo sapien
cctgatttgatcattacgaattgtacgtatgta

SEQ ID NO: 905504 - DNA, 33 bp, Homo sapien
cctgatttgatcattatgaattgtacgtatgta

SEQ ID NO: 905505 - DNA, 33 bp, Homo sapien
aatgcagatgaaagacaattgaactggatcacc

SEQ ID NO: 905506 - DNA, 33 bp, Homo sapien
aatgcagatgaaagactattgaactggatcacc

SEQ ID NO: 905507 - DNA, 33 bp, Homo sapien
gtcccagctaggttagaccctttgagaaaagtt

SEQ ID NO: 905508 - DNA, 33 bp, Homo sapien
gtcccagctaggttaggccctttgagaaaagtt

SEQ ID NO: 905509 - DNA, 33 bp, Homo sapien
actgagtccacctataagtcctgattctgagga

SEQ ID NO: 905510 - DNA, 33 bp, Homo sapien
actgagtccacctatatgtcctgattctgagga

SEQ ID NO: 905511 - DNA, 33 bp, Homo sapien
tatagcaataactaaacgaactacagtccaaaa

SEQ ID NO: 905512 - DNA, 33 bp, Homo sapien
tatagcaataactaaatgaactacagtccaaaa

SEQ ID NO: 905513 - DNA, 33 bp, Homo sapien
cccatggattttcacagatttcacagatcattt

SEQ ID NO: 905514 - DNA, 33 bp, Homo sapien
cccatggattttcacatatttcacagatcattt

SEQ ID NO: 905515 - DNA, 33 bp, Homo sapien
catacatcccaaaataggtatggatccattcca

SEQ ID NO: 905516 - DNA, 33 bp, Homo sapien
catacatcccaaaatatgtatggatccattcca

SEQ ID NO: 905517 - DNA, 33 bp, Homo sapien
cggggtctgcaacgtacctggagaaaaagtgaa

SEQ ID NO: 905518 - DNA, 33 bp, Homo sapien
cggggtctgcaacgtagctggagaaaaagtgaa

SEQ ID NO: 905519 - DNA, 33 bp, Homo sapien
agctgtctttggaaaacaagcctgatcccgaca

SEQ ID NO: 905520 - DNA, 33 bp, Homo sapien
agctgtctttggaaaataagcctgatcccgaca

SEQ ID NO: 905521 - DNA, 33 bp, Homo sapien
tgctgcagtaaccaacaattacaaattcactgt

SEQ ID NO: 905522 - DNA, 33 bp, Homo sapien
tgctgcagtaaccaacgattacaaattcactgt

SEQ ID NO: 905523 - DNA, 33 bp, Homo sapien
gtgaagggatgccctacagccacgtttctacca

SEQ ID NO: 905524 - DNA, 33 bp, Homo sapien
gtgaagggatgccctagagccacgtttctacca

SEQ ID NO: 905525 - DNA, 33 bp, Homo sapien
ccagctaaagtgctacacatatgaccaccccga

SEQ ID NO: 905526 - DNA, 33 bp, Homo sapien
ccagctaaagtgctacccatatgaccaccccga

SEQ ID NO: 905527 - DNA, 33 bp, Homo sapien
ctttggagacagcacaaatataagggaataggc

SEQ ID NO: 905528 - DNA, 33 bp, Homo sapien
ctttggagacagcacacatataagggaataggc

SEQ ID NO: 905529 - DNA, 33 bp, Homo sapien
ggacgatcctaatgtcagaagttacccatgaag

SEQ ID NO: 905530 - DNA, 33 bp, Homo sapien
ggacgatcctaatgtcggaagttacccatgaag

SEQ ID NO: 905531 - DNA, 33 bp, Homo sapien
ccttgcaaatcttcaagtgatgagcaactttac

SEQ ID NO: 905532 - DNA, 33 bp, Homo sapien
ccttgcaaatcttcaattgatgagcaactttac

SEQ ID NO: 905533 - DNA, 33 bp, Homo sapien
cttatcgtaagtcatcaatttgacaaaagtcca

SEQ ID NO: 905534 - DNA, 33 bp, Homo sapien
cttatcgtaagtcatcgatttgacaaaagtcca

SEQ ID NO: 905535 - DNA, 33 bp, Homo sapien
ctgaattgcctaagttcaaattctgctctgacg

SEQ ID NO: 905536 - DNA, 33 bp, Homo sapien
ctgaattgcctaagtttaaattctgctctgacg

SEQ ID NO: 905537 - DNA, 33 bp, Homo sapien
atgattaatgtaacaaactatttctaatctgga

SEQ ID NO: 905538 - DNA, 33 bp, Homo sapien
atgattaatgtaacaagctatttctaatctgga

SEQ ID NO: 905539 - DNA, 33 bp, Homo sapien
tcatacattgctggtcagaatggatggtacaat

SEQ ID NO: 905540 - DNA, 33 bp, Homo sapien
tcatacattgctggtcggaatggatggtacaat

SEQ ID NO: 905541 - DNA, 33 bp, Homo sapien
tttgacttgatctataggtaatgagaagccatg

SEQ ID NO: 905542 - DNA, 33 bp, Homo sapien
tttgacttgatctatatgtaatgagaagccatg

SEQ ID NO: 905543 - DNA, 33 bp, Homo sapien
agaaggctgcatagatgaagtaatatttgtggc

SEQ ID NO: 905544 - DNA, 33 bp, Homo sapien
agaaggctgcatagattaagtaatatttgtggc

SEQ ID NO: 905545 - DNA, 33 bp, Homo sapien
tacatgatagtgcaaacttgaaagtccctcatc

SEQ ID NO: 905546 - DNA, 33 bp, Homo sapien
tacatgatagtgcaaatttgaaagtccctcatc

SEQ ID NO: 905547 - DNA, 33 bp, Homo sapien
aaggggtagggtcctcaagcagaacttctgcca

SEQ ID NO: 905548 - DNA, 33 bp, Homo sapien
aaggggtagggtcctcgagcagaacttctgcca

SEQ ID NO: 905549 - DNA, 33 bp, Homo sapien
agagctgagtcaaagacgggatggtgaggggag

SEQ ID NO: 905550 - DNA, 33 bp, Homo sapien
agagctgagtcaaagatgggatggtgaggggag

SEQ ID NO: 905551 - DNA, 33 bp, Homo sapien
gtattttagtaacacgaatctgttgaggtcctg

SEQ ID NO: 905552 - DNA, 33 bp, Homo sapien
gtattttagtaacacgcatctgttgaggtcctg

SEQ ID NO: 905553 - DNA, 33 bp, Homo sapien
gagattgtacagatcaaggaggcaaacagtggc

SEQ ID NO: 905554 - DNA, 33 bp, Homo sapien
gagattgtacagatcagggaggcaaacagtggc

SEQ ID NO: 905555 - DNA, 33 bp, Homo sapien
ttatccatctaccttcccaaacttattttccac

SEQ ID NO: 905556 - DNA, 33 bp, Homo sapien
ttatccatctaccttctcaaacttattttccac

SEQ ID NO: 905557 - DNA, 33 bp, Homo sapien
gacttcccaggtaaatgaatgtgaaatgacaat

SEQ ID NO: 905558 - DNA, 33 bp, Homo sapien
gacttcccaggtaaattaatgtgaaatgacaat

SEQ ID NO: 905559 - DNA, 33 bp, Homo sapien
tggctagatgtttaggacaaaaagctggatctt

SEQ ID NO: 905560 - DNA, 33 bp, Homo sapien
tggctagatgtttagggcaaaaagctggatctt

SEQ ID NO: 905561 - DNA, 33 bp, Homo sapien
tttctgcctgagttccaagtttgttggcctgcc

SEQ ID NO: 905562 - DNA, 33 bp, Homo sapien
tttctgcctgagttcccagtttgttggcctgcc

SEQ ID NO: 905563 - DNA, 33 bp, Homo sapien
ccaatcatctgttgacgctgagctggaaatgtc

SEQ ID NO: 905564 - DNA, 33 bp, Homo sapien
ccaatcatctgttgactctgagctggaaatgtc

SEQ ID NO: 905565 - DNA, 33 bp, Homo sapien
agccaagctatgcttaaccatggtatctagaaa

SEQ ID NO: 905566 - DNA, 33 bp, Homo sapien
agccaagctatgcttagccatggtatctagaaa

SEQ ID NO: 905567 - DNA, 33 bp, Homo sapien
caggatccgattgcccacttgaatgcttgtttc

SEQ ID NO: 905568 - DNA, 33 bp, Homo sapien
caggatccgattgcccgcttgaatgcttgtttc

SEQ ID NO: 905569 - DNA, 33 bp, Homo sapien
ttatgatattgaaaacaagactgaatccagaat

SEQ ID NO: 905570 - DNA, 33 bp, Homo sapien
ttatgatattgaaaactagactgaatccagaat

SEQ ID NO: 905571 - DNA, 33 bp, Homo sapien
gtggtctccctcaactcagtgcccagagtaccc

SEQ ID NO: 905572 - DNA, 33 bp, Homo sapien
gtggtctccctcaacttagtgcccagagtaccc

SEQ ID NO: 905573 - DNA, 33 bp, Homo sapien
acatccctattttctcagacaaaaagaaactta

SEQ ID NO: 905574 - DNA, 33 bp, Homo sapien
acatccctattttctctgacaaaaagaaactta

SEQ ID NO: 905575 - DNA, 33 bp, Homo sapien
aactttcatatgaaaaataacccttaatgccta

SEQ ID NO: 905576 - DNA, 33 bp, Homo sapien
aactttcatatgaaaattaacccttaatgccta

SEQ ID NO: 905577 - DNA, 33 bp, Homo sapien
gttagacttcaaattagcatcctgtgttcaggt

SEQ ID NO: 905578 - DNA, 33 bp, Homo sapien
gttagacttcaaattatcatcctgtgttcaggt

SEQ ID NO: 905579 - DNA, 33 bp, Homo sapien
tggactttggaatcgccattggccgaagtacta

SEQ ID NO: 905580 - DNA, 33 bp, Homo sapien
tggactttggaatcgctattggccgaagtacta

SEQ ID NO: 905581 - DNA, 33 bp, Homo sapien
gcatcctatgaggataaaagacacagaagataa

SEQ ID NO: 905582 - DNA, 33 bp, Homo sapien
gcatcctatgaggatagaagacacagaagataa

SEQ ID NO: 905583 - DNA, 33 bp, Homo sapien
tttgctgggctttaacaatctaaataagatttt

SEQ ID NO: 905584 - DNA, 33 bp, Homo sapien
tttgctgggctttaaccatctaaataagatttt

SEQ ID NO: 905585 - DNA, 33 bp, Homo sapien
attttaaaattccaaaacacatattttctacat

SEQ ID NO: 905586 - DNA, 33 bp, Homo sapien
attttaaaattccaaagcacatattttctacat

SEQ ID NO: 905587 - DNA, 33 bp, Homo sapien
agattaatagtcattcccacagtcttctctctt

SEQ ID NO: 905588 - DNA, 33 bp, Homo sapien
agattaatagtcattctcacagtcttctctctt

SEQ ID NO: 905589 - DNA, 33 bp, Homo sapien
gaatatctgttgtagcaaatttcaggagaaaag

SEQ ID NO: 905590 - DNA, 33 bp, Homo sapien
gaatatctgttgtagccaatttcaggagaaaag

SEQ ID NO: 905591 - DNA, 33 bp, Homo sapien
tctacatcttcttgaacggtttgaaactgttgg

SEQ ID NO: 905592 - DNA, 33 bp, Homo sapien
tctacatcttcttgaatggtttgaaactgttgg

SEQ ID NO: 905593 - DNA, 33 bp, Homo sapien
taccaatattcttgaaagcaccagtagttgaac

SEQ ID NO: 905594 - DNA, 33 bp, Homo sapien
taccaatattcttgaaggcaccagtagttgaac

SEQ ID NO: 905595 - DNA, 33 bp, Homo sapien
atgtttgtagaatgtacgaaaaaatgaatgaac

SEQ ID NO: 905596 - DNA, 33 bp, Homo sapien
atgtttgtagaatgtatgaaaaaatgaatgaac

SEQ ID NO: 905597 - DNA, 33 bp, Homo sapien
gtgaaaaataagtcaacgcttcatctttcaaag

SEQ ID NO: 905598 - DNA, 33 bp, Homo sapien
gtgaaaaataagtcaaggcttcatctttcaaag

SEQ ID NO: 905599 - DNA, 33 bp, Homo sapien
ggcttcagtccaaaagcagtcaaatagaagcat

SEQ ID NO: 905600 - DNA, 33 bp, Homo sapien
ggcttcagtccaaaagtagtcaaatagaagcat

SEQ ID NO: 905601 - DNA, 33 bp, Homo sapien
aatttcctgaagacgacgtgtgtacctaagcag

SEQ ID NO: 905602 - DNA, 33 bp, Homo sapien
aatttcctgaagacgatgtgtgtacctaagcag

SEQ ID NO: 905603 - DNA, 33 bp, Homo sapien
gaagaatattttcagcccagacaaaggtagctc

SEQ ID NO: 905604 - DNA, 33 bp, Homo sapien
gaagaatattttcagctcagacaaaggtagctc

SEQ ID NO: 905605 - DNA, 33 bp, Homo sapien
agttgggcttcataggccagcttctttttatca

SEQ ID NO: 905606 - DNA, 33 bp, Homo sapien
agttgggcttcataggtcagcttctttttatca

SEQ ID NO: 905607 - DNA, 33 bp, Homo sapien
caggataaatttgacaacagatattgcagatca

SEQ ID NO: 905608 - DNA, 33 bp, Homo sapien
caggataaatttgacagcagatattgcagatca

SEQ ID NO: 905609 - DNA, 33 bp, Homo sapien
agtatgtgccttggacaggagaccatgacagtg

SEQ ID NO: 905610 - DNA, 33 bp, Homo sapien
agtatgtgccttggacgggagaccatgacagtg

SEQ ID NO: 905611 - DNA, 33 bp, Homo sapien
ttcaagttgcttccaacagatacagctgcctct

SEQ ID NO: 905612 - DNA, 33 bp, Homo sapien
ttcaagttgcttccaagagatacagctgcctct

SEQ ID NO: 905613 - DNA, 33 bp, Homo sapien
gtgggcagagaagagcacaagaggcatgaccct

SEQ ID NO: 905614 - DNA, 33 bp, Homo sapien
gtgggcagagaagagcgcaagaggcatgaccct

SEQ ID NO: 905615 - DNA, 33 bp, Homo sapien
tgcatgtgaggaaaccacacaaagctggagaaa

SEQ ID NO: 905616 - DNA, 33 bp, Homo sapien
tgcatgtgaggaaaccgcacaaagctggagaaa

SEQ ID NO: 905617 - DNA, 33 bp, Homo sapien
aaataattatgcttcaaggatcactgaattgac

SEQ ID NO: 905618 - DNA, 33 bp, Homo sapien
aaataattatgcttcagggatcactgaattgac

SEQ ID NO: 905619 - DNA, 33 bp, Homo sapien
actcacatggggcctacaaggtcacaggcaagt

SEQ ID NO: 905620 - DNA, 33 bp, Homo sapien
actcacatggggcctataaggtcacaggcaagt

SEQ ID NO: 905621 - DNA, 33 bp, Homo sapien
ttgtgtctgccttttacgctggcccagtagccc

SEQ ID NO: 905622 - DNA, 33 bp, Homo sapien
ttgtgtctgccttttatgctggcccagtagccc

SEQ ID NO: 905623 - DNA, 33 bp, Homo sapien
ttctagtgggaggaaaactcactaagacagata

SEQ ID NO: 905624 - DNA, 33 bp, Homo sapien
ttctagtgggaggaaagctcactaagacagata

SEQ ID NO: 905625 - DNA, 33 bp, Homo sapien
tgaatcctccaaagccaaagttattctagagtt

SEQ ID NO: 905626 - DNA, 33 bp, Homo sapien
tgaatcctccaaagccgaagttattctagagtt

SEQ ID NO: 905627 - DNA, 33 bp, Homo sapien
ccatttaaatccatgcaaagaggagcttcagcc

SEQ ID NO: 905628 - DNA, 33 bp, Homo sapien
ccatttaaatccatgcgaagaggagcttcagcc

SEQ ID NO: 905629 - DNA, 33 bp, Homo sapien
tcacagttacacgcaacattacacagacagttt

SEQ ID NO: 905630 - DNA, 33 bp, Homo sapien
tcacagttacacgcaatattacacagacagttt

SEQ ID NO: 905631 - DNA, 33 bp, Homo sapien
acaacatgaccgagccaacacattgccatttcc

SEQ ID NO: 905632 - DNA, 33 bp, Homo sapien
acaacatgaccgagccgacacattgccatttcc

SEQ ID NO: 905633 - DNA, 33 bp, Homo sapien
aataatgaaaatcaaccgtatcttacatttcta

SEQ ID NO: 905634 - DNA, 33 bp, Homo sapien
aataatgaaaatcaactgtatcttacatttcta

SEQ ID NO: 905635 - DNA, 33 bp, Homo sapien
cctggattcagtattcaagatttacctactcgc

SEQ ID NO: 905636 - DNA, 33 bp, Homo sapien
cctggattcagtattcgagatttacctactcgc

SEQ ID NO: 905637 - DNA, 33 bp, Homo sapien
gacaatgaaagaagccaagtgatccttgctgag

SEQ ID NO: 905638 - DNA, 33 bp, Homo sapien
gacaatgaaagaagccgagtgatccttgctgag

SEQ ID NO: 905639 - DNA, 33 bp, Homo sapien
acatttctgggaagtgcacagatctagattcca

SEQ ID NO: 905640 - DNA, 33 bp, Homo sapien
acatttctgggaagtgtacagatctagattcca

SEQ ID NO: 905641 - DNA, 33 bp, Homo sapien
aacatgaactagctacaggcctgccttccagaa

SEQ ID NO: 905642 - DNA, 33 bp, Homo sapien
aacatgaactagctacgggcctgccttccagaa

SEQ ID NO: 905643 - DNA, 33 bp, Homo sapien
tttggggtcaaaaaagacaatataatgtaaccc

SEQ ID NO: 905644 - DNA, 33 bp, Homo sapien
tttggggtcaaaaaaggcaatataatgtaaccc

SEQ ID NO: 905645 - DNA, 33 bp, Homo sapien
agtttaccaaatactaagtgaagtacaacaaag

SEQ ID NO: 905646 - DNA, 33 bp, Homo sapien
agtttaccaaatactaggtgaagtacaacaaag

SEQ ID NO: 905647 - DNA, 33 bp, Homo sapien
tagcactggtaggtaacagtaacagtagtagca

SEQ ID NO: 905648 - DNA, 33 bp, Homo sapien
tagcactggtaggtaatagtaacagtagtagca

SEQ ID NO: 905649 - DNA, 33 bp, Homo sapien
gcaagacatttcataccgcgatatccacacccc

SEQ ID NO: 905650 - DNA, 33 bp, Homo sapien
gcaagacatttcatactgcgatatccacacccc

SEQ ID NO: 905651 - DNA, 33 bp, Homo sapien
cagacgtttctaagatcagacatggagtgtatc

SEQ ID NO: 905652 - DNA, 33 bp, Homo sapien
cagacgtttctaagattagacatggagtgtatc

SEQ ID NO: 905653 - DNA, 33 bp, Homo sapien
aaaatgcagcagctaacataaatacattctgta

SEQ ID NO: 905654 - DNA, 33 bp, Homo sapien
aaaatgcagcagctaatataaatacattctgta

SEQ ID NO: 905655 - DNA, 33 bp, Homo sapien
tgtgttcaccagaagaaataagtcctggccaga

SEQ ID NO: 905656 - DNA, 33 bp, Homo sapien
tgtgttcaccagaagagataagtcctggccaga

SEQ ID NO: 905657 - DNA, 33 bp, Homo sapien
ttctgttttgataacgaccctttgaagcaaggc

SEQ ID NO: 905658 - DNA, 33 bp, Homo sapien
ttctgttttgataacgtccctttgaagcaaggc

SEQ ID NO: 905659 - DNA, 33 bp, Homo sapien
taaaaccatccccatcagaagtggcaaggatga

SEQ ID NO: 905660 - DNA, 33 bp, Homo sapien
taaaaccatccccatctgaagtggcaaggatga

SEQ ID NO: 905661 - DNA, 33 bp, Homo sapien
ccaatgaggcaaagatcagggcacagacgggca

SEQ ID NO: 905662 - DNA, 33 bp, Homo sapien
ccaatgaggcaaagatgagggcacagacgggca

SEQ ID NO: 905663 - DNA, 33 bp, Homo sapien
tcttgagtttcctagacagtcttcttctttccg

SEQ ID NO: 905664 - DNA, 33 bp, Homo sapien
tcttgagtttcctagatagtcttcttctttccg

SEQ ID NO: 905665 - DNA, 33 bp, Homo sapien
ggctgtcattccagtgcaagagaaagacaagaa

SEQ ID NO: 905666 - DNA, 33 bp, Homo sapien
ggctgtcattccagtgtaagagaaagacaagaa

SEQ ID NO: 905667 - DNA, 33 bp, Homo sapien
ttgggtcatcacaagaacccatccagggcatgg

SEQ ID NO: 905668 - DNA, 33 bp, Homo sapien
ttgggtcatcacaagaccccatccagggcatgg

SEQ ID NO: 905669 - DNA, 33 bp, Homo sapien
tggaaaaccacaaaaaactaatatattcaggcc

SEQ ID NO: 905670 - DNA, 33 bp, Homo sapien
tggaaaaccacaaaaagctaatatattcaggcc

SEQ ID NO: 905671 - DNA, 33 bp, Homo sapien
aggccagttccagaaacctcagcctcaatttag

SEQ ID NO: 905672 - DNA, 33 bp, Homo sapien
aggccagttccagaaatctcagcctcaatttag

SEQ ID NO: 905673 - DNA, 33 bp, Homo sapien
atttcacagaacacaagttaatgttttactcca

SEQ ID NO: 905674 - DNA, 33 bp, Homo sapien
atttcacagaacacaatttaatgttttactcca

SEQ ID NO: 905675 - DNA, 33 bp, Homo sapien
gtttccaacttcaaaccccaaattccgtcattt

SEQ ID NO: 905676 - DNA, 33 bp, Homo sapien
gtttccaacttcaaactccaaattccgtcattt

SEQ ID NO: 905677 - DNA, 33 bp, Homo sapien
agagtaggtcctctgaccccacttggcccctct

SEQ ID NO: 905678 - DNA, 33 bp, Homo sapien
agagtaggtcctctgatcccacttggcccctct

SEQ ID NO: 905679 - DNA, 33 bp, Homo sapien
cctactctgtgtagacaaacaccaagtctgaat

SEQ ID NO: 905680 - DNA, 33 bp, Homo sapien
cctactctgtgtagacgaacaccaagtctgaat

SEQ ID NO: 905681 - DNA, 33 bp, Homo sapien
ttgatatctctaccaccgtggaggtctgactac

SEQ ID NO: 905682 - DNA, 33 bp, Homo sapien
ttgatatctctaccactgtggaggtctgactac

SEQ ID NO: 905683 - DNA, 33 bp, Homo sapien
agggatcagctgaatacataagccctatgagac

SEQ ID NO: 905684 - DNA, 33 bp, Homo sapien
agggatcagctgaatatataagccctatgagac

SEQ ID NO: 905685 - DNA, 33 bp, Homo sapien
ttcccattataattccaagaaccatgaatctgt

SEQ ID NO: 905686 - DNA, 33 bp, Homo sapien
ttcccattataattccgagaaccatgaatctgt

SEQ ID NO: 905687 - DNA, 33 bp, Homo sapien
gtgaccacaacggaaaagatgaatacaacccct

SEQ ID NO: 905688 - DNA, 33 bp, Homo sapien
gtgaccacaacggaaatgatgaatacaacccct

SEQ ID NO: 905689 - DNA, 33 bp, Homo sapien
ctagaaacaaacttaccgccaatactgggagaa

SEQ ID NO: 905690 - DNA, 33 bp, Homo sapien
ctagaaacaaacttactgccaatactgggagaa

SEQ ID NO: 905691 - DNA, 33 bp, Homo sapien
cctgctcaaaagtacaagagattttgcgtgact

SEQ ID NO: 905692 - DNA, 33 bp, Homo sapien
cctgctcaaaagtacaggagattttgcgtgact

SEQ ID NO: 905693 - DNA, 33 bp, Homo sapien
ctaaagcccttctatgaagtaaataggttaaat

SEQ ID NO: 905694 - DNA, 33 bp, Homo sapien
ctaaagcccttctatgtagtaaataggttaaat

SEQ ID NO: 905695 - DNA, 33 bp, Homo sapien
ttgctgtattggctacactattctcaaactgct

SEQ ID NO: 905696 - DNA, 33 bp, Homo sapien
ttgctgtattggctacgctattctcaaactgct

SEQ ID NO: 905697 - DNA, 33 bp, Homo sapien
cagcctgcatttgttgaaggtcacacattgaat

SEQ ID NO: 905698 - DNA, 33 bp, Homo sapien
cagcctgcatttgttggaggtcacacattgaat

SEQ ID NO: 905699 - DNA, 33 bp, Homo sapien
gactttagaggtgaaacgccagcatttgcaatc

SEQ ID NO: 905700 - DNA, 33 bp, Homo sapien
gactttagaggtgaaaggccagcatttgcaatc

SEQ ID NO: 905701 - DNA, 33 bp, Homo sapien
actgtgtgccctgtggaacgctgctacaaggta

SEQ ID NO: 905702 - DNA, 33 bp, Homo sapien
actgtgtgccctgtgggacgctgctacaaggta

SEQ ID NO: 905703 - DNA, 33 bp, Homo sapien
ccagaggatatgagaacatggcatgcagaatta

SEQ ID NO: 905704 - DNA, 33 bp, Homo sapien
ccagaggatatgagaatatggcatgcagaatta

SEQ ID NO: 905705 - DNA, 33 bp, Homo sapien
gctaatgcaggtgaatcaactctagcttgtttt

SEQ ID NO: 905706 - DNA, 33 bp, Homo sapien
gctaatgcaggtgaatgaactctagcttgtttt

SEQ ID NO: 905707 - DNA, 33 bp, Homo sapien
cttagcagctaaatcacaagtgtctagaaaact

SEQ ID NO: 905708 - DNA, 33 bp, Homo sapien
cttagcagctaaatcagaagtgtctagaaaact

SEQ ID NO: 905709 - DNA, 33 bp, Homo sapien
aacactatgtgcataacagaaacactaaaatgc

SEQ ID NO: 905710 - DNA, 33 bp, Homo sapien
aacactatgtgcataatagaaacactaaaatgc

SEQ ID NO: 905711 - DNA, 33 bp, Homo sapien
gtaaaaatattggtgacagatggcagaagcaac

SEQ ID NO: 905712 - DNA, 33 bp, Homo sapien
gtaaaaatattggtgatagatggcagaagcaac

SEQ ID NO: 905713 - DNA, 33 bp, Homo sapien
gctaaaaatagcacctaaagtcagtaaacagaa

SEQ ID NO: 905714 - DNA, 33 bp, Homo sapien
gctaaaaatagcacctgaagtcagtaaacagaa

SEQ ID NO: 905715 - DNA, 33 bp, Homo sapien
ttaaaaagtcaaaacccgatggataaactgaat

SEQ ID NO: 905716 - DNA, 33 bp, Homo sapien
ttaaaaagtcaaaacctgatggataaactgaat

SEQ ID NO: 905717 - DNA, 33 bp, Homo sapien
aagtatcaaccaaaaaatgaagcaaaatcagag

SEQ ID NO: 905718 - DNA, 33 bp, Homo sapien
aagtatcaaccaaaaagtgaagcaaaatcagag

SEQ ID NO: 905719 - DNA, 33 bp, Homo sapien
tcagcaagtttccttacgaaattgtctctgatt

SEQ ID NO: 905720 - DNA, 33 bp, Homo sapien
tcagcaagtttccttatgaaattgtctctgatt

SEQ ID NO: 905721 - DNA, 33 bp, Homo sapien
gaaggcaactcataggacaaataccaacaacct

SEQ ID NO: 905722 - DNA, 33 bp, Homo sapien
gaaggcaactcatagggcaaataccaacaacct

SEQ ID NO: 905723 - DNA, 33 bp, Homo sapien
tgtgttcacaatttgaagactatcaagtcatgt

SEQ ID NO: 905724 - DNA, 33 bp, Homo sapien
tgtgttcacaatttgaggactatcaagtcatgt

SEQ ID NO: 905725 - DNA, 33 bp, Homo sapien
ccttcctcagttactacacgtctgaatttatta

SEQ ID NO: 905726 - DNA, 33 bp, Homo sapien
ccttcctcagttactagacgtctgaatttatta

SEQ ID NO: 905727 - DNA, 33 bp, Homo sapien
tcttcctcttacttcacgttacttatctctcct

SEQ ID NO: 905728 - DNA, 33 bp, Homo sapien
tcttcctcttacttcatgttacttatctctcct

SEQ ID NO: 905729 - DNA, 33 bp, Homo sapien
ggtcctcagggcagtgaagattcttagaatgaa

SEQ ID NO: 905730 - DNA, 33 bp, Homo sapien
ggtcctcagggcagtggagattcttagaatgaa

SEQ ID NO: 905731 - DNA, 33 bp, Homo sapien
gcaatatgaaaaacacactctgacgaccagttg

SEQ ID NO: 905732 - DNA, 33 bp, Homo sapien
gcaatatgaaaaacactctctgacgaccagttg

SEQ ID NO: 905733 - DNA, 33 bp, Homo sapien
attgaaaggggagatcacagtagcaaaaagtca

SEQ ID NO: 905734 - DNA, 33 bp, Homo sapien
attgaaaggggagatcgcagtagcaaaaagtca

SEQ ID NO: 905735 - DNA, 33 bp, Homo sapien
agagattagagccttacgtccctaagctgctta

SEQ ID NO: 905736 - DNA, 33 bp, Homo sapien
agagattagagccttatgtccctaagctgctta

SEQ ID NO: 905737 - DNA, 33 bp, Homo sapien
aagtccacaataacccagatgatccatgtggtc

SEQ ID NO: 905738 - DNA, 33 bp, Homo sapien
aagtccacaataacccggatgatccatgtggtc

SEQ ID NO: 905739 - DNA, 33 bp, Homo sapien
agaattattttggctaacttgacaattttgtaa

SEQ ID NO: 905740 - DNA, 33 bp, Homo sapien
agaattattttggctagcttgacaattttgtaa

SEQ ID NO: 905741 - DNA, 33 bp, Homo sapien
ccaagctgccaatagaaagtcagggtgctgagt

SEQ ID NO: 905742 - DNA, 33 bp, Homo sapien
ccaagctgccaatagagagtcagggtgctgagt

SEQ ID NO: 905743 - DNA, 33 bp, Homo sapien
tagtgctcttcaggtcaaatttatccgttccga

SEQ ID NO: 905744 - DNA, 33 bp, Homo sapien
tagtgctcttcaggtcgaatttatccgttccga

SEQ ID NO: 905745 - DNA, 33 bp, Homo sapien
atttggtgagaaacagcaatctgcacatccgag

SEQ ID NO: 905746 - DNA, 33 bp, Homo sapien
atttggtgagaaacagtaatctgcacatccgag

SEQ ID NO: 905747 - DNA, 33 bp, Homo sapien
ataaaaattcacaatcagagaaaaattaaacta

SEQ ID NO: 905748 - DNA, 33 bp, Homo sapien
ataaaaattcacaatccgagaaaaattaaacta

SEQ ID NO: 905749 - DNA, 33 bp, Homo sapien
tccagcctagggttacagattgcttttttcttt

SEQ ID NO: 905750 - DNA, 33 bp, Homo sapien
tccagcctagggttacggattgcttttttcttt

SEQ ID NO: 905751 - DNA, 33 bp, Homo sapien
gaggtcaccgtggccaaacagcacgatgagagg

SEQ ID NO: 905752 - DNA, 33 bp, Homo sapien
gaggtcaccgtggccagacagcacgatgagagg

SEQ ID NO: 905753 - DNA, 33 bp, Homo sapien
tactggccacgcttaacagggatgtttggccat

SEQ ID NO: 905754 - DNA, 33 bp, Homo sapien
tactggccacgcttaatagggatgtttggccat

SEQ ID NO: 905755 - DNA, 33 bp, Homo sapien
actaaggcatgtcagacaagggagttcccaaag

SEQ ID NO: 905756 - DNA, 33 bp, Homo sapien
actaaggcatgtcagataagggagttcccaaag

SEQ ID NO: 905757 - DNA, 33 bp, Homo sapien
tcaaccacagtccaaaaacaataaataaaaaat

SEQ ID NO: 905758 - DNA, 33 bp, Homo sapien
tcaaccacagtccaaacacaataaataaaaaat

SEQ ID NO: 905759 - DNA, 33 bp, Homo sapien
ggtgaggtaaattaagcagacattgtgatgtag

SEQ ID NO: 905760 - DNA, 33 bp, Homo sapien
ggtgaggtaaattaagtagacattgtgatgtag

SEQ ID NO: 905761 - DNA, 33 bp, Homo sapien
tgttgtcacagttgataaggaaaatgtttgtga

SEQ ID NO: 905762 - DNA, 33 bp, Homo sapien
tgttgtcacagttgattaggaaaatgtttgtga

SEQ ID NO: 905763 - DNA, 33 bp, Homo sapien
cctgtggaagacaaaaaccatcattctcacaaa

SEQ ID NO: 905764 - DNA, 33 bp, Homo sapien
cctgtggaagacaaaatccatcattctcacaaa

SEQ ID NO: 905765 - DNA, 33 bp, Homo sapien
actttagaatgtgggaacttttactgaacaact

SEQ ID NO: 905766 - DNA, 33 bp, Homo sapien
actttagaatgtgggaccttttactgaacaact

SEQ ID NO: 905767 - DNA, 33 bp, Homo sapien
actgaacaactgatccagattctttaagaagtt

SEQ ID NO: 905768 - DNA, 33 bp, Homo sapien
actgaacaactgatccggattctttaagaagtt

SEQ ID NO: 905769 - DNA, 33 bp, Homo sapien
agtcactgaaagagctgagattataacctggat

SEQ ID NO: 905770 - DNA, 33 bp, Homo sapien
agtcactgaaagagcttagattataacctggat

SEQ ID NO: 905771 - DNA, 33 bp, Homo sapien
tcatatttctgtgaggaaagtcaatgatgagtg

SEQ ID NO: 905772 - DNA, 33 bp, Homo sapien
tcatatttctgtgagggaagtcaatgatgagtg

SEQ ID NO: 905773 - DNA, 33 bp, Homo sapien
gttgtgttctccccccactttcattgactgtaa

SEQ ID NO: 905774 - DNA, 33 bp, Homo sapien
gttgtgttctccccccgctttcattgactgtaa

SEQ ID NO: 905775 - DNA, 33 bp, Homo sapien
agcctcagatgtaacacgtagaaaagagttgtg

SEQ ID NO: 905776 - DNA, 33 bp, Homo sapien
agcctcagatgtaacaggtagaaaagagttgtg

SEQ ID NO: 905777 - DNA, 33 bp, Homo sapien
gaaccatgcttagaaccagtggcctgcaaaatc

SEQ ID NO: 905778 - DNA, 33 bp, Homo sapien
gaaccatgcttagaacgagtggcctgcaaaatc

SEQ ID NO: 905779 - DNA, 33 bp, Homo sapien
actctcctagaagctacagttataccccaacaa

SEQ ID NO: 905780 - DNA, 33 bp, Homo sapien
actctcctagaagctatagttataccccaacaa

SEQ ID NO: 905781 - DNA, 33 bp, Homo sapien
agaattgaatgggaacagtatccaagcacctga

SEQ ID NO: 905782 - DNA, 33 bp, Homo sapien
agaattgaatgggaacggtatccaagcacctga

SEQ ID NO: 905783 - DNA, 33 bp, Homo sapien
agagcaagacggtttccctatgattcatgatga

SEQ ID NO: 905784 - DNA, 33 bp, Homo sapien
agagcaagacggtttctctatgattcatgatga

SEQ ID NO: 905785 - DNA, 33 bp, Homo sapien
aatacttggagtaaaagagtttctggccacagt

SEQ ID NO: 905786 - DNA, 33 bp, Homo sapien
aatacttggagtaaaatagtttctggccacagt

SEQ ID NO: 905787 - DNA, 33 bp, Homo sapien
gtagagacatgttaaccagttacaaggaaaaca

SEQ ID NO: 905788 - DNA, 33 bp, Homo sapien
gtagagacatgttaacgagttacaaggaaaaca

SEQ ID NO: 905789 - DNA, 33 bp, Homo sapien
atagtcccaatgcagacattttctagaaaacgg

SEQ ID NO: 905790 - DNA, 33 bp, Homo sapien
atagtcccaatgcagatattttctagaaaacgg

SEQ ID NO: 905791 - DNA, 33 bp, Homo sapien
tgggcccaggaacaaccgtagagtaagtaaatc

SEQ ID NO: 905792 - DNA, 33 bp, Homo sapien
tgggcccaggaacaactgtagagtaagtaaatc

SEQ ID NO: 905793 - DNA, 33 bp, Homo sapien
caggtttcctggcaaggagacatgcttcccaga

SEQ ID NO: 905794 - DNA, 33 bp, Homo sapien
caggtttcctggcaagtagacatgcttcccaga

SEQ ID NO: 905795 - DNA, 33 bp, Homo sapien
ttccgggcccttggcaagccaactttccctgac

SEQ ID NO: 905796 - DNA, 33 bp, Homo sapien
ttccgggcccttggcaggccaactttccctgac

SEQ ID NO: 905797 - DNA, 33 bp, Homo sapien
aagtggaaagttgaaaaggaatcaagaagagga

SEQ ID NO: 905798 - DNA, 33 bp, Homo sapien
aagtggaaagttgaaatggaatcaagaagagga

SEQ ID NO: 905799 - DNA, 33 bp, Homo sapien
gagctggacgatgcagcactagatggaagccga

SEQ ID NO: 905800 - DNA, 33 bp, Homo sapien
gagctggacgatgcaggactagatggaagccga

SEQ ID NO: 905801 - DNA, 33 bp, Homo sapien
ctcattgctgcaagacactgggattttgaacta

SEQ ID NO: 905802 - DNA, 33 bp, Homo sapien
ctcattgctgcaagacgctgggattttgaacta

SEQ ID NO: 905803 - DNA, 33 bp, Homo sapien
gtgaggcagttagtgaagttagagatgagcaaa

SEQ ID NO: 905804 - DNA, 33 bp, Homo sapien
gtgaggcagttagtgacgttagagatgagcaaa

SEQ ID NO: 905805 - DNA, 33 bp, Homo sapien
aggtggtgacaaaagaaaaactagatacactgg

SEQ ID NO: 905806 - DNA, 33 bp, Homo sapien
aggtggtgacaaaagagaaactagatacactgg

SEQ ID NO: 905807 - DNA, 33 bp, Homo sapien
tgatttttcaaagacaaatacgaccatggtttc

SEQ ID NO: 905808 - DNA, 33 bp, Homo sapien
tgatttttcaaagacagatacgaccatggtttc

SEQ ID NO: 905809 - DNA, 33 bp, Homo sapien
tggtagttcacttacaaatagccagatatcaga

SEQ ID NO: 905810 - DNA, 33 bp, Homo sapien
tggtagttcacttacagatagccagatatcaga

SEQ ID NO: 905811 - DNA, 33 bp, Homo sapien
gagagggttgcctggaacttccattgcactaga

SEQ ID NO: 905812 - DNA, 33 bp, Homo sapien
gagagggttgcctggatcttccattgcactaga

SEQ ID NO: 905813 - DNA, 33 bp, Homo sapien
gaaaggcccccagcctaagaaagagataaactt

SEQ ID NO: 905814 - DNA, 33 bp, Homo sapien
gaaaggcccccagcctgagaaagagataaactt

SEQ ID NO: 905815 - DNA, 33 bp, Homo sapien
tatgaggacttttgatgaaccagaaaaacattg

SEQ ID NO: 905816 - DNA, 33 bp, Homo sapien
tatgaggacttttgattaaccagaaaaacattg

SEQ ID NO: 905817 - DNA, 33 bp, Homo sapien
atgacaccaaaccagacggcagagaaagggcta

SEQ ID NO: 905818 - DNA, 33 bp, Homo sapien
atgacaccaaaccagatggcagagaaagggcta

SEQ ID NO: 905819 - DNA, 33 bp, Homo sapien
actgcaaactctcttcactagaaatgggattcc

SEQ ID NO: 905820 - DNA, 33 bp, Homo sapien
actgcaaactctcttcgctagaaatgggattcc

SEQ ID NO: 905821 - DNA, 33 bp, Homo sapien
gaaccctgtgtaacaacgtgtgtggctttcaag

SEQ ID NO: 905822 - DNA, 33 bp, Homo sapien
gaaccctgtgtaacaatgtgtgtggctttcaag

SEQ ID NO: 905823 - DNA, 33 bp, Homo sapien
gcatttctctgataacaagtggtgatgaccatt

SEQ ID NO: 905824 - DNA, 33 bp, Homo sapien
gcatttctctgataacgagtggtgatgaccatt

SEQ ID NO: 905825 - DNA, 33 bp, Homo sapien
agcccttccaatttgaagcaggaagacaaaact

SEQ ID NO: 905826 - DNA, 33 bp, Homo sapien
agcccttccaatttgacgcaggaagacaaaact

SEQ ID NO: 905827 - DNA, 33 bp, Homo sapien
actgtggtaattcatacattctacagagtggga

SEQ ID NO: 905828 - DNA, 33 bp, Homo sapien
actgtggtaattcatatattctacagagtggga

SEQ ID NO: 905829 - DNA, 33 bp, Homo sapien
acaaattacatctgccagcactcaaggcaggag

SEQ ID NO: 905830 - DNA, 33 bp, Homo sapien
acaaattacatctgccggcactcaaggcaggag

SEQ ID NO: 905831 - DNA, 33 bp, Homo sapien
agcaattcgtttaaaacattcttgatgtgattt

SEQ ID NO: 905832 - DNA, 33 bp, Homo sapien
agcaattcgtttaaaatattcttgatgtgattt

SEQ ID NO: 905833 - DNA, 33 bp, Homo sapien
gcttagaatgagaataaaaaactcctaaaggca

SEQ ID NO: 905834 - DNA, 33 bp, Homo sapien
gcttagaatgagaatacaaaactcctaaaggca

SEQ ID NO: 905835 - DNA, 33 bp, Homo sapien
attaggagacagaataaaagaaacaggatgtct

SEQ ID NO: 905836 - DNA, 33 bp, Homo sapien
attaggagacagaatacaagaaacaggatgtct

SEQ ID NO: 905837 - DNA, 33 bp, Homo sapien
gagagaattgtaggggaagaccaacactgtggg

SEQ ID NO: 905838 - DNA, 33 bp, Homo sapien
gagagaattgtagggggagaccaacactgtggg

SEQ ID NO: 905839 - DNA, 33 bp, Homo sapien
acccttactgacagcaaagaacttagtcaagcc

SEQ ID NO: 905840 - DNA, 33 bp, Homo sapien
acccttactgacagcagagaacttagtcaagcc

SEQ ID NO: 905841 - DNA, 33 bp, Homo sapien
catacaatcaatagaacgcatgactgttaatgt

SEQ ID NO: 905842 - DNA, 33 bp, Homo sapien
catacaatcaatagaatgcatgactgttaatgt

SEQ ID NO: 905843 - DNA, 33 bp, Homo sapien
cgtctagcccagtaaacataaaaactcacacca

SEQ ID NO: 905844 - DNA, 33 bp, Homo sapien
cgtctagcccagtaaagataaaaactcacacca

SEQ ID NO: 905845 - DNA, 33 bp, Homo sapien
atacctaatgtctcacaaaacactgaagaatcc

SEQ ID NO: 905846 - DNA, 33 bp, Homo sapien
atacctaatgtctcaccaaacactgaagaatcc

SEQ ID NO: 905847 - DNA, 33 bp, Homo sapien
gataatccaggattagaacacaggtataccagc

SEQ ID NO: 905848 - DNA, 33 bp, Homo sapien
gataatccaggattagtacacaggtataccagc

SEQ ID NO: 905849 - DNA, 33 bp, Homo sapien
atttaatctacccttaactgagcaatgtagtca

SEQ ID NO: 905850 - DNA, 33 bp, Homo sapien
atttaatctacccttatctgagcaatgtagtca

SEQ ID NO: 905851 - DNA, 33 bp, Homo sapien
ttttgactaaatgcaacgtgaccacttagtctg

SEQ ID NO: 905852 - DNA, 33 bp, Homo sapien
ttttgactaaatgcaatgtgaccacttagtctg

SEQ ID NO: 905853 - DNA, 33 bp, Homo sapien
atcaactcaaaaatgaaatacccgtgaaagctc

SEQ ID NO: 905854 - DNA, 33 bp, Homo sapien
atcaactcaaaaatgacatacccgtgaaagctc

SEQ ID NO: 905855 - DNA, 33 bp, Homo sapien
tgttcacacaagacaaaattgcctaatagtgca

SEQ ID NO: 905856 - DNA, 33 bp, Homo sapien
tgttcacacaagacaacattgcctaatagtgca

SEQ ID NO: 905857 - DNA, 33 bp, Homo sapien
atggacactgaggcaaagcatttgtactttatt

SEQ ID NO: 905858 - DNA, 33 bp, Homo sapien
atggacactgaggcaaggcatttgtactttatt

SEQ ID NO: 905859 - DNA, 33 bp, Homo sapien
cctttgtttatgaaacacttgctctacaccagg

SEQ ID NO: 905860 - DNA, 33 bp, Homo sapien
cctttgtttatgaaacgcttgctctacaccagg

SEQ ID NO: 905861 - DNA, 33 bp, Homo sapien
tcaaattaaaatcacaaccagatattgcctaac

SEQ ID NO: 905862 - DNA, 33 bp, Homo sapien
tcaaattaaaatcacagccagatattgcctaac

SEQ ID NO: 905863 - DNA, 33 bp, Homo sapien
aatgctccaagtaaaacaggttccacaatctaa

SEQ ID NO: 905864 - DNA, 33 bp, Homo sapien
aatgctccaagtaaaataggttccacaatctaa

SEQ ID NO: 905865 - DNA, 33 bp, Homo sapien
taaaaatcatcacagtaaaaatatgcttctgtg

SEQ ID NO: 905866 - DNA, 33 bp, Homo sapien
taaaaatcatcacagttaaaatatgcttctgtg

SEQ ID NO: 905867 - DNA, 33 bp, Homo sapien
tgcacttaataaatcagggtgatcttaataagt

SEQ ID NO: 905868 - DNA, 33 bp, Homo sapien
tgcacttaataaatcatggtgatcttaataagt

SEQ ID NO: 905869 - DNA, 33 bp, Homo sapien
tcaaggcaaattttaaaatatatgcgtatatat

SEQ ID NO: 905870 - DNA, 33 bp, Homo sapien
tcaaggcaaattttaatatatatgcgtatatat

SEQ ID NO: 905871 - DNA, 33 bp, Homo sapien
catctctcgaagctaaggtaggtacgcgcgtca

SEQ ID NO: 905872 - DNA, 33 bp, Homo sapien
catctctcgaagctaatgtaggtacgcgcgtca

SEQ ID NO: 905873 - DNA, 33 bp, Homo sapien
cgcgatgcattgattccatatggctttggggag

SEQ ID NO: 905874 - DNA, 33 bp, Homo sapien
cgcgatgcattgattctatatggctttggggag

SEQ ID NO: 905875 - DNA, 33 bp, Homo sapien
gtgtagtggaaatctacggttaggagagactga

SEQ ID NO: 905876 - DNA, 33 bp, Homo sapien
gtgtagtggaaatctatggttaggagagactga

SEQ ID NO: 905877 - DNA, 33 bp, Homo sapien
aaaaaaattaagaacacaaatgaacatccaaga

SEQ ID NO: 905878 - DNA, 33 bp, Homo sapien
aaaaaaattaagaacagaaatgaacatccaaga

SEQ ID NO: 905879 - DNA, 33 bp, Homo sapien
tagttatggataaggccgagtatcttttcacat

SEQ ID NO: 905880 - DNA, 33 bp, Homo sapien
tagttatggataaggctgagtatcttttcacat

SEQ ID NO: 905881 - DNA, 33 bp, Homo sapien
ttttctcatgacaatgacagaagtgtaagagta

SEQ ID NO: 905882 - DNA, 33 bp, Homo sapien
ttttctcatgacaatggcagaagtgtaagagta

SEQ ID NO: 905883 - DNA, 33 bp, Homo sapien
tgaaatatttagtaaaactattgcctgaagtaa

SEQ ID NO: 905884 - DNA, 33 bp, Homo sapien
tgaaatatttagtaaagctattgcctgaagtaa

SEQ ID NO: 905885 - DNA, 33 bp, Homo sapien
ataaagtattctcacaaaaatgataactatgtg

SEQ ID NO: 905886 - DNA, 33 bp, Homo sapien
ataaagtattctcacagaaatgataactatgtg

SEQ ID NO: 905887 - DNA, 33 bp, Homo sapien
taggtcagatagcagaaacttaaagccaggact

SEQ ID NO: 905888 - DNA, 33 bp, Homo sapien
taggtcagatagcagatacttaaagccaggact

SEQ ID NO: 905889 - DNA, 33 bp, Homo sapien
gggaaatgacagaaaaaggagtggataggtcag

SEQ ID NO: 905890 - DNA, 33 bp, Homo sapien
gggaaatgacagaaaatggagtggataggtcag

SEQ ID NO: 905891 - DNA, 33 bp, Homo sapien
gtgtgctccataatacagagaataagcccttta

SEQ ID NO: 905892 - DNA, 33 bp, Homo sapien
gtgtgctccataatacggagaataagcccttta

SEQ ID NO: 905893 - DNA, 33 bp, Homo sapien
ctgatactgcccacaacgataccagtactgagt

SEQ ID NO: 905894 - DNA, 33 bp, Homo sapien
ctgatactgcccacaaggataccagtactgagt

SEQ ID NO: 905895 - DNA, 33 bp, Homo sapien
aggttagcacaccgtacattctcaaatcctgga

SEQ ID NO: 905896 - DNA, 33 bp, Homo sapien
aggttagcacaccgtatattctcaaatcctgga

SEQ ID NO: 905897 - DNA, 33 bp, Homo sapien
ggaaagtgaactgcccaaactctgatgccttgt

SEQ ID NO: 905898 - DNA, 33 bp, Homo sapien
ggaaagtgaactgcccgaactctgatgccttgt

SEQ ID NO: 905899 - DNA, 33 bp, Homo sapien
caaagtgtagtaatgaagtgaggaacgaagatg

SEQ ID NO: 905900 - DNA, 33 bp, Homo sapien
caaagtgtagtaatgaggtgaggaacgaagatg

SEQ ID NO: 905901 - DNA, 33 bp, Homo sapien
tcacagtcaggcctgcagatgtcctcttctatt

SEQ ID NO: 905902 - DNA, 33 bp, Homo sapien
tcacagtcaggcctgcggatgtcctcttctatt

SEQ ID NO: 905903 - DNA, 33 bp, Homo sapien
agagctggctggaaaaaaccgattatcagagaa

SEQ ID NO: 905904 - DNA, 33 bp, Homo sapien
agagctggctggaaaacaccgattatcagagaa

SEQ ID NO: 905905 - DNA, 33 bp, Homo sapien
gttccaaagggttgtacgacagcaataggaatt

SEQ ID NO: 905906 - DNA, 33 bp, Homo sapien
gttccaaagggttgtatgacagcaataggaatt

SEQ ID NO: 905907 - DNA, 33 bp, Homo sapien
ggatatggatatttgacgggaaaatttatattt

SEQ ID NO: 905908 - DNA, 33 bp, Homo sapien
ggatatggatatttgaggggaaaatttatattt

SEQ ID NO: 905909 - DNA, 33 bp, Homo sapien; identical to SEQ ID NO: 905907

SEQ ID NO: 905910 - DNA, 33 bp, Homo sapien; identical to SEQ ID NO: 905908

SEQ ID NO: 905911 - DNA, 33 bp, Homo sapien
tggtccaaattttctaacctgacatcatgttca

SEQ ID NO: 905912 - DNA, 33 bp, Homo sapien
tggtccaaattttctatcctgacatcatgttca

SEQ ID NO: 905913 - DNA, 33 bp, Homo sapien
atttctaagaagtataccactggaaagagataa

SEQ ID NO: 905914 - DNA, 33 bp, Homo sapien
atttctaagaagtatatcactggaaagagataa

SEQ ID NO: 905915 - DNA, 33 bp, Homo sapien
ctagatcttccatcaccctcaggataaacttaa

SEQ ID NO: 905916 - DNA, 33 bp, Homo sapien
ctagatcttccatcactctcaggataaacttaa

SEQ ID NO: 905917 - DNA, 33 bp, Homo sapien
atctaattgctgttcaaaagaattgatacagag

SEQ ID NO: 905918 - DNA, 33 bp, Homo sapien
atctaattgctgttcagaagaattgatacagag

SEQ ID NO: 905919 - DNA, 33 bp, Homo sapien
tcacccttcgccctaacgcataaaggatcagga

SEQ ID NO: 905920 - DNA, 33 bp, Homo sapien
tcacccttcgccctaatgcataaaggatcagga

SEQ ID NO: 905921 - DNA, 33 bp, Homo sapien
catgtgtttaattaaaataacgaactgagattt

SEQ ID NO: 905922 - DNA, 33 bp, Homo sapien
catgtgtttaattaaagtaacgaactgagattt

SEQ ID NO: 905923 - DNA, 33 bp, Homo sapien
cctttcatgggttgaaaggctcattctagtcac

SEQ ID NO: 905924 - DNA, 33 bp, Homo sapien
cctttcatgggttgaagggctcattctagtcac

SEQ ID NO: 905925 - DNA, 33 bp, Homo sapien
aatcagcactttgaaaccacaaaattcagaact

SEQ ID NO: 905926 - DNA, 33 bp, Homo sapien
aatcagcactttgaaatcacaaaattcagaact

SEQ ID NO: 905927 - DNA, 33 bp, Homo sapien
acttgctcccagtcacgcagctggtaaaggttc

SEQ ID NO: 905928 - DNA, 33 bp, Homo sapien
acttgctcccagtcactcagctggtaaaggttc

SEQ ID NO: 905929 - DNA, 33 bp, Homo sapien
attcttgactacccagaaattcagtggccaaat

SEQ ID NO: 905930 - DNA, 33 bp, Homo sapien
attcttgactacccaggaattcagtggccaaat

SEQ ID NO: 905931 - DNA, 33 bp, Homo sapien
tggatagaatggtcaaaaagttggagatattac

SEQ ID NO: 905932 - DNA, 33 bp, Homo sapien
tggatagaatggtcaacaagttggagatattac

SEQ ID NO: 905933 - DNA, 33 bp, Homo sapien
gctatgttttaggaaaaattctgtgttgtgcct

SEQ ID NO: 905934 - DNA, 33 bp, Homo sapien
gctatgttttaggaaatattctgtgttgtgcct

SEQ ID NO: 905935 - DNA, 33 bp, Homo sapien
gatcaataagacatgaacccatggcacgcagtc

SEQ ID NO: 905936 - DNA, 33 bp, Homo sapien
gatcaataagacatgagcccatggcacgcagtc

SEQ ID NO: 905937 - DNA, 33 bp, Homo sapien
aaagagtagacaaacccggcagcagtcacaata

SEQ ID NO: 905938 - DNA, 33 bp, Homo sapien
aaagagtagacaaacctggcagcagtcacaata

SEQ ID NO: 905939 - DNA, 33 bp, Homo sapien
taattcatttcctgctcaagccacctgatacac

SEQ ID NO: 905940 - DNA, 33 bp, Homo sapien
taattcatttcctgctgaagccacctgatacac

SEQ ID NO: 905941 - DNA, 33 bp, Homo sapien
gctaacgtctaccatcagagtggtggagctatg

SEQ ID NO: 905942 - DNA, 33 bp, Homo sapien
gctaacgtctaccatcggagtggtggagctatg

SEQ ID NO: 905943 - DNA, 33 bp, Homo sapien
ctgcttggcattgcgacgaactccattctcttg

SEQ ID NO: 905944 - DNA, 33 bp, Homo sapien
ctgcttggcattgcgatgaactccattctcttg

SEQ ID NO: 905945 - DNA, 33 bp, Homo sapien
aattttattatattcccaagtctgctctctact

SEQ ID NO: 905946 - DNA, 33 bp, Homo sapien
aattttattatattcctaagtctgctctctact

SEQ ID NO: 905947 - DNA, 33 bp, Homo sapien
cagtacattccttctacaagtcctgagcctggg

SEQ ID NO: 905948 - DNA, 33 bp, Homo sapien
cagtacattccttctataagtcctgagcctggg

SEQ ID NO: 905949 - DNA, 33 bp, Homo sapien
ggggagaagggagcacacacaaagtacagaaat

SEQ ID NO: 905950 - DNA, 33 bp, Homo sapien
ggggagaagggagcacgcacaaagtacagaaat

SEQ ID NO: 905951 - DNA, 33 bp, Homo sapien
ctgcatcgtaactgctaaacccaaagctgctcc

SEQ ID NO: 905952 - DNA, 33 bp, Homo sapien
ctgcatcgtaactgctgaacccaaagctgctcc

SEQ ID NO: 905953 - DNA, 33 bp, Homo sapien
tcgttgaagttacccactctgtgatgttttgtt

SEQ ID NO: 905954 - DNA, 33 bp, Homo sapien
tcgttgaagttacccagtctgtgatgttttgtt

SEQ ID NO: 905955 - DNA, 33 bp, Homo sapien
cgctcatacgaaatgaaacctgcctatgccttg

SEQ ID NO: 905956 - DNA, 33 bp, Homo sapien
cgctcatacgaaatgagacctgcctatgccttg

SEQ ID NO: 905957 - DNA, 33 bp, Homo sapien
agtggcactgaggaaagttagggtcacaaaatg

SEQ ID NO: 905958 - DNA, 33 bp, Homo sapien
agtggcactgaggaaatttagggtcacaaaatg

SEQ ID NO: 905959 - DNA, 33 bp, Homo sapien
taaaatacaattgctaactgaaatctgcagtag

SEQ ID NO: 905960 - DNA, 33 bp, Homo sapien
taaaatacaattgctagctgaaatctgcagtag

SEQ ID NO: 905961 - DNA, 33 bp, Homo sapien
gaaggattggacaataaaagcaatttaaatgtg

SEQ ID NO: 905962 - DNA, 33 bp, Homo sapien
gaaggattggacaatagaagcaatttaaatgtg

SEQ ID NO: 905963 - DNA, 33 bp, Homo sapien
ttaaagtggataccatcaggctcatacacgtag

SEQ ID NO: 905964 - DNA, 33 bp, Homo sapien
ttaaagtggataccattaggctcatacacgtag

SEQ ID NO: 905965 - DNA, 33 bp, Homo sapien
tgtgtgtgtctgtgtacaagggtgggagcaatt

SEQ ID NO: 905966 - DNA, 33 bp, Homo sapien
tgtgtgtgtctgtgtataagggtgggagcaatt

SEQ ID NO: 905967 - DNA, 33 bp, Homo sapien
tagcttgattctctcacgcttatttcaccccca

SEQ ID NO: 905968 - DNA, 33 bp, Homo sapien
tagcttgattctctcatgcttatttcaccccca

SEQ ID NO: 905969 - DNA, 33 bp, Homo sapien
caagtagccaaatatacgtgtgattgaagtgcc

SEQ ID NO: 905970 - DNA, 33 bp, Homo sapien
caagtagccaaatatatgtgtgattgaagtgcc

SEQ ID NO: 905971 - DNA, 33 bp, Homo sapien
tactacaagcttatacacttccattgtgtttac

SEQ ID NO: 905972 - DNA, 33 bp, Homo sapien
tactacaagcttatacgcttccattgtgtttac

SEQ ID NO: 905973 - DNA, 33 bp, Homo sapien
tagataccaccatataaaggagtgaatggtagc

SEQ ID NO: 905974 - DNA, 33 bp, Homo sapien
tagataccaccatatacaggagtgaatggtagc

SEQ ID NO: 905975 - DNA, 33 bp, Homo sapien
gaagtactttcttggcactggacactaaataat

SEQ ID NO: 905976 - DNA, 33 bp, Homo sapien
gaagtactttcttggctctggacactaaataat

SEQ ID NO: 905977 - DNA, 33 bp, Homo sapien
aatgcttgttgttgtacgctgctagggtaattc

SEQ ID NO: 905978 - DNA, 33 bp, Homo sapien
aatgcttgttgttgtatgctgctagggtaattc

SEQ ID NO: 905979 - DNA, 33 bp, Homo sapien
cctactgatgtagataagacaatagttgctagc

SEQ ID NO: 905980 - DNA, 33 bp, Homo sapien
cctactgatgtagataggacaatagttgctagc

SEQ ID NO: 905981 - DNA, 33 bp, Homo sapien
tatatgtgtatagctgaaggaaaattttctaaa

SEQ ID NO: 905982 - DNA, 33 bp, Homo sapien
tatatgtgtatagctgtaggaaaattttctaaa

SEQ ID NO: 905983 - DNA, 33 bp, Homo sapien
gtgctattcctaggacaggtaacgcctctcttt

SEQ ID NO: 905984 - DNA, 33 bp, Homo sapien
gtgctattcctaggacgggtaacgcctctcttt

SEQ ID NO: 905985 - DNA, 33 bp, Homo sapien
tgattcttctgagactaaacttggaaccaatac

SEQ ID NO: 905986 - DNA, 33 bp, Homo sapien
tgattcttctgagactgaacttggaaccaatac

SEQ ID NO: 905987 - DNA, 33 bp, Homo sapien
ccagcaaacctcacgaactcttgtaaaaatcac

SEQ ID NO: 905988 - DNA, 33 bp, Homo sapien
ccagcaaacctcacgacctcttgtaaaaatcac

SEQ ID NO: 905989 - DNA, 33 bp, Homo sapien
ctcaaatgttcctttaccatacactgggtccca

SEQ ID NO: 905990 - DNA, 33 bp, Homo sapien
ctcaaatgttcctttatcatacactgggtccca

SEQ ID NO: 905991 - DNA, 33 bp, Homo sapien
caacagacaaagctgccgatgcggatggcagat

SEQ ID NO: 905992 - DNA, 33 bp, Homo sapien
caacagacaaagctgctgatgcggatggcagat

SEQ ID NO: 905993 - DNA, 33 bp, Homo sapien
taacctaaaatttgcaaagaaaataggacagat

SEQ ID NO: 905994 - DNA, 33 bp, Homo sapien
taacctaaaatttgcagagaaaataggacagat

SEQ ID NO: 905995 - DNA, 33 bp, Homo sapien
ggatcgagccatcacgaaggacctgaaaacggc

SEQ ID NO: 905996 - DNA, 33 bp, Homo sapien
ggatcgagccatcacggaggacctgaaaacggc

SEQ ID NO: 905997 - DNA, 33 bp, Homo sapien
gaaggtctcaccaagacatttgtcaaataactg

SEQ ID NO: 905998 - DNA, 33 bp, Homo sapien
gaaggtctcaccaagagatttgtcaaataactg

SEQ ID NO: 905999 - DNA, 33 bp, Homo sapien
gaaaagcagggaaatgaaaaaactcacttaaag

SEQ ID NO: 906000 - DNA, 33 bp, Homo sapien
gaaaagcagggaaatggaaaaactcacttaaag

SEQ ID NO: 906001 - DNA, 33 bp, Homo sapien
ttagcctttaatcatgaataaggaatgacttca

SEQ ID NO: 906002 - DNA, 33 bp, Homo sapien
ttagcctttaatcatgtataaggaatgacttca

SEQ ID NO: 906003 - DNA, 33 bp, Homo sapien
ttcaggataagagaaaggttggatgaaatgctc

SEQ ID NO: 906004 - DNA, 33 bp, Homo sapien
ttcaggataagagaaatgttggatgaaatgctc

SEQ ID NO: 906005 - DNA, 33 bp, Homo sapien
gtaaggctaaaatccaagtagaatgcagcagcc

SEQ ID NO: 906006 - DNA, 33 bp, Homo sapien
gtaaggctaaaatccatgtagaatgcagcagcc

SEQ ID NO: 906007 - DNA, 33 bp, Homo sapien
cctcttctttattaaacagactccttagcaaga

SEQ ID NO: 906008 - DNA, 33 bp, Homo sapien
cctcttctttattaaatagactccttagcaaga

SEQ ID NO: 906009 - DNA, 33 bp, Homo sapien
gtttgtactccttatgaactgcctcttctttat

SEQ ID NO: 906010 - DNA, 33 bp, Homo sapien
gtttgtactccttatgtactgcctcttctttat

SEQ ID NO: 906011 - DNA, 33 bp, Homo sapien
gactaatgcagtttgacgaaatgtcagggattt

SEQ ID NO: 906012 - DNA, 33 bp, Homo sapien
gactaatgcagtttgatgaaatgtcagggattt

SEQ ID NO: 906013 - DNA, 33 bp, Homo sapien
ttttacagagttggaacgacaaatgtatacttt

SEQ ID NO: 906014 - DNA, 33 bp, Homo sapien
ttttacagagttggaatgacaaatgtatacttt

SEQ ID NO: 906015 - DNA, 33 bp, Homo sapien
aaaaattcaggtaaaagccttgaatctgaaatc

SEQ ID NO: 906016 - DNA, 33 bp, Homo sapien
aaaaattcaggtaaaatccttgaatctgaaatc

SEQ ID NO: 906017 - DNA, 33 bp, Homo sapien
caatgctaaaggtttcacataagagggtcgtga

SEQ ID NO: 906018 - DNA, 33 bp, Homo sapien
caatgctaaaggtttcgcataagagggtcgtga

SEQ ID NO: 906019 - DNA, 33 bp, Homo sapien
accctaacatccatgaagcaactgggccacagg

SEQ ID NO: 906020 - DNA, 33 bp, Homo sapien
accctaacatccatgaggcaactgggccacagg

SEQ ID NO: 906021 - DNA, 33 bp, Homo sapien
ctctccatttaacttacgttcaactgcaataac

SEQ ID NO: 906022 - DNA, 33 bp, Homo sapien
ctctccatttaacttatgttcaactgcaataac

SEQ ID NO: 906023 - DNA, 33 bp, Homo sapien
tgaaaacactatgctaactgaaagaagccaggc

SEQ ID NO: 906024 - DNA, 33 bp, Homo sapien
tgaaaacactatgctacctgaaagaagccaggc

SEQ ID NO: 906025 - DNA, 33 bp, Homo sapien
ctggatgtatacagtaactaaaatgcacagata

SEQ ID NO: 906026 - DNA, 33 bp, Homo sapien
ctggatgtatacagtatctaaaatgcacagata

SEQ ID NO: 906027 - DNA, 33 bp, Homo sapien
tgtatgtagagacagaagtaataaagtgacttt

SEQ ID NO: 906028 - DNA, 33 bp, Homo sapien
tgtatgtagagacagaggtaataaagtgacttt

SEQ ID NO: 906029 - DNA, 33 bp, Homo sapien
aatctcagtctacaaactgctacacctgcaaaa

SEQ ID NO: 906030 - DNA, 33 bp, Homo sapien
aatctcagtctacaaattgctacacctgcaaaa

SEQ ID NO: 906031 - DNA, 33 bp, Homo sapien
gtggagtctagggaaacggccttgtcatgaagc

SEQ ID NO: 906032 - DNA, 33 bp, Homo sapien
gtggagtctagggaaatggccttgtcatgaagc

SEQ ID NO: 906033 - DNA, 33 bp, Homo sapien
acacattctgctttgcacggagatgagtgtggc

SEQ ID NO: 906034 - DNA, 33 bp, Homo sapien
acacattctgctttgcgcggagatgagtgtggc

SEQ ID NO: 906035 - DNA, 33 bp, Homo sapien
ttgttctcccataagcgcatcagtaaacatggt

SEQ ID NO: 906036 - DNA, 33 bp, Homo sapien
ttgttctcccataagctcatcagtaaacatggt

SEQ ID NO: 906037 - DNA, 33 bp, Homo sapien
cctctggagtgtaaaaacctgtgtaggctgctt

SEQ ID NO: 906038 - DNA, 33 bp, Homo sapien
cctctggagtgtaaaaccctgtgtaggctgctt

SEQ ID NO: 906039 - DNA, 33 bp, Homo sapien
tgttaaagaaaacagacggcagctaggtaacaa

SEQ ID NO: 906040 - DNA, 33 bp, Homo sapien
tgttaaagaaaacagatggcagctaggtaacaa

SEQ ID NO: 906041 - DNA, 33 bp, Homo sapien
gggtgaggaagttgcacagtaggaaagggagaa

SEQ ID NO: 906042 - DNA, 33 bp, Homo sapien
gggtgaggaagttgcatagtaggaaagggagaa

SEQ ID NO: 906043 - DNA, 33 bp, Homo sapien
gtggctgagaacatgacctatcttggtgagtat

SEQ ID NO: 906044 - DNA, 33 bp, Homo sapien
gtggctgagaacatgatctatcttggtgagtat

SEQ ID NO: 906045 - DNA, 33 bp, Homo sapien
aggaagcaagtttccacgatttctgaagagctg

SEQ ID NO: 906046 - DNA, 33 bp, Homo sapien
aggaagcaagtttccatgatttctgaagagctg

SEQ ID NO: 906047 - DNA, 33 bp, Homo sapien; identical to SEQ ID NO: 906045

SEQ ID NO: 906048 - DNA, 33 bp, Homo sapien; identical to SEQ ID NO: 906046

SEQ ID NO: 906049 - DNA, 33 bp, Homo sapien
gatagaattaagtacactccttgctcaataaaa

SEQ ID NO: 906050 - DNA, 33 bp, Homo sapien
gatagaattaagtacattccttgctcaataaaa

SEQ ID NO: 906051 - DNA, 33 bp, Homo sapien
gtcttccagcctgcaacgtgtggtacttgaact

SEQ ID NO: 906052 - DNA, 33 bp, Homo sapien
gtcttccagcctgcaatgtgtggtacttgaact

SEQ ID NO: 906053 - DNA, 33 bp, Homo sapien
acgagagggacagtccacctttgattttattag

SEQ ID NO: 906054 - DNA, 33 bp, Homo sapien
acgagagggacagtccgcctttgattttattag

SEQ ID NO: 906055 - DNA, 33 bp, Homo sapien
atatgtagaaaatgaaagttatccttttagagc

SEQ ID NO: 906056 - DNA, 33 bp, Homo sapien
atatgtagaaaatgaaggttatccttttagagc

SEQ ID NO: 906057 - DNA, 33 bp, Homo sapien
agtgacatggaaagtaaaaccactgcaaatgtc

SEQ ID NO: 906058 - DNA, 33 bp, Homo sapien
agtgacatggaaagtagaaccactgcaaatgtc

SEQ ID NO: 906059 - DNA, 33 bp, Homo sapien
gaggaaaggccatgccaattctaaagtgaggtg

SEQ ID NO: 906060 - DNA, 33 bp, Homo sapien
gaggaaaggccatgccgattctaaagtgaggtg

SEQ ID NO: 906061 - DNA, 33 bp, Homo sapien
tctattcccagtactaagatgacttatctccat

SEQ ID NO: 906062 - DNA, 33 bp, Homo sapien
tctattcccagtactacgatgacttatctccat

SEQ ID NO: 906063 - DNA, 33 bp, Homo sapien
gtaccattctccttcaggctggctctatgttct

SEQ ID NO: 906064 - DNA, 33 bp, Homo sapien
gtaccattctccttcatgctggctctatgttct

SEQ ID NO: 906065 - DNA, 33 bp, Homo sapien
ccctgctggcatttcaatagtgctggtggcctc

SEQ ID NO: 906066 - DNA, 33 bp, Homo sapien
ccctgctggcatttcagtagtgctggtggcctc

SEQ ID NO: 906067 - DNA, 33 bp, Homo sapien
gcattcactgaaagaacctgctcagattatgtt

SEQ ID NO: 906068 - DNA, 33 bp, Homo sapien
gcattcactgaaagaagctgctcagattatgtt

SEQ ID NO: 906069 - DNA, 33 bp, Homo sapien
actcgtttagaaataccctctttgcttgcttca

SEQ ID NO: 906070 - DNA, 33 bp, Homo sapien
actcgtttagaaatactctctttgcttgcttca

SEQ ID NO: 906071 - DNA, 33 bp, Homo sapien
aaatgaacaagtttacaaaaaatcctgaaagcc

SEQ ID NO: 906072 - DNA, 33 bp, Homo sapien
aaatgaacaagtttacgaaaaatcctgaaagcc

SEQ ID NO: 906073 - DNA, 33 bp, Homo sapien
gacaaaggcatgtactcaatgtgaatatgtgtg

SEQ ID NO: 906074 - DNA, 33 bp, Homo sapien
gacaaaggcatgtactgaatgtgaatatgtgtg

SEQ ID NO: 906075 - DNA, 33 bp, Homo sapien
caggagccatgtgttggaggacagtatccttag

SEQ ID NO: 906076 - DNA, 33 bp, Homo sapien
caggagccatgtgttgtaggacagtatccttag

SEQ ID NO: 906077 - DNA, 33 bp, Homo sapien
gtgctgacttagtggacgctttcatcagacagt

SEQ ID NO: 906078 - DNA, 33 bp, Homo sapien
gtgctgacttagtggatgctttcatcagacagt

SEQ ID NO: 906079 - DNA, 33 bp, Homo sapien
caggtcggtgtatccaaaacgattaattatttt

SEQ ID NO: 906080 - DNA, 33 bp, Homo sapien
caggtcggtgtatccagaacgattaattatttt

SEQ ID NO: 906081 - DNA, 33 bp, Homo sapien
tttctcattgctaagactcaaattatcatagtc

SEQ ID NO: 906082 - DNA, 33 bp, Homo sapien
tttctcattgctaagattcaaattatcatagtc

SEQ ID NO: 906083 - DNA, 33 bp, Homo sapien
aaagatggcgctagaaagtatctgttatagaaa

SEQ ID NO: 906084 - DNA, 33 bp, Homo sapien
aaagatggcgctagaaggtatctgttatagaaa

SEQ ID NO: 906085 - DNA, 33 bp, Homo sapien
cgtgggtatgaacaggccatgtgtatgtgagtg

SEQ ID NO: 906086 - DNA, 33 bp, Homo sapien
cgtgggtatgaacaggtcatgtgtatgtgagtg

SEQ ID NO: 906087 - DNA, 33 bp, Homo sapien
gtcctagatccctcaacccatatccgtctcctc

SEQ ID NO: 906088 - DNA, 33 bp, Homo sapien
gtcctagatccctcaatccatatccgtctcctc

SEQ ID NO: 906089 - DNA, 33 bp, Homo sapien
tgctcaaatgtcaataagaaattcaatgaaaag

SEQ ID NO: 906090 - DNA, 33 bp, Homo sapien
tgctcaaatgtcaatacgaaattcaatgaaaag

SEQ ID NO: 906091 - DNA, 33 bp, Homo sapien
ttaaacgtacaggaaaagaatatgaaacatatc

SEQ ID NO: 906092 - DNA, 33 bp, Homo sapien
ttaaacgtacaggaaaggaatatgaaacatatc

SEQ ID NO: 906093 - DNA, 33 bp, Homo sapien
gtgttcctggtcatgacattcaggctgttcagt

SEQ ID NO: 906094 - DNA, 33 bp, Homo sapien
gtgttcctggtcatgatattcaggctgttcagt

SEQ ID NO: 906095 - DNA, 33 bp, Homo sapien
atcaggactgggctgaatattgcttttaagtcc

SEQ ID NO: 906096 - DNA, 33 bp, Homo sapien
atcaggactgggctgagtattgcttttaagtcc

SEQ ID NO: 906097 - DNA, 33 bp, Homo sapien
caaattgcttctctaaccattcattcaagaaac

SEQ ID NO: 906098 - DNA, 33 bp, Homo sapien
caaattgcttctctaatcattcattcaagaaac

SEQ ID NO: 906099 - DNA, 33 bp, Homo sapien
gttagtctagtgttcccgatttatggctgtatc

SEQ ID NO: 906100 - DNA, 33 bp, Homo sapien
gttagtctagtgttcctgatttatggctgtatc

SEQ ID NO: 906101 - DNA, 33 bp, Homo sapien
tgctctgtgcagggtccgaacacttgtacaacg

SEQ ID NO: 906102 - DNA, 33 bp, Homo sapien
tgctctgtgcagggtctgaacacttgtacaacg

SEQ ID NO: 906103 - DNA, 33 bp, Homo sapien
ccatcacctccatccaaccgactccaccataag

SEQ ID NO: 906104 - DNA, 33 bp, Homo sapien
ccatcacctccatccacccgactccaccataag

SEQ ID NO: 906105 - DNA, 33 bp, Homo sapien
cattgatccctgggggaaaaaaattatggataa

SEQ ID NO: 906106 - DNA, 33 bp, Homo sapien
cattgatccctggggggaaaaaattatggataa

SEQ ID NO: 906107 - DNA, 33 bp, Homo sapien
gggggacctagttataaaggcaggtcaggacac

SEQ ID NO: 906108 - DNA, 33 bp, Homo sapien
gggggacctagttatacaggcaggtcaggacac

SEQ ID NO: 906109 - DNA, 33 bp, Homo sapien
tccgccttcaaaagtaaacagacagcctcagaa

SEQ ID NO: 906110 - DNA, 33 bp, Homo sapien
tccgccttcaaaagtacacagacagcctcagaa

SEQ ID NO: 906111 - DNA, 33 bp, Homo sapien
tgtatcattaatagccaaagtgtgaaatacagc

SEQ ID NO: 906112 - DNA, 33 bp, Homo sapien
tgtatcattaatagccgaagtgtgaaatacagc

SEQ ID NO: 906113 - DNA, 33 bp, Homo sapien
tttgcattttaaacaaaacgtagccacacatcc

SEQ ID NO: 906114 - DNA, 33 bp, Homo sapien
tttgcattttaaacaatacgtagccacacatcc

SEQ ID NO: 906115 - DNA, 33 bp, Homo sapien
tggcattgtattttcacataacccatgagcatt

SEQ ID NO: 906116 - DNA, 33 bp, Homo sapien
tggcattgtattttcatataacccatgagcatt

SEQ ID NO: 906117 - DNA, 33 bp, Homo sapien
agcttccctcttgaccaccaaatgctcatggaa

SEQ ID NO: 906118 - DNA, 33 bp, Homo sapien
agcttccctcttgaccgccaaatgctcatggaa

SEQ ID NO: 906119 - DNA, 33 bp, Homo sapien
ggaaccacaaatgcccagattgagaggcctgag

SEQ ID NO: 906120 - DNA, 33 bp, Homo sapien
ggaaccacaaatgcccggattgagaggcctgag

SEQ ID NO: 906121 - DNA, 33 bp, Homo sapien
acaaagttcactgcaaatataagctgtagtgaa

SEQ ID NO: 906122 - DNA, 33 bp, Homo sapien
acaaagttcactgcaactataagctgtagtgaa

SEQ ID NO: 906123 - DNA, 33 bp, Homo sapien
caatctttgttacactaaaacgccatggagcag

SEQ ID NO: 906124 - DNA, 33 bp, Homo sapien
caatctttgttacactgaaacgccatggagcag

SEQ ID NO: 906125 - DNA, 33 bp, Homo sapien
tctcctaactaatccacgaggcagttactatca

SEQ ID NO: 906126 - DNA, 33 bp, Homo sapien
tctcctaactaatccatgaggcagttactatca

SEQ ID NO: 906127 - DNA, 33 bp, Homo sapien
aactcagagcagtgacacatgggctcaaatgca

SEQ ID NO: 906128 - DNA, 33 bp, Homo sapien
aactcagagcagtgacgcatgggctcaaatgca

SEQ ID NO: 906129 - DNA, 33 bp, Homo sapien
gctctactaggcaaaagagtagtcttctgtttt

SEQ ID NO: 906130 - DNA, 33 bp, Homo sapien
gctctactaggcaaaatagtagtcttctgtttt

SEQ ID NO: 906131 - DNA, 33 bp, Homo sapien
tttctaggcaaacacactgaggactctggcatc

SEQ ID NO: 906132 - DNA, 33 bp, Homo sapien
tttctaggcaaacacattgaggactctggcatc

SEQ ID NO: 906133 - DNA, 33 bp, Homo sapien
acctgttataaatgcaccaggagaatgagacaa

SEQ ID NO: 906134 - DNA, 33 bp, Homo sapien
acctgttataaatgcagcaggagaatgagacaa

SEQ ID NO: 906135 - DNA, 33 bp, Homo sapien
acctgtcactttaggaagagatccccagcgcag

SEQ ID NO: 906136 - DNA, 33 bp, Homo sapien
acctgtcactttaggaggagatccccagcgcag

SEQ ID NO: 906137 - DNA, 33 bp, Homo sapien
gacctgctgagaaagacgaaaaaccttcaacac

SEQ ID NO: 906138 - DNA, 33 bp, Homo sapien
gacctgctgagaaagaggaaaaaccttcaacac

SEQ ID NO: 906139 - DNA, 33 bp, Homo sapien
taccagcaaatcttgaggccctcaggtgcaggg

SEQ ID NO: 906140 - DNA, 33 bp, Homo sapien
taccagcaaatcttgatgccctcaggtgcaggg

SEQ ID NO: 906141 - DNA, 33 bp, Homo sapien
ctacagctttgtagccagagtgaggttagagac

SEQ ID NO: 906142 - DNA, 33 bp, Homo sapien
ctacagctttgtagccggagtgaggttagagac

SEQ ID NO: 906143 - DNA, 33 bp, Homo sapien
tgactgtgtttgagccaccttgcctccgttact

SEQ ID NO: 906144 - DNA, 33 bp, Homo sapien
tgactgtgtttgagccgccttgcctccgttact

SEQ ID NO: 906145 - DNA, 33 bp, Homo sapien
ggtgacataatggatacaggatactatgctttt

SEQ ID NO: 906146 - DNA, 33 bp, Homo sapien
ggtgacataatggatagaggatactatgctttt

SEQ ID NO: 906147 - DNA, 33 bp, Homo sapien
tagggaggggatgcccagatctcgaataaaacc

SEQ ID NO: 906148 - DNA, 33 bp, Homo sapien
tagggaggggatgcccggatctcgaataaaacc

SEQ ID NO: 906149 - DNA, 33 bp, Homo sapien
aaactgaatttcgaagacaactgctaattcttt

SEQ ID NO: 906150 - DNA, 33 bp, Homo sapien
aaactgaatttcgaaggcaactgctaattcttt

SEQ ID NO: 906151 - DNA, 33 bp, Homo sapien
ttgagaaataatttggacaagcgtgctgttggt

SEQ ID NO: 906152 - DNA, 33 bp, Homo sapien
ttgagaaataatttgggcaagcgtgctgttggt

SEQ ID NO: 906153 - DNA, 33 bp, Homo sapien
caggagagagaagcgcagcacagaggatttcta

SEQ ID NO: 906154 - DNA, 33 bp, Homo sapien
caggagagagaagcgcggcacagaggatttcta

SEQ ID NO: 906155 - DNA, 33 bp, Homo sapien
tgaaggactcaaaagccgagtgcaataatgtgg

SEQ ID NO: 906156 - DNA, 33 bp, Homo sapien
tgaaggactcaaaagctgagtgcaataatgtgg

SEQ ID NO: 906157 - DNA, 33 bp, Homo sapien
tctacataccagaaacaatggccctgcctctca

SEQ ID NO: 906158 - DNA, 33 bp, Homo sapien
tctacataccagaaacgatggccctgcctctca

SEQ ID NO: 906159 - DNA, 33 bp, Homo sapien
ggaacggtagaaataccggcctgcatcacagaa

SEQ ID NO: 906160 - DNA, 33 bp, Homo sapien
ggaacggtagaaatactggcctgcatcacagaa

SEQ ID NO: 906161 - DNA, 33 bp, Homo sapien
ggcctctcaaagcaccggggggagtcaggagag

SEQ ID NO: 906162 - DNA, 33 bp, Homo sapien
ggcctctcaaagcacctgggggagtcaggagag

SEQ ID NO: 906163 - DNA, 33 bp, Homo sapien
gtgccgtttgcaagtacgggcttaaaacaatgg

SEQ ID NO: 906164 - DNA, 33 bp, Homo sapien
gtgccgtttgcaagtatgggcttaaaacaatgg

SEQ ID NO: 906165 - DNA, 33 bp, Homo sapien
catcaattcaactggccgacgttaacctctcaa

SEQ ID NO: 906166 - DNA, 33 bp, Homo sapien
catcaattcaactggctgacgttaacctctcaa

SEQ ID NO: 906167 - DNA, 33 bp, Homo sapien
tgatttttcactggcaagaaacagtgctcaatc

SEQ ID NO: 906168 - DNA, 33 bp, Homo sapien
tgatttttcactggcaggaaacagtgctcaatc

SEQ ID NO: 906169 - DNA, 33 bp, Homo sapien
atgcggattcgccttacgattgagcactgtttc

SEQ ID NO: 906170 - DNA, 33 bp, Homo sapien
atgcggattcgccttaggattgagcactgtttc

SEQ ID NO: 906171 - DNA, 33 bp, Homo sapien
gagcctagattgcaagactggcaggaggaggtc

SEQ ID NO: 906172 - DNA, 33 bp, Homo sapien
gagcctagattgcaagcctggcaggaggaggtc

SEQ ID NO: 906173 - DNA, 33 bp, Homo sapien
ctgctgtaacacatcccatctttgaaaacacaa

SEQ ID NO: 906174 - DNA, 33 bp, Homo sapien
ctgctgtaacacatcctatctttgaaaacacaa

SEQ ID NO: 906175 - DNA, 33 bp, Homo sapien
gtaccctgcccttccacgtagatctttccaggc

SEQ ID NO: 906176 - DNA, 33 bp, Homo sapien
gtaccctgcccttccatgtagatctttccaggc

SEQ ID NO: 906177 - DNA, 33 bp, Homo sapien
tatgcacaacaaaaaaagctggaagcagtttta

SEQ ID NO: 906178 - DNA, 33 bp, Homo sapien
tatgcacaacaaaaaaggctggaagcagtttta

SEQ ID NO: 906179 - DNA, 33 bp, Homo sapien
ccttgctgagtctgcacagaattgaagagagtt

SEQ ID NO: 906180 - DNA, 33 bp, Homo sapien
ccttgctgagtctgcatagaattgaagagagtt

SEQ ID NO: 906181 - DNA, 33 bp, Homo sapien
cactgttggtcttaagaattgttctgaccctgg

SEQ ID NO: 906182 - DNA, 33 bp, Homo sapien
cactgttggtcttaaggattgttctgaccctgg

SEQ ID NO: 906183 - DNA, 33 bp, Homo sapien
tttccactggaaagaaactcgggtacacagtgt

SEQ ID NO: 906184 - DNA, 33 bp, Homo sapien
tttccactggaaagaacctcgggtacacagtgt

SEQ ID NO: 906185 - DNA, 33 bp, Homo sapien
tttcatttgtacacaccggtttttctgcacggt

SEQ ID NO: 906186 - DNA, 33 bp, Homo sapien
tttcatttgtacacactggtttttctgcacggt

SEQ ID NO: 906187 - DNA, 33 bp, Homo sapien
tccagaggagaaacatcaggatgagtctgcctc

SEQ ID NO: 906188 - DNA, 33 bp, Homo sapien
tccagaggagaaacattaggatgagtctgcctc

SEQ ID NO: 906189 - DNA, 33 bp, Homo sapien
ttttactactcaagtacccaaggtggcttgggc

SEQ ID NO: 906190 - DNA, 33 bp, Homo sapien
ttttactactcaagtatccaaggtggcttgggc

SEQ ID NO: 906191 - DNA, 33 bp, Homo sapien
tcactgcagtaaaaaaacagagcctgaatgaag

SEQ ID NO: 906192 - DNA, 33 bp, Homo sapien
tcactgcagtaaaaaatcagagcctgaatgaag

SEQ ID NO: 906193 - DNA, 33 bp, Homo sapien
cccatcattggagtcaatcaagcatgtgttagg

SEQ ID NO: 906194 - DNA, 33 bp, Homo sapien
cccatcattggagtcagtcaagcatgtgttagg

SEQ ID NO: 906195 - DNA, 33 bp, Homo sapien
aagccccagccaagcgaagcagtaaataatttc

SEQ ID NO: 906196 - DNA, 33 bp, Homo sapien
aagccccagccaagcggagcagtaaataatttc

SEQ ID NO: 906197 - DNA, 33 bp, Homo sapien
gggaaagaaagaaagcacccatctgttggccct

SEQ ID NO: 906198 - DNA, 33 bp, Homo sapien
gggaaagaaagaaagcgcccatctgttggccct

SEQ ID NO: 906199 - DNA, 33 bp, Homo sapien
cccgcaggccatcaaccggtgtaatgacatgga

SEQ ID NO: 906200 - DNA, 33 bp, Homo sapien
cccgcaggccatcaactggtgtaatgacatgga

SEQ ID NO: 906201 - DNA, 33 bp, Homo sapien
ttggggccagccattccattactcagcatatcc

SEQ ID NO: 906202 - DNA, 33 bp, Homo sapien
ttggggccagccattcgattactcagcatatcc

SEQ ID NO: 906203 - DNA, 33 bp, Homo sapien
actgagccgcagattcacccgcatggtggtcta

SEQ ID NO: 906204 - DNA, 33 bp, Homo sapien
actgagccgcagattctcccgcatggtggtcta

SEQ ID NO: 906205 - DNA, 33 bp, Homo sapien
tcattatttcactccacatacagtctctttttt

SEQ ID NO: 906206 - DNA, 33 bp, Homo sapien
tcattatttcactccatatacagtctctttttt

SEQ ID NO: 906207 - DNA, 33 bp, Homo sapien
cccaccaaactgtaaaaggcatcaacacaatct

SEQ ID NO: 906208 - DNA, 33 bp, Homo sapien
cccaccaaactgtaaatggcatcaacacaatct

SEQ ID NO: 906209 - DNA, 33 bp, Homo sapien
caagttgaaatgaaataacagtaactcaaaacc

SEQ ID NO: 906210 - DNA, 33 bp, Homo sapien
caagttgaaatgaaatgacagtaactcaaaacc

SEQ ID NO: 906211 - DNA, 33 bp, Homo sapien
agaagctgctccctggaaagtggtatcattcct

SEQ ID NO: 906212 - DNA, 33 bp, Homo sapien
agaagctgctccctggcaagtggtatcattcct

SEQ ID NO: 906213 - DNA, 33 bp, Homo sapien
tagaaaactggtaacacgcagtcacctggatga

SEQ ID NO: 906214 - DNA, 33 bp, Homo sapien
tagaaaactggtaacatgcagtcacctggatga

SEQ ID NO: 906215 - DNA, 33 bp, Homo sapien
cggctctcccaagaggcaatatgcatttccaag

SEQ ID NO: 906216 - DNA, 33 bp, Homo sapien
cggctctcccaagaggtaatatgcatttccaag

SEQ ID NO: 906217 - DNA, 33 bp, Homo sapien
acaattcagatttgtccaacacatacatgaaat

SEQ ID NO: 906218 - DNA, 33 bp, Homo sapien
acaattcagatttgtctaacacatacatgaaat

SEQ ID NO: 906219 - DNA, 33 bp, Homo sapien
acagataacattcaaacactgtttcctctagtt

SEQ ID NO: 906220 - DNA, 33 bp, Homo sapien
acagataacattcaaatactgtttcctctagtt

SEQ ID NO: 906221 - DNA, 33 bp, Homo sapien
tctccaacgatctgcccactaaaaggtgaaaac

SEQ ID NO: 906222 - DNA, 33 bp, Homo sapien
tctccaacgatctgccgactaaaaggtgaaaac

SEQ ID NO: 906223 - DNA, 33 bp, Homo sapien
gtgagccttcttgcacagtacgtatattcagat

SEQ ID NO: 906224 - DNA, 33 bp, Homo sapien
gtgagccttcttgcacggtacgtatattcagat

SEQ ID NO: 906225 - DNA, 33 bp, Homo sapien
aaaaaggatctttcctcagaacttgtattactt

SEQ ID NO: 906226 - DNA, 33 bp, Homo sapien
aaaaaggatctttcctgagaacttgtattactt

SEQ ID NO: 906227 - DNA, 33 bp, Homo sapien
agagaggacacgtagacgggtgaagcctgggtt

SEQ ID NO: 906228 - DNA, 33 bp, Homo sapien
agagaggacacgtagatgggtgaagcctgggtt

SEQ ID NO: 906229 - DNA, 33 bp, Homo sapien
caactagaattcaaaacggcatgcacggcggtg

SEQ ID NO: 906230 - DNA, 33 bp, Homo sapien
caactagaattcaaaatggcatgcacggcggtg

SEQ ID NO: 906231 - DNA, 33 bp, Homo sapien
gaaatccagccagcgtcaatctccctaagcttg

SEQ ID NO: 906232 - DNA, 33 bp, Homo sapien
gaaatccagccagcgtgaatctccctaagcttg

SEQ ID NO: 906233 - DNA, 33 bp, Homo sapien
tatagtggaagccacaagttaaaatgtactgcg

SEQ ID NO: 906234 - DNA, 33 bp, Homo sapien
tatagtggaagccacacgttaaaatgtactgcg

SEQ ID NO: 906235 - DNA, 33 bp, Homo sapien
ctctgaatgttggctcaatacctgtggtccatg

SEQ ID NO: 906236 - DNA, 33 bp, Homo sapien
ctctgaatgttggctcgatacctgtggtccatg

SEQ ID NO: 906237 - DNA, 33 bp, Homo sapien
attcttagctattgaaagaaaaagagattagaa

SEQ ID NO: 906238 - DNA, 33 bp, Homo sapien
attcttagctattgaatgaaaaagagattagaa

SEQ ID NO: 906239 - DNA, 33 bp, Homo sapien
tggtcaaaatatatgacagatgaggtccagaat

SEQ ID NO: 906240 - DNA, 33 bp, Homo sapien
tggtcaaaatatatgatagatgaggtccagaat

SEQ ID NO: 906241 - DNA, 33 bp, Homo sapien
gattattcttcctggcaaaaccaggctatgtat

SEQ ID NO: 906242 - DNA, 33 bp, Homo sapien
gattattcttcctggcgaaaccaggctatgtat

SEQ ID NO: 906243 - DNA, 33 bp, Homo sapien
atatgtagggtacacaagtaagaaggagtcata

SEQ ID NO: 906244 - DNA, 33 bp, Homo sapien
atatgtagggtacacaggtaagaaggagtcata

SEQ ID NO: 906245 - DNA, 33 bp, Homo sapien
ccaacctagctctagccatcattgttcctaaat

SEQ ID NO: 906246 - DNA, 33 bp, Homo sapien
ccaacctagctctagctatcattgttcctaaat

SEQ ID NO: 906247 - DNA, 33 bp, Homo sapien
ctggttataatgacttaaaattcccgatctgaa

SEQ ID NO: 906248 - DNA, 33 bp, Homo sapien
ctggttataatgacttgaaattcccgatctgaa

SEQ ID NO: 906249 - DNA, 33 bp, Homo sapien
gaatttgaccactctacatctgtcacatgaatt

SEQ ID NO: 906250 - DNA, 33 bp, Homo sapien
gaatttgaccactctagatctgtcacatgaatt

SEQ ID NO: 906251 - DNA, 33 bp, Homo sapien
tccttgaacttgctgcaaactttatggagattg

SEQ ID NO: 906252 - DNA, 33 bp, Homo sapien
tccttgaacttgctgcgaactttatggagattg

SEQ ID NO: 906253 - DNA, 33 bp, Homo sapien
gactgagttttctctcactggaaagaagtagta

SEQ ID NO: 906254 - DNA, 33 bp, Homo sapien
gactgagttttctctcgctggaaagaagtagta

SEQ ID NO: 906255 - DNA, 33 bp, Homo sapien
gcctctagaagccggaaaatgctgggcaatgga

SEQ ID NO: 906256 - DNA, 33 bp, Homo sapien
gcctctagaagccggacaatgctgggcaatgga

SEQ ID NO: 906257 - DNA, 33 bp, Homo sapien
ggagacacaacccaaagaatgtggatggcctct

SEQ ID NO: 906258 - DNA, 33 bp, Homo sapien
ggagacacaacccaaataatgtggatggcctct

SEQ ID NO: 906259 - DNA, 33 bp, Homo sapien
aatatgtctaagtatcaaaatacgaccaccagt

SEQ ID NO: 906260 - DNA, 33 bp, Homo sapien
aatatgtctaagtatccaaatacgaccaccagt

SEQ ID NO: 906261 - DNA, 33 bp, Homo sapien
tgagccagggtttatccaaactccttgcccagt

SEQ ID NO: 906262 - DNA, 33 bp, Homo sapien
tgagccagggtttatcgaaactccttgcccagt

SEQ ID NO: 906263 - DNA, 33 bp, Homo sapien
tctctatcccattaaccattttatcttcttcat

SEQ ID NO: 906264 - DNA, 33 bp, Homo sapien
tctctatcccattaacgattttatcttcttcat

SEQ ID NO: 906265 - DNA, 33 bp, Homo sapien
ttgcatcaatgtttacaggagatattggtgtat

SEQ ID NO: 906266 - DNA, 33 bp, Homo sapien
ttgcatcaatgtttacgggagatattggtgtat

SEQ ID NO: 906267 - DNA, 33 bp, Homo sapien
tttcaagaaattggtccatctaagttatcaagt

SEQ ID NO: 906268 - DNA, 33 bp, Homo sapien
tttcaagaaattggtctatctaagttatcaagt

SEQ ID NO: 906269 - DNA, 33 bp, Homo sapien
aaagaatattacgaacgactctatgcccacaaa

SEQ ID NO: 906270 - DNA, 33 bp, Homo sapien
aaagaatattacgaactactctatgcccacaaa

SEQ ID NO: 906271 - DNA, 33 bp, Homo sapien
attgcagtttcactccaagaaagagtgctgtgc

SEQ ID NO: 906272 - DNA, 33 bp, Homo sapien
attgcagtttcactccgagaaagagtgctgtgc

SEQ ID NO: 906273 - DNA, 33 bp, Homo sapien
cagcctctttaggatacgtttaagcaggtataa

SEQ ID NO: 906274 - DNA, 33 bp, Homo sapien
cagcctctttaggatatgtttaagcaggtataa

SEQ ID NO: 906275 - DNA, 33 bp, Homo sapien
actgccaagtatatgacgttttcttcattttac

SEQ ID NO: 906276 - DNA, 33 bp, Homo sapien
actgccaagtatatgatgttttcttcattttac

SEQ ID NO: 906277 - DNA, 33 bp, Homo sapien
gatcttgccatttttccagagtactccccagag

SEQ ID NO: 906278 - DNA, 33 bp, Homo sapien
gatcttgccatttttctagagtactccccagag

SEQ ID NO: 906279 - DNA, 33 bp, Homo sapien
aacaaagttccacaaactggttgccttaaacaa

SEQ ID NO: 906280 - DNA, 33 bp, Homo sapien
aacaaagttccacaaattggttgccttaaacaa

SEQ ID NO: 906281 - DNA, 33 bp, Homo sapien
atctttccaactcccacctgatttctgaaggtt

SEQ ID NO: 906282 - DNA, 33 bp, Homo sapien
atctttccaactcccagctgatttctgaaggtt

SEQ ID NO: 906283 - DNA, 33 bp, Homo sapien
ggctggggtgggtcacacttattctactggata

SEQ ID NO: 906284 - DNA, 33 bp, Homo sapien
ggctggggtgggtcacgcttattctactggata

SEQ ID NO: 906285 - DNA, 33 bp, Homo sapien
gcagaaaggataagaaaagaagacgaagaaacc

SEQ ID NO: 906286 - DNA, 33 bp, Homo sapien
gcagaaaggataagaagagaagacgaagaaacc

SEQ ID NO: 906287 - DNA, 33 bp, Homo sapien
agcttaacttcagtgaataattttcctcctggg

SEQ ID NO: 906288 - DNA, 33 bp, Homo sapien
agcttaacttcagtgattaattttcctcctggg

SEQ ID NO: 906289 - DNA, 33 bp, Homo sapien
cttgatttaggttttcaatggagagaggccagg

SEQ ID NO: 906290 - DNA, 33 bp, Homo sapien
cttgatttaggttttcgatggagagaggccagg

SEQ ID NO: 906291 - DNA, 33 bp, Homo sapien
tcccaggtctaaaggacgaaaactctcagggcg

SEQ ID NO: 906292 - DNA, 33 bp, Homo sapien
tcccaggtctaaaggatgaaaactctcagggcg

SEQ ID NO: 906293 - DNA, 33 bp, Homo sapien
catgaactcctctcacacctatgggaaaatgtt

SEQ ID NO: 906294 - DNA, 33 bp, Homo sapien
catgaactcctctcacgcctatgggaaaatgtt

SEQ ID NO: 906295 - DNA, 33 bp, Homo sapien
tattatagccctcaaacaggtgaagatgaagaa

SEQ ID NO: 906296 - DNA, 33 bp, Homo sapien
tattatagccctcaaataggtgaagatgaagaa

SEQ ID NO: 906297 - DNA, 33 bp, Homo sapien
atgatgggattaaaacaaaggacaatatatact

SEQ ID NO: 906298 - DNA, 33 bp, Homo sapien
atgatgggattaaaacgaaggacaatatatact

SEQ ID NO: 906299 - DNA, 33 bp, Homo sapien
tgaaaacaaactaatacatcagccatgaagaaa

SEQ ID NO: 906300 - DNA, 33 bp, Homo sapien
tgaaaacaaactaatatatcagccatgaagaaa

SEQ ID NO: 906301 - DNA, 33 bp, Homo sapien
ggagactcttcttccactgaaggagtttaagcc

SEQ ID NO: 906302 - DNA, 33 bp, Homo sapien
ggagactcttcttccattgaaggagtttaagcc

SEQ ID NO: 906303 - DNA, 33 bp, Homo sapien
cctcatcgggccctaacattggtaccaggggag

SEQ ID NO: 906304 - DNA, 33 bp, Homo sapien
cctcatcgggccctaatattggtaccaggggag

SEQ ID NO: 906305 - DNA, 33 bp, Homo sapien
tctagaaggtgcgagacaacagatttgtttgat

SEQ ID NO: 906306 - DNA, 33 bp, Homo sapien
tctagaaggtgcgagataacagatttgtttgat

SEQ ID NO: 906307 - DNA, 33 bp, Homo sapien
cctcagtattcagtacaggaacacgctgcacag

SEQ ID NO: 906308 - DNA, 33 bp, Homo sapien
cctcagtattcagtacgggaacacgctgcacag

SEQ ID NO: 906309 - DNA, 33 bp, Homo sapien
ttccttttgcttccaaaaataaatggaattaga

SEQ ID NO: 906310 - DNA, 33 bp, Homo sapien
ttccttttgcttccaagaataaatggaattaga

SEQ ID NO: 906311 - DNA, 33 bp, Homo sapien
aacgagatgctaagaacgtgtccaaagtctgtg

SEQ ID NO: 906312 - DNA, 33 bp, Homo sapien
aacgagatgctaagaatgtgtccaaagtctgtg

SEQ ID NO: 906313 - DNA, 33 bp, Homo sapien
tgataagattaaaaaacttggccactgctccat

SEQ ID NO: 906314 - DNA, 33 bp, Homo sapien
tgataagattaaaaaatttggccactgctccat

SEQ ID NO: 906315 - DNA, 33 bp, Homo sapien
acctctgaggttgggacgatagaaagaaaatga

SEQ ID NO: 906316 - DNA, 33 bp, Homo sapien
acctctgaggttgggatgatagaaagaaaatga

SEQ ID NO: 906317 - DNA, 33 bp, Homo sapien
cctcatacctgttggacctcagctttcctttct

SEQ ID NO: 906318 - DNA, 33 bp, Homo sapien
cctcatacctgttggatctcagctttcctttct

SEQ ID NO: 906319 - DNA, 33 bp, Homo sapien
ggagccagagaggtaccatgtgccggagtgaca

SEQ ID NO: 906320 - DNA, 33 bp, Homo sapien
ggagccagagaggtacgatgtgccggagtgaca

SEQ ID NO: 906321 - DNA, 33 bp, Homo sapien
gatctgaccaaacttacgttaagtacctgccag

SEQ ID NO: 906322 - DNA, 33 bp, Homo sapien
gatctgaccaaacttatgttaagtacctgccag

SEQ ID NO: 906323 - DNA, 33 bp, Homo sapien
gtgacatttggcccaactgtgactctgcttgcc

SEQ ID NO: 906324 - DNA, 33 bp, Homo sapien
gtgacatttggcccaattgtgactctgcttgcc

SEQ ID NO: 906325 - DNA, 33 bp, Homo sapien
tgggctttctttccaacccgccctgttgccacc

SEQ ID NO: 906326 - DNA, 33 bp, Homo sapien
tgggctttctttccaatccgccctgttgccacc

SEQ ID NO: 906327 - DNA, 33 bp, Homo sapien
tgaactcagacagtccccagtgtcgccggacct

SEQ ID NO: 906328 - DNA, 33 bp, Homo sapien
tgaactcagacagtcctcagtgtcgccggacct

SEQ ID NO: 906329 - DNA, 33 bp, Homo sapien
aaaaagtacaacctgaagtttgcagaaaggcat

SEQ ID NO: 906330 - DNA, 33 bp, Homo sapien
aaaaagtacaacctgaggtttgcagaaaggcat

SEQ ID NO: 906331 - DNA, 33 bp, Homo sapien
atagaaggctacaaaacggtgatttgctaattc

SEQ ID NO: 906332 - DNA, 33 bp, Homo sapien
atagaaggctacaaaatggtgatttgctaattc

SEQ ID NO: 906333 - DNA, 33 bp, Homo sapien
aaggtccttctattggaacatttgcccagccta

SEQ ID NO: 906334 - DNA, 33 bp, Homo sapien
aaggtccttctattgggacatttgcccagccta

SEQ ID NO: 906335 - DNA, 33 bp, Homo sapien
aaaactcaagatcaaacggagtacaaagtcact

SEQ ID NO: 906336 - DNA, 33 bp, Homo sapien
aaaactcaagatcaaatggagtacaaagtcact

SEQ ID NO: 906337 - DNA, 33 bp, Homo sapien
actggtaagattattaaagcctgaagtctgaac

SEQ ID NO: 906338 - DNA, 33 bp, Homo sapien
actggtaagattattagagcctgaagtctgaac

SEQ ID NO: 906339 - DNA, 33 bp, Homo sapien
tagctgtgccaacctacagttctaaaccttttt

SEQ ID NO: 906340 - DNA, 33 bp, Homo sapien
tagctgtgccaacctagagttctaaaccttttt

SEQ ID NO: 906341 - DNA, 33 bp, Homo sapien
catctttttaaatccaacctctcatttcaccct

SEQ ID NO: 906342 - DNA, 33 bp, Homo sapien
catctttttaaatccatcctctcatttcaccct

SEQ ID NO: 906343 - DNA, 33 bp, Homo sapien
aggcacgtgacccaaaatgaggagaggagcctg

SEQ ID NO: 906344 - DNA, 33 bp, Homo sapien
aggcacgtgacccaaagtgaggagaggagcctg

SEQ ID NO: 906345 - DNA, 33 bp, Homo sapien
tgcccccaagaaaaagacaggcacgtgacccaa

SEQ ID NO: 906346 - DNA, 33 bp, Homo sapien
tgcccccaagaaaaaggcaggcacgtgacccaa

SEQ ID NO: 906347 - DNA, 33 bp, Homo sapien
cttcagaatcccctaaaggtatgtgaaaactat

SEQ ID NO: 906348 - DNA, 33 bp, Homo sapien
cttcagaatcccctaagggtatgtgaaaactat

SEQ ID NO: 906349 - DNA, 33 bp, Homo sapien
tgagaaccactgcctacatgttcattaatataa

SEQ ID NO: 906350 - DNA, 33 bp, Homo sapien
tgagaaccactgcctatatgttcattaatataa

SEQ ID NO: 906351 - DNA, 33 bp, Homo sapien
accacccagacagaaaccgaagcctgagggaga

SEQ ID NO: 906352 - DNA, 33 bp, Homo sapien
accacccagacagaaatcgaagcctgagggaga

SEQ ID NO: 906353 - DNA, 33 bp, Homo sapien
aaattgtccataaccaatattctgcagacttaa

SEQ ID NO: 906354 - DNA, 33 bp, Homo sapien
aaattgtccataaccagtattctgcagacttaa

SEQ ID NO: 906355 - DNA, 33 bp, Homo sapien
atgtgcaacagcctcaaacaggaattctctgtt

SEQ ID NO: 906356 - DNA, 33 bp, Homo sapien
atgtgcaacagcctcagacaggaattctctgtt

SEQ ID NO: 906357 - DNA, 33 bp, Homo sapien
tccactcgttcagtatcacagattttcctttgc

SEQ ID NO: 906358 - DNA, 33 bp, Homo sapien
tccactcgttcagtattacagattttcctttgc

SEQ ID NO: 906359 - DNA, 33 bp, Homo sapien
ggggtcagatgccacaaaaagcagtttagcaaa

SEQ ID NO: 906360 - DNA, 33 bp, Homo sapien
ggggtcagatgccacagaaagcagtttagcaaa

SEQ ID NO: 906361 - DNA, 33 bp, Homo sapien
aataagttctttattcacctgcattactctggc

SEQ ID NO: 906362 - DNA, 33 bp, Homo sapien
aataagttctttattcgcctgcattactctggc

SEQ ID NO: 906363 - DNA, 33 bp, Homo sapien
cctgcctgtcagtcaacgtaggtgacagatgat

SEQ ID NO: 906364 - DNA, 33 bp, Homo sapien
cctgcctgtcagtcaatgtaggtgacagatgat

SEQ ID NO: 906365 - DNA, 33 bp, Homo sapien
ccagaagccatatgaaaacggaatcccagattt

SEQ ID NO: 906366 - DNA, 33 bp, Homo sapien
ccagaagccatatgaacacggaatcccagattt

SEQ ID NO: 906367 - DNA, 33 bp, Homo sapien
tatgctttactcaagaccagcttttaacacata

SEQ ID NO: 906368 - DNA, 33 bp, Homo sapien
tatgctttactcaagatcagcttttaacacata

SEQ ID NO: 906369 - DNA, 33 bp, Homo sapien
aaaatgctcttacagaaagcaaaaatattttcc

SEQ ID NO: 906370 - DNA, 33 bp, Homo sapien
aaaatgctcttacagacagcaaaaatattttcc

SEQ ID NO: 906371 - DNA, 33 bp, Homo sapien
tggtttgtgacccagacacttggatgcgtgggc

SEQ ID NO: 906372 - DNA, 33 bp, Homo sapien
tggtttgtgacccagatacttggatgcgtgggc

SEQ ID NO: 906373 - DNA, 33 bp, Homo sapien
ttaattttatttgcccactagatcattgcagaa

SEQ ID NO: 906374 - DNA, 33 bp, Homo sapien
ttaattttatttgcccgctagatcattgcagaa

SEQ ID NO: 906375 - DNA, 33 bp, Homo sapien
cactgattatttgatacagacaactggtatttc

SEQ ID NO: 906376 - DNA, 33 bp, Homo sapien
cactgattatttgatatagacaactggtatttc

SEQ ID NO: 906377 - DNA, 33 bp, Homo sapien
ttttttctcagtgaaaatacgctgctaaccaga

SEQ ID NO: 906378 - DNA, 33 bp, Homo sapien
ttttttctcagtgaaattacgctgctaaccaga

SEQ ID NO: 906379 - DNA, 33 bp, Homo sapien
actggagtctcgatcaataaggtggcaccacat

SEQ ID NO: 906380 - DNA, 33 bp, Homo sapien
actggagtctcgatcactaaggtggcaccacat

SEQ ID NO: 906381 - DNA, 33 bp, Homo sapien
agtatttcatccctgcactgtcctagcaccctg

SEQ ID NO: 906382 - DNA, 33 bp, Homo sapien
agtatttcatccctgcgctgtcctagcaccctg

SEQ ID NO: 906383 - DNA, 33 bp, Homo sapien
cctttaaggaccctgcactgccacacagctccc

SEQ ID NO: 906384 - DNA, 33 bp, Homo sapien
cctttaaggaccctgcgctgccacacagctccc

SEQ ID NO: 906385 - DNA, 33 bp, Homo sapien
ttctgttccttctctacagcacactgcagatct

SEQ ID NO: 906386 - DNA, 33 bp, Homo sapien
ttctgttccttctctatagcacactgcagatct

SEQ ID NO: 906387 - DNA, 33 bp, Homo sapien
aacaaatgaaactgtaggaaatgctcattatag

SEQ ID NO: 906388 - DNA, 33 bp, Homo sapien
aacaaatgaaactgtatgaaatgctcattatag

SEQ ID NO: 906389 - DNA, 33 bp, Homo sapien
agtcttggcctcgaagaaatagacatagttagc

SEQ ID NO: 906390 - DNA, 33 bp, Homo sapien
agtcttggcctcgaaggaatagacatagttagc

SEQ ID NO: 906391 - DNA, 33 bp, Homo sapien
aataacattttatatacggcattttgcacatgg

SEQ ID NO: 906392 - DNA, 33 bp, Homo sapien
aataacattttatatatggcattttgcacatgg

SEQ ID NO: 906393 - DNA, 33 bp, Homo sapien
aggatatattcatctcaatttttatagataggc

SEQ ID NO: 906394 - DNA, 33 bp, Homo sapien
aggatatattcatctcgatttttatagataggc

SEQ ID NO: 906395 - DNA, 33 bp, Homo sapien
atctttactcacagataaggctgttgctctttc

SEQ ID NO: 906396 - DNA, 33 bp, Homo sapien
atctttactcacagatgaggctgttgctctttc

SEQ ID NO: 906397 - DNA, 33 bp, Homo sapien
agaaaattatctgccaatgaatctgctaaagga

SEQ ID NO: 906398 - DNA, 33 bp, Homo sapien
agaaaattatctgccactgaatctgctaaagga

SEQ ID NO: 906399 - DNA, 33 bp, Homo sapien
ctttgattttgagcaacttaactatgatgtgtc

SEQ ID NO: 906400 - DNA, 33 bp, Homo sapien
ctttgattttgagcaatttaactatgatgtgtc

SEQ ID NO: 906401 - DNA, 33 bp, Homo sapien
gaaagggacagaaggaaaatggaaatataaaac

SEQ ID NO: 906402 - DNA, 33 bp, Homo sapien
gaaagggacagaaggagaatggaaatataaaac

SEQ ID NO: 906403 - DNA, 33 bp, Homo sapien
ggctatttctttgccaacctctacctgacgcct

SEQ ID NO: 906404 - DNA, 33 bp, Homo sapien
ggctatttctttgccagcctctacctgacgcct

SEQ ID NO: 906405 - DNA, 33 bp, Homo sapien
ctattcagtcataaataaatgaggaagattatc

SEQ ID NO: 906406 - DNA, 33 bp, Homo sapien
ctattcagtcataaatgaatgaggaagattatc

SEQ ID NO: 906407 - DNA, 33 bp, Homo sapien
ggatcctgttgctccaaattgaaccaagatagg

SEQ ID NO: 906408 - DNA, 33 bp, Homo sapien
ggatcctgttgctccagattgaaccaagatagg

SEQ ID NO: 906409 - DNA, 33 bp, Homo sapien
tttgtaggaccatttcaaactatgtcaaagaag

SEQ ID NO: 906410 - DNA, 33 bp, Homo sapien
tttgtaggaccatttcgaactatgtcaaagaag

SEQ ID NO: 906411 - DNA, 33 bp, Homo sapien
tttctcattacgagacacatcatgtgataagaa

SEQ ID NO: 906412 - DNA, 33 bp, Homo sapien
tttctcattacgagacgcatcatgtgataagaa

SEQ ID NO: 906413 - DNA, 33 bp, Homo sapien
aaaaaccatgtgaaaacgcccacagaagtacta

SEQ ID NO: 906414 - DNA, 33 bp, Homo sapien
aaaaaccatgtgaaaatgcccacagaagtacta

SEQ ID NO: 906415 - DNA, 33 bp, Homo sapien
atcttccagatccaaaaaatgttgaccctaaaa

SEQ ID NO: 906416 - DNA, 33 bp, Homo sapien
atcttccagatccaaacaatgttgaccctaaaa

SEQ ID NO: 906417 - DNA, 33 bp, Homo sapien
tcaataggctttaagacggatgtgttgaaaaaa

SEQ ID NO: 906418 - DNA, 33 bp, Homo sapien
tcaataggctttaagatggatgtgttgaaaaaa

SEQ ID NO: 906419 - DNA, 33 bp, Homo sapien
tataaagtaaccagcaccaaaacacaaaaagtc

SEQ ID NO: 906420 - DNA, 33 bp, Homo sapien
tataaagtaaccagcatcaaaacacaaaaagtc

SEQ ID NO: 906421 - DNA, 33 bp, Homo sapien
acatgatggcgaccacaagttaagacaccaggt

SEQ ID NO: 906422 - DNA, 33 bp, Homo sapien
acatgatggcgaccacgagttaagacaccaggt

SEQ ID NO: 906423 - DNA, 33 bp, Homo sapien
cacccagccaggtaagacgtttttaaggcaggg

SEQ ID NO: 906424 - DNA, 33 bp, Homo sapien
cacccagccaggtaaggcgtttttaaggcaggg

SEQ ID NO: 906425 - DNA, 33 bp, Homo sapien
tcacctggcatgggaaaaccagttatccacact

SEQ ID NO: 906426 - DNA, 33 bp, Homo sapien
tcacctggcatgggaagaccagttatccacact

SEQ ID NO: 906427 - DNA, 33 bp, Homo sapien
cagaaaattgactcacgaattaaaccatagcct

SEQ ID NO: 906428 - DNA, 33 bp, Homo sapien
cagaaaattgactcactaattaaaccatagcct

SEQ ID NO: 906429 - DNA, 33 bp, Homo sapien
gattttgtttaagaaagtggcacatagaggaaa

SEQ ID NO: 906430 - DNA, 33 bp, Homo sapien
gattttgtttaagaaattggcacatagaggaaa

SEQ ID NO: 906431 - DNA, 33 bp, Homo sapien
aaatcggtcagaaatcactctccttcatgtacg

SEQ ID NO: 906432 - DNA, 33 bp, Homo sapien
aaatcggtcagaaatcgctctccttcatgtacg

SEQ ID NO: 906433 - DNA, 33 bp, Homo sapien
ttcatattccttcaagacctgcaaatcttcctc

SEQ ID NO: 906434 - DNA, 33 bp, Homo sapien
ttcatattccttcaaggcctgcaaatcttcctc

SEQ ID NO: 906435 - DNA, 33 bp, Homo sapien
tagtgctccacttccacctgaagacctgggcgg

SEQ ID NO: 906436 - DNA, 33 bp, Homo sapien
tagtgctccacttccatctgaagacctgggcgg

SEQ ID NO: 906437 - DNA, 33 bp, Homo sapien
tgaagacctgggcggtaaaagccttccagggaa

SEQ ID NO: 906438 - DNA, 33 bp, Homo sapien
tgaagacctgggcggtgaaagccttccagggaa

SEQ ID NO: 906439 - DNA, 33 bp, Homo sapien
tgacatccctggtaccaagagtaactccgtggg

SEQ ID NO: 906440 - DNA, 33 bp, Homo sapien
tgacatccctggtaccgagagtaactccgtggg

SEQ ID NO: 906441 - DNA, 33 bp, Homo sapien
ctgaactctactgaaaggcccacatttaaattt

SEQ ID NO: 906442 - DNA, 33 bp, Homo sapien
ctgaactctactgaaatgcccacatttaaattt

SEQ ID NO: 906443 - DNA, 33 bp, Homo sapien
cacttctctaaggaataaaacctccattcaaat

SEQ ID NO: 906444 - DNA, 33 bp, Homo sapien
cacttctctaaggaatcaaacctccattcaaat

SEQ ID NO: 906445 - DNA, 33 bp, Homo sapien
acactgaggaaagacaactccggatgggtctgg

SEQ ID NO: 906446 - DNA, 33 bp, Homo sapien
acactgaggaaagacagctccggatgggtctgg

SEQ ID NO: 906447 - DNA, 33 bp, Homo sapien
ttaactgtactttataaatgtgtagacatgcaa

SEQ ID NO: 906448 - DNA, 33 bp, Homo sapien
ttaactgtactttatatatgtgtagacatgcaa

SEQ ID NO: 906449 - DNA, 33 bp, Homo sapien
aactttatgcacctcactcttcgatgaccaacc

SEQ ID NO: 906450 - DNA, 33 bp, Homo sapien
aactttatgcacctcagtcttcgatgaccaacc

SEQ ID NO: 906451 - DNA, 33 bp, Homo sapien
ttttccccatctttaacaccttcctgaagtccc

SEQ ID NO: 906452 - DNA, 33 bp, Homo sapien
ttttccccatctttaataccttcctgaagtccc

SEQ ID NO: 906453 - DNA, 33 bp, Homo sapien
tgtgaaaatggcttatcagtggctggcaggtga

SEQ ID NO: 906454 - DNA, 33 bp, Homo sapien
tgtgaaaatggcttattagtggctggcaggtga

SEQ ID NO: 906455 - DNA, 33 bp, Homo sapien
cttttttgtgagttccccacaacctggtcttcc

SEQ ID NO: 906456 - DNA, 33 bp, Homo sapien
cttttttgtgagttccgcacaacctggtcttcc

SEQ ID NO: 906457 - DNA, 33 bp, Homo sapien
aactctgacaagcaagaataccacatggccaga

SEQ ID NO: 906458 - DNA, 33 bp, Homo sapien
aactctgacaagcaaggataccacatggccaga

SEQ ID NO: 906459 - DNA, 33 bp, Homo sapien
agaagggcaaacaacaatgagagccttggagct

SEQ ID NO: 906460 - DNA, 33 bp, Homo sapien
agaagggcaaacaacagtgagagccttggagct

SEQ ID NO: 906461 - DNA, 33 bp, Homo sapien
agtgaaaaacacaaaactaaatctagaaaatgg

SEQ ID NO: 906462 - DNA, 33 bp, Homo sapien
agtgaaaaacacaaaattaaatctagaaaatgg

SEQ ID NO: 906463 - DNA, 33 bp, Homo sapien
cttccctgcatacatactatctgctttaaaatg

SEQ ID NO: 906464 - DNA, 33 bp, Homo sapien
cttccctgcatacatagtatctgctttaaaatg

SEQ ID NO: 906465 - DNA, 33 bp, Homo sapien
ttaagaatctgtgtcaaatgcaatgtttgctac

SEQ ID NO: 906466 - DNA, 33 bp, Homo sapien
ttaagaatctgtgtcagatgcaatgtttgctac

SEQ ID NO: 906467 - DNA, 33 bp, Homo sapien
tcagtcgtacaaaataagcccagaacatgccaa

SEQ ID NO: 906468 - DNA, 33 bp, Homo sapien
tcagtcgtacaaaataggcccagaacatgccaa

SEQ ID NO: 906469 - DNA, 33 bp, Homo sapien
accctgaactgcacccccaaggtcttctcctct

SEQ ID NO: 906470 - DNA, 33 bp, Homo sapien
accctgaactgcaccctcaaggtcttctcctct

SEQ ID NO: 906471 - DNA, 33 bp, Homo sapien
tgcagttacaaattacaaactagaggttctttg

SEQ ID NO: 906472 - DNA, 33 bp, Homo sapien
tgcagttacaaattacgaactagaggttctttg

SEQ ID NO: 906473 - DNA, 33 bp, Homo sapien
atgaccaagtttcctcaaggcttttggccaacc

SEQ ID NO: 906474 - DNA, 33 bp, Homo sapien
atgaccaagtttcctcgaggcttttggccaacc

SEQ ID NO: 906475 - DNA, 33 bp, Homo sapien
acatctcatgttttccacagcagatatcacctg

SEQ ID NO: 906476 - DNA, 33 bp, Homo sapien
acatctcatgttttccgcagcagatatcacctg

SEQ ID NO: 906477 - DNA, 33 bp, Homo sapien
tcaggtttttagcagcaccatattatttctagt

SEQ ID NO: 906478 - DNA, 33 bp, Homo sapien
tcaggtttttagcagcgccatattatttctagt

SEQ ID NO: 906479 - DNA, 33 bp, Homo sapien
taaatatgcaaacaaaagaaggtcagtgttaag

SEQ ID NO: 906480 - DNA, 33 bp, Homo sapien
taaatatgcaaacaaacgaaggtcagtgttaag

SEQ ID NO: 906481 - DNA, 33 bp, Homo sapien
gtgcaccagtggcctagaatgtgcctggtgatt

SEQ ID NO: 906482 - DNA, 33 bp, Homo sapien
gtgcaccagtggcctataatgtgcctggtgatt

SEQ ID NO: 906483 - DNA, 33 bp, Homo sapien
gatatttttagtgtcacaagtaggaggcgctgc

SEQ ID NO: 906484 - DNA, 33 bp, Homo sapien
gatatttttagtgtcataagtaggaggcgctgc

SEQ ID NO: 906485 - DNA, 33 bp, Homo sapien
cagacaggaaaacgaacgatggaaaattgcagg

SEQ ID NO: 906486 - DNA, 33 bp, Homo sapien
cagacaggaaaacgaatgatggaaaattgcagg

SEQ ID NO: 906487 - DNA, 33 bp, Homo sapien
gggtgaggatgctcaaaaatgtttaagtaatcc

SEQ ID NO: 906488 - DNA, 33 bp, Homo sapien
gggtgaggatgctcaacaatgtttaagtaatcc

SEQ ID NO: 906489 - DNA, 33 bp, Homo sapien
catactgttttataacaactaaaatggtcatat

SEQ ID NO: 906490 - DNA, 33 bp, Homo sapien
catactgttttataactactaaaatggtcatat

SEQ ID NO: 906491 - DNA, 33 bp, Homo sapien
atgctagagttggtaaacttttggaagtacctt

SEQ ID NO: 906492 - DNA, 33 bp, Homo sapien
atgctagagttggtaatcttttggaagtacctt

SEQ ID NO: 906493 - DNA, 33 bp, Homo sapien
gttagtcccaaaatgaatatgtgtaagaaataa

SEQ ID NO: 906494 - DNA, 33 bp, Homo sapien
gttagtcccaaaatgagtatgtgtaagaaataa

SEQ ID NO: 906495 - DNA, 33 bp, Homo sapien
taatctaaacccaccacgatgggagcttgttta

SEQ ID NO: 906496 - DNA, 33 bp, Homo sapien
taatctaaacccaccatgatgggagcttgttta

SEQ ID NO: 906497 - DNA, 33 bp, Homo sapien
ctggccactctgtatccagtctctcccatggca

SEQ ID NO: 906498 - DNA, 33 bp, Homo sapien
ctggccactctgtatctagtctctcccatggca

SEQ ID NO: 906499 - DNA, 33 bp, Homo sapien
gttaaatatgattatccaggcttggagctaaca

SEQ ID NO: 906500 - DNA, 33 bp, Homo sapien
gttaaatatgattatctaggcttggagctaaca

SEQ ID NO: 906501 - DNA, 33 bp, Homo sapien
tctcaccagagcagcactgactttcttcaggtt

SEQ ID NO: 906502 - DNA, 33 bp, Homo sapien
tctcaccagagcagcattgactttcttcaggtt

SEQ ID NO: 906503 - DNA, 33 bp, Homo sapien
gctgaaatcgttataaaccacaaatatatcaca

SEQ ID NO: 906504 - DNA, 33 bp, Homo sapien
gctgaaatcgttataagccacaaatatatcaca

SEQ ID NO: 906505 - DNA, 33 bp, Homo sapien
atcaagttgtatcccaatgaggctacattatcc

SEQ ID NO: 906506 - DNA, 33 bp, Homo sapien
atcaagttgtatcccagtgaggctacattatcc

SEQ ID NO: 906507 - DNA, 33 bp, Homo sapien
tgaccaccacttcaaaagattgattaaattttg

SEQ ID NO: 906508 - DNA, 33 bp, Homo sapien
tgaccaccacttcaaatgattgattaaattttg

SEQ ID NO: 906509 - DNA, 33 bp, Homo sapien
acgaaacaatttgcgcactaccctggctgggga

SEQ ID NO: 906510 - DNA, 33 bp, Homo sapien
acgaaacaatttgcgcgctaccctggctgggga

SEQ ID NO: 906511 - DNA, 33 bp, Homo sapien
accacctggatgaagccgaagcgctgagtgacc

SEQ ID NO: 906512 - DNA, 33 bp, Homo sapien
accacctggatgaagctgaagcgctgagtgacc

SEQ ID NO: 906513 - DNA, 33 bp, Homo sapien
ctttaccccaaatcacaaaggtcgtaaatggtg

SEQ ID NO: 906514 - DNA, 33 bp, Homo sapien
ctttaccccaaatcacgaaggtcgtaaatggtg

SEQ ID NO: 906515 - DNA, 33 bp, Homo sapien
gttgggagaagtgtcacgaagaaaagcttcaga

SEQ ID NO: 906516 - DNA, 33 bp, Homo sapien
gttgggagaagtgtcatgaagaaaagcttcaga

SEQ ID NO: 906517 - DNA, 33 bp, Homo sapien
atttattaagcaaccacgagtgccagtaactgt

SEQ ID NO: 906518 - DNA, 33 bp, Homo sapien
atttattaagcaaccatgagtgccagtaactgt

SEQ ID NO: 906519 - DNA, 33 bp, Homo sapien
gtgagaaaagccattaccatttttgacagactt

SEQ ID NO: 906520 - DNA, 33 bp, Homo sapien
gtgagaaaagccattatcatttttgacagactt

SEQ ID NO: 906521 - DNA, 33 bp, Homo sapien
tagctgcattcaagtacggtgctttagttagca

SEQ ID NO: 906522 - DNA, 33 bp, Homo sapien
tagctgcattcaagtatggtgctttagttagca

SEQ ID NO: 906523 - DNA, 33 bp, Homo sapien
cttaaatgtgaataacaagtccaaatattatat

SEQ ID NO: 906524 - DNA, 33 bp, Homo sapien
cttaaatgtgaataacgagtccaaatattatat

SEQ ID NO: 906525 - DNA, 33 bp, Homo sapien
ttctaaaccagtcttgaaatctcactgcatcac

SEQ ID NO: 906526 - DNA, 33 bp, Homo sapien
ttctaaaccagtcttggaatctcactgcatcac

SEQ ID NO: 906527 - DNA, 33 bp, Homo sapien
aaaagattgaggcataagaaaaaaaagcatcta

SEQ ID NO: 906528 - DNA, 33 bp, Homo sapien
aaaagattgaggcatatgaaaaaaaagcatcta

SEQ ID NO: 906529 - DNA, 33 bp, Homo sapien
aatgtgactagaaggcactgggtttcttttgaa

SEQ ID NO: 906530 - DNA, 33 bp, Homo sapien
aatgtgactagaaggcgctgggtttcttttgaa

SEQ ID NO: 906531 - DNA, 33 bp, Homo sapien
agattgtccccgacaggaagtgatgaaacataa

SEQ ID NO: 906532 - DNA, 33 bp, Homo sapien
agattgtccccgacagtaagtgatgaaacataa

SEQ ID NO: 906533 - DNA, 33 bp, Homo sapien
tcagacataagaaaggaaagtcaatgctcgcca

SEQ ID NO: 906534 - DNA, 33 bp, Homo sapien
tcagacataagaaaggtaagtcaatgctcgcca

SEQ ID NO: 906535 - DNA, 33 bp, Homo sapien
gctgcactcagttgcaggcctctttagtcactg

SEQ ID NO: 906536 - DNA, 33 bp, Homo sapien
gctgcactcagttgcatgcctctttagtcactg

SEQ ID NO: 906537 - DNA, 33 bp, Homo sapien
gtattttgcacaatgaacctcaatatgggtttg

SEQ ID NO: 906538 - DNA, 33 bp, Homo sapien
gtattttgcacaatgagcctcaatatgggtttg

SEQ ID NO: 906539 - DNA, 33 bp, Homo sapien
cccctggaatatgccaactaaaaatgcataacc

SEQ ID NO: 906540 - DNA, 33 bp, Homo sapien
cccctggaatatgccagctaaaaatgcataacc

SEQ ID NO: 906541 - DNA, 33 bp, Homo sapien
gcccagaaaataactaagaagaccataagccgt

SEQ ID NO: 906542 - DNA, 33 bp, Homo sapien
gcccagaaaataactatgaagaccataagccgt

SEQ ID NO: 906543 - DNA, 33 bp, Homo sapien
gctgagtatgtgattacagaaccttctgctcaa

SEQ ID NO: 906544 - DNA, 33 bp, Homo sapien
gctgagtatgtgattatagaaccttctgctcaa

SEQ ID NO: 906545 - DNA, 33 bp, Homo sapien
tgggatggtgggaaaacggcacatatctgagtt

SEQ ID NO: 906546 - DNA, 33 bp, Homo sapien
tgggatggtgggaaaatggcacatatctgagtt

SEQ ID NO: 906547 - DNA, 33 bp, Homo sapien
gcagtatgggaacaaggaaacctcagttaggga

SEQ ID NO: 906548 - DNA, 33 bp, Homo sapien
gcagtatgggaacaagtaaacctcagttaggga

SEQ ID NO: 906549 - DNA, 33 bp, Homo sapien
cattcagggaatcaggcatattgaatgggtggt

SEQ ID NO: 906550 - DNA, 33 bp, Homo sapien
cattcagggaatcagggatattgaatgggtggt

SEQ ID NO: 906551 - DNA, 33 bp, Homo sapien
tgccaattattctgaaatccagcattatgactg

SEQ ID NO: 906552 - DNA, 33 bp, Homo sapien
tgccaattattctgaattccagcattatgactg

SEQ ID NO: 906553 - DNA, 33 bp, Homo sapien
ggagacaaatgactggaactcagtgatactagt

SEQ ID NO: 906554 - DNA, 33 bp, Homo sapien
ggagacaaatgactgggactcagtgatactagt

SEQ ID NO: 906555 - DNA, 33 bp, Homo sapien
acaaaaattacacacacattagtaggctcttag

SEQ ID NO: 906556 - DNA, 33 bp, Homo sapien
acaaaaattacacacatattagtaggctcttag

SEQ ID NO: 906557 - DNA, 33 bp, Homo sapien
agactcaaaatagtgacagcccttttatagttg

SEQ ID NO: 906558 - DNA, 33 bp, Homo sapien
agactcaaaatagtgatagcccttttatagttg

SEQ ID NO: 906559 - DNA, 33 bp, Homo sapien
gatagttattcttctcccccactaatttttgac

SEQ ID NO: 906560 - DNA, 33 bp, Homo sapien
gatagttattcttctcgcccactaatttttgac

SEQ ID NO: 906561 - DNA, 33 bp, Homo sapien
aagagcagttatagcacccataaaatgatcaaa

SEQ ID NO: 906562 - DNA, 33 bp, Homo sapien
aagagcagttatagcagccataaaatgatcaaa

SEQ ID NO: 906563 - DNA, 33 bp, Homo sapien
aggcctgaattatgcacctatcaacagggagtt

SEQ ID NO: 906564 - DNA, 33 bp, Homo sapien
aggcctgaattatgcatctatcaacagggagtt

SEQ ID NO: 906565 - DNA, 33 bp, Homo sapien
taattcagtgagaggacgaatggaaagtaattg

SEQ ID NO: 906566 - DNA, 33 bp, Homo sapien
taattcagtgagaggatgaatggaaagtaattg

SEQ ID NO: 906567 - DNA, 33 bp, Homo sapien
gagaaatgatccctacaaacagatgggaaagtc

SEQ ID NO: 906568 - DNA, 33 bp, Homo sapien
gagaaatgatccctacgaacagatgggaaagtc

SEQ ID NO: 906569 - DNA, 33 bp, Homo sapien
taaatgtgaaaagtaaggcaggaagtctagcag

SEQ ID NO: 906570 - DNA, 33 bp, Homo sapien
taaatgtgaaaagtaatgcaggaagtctagcag

SEQ ID NO: 906571 - DNA, 33 bp, Homo sapien
actgagatgatttattgtatcactgctatctaa

SEQ ID NO: 906572 - DNA, 33 bp, Homo sapien
actgagatgatttattttatcactgctatctaa

SEQ ID NO: 906573 - DNA, 33 bp, Homo sapien
ccccatctgtttagtgcacatgcaggtccttag

SEQ ID NO: 906574 - DNA, 33 bp, Homo sapien
ccccatctgtttagtgtacatgcaggtccttag

SEQ ID NO: 906575 - DNA, 33 bp, Homo sapien
aggaggagatgggaaaggtggataattctttta

SEQ ID NO: 906576 - DNA, 33 bp, Homo sapien
aggaggagatgggaaatgtggataattctttta

SEQ ID NO: 906577 - DNA, 33 bp, Homo sapien
tcagagctacatcttgaaactcggaggggaaag

SEQ ID NO: 906578 - DNA, 33 bp, Homo sapien
tcagagctacatcttggaactcggaggggaaag

SEQ ID NO: 906579 - DNA, 33 bp, Homo sapien
ttcctgaatcgtccacactatgactggaaattt

SEQ ID NO: 906580 - DNA, 33 bp, Homo sapien
ttcctgaatcgtccacgctatgactggaaattt

SEQ ID NO: 906581 - DNA, 33 bp, Homo sapien
tagctatggagggcaacggaaggggaagcacct

SEQ ID NO: 906582 - DNA, 33 bp, Homo sapien
tagctatggagggcaatggaaggggaagcacct

SEQ ID NO: 906583 - DNA, 33 bp, Homo sapien
aaatatctcaaatatacccaaagctctcaaggg

SEQ ID NO: 906584 - DNA, 33 bp, Homo sapien
aaatatctcaaatatatccaaagctctcaaggg

SEQ ID NO: 906585 - DNA, 33 bp, Homo sapien
tccttcacaacaagagccagaatattaccagtt

SEQ ID NO: 906586 - DNA, 33 bp, Homo sapien
tccttcacaacaagagtcagaatattaccagtt

SEQ ID NO: 906587 - DNA, 33 bp, Homo sapien
tactttcaaagtgagccagctggtacttcacta

SEQ ID NO: 906588 - DNA, 33 bp, Homo sapien
tactttcaaagtgagctagctggtacttcacta

SEQ ID NO: 906589 - DNA, 33 bp, Homo sapien
cagaagtgcagaatacagctactcagtaccctg

SEQ ID NO: 906590 - DNA, 33 bp, Homo sapien
cagaagtgcagaatacggctactcagtaccctg

SEQ ID NO: 906591 - DNA, 33 bp, Homo sapien
aagagctgagcctccacatctacctgacagcaa

SEQ ID NO: 906592 - DNA, 33 bp, Homo sapien
aagagctgagcctccatatctacctgacagcaa

SEQ ID NO: 906593 - DNA, 33 bp, Homo sapien
gtcatgagggaccaacaaagagctgagcctcca

SEQ ID NO: 906594 - DNA, 33 bp, Homo sapien
gtcatgagggaccaacgaagagctgagcctcca

SEQ ID NO: 906595 - DNA, 33 bp, Homo sapien
cttcctcatcaatctaccctgaaaaaatgtatt

SEQ ID NO: 906596 - DNA, 33 bp, Homo sapien
cttcctcatcaatctatcctgaaaaaatgtatt

SEQ ID NO: 906597 - DNA, 33 bp, Homo sapien
caggtatgtgtctctcccatcaaatcacctact

SEQ ID NO: 906598 - DNA, 33 bp, Homo sapien
caggtatgtgtctctctcatcaaatcacctact

SEQ ID NO: 906599 - DNA, 33 bp, Homo sapien
gtcaattagcagaaaaaaatggcaaattccatt

SEQ ID NO: 906600 - DNA, 33 bp, Homo sapien
gtcaattagcagaaaagaatggcaaattccatt

SEQ ID NO: 906601 - DNA, 33 bp, Homo sapien
ctatgacagaataacacagaccaagtatcttat

SEQ ID NO: 906602 - DNA, 33 bp, Homo sapien
ctatgacagaataacatagaccaagtatcttat

SEQ ID NO: 906603 - DNA, 33 bp, Homo sapien
tttaatctgagttgtacccccccacaatttata

SEQ ID NO: 906604 - DNA, 33 bp, Homo sapien
tttaatctgagttgtatccccccacaatttata

SEQ ID NO: 906605 - DNA, 33 bp, Homo sapien
atatatcctgataccggatagatataattttga

SEQ ID NO: 906606 - DNA, 33 bp, Homo sapien
atatatcctgataccgtatagatataattttga

SEQ ID NO: 906607 - DNA, 33 bp, Homo sapien
gctggtgtctaggtcaaggtgaacccattagtc

SEQ ID NO: 906608 - DNA, 33 bp, Homo sapien
gctggtgtctaggtcacggtgaacccattagtc

SEQ ID NO: 906609 - DNA, 33 bp, Homo sapien
ggatttatactcaaaacggtgtctattttactt

SEQ ID NO: 906610 - DNA, 33 bp, Homo sapien
ggatttatactcaaaatggtgtctattttactt

SEQ ID NO: 906611 - DNA, 33 bp, Homo sapien
ctccagggtgatgtggccaattcaaaagcacat

SEQ ID NO: 906612 - DNA, 33 bp, Homo sapien
ctccagggtgatgtggtcaattcaaaagcacat

SEQ ID NO: 906613 - DNA, 33 bp, Homo sapien
tcagaggtccaaaatacggtgaggtgatggtta

SEQ ID NO: 906614 - DNA, 33 bp, Homo sapien
tcagaggtccaaaatagggtgaggtgatggtta

SEQ ID NO: 906615 - DNA, 33 bp, Homo sapien
ctcgccttacagccaacgtgaaaaatggccttc

SEQ ID NO: 906616 - DNA, 33 bp, Homo sapien
ctcgccttacagccaatgtgaaaaatggccttc

SEQ ID NO: 906617 - DNA, 33 bp, Homo sapien
gatgagaagtaaatgcaaactacccccaaatta

SEQ ID NO: 906618 - DNA, 33 bp, Homo sapien
gatgagaagtaaatgccaactacccccaaatta

SEQ ID NO: 906619 - DNA, 33 bp, Homo sapien
ttgagttttccacacacgaatttattgtctgta

SEQ ID NO: 906620 - DNA, 33 bp, Homo sapien
ttgagttttccacacatgaatttattgtctgta

SEQ ID NO: 906621 - DNA, 33 bp, Homo sapien
ttaacctcaacagggaagtgattagatggaatt

SEQ ID NO: 906622 - DNA, 33 bp, Homo sapien
ttaacctcaacagggatgtgattagatggaatt

SEQ ID NO: 906623 - DNA, 33 bp, Homo sapien
acagttcaggttcttcaacagagagtttgtaaa

SEQ ID NO: 906624 - DNA, 33 bp, Homo sapien
acagttcaggttcttcgacagagagtttgtaaa

SEQ ID NO: 906625 - DNA, 33 bp, Homo sapien
gtcctcagaaagtgacagattaggttttcatgt

SEQ ID NO: 906626 - DNA, 33 bp, Homo sapien
gtcctcagaaagtgacggattaggttttcatgt

SEQ ID NO: 906627 - DNA, 33 bp, Homo sapien
gtggtatagcattgaaacttcatttaaacattt

SEQ ID NO: 906628 - DNA, 33 bp, Homo sapien
gtggtatagcattgaaccttcatttaaacattt

SEQ ID NO: 906629 - DNA, 33 bp, Homo sapien
caaacatttacttggactattacatctgaaatt

SEQ ID NO: 906630 - DNA, 33 bp, Homo sapien
caaacatttacttggattattacatctgaaatt

SEQ ID NO: 906631 - DNA, 33 bp, Homo sapien
ataattgatacatacaaacatagaggcacagtt

SEQ ID NO: 906632 - DNA, 33 bp, Homo sapien
ataattgatacatacatacatagaggcacagtt

SEQ ID NO: 906633 - DNA, 33 bp, Homo sapien
gctcacatccattttacggtttccatgcacttg

SEQ ID NO: 906634 - DNA, 33 bp, Homo sapien
gctcacatccattttatggtttccatgcacttg

SEQ ID NO: 906635 - DNA, 33 bp, Homo sapien
actaactgcaaagcaaatgcaaccattttaatt

SEQ ID NO: 906636 - DNA, 33 bp, Homo sapien
actaactgcaaagcaactgcaaccattttaatt

SEQ ID NO: 906637 - DNA, 33 bp, Homo sapien
ctactcagtatctttcaacttcaaaacaggaaa

SEQ ID NO: 906638 - DNA, 33 bp, Homo sapien
ctactcagtatctttctacttcaaaacaggaaa

SEQ ID NO: 906639 - DNA, 33 bp, Homo sapien
tcttatacaactaacaacctgaataaactaagt

SEQ ID NO: 906640 - DNA, 33 bp, Homo sapien
tcttatacaactaacagcctgaataaactaagt

SEQ ID NO: 906641 - DNA, 33 bp, Homo sapien
ccagggttataaaaataagactgaactgttaat

SEQ ID NO: 906642 - DNA, 33 bp, Homo sapien
ccagggttataaaaattagactgaactgttaat

SEQ ID NO: 906643 - DNA, 33 bp, Homo sapien
aaaagtcatgtctttacagaagataaggggaag

SEQ ID NO: 906644 - DNA, 33 bp, Homo sapien
aaaagtcatgtctttagagaagataaggggaag

SEQ ID NO: 906645 - DNA, 33 bp, Homo sapien
tgtgatatatgtgtcacctcttctgtgtattat

SEQ ID NO: 906646 - DNA, 33 bp, Homo sapien
tgtgatatatgtgtcatctcttctgtgtattat

SEQ ID NO: 906647 - DNA, 33 bp, Homo sapien
gtgggcaagaaacacactcaaggttgggggtcc

SEQ ID NO: 906648 - DNA, 33 bp, Homo sapien
gtgggcaagaaacacagtcaaggttgggggtcc

SEQ ID NO: 906649 - DNA, 33 bp, Homo sapien
ttcatttgatgaagaaagatagaaaaaaaggaa

SEQ ID NO: 906650 - DNA, 33 bp, Homo sapien
ttcatttgatgaagaaggatagaaaaaaaggaa

SEQ ID NO: 906651 - DNA, 33 bp, Homo sapien
tattcagcattcttaaggtacagaattttcaac

SEQ ID NO: 906652 - DNA, 33 bp, Homo sapien
tattcagcattcttaatgtacagaattttcaac

SEQ ID NO: 906653 - DNA, 33 bp, Homo sapien; identical to SEQ ID NO: 906651

SEQ ID NO: 906654 - DNA, 33 bp, Homo sapien; identical to SEQ ID NO: 906652

SEQ ID NO: 906655 - DNA, 33 bp, Homo sapien
tcactcatttaagtaaaagttcatccatgtgtt

SEQ ID NO: 906656 - DNA, 33 bp, Homo sapien
tcactcatttaagtaagagttcatccatgtgtt

SEQ ID NO: 906657 - DNA, 33 bp, Homo sapien
ccattttgttcactgaagcatcttttctaagta

SEQ ID NO: 906658 - DNA, 33 bp, Homo sapien
ccattttgttcactgaggcatcttttctaagta

SEQ ID NO: 906659 - DNA, 33 bp, Homo sapien
acagaaagtgtgaccaccatcaatctattgcta

SEQ ID NO: 906660 - DNA, 33 bp, Homo sapien
acagaaagtgtgaccatcatcaatctattgcta

SEQ ID NO: 906661 - DNA, 33 bp, Homo sapien
gcagtttctggaaagtcaaagactaatgagaaa

SEQ ID NO: 906662 - DNA, 33 bp, Homo sapien
gcagtttctggaaagttaaagactaatgagaaa

SEQ ID NO: 906663 - DNA, 33 bp, Homo sapien
aattttgatggaaaaactaatggcatgaccaag

SEQ ID NO: 906664 - DNA, 33 bp, Homo sapien
aattttgatggaaaaattaatggcatgaccaag

SEQ ID NO: 906665 - DNA, 33 bp, Homo sapien
caggtgatggagggaaaaagaagctgagtctgc

SEQ ID NO: 906666 - DNA, 33 bp, Homo sapien
caggtgatggagggaagaagaagctgagtctgc

SEQ ID NO: 906667 - DNA, 33 bp, Homo sapien
tgatcttaagtgtctcaaatgggccccactctc

SEQ ID NO: 906668 - DNA, 33 bp, Homo sapien
tgatcttaagtgtctcgaatgggccccactctc

SEQ ID NO: 906669 - DNA, 33 bp, Homo sapien
tgcgtgtaagactccacagtgtgtcaaacaaat

SEQ ID NO: 906670 - DNA, 33 bp, Homo sapien
tgcgtgtaagactccatagtgtgtcaaacaaat

SEQ ID NO: 906671 - DNA, 33 bp, Homo sapien
agacttacacaaatccggatggtagagcctact

SEQ ID NO: 906672 - DNA, 33 bp, Homo sapien
agacttacacaaatcctgatggtagagcctact

SEQ ID NO: 906673 - DNA, 33 bp, Homo sapien
ataagtgagatcatacacaaagatagagcatga

SEQ ID NO: 906674 - DNA, 33 bp, Homo sapien
ataagtgagatcatacgcaaagatagagcatga

SEQ ID NO: 906675 - DNA, 33 bp, Homo sapien
tgttcttgctgagaaacggacagcataaaacat

SEQ ID NO: 906676 - DNA, 33 bp, Homo sapien
tgttcttgctgagaaatggacagcataaaacat

SEQ ID NO: 906677 - DNA, 33 bp, Homo sapien
tctttctcaggacgggccatatggtctctccag

SEQ ID NO: 906678 - DNA, 33 bp, Homo sapien
tctttctcaggacggggcatatggtctctccag

SEQ ID NO: 906679 - DNA, 33 bp, Homo sapien
catctactaaagttaacgcagtcattgcttcac

SEQ ID NO: 906680 - DNA, 33 bp, Homo sapien
catctactaaagttaaggcagtcattgcttcac

SEQ ID NO: 906681 - DNA, 33 bp, Homo sapien
tttagactatggaaataacgtcacacaaaaagc

SEQ ID NO: 906682 - DNA, 33 bp, Homo sapien
tttagactatggaaatgacgtcacacaaaaagc

SEQ ID NO: 906683 - DNA, 33 bp, Homo sapien
agtgcacgtctgcaagaatacttgtgcaggcag

SEQ ID NO: 906684 - DNA, 33 bp, Homo sapien
agtgcacgtctgcaagcatacttgtgcaggcag

SEQ ID NO: 906685 - DNA, 33 bp, Homo sapien
cttattcattctgtcaaataacactgattgagc

SEQ ID NO: 906686 - DNA, 33 bp, Homo sapien
cttattcattctgtcagataacactgattgagc

SEQ ID NO: 906687 - DNA, 33 bp, Homo sapien
ctgaattgagaaaatacgcccagttaatccagc

SEQ ID NO: 906688 - DNA, 33 bp, Homo sapien
ctgaattgagaaaatatgcccagttaatccagc

SEQ ID NO: 906689 - DNA, 33 bp, Homo sapien
tcttgctctgaaacaacttaaactctgatacag

SEQ ID NO: 906690 - DNA, 33 bp, Homo sapien
tcttgctctgaaacaatttaaactctgatacag

SEQ ID NO: 906691 - DNA, 33 bp, Homo sapien
cctcctaaaaccaaacaatagactgcttagaga

SEQ ID NO: 906692 - DNA, 33 bp, Homo sapien
cctcctaaaaccaaactatagactgcttagaga

SEQ ID NO: 906693 - DNA, 33 bp, Homo sapien
agtgcctcccgtataccccagaaatcatgactc

SEQ ID NO: 906694 - DNA, 33 bp, Homo sapien
agtgcctcccgtatactccagaaatcatgactc

SEQ ID NO: 906695 - DNA, 33 bp, Homo sapien
atttctcacactgaaaacttaagacactgagct

SEQ ID NO: 906696 - DNA, 33 bp, Homo sapien
atttctcacactgaaagcttaagacactgagct

SEQ ID NO: 906697 - DNA, 33 bp, Homo sapien
gctacttaaattctagcagatggaatgggtgtg

SEQ ID NO: 906698 - DNA, 33 bp, Homo sapien
gctacttaaattctagtagatggaatgggtgtg

SEQ ID NO: 906699 - DNA, 33 bp, Homo sapien
ttagctaaggtaccacacataacatcatctggt

SEQ ID NO: 906700 - DNA, 33 bp, Homo sapien
ttagctaaggtaccacgcataacatcatctggt

SEQ ID NO: 906701 - DNA, 33 bp, Homo sapien
gctgataaactgtttcacttatagtaaagacta

SEQ ID NO: 906702 - DNA, 33 bp, Homo sapien
gctgataaactgtttctcttatagtaaagacta

SEQ ID NO: 906703 - DNA, 33 bp, Homo sapien
agatgaactccaataacaaaagccaacattcag

SEQ ID NO: 906704 - DNA, 33 bp, Homo sapien
agatgaactccaataataaaagccaacattcag

SEQ ID NO: 906705 - DNA, 33 bp, Homo sapien
taagtagacaataacaaaatcaaggcaaaagta

SEQ ID NO: 906706 - DNA, 33 bp, Homo sapien
taagtagacaataacagaatcaaggcaaaagta

SEQ ID NO: 906707 - DNA, 33 bp, Homo sapien
tgttattgcagcattgccaatcttaattattag

SEQ ID NO: 906708 - DNA, 33 bp, Homo sapien
tgttattgcagcattgtcaatcttaattattag

SEQ ID NO: 906709 - DNA, 33 bp, Homo sapien
tgtaccattctgaacaagtaaaaactgcttaag

SEQ ID NO: 906710 - DNA, 33 bp, Homo sapien
tgtaccattctgaacaggtaaaaactgcttaag

SEQ ID NO: 906711 - DNA, 33 bp, Homo sapien
cactatcatattgaccaatttctgtgtccgtgt

SEQ ID NO: 906712 - DNA, 33 bp, Homo sapien
cactatcatattgaccgatttctgtgtccgtgt

SEQ ID NO: 906713 - DNA, 33 bp, Homo sapien
ttctgtatagagacaaacatgaaagaaagctgg

SEQ ID NO: 906714 - DNA, 33 bp, Homo sapien
ttctgtatagagacaaccatgaaagaaagctgg

SEQ ID NO: 906715 - DNA, 33 bp, Homo sapien
tgtcacagtaagatcacatggagtaaccttttt

SEQ ID NO: 906716 - DNA, 33 bp, Homo sapien
tgtcacagtaagatcatatggagtaaccttttt

SEQ ID NO: 906717 - DNA, 33 bp, Homo sapien
tcaattttaaaatgtacgtagccagagatgcaa

SEQ ID NO: 906718 - DNA, 33 bp, Homo sapien
tcaattttaaaatgtatgtagccagagatgcaa

SEQ ID NO: 906719 - DNA, 33 bp, Homo sapien
ctaacacatctcaaaaacttcctcttttcagtc

SEQ ID NO: 906720 - DNA, 33 bp, Homo sapien
ctaacacatctcaaaagcttcctcttttcagtc

SEQ ID NO: 906721 - DNA, 33 bp, Homo sapien
cccaaagtgactaagacaagctacacctacgtg

SEQ ID NO: 906722 - DNA, 33 bp, Homo sapien
cccaaagtgactaagataagctacacctacgtg

SEQ ID NO: 906723 - DNA, 33 bp, Homo sapien
aagtaaagagaatccgaagtgtggatgagcctc

SEQ ID NO: 906724 - DNA, 33 bp, Homo sapien
aagtaaagagaatccgcagtgtggatgagcctc

SEQ ID NO: 906725 - DNA, 33 bp, Homo sapien
tgtcatttgaaaactgcagtgagggttttggct

SEQ ID NO: 906726 - DNA, 33 bp, Homo sapien
tgtcatttgaaaactgtagtgagggttttggct

SEQ ID NO: 906727 - DNA, 33 bp, Homo sapien
tttttgcttctactcacctgacatttgtttatt

SEQ ID NO: 906728 - DNA, 33 bp, Homo sapien
tttttgcttctactcatctgacatttgtttatt

SEQ ID NO: 906729 - DNA, 33 bp, Homo sapien
acaatttccactattcaatgttttgtataaaac

SEQ ID NO: 906730 - DNA, 33 bp, Homo sapien
acaatttccactattcgatgttttgtataaaac

SEQ ID NO: 906731 - DNA, 33 bp, Homo sapien
tttctgttcagcttgcaaccctgtgtcaaaatt

SEQ ID NO: 906732 - DNA, 33 bp, Homo sapien
tttctgttcagcttgcgaccctgtgtcaaaatt

SEQ ID NO: 906733 - DNA, 33 bp, Homo sapien
ggcacaaacagtttcaaatgcagcttgtcttct

SEQ ID NO: 906734 - DNA, 33 bp, Homo sapien
ggcacaaacagtttcagatgcagcttgtcttct

SEQ ID NO: 906735 - DNA, 33 bp, Homo sapien
tgattgatcatatataaccaacaccttagtccc

SEQ ID NO: 906736 - DNA, 33 bp, Homo sapien
tgattgatcatatatatccaacaccttagtccc

SEQ ID NO: 906737 - DNA, 33 bp, Homo sapien
cctttattccaaatctcactgagaaatctaggt

SEQ ID NO: 906738 - DNA, 33 bp, Homo sapien
cctttattccaaatcttactgagaaatctaggt

SEQ ID NO: 906739 - DNA, 33 bp, Homo sapien
ttttcttcctctcaaaccaagtcagctctatat

SEQ ID NO: 906740 - DNA, 33 bp, Homo sapien
ttttcttcctctcaaatcaagtcagctctatat

SEQ ID NO: 906741 - DNA, 33 bp, Homo sapien
gttaccagcaggtcaacggctggaagtctgtgg

SEQ ID NO: 906742 - DNA, 33 bp, Homo sapien
gttaccagcaggtcaagggctggaagtctgtgg

SEQ ID NO: 906743 - DNA, 33 bp, Homo sapien
tctgcacaagcctcataaatccaacttcccctt

SEQ ID NO: 906744 - DNA, 33 bp, Homo sapien
tctgcacaagcctcattaatccaacttcccctt

SEQ ID NO: 906745 - DNA, 33 bp, Homo sapien
ggtgggcacgaactgacaccgagaattgactaa

SEQ ID NO: 906746 - DNA, 33 bp, Homo sapien
ggtgggcacgaactgagaccgagaattgactaa

SEQ ID NO: 906747 - DNA, 33 bp, Homo sapien
tatgtgttgggcactacgcagagaacgcagact

SEQ ID NO: 906748 - DNA, 33 bp, Homo sapien
tatgtgttgggcactatgcagagaacgcagact

SEQ ID NO: 906749 - DNA, 33 bp, Homo sapien
ttttaaaatgtatggaatagtgaaatgagcaga

SEQ ID NO: 906750 - DNA, 33 bp, Homo sapien
ttttaaaatgtatggagtagtgaaatgagcaga

SEQ ID NO: 906751 - DNA, 33 bp, Homo sapien
ggcatggcttcttcaacggaccaaactgtaatg

SEQ ID NO: 906752 - DNA, 33 bp, Homo sapien
ggcatggcttcttcaatggaccaaactgtaatg

SEQ ID NO: 906753 - DNA, 33 bp, Homo sapien
tcaatttagaatctcccgaatgtcaagatgaca

SEQ ID NO: 906754 - DNA, 33 bp, Homo sapien
tcaatttagaatctcctgaatgtcaagatgaca

SEQ ID NO: 906755 - DNA, 33 bp, Homo sapien; identical to SEQ ID NO: 906753

SEQ ID NO: 906756 - DNA, 33 bp, Homo sapien; identical to SEQ ID NO: 906754

SEQ ID NO: 906757 - DNA, 33 bp, Homo sapien
atttctgccttccttaccattataagcataatc

SEQ ID NO: 906758 - DNA, 33 bp, Homo sapien
atttctgccttccttagcattataagcataatc

SEQ ID NO: 906759 - DNA, 33 bp, Homo sapien
tttccagttttgtccagtccatcccagatgcac

SEQ ID NO: 906760 - DNA, 33 bp, Homo sapien
tttccagttttgtccattccatcccagatgcac

SEQ ID NO: 906761 - DNA, 33 bp, Homo sapien
ttagacgatcttggagacaattagtagactgct

SEQ ID NO: 906762 - DNA, 33 bp, Homo sapien
ttagacgatcttggaggcaattagtagactgct

SEQ ID NO: 906763 - DNA, 33 bp, Homo sapien
catttaggatccattaaaagttggaggttgtga

SEQ ID NO: 906764 - DNA, 33 bp, Homo sapien
catttaggatccattagaagttggaggttgtga

SEQ ID NO: 906765 - DNA, 33 bp, Homo sapien
atctgatctgatctctaaactttgttgccaaag

SEQ ID NO: 906766 - DNA, 33 bp, Homo sapien
atctgatctgatctctgaactttgttgccaaag

SEQ ID NO: 906767 - DNA, 33 bp, Homo sapien
accagcaattagactcccaggaatttatccaac

SEQ ID NO: 906768 - DNA, 33 bp, Homo sapien
accagcaattagactctcaggaatttatccaac

SEQ ID NO: 906769 - DNA, 33 bp, Homo sapien
attcttaaacaactgaatcaattttgataaaat

SEQ ID NO: 906770 - DNA, 33 bp, Homo sapien
attcttaaacaactgattcaattttgataaaat

SEQ ID NO: 906771 - DNA, 33 bp, Homo sapien
aaccgattccacatacagcctgtaaactaaaga

SEQ ID NO: 906772 - DNA, 33 bp, Homo sapien
aaccgattccacatacggcctgtaaactaaaga

SEQ ID NO: 906773 - DNA, 33 bp, Homo sapien
catattttgcaaaaaccattcttgcttctttaa

SEQ ID NO: 906774 - DNA, 33 bp, Homo sapien
catattttgcaaaaactattcttgcttctttaa

SEQ ID NO: 906775 - DNA, 33 bp, Homo sapien
ataagggaaagaagaacgtatgtgacggcactt

SEQ ID NO: 906776 - DNA, 33 bp, Homo sapien
ataagggaaagaagaatgtatgtgacggcactt

SEQ ID NO: 906777 - DNA, 33 bp, Homo sapien
aattattttccaacaccgtcagcaaacttctat

SEQ ID NO: 906778 - DNA, 33 bp, Homo sapien
aattattttccaacactgtcagcaaacttctat

SEQ ID NO: 906779 - DNA, 33 bp, Homo sapien
ctcatatttgatgtaacattcaccatttactat

SEQ ID NO: 906780 - DNA, 33 bp, Homo sapien
ctcatatttgatgtaagattcaccatttactat

SEQ ID NO: 906781 - DNA, 33 bp, Homo sapien
gaattacctcggatcacggtcaaatcttacacc

SEQ ID NO: 906782 - DNA, 33 bp, Homo sapien
gaattacctcggatcatggtcaaatcttacacc

SEQ ID NO: 906783 - DNA, 33 bp, Homo sapien
taaaagagtgtctgtaccaagaggatggaggaa

SEQ ID NO: 906784 - DNA, 33 bp, Homo sapien
taaaagagtgtctgtatcaagaggatggaggaa

SEQ ID NO: 906785 - DNA, 33 bp, Homo sapien
aaaaatgttggaaaagccttctcagataactac

SEQ ID NO: 906786 - DNA, 33 bp, Homo sapien
aaaaatgttggaaaagtcttctcagataactac

SEQ ID NO: 906787 - DNA, 33 bp, Homo sapien
ttagtggtacttctcacagtcttgaattcaaca

SEQ ID NO: 906788 - DNA, 33 bp, Homo sapien
ttagtggtacttctcatagtcttgaattcaaca

SEQ ID NO: 906789 - DNA, 33 bp, Homo sapien
cattttttccagtcaaacaatctctaagaaaat

SEQ ID NO: 906790 - DNA, 33 bp, Homo sapien
cattttttccagtcaagcaatctctaagaaaat

SEQ ID NO: 906791 - DNA, 33 bp, Homo sapien
agtacaaagttataagaaaacctgctttctagg

SEQ ID NO: 906792 - DNA, 33 bp, Homo sapien
agtacaaagttataaggaaacctgctttctagg

SEQ ID NO: 906793 - DNA, 33 bp, Homo sapien
attactgtagctaaaccctaagcagtgtataca

SEQ ID NO: 906794 - DNA, 33 bp, Homo sapien
attactgtagctaaacgctaagcagtgtataca

SEQ ID NO: 906795 - DNA, 33 bp, Homo sapien
atgtgactgcgcaaaacttccctaaactgctac

SEQ ID NO: 906796 - DNA, 33 bp, Homo sapien
atgtgactgcgcaaaatttccctaaactgctac

SEQ ID NO: 906797 - DNA, 33 bp, Homo sapien
gtgatggtttttgttaccaggcatacagaatgt

SEQ ID NO: 906798 - DNA, 33 bp, Homo sapien
gtgatggtttttgttatcaggcatacagaatgt

SEQ ID NO: 906799 - DNA, 33 bp, Homo sapien
gtgtatagccaattagcccatcttaaaaattaa

SEQ ID NO: 906800 - DNA, 33 bp, Homo sapien
gtgtatagccaattagtccatcttaaaaattaa

SEQ ID NO: 906801 - DNA, 33 bp, Homo sapien
tttttaatggtagccactctggcaggtgtgaga

SEQ ID NO: 906802 - DNA, 33 bp, Homo sapien
tttttaatggtagccattctggcaggtgtgaga

SEQ ID NO: 906803 - DNA, 33 bp, Homo sapien
aaaaacaccatcagcacagtaaagagataacaa

SEQ ID NO: 906804 - DNA, 33 bp, Homo sapien
aaaaacaccatcagcagagtaaagagataacaa

SEQ ID NO: 906805 - DNA, 33 bp, Homo sapien
acctgaagaaattatccctctgctgtccattta

SEQ ID NO: 906806 - DNA, 33 bp, Homo sapien
acctgaagaaattatcgctctgctgtccattta

SEQ ID NO: 906807 - DNA, 33 bp, Homo sapien
cccactgtggatcaaaaacttggggcagcaaag

SEQ ID NO: 906808 - DNA, 33 bp, Homo sapien
cccactgtggatcaaagacttggggcagcaaag

SEQ ID NO: 906809 - DNA, 33 bp, Homo sapien
atgaggctctttttgaacatttggtaaaatatt

SEQ ID NO: 906810 - DNA, 33 bp, Homo sapien
atgaggctctttttgagcatttggtaaaatatt

SEQ ID NO: 906811 - DNA, 33 bp, Homo sapien
ttgatgccacatggcaaatatcctaaaattgtc

SEQ ID NO: 906812 - DNA, 33 bp, Homo sapien
ttgatgccacatggcacatatcctaaaattgtc

SEQ ID NO: 906813 - DNA, 33 bp, Homo sapien
tcaagaggaatttgaaaaagtgacaaatgttat

SEQ ID NO: 906814 - DNA, 33 bp, Homo sapien
tcaagaggaatttgaagaagtgacaaatgttat

SEQ ID NO: 906815 - DNA, 33 bp, Homo sapien
aagtagtaaatcattgacaaatacttggtagtt

SEQ ID NO: 906816 - DNA, 33 bp, Homo sapien
aagtagtaaatcattggcaaatacttggtagtt

SEQ ID NO: 906817 - DNA, 33 bp, Homo sapien
ttttttccaatgataacattaaagctagtccac

SEQ ID NO: 906818 - DNA, 33 bp, Homo sapien
ttttttccaatgataagattaaagctagtccac

SEQ ID NO: 906819 - DNA, 33 bp, Homo sapien
atgtaaacaaactagaaaaggcgagaattaaat

SEQ ID NO: 906820 - DNA, 33 bp, Homo sapien
atgtaaacaaactagagaaggcgagaattaaat

SEQ ID NO: 906821 - DNA, 33 bp, Homo sapien
aagggaaatgtcgaaaaaagaccctaagacaag

SEQ ID NO: 906822 - DNA, 33 bp, Homo sapien
aagggaaatgtcgaaagaagaccctaagacaag

SEQ ID NO: 906823 - DNA, 33 bp, Homo sapien
ttgccaatttagctcaacttcttcaaacacgag

SEQ ID NO: 906824 - DNA, 33 bp, Homo sapien
ttgccaatttagctcaccttcttcaaacacgag

SEQ ID NO: 906825 - DNA, 33 bp, Homo sapien
ggttatccatgactacagaaacttcttactgaa

SEQ ID NO: 906826 - DNA, 33 bp, Homo sapien
ggttatccatgactacggaaacttcttactgaa

SEQ ID NO: 906827 - DNA, 33 bp, Homo sapien
gcttaataatacattggacccttgaaagtcagg

SEQ ID NO: 906828 - DNA, 33 bp, Homo sapien
gcttaataatacattgtacccttgaaagtcagg

SEQ ID NO: 906829 - DNA, 33 bp, Homo sapien
gttatttaaatgactacagcaagcctggtcagc

SEQ ID NO: 906830 - DNA, 33 bp, Homo sapien
gttatttaaatgactagagcaagcctggtcagc

SEQ ID NO: 906831 - DNA, 33 bp, Homo sapien
gggaacttccaccatgacaatggaaaggaataa

SEQ ID NO: 906832 - DNA, 33 bp, Homo sapien
gggaacttccaccatggcaatggaaaggaataa

SEQ ID NO: 906833 - DNA, 33 bp, Homo sapien
tttagatattcaccaaattacatcctcccatgt

SEQ ID NO: 906834 - DNA, 33 bp, Homo sapien
tttagatattcaccaagttacatcctcccatgt

SEQ ID NO: 906835 - DNA, 33 bp, Homo sapien
tgccaagttaatctcacccttgttagtctcctt

SEQ ID NO: 906836 - DNA, 33 bp, Homo sapien
tgccaagttaatctcatccttgttagtctcctt

SEQ ID NO: 906837 - DNA, 33 bp, Homo sapien
atgtcatagggaatgactactctggcctctcta

SEQ ID NO: 906838 - DNA, 33 bp, Homo sapien
atgtcatagggaatgagtactctggcctctcta

SEQ ID NO: 906839 - DNA, 33 bp, Homo sapien
atttagtggaagtagaccatcatacatgtcatc

SEQ ID NO: 906840 - DNA, 33 bp, Homo sapien
atttagtggaagtagatcatcatacatgtcatc

SEQ ID NO: 906841 - DNA, 33 bp, Homo sapien
ataaaagttctgatctgaaacatagcctttgtc

SEQ ID NO: 906842 - DNA, 33 bp, Homo sapien
ataaaagttctgatcttaaacatagcctttgtc

SEQ ID NO: 906843 - DNA, 33 bp, Homo sapien
gaagctgggtgctgagacaacagaatgaaaaag

SEQ ID NO: 906844 - DNA, 33 bp, Homo sapien
gaagctgggtgctgaggcaacagaatgaaaaag

SEQ ID NO: 906845 - DNA, 33 bp, Homo sapien
tccaatctaacctaaccggtgttctcataagaa

SEQ ID NO: 906846 - DNA, 33 bp, Homo sapien
tccaatctaacctaactggtgttctcataagaa

SEQ ID NO: 906847 - DNA, 33 bp, Homo sapien
aaatatggatgctaaaagtgattctaatgagat

SEQ ID NO: 906848 - DNA, 33 bp, Homo sapien
aaatatggatgctaaaggtgattctaatgagat

SEQ ID NO: 906849 - DNA, 33 bp, Homo sapien
ccatttttcttgttggccatatttacatagctg

SEQ ID NO: 906850 - DNA, 33 bp, Homo sapien
ccatttttcttgttggtcatatttacatagctg

SEQ ID NO: 906851 - DNA, 33 bp, Homo sapien
agtaactgaatgtccaatatgcacataaatatg

SEQ ID NO: 906852 - DNA, 33 bp, Homo sapien
agtaactgaatgtccattatgcacataaatatg

SEQ ID NO: 906853 - DNA, 33 bp, Homo sapien
aggcagaagatgttaacatggatcgagacttga

SEQ ID NO: 906854 - DNA, 33 bp, Homo sapien
aggcagaagatgttaatatggatcgagacttga

SEQ ID NO: 906855 - DNA, 33 bp, Homo sapien
ctgtttgtactttcaaatgcactgtgagagtct

SEQ ID NO: 906856 - DNA, 33 bp, Homo sapien
ctgtttgtactttcaactgcactgtgagagtct

SEQ ID NO: 906857 - DNA, 33 bp, Homo sapien
tcaatctgttgtctgaactacttccctgaaatg

SEQ ID NO: 906858 - DNA, 33 bp, Homo sapien
tcaatctgttgtctgagctacttccctgaaatg

SEQ ID NO: 906859 - DNA, 33 bp, Homo sapien
attgtgggttctaaagaccaacagcctgcgttt

SEQ ID NO: 906860 - DNA, 33 bp, Homo sapien
attgtgggttctaaagtccaacagcctgcgttt

SEQ ID NO: 906861 - DNA, 33 bp, Homo sapien
tttgtcatagagcagaaccttcaataattgact

SEQ ID NO: 906862 - DNA, 33 bp, Homo sapien
tttgtcatagagcagagccttcaataattgact

SEQ ID NO: 906863 - DNA, 33 bp, Homo sapien
gacataaattctataacaagtgtccatcgtttt

SEQ ID NO: 906864 - DNA, 33 bp, Homo sapien
gacataaattctataagaagtgtccatcgtttt

SEQ ID NO: 906865 - DNA, 33 bp, Homo sapien
aataagaagctctgaaactctcattactctgaa

SEQ ID NO: 906866 - DNA, 33 bp, Homo sapien
aataagaagctctgaacctctcattactctgaa

SEQ ID NO: 906867 - DNA, 33 bp, Homo sapien
ttcttcactccaaagacaaaaggtacttgcttc

SEQ ID NO: 906868 - DNA, 33 bp, Homo sapien
ttcttcactccaaagataaaaggtacttgcttc

SEQ ID NO: 906869 - DNA, 33 bp, Homo sapien
ataattaaagacttgagagctatgtcaggactt

SEQ ID NO: 906870 - DNA, 33 bp, Homo sapien
ataattaaagacttgatagctatgtcaggactt

SEQ ID NO: 906871 - DNA, 33 bp, Homo sapien
tgggaatttaaagggacgtctattatggctatt

SEQ ID NO: 906872 - DNA, 33 bp, Homo sapien
tgggaatttaaagggatgtctattatggctatt

SEQ ID NO: 906873 - DNA, 33 bp, Homo sapien
tcctgtctgggtataacgatttattcagtcaag

SEQ ID NO: 906874 - DNA, 33 bp, Homo sapien
tcctgtctgggtataaggatttattcagtcaag

SEQ ID NO: 906875 - DNA, 33 bp, Homo sapien
tctagaccaactgaaacgttcattaaagataaa

SEQ ID NO: 906876 - DNA, 33 bp, Homo sapien
tctagaccaactgaaatgttcattaaagataaa

SEQ ID NO: 906877 - DNA, 33 bp, Homo sapien
gtcctttatagctacaatacttgagtctagaaa

SEQ ID NO: 906878 - DNA, 33 bp, Homo sapien
gtcctttatagctacagtacttgagtctagaaa

SEQ ID NO: 906879 - DNA, 33 bp, Homo sapien
cttcaactgtgagtcaaacattgaattaaacaa

SEQ ID NO: 906880 - DNA, 33 bp, Homo sapien
cttcaactgtgagtcagacattgaattaaacaa

SEQ ID NO: 906881 - DNA, 33 bp, Homo sapien
aaagtaagatgaaataacaacagcttttatttt

SEQ ID NO: 906882 - DNA, 33 bp, Homo sapien
aaagtaagatgaaatagcaacagcttttatttt

SEQ ID NO: 906883 - DNA, 33 bp, Homo sapien
gccatctgtatgttaacgatttccaaattttct

SEQ ID NO: 906884 - DNA, 33 bp, Homo sapien
gccatctgtatgttaatgatttccaaattttct

SEQ ID NO: 906885 - DNA, 33 bp, Homo sapien
ctctgggtcactgtgagaaaatctagtcctaag

SEQ ID NO: 906886 - DNA, 33 bp, Homo sapien
ctctgggtcactgtgataaaatctagtcctaag

SEQ ID NO: 906887 - DNA, 33 bp, Homo sapien
gtcatcccaaaccataataactagccagggtca

SEQ ID NO: 906888 - DNA, 33 bp, Homo sapien
gtcatcccaaaccatagtaactagccagggtca

SEQ ID NO: 906889 - DNA, 33 bp, Homo sapien
aagccatatagtgccacagataagatcatctca

SEQ ID NO: 906890 - DNA, 33 bp, Homo sapien
aagccatatagtgccagagataagatcatctca

SEQ ID NO: 906891 - DNA, 33 bp, Homo sapien
gcattccactggaaaaagaaagcaagaggctgg

SEQ ID NO: 906892 - DNA, 33 bp, Homo sapien
gcattccactggaaaaggaaagcaagaggctgg

SEQ ID NO: 906893 - DNA, 33 bp, Homo sapien
cacacaatacaaggtccatcactgtagttagtg

SEQ ID NO: 906894 - DNA, 33 bp, Homo sapien
cacacaatacaaggtctatcactgtagttagtg

SEQ ID NO: 906895 - DNA, 33 bp, Homo sapien
atggatacctaaaaccaggatgaaatcttattc

SEQ ID NO: 906896 - DNA, 33 bp, Homo sapien
atggatacctaaaaccgggatgaaatcttattc

SEQ ID NO: 906897 - DNA, 33 bp, Homo sapien
ataattagttcaaagactagatttcagttctgt

SEQ ID NO: 906898 - DNA, 33 bp, Homo sapien
ataattagttcaaagattagatttcagttctgt

SEQ ID NO: 906899 - DNA, 33 bp, Homo sapien
cttgttattaggctcaataaagtgcagaacttg

SEQ ID NO: 906900 - DNA, 33 bp, Homo sapien
cttgttattaggctcagtaaagtgcagaacttg

SEQ ID NO: 906901 - DNA, 33 bp, Homo sapien
ttatgtgtatgatttgcatatggtatgtgtaat

SEQ ID NO: 906902 - DNA, 33 bp, Homo sapien
ttatgtgtatgatttgtatatggtatgtgtaat

SEQ ID NO: 906903 - DNA, 33 bp, Homo sapien
aacgtgtttcctttcacgtattttgacatttaa

SEQ ID NO: 906904 - DNA, 33 bp, Homo sapien
aacgtgtttcctttcatgtattttgacatttaa

SEQ ID NO: 906905 - DNA, 33 bp, Homo sapien
cagccctctcatcttcaatttttggcaagaagc

SEQ ID NO: 906906 - DNA, 33 bp, Homo sapien
cagccctctcatcttccatttttggcaagaagc

SEQ ID NO: 906907 - DNA, 33 bp, Homo sapien
tatgattccaactatacggcattttagaaaact

SEQ ID NO: 906908 - DNA, 33 bp, Homo sapien
tatgattccaactatatggcattttagaaaact

SEQ ID NO: 906909 - DNA, 33 bp, Homo sapien
cttaaagtcagcataccacatagtttaaaatct

SEQ ID NO: 906910 - DNA, 33 bp, Homo sapien
cttaaagtcagcatactacatagtttaaaatct

SEQ ID NO: 906911 - DNA, 33 bp, Homo sapien
ctatattcaaccaacaagaagggattctataat

SEQ ID NO: 906912 - DNA, 33 bp, Homo sapien
ctatattcaaccaacatgaagggattctataat

SEQ ID NO: 906913 - DNA, 33 bp, Homo sapien
ttctaaagtctataacagagtaagaagtcacca

SEQ ID NO: 906914 - DNA, 33 bp, Homo sapien
ttctaaagtctataacggagtaagaagtcacca

SEQ ID NO: 906915 - DNA, 33 bp, Homo sapien
tggatctactgaaaaaagaacggatcaaggaaa

SEQ ID NO: 906916 - DNA, 33 bp, Homo sapien
tggatctactgaaaaaggaacggatcaaggaaa

SEQ ID NO: 906917 - DNA, 33 bp, Homo sapien
gagatggaaaagatacaatgttgagctcttctt

SEQ ID NO: 906918 - DNA, 33 bp, Homo sapien
gagatggaaaagataccatgttgagctcttctt

SEQ ID NO: 906919 - DNA, 33 bp, Homo sapien
tatgataaagtacaccaaaagtaaattctatga

SEQ ID NO: 906920 - DNA, 33 bp, Homo sapien
tatgataaagtacacccaaagtaaattctatga

SEQ ID NO: 906921 - DNA, 33 bp, Homo sapien
ttgctcctggatgttacgagagaatgtttctat

SEQ ID NO: 906922 - DNA, 33 bp, Homo sapien
ttgctcctggatgttatgagagaatgtttctat

SEQ ID NO: 906923 - DNA, 33 bp, Homo sapien
tccccacagtctctgacaggatgctggtgtatt

SEQ ID NO: 906924 - DNA, 33 bp, Homo sapien
tccccacagtctctgagaggatgctggtgtatt

SEQ ID NO: 906925 - DNA, 33 bp, Homo sapien
ttgggtcattgtatgcacatcgttgtaactgac

SEQ ID NO: 906926 - DNA, 33 bp, Homo sapien
ttgggtcattgtatgcgcatcgttgtaactgac

SEQ ID NO: 906927 - DNA, 33 bp, Homo sapien
actcggctaccattcacgaggggaaatgatgag

SEQ ID NO: 906928 - DNA, 33 bp, Homo sapien
actcggctaccattcatgaggggaaatgatgag

SEQ ID NO: 906929 - DNA, 33 bp, Homo sapien
gctcctttgagggccaccaaaacattcagtagt

SEQ ID NO: 906930 - DNA, 33 bp, Homo sapien
gctcctttgagggccatcaaaacattcagtagt

SEQ ID NO: 906931 - DNA, 33 bp, Homo sapien
tatggccacattaccacagaacgcagagattat

SEQ ID NO: 906932 - DNA, 33 bp, Homo sapien
tatggccacattaccagagaacgcagagattat

SEQ ID NO: 906933 - DNA, 33 bp, Homo sapien
tcctaatgaaaagctaggtaaacatttgtgtgt

SEQ ID NO: 906934 - DNA, 33 bp, Homo sapien
tcctaatgaaaagctatgtaaacatttgtgtgt

SEQ ID NO: 906935 - DNA, 33 bp, Homo sapien
ataaaatttaaagcaacttctgtaagcaaaaga

SEQ ID NO: 906936 - DNA, 33 bp, Homo sapien
ataaaatttaaagcaatttctgtaagcaaaaga

SEQ ID NO: 906937 - DNA, 33 bp, Homo sapien
agcatttttgaaagcacgaattaaaatgaagta

SEQ ID NO: 906938 - DNA, 33 bp, Homo sapien
agcatttttgaaagcaggaattaaaatgaagta

SEQ ID NO: 906939 - DNA, 33 bp, Homo sapien
gtgcgtgtatgtctgacgtttcagcctatgtcc

SEQ ID NO: 906940 - DNA, 33 bp, Homo sapien
gtgcgtgtatgtctgaggtttcagcctatgtcc

SEQ ID NO: 906941 - DNA, 33 bp, Homo sapien
atcaaagagatccagtaaaacctcattgacttt

SEQ ID NO: 906942 - DNA, 33 bp, Homo sapien
atcaaagagatccagttaaacctcattgacttt

SEQ ID NO: 906943 - DNA, 33 bp, Homo sapien
atgatcacctatgtgacggtagtagttgttgtt

SEQ ID NO: 906944 - DNA, 33 bp, Homo sapien
atgatcacctatgtgatggtagtagttgttgtt

SEQ ID NO: 906945 - DNA, 33 bp, Homo sapien
atgttttgagggatccaaaggcagaaatgttct

SEQ ID NO: 906946 - DNA, 33 bp, Homo sapien
atgttttgagggatccgaaggcagaaatgttct

SEQ ID NO: 906947 - DNA, 33 bp, Homo sapien
aaacagagtagttatacgcacaaatacagcagt

SEQ ID NO: 906948 - DNA, 33 bp, Homo sapien
aaacagagtagttatatgcacaaatacagcagt

SEQ ID NO: 906949 - DNA, 33 bp, Homo sapien
tataacaaaagcttcaaagggaatcccaagcct

SEQ ID NO: 906950 - DNA, 33 bp, Homo sapien
tataacaaaagcttcagagggaatcccaagcct

SEQ ID NO: 906951 - DNA, 33 bp, Homo sapien
aactcaattaacaacactgagatctgattcaaa

SEQ ID NO: 906952 - DNA, 33 bp, Homo sapien
aactcaattaacaacagtgagatctgattcaaa

SEQ ID NO: 906953 - DNA, 33 bp, Homo sapien
ggatttcaagcatcagaataagcccatcccatg

SEQ ID NO: 906954 - DNA, 33 bp, Homo sapien
ggatttcaagcatcaggataagcccatcccatg

SEQ ID NO: 906955 - DNA, 33 bp, Homo sapien
aatgcttccatgcttacctgtcctcaaccacca

SEQ ID NO: 906956 - DNA, 33 bp, Homo sapien
aatgcttccatgcttatctgtcctcaaccacca

SEQ ID NO: 906957 - DNA, 33 bp, Homo sapien
gttgcccctacaccacggctttaagactgattt

SEQ ID NO: 906958 - DNA, 33 bp, Homo sapien
gttgcccctacaccactgctttaagactgattt

SEQ ID NO: 906959 - DNA, 33 bp, Homo sapien
ttctatatctagaaaaactatcgttcaagaatg

SEQ ID NO: 906960 - DNA, 33 bp, Homo sapien
ttctatatctagaaaatctatcgttcaagaatg

SEQ ID NO: 906961 - DNA, 33 bp, Homo sapien
atccactctcatttcccatttgttctgagattc

SEQ ID NO: 906962 - DNA, 33 bp, Homo sapien
atccactctcatttcctatttgttctgagattc

SEQ ID NO: 906963 - DNA, 33 bp, Homo sapien
ctttatgtctgtgtaaacttttccatttataat

SEQ ID NO: 906964 - DNA, 33 bp, Homo sapien
ctttatgtctgtgtaaccttttccatttataat

SEQ ID NO: 906965 - DNA, 33 bp, Homo sapien
tgtgttggtttatgtacgttaggtaagacaact

SEQ ID NO: 906966 - DNA, 33 bp, Homo sapien
tgtgttggtttatgtatgttaggtaagacaact

SEQ ID NO: 906967 - DNA, 33 bp, Homo sapien
aggaatatgtgcctacccaagaagaaagcagcc

SEQ ID NO: 906968 - DNA, 33 bp, Homo sapien
aggaatatgtgcctactcaagaagaaagcagcc

SEQ ID NO: 906969 - DNA, 33 bp, Homo sapien
aagatggagcaaatataagaatacagaggggtt

SEQ ID NO: 906970 - DNA, 33 bp, Homo sapien
aagatggagcaaatatgagaatacagaggggtt

SEQ ID NO: 906971 - DNA, 33 bp, Homo sapien
gtacaaaagatagaataattagttcactggaga

SEQ ID NO: 906972 - DNA, 33 bp, Homo sapien
gtacaaaagatagaatcattagttcactggaga

SEQ ID NO: 906973 - DNA, 33 bp, Homo sapien
aactcccacaagagctgaagagaccaggctcct

SEQ ID NO: 906974 - DNA, 33 bp, Homo sapien
aactcccacaagagcttaagagaccaggctcct

SEQ ID NO: 906975 - DNA, 33 bp, Homo sapien
gttctgtgtctgtaccgaaataataaatgtgaa

SEQ ID NO: 906976 - DNA, 33 bp, Homo sapien
gttctgtgtctgtacctaaataataaatgtgaa

SEQ ID NO: 906977 - DNA, 33 bp, Homo sapien
ttccaatgcttttaggcactggatttcagacat

SEQ ID NO: 906978 - DNA, 33 bp, Homo sapien
ttccaatgcttttagggactggatttcagacat

SEQ ID NO: 906979 - DNA, 33 bp, Homo sapien
aaaagattggtgtcttaaaagtacattgttgtg

SEQ ID NO: 906980 - DNA, 33 bp, Homo sapien
aaaagattggtgtcttgaaagtacattgttgtg

SEQ ID NO: 906981 - DNA, 33 bp, Homo sapien
ctctgagggcagtgtcccatagtacggaggcac

SEQ ID NO: 906982 - DNA, 33 bp, Homo sapien
ctctgagggcagtgtctcatagtacggaggcac

SEQ ID NO: 906983 - DNA, 33 bp, Homo sapien
aactctccacgtggacactctttaatccaatat

SEQ ID NO: 906984 - DNA, 33 bp, Homo sapien
aactctccacgtggacgctctttaatccaatat

SEQ ID NO: 906985 - DNA, 33 bp, Homo sapien
atcatggctcattacacacttgacctgctgtgc

SEQ ID NO: 906986 - DNA, 33 bp, Homo sapien
atcatggctcattacagacttgacctgctgtgc

SEQ ID NO: 906987 - DNA, 33 bp, Homo sapien
aataataaatactgccaattgataactacagaa

SEQ ID NO: 906988 - DNA, 33 bp, Homo sapien
aataataaatactgccgattgataactacagaa

SEQ ID NO: 906989 - DNA, 33 bp, Homo sapien
ccttttgaaaggaataaacagagagctctgaag

SEQ ID NO: 906990 - DNA, 33 bp, Homo sapien
ccttttgaaaggaatagacagagagctctgaag

SEQ ID NO: 906991 - DNA, 33 bp, Homo sapien
cctgggggaacagttacggatttacagagaaaa

SEQ ID NO: 906992 - DNA, 33 bp, Homo sapien
cctgggggaacagttatggatttacagagaaaa

SEQ ID NO: 906993 - DNA, 33 bp, Homo sapien
catcagcgctcagccacgtgcatccgctgaaat

SEQ ID NO: 906994 - DNA, 33 bp, Homo sapien
catcagcgctcagccatgtgcatccgctgaaat

SEQ ID NO: 906995 - DNA, 33 bp, Homo sapien
atctagcagcttgccacagaccacatccttctt

SEQ ID NO: 906996 - DNA, 33 bp, Homo sapien
atctagcagcttgccatagaccacatccttctt

SEQ ID NO: 906997 - DNA, 33 bp, Homo sapien
gaggaggaatagacaccgggaaaatgagtaaaa

SEQ ID NO: 906998 - DNA, 33 bp, Homo sapien
gaggaggaatagacactgggaaaatgagtaaaa

SEQ ID NO: 906999 - DNA, 33 bp, Homo sapien
ttagcctttttgcctacgtggcttcaattccac

SEQ ID NO: 907000 - DNA, 33 bp, Homo sapien
ttagcctttttgcctatgtggcttcaattccac

SEQ ID NO: 907001 - DNA, 33 bp, Homo sapien
ggcaattaaatactgaagctaatggaagcattt

SEQ ID NO: 907002 - DNA, 33 bp, Homo sapien
ggcaattaaatactgaggctaatggaagcattt

SEQ ID NO: 907003 - DNA, 33 bp, Homo sapien
aggttcctaacacttcaaatttgtctctgaaga

SEQ ID NO: 907004 - DNA, 33 bp, Homo sapien
aggttcctaacacttcgaatttgtctctgaaga

SEQ ID NO: 907005 - DNA, 33 bp, Homo sapien
ctttgcaaaagggaccaaggacactgcagaata

SEQ ID NO: 907006 - DNA, 33 bp, Homo sapien
ctttgcaaaagggaccgaggacactgcagaata

SEQ ID NO: 907007 - DNA, 33 bp, Homo sapien
gtcttctaatgacatacacttccttggaatggg

SEQ ID NO: 907008 - DNA, 33 bp, Homo sapien
gtcttctaatgacatatacttccttggaatggg

SEQ ID NO: 907009 - DNA, 33 bp, Homo sapien
ttgcaattgcatgaccaggaaattatggccgaa

SEQ ID NO: 907010 - DNA, 33 bp, Homo sapien
ttgcaattgcatgaccgggaaattatggccgaa

SEQ ID NO: 907011 - DNA, 33 bp, Homo sapien
tcttattccgtactatcagcaaatgacacagca

SEQ ID NO: 907012 - DNA, 33 bp, Homo sapien
tcttattccgtactattagcaaatgacacagca

SEQ ID NO: 907013 - DNA, 33 bp, Homo sapien
tcttttaaacaaacaaacttctcatgaaattct

SEQ ID NO: 907014 - DNA, 33 bp, Homo sapien
tcttttaaacaaacaaccttctcatgaaattct

SEQ ID NO: 907015 - DNA, 33 bp, Homo sapien
cggttaattttataaccagaagacatagtggac

SEQ ID NO: 907016 - DNA, 33 bp, Homo sapien
cggttaattttataactagaagacatagtggac

SEQ ID NO: 907017 - DNA, 33 bp, Homo sapien
tttgctagattctgcaggattgggtcttatgta

SEQ ID NO: 907018 - DNA, 33 bp, Homo sapien
tttgctagattctgcatgattgggtcttatgta

SEQ ID NO: 907019 - DNA, 33 bp, Homo sapien
cacataactaactagcactggcttgccaaggaa

SEQ ID NO: 907020 - DNA, 33 bp, Homo sapien
cacataactaactagctctggcttgccaaggaa

SEQ ID NO: 907021 - DNA, 33 bp, Homo sapien; identical to SEQ ID NO: 907019

SEQ ID NO: 907022 - DNA, 33 bp, Homo sapien; identical to SEQ ID NO: 907020

SEQ ID NO: 907023 - DNA, 33 bp, Homo sapien
aggtagtaagaagggactcaaaatggtacactt

SEQ ID NO: 907024 - DNA, 33 bp, Homo sapien
aggtagtaagaagggattcaaaatggtacactt

SEQ ID NO: 907025 - DNA, 33 bp, Homo sapien
gtaaaagtacctaatacgcaagatgatatgtag

SEQ ID NO: 907026 - DNA, 33 bp, Homo sapien
gtaaaagtacctaatatgcaagatgatatgtag

SEQ ID NO: 907027 - DNA, 33 bp, Homo sapien
acagtaatggatactaaacatgcaaatgtaatg

SEQ ID NO: 907028 - DNA, 33 bp, Homo sapien
acagtaatggatactacacatgcaaatgtaatg

SEQ ID NO: 907029 - DNA, 33 bp, Homo sapien
caaatggaggagataaccaaaaagacagtaatg

SEQ ID NO: 907030 - DNA, 33 bp, Homo sapien
caaatggaggagataatcaaaaagacagtaatg

SEQ ID NO: 907031 - DNA, 33 bp, Homo sapien
ttcatataccaaaaggacattatcaggctattg

SEQ ID NO: 907032 - DNA, 33 bp, Homo sapien
ttcatataccaaaagggcattatcaggctattg

SEQ ID NO: 907033 - DNA, 33 bp, Homo sapien
catgctgctcaatgaaagctgaattgagttgaa

SEQ ID NO: 907034 - DNA, 33 bp, Homo sapien
catgctgctcaatgaacgctgaattgagttgaa

SEQ ID NO: 907035 - DNA, 33 bp, Homo sapien
agacagagcatcccacacactgggaaagggtct

SEQ ID NO: 907036 - DNA, 33 bp, Homo sapien
agacagagcatcccacgcactgggaaagggtct

SEQ ID NO: 907037 - DNA, 33 bp, Homo sapien
gtgaacaatggtagcactcatatctgttttgct

SEQ ID NO: 907038 - DNA, 33 bp, Homo sapien
gtgaacaatggtagcattcatatctgttttgct

SEQ ID NO: 907039 - DNA, 33 bp, Homo sapien
ctcacactctgaagaaactaactgtgagttatg

SEQ ID NO: 907040 - DNA, 33 bp, Homo sapien
ctcacactctgaagaagctaactgtgagttatg

SEQ ID NO: 907041 - DNA, 33 bp, Homo sapien
gacgttagatttagcacatagagacttaaacag

SEQ ID NO: 907042 - DNA, 33 bp, Homo sapien
gacgttagatttagcagatagagacttaaacag

SEQ ID NO: 907043 - DNA, 33 bp, Homo sapien
aaaagacttgtatatcaaaaactaaaaatcact

SEQ ID NO: 907044 - DNA, 33 bp, Homo sapien
aaaagacttgtatatcgaaaactaaaaatcact

SEQ ID NO: 907045 - DNA, 33 bp, Homo sapien
ctcacacctgttagaacgtctgttacaaaaaat

SEQ ID NO: 907046 - DNA, 33 bp, Homo sapien
ctcacacctgttagaatgtctgttacaaaaaat

SEQ ID NO: 907047 - DNA, 33 bp, Homo sapien
catgaggttgctaaaaactctgcttgctattca

SEQ ID NO: 907048 - DNA, 33 bp, Homo sapien
catgaggttgctaaaatctctgcttgctattca

SEQ ID NO: 907049 - DNA, 33 bp, Homo sapien
tagacagttggaggaacggacatctaaacgttt

SEQ ID NO: 907050 - DNA, 33 bp, Homo sapien
tagacagttggaggaatggacatctaaacgttt

SEQ ID NO: 907051 - DNA, 33 bp, Homo sapien
ttttggccttttatgaacctcattttcctcacc

SEQ ID NO: 907052 - DNA, 33 bp, Homo sapien
ttttggccttttatgagcctcattttcctcacc

SEQ ID NO: 907053 - DNA, 33 bp, Homo sapien
gtgggttatagagtgacgcgcaattatatatta

SEQ ID NO: 907054 - DNA, 33 bp, Homo sapien
gtgggttatagagtgatgcgcaattatatatta

SEQ ID NO: 907055 - DNA, 33 bp, Homo sapien
acaatgtcctcaatgacacaaaaaggccaaatt

SEQ ID NO: 907056 - DNA, 33 bp, Homo sapien
acaatgtcctcaatgatacaaaaaggccaaatt

SEQ ID NO: 907057 - DNA, 33 bp, Homo sapien
ttaaagttgcaaacacactgtgtctaaaagttc

SEQ ID NO: 907058 - DNA, 33 bp, Homo sapien
ttaaagttgcaaacacgctgtgtctaaaagttc

SEQ ID NO: 907059 - DNA, 33 bp, Homo sapien
actacaaaaccctgatcaaagaaagtgttgatg

SEQ ID NO: 907060 - DNA, 33 bp, Homo sapien
actacaaaaccctgatgaaagaaagtgttgatg

SEQ ID NO: 907061 - DNA, 33 bp, Homo sapien
agagaacccagatataaaaccacatacctgcag

SEQ ID NO: 907062 - DNA, 33 bp, Homo sapien
agagaacccagatatagaaccacatacctgcag

SEQ ID NO: 907063 - DNA, 33 bp, Homo sapien
aaatgtctttaatgtccagctgtatcatcaaag

SEQ ID NO: 907064 - DNA, 33 bp, Homo sapien
aaatgtctttaatgtctagctgtatcatcaaag

SEQ ID NO: 907065 - DNA, 33 bp, Homo sapien
tacccctagctgattaccaggccaggaaaaaat

SEQ ID NO: 907066 - DNA, 33 bp, Homo sapien
tacccctagctgattatcaggccaggaaaaaat

SEQ ID NO: 907067 - DNA, 33 bp, Homo sapien
tgggtgtgtaaccttaagtatatctggtacatc

SEQ ID NO: 907068 - DNA, 33 bp, Homo sapien
tgggtgtgtaaccttaggtatatctggtacatc

SEQ ID NO: 907069 - DNA, 33 bp, Homo sapien
ataaaggaaaaaatgaatcatggatgaaagggt

SEQ ID NO: 907070 - DNA, 33 bp, Homo sapien
ataaaggaaaaaatgagtcatggatgaaagggt

SEQ ID NO: 907071 - DNA, 33 bp, Homo sapien
ttgtaaccccagaccaataggcacaggcttcgg

SEQ ID NO: 907072 - DNA, 33 bp, Homo sapien
ttgtaaccccagaccagtaggcacaggcttcgg

SEQ ID NO: 907073 - DNA, 33 bp, Homo sapien
tgactttagtattggccatgtaactggggagat

SEQ ID NO: 907074 - DNA, 33 bp, Homo sapien
tgactttagtattggctatgtaactggggagat

SEQ ID NO: 907075 - DNA, 33 bp, Homo sapien
ctctatcatctttctacccacaaggatttcaga

SEQ ID NO: 907076 - DNA, 33 bp, Homo sapien
ctctatcatctttctatccacaaggatttcaga

SEQ ID NO: 907077 - DNA, 33 bp, Homo sapien
tgataattactaactacagcccatacttttttc

SEQ ID NO: 907078 - DNA, 33 bp, Homo sapien
tgataattactaactagagcccatacttttttc

SEQ ID NO: 907079 - DNA, 33 bp, Homo sapien
aaaattatctcaaaaaggtaaaaagtctgagaa

SEQ ID NO: 907080 - DNA, 33 bp, Homo sapien
aaaattatctcaaaaatgtaaaaagtctgagaa

SEQ ID NO: 907081 - DNA, 33 bp, Homo sapien
ctacaaatgtatacaccgacttaacagaaaggg

SEQ ID NO: 907082 - DNA, 33 bp, Homo sapien
ctacaaatgtatacactgacttaacagaaaggg

SEQ ID NO: 907083 - DNA, 33 bp, Homo sapien
tagagatgaatttcaaagagccagatactgtat

SEQ ID NO: 907084 - DNA, 33 bp, Homo sapien
tagagatgaatttcaaggagccagatactgtat

SEQ ID NO: 907085 - DNA, 33 bp, Homo sapien
gccatagtgctcaaaactatttatagattcaat

SEQ ID NO: 907086 - DNA, 33 bp, Homo sapien
gccatagtgctcaaaagtatttatagattcaat

SEQ ID NO: 907087 - DNA, 33 bp, Homo sapien
ggagagattaaccctacgaaacactaaggtttg

SEQ ID NO: 907088 - DNA, 33 bp, Homo sapien
ggagagattaaccctatgaaacactaaggtttg

SEQ ID NO: 907089 - DNA, 33 bp, Homo sapien
atatgcaagtctatcaatatctacctttacaat

SEQ ID NO: 907090 - DNA, 33 bp, Homo sapien
atatgcaagtctatcagtatctacctttacaat

SEQ ID NO: 907091 - DNA, 33 bp, Homo sapien
tttgacagctgacactcagaaactgtaatgagt

SEQ ID NO: 907092 - DNA, 33 bp, Homo sapien
tttgacagctgacactgagaaactgtaatgagt

SEQ ID NO: 907093 - DNA, 33 bp, Homo sapien
ggtggaaacgaatagcaatacctactctctttg

SEQ ID NO: 907094 - DNA, 33 bp, Homo sapien
ggtggaaacgaatagcgatacctactctctttg

SEQ ID NO: 907095 - DNA, 33 bp, Homo sapien
agctcctattgttaggcagtttagcaagcatgt

SEQ ID NO: 907096 - DNA, 33 bp, Homo sapien
agctcctattgttagggagtttagcaagcatgt

SEQ ID NO: 907097 - DNA, 33 bp, Homo sapien
catgctaactttggacagaatccatttgaaagt

SEQ ID NO: 907098 - DNA, 33 bp, Homo sapien
catgctaactttggactgaatccatttgaaagt

SEQ ID NO: 907099 - DNA, 33 bp, Homo sapien
ttttcttgctacataaggtgcggatttgtgggg

SEQ ID NO: 907100 - DNA, 33 bp, Homo sapien
ttttcttgctacataatgtgcggatttgtgggg

SEQ ID NO: 907101 - DNA, 33 bp, Homo sapien
gatatctaaatatcctaaaaagtgctaaagaac

SEQ ID NO: 907102 - DNA, 33 bp, Homo sapien
gatatctaaatatcctcaaaagtgctaaagaac

SEQ ID NO: 907103 - DNA, 33 bp, Homo sapien
ataagaatgtttatcacggggcaggctctgcca

SEQ ID NO: 907104 - DNA, 33 bp, Homo sapien
ataagaatgtttatcatggggcaggctctgcca

SEQ ID NO: 907105 - DNA, 33 bp, Homo sapien
ttttcaacactgttagcaaagagagaagtgaaa

SEQ ID NO: 907106 - DNA, 33 bp, Homo sapien
ttttcaacactgttagtaaagagagaagtgaaa

SEQ ID NO: 907107 - DNA, 33 bp, Homo sapien
ttctgaaactttttgaaccttaatgtcctcact

SEQ ID NO: 907108 - DNA, 33 bp, Homo sapien
ttctgaaactttttgagccttaatgtcctcact

SEQ ID NO: 907109 - DNA, 33 bp, Homo sapien
gtcagtggattactaaacataattccatttgca

SEQ ID NO: 907110 - DNA, 33 bp, Homo sapien
gtcagtggattactaaccataattccatttgca

SEQ ID NO: 907111 - DNA, 33 bp, Homo sapien
gttctgctttcaaagaacatggtaaacaaagga

SEQ ID NO: 907112 - DNA, 33 bp, Homo sapien
gttctgctttcaaagaccatggtaaacaaagga

SEQ ID NO: 907113 - DNA, 33 bp, Homo sapien
gggccaatctgacttgaacattatgttttctgc

SEQ ID NO: 907114 - DNA, 33 bp, Homo sapien
gggccaatctgacttgcacattatgttttctgc

SEQ ID NO: 907115 - DNA, 33 bp, Homo sapien
ggtgtggcagattgatcaccagcaacctatgta

SEQ ID NO: 907116 - DNA, 33 bp, Homo sapien
ggtgtggcagattgattaccagcaacctatgta

SEQ ID NO: 907117 - DNA, 33 bp, Homo sapien
ctccagttcttgggtcactttagcagtataagc

SEQ ID NO: 907118 - DNA, 33 bp, Homo sapien
ctccagttcttgggtctctttagcagtataagc

SEQ ID NO: 907119 - DNA, 33 bp, Homo sapien
gaaatctgagacaggcaaatttattttctgctt

SEQ ID NO: 907120 - DNA, 33 bp, Homo sapien
gaaatctgagacaggcgaatttattttctgctt

SEQ ID NO: 907121 - DNA, 33 bp, Homo sapien
gcccagaaatgaactacgcatttacagtcaatg

SEQ ID NO: 907122 - DNA, 33 bp, Homo sapien
gcccagaaatgaactatgcatttacagtcaatg

SEQ ID NO: 907123 - DNA, 33 bp, Homo sapien
ttattgctctagacacaagaataggctgtggga

SEQ ID NO: 907124 - DNA, 33 bp, Homo sapien
ttattgctctagacacgagaataggctgtggga

SEQ ID NO: 907125 - DNA, 33 bp, Homo sapien
aaaatcactgttgacacagaagctttgaaaaga

SEQ ID NO: 907126 - DNA, 33 bp, Homo sapien
aaaatcactgttgacatagaagctttgaaaaga

SEQ ID NO: 907127 - DNA, 33 bp, Homo sapien
cctacagaattcagtcaccatccatatgtctct

SEQ ID NO: 907128 - DNA, 33 bp, Homo sapien
cctacagaattcagtcgccatccatatgtctct

SEQ ID NO: 907129 - DNA, 33 bp, Homo sapien
ctttgtttctggttacacacattgaatgttggc

SEQ ID NO: 907130 - DNA, 33 bp, Homo sapien
ctttgtttctggttacgcacattgaatgttggc

SEQ ID NO: 907131 - DNA, 33 bp, Homo sapien
caactatcttagatcacaagggagctttatcgg

SEQ ID NO: 907132 - DNA, 33 bp, Homo sapien
caactatcttagatcagaagggagctttatcgg

SEQ ID NO: 907133 - DNA, 33 bp, Homo sapien
acaagagcatagacaaagcattaggagacatag

SEQ ID NO: 907134 - DNA, 33 bp, Homo sapien
acaagagcatagacaaggcattaggagacatag

SEQ ID NO: 907135 - DNA, 33 bp, Homo sapien
tcttgacaagcggccacgacatagcagaaagta

SEQ ID NO: 907136 - DNA, 33 bp, Homo sapien
tcttgacaagcggccatgacatagcagaaagta

SEQ ID NO: 907137 - DNA, 33 bp, Homo sapien
atgagttatcaactatcaggtccgttagctctt

SEQ ID NO: 907138 - DNA, 33 bp, Homo sapien
atgagttatcaactattaggtccgttagctctt

SEQ ID NO: 907139 - DNA, 33 bp, Homo sapien
atgaaaatgctaagaaaactaagaaacacagtg

SEQ ID NO: 907140 - DNA, 33 bp, Homo sapien
atgaaaatgctaagaagactaagaaacacagtg

SEQ ID NO: 907141 - DNA, 33 bp, Homo sapien
aaatcattagccaaaccatcataagtcagggtc

SEQ ID NO: 907142 - DNA, 33 bp, Homo sapien
aaatcattagccaaacgatcataagtcagggtc

SEQ ID NO: 907143 - DNA, 33 bp, Homo sapien
tatagaatagtttcacaacctcaaaagtctcct

SEQ ID NO: 907144 - DNA, 33 bp, Homo sapien
tatagaatagtttcaccacctcaaaagtctcct

SEQ ID NO: 907145 - DNA, 33 bp, Homo sapien
gccgggcctagcataaagtttttgagggtcatc

SEQ ID NO: 907146 - DNA, 33 bp, Homo sapien
gccgggcctagcataaggtttttgagggtcatc

SEQ ID NO: 907147 - DNA, 33 bp, Homo sapien
actaaatgccacagaagtatacactttcaaatg

SEQ ID NO: 907148 - DNA, 33 bp, Homo sapien
actaaatgccacagaattatacactttcaaatg

SEQ ID NO: 907149 - DNA, 33 bp, Homo sapien
tccttatcacactacaacttgattaatgttatt

SEQ ID NO: 907150 - DNA, 33 bp, Homo sapien
tccttatcacactacaccttgattaatgttatt

SEQ ID NO: 907151 - DNA, 33 bp, Homo sapien
agtgaaagacgacacaaaagagactatatgatg

SEQ ID NO: 907152 - DNA, 33 bp, Homo sapien
agtgaaagacgacacacaagagactatatgatg

SEQ ID NO: 907153 - DNA, 33 bp, Homo sapien
actcatgtttgcccacaaatgagagaacacatt

SEQ ID NO: 907154 - DNA, 33 bp, Homo sapien
actcatgtttgcccacgaatgagagaacacatt

SEQ ID NO: 907155 - DNA, 33 bp, Homo sapien
gttgagacttgactaacgttacccagctaataa

SEQ ID NO: 907156 - DNA, 33 bp, Homo sapien
gttgagacttgactaaggttacccagctaataa

SEQ ID NO: 907157 - DNA, 33 bp, Homo sapien
tgcctagaaatgttcccgatactaacaaaaatg

SEQ ID NO: 907158 - DNA, 33 bp, Homo sapien
tgcctagaaatgttcctgatactaacaaaaatg

SEQ ID NO: 907159 - DNA, 33 bp, Homo sapien
aaaacaagccatcaacaacagtggagtctatta

SEQ ID NO: 907160 - DNA, 33 bp, Homo sapien
aaaacaagccatcaaccacagtggagtctatta

SEQ ID NO: 907161 - DNA, 33 bp, Homo sapien
gttacctgttgaacccactggggtaccaatcct

SEQ ID NO: 907162 - DNA, 33 bp, Homo sapien
gttacctgttgaacccgctggggtaccaatcct

SEQ ID NO: 907163 - DNA, 33 bp, Homo sapien
cacattctagactggcagaactgaactacaacg

SEQ ID NO: 907164 - DNA, 33 bp, Homo sapien
cacattctagactggccgaactgaactacaacg

SEQ ID NO: 907165 - DNA, 33 bp, Homo sapien
gtggccatcctggggcaccaaacagagccctgt

SEQ ID NO: 907166 - DNA, 33 bp, Homo sapien
gtggccatcctggggcgccaaacagagccctgt

SEQ ID NO: 907167 - DNA, 33 bp, Homo sapien
acacagccggagtctaaaaggatctgagtggcc

SEQ ID NO: 907168 - DNA, 33 bp, Homo sapien
acacagccggagtctacaaggatctgagtggcc

SEQ ID NO: 907169 - DNA, 33 bp, Homo sapien
taccttcgaccacgtacctgtacatatccagat

SEQ ID NO: 907170 - DNA, 33 bp, Homo sapien
taccttcgaccacgtagctgtacatatccagat

SEQ ID NO: 907171 - DNA, 33 bp, Homo sapien
catattttcccatgaacgtatgtttaataattt

SEQ ID NO: 907172 - DNA, 33 bp, Homo sapien
catattttcccatgaatgtatgtttaataattt

SEQ ID NO: 907173 - DNA, 33 bp, Homo sapien
ctctgcctaattctcaatcagtgcttcttacat

SEQ ID NO: 907174 - DNA, 33 bp, Homo sapien
ctctgcctaattctcagtcagtgcttcttacat

SEQ ID NO: 907175 - DNA, 33 bp, Homo sapien
gaaaggattaaattagaatcaacaacagaagga

SEQ ID NO: 907176 - DNA, 33 bp, Homo sapien
gaaaggattaaattaggatcaacaacagaagga

SEQ ID NO: 907177 - DNA, 33 bp, Homo sapien
aactgtgaaaccacagactcttgttgtaattgt

SEQ ID NO: 907178 - DNA, 33 bp, Homo sapien
aactgtgaaaccacaggctcttgttgtaattgt

SEQ ID NO: 907179 - DNA, 33 bp, Homo sapien
aatagagatctgagtacgactgaaaaaattaca

SEQ ID NO: 907180 - DNA, 33 bp, Homo sapien
aatagagatctgagtatgactgaaaaaattaca

SEQ ID NO: 907181 - DNA, 33 bp, Homo sapien
ggttctcttccttttcaaagtctccaggaagaa

SEQ ID NO: 907182 - DNA, 33 bp, Homo sapien
ggttctcttccttttcgaagtctccaggaagaa

SEQ ID NO: 907183 - DNA, 33 bp, Homo sapien
catcatacattaagaaatccatgctggaaacaa

SEQ ID NO: 907184 - DNA, 33 bp, Homo sapien
catcatacattaagaagtccatgctggaaacaa

SEQ ID NO: 907185 - DNA, 33 bp, Homo sapien
cttaaaacagaagagggatctttcactttgagt

SEQ ID NO: 907186 - DNA, 33 bp, Homo sapien
cttaaaacagaagaggtatctttcactttgagt

SEQ ID NO: 907187 - DNA, 33 bp, Homo sapien
tttaggaaaacatgatctgatcctagaaatcat

SEQ ID NO: 907188 - DNA, 33 bp, Homo sapien
tttaggaaaacatgatttgatcctagaaatcat

SEQ ID NO: 907189 - DNA, 33 bp, Homo sapien
tgagcagacctttccacgttgcggtccaaacac

SEQ ID NO: 907190 - DNA, 33 bp, Homo sapien
tgagcagacctttccatgttgcggtccaaacac

SEQ ID NO: 907191 - DNA, 33 bp, Homo sapien
ttgatagtaataatcacaagcattgttgttgaa

SEQ ID NO: 907192 - DNA, 33 bp, Homo sapien
ttgatagtaataatcataagcattgttgttgaa

SEQ ID NO: 907193 - DNA, 33 bp, Homo sapien
ctccaacctgcatgtcgccacttcctctgtggt

SEQ ID NO: 907194 - DNA, 33 bp, Homo sapien
ctccaacctgcatgtctccacttcctctgtggt

SEQ ID NO: 907195 - DNA, 33 bp, Homo sapien
ggctaggccatgcacaaatcagatttctagcaa

SEQ ID NO: 907196 - DNA, 33 bp, Homo sapien
ggctaggccatgcacagatcagatttctagcaa

SEQ ID NO: 907197 - DNA, 33 bp, Homo sapien
gacaactgttgagacacgcagaggcctactaga

SEQ ID NO: 907198 - DNA, 33 bp, Homo sapien
gacaactgttgagacatgcagaggcctactaga

SEQ ID NO: 907199 - DNA, 33 bp, Homo sapien
tgatgctcgaaaacaccgtaaggctgacaacaa

SEQ ID NO: 907200 - DNA, 33 bp, Homo sapien
tgatgctcgaaaacactgtaaggctgacaacaa

SEQ ID NO: 907201 - DNA, 33 bp, Homo sapien
ttcttaggaaacagcacctattaatgttacaca

SEQ ID NO: 907202 - DNA, 33 bp, Homo sapien
ttcttaggaaacagcatctattaatgttacaca

SEQ ID NO: 907203 - DNA, 33 bp, Homo sapien
tgtttgaggaagtgcaactatcggaaggtgaaa

SEQ ID NO: 907204 - DNA, 33 bp, Homo sapien
tgtttgaggaagtgcagctatcggaaggtgaaa

SEQ ID NO: 907205 - DNA, 33 bp, Homo sapien
tcaaatttgtgttcaactagaaactttaaagcc

SEQ ID NO: 907206 - DNA, 33 bp, Homo sapien
tcaaatttgtgttcaattagaaactttaaagcc

SEQ ID NO: 907207 - DNA, 33 bp, Homo sapien
ttcttagcagaagacaatccgaagccagcatga

SEQ ID NO: 907208 - DNA, 33 bp, Homo sapien
ttcttagcagaagacactccgaagccagcatga

SEQ ID NO: 907209 - DNA, 33 bp, Homo sapien
tacagcccaaactcaactcaagttttaattcat

SEQ ID NO: 907210 - DNA, 33 bp, Homo sapien
tacagcccaaactcaagtcaagttttaattcat

SEQ ID NO: 907211 - DNA, 33 bp, Homo sapien
ctgcaaaaaaagatgacacagaaaagaaggcat

SEQ ID NO: 907212 - DNA, 33 bp, Homo sapien
ctgcaaaaaaagatgatacagaaaagaaggcat

SEQ ID NO: 907213 - DNA, 33 bp, Homo sapien
atacctacatttcagaggacaaatcatgttatt

SEQ ID NO: 907214 - DNA, 33 bp, Homo sapien
atacctacatttcagatgacaaatcatgttatt

SEQ ID NO: 907215 - DNA, 33 bp, Homo sapien
gcactgcattgttggcaagaaattccttttaag

SEQ ID NO: 907216 - DNA, 33 bp, Homo sapien
gcactgcattgttggccagaaattccttttaag

SEQ ID NO: 907217 - DNA, 33 bp, Homo sapien
ctcttactagtaaaaaaccttgacataatacaa

SEQ ID NO: 907218 - DNA, 33 bp, Homo sapien
ctcttactagtaaaaacccttgacataatacaa

SEQ ID NO: 907219 - DNA, 33 bp, Homo sapien
ttctttgacagcggccaatgatgtggctgcagc

SEQ ID NO: 907220 - DNA, 33 bp, Homo sapien
ttctttgacagcggccgatgatgtggctgcagc

SEQ ID NO: 907221 - DNA, 33 bp, Homo sapien
aggcctctgacttctcaaagaaagtgaaatgaa

SEQ ID NO: 907222 - DNA, 33 bp, Homo sapien
aggcctctgacttctcgaagaaagtgaaatgaa

SEQ ID NO: 907223 - DNA, 33 bp, Homo sapien
aaattggtataatcctgagaaaatacacttggc

SEQ ID NO: 907224 - DNA, 33 bp, Homo sapien
aaattggtataatccttagaaaatacacttggc

SEQ ID NO: 907225 - DNA, 33 bp, Homo sapien
gttaacactgctgacaactaggttatgaaacta

SEQ ID NO: 907226 - DNA, 33 bp, Homo sapien
gttaacactgctgacatctaggttatgaaacta

SEQ ID NO: 907227 - DNA, 33 bp, Homo sapien
aatttaagccacaataacacttataataactcc

SEQ ID NO: 907228 - DNA, 33 bp, Homo sapien
aatttaagccacaataccacttataataactcc

SEQ ID NO: 907229 - DNA, 33 bp, Homo sapien
cctgtgtatgccatggaaatttacaccattaga

SEQ ID NO: 907230 - DNA, 33 bp, Homo sapien
cctgtgtatgccatgggaatttacaccattaga

SEQ ID NO: 907231 - DNA, 33 bp, Homo sapien
tcagtaatgtgtgtgacctctagactaaaagcc

SEQ ID NO: 907232 - DNA, 33 bp, Homo sapien
tcagtaatgtgtgtgatctctagactaaaagcc

SEQ ID NO: 907233 - DNA, 33 bp, Homo sapien
ttcacattcactaagacggctagtgtaaaaaac

SEQ ID NO: 907234 - DNA, 33 bp, Homo sapien
ttcacattcactaagatggctagtgtaaaaaac

SEQ ID NO: 907235 - DNA, 33 bp, Homo sapien
agctcccatagccagaactgacagatgagtatg

SEQ ID NO: 907236 - DNA, 33 bp, Homo sapien
agctcccatagccagagctgacagatgagtatg

SEQ ID NO: 907237 - DNA, 33 bp, Homo sapien
ccaggccatgagaaatcatcttggggcctctca

SEQ ID NO: 907238 - DNA, 33 bp, Homo sapien
ccaggccatgagaaattatcttggggcctctca

SEQ ID NO: 907239 - DNA, 33 bp, Homo sapien
tggaagaattgtaaaaattaatcttgcgaaaga

SEQ ID NO: 907240 - DNA, 33 bp, Homo sapien
tggaagaattgtaaaacttaatcttgcgaaaga

SEQ ID NO: 907241 - DNA, 33 bp, Homo sapien
tttgtggctgattataaaccatcctttgaagag

SEQ ID NO: 907242 - DNA, 33 bp, Homo sapien
tttgtggctgattatagaccatcctttgaagag

SEQ ID NO: 907243 - DNA, 33 bp, Homo sapien
taaaatgaaccgattggcaactggattgaaaag

SEQ ID NO: 907244 - DNA, 33 bp, Homo sapien
taaaatgaaccgattgtcaactggattgaaaag

SEQ ID NO: 907245 - DNA, 33 bp, Homo sapien
gtcagggccttcctccaaaattctaaaggcctg

SEQ ID NO: 907246 - DNA, 33 bp, Homo sapien
gtcagggccttcctccgaaattctaaaggcctg

SEQ ID NO: 907247 - DNA, 33 bp, Homo sapien
tccgatggtggttgaaatatcagtggctgataa

SEQ ID NO: 907248 - DNA, 33 bp, Homo sapien
tccgatggtggttgaagtatcagtggctgataa

SEQ ID NO: 907249 - DNA, 33 bp, Homo sapien
tcataaggaatacacaatctagatccctcacat

SEQ ID NO: 907250 - DNA, 33 bp, Homo sapien
tcataaggaatacacagtctagatccctcacat

SEQ ID NO: 907251 - DNA, 33 bp, Homo sapien
gtagcctctagtactacgataaacagtaaacaa

SEQ ID NO: 907252 - DNA, 33 bp, Homo sapien
gtagcctctagtactaggataaacagtaaacaa

SEQ ID NO: 907253 - DNA, 33 bp, Homo sapien
atgttttggtcaacaaaaaacggcatatacaat

SEQ ID NO: 907254 - DNA, 33 bp, Homo sapien
atgttttggtcaacaacaaacggcatatacaat

SEQ ID NO: 907255 - DNA, 33 bp, Homo sapien
agttctaatgctcaaccacttctgttcttgtgt

SEQ ID NO: 907256 - DNA, 33 bp, Homo sapien
agttctaatgctcaacgacttctgttcttgtgt

SEQ ID NO: 907257 - DNA, 33 bp, Homo sapien
ttctgttcttgtgtatcacttacagccttaatt

SEQ ID NO: 907258 - DNA, 33 bp, Homo sapien
ttctgttcttgtgtatgacttacagccttaatt

SEQ ID NO: 907259 - DNA, 33 bp, Homo sapien; identical to SEQ ID NO: 907257

SEQ ID NO: 907260 - DNA, 33 bp, Homo sapien; identical to SEQ ID NO: 907258

SEQ ID NO: 907261 - DNA, 33 bp, Homo sapien
agggggcattttattacagattgtatactacta

SEQ ID NO: 907262 - DNA, 33 bp, Homo sapien
agggggcattttattatagattgtatactacta

SEQ ID NO: 907263 - DNA, 33 bp, Homo sapien
taataacaaaactctacggagaaacgcccagaa

SEQ ID NO: 907264 - DNA, 33 bp, Homo sapien
taataacaaaactctatggagaaacgcccagaa

SEQ ID NO: 907265 - DNA, 33 bp, Homo sapien
aagatcacttcacttcacctaacccagtcagtg

SEQ ID NO: 907266 - DNA, 33 bp, Homo sapien
aagatcacttcacttcgcctaacccagtcagtg

SEQ ID NO: 907267 - DNA, 33 bp, Homo sapien
ctggctgagcagtgtccgaaactcctgtaatag

SEQ ID NO: 907268 - DNA, 33 bp, Homo sapien
ctggctgagcagtgtctgaaactcctgtaatag

SEQ ID NO: 907269 - DNA, 33 bp, Homo sapien
ttttaagctctaatcacgtttggtgtctttaca

SEQ ID NO: 907270 - DNA, 33 bp, Homo sapien
ttttaagctctaatcatgtttggtgtctttaca

SEQ ID NO: 907271 - DNA, 33 bp, Homo sapien
cttattggagccaaaaaatgtacgttcaagtac

SEQ ID NO: 907272 - DNA, 33 bp, Homo sapien
cttattggagccaaaacatgtacgttcaagtac

SEQ ID NO: 907273 - DNA, 33 bp, Homo sapien
tgaatggctccaaataagatagataccacaaaa

SEQ ID NO: 907274 - DNA, 33 bp, Homo sapien
tgaatggctccaaataggatagataccacaaaa

SEQ ID NO: 907275 - DNA, 33 bp, Homo sapien
tatgtgagccgaattacaatagtgcagaatcac

SEQ ID NO: 907276 - DNA, 33 bp, Homo sapien
tatgtgagccgaattataatagtgcagaatcac

SEQ ID NO: 907277 - DNA, 33 bp, Homo sapien
catgatgaggttgtaaaggagtaactttcagag

SEQ ID NO: 907278 - DNA, 33 bp, Homo sapien
catgatgaggttgtaagggagtaactttcagag

SEQ ID NO: 907279 - DNA, 33 bp, Homo sapien
atttcttctctcttacacttttgggattccaaa

SEQ ID NO: 907280 - DNA, 33 bp, Homo sapien
atttcttctctcttacgcttttgggattccaaa

SEQ ID NO: 907281 - DNA, 33 bp, Homo sapien
acacaagctaagatacaatttttatatccactg

SEQ ID NO: 907282 - DNA, 33 bp, Homo sapien
acacaagctaagatacgatttttatatccactg

SEQ ID NO: 907283 - DNA, 33 bp, Homo sapien
ggggatgcctcagggacatatcagaaataaaca

SEQ ID NO: 907284 - DNA, 33 bp, Homo sapien
ggggatgcctcagggagatatcagaaataaaca

SEQ ID NO: 907285 - DNA, 33 bp, Homo sapien
tgtgcagcagagaatgcaaggggatgcctcagg

SEQ ID NO: 907286 - DNA, 33 bp, Homo sapien
tgtgcagcagagaatgtaaggggatgcctcagg

SEQ ID NO: 907287 - DNA, 33 bp, Homo sapien
tatggttccaaacaaaaaagccaaaggtgacag

SEQ ID NO: 907288 - DNA, 33 bp, Homo sapien
tatggttccaaacaaacaagccaaaggtgacag

SEQ ID NO: 907289 - DNA, 33 bp, Homo sapien
ttcatatttaacaagacctgacaaaatatggca

SEQ ID NO: 907290 - DNA, 33 bp, Homo sapien
ttcatatttaacaagatctgacaaaatatggca

SEQ ID NO: 907291 - DNA, 33 bp, Homo sapien
caccagcaagaaaataaccactagaaagtgaag

SEQ ID NO: 907292 - DNA, 33 bp, Homo sapien
caccagcaagaaaatagccactagaaagtgaag

SEQ ID NO: 907293 - DNA, 33 bp, Homo sapien
atgataaatttgagtacctggaaatgaaaacat

SEQ ID NO: 907294 - DNA, 33 bp, Homo sapien
atgataaatttgagtatctggaaatgaaaacat

SEQ ID NO: 907295 - DNA, 33 bp, Homo sapien
cacaagtgagtttgtaagaatataatcagaaag

SEQ ID NO: 907296 - DNA, 33 bp, Homo sapien
cacaagtgagtttgtaggaatataatcagaaag

SEQ ID NO: 907297 - DNA, 33 bp, Homo sapien
tggtgacacaatgacaaaaattgttcctaactg

SEQ ID NO: 907298 - DNA, 33 bp, Homo sapien
tggtgacacaatgacacaaattgttcctaactg

SEQ ID NO: 907299 - DNA, 33 bp, Homo sapien
taccattaaagccagcacaatcaaattgattca

SEQ ID NO: 907300 - DNA, 33 bp, Homo sapien
taccattaaagccagcgcaatcaaattgattca

SEQ ID NO: 907301 - DNA, 33 bp, Homo sapien
gtaaaaccagcgggaaggtaagtgcagcattca

SEQ ID NO: 907302 - DNA, 33 bp, Homo sapien
gtaaaaccagcgggaatgtaagtgcagcattca

SEQ ID NO: 907303 - DNA, 33 bp, Homo sapien
cactgcaattcctgtaaacactgccaccgaatg

SEQ ID NO: 907304 - DNA, 33 bp, Homo sapien
cactgcaattcctgtagacactgccaccgaatg

SEQ ID NO: 907305 - DNA, 33 bp, Homo sapien
ggaacagtaagaagacaagaacggggcagggat

SEQ ID NO: 907306 - DNA, 33 bp, Homo sapien
ggaacagtaagaagacgagaacggggcagggat

SEQ ID NO: 907307 - DNA, 33 bp, Homo sapien
tgacagttaatgagcacgttataatttctggtg

SEQ ID NO: 907308 - DNA, 33 bp, Homo sapien
tgacagttaatgagcatgttataatttctggtg

SEQ ID NO: 907309 - DNA, 33 bp, Homo sapien
ctgtcattgattttgacgattatttttagatgg

SEQ ID NO: 907310 - DNA, 33 bp, Homo sapien
ctgtcattgattttgatgattatttttagatgg

SEQ ID NO: 907311 - DNA, 33 bp, Homo sapien
gttgtgggttgtgttaagagcaaaaatgaacag

SEQ ID NO: 907312 - DNA, 33 bp, Homo sapien
gttgtgggttgtgttacgagcaaaaatgaacag

SEQ ID NO: 907313 - DNA, 33 bp, Homo sapien
aatttaaagcaaaatgcaggagatattagtcca

SEQ ID NO: 907314 - DNA, 33 bp, Homo sapien
aatttaaagcaaaatgtaggagatattagtcca

SEQ ID NO: 907315 - DNA, 33 bp, Homo sapien
tatgaatcacaaaaaccgttataattgcagaag

SEQ ID NO: 907316 - DNA, 33 bp, Homo sapien
tatgaatcacaaaaactgttataattgcagaag

SEQ ID NO: 907317 - DNA, 33 bp, Homo sapien
aaccttgtaacgtcctgagataaaagattataa

SEQ ID NO: 907318 - DNA, 33 bp, Homo sapien
aaccttgtaacgtccttagataaaagattataa

SEQ ID NO: 907319 - DNA, 33 bp, Homo sapien
agcagaaagtgggagacggaggaagagtagtaa

SEQ ID NO: 907320 - DNA, 33 bp, Homo sapien
agcagaaagtgggagatggaggaagagtagtaa

SEQ ID NO: 907321 - DNA, 33 bp, Homo sapien
tgtactccctagttccaaataagccaggatttt

SEQ ID NO: 907322 - DNA, 33 bp, Homo sapien
tgtactccctagttcctaataagccaggatttt

SEQ ID NO: 907323 - DNA, 33 bp, Homo sapien
tcagttgcataataaactgccaaatatttgaaa

SEQ ID NO: 907324 - DNA, 33 bp, Homo sapien
tcagttgcataataaattgccaaatatttgaaa

SEQ ID NO: 907325 - DNA, 33 bp, Homo sapien
tactaactcatgtcaccgtcccaggaaccctgt

SEQ ID NO: 907326 - DNA, 33 bp, Homo sapien
tactaactcatgtcacggtcccaggaaccctgt

SEQ ID NO: 907327 - DNA, 33 bp, Homo sapien
aataaaaggtgaaatacacagagatagtgaata

SEQ ID NO: 907328 - DNA, 33 bp, Homo sapien
aataaaaggtgaaatatacagagatagtgaata

SEQ ID NO: 907329 - DNA, 33 bp, Homo sapien
ggccaatgtcaagacacattttgaaatgttata

SEQ ID NO: 907330 - DNA, 33 bp, Homo sapien
ggccaatgtcaagacatattttgaaatgttata

SEQ ID NO: 907331 - DNA, 33 bp, Homo sapien
tgagtctaaatgatcaatacaaggatgtattta

SEQ ID NO: 907332 - DNA, 33 bp, Homo sapien
tgagtctaaatgatcagtacaaggatgtattta

SEQ ID NO: 907333 - DNA, 33 bp, Homo sapien
cagactttcacatccaaattcaggcccatagct

SEQ ID NO: 907334 - DNA, 33 bp, Homo sapien
cagactttcacatccagattcaggcccatagct

SEQ ID NO: 907335 - DNA, 33 bp, Homo sapien
gatgcccgtgtgaagacgacttcttagaaataa

SEQ ID NO: 907336 - DNA, 33 bp, Homo sapien
gatgcccgtgtgaagatgacttcttagaaataa

SEQ ID NO: 907337 - DNA, 33 bp, Homo sapien
tgcactgaagtggtgccatgtgaaacctctagg

SEQ ID NO: 907338 - DNA, 33 bp, Homo sapien
tgcactgaagtggtgcgatgtgaaacctctagg

SEQ ID NO: 907339 - DNA, 33 bp, Homo sapien
ttccgcgtgcccagaacggctgctcctctcctc

SEQ ID NO: 907340 - DNA, 33 bp, Homo sapien
ttccgcgtgcccagaatggctgctcctctcctc

SEQ ID NO: 907341 - DNA, 33 bp, Homo sapien
tcagagttgctgctccaggagaggttaggacac

SEQ ID NO: 907342 - DNA, 33 bp, Homo sapien
tcagagttgctgctccgggagaggttaggacac

SEQ ID NO: 907343 - DNA, 33 bp, Homo sapien
gggatttatctctgcaacaagaaaacatcacat

SEQ ID NO: 907344 - DNA, 33 bp, Homo sapien
gggatttatctctgcagcaagaaaacatcacat

SEQ ID NO: 907345 - DNA, 33 bp, Homo sapien
tttgaattaaaatagcaaaaaaccagcttcata

SEQ ID NO: 907346 - DNA, 33 bp, Homo sapien
tttgaattaaaatagcgaaaaaccagcttcata

SEQ ID NO: 907347 - DNA, 33 bp, Homo sapien
ataatttagaaagcgaaaacttcaattcacaga

SEQ ID NO: 907348 - DNA, 33 bp, Homo sapien
ataatttagaaagcgacaacttcaattcacaga

SEQ ID NO: 907349 - DNA, 33 bp, Homo sapien
tgtccatagatttagccatccagttttgccttc

SEQ ID NO: 907350 - DNA, 33 bp, Homo sapien
tgtccatagatttagcgatccagttttgccttc

SEQ ID NO: 907351 - DNA, 33 bp, Homo sapien
atatttgtatcaaatgacacccaactcaacaaa

SEQ ID NO: 907352 - DNA, 33 bp, Homo sapien
atatttgtatcaaatggcacccaactcaacaaa

SEQ ID NO: 907353 - DNA, 33 bp, Homo sapien
atcaatggtctggaaaactttcctgatataact

SEQ ID NO: 907354 - DNA, 33 bp, Homo sapien
atcaatggtctggaaacctttcctgatataact

SEQ ID NO: 907355 - DNA, 33 bp, Homo sapien
atactttgcaaataaaatctacccaaattcctc

SEQ ID NO: 907356 - DNA, 33 bp, Homo sapien
atactttgcaaataaagtctacccaaattcctc

SEQ ID NO: 907357 - DNA, 33 bp, Homo sapien
catgtagctccatagaaacacaaggtaatttat

SEQ ID NO: 907358 - DNA, 33 bp, Homo sapien
catgtagctccatagagacacaaggtaatttat

SEQ ID NO: 907359 - DNA, 33 bp, Homo sapien
gcagattttcttagtccgaagcaatgacatgac

SEQ ID NO: 907360 - DNA, 33 bp, Homo sapien
gcagattttcttagtctgaagcaatgacatgac

SEQ ID NO: 907361 - DNA, 33 bp, Homo sapien
ttctggtatagaaaaactgtaatgttccaacac

SEQ ID NO: 907362 - DNA, 33 bp, Homo sapien
ttctggtatagaaaaattgtaatgttccaacac

SEQ ID NO: 907363 - DNA, 33 bp, Homo sapien
cacaacagtttttgacacctgtgttgactcaat

SEQ ID NO: 907364 - DNA, 33 bp, Homo sapien
cacaacagtttttgactcctgtgttgactcaat

SEQ ID NO: 907365 - DNA, 33 bp, Homo sapien
ctgtgttgactcaatgaagtcaatagaagttca

SEQ ID NO: 907366 - DNA, 33 bp, Homo sapien
ctgtgttgactcaatgtagtcaatagaagttca

SEQ ID NO: 907367 - DNA, 33 bp, Homo sapien
ccatcagttctccataaaagattaccttccgca

SEQ ID NO: 907368 - DNA, 33 bp, Homo sapien
ccatcagttctccatacaagattaccttccgca

SEQ ID NO: 907369 - DNA, 33 bp, Homo sapien
ctcatgggagaattcaatgaaaggcaaccatcc

SEQ ID NO: 907370 - DNA, 33 bp, Homo sapien
ctcatgggagaattcagtgaaaggcaaccatcc

SEQ ID NO: 907371 - DNA, 33 bp, Homo sapien
tagtggcagcgatgggccaggcaatgtgataat

SEQ ID NO: 907372 - DNA, 33 bp, Homo sapien
tagtggcagcgatgggtcaggcaatgtgataat

SEQ ID NO: 907373 - DNA, 33 bp, Homo sapien
gcatcgggctggacaaagaagatgaggaagttg

SEQ ID NO: 907374 - DNA, 33 bp, Homo sapien
gcatcgggctggacaaggaagatgaggaagttg

SEQ ID NO: 907375 - DNA, 33 bp, Homo sapien
aggtcttcttttacaaactgcattcttgcttca

SEQ ID NO: 907376 - DNA, 33 bp, Homo sapien
aggtcttcttttacaacctgcattcttgcttca

SEQ ID NO: 907377 - DNA, 33 bp, Homo sapien
ctctcatcttctactgacactgtggaaaggtgc

SEQ ID NO: 907378 - DNA, 33 bp, Homo sapien
ctctcatcttctactggcactgtggaaaggtgc

SEQ ID NO: 907379 - DNA, 33 bp, Homo sapien
tatcacttcatacccactagaataatcaaaatt

SEQ ID NO: 907380 - DNA, 33 bp, Homo sapien
tatcacttcatacccattagaataatcaaaatt

SEQ ID NO: 907381 - DNA, 33 bp, Homo sapien
atgtcacggaagagaaaaattcaggaatcaaat

SEQ ID NO: 907382 - DNA, 33 bp, Homo sapien
atgtcacggaagagaagaattcaggaatcaaat

SEQ ID NO: 907383 - DNA, 33 bp, Homo sapien
tgtgtggataaaatgaagactatatatgtgtat

SEQ ID NO: 907384 - DNA, 33 bp, Homo sapien
tgtgtggataaaatgatgactatatatgtgtat

SEQ ID NO: 907385 - DNA, 33 bp, Homo sapien
cattttacagtattccacctcaagatcccataa

SEQ ID NO: 907386 - DNA, 33 bp, Homo sapien
cattttacagtattccgcctcaagatcccataa

SEQ ID NO: 907387 - DNA, 33 bp, Homo sapien
cgagactctcaagagcaaagtagcattgcacag

SEQ ID NO: 907388 - DNA, 33 bp, Homo sapien
cgagactctcaagagccaagtagcattgcacag

SEQ ID NO: 907389 - DNA, 33 bp, Homo sapien
ttcagtcttccccttccctcaagagcagccatt

SEQ ID NO: 907390 - DNA, 33 bp, Homo sapien
ttcagtcttccccttcgctcaagagcagccatt

SEQ ID NO: 907391 - DNA, 33 bp, Homo sapien
gcaagtgtggtttagacctgtgcaaacacacat

SEQ ID NO: 907392 - DNA, 33 bp, Homo sapien
gcaagtgtggtttagagctgtgcaaacacacat

SEQ ID NO: 907393 - DNA, 33 bp, Homo sapien
gatatgggaaatgtataagctccaattttaaaa

SEQ ID NO: 907394 - DNA, 33 bp, Homo sapien
gatatgggaaatgtatcagctccaattttaaaa

SEQ ID NO: 907395 - DNA, 33 bp, Homo sapien
ttgtgctcattctatgaaaaaacagtcaatcta

SEQ ID NO: 907396 - DNA, 33 bp, Homo sapien
ttgtgctcattctatggaaaaacagtcaatcta

SEQ ID NO: 907397 - DNA, 33 bp, Homo sapien
ttcaggaaaactaccacctggatgaaatcgaag

SEQ ID NO: 907398 - DNA, 33 bp, Homo sapien
ttcaggaaaactaccatctggatgaaatcgaag

SEQ ID NO: 907399 - DNA, 33 bp, Homo sapien
aacagaccatatctgtaaagtggaagcaagaga

SEQ ID NO: 907400 - DNA, 33 bp, Homo sapien
aacagaccatatctgtgaagtggaagcaagaga

SEQ ID NO: 907401 - DNA, 33 bp, Homo sapien
ttgtcagaaggaagtcacaaagcccaagcactc

SEQ ID NO: 907402 - DNA, 33 bp, Homo sapien
ttgtcagaaggaagtcgcaaagcccaagcactc

SEQ ID NO: 907403 - DNA, 33 bp, Homo sapien
gcttcttgatgacccaaaaaactgtttgacatg

SEQ ID NO: 907404 - DNA, 33 bp, Homo sapien
gcttcttgatgacccacaaaactgtttgacatg

SEQ ID NO: 907405 - DNA, 33 bp, Homo sapien
tggctgtcctgtaacccgaatctggaagcattc

SEQ ID NO: 907406 - DNA, 33 bp, Homo sapien
tggctgtcctgtaacctgaatctggaagcattc

SEQ ID NO: 907407 - DNA, 33 bp, Homo sapien
ggcaaagggaagaataaaagcatcaatggcttg

SEQ ID NO: 907408 - DNA, 33 bp, Homo sapien
ggcaaagggaagaatagaagcatcaatggcttg

SEQ ID NO: 907409 - DNA, 33 bp, Homo sapien
acaatttcaggcaagacctaaaagaagcgatag

SEQ ID NO: 907410 - DNA, 33 bp, Homo sapien
acaatttcaggcaagagctaaaagaagcgatag

SEQ ID NO: 907411 - DNA, 33 bp, Homo sapien
agttctgactctttacgagatgcccctgtacat

SEQ ID NO: 907412 - DNA, 33 bp, Homo sapien
agttctgactctttactagatgcccctgtacat

SEQ ID NO: 907413 - DNA, 33 bp, Homo sapien
caatgtgcattaagtcactactattttcactgc

SEQ ID NO: 907414 - DNA, 33 bp, Homo sapien
caatgtgcattaagtcgctactattttcactgc

SEQ ID NO: 907415 - DNA, 33 bp, Homo sapien
ttttaaaacataagcacgaatgccctcaatgtg

SEQ ID NO: 907416 - DNA, 33 bp, Homo sapien
ttttaaaacataagcatgaatgccctcaatgtg

SEQ ID NO: 907417 - DNA, 33 bp, Homo sapien
aatacagaaaacagaaacacacttggctccctg

SEQ ID NO: 907418 - DNA, 33 bp, Homo sapien
aatacagaaaacagaagcacacttggctccctg

SEQ ID NO: 907419 - DNA, 33 bp, Homo sapien
ctgatagttctagaagcccattctgttattttt

SEQ ID NO: 907420 - DNA, 33 bp, Homo sapien
ctgatagttctagaaggccattctgttattttt

SEQ ID NO: 907421 - DNA, 33 bp, Homo sapien
taacaagttcactctacggtccagatggctgag

SEQ ID NO: 907422 - DNA, 33 bp, Homo sapien
taacaagttcactctatggtccagatggctgag

SEQ ID NO: 907423 - DNA, 33 bp, Homo sapien
cctcctgctgtttataaattgcaacatccctgg

SEQ ID NO: 907424 - DNA, 33 bp, Homo sapien
cctcctgctgtttatagattgcaacatccctgg

SEQ ID NO: 907425 - DNA, 33 bp, Homo sapien
agatcattttgaaaaccgcccgattcaaatata

SEQ ID NO: 907426 - DNA, 33 bp, Homo sapien
agatcattttgaaaactgcccgattcaaatata

SEQ ID NO: 907427 - DNA, 33 bp, Homo sapien
ggtgtcaacctaagaacgagtgtctgtgttttc

SEQ ID NO: 907428 - DNA, 33 bp, Homo sapien
ggtgtcaacctaagaatgagtgtctgtgttttc

SEQ ID NO: 907429 - DNA, 33 bp, Homo sapien
tatattgttcataaaccgagcttatggaaaagc

SEQ ID NO: 907430 - DNA, 33 bp, Homo sapien
tatattgttcataaactgagcttatggaaaagc

SEQ ID NO: 907431 - DNA, 33 bp, Homo sapien
ttatccatgcaatcacacataaacttctaccta

SEQ ID NO: 907432 - DNA, 33 bp, Homo sapien
ttatccatgcaatcacgcataaacttctaccta

SEQ ID NO: 907433 - DNA, 33 bp, Homo sapien
actcgttctgcattagacagacttgcccacctg

SEQ ID NO: 907434 - DNA, 33 bp, Homo sapien
actcgttctgcattagtcagacttgcccacctg

SEQ ID NO: 907435 - DNA, 33 bp, Homo sapien
gactgggagagctctgaaaaatatcagggagcc

SEQ ID NO: 907436 - DNA, 33 bp, Homo sapien
gactgggagagctctgcaaaatatcagggagcc

SEQ ID NO: 907437 - DNA, 33 bp, Homo sapien
tgcttcccatagttccaattcaccgagttgcca

SEQ ID NO: 907438 - DNA, 33 bp, Homo sapien
tgcttcccatagttccgattcaccgagttgcca

SEQ ID NO: 907439 - DNA, 33 bp, Homo sapien
acaaaatacagaaaccactggcactctcccaca

SEQ ID NO: 907440 - DNA, 33 bp, Homo sapien
acaaaatacagaaaccgctggcactctcccaca

SEQ ID NO: 907441 - DNA, 33 bp, Homo sapien
aacagctgatatgaaagatttgtcctggaatca

SEQ ID NO: 907442 - DNA, 33 bp, Homo sapien
aacagctgatatgaaatatttgtcctggaatca

SEQ ID NO: 907443 - DNA, 33 bp, Homo sapien
ggaaataaaattagaaccaagagtcaacctgga

SEQ ID NO: 907444 - DNA, 33 bp, Homo sapien
ggaaataaaattagaatcaagagtcaacctgga

SEQ ID NO: 907445 - DNA, 33 bp, Homo sapien
cgctgtaagctctgtacgaaacaaatccctatc

SEQ ID NO: 907446 - DNA, 33 bp, Homo sapien
cgctgtaagctctgtatgaaacaaatccctatc

SEQ ID NO: 907447 - DNA, 33 bp, Homo sapien
aggcttatatgttgaacttattccattgctctc

SEQ ID NO: 907448 - DNA, 33 bp, Homo sapien
aggcttatatgttgaagttattccattgctctc

SEQ ID NO: 907449 - DNA, 33 bp, Homo sapien
atatgtttcgactaccaggcttcttgcagttgt

SEQ ID NO: 907450 - DNA, 33 bp, Homo sapien
atatgtttcgactaccgggcttcttgcagttgt

SEQ ID NO: 907451 - DNA, 33 bp, Homo sapien
tgagataacttactataataacaagctcatata

SEQ ID NO: 907452 - DNA, 33 bp, Homo sapien
tgagataacttactatcataacaagctcatata

SEQ ID NO: 907453 - DNA, 33 bp, Homo sapien
tgataccaggcttccaactctagtgtagtggga

SEQ ID NO: 907454 - DNA, 33 bp, Homo sapien
tgataccaggcttccatctctagtgtagtggga

SEQ ID NO: 907455 - DNA, 33 bp, Homo sapien
gacactgcatcctagtcacccaaacctcacagg

SEQ ID NO: 907456 - DNA, 33 bp, Homo sapien
gacactgcatcctagttacccaaacctcacagg

SEQ ID NO: 907457 - DNA, 33 bp, Homo sapien
cgtggccctgtcttcaaagtggagaagcaggga

SEQ ID NO: 907458 - DNA, 33 bp, Homo sapien
cgtggccctgtcttcagagtggagaagcaggga

SEQ ID NO: 907459 - DNA, 33 bp, Homo sapien
atggaaccacctcagacgagcacctgctggatg

SEQ ID NO: 907460 - DNA, 33 bp, Homo sapien
atggaaccacctcagatgagcacctgctggatg

SEQ ID NO: 907461 - DNA, 33 bp, Homo sapien
catctctactgagaatcatgatacagttctcaa

SEQ ID NO: 907462 - DNA, 33 bp, Homo sapien
catctctactgagaatgatgatacagttctcaa

SEQ ID NO: 907463 - DNA, 33 bp, Homo sapien
agctctaggtggcaaacgcggaggaggagcaac

SEQ ID NO: 907464 - DNA, 33 bp, Homo sapien
agctctaggtggcaaatgcggaggaggagcaac

SEQ ID NO: 907465 - DNA, 33 bp, Homo sapien
ccttatttcacttccaaatagttatagaactca

SEQ ID NO: 907466 - DNA, 33 bp, Homo sapien
ccttatttcacttccagatagttatagaactca

SEQ ID NO: 907467 - DNA, 33 bp, Homo sapien
tccttgagcttaaagacgtcatcattgtgggga

SEQ ID NO: 907468 - DNA, 33 bp, Homo sapien
tccttgagcttaaagatgtcatcattgtgggga

SEQ ID NO: 907469 - DNA, 33 bp, Homo sapien
gtctcaaatgggtagaaggggatttcctaccca

SEQ ID NO: 907470 - DNA, 33 bp, Homo sapien
gtctcaaatgggtagagggggatttcctaccca

SEQ ID NO: 907471 - DNA, 33 bp, Homo sapien
attgagcaatggcaatcatgagaacataaggac

SEQ ID NO: 907472 - DNA, 33 bp, Homo sapien
attgagcaatggcaattatgagaacataaggac

SEQ ID NO: 907473 - DNA, 33 bp, Homo sapien
aacctgcaatcttaacaaaagtgacttaacaga

SEQ ID NO: 907474 - DNA, 33 bp, Homo sapien
aacctgcaatcttaacgaaagtgacttaacaga

SEQ ID NO: 907475 - DNA, 33 bp, Homo sapien
ttctcttggagatttgcaaagaaagcctctgcc

SEQ ID NO: 907476 - DNA, 33 bp, Homo sapien
ttctcttggagatttgtaaagaaagcctctgcc

SEQ ID NO: 907477 - DNA, 33 bp, Homo sapien
ttgaccagtcgaggaaggattttggaacacagc

SEQ ID NO: 907478 - DNA, 33 bp, Homo sapien
ttgaccagtcgaggaatgattttggaacacagc

SEQ ID NO: 907479 - DNA, 33 bp, Homo sapien
tattttatgtgaaccacagatggtgttgtgcct

SEQ ID NO: 907480 - DNA, 33 bp, Homo sapien
tattttatgtgaaccagagatggtgttgtgcct

SEQ ID NO: 907481 - DNA, 33 bp, Homo sapien
cagaggcgcgaggatgaaaggtcagggtgagct

SEQ ID NO: 907482 - DNA, 33 bp, Homo sapien
cagaggcgcgaggatgcaaggtcagggtgagct

SEQ ID NO: 907483 - DNA, 33 bp, Homo sapien
tctactcccagagcacaagactcccttttccac

SEQ ID NO: 907484 - DNA, 33 bp, Homo sapien
tctactcccagagcacgagactcccttttccac

SEQ ID NO: 907485 - DNA, 33 bp, Homo sapien
ggcaatgattcacagaaaccactgcaaatgaaa

SEQ ID NO: 907486 - DNA, 33 bp, Homo sapien
ggcaatgattcacagagaccactgcaaatgaaa

SEQ ID NO: 907487 - DNA, 33 bp, Homo sapien
tgcaaatgaaacaacaacactcaacagagtgca

SEQ ID NO: 907488 - DNA, 33 bp, Homo sapien
tgcaaatgaaacaacagcactcaacagagtgca

SEQ ID NO: 907489 - DNA, 33 bp, Homo sapien
gattcacggagaagcaaataggaacttgcacta

SEQ ID NO: 907490 - DNA, 33 bp, Homo sapien
gattcacggagaagcagataggaacttgcacta

SEQ ID NO: 907491 - DNA, 33 bp, Homo sapien
ctcgtccataaggaagcagattcacggagaagc

SEQ ID NO: 907492 - DNA, 33 bp, Homo sapien
ctcgtccataaggaagtagattcacggagaagc

SEQ ID NO: 907493 - DNA, 33 bp, Homo sapien
tttggttctagttcaacgcctaccattaattag

SEQ ID NO: 907494 - DNA, 33 bp, Homo sapien
tttggttctagttcaatgcctaccattaattag

SEQ ID NO: 907495 - DNA, 33 bp, Homo sapien
tgagtgggcagttatcaagtggcatcaggggac

SEQ ID NO: 907496 - DNA, 33 bp, Homo sapien
tgagtgggcagttatcgagtggcatcaggggac

SEQ ID NO: 907497 - DNA, 33 bp, Homo sapien
ttagagaacaaatgaaagggctgataaccaagt

SEQ ID NO: 907498 - DNA, 33 bp, Homo sapien
ttagagaacaaatgaacgggctgataaccaagt

SEQ ID NO: 907499 - DNA, 33 bp, Homo sapien
ctcgcagactgcagaactgttgtggagactgat

SEQ ID NO: 907500 - DNA, 33 bp, Homo sapien
ctcgcagactgcagaattgttgtggagactgat

SEQ ID NO: 907501 - DNA, 33 bp, Homo sapien
attcaataactacaacaaaacatgataccaaaa

SEQ ID NO: 907502 - DNA, 33 bp, Homo sapien
attcaataactacaaccaaacatgataccaaaa

SEQ ID NO: 907503 - DNA, 33 bp, Homo sapien
catatactataccctccctccagtgcgtacata

SEQ ID NO: 907504 - DNA, 33 bp, Homo sapien
catatactataccctctctccagtgcgtacata

SEQ ID NO: 907505 - DNA, 33 bp, Homo sapien
tgattaactcatctacccctggcgacaatccca

SEQ ID NO: 907506 - DNA, 33 bp, Homo sapien
tgattaactcatctactcctggcgacaatccca

SEQ ID NO: 907507 - DNA, 33 bp, Homo sapien
aacatgaggctgtcacacgatggtcccttggag

SEQ ID NO: 907508 - DNA, 33 bp, Homo sapien
aacatgaggctgtcacgcgatggtcccttggag

SEQ ID NO: 907509 - DNA, 33 bp, Homo sapien
agcaggggatggtctaagatggtgtaaagtaaa

SEQ ID NO: 907510 - DNA, 33 bp, Homo sapien
agcaggggatggtctacgatggtgtaaagtaaa

SEQ ID NO: 907511 - DNA, 33 bp, Homo sapien
gctcaggatctcagaacagtcccgcttggagtt

SEQ ID NO: 907512 - DNA, 33 bp, Homo sapien
gctcaggatctcagaatagtcccgcttggagtt

SEQ ID NO: 907513 - DNA, 33 bp, Homo sapien
agagggaaagtaggtaaaagggtgctgacttaa

SEQ ID NO: 907514 - DNA, 33 bp, Homo sapien
agagggaaagtaggtagaagggtgctgacttaa

SEQ ID NO: 907515 - DNA, 33 bp, Homo sapien
gcatggggcagtctacagcaaaaaagtgattct

SEQ ID NO: 907516 - DNA, 33 bp, Homo sapien
gcatggggcagtctacggcaaaaaagtgattct

SEQ ID NO: 907517 - DNA, 33 bp, Homo sapien
ggaaagcactacctcccgcagaaggccaaccag

SEQ ID NO: 907518 - DNA, 33 bp, Homo sapien
ggaaagcactacctcctgcagaaggccaaccag

SEQ ID NO: 907519 - DNA, 33 bp, Homo sapien; identical to SEQ ID NO: 907517

SEQ ID NO: 907520 - DNA, 33 bp, Homo sapien; identical to SEQ ID NO: 907518

SEQ ID NO: 907521 - DNA, 33 bp, Homo sapien
cataaatagttcacaccgaaggactctgtgcag

SEQ ID NO: 907522 - DNA, 33 bp, Homo sapien
cataaatagttcacactgaaggactctgtgcag

SEQ ID NO: 907523 - DNA, 33 bp, Homo sapien; identical to SEQ ID NO: 907521

SEQ ID NO: 907524 - DNA, 33 bp, Homo sapien; identical to SEQ ID NO: 907522

SEQ ID NO: 907525 - DNA, 33 bp, Homo sapien
gctgacaaagatattgaaaaacctacactaaca

SEQ ID NO: 907526 - DNA, 33 bp, Homo sapien
gctgacaaagatattggaaaacctacactaaca

SEQ ID NO: 907527 - DNA, 33 bp, Homo sapien
ttgacagttattaatgaagtgctataagcattt

SEQ ID NO: 907528 - DNA, 33 bp, Homo sapien
ttgacagttattaatgcagtgctataagcattt

SEQ ID NO: 907529 - DNA, 33 bp, Homo sapien
actgtagtatagataacatggtaccaaatctct

SEQ ID NO: 907530 - DNA, 33 bp, Homo sapien
actgtagtatagataatatggtaccaaatctct

SEQ ID NO: 907531 - DNA, 33 bp, Homo sapien
tgaatatatgtatacaaacaaaattgaaatgat

SEQ ID NO: 907532 - DNA, 33 bp, Homo sapien
tgaatatatgtatacagacaaaattgaaatgat

SEQ ID NO: 907533 - DNA, 33 bp, Homo sapien
ctaggaataggcattacaagcaagttccctcca

SEQ ID NO: 907534 - DNA, 33 bp, Homo sapien
ctaggaataggcattataagcaagttccctcca

SEQ ID NO: 907535 - DNA, 33 bp, Homo sapien
gtgattaagttaagaaacttgacttgagagatt

SEQ ID NO: 907536 - DNA, 33 bp, Homo sapien
gtgattaagttaagaaccttgacttgagagatt

SEQ ID NO: 907537 - DNA, 33 bp, Homo sapien
ctccgaggaatatcacaggctctgagccacaca

SEQ ID NO: 907538 - DNA, 33 bp, Homo sapien
ctccgaggaatatcacgggctctgagccacaca

SEQ ID NO: 907539 - DNA, 33 bp, Homo sapien
tatggtaggtagcacaaccgctatctcacagca

SEQ ID NO: 907540 - DNA, 33 bp, Homo sapien
tatggtaggtagcacagccgctatctcacagca

SEQ ID NO: 907541 - DNA, 33 bp, Homo sapien
ttggtatgaactaacaacatggtctggggccca

SEQ ID NO: 907542 - DNA, 33 bp, Homo sapien
ttggtatgaactaacatcatggtctggggccca

SEQ ID NO: 907543 - DNA, 33 bp, Homo sapien
tggcagtggggaagtaagcgaagaagtaggggc

SEQ ID NO: 907544 - DNA, 33 bp, Homo sapien
tggcagtggggaagtaggcgaagaagtaggggc

SEQ ID NO: 907545 - DNA, 33 bp, Homo sapien
ctgccgcgacccagcacgtctgtggttgtaagg

SEQ ID NO: 907546 - DNA, 33 bp, Homo sapien
ctgccgcgacccagcatgtctgtggttgtaagg

SEQ ID NO: 907547 - DNA, 33 bp, Homo sapien
ccagagccactttaaccaacaggcttttaggtg

SEQ ID NO: 907548 - DNA, 33 bp, Homo sapien
ccagagccactttaactaacaggcttttaggtg

SEQ ID NO: 907549 - DNA, 33 bp, Homo sapien
gcccaggtgtccctacccacggcttgcttggta

SEQ ID NO: 907550 - DNA, 33 bp, Homo sapien
gcccaggtgtccctacgcacggcttgcttggta

SEQ ID NO: 907551 - DNA, 33 bp, Homo sapien
cgatcatgaaaataaacgtgtgcttctagtcta

SEQ ID NO: 907552 - DNA, 33 bp, Homo sapien
cgatcatgaaaataaatgtgtgcttctagtcta

SEQ ID NO: 907553 - DNA, 33 bp, Homo sapien
taaaattcatttgtaaaccccaatgtcaataaa

SEQ ID NO: 907554 - DNA, 33 bp, Homo sapien
taaaattcatttgtaacccccaatgtcaataaa

SEQ ID NO: 907555 - DNA, 33 bp, Homo sapien
tctggatgagataccaaaagtggaagcacatga

SEQ ID NO: 907556 - DNA, 33 bp, Homo sapien
tctggatgagataccagaagtggaagcacatga

SEQ ID NO: 907557 - DNA, 33 bp, Homo sapien
ccctgaatccagcaagactataggcacaatgtt

SEQ ID NO: 907558 - DNA, 33 bp, Homo sapien
ccctgaatccagcaagtctataggcacaatgtt

SEQ ID NO: 907559 - DNA, 33 bp, Homo sapien
aaagacaggcgaataacgggtcagtggttcagt

SEQ ID NO: 907560 - DNA, 33 bp, Homo sapien
aaagacaggcgaataatgggtcagtggttcagt

SEQ ID NO: 907561 - DNA, 33 bp, Homo sapien
ctcaggaagtccttataacatgtggccaagctt

SEQ ID NO: 907562 - DNA, 33 bp, Homo sapien
ctcaggaagtccttatgacatgtggccaagctt

SEQ ID NO: 907563 - DNA, 33 bp, Homo sapien
tttaccatacaatcaccgggcttgaatatccat

SEQ ID NO: 907564 - DNA, 33 bp, Homo sapien
tttaccatacaatcactgggcttgaatatccat

SEQ ID NO: 907565 - DNA, 33 bp, Homo sapien
gcttctgttgacataaactgcccagtgttccag

SEQ ID NO: 907566 - DNA, 33 bp, Homo sapien
gcttctgttgacataatctgcccagtgttccag

SEQ ID NO: 907567 - DNA, 33 bp, Homo sapien
gaggaagctcaggtaaactctatggccaatatg

SEQ ID NO: 907568 - DNA, 33 bp, Homo sapien
gaggaagctcaggtaacctctatggccaatatg

SEQ ID NO: 907569 - DNA, 33 bp, Homo sapien
caagtgtaagacagtcacaagtgtgtgtgcgta

SEQ ID NO: 907570 - DNA, 33 bp, Homo sapien
caagtgtaagacagtcgcaagtgtgtgtgcgta

SEQ ID NO: 907571 - DNA, 33 bp, Homo sapien
ccgggtttacataaaaatagtggtacaagtgta

SEQ ID NO: 907572 - DNA, 33 bp, Homo sapien
ccgggtttacataaaagtagtggtacaagtgta

SEQ ID NO: 907573 - DNA, 33 bp, Homo sapien
cttctcatctgttaaacggagtaatagtagtcc

SEQ ID NO: 907574 - DNA, 33 bp, Homo sapien
cttctcatctgttaaagggagtaatagtagtcc

SEQ ID NO: 907575 - DNA, 33 bp, Homo sapien
ccaacaattatccgtgaaaaggagccatagaga

SEQ ID NO: 907576 - DNA, 33 bp, Homo sapien
ccaacaattatccgtggaaaggagccatagaga

SEQ ID NO: 907577 - DNA, 33 bp, Homo sapien
ttaactaaggtcacagaatggttacagagatat

SEQ ID NO: 907578 - DNA, 33 bp, Homo sapien
ttaactaaggtcacagcatggttacagagatat

SEQ ID NO: 907579 - DNA, 33 bp, Homo sapien
aactagaacataattcaaattgtctcaagccaa

SEQ ID NO: 907580 - DNA, 33 bp, Homo sapien
aactagaacataattcgaattgtctcaagccaa

SEQ ID NO: 907581 - DNA, 33 bp, Homo sapien
tgcccctggttgagaaaggctgatctcgtgtga

SEQ ID NO: 907582 - DNA, 33 bp, Homo sapien
tgcccctggttgagaatggctgatctcgtgtga

SEQ ID NO: 907583 - DNA, 33 bp, Homo sapien
caaacctgggtcctcactatacgacctcagcca

SEQ ID NO: 907584 - DNA, 33 bp, Homo sapien
caaacctgggtcctcagtatacgacctcagcca

SEQ ID NO: 907585 - DNA, 33 bp, Homo sapien
gtactacagtcatccaactgaaaactcactgag

SEQ ID NO: 907586 - DNA, 33 bp, Homo sapien
gtactacagtcatccagctgaaaactcactgag

SEQ ID NO: 907587 - DNA, 33 bp, Homo sapien
aaagtgctgcatagacaatcctttttgttcttc

SEQ ID NO: 907588 - DNA, 33 bp, Homo sapien
aaagtgctgcatagacgatcctttttgttcttc

SEQ ID NO: 907589 - DNA, 33 bp, Homo sapien
cataacccatgaaatcagaatccgtgtctgtag

SEQ ID NO: 907590 - DNA, 33 bp, Homo sapien
cataacccatgaaatcggaatccgtgtctgtag

SEQ ID NO: 907591 - DNA, 33 bp, Homo sapien
cccctctcaggggtacacgtccctctcgggtaa

SEQ ID NO: 907592 - DNA, 33 bp, Homo sapien
cccctctcaggggtacgcgtccctctcgggtaa

SEQ ID NO: 907593 - DNA, 33 bp, Homo sapien
cttctcccagaggaacagctctatgcgggttgg

SEQ ID NO: 907594 - DNA, 33 bp, Homo sapien
cttctcccagaggaacggctctatgcgggttgg

SEQ ID NO: 907595 - DNA, 33 bp, Homo sapien
tcaagataaaaagcagaagaaaatctataaccc

SEQ ID NO: 907596 - DNA, 33 bp, Homo sapien
tcaagataaaaagcaggagaaaatctataaccc

SEQ ID NO: 907597 - DNA, 33 bp, Homo sapien
tgtcaaccgaattacacgtgaaggcagggaaga

SEQ ID NO: 907598 - DNA, 33 bp, Homo sapien
tgtcaaccgaattacatgtgaaggcagggaaga

SEQ ID NO: 907599 - DNA, 33 bp, Homo sapien
cttgaggaaagtttcaccttggaaggaaggaat

SEQ ID NO: 907600 - DNA, 33 bp, Homo sapien
cttgaggaaagtttcatcttggaaggaaggaat

SEQ ID NO: 907601 - DNA, 33 bp, Homo sapien
agttgttcgttgtagacggaaagtcttttctgc

SEQ ID NO: 907602 - DNA, 33 bp, Homo sapien
agttgttcgttgtagatggaaagtcttttctgc

SEQ ID NO: 907603 - DNA, 33 bp, Homo sapien
tgttcatggatttgaacagcaccgggcaaatga

SEQ ID NO: 907604 - DNA, 33 bp, Homo sapien
tgttcatggatttgaatagcaccgggcaaatga

SEQ ID NO: 907605 - DNA, 33 bp, Homo sapien
ggctaaattaatctcaacaaaaaggaatgtaat

SEQ ID NO: 907606 - DNA, 33 bp, Homo sapien
ggctaaattaatctcaccaaaaaggaatgtaat

SEQ ID NO: 907607 - DNA, 33 bp, Homo sapien
gctctactcaccataaagagaacacgcataata

SEQ ID NO: 907608 - DNA, 33 bp, Homo sapien
gctctactcaccataatgagaacacgcataata

SEQ ID NO: 907609 - DNA, 33 bp, Homo sapien
cagtatttgaaatcagaccacaagtctcatctc

SEQ ID NO: 907610 - DNA, 33 bp, Homo sapien
cagtatttgaaatcaggccacaagtctcatctc

SEQ ID NO: 907611 - DNA, 33 bp, Homo sapien
gaccactggtccagcacactgttactacaacct

SEQ ID NO: 907612 - DNA, 33 bp, Homo sapien
gaccactggtccagcatactgttactacaacct

SEQ ID NO: 907613 - DNA, 33 bp, Homo sapien
caaaatcaagaactcaatcatgtttaaaatggc

SEQ ID NO: 907614 - DNA, 33 bp, Homo sapien
caaaatcaagaactcagtcatgtttaaaatggc

SEQ ID NO: 907615 - DNA, 33 bp, Homo sapien
aagaatgaacctggacacttgtctgaatgaaac

SEQ ID NO: 907616 - DNA, 33 bp, Homo sapien
aagaatgaacctggacccttgtctgaatgaaac

SEQ ID NO: 907617 - DNA, 33 bp, Homo sapien
aaattatagccctaaacgatagctccatttatg

SEQ ID NO: 907618 - DNA, 33 bp, Homo sapien
aaattatagccctaaatgatagctccatttatg

SEQ ID NO: 907619 - DNA, 33 bp, Homo sapien
ccacatggctaaagccagcggggttctctgtct

SEQ ID NO: 907620 - DNA, 33 bp, Homo sapien
ccacatggctaaagccggcggggttctctgtct

SEQ ID NO: 907621 - DNA, 33 bp, Homo sapien
aactgttgataagctgaaaaagaatatttgcaa

SEQ ID NO: 907622 - DNA, 33 bp, Homo sapien
aactgttgataagctgcaaaagaatatttgcaa

SEQ ID NO: 907623 - DNA, 33 bp, Homo sapien
atttttctattcctccgacggtctgatttttta

SEQ ID NO: 907624 - DNA, 33 bp, Homo sapien
atttttctattcctcctacggtctgatttttta

SEQ ID NO: 907625 - DNA, 33 bp, Homo sapien
acagcgtcaccagagaaagagacaagccacatg

SEQ ID NO: 907626 - DNA, 33 bp, Homo sapien
acagcgtcaccagagacagagacaagccacatg

SEQ ID NO: 907627 - DNA, 33 bp, Homo sapien
ccagagtgggaggagaaggattctgagacttcc

SEQ ID NO: 907628 - DNA, 33 bp, Homo sapien
ccagagtgggaggagagggattctgagacttcc

SEQ ID NO: 907629 - DNA, 33 bp, Homo sapien
cagggccttaggtgtcccaggaagagattggtc

SEQ ID NO: 907630 - DNA, 33 bp, Homo sapien
cagggccttaggtgtctcaggaagagattggtc

SEQ ID NO: 907631 - DNA, 33 bp, Homo sapien
gtctgcttgtctaaacccctcacatgtgtgcac

SEQ ID NO: 907632 - DNA, 33 bp, Homo sapien
gtctgcttgtctaaactcctcacatgtgtgcac

SEQ ID NO: 907633 - DNA, 33 bp, Homo sapien
gtcccctcataagtaactgaatgacaagttgag

SEQ ID NO: 907634 - DNA, 33 bp, Homo sapien
gtcccctcataagtaattgaatgacaagttgag

SEQ ID NO: 907635 - DNA, 33 bp, Homo sapien
ttgtggcttcacgcacgcaagagtcagcatgag

SEQ ID NO: 907636 - DNA, 33 bp, Homo sapien
ttgtggcttcacgcactcaagagtcagcatgag

SEQ ID NO: 907637 - DNA, 33 bp, Homo sapien
acaatagagaccagacagatttggttttatttc

SEQ ID NO: 907638 - DNA, 33 bp, Homo sapien
acaatagagaccagacggatttggttttatttc

SEQ ID NO: 907639 - DNA, 33 bp, Homo sapien
gtgctgtaggaaatagccacaagtgccccaaat

SEQ ID NO: 907640 - DNA, 33 bp, Homo sapien
gtgctgtaggaaatagtcacaagtgccccaaat

SEQ ID NO: 907641 - DNA, 33 bp, Homo sapien
tgaaactctgtccccaataaacagcgattcccc

SEQ ID NO: 907642 - DNA, 33 bp, Homo sapien
tgaaactctgtccccagtaaacagcgattcccc

SEQ ID NO: 907643 - DNA, 33 bp, Homo sapien
ctttttatataagtaaccatccattgcataatt

SEQ ID NO: 907644 - DNA, 33 bp, Homo sapien
ctttttatataagtaagcatccattgcataatt

SEQ ID NO: 907645 - DNA, 33 bp, Homo sapien
atcatttgctggtctacgtgggatagttagctg

SEQ ID NO: 907646 - DNA, 33 bp, Homo sapien
atcatttgctggtctatgtgggatagttagctg

SEQ ID NO: 907647 - DNA, 33 bp, Homo sapien
agaagcttttgtggacactaaaacgtcagatta

SEQ ID NO: 907648 - DNA, 33 bp, Homo sapien
agaagcttttgtggacgctaaaacgtcagatta

SEQ ID NO: 907649 - DNA, 33 bp, Homo sapien
gtgttgactttaaagcagctcagagacatcgcc

SEQ ID NO: 907650 - DNA, 33 bp, Homo sapien
gtgttgactttaaagcggctcagagacatcgcc

SEQ ID NO: 907651 - DNA, 33 bp, Homo sapien
gacaaaaaatccccaccaaagaggctcacaata

SEQ ID NO: 907652 - DNA, 33 bp, Homo sapien
gacaaaaaatccccacgaaagaggctcacaata

SEQ ID NO: 907653 - DNA, 33 bp, Homo sapien
ggctcacaatagaaggcacagtgactatggaga

SEQ ID NO: 907654 - DNA, 33 bp, Homo sapien
ggctcacaatagaagggacagtgactatggaga

SEQ ID NO: 907655 - DNA, 33 bp, Homo sapien
agaaggctctgcccataaggcctggacctacct

SEQ ID NO: 907656 - DNA, 33 bp, Homo sapien
agaaggctctgcccatgaggcctggacctacct

SEQ ID NO: 907657 - DNA, 33 bp, Homo sapien
agctgagcagatgctccgaatggcttctccctg

SEQ ID NO: 907658 - DNA, 33 bp, Homo sapien
agctgagcagatgctctgaatggcttctccctg

SEQ ID NO: 907659 - DNA, 33 bp, Homo sapien
ggctccttcaaaatgcaaaagtaaacatttgac

SEQ ID NO: 907660 - DNA, 33 bp, Homo sapien
ggctccttcaaaatgcgaaagtaaacatttgac

SEQ ID NO: 907661 - DNA, 33 bp, Homo sapien
aacataaactgcaaagacagacatgtatttgat

SEQ ID NO: 907662 - DNA, 33 bp, Homo sapien
aacataaactgcaaaggcagacatgtatttgat

SEQ ID NO: 907663 - DNA, 33 bp, Homo sapien
gtcattgccccctcaccctttgaacaactcagg

SEQ ID NO: 907664 - DNA, 33 bp, Homo sapien
gtcattgccccctcactctttgaacaactcagg

SEQ ID NO: 907665 - DNA, 33 bp, Homo sapien
tagagaatttcagttacattacaagtaaaaaat

SEQ ID NO: 907666 - DNA, 33 bp, Homo sapien
tagagaatttcagttagattacaagtaaaaaat

SEQ ID NO: 907667 - DNA, 33 bp, Homo sapien
tttatttaaaaatacaatgacagaactttgaat

SEQ ID NO: 907668 - DNA, 33 bp, Homo sapien
tttatttaaaaatacagtgacagaactttgaat

SEQ ID NO: 907669 - DNA, 33 bp, Homo sapien
gctcagtacacaagacagcagagtttcaaatga

SEQ ID NO: 907670 - DNA, 33 bp, Homo sapien
gctcagtacacaagacggcagagtttcaaatga

SEQ ID NO: 907671 - DNA, 33 bp, Homo sapien
caaaatttgcctaaaactgagaggccaaacttc

SEQ ID NO: 907672 - DNA, 33 bp, Homo sapien
caaaatttgcctaaaattgagaggccaaacttc

SEQ ID NO: 907673 - DNA, 33 bp, Homo sapien
ttgttaaaaacctacaacattgcatcatacata

SEQ ID NO: 907674 - DNA, 33 bp, Homo sapien
ttgttaaaaacctacagcattgcatcatacata

SEQ ID NO: 907675 - DNA, 33 bp, Homo sapien
ccttcaaaaatactcaagtggtttgcagatgag

SEQ ID NO: 907676 - DNA, 33 bp, Homo sapien
ccttcaaaaatactcaggtggtttgcagatgag

SEQ ID NO: 907677 - DNA, 33 bp, Homo sapien
agtctttggtaaaaacaaccataacagcaaacc

SEQ ID NO: 907678 - DNA, 33 bp, Homo sapien
agtctttggtaaaaacgaccataacagcaaacc

SEQ ID NO: 907679 - DNA, 33 bp, Homo sapien
ttggtgaagactaccactgacacatttttttct

SEQ ID NO: 907680 - DNA, 33 bp, Homo sapien
ttggtgaagactaccagtgacacatttttttct

SEQ ID NO: 907681 - DNA, 33 bp, Homo sapien
atgtctgtaagacaagacaagaaactatgaaac

SEQ ID NO: 907682 - DNA, 33 bp, Homo sapien
atgtctgtaagacaaggcaagaaactatgaaac

SEQ ID NO: 907683 - DNA, 33 bp, Homo sapien
tataaatggttccctccacaaaatgttaaggag

SEQ ID NO: 907684 - DNA, 33 bp, Homo sapien
tataaatggttccctctacaaaatgttaaggag

SEQ ID NO: 907685 - DNA, 33 bp, Homo sapien
ctttggagtcaaggaaaaccagctgggttgtgg

SEQ ID NO: 907686 - DNA, 33 bp, Homo sapien
ctttggagtcaaggaacaccagctgggttgtgg

SEQ ID NO: 907687 - DNA, 33 bp, Homo sapien
cgttccgtttcaactacagcatcaaatgcactc

SEQ ID NO: 907688 - DNA, 33 bp, Homo sapien
cgttccgtttcaactagagcatcaaatgcactc

SEQ ID NO: 907689 - DNA, 33 bp, Homo sapien
taaaatgtttcaaaccacaagtctattaagcta

SEQ ID NO: 907690 - DNA, 33 bp, Homo sapien
taaaatgtttcaaaccgcaagtctattaagcta

SEQ ID NO: 907691 - DNA, 33 bp, Homo sapien
gagacactcactcacacgagaagcttgaagagt

SEQ ID NO: 907692 - DNA, 33 bp, Homo sapien
gagacactcactcacatgagaagcttgaagagt

SEQ ID NO: 907693 - DNA, 33 bp, Homo sapien
taagtggtgctaaaaaacaatttccatctaaac

SEQ ID NO: 907694 - DNA, 33 bp, Homo sapien
taagtggtgctaaaaagcaatttccatctaaac

SEQ ID NO: 907695 - DNA, 33 bp, Homo sapien
ctgactgatttctgcacgggtaactaacccatg

SEQ ID NO: 907696 - DNA, 33 bp, Homo sapien
ctgactgatttctgcatgggtaactaacccatg

SEQ ID NO: 907697 - DNA, 33 bp, Homo sapien
ttctaaaggatgaccaagcgccgggtaatttag

SEQ ID NO: 907698 - DNA, 33 bp, Homo sapien
ttctaaaggatgaccaggcgccgggtaatttag

SEQ ID NO: 907699 - DNA, 33 bp, Homo sapien
gttccagtcttgagcaatcgtaattatattata

SEQ ID NO: 907700 - DNA, 33 bp, Homo sapien
gttccagtcttgagcagtcgtaattatattata

SEQ ID NO: 907701 - DNA, 33 bp, Homo sapien
gcccggacaactagctaacactaactggccaca

SEQ ID NO: 907702 - DNA, 33 bp, Homo sapien
gcccggacaactagctgacactaactggccaca

SEQ ID NO: 907703 - DNA, 33 bp, Homo sapien
agctacagaaacgatccatggctgctggcgaca

SEQ ID NO: 907704 - DNA, 33 bp, Homo sapien
agctacagaaacgatctatggctgctggcgaca

SEQ ID NO: 907705 - DNA, 33 bp, Homo sapien
gggcacagttctcactcagtaggttggggacgt

SEQ ID NO: 907706 - DNA, 33 bp, Homo sapien
gggcacagttctcactgagtaggttggggacgt

SEQ ID NO: 907707 - DNA, 33 bp, Homo sapien
aacagcagatagtaacagggacccaagaaagat

SEQ ID NO: 907708 - DNA, 33 bp, Homo sapien
aacagcagatagtaacggggacccaagaaagat

SEQ ID NO: 907709 - DNA, 33 bp, Homo sapien
tggagttgcagaacacagccccaaggaaaaacc

SEQ ID NO: 907710 - DNA, 33 bp, Homo sapien
tggagttgcagaacacggccccaaggaaaaacc

SEQ ID NO: 907711 - DNA, 33 bp, Homo sapien
atataaacagtgaagacgaaactgagtaaaacc

SEQ ID NO: 907712 - DNA, 33 bp, Homo sapien
atataaacagtgaagatgaaactgagtaaaacc

SEQ ID NO: 907713 - DNA, 33 bp, Homo sapien
tctgtgctctcgcctcaattcatgacctcttcc

SEQ ID NO: 907714 - DNA, 33 bp, Homo sapien
tctgtgctctcgcctccattcatgacctcttcc

SEQ ID NO: 907715 - DNA, 33 bp, Homo sapien
ttgtttgactgtaagcacctttgttttgtggat

SEQ ID NO: 907716 - DNA, 33 bp, Homo sapien
ttgtttgactgtaagcgcctttgttttgtggat

SEQ ID NO: 907717 - DNA, 33 bp, Homo sapien
acatgcgtgcaggtggcaaattctagaaggcag

SEQ ID NO: 907718 - DNA, 33 bp, Homo sapien
acatgcgtgcaggtggtaaattctagaaggcag

SEQ ID NO: 907719 - DNA, 33 bp, Homo sapien
atctcctgggtccccaaataactcaccactggt

SEQ ID NO: 907720 - DNA, 33 bp, Homo sapien
atctcctgggtccccagataactcaccactggt

SEQ ID NO: 907721 - DNA, 33 bp, Homo sapien
atttcaagccaaaaacacaaagactaagtggga

SEQ ID NO: 907722 - DNA, 33 bp, Homo sapien
atttcaagccaaaaactcaaagactaagtggga

SEQ ID NO: 907723 - DNA, 33 bp, Homo sapien
ccagaggcatgtccgcaaggagagtgtgcgcag

SEQ ID NO: 907724 - DNA, 33 bp, Homo sapien
ccagaggcatgtccgcgaggagagtgtgcgcag

SEQ ID NO: 907725 - DNA, 33 bp, Homo sapien
agaagagggtggagaccaattgaaacccctacc

SEQ ID NO: 907726 - DNA, 33 bp, Homo sapien
agaagagggtggagactaattgaaacccctacc

SEQ ID NO: 907727 - DNA, 33 bp, Homo sapien
gtagcttaagtgactaaaagataagaaaaaagg

SEQ ID NO: 907728 - DNA, 33 bp, Homo sapien
gtagcttaagtgactacaagataagaaaaaagg

SEQ ID NO: 907729 - DNA, 33 bp, Homo sapien
ttttggttgcttctgcgaattaaatcattttca

SEQ ID NO: 907730 - DNA, 33 bp, Homo sapien
ttttggttgcttctgctaattaaatcattttca

SEQ ID NO: 907731 - DNA, 33 bp, Homo sapien
cctagaagccatgaagaaaaaactaacttctgt

SEQ ID NO: 907732 - DNA, 33 bp, Homo sapien
cctagaagccatgaaggaaaaactaacttctgt

SEQ ID NO: 907733 - DNA, 33 bp, Homo sapien
gactacttagcatcacaacagtggaggacaatg

SEQ ID NO: 907734 - DNA, 33 bp, Homo sapien
gactacttagcatcacgacagtggaggacaatg

SEQ ID NO: 907735 - DNA, 33 bp, Homo sapien
ctgggactcttgcatccagaatgtggtctagaa

SEQ ID NO: 907736 - DNA, 33 bp, Homo sapien
ctgggactcttgcatcgagaatgtggtctagaa

SEQ ID NO: 907737 - DNA, 33 bp, Homo sapien
gtgcgtcataggacaccacgaagacagtgaaaa

SEQ ID NO: 907738 - DNA, 33 bp, Homo sapien
gtgcgtcataggacactacgaagacagtgaaaa

SEQ ID NO: 907739 - DNA, 33 bp, Homo sapien
ctacaatagaagcacacaaggctttgccatagg

SEQ ID NO: 907740 - DNA, 33 bp, Homo sapien
ctacaatagaagcacagaaggctttgccatagg

SEQ ID NO: 907741 - DNA, 33 bp, Homo sapien
tctgttctagggtaccacactccctcttctgaa

SEQ ID NO: 907742 - DNA, 33 bp, Homo sapien
tctgttctagggtaccgcactccctcttctgaa

SEQ ID NO: 907743 - DNA, 33 bp, Homo sapien
tttataataccacatacctcatagaataatttt

SEQ ID NO: 907744 - DNA, 33 bp, Homo sapien
tttataataccacatatctcatagaataatttt

SEQ ID NO: 907745 - DNA, 33 bp, Homo sapien
cctgtcttgcccagtaagctgagctctccagga

SEQ ID NO: 907746 - DNA, 33 bp, Homo sapien
cctgtcttgcccagtatgctgagctctccagga

SEQ ID NO: 907747 - DNA, 33 bp, Homo sapien
ctgtgcagaaaggcaactccatgatactgctcc

SEQ ID NO: 907748 - DNA, 33 bp, Homo sapien
ctgtgcagaaaggcaattccatgatactgctcc

SEQ ID NO: 907749 - DNA, 33 bp, Homo sapien
cagagctataactgaacgctcaagttagggtct

SEQ ID NO: 907750 - DNA, 33 bp, Homo sapien
cagagctataactgaatgctcaagttagggtct

SEQ ID NO: 907751 - DNA, 33 bp, Homo sapien
acagatggctataaaacgagatgctcagtgcca

SEQ ID NO: 907752 - DNA, 33 bp, Homo sapien
acagatggctataaaatgagatgctcagtgcca

SEQ ID NO: 907753 - DNA, 33 bp, Homo sapien
ttgaagcatcctcctggaagaggccttagattg

SEQ ID NO: 907754 - DNA, 33 bp, Homo sapien
ttgaagcatcctcctgtaagaggccttagattg

SEQ ID NO: 907755 - DNA, 33 bp, Homo sapien
gatattggttcaaaacagttaccttagtgccag

SEQ ID NO: 907756 - DNA, 33 bp, Homo sapien
gatattggttcaaaacggttaccttagtgccag

SEQ ID NO: 907757 - DNA, 33 bp, Homo sapien
tctggtaagcttgctgcaagttggccctttggg

SEQ ID NO: 907758 - DNA, 33 bp, Homo sapien
tctggtaagcttgctggaagttggccctttggg

SEQ ID NO: 907759 - DNA, 33 bp, Homo sapien
ataaaggtcactactaataaggactcaaaactg

SEQ ID NO: 907760 - DNA, 33 bp, Homo sapien
ataaaggtcactactattaaggactcaaaactg

SEQ ID NO: 907761 - DNA, 33 bp, Homo sapien
taccataggcgcattaagagaacaaacagaaac

SEQ ID NO: 907762 - DNA, 33 bp, Homo sapien
taccataggcgcattatgagaacaaacagaaac

SEQ ID NO: 907763 - DNA, 33 bp, Homo sapien
aactctacataacaaactttcaaggaagagtta

SEQ ID NO: 907764 - DNA, 33 bp, Homo sapien
aactctacataacaaattttcaaggaagagtta

SEQ ID NO: 907765 - DNA, 33 bp, Homo sapien
ccattaaaaatgtgcccgaaagcatggcagcat

SEQ ID NO: 907766 - DNA, 33 bp, Homo sapien
ccattaaaaatgtgcctgaaagcatggcagcat

SEQ ID NO: 907767 - DNA, 33 bp, Homo sapien
ggaggccgaacttctacgatcaagttaatcatt

SEQ ID NO: 907768 - DNA, 33 bp, Homo sapien
ggaggccgaacttctatgatcaagttaatcatt

SEQ ID NO: 907769 - DNA, 33 bp, Homo sapien
ggtctgaaacaaggcaaagcgaatgattaactt

SEQ ID NO: 907770 - DNA, 33 bp, Homo sapien
ggtctgaaacaaggcatagcgaatgattaactt

SEQ ID NO: 907771 - DNA, 33 bp, Homo sapien
tgtggtgattattttacaggtttttgtgaagat

SEQ ID NO: 907772 - DNA, 33 bp, Homo sapien
tgtggtgattattttataggtttttgtgaagat

SEQ ID NO: 907773 - DNA, 33 bp, Homo sapien
tcaggtggaaatagagacaagaagcagccagtt

SEQ ID NO: 907774 - DNA, 33 bp, Homo sapien
tcaggtggaaatagagccaagaagcagccagtt

SEQ ID NO: 907775 - DNA, 33 bp, Homo sapien
agggcacacaataaaagaaaacagcaaggcagc

SEQ ID NO: 907776 - DNA, 33 bp, Homo sapien
agggcacacaataaaataaaacagcaaggcagc

SEQ ID NO: 907777 - DNA, 33 bp, Homo sapien
agcaggtcagggagaaacttcctccaaagcagc

SEQ ID NO: 907778 - DNA, 33 bp, Homo sapien
agcaggtcagggagaaccttcctccaaagcagc

SEQ ID NO: 907779 - DNA, 33 bp, Homo sapien
ctggtgaaagctaagccgcctccaatgaccttg

SEQ ID NO: 907780 - DNA, 33 bp, Homo sapien
ctggtgaaagctaagctgcctccaatgaccttg

SEQ ID NO: 907781 - DNA, 33 bp, Homo sapien
gatggactgtgggtgaaaacaaaaacgatgatt

SEQ ID NO: 907782 - DNA, 33 bp, Homo sapien
gatggactgtgggtgacaacaaaaacgatgatt

SEQ ID NO: 907783 - DNA, 33 bp, Homo sapien
acacaagttcatagaacgagggctgaatattct

SEQ ID NO: 907784 - DNA, 33 bp, Homo sapien
acacaagttcatagaatgagggctgaatattct

SEQ ID NO: 907785 - DNA, 33 bp, Homo sapien
ctaaagcataaataagcctaagaaagaattgtt

SEQ ID NO: 907786 - DNA, 33 bp, Homo sapien
ctaaagcataaataaggctaagaaagaattgtt

SEQ ID NO: 907787 - DNA, 33 bp, Homo sapien
tacttttgattataccccacagccggagcagac

SEQ ID NO: 907788 - DNA, 33 bp, Homo sapien
tacttttgattataccgcacagccggagcagac

SEQ ID NO: 907789 - DNA, 33 bp, Homo sapien
gctccttgaactctggaaattgcctgagtgatg

SEQ ID NO: 907790 - DNA, 33 bp, Homo sapien
gctccttgaactctgggaattgcctgagtgatg

SEQ ID NO: 907791 - DNA, 33 bp, Homo sapien
gatctccaggcttagcagaccacgagtgctgcg

SEQ ID NO: 907792 - DNA, 33 bp, Homo sapien
gatctccaggcttagcggaccacgagtgctgcg

SEQ ID NO: 907793 - DNA, 33 bp, Homo sapien
atagaataaccttgtacgagactttcaagtttt

SEQ ID NO: 907794 - DNA, 33 bp, Homo sapien
atagaataaccttgtatgagactttcaagtttt

SEQ ID NO: 907795 - DNA, 33 bp, Homo sapien
ccagttatcatagggaacccggaagaactcaac

SEQ ID NO: 907796 - DNA, 33 bp, Homo sapien
ccagttatcatagggaccccggaagaactcaac

SEQ ID NO: 907797 - DNA, 33 bp, Homo sapien
gtagaaatacctgatcactcagacaatttacac

SEQ ID NO: 907798 - DNA, 33 bp, Homo sapien
gtagaaatacctgatcgctcagacaatttacac

SEQ ID NO: 907799 - DNA, 33 bp, Homo sapien
cttaaatggataacaaacagttctgtaaaatta

SEQ ID NO: 907800 - DNA, 33 bp, Homo sapien
cttaaatggataacaagcagttctgtaaaatta

SEQ ID NO: 907801 - DNA, 33 bp, Homo sapien
gttcctggatggaagacgcgtttctgcagccct

SEQ ID NO: 907802 - DNA, 33 bp, Homo sapien
gttcctggatggaagatgcgtttctgcagccct

SEQ ID NO: 907803 - DNA, 33 bp, Homo sapien
gtgtttgccaaaatgacgtgctggttcaactgg

SEQ ID NO: 907804 - DNA, 33 bp, Homo sapien
gtgtttgccaaaatgaggtgctggttcaactgg

SEQ ID NO: 907805 - DNA, 33 bp, Homo sapien
gtgctggttcaactggacatgaagtgataagca

SEQ ID NO: 907806 - DNA, 33 bp, Homo sapien
gtgctggttcaactgggcatgaagtgataagca

SEQ ID NO: 907807 - DNA, 33 bp, Homo sapien
tgatttgattatcctcaaatcaatctatatgtt

SEQ ID NO: 907808 - DNA, 33 bp, Homo sapien
tgatttgattatcctcgaatcaatctatatgtt

SEQ ID NO: 907809 - DNA, 33 bp, Homo sapien
cttgtgcctgaatggaacttaactgacaggtct

SEQ ID NO: 907810 - DNA, 33 bp, Homo sapien
cttgtgcctgaatggagcttaactgacaggtct

SEQ ID NO: 907811 - DNA, 33 bp, Homo sapien
attcagccagagagaaataaacatcttactttc

SEQ ID NO: 907812 - DNA, 33 bp, Homo sapien
attcagccagagagaactaaacatcttactttc

SEQ ID NO: 907813 - DNA, 33 bp, Homo sapien
atgggaaactccatggaaattctcattcagctg

SEQ ID NO: 907814 - DNA, 33 bp, Homo sapien
atgggaaactccatggtaattctcattcagctg

SEQ ID NO: 907815 - DNA, 33 bp, Homo sapien
actgatatgaaatggaaagctggagctgtgaga

SEQ ID NO: 907816 - DNA, 33 bp, Homo sapien
actgatatgaaatggagagctggagctgtgaga

SEQ ID NO: 907817 - DNA, 33 bp, Homo sapien
tgtgacccaagttgccactaacttctatgggct

SEQ ID NO: 907818 - DNA, 33 bp, Homo sapien
tgtgacccaagttgccgctaacttctatgggct

SEQ ID NO: 907819 - DNA, 33 bp, Homo sapien
tctcacattaaaaaaagtccaggagtgagggca

SEQ ID NO: 907820 - DNA, 33 bp, Homo sapien
tctcacattaaaaaaattccaggagtgagggca

SEQ ID NO: 907821 - DNA, 33 bp, Homo sapien
gctcatagcaataaaaaaacctggtgaaatatg

SEQ ID NO: 907822 - DNA, 33 bp, Homo sapien
gctcatagcaataaaagaacctggtgaaatatg

SEQ ID NO: 907823 - DNA, 33 bp, Homo sapien
agctagtcttgggataaccacctctgctgccag

SEQ ID NO: 907824 - DNA, 33 bp, Homo sapien
agctagtcttgggatacccacctctgctgccag

SEQ ID NO: 907825 - DNA, 33 bp, Homo sapien
ctctttaaaaggacacaggtgctaccagattag

SEQ ID NO: 907826 - DNA, 33 bp, Homo sapien
ctctttaaaaggacaccggtgctaccagattag

SEQ ID NO: 907827 - DNA, 33 bp, Homo sapien
cacagaggactgggaaagaatgctgtgatttaa

SEQ ID NO: 907828 - DNA, 33 bp, Homo sapien
cacagaggactgggaaggaatgctgtgatttaa

SEQ ID NO: 907829 - DNA, 33 bp, Homo sapien
tttataacagattatccctaatcacaggatcat

SEQ ID NO: 907830 - DNA, 33 bp, Homo sapien
tttataacagattatctctaatcacaggatcat

SEQ ID NO: 907831 - DNA, 33 bp, Homo sapien
tgtcaagtttatgagacgacttgaggtttgctg

SEQ ID NO: 907832 - DNA, 33 bp, Homo sapien
tgtcaagtttatgagatgacttgaggtttgctg

SEQ ID NO: 907833 - DNA, 33 bp, Homo sapien
agtggaacaggactctaaattgcagtccattag

SEQ ID NO: 907834 - DNA, 33 bp, Homo sapien
agtggaacaggactcttaattgcagtccattag

SEQ ID NO: 907835 - DNA, 33 bp, Homo sapien
tgaaatccagccggacacagattgccagttcat

SEQ ID NO: 907836 - DNA, 33 bp, Homo sapien
tgaaatccagccggacgcagattgccagttcat

SEQ ID NO: 907837 - DNA, 33 bp, Homo sapien
ttattactctgtgggacactggaataaagtaca

SEQ ID NO: 907838 - DNA, 33 bp, Homo sapien
ttattactctgtgggatactggaataaagtaca

SEQ ID NO: 907839 - DNA, 33 bp, Homo sapien
atccagaagatttcccagagtaagaatcaaaat

SEQ ID NO: 907840 - DNA, 33 bp, Homo sapien
atccagaagatttcccggagtaagaatcaaaat

SEQ ID NO: 907841 - DNA, 33 bp, Homo sapien
gggctgtactggattacatcccttatggtggaa

SEQ ID NO: 907842 - DNA, 33 bp, Homo sapien
gggctgtactggattatatcccttatggtggaa

SEQ ID NO: 907843 - DNA, 33 bp, Homo sapien
tctttcctcactggacagcaagctctttagaca

SEQ ID NO: 907844 - DNA, 33 bp, Homo sapien
tctttcctcactggaccgcaagctctttagaca

SEQ ID NO: 907845 - DNA, 33 bp, Homo sapien
ccaccatgaggcccaaaacctggcacagaaggg

SEQ ID NO: 907846 - DNA, 33 bp, Homo sapien
ccaccatgaggcccaagacctggcacagaaggg

SEQ ID NO: 907847 - DNA, 33 bp, Homo sapien
ctgaatctgaaaccaaataatatctaagaggcc

SEQ ID NO: 907848 - DNA, 33 bp, Homo sapien
ctgaatctgaaaccaagtaatatctaagaggcc

SEQ ID NO: 907849 - DNA, 33 bp, Homo sapien
agccactaaatggtgaaagaagcataggaacca

SEQ ID NO: 907850 - DNA, 33 bp, Homo sapien
agccactaaatggtgagagaagcataggaacca

SEQ ID NO: 907851 - DNA, 33 bp, Homo sapien
gtttgggccctggaaaactcccttacacagcac

SEQ ID NO: 907852 - DNA, 33 bp, Homo sapien
gtttgggccctggaaagctcccttacacagcac

SEQ ID NO: 907853 - DNA, 33 bp, Homo sapien
ttattcaaccaacacacgtttctggctccctcc

SEQ ID NO: 907854 - DNA, 33 bp, Homo sapien
ttattcaaccaacacaggtttctggctccctcc

SEQ ID NO: 907855 - DNA, 33 bp, Homo sapien
tcacaattttggttcagccttgacgcgtttgtc

SEQ ID NO: 907856 - DNA, 33 bp, Homo sapien
tcacaattttggttcatccttgacgcgtttgtc

SEQ ID NO: 907857 - DNA, 33 bp, Homo sapien
tgaaccaaaattgtgacgctctcagcgcaactt

SEQ ID NO: 907858 - DNA, 33 bp, Homo sapien
tgaaccaaaattgtgatgctctcagcgcaactt

SEQ ID NO: 907859 - DNA, 33 bp, Homo sapien
cccttccatcacatgacacgatgggcaagactc

SEQ ID NO: 907860 - DNA, 33 bp, Homo sapien
cccttccatcacatgatacgatgggcaagactc

SEQ ID NO: 907861 - DNA, 33 bp, Homo sapien
ccagcttctttggaaaagttcctaaggtcaata

SEQ ID NO: 907862 - DNA, 33 bp, Homo sapien
ccagcttctttggaaacgttcctaaggtcaata

SEQ ID NO: 907863 - DNA, 33 bp, Homo sapien
ggacatccagcccacactcagagacacaaggat

SEQ ID NO: 907864 - DNA, 33 bp, Homo sapien
ggacatccagcccacagtcagagacacaaggat

SEQ ID NO: 907865 - DNA, 33 bp, Homo sapien
cggattccttttccgacgtcatgggaagcgggg

SEQ ID NO: 907866 - DNA, 33 bp, Homo sapien
cggattccttttccgatgtcatgggaagcgggg

SEQ ID NO: 907867 - DNA, 33 bp, Homo sapien
aaagttttaattccaccgcacaaaagacggttc

SEQ ID NO: 907868 - DNA, 33 bp, Homo sapien
aaagttttaattccactgcacaaaagacggttc

SEQ ID NO: 907869 - DNA, 33 bp, Homo sapien
cctcacagcaacagtaacaggagtaactgctcc

SEQ ID NO: 907870 - DNA, 33 bp, Homo sapien
cctcacagcaacagtagcaggagtaactgctcc

SEQ ID NO: 907871 - DNA, 33 bp, Homo sapien
actgctaatcaggcccagataatgatgcatgaa

SEQ ID NO: 907872 - DNA, 33 bp, Homo sapien
actgctaatcaggcccggataatgatgcatgaa

SEQ ID NO: 907873 - DNA, 33 bp, Homo sapien
cttttggctcctggcactaactgaatttgactg

SEQ ID NO: 907874 - DNA, 33 bp, Homo sapien
cttttggctcctggcagtaactgaatttgactg

SEQ ID NO: 907875 - DNA, 33 bp, Homo sapien
gaacaagagtctagccacaaaagctggggagag

SEQ ID NO: 907876 - DNA, 33 bp, Homo sapien
gaacaagagtctagccccaaaagctggggagag

SEQ ID NO: 907877 - DNA, 33 bp, Homo sapien
cacaatgctgtgaaacagatctccaggacctca

SEQ ID NO: 907878 - DNA, 33 bp, Homo sapien
cacaatgctgtgaaaccgatctccaggacctca

SEQ ID NO: 907879 - DNA, 33 bp, Homo sapien
cctcttactacaaagactatcaagaaagcagat

SEQ ID NO: 907880 - DNA, 33 bp, Homo sapien
cctcttactacaaagattatcaagaaagcagat

SEQ ID NO: 907881 - DNA, 33 bp, Homo sapien
aagcatctgaaagtcaaaagtcaccaaggaacc

SEQ ID NO: 907882 - DNA, 33 bp, Homo sapien
aagcatctgaaagtcagaagtcaccaaggaacc

SEQ ID NO: 907883 - DNA, 33 bp, Homo sapien
tatcaatcagaaagacggcagccgtggcgtgga

SEQ ID NO: 907884 - DNA, 33 bp, Homo sapien
tatcaatcagaaagactgcagccgtggcgtgga

SEQ ID NO: 907885 - DNA, 33 bp, Homo sapien
gtccaagcgcaggcccaacgtgcccataatgcc

SEQ ID NO: 907886 - DNA, 33 bp, Homo sapien
gtccaagcgcaggcccgacgtgcccataatgcc

SEQ ID NO: 907887 - DNA, 33 bp, Homo sapien
aaaccaaagtggagcaaatgcttccaaaaatga

SEQ ID NO: 907888 - DNA, 33 bp, Homo sapien
aaaccaaagtggagcacatgcttccaaaaatga

SEQ ID NO: 907889 - DNA, 33 bp, Homo sapien
ccaagtggaacatcaacaactgcagggaatcat

SEQ ID NO: 907890 - DNA, 33 bp, Homo sapien
ccaagtggaacatcaagaactgcagggaatcat

SEQ ID NO: 907891 - DNA, 33 bp, Homo sapien
acccaaaggtgcaaagaacagccgaccccatgc

SEQ ID NO: 907892 - DNA, 33 bp, Homo sapien
acccaaaggtgcaaaggacagccgaccccatgc

SEQ ID NO: 907893 - DNA, 33 bp, Homo sapien
tttctttaaaaagcacacattcagacatatttt

SEQ ID NO: 907894 - DNA, 33 bp, Homo sapien
tttctttaaaaagcactcattcagacatatttt

SEQ ID NO: 907895 - DNA, 33 bp, Homo sapien
cttttgggtagattacaacataggtgtccagga

SEQ ID NO: 907896 - DNA, 33 bp, Homo sapien
cttttgggtagattacgacataggtgtccagga

SEQ ID NO: 907897 - DNA, 33 bp, Homo sapien
tctattcggtgctggcaacatctgttccttcag

SEQ ID NO: 907898 - DNA, 33 bp, Homo sapien
tctattcggtgctggccacatctgttccttcag

SEQ ID NO: 907899 - DNA, 33 bp, Homo sapien
gggtgaacatggcctcaatgtcagacagctaag

SEQ ID NO: 907900 - DNA, 33 bp, Homo sapien
gggtgaacatggcctcgatgtcagacagctaag

SEQ ID NO: 907901 - DNA, 33 bp, Homo sapien
cagagctagagaacgaccttatttccctcagtg

SEQ ID NO: 907902 - DNA, 33 bp, Homo sapien
cagagctagagaacgatcttatttccctcagtg

SEQ ID NO: 907903 - DNA, 33 bp, Homo sapien
gttccatagactgtacaggaagcagatgccagc

SEQ ID NO: 907904 - DNA, 33 bp, Homo sapien
gttccatagactgtacgggaagcagatgccagc

SEQ ID NO: 907905 - DNA, 33 bp, Homo sapien
atggtcagaggtcagaacaatattgggaggagt

SEQ ID NO: 907906 - DNA, 33 bp, Homo sapien
atggtcagaggtcagatcaatattgggaggagt

SEQ ID NO: 907907 - DNA, 33 bp, Homo sapien
tggtctaagtcggcagcattcagagtgctcctc

SEQ ID NO: 907908 - DNA, 33 bp, Homo sapien
tggtctaagtcggcaggattcagagtgctcctc

SEQ ID NO: 907909 - DNA, 33 bp, Homo sapien
caggaatggatctcacacactgtaattgttcag

SEQ ID NO: 907910 - DNA, 33 bp, Homo sapien
caggaatggatctcacgcactgtaattgttcag

SEQ ID NO: 907911 - DNA, 33 bp, Homo sapien
ttctggaagaacacacaggcaaaaagaattcag

SEQ ID NO: 907912 - DNA, 33 bp, Homo sapien
ttctggaagaacacacgggcaaaaagaattcag

SEQ ID NO: 907913 - DNA, 33 bp, Homo sapien
tagcaagagattctaaaccagatttattattct

SEQ ID NO: 907914 - DNA, 33 bp, Homo sapien
tagcaagagattctaagccagatttattattct

SEQ ID NO: 907915 - DNA, 33 bp, Homo sapien
agtcacaatggggaaaataccatctcttcaata

SEQ ID NO: 907916 - DNA, 33 bp, Homo sapien
agtcacaatggggaaagtaccatctcttcaata

SEQ ID NO: 907917 - DNA, 33 bp, Homo sapien
tggcagtttaaaaagaataggccttctgcacaa

SEQ ID NO: 907918 - DNA, 33 bp, Homo sapien
tggcagtttaaaaagagtaggccttctgcacaa

SEQ ID NO: 907919 - DNA, 33 bp, Homo sapien
cctgcgatttgcattcactgcaccatgtcacct

SEQ ID NO: 907920 - DNA, 33 bp, Homo sapien
cctgcgatttgcattcgctgcaccatgtcacct

SEQ ID NO: 907921 - DNA, 33 bp, Homo sapien
tggctgctggcaaaccacatgtgcttaaaggga

SEQ ID NO: 907922 - DNA, 33 bp, Homo sapien
tggctgctggcaaaccgcatgtgcttaaaggga

SEQ ID NO: 907923 - DNA, 33 bp, Homo sapien
cagacacaaaccagacacagcttatgtaccgct

SEQ ID NO: 907924 - DNA, 33 bp, Homo sapien
cagacacaaaccagacgcagcttatgtaccgct

SEQ ID NO: 907925 - DNA, 33 bp, Homo sapien
ctaaagagatgatgaaagatcagcaaaaagaag

SEQ ID NO: 907926 - DNA, 33 bp, Homo sapien
ctaaagagatgatgaatgatcagcaaaaagaag

SEQ ID NO: 907927 - DNA, 33 bp, Homo sapien
tttatgactttctcctgaacatttattcaattt

SEQ ID NO: 907928 - DNA, 33 bp, Homo sapien
tttatgactttctccttaacatttattcaattt

SEQ ID NO: 907929 - DNA, 33 bp, Homo sapien
tttggggcataacaggaatctaattatgtatag

SEQ ID NO: 907930 - DNA, 33 bp, Homo sapien
tttggggcataacaggcatctaattatgtatag

SEQ ID NO: 907931 - DNA, 33 bp, Homo sapien
ctgtgagtattcatacacttaatccaggtcagc

SEQ ID NO: 907932 - DNA, 33 bp, Homo sapien
ctgtgagtattcatacccttaatccaggtcagc

SEQ ID NO: 907933 - DNA, 33 bp, Homo sapien
ttttgttttcatgacactggctttttaaaaaca

SEQ ID NO: 907934 - DNA, 33 bp, Homo sapien
ttttgttttcatgacattggctttttaaaaaca

SEQ ID NO: 907935 - DNA, 33 bp, Homo sapien
agccagaacaaaaccaacgcaggacctgactca

SEQ ID NO: 907936 - DNA, 33 bp, Homo sapien
agccagaacaaaaccagcgcaggacctgactca

SEQ ID NO: 907937 - DNA, 33 bp, Homo sapien
ctcttcaagaaagtgacagtaacagcacctatg

SEQ ID NO: 907938 - DNA, 33 bp, Homo sapien
ctcttcaagaaagtgatagtaacagcacctatg

SEQ ID NO: 907939 - DNA, 33 bp, Homo sapien
aggtgcgcacagagaccggattgctggttttgt

SEQ ID NO: 907940 - DNA, 33 bp, Homo sapien
aggtgcgcacagagactggattgctggttttgt

SEQ ID NO: 907941 - DNA, 33 bp, Homo sapien
cctcccaaatctgcaccgaactaggctgcatgg

SEQ ID NO: 907942 - DNA, 33 bp, Homo sapien
cctcccaaatctgcactgaactaggctgcatgg

SEQ ID NO: 907943 - DNA, 33 bp, Homo sapien
ctcttgtaccaccattcaatctgcctcaggatg

SEQ ID NO: 907944 - DNA, 33 bp, Homo sapien
ctcttgtaccaccatttaatctgcctcaggatg

SEQ ID NO: 907945 - DNA, 33 bp, Homo sapien
cctaaattctttctcacgtgaaatccaacaacc

SEQ ID NO: 907946 - DNA, 33 bp, Homo sapien
cctaaattctttctcatgtgaaatccaacaacc

SEQ ID NO: 907947 - DNA, 33 bp, Homo sapien
ttcagagtctttaacacaggctgtaagaaataa

SEQ ID NO: 907948 - DNA, 33 bp, Homo sapien
ttcagagtctttaacataggctgtaagaaataa

SEQ ID NO: 907949 - DNA, 33 bp, Homo sapien
tacgtacagcaagcaagatttaaacacaaaaaa

SEQ ID NO: 907950 - DNA, 33 bp, Homo sapien
tacgtacagcaagcaatatttaaacacaaaaaa

SEQ ID NO: 907951 - DNA, 33 bp, Homo sapien
tgaacaaattgagctgcaatggcctgtaaattg

SEQ ID NO: 907952 - DNA, 33 bp, Homo sapien
tgaacaaattgagctgtaatggcctgtaaattg

SEQ ID NO: 907953 - DNA, 33 bp, Homo sapien
tggaccttgtttactggcagaagcaatggagtt

SEQ ID NO: 907954 - DNA, 33 bp, Homo sapien
tggaccttgtttactgtcagaagcaatggagtt

SEQ ID NO: 907955 - DNA, 33 bp, Homo sapien
tttatctagtattcacaattcacatttgggttg

SEQ ID NO: 907956 - DNA, 33 bp, Homo sapien
tttatctagtattcacgattcacatttgggttg

SEQ ID NO: 907957 - DNA, 33 bp, Homo sapien
acaagtcccctatggacggctaaactgaaatag

SEQ ID NO: 907958 - DNA, 33 bp, Homo sapien
acaagtcccctatggatggctaaactgaaatag

SEQ ID NO: 907959 - DNA, 33 bp, Homo sapien
acaccttttctcattacgtaagcataggtgctg

SEQ ID NO: 907960 - DNA, 33 bp, Homo sapien
acaccttttctcattatgtaagcataggtgctg

SEQ ID NO: 907961 - DNA, 33 bp, Homo sapien
ttgtctattgcttatcaatcagtcaatttttaa

SEQ ID NO: 907962 - DNA, 33 bp, Homo sapien
ttgtctattgcttatcgatcagtcaatttttaa

SEQ ID NO: 907963 - DNA, 33 bp, Homo sapien
gcaggtaatttccatacagctgtgagcctgtaa

SEQ ID NO: 907964 - DNA, 33 bp, Homo sapien
gcaggtaatttccatatagctgtgagcctgtaa

SEQ ID NO: 907965 - DNA, 33 bp, Homo sapien
tcatctccaaacacaaataacctagaaaaacag

SEQ ID NO: 907966 - DNA, 33 bp, Homo sapien
tcatctccaaacacaagtaacctagaaaaacag

SEQ ID NO: 907967 - DNA, 33 bp, Homo sapien
ctgtcttttcatttcacgggggatgggatatgt

SEQ ID NO: 907968 - DNA, 33 bp, Homo sapien
ctgtcttttcatttcaggggggatgggatatgt

SEQ ID NO: 907969 - DNA, 33 bp, Homo sapien
tacccaagcctggttacgataaagacattactg

SEQ ID NO: 907970 - DNA, 33 bp, Homo sapien
tacccaagcctggttatgataaagacattactg

SEQ ID NO: 907971 - DNA, 33 bp, Homo sapien
aggaaattctcatatactaaccaacaagtcaat

SEQ ID NO: 907972 - DNA, 33 bp, Homo sapien
aggaaattctcatatattaaccaacaagtcaat

SEQ ID NO: 907973 - DNA, 33 bp, Homo sapien
gtgaaccaccatctcacggttactttgtgaagt

SEQ ID NO: 907974 - DNA, 33 bp, Homo sapien
gtgaaccaccatctcatggttactttgtgaagt

SEQ ID NO: 907975 - DNA, 33 bp, Homo sapien
aatgtatgtgtcagccaatgttagaacagatcc

SEQ ID NO: 907976 - DNA, 33 bp, Homo sapien
aatgtatgtgtcagccgatgttagaacagatcc

SEQ ID NO: 907977 - DNA, 33 bp, Homo sapien
ctttggcatcatcaaagatcaagccgaggaaca

SEQ ID NO: 907978 - DNA, 33 bp, Homo sapien
ctttggcatcatcaaatatcaagccgaggaaca

SEQ ID NO: 907979 - DNA, 33 bp, Homo sapien
cgagagagagtgccgcaaagttttaaaaaacca

SEQ ID NO: 907980 - DNA, 33 bp, Homo sapien
cgagagagagtgccgccaagttttaaaaaacca

SEQ ID NO: 907981 - DNA, 33 bp, Homo sapien
gtcacttgggaaatgcaagtcaaaagtacaata

SEQ ID NO: 907982 - DNA, 33 bp, Homo sapien
gtcacttgggaaatgcgagtcaaaagtacaata

SEQ ID NO: 907983 - DNA, 33 bp, Homo sapien
tccatttaacttcaccacacttgtagcacctaa

SEQ ID NO: 907984 - DNA, 33 bp, Homo sapien
tccatttaacttcaccgcacttgtagcacctaa

SEQ ID NO: 907985 - DNA, 33 bp, Homo sapien
ccccatcctcactacactcagagaaatcaaccc

SEQ ID NO: 907986 - DNA, 33 bp, Homo sapien
ccccatcctcactacattcagagaaatcaaccc

SEQ ID NO: 907987 - DNA, 33 bp, Homo sapien
ctgttggaaatacagaatcatgggccccatcca

SEQ ID NO: 907988 - DNA, 33 bp, Homo sapien
ctgttggaaatacagagtcatgggccccatcca

SEQ ID NO: 907989 - DNA, 33 bp, Homo sapien
cccagctctagaacaggattcccagaaagagca

SEQ ID NO: 907990 - DNA, 33 bp, Homo sapien
cccagctctagaacagtattcccagaaagagca

SEQ ID NO: 907991 - DNA, 33 bp, Homo sapien
ttgtcctctatggtggcatcctgaaattggctt

SEQ ID NO: 907992 - DNA, 33 bp, Homo sapien
ttgtcctctatggtggtatcctgaaattggctt

SEQ ID NO: 907993 - DNA, 33 bp, Homo sapien
ataacagtggcaaaataatttatatacatgata

SEQ ID NO: 907994 - DNA, 33 bp, Homo sapien
ataacagtggcaaaatgatttatatacatgata

SEQ ID NO: 907995 - DNA, 33 bp, Homo sapien
ggccagtctggtggtccctcttccatgccaggg

SEQ ID NO: 907996 - DNA, 33 bp, Homo sapien
ggccagtctggtggtctctcttccatgccaggg

SEQ ID NO: 907997 - DNA, 33 bp, Homo sapien
tcccgaggggaggtgcaaggtgaagaggtgggc

SEQ ID NO: 907998 - DNA, 33 bp, Homo sapien
tcccgaggggaggtgcgaggtgaagaggtgggc

SEQ ID NO: 907999 - DNA, 33 bp, Homo sapien
ctgattagttttatgaactgacctttaaaggag

SEQ ID NO: 908000 - DNA, 33 bp, Homo sapien
ctgattagttttatgagctgacctttaaaggag

SEQ ID NO: 908001 - DNA, 33 bp, Homo sapien
gaaggtgagtggataaactgttctatatttcag

SEQ ID NO: 908002 - DNA, 33 bp, Homo sapien
gaaggtgagtggataagctgttctatatttcag

SEQ ID NO: 908003 - DNA, 33 bp, Homo sapien
agtctgagtagaactcacgctgattggaagatg

SEQ ID NO: 908004 - DNA, 33 bp, Homo sapien
agtctgagtagaactcgcgctgattggaagatg

SEQ ID NO: 908005 - DNA, 33 bp, Homo sapien
ccttaaggagatgtgaaatagtgaagattcatc

SEQ ID NO: 908006 - DNA, 33 bp, Homo sapien
ccttaaggagatgtgagatagtgaagattcatc

SEQ ID NO: 908007 - DNA, 33 bp, Homo sapien
aaaaactatggaataaagcaaaagcaatacaag

SEQ ID NO: 908008 - DNA, 33 bp, Homo sapien
aaaaactatggaataaggcaaaagcaatacaag

SEQ ID NO: 908009 - DNA, 33 bp, Homo sapien
aattcacaattccgccaagtacacagatatacg

SEQ ID NO: 908010 - DNA, 33 bp, Homo sapien
aattcacaattccgccgagtacacagatatacg

SEQ ID NO: 908011 - DNA, 33 bp, Homo sapien
cagatcaatgttaggaagcatttcccctatgtt

SEQ ID NO: 908012 - DNA, 33 bp, Homo sapien
cagatcaatgttaggaggcatttcccctatgtt

SEQ ID NO: 908013 - DNA, 33 bp, Homo sapien
tttgcagctgctccacaacaaatctgctgggcc

SEQ ID NO: 908014 - DNA, 33 bp, Homo sapien
tttgcagctgctccactacaaatctgctgggcc

SEQ ID NO: 908015 - DNA, 33 bp, Homo sapien
acattccattgctccacactttttggcagatgc

SEQ ID NO: 908016 - DNA, 33 bp, Homo sapien
acattccattgctccagactttttggcagatgc

SEQ ID NO: 908017 - DNA, 33 bp, Homo sapien
actgaatttgtcgacacggagtggtcctggatt

SEQ ID NO: 908018 - DNA, 33 bp, Homo sapien
actgaatttgtcgacatggagtggtcctggatt

SEQ ID NO: 908019 - DNA, 33 bp, Homo sapien
taaaagaaaaacagcactgcaataaaacaacag

SEQ ID NO: 908020 - DNA, 33 bp, Homo sapien
taaaagaaaaacagcagtgcaataaaacaacag

SEQ ID NO: 908021 - DNA, 33 bp, Homo sapien
aatctagattcacacccaatccagcctctcact

SEQ ID NO: 908022 - DNA, 33 bp, Homo sapien
aatctagattcacacctaatccagcctctcact

SEQ ID NO: 908023 - DNA, 33 bp, Homo sapien
ttttgagatactatcacgttgtcttagtggctg

SEQ ID NO: 908024 - DNA, 33 bp, Homo sapien
ttttgagatactatcatgttgtcttagtggctg

SEQ ID NO: 908025 - DNA, 33 bp, Homo sapien
gcaagtcattcacgaaattagcactaccaggta

SEQ ID NO: 908026 - DNA, 33 bp, Homo sapien
gcaagtcattcacgaatttagcactaccaggta

SEQ ID NO: 908027 - DNA, 33 bp, Homo sapien
tgaccatcaccctgacactcccaaatacaccac

SEQ ID NO: 908028 - DNA, 33 bp, Homo sapien
tgaccatcaccctgactctcccaaatacaccac

SEQ ID NO: 908029 - DNA, 33 bp, Homo sapien
tatcagcaattttaggaaaccacaagggctctt

SEQ ID NO: 908030 - DNA, 33 bp, Homo sapien
tatcagcaattttaggcaaccacaagggctctt

SEQ ID NO: 908031 - DNA, 33 bp, Homo sapien
ggctggaaactcaggagacaagtctggagtggt

SEQ ID NO: 908032 - DNA, 33 bp, Homo sapien
ggctggaaactcaggatacaagtctggagtggt

SEQ ID NO: 908033 - DNA, 33 bp, Homo sapien
agagaacagtcaaaccaggaaatgttctggctg

SEQ ID NO: 908034 - DNA, 33 bp, Homo sapien
agagaacagtcaaaccgggaaatgttctggctg

SEQ ID NO: 908035 - DNA, 33 bp, Homo sapien
tatacattaacctacccgggctatgatcattct

SEQ ID NO: 908036 - DNA, 33 bp, Homo sapien
tatacattaacctacctgggctatgatcattct

SEQ ID NO: 908037 - DNA, 33 bp, Homo sapien
ctttatgcaacactatcaagcagcaagtgggag

SEQ ID NO: 908038 - DNA, 33 bp, Homo sapien
ctttatgcaacactatgaagcagcaagtgggag

SEQ ID NO: 908039 - DNA, 33 bp, Homo sapien
gtatagacttccaaaacttcagccatttccccc

SEQ ID NO: 908040 - DNA, 33 bp, Homo sapien
gtatagacttccaaaagttcagccatttccccc

SEQ ID NO: 908041 - DNA, 33 bp, Homo sapien
caacaatcactaatgaacagaactgtgtctata

SEQ ID NO: 908042 - DNA, 33 bp, Homo sapien
caacaatcactaatgagcagaactgtgtctata

SEQ ID NO: 908043 - DNA, 33 bp, Homo sapien
cccagaggactctaaagtgcggccagagctgag

SEQ ID NO: 908044 - DNA, 33 bp, Homo sapien
cccagaggactctaaattgcggccagagctgag

SEQ ID NO: 908045 - DNA, 33 bp, Homo sapien
aacacatactccttaaaagtgcacagaacacta

SEQ ID NO: 908046 - DNA, 33 bp, Homo sapien
aacacatactccttaagagtgcacagaacacta

SEQ ID NO: 908047 - DNA, 33 bp, Homo sapien
aaatattaagcgaaacaagctgtaatgctgctc

SEQ ID NO: 908048 - DNA, 33 bp, Homo sapien
aaatattaagcgaaacgagctgtaatgctgctc

SEQ ID NO: 908049 - DNA, 33 bp, Homo sapien
aaaacatcaagaataacacactggtctctgttt

SEQ ID NO: 908050 - DNA, 33 bp, Homo sapien
aaaacatcaagaataatacactggtctctgttt

SEQ ID NO: 908051 - DNA, 33 bp, Homo sapien
tttgctccttttagccgaagtgtagacagaatc

SEQ ID NO: 908052 - DNA, 33 bp, Homo sapien
tttgctccttttagcctaagtgtagacagaatc

SEQ ID NO: 908053 - DNA, 33 bp, Homo sapien
gctcttttgcagccacaactcatggtcagtgac

SEQ ID NO: 908054 - DNA, 33 bp, Homo sapien
gctcttttgcagccaccactcatggtcagtgac

SEQ ID NO: 908055 - DNA, 33 bp, Homo sapien
gagactcggggcaaggcaaatatgtccttcaat

SEQ ID NO: 908056 - DNA, 33 bp, Homo sapien
gagactcggggcaaggtaaatatgtccttcaat

SEQ ID NO: 908057 - DNA, 33 bp, Homo sapien
cctacctaaaaggctgccaaccatgcagaggag

SEQ ID NO: 908058 - DNA, 33 bp, Homo sapien
cctacctaaaaggctgtcaaccatgcagaggag

SEQ ID NO: 908059 - DNA, 33 bp, Homo sapien
gtgagtgccattcggcccattggattgttaaat

SEQ ID NO: 908060 - DNA, 33 bp, Homo sapien
gtgagtgccattcggctcattggattgttaaat

SEQ ID NO: 908061 - DNA, 33 bp, Homo sapien
gaatgactcggccacacgaaggaaagacccttg

SEQ ID NO: 908062 - DNA, 33 bp, Homo sapien
gaatgactcggccacatgaaggaaagacccttg

SEQ ID NO: 908063 - DNA, 33 bp, Homo sapien
tactctattagcaataagggatgtgagcaccag

SEQ ID NO: 908064 - DNA, 33 bp, Homo sapien
tactctattagcaatatgggatgtgagcaccag

SEQ ID NO: 908065 - DNA, 33 bp, Homo sapien
gacacaacagaaaaacagaactcgaatctgact

SEQ ID NO: 908066 - DNA, 33 bp, Homo sapien
gacacaacagaaaaacggaactcgaatctgact

SEQ ID NO: 908067 - DNA, 33 bp, Homo sapien
tttggtaggagacttacgggaagttttcagtgt

SEQ ID NO: 908068 - DNA, 33 bp, Homo sapien
tttggtaggagacttatgggaagttttcagtgt

SEQ ID NO: 908069 - DNA, 33 bp, Homo sapien
taagctcctgcctttaaatgctgatgcttcctg

SEQ ID NO: 908070 - DNA, 33 bp, Homo sapien
taagctcctgcctttagatgctgatgcttcctg

SEQ ID NO: 908071 - DNA, 33 bp, Homo sapien
tcctgtatctgagtatcaattttagctggaata

SEQ ID NO: 908072 - DNA, 33 bp, Homo sapien
tcctgtatctgagtatgaattttagctggaata

SEQ ID NO: 908073 - DNA, 33 bp, Homo sapien
atggcatgctctcagacatactacagctttcct

SEQ ID NO: 908074 - DNA, 33 bp, Homo sapien
atggcatgctctcagagatactacagctttcct

SEQ ID NO: 908075 - DNA, 33 bp, Homo sapien
aaatgggtattaaaaagctcagcacaggtgcta

SEQ ID NO: 908076 - DNA, 33 bp, Homo sapien
aaatgggtattaaaaatctcagcacaggtgcta

SEQ ID NO: 908077 - DNA, 33 bp, Homo sapien
ttacatggcatgatagccaacaatacacaattt

SEQ ID NO: 908078 - DNA, 33 bp, Homo sapien
ttacatggcatgatagtcaacaatacacaattt

SEQ ID NO: 908079 - DNA, 33 bp, Homo sapien
tatcagagtggtacaaatatggatttctgtcat

SEQ ID NO: 908080 - DNA, 33 bp, Homo sapien
tatcagagtggtacaattatggatttctgtcat

SEQ ID NO: 908081 - DNA, 33 bp, Homo sapien
taacagttctaaacaccaatcagttgttgaaac

SEQ ID NO: 908082 - DNA, 33 bp, Homo sapien
taacagttctaaacactaatcagttgttgaaac

SEQ ID NO: 908083 - DNA, 33 bp, Homo sapien
cttcccagttgtagaaatacagatacttgaatt

SEQ ID NO: 908084 - DNA, 33 bp, Homo sapien
cttcccagttgtagaagtacagatacttgaatt

SEQ ID NO: 908085 - DNA, 33 bp, Homo sapien
tacaagtatctgcaggaaagtaatctcatttta

SEQ ID NO: 908086 - DNA, 33 bp, Homo sapien
tacaagtatctgcaggcaagtaatctcatttta

SEQ ID NO: 908087 - DNA, 33 bp, Homo sapien
ccccagtggaaatgcaataagttagttaaagta

SEQ ID NO: 908088 - DNA, 33 bp, Homo sapien
ccccagtggaaatgcattaagttagttaaagta

SEQ ID NO: 908089 - DNA, 33 bp, Homo sapien
ctacataaggaaatgaccttccaagtctctgct

SEQ ID NO: 908090 - DNA, 33 bp, Homo sapien
ctacataaggaaatgatcttccaagtctctgct

SEQ ID NO: 908091 - DNA, 33 bp, Homo sapien
tgaaaggggtttcagcaaggtggcaaaatcacc

SEQ ID NO: 908092 - DNA, 33 bp, Homo sapien
tgaaaggggtttcagcgaggtggcaaaatcacc

SEQ ID NO: 908093 - DNA, 33 bp, Homo sapien
tcttcttttggaagtacggagacgtatggagag

SEQ ID NO: 908094 - DNA, 33 bp, Homo sapien
tcttcttttggaagtagggagacgtatggagag

SEQ ID NO: 908095 - DNA, 33 bp, Homo sapien
tgattagattgactgacggatcgcttgcctggt

SEQ ID NO: 908096 - DNA, 33 bp, Homo sapien
tgattagattgactgatggatcgcttgcctggt

SEQ ID NO: 908097 - DNA, 33 bp, Homo sapien
ctaaaatgatgaagaccgataacacttaatgtt

SEQ ID NO: 908098 - DNA, 33 bp, Homo sapien
ctaaaatgatgaagactgataacacttaatgtt

SEQ ID NO: 908099 - DNA, 33 bp, Homo sapien
actcagtggcaaacacaggaagtttggctttat

SEQ ID NO: 908100 - DNA, 33 bp, Homo sapien
actcagtggcaaacacgggaagtttggctttat

SEQ ID NO: 908101 - DNA, 33 bp, Homo sapien
accccagtaacttgccaaaaacaaaaagtagag

SEQ ID NO: 908102 - DNA, 33 bp, Homo sapien
accccagtaacttgcctaaaacaaaaagtagag

SEQ ID NO: 908103 - DNA, 33 bp, Homo sapien
agcaagagagtctcttaaaaaaaatccagaaca

SEQ ID NO: 908104 - DNA, 33 bp, Homo sapien
agcaagagagtctctttaaaaaaatccagaaca

SEQ ID NO: 908105 - DNA, 33 bp, Homo sapien
tgctggaacttgagaggcataatatggaaggaa

SEQ ID NO: 908106 - DNA, 33 bp, Homo sapien
tgctggaacttgagagtcataatatggaaggaa

SEQ ID NO: 908107 - DNA, 33 bp, Homo sapien
tagtgccacaagctaaaccttttcatcgcacct

SEQ ID NO: 908108 - DNA, 33 bp, Homo sapien
tagtgccacaagctaacccttttcatcgcacct

SEQ ID NO: 908109 - DNA, 33 bp, Homo sapien
gttataacagtgaatgccaagttataaagaagt

SEQ ID NO: 908110 - DNA, 33 bp, Homo sapien
gttataacagtgaatggcaagttataaagaagt

SEQ ID NO: 908111 - DNA, 33 bp, Homo sapien
agattgatgtaattaccattcccaatgattcat

SEQ ID NO: 908112 - DNA, 33 bp, Homo sapien
agattgatgtaattactattcccaatgattcat

SEQ ID NO: 908113 - DNA, 33 bp, Homo sapien
taacatcataatgccacggacttgtgcctttag

SEQ ID NO: 908114 - DNA, 33 bp, Homo sapien
taacatcataatgccagggacttgtgcctttag

SEQ ID NO: 908115 - DNA, 33 bp, Homo sapien
gctgcgcgtggcacaaaaaatgaggctataaag

SEQ ID NO: 908116 - DNA, 33 bp, Homo sapien
gctgcgcgtggcacaacaaatgaggctataaag

SEQ ID NO: 908117 - DNA, 33 bp, Homo sapien
gggaggagctctggaacgatcagatgcctgccc

SEQ ID NO: 908118 - DNA, 33 bp, Homo sapien
gggaggagctctggaatgatcagatgcctgccc

SEQ ID NO: 908119 - DNA, 33 bp, Homo sapien
ttcatgcagagaattacactttcaactaaatca

SEQ ID NO: 908120 - DNA, 33 bp, Homo sapien
ttcatgcagagaattagactttcaactaaatca

SEQ ID NO: 908121 - DNA, 33 bp, Homo sapien
tcacattccttctaaacggcatttcataattcc

SEQ ID NO: 908122 - DNA, 33 bp, Homo sapien
tcacattccttctaaatggcatttcataattcc

SEQ ID NO: 908123 - DNA, 33 bp, Homo sapien
cgttaacaagaaaaaaaggttagagatagctga

SEQ ID NO: 908124 - DNA, 33 bp, Homo sapien
cgttaacaagaaaaaagggttagagatagctga

SEQ ID NO: 908125 - DNA, 33 bp, Homo sapien
atacctggtctttgcactaaactgatgtatgat

SEQ ID NO: 908126 - DNA, 33 bp, Homo sapien
atacctggtctttgcattaaactgatgtatgat

SEQ ID NO: 908127 - DNA, 33 bp, Homo sapien
gcaaaagcatggaaaaggatctatcagataaac

SEQ ID NO: 908128 - DNA, 33 bp, Homo sapien
gcaaaagcatggaaaatgatctatcagataaac

SEQ ID NO: 908129 - DNA, 33 bp, Homo sapien
catttgtgttgtccttaaaaaactgacttcaaa

SEQ ID NO: 908130 - DNA, 33 bp, Homo sapien
catttgtgttgtccttgaaaaactgacttcaaa

SEQ ID NO: 908131 - DNA, 33 bp, Homo sapien
gaagctctcataaataacactatcctcctaccc

SEQ ID NO: 908132 - DNA, 33 bp, Homo sapien
gaagctctcataaatagcactatcctcctaccc

SEQ ID NO: 908133 - DNA, 33 bp, Homo sapien
agcaccaatcctacaactgagtcaggccagaca

SEQ ID NO: 908134 - DNA, 33 bp, Homo sapien
agcaccaatcctacaattgagtcaggccagaca

SEQ ID NO: 908135 - DNA, 33 bp, Homo sapien
tgagcagagccctaagaatgtgctgaaagtcaa

SEQ ID NO: 908136 - DNA, 33 bp, Homo sapien
tgagcagagccctaaggatgtgctgaaagtcaa

SEQ ID NO: 908137 - DNA, 33 bp, Homo sapien
tcctagagaggataatcaggtaacagcagagct

SEQ ID NO: 908138 - DNA, 33 bp, Homo sapien
tcctagagaggataatgaggtaacagcagagct

SEQ ID NO: 908139 - DNA, 33 bp, Homo sapien
tgtgccggcagatcaggacccttgtaagcatca

SEQ ID NO: 908140 - DNA, 33 bp, Homo sapien
tgtgccggcagatcagtacccttgtaagcatca

SEQ ID NO: 908141 - DNA, 33 bp, Homo sapien
gtcttgagaacttggaataattaagtctagctt

SEQ ID NO: 908142 - DNA, 33 bp, Homo sapien
gtcttgagaacttggattaattaagtctagctt

SEQ ID NO: 908143 - DNA, 33 bp, Homo sapien
gacaccttgtggtagaaacatcacagagttcct

SEQ ID NO: 908144 - DNA, 33 bp, Homo sapien
gacaccttgtggtagagacatcacagagttcct

SEQ ID NO: 908145 - DNA, 33 bp, Homo sapien
caaccgcagatccataaaaattctatccttgat

SEQ ID NO: 908146 - DNA, 33 bp, Homo sapien
caaccgcagatccatacaaattctatccttgat

SEQ ID NO: 908147 - DNA, 33 bp, Homo sapien
ctatttacttgtaacaatgtcttcacctgggac

SEQ ID NO: 908148 - DNA, 33 bp, Homo sapien
ctatttacttgtaacagtgtcttcacctgggac

SEQ ID NO: 908149 - DNA, 33 bp, Homo sapien
caatttggacacaaaaacttatattgctgctca

SEQ ID NO: 908150 - DNA, 33 bp, Homo sapien
caatttggacacaaaaccttatattgctgctca

SEQ ID NO: 908151 - DNA, 33 bp, Homo sapien
tagctggccattaaacaaagctttcacttaagg

SEQ ID NO: 908152 - DNA, 33 bp, Homo sapien
tagctggccattaaacgaagctttcacttaagg

SEQ ID NO: 908153 - DNA, 33 bp, Homo sapien
gccagctatggagaggaacagatttgtgttctg

SEQ ID NO: 908154 - DNA, 33 bp, Homo sapien
gccagctatggagaggtacagatttgtgttctg

SEQ ID NO: 908155 - DNA, 33 bp, Homo sapien
agcaggaagcatggaaacttatatccaggggtc

SEQ ID NO: 908156 - DNA, 33 bp, Homo sapien
agcaggaagcatggaagcttatatccaggggtc

SEQ ID NO: 908157 - DNA, 33 bp, Homo sapien
atcactaatcacttcaagatggaaaaggccatg

SEQ ID NO: 908158 - DNA, 33 bp, Homo sapien
atcactaatcacttcaggatggaaaaggccatg

SEQ ID NO: 908159 - DNA, 33 bp, Homo sapien
tataatccatgttggaccacattctttttgttt

SEQ ID NO: 908160 - DNA, 33 bp, Homo sapien
tataatccatgttggatcacattctttttgttt

SEQ ID NO: 908161 - DNA, 33 bp, Homo sapien
acccatcttccactaacatttccttagccaaat

SEQ ID NO: 908162 - DNA, 33 bp, Homo sapien
acccatcttccactaatatttccttagccaaat

SEQ ID NO: 908163 - DNA, 33 bp, Homo sapien
aaaacaaataattgtgaaattaagccactgaga

SEQ ID NO: 908164 - DNA, 33 bp, Homo sapien
aaaacaaataattgtggaattaagccactgaga

SEQ ID NO: 908165 - DNA, 33 bp, Homo sapien
cagtgacactaagcaaagaagactaagaacact

SEQ ID NO: 908166 - DNA, 33 bp, Homo sapien
cagtgacactaagcaatgaagactaagaacact

SEQ ID NO: 908167 - DNA, 33 bp, Homo sapien
tggaatgtgataagcacgaagtcattggagatt

SEQ ID NO: 908168 - DNA, 33 bp, Homo sapien
tggaatgtgataagcatgaagtcattggagatt

SEQ ID NO: 908169 - DNA, 33 bp, Homo sapien
tttttgcccgtttcttgaacaacttcctccaga

SEQ ID NO: 908170 - DNA, 33 bp, Homo sapien
tttttgcccgtttctttaacaacttcctccaga

SEQ ID NO: 908171 - DNA, 33 bp, Homo sapien
ggcatggatattttgacgggtcattagtctgca

SEQ ID NO: 908172 - DNA, 33 bp, Homo sapien
ggcatggatattttgatgggtcattagtctgca

SEQ ID NO: 908173 - DNA, 33 bp, Homo sapien
caatatgaatgattctcaagagcattatgttga

SEQ ID NO: 908174 - DNA, 33 bp, Homo sapien
caatatgaatgattctgaagagcattatgttga

SEQ ID NO: 908175 - DNA, 33 bp, Homo sapien
tattgaaagacactaacctttttttgtcatcca

SEQ ID NO: 908176 - DNA, 33 bp, Homo sapien
tattgaaagacactaagctttttttgtcatcca

SEQ ID NO: 908177 - DNA, 33 bp, Homo sapien
cagggaactgacagaaaccatttattttagaca

SEQ ID NO: 908178 - DNA, 33 bp, Homo sapien
cagggaactgacagaagccatttattttagaca

SEQ ID NO: 908179 - DNA, 33 bp, Homo sapien
agttgttttcgtgaagactgtaataaaagtgta

SEQ ID NO: 908180 - DNA, 33 bp, Homo sapien
agttgttttcgtgaagcctgtaataaaagtgta

SEQ ID NO: 908181 - DNA, 33 bp, Homo sapien
acagaatatctgctacgatgtacagtttgctct

SEQ ID NO: 908182 - DNA, 33 bp, Homo sapien
acagaatatctgctactatgtacagtttgctct

SEQ ID NO: 908183 - DNA, 33 bp, Homo sapien
ctgtgccacaggacggaatataacatgagaatg

SEQ ID NO: 908184 - DNA, 33 bp, Homo sapien
ctgtgccacaggacgggatataacatgagaatg

SEQ ID NO: 908185 - DNA, 33 bp, Homo sapien
tggtaggtccagtttccagatagataagggaat

SEQ ID NO: 908186 - DNA, 33 bp, Homo sapien
tggtaggtccagtttctagatagataagggaat

SEQ ID NO: 908187 - DNA, 33 bp, Homo sapien
gaagatttaattgaaaagatagaagagcttcaa

SEQ ID NO: 908188 - DNA, 33 bp, Homo sapien
gaagatttaattgaaaggatagaagagcttcaa

SEQ ID NO: 908189 - DNA, 33 bp, Homo sapien
ttcatggttgttctggcagaatttaatattgca

SEQ ID NO: 908190 - DNA, 33 bp, Homo sapien
ttcatggttgttctggtagaatttaatattgca

SEQ ID NO: 908191 - DNA, 33 bp, Homo sapien
ttttgctgagcaaactcaatgccacatccttgt

SEQ ID NO: 908192 - DNA, 33 bp, Homo sapien
ttttgctgagcaaacttaatgccacatccttgt

SEQ ID NO: 908193 - DNA, 33 bp, Homo sapien
ccagagtgacctgtgacgctcaattagtgaatg

SEQ ID NO: 908194 - DNA, 33 bp, Homo sapien
ccagagtgacctgtgatgctcaattagtgaatg

SEQ ID NO: 908195 - DNA, 33 bp, Homo sapien
gtgggaagaaagtttgcagactagttatattta

SEQ ID NO: 908196 - DNA, 33 bp, Homo sapien
gtgggaagaaagtttgtagactagttatattta

SEQ ID NO: 908197 - DNA, 33 bp, Homo sapien
aggtgcagattggtgcaaagttcacctaatttg

SEQ ID NO: 908198 - DNA, 33 bp, Homo sapien
aggtgcagattggtgcgaagttcacctaatttg

SEQ ID NO: 908199 - DNA, 33 bp, Homo sapien
tcatattttgggaggacctatgatacagtaaga

SEQ ID NO: 908200 - DNA, 33 bp, Homo sapien
tcatattttgggaggatctatgatacagtaaga

SEQ ID NO: 908201 - DNA, 33 bp, Homo sapien
tcaactaacagatttaacatccaaaacctatgc

SEQ ID NO: 908202 - DNA, 33 bp, Homo sapien
tcaactaacagatttagcatccaaaacctatgc

SEQ ID NO: 908203 - DNA, 33 bp, Homo sapien
gaattctattgaaagagtcaggccttctaatga

SEQ ID NO: 908204 - DNA, 33 bp, Homo sapien
gaattctattgaaagattcaggccttctaatga

SEQ ID NO: 908205 - DNA, 33 bp, Homo sapien
gacaatccgtgctcctaaaatagacagaagacc

SEQ ID NO: 908206 - DNA, 33 bp, Homo sapien
gacaatccgtgctcctcaaatagacagaagacc

SEQ ID NO: 908207 - DNA, 33 bp, Homo sapien
tttgtgctgtttgaacagatgtcacgtggttcg

SEQ ID NO: 908208 - DNA, 33 bp, Homo sapien
tttgtgctgtttgaactgatgtcacgtggttcg

SEQ ID NO: 908209 - DNA, 33 bp, Homo sapien
atgtcactattccaaaagagaagttgatataat

SEQ ID NO: 908210 - DNA, 33 bp, Homo sapien
atgtcactattccaaaggagaagttgatataat

SEQ ID NO: 908211 - DNA, 33 bp, Homo sapien
gatttgattgttctggaagtttggagagagaaa

SEQ ID NO: 908212 - DNA, 33 bp, Homo sapien
gatttgattgttctggcagtttggagagagaaa

SEQ ID NO: 908213 - DNA, 33 bp, Homo sapien
gtctatatgtcttgcacactttattgttacagt

SEQ ID NO: 908214 - DNA, 33 bp, Homo sapien
gtctatatgtcttgcatactttattgttacagt

SEQ ID NO: 908215 - DNA, 33 bp, Homo sapien
attatctaattactgacggagtgaattgctttg

SEQ ID NO: 908216 - DNA, 33 bp, Homo sapien
attatctaattactgatggagtgaattgctttg

SEQ ID NO: 908217 - DNA, 33 bp, Homo sapien
tttatataggctaacaaaaattttcccactgac

SEQ ID NO: 908218 - DNA, 33 bp, Homo sapien
tttatataggctaacacaaattttcccactgac

SEQ ID NO: 908219 - DNA, 33 bp, Homo sapien
gggccccagaaggaaaagctctaagagaaggga

SEQ ID NO: 908220 - DNA, 33 bp, Homo sapien
gggccccagaaggaaaggctctaagagaaggga

SEQ ID NO: 908221 - DNA, 33 bp, Homo sapien
tcaccggcaactgtgacgtcaatccagtacctg

SEQ ID NO: 908222 - DNA, 33 bp, Homo sapien
tcaccggcaactgtgatgtcaatccagtacctg

SEQ ID NO: 908223 - DNA, 33 bp, Homo sapien
cacctgtgcccacaaaattccattcctcttgct

SEQ ID NO: 908224 - DNA, 33 bp, Homo sapien
cacctgtgcccacaaagttccattcctcttgct

SEQ ID NO: 908225 - DNA, 33 bp, Homo sapien
caattgcaacagtccaaatgaggatgggatcta

SEQ ID NO: 908226 - DNA, 33 bp, Homo sapien
caattgcaacagtccacatgaggatgggatcta

SEQ ID NO: 908227 - DNA, 33 bp, Homo sapien
cttacaaaagcctatcagacagataaaacccct

SEQ ID NO: 908228 - DNA, 33 bp, Homo sapien
cttacaaaagcctatcggacagataaaacccct

SEQ ID NO: 908229 - DNA, 33 bp, Homo sapien
ttctggatttcagtaaacaaatgaatatgtcct

SEQ ID NO: 908230 - DNA, 33 bp, Homo sapien
ttctggatttcagtaatcaaatgaatatgtcct

SEQ ID NO: 908231 - DNA, 33 bp, Homo sapien
atacaacaatctcttacagtcataggcattgat

SEQ ID NO: 908232 - DNA, 33 bp, Homo sapien
atacaacaatctcttatagtcataggcattgat

SEQ ID NO: 908233 - DNA, 33 bp, Homo sapien
ggctgtcccctaaagactcatgttccagggtca

SEQ ID NO: 908234 - DNA, 33 bp, Homo sapien
ggctgtcccctaaagagtcatgttccagggtca

SEQ ID NO: 908235 - DNA, 33 bp, Homo sapien
cctgacctgtgggtccacactcagcacctgcag

SEQ ID NO: 908236 - DNA, 33 bp, Homo sapien
cctgacctgtgggtccgcactcagcacctgcag

SEQ ID NO: 908237 - DNA, 33 bp, Homo sapien
actgtcttcttgagatcaagcttctgaggaggg

SEQ ID NO: 908238 - DNA, 33 bp, Homo sapien
actgtcttcttgagatgaagcttctgaggaggg

SEQ ID NO: 908239 - DNA, 33 bp, Homo sapien
atggagcctgaaagaacagctgaagggctcttc

SEQ ID NO: 908240 - DNA, 33 bp, Homo sapien
atggagcctgaaagaatagctgaagggctcttc

SEQ ID NO: 908241 - DNA, 33 bp, Homo sapien
ctcaaattttgtcatacattttgggcaatctca

SEQ ID NO: 908242 - DNA, 33 bp, Homo sapien
ctcaaattttgtcatatattttgggcaatctca

SEQ ID NO: 908243 - DNA, 33 bp, Homo sapien
gaaaattggcttcatagatctagatgaaaaaga

SEQ ID NO: 908244 - DNA, 33 bp, Homo sapien
gaaaattggcttcatatatctagatgaaaaaga

SEQ ID NO: 908245 - DNA, 33 bp, Homo sapien
ttttaaacactatatccagacatgacatataac

SEQ ID NO: 908246 - DNA, 33 bp, Homo sapien
ttttaaacactatatcgagacatgacatataac

SEQ ID NO: 908247 - DNA, 33 bp, Homo sapien
gtgcttggcgtatagcaaaaatacaagaaaagc

SEQ ID NO: 908248 - DNA, 33 bp, Homo sapien
gtgcttggcgtatagcgaaaatacaagaaaagc

SEQ ID NO: 908249 - DNA, 33 bp, Homo sapien
atgccatttcttcttacagagtattggccagaa

SEQ ID NO: 908250 - DNA, 33 bp, Homo sapien
atgccatttcttcttatagagtattggccagaa

SEQ ID NO: 908251 - DNA, 33 bp, Homo sapien
gtctgagcattgaagacgtaggtattttttgca

SEQ ID NO: 908252 - DNA, 33 bp, Homo sapien
gtctgagcattgaagaggtaggtattttttgca

SEQ ID NO: 908253 - DNA, 33 bp, Homo sapien
tttcatagattcttccaagagtctgcattttct

SEQ ID NO: 908254 - DNA, 33 bp, Homo sapien
tttcatagattcttccgagagtctgcattttct

SEQ ID NO: 908255 - DNA, 33 bp, Homo sapien
tgcatcttcggtcagcaatagttcttagttctt

SEQ ID NO: 908256 - DNA, 33 bp, Homo sapien
tgcatcttcggtcagccatagttcttagttctt

SEQ ID NO: 908257 - DNA, 33 bp, Homo sapien
ggagtttaccaatttaagcatagttttagagat

SEQ ID NO: 908258 - DNA, 33 bp, Homo sapien
ggagtttaccaatttatgcatagttttagagat

SEQ ID NO: 908259 - DNA, 33 bp, Homo sapien
cttttccagaactcctaaatgatgtgtccagca

SEQ ID NO: 908260 - DNA, 33 bp, Homo sapien
cttttccagaactcctgaatgatgtgtccagca

SEQ ID NO: 908261 - DNA, 33 bp, Homo sapien
agtgacagcattcaagaaatttgcattcacaca

SEQ ID NO: 908262 - DNA, 33 bp, Homo sapien
agtgacagcattcaaggaatttgcattcacaca

SEQ ID NO: 908263 - DNA, 33 bp, Homo sapien
cttcctcttcctcagaaccctgaaaaggaatca

SEQ ID NO: 908264 - DNA, 33 bp, Homo sapien
cttcctcttcctcagatccctgaaaaggaatca

SEQ ID NO: 908265 - DNA, 33 bp, Homo sapien
gcaaacacatttacataactgacctatctgaga

SEQ ID NO: 908266 - DNA, 33 bp, Homo sapien
gcaaacacatttacatgactgacctatctgaga

SEQ ID NO: 908267 - DNA, 33 bp, Homo sapien
ttactgaggtgcagtcccataaatcaatcttca

SEQ ID NO: 908268 - DNA, 33 bp, Homo sapien
ttactgaggtgcagtcgcataaatcaatcttca

SEQ ID NO: 908269 - DNA, 33 bp, Homo sapien
taaaccttcacatgtaacttttgaatgtaaaat

SEQ ID NO: 908270 - DNA, 33 bp, Homo sapien
taaaccttcacatgtaccttttgaatgtaaaat

SEQ ID NO: 908271 - DNA, 33 bp, Homo sapien
cagtttttgttgcatgcagttgtttttgaggac

SEQ ID NO: 908272 - DNA, 33 bp, Homo sapien
cagtttttgttgcatgtagttgtttttgaggac

SEQ ID NO: 908273 - DNA, 33 bp, Homo sapien
ttccactcgaggccacagatttcatctcacccc

SEQ ID NO: 908274 - DNA, 33 bp, Homo sapien
ttccactcgaggccacggatttcatctcacccc

SEQ ID NO: 908275 - DNA, 33 bp, Homo sapien
attagcactgtagtcaggttccgcgcccttgta

SEQ ID NO: 908276 - DNA, 33 bp, Homo sapien
attagcactgtagtcatgttccgcgcccttgta

SEQ ID NO: 908277 - DNA, 33 bp, Homo sapien
acaattataactcttcacacaaatattgctgct

SEQ ID NO: 908278 - DNA, 33 bp, Homo sapien
acaattataactcttctcacaaatattgctgct

SEQ ID NO: 908279 - DNA, 33 bp, Homo sapien
tgggcagaatataatgacaagaaatgaagtgtg

SEQ ID NO: 908280 - DNA, 33 bp, Homo sapien
tgggcagaatataatggcaagaaatgaagtgtg

SEQ ID NO: 908281 - DNA, 33 bp, Homo sapien
ggctatagtgcagcggcaggatcacagctcatt

SEQ ID NO: 908282 - DNA, 33 bp, Homo sapien
ggctatagtgcagcggtaggatcacagctcatt

SEQ ID NO: 908283 - DNA, 33 bp, Homo sapien
catgacttcctcctcaatatctgtgagtttcga

SEQ ID NO: 908284 - DNA, 33 bp, Homo sapien
catgacttcctcctcagtatctgtgagtttcga

SEQ ID NO: 908285 - DNA, 33 bp, Homo sapien
ctccagttctattatcggagccacttttccctt

SEQ ID NO: 908286 - DNA, 33 bp, Homo sapien
ctccagttctattatctgagccacttttccctt

SEQ ID NO: 908287 - DNA, 33 bp, Homo sapien
aacagaaaatgataagaaagtgagatgagaatg

SEQ ID NO: 908288 - DNA, 33 bp, Homo sapien
aacagaaaatgataaggaagtgagatgagaatg

SEQ ID NO: 908289 - DNA, 33 bp, Homo sapien
tattcattaaaaaactcacttttgagcaccaag

SEQ ID NO: 908290 - DNA, 33 bp, Homo sapien
tattcattaaaaaactgacttttgagcaccaag

SEQ ID NO: 908291 - DNA, 33 bp, Homo sapien
tcacaggacgaactcacgtaaagcttcaattac

SEQ ID NO: 908292 - DNA, 33 bp, Homo sapien
tcacaggacgaactcatgtaaagcttcaattac

SEQ ID NO: 908293 - DNA, 33 bp, Homo sapien
agtggctgtactcttccaaattaaaacacattc

SEQ ID NO: 908294 - DNA, 33 bp, Homo sapien
agtggctgtactcttctaaattaaaacacattc

SEQ ID NO: 908295 - DNA, 33 bp, Homo sapien
ggggatttcccaaatagctttcggttattgatt

SEQ ID NO: 908296 - DNA, 33 bp, Homo sapien
ggggatttcccaaatatctttcggttattgatt

SEQ ID NO: 908297 - DNA, 33 bp, Homo sapien
tggtgagaaagaatcacatctgtttatcttgat

SEQ ID NO: 908298 - DNA, 33 bp, Homo sapien
tggtgagaaagaatcatatctgtttatcttgat

SEQ ID NO: 908299 - DNA, 33 bp, Homo sapien
gtcagaggagtctataaggtaaagagtcagatt

SEQ ID NO: 908300 - DNA, 33 bp, Homo sapien
gtcagaggagtctatagggtaaagagtcagatt

SEQ ID NO: 908301 - DNA, 33 bp, Homo sapien
ttcaaccatgttgacacgaatactcaggtttgt

SEQ ID NO: 908302 - DNA, 33 bp, Homo sapien
ttcaaccatgttgacatgaatactcaggtttgt

SEQ ID NO: 908303 - DNA, 33 bp, Homo sapien
atgtgatgatacaagaaaaaaatacgttgtttt

SEQ ID NO: 908304 - DNA, 33 bp, Homo sapien
atgtgatgatacaagacaaaaatacgttgtttt

SEQ ID NO: 908305 - DNA, 33 bp, Homo sapien
tctttttctcttgacaatggaatgtttttgctt

SEQ ID NO: 908306 - DNA, 33 bp, Homo sapien
tctttttctcttgacagtggaatgtttttgctt

SEQ ID NO: 908307 - DNA, 33 bp, Homo sapien
cctctgatcccgaagccctcactctactaacag

SEQ ID NO: 908308 - DNA, 33 bp, Homo sapien
cctctgatcccgaagctctcactctactaacag

SEQ ID NO: 908309 - DNA, 33 bp, Homo sapien
atgttttatggtgttacgtgtttcttacctgtt

SEQ ID NO: 908310 - DNA, 33 bp, Homo sapien
atgttttatggtgttatgtgtttcttacctgtt

SEQ ID NO: 908311 - DNA, 33 bp, Homo sapien
gtaaggcagttgaatgcactatgcacctttcaa

SEQ ID NO: 908312 - DNA, 33 bp, Homo sapien
gtaaggcagttgaatggactatgcacctttcaa

SEQ ID NO: 908313 - DNA, 33 bp, Homo sapien
tgatagtcaatttttaggcaggaaatctcatca

SEQ ID NO: 908314 - DNA, 33 bp, Homo sapien
tgatagtcaatttttatgcaggaaatctcatca

SEQ ID NO: 908315 - DNA, 33 bp, Homo sapien
cagaatgtagctcgcaccctaccttttaacact

SEQ ID NO: 908316 - DNA, 33 bp, Homo sapien
cagaatgtagctcgcatcctaccttttaacact

SEQ ID NO: 908317 - DNA, 33 bp, Homo sapien
tgcaattttcttgacgaaataggaatggatccc

SEQ ID NO: 908318 - DNA, 33 bp, Homo sapien
tgcaattttcttgacggaataggaatggatccc

SEQ ID NO: 908319 - DNA, 33 bp, Homo sapien
attgacatcgaagcaaaactctccaccagcaaa

SEQ ID NO: 908320 - DNA, 33 bp, Homo sapien
attgacatcgaagcaagactctccaccagcaaa

SEQ ID NO: 908321 - DNA, 33 bp, Homo sapien
tcttccctgaactgaaccacagctatctaaatt

SEQ ID NO: 908322 - DNA, 33 bp, Homo sapien
tcttccctgaactgaatcacagctatctaaatt

SEQ ID NO: 908323 - DNA, 33 bp, Homo sapien
ccaatggagtccaatacagagtccagaaataga

SEQ ID NO: 908324 - DNA, 33 bp, Homo sapien
ccaatggagtccaatatagagtccagaaataga

SEQ ID NO: 908325 - DNA, 33 bp, Homo sapien
tctgtatctttgtattgaaactggatttcttta

SEQ ID NO: 908326 - DNA, 33 bp, Homo sapien
tctgtatctttgtatttaaactggatttcttta

SEQ ID NO: 908327 - DNA, 33 bp, Homo sapien
gtatccagcacagtaaactgctgtgaagatttg

SEQ ID NO: 908328 - DNA, 33 bp, Homo sapien
gtatccagcacagtaacctgctgtgaagatttg

SEQ ID NO: 908329 - DNA, 33 bp, Homo sapien
cactctaacactttaacaggcaaaatgcatgag

SEQ ID NO: 908330 - DNA, 33 bp, Homo sapien
cactctaacactttaataggcaaaatgcatgag

SEQ ID NO: 908331 - DNA, 33 bp, Homo sapien
gtattgtttaacttccaaatcctgaagaatgga

SEQ ID NO: 908332 - DNA, 33 bp, Homo sapien
gtattgtttaacttccgaatcctgaagaatgga

SEQ ID NO: 908333 - DNA, 33 bp, Homo sapien
tttctctgtgttgatacgttccaaagccgtttc

SEQ ID NO: 908334 - DNA, 33 bp, Homo sapien
tttctctgtgttgatatgttccaaagccgtttc

SEQ ID NO: 908335 - DNA, 33 bp, Homo sapien
ctttgcaaattaaatacctgctgaagttgctct

SEQ ID NO: 908336 - DNA, 33 bp, Homo sapien
ctttgcaaattaaatatctgctgaagttgctct

SEQ ID NO: 908337 - DNA, 33 bp, Homo sapien
ctttactttcactgacactctcttgctgtctct

SEQ ID NO: 908338 - DNA, 33 bp, Homo sapien
ctttactttcactgacgctctcttgctgtctct

SEQ ID NO: 908339 - DNA, 33 bp, Homo sapien
aatgttgcaatgaattcaagcacctgactcaag

SEQ ID NO: 908340 - DNA, 33 bp, Homo sapien
aatgttgcaatgaatttaagcacctgactcaag

SEQ ID NO: 908341 - DNA, 33 bp, Homo sapien
tagggtaatttcttgacccaaatgaaaaccata

SEQ ID NO: 908342 - DNA, 33 bp, Homo sapien
tagggtaatttcttgatccaaatgaaaaccata

SEQ ID NO: 908343 - DNA, 33 bp, Homo sapien
aagattgttttcagcacccctatgatttcatcc

SEQ ID NO: 908344 - DNA, 33 bp, Homo sapien
aagattgttttcagcatccctatgatttcatcc

SEQ ID NO: 908345 - DNA, 33 bp, Homo sapien
caattggaaccattcaatatgcaaccttttgat

SEQ ID NO: 908346 - DNA, 33 bp, Homo sapien
caattggaaccattcagtatgcaaccttttgat

SEQ ID NO: 908347 - DNA, 33 bp, Homo sapien
acttcagcattagctaaggatgagactgaaact

SEQ ID NO: 908348 - DNA, 33 bp, Homo sapien
acttcagcattagctagggatgagactgaaact

SEQ ID NO: 908349 - DNA, 33 bp, Homo sapien
aaatttgtattctatacccattacatgccgggc

SEQ ID NO: 908350 - DNA, 33 bp, Homo sapien
aaatttgtattctatatccattacatgccgggc

SEQ ID NO: 908351 - DNA, 33 bp, Homo sapien
ttctactctttttccaatacttcaagcagaaga

SEQ ID NO: 908352 - DNA, 33 bp, Homo sapien
ttctactctttttccagtacttcaagcagaaga

SEQ ID NO: 908353 - DNA, 33 bp, Homo sapien
tttctcaactagttcaacaaacatacatgatga

SEQ ID NO: 908354 - DNA, 33 bp, Homo sapien
tttctcaactagttcagcaaacatacatgatga

SEQ ID NO: 908355 - DNA, 33 bp, Homo sapien
tatgccttcgtaaatgcagcatttttaaatgat

SEQ ID NO: 908356 - DNA, 33 bp, Homo sapien
tatgccttcgtaaatgtagcatttttaaatgat

SEQ ID NO: 908357 - DNA, 33 bp, Homo sapien
ttagtttatggcattccatcatcctcaagaagc

SEQ ID NO: 908358 - DNA, 33 bp, Homo sapien
ttagtttatggcattcgatcatcctcaagaagc

SEQ ID NO: 908359 - DNA, 33 bp, Homo sapien
actggagctccagccactaagttcacattccaa

SEQ ID NO: 908360 - DNA, 33 bp, Homo sapien
actggagctccagccattaagttcacattccaa

SEQ ID NO: 908361 - DNA, 33 bp, Homo sapien
atctcccaatatctggaaaatgtggctgaacat

SEQ ID NO: 908362 - DNA, 33 bp, Homo sapien
atctcccaatatctggcaaatgtggctgaacat

SEQ ID NO: 908363 - DNA, 33 bp, Homo sapien
tttcatctcatgcctaaaaaatttagatatcct

SEQ ID NO: 908364 - DNA, 33 bp, Homo sapien
tttcatctcatgcctataaaatttagatatcct

SEQ ID NO: 908365 - DNA, 33 bp, Homo sapien
ctcttgtcaaattctccaggcttttttctgctg

SEQ ID NO: 908366 - DNA, 33 bp, Homo sapien
ctcttgtcaaattctctaggcttttttctgctg

SEQ ID NO: 908367 - DNA, 33 bp, Homo sapien
gaggaggctaaaggtccgaacaaataacttggt

SEQ ID NO: 908368 - DNA, 33 bp, Homo sapien
gaggaggctaaaggtctgaacaaataacttggt

SEQ ID NO: 908369 - DNA, 33 bp, Homo sapien
ttagttctgaatttcacgccatataaacactat

SEQ ID NO: 908370 - DNA, 33 bp, Homo sapien
ttagttctgaatttcaggccatataaacactat

SEQ ID NO: 908371 - DNA, 33 bp, Homo sapien
agtaatgtaaacagtgaagcacaagtacaaaga

SEQ ID NO: 908372 - DNA, 33 bp, Homo sapien
agtaatgtaaacagtgtagcacaagtacaaaga

SEQ ID NO: 908373 - DNA, 33 bp, Homo sapien
acttgttacaaatctccagtaatgtaaacagtg

SEQ ID NO: 908374 - DNA, 33 bp, Homo sapien
acttgttacaaatctcgagtaatgtaaacagtg

SEQ ID NO: 908375 - DNA, 33 bp, Homo sapien
aattttatcaagtggaaggaaatgacagaatgt

SEQ ID NO: 908376 - DNA, 33 bp, Homo sapien
aattttatcaagtggagggaaatgacagaatgt

SEQ ID NO: 908377 - DNA, 33 bp, Homo sapien
aacacttgagacatgaagaaacaaactctgtga

SEQ ID NO: 908378 - DNA, 33 bp, Homo sapien
aacacttgagacatgacgaaacaaactctgtga

SEQ ID NO: 908379 - DNA, 33 bp, Homo sapien
acttacactacaagaacgactaaaaggtaattt

SEQ ID NO: 908380 - DNA, 33 bp, Homo sapien
acttacactacaagaatgactaaaaggtaattt

SEQ ID NO: 908381 - DNA, 33 bp, Homo sapien
ttaagctggaagttctaacagaaagatagtggg

SEQ ID NO: 908382 - DNA, 33 bp, Homo sapien
ttaagctggaagttctgacagaaagatagtggg

SEQ ID NO: 908383 - DNA, 33 bp, Homo sapien
aacttacagctttataaacttgaactgaaatat

SEQ ID NO: 908384 - DNA, 33 bp, Homo sapien
aacttacagctttatagacttgaactgaaatat

SEQ ID NO: 908385 - DNA, 33 bp, Homo sapien
tatctttttgttttcacatagccagcaccacca

SEQ ID NO: 908386 - DNA, 33 bp, Homo sapien
tatctttttgttttcatatagccagcaccacca

SEQ ID NO: 908387 - DNA, 33 bp, Homo sapien
ctgatttcagtcaccacgtttgctatttatata

SEQ ID NO: 908388 - DNA, 33 bp, Homo sapien
ctgatttcagtcaccatgtttgctatttatata

SEQ ID NO: 908389 - DNA, 33 bp, Homo sapien
cagcatgagaaacatccgaaatgtaattattct

SEQ ID NO: 908390 - DNA, 33 bp, Homo sapien
cagcatgagaaacatcggaaatgtaattattct

SEQ ID NO: 908391 - DNA, 33 bp, Homo sapien
ttcccattttacagaaatagccttgaggaggtc

SEQ ID NO: 908392 - DNA, 33 bp, Homo sapien
ttcccattttacagaagtagccttgaggaggtc

SEQ ID NO: 908393 - DNA, 33 bp, Homo sapien
atttaatgcaattacccatttcctttttatctg

SEQ ID NO: 908394 - DNA, 33 bp, Homo sapien
atttaatgcaattacctatttcctttttatctg

SEQ ID NO: 908395 - DNA, 33 bp, Homo sapien
tcactttttgtggaagcatacgttaatcgatat

SEQ ID NO: 908396 - DNA, 33 bp, Homo sapien
tcactttttgtggaaggatacgttaatcgatat

SEQ ID NO: 908397 - DNA, 33 bp, Homo sapien
ttgatccagtgaatagcaagtaataagcaccag

SEQ ID NO: 908398 - DNA, 33 bp, Homo sapien
ttgatccagtgaataggaagtaataagcaccag

SEQ ID NO: 908399 - DNA, 33 bp, Homo sapien
tgtgaagataataaacaagtcatgattattcca

SEQ ID NO: 908400 - DNA, 33 bp, Homo sapien
tgtgaagataataaacgagtcatgattattcca

SEQ ID NO: 908401 - DNA, 33 bp, Homo sapien
gtgaagcatctgatgaactgaatattgaagata

SEQ ID NO: 908402 - DNA, 33 bp, Homo sapien
gtgaagcatctgatgagctgaatattgaagata

SEQ ID NO: 908403 - DNA, 33 bp, Homo sapien
cttgtataggaaaaaggagtcctgttagtaatg

SEQ ID NO: 908404 - DNA, 33 bp, Homo sapien
cttgtataggaaaaagtagtcctgttagtaatg

SEQ ID NO: 908405 - DNA, 33 bp, Homo sapien
tagcttactatctttcacctacaatcttaaaaa

SEQ ID NO: 908406 - DNA, 33 bp, Homo sapien
tagcttactatctttcgcctacaatcttaaaaa

SEQ ID NO: 908407 - DNA, 33 bp, Homo sapien
tgtgagtggtaaagtcaacactgttagaaaact

SEQ ID NO: 908408 - DNA, 33 bp, Homo sapien
tgtgagtggtaaagtcgacactgttagaaaact

SEQ ID NO: 908409 - DNA, 33 bp, Homo sapien
cctatgacctgggctaataatcatctgaaccag

SEQ ID NO: 908410 - DNA, 33 bp, Homo sapien
cctatgacctgggctagtaatcatctgaaccag

SEQ ID NO: 908411 - DNA, 33 bp, Homo sapien
tatgggtgtatttcaacagctggttcagatgat

SEQ ID NO: 908412 - DNA, 33 bp, Homo sapien
tatgggtgtatttcaagagctggttcagatgat

SEQ ID NO: 908413 - DNA, 33 bp, Homo sapien
aggaaacgcatccccccacttcctcctggcatc

SEQ ID NO: 908414 - DNA, 33 bp, Homo sapien
aggaaacgcatccccctacttcctcctggcatc

SEQ ID NO: 908415 - DNA, 33 bp, Homo sapien
atctcttgtatacaaacgaagaatcacaattcc

SEQ ID NO: 908416 - DNA, 33 bp, Homo sapien
atctcttgtatacaaatgaagaatcacaattcc

SEQ ID NO: 908417 - DNA, 33 bp, Homo sapien
tgtagttccaaataccaattgccactactttta

SEQ ID NO: 908418 - DNA, 33 bp, Homo sapien
tgtagttccaaataccgattgccactactttta

SEQ ID NO: 908419 - DNA, 33 bp, Homo sapien
cacagagacacatagaacggactctcagagagg

SEQ ID NO: 908420 - DNA, 33 bp, Homo sapien
cacagagacacatagatcggactctcagagagg

SEQ ID NO: 908421 - DNA, 33 bp, Homo sapien
aacctgccagcctctaagaacttggggttattg

SEQ ID NO: 908422 - DNA, 33 bp, Homo sapien
aacctgccagcctctaggaacttggggttattg

SEQ ID NO: 908423 - DNA, 33 bp, Homo sapien
tgccatgaggggtggaagatgttacctgtcact

SEQ ID NO: 908424 - DNA, 33 bp, Homo sapien
tgccatgaggggtggaggatgttacctgtcact

SEQ ID NO: 908425 - DNA, 33 bp, Homo sapien
cccttgctaccattatcagagcttagacaagaa

SEQ ID NO: 908426 - DNA, 33 bp, Homo sapien
cccttgctaccattatgagagcttagacaagaa

SEQ ID NO: 908427 - DNA, 33 bp, Homo sapien
gctatcgtataacttaaatactactgcataaag

SEQ ID NO: 908428 - DNA, 33 bp, Homo sapien
gctatcgtataacttacatactactgcataaag

SEQ ID NO: 908429 - DNA, 33 bp, Homo sapien
gtgaaggccagtggaaaacaattgacattaaag

SEQ ID NO: 908430 - DNA, 33 bp, Homo sapien
gtgaaggccagtggaatacaattgacattaaag

SEQ ID NO: 908431 - DNA, 33 bp, Homo sapien
agtctttgtactaagaagccttttctgttccag

SEQ ID NO: 908432 - DNA, 33 bp, Homo sapien
agtctttgtactaagatgccttttctgttccag

SEQ ID NO: 908433 - DNA, 33 bp, Homo sapien
cctagaacagactccccgcacattcgcagtaga

SEQ ID NO: 908434 - DNA, 33 bp, Homo sapien
cctagaacagactcccggcacattcgcagtaga

SEQ ID NO: 908435 - DNA, 33 bp, Homo sapien
ccacaactaaatccatcagtatgaaactttaat

SEQ ID NO: 908436 - DNA, 33 bp, Homo sapien
ccacaactaaatccatgagtatgaaactttaat

SEQ ID NO: 908437 - DNA, 33 bp, Homo sapien
attctgccttcataccacaactgcatcatcagt

SEQ ID NO: 908438 - DNA, 33 bp, Homo sapien
attctgccttcatacctcaactgcatcatcagt

SEQ ID NO: 908439 - DNA, 33 bp, Homo sapien
gaagccccagtagtgacaattccatagagtaaa

SEQ ID NO: 908440 - DNA, 33 bp, Homo sapien
gaagccccagtagtgagaattccatagagtaaa

SEQ ID NO: 908441 - DNA, 33 bp, Homo sapien
ttgctacatctggaatcacgattaggcttctct

SEQ ID NO: 908442 - DNA, 33 bp, Homo sapien
ttgctacatctggaattacgattaggcttctct

SEQ ID NO: 908443 - DNA, 33 bp, Homo sapien
ggggtggactctggaacatgaggaagacagcta

SEQ ID NO: 908444 - DNA, 33 bp, Homo sapien
ggggtggactctggaagatgaggaagacagcta

SEQ ID NO: 908445 - DNA, 33 bp, Homo sapien
aaggattgcattattacgtgaattttgcgtatg

SEQ ID NO: 908446 - DNA, 33 bp, Homo sapien
aaggattgcattattatgtgaattttgcgtatg

SEQ ID NO: 908447 - DNA, 33 bp, Homo sapien
tataactttattacccaatggattaattttgtt

SEQ ID NO: 908448 - DNA, 33 bp, Homo sapien
tataactttattacccgatggattaattttgtt

SEQ ID NO: 908449 - DNA, 33 bp, Homo sapien
ctacttccttagtacaagtacatctaactcagg

SEQ ID NO: 908450 - DNA, 33 bp, Homo sapien
ctacttccttagtacaggtacatctaactcagg

SEQ ID NO: 908451 - DNA, 33 bp, Homo sapien
tttatatacaaagctgcaagagagaaaaataat

SEQ ID NO: 908452 - DNA, 33 bp, Homo sapien
tttatatacaaagctgtaagagagaaaaataat

SEQ ID NO: 908453 - DNA, 33 bp, Homo sapien
tttacacaggtagggccaactaaataaaagact

SEQ ID NO: 908454 - DNA, 33 bp, Homo sapien
tttacacaggtagggctaactaaataaaagact

SEQ ID NO: 908455 - DNA, 33 bp, Homo sapien
aaataaaagacctaccaatagattcctgaaaat

SEQ ID NO: 908456 - DNA, 33 bp, Homo sapien
aaataaaagacctaccgatagattcctgaaaat

SEQ ID NO: 908457 - DNA, 33 bp, Homo sapien
ttttttttcagatggactcacacttttgttgcc

SEQ ID NO: 908458 - DNA, 33 bp, Homo sapien
ttttttttcagatggattcacacttttgttgcc

SEQ ID NO: 908459 - DNA, 33 bp, Homo sapien
aaatatattgagttcactatcagtttatttggg

SEQ ID NO: 908460 - DNA, 33 bp, Homo sapien
aaatatattgagttcattatcagtttatttggg

SEQ ID NO: 908461 - DNA, 33 bp, Homo sapien
gaaactttatgagctacacttttgccttatgag

SEQ ID NO: 908462 - DNA, 33 bp, Homo sapien
gaaactttatgagctatacttttgccttatgag

SEQ ID NO: 908463 - DNA, 33 bp, Homo sapien
actggtgatgtgcttaaaggaaacatttaagaa

SEQ ID NO: 908464 - DNA, 33 bp, Homo sapien
actggtgatgtgcttagaggaaacatttaagaa

SEQ ID NO: 908465 - DNA, 33 bp, Homo sapien
agtaccatcattaaaccggatcattcatggcag

SEQ ID NO: 908466 - DNA, 33 bp, Homo sapien
agtaccatcattaaactggatcattcatggcag

SEQ ID NO: 908467 - DNA, 33 bp, Homo sapien
aatcacccctgaaaaacggctgtgcaacctttg

SEQ ID NO: 908468 - DNA, 33 bp, Homo sapien
aatcacccctgaaaaatggctgtgcaacctttg

SEQ ID NO: 908469 - DNA, 33 bp, Homo sapien
agatagaacattggagaaggcgttggttagtga

SEQ ID NO: 908470 - DNA, 33 bp, Homo sapien
agatagaacattggaggaggcgttggttagtga

SEQ ID NO: 908471 - DNA, 33 bp, Homo sapien
tgaaaacaattgctatcacttattgagtgtctg

SEQ ID NO: 908472 - DNA, 33 bp, Homo sapien
tgaaaacaattgctattacttattgagtgtctg

SEQ ID NO: 908473 - DNA, 33 bp, Homo sapien
tctttattccagataacgtaacattcacaggtt

SEQ ID NO: 908474 - DNA, 33 bp, Homo sapien
tctttattccagataaggtaacattcacaggtt

SEQ ID NO: 908475 - DNA, 33 bp, Homo sapien
tggagaacattttaccacagtacatccagtagc

SEQ ID NO: 908476 - DNA, 33 bp, Homo sapien
tggagaacattttaccgcagtacatccagtagc

SEQ ID NO: 908477 - DNA, 33 bp, Homo sapien
tgtaattcattgtcaactaaggatgtgactgag

SEQ ID NO: 908478 - DNA, 33 bp, Homo sapien
tgtaattcattgtcaattaaggatgtgactgag

SEQ ID NO: 908479 - DNA, 33 bp, Homo sapien
aacattccctctaaaagttcccaatgaaagacc

SEQ ID NO: 908480 - DNA, 33 bp, Homo sapien
aacattccctctaaaatttcccaatgaaagacc

SEQ ID NO: 908481 - DNA, 33 bp, Homo sapien
caaacagaacagatataagtggcaacggtcacc

SEQ ID NO: 908482 - DNA, 33 bp, Homo sapien
caaacagaacagatatgagtggcaacggtcacc

SEQ ID NO: 908483 - DNA, 33 bp, Homo sapien
ctcagttatccacacaacaataacagcaaaata

SEQ ID NO: 908484 - DNA, 33 bp, Homo sapien
ctcagttatccacacagcaataacagcaaaata

SEQ ID NO: 908485 - DNA, 33 bp, Homo sapien
tccttgatttctgtaaacttggtgtcccttata

SEQ ID NO: 908486 - DNA, 33 bp, Homo sapien
tccttgatttctgtaaccttggtgtcccttata

SEQ ID NO: 908487 - DNA, 33 bp, Homo sapien
cactctaaatttcacaacttgaagttttaaatg

SEQ ID NO: 908488 - DNA, 33 bp, Homo sapien
cactctaaatttcacatcttgaagttttaaatg

SEQ ID NO: 908489 - DNA, 33 bp, Homo sapien
gtactatttgtaggtacgtgcactaaacagaag

SEQ ID NO: 908490 - DNA, 33 bp, Homo sapien
gtactatttgtaggtatgtgcactaaacagaag

SEQ ID NO: 908491 - DNA, 33 bp, Homo sapien
aagtactctaagttaccgaaagagcagtgctac

SEQ ID NO: 908492 - DNA, 33 bp, Homo sapien
aagtactctaagttactgaaagagcagtgctac

SEQ ID NO: 908493 - DNA, 33 bp, Homo sapien
cttataaacggcattaagcaatgtatgtggctt

SEQ ID NO: 908494 - DNA, 33 bp, Homo sapien
cttataaacggcattaggcaatgtatgtggctt

SEQ ID NO: 908495 - DNA, 33 bp, Homo sapien
cttgtttaaaatttcaacctgaagagatagagc

SEQ ID NO: 908496 - DNA, 33 bp, Homo sapien
cttgtttaaaatttcagcctgaagagatagagc

SEQ ID NO: 908497 - DNA, 33 bp, Homo sapien
atacacttctcaataaaccttatgtcagttaga

SEQ ID NO: 908498 - DNA, 33 bp, Homo sapien
atacacttctcaataacccttatgtcagttaga

SEQ ID NO: 908499 - DNA, 33 bp, Homo sapien
acaagggtatggtgagaagagtggagaactcca

SEQ ID NO: 908500 - DNA, 33 bp, Homo sapien
acaagggtatggtgagtagagtggagaactcca

SEQ ID NO: 908501 - DNA, 33 bp, Homo sapien
ctgttagcttccaacacggtgtcatctagtggc

SEQ ID NO: 908502 - DNA, 33 bp, Homo sapien
ctgttagcttccaacatggtgtcatctagtggc

SEQ ID NO: 908503 - DNA, 33 bp, Homo sapien
actacatcaaagcccaacttccacttctaacaa

SEQ ID NO: 908504 - DNA, 33 bp, Homo sapien
actacatcaaagcccagcttccacttctaacaa

SEQ ID NO: 908505 - DNA, 33 bp, Homo sapien
tatcaggatacaatggcaatataggcatttagt

SEQ ID NO: 908506 - DNA, 33 bp, Homo sapien
tatcaggatacaatgggaatataggcatttagt

SEQ ID NO: 908507 - DNA, 33 bp, Homo sapien
gtgtccccgaaggttgaaaaatcacagggtcac

SEQ ID NO: 908508 - DNA, 33 bp, Homo sapien
gtgtccccgaaggttggaaaatcacagggtcac

SEQ ID NO: 908509 - DNA, 33 bp, Homo sapien
agttaatccccaacaacctgagatcttgcagta

SEQ ID NO: 908510 - DNA, 33 bp, Homo sapien
agttaatccccaacaatctgagatcttgcagta

SEQ ID NO: 908511 - DNA, 33 bp, Homo sapien
ctaatttccacaaaggaaagtttaccttcagca

SEQ ID NO: 908512 - DNA, 33 bp, Homo sapien
ctaatttccacaaagggaagtttaccttcagca

SEQ ID NO: 908513 - DNA, 33 bp, Homo sapien
caaaataaattttctaaggagtctcagtggaat

SEQ ID NO: 908514 - DNA, 33 bp, Homo sapien
caaaataaattttctacggagtctcagtggaat

SEQ ID NO: 908515 - DNA, 33 bp, Homo sapien
ttatgggacaattggaacagcctcaaaatgaca

SEQ ID NO: 908516 - DNA, 33 bp, Homo sapien
ttatgggacaattggagcagcctcaaaatgaca

SEQ ID NO: 908517 - DNA, 33 bp, Homo sapien
tcatgatgggtttatcaagaagcaaccccacag

SEQ ID NO: 908518 - DNA, 33 bp, Homo sapien
tcatgatgggtttatcgagaagcaaccccacag

SEQ ID NO: 908519 - DNA, 33 bp, Homo sapien
gctaatctgtgttaaacacctcaaattcattga

SEQ ID NO: 908520 - DNA, 33 bp, Homo sapien
gctaatctgtgttaaatacctcaaattcattga

SEQ ID NO: 908521 - DNA, 33 bp, Homo sapien
ttgttagcattccacccaaatctctttggattg

SEQ ID NO: 908522 - DNA, 33 bp, Homo sapien
ttgttagcattccaccgaaatctctttggattg

SEQ ID NO: 908523 - DNA, 33 bp, Homo sapien
ccagatatagatgttacgtaggtaagtaggtag

SEQ ID NO: 908524 - DNA, 33 bp, Homo sapien
ccagatatagatgttaggtaggtaagtaggtag

SEQ ID NO: 908525 - DNA, 33 bp, Homo sapien
ttgtggaggcttggcaaatccaaaaccagcagg

SEQ ID NO: 908526 - DNA, 33 bp, Homo sapien
ttgtggaggcttggcagatccaaaaccagcagg

SEQ ID NO: 908527 - DNA, 33 bp, Homo sapien
gggatgagtatcataactctgcaaaaccaattt

SEQ ID NO: 908528 - DNA, 33 bp, Homo sapien
gggatgagtatcataattctgcaaaaccaattt

SEQ ID NO: 908529 - DNA, 33 bp, Homo sapien
taattatatgctaagcaacttaactggattatt

SEQ ID NO: 908530 - DNA, 33 bp, Homo sapien
taattatatgctaagcgacttaactggattatt

SEQ ID NO: 908531 - DNA, 33 bp, Homo sapien
aactacaagacttagacgaatacactggtggga

SEQ ID NO: 908532 - DNA, 33 bp, Homo sapien
aactacaagacttagatgaatacactggtggga

SEQ ID NO: 908533 - DNA, 33 bp, Homo sapien
actcctgaatgaaaaaagtggaggaatattgtg

SEQ ID NO: 908534 - DNA, 33 bp, Homo sapien
actcctgaatgaaaaacgtggaggaatattgtg

SEQ ID NO: 908535 - DNA, 33 bp, Homo sapien
tgtgaataagtcctcacgcttcaaccataaatt

SEQ ID NO: 908536 - DNA, 33 bp, Homo sapien
tgtgaataagtcctcatgcttcaaccataaatt

SEQ ID NO: 908537 - DNA, 33 bp, Homo sapien
gctttctctgagctgacgttttaatgacttgat

SEQ ID NO: 908538 - DNA, 33 bp, Homo sapien
gctttctctgagctgaggttttaatgacttgat

SEQ ID NO: 908539 - DNA, 33 bp, Homo sapien
atgatgacgtgaggacacagggaggatatgacc

SEQ ID NO: 908540 - DNA, 33 bp, Homo sapien
atgatgacgtgaggacgcagggaggatatgacc

SEQ ID NO: 908541 - DNA, 33 bp, Homo sapien
cttgtgaaaatttaaacgttaggtcagaatttg

SEQ ID NO: 908542 - DNA, 33 bp, Homo sapien
cttgtgaaaatttaaatgttaggtcagaatttg

SEQ ID NO: 908543 - DNA, 33 bp, Homo sapien
ttcattagaattttagccaaaatctgattataa

SEQ ID NO: 908544 - DNA, 33 bp, Homo sapien
ttcattagaattttaggcaaaatctgattataa

SEQ ID NO: 908545 - DNA, 33 bp, Homo sapien
gagatttgtccagataactccttctcaatgata

SEQ ID NO: 908546 - DNA, 33 bp, Homo sapien
gagatttgtccagatacctccttctcaatgata

SEQ ID NO: 908547 - DNA, 33 bp, Homo sapien
gagaatgctgttattaggggtctaaagatcatt

SEQ ID NO: 908548 - DNA, 33 bp, Homo sapien
gagaatgctgttattatgggtctaaagatcatt

SEQ ID NO: 908549 - DNA, 33 bp, Homo sapien
acattactttcacataacacaccttttcaaagt

SEQ ID NO: 908550 - DNA, 33 bp, Homo sapien
acattactttcacatatcacaccttttcaaagt

SEQ ID NO: 908551 - DNA, 33 bp, Homo sapien
gacaatgctgtttaaacgtcattcatgtcacgt

SEQ ID NO: 908552 - DNA, 33 bp, Homo sapien
gacaatgctgtttaaatgtcattcatgtcacgt

SEQ ID NO: 908553 - DNA, 33 bp, Homo sapien
ggtatctatttctcagacactgcactaactgta

SEQ ID NO: 908554 - DNA, 33 bp, Homo sapien
ggtatctatttctcaggcactgcactaactgta

SEQ ID NO: 908555 - DNA, 33 bp, Homo sapien
tctgttctttcaaatacggtgcgagtggaatct

SEQ ID NO: 908556 - DNA, 33 bp, Homo sapien
tctgttctttcaaatatggtgcgagtggaatct

SEQ ID NO: 908557 - DNA, 33 bp, Homo sapien
ggattgcagtttggatgaaaatgtccataacta

SEQ ID NO: 908558 - DNA, 33 bp, Homo sapien
ggattgcagtttggattaaaatgtccataacta

SEQ ID NO: 908559 - DNA, 33 bp, Homo sapien
ttgctactgagctttacactattcctaacctta

SEQ ID NO: 908560 - DNA, 33 bp, Homo sapien
ttgctactgagctttatactattcctaacctta

SEQ ID NO: 908561 - DNA, 33 bp, Homo sapien
tttaggatgctataaacttctctctattattcc

SEQ ID NO: 908562 - DNA, 33 bp, Homo sapien
tttaggatgctataaatttctctctattattcc

SEQ ID NO: 908563 - DNA, 33 bp, Homo sapien
atgtggtgttttaacgaaggctactctaatttc

SEQ ID NO: 908564 - DNA, 33 bp, Homo sapien
atgtggtgttttaacgtaggctactctaatttc

SEQ ID NO: 908565 - DNA, 33 bp, Homo sapien
cttcttggagaaacaagatcttcatgcagtttc

SEQ ID NO: 908566 - DNA, 33 bp, Homo sapien
cttcttggagaaacaatatcttcatgcagtttc

SEQ ID NO: 908567 - DNA, 33 bp, Homo sapien
tgctggatcaaacataacttttaaattgagaaa

SEQ ID NO: 908568 - DNA, 33 bp, Homo sapien
tgctggatcaaacataccttttaaattgagaaa

SEQ ID NO: 908569 - DNA, 33 bp, Homo sapien
gggagctaccgtggaacaagatggcctcaaagc

SEQ ID NO: 908570 - DNA, 33 bp, Homo sapien
gggagctaccgtggaataagatggcctcaaagc

SEQ ID NO: 908571 - DNA, 33 bp, Homo sapien
agatcttactgtttgggaaactaaggcttctct

SEQ ID NO: 908572 - DNA, 33 bp, Homo sapien
agatcttactgtttggtaaactaaggcttctct

SEQ ID NO: 908573 - DNA, 33 bp, Homo sapien
cccaccttttctgcaacggtccctgggcctaga

SEQ ID NO: 908574 - DNA, 33 bp, Homo sapien
cccaccttttctgcaatggtccctgggcctaga

SEQ ID NO: 908575 - DNA, 33 bp, Homo sapien
tataattccaattataagatgaacctagcatag

SEQ ID NO: 908576 - DNA, 33 bp, Homo sapien
tataattccaattatatgatgaacctagcatag

SEQ ID NO: 908577 - DNA, 33 bp, Homo sapien
gcttagaccctgtgaactgcatgggaggccatc

SEQ ID NO: 908578 - DNA, 33 bp, Homo sapien
gcttagaccctgtgaattgcatgggaggccatc

SEQ ID NO: 908579 - DNA, 33 bp, Homo sapien
ttcccatgagacaggtaaaaaaacatcttgtca

SEQ ID NO: 908580 - DNA, 33 bp, Homo sapien
ttcccatgagacaggtgaaaaaacatcttgtca

SEQ ID NO: 908581 - DNA, 33 bp, Homo sapien
gctgtggcctgactcacaggtgtgcactataca

SEQ ID NO: 908582 - DNA, 33 bp, Homo sapien
gctgtggcctgactcataggtgtgcactataca

SEQ ID NO: 908583 - DNA, 33 bp, Homo sapien
gtatggtgcataaacaaagataagactgaggca

SEQ ID NO: 908584 - DNA, 33 bp, Homo sapien
gtatggtgcataaacagagataagactgaggca

SEQ ID NO: 908585 - DNA, 33 bp, Homo sapien
caggaagctctagttaccatttatttatatata

SEQ ID NO: 908586 - DNA, 33 bp, Homo sapien
caggaagctctagttagcatttatttatatata

SEQ ID NO: 908587 - DNA, 33 bp, Homo sapien
agcaaaaacaatggtcaattctaaacttgtagg

SEQ ID NO: 908588 - DNA, 33 bp, Homo sapien
agcaaaaacaatggtcgattctaaacttgtagg

SEQ ID NO: 908589 - DNA, 33 bp, Homo sapien
tgattctggaagggtaaatattcagccactgca

SEQ ID NO: 908590 - DNA, 33 bp, Homo sapien
tgattctggaagggtagatattcagccactgca

SEQ ID NO: 908591 - DNA, 33 bp, Homo sapien
actccaaagacctagcacttaccaggagatggg

SEQ ID NO: 908592 - DNA, 33 bp, Homo sapien
actccaaagacctagcgcttaccaggagatggg

SEQ ID NO: 908593 - DNA, 33 bp, Homo sapien
tcccacttgataaaacactgataaaattgctat

SEQ ID NO: 908594 - DNA, 33 bp, Homo sapien
tcccacttgataaaacgctgataaaattgctat

SEQ ID NO: 908595 - DNA, 33 bp, Homo sapien
gtatatattgagtttaaagagtttctaactacg

SEQ ID NO: 908596 - DNA, 33 bp, Homo sapien
gtatatattgagtttagagagtttctaactacg

SEQ ID NO: 908597 - DNA, 33 bp, Homo sapien
tgcttcaggtccttcacgtgtgcccttctatcc

SEQ ID NO: 908598 - DNA, 33 bp, Homo sapien
tgcttcaggtccttcatgtgtgcccttctatcc

SEQ ID NO: 908599 - DNA, 33 bp, Homo sapien
agtgacttctggagaaaatattcagttctaaaa

SEQ ID NO: 908600 - DNA, 33 bp, Homo sapien
agtgacttctggagaagatattcagttctaaaa

SEQ ID NO: 908601 - DNA, 33 bp, Homo sapien
aattaatctggacccacgtctcttaccatatgc

SEQ ID NO: 908602 - DNA, 33 bp, Homo sapien
aattaatctggacccatgtctcttaccatatgc

SEQ ID NO: 908603 - DNA, 33 bp, Homo sapien
gttgcttcagagccataatgcctgaactgaagt

SEQ ID NO: 908604 - DNA, 33 bp, Homo sapien
gttgcttcagagccatgatgcctgaactgaagt

SEQ ID NO: 908605 - DNA, 33 bp, Homo sapien
ataagatgtaggttgaaaaacagtggttaaaat

SEQ ID NO: 908606 - DNA, 33 bp, Homo sapien
ataagatgtaggttgagaaacagtggttaaaat

SEQ ID NO: 908607 - DNA, 33 bp, Homo sapien
aagcatgagtaatgcaagaatccaattgtcctt

SEQ ID NO: 908608 - DNA, 33 bp, Homo sapien
aagcatgagtaatgcaggaatccaattgtcctt

SEQ ID NO: 908609 - DNA, 33 bp, Homo sapien
tctgccacttacccaccgaacagtacaagtgtg

SEQ ID NO: 908610 - DNA, 33 bp, Homo sapien
tctgccacttacccactgaacagtacaagtgtg

SEQ ID NO: 908611 - DNA, 33 bp, Homo sapien
attactggcagtagaacgcagaagagaaactca

SEQ ID NO: 908612 - DNA, 33 bp, Homo sapien
attactggcagtagaatgcagaagagaaactca

SEQ ID NO: 908613 - DNA, 33 bp, Homo sapien
attcattcctaagtaaatagactcaacagtgag

SEQ ID NO: 908614 - DNA, 33 bp, Homo sapien
attcattcctaagtaagtagactcaacagtgag

SEQ ID NO: 908615 - DNA, 33 bp, Homo sapien
gtggcagtgacatattcggtgttcacattgaaa

SEQ ID NO: 908616 - DNA, 33 bp, Homo sapien
gtggcagtgacatatttggtgttcacattgaaa

SEQ ID NO: 908617 - DNA, 33 bp, Homo sapien
agggttttggtaaataaatgacatcaccaatgt

SEQ ID NO: 908618 - DNA, 33 bp, Homo sapien
agggttttggtaaatagatgacatcaccaatgt

SEQ ID NO: 908619 - DNA, 33 bp, Homo sapien
ttaaccaaattggtgaatacacaaggtccctct

SEQ ID NO: 908620 - DNA, 33 bp, Homo sapien
ttaaccaaattggtgagtacacaaggtccctct

SEQ ID NO: 908621 - DNA, 33 bp, Homo sapien
tgtatgcttattctaacgtttgtgttacctgtg

SEQ ID NO: 908622 - DNA, 33 bp, Homo sapien
tgtatgcttattctaatgtttgtgttacctgtg

SEQ ID NO: 908623 - DNA, 33 bp, Homo sapien
aacgtaatatgatccacgcccaatgtagcaaca

SEQ ID NO: 908624 - DNA, 33 bp, Homo sapien
aacgtaatatgatccaggcccaatgtagcaaca

SEQ ID NO: 908625 - DNA, 33 bp, Homo sapien
acaatcttgacagtagaaagtttttactatttt

SEQ ID NO: 908626 - DNA, 33 bp, Homo sapien
acaatcttgacagtaggaagtttttactatttt

SEQ ID NO: 908627 - DNA, 33 bp, Homo sapien
aaatagagaaaggttggaactgtcgctacctca

SEQ ID NO: 908628 - DNA, 33 bp, Homo sapien
aaatagagaaaggttgtaactgtcgctacctca

SEQ ID NO: 908629 - DNA, 33 bp, Homo sapien
gcagtgtaaaagcaagaaaaagactttcaatag

SEQ ID NO: 908630 - DNA, 33 bp, Homo sapien
gcagtgtaaaagcaaggaaaagactttcaatag

SEQ ID NO: 908631 - DNA, 33 bp, Homo sapien
aaatttagatttttaaagaaagcaccaaacgat

SEQ ID NO: 908632 - DNA, 33 bp, Homo sapien
aaatttagatttttaaggaaagcaccaaacgat

SEQ ID NO: 908633 - DNA, 33 bp, Homo sapien
atctactttgaatctaggttttgcaattaacta

SEQ ID NO: 908634 - DNA, 33 bp, Homo sapien
atctactttgaatctatgttttgcaattaacta

SEQ ID NO: 908635 - DNA, 33 bp, Homo sapien
gtttggtaattcaccaataaagtcactgggctt

SEQ ID NO: 908636 - DNA, 33 bp, Homo sapien
gtttggtaattcaccagtaaagtcactgggctt

SEQ ID NO: 908637 - DNA, 33 bp, Homo sapien
agtaaagtgagttagacattcagtcatttaaat

SEQ ID NO: 908638 - DNA, 33 bp, Homo sapien
agtaaagtgagttagatattcagtcatttaaat

SEQ ID NO: 908639 - DNA, 33 bp, Homo sapien
ggaagaagtaggaatacatattgcttaaaatta

SEQ ID NO: 908640 - DNA, 33 bp, Homo sapien
ggaagaagtaggaatagatattgcttaaaatta

SEQ ID NO: 908641 - DNA, 33 bp, Homo sapien
agtcctttgagagttacctggcactgagtaaat

SEQ ID NO: 908642 - DNA, 33 bp, Homo sapien
agtcctttgagagttagctggcactgagtaaat

SEQ ID NO: 908643 - DNA, 33 bp, Homo sapien
aagtgccaaagcaaaaataaggccaaataagga

SEQ ID NO: 908644 - DNA, 33 bp, Homo sapien
aagtgccaaagcaaaagtaaggccaaataagga

SEQ ID NO: 908645 - DNA, 33 bp, Homo sapien
ctcactttattctcaaatatgcagtccagttta

SEQ ID NO: 908646 - DNA, 33 bp, Homo sapien
ctcactttattctcaattatgcagtccagttta

SEQ ID NO: 908647 - DNA, 33 bp, Homo sapien
atttagtttggaagtgcaatcccattgtgtatc

SEQ ID NO: 908648 - DNA, 33 bp, Homo sapien
atttagtttggaagtgtaatcccattgtgtatc

SEQ ID NO: 908649 - DNA, 33 bp, Homo sapien
gagtgcaaacattaaacgggggttgaatacaag

SEQ ID NO: 908650 - DNA, 33 bp, Homo sapien
gagtgcaaacattaaatgggggttgaatacaag

SEQ ID NO: 908651 - DNA, 33 bp, Homo sapien
gatgctagatttgggggatggatgcaaggaaga

SEQ ID NO: 908652 - DNA, 33 bp, Homo sapien
gatgctagatttggggtatggatgcaaggaaga

SEQ ID NO: 908653 - DNA, 33 bp, Homo sapien
ttaaattcatgtattgcaaatcctgtgcttatc

SEQ ID NO: 908654 - DNA, 33 bp, Homo sapien
ttaaattcatgtattgtaaatcctgtgcttatc

SEQ ID NO: 908655 - DNA, 33 bp, Homo sapien
gtactactctggtgaaggttgtccatagttggg

SEQ ID NO: 908656 - DNA, 33 bp, Homo sapien
gtactactctggtgaatgttgtccatagttggg

SEQ ID NO: 908657 - DNA, 33 bp, Homo sapien
ctgccatcattttaaggaatgtttcctggagag

SEQ ID NO: 908658 - DNA, 33 bp, Homo sapien
ctgccatcattttaagtaatgtttcctggagag

SEQ ID NO: 908659 - DNA, 33 bp, Homo sapien
ttttatgctatagttaccatcaaagaacatcct

SEQ ID NO: 908660 - DNA, 33 bp, Homo sapien
ttttatgctatagttatcatcaaagaacatcct

SEQ ID NO: 908661 - DNA, 33 bp, Homo sapien
agggtgcctaaaatttaaaacaaatgagcaaat

SEQ ID NO: 908662 - DNA, 33 bp, Homo sapien
agggtgcctaaaatttgaaacaaatgagcaaat

SEQ ID NO: 908663 - DNA, 33 bp, Homo sapien
aattgcagacattttaacatctaactggaacac

SEQ ID NO: 908664 - DNA, 33 bp, Homo sapien
aattgcagacattttagcatctaactggaacac

SEQ ID NO: 908665 - DNA, 33 bp, Homo sapien
tttcaaaccagagaagaaacttagaggcattcc

SEQ ID NO: 908666 - DNA, 33 bp, Homo sapien
tttcaaaccagagaaggaacttagaggcattcc

SEQ ID NO: 908667 - DNA, 33 bp, Homo sapien
ccttactgaatgcatactataaacttttatgtg

SEQ ID NO: 908668 - DNA, 33 bp, Homo sapien
ccttactgaatgcatagtataaacttttatgtg

SEQ ID NO: 908669 - DNA, 33 bp, Homo sapien
tgcttgatcaagctgaacttaataatggaagaa

SEQ ID NO: 908670 - DNA, 33 bp, Homo sapien
tgcttgatcaagctgaccttaataatggaagaa

SEQ ID NO: 908671 - DNA, 33 bp, Homo sapien
aggagtgtggaagggaactatacgtccatcatg

SEQ ID NO: 908672 - DNA, 33 bp, Homo sapien
aggagtgtggaagggagctatacgtccatcatg

SEQ ID NO: 908673 - DNA, 33 bp, Homo sapien
aagcattccagaggaaacagaaaattagatgaa

SEQ ID NO: 908674 - DNA, 33 bp, Homo sapien
aagcattccagaggaagcagaaaattagatgaa

SEQ ID NO: 908675 - DNA, 33 bp, Homo sapien
ttccctgaggactaaccccttgttgctttcagt

SEQ ID NO: 908676 - DNA, 33 bp, Homo sapien
ttccctgaggactaactccttgttgctttcagt

SEQ ID NO: 908677 - DNA, 33 bp, Homo sapien
ttaaacatagtagctcaaaagcatcatatgttt

SEQ ID NO: 908678 - DNA, 33 bp, Homo sapien
ttaaacatagtagctcgaaagcatcatatgttt

SEQ ID NO: 908679 - DNA, 33 bp, Homo sapien
aggtctcttatcaagcaatttaaataaccatat

SEQ ID NO: 908680 - DNA, 33 bp, Homo sapien
aggtctcttatcaagcgatttaaataaccatat

SEQ ID NO: 908681 - DNA, 33 bp, Homo sapien
ttgttaggcagaataactgcttatctcacctaa

SEQ ID NO: 908682 - DNA, 33 bp, Homo sapien
ttgttaggcagaataagtgcttatctcacctaa

SEQ ID NO: 908683 - DNA, 33 bp, Homo sapien
tttcaatttttttcaacgtacgtgaattcattg

SEQ ID NO: 908684 - DNA, 33 bp, Homo sapien
tttcaatttttttcaatgtacgtgaattcattg

SEQ ID NO: 908685 - DNA, 33 bp, Homo sapien
gaacttgggaggtggaagtggttgcggttagcc

SEQ ID NO: 908686 - DNA, 33 bp, Homo sapien
gaacttgggaggtggaggtggttgcggttagcc

SEQ ID NO: 908687 - DNA, 33 bp, Homo sapien
atgtcagaaagatcatgaaaggtccaaacccag

SEQ ID NO: 908688 - DNA, 33 bp, Homo sapien
atgtcagaaagatcattaaaggtccaaacccag

SEQ ID NO: 908689 - DNA, 33 bp, Homo sapien
gtttaagccaaaacaaagaaggccctattattt

SEQ ID NO: 908690 - DNA, 33 bp, Homo sapien
gtttaagccaaaacaaggaaggccctattattt

SEQ ID NO: 908691 - DNA, 33 bp, Homo sapien
ttgccaaaagatggaaatagcctaacaatagtt

SEQ ID NO: 908692 - DNA, 33 bp, Homo sapien
ttgccaaaagatggaagtagcctaacaatagtt

SEQ ID NO: 908693 - DNA, 33 bp, Homo sapien
gattgtgttcaaattgaagaatgaaaaatagat

SEQ ID NO: 908694 - DNA, 33 bp, Homo sapien
gattgtgttcaaattgtagaatgaaaaatagat

SEQ ID NO: 908695 - DNA, 33 bp, Homo sapien
ttcattatcccccctcacatttcctttctcatc

SEQ ID NO: 908696 - DNA, 33 bp, Homo sapien
ttcattatcccccctcgcatttcctttctcatc

SEQ ID NO: 908697 - DNA, 33 bp, Homo sapien
ggtgcaattcccttcaaatgttcctctttcatt

SEQ ID NO: 908698 - DNA, 33 bp, Homo sapien
ggtgcaattcccttcatatgttcctctttcatt

SEQ ID NO: 908699 - DNA, 33 bp, Homo sapien
ctagtaaacacacaaaaatccaagcaaataaaa

SEQ ID NO: 908700 - DNA, 33 bp, Homo sapien
ctagtaaacacacaaatatccaagcaaataaaa

SEQ ID NO: 908701 - DNA, 33 bp, Homo sapien
tgaggaacgtaaaagaaacaggatagcaacata

SEQ ID NO: 908702 - DNA, 33 bp, Homo sapien
tgaggaacgtaaaagatacaggatagcaacata

SEQ ID NO: 908703 - DNA, 33 bp, Homo sapien
ttgatgagtccaatgacagcaatttattcacat

SEQ ID NO: 908704 - DNA, 33 bp, Homo sapien
ttgatgagtccaatgatagcaatttattcacat

SEQ ID NO: 908705 - DNA, 33 bp, Homo sapien
caatttgagatctacacaatgtgcagtgaaaca

SEQ ID NO: 908706 - DNA, 33 bp, Homo sapien
caatttgagatctacataatgtgcagtgaaaca

SEQ ID NO: 908707 - DNA, 33 bp, Homo sapien
aaggaacaatgggattgaaatactgaataaaag

SEQ ID NO: 908708 - DNA, 33 bp, Homo sapien
aaggaacaatgggatttaaatactgaataaaag

SEQ ID NO: 908709 - DNA, 33 bp, Homo sapien
agaccgctgtcctagaagatgcaagtgttttta

SEQ ID NO: 908710 - DNA, 33 bp, Homo sapien
agaccgctgtcctagaggatgcaagtgttttta

SEQ ID NO: 908711 - DNA, 33 bp, Homo sapien
acctagggtgaggctaccagtgaccattccaac

SEQ ID NO: 908712 - DNA, 33 bp, Homo sapien
acctagggtgaggctagcagtgaccattccaac

SEQ ID NO: 908713 - DNA, 33 bp, Homo sapien
tttccttgattgttgaagactatgatagggcat

SEQ ID NO: 908714 - DNA, 33 bp, Homo sapien
tttccttgattgttgacgactatgatagggcat

SEQ ID NO: 908715 - DNA, 33 bp, Homo sapien
agcaagcaccaccttaaactgcttctgggcatc

SEQ ID NO: 908716 - DNA, 33 bp, Homo sapien
agcaagcaccaccttagactgcttctgggcatc

SEQ ID NO: 908717 - DNA, 33 bp, Homo sapien
caccttgtgccatgctcacataaactcatctgt

SEQ ID NO: 908718 - DNA, 33 bp, Homo sapien
caccttgtgccatgcttacataaactcatctgt

SEQ ID NO: 908719 - DNA, 33 bp, Homo sapien
aaacacctaagaagatcaatgtatgtgctgggt

SEQ ID NO: 908720 - DNA, 33 bp, Homo sapien
aaacacctaagaagattaatgtatgtgctgggt

SEQ ID NO: 908721 - DNA, 33 bp, Homo sapien
atcagattcataaccactatctagacctgtggg

SEQ ID NO: 908722 - DNA, 33 bp, Homo sapien
atcagattcataaccattatctagacctgtggg

SEQ ID NO: 908723 - DNA, 33 bp, Homo sapien
gagaactgtgtctctacgactcttcatgggagt

SEQ ID NO: 908724 - DNA, 33 bp, Homo sapien
gagaactgtgtctctatgactcttcatgggagt

SEQ ID NO: 908725 - DNA, 33 bp, Homo sapien
aacaaatataagcttcactcaatttttacagta

SEQ ID NO: 908726 - DNA, 33 bp, Homo sapien
aacaaatataagcttcgctcaatttttacagta

SEQ ID NO: 908727 - DNA, 33 bp, Homo sapien
cttgaacacgtagaggccatttagggttattaa

SEQ ID NO: 908728 - DNA, 33 bp, Homo sapien
cttgaacacgtagaggtcatttagggttattaa

SEQ ID NO: 908729 - DNA, 33 bp, Homo sapien
caaagtattcctacacacctcctctcgtctagc

SEQ ID NO: 908730 - DNA, 33 bp, Homo sapien
caaagtattcctacacgcctcctctcgtctagc

SEQ ID NO: 908731 - DNA, 33 bp, Homo sapien
agaaggaagagtgataaagagaagcgccataac

SEQ ID NO: 908732 - DNA, 33 bp, Homo sapien
agaaggaagagtgatagagagaagcgccataac

SEQ ID NO: 908733 - DNA, 33 bp, Homo sapien
gagtagaactatctcactatttcatatggaact

SEQ ID NO: 908734 - DNA, 33 bp, Homo sapien
gagtagaactatctcagtatttcatatggaact

SEQ ID NO: 908735 - DNA, 33 bp, Homo sapien
tttggaagtaaacataaacttgaatcccagagc

SEQ ID NO: 908736 - DNA, 33 bp, Homo sapien
tttggaagtaaacatagacttgaatcccagagc

SEQ ID NO: 908737 - DNA, 33 bp, Homo sapien
taatagaaatacagaacgtggtgtggaaggtgg

SEQ ID NO: 908738 - DNA, 33 bp, Homo sapien
taatagaaatacagaatgtggtgtggaaggtgg

SEQ ID NO: 908739 - DNA, 33 bp, Homo sapien
aatcctcttctctccacagtgccatcctgtctg

SEQ ID NO: 908740 - DNA, 33 bp, Homo sapien
aatcctcttctctccatagtgccatcctgtctg

SEQ ID NO: 908741 - DNA, 33 bp, Homo sapien
agttattcatcttttaagacatagtgccagtct

SEQ ID NO: 908742 - DNA, 33 bp, Homo sapien
agttattcatcttttaggacatagtgccagtct

SEQ ID NO: 908743 - DNA, 33 bp, Homo sapien
tctgtcttgctccacaaagactggcactatgtc

SEQ ID NO: 908744 - DNA, 33 bp, Homo sapien
tctgtcttgctccacagagactggcactatgtc

SEQ ID NO: 908745 - DNA, 33 bp, Homo sapien
tggtcacaaaagcatacgtacagtcaaaattaa

SEQ ID NO: 908746 - DNA, 33 bp, Homo sapien
tggtcacaaaagcatatgtacagtcaaaattaa

SEQ ID NO: 908747 - DNA, 33 bp, Homo sapien
acacacattataaccccaacagaaacaaaagaa

SEQ ID NO: 908748 - DNA, 33 bp, Homo sapien
acacacattataaccctaacagaaacaaaagaa

SEQ ID NO: 908749 - DNA, 33 bp, Homo sapien
agcatttacttaaaaaaataccatatgcttata

SEQ ID NO: 908750 - DNA, 33 bp, Homo sapien
agcatttacttaaaaacataccatatgcttata

SEQ ID NO: 908751 - DNA, 33 bp, Homo sapien
tcagagctacgtaacaacctggctgtttcctct

SEQ ID NO: 908752 - DNA, 33 bp, Homo sapien
tcagagctacgtaacaccctggctgtttcctct

SEQ ID NO: 908753 - DNA, 33 bp, Homo sapien
tgaaaacacctcttgcagaattgaagtacacag

SEQ ID NO: 908754 - DNA, 33 bp, Homo sapien
tgaaaacacctcttgccgaattgaagtacacag

SEQ ID NO: 908755 - DNA, 33 bp, Homo sapien
aactggatgtgagaccggaatggaaacacatat

SEQ ID NO: 908756 - DNA, 33 bp, Homo sapien
aactggatgtgagacctgaatggaaacacatat

SEQ ID NO: 908757 - DNA, 33 bp, Homo sapien
gacctttcttaattctaaaatatatccagcccc

SEQ ID NO: 908758 - DNA, 33 bp, Homo sapien
gacctttcttaattctgaaatatatccagcccc

SEQ ID NO: 908759 - DNA, 33 bp, Homo sapien
cttccaaaaactgaccggattataatagcaacc

SEQ ID NO: 908760 - DNA, 33 bp, Homo sapien
cttccaaaaactgacctgattataatagcaacc

SEQ ID NO: 908761 - DNA, 33 bp, Homo sapien
tagcctttcatgttgaccatatggacactcagc

SEQ ID NO: 908762 - DNA, 33 bp, Homo sapien
tagcctttcatgttgatcatatggacactcagc

SEQ ID NO: 908763 - DNA, 33 bp, Homo sapien
agatacttgttcttaacagctttttgagaattc

SEQ ID NO: 908764 - DNA, 33 bp, Homo sapien
agatacttgttcttaatagctttttgagaattc

SEQ ID NO: 908765 - DNA, 33 bp, Homo sapien
aggatggcttctgtccactccaactgcatcttc

SEQ ID NO: 908766 - DNA, 33 bp, Homo sapien
aggatggcttctgtccgctccaactgcatcttc

SEQ ID NO: 908767 - DNA, 33 bp, Homo sapien
catgctgattggtcaagaggtggtcataggcag

SEQ ID NO: 908768 - DNA, 33 bp, Homo sapien
catgctgattggtcaataggtggtcataggcag

SEQ ID NO: 908769 - DNA, 33 bp, Homo sapien
tcacttttgtagccaccaggtgaaaagatctgc

SEQ ID NO: 908770 - DNA, 33 bp, Homo sapien
tcacttttgtagccacgaggtgaaaagatctgc

SEQ ID NO: 908771 - DNA, 33 bp, Homo sapien
gtggctgcctttgagaagagatgttctttccct

SEQ ID NO: 908772 - DNA, 33 bp, Homo sapien
gtggctgcctttgagaggagatgttctttccct

SEQ ID NO: 908773 - DNA, 33 bp, Homo sapien
caaaggaaccaaaggaaatgatggagcattttt

SEQ ID NO: 908774 - DNA, 33 bp, Homo sapien
caaaggaaccaaaggagatgatggagcattttt

SEQ ID NO: 908775 - DNA, 33 bp, Homo sapien
ttccaacagcttactacattacttcaaataatt

SEQ ID NO: 908776 - DNA, 33 bp, Homo sapien
ttccaacagcttactatattacttcaaataatt

SEQ ID NO: 908777 - DNA, 33 bp, Homo sapien
taagcacctatatcccacaatcaatgtccatat

SEQ ID NO: 908778 - DNA, 33 bp, Homo sapien
taagcacctatatcccgcaatcaatgtccatat

SEQ ID NO: 908779 - DNA, 33 bp, Homo sapien
tatttgtgagaagttagaattctgcctttgttt

SEQ ID NO: 908780 - DNA, 33 bp, Homo sapien
tatttgtgagaagttataattctgcctttgttt

SEQ ID NO: 908781 - DNA, 33 bp, Homo sapien
catcataattgttgaccctgtgaagtacactac

SEQ ID NO: 908782 - DNA, 33 bp, Homo sapien
catcataattgttgacgctgtgaagtacactac

SEQ ID NO: 908783 - DNA, 33 bp, Homo sapien
caggagtgaaagcaaccgtaagggagtcaatga

SEQ ID NO: 908784 - DNA, 33 bp, Homo sapien
caggagtgaaagcaactgtaagggagtcaatga

SEQ ID NO: 908785 - DNA, 33 bp, Homo sapien
gaattcagttcttccaaataaaatccattttca

SEQ ID NO: 908786 - DNA, 33 bp, Homo sapien
gaattcagttcttccagataaaatccattttca

SEQ ID NO: 908787 - DNA, 33 bp, Homo sapien
agcgaggtgctaaataaatatgagcctggggtc

SEQ ID NO: 908788 - DNA, 33 bp, Homo sapien
agcgaggtgctaaatagatatgagcctggggtc

SEQ ID NO: 908789 - DNA, 33 bp, Homo sapien
atgtaagagatgcaaaataagcctaccacttcc

SEQ ID NO: 908790 - DNA, 33 bp, Homo sapien
atgtaagagatgcaaagtaagcctaccacttcc

SEQ ID NO: 908791 - DNA, 33 bp, Homo sapien
ctttcagtgtaccacaaaatgccttgtttataa

SEQ ID NO: 908792 - DNA, 33 bp, Homo sapien
ctttcagtgtaccacacaatgccttgtttataa

SEQ ID NO: 908793 - DNA, 33 bp, Homo sapien
gaaactaagccattgtaaaatgagtctctaagt

SEQ ID NO: 908794 - DNA, 33 bp, Homo sapien
gaaactaagccattgttaaatgagtctctaagt

SEQ ID NO: 908795 - DNA, 33 bp, Homo sapien
ttgcattaaatgatggacaattacaagtctgtg

SEQ ID NO: 908796 - DNA, 33 bp, Homo sapien
ttgcattaaatgatgggcaattacaagtctgtg

SEQ ID NO: 908797 - DNA, 33 bp, Homo sapien
caaacattgaatcagacgaggccgaggccctgc

SEQ ID NO: 908798 - DNA, 33 bp, Homo sapien
caaacattgaatcagatgaggccgaggccctgc

SEQ ID NO: 908799 - DNA, 33 bp, Homo sapien
gaatacatcaaacaatgacagccctgaatagtc

SEQ ID NO: 908800 - DNA, 33 bp, Homo sapien
gaatacatcaaacaattacagccctgaatagtc

SEQ ID NO: 908801 - DNA, 33 bp, Homo sapien
gctacttagattcaaaatcattacaatgaaata

SEQ ID NO: 908802 - DNA, 33 bp, Homo sapien
gctacttagattcaaattcattacaatgaaata

SEQ ID NO: 908803 - DNA, 33 bp, Homo sapien
aagtagccatatacagaagctagtatttaccac

SEQ ID NO: 908804 - DNA, 33 bp, Homo sapien
aagtagccatatacagcagctagtatttaccac

SEQ ID NO: 908805 - DNA, 33 bp, Homo sapien
agcattctcttcctaaaaaaatagcaagtaaaa

SEQ ID NO: 908806 - DNA, 33 bp, Homo sapien
agcattctcttcctaacaaaatagcaagtaaaa

SEQ ID NO: 908807 - DNA, 33 bp, Homo sapien
aaaaactctgatatgcaaagaagccggaagata

SEQ ID NO: 908808 - DNA, 33 bp, Homo sapien
aaaaactctgatatgcgaagaagccggaagata

SEQ ID NO: 908809 - DNA, 33 bp, Homo sapien; identical to SEQ ID NO: 908807

SEQ ID NO: 908810 - DNA, 33 bp, Homo sapien; identical to SEQ ID NO: 908808

SEQ ID NO: 908811 - DNA, 33 bp, Homo sapien
tcttttacttttcagaagttgtcccattatgtt

SEQ ID NO: 908812 - DNA, 33 bp, Homo sapien
tcttttacttttcagaggttgtcccattatgtt

SEQ ID NO: 908813 - DNA, 33 bp, Homo sapien
ccctgccaaagagaagaaagcattggtaattac

SEQ ID NO: 908814 - DNA, 33 bp, Homo sapien
ccctgccaaagagaaggaagcattggtaattac

SEQ ID NO: 908815 - DNA, 33 bp, Homo sapien
cactgccatgtcagcagtatgtcttcaaatata

SEQ ID NO: 908816 - DNA, 33 bp, Homo sapien
cactgccatgtcagcattatgtcttcaaatata

SEQ ID NO: 908817 - DNA, 33 bp, Homo sapien
gtagtgaatgagtagccatttcatttcatggtg

SEQ ID NO: 908818 - DNA, 33 bp, Homo sapien
gtagtgaatgagtagcgatttcatttcatggtg

SEQ ID NO: 908819 - DNA, 33 bp, Homo sapien
tgaactgtgcaggtccacttagcaaaaccaaca

SEQ ID NO: 908820 - DNA, 33 bp, Homo sapien
tgaactgtgcaggtccgcttagcaaaaccaaca

SEQ ID NO: 908821 - DNA, 33 bp, Homo sapien
aaagtatttgactcttaaaaatgtagctgttgt

SEQ ID NO: 908822 - DNA, 33 bp, Homo sapien
aaagtatttgactcttgaaaatgtagctgttgt

SEQ ID NO: 908823 - DNA, 33 bp, Homo sapien
atggtatactggaataaatagcaaattattgat

SEQ ID NO: 908824 - DNA, 33 bp, Homo sapien
atggtatactggaatacatagcaaattattgat

SEQ ID NO: 908825 - DNA, 33 bp, Homo sapien
tctgcagtctgttctcaagggttttaatacatg

SEQ ID NO: 908826 - DNA, 33 bp, Homo sapien
tctgcagtctgttctcgagggttttaatacatg

SEQ ID NO: 908827 - DNA, 33 bp, Homo sapien
gatcaagcaagattgacggtagaccttcactac

SEQ ID NO: 908828 - DNA, 33 bp, Homo sapien
gatcaagcaagattgatggtagaccttcactac

SEQ ID NO: 908829 - DNA, 33 bp, Homo sapien
tggtaaaagatctacaaatggagtccaaccttt

SEQ ID NO: 908830 - DNA, 33 bp, Homo sapien
tggtaaaagatctacagatggagtccaaccttt

SEQ ID NO: 908831 - DNA, 33 bp, Homo sapien
ttatgtgtatctggaaatgaagcaggatactga

SEQ ID NO: 908832 - DNA, 33 bp, Homo sapien
ttatgtgtatctggaagtgaagcaggatactga

SEQ ID NO: 908833 - DNA, 33 bp, Homo sapien
ggcatgagtgaagaaaacatgacacagaaatag

SEQ ID NO: 908834 - DNA, 33 bp, Homo sapien
ggcatgagtgaagaaagcatgacacagaaatag

SEQ ID NO: 908835 - DNA, 33 bp, Homo sapien
ttgttaaccaagtacaatacctcaactgtgaat

SEQ ID NO: 908836 - DNA, 33 bp, Homo sapien
ttgttaaccaagtacattacctcaactgtgaat

SEQ ID NO: 908837 - DNA, 33 bp, Homo sapien
aactcatggttggatacatgttaccatttgcct

SEQ ID NO: 908838 - DNA, 33 bp, Homo sapien
aactcatggttggatatatgttaccatttgcct

SEQ ID NO: 908839 - DNA, 33 bp, Homo sapien
atggcttaagggtaagacattttcagattcatg

SEQ ID NO: 908840 - DNA, 33 bp, Homo sapien
atggcttaagggtaaggcattttcagattcatg

SEQ ID NO: 908841 - DNA, 33 bp, Homo sapien
cttatgctattatacacatattaattcttctag

SEQ ID NO: 908842 - DNA, 33 bp, Homo sapien
cttatgctattatacagatattaattcttctag

SEQ ID NO: 908843 - DNA, 33 bp, Homo sapien
gtaatattcaataacccggagccatggaatagg

SEQ ID NO: 908844 - DNA, 33 bp, Homo sapien
gtaatattcaataacctggagccatggaatagg

SEQ ID NO: 908845 - DNA, 33 bp, Homo sapien
attctggatgcacttcacttgaaaaacagaacc

SEQ ID NO: 908846 - DNA, 33 bp, Homo sapien
attctggatgcacttcgcttgaaaaacagaacc

SEQ ID NO: 908847 - DNA, 33 bp, Homo sapien
atatttatgatatcaacttgaaagtgaatgata

SEQ ID NO: 908848 - DNA, 33 bp, Homo sapien
atatttatgatatcaatttgaaagtgaatgata

SEQ ID NO: 908849 - DNA, 33 bp, Homo sapien
caaatatttcatacgaaaaaaccttgcaatatg

SEQ ID NO: 908850 - DNA, 33 bp, Homo sapien
caaatatttcatacgagaaaaccttgcaatatg

SEQ ID NO: 908851 - DNA, 33 bp, Homo sapien
ctctcatggcagttaacgttaatttgtgaattt

SEQ ID NO: 908852 - DNA, 33 bp, Homo sapien
ctctcatggcagttaaggttaatttgtgaattt

SEQ ID NO: 908853 - DNA, 33 bp, Homo sapien
tactcattatctcagacaagggaagcactaaaa

SEQ ID NO: 908854 - DNA, 33 bp, Homo sapien
tactcattatctcagagaagggaagcactaaaa

SEQ ID NO: 908855 - DNA, 33 bp, Homo sapien
tcctgggctaaagaaaatcactattcaaaatta

SEQ ID NO: 908856 - DNA, 33 bp, Homo sapien
tcctgggctaaagaaagtcactattcaaaatta

SEQ ID NO: 908857 - DNA, 33 bp, Homo sapien
ttaaaccagctcataacgtttctgaaaatgtaa

SEQ ID NO: 908858 - DNA, 33 bp, Homo sapien
ttaaaccagctcataatgtttctgaaaatgtaa

SEQ ID NO: 908859 - DNA, 33 bp, Homo sapien
ttcaaaacagattatcacacttcttcatagcta

SEQ ID NO: 908860 - DNA, 33 bp, Homo sapien
ttcaaaacagattatcgcacttcttcatagcta

SEQ ID NO: 908861 - DNA, 33 bp, Homo sapien
aagcccaattgtttacactcaaagtatagaata

SEQ ID NO: 908862 - DNA, 33 bp, Homo sapien
aagcccaattgtttacgctcaaagtatagaata

SEQ ID NO: 908863 - DNA, 33 bp, Homo sapien
aagggctctgaagaaacagtgtgatgcatatgc

SEQ ID NO: 908864 - DNA, 33 bp, Homo sapien
aagggctctgaagaaagagtgtgatgcatatgc

SEQ ID NO: 908865 - DNA, 33 bp, Homo sapien
caattcatcccataccactcaatcctctggccc

SEQ ID NO: 908866 - DNA, 33 bp, Homo sapien
caattcatcccatacctctcaatcctctggccc

SEQ ID NO: 908867 - DNA, 33 bp, Homo sapien
ttcatctctaccataactgtaacaataaatgac

SEQ ID NO: 908868 - DNA, 33 bp, Homo sapien
ttcatctctaccataagtgtaacaataaatgac

SEQ ID NO: 908869 - DNA, 33 bp, Homo sapien
agtcataagcatatgagctgtaaacattggcag

SEQ ID NO: 908870 - DNA, 33 bp, Homo sapien
agtcataagcatatgatctgtaaacattggcag

SEQ ID NO: 908871 - DNA, 33 bp, Homo sapien
tggaatccggtggaaccgcacacggaaatgaga
